United States Patent Application Publication US 2015/0232836 A1 - sequence listing, part 41

SEQ ID NO: 1618190 - DNA, 15 bp, Homo sapiens
ctcctgacctcagaa

SEQ ID NO: 1618191 - DNA, 15 bp, Homo sapiens
tcctgacctcagaag

SEQ ID NO: 1618192 - DNA, 15 bp, Homo sapiens
cctgacctcagaaga

SEQ ID NO: 1618193 - DNA, 15 bp, Homo sapiens
ctgacctcagaagat

SEQ ID NO: 1618194 - DNA, 15 bp, Homo sapiens
tgacctcagaagatc

SEQ ID NO: 1618195 - DNA, 15 bp, Homo sapiens
gacctcagaagatcc

SEQ ID NO: 1618196 - DNA, 15 bp, Homo sapiens
acctcagaagatcca

SEQ ID NO: 1618197 - DNA, 15 bp, Homo sapiens
cctcagaagatccac

SEQ ID NO: 1618198 - DNA, 15 bp, Homo sapiens
ctcagaagatccacc

SEQ ID NO: 1618199 - DNA, 15 bp, Homo sapiens
tcagaagatccacct

SEQ ID NO: 1618200 - DNA, 15 bp, Homo sapiens
cagaagatccacctg

SEQ ID NO: 1618201 - DNA, 15 bp, Homo sapiens
agaagatccacctgt

SEQ ID NO: 1618202 - DNA, 15 bp, Homo sapiens
gaagatccacctgtc

SEQ ID NO: 1618203 - DNA, 15 bp, Homo sapiens
aagatccacctgtct

SEQ ID NO: 1618204 - DNA, 15 bp, Homo sapiens
agatccacctgtctt

SEQ ID NO: 1618205 - DNA, 15 bp, Homo sapiens
gatccacctgtcttg

SEQ ID NO: 1618206 - DNA, 15 bp, Homo sapiens
atccacctgtcttga

SEQ ID NO: 1618207 - DNA, 15 bp, Homo sapiens
tccacctgtcttgac

SEQ ID NO: 1618208 - DNA, 15 bp, Homo sapiens
ccacctgtcttgacc

SEQ ID NO: 1618209 - DNA, 15 bp, Homo sapiens
cacctgtcttgacct

SEQ ID NO: 1618210 - DNA, 15 bp, Homo sapiens
acctgtcttgacctc

SEQ ID NO: 1618211 - DNA, 15 bp, Homo sapiens
cctgtcttgacctcc

SEQ ID NO: 1618212 - DNA, 15 bp, Homo sapiens
ctgtcttgacctccc

SEQ ID NO: 1618213 - DNA, 15 bp, Homo sapiens
tgtcttgacctccca

SEQ ID NO: 1618214 - DNA, 15 bp, Homo sapiens
gtcttgacctcccaa

SEQ ID NO: 1618215 - DNA, 15 bp, Homo sapiens
gtgagccaccgtgcg

SEQ ID NO: 1618216 - DNA, 15 bp, Homo sapiens
tgagccaccgtgcgt

SEQ ID NO: 1618217 - DNA, 15 bp, Homo sapiens
gagccaccgtgcgtg

SEQ ID NO: 1618218 - DNA, 15 bp, Homo sapiens
agccaccgtgcgtgg

SEQ ID NO: 1618219 - DNA, 15 bp, Homo sapiens
gccaccgtgcgtggc

SEQ ID NO: 1618220 - DNA, 15 bp, Homo sapiens
ccaccgtgcgtggcc

SEQ ID NO: 1618221 - DNA, 15 bp, Homo sapiens
caccgtgcgtggcct

SEQ ID NO: 1618222 - DNA, 15 bp, Homo sapiens
accgtgcgtggcctg

SEQ ID NO: 1618223 - DNA, 15 bp, Homo sapiens
ccgtgcgtggcctgt

SEQ ID NO: 1618224 - DNA, 15 bp, Homo sapiens
cgtgcgtggcctgtg

SEQ ID NO: 1618225 - DNA, 15 bp, Homo sapiens
gtgcgtggcctgtgt

SEQ ID NO: 1618226 - DNA, 15 bp, Homo sapiens
tgcgtggcctgtgtg

SEQ ID NO: 1618227 - DNA, 15 bp, Homo sapiens
gcgtggcctgtgtgt

SEQ ID NO: 1618228 - DNA, 15 bp, Homo sapiens
cgtggcctgtgtgta

SEQ ID NO: 1618229 - DNA, 15 bp, Homo sapiens
gtggcctgtgtgtaa

SEQ ID NO: 1618230 - DNA, 15 bp, Homo sapiens
tggcctgtgtgtaag

SEQ ID NO: 1618231 - DNA, 15 bp, Homo sapiens
ggcctgtgtgtaagt

SEQ ID NO: 1618232 - DNA, 15 bp, Homo sapiens
gcctgtgtgtaagtt

SEQ ID NO: 1618233 - DNA, 15 bp, Homo sapiens
cctgtgtgtaagttt

SEQ ID NO: 1618234 - DNA, 15 bp, Homo sapiens
ctgtgtgtaagtttt

SEQ ID NO: 1618235 - DNA, 15 bp, Homo sapiens
tgtgtgtaagtttta

SEQ ID NO: 1618236 - DNA, 15 bp, Homo sapiens
gtgtgtaagttttaa

SEQ ID NO: 1618237 - DNA, 15 bp, Homo sapiens
tgtgtaagttttaag

SEQ ID NO: 1618238 - DNA, 15 bp, Homo sapiens
gtgtaagttttaagg

SEQ ID NO: 1618239 - DNA, 15 bp, Homo sapiens
tgtaagttttaaggg

SEQ ID NO: 1618240 - DNA, 15 bp, Homo sapiens
gtaagttttaaggga

SEQ ID NO: 1618241 - DNA, 15 bp, Homo sapiens
taagttttaagggat

SEQ ID NO: 1618242 - DNA, 15 bp, Homo sapiens
aagttttaagggata

SEQ ID NO: 1618243 - DNA, 15 bp, Homo sapiens
agttttaagggataa

SEQ ID NO: 1618244 - DNA, 15 bp, Homo sapiens
gttttaagggataac

SEQ ID NO: 1618245 - DNA, 15 bp, Homo sapiens
ttttaagggataacc

SEQ ID NO: 1618246 - DNA, 15 bp, Homo sapiens
tttaagggataacca

SEQ ID NO: 1618247 - DNA, 15 bp, Homo sapiens
ttaagggataaccag

SEQ ID NO: 1618248 - DNA, 15 bp, Homo sapiens
taagggataaccaga

SEQ ID NO: 1618249 - DNA, 15 bp, Homo sapiens
aagggataaccagaa

SEQ ID NO: 1618250 - DNA, 15 bp, Homo sapiens
agggataaccagaat

SEQ ID NO: 1618251 - DNA, 15 bp, Homo sapiens
gggataaccagaatg

SEQ ID NO: 1618252 - DNA, 15 bp, Homo sapiens
ggataaccagaatga

SEQ ID NO: 1618253 - DNA, 15 bp, Homo sapiens
gataaccagaatgac

SEQ ID NO: 1618254 - DNA, 15 bp, Homo sapiens
ataaccagaatgacc

SEQ ID NO: 1618255 - DNA, 15 bp, Homo sapiens
taaccagaatgacca

SEQ ID NO: 1618256 - DNA, 15 bp, Homo sapiens
aaccagaatgaccat

SEQ ID NO: 1618257 - DNA, 15 bp, Homo sapiens
accagaatgaccatc

SEQ ID NO: 1618258 - DNA, 15 bp, Homo sapiens
ccagaatgaccatca

SEQ ID NO: 1618259 - DNA, 15 bp, Homo sapiens
cagaatgaccatcac

SEQ ID NO: 1618260 - DNA, 15 bp, Homo sapiens
agaatgaccatcaca

SEQ ID NO: 1618261 - DNA, 15 bp, Homo sapiens
gaatgaccatcacat

SEQ ID NO: 1618262 - DNA, 15 bp, Homo sapiens
aatgaccatcacatt

SEQ ID NO: 1618263 - DNA, 15 bp, Homo sapiens
atgaccatcacattc

SEQ ID NO: 1618264 - DNA, 15 bp, Homo sapiens
tgaccatcacattct

SEQ ID NO: 1618265 - DNA, 15 bp, Homo sapiens
gaccatcacattctt

SEQ ID NO: 1618266 - DNA, 15 bp, Homo sapiens
accatcacattcttg

SEQ ID NO: 1618267 - DNA, 15 bp, Homo sapiens
ccatcacattcttgg

SEQ ID NO: 1618268 - DNA, 15 bp, Homo sapiens
catcacattcttgga

SEQ ID NO: 1618269 - DNA, 15 bp, Homo sapiens
atcacattcttggag

SEQ ID NO: 1618270 - DNA, 15 bp, Homo sapiens
tcacattcttggagt

SEQ ID NO: 1618271 - DNA, 15 bp, Homo sapiens
cacattcttggagtt

SEQ ID NO: 1618272 - DNA, 15 bp, Homo sapiens
acattcttggagtta

SEQ ID NO: 1618273 - DNA, 15 bp, Homo sapiens
cattcttggagttaa

SEQ ID NO: 1618274 - DNA, 15 bp, Homo sapiens
attcttggagttaaa

SEQ ID NO: 1618275 - DNA, 15 bp, Homo sapiens
ttcttggagttaaat

SEQ ID NO: 1618276 - DNA, 15 bp, Homo sapiens
tcttggagttaaatg

SEQ ID NO: 1618277 - DNA, 15 bp, Homo sapiens
cttggagttaaatgt

SEQ ID NO: 1618278 - DNA, 15 bp, Homo sapiens
ttggagttaaatgtg

SEQ ID NO: 1618279 - DNA, 15 bp, Homo sapiens
tggagttaaatgtgg

SEQ ID NO: 1618280 - DNA, 15 bp, Homo sapiens
ggagttaaatgtggt

SEQ ID NO: 1618281 - DNA, 15 bp, Homo sapiens
gagttaaatgtggta

SEQ ID NO: 1618282 - DNA, 15 bp, Homo sapiens
agttaaatgtggtac

SEQ ID NO: 1618283 - DNA, 15 bp, Homo sapiens
gttaaatgtggtaca

SEQ ID NO: 1618284 - DNA, 15 bp, Homo sapiens
ttaaatgtggtacag

SEQ ID NO: 1618285 - DNA, 15 bp, Homo sapiens
taaatgtggtacaga

SEQ ID NO: 1618286 - DNA, 15 bp, Homo sapiens
aaatgtggtacagaa

SEQ ID NO: 1618287 - DNA, 15 bp, Homo sapiens
aatgtggtacagaaa

SEQ ID NO: 1618288 - DNA, 15 bp, Homo sapiens
atgtggtacagaaat

SEQ ID NO: 1618289 - DNA, 15 bp, Homo sapiens
tgtggtacagaaatc

SEQ ID NO: 1618290 - DNA, 15 bp, Homo sapiens
gtggtacagaaatct

SEQ ID NO: 1618291 - DNA, 15 bp, Homo sapiens
tggtacagaaatctc

SEQ ID NO: 1618292 - DNA, 15 bp, Homo sapiens
ggtacagaaatctct

SEQ ID NO: 1618293 - DNA, 15 bp, Homo sapiens
gtacagaaatctcta

SEQ ID NO: 1618294 - DNA, 15 bp, Homo sapiens
tacagaaatctctaa

SEQ ID NO: 1618295 - DNA, 15 bp, Homo sapiens
acagaaatctctaac

SEQ ID NO: 1618296 - DNA, 15 bp, Homo sapiens
cagaaatctctaacc

SEQ ID NO: 1618297 - DNA, 15 bp, Homo sapiens
agaaatctctaacct

SEQ ID NO: 1618298 - DNA, 15 bp, Homo sapiens
gaaatctctaacctg

SEQ ID NO: 1618299 - DNA, 15 bp, Homo sapiens
aaatctctaacctga

SEQ ID NO: 1618300 - DNA, 15 bp, Homo sapiens
aatctctaacctgag

SEQ ID NO: 1618301 - DNA, 15 bp, Homo sapiens
atctctaacctgaga

SEQ ID NO: 1618302 - DNA, 15 bp, Homo sapiens
tctctaacctgagag

SEQ ID NO: 1618303 - DNA, 15 bp, Homo sapiens
ctctaacctgagagt

SEQ ID NO: 1618304 - DNA, 15 bp, Homo sapiens
tctaacctgagagtc

SEQ ID NO: 1618305 - DNA, 15 bp, Homo sapiens
ctaacctgagagtca

SEQ ID NO: 1618306 - DNA, 15 bp, Homo sapiens
taacctgagagtcaa

SEQ ID NO: 1618307 - DNA, 15 bp, Homo sapiens
aacctgagagtcaag

SEQ ID NO: 1618308 - DNA, 15 bp, Homo sapiens
acctgagagtcaaga

SEQ ID NO: 1618309 - DNA, 15 bp, Homo sapiens
cctgagagtcaagag

SEQ ID NO: 1618310 - DNA, 15 bp, Homo sapiens
ctgagagtcaagaga

SEQ ID NO: 1618311 - DNA, 15 bp, Homo sapiens
tgagagtcaagagac

SEQ ID NO: 1618312 - DNA, 15 bp, Homo sapiens
gagagtcaagagacc

SEQ ID NO: 1618313 - DNA, 15 bp, Homo sapiens
agagtcaagagacca

SEQ ID NO: 1618314 - DNA, 15 bp, Homo sapiens
gagtcaagagaccag

SEQ ID NO: 1618315 - DNA, 15 bp, Homo sapiens
agtcaagagaccagg

SEQ ID NO: 1618316 - DNA, 15 bp, Homo sapiens
gtcaagagaccaggt

SEQ ID NO: 1618317 - DNA, 15 bp, Homo sapiens
tcaagagaccaggtc

SEQ ID NO: 1618318 - DNA, 15 bp, Homo sapiens
caagagaccaggtca

SEQ ID NO: 1618319 - DNA, 15 bp, Homo sapiens
aagagaccaggtcat

SEQ ID NO: 1618320 - DNA, 15 bp, Homo sapiens
agagaccaggtcatg

SEQ ID NO: 1618321 - DNA, 15 bp, Homo sapiens
gagaccaggtcatgg

SEQ ID NO: 1618322 - DNA, 15 bp, Homo sapiens
agaccaggtcatggg

SEQ ID NO: 1618323 - DNA, 15 bp, Homo sapiens
gaccaggtcatgggt

SEQ ID NO: 1618324 - DNA, 15 bp, Homo sapiens
accaggtcatgggtt

SEQ ID NO: 1618325 - DNA, 15 bp, Homo sapiens
ccaggtcatgggttc

SEQ ID NO: 1618326 - DNA, 15 bp, Homo sapiens
caggtcatgggttcc

SEQ ID NO: 1618327 - DNA, 15 bp, Homo sapiens
aggtcatgggttcca

SEQ ID NO: 1618328 - DNA, 15 bp, Homo sapiens
ggtcatgggttccat

SEQ ID NO: 1618329 - DNA, 15 bp, Homo sapiens
gtcatgggttccatt

SEQ ID NO: 1618330 - DNA, 15 bp, Homo sapiens
tcatgggttccattt

SEQ ID NO: 1618331 - DNA, 15 bp, Homo sapiens
catgggttccatttg

SEQ ID NO: 1618332 - DNA, 15 bp, Homo sapiens
atgggttccatttgg

SEQ ID NO: 1618333 - DNA, 15 bp, Homo sapiens
tgggttccatttgga

SEQ ID NO: 1618334 - DNA, 15 bp, Homo sapiens
gggttccatttggac

SEQ ID NO: 1618335 - DNA, 15 bp, Homo sapiens
ggttccatttggaca

SEQ ID NO: 1618336 - DNA, 15 bp, Homo sapiens
gttccatttggacat

SEQ ID NO: 1618337 - DNA, 15 bp, Homo sapiens
ttccatttggacatc

SEQ ID NO: 1618338 - DNA, 15 bp, Homo sapiens
tccatttggacatct

SEQ ID NO: 1618339 - DNA, 15 bp, Homo sapiens
ccatttggacatctt

SEQ ID NO: 1618340 - DNA, 15 bp, Homo sapiens
catttggacatcttt

SEQ ID NO: 1618341 - DNA, 15 bp, Homo sapiens
atttggacatctttc

SEQ ID NO: 1618342 - DNA, 15 bp, Homo sapiens
tttggacatctttca

SEQ ID NO: 1618343 - DNA, 15 bp, Homo sapiens
ttggacatctttcag

SEQ ID NO: 1618344 - DNA, 15 bp, Homo sapiens
tggacatctttcagc

SEQ ID NO: 1618345 - DNA, 15 bp, Homo sapiens
ggacatctttcagct

SEQ ID NO: 1618346 - DNA, 15 bp, Homo sapiens
gacatctttcagctt

SEQ ID NO: 1618347 - DNA, 15 bp, Homo sapiens
acatctttcagcttt

SEQ ID NO: 1618348 - DNA, 15 bp, Homo sapiens
catctttcagctttg

SEQ ID NO: 1618349 - DNA, 15 bp, Homo sapiens
atctttcagctttgt

SEQ ID NO: 1618350 - DNA, 15 bp, Homo sapiens
tctttcagctttgtg

SEQ ID NO: 1618351 - DNA, 15 bp, Homo sapiens
ctttcagctttgtga

SEQ ID NO: 1618352 - DNA, 15 bp, Homo sapiens
tttcagctttgtgac

SEQ ID NO: 1618353 - DNA, 15 bp, Homo sapiens
ttcagctttgtgacc

SEQ ID NO: 1618354 - DNA, 15 bp, Homo sapiens
tcagctttgtgacca

SEQ ID NO: 1618355 - DNA, 15 bp, Homo sapiens
cagctttgtgaccat

SEQ ID NO: 1618356 - DNA, 15 bp, Homo sapiens
agctttgtgaccatt

SEQ ID NO: 1618357 - DNA, 15 bp, Homo sapiens
gctttgtgaccattt

SEQ ID NO: 1618358 - DNA, 15 bp, Homo sapiens
ctttgtgaccatttt

SEQ ID NO: 1618359 - DNA, 15 bp, Homo sapiens
tttgtgaccatttta

SEQ ID NO: 1618360 - DNA, 15 bp, Homo sapiens
ttgtgaccattttat

SEQ ID NO: 1618361 - DNA, 15 bp, Homo sapiens
tgtgaccattttatg

SEQ ID NO: 1618362 - DNA, 15 bp, Homo sapiens
gtgaccattttatgt

SEQ ID NO: 1618363 - DNA, 15 bp, Homo sapiens
tgaccattttatgtc

SEQ ID NO: 1618364 - DNA, 15 bp, Homo sapiens
gaccattttatgtct

SEQ ID NO: 1618365 - DNA, 15 bp, Homo sapiens
accattttatgtctg

SEQ ID NO: 1618366 - DNA, 15 bp, Homo sapiens
ccattttatgtctgc

SEQ ID NO: 1618367 - DNA, 15 bp, Homo sapiens
cattttatgtctgca

SEQ ID NO: 1618368 - DNA, 15 bp, Homo sapiens
attttatgtctgcaa

SEQ ID NO: 1618369 - DNA, 15 bp, Homo sapiens
ttttatgtctgcaaa

SEQ ID NO: 1618370 - DNA, 15 bp, Homo sapiens
tttatgtctgcaaaa

SEQ ID NO: 1618371 - DNA, 15 bp, Homo sapiens
ttatgtctgcaaaat

SEQ ID NO: 1618372 - DNA, 15 bp, Homo sapiens
tatgtctgcaaaata

SEQ ID NO: 1618373 - DNA, 15 bp, Homo sapiens
atgtctgcaaaataa

SEQ ID NO: 1618374 - DNA, 15 bp, Homo sapiens
tgtctgcaaaataag

SEQ ID NO: 1618375 - DNA, 15 bp, Homo sapiens
gtctgcaaaataagc

SEQ ID NO: 1618376 - DNA, 15 bp, Homo sapiens
tctgcaaaataagca

SEQ ID NO: 1618377 - DNA, 15 bp, Homo sapiens
ctgcaaaataagcat

SEQ ID NO: 1618378 - DNA, 15 bp, Homo sapiens
tgcaaaataagcata

SEQ ID NO: 1618379 - DNA, 15 bp, Homo sapiens
gcaaaataagcataa

SEQ ID NO: 1618380 - DNA, 15 bp, Homo sapiens
caaaataagcataac

SEQ ID NO: 1618381 - DNA, 15 bp, Homo sapiens
aaaataagcataaca

SEQ ID NO: 1618382 - DNA, 15 bp, Homo sapiens
aaataagcataacaa

SEQ ID NO: 1618383 - DNA, 15 bp, Homo sapiens
aataagcataacaac

SEQ ID NO: 1618384 - DNA, 15 bp, Homo sapiens
ataagcataacaaca

SEQ ID NO: 1618385 - DNA, 15 bp, Homo sapiens
taagcataacaacac

SEQ ID NO: 1618386 - DNA, 15 bp, Homo sapiens
aagcataacaacact

SEQ ID NO: 1618387 - DNA, 15 bp, Homo sapiens
agcataacaacacta

SEQ ID NO: 1618388 - DNA, 15 bp, Homo sapiens
gcataacaacactag

SEQ ID NO: 1618389 - DNA, 15 bp, Homo sapiens
cataacaacactagc

SEQ ID NO: 1618390 - DNA, 15 bp, Homo sapiens
ataacaacactagcc

SEQ ID NO: 1618391 - DNA, 15 bp, Homo sapiens
taacaacactagccc

SEQ ID NO: 1618392 - DNA, 15 bp, Homo sapiens
aacaacactagccct

SEQ ID NO: 1618393 - DNA, 15 bp, Homo sapiens
acaacactagccctg

SEQ ID NO: 1618394 - DNA, 15 bp, Homo sapiens
caacactagccctgc

SEQ ID NO: 1618395 - DNA, 15 bp, Homo sapiens
aacactagccctgcc

SEQ ID NO: 1618396 - DNA, 15 bp, Homo sapiens
acactagccctgcct

SEQ ID NO: 1618397 - DNA, 15 bp, Homo sapiens
cactagccctgcctt

SEQ ID NO: 1618398 - DNA, 15 bp, Homo sapiens
actagccctgcctta

SEQ ID NO: 1618399 - DNA, 15 bp, Homo sapiens
ctagccctgccttat

SEQ ID NO: 1618400 - DNA, 15 bp, Homo sapiens
tagccctgccttatt

SEQ ID NO: 1618401 - DNA, 15 bp, Homo sapiens
agccctgccttattc

SEQ ID NO: 1618402 - DNA, 15 bp, Homo sapiens
gccctgccttattca

SEQ ID NO: 1618403 - DNA, 15 bp, Homo sapiens
ccctgccttattcac

SEQ ID NO: 1618404 - DNA, 15 bp, Homo sapiens
cctgccttattcaca

SEQ ID NO: 1618405 - DNA, 15 bp, Homo sapiens
ctgccttattcacaa

SEQ ID NO: 1618406 - DNA, 15 bp, Homo sapiens
tgccttattcacaag

SEQ ID NO: 1618407 - DNA, 15 bp, Homo sapiens
gccttattcacaagg

SEQ ID NO: 1618408 - DNA, 15 bp, Homo sapiens
ccttattcacaaggt

SEQ ID NO: 1618409 - DNA, 15 bp, Homo sapiens
cttattcacaaggtt

SEQ ID NO: 1618410 - DNA, 15 bp, Homo sapiens
ttattcacaaggtta

SEQ ID NO: 1618411 - DNA, 15 bp, Homo sapiens
tattcacaaggttac

SEQ ID NO: 1618412 - DNA, 15 bp, Homo sapiens
attcacaaggttact

SEQ ID NO: 1618413 - DNA, 15 bp, Homo sapiens
ttcacaaggttactg

SEQ ID NO: 1618414 - DNA, 15 bp, Homo sapiens
tcacaaggttactgt

SEQ ID NO: 1618415 - DNA, 15 bp, Homo sapiens
cacaaggttactgtg

SEQ ID NO: 1618416 - DNA, 15 bp, Homo sapiens
acaaggttactgtga

SEQ ID NO: 1618417 - DNA, 15 bp, Homo sapiens
caaggttactgtgag

SEQ ID NO: 1618418 - DNA, 15 bp, Homo sapiens
aaggttactgtgagg

SEQ ID NO: 1618419 - DNA, 15 bp, Homo sapiens
aggttactgtgaggc

SEQ ID NO: 1618420 - DNA, 15 bp, Homo sapiens
ggttactgtgaggcc

SEQ ID NO: 1618421 - DNA, 15 bp, Homo sapiens
gttactgtgaggcct

SEQ ID NO: 1618422 - DNA, 15 bp, Homo sapiens
ttactgtgaggcctg

SEQ ID NO: 1618423 - DNA, 15 bp, Homo sapiens
tactgtgaggcctga

SEQ ID NO: 1618424 - DNA, 15 bp, Homo sapiens
actgtgaggcctgag

SEQ ID NO: 1618425 - DNA, 15 bp, Homo sapiens
ctgtgaggcctgagt

SEQ ID NO: 1618426 - DNA, 15 bp, Homo sapiens
tgtgaggcctgagtg

SEQ ID NO: 1618427 - DNA, 15 bp, Homo sapiens
gtgaggcctgagtgg

SEQ ID NO: 1618428 - DNA, 15 bp, Homo sapiens
tgaggcctgagtgga

SEQ ID NO: 1618429 - DNA, 15 bp, Homo sapiens
gaggcctgagtggaa

SEQ ID NO: 1618430 - DNA, 15 bp, Homo sapiens
aggcctgagtggaat

SEQ ID NO: 1618431 - DNA, 15 bp, Homo sapiens
ggcctgagtggaata

SEQ ID NO: 1618432 - DNA, 15 bp, Homo sapiens
gcctgagtggaatat

SEQ ID NO: 1618433 - DNA, 15 bp, Homo sapiens
cctgagtggaatatg

SEQ ID NO: 1618434 - DNA, 15 bp, Homo sapiens
ctgagtggaatatgg

SEQ ID NO: 1618435 - DNA, 15 bp, Homo sapiens
tgagtggaatatggt

SEQ ID NO: 1618436 - DNA, 15 bp, Homo sapiens
gagtggaatatggtg

SEQ ID NO: 1618437 - DNA, 15 bp, Homo sapiens
agtggaatatggtgt

SEQ ID NO: 1618438 - DNA, 15 bp, Homo sapiens
gtggaatatggtgtt

SEQ ID NO: 1618439 - DNA, 15 bp, Homo sapiens
tggaatatggtgttg

SEQ ID NO: 1618440 - DNA, 15 bp, Homo sapiens
ggaatatggtgttga

SEQ ID NO: 1618441 - DNA, 15 bp, Homo sapiens
gaatatggtgttgaa

SEQ ID NO: 1618442 - DNA, 15 bp, Homo sapiens
aatatggtgttgaag

SEQ ID NO: 1618443 - DNA, 15 bp, Homo sapiens
atatggtgttgaagt

SEQ ID NO: 1618444 - DNA, 15 bp, Homo sapiens
tatggtgttgaagta

SEQ ID NO: 1618445 - DNA, 15 bp, Homo sapiens
atggtgttgaagtat

SEQ ID NO: 1618446 - DNA, 15 bp, Homo sapiens
tggtgttgaagtatt

SEQ ID NO: 1618447 - DNA, 15 bp, Homo sapiens
ggtgttgaagtatta

SEQ ID NO: 1618448 - DNA, 15 bp, Homo sapiens
gtgttgaagtattag

SEQ ID NO: 1618449 - DNA, 15 bp, Homo sapiens
tgttgaagtattagg

SEQ ID NO: 1618450 - DNA, 15 bp, Homo sapiens
gttgaagtattagga

SEQ ID NO: 1618451 - DNA, 15 bp, Homo sapiens
ttgaagtattaggaa

SEQ ID NO: 1618452 - DNA, 15 bp, Homo sapiens
tgaagtattaggaag

SEQ ID NO: 1618453 - DNA, 15 bp, Homo sapiens
gaagtattaggaagc

SEQ ID NO: 1618454 - DNA, 15 bp, Homo sapiens
aagtattaggaagct

SEQ ID NO: 1618455 - DNA, 15 bp, Homo sapiens
agtattaggaagcta

SEQ ID NO: 1618456 - DNA, 15 bp, Homo sapiens
gtattaggaagctat

SEQ ID NO: 1618457 - DNA, 15 bp, Homo sapiens
tattaggaagctata

SEQ ID NO: 1618458 - DNA, 15 bp, Homo sapiens
attaggaagctataa

SEQ ID NO: 1618459 - DNA, 15 bp, Homo sapiens
ttaggaagctataaa

SEQ ID NO: 1618460 - DNA, 15 bp, Homo sapiens
taggaagctataaag

SEQ ID NO: 1618461 - DNA, 15 bp, Homo sapiens
aggaagctataaagt

SEQ ID NO: 1618462 - DNA, 15 bp, Homo sapiens
ggaagctataaagta

SEQ ID NO: 1618463 - DNA, 15 bp, Homo sapiens
gaagctataaagtac

SEQ ID NO: 1618464 - DNA, 15 bp, Homo sapiens
aagctataaagtact

SEQ ID NO: 1618465 - DNA, 15 bp, Homo sapiens
agctataaagtacta

SEQ ID NO: 1618466 - DNA, 15 bp, Homo sapiens
gctataaagtactac

SEQ ID NO: 1618467 - DNA, 15 bp, Homo sapiens
ctataaagtactact

SEQ ID NO: 1618468 - DNA, 15 bp, Homo sapiens
tataaagtactacta

SEQ ID NO: 1618469 - DNA, 15 bp, Homo sapiens
ataaagtactactag

SEQ ID NO: 1618470 - DNA, 15 bp, Homo sapiens
taaagtactactagc

SEQ ID NO: 1618471 - DNA, 15 bp, Homo sapiens
aaagtactactagca

SEQ ID NO: 1618472 - DNA, 15 bp, Homo sapiens
aagtactactagcat

SEQ ID NO: 1618473 - DNA, 15 bp, Homo sapiens
agtactactagcata

SEQ ID NO: 1618474 - DNA, 15 bp, Homo sapiens
gtactactagcatag

SEQ ID NO: 1618475 - DNA, 15 bp, Homo sapiens
tactactagcatagg

SEQ ID NO: 1618476 - DNA, 15 bp, Homo sapiens
actactagcataggt

SEQ ID NO: 1618477 - DNA, 15 bp, Homo sapiens
ctactagcataggta

SEQ ID NO: 1618478 - DNA, 15 bp, Homo sapiens
tactagcataggtaa

SEQ ID NO: 1618479 - DNA, 15 bp, Homo sapiens
actagcataggtaag

SEQ ID NO: 1618480 - DNA, 15 bp, Homo sapiens
ctagcataggtaagt

SEQ ID NO: 1618481 - DNA, 15 bp, Homo sapiens
tagcataggtaagta

SEQ ID NO: 1618482 - DNA, 15 bp, Homo sapiens
agcataggtaagtaa

SEQ ID NO: 1618483 - DNA, 15 bp, Homo sapiens
gcataggtaagtaac

SEQ ID NO: 1618484 - DNA, 15 bp, Homo sapiens
cataggtaagtaact

SEQ ID NO: 1618485 - DNA, 15 bp, Homo sapiens
ataggtaagtaactt

SEQ ID NO: 1618486 - DNA, 15 bp, Homo sapiens
taggtaagtaacttg

SEQ ID NO: 1618487 - DNA, 15 bp, Homo sapiens
aggtaagtaacttgc

SEQ ID NO: 1618488 - DNA, 15 bp, Homo sapiens
ggtaagtaacttgct

SEQ ID NO: 1618489 - DNA, 15 bp, Homo sapiens
gtaagtaacttgcta

SEQ ID NO: 1618490 - DNA, 15 bp, Homo sapiens
taagtaacttgctaa

SEQ ID NO: 1618491 - DNA, 15 bp, Homo sapiens
aagtaacttgctaag

SEQ ID NO: 1618492 - DNA, 15 bp, Homo sapiens
agtaacttgctaagg

SEQ ID NO: 1618493 - DNA, 15 bp, Homo sapiens
gtaacttgctaagga

SEQ ID NO: 1618494 - DNA, 15 bp, Homo sapiens
taacttgctaaggat

SEQ ID NO: 1618495 - DNA, 15 bp, Homo sapiens
aacttgctaaggatc

SEQ ID NO: 1618496 - DNA, 15 bp, Homo sapiens
acttgctaaggatct

SEQ ID NO: 1618497 - DNA, 15 bp, Homo sapiens
cttgctaaggatctt

SEQ ID NO: 1618498 - DNA, 15 bp, Homo sapiens
ttgctaaggatcttt

SEQ ID NO: 1618499 - DNA, 15 bp, Homo sapiens
tgctaaggatctttt

SEQ ID NO: 1618500 - DNA, 15 bp, Homo sapiens
gctaaggatcttttt

SEQ ID NO: 1618501 - DNA, 15 bp, Homo sapiens
ctaaggatctttttt

SEQ ID NO: 1618502 - DNA, 15 bp, Homo sapiens
taaggatcttttttt

SEQ ID NO: 1618503 - DNA, 15 bp, Homo sapiens
aaggatctttttttt

SEQ ID NO: 1618504 - DNA, 15 bp, Homo sapiens
aggatcttttttttt

SEQ ID NO: 1618505 - DNA, 15 bp, Homo sapiens
ggatctttttttttt

SEQ ID NO: 1618506 - DNA, 15 bp, Homo sapiens
ttttttctttgagaa

SEQ ID NO: 1618507 - DNA, 15 bp, Homo sapiens
tttctttgagaagga

SEQ ID NO: 1618508 - DNA, 15 bp, Homo sapiens
ttctttgagaaggag

SEQ ID NO: 1618509 - DNA, 15 bp, Homo sapiens
tctttgagaaggagt

SEQ ID NO: 1618510 - DNA, 15 bp, Homo sapiens
ctttgagaaggagtc

SEQ ID NO: 1618511 - DNA, 15 bp, Homo sapiens
tttgagaaggagtct

SEQ ID NO: 1618512 - DNA, 15 bp, Homo sapiens
ttgagaaggagtctt

SEQ ID NO: 1618513 - DNA, 15 bp, Homo sapiens
tgagaaggagtcttg

SEQ ID NO: 1618514 - DNA, 15 bp, Homo sapiens
gagaaggagtcttgc

SEQ ID NO: 1618515 - DNA, 15 bp, Homo sapiens
agaaggagtcttgct

SEQ ID NO: 1618516 - DNA, 15 bp, Homo sapiens
gaaggagtcttgctc

SEQ ID NO: 1618517 - DNA, 15 bp, Homo sapiens
aaggagtcttgctct

SEQ ID NO: 1618518 - DNA, 15 bp, Homo sapiens
agtcttgctctgtcc

SEQ ID NO: 1618519 - DNA, 15 bp, Homo sapiens
gtcttgctctgtcct

SEQ ID NO: 1618520 - DNA, 15 bp, Homo sapiens
tcttgctctgtcctc

SEQ ID NO: 1618521 - DNA, 15 bp, Homo sapiens
cttgctctgtcctcc

SEQ ID NO: 1618522 - DNA, 15 bp, Homo sapiens
ttgctctgtcctcca

SEQ ID NO: 1618523 - DNA, 15 bp, Homo sapiens
tgctctgtcctccag

SEQ ID NO: 1618524 - DNA, 15 bp, Homo sapiens
gctctgtcctccagg

SEQ ID NO: 1618525 - DNA, 15 bp, Homo sapiens
ctctgtcctccaggc

SEQ ID NO: 1618526 - DNA, 15 bp, Homo sapiens
tctgtcctccaggct

SEQ ID NO: 1618527 - DNA, 15 bp, Homo sapiens
ctgtcctccaggctg

SEQ ID NO: 1618528 - DNA, 15 bp, Homo sapiens
tgtcctccaggctgg

SEQ ID NO: 1618529 - DNA, 15 bp, Homo sapiens
gtcctccaggctgga

SEQ ID NO: 1618530 - DNA, 15 bp, Homo sapiens
tcctccaggctggag

SEQ ID NO: 1618531 - DNA, 15 bp, Homo sapiens
cctccaggctggagt

SEQ ID NO: 1618532 - DNA, 15 bp, Homo sapiens
gagtgcaatggtgcg

SEQ ID NO: 1618533 - DNA, 15 bp, Homo sapiens
agtgcaatggtgcga

SEQ ID NO: 1618534 - DNA, 15 bp, Homo sapiens
gtgcaatggtgcgat

SEQ ID NO: 1618535 - DNA, 15 bp, Homo sapiens
tgcaatggtgcgatc

SEQ ID NO: 1618536 - DNA, 15 bp, Homo sapiens
gcaatggtgcgatct

SEQ ID NO: 1618537 - DNA, 15 bp, Homo sapiens
caatggtgcgatctg

SEQ ID NO: 1618538 - DNA, 15 bp, Homo sapiens
aatggtgcgatctgg

SEQ ID NO: 1618539 - DNA, 15 bp, Homo sapiens
atggtgcgatctggg

SEQ ID NO: 1618540 - DNA, 15 bp, Homo sapiens
tggtgcgatctgggc

SEQ ID NO: 1618541 - DNA, 15 bp, Homo sapiens
ggtgcgatctgggct

SEQ ID NO: 1618542 - DNA, 15 bp, Homo sapiens
gtgcgatctgggctc

SEQ ID NO: 1618543 - DNA, 15 bp, Homo sapiens
tgcgatctgggctca

SEQ ID NO: 1618544 - DNA, 15 bp, Homo sapiens
gcgatctgggctcac

SEQ ID NO: 1618545 - DNA, 15 bp, Homo sapiens
cgatctgggctcact

SEQ ID NO: 1618546 - DNA, 15 bp, Homo sapiens
ctcactgcaacttct

SEQ ID NO: 1618547 - DNA, 15 bp, Homo sapiens
tcactgcaacttctg

SEQ ID NO: 1618548 - DNA, 15 bp, Homo sapiens
cactgcaacttctgc

SEQ ID NO: 1618549 - DNA, 15 bp, Homo sapiens
actgcaacttctgcc

SEQ ID NO: 1618550 - DNA, 15 bp, Homo sapiens
ctgcaacttctgcct

SEQ ID NO: 1618551 - DNA, 15 bp, Homo sapiens
tgcaacttctgcctc

SEQ ID NO: 1618552 - DNA, 15 bp, Homo sapiens
gcaacttctgcctcc

SEQ ID NO: 1618553 - DNA, 15 bp, Homo sapiens
caacttctgcctccc

SEQ ID NO: 1618554 - DNA, 15 bp, Homo sapiens
aacttctgcctccca

SEQ ID NO: 1618555 - DNA, 15 bp, Homo sapiens
acttctgcctcccag

SEQ ID NO: 1618556 - DNA, 15 bp, Homo sapiens
tgcctcccaggttcc

SEQ ID NO: 1618557 - DNA, 15 bp, Homo sapiens
gcctcccaggttcca

SEQ ID NO: 1618558 - DNA, 15 bp, Homo sapiens
cctcccaggttccaa

SEQ ID NO: 1618559 - DNA, 15 bp, Homo sapiens
ctcccaggttccaac

SEQ ID NO: 1618560 - DNA, 15 bp, Homo sapiens
tcccaggttccaaca

SEQ ID NO: 1618561 - DNA, 15 bp, Homo sapiens
cccaggttccaacaa

SEQ ID NO: 1618562 - DNA, 15 bp, Homo sapiens
ccaggttccaacaat

SEQ ID NO: 1618563 - DNA, 15 bp, Homo sapiens
caggttccaacaatt

SEQ ID NO: 1618564 - DNA, 15 bp, Homo sapiens
aggttccaacaattc

SEQ ID NO: 1618565 - DNA, 15 bp, Homo sapiens
ggttccaacaattct

SEQ ID NO: 1618566 - DNA, 15 bp, Homo sapiens
gttccaacaattctc

SEQ ID NO: 1618567 - DNA, 15 bp, Homo sapiens
ttccaacaattctcc

SEQ ID NO: 1618568 - DNA, 15 bp, Homo sapiens
tccaacaattctcct

SEQ ID NO: 1618569 - DNA, 15 bp, Homo sapiens
ccaacaattctcctg

SEQ ID NO: 1618570 - DNA, 15 bp, Homo sapiens
caacaattctcctgc

SEQ ID NO: 1618571 - DNA, 15 bp, Homo sapiens
aacaattctcctgcc

SEQ ID NO: 1618572 - DNA, 15 bp, Homo sapiens
acaattctcctgcct

SEQ ID NO: 1618573 - DNA, 15 bp, Homo sapiens
caattctcctgcctt

SEQ ID NO: 1618574 - DNA, 15 bp, Homo sapiens
aattctcctgcctta

SEQ ID NO: 1618575 - DNA, 15 bp, Homo sapiens
cctgccttagcctct

SEQ ID NO: 1618576 - DNA, 15 bp, Homo sapiens
ctgccttagcctctt

SEQ ID NO: 1618577 - DNA, 15 bp, Homo sapiens
tgccttagcctcttg

SEQ ID NO: 1618578 - DNA, 15 bp, Homo sapiens
gccttagcctcttga

SEQ ID NO: 1618579 - DNA, 15 bp, Homo sapiens
ccttagcctcttgag

SEQ ID NO: 1618580 - DNA, 15 bp, Homo sapiens
cttagcctcttgagt

SEQ ID NO: 1618581 - DNA, 15 bp, Homo sapiens
ttagcctcttgagta

SEQ ID NO: 1618582 - DNA, 15 bp, Homo sapiens
tagcctcttgagtag

SEQ ID NO: 1618583 - DNA, 15 bp, Homo sapiens
ctcttgagtagctga

SEQ ID NO: 1618584 - DNA, 15 bp, Homo sapiens
tcttgagtagctgag

SEQ ID NO: 1618585 - DNA, 15 bp, Homo sapiens
cttgagtagctgaga

SEQ ID NO: 1618586 - DNA, 15 bp, Homo sapiens
ttgagtagctgagac

SEQ ID NO: 1618587 - DNA, 15 bp, Homo sapiens
ctgagactataggca

SEQ ID NO: 1618588 - DNA, 15 bp, Homo sapiens
tgagactataggcac

SEQ ID NO: 1618589 - DNA, 15 bp, Homo sapiens
gagactataggcacc

SEQ ID NO: 1618590 - DNA, 15 bp, Homo sapiens
agactataggcacct

SEQ ID NO: 1618591 - DNA, 15 bp, Homo sapiens
gactataggcacctg

SEQ ID NO: 1618592 - DNA, 15 bp, Homo sapiens
actataggcacctgc

SEQ ID NO: 1618593 - DNA, 15 bp, Homo sapiens
ctataggcacctgcc

SEQ ID NO: 1618594 - DNA, 15 bp, Homo sapiens
cacctgccaccatgg

SEQ ID NO: 1618595 - DNA, 15 bp, Homo sapiens
acctgccaccatggc

SEQ ID NO: 1618596 - DNA, 15 bp, Homo sapiens
cctgccaccatggcc

SEQ ID NO: 1618597 - DNA, 15 bp, Homo sapiens
ctgccaccatggcca

SEQ ID NO: 1618598 - DNA, 15 bp, Homo sapiens
tgccaccatggccag

SEQ ID NO: 1618599 - DNA, 15 bp, Homo sapiens
gccaccatggccagc

SEQ ID NO: 1618600 - DNA, 15 bp, Homo sapiens
ccaccatggccagct

SEQ ID NO: 1618601 - DNA, 15 bp, Homo sapiens
caccatggccagcta

SEQ ID NO: 1618602 - DNA, 15 bp, Homo sapiens
accatggccagctaa

SEQ ID NO: 1618603 - DNA, 15 bp, Homo sapiens
ccatggccagctaat

SEQ ID NO: 1618604 - DNA, 15 bp, Homo sapiens
catggccagctaatt

SEQ ID NO: 1618605 - DNA, 15 bp, Homo sapiens
atggccagctaattt

SEQ ID NO: 1618606 - DNA, 15 bp, Homo sapiens
tggccagctaatttg

SEQ ID NO: 1618607 - DNA, 15 bp, Homo sapiens
ggccagctaatttgt

SEQ ID NO: 1618608 - DNA, 15 bp, Homo sapiens
gccagctaatttgtt

SEQ ID NO: 1618609 - DNA, 15 bp, Homo sapiens
ccagctaatttgttg

SEQ ID NO: 1618610 - DNA, 15 bp, Homo sapiens
cagctaatttgttgt

SEQ ID NO: 1618611 - DNA, 15 bp, Homo sapiens
agctaatttgttgta

SEQ ID NO: 1618612 - DNA, 15 bp, Homo sapiens
gctaatttgttgtat

SEQ ID NO: 1618613 - DNA, 15 bp, Homo sapiens
ctaatttgttgtatt

SEQ ID NO: 1618614 - DNA, 15 bp, Homo sapiens
taatttgttgtattg

SEQ ID NO: 1618615 - DNA, 15 bp, Homo sapiens
aatttgttgtattgt

SEQ ID NO: 1618616 - DNA, 15 bp, Homo sapiens
atttgttgtattgtt

SEQ ID NO: 1618617 - DNA, 15 bp, Homo sapiens
tttgttgtattgtta

SEQ ID NO: 1618618 - DNA, 15 bp, Homo sapiens
ttgttgtattgttag

SEQ ID NO: 1618619 - DNA, 15 bp, Homo sapiens
tgttgtattgttagt

SEQ ID NO: 1618620 - DNA, 15 bp, Homo sapiens
gttgtattgttagta

SEQ ID NO: 1618621 - DNA, 15 bp, Homo sapiens
ttgtattgttagtag

SEQ ID NO: 1618622 - DNA, 15 bp, Homo sapiens
tgtattgttagtaga

SEQ ID NO: 1618623 - DNA, 15 bp, Homo sapiens
gtattgttagtagag

SEQ ID NO: 1618624 - DNA, 15 bp, Homo sapiens
tattgttagtagaga

SEQ ID NO: 1618625 - DNA, 15 bp, Homo sapiens
attgttagtagagac

SEQ ID NO: 1618626 - DNA, 15 bp, Homo sapiens
ttgttagtagagacg

SEQ ID NO: 1618627 - DNA, 15 bp, Homo sapiens
tgttagtagagacgg

SEQ ID NO: 1618628 - DNA, 15 bp, Homo sapiens
gttagtagagacggg

SEQ ID NO: 1618629 - DNA, 15 bp, Homo sapiens
caggctggtctcgtt

SEQ ID NO: 1618630 - DNA, 15 bp, Homo sapiens
aggctggtctcgttc

SEQ ID NO: 1618631 - DNA, 15 bp, Homo sapiens
ggctggtctcgttct

SEQ ID NO: 1618632 - DNA, 15 bp, Homo sapiens
gctggtctcgttctc

SEQ ID NO: 1618633 - DNA, 15 bp, Homo sapiens
ctggtctcgttctcc

SEQ ID NO: 1618634 - DNA, 15 bp, Homo sapiens
tggtctcgttctcct

SEQ ID NO: 1618635 - DNA, 15 bp, Homo sapiens
ggtctcgttctcctg

SEQ ID NO: 1618636 - DNA, 15 bp, Homo sapiens
gtctcgttctcctga

SEQ ID NO: 1618637 - DNA, 15 bp, Homo sapiens
tctcgttctcctgac

SEQ ID NO: 1618638 - DNA, 15 bp, Homo sapiens
ctcgttctcctgacc

SEQ ID NO: 1618639 - DNA, 15 bp, Homo sapiens
tcgttctcctgacct

SEQ ID NO: 1618640 - DNA, 15 bp, Homo sapiens
cgttctcctgacctc

SEQ ID NO: 1618641 - DNA, 15 bp, Homo sapiens
gttctcctgacctca

SEQ ID NO: 1618642 - DNA, 15 bp, Homo sapiens
ttctcctgacctcag

SEQ ID NO: 1618643 - DNA, 15 bp, Homo sapiens
tctcctgacctcagg

SEQ ID NO: 1618644 - DNA, 15 bp, Homo sapiens
ctcccaaagtgctgt

SEQ ID NO: 1618645 - DNA, 15 bp, Homo sapiens
tcccaaagtgctgtg

SEQ ID NO: 1618646 - DNA, 15 bp, Homo sapiens
cccaaagtgctgtga

SEQ ID NO: 1618647 - DNA, 15 bp, Homo sapiens
ccaaagtgctgtgat

SEQ ID NO: 1618648 - DNA, 15 bp, Homo sapiens
caaagtgctgtgatt

SEQ ID NO: 1618649 - DNA, 15 bp, Homo sapiens
aaagtgctgtgatta

SEQ ID NO: 1618650 - DNA, 15 bp, Homo sapiens
aagtgctgtgattat

SEQ ID NO: 1618651 - DNA, 15 bp, Homo sapiens
agtgctgtgattata

SEQ ID NO: 1618652 - DNA, 15 bp, Homo sapiens
gtgctgtgattatag

SEQ ID NO: 1618653 - DNA, 15 bp, Homo sapiens
tgctgtgattatagg

SEQ ID NO: 1618654 - DNA, 15 bp, Homo sapiens
gctgtgattatagga

SEQ ID NO: 1618655 - DNA, 15 bp, Homo sapiens
ctgtgattataggag

SEQ ID NO: 1618656 - DNA, 15 bp, Homo sapiens
tgtgattataggagt

SEQ ID NO: 1618657 - DNA, 15 bp, Homo sapiens
gtgattataggagtg

SEQ ID NO: 1618658 - DNA, 15 bp, Homo sapiens
tgattataggagtgg

SEQ ID NO: 1618659 - DNA, 15 bp, Homo sapiens
gattataggagtggg

SEQ ID NO: 1618660 - DNA, 15 bp, Homo sapiens
attataggagtgggc

SEQ ID NO: 1618661 - DNA, 15 bp, Homo sapiens
ttataggagtgggcc

SEQ ID NO: 1618662 - DNA, 15 bp, Homo sapiens
tataggagtgggcca

SEQ ID NO: 1618663 - DNA, 15 bp, Homo sapiens
ataggagtgggccac

SEQ ID NO: 1618664 - DNA, 15 bp, Homo sapiens
taggagtgggccact

SEQ ID NO: 1618665 - DNA, 15 bp, Homo sapiens
aggagtgggccactg

SEQ ID NO: 1618666 - DNA, 15 bp, Homo sapiens
ggagtgggccactgt

SEQ ID NO: 1618667 - DNA, 15 bp, Homo sapiens
gagtgggccactgtg

SEQ ID NO: 1618668 - DNA, 15 bp, Homo sapiens
agtgggccactgtgc

SEQ ID NO: 1618669 - DNA, 15 bp, Homo sapiens
gtgggccactgtgcc

SEQ ID NO: 1618670 - DNA, 15 bp, Homo sapiens
tgggccactgtgcct

SEQ ID NO: 1618671 - DNA, 15 bp, Homo sapiens
gggccactgtgcctg

SEQ ID NO: 1618672 - DNA, 15 bp, Homo sapiens
ggccactgtgcctgg

SEQ ID NO: 1618673 - DNA, 15 bp, Homo sapiens
cactgtgcctggcct

SEQ ID NO: 1618674 - DNA, 15 bp, Homo sapiens
actgtgcctggcctg

SEQ ID NO: 1618675 - DNA, 15 bp, Homo sapiens
ctgtgcctggcctgc

SEQ ID NO: 1618676 - DNA, 15 bp, Homo sapiens
tgtgcctggcctgct

SEQ ID NO: 1618677 - DNA, 15 bp, Homo sapiens
gtgcctggcctgcta

SEQ ID NO: 1618678 - DNA, 15 bp, Homo sapiens
tgcctggcctgctaa

SEQ ID NO: 1618679 - DNA, 15 bp, Homo sapiens
gcctggcctgctaag

SEQ ID NO: 1618680 - DNA, 15 bp, Homo sapiens
cctggcctgctaagg

SEQ ID NO: 1618681 - DNA, 15 bp, Homo sapiens
ctggcctgctaagga

SEQ ID NO: 1618682 - DNA, 15 bp, Homo sapiens
tggcctgctaaggat

SEQ ID NO: 1618683 - DNA, 15 bp, Homo sapiens
ggcctgctaaggatc

SEQ ID NO: 1618684 - DNA, 15 bp, Homo sapiens
gcctgctaaggatct

SEQ ID NO: 1618685 - DNA, 15 bp, Homo sapiens
cctgctaaggatctt

SEQ ID NO: 1618686 - DNA, 15 bp, Homo sapiens
ctgctaaggatcttt

SEQ ID NO: 1618687 - DNA, 15 bp, Homo sapiens
gctaaggatctttta

SEQ ID NO: 1618688 - DNA, 15 bp, Homo sapiens
ctaaggatcttttat

SEQ ID NO: 1618689 - DNA, 15 bp, Homo sapiens
taaggatcttttatt

SEQ ID NO: 1618690 - DNA, 15 bp, Homo sapiens
aaggatcttttattg

SEQ ID NO: 1618691 - DNA, 15 bp, Homo sapiens
aggatcttttattgg

SEQ ID NO: 1618692 - DNA, 15 bp, Homo sapiens
ggatcttttattggc

SEQ ID NO: 1618693 - DNA, 15 bp, Homo sapiens
gatcttttattggcc

SEQ ID NO: 1618694 - DNA, 15 bp, Homo sapiens
atcttttattggcct

SEQ ID NO: 1618695 - DNA, 15 bp, Homo sapiens
tcttttattggcctc

SEQ ID NO: 1618696 - DNA, 15 bp, Homo sapiens
cttttattggcctcc

SEQ ID NO: 1618697 - DNA, 15 bp, Homo sapiens
ttttattggcctcct

SEQ ID NO: 1618698 - DNA, 15 bp, Homo sapiens
tttattggcctccta

SEQ ID NO: 1618699 - DNA, 15 bp, Homo sapiens
ttattggcctcctaa

SEQ ID NO: 1618700 - DNA, 15 bp, Homo sapiens
tattggcctcctaag

SEQ ID NO: 1618701 - DNA, 15 bp, Homo sapiens
attggcctcctaagg

SEQ ID NO: 1618702 - DNA, 15 bp, Homo sapiens
ttggcctcctaagga

SEQ ID NO: 1618703 - DNA, 15 bp, Homo sapiens
tggcctcctaaggat

SEQ ID NO: 1618704 - DNA, 15 bp, Homo sapiens
ggcctcctaaggatc

SEQ ID NO: 1618705 - DNA, 15 bp, Homo sapiens
gcctcctaaggatct

SEQ ID NO: 1618706 - DNA, 15 bp, Homo sapiens
cctcctaaggatctt

SEQ ID NO: 1618707 - DNA, 15 bp, Homo sapiens
ctcctaaggatcttt

SEQ ID NO: 1618708 - DNA, 15 bp, Homo sapiens
tcctaaggatctttt

SEQ ID NO: 1618709 - DNA, 15 bp, Homo sapiens
cctaaggatctttta

SEQ ID NO: 1618710 - DNA, 15 bp, Homo sapiens
gatcttttattggct

SEQ ID NO: 1618711 - DNA, 15 bp, Homo sapiens
atcttttattggctc

SEQ ID NO: 1618712 - DNA, 15 bp, Homo sapiens
tcttttattggctcc

SEQ ID NO: 1618713 - DNA, 15 bp, Homo sapiens
cttttattggctcca

SEQ ID NO: 1618714 - DNA, 15 bp, Homo sapiens
ttttattggctccag

SEQ ID NO: 1618715 - DNA, 15 bp, Homo sapiens
tttattggctccagg

SEQ ID NO: 1618716 - DNA, 15 bp, Homo sapiens
ttattggctccaggt

SEQ ID NO: 1618717 - DNA, 15 bp, Homo sapiens
tattggctccaggtc

SEQ ID NO: 1618718 - DNA, 15 bp, Homo sapiens
attggctccaggtca

SEQ ID NO: 1618719 - DNA, 15 bp, Homo sapiens
ttggctccaggtcaa

SEQ ID NO: 1618720 - DNA, 15 bp, Homo sapiens
tggctccaggtcaag

SEQ ID NO: 1618721 - DNA, 15 bp, Homo sapiens
ggctccaggtcaaga

SEQ ID NO: 1618722 - DNA, 15 bp, Homo sapiens
gctccaggtcaagat

SEQ ID NO: 1618723 - DNA, 15 bp, Homo sapiens
ctccaggtcaagatg

SEQ ID NO: 1618724 - DNA, 15 bp, Homo sapiens
tccaggtcaagatgc

SEQ ID NO: 1618725 - DNA, 15 bp, Homo sapiens
ccaggtcaagatgct

SEQ ID NO: 1618726 - DNA, 15 bp, Homo sapiens
caggtcaagatgcta

SEQ ID NO: 1618727 - DNA, 15 bp, Homo sapiens
aggtcaagatgctat

SEQ ID NO: 1618728 - DNA, 15 bp, Homo sapiens
ggtcaagatgctatc

SEQ ID NO: 1618729 - DNA, 15 bp, Homo sapiens
gtcaagatgctatct

SEQ ID NO: 1618730 - DNA, 15 bp, Homo sapiens
tcaagatgctatcta

SEQ ID NO: 1618731 - DNA, 15 bp, Homo sapiens
caagatgctatctat

SEQ ID NO: 1618732 - DNA, 15 bp, Homo sapiens
aagatgctatctatc

SEQ ID NO: 1618733 - DNA, 15 bp, Homo sapiens
agatgctatctatct

SEQ ID NO: 1618734 - DNA, 15 bp, Homo sapiens
gatgctatctatctt

SEQ ID NO: 1618735 - DNA, 15 bp, Homo sapiens
atgctatctatcttg

SEQ ID NO: 1618736 - DNA, 15 bp, Homo sapiens
tgctatctatcttgt

SEQ ID NO: 1618737 - DNA, 15 bp, Homo sapiens
gctatctatcttgtg

SEQ ID NO: 1618738 - DNA, 15 bp, Homo sapiens
ctatctatcttgtgt

SEQ ID NO: 1618739 - DNA, 15 bp, Homo sapiens
tatctatcttgtgtt

SEQ ID NO: 1618740 - DNA, 15 bp, Homo sapiens
atctatcttgtgttc

SEQ ID NO: 1618741 - DNA, 15 bp, Homo sapiens
tctatcttgtgttct

SEQ ID NO: 1618742 - DNA, 15 bp, Homo sapiens
ctatcttgtgttctc

SEQ ID NO: 1618743 - DNA, 15 bp, Homo sapiens
tatcttgtgttctcc

SEQ ID NO: 1618744 - DNA, 15 bp, Homo sapiens
atcttgtgttctccc

SEQ ID NO: 1618745 - DNA, 15 bp, Homo sapiens
tcttgtgttctccca

SEQ ID NO: 1618746 - DNA, 15 bp, Homo sapiens
cttgtgttctcccac

SEQ ID NO: 1618747 - DNA, 15 bp, Homo sapiens
ttgtgttctcccacc

SEQ ID NO: 1618748 - DNA, 15 bp, Homo sapiens
tgtgttctcccacct

SEQ ID NO: 1618749 - DNA, 15 bp, Homo sapiens
gtgttctcccacctg

SEQ ID NO: 1618750 - DNA, 15 bp, Homo sapiens
tgttctcccacctgc

SEQ ID NO: 1618751 - DNA, 15 bp, Homo sapiens
gttctcccacctgca

SEQ ID NO: 1618752 - DNA, 15 bp, Homo sapiens
ttctcccacctgcag

SEQ ID NO: 1618753 - DNA, 15 bp, Homo sapiens
tctcccacctgcagc

SEQ ID NO: 1618754 - DNA, 15 bp, Homo sapiens
ctcccacctgcagca

SEQ ID NO: 1618755 - DNA, 15 bp, Homo sapiens
tcccacctgcagcac

SEQ ID NO: 1618756 - DNA, 15 bp, Homo sapiens
cccacctgcagcact

SEQ ID NO: 1618757 - DNA, 15 bp, Homo sapiens
ccacctgcagcactg

SEQ ID NO: 1618758 - DNA, 15 bp, Homo sapiens
cacctgcagcactga

SEQ ID NO: 1618759 - DNA, 15 bp, Homo sapiens
acctgcagcactgat

SEQ ID NO: 1618760 - DNA, 15 bp, Homo sapiens
cctgcagcactgatg

SEQ ID NO: 1618761 - DNA, 15 bp, Homo sapiens
ctgcagcactgatgg

SEQ ID NO: 1618762 - DNA, 15 bp, Homo sapiens
tgcagcactgatggc

SEQ ID NO: 1618763 - DNA, 15 bp, Homo sapiens
gcagcactgatggcc

SEQ ID NO: 1618764 - DNA, 15 bp, Homo sapiens
cagcactgatggccc

SEQ ID NO: 1618765 - DNA, 15 bp, Homo sapiens
agcactgatggccca

SEQ ID NO: 1618766 - DNA, 15 bp, Homo sapiens
gcactgatggcccac

SEQ ID NO: 1618767 - DNA, 15 bp, Homo sapiens
cactgatggcccaca

SEQ ID NO: 1618768 - DNA, 15 bp, Homo sapiens
actgatggcccacaa

SEQ ID NO: 1618769 - DNA, 15 bp, Homo sapiens
ctgatggcccacaac

SEQ ID NO: 1618770 - DNA, 15 bp, Homo sapiens
tgatggcccacaacc

SEQ ID NO: 1618771 - DNA, 15 bp, Homo sapiens
gatggcccacaaccc

SEQ ID NO: 1618772 - DNA, 15 bp, Homo sapiens
atggcccacaaccct

SEQ ID NO: 1618773 - DNA, 15 bp, Homo sapiens
tggcccacaaccctg

SEQ ID NO: 1618774 - DNA, 15 bp, Homo sapiens
ggcccacaaccctgg

SEQ ID NO: 1618775 - DNA, 15 bp, Homo sapiens
gcccacaaccctgga

SEQ ID NO: 1618776 - DNA, 15 bp, Homo sapiens
cccacaaccctggaa

SEQ ID NO: 1618777 - DNA, 15 bp, Homo sapiens
ccacaaccctggaaa

SEQ ID NO: 1618778 - DNA, 15 bp, Homo sapiens
cacaaccctggaaag

SEQ ID NO: 1618779 - DNA, 15 bp, Homo sapiens
acaaccctggaaagg

SEQ ID NO: 1618780 - DNA, 15 bp, Homo sapiens
caaccctggaaaggc

SEQ ID NO: 1618781 - DNA, 15 bp, Homo sapiens
aaccctggaaaggct

SEQ ID NO: 1618782 - DNA, 15 bp, Homo sapiens
accctggaaaggcta

SEQ ID NO: 1618783 - DNA, 15 bp, Homo sapiens
ccctggaaaggctac

SEQ ID NO: 1618784 - DNA, 15 bp, Homo sapiens
cctggaaaggctaca

SEQ ID NO: 1618785 - DNA, 15 bp, Homo sapiens
ctggaaaggctacac

SEQ ID NO: 1618786 - DNA, 15 bp, Homo sapiens
tggaaaggctacact

SEQ ID NO: 1618787 - DNA, 15 bp, Homo sapiens
ggaaaggctacactt

SEQ ID NO: 1618788 - DNA, 15 bp, Homo sapiens
gaaaggctacacttc

SEQ ID NO: 1618789 - DNA, 15 bp, Homo sapiens
aaaggctacacttca

SEQ ID NO: 1618790 - DNA, 15 bp, Homo sapiens
aaggctacacttcag

SEQ ID NO: 1618791 - DNA, 15 bp, Homo sapiens
aggctacacttcagg

SEQ ID NO: 1618792 - DNA, 15 bp, Homo sapiens
ggctacacttcaggc

SEQ ID NO: 1618793 - DNA, 15 bp, Homo sapiens
gctacacttcaggca

SEQ ID NO: 1618794 - DNA, 15 bp, Homo sapiens
ctacacttcaggcac

SEQ ID NO: 1618795 - DNA, 15 bp, Homo sapiens
tacacttcaggcaca

SEQ ID NO: 1618796 - DNA, 15 bp, Homo sapiens
acacttcaggcacat

SEQ ID NO: 1618797 - DNA, 15 bp, Homo sapiens
cacttcaggcacatc

SEQ ID NO: 1618798 - DNA, 15 bp, Homo sapiens
acttcaggcacatca

SEQ ID NO: 1618799 - DNA, 15 bp, Homo sapiens
cttcaggcacatcag

SEQ ID NO: 1618800 - DNA, 15 bp, Homo sapiens
ttcaggcacatcagg

SEQ ID NO: 1618801 - DNA, 15 bp, Homo sapiens
tcaggcacatcaggc

SEQ ID NO: 1618802 - DNA, 15 bp, Homo sapiens
caggcacatcaggca

SEQ ID NO: 1618803 - DNA, 15 bp, Homo sapiens
aggcacatcaggcat

SEQ ID NO: 1618804 - DNA, 15 bp, Homo sapiens
ggcacatcaggcatt

SEQ ID NO: 1618805 - DNA, 15 bp, Homo sapiens
gcacatcaggcattt

SEQ ID NO: 1618806 - DNA, 15 bp, Homo sapiens
cacatcaggcatttc

SEQ ID NO: 1618807 - DNA, 15 bp, Homo sapiens
acatcaggcatttct

SEQ ID NO: 1618808 - DNA, 15 bp, Homo sapiens
catcaggcatttctc

SEQ ID NO: 1618809 - DNA, 15 bp, Homo sapiens
atcaggcatttctct

SEQ ID NO: 1618810 - DNA, 15 bp, Homo sapiens
tcaggcatttctctc

SEQ ID NO: 1618811 - DNA, 15 bp, Homo sapiens
caggcatttctctct

SEQ ID NO: 1618812 - DNA, 15 bp, Homo sapiens
aggcatttctctctt

SEQ ID NO: 1618813 - DNA, 15 bp, Homo sapiens
ggcatttctctcttc

SEQ ID NO: 1618814 - DNA, 15 bp, Homo sapiens
gcatttctctcttcc

SEQ ID NO: 1618815 - DNA, 15 bp, Homo sapiens
tttctctcttccaga

SEQ ID NO: 1618816 - DNA, 15 bp, Homo sapiens
ttctctcttccagag

SEQ ID NO: 1618817 - DNA, 15 bp, Homo sapiens
tctctcttccagagt

SEQ ID NO: 1618818 - DNA, 15 bp, Homo sapiens
ctctcttccagagtt

SEQ ID NO: 1618819 - DNA, 15 bp, Homo sapiens
tctcttccagagttg

SEQ ID NO: 1618820 - DNA, 15 bp, Homo sapiens
ctcttccagagttgg

SEQ ID NO: 1618821 - DNA, 15 bp, Homo sapiens
tcttccagagttggt

SEQ ID NO: 1618822 - DNA, 15 bp, Homo sapiens
cttccagagttggtt

SEQ ID NO: 1618823 - DNA, 15 bp, Homo sapiens
ttccagagttggttt

SEQ ID NO: 1618824 - DNA, 15 bp, Homo sapiens
tccagagttggtttc

SEQ ID NO: 1618825 - DNA, 15 bp, Homo sapiens
ccagagttggtttca

SEQ ID NO: 1618826 - DNA, 15 bp, Homo sapiens
cagagttggtttcac

SEQ ID NO: 1618827 - DNA, 15 bp, Homo sapiens
agagttggtttcacc

SEQ ID NO: 1618828 - DNA, 15 bp, Homo sapiens
gagttggtttcacct

SEQ ID NO: 1618829 - DNA, 15 bp, Homo sapiens
agttggtttcaccta

SEQ ID NO: 1618830 - DNA, 15 bp, Homo sapiens
gttggtttcacctaa

SEQ ID NO: 1618831 - DNA, 15 bp, Homo sapiens
ttggtttcacctaat

SEQ ID NO: 1618832 - DNA, 15 bp, Homo sapiens
tggtttcacctaatt

SEQ ID NO: 1618833 - DNA, 15 bp, Homo sapiens
ggtttcacctaatta

SEQ ID NO: 1618834 - DNA, 15 bp, Homo sapiens
gtttcacctaattag

SEQ ID NO: 1618835 - DNA, 15 bp, Homo sapiens
tttcacctaattagt

SEQ ID NO: 1618836 - DNA, 15 bp, Homo sapiens
ttcacctaattagta

SEQ ID NO: 1618837 - DNA, 15 bp, Homo sapiens
tcacctaattagtat

SEQ ID NO: 1618838 - DNA, 15 bp, Homo sapiens
cacctaattagtatt

SEQ ID NO: 1618839 - DNA, 15 bp, Homo sapiens
acctaattagtattg

SEQ ID NO: 1618840 - DNA, 15 bp, Homo sapiens
cctaattagtattga

SEQ ID NO: 1618841 - DNA, 15 bp, Homo sapiens
ctaattagtattgac

SEQ ID NO: 1618842 - DNA, 15 bp, Homo sapiens
taattagtattgacg

SEQ ID NO: 1618843 - DNA, 15 bp, Homo sapiens
aattagtattgacgt

SEQ ID NO: 1618844 - DNA, 15 bp, Homo sapiens
attagtattgacgtg

SEQ ID NO: 1618845 - DNA, 15 bp, Homo sapiens
ttagtattgacgtgc

SEQ ID NO: 1618846 - DNA, 15 bp, Homo sapiens
tagtattgacgtgca

SEQ ID NO: 1618847 - DNA, 15 bp, Homo sapiens
agtattgacgtgcag

SEQ ID NO: 1618848 - DNA, 15 bp, Homo sapiens
gtattgacgtgcaga

SEQ ID NO: 1618849 - DNA, 15 bp, Homo sapiens
tattgacgtgcagag

SEQ ID NO: 1618850 - DNA, 15 bp, Homo sapiens
attgacgtgcagaga

SEQ ID NO: 1618851 - DNA, 15 bp, Homo sapiens
ttgacgtgcagagag

SEQ ID NO: 1618852 - DNA, 15 bp, Homo sapiens
tgacgtgcagagagt

SEQ ID NO: 1618853 - DNA, 15 bp, Homo sapiens
gacgtgcagagagtc

SEQ ID NO: 1618854 - DNA, 15 bp, Homo sapiens
acgtgcagagagtct

SEQ ID NO: 1618855 - DNA, 15 bp, Homo sapiens
cgtgcagagagtctc

SEQ ID NO: 1618856 - DNA, 15 bp, Homo sapiens
gtgcagagagtctct

SEQ ID NO: 1618857 - DNA, 15 bp, Homo sapiens
tgcagagagtctctg

SEQ ID NO: 1618858 - DNA, 15 bp, Homo sapiens
gcagagagtctctgg

SEQ ID NO: 1618859 - DNA, 15 bp, Homo sapiens
cagagagtctctggt

SEQ ID NO: 1618860 - DNA, 15 bp, Homo sapiens
agagagtctctggtt

SEQ ID NO: 1618861 - DNA, 15 bp, Homo sapiens
gagagtctctggttg

SEQ ID NO: 1618862 - DNA, 15 bp, Homo sapiens
agagtctctggttgc

SEQ ID NO: 1618863 - DNA, 15 bp, Homo sapiens
gagtctctggttgct

SEQ ID NO: 1618864 - DNA, 15 bp, Homo sapiens
agtctctggttgcta

SEQ ID NO: 1618865 - DNA, 15 bp, Homo sapiens
gtctctggttgctaa

SEQ ID NO: 1618866 - DNA, 15 bp, Homo sapiens
tctctggttgctaaa

SEQ ID NO: 1618867 - DNA, 15 bp, Homo sapiens
ctctggttgctaaag

SEQ ID NO: 1618868 - DNA, 15 bp, Homo sapiens
tctggttgctaaaga

SEQ ID NO: 1618869 - DNA, 15 bp, Homo sapiens
ctggttgctaaagaa

SEQ ID NO: 1618870 - DNA, 15 bp, Homo sapiens
tggttgctaaagaaa

SEQ ID NO: 1618871 - DNA, 15 bp, Homo sapiens
ggttgctaaagaaag

SEQ ID NO: 1618872 - DNA, 15 bp, Homo sapiens
gttgctaaagaaaga

SEQ ID NO: 1618873 - DNA, 15 bp, Homo sapiens
ttgctaaagaaagac

SEQ ID NO: 1618874 - DNA, 15 bp, Homo sapiens
tgctaaagaaagacc

SEQ ID NO: 1618875 - DNA, 15 bp, Homo sapiens
gctaaagaaagaccc

SEQ ID NO: 1618876 - DNA, 15 bp, Homo sapiens
ctaaagaaagaccct

SEQ ID NO: 1618877 - DNA, 15 bp, Homo sapiens
taaagaaagaccctg

SEQ ID NO: 1618878 - DNA, 15 bp, Homo sapiens
aaagaaagaccctgt

SEQ ID NO: 1618879 - DNA, 15 bp, Homo sapiens
aagaaagaccctgta

SEQ ID NO: 1618880 - DNA, 15 bp, Homo sapiens
agaaagaccctgtag

SEQ ID NO: 1618881 - DNA, 15 bp, Homo sapiens
gaaagaccctgtagt

SEQ ID NO: 1618882 - DNA, 15 bp, Homo sapiens
aaagaccctgtagtc

SEQ ID NO: 1618883 - DNA, 15 bp, Homo sapiens
aagaccctgtagtca

SEQ ID NO: 1618884 - DNA, 15 bp, Homo sapiens
agaccctgtagtcat

SEQ ID NO: 1618885 - DNA, 15 bp, Homo sapiens
gaccctgtagtcatg

SEQ ID NO: 1618886 - DNA, 15 bp, Homo sapiens
accctgtagtcatgc

SEQ ID NO: 1618887 - DNA, 15 bp, Homo sapiens
ccctgtagtcatgcc

SEQ ID NO: 1618888 - DNA, 15 bp, Homo sapiens
cctgtagtcatgcct

SEQ ID NO: 1618889 - DNA, 15 bp, Homo sapiens
ctgtagtcatgcctt

SEQ ID NO: 1618890 - DNA, 15 bp, Homo sapiens
tgtagtcatgccttc

SEQ ID NO: 1618891 - DNA, 15 bp, Homo sapiens
gtagtcatgccttct

SEQ ID NO: 1618892 - DNA, 15 bp, Homo sapiens
tagtcatgccttctc

SEQ ID NO: 1618893 - DNA, 15 bp, Homo sapiens
agtcatgccttctcc

SEQ ID NO: 1618894 - DNA, 15 bp, Homo sapiens
gtcatgccttctcct

SEQ ID NO: 1618895 - DNA, 15 bp, Homo sapiens
tcatgccttctcctt

SEQ ID NO: 1618896 - DNA, 15 bp, Homo sapiens
catgccttctccttt

SEQ ID NO: 1618897 - DNA, 15 bp, Homo sapiens
atgccttctccttta

SEQ ID NO: 1618898 - DNA, 15 bp, Homo sapiens
tgccttctcctttag

SEQ ID NO: 1618899 - DNA, 15 bp, Homo sapiens
gccttctcctttaga

SEQ ID NO: 1618900 - DNA, 15 bp, Homo sapiens
ccttctcctttagaa

SEQ ID NO: 1618901 - DNA, 15 bp, Homo sapiens
cttctcctttagaac

SEQ ID NO: 1618902 - DNA, 15 bp, Homo sapiens
ttctcctttagaaca

SEQ ID NO: 1618903 - DNA, 15 bp, Homo sapiens
tctcctttagaacat

SEQ ID NO: 1618904 - DNA, 15 bp, Homo sapiens
ctcctttagaacatc

SEQ ID NO: 1618905 - DNA, 15 bp, Homo sapiens
tcctttagaacatca

SEQ ID NO: 1618906 - DNA, 15 bp, Homo sapiens
cctttagaacatcac

SEQ ID NO: 1618907 - DNA, 15 bp, Homo sapiens
ctttagaacatcacc

SEQ ID NO: 1618908 - DNA, 15 bp, Homo sapiens
tttagaacatcacct

SEQ ID NO: 1618909 - DNA, 15 bp, Homo sapiens
ttagaacatcacctt

SEQ ID NO: 1618910 - DNA, 15 bp, Homo sapiens
tagaacatcaccttt

SEQ ID NO: 1618911 - DNA, 15 bp, Homo sapiens
agaacatcaccttta

SEQ ID NO: 1618912 - DNA, 15 bp, Homo sapiens
gaacatcacctttat

SEQ ID NO: 1618913 - DNA, 15 bp, Homo sapiens
aacatcacctttatt

SEQ ID NO: 1618914 - DNA, 15 bp, Homo sapiens
acatcacctttattc

SEQ ID NO: 1618915 - DNA, 15 bp, Homo sapiens
catcacctttattct

SEQ ID NO: 1618916 - DNA, 15 bp, Homo sapiens
atcacctttattctg

SEQ ID NO: 1618917 - DNA, 15 bp, Homo sapiens
tcacctttattctga

SEQ ID NO: 1618918 - DNA, 15 bp, Homo sapiens
cacctttattctgat

SEQ ID NO: 1618919 - DNA, 15 bp, Homo sapiens
acctttattctgata

SEQ ID NO: 1618920 - DNA, 15 bp, Homo sapiens
cctttattctgataa

SEQ ID NO: 1618921 - DNA, 15 bp, Homo sapiens
ctttattctgataat

SEQ ID NO: 1618922 - DNA, 15 bp, Homo sapiens
tttattctgataata

SEQ ID NO: 1618923 - DNA, 15 bp, Homo sapiens
ttattctgataataa

SEQ ID NO: 1618924 - DNA, 15 bp, Homo sapiens
tattctgataataag

SEQ ID NO: 1618925 - DNA, 15 bp, Homo sapiens
attctgataataagg

SEQ ID NO: 1618926 - DNA, 15 bp, Homo sapiens
ttctgataataaggg

SEQ ID NO: 1618927 - DNA, 15 bp, Homo sapiens
tctgataataaggga

SEQ ID NO: 1618928 - DNA, 15 bp, Homo sapiens
ctgataataagggag

SEQ ID NO: 1618929 - DNA, 15 bp, Homo sapiens
tgataataagggaga

SEQ ID NO: 1618930 - DNA, 15 bp, Homo sapiens
gataataagggagag

SEQ ID NO: 1618931 - DNA, 15 bp, Homo sapiens
ataataagggagaga

SEQ ID NO: 1618932 - DNA, 15 bp, Homo sapiens
taataagggagagag

SEQ ID NO: 1618933 - DNA, 15 bp, Homo sapiens
aataagggagagagg

SEQ ID NO: 1618934 - DNA, 15 bp, Homo sapiens
ataagggagagaggg

SEQ ID NO: 1618935 - DNA, 15 bp, Homo sapiens
taagggagagaggga

SEQ ID NO: 1618936 - DNA, 15 bp, Homo sapiens
aagggagagagggaa

SEQ ID NO: 1618937 - DNA, 15 bp, Homo sapiens
agggagagagggaaa

SEQ ID NO: 1618938 - DNA, 15 bp, Homo sapiens
gggagagagggaaag

SEQ ID NO: 1618939 - DNA, 15 bp, Homo sapiens
ggagagagggaaagg

SEQ ID NO: 1618940 - DNA, 15 bp, Homo sapiens
gagagagggaaagga

SEQ ID NO: 1618941 - DNA, 15 bp, Homo sapiens
agagagggaaaggaa

SEQ ID NO: 1618942 - DNA, 15 bp, Homo sapiens
gagagggaaaggaag

SEQ ID NO: 1618943 - DNA, 15 bp, Homo sapiens
agagggaaaggaagt

SEQ ID NO: 1618944 - DNA, 15 bp, Homo sapiens
gagggaaaggaagta

SEQ ID NO: 1618945 - DNA, 15 bp, Homo sapiens
agggaaaggaagtaa

SEQ ID NO: 1618946 - DNA, 15 bp, Homo sapiens
gggaaaggaagtaag

SEQ ID NO: 1618947 - DNA, 15 bp, Homo sapiens
ggaaaggaagtaagg

SEQ ID NO: 1618948 - DNA, 15 bp, Homo sapiens
gaaaggaagtaagga

SEQ ID NO: 1618949 - DNA, 15 bp, Homo sapiens
aaaggaagtaaggag

SEQ ID NO: 1618950 - DNA, 15 bp, Homo sapiens
aaggaagtaaggagc

SEQ ID NO: 1618951 - DNA, 15 bp, Homo sapiens
aggaagtaaggagca

SEQ ID NO: 1618952 - DNA, 15 bp, Homo sapiens
ggaagtaaggagcat

SEQ ID NO: 1618953 - DNA, 15 bp, Homo sapiens
gaagtaaggagcatt

SEQ ID NO: 1618954 - DNA, 15 bp, Homo sapiens
aagtaaggagcattg

SEQ ID NO: 1618955 - DNA, 15 bp, Homo sapiens
agtaaggagcattgt

SEQ ID NO: 1618956 - DNA, 15 bp, Homo sapiens
gtaaggagcattgtc

SEQ ID NO: 1618957 - DNA, 15 bp, Homo sapiens
taaggagcattgtca

SEQ ID NO: 1618958 - DNA, 15 bp, Homo sapiens
aaggagcattgtcat

SEQ ID NO: 1618959 - DNA, 15 bp, Homo sapiens
aggagcattgtcata

SEQ ID NO: 1618960 - DNA, 15 bp, Homo sapiens
ggagcattgtcataa

SEQ ID NO: 1618961 - DNA, 15 bp, Homo sapiens
gagcattgtcataaa

SEQ ID NO: 1618962 - DNA, 15 bp, Homo sapiens
agcattgtcataaaa

SEQ ID NO: 1618963 - DNA, 15 bp, Homo sapiens
gcattgtcataaaaa

SEQ ID NO: 1618964 - DNA, 15 bp, Homo sapiens
cattgtcataaaaat

SEQ ID NO: 1618965 - DNA, 15 bp, Homo sapiens
attgtcataaaaatt

SEQ ID NO: 1618966 - DNA, 15 bp, Homo sapiens
ttgtcataaaaattg

SEQ ID NO: 1618967 - DNA, 15 bp, Homo sapiens
tgtcataaaaattgc

SEQ ID NO: 1618968 - DNA, 15 bp, Homo sapiens
gtcataaaaattgca

SEQ ID NO: 1618969 - DNA, 15 bp, Homo sapiens
tcataaaaattgcac

SEQ ID NO: 1618970 - DNA, 15 bp, Homo sapiens
cataaaaattgcacc

SEQ ID NO: 1618971 - DNA, 15 bp, Homo sapiens
ataaaaattgcaccc

SEQ ID NO: 1618972 - DNA, 15 bp, Homo sapiens
taaaaattgcaccca

SEQ ID NO: 1618973 - DNA, 15 bp, Homo sapiens
aaaaattgcacccac

SEQ ID NO: 1618974 - DNA, 15 bp, Homo sapiens
aaaattgcacccact

SEQ ID NO: 1618975 - DNA, 15 bp, Homo sapiens
aaattgcacccactg

SEQ ID NO: 1618976 - DNA, 15 bp, Homo sapiens
aattgcacccactgc

SEQ ID NO: 1618977 - DNA, 15 bp, Homo sapiens
attgcacccactgct

SEQ ID NO: 1618978 - DNA, 15 bp, Homo sapiens
ttgcacccactgctg

SEQ ID NO: 1618979 - DNA, 15 bp, Homo sapiens
tgcacccactgctgc

SEQ ID NO: 1618980 - DNA, 15 bp, Homo sapiens
gcacccactgctgcc

SEQ ID NO: 1618981 - DNA, 15 bp, Homo sapiens
cacccactgctgcct

SEQ ID NO: 1618982 - DNA, 15 bp, Homo sapiens
acccactgctgcctt

SEQ ID NO: 1618983 - DNA, 15 bp, Homo sapiens
cccactgctgccttg

SEQ ID NO: 1618984 - DNA, 15 bp, Homo sapiens
ccactgctgccttgt

SEQ ID NO: 1618985 - DNA, 15 bp, Homo sapiens
cactgctgccttgta

SEQ ID NO: 1618986 - DNA, 15 bp, Homo sapiens
actgctgccttgtag

SEQ ID NO: 1618987 - DNA, 15 bp, Homo sapiens
ctgctgccttgtagg

SEQ ID NO: 1618988 - DNA, 15 bp, Homo sapiens
tgctgccttgtaggt

SEQ ID NO: 1618989 - DNA, 15 bp, Homo sapiens
gctgccttgtaggtg

SEQ ID NO: 1618990 - DNA, 15 bp, Homo sapiens
ctgccttgtaggtga

SEQ ID NO: 1618991 - DNA, 15 bp, Homo sapiens
tgccttgtaggtgag

SEQ ID NO: 1618992 - DNA, 15 bp, Homo sapiens
gccttgtaggtgaga

SEQ ID NO: 1618993 - DNA, 15 bp, Homo sapiens
ccttgtaggtgagag

SEQ ID NO: 1618994 - DNA, 15 bp, Homo sapiens
cttgtaggtgagaga

SEQ ID NO: 1618995 - DNA, 15 bp, Homo sapiens
ttgtaggtgagagag

SEQ ID NO: 1618996 - DNA, 15 bp, Homo sapiens
tgtaggtgagagagg

SEQ ID NO: 1618997 - DNA, 15 bp, Homo sapiens
gtaggtgagagaggg

SEQ ID NO: 1618998 - DNA, 15 bp, Homo sapiens
taggtgagagaggga

SEQ ID NO: 1618999 - DNA, 15 bp, Homo sapiens
aggtgagagagggac

SEQ ID NO: 1619000 - DNA, 15 bp, Homo sapiens
ggtgagagagggact

SEQ ID NO: 1619001 - DNA, 15 bp, Homo sapiens
gtgagagagggactg

SEQ ID NO: 1619002 - DNA, 15 bp, Homo sapiens
tgagagagggactga

SEQ ID NO: 1619003 - DNA, 15 bp, Homo sapiens
gagagagggactgac

SEQ ID NO: 1619004 - DNA, 15 bp, Homo sapiens
agagagggactgaca

SEQ ID NO: 1619005 - DNA, 15 bp, Homo sapiens
gagagggactgacac

SEQ ID NO: 1619006 - DNA, 15 bp, Homo sapiens
agagggactgacact

SEQ ID NO: 1619007 - DNA, 15 bp, Homo sapiens
gagggactgacactg

SEQ ID NO: 1619008 - DNA, 15 bp, Homo sapiens
agggactgacactgg

SEQ ID NO: 1619009 - DNA, 15 bp, Homo sapiens
gggactgacactggg

SEQ ID NO: 1619010 - DNA, 15 bp, Homo sapiens
ggactgacactgggc

SEQ ID NO: 1619011 - DNA, 15 bp, Homo sapiens
gactgacactgggct

SEQ ID NO: 1619012 - DNA, 15 bp, Homo sapiens
actgacactgggctc

SEQ ID NO: 1619013 - DNA, 15 bp, Homo sapiens
ctgacactgggctcc

SEQ ID NO: 1619014 - DNA, 15 bp, Homo sapiens
tgacactgggctcca

SEQ ID NO: 1619015 - DNA, 15 bp, Homo sapiens
gacactgggctccac

SEQ ID NO: 1619016 - DNA, 15 bp, Homo sapiens
acactgggctccacg

SEQ ID NO: 1619017 - DNA, 15 bp, Homo sapiens
cactgggctccacgt

SEQ ID NO: 1619018 - DNA, 15 bp, Homo sapiens
actgggctccacgtg

SEQ ID NO: 1619019 - DNA, 15 bp, Homo sapiens
ctgggctccacgtgc

SEQ ID NO: 1619020 - DNA, 15 bp, Homo sapiens
tgggctccacgtgct

SEQ ID NO: 1619021 - DNA, 15 bp, Homo sapiens
gggctccacgtgctc

SEQ ID NO: 1619022 - DNA, 15 bp, Homo sapiens
ggctccacgtgctcc

SEQ ID NO: 1619023 - DNA, 15 bp, Homo sapiens
gctccacgtgctcct

SEQ ID NO: 1619024 - DNA, 15 bp, Homo sapiens
ctccacgtgctccta

SEQ ID NO: 1619025 - DNA, 15 bp, Homo sapiens
tccacgtgctcctac

SEQ ID NO: 1619026 - DNA, 15 bp, Homo sapiens
ccacgtgctcctaca

SEQ ID NO: 1619027 - DNA, 15 bp, Homo sapiens
cacgtgctcctacag

SEQ ID NO: 1619028 - DNA, 15 bp, Homo sapiens
acgtgctcctacaga

SEQ ID NO: 1619029 - DNA, 15 bp, Homo sapiens
cgtgctcctacagag

SEQ ID NO: 1619030 - DNA, 15 bp, Homo sapiens
gtgctcctacagagg

SEQ ID NO: 1619031 - DNA, 15 bp, Homo sapiens
tgctcctacagaggg

SEQ ID NO: 1619032 - DNA, 15 bp, Homo sapiens
gctcctacagagggt

SEQ ID NO: 1619033 - DNA, 15 bp, Homo sapiens
ctcctacagagggtg

SEQ ID NO: 1619034 - DNA, 15 bp, Homo sapiens
tcctacagagggtgt

SEQ ID NO: 1619035 - DNA, 15 bp, Homo sapiens
cctacagagggtgtg

SEQ ID NO: 1619036 - DNA, 15 bp, Homo sapiens
ctacagagggtgtga

SEQ ID NO: 1619037 - DNA, 15 bp, Homo sapiens
tacagagggtgtgaa

SEQ ID NO: 1619038 - DNA, 15 bp, Homo sapiens
acagagggtgtgaac

SEQ ID NO: 1619039 - DNA, 15 bp, Homo sapiens
cagagggtgtgaaca

SEQ ID NO: 1619040 - DNA, 15 bp, Homo sapiens
agagggtgtgaacac

SEQ ID NO: 1619041 - DNA, 15 bp, Homo sapiens
gagggtgtgaacact

SEQ ID NO: 1619042 - DNA, 15 bp, Homo sapiens
agggtgtgaacacta

SEQ ID NO: 1619043 - DNA, 15 bp, Homo sapiens
gggtgtgaacactag

SEQ ID NO: 1619044 - DNA, 15 bp, Homo sapiens
ggtgtgaacactagc

SEQ ID NO: 1619045 - DNA, 15 bp, Homo sapiens
gtgtgaacactagct

SEQ ID NO: 1619046 - DNA, 15 bp, Homo sapiens
tgtgaacactagctc

SEQ ID NO: 1619047 - DNA, 15 bp, Homo sapiens
gtgaacactagctcc

SEQ ID NO: 1619048 - DNA, 15 bp, Homo sapiens
tgaacactagctcca

SEQ ID NO: 1619049 - DNA, 15 bp, Homo sapiens
gaacactagctccag

SEQ ID NO: 1619050 - DNA, 15 bp, Homo sapiens
aacactagctccaga

SEQ ID NO: 1619051 - DNA, 15 bp, Homo sapiens
acactagctccagag

SEQ ID NO: 1619052 - DNA, 15 bp, Homo sapiens
cactagctccagagt

SEQ ID NO: 1619053 - DNA, 15 bp, Homo sapiens
actagctccagagtc

SEQ ID NO: 1619054 - DNA, 15 bp, Homo sapiens
ctagctccagagtct

SEQ ID NO: 1619055 - DNA, 15 bp, Homo sapiens
tagctccagagtctc

SEQ ID NO: 1619056 - DNA, 15 bp, Homo sapiens
agctccagagtctct

SEQ ID NO: 1619057 - DNA, 15 bp, Homo sapiens
gctccagagtctctt

SEQ ID NO: 1619058 - DNA, 15 bp, Homo sapiens
ctccagagtctcttc

SEQ ID NO: 1619059 - DNA, 15 bp, Homo sapiens
tccagagtctcttct

SEQ ID NO: 1619060 - DNA, 15 bp, Homo sapiens
ccagagtctcttctg

SEQ ID NO: 1619061 - DNA, 15 bp, Homo sapiens
cagagtctcttctgt

SEQ ID NO: 1619062 - DNA, 15 bp, Homo sapiens
agagtctcttctgtg

SEQ ID NO: 1619063 - DNA, 15 bp, Homo sapiens
gagtctcttctgtgt

SEQ ID NO: 1619064 - DNA, 15 bp, Homo sapiens
agtctcttctgtgtt

SEQ ID NO: 1619065 - DNA, 15 bp, Homo sapiens
gtctcttctgtgttt

SEQ ID NO: 1619066 - DNA, 15 bp, Homo sapiens
tctcttctgtgtttc

SEQ ID NO: 1619067 - DNA, 15 bp, Homo sapiens
ctcttctgtgtttcc

SEQ ID NO: 1619068 - DNA, 15 bp, Homo sapiens
tcttctgtgtttcca

SEQ ID NO: 1619069 - DNA, 15 bp, Homo sapiens
cttctgtgtttccac

SEQ ID NO: 1619070 - DNA, 15 bp, Homo sapiens
ttctgtgtttccaca

SEQ ID NO: 1619071 - DNA, 15 bp, Homo sapiens
tctgtgtttccacat

SEQ ID NO: 1619072 - DNA, 15 bp, Homo sapiens
ctgtgtttccacata

SEQ ID NO: 1619073 - DNA, 15 bp, Homo sapiens
tgtgtttccacataa

SEQ ID NO: 1619074 - DNA, 15 bp, Homo sapiens
gtgtttccacataat

SEQ ID NO: 1619075 - DNA, 15 bp, Homo sapiens
tgtttccacataata

SEQ ID NO: 1619076 - DNA, 15 bp, Homo sapiens
gtttccacataatag

SEQ ID NO: 1619077 - DNA, 15 bp, Homo sapiens
tttccacataataga

SEQ ID NO: 1619078 - DNA, 15 bp, Homo sapiens
ttccacataatagaa

SEQ ID NO: 1619079 - DNA, 15 bp, Homo sapiens
tccacataatagaaa

SEQ ID NO: 1619080 - DNA, 15 bp, Homo sapiens
ccacataatagaaac

SEQ ID NO: 1619081 - DNA, 15 bp, Homo sapiens
cacataatagaaacc

SEQ ID NO: 1619082 - DNA, 15 bp, Homo sapiens
acataatagaaacca

SEQ ID NO: 1619083 - DNA, 15 bp, Homo sapiens
cataatagaaaccaa

SEQ ID NO: 1619084 - DNA, 15 bp, Homo sapiens
ataatagaaaccaaa

SEQ ID NO: 1619085 - DNA, 15 bp, Homo sapiens
taatagaaaccaaag

SEQ ID NO: 1619086 - DNA, 15 bp, Homo sapiens
aatagaaaccaaagg

SEQ ID NO: 1619087 - DNA, 15 bp, Homo sapiens
atagaaaccaaaggc

SEQ ID NO: 1619088 - DNA, 15 bp, Homo sapiens
tagaaaccaaaggcc

SEQ ID NO: 1619089 - DNA, 15 bp, Homo sapiens
agaaaccaaaggcca

SEQ ID NO: 1619090 - DNA, 15 bp, Homo sapiens
gaaaccaaaggccag

SEQ ID NO: 1619091 - DNA, 15 bp, Homo sapiens
aaaccaaaggccagg

SEQ ID NO: 1619092 - DNA, 15 bp, Homo sapiens
aaccaaaggccaggc

SEQ ID NO: 1619093 - DNA, 15 bp, Homo sapiens
accaaaggccaggca

SEQ ID NO: 1619094 - DNA, 15 bp, Homo sapiens
ccaaaggccaggcat

SEQ ID NO: 1619095 - DNA, 15 bp, Homo sapiens
caaaggccaggcatg

SEQ ID NO: 1619096 - DNA, 15 bp, Homo sapiens
aaaggccaggcatgg

SEQ ID NO: 1619097 - DNA, 15 bp, Homo sapiens
tcacacctgtaatcg

SEQ ID NO: 1619098 - DNA, 15 bp, Homo sapiens
cacacctgtaatcgc

SEQ ID NO: 1619099 - DNA, 15 bp, Homo sapiens
acacctgtaatcgca

SEQ ID NO: 1619100 - DNA, 15 bp, Homo sapiens
cacctgtaatcgcag

SEQ ID NO: 1619101 - DNA, 15 bp, Homo sapiens
acctgtaatcgcagc

SEQ ID NO: 1619102 - DNA, 15 bp, Homo sapiens
cctgtaatcgcagca

SEQ ID NO: 1619103 - DNA, 15 bp, Homo sapiens
ctgtaatcgcagcac

SEQ ID NO: 1619104 - DNA, 15 bp, Homo sapiens
tgtaatcgcagcact

SEQ ID NO: 1619105 - DNA, 15 bp, Homo sapiens
gtaatcgcagcacta

SEQ ID NO: 1619106 - DNA, 15 bp, Homo sapiens
taatcgcagcactat

SEQ ID NO: 1619107 - DNA, 15 bp, Homo sapiens
aatcgcagcactatg

SEQ ID NO: 1619108 - DNA, 15 bp, Homo sapiens
atcgcagcactatgg

SEQ ID NO: 1619109 - DNA, 15 bp, Homo sapiens
tcgcagcactatggg

SEQ ID NO: 1619110 - DNA, 15 bp, Homo sapiens
cgcagcactatggga

SEQ ID NO: 1619111 - DNA, 15 bp, Homo sapiens
gcagcactatgggag

SEQ ID NO: 1619112 - DNA, 15 bp, Homo sapiens
cagcactatgggagg

SEQ ID NO: 1619113 - DNA, 15 bp, Homo sapiens
agcactatgggaggc

SEQ ID NO: 1619114 - DNA, 15 bp, Homo sapiens
gcactatgggaggct

SEQ ID NO: 1619115 - DNA, 15 bp, Homo sapiens
cactatgggaggctg

SEQ ID NO: 1619116 - DNA, 15 bp, Homo sapiens
actatgggaggctga

SEQ ID NO: 1619117 - DNA, 15 bp, Homo sapiens
ctatgggaggctgaa

SEQ ID NO: 1619118 - DNA, 15 bp, Homo sapiens
tatgggaggctgaag

SEQ ID NO: 1619119 - DNA, 15 bp, Homo sapiens
atgggaggctgaagc

SEQ ID NO: 1619120 - DNA, 15 bp, Homo sapiens
tgggaggctgaagcg

SEQ ID NO: 1619121 - DNA, 15 bp, Homo sapiens
gggaggctgaagcgg

SEQ ID NO: 1619122 - DNA, 15 bp, Homo sapiens
ggaggctgaagcggg

SEQ ID NO: 1619123 - DNA, 15 bp, Homo sapiens
gaggctgaagcgggt

SEQ ID NO: 1619124 - DNA, 15 bp, Homo sapiens
aggctgaagcgggtg

SEQ ID NO: 1619125 - DNA, 15 bp, Homo sapiens
ggctgaagcgggtgt

SEQ ID NO: 1619126 - DNA, 15 bp, Homo sapiens
gctgaagcgggtgta

SEQ ID NO: 1619127 - DNA, 15 bp, Homo sapiens
ctgaagcgggtgtat

SEQ ID NO: 1619128 - DNA, 15 bp, Homo sapiens
tgaagcgggtgtatc

SEQ ID NO: 1619129 - DNA, 15 bp, Homo sapiens
gaagcgggtgtatca

SEQ ID NO: 1619130 - DNA, 15 bp, Homo sapiens
aagcgggtgtatcat

SEQ ID NO: 1619131 - DNA, 15 bp, Homo sapiens
agcgggtgtatcatg

SEQ ID NO: 1619132 - DNA, 15 bp, Homo sapiens
gcgggtgtatcatga

SEQ ID NO: 1619133 - DNA, 15 bp, Homo sapiens
cgggtgtatcatgag

SEQ ID NO: 1619134 - DNA, 15 bp, Homo sapiens
gggtgtatcatgagg

SEQ ID NO: 1619135 - DNA, 15 bp, Homo sapiens
ggtgtatcatgaggt

SEQ ID NO: 1619136 - DNA, 15 bp, Homo sapiens
gtgtatcatgaggtc

SEQ ID NO: 1619137 - DNA, 15 bp, Homo sapiens
tgtatcatgaggtca

SEQ ID NO: 1619138 - DNA, 15 bp, Homo sapiens
gtatcatgaggtcag

SEQ ID NO: 1619139 - DNA, 15 bp, Homo sapiens
tatcatgaggtcagg

SEQ ID NO: 1619140 - DNA, 15 bp, Homo sapiens
actaaaatacaaaat

SEQ ID NO: 1619141 - DNA, 15 bp, Homo sapiens
ctaaaatacaaaatt

SEQ ID NO: 1619142 - DNA, 15 bp, Homo sapiens
taaaatacaaaattt

SEQ ID NO: 1619143 - DNA, 15 bp, Homo sapiens
aaaatacaaaattta

SEQ ID NO: 1619144 - DNA, 15 bp, Homo sapiens
aaatacaaaatttag

SEQ ID NO: 1619145 - DNA, 15 bp, Homo sapiens
aatacaaaatttagc

SEQ ID NO: 1619146 - DNA, 15 bp, Homo sapiens
atacaaaatttagcc

SEQ ID NO: 1619147 - DNA, 15 bp, Homo sapiens
tacaaaatttagcca

SEQ ID NO: 1619148 - DNA, 15 bp, Homo sapiens
acaaaatttagccac

SEQ ID NO: 1619149 - DNA, 15 bp, Homo sapiens
caaaatttagccacg

SEQ ID NO: 1619150 - DNA, 15 bp, Homo sapiens
aaaatttagccacgc

SEQ ID NO: 1619151 - DNA, 15 bp, Homo sapiens
aaatttagccacgca

SEQ ID NO: 1619152 - DNA, 15 bp, Homo sapiens
aatttagccacgcat

SEQ ID NO: 1619153 - DNA, 15 bp, Homo sapiens
atttagccacgcatg

SEQ ID NO: 1619154 - DNA, 15 bp, Homo sapiens
tttagccacgcatgg

SEQ ID NO: 1619155 - DNA, 15 bp, Homo sapiens
gccacgcatggtggc

SEQ ID NO: 1619156 - DNA, 15 bp, Homo sapiens
ccacgcatggtggcg

SEQ ID NO: 1619157 - DNA, 15 bp, Homo sapiens
cacgcatggtggcgt

SEQ ID NO: 1619158 - DNA, 15 bp, Homo sapiens
acgcatggtggcgtg

SEQ ID NO: 1619159 - DNA, 15 bp, Homo sapiens
cgcatggtggcgtgt

SEQ ID NO: 1619160 - DNA, 15 bp, Homo sapiens
gtgcctgtaatcccc

SEQ ID NO: 1619161 - DNA, 15 bp, Homo sapiens
tgcctgtaatcccca

SEQ ID NO: 1619162 - DNA, 15 bp, Homo sapiens
gcctgtaatccccac

SEQ ID NO: 1619163 - DNA, 15 bp, Homo sapiens
cctgtaatccccacg

SEQ ID NO: 1619164 - DNA, 15 bp, Homo sapiens
ctgtaatccccacgc

SEQ ID NO: 1619165 - DNA, 15 bp, Homo sapiens
tgtaatccccacgca

SEQ ID NO: 1619166 - DNA, 15 bp, Homo sapiens
gtaatccccacgcat

SEQ ID NO: 1619167 - DNA, 15 bp, Homo sapiens
taatccccacgcatg

SEQ ID NO: 1619168 - DNA, 15 bp, Homo sapiens
aatccccacgcatgg

SEQ ID NO: 1619169 - DNA, 15 bp, Homo sapiens
atccccacgcatggt

SEQ ID NO: 1619170 - DNA, 15 bp, Homo sapiens
tccccacgcatggtg

SEQ ID NO: 1619171 - DNA, 15 bp, Homo sapiens
ccccacgcatggtgg

SEQ ID NO: 1619172 - DNA, 15 bp, Homo sapiens
cccacgcatggtggc

SEQ ID NO: 1619173 - DNA, 15 bp, Homo sapiens
tcaggaggctaaggg

SEQ ID NO: 1619174 - DNA, 15 bp, Homo sapiens
caggaggctaaggga

SEQ ID NO: 1619175 - DNA, 15 bp, Homo sapiens
aggaggctaagggag

SEQ ID NO: 1619176 - DNA, 15 bp, Homo sapiens
ggaggctaagggagg

SEQ ID NO: 1619177 - DNA, 15 bp, Homo sapiens
gaggctaagggagga

SEQ ID NO: 1619178 - DNA, 15 bp, Homo sapiens
aggctaagggaggag

SEQ ID NO: 1619179 - DNA, 15 bp, Homo sapiens
ggctaagggaggaga

SEQ ID NO: 1619180 - DNA, 15 bp, Homo sapiens
gctaagggaggagaa

SEQ ID NO: 1619181 - DNA, 15 bp, Homo sapiens
ctaagggaggagaat

SEQ ID NO: 1619182 - DNA, 15 bp, Homo sapiens
taagggaggagaatc

SEQ ID NO: 1619183 - DNA, 15 bp, Homo sapiens
aagggaggagaatcg

SEQ ID NO: 1619184 - DNA, 15 bp, Homo sapiens
agggaggagaatcgc

SEQ ID NO: 1619185 - DNA, 15 bp, Homo sapiens
gggaggagaatcgct

SEQ ID NO: 1619186 - DNA, 15 bp, Homo sapiens
ggaggagaatcgctt

SEQ ID NO: 1619187 - DNA, 15 bp, Homo sapiens
gaggagaatcgcttg

SEQ ID NO: 1619188 - DNA, 15 bp, Homo sapiens
cagagtgagactcta

SEQ ID NO: 1619189 - DNA, 15 bp, Homo sapiens
agagtgagactctat

SEQ ID NO: 1619190 - DNA, 15 bp, Homo sapiens
gagtgagactctatc

SEQ ID NO: 1619191 - DNA, 15 bp, Homo sapiens
agtgagactctatct

SEQ ID NO: 1619192 - DNA, 15 bp, Homo sapiens
gtgagactctatctc

SEQ ID NO: 1619193 - DNA, 15 bp, Homo sapiens
tgagactctatctca

SEQ ID NO: 1619194 - DNA, 15 bp, Homo sapiens
gagactctatctcaa

SEQ ID NO: 1619195 - DNA, 15 bp, Homo sapiens
agactctatctcaaa

SEQ ID NO: 1619196 - DNA, 15 bp, Homo sapiens
gactctatctcaaaa

SEQ ID NO: 1619197 - DNA, 15 bp, Homo sapiens
actctatctcaaaaa

SEQ ID NO: 1619198 - DNA, 15 bp, Homo sapiens
ctctatctcaaaaaa

SEQ ID NO: 1619199 - DNA, 15 bp, Homo sapiens
tctatctcaaaaaaa

SEQ ID NO: 1619200 - DNA, 15 bp, Homo sapiens
ctatctcaaaaaaaa

SEQ ID NO: 1619201 - DNA, 15 bp, Homo sapiens
tatctcaaaaaaaaa

SEQ ID NO: 1619202 - DNA, 15 bp, Homo sapiens
aaaaaaaaatagaaa

SEQ ID NO: 1619203 - DNA, 15 bp, Homo sapiens
aaaaaaaatagaaac

SEQ ID NO: 1619204 - DNA, 15 bp, Homo sapiens
aaaaaaatagaaacc

SEQ ID NO: 1619205 - DNA, 15 bp, Homo sapiens
aaaaaatagaaacca

SEQ ID NO: 1619206 - DNA, 15 bp, Homo sapiens
aaaaatagaaaccaa

SEQ ID NO: 1619207 - DNA, 15 bp, Homo sapiens
aaaatagaaaccaag

SEQ ID NO: 1619208 - DNA, 15 bp, Homo sapiens
aaatagaaaccaaga

SEQ ID NO: 1619209 - DNA, 15 bp, Homo sapiens
aatagaaaccaagat

SEQ ID NO: 1619210 - DNA, 15 bp, Homo sapiens
atagaaaccaagatt

SEQ ID NO: 1619211 - DNA, 15 bp, Homo sapiens
tagaaaccaagattc

SEQ ID NO: 1619212 - DNA, 15 bp, Homo sapiens
agaaaccaagattcc

SEQ ID NO: 1619213 - DNA, 15 bp, Homo sapiens
gaaaccaagattcct

SEQ ID NO: 1619214 - DNA, 15 bp, Homo sapiens
aaaccaagattcctg

SEQ ID NO: 1619215 - DNA, 15 bp, Homo sapiens
aaccaagattcctga

SEQ ID NO: 1619216 - DNA, 15 bp, Homo sapiens
accaagattcctgaa

SEQ ID NO: 1619217 - DNA, 15 bp, Homo sapiens
ccaagattcctgaat

SEQ ID NO: 1619218 - DNA, 15 bp, Homo sapiens
caagattcctgaatt

SEQ ID NO: 1619219 - DNA, 15 bp, Homo sapiens
aagattcctgaatta

SEQ ID NO: 1619220 - DNA, 15 bp, Homo sapiens
agattcctgaattac

SEQ ID NO: 1619221 - DNA, 15 bp, Homo sapiens
gattcctgaattact

SEQ ID NO: 1619222 - DNA, 15 bp, Homo sapiens
attcctgaattactc

SEQ ID NO: 1619223 - DNA, 15 bp, Homo sapiens
ttcctgaattactct

SEQ ID NO: 1619224 - DNA, 15 bp, Homo sapiens
tcctgaattactcta

SEQ ID NO: 1619225 - DNA, 15 bp, Homo sapiens
cctgaattactctaa

SEQ ID NO: 1619226 - DNA, 15 bp, Homo sapiens
ctgaattactctaat

SEQ ID NO: 1619227 - DNA, 15 bp, Homo sapiens
tgaattactctaatt

SEQ ID NO: 1619228 - DNA, 15 bp, Homo sapiens
gaattactctaatta

SEQ ID NO: 1619229 - DNA, 15 bp, Homo sapiens
aattactctaattaa

SEQ ID NO: 1619230 - DNA, 15 bp, Homo sapiens
attactctaattaaa

SEQ ID NO: 1619231 - DNA, 15 bp, Homo sapiens
ttactctaattaaat

SEQ ID NO: 1619232 - DNA, 15 bp, Homo sapiens
tactctaattaaatc

SEQ ID NO: 1619233 - DNA, 15 bp, Homo sapiens
actctaattaaatca

SEQ ID NO: 1619234 - DNA, 15 bp, Homo sapiens
ctctaattaaatcat

SEQ ID NO: 1619235 - DNA, 15 bp, Homo sapiens
tctaattaaatcatc

SEQ ID NO: 1619236 - DNA, 15 bp, Homo sapiens
ctaattaaatcatct

SEQ ID NO: 1619237 - DNA, 15 bp, Homo sapiens
taattaaatcatctc

SEQ ID NO: 1619238 - DNA, 15 bp, Homo sapiens
aattaaatcatctct

SEQ ID NO: 1619239 - DNA, 15 bp, Homo sapiens
attaaatcatctctg

SEQ ID NO: 1619240 - DNA, 15 bp, Homo sapiens
ttaaatcatctctgg

SEQ ID NO: 1619241 - DNA, 15 bp, Homo sapiens
taaatcatctctgga

SEQ ID NO: 1619242 - DNA, 15 bp, Homo sapiens
aaatcatctctggag

SEQ ID NO: 1619243 - DNA, 15 bp, Homo sapiens
aatcatctctggagt

SEQ ID NO: 1619244 - DNA, 15 bp, Homo sapiens
atcatctctggagtg

SEQ ID NO: 1619245 - DNA, 15 bp, Homo sapiens
tcatctctggagtgg

SEQ ID NO: 1619246 - DNA, 15 bp, Homo sapiens
catctctggagtggg

SEQ ID NO: 1619247 - DNA, 15 bp, Homo sapiens
atctctggagtggga

SEQ ID NO: 1619248 - DNA, 15 bp, Homo sapiens
tctctggagtgggaa

SEQ ID NO: 1619249 - DNA, 15 bp, Homo sapiens
ctctggagtgggaaa

SEQ ID NO: 1619250 - DNA, 15 bp, Homo sapiens
tctggagtgggaaag

SEQ ID NO: 1619251 - DNA, 15 bp, Homo sapiens
ctggagtgggaaagg

SEQ ID NO: 1619252 - DNA, 15 bp, Homo sapiens
tggagtgggaaaggc

SEQ ID NO: 1619253 - DNA, 15 bp, Homo sapiens
ggagtgggaaaggca

SEQ ID NO: 1619254 - DNA, 15 bp, Homo sapiens
gagtgggaaaggcac

SEQ ID NO: 1619255 - DNA, 15 bp, Homo sapiens
agtgggaaaggcaca

SEQ ID NO: 1619256 - DNA, 15 bp, Homo sapiens
gtgggaaaggcacaa

SEQ ID NO: 1619257 - DNA, 15 bp, Homo sapiens
tgggaaaggcacaac

SEQ ID NO: 1619258 - DNA, 15 bp, Homo sapiens
gggaaaggcacaaca

SEQ ID NO: 1619259 - DNA, 15 bp, Homo sapiens
ggaaaggcacaacaa

SEQ ID NO: 1619260 - DNA, 15 bp, Homo sapiens
gaaaggcacaacaaa

SEQ ID NO: 1619261 - DNA, 15 bp, Homo sapiens
aaaggcacaacaaaa

SEQ ID NO: 1619262 - DNA, 15 bp, Homo sapiens
aaggcacaacaaaat

SEQ ID NO: 1619263 - DNA, 15 bp, Homo sapiens
aggcacaacaaaatg

SEQ ID NO: 1619264 - DNA, 15 bp, Homo sapiens
ggcacaacaaaatgc

SEQ ID NO: 1619265 - DNA, 15 bp, Homo sapiens
gcacaacaaaatgct

SEQ ID NO: 1619266 - DNA, 15 bp, Homo sapiens
cacaacaaaatgctt

SEQ ID NO: 1619267 - DNA, 15 bp, Homo sapiens
acaacaaaatgcttg

SEQ ID NO: 1619268 - DNA, 15 bp, Homo sapiens
caacaaaatgcttgg

SEQ ID NO: 1619269 - DNA, 15 bp, Homo sapiens
aacaaaatgcttggt

SEQ ID NO: 1619270 - DNA, 15 bp, Homo sapiens
acaaaatgcttggta

SEQ ID NO: 1619271 - DNA, 15 bp, Homo sapiens
caaaatgcttggtat

SEQ ID NO: 1619272 - DNA, 15 bp, Homo sapiens
aaaatgcttggtatg

SEQ ID NO: 1619273 - DNA, 15 bp, Homo sapiens
aaatgcttggtatgt

SEQ ID NO: 1619274 - DNA, 15 bp, Homo sapiens
aatgcttggtatgtt

SEQ ID NO: 1619275 - DNA, 15 bp, Homo sapiens
atgcttggtatgttt

SEQ ID NO: 1619276 - DNA, 15 bp, Homo sapiens
tgcttggtatgtttc

SEQ ID NO: 1619277 - DNA, 15 bp, Homo sapiens
gcttggtatgtttca

SEQ ID NO: 1619278 - DNA, 15 bp, Homo sapiens
cttggtatgtttcat

SEQ ID NO: 1619279 - DNA, 15 bp, Homo sapiens
ttggtatgtttcatg

SEQ ID NO: 1619280 - DNA, 15 bp, Homo sapiens
tggtatgtttcatga

SEQ ID NO: 1619281 - DNA, 15 bp, Homo sapiens
ggtatgtttcatgag

SEQ ID NO: 1619282 - DNA, 15 bp, Homo sapiens
gtatgtttcatgaga

SEQ ID NO: 1619283 - DNA, 15 bp, Homo sapiens
tatgtttcatgagaa

SEQ ID NO: 1619284 - DNA, 15 bp, Homo sapiens
atgtttcatgagaag

SEQ ID NO: 1619285 - DNA, 15 bp, Homo sapiens
tgtttcatgagaagc

SEQ ID NO: 1619286 - DNA, 15 bp, Homo sapiens
gtttcatgagaagcc

SEQ ID NO: 1619287 - DNA, 15 bp, Homo sapiens
tttcatgagaagccc

SEQ ID NO: 1619288 - DNA, 15 bp, Homo sapiens
ttcatgagaagccct

SEQ ID NO: 1619289 - DNA, 15 bp, Homo sapiens
tcatgagaagccctg

SEQ ID NO: 1619290 - DNA, 15 bp, Homo sapiens
catgagaagccctgc

SEQ ID NO: 1619291 - DNA, 15 bp, Homo sapiens
atgagaagccctgct

SEQ ID NO: 1619292 - DNA, 15 bp, Homo sapiens
tgagaagccctgctg

SEQ ID NO: 1619293 - DNA, 15 bp, Homo sapiens
gagaagccctgctgc

SEQ ID NO: 1619294 - DNA, 15 bp, Homo sapiens
agaagccctgctgct

SEQ ID NO: 1619295 - DNA, 15 bp, Homo sapiens
gaagccctgctgctt

SEQ ID NO: 1619296 - DNA, 15 bp, Homo sapiens
aagccctgctgcttc

SEQ ID NO: 1619297 - DNA, 15 bp, Homo sapiens
agccctgctgcttct

SEQ ID NO: 1619298 - DNA, 15 bp, Homo sapiens
gccctgctgcttctg

SEQ ID NO: 1619299 - DNA, 15 bp, Homo sapiens
ccctgctgcttctgc

SEQ ID NO: 1619300 - DNA, 15 bp, Homo sapiens
cctgctgcttctgcc

SEQ ID NO: 1619301 - DNA, 15 bp, Homo sapiens
ctgctgcttctgccc

SEQ ID NO: 1619302 - DNA, 15 bp, Homo sapiens
tgctgcttctgccca

SEQ ID NO: 1619303 - DNA, 15 bp, Homo sapiens
gctgcttctgcccac

SEQ ID NO: 1619304 - DNA, 15 bp, Homo sapiens
ctgcttctgcccacc

SEQ ID NO: 1619305 - DNA, 15 bp, Homo sapiens
tgcttctgcccacca

SEQ ID NO: 1619306 - DNA, 15 bp, Homo sapiens
gcttctgcccaccac

SEQ ID NO: 1619307 - DNA, 15 bp, Homo sapiens
cttctgcccaccact

SEQ ID NO: 1619308 - DNA, 15 bp, Homo sapiens
ttctgcccaccactc

SEQ ID NO: 1619309 - DNA, 15 bp, Homo sapiens
tctgcccaccactcg

SEQ ID NO: 1619310 - DNA, 15 bp, Homo sapiens
ctgcccaccactcgc

SEQ ID NO: 1619311 - DNA, 15 bp, Homo sapiens
tgcccaccactcgcc

SEQ ID NO: 1619312 - DNA, 15 bp, Homo sapiens
gcccaccactcgccc

SEQ ID NO: 1619313 - DNA, 15 bp, Homo sapiens
cccaccactcgcccg

SEQ ID NO: 1619314 - DNA, 15 bp, Homo sapiens
ccaccactcgcccgc

SEQ ID NO: 1619315 - DNA, 15 bp, Homo sapiens
caccactcgcccgcc

SEQ ID NO: 1619316 - DNA, 15 bp, Homo sapiens
accactcgcccgccc

SEQ ID NO: 1619317 - DNA, 15 bp, Homo sapiens
ccactcgcccgcccc

SEQ ID NO: 1619318 - DNA, 15 bp, Homo sapiens
cactcgcccgccccc

SEQ ID NO: 1619319 - DNA, 15 bp, Homo sapiens
actcgcccgccccca

SEQ ID NO: 1619320 - DNA, 15 bp, Homo sapiens
ctcgcccgcccccat

SEQ ID NO: 1619321 - DNA, 15 bp, Homo sapiens
tcgcccgcccccatc

SEQ ID NO: 1619322 - DNA, 15 bp, Homo sapiens
cgcccgcccccatcc

SEQ ID NO: 1619323 - DNA, 15 bp, Homo sapiens
gcccgcccccatccc

SEQ ID NO: 1619324 - DNA, 15 bp, Homo sapiens
cccgcccccatccca

SEQ ID NO: 1619325 - DNA, 15 bp, Homo sapiens
ccgcccccatcccag

SEQ ID NO: 1619326 - DNA, 15 bp, Homo sapiens
cgcccccatcccagg

SEQ ID NO: 1619327 - DNA, 15 bp, Homo sapiens
gcccccatcccaggc

SEQ ID NO: 1619328 - DNA, 15 bp, Homo sapiens
cccccatcccaggca

SEQ ID NO: 1619329 - DNA, 15 bp, Homo sapiens
ccccatcccaggcat

SEQ ID NO: 1619330 - DNA, 15 bp, Homo sapiens
cccatcccaggcatt

SEQ ID NO: 1619331 - DNA, 15 bp, Homo sapiens
ccatcccaggcattt

SEQ ID NO: 1619332 - DNA, 15 bp, Homo sapiens
catcccaggcatttt

SEQ ID NO: 1619333 - DNA, 15 bp, Homo sapiens
atcccaggcattttc

SEQ ID NO: 1619334 - DNA, 15 bp, Homo sapiens
tcccaggcattttct

SEQ ID NO: 1619335 - DNA, 15 bp, Homo sapiens
cccaggcattttctg

SEQ ID NO: 1619336 - DNA, 15 bp, Homo sapiens
ccaggcattttctgc

SEQ ID NO: 1619337 - DNA, 15 bp, Homo sapiens
caggcattttctgca

SEQ ID NO: 1619338 - DNA, 15 bp, Homo sapiens
aggcattttctgcac

SEQ ID NO: 1619339 - DNA, 15 bp, Homo sapiens
ggcattttctgcaca

SEQ ID NO: 1619340 - DNA, 15 bp, Homo sapiens
gcattttctgcacat

SEQ ID NO: 1619341 - DNA, 15 bp, Homo sapiens
cattttctgcacatc

SEQ ID NO: 1619342 - DNA, 15 bp, Homo sapiens
attttctgcacatcg

SEQ ID NO: 1619343 - DNA, 15 bp, Homo sapiens
ttttctgcacatcgc

SEQ ID NO: 1619344 - DNA, 15 bp, Homo sapiens
tttctgcacatcgca

SEQ ID NO: 1619345 - DNA, 15 bp, Homo sapiens
ttctgcacatcgcag

SEQ ID NO: 1619346 - DNA, 15 bp, Homo sapiens
tctgcacatcgcagt

SEQ ID NO: 1619347 - DNA, 15 bp, Homo sapiens
ctgcacatcgcagtg

SEQ ID NO: 1619348 - DNA, 15 bp, Homo sapiens
tgcacatcgcagtga

SEQ ID NO: 1619349 - DNA, 15 bp, Homo sapiens
gcacatcgcagtgag

SEQ ID NO: 1619350 - DNA, 15 bp, Homo sapiens
cacatcgcagtgagt

SEQ ID NO: 1619351 - DNA, 15 bp, Homo sapiens
acatcgcagtgagtg

SEQ ID NO: 1619352 - DNA, 15 bp, Homo sapiens
catcgcagtgagtgc

SEQ ID NO: 1619353 - DNA, 15 bp, Homo sapiens
atcgcagtgagtgct

SEQ ID NO: 1619354 - DNA, 15 bp, Homo sapiens
tcgcagtgagtgctc

SEQ ID NO: 1619355 - DNA, 15 bp, Homo sapiens
cgcagtgagtgctcc

SEQ ID NO: 1619356 - DNA, 15 bp, Homo sapiens
gcagtgagtgctcct

SEQ ID NO: 1619357 - DNA, 15 bp, Homo sapiens
cagtgagtgctcctc

SEQ ID NO: 1619358 - DNA, 15 bp, Homo sapiens
agtgagtgctcctcc

SEQ ID NO: 1619359 - DNA, 15 bp, Homo sapiens
gtgagtgctcctcca

SEQ ID NO: 1619360 - DNA, 15 bp, Homo sapiens
tgagtgctcctccag

SEQ ID NO: 1619361 - DNA, 15 bp, Homo sapiens
gagtgctcctccagg

SEQ ID NO: 1619362 - DNA, 15 bp, Homo sapiens
agtgctcctccaggg

SEQ ID NO: 1619363 - DNA, 15 bp, Homo sapiens
gtgctcctccagggg

SEQ ID NO: 1619364 - DNA, 15 bp, Homo sapiens
tgctcctccaggggt

SEQ ID NO: 1619365 - DNA, 15 bp, Homo sapiens
gctcctccaggggta

SEQ ID NO: 1619366 - DNA, 15 bp, Homo sapiens
ctcctccaggggtag

SEQ ID NO: 1619367 - DNA, 15 bp, Homo sapiens
tcctccaggggtagg

SEQ ID NO: 1619368 - DNA, 15 bp, Homo sapiens
cctccaggggtaggg

SEQ ID NO: 1619369 - DNA, 15 bp, Homo sapiens
ctccaggggtagggt

SEQ ID NO: 1619370 - DNA, 15 bp, Homo sapiens
tccaggggtagggtg

SEQ ID NO: 1619371 - DNA, 15 bp, Homo sapiens
ccaggggtagggtgg

SEQ ID NO: 1619372 - DNA, 15 bp, Homo sapiens
caggggtagggtggg

SEQ ID NO: 1619373 - DNA, 15 bp, Homo sapiens
aggggtagggtggga

SEQ ID NO: 1619374 - DNA, 15 bp, Homo sapiens
ggggtagggtgggat

SEQ ID NO: 1619375 - DNA, 15 bp, Homo sapiens
gggtagggtgggatc

SEQ ID NO: 1619376 - DNA, 15 bp, Homo sapiens
ggtagggtgggatca

SEQ ID NO: 1619377 - DNA, 15 bp, Homo sapiens
gtagggtgggatcac

SEQ ID NO: 1619378 - DNA, 15 bp, Homo sapiens
tagggtgggatcacc

SEQ ID NO: 1619379 - DNA, 15 bp, Homo sapiens
agggtgggatcacca

SEQ ID NO: 1619380 - DNA, 15 bp, Homo sapiens
gggtgggatcaccag

SEQ ID NO: 1619381 - DNA, 15 bp, Homo sapiens
ggtgggatcaccaga

SEQ ID NO: 1619382 - DNA, 15 bp, Homo sapiens
gtgggatcaccagat

SEQ ID NO: 1619383 - DNA, 15 bp, Homo sapiens
tgggatcaccagatg

SEQ ID NO: 1619384 - DNA, 15 bp, Homo sapiens
gggatcaccagatgg

SEQ ID NO: 1619385 - DNA, 15 bp, Homo sapiens
ggatcaccagatggt

SEQ ID NO: 1619386 - DNA, 15 bp, Homo sapiens
gatcaccagatggtg

SEQ ID NO: 1619387 - DNA, 15 bp, Homo sapiens
atcaccagatggtga

SEQ ID NO: 1619388 - DNA, 15 bp, Homo sapiens
tcaccagatggtgaa

SEQ ID NO: 1619389 - DNA, 15 bp, Homo sapiens
caccagatggtgaag

SEQ ID NO: 1619390 - DNA, 15 bp, Homo sapiens
accagatggtgaagg

SEQ ID NO: 1619391 - DNA, 15 bp, Homo sapiens
ccagatggtgaaggt

SEQ ID NO: 1619392 - DNA, 15 bp, Homo sapiens
cagatggtgaaggtg

SEQ ID NO: 1619393 - DNA, 15 bp, Homo sapiens
agatggtgaaggtgg

SEQ ID NO: 1619394 - DNA, 15 bp, Homo sapiens
gatggtgaaggtggt

SEQ ID NO: 1619395 - DNA, 15 bp, Homo sapiens
atggtgaaggtggta

SEQ ID NO: 1619396 - DNA, 15 bp, Homo sapiens
tggtgaaggtggtat

SEQ ID NO: 1619397 - DNA, 15 bp, Homo sapiens
ggtgaaggtggtatc

SEQ ID NO: 1619398 - DNA, 15 bp, Homo sapiens
gtgaaggtggtatcc

SEQ ID NO: 1619399 - DNA, 15 bp, Homo sapiens
tgaaggtggtatcct

SEQ ID NO: 1619400 - DNA, 15 bp, Homo sapiens
gaaggtggtatccta

SEQ ID NO: 1619401 - DNA, 15 bp, Homo sapiens
aaggtggtatcctat

SEQ ID NO: 1619402 - DNA, 15 bp, Homo sapiens
aggtggtatcctatc

SEQ ID NO: 1619403 - DNA, 15 bp, Homo sapiens
ggtggtatcctatca

SEQ ID NO: 1619404 - DNA, 15 bp, Homo sapiens
gtggtatcctatcac

SEQ ID NO: 1619405 - DNA, 15 bp, Homo sapiens
tggtatcctatcaca

SEQ ID NO: 1619406 - DNA, 15 bp, Homo sapiens
ggtatcctatcacag

SEQ ID NO: 1619407 - DNA, 15 bp, Homo sapiens
gtatcctatcacagg

SEQ ID NO: 1619408 - DNA, 15 bp, Homo sapiens
tatcctatcacagga

SEQ ID NO: 1619409 - DNA, 15 bp, Homo sapiens
atcctatcacaggag

SEQ ID NO: 1619410 - DNA, 15 bp, Homo sapiens
tcctatcacaggaga

SEQ ID NO: 1619411 - DNA, 15 bp, Homo sapiens
cctatcacaggagat

SEQ ID NO: 1619412 - DNA, 15 bp, Homo sapiens
ctatcacaggagatg

SEQ ID NO: 1619413 - DNA, 15 bp, Homo sapiens
tatcacaggagatgg

SEQ ID NO: 1619414 - DNA, 15 bp, Homo sapiens
atcacaggagatggt

SEQ ID NO: 1619415 - DNA, 15 bp, Homo sapiens
tcacaggagatggtt

SEQ ID NO: 1619416 - DNA, 15 bp, Homo sapiens
cacaggagatggttt

SEQ ID NO: 1619417 - DNA, 15 bp, Homo sapiens
acaggagatggtttt

SEQ ID NO: 1619418 - DNA, 15 bp, Homo sapiens
caggagatggtttta

SEQ ID NO: 1619419 - DNA, 15 bp, Homo sapiens
aggagatggttttaa

SEQ ID NO: 1619420 - DNA, 15 bp, Homo sapiens
ggagatggttttaac

SEQ ID NO: 1619421 - DNA, 15 bp, Homo sapiens
gagatggttttaacg

SEQ ID NO: 1619422 - DNA, 15 bp, Homo sapiens
agatggttttaacga

SEQ ID NO: 1619423 - DNA, 15 bp, Homo sapiens
gatggttttaacgag

SEQ ID NO: 1619424 - DNA, 15 bp, Homo sapiens
atggttttaacgaga

SEQ ID NO: 1619425 - DNA, 15 bp, Homo sapiens
tggttttaacgagat

SEQ ID NO: 1619426 - DNA, 15 bp, Homo sapiens
ggttttaacgagatg

SEQ ID NO: 1619427 - DNA, 15 bp, Homo sapiens
gttttaacgagatgt

SEQ ID NO: 1619428 - DNA, 15 bp, Homo sapiens
ttttaacgagatgtt

SEQ ID NO: 1619429 - DNA, 15 bp, Homo sapiens
tttaacgagatgtta

SEQ ID NO: 1619430 - DNA, 15 bp, Homo sapiens
ttaacgagatgttat

SEQ ID NO: 1619431 - DNA, 15 bp, Homo sapiens
taacgagatgttatg

SEQ ID NO: 1619432 - DNA, 15 bp, Homo sapiens
aacgagatgttatgt

SEQ ID NO: 1619433 - DNA, 15 bp, Homo sapiens
acgagatgttatgta

SEQ ID NO: 1619434 - DNA, 15 bp, Homo sapiens
cgagatgttatgtat

SEQ ID NO: 1619435 - DNA, 15 bp, Homo sapiens
gagatgttatgtatt

SEQ ID NO: 1619436 - DNA, 15 bp, Homo sapiens
agatgttatgtattt

SEQ ID NO: 1619437 - DNA, 15 bp, Homo sapiens
gatgttatgtatttt

SEQ ID NO: 1619438 - DNA, 15 bp, Homo sapiens
atgttatgtatttta

SEQ ID NO: 1619439 - DNA, 15 bp, Homo sapiens
tgttatgtattttaa

SEQ ID NO: 1619440 - DNA, 15 bp, Homo sapiens
gttatgtattttaag

SEQ ID NO: 1619441 - DNA, 15 bp, Homo sapiens
ttatgtattttaagt

SEQ ID NO: 1619442 - DNA, 15 bp, Homo sapiens
tatgtattttaagta

SEQ ID NO: 1619443 - DNA, 15 bp, Homo sapiens
atgtattttaagtaa

SEQ ID NO: 1619444 - DNA, 15 bp, Homo sapiens
tgtattttaagtaac

SEQ ID NO: 1619445 - DNA, 15 bp, Homo sapiens
gtattttaagtaaca

SEQ ID NO: 1619446 - DNA, 15 bp, Homo sapiens
tattttaagtaacat

SEQ ID NO: 1619447 - DNA, 15 bp, Homo sapiens
attttaagtaacatg

SEQ ID NO: 1619448 - DNA, 15 bp, Homo sapiens
ttttaagtaacatgg

SEQ ID NO: 1619449 - DNA, 15 bp, Homo sapiens
tttaagtaacatggt

SEQ ID NO: 1619450 - DNA, 15 bp, Homo sapiens
ttaagtaacatggtt

SEQ ID NO: 1619451 - DNA, 15 bp, Homo sapiens
taagtaacatggttc

SEQ ID NO: 1619452 - DNA, 15 bp, Homo sapiens
aagtaacatggttcc

SEQ ID NO: 1619453 - DNA, 15 bp, Homo sapiens
agtaacatggttcct

SEQ ID NO: 1619454 - DNA, 15 bp, Homo sapiens
gtaacatggttccta

SEQ ID NO: 1619455 - DNA, 15 bp, Homo sapiens
taacatggttcctat

SEQ ID NO: 1619456 - DNA, 15 bp, Homo sapiens
aacatggttcctatt

SEQ ID NO: 1619457 - DNA, 15 bp, Homo sapiens
acatggttcctattt

SEQ ID NO: 1619458 - DNA, 15 bp, Homo sapiens
catggttcctatttg

SEQ ID NO: 1619459 - DNA, 15 bp, Homo sapiens
atggttcctatttga

SEQ ID NO: 1619460 - DNA, 15 bp, Homo sapiens
tggttcctatttgaa

SEQ ID NO: 1619461 - DNA, 15 bp, Homo sapiens
ggttcctatttgaat

SEQ ID NO: 1619462 - DNA, 15 bp, Homo sapiens
gttcctatttgaatg

SEQ ID NO: 1619463 - DNA, 15 bp, Homo sapiens
ttcctatttgaatga

SEQ ID NO: 1619464 - DNA, 15 bp, Homo sapiens
tcctatttgaatgaa

SEQ ID NO: 1619465 - DNA, 15 bp, Homo sapiens
cctatttgaatgaaa

SEQ ID NO: 1619466 - DNA, 15 bp, Homo sapiens
ctatttgaatgaaat

SEQ ID NO: 1619467 - DNA, 15 bp, Homo sapiens
tatttgaatgaaatt

SEQ ID NO: 1619468 - DNA, 15 bp, Homo sapiens
atttgaatgaaatta

SEQ ID NO: 1619469 - DNA, 15 bp, Homo sapiens
tttgaatgaaattaa

SEQ ID NO: 1619470 - DNA, 15 bp, Homo sapiens
ttgaatgaaattaaa

SEQ ID NO: 1619471 - DNA, 15 bp, Homo sapiens
tgaatgaaattaaag

SEQ ID NO: 1619472 - DNA, 15 bp, Homo sapiens
gaatgaaattaaaga

SEQ ID NO: 1619473 - DNA, 15 bp, Homo sapiens
aatgaaattaaagat

SEQ ID NO: 1619474 - DNA, 15 bp, Homo sapiens
atgaaattaaagata

SEQ ID NO: 1619475 - DNA, 15 bp, Homo sapiens
tgaaattaaagataa

SEQ ID NO: 1619476 - DNA, 15 bp, Homo sapiens
gaaattaaagataat

SEQ ID NO: 1619477 - DNA, 15 bp, Homo sapiens
aaattaaagataatt

SEQ ID NO: 1619478 - DNA, 15 bp, Homo sapiens
aattaaagataattc

SEQ ID NO: 1619479 - DNA, 15 bp, Homo sapiens
attaaagataattct

SEQ ID NO: 1619480 - DNA, 15 bp, Homo sapiens
ttaaagataattcta

SEQ ID NO: 1619481 - DNA, 15 bp, Homo sapiens
taaagataattctat

SEQ ID NO: 1619482 - DNA, 15 bp, Homo sapiens
aaagataattctatc

SEQ ID NO: 1619483 - DNA, 15 bp, Homo sapiens
aagataattctatcc

SEQ ID NO: 1619484 - DNA, 15 bp, Homo sapiens
agataattctatccc

SEQ ID NO: 1619485 - DNA, 15 bp, Homo sapiens
gataattctatccca

SEQ ID NO: 1619486 - DNA, 15 bp, Homo sapiens
ataattctatcccag

SEQ ID NO: 1619487 - DNA, 15 bp, Homo sapiens
taattctatcccagt

SEQ ID NO: 1619488 - DNA, 15 bp, Homo sapiens
aattctatcccagtc

SEQ ID NO: 1619489 - DNA, 15 bp, Homo sapiens
attctatcccagtct

SEQ ID NO: 1619490 - DNA, 15 bp, Homo sapiens
ttctatcccagtctg

SEQ ID NO: 1619491 - DNA, 15 bp, Homo sapiens
tctatcccagtctgt

SEQ ID NO: 1619492 - DNA, 15 bp, Homo sapiens
ctatcccagtctgtg

SEQ ID NO: 1619493 - DNA, 15 bp, Homo sapiens
tatcccagtctgtgt

SEQ ID NO: 1619494 - DNA, 15 bp, Homo sapiens
atcccagtctgtgtc

SEQ ID NO: 1619495 - DNA, 15 bp, Homo sapiens
tcccagtctgtgtca

SEQ ID NO: 1619496 - DNA, 15 bp, Homo sapiens
cccagtctgtgtcat

SEQ ID NO: 1619497 - DNA, 15 bp, Homo sapiens
ccagtctgtgtcatg

SEQ ID NO: 1619498 - DNA, 15 bp, Homo sapiens
cagtctgtgtcatgg

SEQ ID NO: 1619499 - DNA, 15 bp, Homo sapiens
agtctgtgtcatggg

SEQ ID NO: 1619500 - DNA, 15 bp, Homo sapiens
gtctgtgtcatggga

SEQ ID NO: 1619501 - DNA, 15 bp, Homo sapiens
tctgtgtcatgggaa

SEQ ID NO: 1619502 - DNA, 15 bp, Homo sapiens
ctgtgtcatgggaaa

SEQ ID NO: 1619503 - DNA, 15 bp, Homo sapiens
tgtgtcatgggaaaa

SEQ ID NO: 1619504 - DNA, 15 bp, Homo sapiens
gtgtcatgggaaaaa

SEQ ID NO: 1619505 - DNA, 15 bp, Homo sapiens
tgtcatgggaaaaac

SEQ ID NO: 1619506 - DNA, 15 bp, Homo sapiens
gtcatgggaaaaaca

SEQ ID NO: 1619507 - DNA, 15 bp, Homo sapiens
tcatgggaaaaacag

SEQ ID NO: 1619508 - DNA, 15 bp, Homo sapiens
catgggaaaaacaga

SEQ ID NO: 1619509 - DNA, 15 bp, Homo sapiens
atgggaaaaacagaa

SEQ ID NO: 1619510 - DNA, 15 bp, Homo sapiens
tgggaaaaacagaaa

SEQ ID NO: 1619511 - DNA, 15 bp, Homo sapiens
gggaaaaacagaaat

SEQ ID NO: 1619512 - DNA, 15 bp, Homo sapiens
ggaaaaacagaaatt

SEQ ID NO: 1619513 - DNA, 15 bp, Homo sapiens
gaaaaacagaaattc

SEQ ID NO: 1619514 - DNA, 15 bp, Homo sapiens
aaaaacagaaattca

SEQ ID NO: 1619515 - DNA, 15 bp, Homo sapiens
aaaacagaaattcat

SEQ ID NO: 1619516 - DNA, 15 bp, Homo sapiens
aaacagaaattcata

SEQ ID NO: 1619517 - DNA, 15 bp, Homo sapiens
aacagaaattcatag

SEQ ID NO: 1619518 - DNA, 15 bp, Homo sapiens
acagaaattcatagt

SEQ ID NO: 1619519 - DNA, 15 bp, Homo sapiens
cagaaattcatagtg

SEQ ID NO: 1619520 - DNA, 15 bp, Homo sapiens
agaaattcatagtgg

SEQ ID NO: 1619521 - DNA, 15 bp, Homo sapiens
gaaattcatagtggt

SEQ ID NO: 1619522 - DNA, 15 bp, Homo sapiens
aaattcatagtggtg

SEQ ID NO: 1619523 - DNA, 15 bp, Homo sapiens
aattcatagtggtgg

SEQ ID NO: 1619524 - DNA, 15 bp, Homo sapiens
attcatagtggtggt

SEQ ID NO: 1619525 - DNA, 15 bp, Homo sapiens
ttcatagtggtggtg

SEQ ID NO: 1619526 - DNA, 15 bp, Homo sapiens
tcatagtggtggtgg

SEQ ID NO: 1619527 - DNA, 15 bp, Homo sapiens
catagtggtggtggg

SEQ ID NO: 1619528 - DNA, 15 bp, Homo sapiens
atagtggtggtgggg

SEQ ID NO: 1619529 - DNA, 15 bp, Homo sapiens
tagtggtggtggggc

SEQ ID NO: 1619530 - DNA, 15 bp, Homo sapiens
agtggtggtggggca

SEQ ID NO: 1619531 - DNA, 15 bp, Homo sapiens
gtggtggtggggcac

SEQ ID NO: 1619532 - DNA, 15 bp, Homo sapiens
tggtggtggggcacg

SEQ ID NO: 1619533 - DNA, 15 bp, Homo sapiens
ggtggtggggcacgc

SEQ ID NO: 1619534 - DNA, 15 bp, Homo sapiens
gtggtggggcacgct

SEQ ID NO: 1619535 - DNA, 15 bp, Homo sapiens
tggtggggcacgctg

SEQ ID NO: 1619536 - DNA, 15 bp, Homo sapiens
ggtggggcacgctgg

SEQ ID NO: 1619537 - DNA, 15 bp, Homo sapiens
gtggggcacgctggc

SEQ ID NO: 1619538 - DNA, 15 bp, Homo sapiens
tggggcacgctggct

SEQ ID NO: 1619539 - DNA, 15 bp, Homo sapiens
ggggcacgctggctc

SEQ ID NO: 1619540 - DNA, 15 bp, Homo sapiens
gggcacgctggctca

SEQ ID NO: 1619541 - DNA, 15 bp, Homo sapiens
ggcacgctggctcat

SEQ ID NO: 1619542 - DNA, 15 bp, Homo sapiens
gcacgctggctcatg

SEQ ID NO: 1619543 - DNA, 15 bp, Homo sapiens
cacgctggctcatgc

SEQ ID NO: 1619544 - DNA, 15 bp, Homo sapiens
acgctggctcatgcc

SEQ ID NO: 1619545 - DNA, 15 bp, Homo sapiens
cgctggctcatgcct

SEQ ID NO: 1619546 - DNA, 15 bp, Homo sapiens
gctggctcatgccta

SEQ ID NO: 1619547 - DNA, 15 bp, Homo sapiens
ctggctcatgcctat

SEQ ID NO: 1619548 - DNA, 15 bp, Homo sapiens
atgcctataatccct

SEQ ID NO: 1619549 - DNA, 15 bp, Homo sapiens
tgcctataatccctg

SEQ ID NO: 1619550 - DNA, 15 bp, Homo sapiens
gcctataatccctgc

SEQ ID NO: 1619551 - DNA, 15 bp, Homo sapiens
cctataatccctgca

SEQ ID NO: 1619552 - DNA, 15 bp, Homo sapiens
ctataatccctgcac

SEQ ID NO: 1619553 - DNA, 15 bp, Homo sapiens
tataatccctgcact

SEQ ID NO: 1619554 - DNA, 15 bp, Homo sapiens
ataatccctgcactt

SEQ ID NO: 1619555 - DNA, 15 bp, Homo sapiens
tgggaggccgagggg

SEQ ID NO: 1619556 - DNA, 15 bp, Homo sapiens
gggaggccgaggggg

SEQ ID NO: 1619557 - DNA, 15 bp, Homo sapiens
ggaggccgagggggg

SEQ ID NO: 1619558 - DNA, 15 bp, Homo sapiens
gaggccgaggggggg

SEQ ID NO: 1619559 - DNA, 15 bp, Homo sapiens
aggccgagggggggc

SEQ ID NO: 1619560 - DNA, 15 bp, Homo sapiens
ggccgagggggggca

SEQ ID NO: 1619561 - DNA, 15 bp, Homo sapiens
gccgagggggggcag

SEQ ID NO: 1619562 - DNA, 15 bp, Homo sapiens
ccgagggggggcaga

SEQ ID NO: 1619563 - DNA, 15 bp, Homo sapiens
cgagggggggcagat

SEQ ID NO: 1619564 - DNA, 15 bp, Homo sapiens
gagggggggcagata

SEQ ID NO: 1619565 - DNA, 15 bp, Homo sapiens
agggggggcagataa

SEQ ID NO: 1619566 - DNA, 15 bp, Homo sapiens
gggggggcagataac

SEQ ID NO: 1619567 - DNA, 15 bp, Homo sapiens
ggggggcagataact

SEQ ID NO: 1619568 - DNA, 15 bp, Homo sapiens
gggggcagataactt

SEQ ID NO: 1619569 - DNA, 15 bp, Homo sapiens
ggggcagataacttg

SEQ ID NO: 1619570 - DNA, 15 bp, Homo sapiens
gggcagataacttga

SEQ ID NO: 1619571 - DNA, 15 bp, Homo sapiens
gcagataacttgagg

SEQ ID NO: 1619572 - DNA, 15 bp, Homo sapiens
cagataacttgaggt

SEQ ID NO: 1619573 - DNA, 15 bp, Homo sapiens
agataacttgaggtc

SEQ ID NO: 1619574 - DNA, 15 bp, Homo sapiens
gataacttgaggtca

SEQ ID NO: 1619575 - DNA, 15 bp, Homo sapiens
ataacttgaggtcag

SEQ ID NO: 1619576 - DNA, 15 bp, Homo sapiens
taacttgaggtcagg

SEQ ID NO: 1619577 - DNA, 15 bp, Homo sapiens
aacttgaggtcagga

SEQ ID NO: 1619578 - DNA, 15 bp, Homo sapiens
cagcctggtcaacac

SEQ ID NO: 1619579 - DNA, 15 bp, Homo sapiens
agcctggtcaacacg

SEQ ID NO: 1619580 - DNA, 15 bp, Homo sapiens
gcctggtcaacacgg

SEQ ID NO: 1619581 - DNA, 15 bp, Homo sapiens
cctggtcaacacggt

SEQ ID NO: 1619582 - DNA, 15 bp, Homo sapiens
ctggtcaacacggtg

SEQ ID NO: 1619583 - DNA, 15 bp, Homo sapiens
tggtcaacacggtga

SEQ ID NO: 1619584 - DNA, 15 bp, Homo sapiens
ggtcaacacggtgaa

SEQ ID NO: 1619585 - DNA, 15 bp, Homo sapiens
gtcaacacggtgaaa

SEQ ID NO: 1619586 - DNA, 15 bp, Homo sapiens
tcaacacggtgaaac

SEQ ID NO: 1619587 - DNA, 15 bp, Homo sapiens
tgtctctgctaaaaa

SEQ ID NO: 1619588 - DNA, 15 bp, Homo sapiens
gtctctgctaaaaat

SEQ ID NO: 1619589 - DNA, 15 bp, Homo sapiens
tctctgctaaaaata

SEQ ID NO: 1619590 - DNA, 15 bp, Homo sapiens
ctctgctaaaaatac

SEQ ID NO: 1619591 - DNA, 15 bp, Homo sapiens
tctgctaaaaataca

SEQ ID NO: 1619592 - DNA, 15 bp, Homo sapiens
ctgctaaaaatacaa

SEQ ID NO: 1619593 - DNA, 15 bp, Homo sapiens
tgctaaaaatacaaa

SEQ ID NO: 1619594 - DNA, 15 bp, Homo sapiens
gctaaaaatacaaaa

SEQ ID NO: 1619595 - DNA, 15 bp, Homo sapiens
atacaaaaagtagca

SEQ ID NO: 1619596 - DNA, 15 bp, Homo sapiens
tacaaaaagtagcag

SEQ ID NO: 1619597 - DNA, 15 bp, Homo sapiens
acaaaaagtagcagg

SEQ ID NO: 1619598 - DNA, 15 bp, Homo sapiens
caaaaagtagcaggg

SEQ ID NO: 1619599 - DNA, 15 bp, Homo sapiens
aaagtagcagggagt

SEQ ID NO: 1619600 - DNA, 15 bp, Homo sapiens
aagtagcagggagtg

SEQ ID NO: 1619601 - DNA, 15 bp, Homo sapiens
agtagcagggagtgg

SEQ ID NO: 1619602 - DNA, 15 bp, Homo sapiens
gtagcagggagtggt

SEQ ID NO: 1619603 - DNA, 15 bp, Homo sapiens
tagcagggagtggtg

SEQ ID NO: 1619604 - DNA, 15 bp, Homo sapiens
agcagggagtggtgg

SEQ ID NO: 1619605 - DNA, 15 bp, Homo sapiens
gcagggagtggtggt

SEQ ID NO: 1619606 - DNA, 15 bp, Homo sapiens
cagggagtggtggtg

SEQ ID NO: 1619607 - DNA, 15 bp, Homo sapiens
agggagtggtggtgg

SEQ ID NO: 1619608 - DNA, 15 bp, Homo sapiens
gggagtggtggtggg

SEQ ID NO: 1619609 - DNA, 15 bp, Homo sapiens
ggagtggtggtgggt

SEQ ID NO: 1619610 - DNA, 15 bp, Homo sapiens
gagtggtggtgggtg

SEQ ID NO: 1619611 - DNA, 15 bp, Homo sapiens
agtggtggtgggtgc

SEQ ID NO: 1619612 - DNA, 15 bp, Homo sapiens
ggtggtgggtgcctg

SEQ ID NO: 1619613 - DNA, 15 bp, Homo sapiens
gtggtgggtgcctgt

SEQ ID NO: 1619614 - DNA, 15 bp, Homo sapiens
tggtgggtgcctgta

SEQ ID NO: 1619615 - DNA, 15 bp, Homo sapiens
ggtgggtgcctgtaa

SEQ ID NO: 1619616 - DNA, 15 bp, Homo sapiens
gtgggtgcctgtaat

SEQ ID NO: 1619617 - DNA, 15 bp, Homo sapiens
tgggtgcctgtaatc

SEQ ID NO: 1619618 - DNA, 15 bp, Homo sapiens
aggaggctgaagcag

SEQ ID NO: 1619619 - DNA, 15 bp, Homo sapiens
aagcaggagaatcga

SEQ ID NO: 1619620 - DNA, 15 bp, Homo sapiens
agcaggagaatcgat

SEQ ID NO: 1619621 - DNA, 15 bp, Homo sapiens
aatcgattgaaccca

SEQ ID NO: 1619622 - DNA, 15 bp, Homo sapiens
atcgattgaacccag

SEQ ID NO: 1619623 - DNA, 15 bp, Homo sapiens
tcgattgaacccagg

SEQ ID NO: 1619624 - DNA, 15 bp, Homo sapiens
cgattgaacccagga

SEQ ID NO: 1619625 - DNA, 15 bp, Homo sapiens
gattgaacccaggag

SEQ ID NO: 1619626 - DNA, 15 bp, Homo sapiens
gaggcggaggttgta

SEQ ID NO: 1619627 - DNA, 15 bp, Homo sapiens
aggcggaggttgtag

SEQ ID NO: 1619628 - DNA, 15 bp, Homo sapiens
ggcggaggttgtagt

SEQ ID NO: 1619629 - DNA, 15 bp, Homo sapiens
gcggaggttgtagtg

SEQ ID NO: 1619630 - DNA, 15 bp, Homo sapiens
gaggttgtagtgagt

SEQ ID NO: 1619631 - DNA, 15 bp, Homo sapiens
aggttgtagtgagtc

SEQ ID NO: 1619632 - DNA, 15 bp, Homo sapiens
ggttgtagtgagtca

SEQ ID NO: 1619633 - DNA, 15 bp, Homo sapiens
gttgtagtgagtcaa

SEQ ID NO: 1619634 - DNA, 15 bp, Homo sapiens
ttgtagtgagtcaag

SEQ ID NO: 1619635 - DNA, 15 bp, Homo sapiens
tgtagtgagtcaaga

SEQ ID NO: 1619636 - DNA, 15 bp, Homo sapiens
gtagtgagtcaagat

SEQ ID NO: 1619637 - DNA, 15 bp, Homo sapiens
tagtgagtcaagatc

SEQ ID NO: 1619638 - DNA, 15 bp, Homo sapiens
agtgagtcaagatca

SEQ ID NO: 1619639 - DNA, 15 bp, Homo sapiens
gtgagtcaagatcat

SEQ ID NO: 1619640 - DNA, 15 bp, Homo sapiens
tgagtcaagatcatc

SEQ ID NO: 1619641 - DNA, 15 bp, Homo sapiens
gagtcaagatcatcc

SEQ ID NO: 1619642 - DNA, 15 bp, Homo sapiens
agtcaagatcatcct

SEQ ID NO: 1619643 - DNA, 15 bp, Homo sapiens
gtcaagatcatccta

SEQ ID NO: 1619644 - DNA, 15 bp, Homo sapiens
tcaagatcatcctac

SEQ ID NO: 1619645 - DNA, 15 bp, Homo sapiens
caagatcatcctact

SEQ ID NO: 1619646 - DNA, 15 bp, Homo sapiens
aagatcatcctactg

SEQ ID NO: 1619647 - DNA, 15 bp, Homo sapiens
agatcatcctactgc

SEQ ID NO: 1619648 - DNA, 15 bp, Homo sapiens
gatcatcctactgca

SEQ ID NO: 1619649 - DNA, 15 bp, Homo sapiens
atcatcctactgcac

SEQ ID NO: 1619650 - DNA, 15 bp, Homo sapiens
tcatcctactgcact

SEQ ID NO: 1619651 - DNA, 15 bp, Homo sapiens
catcctactgcactc

SEQ ID NO: 1619652 - DNA, 15 bp, Homo sapiens
atcctactgcactcc

SEQ ID NO: 1619653 - DNA, 15 bp, Homo sapiens
tcctactgcactcca

SEQ ID NO: 1619654 - DNA, 15 bp, Homo sapiens
cctactgcactccag

SEQ ID NO: 1619655 - DNA, 15 bp, Homo sapiens
ctactgcactccagt

SEQ ID NO: 1619656 - DNA, 15 bp, Homo sapiens
tactgcactccagtc

SEQ ID NO: 1619657 - DNA, 15 bp, Homo sapiens
gcactccagtctggc

SEQ ID NO: 1619658 - DNA, 15 bp, Homo sapiens
cactccagtctggca

SEQ ID NO: 1619659 - DNA, 15 bp, Homo sapiens
actccagtctggcaa

SEQ ID NO: 1619660 - DNA, 15 bp, Homo sapiens
ctccagtctggcaaa

SEQ ID NO: 1619661 - DNA, 15 bp, Homo sapiens
tccagtctggcaaac

SEQ ID NO: 1619662 - DNA, 15 bp, Homo sapiens
ccagtctggcaaaca

SEQ ID NO: 1619663 - DNA, 15 bp, Homo sapiens
cagtctggcaaacag

SEQ ID NO: 1619664 - DNA, 15 bp, Homo sapiens
agtctggcaaacaga

SEQ ID NO: 1619665 - DNA, 15 bp, Homo sapiens
gtctggcaaacagag

SEQ ID NO: 1619666 - DNA, 15 bp, Homo sapiens
tctggcaaacagagc

SEQ ID NO: 1619667 - DNA, 15 bp, Homo sapiens
ctggcaaacagagca

SEQ ID NO: 1619668 - DNA, 15 bp, Homo sapiens
tggcaaacagagcaa

SEQ ID NO: 1619669 - DNA, 15 bp, Homo sapiens
ggcaaacagagcaag

SEQ ID NO: 1619670 - DNA, 15 bp, Homo sapiens
gcaaacagagcaaga

SEQ ID NO: 1619671 - DNA, 15 bp, Homo sapiens
caaacagagcaagac

SEQ ID NO: 1619672 - DNA, 15 bp, Homo sapiens
aaacagagcaagact

SEQ ID NO: 1619673 - DNA, 15 bp, Homo sapiens
cagagcaagactcct

SEQ ID NO: 1619674 - DNA, 15 bp, Homo sapiens
agagcaagactcctt

SEQ ID NO: 1619675 - DNA, 15 bp, Homo sapiens
gagcaagactccttc

SEQ ID NO: 1619676 - DNA, 15 bp, Homo sapiens
agcaagactccttct

SEQ ID NO: 1619677 - DNA, 15 bp, Homo sapiens
gcaagactccttctc

SEQ ID NO: 1619678 - DNA, 15 bp, Homo sapiens
caagactccttctca

SEQ ID NO: 1619679 - DNA, 15 bp, Homo sapiens
aagactccttctcaa

SEQ ID NO: 1619680 - DNA, 15 bp, Homo sapiens
agactccttctcaaa

SEQ ID NO: 1619681 - DNA, 15 bp, Homo sapiens
gactccttctcaaaa

SEQ ID NO: 1619682 - DNA, 15 bp, Homo sapiens
actccttctcaaaaa

SEQ ID NO: 1619683 - DNA, 15 bp, Homo sapiens
ctccttctcaaaaaa

SEQ ID NO: 1619684 - DNA, 15 bp, Homo sapiens
tccttctcaaaaaaa

SEQ ID NO: 1619685 - DNA, 15 bp, Homo sapiens
ttctcaaaaaaaaaa

SEQ ID NO: 1619686 - DNA, 15 bp, Homo sapiens
aaaaaaaaaagaatg

SEQ ID NO: 1619687 - DNA, 15 bp, Homo sapiens
aaaaaaaaagaatga

SEQ ID NO: 1619688 - DNA, 15 bp, Homo sapiens
aaaaaaaagaatgaa

SEQ ID NO: 1619689 - DNA, 15 bp, Homo sapiens
aaaaaaagaatgaaa

SEQ ID NO: 1619690 - DNA, 15 bp, Homo sapiens
aagaatgaaagaaag

SEQ ID NO: 1619691 - DNA, 15 bp, Homo sapiens
agaatgaaagaaaga

SEQ ID NO: 1619692 - DNA, 15 bp, Homo sapiens
gaatgaaagaaagaa

SEQ ID NO: 1619693 - DNA, 15 bp, Homo sapiens
aatgaaagaaagaaa

SEQ ID NO: 1619694 - DNA, 15 bp, Homo sapiens
atgaaagaaagaaat

SEQ ID NO: 1619695 - DNA, 15 bp, Homo sapiens
tgaaagaaagaaatt

SEQ ID NO: 1619696 - DNA, 15 bp, Homo sapiens
gaaagaaagaaattc

SEQ ID NO: 1619697 - DNA, 15 bp, Homo sapiens
aaagaaagaaattca

SEQ ID NO: 1619698 - DNA, 15 bp, Homo sapiens
aagaaagaaattcat

SEQ ID NO: 1619699 - DNA, 15 bp, Homo sapiens
agaaagaaattcata

SEQ ID NO: 1619700 - DNA, 15 bp, Homo sapiens
gaaagaaattcatag

SEQ ID NO: 1619701 - DNA, 15 bp, Homo sapiens
aaagaaattcatagt

SEQ ID NO: 1619702 - DNA, 15 bp, Homo sapiens
aagaaattcatagtg

SEQ ID NO: 1619703 - DNA, 15 bp, Homo sapiens
aattcatagtggtgt

SEQ ID NO: 1619704 - DNA, 15 bp, Homo sapiens
attcatagtggtgta

SEQ ID NO: 1619705 - DNA, 15 bp, Homo sapiens
ttcatagtggtgtat

SEQ ID NO: 1619706 - DNA, 15 bp, Homo sapiens
tcatagtggtgtatt

SEQ ID NO: 1619707 - DNA, 15 bp, Homo sapiens
catagtggtgtattt

SEQ ID NO: 1619708 - DNA, 15 bp, Homo sapiens
atagtggtgtatttc

SEQ ID NO: 1619709 - DNA, 15 bp, Homo sapiens
tagtggtgtatttct

SEQ ID NO: 1619710 - DNA, 15 bp, Homo sapiens
agtggtgtatttctt

SEQ ID NO: 1619711 - DNA, 15 bp, Homo sapiens
gtggtgtatttcttc

SEQ ID NO: 1619712 - DNA, 15 bp, Homo sapiens
tggtgtatttcttca

SEQ ID NO: 1619713 - DNA, 15 bp, Homo sapiens
ggtgtatttcttcac

SEQ ID NO: 1619714 - DNA, 15 bp, Homo sapiens
gtgtatttcttcaca

SEQ ID NO: 1619715 - DNA, 15 bp, Homo sapiens
tgtatttcttcacat

SEQ ID NO: 1619716 - DNA, 15 bp, Homo sapiens
gtatttcttcacatg

SEQ ID NO: 1619717 - DNA, 15 bp, Homo sapiens
tatttcttcacatgg

SEQ ID NO: 1619718 - DNA, 15 bp, Homo sapiens
atttcttcacatggt

SEQ ID NO: 1619719 - DNA, 15 bp, Homo sapiens
tttcttcacatggtt

SEQ ID NO: 1619720 - DNA, 15 bp, Homo sapiens
ttcttcacatggttg

SEQ ID NO: 1619721 - DNA, 15 bp, Homo sapiens
tcttcacatggttgt

SEQ ID NO: 1619722 - DNA, 15 bp, Homo sapiens
cttcacatggttgtt

SEQ ID NO: 1619723 - DNA, 15 bp, Homo sapiens
ttcacatggttgttt

SEQ ID NO: 1619724 - DNA, 15 bp, Homo sapiens
tcacatggttgtttt

SEQ ID NO: 1619725 - DNA, 15 bp, Homo sapiens
cacatggttgttttc

SEQ ID NO: 1619726 - DNA, 15 bp, Homo sapiens
acatggttgttttcc

SEQ ID NO: 1619727 - DNA, 15 bp, Homo sapiens
catggttgttttcca

SEQ ID NO: 1619728 - DNA, 15 bp, Homo sapiens
atggttgttttccat

SEQ ID NO: 1619729 - DNA, 15 bp, Homo sapiens
tggttgttttccata

SEQ ID NO: 1619730 - DNA, 15 bp, Homo sapiens
ggttgttttccataa

SEQ ID NO: 1619731 - DNA, 15 bp, Homo sapiens
gttgttttccataag

SEQ ID NO: 1619732 - DNA, 15 bp, Homo sapiens
ttgttttccataagt

SEQ ID NO: 1619733 - DNA, 15 bp, Homo sapiens
tgttttccataagta

SEQ ID NO: 1619734 - DNA, 15 bp, Homo sapiens
gttttccataagtaa

SEQ ID NO: 1619735 - DNA, 15 bp, Homo sapiens
ttttccataagtaag

SEQ ID NO: 1619736 - DNA, 15 bp, Homo sapiens
tttccataagtaagg

SEQ ID NO: 1619737 - DNA, 15 bp, Homo sapiens
ttccataagtaagga

SEQ ID NO: 1619738 - DNA, 15 bp, Homo sapiens
tccataagtaaggat

SEQ ID NO: 1619739 - DNA, 15 bp, Homo sapiens
ccataagtaaggata

SEQ ID NO: 1619740 - DNA, 15 bp, Homo sapiens
cataagtaaggataa

SEQ ID NO: 1619741 - DNA, 15 bp, Homo sapiens
ataagtaaggataat

SEQ ID NO: 1619742 - DNA, 15 bp, Homo sapiens
taagtaaggataatt

SEQ ID NO: 1619743 - DNA, 15 bp, Homo sapiens
aagtaaggataattt

SEQ ID NO: 1619744 - DNA, 15 bp, Homo sapiens
agtaaggataattta

SEQ ID NO: 1619745 - DNA, 15 bp, Homo sapiens
gtaaggataatttag

SEQ ID NO: 1619746 - DNA, 15 bp, Homo sapiens
taaggataatttagc

SEQ ID NO: 1619747 - DNA, 15 bp, Homo sapiens
aaggataatttagct

SEQ ID NO: 1619748 - DNA, 15 bp, Homo sapiens
aggataatttagctt

SEQ ID NO: 1619749 - DNA, 15 bp, Homo sapiens
ggataatttagctta

SEQ ID NO: 1619750 - DNA, 15 bp, Homo sapiens
gataatttagcttaa

SEQ ID NO: 1619751 - DNA, 15 bp, Homo sapiens
ataatttagcttaaa

SEQ ID NO: 1619752 - DNA, 15 bp, Homo sapiens
taatttagcttaaaa

SEQ ID NO: 1619753 - DNA, 15 bp, Homo sapiens
aatttagcttaaaat

SEQ ID NO: 1619754 - DNA, 15 bp, Homo sapiens
atttagcttaaaata

SEQ ID NO: 1619755 - DNA, 15 bp, Homo sapiens
tttagcttaaaatat

SEQ ID NO: 1619756 - DNA, 15 bp, Homo sapiens
ttagcttaaaatatg

SEQ ID NO: 1619757 - DNA, 15 bp, Homo sapiens
tagcttaaaatatgt

SEQ ID NO: 1619758 - DNA, 15 bp, Homo sapiens
agcttaaaatatgta

SEQ ID NO: 1619759 - DNA, 15 bp, Homo sapiens
gcttaaaatatgtat

SEQ ID NO: 1619760 - DNA, 15 bp, Homo sapiens
cttaaaatatgtatc

SEQ ID NO: 1619761 - DNA, 15 bp, Homo sapiens
ttaaaatatgtatcg

SEQ ID NO: 1619762 - DNA, 15 bp, Homo sapiens
taaaatatgtatcgt

SEQ ID NO: 1619763 - DNA, 15 bp, Homo sapiens
aaaatatgtatcgtt

SEQ ID NO: 1619764 - DNA, 15 bp, Homo sapiens
aaatatgtatcgttt

SEQ ID NO: 1619765 - DNA, 15 bp, Homo sapiens
aatatgtatcgtttt

SEQ ID NO: 1619766 - DNA, 15 bp, Homo sapiens
atatgtatcgttttc

SEQ ID NO: 1619767 - DNA, 15 bp, Homo sapiens
tatgtatcgttttca

SEQ ID NO: 1619768 - DNA, 15 bp, Homo sapiens
atgtatcgttttcat

SEQ ID NO: 1619769 - DNA, 15 bp, Homo sapiens
tgtatcgttttcata

SEQ ID NO: 1619770 - DNA, 15 bp, Homo sapiens
gtatcgttttcatat

SEQ ID NO: 1619771 - DNA, 15 bp, Homo sapiens
tatcgttttcatatc

SEQ ID NO: 1619772 - DNA, 15 bp, Homo sapiens
atcgttttcatatca

SEQ ID NO: 1619773 - DNA, 15 bp, Homo sapiens
tcgttttcatatcaa

SEQ ID NO: 1619774 - DNA, 15 bp, Homo sapiens
cgttttcatatcaag

SEQ ID NO: 1619775 - DNA, 15 bp, Homo sapiens
gttttcatatcaagg

SEQ ID NO: 1619776 - DNA, 15 bp, Homo sapiens
ttttcatatcaaggc

SEQ ID NO: 1619777 - DNA, 15 bp, Homo sapiens
tttcatatcaaggct

SEQ ID NO: 1619778 - DNA, 15 bp, Homo sapiens
ttcatatcaaggctc

SEQ ID NO: 1619779 - DNA, 15 bp, Homo sapiens
tcatatcaaggctca

SEQ ID NO: 1619780 - DNA, 15 bp, Homo sapiens
catatcaaggctcaa

SEQ ID NO: 1619781 - DNA, 15 bp, Homo sapiens
atatcaaggctcaaa

SEQ ID NO: 1619782 - DNA, 15 bp, Homo sapiens
tatcaaggctcaaaa

SEQ ID NO: 1619783 - DNA, 15 bp, Homo sapiens
atcaaggctcaaaaa

SEQ ID NO: 1619784 - DNA, 15 bp, Homo sapiens
tcaaggctcaaaaaa

SEQ ID NO: 1619785 - DNA, 15 bp, Homo sapiens
caaggctcaaaaaag

SEQ ID NO: 1619786 - DNA, 15 bp, Homo sapiens
aaggctcaaaaaagt

SEQ ID NO: 1619787 - DNA, 15 bp, Homo sapiens
aggctcaaaaaagta

SEQ ID NO: 1619788 - DNA, 15 bp, Homo sapiens
ggctcaaaaaagtat

SEQ ID NO: 1619789 - DNA, 15 bp, Homo sapiens
gctcaaaaaagtatt

SEQ ID NO: 1619790 - DNA, 15 bp, Homo sapiens
ctcaaaaaagtattc

SEQ ID NO: 1619791 - DNA, 15 bp, Homo sapiens
tcaaaaaagtattct

SEQ ID NO: 1619792 - DNA, 15 bp, Homo sapiens
aaaaagtattctgta

SEQ ID NO: 1619793 - DNA, 15 bp, Homo sapiens
aaaagtattctgtag

SEQ ID NO: 1619794 - DNA, 15 bp, Homo sapiens
aaagtattctgtagc

SEQ ID NO: 1619795 - DNA, 15 bp, Homo sapiens
aagtattctgtagct

SEQ ID NO: 1619796 - DNA, 15 bp, Homo sapiens
agtattctgtagctc

SEQ ID NO: 1619797 - DNA, 15 bp, Homo sapiens
gtattctgtagctct

SEQ ID NO: 1619798 - DNA, 15 bp, Homo sapiens
tattctgtagctctt

SEQ ID NO: 1619799 - DNA, 15 bp, Homo sapiens
attctgtagctcttg

SEQ ID NO: 1619800 - DNA, 15 bp, Homo sapiens
ttctgtagctcttgc

SEQ ID NO: 1619801 - DNA, 15 bp, Homo sapiens
tctgtagctcttgcc

SEQ ID NO: 1619802 - DNA, 15 bp, Homo sapiens
ctgtagctcttgcct

SEQ ID NO: 1619803 - DNA, 15 bp, Homo sapiens
tgtagctcttgcctc

SEQ ID NO: 1619804 - DNA, 15 bp, Homo sapiens
gtagctcttgcctca

SEQ ID NO: 1619805 - DNA, 15 bp, Homo sapiens
tagctcttgcctcat

SEQ ID NO: 1619806 - DNA, 15 bp, Homo sapiens
agctcttgcctcata

SEQ ID NO: 1619807 - DNA, 15 bp, Homo sapiens
gctcttgcctcatat

SEQ ID NO: 1619808 - DNA, 15 bp, Homo sapiens
ctcttgcctcatata

SEQ ID NO: 1619809 - DNA, 15 bp, Homo sapiens
tcttgcctcatataa

SEQ ID NO: 1619810 - DNA, 15 bp, Homo sapiens
cttgcctcatataat

SEQ ID NO: 1619811 - DNA, 15 bp, Homo sapiens
ttgcctcatataatt

SEQ ID NO: 1619812 - DNA, 15 bp, Homo sapiens
tgcctcatataattc

SEQ ID NO: 1619813 - DNA, 15 bp, Homo sapiens
gcctcatataattca

SEQ ID NO: 1619814 - DNA, 15 bp, Homo sapiens
cctcatataattcag

SEQ ID NO: 1619815 - DNA, 15 bp, Homo sapiens
ctcatataattcagt

SEQ ID NO: 1619816 - DNA, 15 bp, Homo sapiens
tcatataattcagtt

SEQ ID NO: 1619817 - DNA, 15 bp, Homo sapiens
catataattcagttt

SEQ ID NO: 1619818 - DNA, 15 bp, Homo sapiens
atataattcagtttt

SEQ ID NO: 1619819 - DNA, 15 bp, Homo sapiens
tataattcagttttg

SEQ ID NO: 1619820 - DNA, 15 bp, Homo sapiens
ataattcagttttgc

SEQ ID NO: 1619821 - DNA, 15 bp, Homo sapiens
taattcagttttgca

SEQ ID NO: 1619822 - DNA, 15 bp, Homo sapiens
aattcagttttgcat

SEQ ID NO: 1619823 - DNA, 15 bp, Homo sapiens
attcagttttgcata

SEQ ID NO: 1619824 - DNA, 15 bp, Homo sapiens
ttcagttttgcatat

SEQ ID NO: 1619825 - DNA, 15 bp, Homo sapiens
tcagttttgcatatt

SEQ ID NO: 1619826 - DNA, 15 bp, Homo sapiens
cagttttgcatatta

SEQ ID NO: 1619827 - DNA, 15 bp, Homo sapiens
agttttgcatattaa

SEQ ID NO: 1619828 - DNA, 15 bp, Homo sapiens
ttttgcatattaaat

SEQ ID NO: 1619829 - DNA, 15 bp, Homo sapiens
tttgcatattaaatg

SEQ ID NO: 1619830 - DNA, 15 bp, Homo sapiens
ttgcatattaaatgt

SEQ ID NO: 1619831 - DNA, 15 bp, Homo sapiens
tgcatattaaatgtt

SEQ ID NO: 1619832 - DNA, 15 bp, Homo sapiens
gcatattaaatgttg

SEQ ID NO: 1619833 - DNA, 15 bp, Homo sapiens
catattaaatgttga

SEQ ID NO: 1619834 - DNA, 15 bp, Homo sapiens
atattaaatgttgaa

SEQ ID NO: 1619835 - DNA, 15 bp, Homo sapiens
tattaaatgttgaag

SEQ ID NO: 1619836 - DNA, 15 bp, Homo sapiens
attaaatgttgaagt

SEQ ID NO: 1619837 - DNA, 15 bp, Homo sapiens
ttaaatgttgaagtt

SEQ ID NO: 1619838 - DNA, 15 bp, Homo sapiens
taaatgttgaagtta

SEQ ID NO: 1619839 - DNA, 15 bp, Homo sapiens
aaatgttgaagttat

SEQ ID NO: 1619840 - DNA, 15 bp, Homo sapiens
aatgttgaagttatt

SEQ ID NO: 1619841 - DNA, 15 bp, Homo sapiens
atgttgaagttattt

SEQ ID NO: 1619842 - DNA, 15 bp, Homo sapiens
tgttgaagttattta

SEQ ID NO: 1619843 - DNA, 15 bp, Homo sapiens
gttgaagttatttat

SEQ ID NO: 1619844 - DNA, 15 bp, Homo sapiens
ttgaagttatttatg

SEQ ID NO: 1619845 - DNA, 15 bp, Homo sapiens
tgaagttatttatgt

SEQ ID NO: 1619846 - DNA, 15 bp, Homo sapiens
gaagttatttatgta

SEQ ID NO: 1619847 - DNA, 15 bp, Homo sapiens
aagttatttatgtat

SEQ ID NO: 1619848 - DNA, 15 bp, Homo sapiens
agttatttatgtatc

SEQ ID NO: 1619849 - DNA, 15 bp, Homo sapiens
gttatttatgtatca

SEQ ID NO: 1619850 - DNA, 15 bp, Homo sapiens
ttatttatgtatcat

SEQ ID NO: 1619851 - DNA, 15 bp, Homo sapiens
tatttatgtatcatt

SEQ ID NO: 1619852 - DNA, 15 bp, Homo sapiens
atttatgtatcattt

SEQ ID NO: 1619853 - DNA, 15 bp, Homo sapiens
tttatgtatcattta

SEQ ID NO: 1619854 - DNA, 15 bp, Homo sapiens
ttatgtatcatttaa

SEQ ID NO: 1619855 - DNA, 15 bp, Homo sapiens
tatgtatcatttaat

SEQ ID NO: 1619856 - DNA, 15 bp, Homo sapiens
atgtatcatttaatc

SEQ ID NO: 1619857 - DNA, 15 bp, Homo sapiens
tgtatcatttaatcc

SEQ ID NO: 1619858 - DNA, 15 bp, Homo sapiens
gtatcatttaatcct

SEQ ID NO: 1619859 - DNA, 15 bp, Homo sapiens
tatcatttaatccta

SEQ ID NO: 1619860 - DNA, 15 bp, Homo sapiens
atcatttaatcctat

SEQ ID NO: 1619861 - DNA, 15 bp, Homo sapiens
tcatttaatcctatt

SEQ ID NO: 1619862 - DNA, 15 bp, Homo sapiens
catttaatcctattt

SEQ ID NO: 1619863 - DNA, 15 bp, Homo sapiens
atttaatcctatttt

SEQ ID NO: 1619864 - DNA, 15 bp, Homo sapiens
tttaatcctattttt

SEQ ID NO: 1619865 - DNA, 15 bp, Homo sapiens
ttaatcctatttttt

SEQ ID NO: 1619866 - DNA, 15 bp, Homo sapiens
taatcctattttttc

SEQ ID NO: 1619867 - DNA, 15 bp, Homo sapiens
aatcctattttttca

SEQ ID NO: 1619868 - DNA, 15 bp, Homo sapiens
atcctattttttcac

SEQ ID NO: 1619869 - DNA, 15 bp, Homo sapiens
tcctattttttcact

SEQ ID NO: 1619870 - DNA, 15 bp, Homo sapiens
cctattttttcactc

SEQ ID NO: 1619871 - DNA, 15 bp, Homo sapiens
ctattttttcactct

SEQ ID NO: 1619872 - DNA, 15 bp, Homo sapiens
tattttttcactcta

SEQ ID NO: 1619873 - DNA, 15 bp, Homo sapiens
attttttcactctac

SEQ ID NO: 1619874 - DNA, 15 bp, Homo sapiens
ttttttcactctact

SEQ ID NO: 1619875 - DNA, 15 bp, Homo sapiens
tttttcactctacta

SEQ ID NO: 1619876 - DNA, 15 bp, Homo sapiens
ttttcactctactat

SEQ ID NO: 1619877 - DNA, 15 bp, Homo sapiens
tttcactctactata

SEQ ID NO: 1619878 - DNA, 15 bp, Homo sapiens
ttcactctactatat

SEQ ID NO: 1619879 - DNA, 15 bp, Homo sapiens
tcactctactatatt

SEQ ID NO: 1619880 - DNA, 15 bp, Homo sapiens
cactctactatatta

SEQ ID NO: 1619881 - DNA, 15 bp, Homo sapiens
actctactatattaa

SEQ ID NO: 1619882 - DNA, 15 bp, Homo sapiens
ctctactatattaaa

SEQ ID NO: 1619883 - DNA, 15 bp, Homo sapiens
tctactatattaaat

SEQ ID NO: 1619884 - DNA, 15 bp, Homo sapiens
ctactatattaaata

SEQ ID NO: 1619885 - DNA, 15 bp, Homo sapiens
tactatattaaatat

SEQ ID NO: 1619886 - DNA, 15 bp, Homo sapiens
actatattaaatata

SEQ ID NO: 1619887 - DNA, 15 bp, Homo sapiens
ctatattaaatataa

SEQ ID NO: 1619888 - DNA, 15 bp, Homo sapiens
tatattaaatataat

SEQ ID NO: 1619889 - DNA, 15 bp, Homo sapiens
atattaaatataatc

SEQ ID NO: 1619890 - DNA, 15 bp, Homo sapiens
tattaaatataatct

SEQ ID NO: 1619891 - DNA, 15 bp, Homo sapiens
attaaatataatctc

SEQ ID NO: 1619892 - DNA, 15 bp, Homo sapiens
ttaaatataatctca

SEQ ID NO: 1619893 - DNA, 15 bp, Homo sapiens
taaatataatctcac

SEQ ID NO: 1619894 - DNA, 15 bp, Homo sapiens
aaatataatctcaca

SEQ ID NO: 1619895 - DNA, 15 bp, Homo sapiens
aatataatctcacaa

SEQ ID NO: 1619896 - DNA, 15 bp, Homo sapiens
atataatctcacaag

SEQ ID NO: 1619897 - DNA, 15 bp, Homo sapiens
tataatctcacaagg

SEQ ID NO: 1619898 - DNA, 15 bp, Homo sapiens
ataatctcacaagga

SEQ ID NO: 1619899 - DNA, 15 bp, Homo sapiens
taatctcacaaggaa

SEQ ID NO: 1619900 - DNA, 15 bp, Homo sapiens
aatctcacaaggaaa

SEQ ID NO: 1619901 - DNA, 15 bp, Homo sapiens
atctcacaaggaaat

SEQ ID NO: 1619902 - DNA, 15 bp, Homo sapiens
tctcacaaggaaata

SEQ ID NO: 1619903 - DNA, 15 bp, Homo sapiens
ctcacaaggaaataa

SEQ ID NO: 1619904 - DNA, 15 bp, Homo sapiens
tcacaaggaaataag

SEQ ID NO: 1619905 - DNA, 15 bp, Homo sapiens
cacaaggaaataaga

SEQ ID NO: 1619906 - DNA, 15 bp, Homo sapiens
acaaggaaataagat

SEQ ID NO: 1619907 - DNA, 15 bp, Homo sapiens
caaggaaataagata

SEQ ID NO: 1619908 - DNA, 15 bp, Homo sapiens
aaggaaataagatat

SEQ ID NO: 1619909 - DNA, 15 bp, Homo sapiens
aggaaataagatata

SEQ ID NO: 1619910 - DNA, 15 bp, Homo sapiens
ggaaataagatatat

SEQ ID NO: 1619911 - DNA, 15 bp, Homo sapiens
gaaataagatatatt

SEQ ID NO: 1619912 - DNA, 15 bp, Homo sapiens
aaataagatatattt

SEQ ID NO: 1619913 - DNA, 15 bp, Homo sapiens
aataagatatatttt

SEQ ID NO: 1619914 - DNA, 15 bp, Homo sapiens
ataagatatattttt

SEQ ID NO: 1619915 - DNA, 15 bp, Homo sapiens
taagatatatttttc

SEQ ID NO: 1619916 - DNA, 15 bp, Homo sapiens
aagatatatttttct

SEQ ID NO: 1619917 - DNA, 15 bp, Homo sapiens
agatatatttttctc

SEQ ID NO: 1619918 - DNA, 15 bp, Homo sapiens
gatatatttttctcg

SEQ ID NO: 1619919 - DNA, 15 bp, Homo sapiens
atatatttttctcgg

SEQ ID NO: 1619920 - DNA, 15 bp, Homo sapiens
tatatttttctcggt

SEQ ID NO: 1619921 - DNA, 15 bp, Homo sapiens
atatttttctcggtt

SEQ ID NO: 1619922 - DNA, 15 bp, Homo sapiens
tatttttctcggttc

SEQ ID NO: 1619923 - DNA, 15 bp, Homo sapiens
atttttctcggttca

SEQ ID NO: 1619924 - DNA, 15 bp, Homo sapiens
tttttctcggttcac

SEQ ID NO: 1619925 - DNA, 15 bp, Homo sapiens
ttttctcggttcacg

SEQ ID NO: 1619926 - DNA, 15 bp, Homo sapiens
tttctcggttcacgc

SEQ ID NO: 1619927 - DNA, 15 bp, Homo sapiens
ttctcggttcacgcc

SEQ ID NO: 1619928 - DNA, 15 bp, Homo sapiens
tctcggttcacgcca

SEQ ID NO: 1619929 - DNA, 15 bp, Homo sapiens
ctcggttcacgccac

SEQ ID NO: 1619930 - DNA, 15 bp, Homo sapiens
tcggttcacgccact

SEQ ID NO: 1619931 - DNA, 15 bp, Homo sapiens
cggttcacgccactc

SEQ ID NO: 1619932 - DNA, 15 bp, Homo sapiens
ggttcacgccactct

SEQ ID NO: 1619933 - DNA, 15 bp, Homo sapiens
gttcacgccactctg

SEQ ID NO: 1619934 - DNA, 15 bp, Homo sapiens
ttcacgccactctga

SEQ ID NO: 1619935 - DNA, 15 bp, Homo sapiens
tcacgccactctgaa

SEQ ID NO: 1619936 - DNA, 15 bp, Homo sapiens
cacgccactctgaac

SEQ ID NO: 1619937 - DNA, 15 bp, Homo sapiens
acgccactctgaact

SEQ ID NO: 1619938 - DNA, 15 bp, Homo sapiens
cgccactctgaactt

SEQ ID NO: 1619939 - DNA, 15 bp, Homo sapiens
gccactctgaacttc

SEQ ID NO: 1619940 - DNA, 15 bp, Homo sapiens
ccactctgaacttct

SEQ ID NO: 1619941 - DNA, 15 bp, Homo sapiens
cactctgaacttctc

SEQ ID NO: 1619942 - DNA, 15 bp, Homo sapiens
actctgaacttctca

SEQ ID NO: 1619943 - DNA, 15 bp, Homo sapiens
ctctgaacttctcat

SEQ ID NO: 1619944 - DNA, 15 bp, Homo sapiens
tctgaacttctcatg

SEQ ID NO: 1619945 - DNA, 15 bp, Homo sapiens
ctgaacttctcatgc

SEQ ID NO: 1619946 - DNA, 15 bp, Homo sapiens
tgaacttctcatgcc

SEQ ID NO: 1619947 - DNA, 15 bp, Homo sapiens
gaacttctcatgccc

SEQ ID NO: 1619948 - DNA, 15 bp, Homo sapiens
aacttctcatgccct

SEQ ID NO: 1619949 - DNA, 15 bp, Homo sapiens
acttctcatgccctt

SEQ ID NO: 1619950 - DNA, 15 bp, Homo sapiens
cttctcatgcccttt

SEQ ID NO: 1619951 - DNA, 15 bp, Homo sapiens
ttctcatgcccttta

SEQ ID NO: 1619952 - DNA, 15 bp, Homo sapiens
tctcatgccctttaa

SEQ ID NO: 1619953 - DNA, 15 bp, Homo sapiens
ctcatgccctttaaa

SEQ ID NO: 1619954 - DNA, 15 bp, Homo sapiens
tcatgccctttaaac

SEQ ID NO: 1619955 - DNA, 15 bp, Homo sapiens
catgccctttaaaca

SEQ ID NO: 1619956 - DNA, 15 bp, Homo sapiens
atgccctttaaacaa

SEQ ID NO: 1619957 - DNA, 15 bp, Homo sapiens
tgccctttaaacaag

SEQ ID NO: 1619958 - DNA, 15 bp, Homo sapiens
gccctttaaacaaga

SEQ ID NO: 1619959 - DNA, 15 bp, Homo sapiens
ccctttaaacaagag

SEQ ID NO: 1619960 - DNA, 15 bp, Homo sapiens
cctttaaacaagagc

SEQ ID NO: 1619961 - DNA, 15 bp, Homo sapiens
ctttaaacaagagct

SEQ ID NO: 1619962 - DNA, 15 bp, Homo sapiens
tttaaacaagagcta

SEQ ID NO: 1619963 - DNA, 15 bp, Homo sapiens
ggggtgattacctct

SEQ ID NO: 1619964 - DNA, 15 bp, Homo sapiens
gggtgattacctctg

SEQ ID NO: 1619965 - DNA, 15 bp, Homo sapiens
ggtgattacctctgt

SEQ ID NO: 1619966 - DNA, 15 bp, Homo sapiens
gtgattacctctgta

SEQ ID NO: 1619967 - DNA, 15 bp, Homo sapiens
tgattacctctgtaa

SEQ ID NO: 1619968 - DNA, 15 bp, Homo sapiens
gattacctctgtaat

SEQ ID NO: 1619969 - DNA, 15 bp, Homo sapiens
attacctctgtaatc

SEQ ID NO: 1619970 - DNA, 15 bp, Homo sapiens
ttacctctgtaatcg

SEQ ID NO: 1619971 - DNA, 15 bp, Homo sapiens
tacctctgtaatcgt

SEQ ID NO: 1619972 - DNA, 15 bp, Homo sapiens
acctctgtaatcgtt

SEQ ID NO: 1619973 - DNA, 15 bp, Homo sapiens
cctctgtaatcgtta

SEQ ID NO: 1619974 - DNA, 15 bp, Homo sapiens
ctctgtaatcgttag

SEQ ID NO: 1619975 - DNA, 15 bp, Homo sapiens
tctgtaatcgttaga

SEQ ID NO: 1619976 - DNA, 15 bp, Homo sapiens
ctgtaatcgttagac

SEQ ID NO: 1619977 - DNA, 15 bp, Homo sapiens
tgtaatcgttagact

SEQ ID NO: 1619978 - DNA, 15 bp, Homo sapiens
gtaatcgttagacta

SEQ ID NO: 1619979 - DNA, 15 bp, Homo sapiens
taatcgttagactaa

SEQ ID NO: 1619980 - DNA, 15 bp, Homo sapiens
aatcgttagactaac

SEQ ID NO: 1619981 - DNA, 15 bp, Homo sapiens
atcgttagactaaca

SEQ ID NO: 1619982 - DNA, 15 bp, Homo sapiens
tcgttagactaacaa

SEQ ID NO: 1619983 - DNA, 15 bp, Homo sapiens
cgttagactaacaag

SEQ ID NO: 1619984 - DNA, 15 bp, Homo sapiens
gttagactaacaaga

SEQ ID NO: 1619985 - DNA, 15 bp, Homo sapiens
ttagactaacaagaa

SEQ ID NO: 1619986 - DNA, 15 bp, Homo sapiens
tagactaacaagaaa

SEQ ID NO: 1619987 - DNA, 15 bp, Homo sapiens
agactaacaagaaaa

SEQ ID NO: 1619988 - DNA, 15 bp, Homo sapiens
gactaacaagaaaat

SEQ ID NO: 1619989 - DNA, 15 bp, Homo sapiens
actaacaagaaaatt

SEQ ID NO: 1619990 - DNA, 15 bp, Homo sapiens
ctaacaagaaaattg

SEQ ID NO: 1619991 - DNA, 15 bp, Homo sapiens
taacaagaaaattgt

SEQ ID NO: 1619992 - DNA, 15 bp, Homo sapiens
aacaagaaaattgtg

SEQ ID NO: 1619993 - DNA, 15 bp, Homo sapiens
acaagaaaattgtgt

SEQ ID NO: 1619994 - DNA, 15 bp, Homo sapiens
caagaaaattgtgtg

SEQ ID NO: 1619995 - DNA, 15 bp, Homo sapiens
aagaaaattgtgtgt

SEQ ID NO: 1619996 - DNA, 15 bp, Homo sapiens
agaaaattgtgtgtg

SEQ ID NO: 1619997 - DNA, 15 bp, Homo sapiens
gaaaattgtgtgtga

SEQ ID NO: 1619998 - DNA, 15 bp, Homo sapiens
aaaattgtgtgtgat

SEQ ID NO: 1619999 - DNA, 15 bp, Homo sapiens
aaattgtgtgtgata

SEQ ID NO: 1620000 - DNA, 15 bp, Homo sapiens
aattgtgtgtgatag

SEQ ID NO: 1620001 - DNA, 15 bp, Homo sapiens
attgtgtgtgataga

SEQ ID NO: 1620002 - DNA, 15 bp, Homo sapiens
ttgtgtgtgatagag

SEQ ID NO: 1620003 - DNA, 15 bp, Homo sapiens
tgtgtgtgatagagg

SEQ ID NO: 1620004 - DNA, 15 bp, Homo sapiens
gtgtgtgatagaggc

SEQ ID NO: 1620005 - DNA, 15 bp, Homo sapiens
tgtgtgatagaggca

SEQ ID NO: 1620006 - DNA, 15 bp, Homo sapiens
gtgtgatagaggcac

SEQ ID NO: 1620007 - DNA, 15 bp, Homo sapiens
tgtgatagaggcaca

SEQ ID NO: 1620008 - DNA, 15 bp, Homo sapiens
gtgatagaggcacaa

SEQ ID NO: 1620009 - DNA, 15 bp, Homo sapiens
tgatagaggcacaaa

SEQ ID NO: 1620010 - DNA, 15 bp, Homo sapiens
gatagaggcacaaaa

SEQ ID NO: 1620011 - DNA, 15 bp, Homo sapiens
atagaggcacaaaat

SEQ ID NO: 1620012 - DNA, 15 bp, Homo sapiens
tagaggcacaaaata

SEQ ID NO: 1620013 - DNA, 15 bp, Homo sapiens
agaggcacaaaatag

SEQ ID NO: 1620014 - DNA, 15 bp, Homo sapiens
gaggcacaaaataga

SEQ ID NO: 1620015 - DNA, 15 bp, Homo sapiens
aggcacaaaatagaa

SEQ ID NO: 1620016 - DNA, 15 bp, Homo sapiens
ggcacaaaatagaaa

SEQ ID NO: 1620017 - DNA, 15 bp, Homo sapiens
gcacaaaatagaaaa

SEQ ID NO: 1620018 - DNA, 15 bp, Homo sapiens
cacaaaatagaaaat

SEQ ID NO: 1620019 - DNA, 15 bp, Homo sapiens
acaaaatagaaaatg

SEQ ID NO: 1620020 - DNA, 15 bp, Homo sapiens
caaaatagaaaatga

SEQ ID NO: 1620021 - DNA, 15 bp, Homo sapiens
aaaatagaaaatgat

SEQ ID NO: 1620022 - DNA, 15 bp, Homo sapiens
aaatagaaaatgatt

SEQ ID NO: 1620023 - DNA, 15 bp, Homo sapiens
aatagaaaatgattc

SEQ ID NO: 1620024 - DNA, 15 bp, Homo sapiens
atagaaaatgattct

SEQ ID NO: 1620025 - DNA, 15 bp, Homo sapiens
tagaaaatgattctt

SEQ ID NO: 1620026 - DNA, 15 bp, Homo sapiens
agaaaatgattcttt

SEQ ID NO: 1620027 - DNA, 15 bp, Homo sapiens
gaaaatgattctttc

SEQ ID NO: 1620028 - DNA, 15 bp, Homo sapiens
aaaatgattctttct

SEQ ID NO: 1620029 - DNA, 15 bp, Homo sapiens
aaatgattctttctg

SEQ ID NO: 1620030 - DNA, 15 bp, Homo sapiens
aatgattctttctgt

SEQ ID NO: 1620031 - DNA, 15 bp, Homo sapiens
atgattctttctgtt

SEQ ID NO: 1620032 - DNA, 15 bp, Homo sapiens
tgattctttctgttt

SEQ ID NO: 1620033 - DNA, 15 bp, Homo sapiens
gattctttctgtttg

SEQ ID NO: 1620034 - DNA, 15 bp, Homo sapiens
attctttctgtttga

SEQ ID NO: 1620035 - DNA, 15 bp, Homo sapiens
ttctttctgtttgaa

SEQ ID NO: 1620036 - DNA, 15 bp, Homo sapiens
tctttctgtttgaaa

SEQ ID NO: 1620037 - DNA, 15 bp, Homo sapiens
ctttctgtttgaaaa

SEQ ID NO: 1620038 - DNA, 15 bp, Homo sapiens
tttctgtttgaaaag

SEQ ID NO: 1620039 - DNA, 15 bp, Homo sapiens
ttctgtttgaaaagt

SEQ ID NO: 1620040 - DNA, 15 bp, Homo sapiens
tctgtttgaaaagtt

SEQ ID NO: 1620041 - DNA, 15 bp, Homo sapiens
ctgtttgaaaagttg

SEQ ID NO: 1620042 - DNA, 15 bp, Homo sapiens
tgtttgaaaagttga

SEQ ID NO: 1620043 - DNA, 15 bp, Homo sapiens
gtttgaaaagttgag

SEQ ID NO: 1620044 - DNA, 15 bp, Homo sapiens
tttgaaaagttgagg

SEQ ID NO: 1620045 - DNA, 15 bp, Homo sapiens
ttgaaaagttgagga

SEQ ID NO: 1620046 - DNA, 15 bp, Homo sapiens
tgaaaagttgaggaa

SEQ ID NO: 1620047 - DNA, 15 bp, Homo sapiens
gaaaagttgaggaat

SEQ ID NO: 1620048 - DNA, 15 bp, Homo sapiens
aaaagttgaggaatg

SEQ ID NO: 1620049 - DNA, 15 bp, Homo sapiens
aaagttgaggaatgt

SEQ ID NO: 1620050 - DNA, 15 bp, Homo sapiens
aagttgaggaatgtt

SEQ ID NO: 1620051 - DNA, 15 bp, Homo sapiens
agttgaggaatgttt

SEQ ID NO: 1620052 - DNA, 15 bp, Homo sapiens
gttgaggaatgtttt

SEQ ID NO: 1620053 - DNA, 15 bp, Homo sapiens
ttgaggaatgttttt

SEQ ID NO: 1620054 - DNA, 15 bp, Homo sapiens
tgaggaatgtttttt

SEQ ID NO: 1620055 - DNA, 15 bp, Homo sapiens
gaggaatgtttttta

SEQ ID NO: 1620056 - DNA, 15 bp, Homo sapiens
aggaatgttttttac

SEQ ID NO: 1620057 - DNA, 15 bp, Homo sapiens
ggaatgttttttaca

SEQ ID NO: 1620058 - DNA, 15 bp, Homo sapiens
gaatgttttttacag

SEQ ID NO: 1620059 - DNA, 15 bp, Homo sapiens
aatgttttttacagg

SEQ ID NO: 1620060 - DNA, 15 bp, Homo sapiens
atgttttttacagga

SEQ ID NO: 1620061 - DNA, 15 bp, Homo sapiens
tgttttttacaggag

SEQ ID NO: 1620062 - DNA, 15 bp, Homo sapiens
gttttttacaggagg

SEQ ID NO: 1620063 - DNA, 15 bp, Homo sapiens
ttttttacaggaggt

SEQ ID NO: 1620064 - DNA, 15 bp, Homo sapiens
tttttacaggaggta

SEQ ID NO: 1620065 - DNA, 15 bp, Homo sapiens
ttttacaggaggtaa

SEQ ID NO: 1620066 - DNA, 15 bp, Homo sapiens
tttacaggaggtaag

SEQ ID NO: 1620067 - DNA, 15 bp, Homo sapiens
ttacaggaggtaagt

SEQ ID NO: 1620068 - DNA, 15 bp, Homo sapiens
tacaggaggtaagtt

SEQ ID NO: 1620069 - DNA, 15 bp, Homo sapiens
acaggaggtaagttt

SEQ ID NO: 1620070 - DNA, 15 bp, Homo sapiens
caggaggtaagtttg

SEQ ID NO: 1620071 - DNA, 15 bp, Homo sapiens
aggaggtaagtttga

SEQ ID NO: 1620072 - DNA, 15 bp, Homo sapiens
ggaggtaagtttgat

SEQ ID NO: 1620073 - DNA, 15 bp, Homo sapiens
gaggtaagtttgata

SEQ ID NO: 1620074 - DNA, 15 bp, Homo sapiens
aggtaagtttgatac

SEQ ID NO: 1620075 - DNA, 15 bp, Homo sapiens
ggtaagtttgatact

SEQ ID NO: 1620076 - DNA, 15 bp, Homo sapiens
gtaagtttgatactt

SEQ ID NO: 1620077 - DNA, 15 bp, Homo sapiens
taagtttgatactta

SEQ ID NO: 1620078 - DNA, 15 bp, Homo sapiens
aagtttgatacttaa

SEQ ID NO: 1620079 - DNA, 15 bp, Homo sapiens
agtttgatacttaac

SEQ ID NO: 1620080 - DNA, 15 bp, Homo sapiens
gtttgatacttaact

SEQ ID NO: 1620081 - DNA, 15 bp, Homo sapiens
tttgatacttaactt

SEQ ID NO: 1620082 - DNA, 15 bp, Homo sapiens
ttgatacttaacttt

SEQ ID NO: 1620083 - DNA, 15 bp, Homo sapiens
tgatacttaacttta

SEQ ID NO: 1620084 - DNA, 15 bp, Homo sapiens
gatacttaactttaa

SEQ ID NO: 1620085 - DNA, 15 bp, Homo sapiens
atacttaactttaaa

SEQ ID NO: 1620086 - DNA, 15 bp, Homo sapiens
tacttaactttaaag

SEQ ID NO: 1620087 - DNA, 15 bp, Homo sapiens
acttaactttaaagt

SEQ ID NO: 1620088 - DNA, 15 bp, Homo sapiens
cttaactttaaagtt

SEQ ID NO: 1620089 - DNA, 15 bp, Homo sapiens
ttaactttaaagttg

SEQ ID NO: 1620090 - DNA, 15 bp, Homo sapiens
taactttaaagttga

SEQ ID NO: 1620091 - DNA, 15 bp, Homo sapiens
aactttaaagttgaa

SEQ ID NO: 1620092 - DNA, 15 bp, Homo sapiens
actttaaagttgaat

SEQ ID NO: 1620093 - DNA, 15 bp, Homo sapiens
ctttaaagttgaatt

SEQ ID NO: 1620094 - DNA, 15 bp, Homo sapiens
tttaaagttgaattg

SEQ ID NO: 1620095 - DNA, 15 bp, Homo sapiens
ttaaagttgaattga

SEQ ID NO: 1620096 - DNA, 15 bp, Homo sapiens
taaagttgaattgat

SEQ ID NO: 1620097 - DNA, 15 bp, Homo sapiens
aaagttgaattgatt

SEQ ID NO: 1620098 - DNA, 15 bp, Homo sapiens
aagttgaattgattg

SEQ ID NO: 1620099 - DNA, 15 bp, Homo sapiens
agttgaattgattgg

SEQ ID NO: 1620100 - DNA, 15 bp, Homo sapiens
gttgaattgattggt

SEQ ID NO: 1620101 - DNA, 15 bp, Homo sapiens
ttgaattgattggtg

SEQ ID NO: 1620102 - DNA, 15 bp, Homo sapiens
tgaattgattggtgt

SEQ ID NO: 1620103 - DNA, 15 bp, Homo sapiens
gaattgattggtgta

SEQ ID NO: 1620104 - DNA, 15 bp, Homo sapiens
aattgattggtgtac

SEQ ID NO: 1620105 - DNA, 15 bp, Homo sapiens
attgattggtgtacc

SEQ ID NO: 1620106 - DNA, 15 bp, Homo sapiens
ttgattggtgtacct

SEQ ID NO: 1620107 - DNA, 15 bp, Homo sapiens
tgattggtgtacctt

SEQ ID NO: 1620108 - DNA, 15 bp, Homo sapiens
gattggtgtaccttc

SEQ ID NO: 1620109 - DNA, 15 bp, Homo sapiens
attggtgtaccttca

SEQ ID NO: 1620110 - DNA, 15 bp, Homo sapiens
ttggtgtaccttcat

SEQ ID NO: 1620111 - DNA, 15 bp, Homo sapiens
tggtgtaccttcatt

SEQ ID NO: 1620112 - DNA, 15 bp, Homo sapiens
ggtgtaccttcattg

SEQ ID NO: 1620113 - DNA, 15 bp, Homo sapiens
gtgtaccttcattga

SEQ ID NO: 1620114 - DNA, 15 bp, Homo sapiens
tgtaccttcattgaa

SEQ ID NO: 1620115 - DNA, 15 bp, Homo sapiens
gtaccttcattgaaa

SEQ ID NO: 1620116 - DNA, 15 bp, Homo sapiens
taccttcattgaaaa

SEQ ID NO: 1620117 - DNA, 15 bp, Homo sapiens
accttcattgaaaat

SEQ ID NO: 1620118 - DNA, 15 bp, Homo sapiens
ccttcattgaaaatt

SEQ ID NO: 1620119 - DNA, 15 bp, Homo sapiens
cttcattgaaaattt

SEQ ID NO: 1620120 - DNA, 15 bp, Homo sapiens
ttcattgaaaatttt

SEQ ID NO: 1620121 - DNA, 15 bp, Homo sapiens
tcattgaaaattttc

SEQ ID NO: 1620122 - DNA, 15 bp, Homo sapiens
cattgaaaattttct

SEQ ID NO: 1620123 - DNA, 15 bp, Homo sapiens
attgaaaattttctc

SEQ ID NO: 1620124 - DNA, 15 bp, Homo sapiens
ttgaaaattttctcc

SEQ ID NO: 1620125 - DNA, 15 bp, Homo sapiens
tgaaaattttctcct

SEQ ID NO: 1620126 - DNA, 15 bp, Homo sapiens
gaaaattttctcctg

SEQ ID NO: 1620127 - DNA, 15 bp, Homo sapiens
aaaattttctcctga

SEQ ID NO: 1620128 - DNA, 15 bp, Homo sapiens
aaattttctcctgaa

SEQ ID NO: 1620129 - DNA, 15 bp, Homo sapiens
aattttctcctgaat

SEQ ID NO: 1620130 - DNA, 15 bp, Homo sapiens
attttctcctgaatg

SEQ ID NO: 1620131 - DNA, 15 bp, Homo sapiens
ttttctcctgaatgc

SEQ ID NO: 1620132 - DNA, 15 bp, Homo sapiens
tttctcctgaatgcc

SEQ ID NO: 1620133 - DNA, 15 bp, Homo sapiens
ttctcctgaatgccc

SEQ ID NO: 1620134 - DNA, 15 bp, Homo sapiens
tctcctgaatgccca

SEQ ID NO: 1620135 - DNA, 15 bp, Homo sapiens
ctcctgaatgcccag

SEQ ID NO: 1620136 - DNA, 15 bp, Homo sapiens
tcctgaatgcccagc

SEQ ID NO: 1620137 - DNA, 15 bp, Homo sapiens
cctgaatgcccagca

SEQ ID NO: 1620138 - DNA, 15 bp, Homo sapiens
ctgaatgcccagcat

SEQ ID NO: 1620139 - DNA, 15 bp, Homo sapiens
tgaatgcccagcatt

SEQ ID NO: 1620140 - DNA, 15 bp, Homo sapiens
gaatgcccagcatta

SEQ ID NO: 1620141 - DNA, 15 bp, Homo sapiens
aatgcccagcattaa

SEQ ID NO: 1620142 - DNA, 15 bp, Homo sapiens
atgcccagcattaaa

SEQ ID NO: 1620143 - DNA, 15 bp, Homo sapiens
tgcccagcattaaat

SEQ ID NO: 1620144 - DNA, 15 bp, Homo sapiens
gcccagcattaaata

SEQ ID NO: 1620145 - DNA, 15 bp, Homo sapiens
cccagcattaaataa

SEQ ID NO: 1620146 - DNA, 15 bp, Homo sapiens
ccagcattaaataaa

SEQ ID NO: 1620147 - DNA, 15 bp, Homo sapiens
cagcattaaataaat

SEQ ID NO: 1620148 - DNA, 15 bp, Homo sapiens
agcattaaataaata

SEQ ID NO: 1620149 - DNA, 15 bp, Homo sapiens
gcattaaataaataa

SEQ ID NO: 1620150 - DNA, 15 bp, Homo sapiens
cattaaataaataag

SEQ ID NO: 1620151 - DNA, 15 bp, Homo sapiens
attaaataaataagc

SEQ ID NO: 1620152 - DNA, 15 bp, Homo sapiens
ttaaataaataagca

SEQ ID NO: 1620153 - DNA, 15 bp, Homo sapiens
taaataaataagcaa

SEQ ID NO: 1620154 - DNA, 15 bp, Homo sapiens
aaataaataagcaaa

SEQ ID NO: 1620155 - DNA, 15 bp, Homo sapiens
aataaataagcaaac

SEQ ID NO: 1620156 - DNA, 15 bp, Homo sapiens
ataaataagcaaaca

SEQ ID NO: 1620157 - DNA, 15 bp, Homo sapiens
aataagcaaacatat

SEQ ID NO: 1620158 - DNA, 15 bp, Homo sapiens
ataagcaaacatata

SEQ ID NO: 1620159 - DNA, 15 bp, Homo sapiens
taagcaaacatataa

SEQ ID NO: 1620160 - DNA, 15 bp, Homo sapiens
aagcaaacatataag

SEQ ID NO: 1620161 - DNA, 15 bp, Homo sapiens
agcaaacatataagt

SEQ ID NO: 1620162 - DNA, 15 bp, Homo sapiens
gcaaacatataagtt

SEQ ID NO: 1620163 - DNA, 15 bp, Homo sapiens
caaacatataagttg

SEQ ID NO: 1620164 - DNA, 15 bp, Homo sapiens
aaacatataagttgc

SEQ ID NO: 1620165 - DNA, 15 bp, Homo sapiens
aacatataagttgct

SEQ ID NO: 1620166 - DNA, 15 bp, Homo sapiens
acatataagttgctt

SEQ ID NO: 1620167 - DNA, 15 bp, Homo sapiens
catataagttgcttg

SEQ ID NO: 1620168 - DNA, 15 bp, Homo sapiens
atataagttgcttgt

SEQ ID NO: 1620169 - DNA, 15 bp, Homo sapiens
tataagttgcttgtt

SEQ ID NO: 1620170 - DNA, 15 bp, Homo sapiens
ataagttgcttgttg

SEQ ID NO: 1620171 - DNA, 15 bp, Homo sapiens
taagttgcttgttga

SEQ ID NO: 1620172 - DNA, 15 bp, Homo sapiens
aagttgcttgttgac

SEQ ID NO: 1620173 - DNA, 15 bp, Homo sapiens
agttgcttgttgacc

SEQ ID NO: 1620174 - DNA, 15 bp, Homo sapiens
gttgcttgttgacct

SEQ ID NO: 1620175 - DNA, 15 bp, Homo sapiens
ttgcttgttgaccta

SEQ ID NO: 1620176 - DNA, 15 bp, Homo sapiens
tgcttgttgacctag

SEQ ID NO: 1620177 - DNA, 15 bp, Homo sapiens
gcttgttgacctagc

SEQ ID NO: 1620178 - DNA, 15 bp, Homo sapiens
cttgttgacctagcc

SEQ ID NO: 1620179 - DNA, 15 bp, Homo sapiens
ttgttgacctagcct

SEQ ID NO: 1620180 - DNA, 15 bp, Homo sapiens
tgttgacctagcctc

SEQ ID NO: 1620181 - DNA, 15 bp, Homo sapiens
gttgacctagcctca

SEQ ID NO: 1620182 - DNA, 15 bp, Homo sapiens
ttgacctagcctcat

SEQ ID NO: 1620183 - DNA, 15 bp, Homo sapiens
tgacctagcctcata

SEQ ID NO: 1620184 - DNA, 15 bp, Homo sapiens
gacctagcctcatat

SEQ ID NO: 1620185 - DNA, 15 bp, Homo sapiens
acctagcctcatata

SEQ ID NO: 1620186 - DNA, 15 bp, Homo sapiens
cctagcctcatatat

SEQ ID NO: 1620187 - DNA, 15 bp, Homo sapiens
ctagcctcatatata

SEQ ID NO: 1620188 - DNA, 15 bp, Homo sapiens
tagcctcatatataa

SEQ ID NO: 1620189 - DNA, 15 bp, Homo sapiens
agcctcatatataat

SEQ ID NO: 1620190 - DNA, 15 bp, Homo sapiens
gcctcatatataatg

SEQ ID NO: 1620191 - DNA, 15 bp, Homo sapiens
cctcatatataatgc

SEQ ID NO: 1620192 - DNA, 15 bp, Homo sapiens
ctcatatataatgca

SEQ ID NO: 1620193 - DNA, 15 bp, Homo sapiens
tcatatataatgcaa

SEQ ID NO: 1620194 - DNA, 15 bp, Homo sapiens
catatataatgcaag

SEQ ID NO: 1620195 - DNA, 15 bp, Homo sapiens
atatataatgcaaga

SEQ ID NO: 1620196 - DNA, 15 bp, Homo sapiens
tatataatgcaagaa

SEQ ID NO: 1620197 - DNA, 15 bp, Homo sapiens
atataatgcaagaag

SEQ ID NO: 1620198 - DNA, 15 bp, Homo sapiens
tataatgcaagaagt

SEQ ID NO: 1620199 - DNA, 15 bp, Homo sapiens
ataatgcaagaagta

SEQ ID NO: 1620200 - DNA, 15 bp, Homo sapiens
taatgcaagaagtaa

SEQ ID NO: 1620201 - DNA, 15 bp, Homo sapiens
aatgcaagaagtaaa

SEQ ID NO: 1620202 - DNA, 15 bp, Homo sapiens
atgcaagaagtaaac

SEQ ID NO: 1620203 - DNA, 15 bp, Homo sapiens
tgcaagaagtaaaca

SEQ ID NO: 1620204 - DNA, 15 bp, Homo sapiens
gcaagaagtaaacat

SEQ ID NO: 1620205 - DNA, 15 bp, Homo sapiens
caagaagtaaacata

SEQ ID NO: 1620206 - DNA, 15 bp, Homo sapiens
aagaagtaaacataa

SEQ ID NO: 1620207 - DNA, 15 bp, Homo sapiens
agaagtaaacataaa

SEQ ID NO: 1620208 - DNA, 15 bp, Homo sapiens
gaagtaaacataaac

SEQ ID NO: 1620209 - DNA, 15 bp, Homo sapiens
aagtaaacataaaca

SEQ ID NO: 1620210 - DNA, 15 bp, Homo sapiens
agtaaacataaacat

SEQ ID NO: 1620211 - DNA, 15 bp, Homo sapiens
gtaaacataaacata

SEQ ID NO: 1620212 - DNA, 15 bp, Homo sapiens
taaacataaacatat

SEQ ID NO: 1620213 - DNA, 15 bp, Homo sapiens
aaacataaacatata

SEQ ID NO: 1620214 - DNA, 15 bp, Homo sapiens
aacataaacatataa

SEQ ID NO: 1620215 - DNA, 15 bp, Homo sapiens
acataaacatataaa

SEQ ID NO: 1620216 - DNA, 15 bp, Homo sapiens
cataaacatataaat

SEQ ID NO: 1620217 - DNA, 15 bp, Homo sapiens
ataaacatataaatg

SEQ ID NO: 1620218 - DNA, 15 bp, Homo sapiens
taaacatataaatgt

SEQ ID NO: 1620219 - DNA, 15 bp, Homo sapiens
aaacatataaatgtt

SEQ ID NO: 1620220 - DNA, 15 bp, Homo sapiens
aacatataaatgttg

SEQ ID NO: 1620221 - DNA, 15 bp, Homo sapiens
acatataaatgttgt

SEQ ID NO: 1620222 - DNA, 15 bp, Homo sapiens
catataaatgttgta

SEQ ID NO: 1620223 - DNA, 15 bp, Homo sapiens
atataaatgttgtaa

SEQ ID NO: 1620224 - DNA, 15 bp, Homo sapiens
tataaatgttgtaaa

SEQ ID NO: 1620225 - DNA, 15 bp, Homo sapiens
ataaatgttgtaaat

SEQ ID NO: 1620226 - DNA, 15 bp, Homo sapiens
taaatgttgtaaatg

SEQ ID NO: 1620227 - DNA, 15 bp, Homo sapiens
aaatgttgtaaatga

SEQ ID NO: 1620228 - DNA, 15 bp, Homo sapiens
aatgttgtaaatgag

SEQ ID NO: 1620229 - DNA, 15 bp, Homo sapiens
atgttgtaaatgagc

SEQ ID NO: 1620230 - DNA, 15 bp, Homo sapiens
tgttgtaaatgagca

SEQ ID NO: 1620231 - DNA, 15 bp, Homo sapiens
gttgtaaatgagcat

SEQ ID NO: 1620232 - DNA, 15 bp, Homo sapiens
ttgtaaatgagcatc

SEQ ID NO: 1620233 - DNA, 15 bp, Homo sapiens
tgtaaatgagcatca

SEQ ID NO: 1620234 - DNA, 15 bp, Homo sapiens
gtaaatgagcatcag

SEQ ID NO: 1620235 - DNA, 15 bp, Homo sapiens
taaatgagcatcaga

SEQ ID NO: 1620236 - DNA, 15 bp, Homo sapiens
aaatgagcatcagaa

SEQ ID NO: 1620237 - DNA, 15 bp, Homo sapiens
aatgagcatcagaat

SEQ ID NO: 1620238 - DNA, 15 bp, Homo sapiens
atgagcatcagaatc

SEQ ID NO: 1620239 - DNA, 15 bp, Homo sapiens
tgagcatcagaatca

SEQ ID NO: 1620240 - DNA, 15 bp, Homo sapiens
gagcatcagaatcat

SEQ ID NO: 1620241 - DNA, 15 bp, Homo sapiens
agcatcagaatcatc

SEQ ID NO: 1620242 - DNA, 15 bp, Homo sapiens
gcatcagaatcatct

SEQ ID NO: 1620243 - DNA, 15 bp, Homo sapiens
catcagaatcatcta

SEQ ID NO: 1620244 - DNA, 15 bp, Homo sapiens
atcagaatcatctaa

SEQ ID NO: 1620245 - DNA, 15 bp, Homo sapiens
tcagaatcatctaat

SEQ ID NO: 1620246 - DNA, 15 bp, Homo sapiens
cagaatcatctaata

SEQ ID NO: 1620247 - DNA, 15 bp, Homo sapiens
agaatcatctaatat

SEQ ID NO: 1620248 - DNA, 15 bp, Homo sapiens
gaatcatctaatata

SEQ ID NO: 1620249 - DNA, 15 bp, Homo sapiens
aatcatctaatatat

SEQ ID NO: 1620250 - DNA, 15 bp, Homo sapiens
atcatctaatatata

SEQ ID NO: 1620251 - DNA, 15 bp, Homo sapiens
tcatctaatatatag

SEQ ID NO: 1620252 - DNA, 15 bp, Homo sapiens
catctaatatataga

SEQ ID NO: 1620253 - DNA, 15 bp, Homo sapiens
atctaatatatagaa

SEQ ID NO: 1620254 - DNA, 15 bp, Homo sapiens
tctaatatatagaat

SEQ ID NO: 1620255 - DNA, 15 bp, Homo sapiens
ctaatatatagaatc

SEQ ID NO: 1620256 - DNA, 15 bp, Homo sapiens
taatatatagaatct

SEQ ID NO: 1620257 - DNA, 15 bp, Homo sapiens
aatatatagaatctt

SEQ ID NO: 1620258 - DNA, 15 bp, Homo sapiens
atatatagaatcttc

SEQ ID NO: 1620259 - DNA, 15 bp, Homo sapiens
tatatagaatcttct

SEQ ID NO: 1620260 - DNA, 15 bp, Homo sapiens
atatagaatcttctg

SEQ ID NO: 1620261 - DNA, 15 bp, Homo sapiens
tatagaatcttctgg

SEQ ID NO: 1620262 - DNA, 15 bp, Homo sapiens
atagaatcttctggg

SEQ ID NO: 1620263 - DNA, 15 bp, Homo sapiens
tagaatcttctggga

SEQ ID NO: 1620264 - DNA, 15 bp, Homo sapiens
agaatcttctgggag

SEQ ID NO: 1620265 - DNA, 15 bp, Homo sapiens
gaatcttctgggaga

SEQ ID NO: 1620266 - DNA, 15 bp, Homo sapiens
aatcttctgggagag

SEQ ID NO: 1620267 - DNA, 15 bp, Homo sapiens
atcttctgggagagc

SEQ ID NO: 1620268 - DNA, 15 bp, Homo sapiens
tcttctgggagagct

SEQ ID NO: 1620269 - DNA, 15 bp, Homo sapiens
cttctgggagagcta

SEQ ID NO: 1620270 - DNA, 15 bp, Homo sapiens
ttctgggagagctac

SEQ ID NO: 1620271 - DNA, 15 bp, Homo sapiens
tctgggagagctact

SEQ ID NO: 1620272 - DNA, 15 bp, Homo sapiens
ctgggagagctactt

SEQ ID NO: 1620273 - DNA, 15 bp, Homo sapiens
tgggagagctacttt

SEQ ID NO: 1620274 - DNA, 15 bp, Homo sapiens
gggagagctactttt

SEQ ID NO: 1620275 - DNA, 15 bp, Homo sapiens
ggagagctacttttt

SEQ ID NO: 1620276 - DNA, 15 bp, Homo sapiens
gagagctacttttta

SEQ ID NO: 1620277 - DNA, 15 bp, Homo sapiens
agagctactttttaa

SEQ ID NO: 1620278 - DNA, 15 bp, Homo sapiens
gagctactttttaaa

SEQ ID NO: 1620279 - DNA, 15 bp, Homo sapiens
agctactttttaaaa

SEQ ID NO: 1620280 - DNA, 15 bp, Homo sapiens
gctactttttaaaac

SEQ ID NO: 1620281 - DNA, 15 bp, Homo sapiens
ctactttttaaaact

SEQ ID NO: 1620282 - DNA, 15 bp, Homo sapiens
tactttttaaaacta

SEQ ID NO: 1620283 - DNA, 15 bp, Homo sapiens
actttttaaaactat

SEQ ID NO: 1620284 - DNA, 15 bp, Homo sapiens
ctttttaaaactata

SEQ ID NO: 1620285 - DNA, 15 bp, Homo sapiens
tttttaaaactataa

SEQ ID NO: 1620286 - DNA, 15 bp, Homo sapiens
ttttaaaactataaa

SEQ ID NO: 1620287 - DNA, 15 bp, Homo sapiens
tttaaaactataaat

SEQ ID NO: 1620288 - DNA, 15 bp, Homo sapiens
ttaaaactataaatt

SEQ ID NO: 1620289 - DNA, 15 bp, Homo sapiens
taaaactataaatta

SEQ ID NO: 1620290 - DNA, 15 bp, Homo sapiens
aaaactataaattaa

SEQ ID NO: 1620291 - DNA, 15 bp, Homo sapiens
aaactataaattaat

SEQ ID NO: 1620292 - DNA, 15 bp, Homo sapiens
aactataaattaatg

SEQ ID NO: 1620293 - DNA, 15 bp, Homo sapiens
actataaattaatga

SEQ ID NO: 1620294 - DNA, 15 bp, Homo sapiens
ctataaattaatgat

SEQ ID NO: 1620295 - DNA, 15 bp, Homo sapiens
tataaattaatgatg

SEQ ID NO: 1620296 - DNA, 15 bp, Homo sapiens
ataaattaatgatga

SEQ ID NO: 1620297 - DNA, 15 bp, Homo sapiens
taaattaatgatgat

SEQ ID NO: 1620298 - DNA, 15 bp, Homo sapiens
aaattaatgatgata

SEQ ID NO: 1620299 - DNA, 15 bp, Homo sapiens
aattaatgatgatag

SEQ ID NO: 1620300 - DNA, 15 bp, Homo sapiens
attaatgatgatagc

SEQ ID NO: 1620301 - DNA, 15 bp, Homo sapiens
ttaatgatgatagct

SEQ ID NO: 1620302 - DNA, 15 bp, Homo sapiens
taatgatgatagcta

SEQ ID NO: 1620303 - DNA, 15 bp, Homo sapiens
aatgatgatagctaa

SEQ ID NO: 1620304 - DNA, 15 bp, Homo sapiens
atgatgatagctaat

SEQ ID NO: 1620305 - DNA, 15 bp, Homo sapiens
tgatgatagctaata

SEQ ID NO: 1620306 - DNA, 15 bp, Homo sapiens
gatgatagctaataa

SEQ ID NO: 1620307 - DNA, 15 bp, Homo sapiens
atgatagctaataat

SEQ ID NO: 1620308 - DNA, 15 bp, Homo sapiens
tgatagctaataatt

SEQ ID NO: 1620309 - DNA, 15 bp, Homo sapiens
gatagctaataatta

SEQ ID NO: 1620310 - DNA, 15 bp, Homo sapiens
atagctaataattac

SEQ ID NO: 1620311 - DNA, 15 bp, Homo sapiens
tagctaataattact

SEQ ID NO: 1620312 - DNA, 15 bp, Homo sapiens
agctaataattactt

SEQ ID NO: 1620313 - DNA, 15 bp, Homo sapiens
gctaataattactta

SEQ ID NO: 1620314 - DNA, 15 bp, Homo sapiens
ctaataattacttaa

SEQ ID NO: 1620315 - DNA, 15 bp, Homo sapiens
taataattacttaat

SEQ ID NO: 1620316 - DNA, 15 bp, Homo sapiens
aataattacttaatt

SEQ ID NO: 1620317 - DNA, 15 bp, Homo sapiens
ataattacttaattc

SEQ ID NO: 1620318 - DNA, 15 bp, Homo sapiens
taattacttaattct

SEQ ID NO: 1620319 - DNA, 15 bp, Homo sapiens
aattacttaattctt

SEQ ID NO: 1620320 - DNA, 15 bp, Homo sapiens
attacttaattcttt

SEQ ID NO: 1620321 - DNA, 15 bp, Homo sapiens
ttacttaattctttc

SEQ ID NO: 1620322 - DNA, 15 bp, Homo sapiens
tacttaattctttca

SEQ ID NO: 1620323 - DNA, 15 bp, Homo sapiens
acttaattctttcat

SEQ ID NO: 1620324 - DNA, 15 bp, Homo sapiens
cttaattctttcata

SEQ ID NO: 1620325 - DNA, 15 bp, Homo sapiens
ttaattctttcatat

SEQ ID NO: 1620326 - DNA, 15 bp, Homo sapiens
taattctttcatatg

SEQ ID NO: 1620327 - DNA, 15 bp, Homo sapiens
aattctttcatatgc

SEQ ID NO: 1620328 - DNA, 15 bp, Homo sapiens
attctttcatatgcc

SEQ ID NO: 1620329 - DNA, 15 bp, Homo sapiens
ttctttcatatgcct

SEQ ID NO: 1620330 - DNA, 15 bp, Homo sapiens
tctttcatatgcctc

SEQ ID NO: 1620331 - DNA, 15 bp, Homo sapiens
ctttcatatgcctct

SEQ ID NO: 1620332 - DNA, 15 bp, Homo sapiens
tttcatatgcctctt

SEQ ID NO: 1620333 - DNA, 15 bp, Homo sapiens
ttcatatgcctctta

SEQ ID NO: 1620334 - DNA, 15 bp, Homo sapiens
tcatatgcctcttac

SEQ ID NO: 1620335 - DNA, 15 bp, Homo sapiens
catatgcctcttact

SEQ ID NO: 1620336 - DNA, 15 bp, Homo sapiens
atatgcctcttactg

SEQ ID NO: 1620337 - DNA, 15 bp, Homo sapiens
tatgcctcttactgt

SEQ ID NO: 1620338 - DNA, 15 bp, Homo sapiens
atgcctcttactgtc

SEQ ID NO: 1620339 - DNA, 15 bp, Homo sapiens
tgcctcttactgtcc

SEQ ID NO: 1620340 - DNA, 15 bp, Homo sapiens
gcctcttactgtcca

SEQ ID NO: 1620341 - DNA, 15 bp, Homo sapiens
cctcttactgtccaa

SEQ ID NO: 1620342 - DNA, 15 bp, Homo sapiens
ctcttactgtccaaa

SEQ ID NO: 1620343 - DNA, 15 bp, Homo sapiens
tcttactgtccaaaa

SEQ ID NO: 1620344 - DNA, 15 bp, Homo sapiens
cttactgtccaaaaa

SEQ ID NO: 1620345 - DNA, 15 bp, Homo sapiens
ttactgtccaaaaag

SEQ ID NO: 1620346 - DNA, 15 bp, Homo sapiens
tactgtccaaaaagt

SEQ ID NO: 1620347 - DNA, 15 bp, Homo sapiens
actgtccaaaaagtg

SEQ ID NO: 1620348 - DNA, 15 bp, Homo sapiens
ctgtccaaaaagtgt

SEQ ID NO: 1620349 - DNA, 15 bp, Homo sapiens
tgtccaaaaagtgtc

SEQ ID NO: 1620350 - DNA, 15 bp, Homo sapiens
gtccaaaaagtgtca

SEQ ID NO: 1620351 - DNA, 15 bp, Homo sapiens
tccaaaaagtgtcat

SEQ ID NO: 1620352 - DNA, 15 bp, Homo sapiens
ccaaaaagtgtcata

SEQ ID NO: 1620353 - DNA, 15 bp, Homo sapiens
caaaaagtgtcatat

SEQ ID NO: 1620354 - DNA, 15 bp, Homo sapiens
aaaaagtgtcatata

SEQ ID NO: 1620355 - DNA, 15 bp, Homo sapiens
aaaagtgtcatatac

SEQ ID NO: 1620356 - DNA, 15 bp, Homo sapiens
aaagtgtcatataca

SEQ ID NO: 1620357 - DNA, 15 bp, Homo sapiens
aagtgtcatatacat

SEQ ID NO: 1620358 - DNA, 15 bp, Homo sapiens
agtgtcatatacatt

SEQ ID NO: 1620359 - DNA, 15 bp, Homo sapiens
gtgtcatatacatta

SEQ ID NO: 1620360 - DNA, 15 bp, Homo sapiens
tgtcatatacattaa

SEQ ID NO: 1620361 - DNA, 15 bp, Homo sapiens
gtcatatacattaat

SEQ ID NO: 1620362 - DNA, 15 bp, Homo sapiens
tcatatacattaatc

SEQ ID NO: 1620363 - DNA, 15 bp, Homo sapiens
catatacattaatca

SEQ ID NO: 1620364 - DNA, 15 bp, Homo sapiens
atatacattaatcac

SEQ ID NO: 1620365 - DNA, 15 bp, Homo sapiens
tatacattaatcact

SEQ ID NO: 1620366 - DNA, 15 bp, Homo sapiens
atacattaatcactt

SEQ ID NO: 1620367 - DNA, 15 bp, Homo sapiens
tacattaatcacttg

SEQ ID NO: 1620368 - DNA, 15 bp, Homo sapiens
acattaatcacttga

SEQ ID NO: 1620369 - DNA, 15 bp, Homo sapiens
cattaatcacttgat

SEQ ID NO: 1620370 - DNA, 15 bp, Homo sapiens
attaatcacttgatc

SEQ ID NO: 1620371 - DNA, 15 bp, Homo sapiens
ttaatcacttgatca

SEQ ID NO: 1620372 - DNA, 15 bp, Homo sapiens
taatcacttgatcaa

SEQ ID NO: 1620373 - DNA, 15 bp, Homo sapiens
aatcacttgatcaaa

SEQ ID NO: 1620374 - DNA, 15 bp, Homo sapiens
atcacttgatcaaaa

SEQ ID NO: 1620375 - DNA, 15 bp, Homo sapiens
tcacttgatcaaaac

SEQ ID NO: 1620376 - DNA, 15 bp, Homo sapiens
cacttgatcaaaaca

SEQ ID NO: 1620377 - DNA, 15 bp, Homo sapiens
acttgatcaaaacaa

SEQ ID NO: 1620378 - DNA, 15 bp, Homo sapiens
cttgatcaaaacaat

SEQ ID NO: 1620379 - DNA, 15 bp, Homo sapiens
ttgatcaaaacaatg

SEQ ID NO: 1620380 - DNA, 15 bp, Homo sapiens
tgatcaaaacaatga

SEQ ID NO: 1620381 - DNA, 15 bp, Homo sapiens
gatcaaaacaatgaa

SEQ ID NO: 1620382 - DNA, 15 bp, Homo sapiens
atcaaaacaatgaat

SEQ ID NO: 1620383 - DNA, 15 bp, Homo sapiens
tcaaaacaatgaatc

SEQ ID NO: 1620384 - DNA, 15 bp, Homo sapiens
caaaacaatgaatct

SEQ ID NO: 1620385 - DNA, 15 bp, Homo sapiens
aaaacaatgaatcta

SEQ ID NO: 1620386 - DNA, 15 bp, Homo sapiens
aaacaatgaatctag

SEQ ID NO: 1620387 - DNA, 15 bp, Homo sapiens
aacaatgaatctaga

SEQ ID NO: 1620388 - DNA, 15 bp, Homo sapiens
acaatgaatctagag

SEQ ID NO: 1620389 - DNA, 15 bp, Homo sapiens
caatgaatctagaga

SEQ ID NO: 1620390 - DNA, 15 bp, Homo sapiens
aatgaatctagagac

SEQ ID NO: 1620391 - DNA, 15 bp, Homo sapiens
atgaatctagagaca

SEQ ID NO: 1620392 - DNA, 15 bp, Homo sapiens
tgaatctagagacag

SEQ ID NO: 1620393 - DNA, 15 bp, Homo sapiens
gaatctagagacagg

SEQ ID NO: 1620394 - DNA, 15 bp, Homo sapiens
aatctagagacaggt

SEQ ID NO: 1620395 - DNA, 15 bp, Homo sapiens
atctagagacaggta

SEQ ID NO: 1620396 - DNA, 15 bp, Homo sapiens
tctagagacaggtac

SEQ ID NO: 1620397 - DNA, 15 bp, Homo sapiens
ctagagacaggtact

SEQ ID NO: 1620398 - DNA, 15 bp, Homo sapiens
tagagacaggtacta

SEQ ID NO: 1620399 - DNA, 15 bp, Homo sapiens
agagacaggtactat

SEQ ID NO: 1620400 - DNA, 15 bp, Homo sapiens
gagacaggtactatt

SEQ ID NO: 1620401 - DNA, 15 bp, Homo sapiens
agacaggtactatta

SEQ ID NO: 1620402 - DNA, 15 bp, Homo sapiens
gacaggtactattac

SEQ ID NO: 1620403 - DNA, 15 bp, Homo sapiens
acaggtactattact

SEQ ID NO: 1620404 - DNA, 15 bp, Homo sapiens
caggtactattacta

SEQ ID NO: 1620405 - DNA, 15 bp, Homo sapiens
aggtactattactag

SEQ ID NO: 1620406 - DNA, 15 bp, Homo sapiens
ggtactattactagt

SEQ ID NO: 1620407 - DNA, 15 bp, Homo sapiens
gtactattactagta

SEQ ID NO: 1620408 - DNA, 15 bp, Homo sapiens
tactattactagtac

SEQ ID NO: 1620409 - DNA, 15 bp, Homo sapiens
actattactagtact

SEQ ID NO: 1620410 - DNA, 15 bp, Homo sapiens
ctattactagtactt

SEQ ID NO: 1620411 - DNA, 15 bp, Homo sapiens
tattactagtacttc

SEQ ID NO: 1620412 - DNA, 15 bp, Homo sapiens
attactagtacttct

SEQ ID NO: 1620413 - DNA, 15 bp, Homo sapiens
ttactagtacttctt

SEQ ID NO: 1620414 - DNA, 15 bp, Homo sapiens
tactagtacttcttt

SEQ ID NO: 1620415 - DNA, 15 bp, Homo sapiens
actagtacttctttt

SEQ ID NO: 1620416 - DNA, 15 bp, Homo sapiens
ctagtacttcttttt

SEQ ID NO: 1620417 - DNA, 15 bp, Homo sapiens
tagtacttctttttc

SEQ ID NO: 1620418 - DNA, 15 bp, Homo sapiens
agtacttctttttcc

SEQ ID NO: 1620419 - DNA, 15 bp, Homo sapiens
gtacttctttttcct

SEQ ID NO: 1620420 - DNA, 15 bp, Homo sapiens
tacttctttttccta

SEQ ID NO: 1620421 - DNA, 15 bp, Homo sapiens
acttctttttcctat

SEQ ID NO: 1620422 - DNA, 15 bp, Homo sapiens
cttctttttcctata

SEQ ID NO: 1620423 - DNA, 15 bp, Homo sapiens
ttctttttcctatat

SEQ ID NO: 1620424 - DNA, 15 bp, Homo sapiens
tctttttcctatatg

SEQ ID NO: 1620425 - DNA, 15 bp, Homo sapiens
ctttttcctatatgg

SEQ ID NO: 1620426 - DNA, 15 bp, Homo sapiens
tttttcctatatggg

SEQ ID NO: 1620427 - DNA, 15 bp, Homo sapiens
ttttcctatatggga

SEQ ID NO: 1620428 - DNA, 15 bp, Homo sapiens
tttcctatatgggaa

SEQ ID NO: 1620429 - DNA, 15 bp, Homo sapiens
ttcctatatgggaat

SEQ ID NO: 1620430 - DNA, 15 bp, Homo sapiens
tcctatatgggaatt

SEQ ID NO: 1620431 - DNA, 15 bp, Homo sapiens
cctatatgggaattg

SEQ ID NO: 1620432 - DNA, 15 bp, Homo sapiens
ctatatgggaattga

SEQ ID NO: 1620433 - DNA, 15 bp, Homo sapiens
tatatgggaattgat

SEQ ID NO: 1620434 - DNA, 15 bp, Homo sapiens
atatgggaattgata

SEQ ID NO: 1620435 - DNA, 15 bp, Homo sapiens
tatgggaattgatac

SEQ ID NO: 1620436 - DNA, 15 bp, Homo sapiens
atgggaattgatacc

SEQ ID NO: 1620437 - DNA, 15 bp, Homo sapiens
tgggaattgataccc

SEQ ID NO: 1620438 - DNA, 15 bp, Homo sapiens
gggaattgataccca

SEQ ID NO: 1620439 - DNA, 15 bp, Homo sapiens
ggaattgatacccaa

SEQ ID NO: 1620440 - DNA, 15 bp, Homo sapiens
gaattgatacccaat

SEQ ID NO: 1620441 - DNA, 15 bp, Homo sapiens
aattgatacccaata

SEQ ID NO: 1620442 - DNA, 15 bp, Homo sapiens
attgatacccaatat

SEQ ID NO: 1620443 - DNA, 15 bp, Homo sapiens
ttgatacccaatata

SEQ ID NO: 1620444 - DNA, 15 bp, Homo sapiens
tgatacccaatatag

SEQ ID NO: 1620445 - DNA, 15 bp, Homo sapiens
gatacccaatatagt

SEQ ID NO: 1620446 - DNA, 15 bp, Homo sapiens
atacccaatatagtt

SEQ ID NO: 1620447 - DNA, 15 bp, Homo sapiens
tacccaatatagttc

SEQ ID NO: 1620448 - DNA, 15 bp, Homo sapiens
acccaatatagttca

SEQ ID NO: 1620449 - DNA, 15 bp, Homo sapiens
cccaatatagttcag

SEQ ID NO: 1620450 - DNA, 15 bp, Homo sapiens
ccaatatagttcagt

SEQ ID NO: 1620451 - DNA, 15 bp, Homo sapiens
caatatagttcagta

SEQ ID NO: 1620452 - DNA, 15 bp, Homo sapiens
aatatagttcagtag

SEQ ID NO: 1620453 - DNA, 15 bp, Homo sapiens
atatagttcagtagt

SEQ ID NO: 1620454 - DNA, 15 bp, Homo sapiens
tatagttcagtagtt

SEQ ID NO: 1620455 - DNA, 15 bp, Homo sapiens
atagttcagtagttt

SEQ ID NO: 1620456 - DNA, 15 bp, Homo sapiens
tagttcagtagtttt

SEQ ID NO: 1620457 - DNA, 15 bp, Homo sapiens
agttcagtagttttc

SEQ ID NO: 1620458 - DNA, 15 bp, Homo sapiens
gttcagtagttttca

SEQ ID NO: 1620459 - DNA, 15 bp, Homo sapiens
tcagtagttttcaag

SEQ ID NO: 1620460 - DNA, 15 bp, Homo sapiens
cagtagttttcaaga

SEQ ID NO: 1620461 - DNA, 15 bp, Homo sapiens
agtagttttcaagag

SEQ ID NO: 1620462 - DNA, 15 bp, Homo sapiens
gtagttttcaagagc

SEQ ID NO: 1620463 - DNA, 15 bp, Homo sapiens
tagttttcaagagcc

SEQ ID NO: 1620464 - DNA, 15 bp, Homo sapiens
agttttcaagagcca

SEQ ID NO: 1620465 - DNA, 15 bp, Homo sapiens
gttttcaagagccac

SEQ ID NO: 1620466 - DNA, 15 bp, Homo sapiens
ttttcaagagccaca

SEQ ID NO: 1620467 - DNA, 15 bp, Homo sapiens
tttcaagagccacac

SEQ ID NO: 1620468 - DNA, 15 bp, Homo sapiens
ttcaagagccacaca

SEQ ID NO: 1620469 - DNA, 15 bp, Homo sapiens
tcaagagccacacag

SEQ ID NO: 1620470 - DNA, 15 bp, Homo sapiens
caagagccacacagc

SEQ ID NO: 1620471 - DNA, 15 bp, Homo sapiens
aagagccacacagct

SEQ ID NO: 1620472 - DNA, 15 bp, Homo sapiens
agagccacacagcta

SEQ ID NO: 1620473 - DNA, 15 bp, Homo sapiens
gagccacacagctat

SEQ ID NO: 1620474 - DNA, 15 bp, Homo sapiens
agccacacagctatg

SEQ ID NO: 1620475 - DNA, 15 bp, Homo sapiens
gccacacagctatga

SEQ ID NO: 1620476 - DNA, 15 bp, Homo sapiens
ccacacagctatgac

SEQ ID NO: 1620477 - DNA, 15 bp, Homo sapiens
cacacagctatgaca

SEQ ID NO: 1620478 - DNA, 15 bp, Homo sapiens
acacagctatgacaa

SEQ ID NO: 1620479 - DNA, 15 bp, Homo sapiens
cacagctatgacaaa

SEQ ID NO: 1620480 - DNA, 15 bp, Homo sapiens
acagctatgacaaag

SEQ ID NO: 1620481 - DNA, 15 bp, Homo sapiens
cagctatgacaaagt

SEQ ID NO: 1620482 - DNA, 15 bp, Homo sapiens
agctatgacaaagta

SEQ ID NO: 1620483 - DNA, 15 bp, Homo sapiens
gctatgacaaagtaa

SEQ ID NO: 1620484 - DNA, 15 bp, Homo sapiens
ctatgacaaagtaaa

SEQ ID NO: 1620485 - DNA, 15 bp, Homo sapiens
tatgacaaagtaaaa

SEQ ID NO: 1620486 - DNA, 15 bp, Homo sapiens
atgacaaagtaaaag

SEQ ID NO: 1620487 - DNA, 15 bp, Homo sapiens
tgacaaagtaaaaga

SEQ ID NO: 1620488 - DNA, 15 bp, Homo sapiens
gacaaagtaaaagat

SEQ ID NO: 1620489 - DNA, 15 bp, Homo sapiens
acaaagtaaaagatt

SEQ ID NO: 1620490 - DNA, 15 bp, Homo sapiens
caaagtaaaagattg

SEQ ID NO: 1620491 - DNA, 15 bp, Homo sapiens
aaagtaaaagattga

SEQ ID NO: 1620492 - DNA, 15 bp, Homo sapiens
aagtaaaagattgaa

SEQ ID NO: 1620493 - DNA, 15 bp, Homo sapiens
agtaaaagattgaac

SEQ ID NO: 1620494 - DNA, 15 bp, Homo sapiens
gtaaaagattgaacc

SEQ ID NO: 1620495 - DNA, 15 bp, Homo sapiens
taaaagattgaaccc

SEQ ID NO: 1620496 - DNA, 15 bp, Homo sapiens
aaaagattgaaccca

SEQ ID NO: 1620497 - DNA, 15 bp, Homo sapiens
aaagattgaacccag

SEQ ID NO: 1620498 - DNA, 15 bp, Homo sapiens
aagattgaacccagg

SEQ ID NO: 1620499 - DNA, 15 bp, Homo sapiens
agattgaacccaggc

SEQ ID NO: 1620500 - DNA, 15 bp, Homo sapiens
gattgaacccaggca

SEQ ID NO: 1620501 - DNA, 15 bp, Homo sapiens
attgaacccaggcaa

SEQ ID NO: 1620502 - DNA, 15 bp, Homo sapiens
ttgaacccaggcaat

SEQ ID NO: 1620503 - DNA, 15 bp, Homo sapiens
tgaacccaggcaatc

SEQ ID NO: 1620504 - DNA, 15 bp, Homo sapiens
gaacccaggcaatct

SEQ ID NO: 1620505 - DNA, 15 bp, Homo sapiens
aacccaggcaatctg

SEQ ID NO: 1620506 - DNA, 15 bp, Homo sapiens
acccaggcaatctga

SEQ ID NO: 1620507 - DNA, 15 bp, Homo sapiens
cccaggcaatctgac

SEQ ID NO: 1620508 - DNA, 15 bp, Homo sapiens
ccaggcaatctgact

SEQ ID NO: 1620509 - DNA, 15 bp, Homo sapiens
caggcaatctgactg

SEQ ID NO: 1620510 - DNA, 15 bp, Homo sapiens
aggcaatctgactgc

SEQ ID NO: 1620511 - DNA, 15 bp, Homo sapiens
ggcaatctgactgca

SEQ ID NO: 1620512 - DNA, 15 bp, Homo sapiens
gcaatctgactgcag

SEQ ID NO: 1620513 - DNA, 15 bp, Homo sapiens
caatctgactgcaga

SEQ ID NO: 1620514 - DNA, 15 bp, Homo sapiens
aatctgactgcagaa

SEQ ID NO: 1620515 - DNA, 15 bp, Homo sapiens
atctgactgcagaat

SEQ ID NO: 1620516 - DNA, 15 bp, Homo sapiens
tctgactgcagaata

SEQ ID NO: 1620517 - DNA, 15 bp, Homo sapiens
ctgactgcagaatac

SEQ ID NO: 1620518 - DNA, 15 bp, Homo sapiens
tgactgcagaatact

SEQ ID NO: 1620519 - DNA, 15 bp, Homo sapiens
gactgcagaatactt

SEQ ID NO: 1620520 - DNA, 15 bp, Homo sapiens
actgcagaatacttc

SEQ ID NO: 1620521 - DNA, 15 bp, Homo sapiens
ctgcagaatacttca

SEQ ID NO: 1620522 - DNA, 15 bp, Homo sapiens
tgcagaatacttcaa

SEQ ID NO: 1620523 - DNA, 15 bp, Homo sapiens
gcagaatacttcaaa

SEQ ID NO: 1620524 - DNA, 15 bp, Homo sapiens
cagaatacttcaaac

SEQ ID NO: 1620525 - DNA, 15 bp, Homo sapiens
agaatacttcaaacc

SEQ ID NO: 1620526 - DNA, 15 bp, Homo sapiens
gaatacttcaaaccg

SEQ ID NO: 1620527 - DNA, 15 bp, Homo sapiens
aatacttcaaaccgc

SEQ ID NO: 1620528 - DNA, 15 bp, Homo sapiens
atacttcaaaccgct

SEQ ID NO: 1620529 - DNA, 15 bp, Homo sapiens
tacttcaaaccgcta

SEQ ID NO: 1620530 - DNA, 15 bp, Homo sapiens
acttcaaaccgctac

SEQ ID NO: 1620531 - DNA, 15 bp, Homo sapiens
cttcaaaccgctaca

SEQ ID NO: 1620532 - DNA, 15 bp, Homo sapiens
ttcaaaccgctacac

SEQ ID NO: 1620533 - DNA, 15 bp, Homo sapiens
tcaaaccgctacaca

SEQ ID NO: 1620534 - DNA, 15 bp, Homo sapiens
caaaccgctacacaa

SEQ ID NO: 1620535 - DNA, 15 bp, Homo sapiens
aaaccgctacacaat

SEQ ID NO: 1620536 - DNA, 15 bp, Homo sapiens
aaccgctacacaata

SEQ ID NO: 1620537 - DNA, 15 bp, Homo sapiens
accgctacacaatac

SEQ ID NO: 1620538 - DNA, 15 bp, Homo sapiens
ccgctacacaataca

SEQ ID NO: 1620539 - DNA, 15 bp, Homo sapiens
cgctacacaatacaa

SEQ ID NO: 1620540 - DNA, 15 bp, Homo sapiens
gctacacaatacaat

SEQ ID NO: 1620541 - DNA, 15 bp, Homo sapiens
ctacacaatacaatc

SEQ ID NO: 1620542 - DNA, 15 bp, Homo sapiens
tacacaatacaatct

SEQ ID NO: 1620543 - DNA, 15 bp, Homo sapiens
acacaatacaatctc

SEQ ID NO: 1620544 - DNA, 15 bp, Homo sapiens
cacaatacaatctcc

SEQ ID NO: 1620545 - DNA, 15 bp, Homo sapiens
acaatacaatctcct

SEQ ID NO: 1620546 - DNA, 15 bp, Homo sapiens
caatacaatctcctc

SEQ ID NO: 1620547 - DNA, 15 bp, Homo sapiens
aatacaatctcctct

SEQ ID NO: 1620548 - DNA, 15 bp, Homo sapiens
atacaatctcctctc

SEQ ID NO: 1620549 - DNA, 15 bp, Homo sapiens
tacaatctcctctct

SEQ ID NO: 1620550 - DNA, 15 bp, Homo sapiens
acaatctcctctctt

SEQ ID NO: 1620551 - DNA, 15 bp, Homo sapiens
caatctcctctcttg

SEQ ID NO: 1620552 - DNA, 15 bp, Homo sapiens
aatctcctctcttgg

SEQ ID NO: 1620553 - DNA, 15 bp, Homo sapiens
atctcctctcttgga

SEQ ID NO: 1620554 - DNA, 15 bp, Homo sapiens
tctcctctcttggaa

SEQ ID NO: 1620555 - DNA, 15 bp, Homo sapiens
ctcctctcttggaaa

SEQ ID NO: 1620556 - DNA, 15 bp, Homo sapiens
tcctctcttggaaaa

SEQ ID NO: 1620557 - DNA, 15 bp, Homo sapiens
cctctcttggaaaat

SEQ ID NO: 1620558 - DNA, 15 bp, Homo sapiens
ctctcttggaaaatg

SEQ ID NO: 1620559 - DNA, 15 bp, Homo sapiens
tctcttggaaaatgt

SEQ ID NO: 1620560 - DNA, 15 bp, Homo sapiens
ctcttggaaaatgtt

SEQ ID NO: 1620561 - DNA, 15 bp, Homo sapiens
tcttggaaaatgttc

SEQ ID NO: 1620562 - DNA, 15 bp, Homo sapiens
cttggaaaatgttct

SEQ ID NO: 1620563 - DNA, 15 bp, Homo sapiens
ttggaaaatgttctt

SEQ ID NO: 1620564 - DNA, 15 bp, Homo sapiens
tggaaaatgttcttt

SEQ ID NO: 1620565 - DNA, 15 bp, Homo sapiens
ggaaaatgttctttt

SEQ ID NO: 1620566 - DNA, 15 bp, Homo sapiens
gaaaatgttctttta

SEQ ID NO: 1620567 - DNA, 15 bp, Homo sapiens
aaaatgttcttttac

SEQ ID NO: 1620568 - DNA, 15 bp, Homo sapiens
aaatgttcttttaca

SEQ ID NO: 1620569 - DNA, 15 bp, Homo sapiens
aatgttcttttacaa

SEQ ID NO: 1620570 - DNA, 15 bp, Homo sapiens
atgttcttttacaag

SEQ ID NO: 1620571 - DNA, 15 bp, Homo sapiens
tgttcttttacaagg

SEQ ID NO: 1620572 - DNA, 15 bp, Homo sapiens
gttcttttacaaggg

SEQ ID NO: 1620573 - DNA, 15 bp, Homo sapiens
ttcttttacaaggga

SEQ ID NO: 1620574 - DNA, 15 bp, Homo sapiens
tcttttacaagggaa

SEQ ID NO: 1620575 - DNA, 15 bp, Homo sapiens
cttttacaagggaac

SEQ ID NO: 1620576 - DNA, 15 bp, Homo sapiens
ttttacaagggaact

SEQ ID NO: 1620577 - DNA, 15 bp, Homo sapiens
tttacaagggaacta

SEQ ID NO: 1620578 - DNA, 15 bp, Homo sapiens
ttacaagggaactag

SEQ ID NO: 1620579 - DNA, 15 bp, Homo sapiens
tacaagggaactagg

SEQ ID NO: 1620580 - DNA, 15 bp, Homo sapiens
acaagggaactaggt

SEQ ID NO: 1620581 - DNA, 15 bp, Homo sapiens
caagggaactaggtt

SEQ ID NO: 1620582 - DNA, 15 bp, Homo sapiens
aagggaactaggttc

SEQ ID NO: 1620583 - DNA, 15 bp, Homo sapiens
agggaactaggttcc

SEQ ID NO: 1620584 - DNA, 15 bp, Homo sapiens
gggaactaggttcct

SEQ ID NO: 1620585 - DNA, 15 bp, Homo sapiens
ggaactaggttcctt

SEQ ID NO: 1620586 - DNA, 15 bp, Homo sapiens
gaactaggttccttt

SEQ ID NO: 1620587 - DNA, 15 bp, Homo sapiens
aactaggttcctttt

SEQ ID NO: 1620588 - DNA, 15 bp, Homo sapiens
actaggttccttttg

SEQ ID NO: 1620589 - DNA, 15 bp, Homo sapiens
ctaggttccttttga

SEQ ID NO: 1620590 - DNA, 15 bp, Homo sapiens
taggttccttttgaa

SEQ ID NO: 1620591 - DNA, 15 bp, Homo sapiens
aggttccttttgaac

SEQ ID NO: 1620592 - DNA, 15 bp, Homo sapiens
ggttccttttgaact

SEQ ID NO: 1620593 - DNA, 15 bp, Homo sapiens
gttccttttgaactt

SEQ ID NO: 1620594 - DNA, 15 bp, Homo sapiens
ttccttttgaacttt

SEQ ID NO: 1620595 - DNA, 15 bp, Homo sapiens
tccttttgaactttg

SEQ ID NO: 1620596 - DNA, 15 bp, Homo sapiens
ccttttgaactttgc

SEQ ID NO: 1620597 - DNA, 15 bp, Homo sapiens
cttttgaactttgct

SEQ ID NO: 1620598 - DNA, 15 bp, Homo sapiens
ttttgaactttgcta

SEQ ID NO: 1620599 - DNA, 15 bp, Homo sapiens
tttgaactttgctat

SEQ ID NO: 1620600 - DNA, 15 bp, Homo sapiens
ttgaactttgctatc

SEQ ID NO: 1620601 - DNA, 15 bp, Homo sapiens
tgaactttgctatca

SEQ ID NO: 1620602 - DNA, 15 bp, Homo sapiens
gaactttgctatcac

SEQ ID NO: 1620603 - DNA, 15 bp, Homo sapiens
aactttgctatcaca

SEQ ID NO: 1620604 - DNA, 15 bp, Homo sapiens
actttgctatcacag

SEQ ID NO: 1620605 - DNA, 15 bp, Homo sapiens
ctttgctatcacagt

SEQ ID NO: 1620606 - DNA, 15 bp, Homo sapiens
tttgctatcacagta

SEQ ID NO: 1620607 - DNA, 15 bp, Homo sapiens
ttgctatcacagtat

SEQ ID NO: 1620608 - DNA, 15 bp, Homo sapiens
tgctatcacagtatt

SEQ ID NO: 1620609 - DNA, 15 bp, Homo sapiens
gctatcacagtattg

SEQ ID NO: 1620610 - DNA, 15 bp, Homo sapiens
ctatcacagtattgg

SEQ ID NO: 1620611 - DNA, 15 bp, Homo sapiens
tatcacagtattgga

SEQ ID NO: 1620612 - DNA, 15 bp, Homo sapiens
atcacagtattggat

SEQ ID NO: 1620613 - DNA, 15 bp, Homo sapiens
tcacagtattggata

SEQ ID NO: 1620614 - DNA, 15 bp, Homo sapiens
cacagtattggataa

SEQ ID NO: 1620615 - DNA, 15 bp, Homo sapiens
acagtattggataat

SEQ ID NO: 1620616 - DNA, 15 bp, Homo sapiens
cagtattggataatt

SEQ ID NO: 1620617 - DNA, 15 bp, Homo sapiens
agtattggataattg

SEQ ID NO: 1620618 - DNA, 15 bp, Homo sapiens
gtattggataattga

SEQ ID NO: 1620619 - DNA, 15 bp, Homo sapiens
tattggataattgac

SEQ ID NO: 1620620 - DNA, 15 bp, Homo sapiens
attggataattgact

SEQ ID NO: 1620621 - DNA, 15 bp, Homo sapiens
ttggataattgactg

SEQ ID NO: 1620622 - DNA, 15 bp, Homo sapiens
tggataattgactgc

SEQ ID NO: 1620623 - DNA, 15 bp, Homo sapiens
ggataattgactgcg

SEQ ID NO: 1620624 - DNA, 15 bp, Homo sapiens
gataattgactgcgc

SEQ ID NO: 1620625 - DNA, 15 bp, Homo sapiens
ataattgactgcgca

SEQ ID NO: 1620626 - DNA, 15 bp, Homo sapiens
taattgactgcgcaa

SEQ ID NO: 1620627 - DNA, 15 bp, Homo sapiens
aattgactgcgcaag

SEQ ID NO: 1620628 - DNA, 15 bp, Homo sapiens
attgactgcgcaagt

SEQ ID NO: 1620629 - DNA, 15 bp, Homo sapiens
ttgactgcgcaagtc

SEQ ID NO: 1620630 - DNA, 15 bp, Homo sapiens
tgactgcgcaagtct

SEQ ID NO: 1620631 - DNA, 15 bp, Homo sapiens
gactgcgcaagtctc

SEQ ID NO: 1620632 - DNA, 15 bp, Homo sapiens
actgcgcaagtctct

SEQ ID NO: 1620633 - DNA, 15 bp, Homo sapiens
ctgcgcaagtctctc

SEQ ID NO: 1620634 - DNA, 15 bp, Homo sapiens
tgcgcaagtctctcc

SEQ ID NO: 1620635 - DNA, 15 bp, Homo sapiens
gcgcaagtctctcct

SEQ ID NO: 1620636 - DNA, 15 bp, Homo sapiens
cgcaagtctctcctc

SEQ ID NO: 1620637 - DNA, 15 bp, Homo sapiens
gcaagtctctcctca

SEQ ID NO: 1620638 - DNA, 15 bp, Homo sapiens
caagtctctcctcaa

SEQ ID NO: 1620639 - DNA, 15 bp, Homo sapiens
aagtctctcctcaaa

SEQ ID NO: 1620640 - DNA, 15 bp, Homo sapiens
agtctctcctcaaat

SEQ ID NO: 1620641 - DNA, 15 bp, Homo sapiens
gtctctcctcaaatt

SEQ ID NO: 1620642 - DNA, 15 bp, Homo sapiens
tctctcctcaaattc

SEQ ID NO: 1620643 - DNA, 15 bp, Homo sapiens
ctctcctcaaattcc

SEQ ID NO: 1620644 - DNA, 15 bp, Homo sapiens
tctcctcaaattccc

SEQ ID NO: 1620645 - DNA, 15 bp, Homo sapiens
ctcctcaaattccca

SEQ ID NO: 1620646 - DNA, 15 bp, Homo sapiens
tcctcaaattcccaa

SEQ ID NO: 1620647 - DNA, 15 bp, Homo sapiens
cctcaaattcccaac

SEQ ID NO: 1620648 - DNA, 15 bp, Homo sapiens
ctcaaattcccaact

SEQ ID NO: 1620649 - DNA, 15 bp, Homo sapiens
tcaaattcccaactc

SEQ ID NO: 1620650 - DNA, 15 bp, Homo sapiens
caaattcccaactca

SEQ ID NO: 1620651 - DNA, 15 bp, Homo sapiens
aaattcccaactcat

SEQ ID NO: 1620652 - DNA, 15 bp, Homo sapiens
aattcccaactcatg

SEQ ID NO: 1620653 - DNA, 15 bp, Homo sapiens
attcccaactcatgc

SEQ ID NO: 1620654 - DNA, 15 bp, Homo sapiens
ttcccaactcatgca

SEQ ID NO: 1620655 - DNA, 15 bp, Homo sapiens
tcccaactcatgcat

SEQ ID NO: 1620656 - DNA, 15 bp, Homo sapiens
cccaactcatgcatg

SEQ ID NO: 1620657 - DNA, 15 bp, Homo sapiens
ccaactcatgcatga

SEQ ID NO: 1620658 - DNA, 15 bp, Homo sapiens
caactcatgcatgac

SEQ ID NO: 1620659 - DNA, 15 bp, Homo sapiens
aactcatgcatgact

SEQ ID NO: 1620660 - DNA, 15 bp, Homo sapiens
actcatgcatgactt

SEQ ID NO: 1620661 - DNA, 15 bp, Homo sapiens
ctcatgcatgacttt

SEQ ID NO: 1620662 - DNA, 15 bp, Homo sapiens
tcatgcatgactttt

SEQ ID NO: 1620663 - DNA, 15 bp, Homo sapiens
catgcatgacttttt

SEQ ID NO: 1620664 - DNA, 15 bp, Homo sapiens
atgcatgacttttta

SEQ ID NO: 1620665 - DNA, 15 bp, Homo sapiens
tgcatgactttttat

SEQ ID NO: 1620666 - DNA, 15 bp, Homo sapiens
gcatgactttttatt

SEQ ID NO: 1620667 - DNA, 15 bp, Homo sapiens
catgactttttatta

SEQ ID NO: 1620668 - DNA, 15 bp, Homo sapiens
atgactttttattac

SEQ ID NO: 1620669 - DNA, 15 bp, Homo sapiens
tgactttttattacg

SEQ ID NO: 1620670 - DNA, 15 bp, Homo sapiens
gactttttattacgt

SEQ ID NO: 1620671 - DNA, 15 bp, Homo sapiens
actttttattacgtt

SEQ ID NO: 1620672 - DNA, 15 bp, Homo sapiens
ctttttattacgttg

SEQ ID NO: 1620673 - DNA, 15 bp, Homo sapiens
tttttattacgttgt

SEQ ID NO: 1620674 - DNA, 15 bp, Homo sapiens
ttttattacgttgta

SEQ ID NO: 1620675 - DNA, 15 bp, Homo sapiens
tttattacgttgtag

SEQ ID NO: 1620676 - DNA, 15 bp, Homo sapiens
ttattacgttgtagc

SEQ ID NO: 1620677 - DNA, 15 bp, Homo sapiens
tattacgttgtagca

SEQ ID NO: 1620678 - DNA, 15 bp, Homo sapiens
attacgttgtagcaa

SEQ ID NO: 1620679 - DNA, 15 bp, Homo sapiens
ttacgttgtagcaat

SEQ ID NO: 1620680 - DNA, 15 bp, Homo sapiens
tacgttgtagcaata

SEQ ID NO: 1620681 - DNA, 15 bp, Homo sapiens
acgttgtagcaataa

SEQ ID NO: 1620682 - DNA, 15 bp, Homo sapiens
cgttgtagcaataaa

SEQ ID NO: 1620683 - DNA, 15 bp, Homo sapiens
gttgtagcaataaaa

SEQ ID NO: 1620684 - DNA, 15 bp, Homo sapiens
ttgtagcaataaaag

SEQ ID NO: 1620685 - DNA, 15 bp, Homo sapiens
tgtagcaataaaaga

SEQ ID NO: 1620686 - DNA, 15 bp, Homo sapiens
gtagcaataaaagag

SEQ ID NO: 1620687 - DNA, 15 bp, Homo sapiens
tagcaataaaagagc

SEQ ID NO: 1620688 - DNA, 15 bp, Homo sapiens
agcaataaaagagca

SEQ ID NO: 1620689 - DNA, 15 bp, Homo sapiens
gcaataaaagagcag

SEQ ID NO: 1620690 - DNA, 15 bp, Homo sapiens
caataaaagagcagt

SEQ ID NO: 1620691 - DNA, 15 bp, Homo sapiens
aataaaagagcagtg

SEQ ID NO: 1620692 - DNA, 15 bp, Homo sapiens
ataaaagagcagtgg

SEQ ID NO: 1620693 - DNA, 15 bp, Homo sapiens
taaaagagcagtgga

SEQ ID NO: 1620694 - DNA, 15 bp, Homo sapiens
aaaagagcagtggag

SEQ ID NO: 1620695 - DNA, 15 bp, Homo sapiens
aaagagcagtggagg

SEQ ID NO: 1620696 - DNA, 15 bp, Homo sapiens
aagagcagtggaggt

SEQ ID NO: 1620697 - DNA, 15 bp, Homo sapiens
agagcagtggaggtg

SEQ ID NO: 1620698 - DNA, 15 bp, Homo sapiens
gagcagtggaggtgg

SEQ ID NO: 1620699 - DNA, 15 bp, Homo sapiens
agcagtggaggtggg

SEQ ID NO: 1620700 - DNA, 15 bp, Homo sapiens
gcagtggaggtgggg

SEQ ID NO: 1620701 - DNA, 15 bp, Homo sapiens
cagtggaggtggggt

SEQ ID NO: 1620702 - DNA, 15 bp, Homo sapiens
agtggaggtggggtg

SEQ ID NO: 1620703 - DNA, 15 bp, Homo sapiens
gtggaggtggggtgg

SEQ ID NO: 1620704 - DNA, 15 bp, Homo sapiens
tggaggtggggtgga

SEQ ID NO: 1620705 - DNA, 15 bp, Homo sapiens
ggaggtggggtggaa

SEQ ID NO: 1620706 - DNA, 15 bp, Homo sapiens
gaggtggggtggaag

SEQ ID NO: 1620707 - DNA, 15 bp, Homo sapiens
aggtggggtggaaga

SEQ ID NO: 1620708 - DNA, 15 bp, Homo sapiens
ggtggggtggaagaa

SEQ ID NO: 1620709 - DNA, 15 bp, Homo sapiens
gtggggtggaagaag

SEQ ID NO: 1620710 - DNA, 15 bp, Homo sapiens
tggggtggaagaaga

SEQ ID NO: 1620711 - DNA, 15 bp, Homo sapiens
ggggtggaagaagac

SEQ ID NO: 1620712 - DNA, 15 bp, Homo sapiens
gggtggaagaagact

SEQ ID NO: 1620713 - DNA, 15 bp, Homo sapiens
ggtggaagaagactc

SEQ ID NO: 1620714 - DNA, 15 bp, Homo sapiens
gtggaagaagactca

SEQ ID NO: 1620715 - DNA, 15 bp, Homo sapiens
tggaagaagactcat

SEQ ID NO: 1620716 - DNA, 15 bp, Homo sapiens
ggaagaagactcatt

SEQ ID NO: 1620717 - DNA, 15 bp, Homo sapiens
gaagaagactcattt

SEQ ID NO: 1620718 - DNA, 15 bp, Homo sapiens
aagaagactcatttt

SEQ ID NO: 1620719 - DNA, 15 bp, Homo sapiens
agaagactcattttt

SEQ ID NO: 1620720 - DNA, 15 bp, Homo sapiens
gaagactcatttttg

SEQ ID NO: 1620721 - DNA, 15 bp, Homo sapiens
aagactcatttttgt

SEQ ID NO: 1620722 - DNA, 15 bp, Homo sapiens
agactcatttttgtc

SEQ ID NO: 1620723 - DNA, 15 bp, Homo sapiens
gactcatttttgtct

SEQ ID NO: 1620724 - DNA, 15 bp, Homo sapiens
actcatttttgtctt

SEQ ID NO: 1620725 - DNA, 15 bp, Homo sapiens
ctcatttttgtcttc

SEQ ID NO: 1620726 - DNA, 15 bp, Homo sapiens
tcatttttgtcttca

SEQ ID NO: 1620727 - DNA, 15 bp, Homo sapiens
catttttgtcttcat

SEQ ID NO: 1620728 - DNA, 15 bp, Homo sapiens
atttttgtcttcatt

SEQ ID NO: 1620729 - DNA, 15 bp, Homo sapiens
tttttgtcttcatta

SEQ ID NO: 1620730 - DNA, 15 bp, Homo sapiens
ttttgtcttcattac

SEQ ID NO: 1620731 - DNA, 15 bp, Homo sapiens
tttgtcttcattact

SEQ ID NO: 1620732 - DNA, 15 bp, Homo sapiens
ttgtcttcattactg

SEQ ID NO: 1620733 - DNA, 15 bp, Homo sapiens
tgtcttcattactgc

SEQ ID NO: 1620734 - DNA, 15 bp, Homo sapiens
gtcttcattactgct

SEQ ID NO: 1620735 - DNA, 15 bp, Homo sapiens
tcttcattactgcta

SEQ ID NO: 1620736 - DNA, 15 bp, Homo sapiens
cttcattactgctat

SEQ ID NO: 1620737 - DNA, 15 bp, Homo sapiens
ttcattactgctatg

SEQ ID NO: 1620738 - DNA, 15 bp, Homo sapiens
tcattactgctatgt

SEQ ID NO: 1620739 - DNA, 15 bp, Homo sapiens
cattactgctatgtg

SEQ ID NO: 1620740 - DNA, 15 bp, Homo sapiens
attactgctatgtgg

SEQ ID NO: 1620741 - DNA, 15 bp, Homo sapiens
ttactgctatgtgga

SEQ ID NO: 1620742 - DNA, 15 bp, Homo sapiens
tactgctatgtggag

SEQ ID NO: 1620743 - DNA, 15 bp, Homo sapiens
actgctatgtggagc

SEQ ID NO: 1620744 - DNA, 15 bp, Homo sapiens
ctgctatgtggagca

SEQ ID NO: 1620745 - DNA, 15 bp, Homo sapiens
tgctatgtggagcaa

SEQ ID NO: 1620746 - DNA, 15 bp, Homo sapiens
gctatgtggagcaag

SEQ ID NO: 1620747 - DNA, 15 bp, Homo sapiens
ctatgtggagcaagg

SEQ ID NO: 1620748 - DNA, 15 bp, Homo sapiens
tatgtggagcaaggg

SEQ ID NO: 1620749 - DNA, 15 bp, Homo sapiens
atgtggagcaagggc

SEQ ID NO: 1620750 - DNA, 15 bp, Homo sapiens
tgtggagcaagggcc

SEQ ID NO: 1620751 - DNA, 15 bp, Homo sapiens
gtggagcaagggccc

SEQ ID NO: 1620752 - DNA, 15 bp, Homo sapiens
tggagcaagggccca

SEQ ID NO: 1620753 - DNA, 15 bp, Homo sapiens
ggagcaagggcccaa

SEQ ID NO: 1620754 - DNA, 15 bp, Homo sapiens
gagcaagggcccaag

SEQ ID NO: 1620755 - DNA, 15 bp, Homo sapiens
agcaagggcccaagc

SEQ ID NO: 1620756 - DNA, 15 bp, Homo sapiens
gcaagggcccaagct

SEQ ID NO: 1620757 - DNA, 15 bp, Homo sapiens
caagggcccaagctt

SEQ ID NO: 1620758 - DNA, 15 bp, Homo sapiens
aagggcccaagcttt

SEQ ID NO: 1620759 - DNA, 15 bp, Homo sapiens
agggcccaagctttt

SEQ ID NO: 1620760 - DNA, 15 bp, Homo sapiens
gggcccaagctttta

SEQ ID NO: 1620761 - DNA, 15 bp, Homo sapiens
ggcccaagcttttaa

SEQ ID NO: 1620762 - DNA, 15 bp, Homo sapiens
gcccaagcttttaaa

SEQ ID NO: 1620763 - DNA, 15 bp, Homo sapiens
cccaagcttttaaaa

SEQ ID NO: 1620764 - DNA, 15 bp, Homo sapiens
ccaagcttttaaaaa

SEQ ID NO: 1620765 - DNA, 15 bp, Homo sapiens
caagcttttaaaaac

SEQ ID NO: 1620766 - DNA, 15 bp, Homo sapiens
aagcttttaaaaaca

SEQ ID NO: 1620767 - DNA, 15 bp, Homo sapiens
agcttttaaaaacaa

SEQ ID NO: 1620768 - DNA, 15 bp, Homo sapiens
gcttttaaaaacaag

SEQ ID NO: 1620769 - DNA, 15 bp, Homo sapiens
cttttaaaaacaaga

SEQ ID NO: 1620770 - DNA, 15 bp, Homo sapiens
ttttaaaaacaagag

SEQ ID NO: 1620771 - DNA, 15 bp, Homo sapiens
tttaaaaacaagagc

SEQ ID NO: 1620772 - DNA, 15 bp, Homo sapiens
ttaaaaacaagagct

SEQ ID NO: 1620773 - DNA, 15 bp, Homo sapiens
taaaaacaagagctc

SEQ ID NO: 1620774 - DNA, 15 bp, Homo sapiens
aaaaacaagagctca

SEQ ID NO: 1620775 - DNA, 15 bp, Homo sapiens
aaaacaagagctcag

SEQ ID NO: 1620776 - DNA, 15 bp, Homo sapiens
aaacaagagctcaga

SEQ ID NO: 1620777 - DNA, 15 bp, Homo sapiens
aacaagagctcagag

SEQ ID NO: 1620778 - DNA, 15 bp, Homo sapiens
acaagagctcagaga

SEQ ID NO: 1620779 - DNA, 15 bp, Homo sapiens
caagagctcagagac

SEQ ID NO: 1620780 - DNA, 15 bp, Homo sapiens
aagagctcagagaca

SEQ ID NO: 1620781 - DNA, 15 bp, Homo sapiens
agagctcagagacat

SEQ ID NO: 1620782 - DNA, 15 bp, Homo sapiens
gagctcagagacatg

SEQ ID NO: 1620783 - DNA, 15 bp, Homo sapiens
agctcagagacatgg

SEQ ID NO: 1620784 - DNA, 15 bp, Homo sapiens
gctcagagacatggc

SEQ ID NO: 1620785 - DNA, 15 bp, Homo sapiens
ctcagagacatggcc

SEQ ID NO: 1620786 - DNA, 15 bp, Homo sapiens
tcagagacatggccc

SEQ ID NO: 1620787 - DNA, 15 bp, Homo sapiens
cagagacatggccct

SEQ ID NO: 1620788 - DNA, 15 bp, Homo sapiens
agagacatggccctg

SEQ ID NO: 1620789 - DNA, 15 bp, Homo sapiens
gagacatggccctgg

SEQ ID NO: 1620790 - DNA, 15 bp, Homo sapiens
agacatggccctggc

SEQ ID NO: 1620791 - DNA, 15 bp, Homo sapiens
gacatggccctggcc

SEQ ID NO: 1620792 - DNA, 15 bp, Homo sapiens
acatggccctggcct

SEQ ID NO: 1620793 - DNA, 15 bp, Homo sapiens
catggccctggcctt

SEQ ID NO: 1620794 - DNA, 15 bp, Homo sapiens
atggccctggccttg

SEQ ID NO: 1620795 - DNA, 15 bp, Homo sapiens
tggccctggccttgg

SEQ ID NO: 1620796 - DNA, 15 bp, Homo sapiens
ggccctggccttgga

SEQ ID NO: 1620797 - DNA, 15 bp, Homo sapiens
gccctggccttggaa

SEQ ID NO: 1620798 - DNA, 15 bp, Homo sapiens
ccctggccttggaag

SEQ ID NO: 1620799 - DNA, 15 bp, Homo sapiens
cctggccttggaaga

SEQ ID NO: 1620800 - DNA, 15 bp, Homo sapiens
ctggccttggaagat

SEQ ID NO: 1620801 - DNA, 15 bp, Homo sapiens
tggccttggaagatg

SEQ ID NO: 1620802 - DNA, 15 bp, Homo sapiens
ggccttggaagatgc

SEQ ID NO: 1620803 - DNA, 15 bp, Homo sapiens
gccttggaagatgcc

SEQ ID NO: 1620804 - DNA, 15 bp, Homo sapiens
ccttggaagatgccc

SEQ ID NO: 1620805 - DNA, 15 bp, Homo sapiens
cttggaagatgccct

SEQ ID NO: 1620806 - DNA, 15 bp, Homo sapiens
ttggaagatgcccta

SEQ ID NO: 1620807 - DNA, 15 bp, Homo sapiens
tggaagatgccctag

SEQ ID NO: 1620808 - DNA, 15 bp, Homo sapiens
ggaagatgccctaga

SEQ ID NO: 1620809 - DNA, 15 bp, Homo sapiens
gaagatgccctagag

SEQ ID NO: 1620810 - DNA, 15 bp, Homo sapiens
aagatgccctagaga

SEQ ID NO: 1620811 - DNA, 15 bp, Homo sapiens
agatgccctagagac

SEQ ID NO: 1620812 - DNA, 15 bp, Homo sapiens
gatgccctagagacg

SEQ ID NO: 1620813 - DNA, 15 bp, Homo sapiens
atgccctagagacgc

SEQ ID NO: 1620814 - DNA, 15 bp, Homo sapiens
tgccctagagacgct

SEQ ID NO: 1620815 - DNA, 15 bp, Homo sapiens
gccctagagacgctg

SEQ ID NO: 1620816 - DNA, 15 bp, Homo sapiens
ccctagagacgctga

SEQ ID NO: 1620817 - DNA, 15 bp, Homo sapiens
cctagagacgctgag

SEQ ID NO: 1620818 - DNA, 15 bp, Homo sapiens
ctagagacgctgagg

SEQ ID NO: 1620819 - DNA, 15 bp, Homo sapiens
tagagacgctgaggt

SEQ ID NO: 1620820 - DNA, 15 bp, Homo sapiens
agagacgctgaggtg

SEQ ID NO: 1620821 - DNA, 15 bp, Homo sapiens
gagacgctgaggtgg

SEQ ID NO: 1620822 - DNA, 15 bp, Homo sapiens
agacgctgaggtggt

SEQ ID NO: 1620823 - DNA, 15 bp, Homo sapiens
gacgctgaggtggtt

SEQ ID NO: 1620824 - DNA, 15 bp, Homo sapiens
acgctgaggtggttg

SEQ ID NO: 1620825 - DNA, 15 bp, Homo sapiens
cgctgaggtggttgt

SEQ ID NO: 1620826 - DNA, 15 bp, Homo sapiens
gctgaggtggttgta

SEQ ID NO: 1620827 - DNA, 15 bp, Homo sapiens
ctgaggtggttgtac

SEQ ID NO: 1620828 - DNA, 15 bp, Homo sapiens
tgaggtggttgtact

SEQ ID NO: 1620829 - DNA, 15 bp, Homo sapiens
gaggtggttgtactt

SEQ ID NO: 1620830 - DNA, 15 bp, Homo sapiens
aggtggttgtacttt

SEQ ID NO: 1620831 - DNA, 15 bp, Homo sapiens
ggtggttgtactttt

SEQ ID NO: 1620832 - DNA, 15 bp, Homo sapiens
gtggttgtacttttg

SEQ ID NO: 1620833 - DNA, 15 bp, Homo sapiens
tggttgtacttttgc

SEQ ID NO: 1620834 - DNA, 15 bp, Homo sapiens
ggttgtacttttgcc

SEQ ID NO: 1620835 - DNA, 15 bp, Homo sapiens
gttgtacttttgcca

SEQ ID NO: 1620836 - DNA, 15 bp, Homo sapiens
ttgtacttttgccat

SEQ ID NO: 1620837 - DNA, 15 bp, Homo sapiens
tgtacttttgccata

SEQ ID NO: 1620838 - DNA, 15 bp, Homo sapiens
gtacttttgccatag

SEQ ID NO: 1620839 - DNA, 15 bp, Homo sapiens
tacttttgccatagg

SEQ ID NO: 1620840 - DNA, 15 bp, Homo sapiens
acttttgccatagga

SEQ ID NO: 1620841 - DNA, 15 bp, Homo sapiens
cttttgccataggag

SEQ ID NO: 1620842 - DNA, 15 bp, Homo sapiens
ttttgccataggagt

SEQ ID NO: 1620843 - DNA, 15 bp, Homo sapiens
tttgccataggagtg

SEQ ID NO: 1620844 - DNA, 15 bp, Homo sapiens
ttgccataggagtgg

SEQ ID NO: 1620845 - DNA, 15 bp, Homo sapiens
tgccataggagtggc

SEQ ID NO: 1620846 - DNA, 15 bp, Homo sapiens
gccataggagtggca

SEQ ID NO: 1620847 - DNA, 15 bp, Homo sapiens
ccataggagtggcag

SEQ ID NO: 1620848 - DNA, 15 bp, Homo sapiens
cataggagtggcagc

SEQ ID NO: 1620849 - DNA, 15 bp, Homo sapiens
ataggagtggcagcc

SEQ ID NO: 1620850 - DNA, 15 bp, Homo sapiens
taggagtggcagcca

SEQ ID NO: 1620851 - DNA, 15 bp, Homo sapiens
aggagtggcagccag

SEQ ID NO: 1620852 - DNA, 15 bp, Homo sapiens
ggagtggcagccaga

SEQ ID NO: 1620853 - DNA, 15 bp, Homo sapiens
gagtggcagccagag

SEQ ID NO: 1620854 - DNA, 15 bp, Homo sapiens
agtggcagccagaga

SEQ ID NO: 1620855 - DNA, 15 bp, Homo sapiens
gtggcagccagagaa

SEQ ID NO: 1620856 - DNA, 15 bp, Homo sapiens
tggcagccagagaac

SEQ ID NO: 1620857 - DNA, 15 bp, Homo sapiens
ggcagccagagaact

SEQ ID NO: 1620858 - DNA, 15 bp, Homo sapiens
gcagccagagaactg

SEQ ID NO: 1620859 - DNA, 15 bp, Homo sapiens
cagccagagaactga

SEQ ID NO: 1620860 - DNA, 15 bp, Homo sapiens
agccagagaactgag

SEQ ID NO: 1620861 - DNA, 15 bp, Homo sapiens
gccagagaactgagc

SEQ ID NO: 1620862 - DNA, 15 bp, Homo sapiens
ccagagaactgagcc

SEQ ID NO: 1620863 - DNA, 15 bp, Homo sapiens
cagagaactgagccc

SEQ ID NO: 1620864 - DNA, 15 bp, Homo sapiens
agagaactgagccca

SEQ ID NO: 1620865 - DNA, 15 bp, Homo sapiens
gagaactgagcccaa

SEQ ID NO: 1620866 - DNA, 15 bp, Homo sapiens
agaactgagcccaat

SEQ ID NO: 1620867 - DNA, 15 bp, Homo sapiens
gaactgagcccaatg

SEQ ID NO: 1620868 - DNA, 15 bp, Homo sapiens
aactgagcccaatga

SEQ ID NO: 1620869 - DNA, 15 bp, Homo sapiens
actgagcccaatgaa

SEQ ID NO: 1620870 - DNA, 15 bp, Homo sapiens
ctgagcccaatgaat

SEQ ID NO: 1620871 - DNA, 15 bp, Homo sapiens
tgagcccaatgaatg

SEQ ID NO: 1620872 - DNA, 15 bp, Homo sapiens
gagcccaatgaatgc

SEQ ID NO: 1620873 - DNA, 15 bp, Homo sapiens
agcccaatgaatgca

SEQ ID NO: 1620874 - DNA, 15 bp, Homo sapiens
gcccaatgaatgcaa

SEQ ID NO: 1620875 - DNA, 15 bp, Homo sapiens
cccaatgaatgcaaa

SEQ ID NO: 1620876 - DNA, 15 bp, Homo sapiens
ccaatgaatgcaaag

SEQ ID NO: 1620877 - DNA, 15 bp, Homo sapiens
caatgaatgcaaagg

SEQ ID NO: 1620878 - DNA, 15 bp, Homo sapiens
aatgaatgcaaaggc

SEQ ID NO: 1620879 - DNA, 15 bp, Homo sapiens
atgaatgcaaaggct

SEQ ID NO: 1620880 - DNA, 15 bp, Homo sapiens
tgaatgcaaaggctg

SEQ ID NO: 1620881 - DNA, 15 bp, Homo sapiens
gaatgcaaaggctgg

SEQ ID NO: 1620882 - DNA, 15 bp, Homo sapiens
aatgcaaaggctggt

SEQ ID NO: 1620883 - DNA, 15 bp, Homo sapiens
atgcaaaggctggtg

SEQ ID NO: 1620884 - DNA, 15 bp, Homo sapiens
tgcaaaggctggtgc

SEQ ID NO: 1620885 - DNA, 15 bp, Homo sapiens
gcaaaggctggtgcc

SEQ ID NO: 1620886 - DNA, 15 bp, Homo sapiens
caaaggctggtgcct

SEQ ID NO: 1620887 - DNA, 15 bp, Homo sapiens
aaaggctggtgcctg

SEQ ID NO: 1620888 - DNA, 15 bp, Homo sapiens
aaggctggtgcctgg

SEQ ID NO: 1620889 - DNA, 15 bp, Homo sapiens
aggctggtgcctgga

SEQ ID NO: 1620890 - DNA, 15 bp, Homo sapiens
ggctggtgcctggaa

SEQ ID NO: 1620891 - DNA, 15 bp, Homo sapiens
gctggtgcctggaaa

SEQ ID NO: 1620892 - DNA, 15 bp, Homo sapiens
ctggtgcctggaaat

SEQ ID NO: 1620893 - DNA, 15 bp, Homo sapiens
tggtgcctggaaata

SEQ ID NO: 1620894 - DNA, 15 bp, Homo sapiens
ggtgcctggaaatat

SEQ ID NO: 1620895 - DNA, 15 bp, Homo sapiens
gtgcctggaaatatt

SEQ ID NO: 1620896 - DNA, 15 bp, Homo sapiens
tgcctggaaatattg

SEQ ID NO: 1620897 - DNA, 15 bp, Homo sapiens
gcctggaaatattgt

SEQ ID NO: 1620898 - DNA, 15 bp, Homo sapiens
cctggaaatattgtg

SEQ ID NO: 1620899 - DNA, 15 bp, Homo sapiens
ctggaaatattgtga

SEQ ID NO: 1620900 - DNA, 15 bp, Homo sapiens
tggaaatattgtgac

SEQ ID NO: 1620901 - DNA, 15 bp, Homo sapiens
ggaaatattgtgact

SEQ ID NO: 1620902 - DNA, 15 bp, Homo sapiens
gaaatattgtgactt

SEQ ID NO: 1620903 - DNA, 15 bp, Homo sapiens
aaatattgtgacttt

SEQ ID NO: 1620904 - DNA, 15 bp, Homo sapiens
aatattgtgactttg

SEQ ID NO: 1620905 - DNA, 15 bp, Homo sapiens
atattgtgactttgc

SEQ ID NO: 1620906 - DNA, 15 bp, Homo sapiens
tattgtgactttgcc

SEQ ID NO: 1620907 - DNA, 15 bp, Homo sapiens
attgtgactttgcca

SEQ ID NO: 1620908 - DNA, 15 bp, Homo sapiens
ttgtgactttgccac

SEQ ID NO: 1620909 - DNA, 15 bp, Homo sapiens
tgtgactttgccaca

SEQ ID NO: 1620910 - DNA, 15 bp, Homo sapiens
gtgactttgccacag

SEQ ID NO: 1620911 - DNA, 15 bp, Homo sapiens
tgactttgccacaga

SEQ ID NO: 1620912 - DNA, 15 bp, Homo sapiens
gactttgccacagaa

SEQ ID NO: 1620913 - DNA, 15 bp, Homo sapiens
actttgccacagaaa

SEQ ID NO: 1620914 - DNA, 15 bp, Homo sapiens
ctttgccacagaaag

SEQ ID NO: 1620915 - DNA, 15 bp, Homo sapiens
tttgccacagaaaga

SEQ ID NO: 1620916 - DNA, 15 bp, Homo sapiens
ttgccacagaaagaa

SEQ ID NO: 1620917 - DNA, 15 bp, Homo sapiens
tgccacagaaagaag

SEQ ID NO: 1620918 - DNA, 15 bp, Homo sapiens
gccacagaaagaaga

SEQ ID NO: 1620919 - DNA, 15 bp, Homo sapiens
ccacagaaagaagat

SEQ ID NO: 1620920 - DNA, 15 bp, Homo sapiens
cacagaaagaagatg

SEQ ID NO: 1620921 - DNA, 15 bp, Homo sapiens
acagaaagaagatgg

SEQ ID NO: 1620922 - DNA, 15 bp, Homo sapiens
cagaaagaagatgga

SEQ ID NO: 1620923 - DNA, 15 bp, Homo sapiens
agaaagaagatggag

SEQ ID NO: 1620924 - DNA, 15 bp, Homo sapiens
gaaagaagatggaga

SEQ ID NO: 1620925 - DNA, 15 bp, Homo sapiens
aaagaagatggagaa

SEQ ID NO: 1620926 - DNA, 15 bp, Homo sapiens
aagaagatggagaat

SEQ ID NO: 1620927 - DNA, 15 bp, Homo sapiens
agaagatggagaatt

SEQ ID NO: 1620928 - DNA, 15 bp, Homo sapiens
gaagatggagaattt

SEQ ID NO: 1620929 - DNA, 15 bp, Homo sapiens
aagatggagaatttt

SEQ ID NO: 1620930 - DNA, 15 bp, Homo sapiens
agatggagaatttta

SEQ ID NO: 1620931 - DNA, 15 bp, Homo sapiens
gatggagaattttaa

SEQ ID NO: 1620932 - DNA, 15 bp, Homo sapiens
atggagaattttaaa

SEQ ID NO: 1620933 - DNA, 15 bp, Homo sapiens
tggagaattttaaag

SEQ ID NO: 1620934 - DNA, 15 bp, Homo sapiens
ggagaattttaaagt

SEQ ID NO: 1620935 - DNA, 15 bp, Homo sapiens
gagaattttaaagtt

SEQ ID NO: 1620936 - DNA, 15 bp, Homo sapiens
agaattttaaagttg

SEQ ID NO: 1620937 - DNA, 15 bp, Homo sapiens
gaattttaaagttgg

SEQ ID NO: 1620938 - DNA, 15 bp, Homo sapiens
aattttaaagttgga

SEQ ID NO: 1620939 - DNA, 15 bp, Homo sapiens
attttaaagttggaa

SEQ ID NO: 1620940 - DNA, 15 bp, Homo sapiens
ttttaaagttggaaa

SEQ ID NO: 1620941 - DNA, 15 bp, Homo sapiens
tttaaagttggaaat

SEQ ID NO: 1620942 - DNA, 15 bp, Homo sapiens
ttaaagttggaaatc

SEQ ID NO: 1620943 - DNA, 15 bp, Homo sapiens
taaagttggaaatct

SEQ ID NO: 1620944 - DNA, 15 bp, Homo sapiens
aaagttggaaatctg

SEQ ID NO: 1620945 - DNA, 15 bp, Homo sapiens
aagttggaaatctgc

SEQ ID NO: 1620946 - DNA, 15 bp, Homo sapiens
agttggaaatctgcc

SEQ ID NO: 1620947 - DNA, 15 bp, Homo sapiens
gttggaaatctgcct

SEQ ID NO: 1620948 - DNA, 15 bp, Homo sapiens
ttggaaatctgcctg

SEQ ID NO: 1620949 - DNA, 15 bp, Homo sapiens
tggaaatctgcctgg

SEQ ID NO: 1620950 - DNA, 15 bp, Homo sapiens
ggaaatctgcctggt

SEQ ID NO: 1620951 - DNA, 15 bp, Homo sapiens
gaaatctgcctggta

SEQ ID NO: 1620952 - DNA, 15 bp, Homo sapiens
aaatctgcctggtaa

SEQ ID NO: 1620953 - DNA, 15 bp, Homo sapiens
aatctgcctggtaag

SEQ ID NO: 1620954 - DNA, 15 bp, Homo sapiens
atctgcctggtaagg

SEQ ID NO: 1620955 - DNA, 15 bp, Homo sapiens
tctgcctggtaaggg

SEQ ID NO: 1620956 - DNA, 15 bp, Homo sapiens
ctgcctggtaaggga

SEQ ID NO: 1620957 - DNA, 15 bp, Homo sapiens
tgcctggtaagggat

SEQ ID NO: 1620958 - DNA, 15 bp, Homo sapiens
gcctggtaagggatc

SEQ ID NO: 1620959 - DNA, 15 bp, Homo sapiens
cctggtaagggatca

SEQ ID NO: 1620960 - DNA, 15 bp, Homo sapiens
ctggtaagggatcat

SEQ ID NO: 1620961 - DNA, 15 bp, Homo sapiens
tggtaagggatcatt

SEQ ID NO: 1620962 - DNA, 15 bp, Homo sapiens
ggtaagggatcattt

SEQ ID NO: 1620963 - DNA, 15 bp, Homo sapiens
gtaagggatcatttg

SEQ ID NO: 1620964 - DNA, 15 bp, Homo sapiens
taagggatcatttgc

SEQ ID NO: 1620965 - DNA, 15 bp, Homo sapiens
aagggatcatttgct

SEQ ID NO: 1620966 - DNA, 15 bp, Homo sapiens
agggatcatttgctg

SEQ ID NO: 1620967 - DNA, 15 bp, Homo sapiens
gggatcatttgctgg

SEQ ID NO: 1620968 - DNA, 15 bp, Homo sapiens
ggatcatttgctggt

SEQ ID NO: 1620969 - DNA, 15 bp, Homo sapiens
gatcatttgctggtg

SEQ ID NO: 1620970 - DNA, 15 bp, Homo sapiens
atcatttgctggtgt

SEQ ID NO: 1620971 - DNA, 15 bp, Homo sapiens
tcatttgctggtgtc

SEQ ID NO: 1620972 - DNA, 15 bp, Homo sapiens
catttgctggtgtct

SEQ ID NO: 1620973 - DNA, 15 bp, Homo sapiens
atttgctggtgtctg

SEQ ID NO: 1620974 - DNA, 15 bp, Homo sapiens
tttgctggtgtctgc

SEQ ID NO: 1620975 - DNA, 15 bp, Homo sapiens
ttgctggtgtctgca

SEQ ID NO: 1620976 - DNA, 15 bp, Homo sapiens
tgctggtgtctgcaa

SEQ ID NO: 1620977 - DNA, 15 bp, Homo sapiens
gctggtgtctgcaaa

SEQ ID NO: 1620978 - DNA, 15 bp, Homo sapiens
ctggtgtctgcaaag

SEQ ID NO: 1620979 - DNA, 15 bp, Homo sapiens
tggtgtctgcaaagt

SEQ ID NO: 1620980 - DNA, 15 bp, Homo sapiens
ggtgtctgcaaagtt

SEQ ID NO: 1620981 - DNA, 15 bp, Homo sapiens
gtgtctgcaaagttg

SEQ ID NO: 1620982 - DNA, 15 bp, Homo sapiens
tgtctgcaaagttga

SEQ ID NO: 1620983 - DNA, 15 bp, Homo sapiens
gtctgcaaagttgag

SEQ ID NO: 1620984 - DNA, 15 bp, Homo sapiens
tctgcaaagttgagt

SEQ ID NO: 1620985 - DNA, 15 bp, Homo sapiens
ctgcaaagttgagtc

SEQ ID NO: 1620986 - DNA, 15 bp, Homo sapiens
tgcaaagttgagtcc

SEQ ID NO: 1620987 - DNA, 15 bp, Homo sapiens
gcaaagttgagtcca

SEQ ID NO: 1620988 - DNA, 15 bp, Homo sapiens
caaagttgagtccat

SEQ ID NO: 1620989 - DNA, 15 bp, Homo sapiens
aaagttgagtccata

SEQ ID NO: 1620990 - DNA, 15 bp, Homo sapiens
aagttgagtccatac

SEQ ID NO: 1620991 - DNA, 15 bp, Homo sapiens
agttgagtccataca

SEQ ID NO: 1620992 - DNA, 15 bp, Homo sapiens
gttgagtccatacac

SEQ ID NO: 1620993 - DNA, 15 bp, Homo sapiens
ttgagtccatacaca

SEQ ID NO: 1620994 - DNA, 15 bp, Homo sapiens
tgagtccatacacac

SEQ ID NO: 1620995 - DNA, 15 bp, Homo sapiens
gagtccatacacact

SEQ ID NO: 1620996 - DNA, 15 bp, Homo sapiens
agtccatacacactg

SEQ ID NO: 1620997 - DNA, 15 bp, Homo sapiens
gtccatacacactgg

SEQ ID NO: 1620998 - DNA, 15 bp, Homo sapiens
tccatacacactggt

SEQ ID NO: 1620999 - DNA, 15 bp, Homo sapiens
ccatacacactggtt

SEQ ID NO: 1621000 - DNA, 15 bp, Homo sapiens
catacacactggttt

SEQ ID NO: 1621001 - DNA, 15 bp, Homo sapiens
atacacactggtttg

SEQ ID NO: 1621002 - DNA, 15 bp, Homo sapiens
tacacactggtttgg

SEQ ID NO: 1621003 - DNA, 15 bp, Homo sapiens
acacactggtttgga

SEQ ID NO: 1621004 - DNA, 15 bp, Homo sapiens
cacactggtttggaa

SEQ ID NO: 1621005 - DNA, 15 bp, Homo sapiens
acactggtttggaaa

SEQ ID NO: 1621006 - DNA, 15 bp, Homo sapiens
cactggtttggaaat

SEQ ID NO: 1621007 - DNA, 15 bp, Homo sapiens
actggtttggaaatt

SEQ ID NO: 1621008 - DNA, 15 bp, Homo sapiens
ctggtttggaaattt

SEQ ID NO: 1621009 - DNA, 15 bp, Homo sapiens
tggtttggaaatttc

SEQ ID NO: 1621010 - DNA, 15 bp, Homo sapiens
ggtttggaaatttca

SEQ ID NO: 1621011 - DNA, 15 bp, Homo sapiens
gtttggaaatttcag

SEQ ID NO: 1621012 - DNA, 15 bp, Homo sapiens
tttggaaatttcagt

SEQ ID NO: 1621013 - DNA, 15 bp, Homo sapiens
ttggaaatttcagtc

SEQ ID NO: 1621014 - DNA, 15 bp, Homo sapiens
tggaaatttcagtcc

SEQ ID NO: 1621015 - DNA, 15 bp, Homo sapiens
ggaaatttcagtcca

SEQ ID NO: 1621016 - DNA, 15 bp, Homo sapiens
gaaatttcagtccag

SEQ ID NO: 1621017 - DNA, 15 bp, Homo sapiens
aaatttcagtccaga

SEQ ID NO: 1621018 - DNA, 15 bp, Homo sapiens
aatttcagtccagat

SEQ ID NO: 1621019 - DNA, 15 bp, Homo sapiens
atttcagtccagatg

SEQ ID NO: 1621020 - DNA, 15 bp, Homo sapiens
tttcagtccagatga

SEQ ID NO: 1621021 - DNA, 15 bp, Homo sapiens
ttcagtccagatgat

SEQ ID NO: 1621022 - DNA, 15 bp, Homo sapiens
tcagtccagatgata

SEQ ID NO: 1621023 - DNA, 15 bp, Homo sapiens
cagtccagatgatag

SEQ ID NO: 1621024 - DNA, 15 bp, Homo sapiens
agtccagatgatagt

SEQ ID NO: 1621025 - DNA, 15 bp, Homo sapiens
gtccagatgatagtt

SEQ ID NO: 1621026 - DNA, 15 bp, Homo sapiens
tccagatgatagtta

SEQ ID NO: 1621027 - DNA, 15 bp, Homo sapiens
ccagatgatagttaa

SEQ ID NO: 1621028 - DNA, 15 bp, Homo sapiens
cagatgatagttaag

SEQ ID NO: 1621029 - DNA, 15 bp, Homo sapiens
agatgatagttaaga

SEQ ID NO: 1621030 - DNA, 15 bp, Homo sapiens
gatgatagttaagaa

SEQ ID NO: 1621031 - DNA, 15 bp, Homo sapiens
atgatagttaagaaa

SEQ ID NO: 1621032 - DNA, 15 bp, Homo sapiens
tgatagttaagaaag

SEQ ID NO: 1621033 - DNA, 15 bp, Homo sapiens
gatagttaagaaagc

SEQ ID NO: 1621034 - DNA, 15 bp, Homo sapiens
atagttaagaaagca

SEQ ID NO: 1621035 - DNA, 15 bp, Homo sapiens
tagttaagaaagcag

SEQ ID NO: 1621036 - DNA, 15 bp, Homo sapiens
agttaagaaagcagt

SEQ ID NO: 1621037 - DNA, 15 bp, Homo sapiens
gttaagaaagcagta

SEQ ID NO: 1621038 - DNA, 15 bp, Homo sapiens
ttaagaaagcagtaa

SEQ ID NO: 1621039 - DNA, 15 bp, Homo sapiens
taagaaagcagtaag

SEQ ID NO: 1621040 - DNA, 15 bp, Homo sapiens
aagaaagcagtaaga

SEQ ID NO: 1621041 - DNA, 15 bp, Homo sapiens
agaaagcagtaagaa

SEQ ID NO: 1621042 - DNA, 15 bp, Homo sapiens
gaaagcagtaagaat

SEQ ID NO: 1621043 - DNA, 15 bp, Homo sapiens
aaagcagtaagaata

SEQ ID NO: 1621044 - DNA, 15 bp, Homo sapiens
aagcagtaagaatac

SEQ ID NO: 1621045 - DNA, 15 bp, Homo sapiens
agcagtaagaataca

SEQ ID NO: 1621046 - DNA, 15 bp, Homo sapiens
gcagtaagaatacag

SEQ ID NO: 1621047 - DNA, 15 bp, Homo sapiens
gtaagaatacagaga

SEQ ID NO: 1621048 - DNA, 15 bp, Homo sapiens
taagaatacagagag

SEQ ID NO: 1621049 - DNA, 15 bp, Homo sapiens
aagaatacagagagt

SEQ ID NO: 1621050 - DNA, 15 bp, Homo sapiens
agaatacagagagtc

SEQ ID NO: 1621051 - DNA, 15 bp, Homo sapiens
gaatacagagagtcc

SEQ ID NO: 1621052 - DNA, 15 bp, Homo sapiens
aatacagagagtcca

SEQ ID NO: 1621053 - DNA, 15 bp, Homo sapiens
atacagagagtccac

SEQ ID NO: 1621054 - DNA, 15 bp, Homo sapiens
tacagagagtccaca

SEQ ID NO: 1621055 - DNA, 15 bp, Homo sapiens
acagagagtccacaa

SEQ ID NO: 1621056 - DNA, 15 bp, Homo sapiens
cagagagtccacaat

SEQ ID NO: 1621057 - DNA, 15 bp, Homo sapiens
agagagtccacaatg

SEQ ID NO: 1621058 - DNA, 15 bp, Homo sapiens
gagagtccacaatga

SEQ ID NO: 1621059 - DNA, 15 bp, Homo sapiens
agagtccacaatgag

SEQ ID NO: 1621060 - DNA, 15 bp, Homo sapiens
gagtccacaatgaga

SEQ ID NO: 1621061 - DNA, 15 bp, Homo sapiens
agtccacaatgagat

SEQ ID NO: 1621062 - DNA, 15 bp, Homo sapiens
gtccacaatgagatg

SEQ ID NO: 1621063 - DNA, 15 bp, Homo sapiens
tccacaatgagatga

SEQ ID NO: 1621064 - DNA, 15 bp, Homo sapiens
ccacaatgagatgaa

SEQ ID NO: 1621065 - DNA, 15 bp, Homo sapiens
cacaatgagatgaaa

SEQ ID NO: 1621066 - DNA, 15 bp, Homo sapiens
acaatgagatgaaaa

SEQ ID NO: 1621067 - DNA, 15 bp, Homo sapiens
caatgagatgaaaat

SEQ ID NO: 1621068 - DNA, 15 bp, Homo sapiens
aatgagatgaaaatg

SEQ ID NO: 1621069 - DNA, 15 bp, Homo sapiens
atgagatgaaaatgc

SEQ ID NO: 1621070 - DNA, 15 bp, Homo sapiens
tgagatgaaaatgca

SEQ ID NO: 1621071 - DNA, 15 bp, Homo sapiens
gagatgaaaatgcac

SEQ ID NO: 1621072 - DNA, 15 bp, Homo sapiens
agatgaaaatgcact

SEQ ID NO: 1621073 - DNA, 15 bp, Homo sapiens
gatgaaaatgcactg

SEQ ID NO: 1621074 - DNA, 15 bp, Homo sapiens
atgaaaatgcactgc

SEQ ID NO: 1621075 - DNA, 15 bp, Homo sapiens
tgaaaatgcactgcc

SEQ ID NO: 1621076 - DNA, 15 bp, Homo sapiens
gaaaatgcactgcca

SEQ ID NO: 1621077 - DNA, 15 bp, Homo sapiens
aaaatgcactgccag

SEQ ID NO: 1621078 - DNA, 15 bp, Homo sapiens
aaatgcactgccagt

SEQ ID NO: 1621079 - DNA, 15 bp, Homo sapiens
aatgcactgccagtt

SEQ ID NO: 1621080 - DNA, 15 bp, Homo sapiens
atgcactgccagttg

SEQ ID NO: 1621081 - DNA, 15 bp, Homo sapiens
tgcactgccagttga

SEQ ID NO: 1621082 - DNA, 15 bp, Homo sapiens
gcactgccagttgaa

SEQ ID NO: 1621083 - DNA, 15 bp, Homo sapiens
cactgccagttgaaa

SEQ ID NO: 1621084 - DNA, 15 bp, Homo sapiens
actgccagttgaaac

SEQ ID NO: 1621085 - DNA, 15 bp, Homo sapiens
ctgccagttgaaaca

SEQ ID NO: 1621086 - DNA, 15 bp, Homo sapiens
tgccagttgaaacat

SEQ ID NO: 1621087 - DNA, 15 bp, Homo sapiens
gccagttgaaacatc

SEQ ID NO: 1621088 - DNA, 15 bp, Homo sapiens
ccagttgaaacatcc

SEQ ID NO: 1621089 - DNA, 15 bp, Homo sapiens
cagttgaaacatcct

SEQ ID NO: 1621090 - DNA, 15 bp, Homo sapiens
agttgaaacatcctc

SEQ ID NO: 1621091 - DNA, 15 bp, Homo sapiens
gttgaaacatcctcc

SEQ ID NO: 1621092 - DNA, 15 bp, Homo sapiens
ttgaaacatcctcct

SEQ ID NO: 1621093 - DNA, 15 bp, Homo sapiens
tgaaacatcctccta

SEQ ID NO: 1621094 - DNA, 15 bp, Homo sapiens
gaaacatcctcctac

SEQ ID NO: 1621095 - DNA, 15 bp, Homo sapiens
aaacatcctcctaca

SEQ ID NO: 1621096 - DNA, 15 bp, Homo sapiens
aacatcctcctacac

SEQ ID NO: 1621097 - DNA, 15 bp, Homo sapiens
acatcctcctacact

SEQ ID NO: 1621098 - DNA, 15 bp, Homo sapiens
catcctcctacactg

SEQ ID NO: 1621099 - DNA, 15 bp, Homo sapiens
atcctcctacactgg

SEQ ID NO: 1621100 - DNA, 15 bp, Homo sapiens
tcctcctacactgga

SEQ ID NO: 1621101 - DNA, 15 bp, Homo sapiens
cctcctacactggag

SEQ ID NO: 1621102 - DNA, 15 bp, Homo sapiens
ctcctacactggagc

SEQ ID NO: 1621103 - DNA, 15 bp, Homo sapiens
tcctacactggagct

SEQ ID NO: 1621104 - DNA, 15 bp, Homo sapiens
cctacactggagctt

SEQ ID NO: 1621105 - DNA, 15 bp, Homo sapiens
ctacactggagcttt

SEQ ID NO: 1621106 - DNA, 15 bp, Homo sapiens
tacactggagcttta

SEQ ID NO: 1621107 - DNA, 15 bp, Homo sapiens
acactggagctttat

SEQ ID NO: 1621108 - DNA, 15 bp, Homo sapiens
cactggagctttata

SEQ ID NO: 1621109 - DNA, 15 bp, Homo sapiens
actggagctttataa

SEQ ID NO: 1621110 - DNA, 15 bp, Homo sapiens
ctggagctttataaa

SEQ ID NO: 1621111 - DNA, 15 bp, Homo sapiens
tggagctttataaat

SEQ ID NO: 1621112 - DNA, 15 bp, Homo sapiens
ggagctttataaata

SEQ ID NO: 1621113 - DNA, 15 bp, Homo sapiens
gagctttataaatat

SEQ ID NO: 1621114 - DNA, 15 bp, Homo sapiens
agctttataaatatt

SEQ ID NO: 1621115 - DNA, 15 bp, Homo sapiens
gctttataaatattt

SEQ ID NO: 1621116 - DNA, 15 bp, Homo sapiens
ctttataaatatttt

SEQ ID NO: 1621117 - DNA, 15 bp, Homo sapiens
ttataaatattttaa

SEQ ID NO: 1621118 - DNA, 15 bp, Homo sapiens
tataaatattttaaa

SEQ ID NO: 1621119 - DNA, 15 bp, Homo sapiens
ataaatattttaaag

SEQ ID NO: 1621120 - DNA, 15 bp, Homo sapiens
taaatattttaaaga

SEQ ID NO: 1621121 - DNA, 15 bp, Homo sapiens
aaatattttaaagac

SEQ ID NO: 1621122 - DNA, 15 bp, Homo sapiens
aatattttaaagaca

SEQ ID NO: 1621123 - DNA, 15 bp, Homo sapiens
atattttaaagacaa

SEQ ID NO: 1621124 - DNA, 15 bp, Homo sapiens
tattttaaagacaag

SEQ ID NO: 1621125 - DNA, 15 bp, Homo sapiens
attttaaagacaagg

SEQ ID NO: 1621126 - DNA, 15 bp, Homo sapiens
ttttaaagacaagga

SEQ ID NO: 1621127 - DNA, 15 bp, Homo sapiens
tttaaagacaaggat

SEQ ID NO: 1621128 - DNA, 15 bp, Homo sapiens
ttaaagacaaggatt

SEQ ID NO: 1621129 - DNA, 15 bp, Homo sapiens
taaagacaaggattg

SEQ ID NO: 1621130 - DNA, 15 bp, Homo sapiens
aaagacaaggattgg

SEQ ID NO: 1621131 - DNA, 15 bp, Homo sapiens
aagacaaggattgga

SEQ ID NO: 1621132 - DNA, 15 bp, Homo sapiens
agacaaggattggat

SEQ ID NO: 1621133 - DNA, 15 bp, Homo sapiens
gacaaggattggatt

SEQ ID NO: 1621134 - DNA, 15 bp, Homo sapiens
acaaggattggatta

SEQ ID NO: 1621135 - DNA, 15 bp, Homo sapiens
caaggattggattag

SEQ ID NO: 1621136 - DNA, 15 bp, Homo sapiens
aaggattggattaga

SEQ ID NO: 1621137 - DNA, 15 bp, Homo sapiens
aggattggattagat

SEQ ID NO: 1621138 - DNA, 15 bp, Homo sapiens
ggattggattagatt

SEQ ID NO: 1621139 - DNA, 15 bp, Homo sapiens
gattggattagattt

SEQ ID NO: 1621140 - DNA, 15 bp, Homo sapiens
attggattagatttg

SEQ ID NO: 1621141 - DNA, 15 bp, Homo sapiens
ttggattagatttga

SEQ ID NO: 1621142 - DNA, 15 bp, Homo sapiens
tggattagatttgac

SEQ ID NO: 1621143 - DNA, 15 bp, Homo sapiens
ggattagatttgaca

SEQ ID NO: 1621144 - DNA, 15 bp, Homo sapiens
gattagatttgacat

SEQ ID NO: 1621145 - DNA, 15 bp, Homo sapiens
attagatttgacatt

SEQ ID NO: 1621146 - DNA, 15 bp, Homo sapiens
ttagatttgacatta

SEQ ID NO: 1621147 - DNA, 15 bp, Homo sapiens
tagatttgacattag

SEQ ID NO: 1621148 - DNA, 15 bp, Homo sapiens
agatttgacattaga

SEQ ID NO: 1621149 - DNA, 15 bp, Homo sapiens
gatttgacattagaa

SEQ ID NO: 1621150 - DNA, 15 bp, Homo sapiens
atttgacattagaaa

SEQ ID NO: 1621151 - DNA, 15 bp, Homo sapiens
tttgacattagaaat

SEQ ID NO: 1621152 - DNA, 15 bp, Homo sapiens
ttgacattagaaatg

SEQ ID NO: 1621153 - DNA, 15 bp, Homo sapiens
tgacattagaaatgt

SEQ ID NO: 1621154 - DNA, 15 bp, Homo sapiens
gacattagaaatgta

SEQ ID NO: 1621155 - DNA, 15 bp, Homo sapiens
acattagaaatgtac

SEQ ID NO: 1621156 - DNA, 15 bp, Homo sapiens
cattagaaatgtacc

SEQ ID NO: 1621157 - DNA, 15 bp, Homo sapiens
attagaaatgtacca

SEQ ID NO: 1621158 - DNA, 15 bp, Homo sapiens
ttagaaatgtaccat

SEQ ID NO: 1621159 - DNA, 15 bp, Homo sapiens
tagaaatgtaccata

SEQ ID NO: 1621160 - DNA, 15 bp, Homo sapiens
agaaatgtaccataa

SEQ ID NO: 1621161 - DNA, 15 bp, Homo sapiens
gaaatgtaccataat

SEQ ID NO: 1621162 - DNA, 15 bp, Homo sapiens
aaatgtaccataata

SEQ ID NO: 1621163 - DNA, 15 bp, Homo sapiens
aatgtaccataatac

SEQ ID NO: 1621164 - DNA, 15 bp, Homo sapiens
atgtaccataataca

SEQ ID NO: 1621165 - DNA, 15 bp, Homo sapiens
tgtaccataatacag

SEQ ID NO: 1621166 - DNA, 15 bp, Homo sapiens
gtaccataatacaga

SEQ ID NO: 1621167 - DNA, 15 bp, Homo sapiens
taccataatacagaa

SEQ ID NO: 1621168 - DNA, 15 bp, Homo sapiens
accataatacagaag

SEQ ID NO: 1621169 - DNA, 15 bp, Homo sapiens
ccataatacagaagg

SEQ ID NO: 1621170 - DNA, 15 bp, Homo sapiens
cataatacagaaggc

SEQ ID NO: 1621171 - DNA, 15 bp, Homo sapiens
ataatacagaaggca

SEQ ID NO: 1621172 - DNA, 15 bp, Homo sapiens
taatacagaaggcaa

SEQ ID NO: 1621173 - DNA, 15 bp, Homo sapiens
aatacagaaggcaat

SEQ ID NO: 1621174 - DNA, 15 bp, Homo sapiens
atacagaaggcaatg

SEQ ID NO: 1621175 - DNA, 15 bp, Homo sapiens
tacagaaggcaatgg

SEQ ID NO: 1621176 - DNA, 15 bp, Homo sapiens
acagaaggcaatgga

SEQ ID NO: 1621177 - DNA, 15 bp, Homo sapiens
cagaaggcaatggac

SEQ ID NO: 1621178 - DNA, 15 bp, Homo sapiens
agaaggcaatggaca

SEQ ID NO: 1621179 - DNA, 15 bp, Homo sapiens
gaaggcaatggacac

SEQ ID NO: 1621180 - DNA, 15 bp, Homo sapiens
aaggcaatggacacc

SEQ ID NO: 1621181 - DNA, 15 bp, Homo sapiens
aggcaatggacacct

SEQ ID NO: 1621182 - DNA, 15 bp, Homo sapiens
ggcaatggacaccta

SEQ ID NO: 1621183 - DNA, 15 bp, Homo sapiens
gcaatggacacctaa

SEQ ID NO: 1621184 - DNA, 15 bp, Homo sapiens
caatggacacctaaa

SEQ ID NO: 1621185 - DNA, 15 bp, Homo sapiens
aatggacacctaaag

SEQ ID NO: 1621186 - DNA, 15 bp, Homo sapiens
atggacacctaaaga

SEQ ID NO: 1621187 - DNA, 15 bp, Homo sapiens
tggacacctaaagaa

SEQ ID NO: 1621188 - DNA, 15 bp, Homo sapiens
ggacacctaaagaac

SEQ ID NO: 1621189 - DNA, 15 bp, Homo sapiens
gacacctaaagaaca

SEQ ID NO: 1621190 - DNA, 15 bp, Homo sapiens
acacctaaagaacag

SEQ ID NO: 1621191 - DNA, 15 bp, Homo sapiens
cacctaaagaacaga

SEQ ID NO: 1621192 - DNA, 15 bp, Homo sapiens
acctaaagaacagaa

SEQ ID NO: 1621193 - DNA, 15 bp, Homo sapiens
cctaaagaacagaat

SEQ ID NO: 1621194 - DNA, 15 bp, Homo sapiens
ctaaagaacagaatg

SEQ ID NO: 1621195 - DNA, 15 bp, Homo sapiens
taaagaacagaatga

SEQ ID NO: 1621196 - DNA, 15 bp, Homo sapiens
aagaacagaatgaaa

SEQ ID NO: 1621197 - DNA, 15 bp, Homo sapiens
agaacagaatgaaaa

SEQ ID NO: 1621198 - DNA, 15 bp, Homo sapiens
gaacagaatgaaaac

SEQ ID NO: 1621199 - DNA, 15 bp, Homo sapiens
aacagaatgaaaacc

SEQ ID NO: 1621200 - DNA, 15 bp, Homo sapiens
acagaatgaaaacct

SEQ ID NO: 1621201 - DNA, 15 bp, Homo sapiens
cagaatgaaaacctt

SEQ ID NO: 1621202 - DNA, 15 bp, Homo sapiens
agaatgaaaaccttc

SEQ ID NO: 1621203 - DNA, 15 bp, Homo sapiens
gaatgaaaaccttct

SEQ ID NO: 1621204 - DNA, 15 bp, Homo sapiens
aatgaaaaccttctt

SEQ ID NO: 1621205 - DNA, 15 bp, Homo sapiens
atgaaaaccttctta

SEQ ID NO: 1621206 - DNA, 15 bp, Homo sapiens
tgaaaaccttcttag

SEQ ID NO: 1621207 - DNA, 15 bp, Homo sapiens
gaaaaccttcttagg

SEQ ID NO: 1621208 - DNA, 15 bp, Homo sapiens
aaaaccttcttagga

SEQ ID NO: 1621209 - DNA, 15 bp, Homo sapiens
aaaccttcttaggaa

SEQ ID NO: 1621210 - DNA, 15 bp, Homo sapiens
aaccttcttaggaaa

SEQ ID NO: 1621211 - DNA, 15 bp, Homo sapiens
accttcttaggaaat

SEQ ID NO: 1621212 - DNA, 15 bp, Homo sapiens
ccttcttaggaaatg

SEQ ID NO: 1621213 - DNA, 15 bp, Homo sapiens
cttcttaggaaatga

SEQ ID NO: 1621214 - DNA, 15 bp, Homo sapiens
ttcttaggaaatgaa

SEQ ID NO: 1621215 - DNA, 15 bp, Homo sapiens
tcttaggaaatgaag

SEQ ID NO: 1621216 - DNA, 15 bp, Homo sapiens
cttaggaaatgaagc

SEQ ID NO: 1621217 - DNA, 15 bp, Homo sapiens
ttaggaaatgaagct

SEQ ID NO: 1621218 - DNA, 15 bp, Homo sapiens
taggaaatgaagctt

SEQ ID NO: 1621219 - DNA, 15 bp, Homo sapiens
aggaaatgaagcttg

SEQ ID NO: 1621220 - DNA, 15 bp, Homo sapiens
ggaaatgaagcttga

SEQ ID NO: 1621221 - DNA, 15 bp, Homo sapiens
gaaatgaagcttgac

SEQ ID NO: 1621222 - DNA, 15 bp, Homo sapiens
aaatgaagcttgaca

SEQ ID NO: 1621223 - DNA, 15 bp, Homo sapiens
aatgaagcttgacac

SEQ ID NO: 1621224 - DNA, 15 bp, Homo sapiens
atgaagcttgacact

SEQ ID NO: 1621225 - DNA, 15 bp, Homo sapiens
tgaagcttgacactt

SEQ ID NO: 1621226 - DNA, 15 bp, Homo sapiens
gaagcttgacacttc

SEQ ID NO: 1621227 - DNA, 15 bp, Homo sapiens
aagcttgacacttca

SEQ ID NO: 1621228 - DNA, 15 bp, Homo sapiens
agcttgacacttcac

SEQ ID NO: 1621229 - DNA, 15 bp, Homo sapiens
gcttgacacttcacc

SEQ ID NO: 1621230 - DNA, 15 bp, Homo sapiens
cttgacacttcaccc

SEQ ID NO: 1621231 - DNA, 15 bp, Homo sapiens
ttgacacttcaccca

SEQ ID NO: 1621232 - DNA, 15 bp, Homo sapiens
tgacacttcacccac

SEQ ID NO: 1621233 - DNA, 15 bp, Homo sapiens
gacacttcacccacc

SEQ ID NO: 1621234 - DNA, 15 bp, Homo sapiens
acacttcacccacca

SEQ ID NO: 1621235 - DNA, 15 bp, Homo sapiens
cacttcacccaccag

SEQ ID NO: 1621236 - DNA, 15 bp, Homo sapiens
acttcacccaccagg

SEQ ID NO: 1621237 - DNA, 15 bp, Homo sapiens
cttcacccaccaggc

SEQ ID NO: 1621238 - DNA, 15 bp, Homo sapiens
ttcacccaccaggcc

SEQ ID NO: 1621239 - DNA, 15 bp, Homo sapiens
tcacccaccaggcca

SEQ ID NO: 1621240 - DNA, 15 bp, Homo sapiens
cacccaccaggccac

SEQ ID NO: 1621241 - DNA, 15 bp, Homo sapiens
acccaccaggccacc

SEQ ID NO: 1621242 - DNA, 15 bp, Homo sapiens
cccaccaggccacca

SEQ ID NO: 1621243 - DNA, 15 bp, Homo sapiens
ccaccaggccaccac

SEQ ID NO: 1621244 - DNA, 15 bp, Homo sapiens
caccaggccaccaca

SEQ ID NO: 1621245 - DNA, 15 bp, Homo sapiens
accaggccaccacaa

SEQ ID NO: 1621246 - DNA, 15 bp, Homo sapiens
ccaggccaccacaag

SEQ ID NO: 1621247 - DNA, 15 bp, Homo sapiens
caggccaccacaaga

SEQ ID NO: 1621248 - DNA, 15 bp, Homo sapiens
aggccaccacaagaa

SEQ ID NO: 1621249 - DNA, 15 bp, Homo sapiens
ggccaccacaagaat

SEQ ID NO: 1621250 - DNA, 15 bp, Homo sapiens
gccaccacaagaatg

SEQ ID NO: 1621251 - DNA, 15 bp, Homo sapiens
ccaccacaagaatgt

SEQ ID NO: 1621252 - DNA, 15 bp, Homo sapiens
caccacaagaatgtt

SEQ ID NO: 1621253 - DNA, 15 bp, Homo sapiens
accacaagaatgttg

SEQ ID NO: 1621254 - DNA, 15 bp, Homo sapiens
ccacaagaatgttgc

SEQ ID NO: 1621255 - DNA, 15 bp, Homo sapiens
cacaagaatgttgca

SEQ ID NO: 1621256 - DNA, 15 bp, Homo sapiens
acaagaatgttgcat

SEQ ID NO: 1621257 - DNA, 15 bp, Homo sapiens
caagaatgttgcatt

SEQ ID NO: 1621258 - DNA, 15 bp, Homo sapiens
aagaatgttgcattt

SEQ ID NO: 1621259 - DNA, 15 bp, Homo sapiens
agaatgttgcatttt

SEQ ID NO: 1621260 - DNA, 15 bp, Homo sapiens
gaatgttgcattttc

SEQ ID NO: 1621261 - DNA, 15 bp, Homo sapiens
aatgttgcattttca

SEQ ID NO: 1621262 - DNA, 15 bp, Homo sapiens
atgttgcattttcat

SEQ ID NO: 1621263 - DNA, 15 bp, Homo sapiens
tgttgcattttcatt

SEQ ID NO: 1621264 - DNA, 15 bp, Homo sapiens
gttgcattttcatta

SEQ ID NO: 1621265 - DNA, 15 bp, Homo sapiens
ttgcattttcattat

SEQ ID NO: 1621266 - DNA, 15 bp, Homo sapiens
tgcattttcattatt

SEQ ID NO: 1621267 - DNA, 15 bp, Homo sapiens
gcattttcattatta

SEQ ID NO: 1621268 - DNA, 15 bp, Homo sapiens
cattttcattattat

SEQ ID NO: 1621269 - DNA, 15 bp, Homo sapiens
attttcattattatg

SEQ ID NO: 1621270 - DNA, 15 bp, Homo sapiens
ttttcattattatgg

SEQ ID NO: 1621271 - DNA, 15 bp, Homo sapiens
tttcattattatggt

SEQ ID NO: 1621272 - DNA, 15 bp, Homo sapiens
ttcattattatggta

SEQ ID NO: 1621273 - DNA, 15 bp, Homo sapiens
tcattattatggtaa

SEQ ID NO: 1621274 - DNA, 15 bp, Homo sapiens
cattattatggtaag

SEQ ID NO: 1621275 - DNA, 15 bp, Homo sapiens
attattatggtaagt

SEQ ID NO: 1621276 - DNA, 15 bp, Homo sapiens
ttattatggtaagta

SEQ ID NO: 1621277 - DNA, 15 bp, Homo sapiens
tattatggtaagtac

SEQ ID NO: 1621278 - DNA, 15 bp, Homo sapiens
attatggtaagtaca

SEQ ID NO: 1621279 - DNA, 15 bp, Homo sapiens
ttatggtaagtacac

SEQ ID NO: 1621280 - DNA, 15 bp, Homo sapiens
tatggtaagtacact

SEQ ID NO: 1621281 - DNA, 15 bp, Homo sapiens
atggtaagtacactg

SEQ ID NO: 1621282 - DNA, 15 bp, Homo sapiens
tggtaagtacactgg

SEQ ID NO: 1621283 - DNA, 15 bp, Homo sapiens
ggtaagtacactggt

SEQ ID NO: 1621284 - DNA, 15 bp, Homo sapiens
gtaagtacactggta

SEQ ID NO: 1621285 - DNA, 15 bp, Homo sapiens
taagtacactggtaa

SEQ ID NO: 1621286 - DNA, 15 bp, Homo sapiens
aagtacactggtaac

SEQ ID NO: 1621287 - DNA, 15 bp, Homo sapiens
agtacactggtaact

SEQ ID NO: 1621288 - DNA, 15 bp, Homo sapiens
gtacactggtaactt

SEQ ID NO: 1621289 - DNA, 15 bp, Homo sapiens
tacactggtaacttc

SEQ ID NO: 1621290 - DNA, 15 bp, Homo sapiens
acactggtaacttct

SEQ ID NO: 1621291 - DNA, 15 bp, Homo sapiens
cactggtaacttctt

SEQ ID NO: 1621292 - DNA, 15 bp, Homo sapiens
actggtaacttcttt

SEQ ID NO: 1621293 - DNA, 15 bp, Homo sapiens
ctggtaacttctttt

SEQ ID NO: 1621294 - DNA, 15 bp, Homo sapiens
tggtaacttcttttc

SEQ ID NO: 1621295 - DNA, 15 bp, Homo sapiens
ggtaacttcttttct

SEQ ID NO: 1621296 - DNA, 15 bp, Homo sapiens
gtaacttcttttcta

SEQ ID NO: 1621297 - DNA, 15 bp, Homo sapiens
taacttcttttctaa

SEQ ID NO: 1621298 - DNA, 15 bp, Homo sapiens
aacttcttttctaac

SEQ ID NO: 1621299 - DNA, 15 bp, Homo sapiens
acttcttttctaacc

SEQ ID NO: 1621300 - DNA, 15 bp, Homo sapiens
cttcttttctaacct

SEQ ID NO: 1621301 - DNA, 15 bp, Homo sapiens
ttcttttctaacctc

SEQ ID NO: 1621302 - DNA, 15 bp, Homo sapiens
tcttttctaacctcg

SEQ ID NO: 1621303 - DNA, 15 bp, Homo sapiens
cttttctaacctcgt

SEQ ID NO: 1621304 - DNA, 15 bp, Homo sapiens
ttttctaacctcgta

SEQ ID NO: 1621305 - DNA, 15 bp, Homo sapiens
tttctaacctcgtat

SEQ ID NO: 1621306 - DNA, 15 bp, Homo sapiens
ttctaacctcgtatg

SEQ ID NO: 1621307 - DNA, 15 bp, Homo sapiens
tctaacctcgtatgc

SEQ ID NO: 1621308 - DNA, 15 bp, Homo sapiens
ctaacctcgtatgca

SEQ ID NO: 1621309 - DNA, 15 bp, Homo sapiens
taacctcgtatgcat

SEQ ID NO: 1621310 - DNA, 15 bp, Homo sapiens
aacctcgtatgcata

SEQ ID NO: 1621311 - DNA, 15 bp, Homo sapiens
acctcgtatgcataa

SEQ ID NO: 1621312 - DNA, 15 bp, Homo sapiens
cctcgtatgcataat

SEQ ID NO: 1621313 - DNA, 15 bp, Homo sapiens
ctcgtatgcataatg

SEQ ID NO: 1621314 - DNA, 15 bp, Homo sapiens
tcgtatgcataatgt

SEQ ID NO: 1621315 - DNA, 15 bp, Homo sapiens
cgtatgcataatgta

SEQ ID NO: 1621316 - DNA, 15 bp, Homo sapiens
gtatgcataatgtaa

SEQ ID NO: 1621317 - DNA, 15 bp, Homo sapiens
tatgcataatgtaaa

SEQ ID NO: 1621318 - DNA, 15 bp, Homo sapiens
atgcataatgtaaac

SEQ ID NO: 1621319 - DNA, 15 bp, Homo sapiens
tgcataatgtaaaca

SEQ ID NO: 1621320 - DNA, 15 bp, Homo sapiens
gcataatgtaaacat

SEQ ID NO: 1621321 - DNA, 15 bp, Homo sapiens
cataatgtaaacatc

SEQ ID NO: 1621322 - DNA, 15 bp, Homo sapiens
ataatgtaaacatca

SEQ ID NO: 1621323 - DNA, 15 bp, Homo sapiens
taatgtaaacatcaa

SEQ ID NO: 1621324 - DNA, 15 bp, Homo sapiens
aatgtaaacatcaag

SEQ ID NO: 1621325 - DNA, 15 bp, Homo sapiens
atgtaaacatcaaga

SEQ ID NO: 1621326 - DNA, 15 bp, Homo sapiens
tgtaaacatcaagac

SEQ ID NO: 1621327 - DNA, 15 bp, Homo sapiens
gtaaacatcaagact

SEQ ID NO: 1621328 - DNA, 15 bp, Homo sapiens
taaacatcaagactg

SEQ ID NO: 1621329 - DNA, 15 bp, Homo sapiens
aaacatcaagactga

SEQ ID NO: 1621330 - DNA, 15 bp, Homo sapiens
aacatcaagactgac

SEQ ID NO: 1621331 - DNA, 15 bp, Homo sapiens
acatcaagactgaca

SEQ ID NO: 1621332 - DNA, 15 bp, Homo sapiens
catcaagactgacaa

SEQ ID NO: 1621333 - DNA, 15 bp, Homo sapiens
atcaagactgacaat

SEQ ID NO: 1621334 - DNA, 15 bp, Homo sapiens
tcaagactgacaatt

SEQ ID NO: 1621335 - DNA, 15 bp, Homo sapiens
caagactgacaattt

SEQ ID NO: 1621336 - DNA, 15 bp, Homo sapiens
aagactgacaatttg

SEQ ID NO: 1621337 - DNA, 15 bp, Homo sapiens
agactgacaatttgg

SEQ ID NO: 1621338 - DNA, 15 bp, Homo sapiens
gactgacaatttggg

SEQ ID NO: 1621339 - DNA, 15 bp, Homo sapiens
actgacaatttgggg

SEQ ID NO: 1621340 - DNA, 15 bp, Homo sapiens
ctgacaatttggggc

SEQ ID NO: 1621341 - DNA, 15 bp, Homo sapiens
tgacaatttggggct

SEQ ID NO: 1621342 - DNA, 15 bp, Homo sapiens
gacaatttggggcta

SEQ ID NO: 1621343 - DNA, 15 bp, Homo sapiens
acaatttggggctag

SEQ ID NO: 1621344 - DNA, 15 bp, Homo sapiens
caatttggggctagc

SEQ ID NO: 1621345 - DNA, 15 bp, Homo sapiens
aatttggggctagca

SEQ ID NO: 1621346 - DNA, 15 bp, Homo sapiens
atttggggctagcaa

SEQ ID NO: 1621347 - DNA, 15 bp, Homo sapiens
tttggggctagcaac

SEQ ID NO: 1621348 - DNA, 15 bp, Homo sapiens
ttggggctagcaact

SEQ ID NO: 1621349 - DNA, 15 bp, Homo sapiens
tggggctagcaactc

SEQ ID NO: 1621350 - DNA, 15 bp, Homo sapiens
ggggctagcaactca

SEQ ID NO: 1621351 - DNA, 15 bp, Homo sapiens
gggctagcaactcaa

SEQ ID NO: 1621352 - DNA, 15 bp, Homo sapiens
ggctagcaactcaat

SEQ ID NO: 1621353 - DNA, 15 bp, Homo sapiens
gctagcaactcaatt

SEQ ID NO: 1621354 - DNA, 15 bp, Homo sapiens
ctagcaactcaattg

SEQ ID NO: 1621355 - DNA, 15 bp, Homo sapiens
tagcaactcaattgg

SEQ ID NO: 1621356 - DNA, 15 bp, Homo sapiens
agcaactcaattgga

SEQ ID NO: 1621357 - DNA, 15 bp, Homo sapiens
gcaactcaattggaa

SEQ ID NO: 1621358 - DNA, 15 bp, Homo sapiens
caactcaattggaaa

SEQ ID NO: 1621359 - DNA, 15 bp, Homo sapiens
aactcaattggaaaa

SEQ ID NO: 1621360 - DNA, 15 bp, Homo sapiens
actcaattggaaaat

SEQ ID NO: 1621361 - DNA, 15 bp, Homo sapiens
ctcaattggaaaatc

SEQ ID NO: 1621362 - DNA, 15 bp, Homo sapiens
tcaattggaaaatca

SEQ ID NO: 1621363 - DNA, 15 bp, Homo sapiens
caattggaaaatcac

SEQ ID NO: 1621364 - DNA, 15 bp, Homo sapiens
attggaaaatcactg

SEQ ID NO: 1621365 - DNA, 15 bp, Homo sapiens
ttggaaaatcactgt

SEQ ID NO: 1621366 - DNA, 15 bp, Homo sapiens
tggaaaatcactgtt

SEQ ID NO: 1621367 - DNA, 15 bp, Homo sapiens
ggaaaatcactgttc

SEQ ID NO: 1621368 - DNA, 15 bp, Homo sapiens
gaaaatcactgttct

SEQ ID NO: 1621369 - DNA, 15 bp, Homo sapiens
aaaatcactgttctc

SEQ ID NO: 1621370 - DNA, 15 bp, Homo sapiens
aaatcactgttctct

SEQ ID NO: 1621371 - DNA, 15 bp, Homo sapiens
aatcactgttctcta

SEQ ID NO: 1621372 - DNA, 15 bp, Homo sapiens
atcactgttctctat

SEQ ID NO: 1621373 - DNA, 15 bp, Homo sapiens
tcactgttctctatt

SEQ ID NO: 1621374 - DNA, 15 bp, Homo sapiens
cactgttctctattg

SEQ ID NO: 1621375 - DNA, 15 bp, Homo sapiens
actgttctctattgt

SEQ ID NO: 1621376 - DNA, 15 bp, Homo sapiens
ctgttctctattgta

SEQ ID NO: 1621377 - DNA, 15 bp, Homo sapiens
tgttctctattgtaa

SEQ ID NO: 1621378 - DNA, 15 bp, Homo sapiens
gttctctattgtaaa

SEQ ID NO: 1621379 - DNA, 15 bp, Homo sapiens
ttctctattgtaaaa

SEQ ID NO: 1621380 - DNA, 15 bp, Homo sapiens
tctctattgtaaaat

SEQ ID NO: 1621381 - DNA, 15 bp, Homo sapiens
ctctattgtaaaatt

SEQ ID NO: 1621382 - DNA, 15 bp, Homo sapiens
tctattgtaaaattc

SEQ ID NO: 1621383 - DNA, 15 bp, Homo sapiens
ctattgtaaaattcc

SEQ ID NO: 1621384 - DNA, 15 bp, Homo sapiens
tattgtaaaattcct

SEQ ID NO: 1621385 - DNA, 15 bp, Homo sapiens
attgtaaaattccta

SEQ ID NO: 1621386 - DNA, 15 bp, Homo sapiens
ttgtaaaattcctaa

SEQ ID NO: 1621387 - DNA, 15 bp, Homo sapiens
tgtaaaattcctaat

SEQ ID NO: 1621388 - DNA, 15 bp, Homo sapiens
gtaaaattcctaatt

SEQ ID NO: 1621389 - DNA, 15 bp, Homo sapiens
taaaattcctaatta

SEQ ID NO: 1621390 - DNA, 15 bp, Homo sapiens
aaaattcctaattat

SEQ ID NO: 1621391 - DNA, 15 bp, Homo sapiens
aaattcctaattatg

SEQ ID NO: 1621392 - DNA, 15 bp, Homo sapiens
aattcctaattatgt

SEQ ID NO: 1621393 - DNA, 15 bp, Homo sapiens
attcctaattatgtt

SEQ ID NO: 1621394 - DNA, 15 bp, Homo sapiens
ttcctaattatgttt

SEQ ID NO: 1621395 - DNA, 15 bp, Homo sapiens
cctaattatgtttcc

SEQ ID NO: 1621396 - DNA, 15 bp, Homo sapiens
ctaattatgtttccc

SEQ ID NO: 1621397 - DNA, 15 bp, Homo sapiens
taattatgtttccct

SEQ ID NO: 1621398 - DNA, 15 bp, Homo sapiens
aattatgtttcccta

SEQ ID NO: 1621399 - DNA, 15 bp, Homo sapiens
attatgtttccctag

SEQ ID NO: 1621400 - DNA, 15 bp, Homo sapiens
ttatgtttccctaga

SEQ ID NO: 1621401 - DNA, 15 bp, Homo sapiens
tatgtttccctagaa

SEQ ID NO: 1621402 - DNA, 15 bp, Homo sapiens
atgtttccctagaaa

SEQ ID NO: 1621403 - DNA, 15 bp, Homo sapiens
tgtttccctagaaat

SEQ ID NO: 1621404 - DNA, 15 bp, Homo sapiens
gtttccctagaaatt

SEQ ID NO: 1621405 - DNA, 15 bp, Homo sapiens
tttccctagaaattg

SEQ ID NO: 1621406 - DNA, 15 bp, Homo sapiens
ttccctagaaattgc

SEQ ID NO: 1621407 - DNA, 15 bp, Homo sapiens
tccctagaaattgca

SEQ ID NO: 1621408 - DNA, 15 bp, Homo sapiens
ccctagaaattgcaa

SEQ ID NO: 1621409 - DNA, 15 bp, Homo sapiens
cctagaaattgcaaa

SEQ ID NO: 1621410 - DNA, 15 bp, Homo sapiens
ctagaaattgcaaag

SEQ ID NO: 1621411 - DNA, 15 bp, Homo sapiens
tagaaattgcaaagt

SEQ ID NO: 1621412 - DNA, 15 bp, Homo sapiens
agaaattgcaaagtg

SEQ ID NO: 1621413 - DNA, 15 bp, Homo sapiens
gaaattgcaaagtgc

SEQ ID NO: 1621414 - DNA, 15 bp, Homo sapiens
aaattgcaaagtgca

SEQ ID NO: 1621415 - DNA, 15 bp, Homo sapiens
aattgcaaagtgcac

SEQ ID NO: 1621416 - DNA, 15 bp, Homo sapiens
attgcaaagtgcaca

SEQ ID NO: 1621417 - DNA, 15 bp, Homo sapiens
ttgcaaagtgcacat

SEQ ID NO: 1621418 - DNA, 15 bp, Homo sapiens
tgcaaagtgcacatg

SEQ ID NO: 1621419 - DNA, 15 bp, Homo sapiens
gcaaagtgcacatgt

SEQ ID NO: 1621420 - DNA, 15 bp, Homo sapiens
caaagtgcacatgta

SEQ ID NO: 1621421 - DNA, 15 bp, Homo sapiens
aaagtgcacatgtac

SEQ ID NO: 1621422 - DNA, 15 bp, Homo sapiens
aagtgcacatgtact

SEQ ID NO: 1621423 - DNA, 15 bp, Homo sapiens
agtgcacatgtactt

SEQ ID NO: 1621424 - DNA, 15 bp, Homo sapiens
gtgcacatgtacttg

SEQ ID NO: 1621425 - DNA, 15 bp, Homo sapiens
tgcacatgtacttgc

SEQ ID NO: 1621426 - DNA, 15 bp, Homo sapiens
gcacatgtacttgca

SEQ ID NO: 1621427 - DNA, 15 bp, Homo sapiens
cacatgtacttgcat

SEQ ID NO: 1621428 - DNA, 15 bp, Homo sapiens
acatgtacttgcatt

SEQ ID NO: 1621429 - DNA, 15 bp, Homo sapiens
catgtacttgcattt

SEQ ID NO: 1621430 - DNA, 15 bp, Homo sapiens
atgtacttgcattta

SEQ ID NO: 1621431 - DNA, 15 bp, Homo sapiens
tgtacttgcatttaa

SEQ ID NO: 1621432 - DNA, 15 bp, Homo sapiens
gtacttgcatttaat

SEQ ID NO: 1621433 - DNA, 15 bp, Homo sapiens
tacttgcatttaatg

SEQ ID NO: 1621434 - DNA, 15 bp, Homo sapiens
acttgcatttaatgt

SEQ ID NO: 1621435 - DNA, 15 bp, Homo sapiens
cttgcatttaatgtt

SEQ ID NO: 1621436 - DNA, 15 bp, Homo sapiens
ttgcatttaatgttt

SEQ ID NO: 1621437 - DNA, 15 bp, Homo sapiens
tgcatttaatgtttg

SEQ ID NO: 1621438 - DNA, 15 bp, Homo sapiens
gcatttaatgtttgg

SEQ ID NO: 1621439 - DNA, 15 bp, Homo sapiens
catttaatgtttggt

SEQ ID NO: 1621440 - DNA, 15 bp, Homo sapiens
atttaatgtttggtc

SEQ ID NO: 1621441 - DNA, 15 bp, Homo sapiens
tttaatgtttggtcc

SEQ ID NO: 1621442 - DNA, 15 bp, Homo sapiens
ttaatgtttggtcca

SEQ ID NO: 1621443 - DNA, 15 bp, Homo sapiens
taatgtttggtccat

SEQ ID NO: 1621444 - DNA, 15 bp, Homo sapiens
aatgtttggtccatg

SEQ ID NO: 1621445 - DNA, 15 bp, Homo sapiens
atgtttggtccatgg

SEQ ID NO: 1621446 - DNA, 15 bp, Homo sapiens
tgtttggtccatggg

SEQ ID NO: 1621447 - DNA, 15 bp, Homo sapiens
gtttggtccatgggc

SEQ ID NO: 1621448 - DNA, 15 bp, Homo sapiens
tttggtccatgggct

SEQ ID NO: 1621449 - DNA, 15 bp, Homo sapiens
ttggtccatgggctg

SEQ ID NO: 1621450 - DNA, 15 bp, Homo sapiens
tggtccatgggctga

SEQ ID NO: 1621451 - DNA, 15 bp, Homo sapiens
ggtccatgggctgaa

SEQ ID NO: 1621452 - DNA, 15 bp, Homo sapiens
gtccatgggctgaat

SEQ ID NO: 1621453 - DNA, 15 bp, Homo sapiens
tccatgggctgaatg

SEQ ID NO: 1621454 - DNA, 15 bp, Homo sapiens
ccatgggctgaatgc

SEQ ID NO: 1621455 - DNA, 15 bp, Homo sapiens
catgggctgaatgct

SEQ ID NO: 1621456 - DNA, 15 bp, Homo sapiens
atgggctgaatgctt

SEQ ID NO: 1621457 - DNA, 15 bp, Homo sapiens
tgggctgaatgcttt

SEQ ID NO: 1621458 - DNA, 15 bp, Homo sapiens
gggctgaatgctttg

SEQ ID NO: 1621459 - DNA, 15 bp, Homo sapiens
ggctgaatgctttgt

SEQ ID NO: 1621460 - DNA, 15 bp, Homo sapiens
gctgaatgctttgtg

SEQ ID NO: 1621461 - DNA, 15 bp, Homo sapiens
ctgaatgctttgtgc

SEQ ID NO: 1621462 - DNA, 15 bp, Homo sapiens
tgaatgctttgtgca

SEQ ID NO: 1621463 - DNA, 15 bp, Homo sapiens
gaatgctttgtgcat

SEQ ID NO: 1621464 - DNA, 15 bp, Homo sapiens
aatgctttgtgcatt

SEQ ID NO: 1621465 - DNA, 15 bp, Homo sapiens
atgctttgtgcatta

SEQ ID NO: 1621466 - DNA, 15 bp, Homo sapiens
tgctttgtgcattac

SEQ ID NO: 1621467 - DNA, 15 bp, Homo sapiens
gctttgtgcattact

SEQ ID NO: 1621468 - DNA, 15 bp, Homo sapiens
ctttgtgcattactt

SEQ ID NO: 1621469 - DNA, 15 bp, Homo sapiens
tttgtgcattacttt

SEQ ID NO: 1621470 - DNA, 15 bp, Homo sapiens
ttgtgcattactttt

SEQ ID NO: 1621471 - DNA, 15 bp, Homo sapiens
tgtgcattacttttc

SEQ ID NO: 1621472 - DNA, 15 bp, Homo sapiens
gtgcattacttttct

SEQ ID NO: 1621473 - DNA, 15 bp, Homo sapiens
tgcattacttttctg

SEQ ID NO: 1621474 - DNA, 15 bp, Homo sapiens
gcattacttttctgg

SEQ ID NO: 1621475 - DNA, 15 bp, Homo sapiens
cattacttttctggt

SEQ ID NO: 1621476 - DNA, 15 bp, Homo sapiens
attacttttctggtt

SEQ ID NO: 1621477 - DNA, 15 bp, Homo sapiens
ttacttttctggttg

SEQ ID NO: 1621478 - DNA, 15 bp, Homo sapiens
tacttttctggttgt

SEQ ID NO: 1621479 - DNA, 15 bp, Homo sapiens
acttttctggttgtt

SEQ ID NO: 1621480 - DNA, 15 bp, Homo sapiens
cttttctggttgttg

SEQ ID NO: 1621481 - DNA, 15 bp, Homo sapiens
ttttctggttgttgt

SEQ ID NO: 1621482 - DNA, 15 bp, Homo sapiens
tttctggttgttgtt

SEQ ID NO: 1621483 - DNA, 15 bp, Homo sapiens
ttctggttgttgttg

SEQ ID NO: 1621484 - DNA, 15 bp, Homo sapiens
tctggttgttgttgt

SEQ ID NO: 1621485 - DNA, 15 bp, Homo sapiens
ctggttgttgttgtt

SEQ ID NO: 1621486 - DNA, 15 bp, Homo sapiens
tggttgttgttgttg

SEQ ID NO: 1621487 - DNA, 15 bp, Homo sapiens
ggttgttgttgttgt

SEQ ID NO: 1621488 - DNA, 15 bp, Homo sapiens
ttgttgttgttttga

SEQ ID NO: 1621489 - DNA, 15 bp, Homo sapiens
tgttgttgttttgag

SEQ ID NO: 1621490 - DNA, 15 bp, Homo sapiens
gttgttgttttgaga

SEQ ID NO: 1621491 - DNA, 15 bp, Homo sapiens
ttgttgttttgagac

SEQ ID NO: 1621492 - DNA, 15 bp, Homo sapiens
tgttgttttgagaca

SEQ ID NO: 1621493 - DNA, 15 bp, Homo sapiens
gttgttttgagacag

SEQ ID NO: 1621494 - DNA, 15 bp, Homo sapiens
ctcactctgttgcca

SEQ ID NO: 1621495 - DNA, 15 bp, Homo sapiens
tcactctgttgccag

SEQ ID NO: 1621496 - DNA, 15 bp, Homo sapiens
cactctgttgccagg

SEQ ID NO: 1621497 - DNA, 15 bp, Homo sapiens
actctgttgccaggc

SEQ ID NO: 1621498 - DNA, 15 bp, Homo sapiens
tctgttgccaggctg

SEQ ID NO: 1621499 - DNA, 15 bp, Homo sapiens
ctgttgccaggctgg

SEQ ID NO: 1621500 - DNA, 15 bp, Homo sapiens
tgttgccaggctgga

SEQ ID NO: 1621501 - DNA, 15 bp, Homo sapiens
gttgccaggctggag

SEQ ID NO: 1621502 - DNA, 15 bp, Homo sapiens
gcaattcttctgcca

SEQ ID NO: 1621503 - DNA, 15 bp, Homo sapiens
caattcttctgccac

SEQ ID NO: 1621504 - DNA, 15 bp, Homo sapiens
aattcttctgccaca

SEQ ID NO: 1621505 - DNA, 15 bp, Homo sapiens
attcttctgccacag

SEQ ID NO: 1621506 - DNA, 15 bp, Homo sapiens
ttcttctgccacagc

SEQ ID NO: 1621507 - DNA, 15 bp, Homo sapiens
tcttctgccacagcc

SEQ ID NO: 1621508 - DNA, 15 bp, Homo sapiens
cttctgccacagcct

SEQ ID NO: 1621509 - DNA, 15 bp, Homo sapiens
ttctgccacagcctt

SEQ ID NO: 1621510 - DNA, 15 bp, Homo sapiens
tctgccacagccttc

SEQ ID NO: 1621511 - DNA, 15 bp, Homo sapiens
ctgccacagccttcc

SEQ ID NO: 1621512 - DNA, 15 bp, Homo sapiens
tgccacagccttcca

SEQ ID NO: 1621513 - DNA, 15 bp, Homo sapiens
gccacagccttccaa

SEQ ID NO: 1621514 - DNA, 15 bp, Homo sapiens
ccacagccttccaag

SEQ ID NO: 1621515 - DNA, 15 bp, Homo sapiens
cacagccttccaagt

SEQ ID NO: 1621516 - DNA, 15 bp, Homo sapiens
acagccttccaagta

SEQ ID NO: 1621517 - DNA, 15 bp, Homo sapiens
cagccttccaagtaa

SEQ ID NO: 1621518 - DNA, 15 bp, Homo sapiens
agccttccaagtaac

SEQ ID NO: 1621519 - DNA, 15 bp, Homo sapiens
gccttccaagtaact

SEQ ID NO: 1621520 - DNA, 15 bp, Homo sapiens
ccttccaagtaactg

SEQ ID NO: 1621521 - DNA, 15 bp, Homo sapiens
cttccaagtaactgg

SEQ ID NO: 1621522 - DNA, 15 bp, Homo sapiens
ttccaagtaactggg

SEQ ID NO: 1621523 - DNA, 15 bp, Homo sapiens
tccaagtaactggga

SEQ ID NO: 1621524 - DNA, 15 bp, Homo sapiens
ccaagtaactgggat

SEQ ID NO: 1621525 - DNA, 15 bp, Homo sapiens
caagtaactgggatt

SEQ ID NO: 1621526 - DNA, 15 bp, Homo sapiens
aagtaactgggatta

SEQ ID NO: 1621527 - DNA, 15 bp, Homo sapiens
gggattacaggcgct

SEQ ID NO: 1621528 - DNA, 15 bp, Homo sapiens
ggattacaggcgctc

SEQ ID NO: 1621529 - DNA, 15 bp, Homo sapiens
gattacaggcgctca

SEQ ID NO: 1621530 - DNA, 15 bp, Homo sapiens
attacaggcgctcac

SEQ ID NO: 1621531 - DNA, 15 bp, Homo sapiens
ttacaggcgctcacc

SEQ ID NO: 1621532 - DNA, 15 bp, Homo sapiens
tacaggcgctcacca

SEQ ID NO: 1621533 - DNA, 15 bp, Homo sapiens
acaggcgctcaccac

SEQ ID NO: 1621534 - DNA, 15 bp, Homo sapiens
caggcgctcaccacc

SEQ ID NO: 1621535 - DNA, 15 bp, Homo sapiens
aggcgctcaccacca

SEQ ID NO: 1621536 - DNA, 15 bp, Homo sapiens
ggcgctcaccaccac

SEQ ID NO: 1621537 - DNA, 15 bp, Homo sapiens
gcgctcaccaccaca

SEQ ID NO: 1621538 - DNA, 15 bp, Homo sapiens
cgctcaccaccacac

SEQ ID NO: 1621539 - DNA, 15 bp, Homo sapiens
gctcaccaccacacc

SEQ ID NO: 1621540 - DNA, 15 bp, Homo sapiens
ctcaccaccacaccc

SEQ ID NO: 1621541 - DNA, 15 bp, Homo sapiens
tcaccaccacaccct

SEQ ID NO: 1621542 - DNA, 15 bp, Homo sapiens
caccaccacaccctg

SEQ ID NO: 1621543 - DNA, 15 bp, Homo sapiens
accctgctaattttt

SEQ ID NO: 1621544 - DNA, 15 bp, Homo sapiens
ccctgctaatttttg

SEQ ID NO: 1621545 - DNA, 15 bp, Homo sapiens
cctgctaatttttgt

SEQ ID NO: 1621546 - DNA, 15 bp, Homo sapiens
ctgctaatttttgta

SEQ ID NO: 1621547 - DNA, 15 bp, Homo sapiens
tgctaatttttgtac

SEQ ID NO: 1621548 - DNA, 15 bp, Homo sapiens
ggccaggctggcctc

SEQ ID NO: 1621549 - DNA, 15 bp, Homo sapiens
gccaggctggcctca

SEQ ID NO: 1621550 - DNA, 15 bp, Homo sapiens
ccaggctggcctcaa

SEQ ID NO: 1621551 - DNA, 15 bp, Homo sapiens
caggctggcctcaaa

SEQ ID NO: 1621552 - DNA, 15 bp, Homo sapiens
ggcctcaaactcctg

SEQ ID NO: 1621553 - DNA, 15 bp, Homo sapiens
gcctcaaactcctga

SEQ ID NO: 1621554 - DNA, 15 bp, Homo sapiens
cctcaaactcctgac

SEQ ID NO: 1621555 - DNA, 15 bp, Homo sapiens
agtgatccacctgct

SEQ ID NO: 1621556 - DNA, 15 bp, Homo sapiens
gtgatccacctgctt

SEQ ID NO: 1621557 - DNA, 15 bp, Homo sapiens
atccacctgctttga

SEQ ID NO: 1621558 - DNA, 15 bp, Homo sapiens
tccacctgctttgac

SEQ ID NO: 1621559 - DNA, 15 bp, Homo sapiens
ccacctgctttgacc

SEQ ID NO: 1621560 - DNA, 15 bp, Homo sapiens
cacctgctttgacct

SEQ ID NO: 1621561 - DNA, 15 bp, Homo sapiens
acctgctttgacctc

SEQ ID NO: 1621562 - DNA, 15 bp, Homo sapiens
cctgctttgacctcc

SEQ ID NO: 1621563 - DNA, 15 bp, Homo sapiens
ctgctttgacctccc

SEQ ID NO: 1621564 - DNA, 15 bp, Homo sapiens
tgctttgacctccca

SEQ ID NO: 1621565 - DNA, 15 bp, Homo sapiens
gctttgacctcccaa

SEQ ID NO: 1621566 - DNA, 15 bp, Homo sapiens
ctttgacctcccaaa

SEQ ID NO: 1621567 - DNA, 15 bp, Homo sapiens
tttgacctcccaaaa

SEQ ID NO: 1621568 - DNA, 15 bp, Homo sapiens
ttgacctcccaaaat

SEQ ID NO: 1621569 - DNA, 15 bp, Homo sapiens
tgacctcccaaaatg

SEQ ID NO: 1621570 - DNA, 15 bp, Homo sapiens
gacctcccaaaatgc

SEQ ID NO: 1621571 - DNA, 15 bp, Homo sapiens
acctcccaaaatgct

SEQ ID NO: 1621572 - DNA, 15 bp, Homo sapiens
aggcatgagccacct

SEQ ID NO: 1621573 - DNA, 15 bp, Homo sapiens
ggcatgagccacctt

SEQ ID NO: 1621574 - DNA, 15 bp, Homo sapiens
gcatgagccaccttg

SEQ ID NO: 1621575 - DNA, 15 bp, Homo sapiens
catgagccaccttgc

SEQ ID NO: 1621576 - DNA, 15 bp, Homo sapiens
atgagccaccttgcc

SEQ ID NO: 1621577 - DNA, 15 bp, Homo sapiens
gagccaccttgccca

SEQ ID NO: 1621578 - DNA, 15 bp, Homo sapiens
agccaccttgcccag

SEQ ID NO: 1621579 - DNA, 15 bp, Homo sapiens
gccaccttgcccagc

SEQ ID NO: 1621580 - DNA, 15 bp, Homo sapiens
ccaccttgcccagcc

SEQ ID NO: 1621581 - DNA, 15 bp, Homo sapiens
caccttgcccagcct

SEQ ID NO: 1621582 - DNA, 15 bp, Homo sapiens
accttgcccagcctg

SEQ ID NO: 1621583 - DNA, 15 bp, Homo sapiens
ccttgcccagcctgt

SEQ ID NO: 1621584 - DNA, 15 bp, Homo sapiens
cttgcccagcctgtg

SEQ ID NO: 1621585 - DNA, 15 bp, Homo sapiens
ttgcccagcctgtgc

SEQ ID NO: 1621586 - DNA, 15 bp, Homo sapiens
tgcccagcctgtgca

SEQ ID NO: 1621587 - DNA, 15 bp, Homo sapiens
gcccagcctgtgcat

SEQ ID NO: 1621588 - DNA, 15 bp, Homo sapiens
cccagcctgtgcatt

SEQ ID NO: 1621589 - DNA, 15 bp, Homo sapiens
ccagcctgtgcatta

SEQ ID NO: 1621590 - DNA, 15 bp, Homo sapiens
cagcctgtgcattac

SEQ ID NO: 1621591 - DNA, 15 bp, Homo sapiens
agcctgtgcattact

SEQ ID NO: 1621592 - DNA, 15 bp, Homo sapiens
gcctgtgcattactt

SEQ ID NO: 1621593 - DNA, 15 bp, Homo sapiens
cctgtgcattacttt

SEQ ID NO: 1621594 - DNA, 15 bp, Homo sapiens
ctgtgcattactttt

SEQ ID NO: 1621595 - DNA, 15 bp, Homo sapiens
tgtgcattacttttg

SEQ ID NO: 1621596 - DNA, 15 bp, Homo sapiens
gtgcattacttttga

SEQ ID NO: 1621597 - DNA, 15 bp, Homo sapiens
tgcattacttttgag

SEQ ID NO: 1621598 - DNA, 15 bp, Homo sapiens
gcattacttttgagg

SEQ ID NO: 1621599 - DNA, 15 bp, Homo sapiens
cattacttttgagga

SEQ ID NO: 1621600 - DNA, 15 bp, Homo sapiens
attacttttgaggac

SEQ ID NO: 1621601 - DNA, 15 bp, Homo sapiens
ttacttttgaggaca

SEQ ID NO: 1621602 - DNA, 15 bp, Homo sapiens
tacttttgaggacac

SEQ ID NO: 1621603 - DNA, 15 bp, Homo sapiens
acttttgaggacaca

SEQ ID NO: 1621604 - DNA, 15 bp, Homo sapiens
cttttgaggacacat

SEQ ID NO: 1621605 - DNA, 15 bp, Homo sapiens
ttttgaggacacatt

SEQ ID NO: 1621606 - DNA, 15 bp, Homo sapiens
tttgaggacacattt

SEQ ID NO: 1621607 - DNA, 15 bp, Homo sapiens
ttgaggacacatttg

SEQ ID NO: 1621608 - DNA, 15 bp, Homo sapiens
tgaggacacatttga

SEQ ID NO: 1621609 - DNA, 15 bp, Homo sapiens
gaggacacatttgac

SEQ ID NO: 1621610 - DNA, 15 bp, Homo sapiens
aggacacatttgaca

SEQ ID NO: 1621611 - DNA, 15 bp, Homo sapiens
ggacacatttgacaa

SEQ ID NO: 1621612 - DNA, 15 bp, Homo sapiens
gacacatttgacaat

SEQ ID NO: 1621613 - DNA, 15 bp, Homo sapiens
acacatttgacaatg

SEQ ID NO: 1621614 - DNA, 15 bp, Homo sapiens
cacatttgacaatgg

SEQ ID NO: 1621615 - DNA, 15 bp, Homo sapiens
acatttgacaatggc

SEQ ID NO: 1621616 - DNA, 15 bp, Homo sapiens
catttgacaatggca

SEQ ID NO: 1621617 - DNA, 15 bp, Homo sapiens
atttgacaatggcac

SEQ ID NO: 1621618 - DNA, 15 bp, Homo sapiens
tttgacaatggcaca

SEQ ID NO: 1621619 - DNA, 15 bp, Homo sapiens
ttgacaatggcacag

SEQ ID NO: 1621620 - DNA, 15 bp, Homo sapiens
tgacaatggcacagt

SEQ ID NO: 1621621 - DNA, 15 bp, Homo sapiens
gacaatggcacagtc

SEQ ID NO: 1621622 - DNA, 15 bp, Homo sapiens
acaatggcacagtca

SEQ ID NO: 1621623 - DNA, 15 bp, Homo sapiens
caatggcacagtcaa

SEQ ID NO: 1621624 - DNA, 15 bp, Homo sapiens
aatggcacagtcaag

SEQ ID NO: 1621625 - DNA, 15 bp, Homo sapiens
atggcacagtcaaga

SEQ ID NO: 1621626 - DNA, 15 bp, Homo sapiens
tggcacagtcaagaa

SEQ ID NO: 1621627 - DNA, 15 bp, Homo sapiens
ggcacagtcaagaac

SEQ ID NO: 1621628 - DNA, 15 bp, Homo sapiens
gcacagtcaagaaca

SEQ ID NO: 1621629 - DNA, 15 bp, Homo sapiens
cacagtcaagaacac

SEQ ID NO: 1621630 - DNA, 15 bp, Homo sapiens
acagtcaagaacacc

SEQ ID NO: 1621631 - DNA, 15 bp, Homo sapiens
cagtcaagaacacca

SEQ ID NO: 1621632 - DNA, 15 bp, Homo sapiens
agtcaagaacaccac

SEQ ID NO: 1621633 - DNA, 15 bp, Homo sapiens
gtcaagaacaccaca

SEQ ID NO: 1621634 - DNA, 15 bp, Homo sapiens
tcaagaacaccacat

SEQ ID NO: 1621635 - DNA, 15 bp, Homo sapiens
caagaacaccacata

SEQ ID NO: 1621636 - DNA, 15 bp, Homo sapiens
aagaacaccacataa

SEQ ID NO: 1621637 - DNA, 15 bp, Homo sapiens
agaacaccacataaa

SEQ ID NO: 1621638 - DNA, 15 bp, Homo sapiens
gaacaccacataaag

SEQ ID NO: 1621639 - DNA, 15 bp, Homo sapiens
aacaccacataaagt

SEQ ID NO: 1621640 - DNA, 15 bp, Homo sapiens
acaccacataaagta

SEQ ID NO: 1621641 - DNA, 15 bp, Homo sapiens
caccacataaagtag

SEQ ID NO: 1621642 - DNA, 15 bp, Homo sapiens
accacataaagtagt

SEQ ID NO: 1621643 - DNA, 15 bp, Homo sapiens
ccacataaagtagta

SEQ ID NO: 1621644 - DNA, 15 bp, Homo sapiens
cacataaagtagtat

SEQ ID NO: 1621645 - DNA, 15 bp, Homo sapiens
acataaagtagtatt

SEQ ID NO: 1621646 - DNA, 15 bp, Homo sapiens
cataaagtagtattg

SEQ ID NO: 1621647 - DNA, 15 bp, Homo sapiens
ataaagtagtattgg

SEQ ID NO: 1621648 - DNA, 15 bp, Homo sapiens
taaagtagtattggc

SEQ ID NO: 1621649 - DNA, 15 bp, Homo sapiens
aaagtagtattggca

SEQ ID NO: 1621650 - DNA, 15 bp, Homo sapiens
aagtagtattggcag

SEQ ID NO: 1621651 - DNA, 15 bp, Homo sapiens
agtagtattggcaga

SEQ ID NO: 1621652 - DNA, 15 bp, Homo sapiens
gtagtattggcagat

SEQ ID NO: 1621653 - DNA, 15 bp, Homo sapiens
tagtattggcagatt

SEQ ID NO: 1621654 - DNA, 15 bp, Homo sapiens
agtattggcagatta

SEQ ID NO: 1621655 - DNA, 15 bp, Homo sapiens
gtattggcagattat

SEQ ID NO: 1621656 - DNA, 15 bp, Homo sapiens
tattggcagattatg

SEQ ID NO: 1621657 - DNA, 15 bp, Homo sapiens
attggcagattatga

SEQ ID NO: 1621658 - DNA, 15 bp, Homo sapiens
ttggcagattatgaa

SEQ ID NO: 1621659 - DNA, 15 bp, Homo sapiens
tggcagattatgaaa

SEQ ID NO: 1621660 - DNA, 15 bp, Homo sapiens
ggcagattatgaaat

SEQ ID NO: 1621661 - DNA, 15 bp, Homo sapiens
gcagattatgaaata

SEQ ID NO: 1621662 - DNA, 15 bp, Homo sapiens
cagattatgaaatag

SEQ ID NO: 1621663 - DNA, 15 bp, Homo sapiens
agattatgaaatagc

SEQ ID NO: 1621664 - DNA, 15 bp, Homo sapiens
gattatgaaatagca

SEQ ID NO: 1621665 - DNA, 15 bp, Homo sapiens
attatgaaatagcaa

SEQ ID NO: 1621666 - DNA, 15 bp, Homo sapiens
ttatgaaatagcaat

SEQ ID NO: 1621667 - DNA, 15 bp, Homo sapiens
tatgaaatagcaatt

SEQ ID NO: 1621668 - DNA, 15 bp, Homo sapiens
atgaaatagcaattg

SEQ ID NO: 1621669 - DNA, 15 bp, Homo sapiens
tgaaatagcaattgt

SEQ ID NO: 1621670 - DNA, 15 bp, Homo sapiens
gaaatagcaattgtt

SEQ ID NO: 1621671 - DNA, 15 bp, Homo sapiens
aaatagcaattgttt

SEQ ID NO: 1621672 - DNA, 15 bp, Homo sapiens
aatagcaattgtttt

SEQ ID NO: 1621673 - DNA, 15 bp, Homo sapiens
atagcaattgttttg

SEQ ID NO: 1621674 - DNA, 15 bp, Homo sapiens
tagcaattgttttgg

SEQ ID NO: 1621675 - DNA, 15 bp, Homo sapiens
agcaattgttttgga

SEQ ID NO: 1621676 - DNA, 15 bp, Homo sapiens
gcaattgttttggaa

SEQ ID NO: 1621677 - DNA, 15 bp, Homo sapiens
caattgttttggaag

SEQ ID NO: 1621678 - DNA, 15 bp, Homo sapiens
aattgttttggaaga

SEQ ID NO: 1621679 - DNA, 15 bp, Homo sapiens
attgttttggaagac

SEQ ID NO: 1621680 - DNA, 15 bp, Homo sapiens
ttgttttggaagaca

SEQ ID NO: 1621681 - DNA, 15 bp, Homo sapiens
tgttttggaagacag

SEQ ID NO: 1621682 - DNA, 15 bp, Homo sapiens
gttttggaagacagc

SEQ ID NO: 1621683 - DNA, 15 bp, Homo sapiens
ttttggaagacagca

SEQ ID NO: 1621684 - DNA, 15 bp, Homo sapiens
tttggaagacagcaa

SEQ ID NO: 1621685 - DNA, 15 bp, Homo sapiens
ttggaagacagcaaa

SEQ ID NO: 1621686 - DNA, 15 bp, Homo sapiens
tggaagacagcaaaa

SEQ ID NO: 1621687 - DNA, 15 bp, Homo sapiens
ggaagacagcaaaac

SEQ ID NO: 1621688 - DNA, 15 bp, Homo sapiens
gaagacagcaaaacc

SEQ ID NO: 1621689 - DNA, 15 bp, Homo sapiens
aagacagcaaaacct

SEQ ID NO: 1621690 - DNA, 15 bp, Homo sapiens
agacagcaaaacctg

SEQ ID NO: 1621691 - DNA, 15 bp, Homo sapiens
gacagcaaaacctga

SEQ ID NO: 1621692 - DNA, 15 bp, Homo sapiens
acagcaaaacctgaa

SEQ ID NO: 1621693 - DNA, 15 bp, Homo sapiens
cagcaaaacctgaag

SEQ ID NO: 1621694 - DNA, 15 bp, Homo sapiens
agcaaaacctgaagt

SEQ ID NO: 1621695 - DNA, 15 bp, Homo sapiens
gcaaaacctgaagta

SEQ ID NO: 1621696 - DNA, 15 bp, Homo sapiens
caaaacctgaagtat

SEQ ID NO: 1621697 - DNA, 15 bp, Homo sapiens
aaaacctgaagtatt

SEQ ID NO: 1621698 - DNA, 15 bp, Homo sapiens
aaacctgaagtattt

SEQ ID NO: 1621699 - DNA, 15 bp, Homo sapiens
aacctgaagtatttt

SEQ ID NO: 1621700 - DNA, 15 bp, Homo sapiens
acctgaagtattttc

SEQ ID NO: 1621701 - DNA, 15 bp, Homo sapiens
cctgaagtattttca

SEQ ID NO: 1621702 - DNA, 15 bp, Homo sapiens
ctgaagtattttcag

SEQ ID NO: 1621703 - DNA, 15 bp, Homo sapiens
tgaagtattttcaga

SEQ ID NO: 1621704 - DNA, 15 bp, Homo sapiens
gaagtattttcagac

SEQ ID NO: 1621705 - DNA, 15 bp, Homo sapiens
aagtattttcagaca

SEQ ID NO: 1621706 - DNA, 15 bp, Homo sapiens
agtattttcagacat

SEQ ID NO: 1621707 - DNA, 15 bp, Homo sapiens
gtattttcagacatg

SEQ ID NO: 1621708 - DNA, 15 bp, Homo sapiens
tattttcagacatgt

SEQ ID NO: 1621709 - DNA, 15 bp, Homo sapiens
attttcagacatgta

SEQ ID NO: 1621710 - DNA, 15 bp, Homo sapiens
ttttcagacatgtac

SEQ ID NO: 1621711 - DNA, 15 bp, Homo sapiens
tttcagacatgtaca

SEQ ID NO: 1621712 - DNA, 15 bp, Homo sapiens
ttcagacatgtacat

SEQ ID NO: 1621713 - DNA, 15 bp, Homo sapiens
tcagacatgtacatt

SEQ ID NO: 1621714 - DNA, 15 bp, Homo sapiens
cagacatgtacatta

SEQ ID NO: 1621715 - DNA, 15 bp, Homo sapiens
agacatgtacattat

SEQ ID NO: 1621716 - DNA, 15 bp, Homo sapiens
gacatgtacattatg

SEQ ID NO: 1621717 - DNA, 15 bp, Homo sapiens
acatgtacattatga

SEQ ID NO: 1621718 - DNA, 15 bp, Homo sapiens
catgtacattatgaa

SEQ ID NO: 1621719 - DNA, 15 bp, Homo sapiens
atgtacattatgaag

SEQ ID NO: 1621720 - DNA, 15 bp, Homo sapiens
tgtacattatgaagt

SEQ ID NO: 1621721 - DNA, 15 bp, Homo sapiens
gtacattatgaagta

SEQ ID NO: 1621722 - DNA, 15 bp, Homo sapiens
tacattatgaagtat

SEQ ID NO: 1621723 - DNA, 15 bp, Homo sapiens
acattatgaagtatt

SEQ ID NO: 1621724 - DNA, 15 bp, Homo sapiens
cattatgaagtatta

SEQ ID NO: 1621725 - DNA, 15 bp, Homo sapiens
attatgaagtattat

SEQ ID NO: 1621726 - DNA, 15 bp, Homo sapiens
ttatgaagtattata

SEQ ID NO: 1621727 - DNA, 15 bp, Homo sapiens
tatgaagtattatac

SEQ ID NO: 1621728 - DNA, 15 bp, Homo sapiens
atgaagtattatacc

SEQ ID NO: 1621729 - DNA, 15 bp, Homo sapiens
tgaagtattatacct

SEQ ID NO: 1621730 - DNA, 15 bp, Homo sapiens
gaagtattatacctt

SEQ ID NO: 1621731 - DNA, 15 bp, Homo sapiens
aagtattataccttc

SEQ ID NO: 1621732 - DNA, 15 bp, Homo sapiens
agtattataccttct

SEQ ID NO: 1621733 - DNA, 15 bp, Homo sapiens
gtattataccttctt

SEQ ID NO: 1621734 - DNA, 15 bp, Homo sapiens
tattataccttcttt

SEQ ID NO: 1621735 - DNA, 15 bp, Homo sapiens
attataccttcttta

SEQ ID NO: 1621736 - DNA, 15 bp, Homo sapiens
ttataccttctttaa

SEQ ID NO: 1621737 - DNA, 15 bp, Homo sapiens
tataccttctttaac

SEQ ID NO: 1621738 - DNA, 15 bp, Homo sapiens
ataccttctttaact

SEQ ID NO: 1621739 - DNA, 15 bp, Homo sapiens
taccttctttaacta

SEQ ID NO: 1621740 - DNA, 15 bp, Homo sapiens
accttctttaactat

SEQ ID NO: 1621741 - DNA, 15 bp, Homo sapiens
ccttctttaactatg

SEQ ID NO: 1621742 - DNA, 15 bp, Homo sapiens
cttctttaactatgt

SEQ ID NO: 1621743 - DNA, 15 bp, Homo sapiens
ttctttaactatgtg

SEQ ID NO: 1621744 - DNA, 15 bp, Homo sapiens
tctttaactatgtgc

SEQ ID NO: 1621745 - DNA, 15 bp, Homo sapiens
ctttaactatgtgca

SEQ ID NO: 1621746 - DNA, 15 bp, Homo sapiens
tttaactatgtgcaa

SEQ ID NO: 1621747 - DNA, 15 bp, Homo sapiens
ttaactatgtgcaag

SEQ ID NO: 1621748 - DNA, 15 bp, Homo sapiens
taactatgtgcaagt

SEQ ID NO: 1621749 - DNA, 15 bp, Homo sapiens
aactatgtgcaagtt

SEQ ID NO: 1621750 - DNA, 15 bp, Homo sapiens
actatgtgcaagtta

SEQ ID NO: 1621751 - DNA, 15 bp, Homo sapiens
ctatgtgcaagttaa

SEQ ID NO: 1621752 - DNA, 15 bp, Homo sapiens
tatgtgcaagttaaa

SEQ ID NO: 1621753 - DNA, 15 bp, Homo sapiens
atgtgcaagttaaaa

SEQ ID NO: 1621754 - DNA, 15 bp, Homo sapiens
tgtgcaagttaaaat

SEQ ID NO: 1621755 - DNA, 15 bp, Homo sapiens
gtgcaagttaaaatc

SEQ ID NO: 1621756 - DNA, 15 bp, Homo sapiens
tgcaagttaaaatca

SEQ ID NO: 1621757 - DNA, 15 bp, Homo sapiens
gcaagttaaaatcag

SEQ ID NO: 1621758 - DNA, 15 bp, Homo sapiens
caagttaaaatcagt

SEQ ID NO: 1621759 - DNA, 15 bp, Homo sapiens
aagttaaaatcagtc

SEQ ID NO: 1621760 - DNA, 15 bp, Homo sapiens
agttaaaatcagtca

SEQ ID NO: 1621761 - DNA, 15 bp, Homo sapiens
gttaaaatcagtcat

SEQ ID NO: 1621762 - DNA, 15 bp, Homo sapiens
ttaaaatcagtcata

SEQ ID NO: 1621763 - DNA, 15 bp, Homo sapiens
taaaatcagtcataa

SEQ ID NO: 1621764 - DNA, 15 bp, Homo sapiens
aaaatcagtcataac

SEQ ID NO: 1621765 - DNA, 15 bp, Homo sapiens
aaatcagtcataact

SEQ ID NO: 1621766 - DNA, 15 bp, Homo sapiens
aatcagtcataactg

SEQ ID NO: 1621767 - DNA, 15 bp, Homo sapiens
atcagtcataactga

SEQ ID NO: 1621768 - DNA, 15 bp, Homo sapiens
tcagtcataactgaa

SEQ ID NO: 1621769 - DNA, 15 bp, Homo sapiens
cagtcataactgaaa

SEQ ID NO: 1621770 - DNA, 15 bp, Homo sapiens
agtcataactgaaaa

SEQ ID NO: 1621771 - DNA, 15 bp, Homo sapiens
gtcataactgaaaat

SEQ ID NO: 1621772 - DNA, 15 bp, Homo sapiens
tcataactgaaaatc

SEQ ID NO: 1621773 - DNA, 15 bp, Homo sapiens
cataactgaaaatca

SEQ ID NO: 1621774 - DNA, 15 bp, Homo sapiens
ataactgaaaatcaa

SEQ ID NO: 1621775 - DNA, 15 bp, Homo sapiens
taactgaaaatcaaa

SEQ ID NO: 1621776 - DNA, 15 bp, Homo sapiens
aactgaaaatcaaaa

SEQ ID NO: 1621777 - DNA, 15 bp, Homo sapiens
actgaaaatcaaaag

SEQ ID NO: 1621778 - DNA, 15 bp, Homo sapiens
ctgaaaatcaaaagg

SEQ ID NO: 1621779 - DNA, 15 bp, Homo sapiens
tgaaaatcaaaaggg

SEQ ID NO: 1621780 - DNA, 15 bp, Homo sapiens
gaaaatcaaaagggc

SEQ ID NO: 1621781 - DNA, 15 bp, Homo sapiens
aaaatcaaaagggca

SEQ ID NO: 1621782 - DNA, 15 bp, Homo sapiens
aaatcaaaagggcaa

SEQ ID NO: 1621783 - DNA, 15 bp, Homo sapiens
aatcaaaagggcaat

SEQ ID NO: 1621784 - DNA, 15 bp, Homo sapiens
atcaaaagggcaata

SEQ ID NO: 1621785 - DNA, 15 bp, Homo sapiens
tcaaaagggcaataa

SEQ ID NO: 1621786 - DNA, 15 bp, Homo sapiens
caaaagggcaataat

SEQ ID NO: 1621787 - DNA, 15 bp, Homo sapiens
aaaagggcaataatg

SEQ ID NO: 1621788 - DNA, 15 bp, Homo sapiens
aaagggcaataatga

SEQ ID NO: 1621789 - DNA, 15 bp, Homo sapiens
aagggcaataatgaa

SEQ ID NO: 1621790 - DNA, 15 bp, Homo sapiens
agggcaataatgaac

SEQ ID NO: 1621791 - DNA, 15 bp, Homo sapiens
gggcaataatgaaca

SEQ ID NO: 1621792 - DNA, 15 bp, Homo sapiens
ggcaataatgaacat

SEQ ID NO: 1621793 - DNA, 15 bp, Homo sapiens
gcaataatgaacata

SEQ ID NO: 1621794 - DNA, 15 bp, Homo sapiens
caataatgaacatac

SEQ ID NO: 1621795 - DNA, 15 bp, Homo sapiens
aataatgaacatact

SEQ ID NO: 1621796 - DNA, 15 bp, Homo sapiens
ataatgaacatactt

SEQ ID NO: 1621797 - DNA, 15 bp, Homo sapiens
taatgaacatacttc

SEQ ID NO: 1621798 - DNA, 15 bp, Homo sapiens
aatgaacatacttca

SEQ ID NO: 1621799 - DNA, 15 bp, Homo sapiens
atgaacatacttcat

SEQ ID NO: 1621800 - DNA, 15 bp, Homo sapiens
tgaacatacttcatc

SEQ ID NO: 1621801 - DNA, 15 bp, Homo sapiens
gaacatacttcatcc

SEQ ID NO: 1621802 - DNA, 15 bp, Homo sapiens
aacatacttcatcca

SEQ ID NO: 1621803 - DNA, 15 bp, Homo sapiens
acatacttcatccag

SEQ ID NO: 1621804 - DNA, 15 bp, Homo sapiens
catacttcatccaga

SEQ ID NO: 1621805 - DNA, 15 bp, Homo sapiens
atacttcatccagaa

SEQ ID NO: 1621806 - DNA, 15 bp, Homo sapiens
tacttcatccagaag

SEQ ID NO: 1621807 - DNA, 15 bp, Homo sapiens
acttcatccagaaga

SEQ ID NO: 1621808 - DNA, 15 bp, Homo sapiens
cttcatccagaagag

SEQ ID NO: 1621809 - DNA, 15 bp, Homo sapiens
ttcatccagaagagg

SEQ ID NO: 1621810 - DNA, 15 bp, Homo sapiens
tcatccagaagaggt

SEQ ID NO: 1621811 - DNA, 15 bp, Homo sapiens
catccagaagaggta

SEQ ID NO: 1621812 - DNA, 15 bp, Homo sapiens
atccagaagaggtat

SEQ ID NO: 1621813 - DNA, 15 bp, Homo sapiens
tccagaagaggtatc

SEQ ID NO: 1621814 - DNA, 15 bp, Homo sapiens
ccagaagaggtatcc

SEQ ID NO: 1621815 - DNA, 15 bp, Homo sapiens
cagaagaggtatcca

SEQ ID NO: 1621816 - DNA, 15 bp, Homo sapiens
agaagaggtatccac

SEQ ID NO: 1621817 - DNA, 15 bp, Homo sapiens
gaagaggtatccaca

SEQ ID NO: 1621818 - DNA, 15 bp, Homo sapiens
aagaggtatccacaa

SEQ ID NO: 1621819 - DNA, 15 bp, Homo sapiens
agaggtatccacaaa

SEQ ID NO: 1621820 - DNA, 15 bp, Homo sapiens
gaggtatccacaaaa

SEQ ID NO: 1621821 - DNA, 15 bp, Homo sapiens
aggtatccacaaaac

SEQ ID NO: 1621822 - DNA, 15 bp, Homo sapiens
ggtatccacaaaact

SEQ ID NO: 1621823 - DNA, 15 bp, Homo sapiens
gtatccacaaaactt

SEQ ID NO: 1621824 - DNA, 15 bp, Homo sapiens
tatccacaaaacttc

SEQ ID NO: 1621825 - DNA, 15 bp, Homo sapiens
atccacaaaacttct

SEQ ID NO: 1621826 - DNA, 15 bp, Homo sapiens
tccacaaaacttctg

SEQ ID NO: 1621827 - DNA, 15 bp, Homo sapiens
ccacaaaacttctga

SEQ ID NO: 1621828 - DNA, 15 bp, Homo sapiens
cacaaaacttctgaa

SEQ ID NO: 1621829 - DNA, 15 bp, Homo sapiens
acaaaacttctgaaa

SEQ ID NO: 1621830 - DNA, 15 bp, Homo sapiens
caaaacttctgaaag

SEQ ID NO: 1621831 - DNA, 15 bp, Homo sapiens
aaacttctgaaagag

SEQ ID NO: 1621832 - DNA, 15 bp, Homo sapiens
aacttctgaaagagg

SEQ ID NO: 1621833 - DNA, 15 bp, Homo sapiens
acttctgaaagaggt

SEQ ID NO: 1621834 - DNA, 15 bp, Homo sapiens
cttctgaaagaggtc

SEQ ID NO: 1621835 - DNA, 15 bp, Homo sapiens
ttctgaaagaggtct

SEQ ID NO: 1621836 - DNA, 15 bp, Homo sapiens
tctgaaagaggtctt

SEQ ID NO: 1621837 - DNA, 15 bp, Homo sapiens
ctgaaagaggtctta

SEQ ID NO: 1621838 - DNA, 15 bp, Homo sapiens
tgaaagaggtcttag

SEQ ID NO: 1621839 - DNA, 15 bp, Homo sapiens
gaaagaggtcttagt

SEQ ID NO: 1621840 - DNA, 15 bp, Homo sapiens
aaagaggtcttagta

SEQ ID NO: 1621841 - DNA, 15 bp, Homo sapiens
aagaggtcttagtat

SEQ ID NO: 1621842 - DNA, 15 bp, Homo sapiens
agaggtcttagtata

SEQ ID NO: 1621843 - DNA, 15 bp, Homo sapiens
gaggtcttagtatat

SEQ ID NO: 1621844 - DNA, 15 bp, Homo sapiens
aggtcttagtatatc

SEQ ID NO: 1621845 - DNA, 15 bp, Homo sapiens
ggtcttagtatatcc

SEQ ID NO: 1621846 - DNA, 15 bp, Homo sapiens
gtcttagtatatcca

SEQ ID NO: 1621847 - DNA, 15 bp, Homo sapiens
tcttagtatatccag

SEQ ID NO: 1621848 - DNA, 15 bp, Homo sapiens
cttagtatatccagg

SEQ ID NO: 1621849 - DNA, 15 bp, Homo sapiens
ttagtatatccaggg

SEQ ID NO: 1621850 - DNA, 15 bp, Homo sapiens
tagtatatccaggga

SEQ ID NO: 1621851 - DNA, 15 bp, Homo sapiens
agtatatccagggat

SEQ ID NO: 1621852 - DNA, 15 bp, Homo sapiens
gtatatccagggatg

SEQ ID NO: 1621853 - DNA, 15 bp, Homo sapiens
tatatccagggatgg

SEQ ID NO: 1621854 - DNA, 15 bp, Homo sapiens
atatccagggatgga

SEQ ID NO: 1621855 - DNA, 15 bp, Homo sapiens
tatccagggatggag

SEQ ID NO: 1621856 - DNA, 15 bp, Homo sapiens
atccagggatggaga

SEQ ID NO: 1621857 - DNA, 15 bp, Homo sapiens
tccagggatggagat

SEQ ID NO: 1621858 - DNA, 15 bp, Homo sapiens
ccagggatggagata

SEQ ID NO: 1621859 - DNA, 15 bp, Homo sapiens
cagggatggagatat

SEQ ID NO: 1621860 - DNA, 15 bp, Homo sapiens
agggatggagatatt

SEQ ID NO: 1621861 - DNA, 15 bp, Homo sapiens
gggatggagatatta

SEQ ID NO: 1621862 - DNA, 15 bp, Homo sapiens
ggatggagatattat

SEQ ID NO: 1621863 - DNA, 15 bp, Homo sapiens
gatggagatattatt

SEQ ID NO: 1621864 - DNA, 15 bp, Homo sapiens
atggagatattatta

SEQ ID NO: 1621865 - DNA, 15 bp, Homo sapiens
tggagatattattac

SEQ ID NO: 1621866 - DNA, 15 bp, Homo sapiens
ggagatattattaca

SEQ ID NO: 1621867 - DNA, 15 bp, Homo sapiens
gagatattattacaa

SEQ ID NO: 1621868 - DNA, 15 bp, Homo sapiens
agatattattacaat

SEQ ID NO: 1621869 - DNA, 15 bp, Homo sapiens
gatattattacaatg

SEQ ID NO: 1621870 - DNA, 15 bp, Homo sapiens
atattattacaatgt

SEQ ID NO: 1621871 - DNA, 15 bp, Homo sapiens
tattattacaatgta

SEQ ID NO: 1621872 - DNA, 15 bp, Homo sapiens
attattacaatgtat

SEQ ID NO: 1621873 - DNA, 15 bp, Homo sapiens
ttattacaatgtatt

SEQ ID NO: 1621874 - DNA, 15 bp, Homo sapiens
tattacaatgtatta

SEQ ID NO: 1621875 - DNA, 15 bp, Homo sapiens
attacaatgtattat

SEQ ID NO: 1621876 - DNA, 15 bp, Homo sapiens
ttacaatgtattatc

SEQ ID NO: 1621877 - DNA, 15 bp, Homo sapiens
tacaatgtattatcc

SEQ ID NO: 1621878 - DNA, 15 bp, Homo sapiens
acaatgtattatcca

SEQ ID NO: 1621879 - DNA, 15 bp, Homo sapiens
caatgtattatccaa

SEQ ID NO: 1621880 - DNA, 15 bp, Homo sapiens
aatgtattatccaaa

SEQ ID NO: 1621881 - DNA, 15 bp, Homo sapiens
atgtattatccaaat

SEQ ID NO: 1621882 - DNA, 15 bp, Homo sapiens
tgtattatccaaatg

SEQ ID NO: 1621883 - DNA, 15 bp, Homo sapiens
gtattatccaaatga

SEQ ID NO: 1621884 - DNA, 15 bp, Homo sapiens
tattatccaaatgat

SEQ ID NO: 1621885 - DNA, 15 bp, Homo sapiens
attatccaaatgatg

SEQ ID NO: 1621886 - DNA, 15 bp, Homo sapiens
ttatccaaatgatgg

SEQ ID NO: 1621887 - DNA, 15 bp, Homo sapiens
tatccaaatgatgga

SEQ ID NO: 1621888 - DNA, 15 bp, Homo sapiens
atccaaatgatggaa

SEQ ID NO: 1621889 - DNA, 15 bp, Homo sapiens
tccaaatgatggaag

SEQ ID NO: 1621890 - DNA, 15 bp, Homo sapiens
ccaaatgatggaagt

SEQ ID NO: 1621891 - DNA, 15 bp, Homo sapiens
caaatgatggaagtt

SEQ ID NO: 1621892 - DNA, 15 bp, Homo sapiens
aaatgatggaagttt

SEQ ID NO: 1621893 - DNA, 15 bp, Homo sapiens
aatgatggaagtttt

SEQ ID NO: 1621894 - DNA, 15 bp, Homo sapiens
atgatggaagttttc

SEQ ID NO: 1621895 - DNA, 15 bp, Homo sapiens
tgatggaagttttct

SEQ ID NO: 1621896 - DNA, 15 bp, Homo sapiens
gatggaagttttctc

SEQ ID NO: 1621897 - DNA, 15 bp, Homo sapiens
atggaagttttctct

SEQ ID NO: 1621898 - DNA, 15 bp, Homo sapiens
tggaagttttctctt

SEQ ID NO: 1621899 - DNA, 15 bp, Homo sapiens
ggaagttttctcttg

SEQ ID NO: 1621900 - DNA, 15 bp, Homo sapiens
gaagttttctcttgc

SEQ ID NO: 1621901 - DNA, 15 bp, Homo sapiens
aagttttctcttgct

SEQ ID NO: 1621902 - DNA, 15 bp, Homo sapiens
agttttctcttgctg

SEQ ID NO: 1621903 - DNA, 15 bp, Homo sapiens
gttttctcttgctga

SEQ ID NO: 1621904 - DNA, 15 bp, Homo sapiens
ttttctcttgctgat

SEQ ID NO: 1621905 - DNA, 15 bp, Homo sapiens
tttctcttgctgata

SEQ ID NO: 1621906 - DNA, 15 bp, Homo sapiens
ttctcttgctgatag

SEQ ID NO: 1621907 - DNA, 15 bp, Homo sapiens
tctcttgctgataga

SEQ ID NO: 1621908 - DNA, 15 bp, Homo sapiens
ctcttgctgatagaa

SEQ ID NO: 1621909 - DNA, 15 bp, Homo sapiens
tcttgctgatagaat

SEQ ID NO: 1621910 - DNA, 15 bp, Homo sapiens
cttgctgatagaatg

SEQ ID NO: 1621911 - DNA, 15 bp, Homo sapiens
ttgctgatagaatgc

SEQ ID NO: 1621912 - DNA, 15 bp, Homo sapiens
tgctgatagaatgca

SEQ ID NO: 1621913 - DNA, 15 bp, Homo sapiens
gctgatagaatgcat

SEQ ID NO: 1621914 - DNA, 15 bp, Homo sapiens
ctgatagaatgcatc

SEQ ID NO: 1621915 - DNA, 15 bp, Homo sapiens
tgatagaatgcatcc

SEQ ID NO: 1621916 - DNA, 15 bp, Homo sapiens
gatagaatgcatcca

SEQ ID NO: 1621917 - DNA, 15 bp, Homo sapiens
atagaatgcatccac

SEQ ID NO: 1621918 - DNA, 15 bp, Homo sapiens
tagaatgcatccacc

SEQ ID NO: 1621919 - DNA, 15 bp, Homo sapiens
agaatgcatccacct

SEQ ID NO: 1621920 - DNA, 15 bp, Homo sapiens
gaatgcatccaccta

SEQ ID NO: 1621921 - DNA, 15 bp, Homo sapiens
aatgcatccacctac

SEQ ID NO: 1621922 - DNA, 15 bp, Homo sapiens
atgcatccacctact

SEQ ID NO: 1621923 - DNA, 15 bp, Homo sapiens
tgcatccacctacta

SEQ ID NO: 1621924 - DNA, 15 bp, Homo sapiens
gcatccacctactaa

SEQ ID NO: 1621925 - DNA, 15 bp, Homo sapiens
catccacctactaac

SEQ ID NO: 1621926 - DNA, 15 bp, Homo sapiens
atccacctactaaca

SEQ ID NO: 1621927 - DNA, 15 bp, Homo sapiens
tccacctactaacat

SEQ ID NO: 1621928 - DNA, 15 bp, Homo sapiens
ccacctactaacatc

SEQ ID NO: 1621929 - DNA, 15 bp, Homo sapiens
cacctactaacatca

SEQ ID NO: 1621930 - DNA, 15 bp, Homo sapiens
acctactaacatcag

SEQ ID NO: 1621931 - DNA, 15 bp, Homo sapiens
cctactaacatcagt

SEQ ID NO: 1621932 - DNA, 15 bp, Homo sapiens
ctactaacatcagta

SEQ ID NO: 1621933 - DNA, 15 bp, Homo sapiens
tactaacatcagtaa

SEQ ID NO: 1621934 - DNA, 15 bp, Homo sapiens
actaacatcagtaag

SEQ ID NO: 1621935 - DNA, 15 bp, Homo sapiens
ctaacatcagtaagt

SEQ ID NO: 1621936 - DNA, 15 bp, Homo sapiens
taacatcagtaagta

SEQ ID NO: 1621937 - DNA, 15 bp, Homo sapiens
aacatcagtaagtac

SEQ ID NO: 1621938 - DNA, 15 bp, Homo sapiens
acatcagtaagtaca

SEQ ID NO: 1621939 - DNA, 15 bp, Homo sapiens
catcagtaagtacag

SEQ ID NO: 1621940 - DNA, 15 bp, Homo sapiens
atcagtaagtacagg

SEQ ID NO: 1621941 - DNA, 15 bp, Homo sapiens
tcagtaagtacaggt

SEQ ID NO: 1621942 - DNA, 15 bp, Homo sapiens
cagtaagtacaggtt

SEQ ID NO: 1621943 - DNA, 15 bp, Homo sapiens
agtaagtacaggttt

SEQ ID NO: 1621944 - DNA, 15 bp, Homo sapiens
gtaagtacaggttta

SEQ ID NO: 1621945 - DNA, 15 bp, Homo sapiens
taagtacaggtttaa

SEQ ID NO: 1621946 - DNA, 15 bp, Homo sapiens
aagtacaggtttaac

SEQ ID NO: 1621947 - DNA, 15 bp, Homo sapiens
agtacaggtttaaca

SEQ ID NO: 1621948 - DNA, 15 bp, Homo sapiens
gtacaggtttaacaa

SEQ ID NO: 1621949 - DNA, 15 bp, Homo sapiens
tacaggtttaacaat

SEQ ID NO: 1621950 - DNA, 15 bp, Homo sapiens
acaggtttaacaatt

SEQ ID NO: 1621951 - DNA, 15 bp, Homo sapiens
caggtttaacaattt

SEQ ID NO: 1621952 - DNA, 15 bp, Homo sapiens
aggtttaacaattta

SEQ ID NO: 1621953 - DNA, 15 bp, Homo sapiens
ggtttaacaatttac

SEQ ID NO: 1621954 - DNA, 15 bp, Homo sapiens
gtttaacaatttacc

SEQ ID NO: 1621955 - DNA, 15 bp, Homo sapiens
tttaacaatttacca

SEQ ID NO: 1621956 - DNA, 15 bp, Homo sapiens
ttaacaatttaccag

SEQ ID NO: 1621957 - DNA, 15 bp, Homo sapiens
taacaatttaccaga

SEQ ID NO: 1621958 - DNA, 15 bp, Homo sapiens
aacaatttaccagaa

SEQ ID NO: 1621959 - DNA, 15 bp, Homo sapiens
acaatttaccagaaa

SEQ ID NO: 1621960 - DNA, 15 bp, Homo sapiens
caatttaccagaaat

SEQ ID NO: 1621961 - DNA, 15 bp, Homo sapiens
aatttaccagaaatg

SEQ ID NO: 1621962 - DNA, 15 bp, Homo sapiens
atttaccagaaatgt

SEQ ID NO: 1621963 - DNA, 15 bp, Homo sapiens
tttaccagaaatgta

SEQ ID NO: 1621964 - DNA, 15 bp, Homo sapiens
ttaccagaaatgtac

SEQ ID NO: 1621965 - DNA, 15 bp, Homo sapiens
taccagaaatgtact

SEQ ID NO: 1621966 - DNA, 15 bp, Homo sapiens
accagaaatgtactg

SEQ ID NO: 1621967 - DNA, 15 bp, Homo sapiens
ccagaaatgtactgg

SEQ ID NO: 1621968 - DNA, 15 bp, Homo sapiens
cagaaatgtactgga

SEQ ID NO: 1621969 - DNA, 15 bp, Homo sapiens
agaaatgtactggag

SEQ ID NO: 1621970 - DNA, 15 bp, Homo sapiens
gaaatgtactggagg

SEQ ID NO: 1621971 - DNA, 15 bp, Homo sapiens
aaatgtactggagga

SEQ ID NO: 1621972 - DNA, 15 bp, Homo sapiens
aatgtactggaggaa

SEQ ID NO: 1621973 - DNA, 15 bp, Homo sapiens
atgtactggaggaaa

SEQ ID NO: 1621974 - DNA, 15 bp, Homo sapiens
tgtactggaggaaat

SEQ ID NO: 1621975 - DNA, 15 bp, Homo sapiens
gtactggaggaaata

SEQ ID NO: 1621976 - DNA, 15 bp, Homo sapiens
tactggaggaaatat

SEQ ID NO: 1621977 - DNA, 15 bp, Homo sapiens
actggaggaaatatg

SEQ ID NO: 1621978 - DNA, 15 bp, Homo sapiens
ctggaggaaatatga

SEQ ID NO: 1621979 - DNA, 15 bp, Homo sapiens
tggaggaaatatgaa

SEQ ID NO: 1621980 - DNA, 15 bp, Homo sapiens
ggaggaaatatgaat

SEQ ID NO: 1621981 - DNA, 15 bp, Homo sapiens
gaggaaatatgaata

SEQ ID NO: 1621982 - DNA, 15 bp, Homo sapiens
aggaaatatgaatat

SEQ ID NO: 1621983 - DNA, 15 bp, Homo sapiens
ggaaatatgaatatg

SEQ ID NO: 1621984 - DNA, 15 bp, Homo sapiens
gaaatatgaatatgc

SEQ ID NO: 1621985 - DNA, 15 bp, Homo sapiens
aaatatgaatatgct

SEQ ID NO: 1621986 - DNA, 15 bp, Homo sapiens
aatatgaatatgctt

SEQ ID NO: 1621987 - DNA, 15 bp, Homo sapiens
atatgaatatgcttc

SEQ ID NO: 1621988 - DNA, 15 bp, Homo sapiens
tatgaatatgcttcc

SEQ ID NO: 1621989 - DNA, 15 bp, Homo sapiens
atgaatatgcttcca

SEQ ID NO: 1621990 - DNA, 15 bp, Homo sapiens
tgaatatgcttccag

SEQ ID NO: 1621991 - DNA, 15 bp, Homo sapiens
gaatatgcttccaga

SEQ ID NO: 1621992 - DNA, 15 bp, Homo sapiens
aatatgcttccagat

SEQ ID NO: 1621993 - DNA, 15 bp, Homo sapiens
atatgcttccagatt

SEQ ID NO: 1621994 - DNA, 15 bp, Homo sapiens
tatgcttccagattt

SEQ ID NO: 1621995 - DNA, 15 bp, Homo sapiens
atgcttccagattta

SEQ ID NO: 1621996 - DNA, 15 bp, Homo sapiens
tgcttccagatttat

SEQ ID NO: 1621997 - DNA, 15 bp, Homo sapiens
gcttccagatttatt

SEQ ID NO: 1621998 - DNA, 15 bp, Homo sapiens
cttccagatttattc

SEQ ID NO: 1621999 - DNA, 15 bp, Homo sapiens
ttccagatttattct

SEQ ID NO: 1622000 - DNA, 15 bp, Homo sapiens
tccagatttattcta

SEQ ID NO: 1622001 - DNA, 15 bp, Homo sapiens
ccagatttattctac

SEQ ID NO: 1622002 - DNA, 15 bp, Homo sapiens
cagatttattctacc

SEQ ID NO: 1622003 - DNA, 15 bp, Homo sapiens
agatttattctacct

SEQ ID NO: 1622004 - DNA, 15 bp, Homo sapiens
gatttattctaccta

SEQ ID NO: 1622005 - DNA, 15 bp, Homo sapiens
atttattctacctaa

SEQ ID NO: 1622006 - DNA, 15 bp, Homo sapiens
tttattctacctaaa

SEQ ID NO: 1622007 - DNA, 15 bp, Homo sapiens
ttattctacctaaag

SEQ ID NO: 1622008 - DNA, 15 bp, Homo sapiens
tattctacctaaagg

SEQ ID NO: 1622009 - DNA, 15 bp, Homo sapiens
attctacctaaagga

SEQ ID NO: 1622010 - DNA, 15 bp, Homo sapiens
ttctacctaaaggat

SEQ ID NO: 1622011 - DNA, 15 bp, Homo sapiens
tctacctaaaggatc

SEQ ID NO: 1622012 - DNA, 15 bp, Homo sapiens
ctacctaaaggatct

SEQ ID NO: 1622013 - DNA, 15 bp, Homo sapiens
tacctaaaggatctg

SEQ ID NO: 1622014 - DNA, 15 bp, Homo sapiens
acctaaaggatctgg

SEQ ID NO: 1622015 - DNA, 15 bp, Homo sapiens
cctaaaggatctggc

SEQ ID NO: 1622016 - DNA, 15 bp, Homo sapiens
ctaaaggatctggct

SEQ ID NO: 1622017 - DNA, 15 bp, Homo sapiens
taaaggatctggctc

SEQ ID NO: 1622018 - DNA, 15 bp, Homo sapiens
aaaggatctggctct

SEQ ID NO: 1622019 - DNA, 15 bp, Homo sapiens
aaggatctggctcta

SEQ ID NO: 1622020 - DNA, 15 bp, Homo sapiens
aggatctggctctat

SEQ ID NO: 1622021 - DNA, 15 bp, Homo sapiens
ggatctggctctatt

SEQ ID NO: 1622022 - DNA, 15 bp, Homo sapiens
gatctggctctattt

SEQ ID NO: 1622023 - DNA, 15 bp, Homo sapiens
atctggctctatttt

SEQ ID NO: 1622024 - DNA, 15 bp, Homo sapiens
tctggctctatttta

SEQ ID NO: 1622025 - DNA, 15 bp, Homo sapiens
ctggctctattttac

SEQ ID NO: 1622026 - DNA, 15 bp, Homo sapiens
tggctctattttaca

SEQ ID NO: 1622027 - DNA, 15 bp, Homo sapiens
ggctctattttacaa

SEQ ID NO: 1622028 - DNA, 15 bp, Homo sapiens
gctctattttacaag

SEQ ID NO: 1622029 - DNA, 15 bp, Homo sapiens
ctctattttacaagg

SEQ ID NO: 1622030 - DNA, 15 bp, Homo sapiens
tctattttacaaggt

SEQ ID NO: 1622031 - DNA, 15 bp, Homo sapiens
ctattttacaaggtc

SEQ ID NO: 1622032 - DNA, 15 bp, Homo sapiens
tattttacaaggtca

SEQ ID NO: 1622033 - DNA, 15 bp, Homo sapiens
attttacaaggtcat

SEQ ID NO: 1622034 - DNA, 15 bp, Homo sapiens
ttttacaaggtcatc

SEQ ID NO: 1622035 - DNA, 15 bp, Homo sapiens
tttacaaggtcatct

SEQ ID NO: 1622036 - DNA, 15 bp, Homo sapiens
ttacaaggtcatcta

SEQ ID NO: 1622037 - DNA, 15 bp, Homo sapiens
tacaaggtcatctat

SEQ ID NO: 1622038 - DNA, 15 bp, Homo sapiens
acaaggtcatctatt

SEQ ID NO: 1622039 - DNA, 15 bp, Homo sapiens
caaggtcatctattt

SEQ ID NO: 1622040 - DNA, 15 bp, Homo sapiens
aaggtcatctatttt

SEQ ID NO: 1622041 - DNA, 15 bp, Homo sapiens
aggtcatctatttta

SEQ ID NO: 1622042 - DNA, 15 bp, Homo sapiens
ggtcatctattttac

SEQ ID NO: 1622043 - DNA, 15 bp, Homo sapiens
gtcatctattttaca

SEQ ID NO: 1622044 - DNA, 15 bp, Homo sapiens
tcatctattttacaa

SEQ ID NO: 1622045 - DNA, 15 bp, Homo sapiens
catctattttacaag

SEQ ID NO: 1622046 - DNA, 15 bp, Homo sapiens
atctattttacaagg

SEQ ID NO: 1622047 - DNA, 15 bp, Homo sapiens
ctattttacaaggta

SEQ ID NO: 1622048 - DNA, 15 bp, Homo sapiens
tattttacaaggtac

SEQ ID NO: 1622049 - DNA, 15 bp, Homo sapiens
attttacaaggtact

SEQ ID NO: 1622050 - DNA, 15 bp, Homo sapiens
ttttacaaggtactg

SEQ ID NO: 1622051 - DNA, 15 bp, Homo sapiens
tttacaaggtactgt

SEQ ID NO: 1622052 - DNA, 15 bp, Homo sapiens
ttacaaggtactgta

SEQ ID NO: 1622053 - DNA, 15 bp, Homo sapiens
tacaaggtactgtag

SEQ ID NO: 1622054 - DNA, 15 bp, Homo sapiens
acaaggtactgtaga

SEQ ID NO: 1622055 - DNA, 15 bp, Homo sapiens
caaggtactgtagat

SEQ ID NO: 1622056 - DNA, 15 bp, Homo sapiens
aaggtactgtagatg

SEQ ID NO: 1622057 - DNA, 15 bp, Homo sapiens
aggtactgtagatgc

SEQ ID NO: 1622058 - DNA, 15 bp, Homo sapiens
ggtactgtagatgca

SEQ ID NO: 1622059 - DNA, 15 bp, Homo sapiens
gtactgtagatgcat

SEQ ID NO: 1622060 - DNA, 15 bp, Homo sapiens
tactgtagatgcatt

SEQ ID NO: 1622061 - DNA, 15 bp, Homo sapiens
actgtagatgcattt

SEQ ID NO: 1622062 - DNA, 15 bp, Homo sapiens
ctgtagatgcatttt

SEQ ID NO: 1622063 - DNA, 15 bp, Homo sapiens
tgtagatgcattttg

SEQ ID NO: 1622064 - DNA, 15 bp, Homo sapiens
gtagatgcattttga

SEQ ID NO: 1622065 - DNA, 15 bp, Homo sapiens
tagatgcattttgat

SEQ ID NO: 1622066 - DNA, 15 bp, Homo sapiens
agatgcattttgatg

SEQ ID NO: 1622067 - DNA, 15 bp, Homo sapiens
gatgcattttgatga

SEQ ID NO: 1622068 - DNA, 15 bp, Homo sapiens
atgcattttgatgaa

SEQ ID NO: 1622069 - DNA, 15 bp, Homo sapiens
tgcattttgatgaaa

SEQ ID NO: 1622070 - DNA, 15 bp, Homo sapiens
gcattttgatgaaaa

SEQ ID NO: 1622071 - DNA, 15 bp, Homo sapiens
cattttgatgaaaaa

SEQ ID NO: 1622072 - DNA, 15 bp, Homo sapiens
attttgatgaaaaaa

SEQ ID NO: 1622073 - DNA, 15 bp, Homo sapiens
ttttgatgaaaaaaa

SEQ ID NO: 1622074 - DNA, 15 bp, Homo sapiens
tttgatgaaaaaaat

SEQ ID NO: 1622075 - DNA, 15 bp, Homo sapiens
ttgatgaaaaaaatt

SEQ ID NO: 1622076 - DNA, 15 bp, Homo sapiens
tgatgaaaaaaatta

SEQ ID NO: 1622077 - DNA, 15 bp, Homo sapiens
gatgaaaaaaattac

SEQ ID NO: 1622078 - DNA, 15 bp, Homo sapiens
atgaaaaaaattacc

SEQ ID NO: 1622079 - DNA, 15 bp, Homo sapiens
tgaaaaaaattaccc

SEQ ID NO: 1622080 - DNA, 15 bp, Homo sapiens
gaaaaaaattaccct

SEQ ID NO: 1622081 - DNA, 15 bp, Homo sapiens
aaaaaaattaccctg

SEQ ID NO: 1622082 - DNA, 15 bp, Homo sapiens
aaaaaattaccctgc

SEQ ID NO: 1622083 - DNA, 15 bp, Homo sapiens
aaaaattaccctgct

SEQ ID NO: 1622084 - DNA, 15 bp, Homo sapiens
aaaattaccctgcta

SEQ ID NO: 1622085 - DNA, 15 bp, Homo sapiens
aaattaccctgctat

SEQ ID NO: 1622086 - DNA, 15 bp, Homo sapiens
aattaccctgctatt

SEQ ID NO: 1622087 - DNA, 15 bp, Homo sapiens
attaccctgctattg

SEQ ID NO: 1622088 - DNA, 15 bp, Homo sapiens
ttaccctgctattga

SEQ ID NO: 1622089 - DNA, 15 bp, Homo sapiens
taccctgctattgat

SEQ ID NO: 1622090 - DNA, 15 bp, Homo sapiens
accctgctattgatt

SEQ ID NO: 1622091 - DNA, 15 bp, Homo sapiens
ccctgctattgattt

SEQ ID NO: 1622092 - DNA, 15 bp, Homo sapiens
cctgctattgatttt

SEQ ID NO: 1622093 - DNA, 15 bp, Homo sapiens
ctgctattgattttg

SEQ ID NO: 1622094 - DNA, 15 bp, Homo sapiens
tgctattgattttga

SEQ ID NO: 1622095 - DNA, 15 bp, Homo sapiens
gctattgattttgag

SEQ ID NO: 1622096 - DNA, 15 bp, Homo sapiens
ctattgattttgagg

SEQ ID NO: 1622097 - DNA, 15 bp, Homo sapiens
tattgattttgaggt

SEQ ID NO: 1622098 - DNA, 15 bp, Homo sapiens
attgattttgaggtc

SEQ ID NO: 1622099 - DNA, 15 bp, Homo sapiens
ttgattttgaggtct

SEQ ID NO: 1622100 - DNA, 15 bp, Homo sapiens
tgattttgaggtctg

SEQ ID NO: 1622101 - DNA, 15 bp, Homo sapiens
gattttgaggtctgg

SEQ ID NO: 1622102 - DNA, 15 bp, Homo sapiens
attttgaggtctggt

SEQ ID NO: 1622103 - DNA, 15 bp, Homo sapiens
ttttgaggtctggta

SEQ ID NO: 1622104 - DNA, 15 bp, Homo sapiens
tttgaggtctggtat

SEQ ID NO: 1622105 - DNA, 15 bp, Homo sapiens
ttgaggtctggtatt

SEQ ID NO: 1622106 - DNA, 15 bp, Homo sapiens
tgaggtctggtatta

SEQ ID NO: 1622107 - DNA, 15 bp, Homo sapiens
gaggtctggtattat

SEQ ID NO: 1622108 - DNA, 15 bp, Homo sapiens
aggtctggtattatg

SEQ ID NO: 1622109 - DNA, 15 bp, Homo sapiens
ggtctggtattatga

SEQ ID NO: 1622110 - DNA, 15 bp, Homo sapiens
gtctggtattatgat

SEQ ID NO: 1622111 - DNA, 15 bp, Homo sapiens
tctggtattatgata

SEQ ID NO: 1622112 - DNA, 15 bp, Homo sapiens
ctggtattatgatag

SEQ ID NO: 1622113 - DNA, 15 bp, Homo sapiens
tggtattatgataga

SEQ ID NO: 1622114 - DNA, 15 bp, Homo sapiens
ggtattatgatagag

SEQ ID NO: 1622115 - DNA, 15 bp, Homo sapiens
gtattatgatagagc

SEQ ID NO: 1622116 - DNA, 15 bp, Homo sapiens
tattatgatagagca

SEQ ID NO: 1622117 - DNA, 15 bp, Homo sapiens
attatgatagagcaa

SEQ ID NO: 1622118 - DNA, 15 bp, Homo sapiens
ttatgatagagcaaa

SEQ ID NO: 1622119 - DNA, 15 bp, Homo sapiens
tatgatagagcaaaa

SEQ ID NO: 1622120 - DNA, 15 bp, Homo sapiens
atgatagagcaaaaa

SEQ ID NO: 1622121 - DNA, 15 bp, Homo sapiens
tgatagagcaaaaac

SEQ ID NO: 1622122 - DNA, 15 bp, Homo sapiens
gatagagcaaaaact

SEQ ID NO: 1622123 - DNA, 15 bp, Homo sapiens
atagagcaaaaacta

SEQ ID NO: 1622124 - DNA, 15 bp, Homo sapiens
tagagcaaaaactat

SEQ ID NO: 1622125 - DNA, 15 bp, Homo sapiens
agagcaaaaactatc

SEQ ID NO: 1622126 - DNA, 15 bp, Homo sapiens
gagcaaaaactatcc

SEQ ID NO: 1622127 - DNA, 15 bp, Homo sapiens
agcaaaaactatcca

SEQ ID NO: 1622128 - DNA, 15 bp, Homo sapiens
gcaaaaactatccaa

SEQ ID NO: 1622129 - DNA, 15 bp, Homo sapiens
caaaaactatccaaa

SEQ ID NO: 1622130 - DNA, 15 bp, Homo sapiens
aaaaactatccaaaa

SEQ ID NO: 1622131 - DNA, 15 bp, Homo sapiens
aaaactatccaaaag

SEQ ID NO: 1622132 - DNA, 15 bp, Homo sapiens
aaactatccaaaaga

SEQ ID NO: 1622133 - DNA, 15 bp, Homo sapiens
aactatccaaaagag

SEQ ID NO: 1622134 - DNA, 15 bp, Homo sapiens
actatccaaaagaga

SEQ ID NO: 1622135 - DNA, 15 bp, Homo sapiens
ctatccaaaagagat

SEQ ID NO: 1622136 - DNA, 15 bp, Homo sapiens
tatccaaaagagatt

SEQ ID NO: 1622137 - DNA, 15 bp, Homo sapiens
atccaaaagagattt

SEQ ID NO: 1622138 - DNA, 15 bp, Homo sapiens
tccaaaagagattta

SEQ ID NO: 1622139 - DNA, 15 bp, Homo sapiens
ccaaaagagatttaa

SEQ ID NO: 1622140 - DNA, 15 bp, Homo sapiens
caaaagagatttaat

SEQ ID NO: 1622141 - DNA, 15 bp, Homo sapiens
aaaagagatttaatt

SEQ ID NO: 1622142 - DNA, 15 bp, Homo sapiens
aaagagatttaattc

SEQ ID NO: 1622143 - DNA, 15 bp, Homo sapiens
aagagatttaattca

SEQ ID NO: 1622144 - DNA, 15 bp, Homo sapiens
agagatttaattcaa

SEQ ID NO: 1622145 - DNA, 15 bp, Homo sapiens
gagatttaattcaag

SEQ ID NO: 1622146 - DNA, 15 bp, Homo sapiens
agatttaattcaagt

SEQ ID NO: 1622147 - DNA, 15 bp, Homo sapiens
gatttaattcaagtc

SEQ ID NO: 1622148 - DNA, 15 bp, Homo sapiens
atttaattcaagtca

SEQ ID NO: 1622149 - DNA, 15 bp, Homo sapiens
tttaattcaagtcat

SEQ ID NO: 1622150 - DNA, 15 bp, Homo sapiens
ttaattcaagtcatt

SEQ ID NO: 1622151 - DNA, 15 bp, Homo sapiens
taattcaagtcattg

SEQ ID NO: 1622152 - DNA, 15 bp, Homo sapiens
aattcaagtcattgc

SEQ ID NO: 1622153 - DNA, 15 bp, Homo sapiens
attcaagtcattgca

SEQ ID NO: 1622154 - DNA, 15 bp, Homo sapiens
ttcaagtcattgcaa

SEQ ID NO: 1622155 - DNA, 15 bp, Homo sapiens
tcaagtcattgcaaa

SEQ ID NO: 1622156 - DNA, 15 bp, Homo sapiens
caagtcattgcaaaa

SEQ ID NO: 1622157 - DNA, 15 bp, Homo sapiens
aagtcattgcaaaat

SEQ ID NO: 1622158 - DNA, 15 bp, Homo sapiens
agtcattgcaaaatc

SEQ ID NO: 1622159 - DNA, 15 bp, Homo sapiens
gtcattgcaaaatct

SEQ ID NO: 1622160 - DNA, 15 bp, Homo sapiens
tcattgcaaaatctt

SEQ ID NO: 1622161 - DNA, 15 bp, Homo sapiens
cattgcaaaatcttg

SEQ ID NO: 1622162 - DNA, 15 bp, Homo sapiens
attgcaaaatcttgg

SEQ ID NO: 1622163 - DNA, 15 bp, Homo sapiens
ttgcaaaatcttgga

SEQ ID NO: 1622164 - DNA, 15 bp, Homo sapiens
tgcaaaatcttggaa

SEQ ID NO: 1622165 - DNA, 15 bp, Homo sapiens
gcaaaatcttggaaa

SEQ ID NO: 1622166 - DNA, 15 bp, Homo sapiens
caaaatcttggaaaa

SEQ ID NO: 1622167 - DNA, 15 bp, Homo sapiens
aaaatcttggaaaat

SEQ ID NO: 1622168 - DNA, 15 bp, Homo sapiens
aaatcttggaaaatg

SEQ ID NO: 1622169 - DNA, 15 bp, Homo sapiens
aatcttggaaaatgt

SEQ ID NO: 1622170 - DNA, 15 bp, Homo sapiens
atcttggaaaatgtg

SEQ ID NO: 1622171 - DNA, 15 bp, Homo sapiens
tcttggaaaatgtgt

SEQ ID NO: 1622172 - DNA, 15 bp, Homo sapiens
cttggaaaatgtgtg

SEQ ID NO: 1622173 - DNA, 15 bp, Homo sapiens
ttggaaaatgtgtga

SEQ ID NO: 1622174 - DNA, 15 bp, Homo sapiens
tggaaaatgtgtgag

SEQ ID NO: 1622175 - DNA, 15 bp, Homo sapiens
ggaaaatgtgtgaga

SEQ ID NO: 1622176 - DNA, 15 bp, Homo sapiens
gaaaatgtgtgagaa

SEQ ID NO: 1622177 - DNA, 15 bp, Homo sapiens
aaaatgtgtgagaaa

SEQ ID NO: 1622178 - DNA, 15 bp, Homo sapiens
aaatgtgtgagaaat

SEQ ID NO: 1622179 - DNA, 15 bp, Homo sapiens
aatgtgtgagaaatc

SEQ ID NO: 1622180 - DNA, 15 bp, Homo sapiens
atgtgtgagaaatct

SEQ ID NO: 1622181 - DNA, 15 bp, Homo sapiens
tgtgtgagaaatctt

SEQ ID NO: 1622182 - DNA, 15 bp, Homo sapiens
gtgtgagaaatctta

SEQ ID NO: 1622183 - DNA, 15 bp, Homo sapiens
tgtgagaaatcttac

SEQ ID NO: 1622184 - DNA, 15 bp, Homo sapiens
gtgagaaatcttaca

SEQ ID NO: 1622185 - DNA, 15 bp, Homo sapiens
tgagaaatcttacac

SEQ ID NO: 1622186 - DNA, 15 bp, Homo sapiens
gagaaatcttacaca

SEQ ID NO: 1622187 - DNA, 15 bp, Homo sapiens
agaaatcttacacat

SEQ ID NO: 1622188 - DNA, 15 bp, Homo sapiens
gaaatcttacacatg

SEQ ID NO: 1622189 - DNA, 15 bp, Homo sapiens
aaatcttacacatgg

SEQ ID NO: 1622190 - DNA, 15 bp, Homo sapiens
aatcttacacatgga

SEQ ID NO: 1622191 - DNA, 15 bp, Homo sapiens
atcttacacatggaa

SEQ ID NO: 1622192 - DNA, 15 bp, Homo sapiens
tcttacacatggaaa

SEQ ID NO: 1622193 - DNA, 15 bp, Homo sapiens
cttacacatggaaag

SEQ ID NO: 1622194 - DNA, 15 bp, Homo sapiens
ttacacatggaaagg

SEQ ID NO: 1622195 - DNA, 15 bp, Homo sapiens
tacacatggaaagga

SEQ ID NO: 1622196 - DNA, 15 bp, Homo sapiens
acacatggaaaggag

SEQ ID NO: 1622197 - DNA, 15 bp, Homo sapiens
cacatggaaaggagg

SEQ ID NO: 1622198 - DNA, 15 bp, Homo sapiens
acatggaaaggagga

SEQ ID NO: 1622199 - DNA, 15 bp, Homo sapiens
catggaaaggaggaa

SEQ ID NO: 1622200 - DNA, 15 bp, Homo sapiens
atggaaaggaggaag

SEQ ID NO: 1622201 - DNA, 15 bp, Homo sapiens
tggaaaggaggaagt

SEQ ID NO: 1622202 - DNA, 15 bp, Homo sapiens
ggaaaggaggaagta

SEQ ID NO: 1622203 - DNA, 15 bp, Homo sapiens
gaaaggaggaagtaa

SEQ ID NO: 1622204 - DNA, 15 bp, Homo sapiens
aaaggaggaagtaaa

SEQ ID NO: 1622205 - DNA, 15 bp, Homo sapiens
aaggaggaagtaaag

SEQ ID NO: 1622206 - DNA, 15 bp, Homo sapiens
aggaggaagtaaaga

SEQ ID NO: 1622207 - DNA, 15 bp, Homo sapiens
ggaggaagtaaagat

SEQ ID NO: 1622208 - DNA, 15 bp, Homo sapiens
gaggaagtaaagatg

SEQ ID NO: 1622209 - DNA, 15 bp, Homo sapiens
aggaagtaaagatgg

SEQ ID NO: 1622210 - DNA, 15 bp, Homo sapiens
ggaagtaaagatggt

SEQ ID NO: 1622211 - DNA, 15 bp, Homo sapiens
gaagtaaagatggta

SEQ ID NO: 1622212 - DNA, 15 bp, Homo sapiens
aagtaaagatggtag

SEQ ID NO: 1622213 - DNA, 15 bp, Homo sapiens
agtaaagatggtagc

SEQ ID NO: 1622214 - DNA, 15 bp, Homo sapiens
gtaaagatggtagct

SEQ ID NO: 1622215 - DNA, 15 bp, Homo sapiens
taaagatggtagctt

SEQ ID NO: 1622216 - DNA, 15 bp, Homo sapiens
aaagatggtagctta

SEQ ID NO: 1622217 - DNA, 15 bp, Homo sapiens
aagatggtagcttaa

SEQ ID NO: 1622218 - DNA, 15 bp, Homo sapiens
agatggtagcttaaa

SEQ ID NO: 1622219 - DNA, 15 bp, Homo sapiens
gatggtagcttaaac

SEQ ID NO: 1622220 - DNA, 15 bp, Homo sapiens
atggtagcttaaaca

SEQ ID NO: 1622221 - DNA, 15 bp, Homo sapiens
tggtagcttaaacat

SEQ ID NO: 1622222 - DNA, 15 bp, Homo sapiens
ggtagcttaaacatg

SEQ ID NO: 1622223 - DNA, 15 bp, Homo sapiens
gtagcttaaacatgt

SEQ ID NO: 1622224 - DNA, 15 bp, Homo sapiens
tagcttaaacatgtg

SEQ ID NO: 1622225 - DNA, 15 bp, Homo sapiens
agcttaaacatgtgt

SEQ ID NO: 1622226 - DNA, 15 bp, Homo sapiens
gcttaaacatgtgtt

SEQ ID NO: 1622227 - DNA, 15 bp, Homo sapiens
cttaaacatgtgttc

SEQ ID NO: 1622228 - DNA, 15 bp, Homo sapiens
ttaaacatgtgttcc

SEQ ID NO: 1622229 - DNA, 15 bp, Homo sapiens
taaacatgtgttcca

SEQ ID NO: 1622230 - DNA, 15 bp, Homo sapiens
aaacatgtgttccac

SEQ ID NO: 1622231 - DNA, 15 bp, Homo sapiens
aacatgtgttccact

SEQ ID NO: 1622232 - DNA, 15 bp, Homo sapiens
acatgtgttccactg

SEQ ID NO: 1622233 - DNA, 15 bp, Homo sapiens
catgtgttccactgt

SEQ ID NO: 1622234 - DNA, 15 bp, Homo sapiens
atgtgttccactgtg

SEQ ID NO: 1622235 - DNA, 15 bp, Homo sapiens
tgtgttccactgtga

SEQ ID NO: 1622236 - DNA, 15 bp, Homo sapiens
gtgttccactgtgaa

SEQ ID NO: 1622237 - DNA, 15 bp, Homo sapiens
tgttccactgtgaac

SEQ ID NO: 1622238 - DNA, 15 bp, Homo sapiens
gttccactgtgaaca

SEQ ID NO: 1622239 - DNA, 15 bp, Homo sapiens
ttccactgtgaacaa

SEQ ID NO: 1622240 - DNA, 15 bp, Homo sapiens
tccactgtgaacaat

SEQ ID NO: 1622241 - DNA, 15 bp, Homo sapiens
ccactgtgaacaatt

SEQ ID NO: 1622242 - DNA, 15 bp, Homo sapiens
cactgtgaacaattc

SEQ ID NO: 1622243 - DNA, 15 bp, Homo sapiens
actgtgaacaattct

SEQ ID NO: 1622244 - DNA, 15 bp, Homo sapiens
ctgtgaacaattctc

SEQ ID NO: 1622245 - DNA, 15 bp, Homo sapiens
tgtgaacaattctct

SEQ ID NO: 1622246 - DNA, 15 bp, Homo sapiens
gtgaacaattctctg

SEQ ID NO: 1622247 - DNA, 15 bp, Homo sapiens
tgaacaattctctgc

SEQ ID NO: 1622248 - DNA, 15 bp, Homo sapiens
gaacaattctctgca

SEQ ID NO: 1622249 - DNA, 15 bp, Homo sapiens
aacaattctctgcaa

SEQ ID NO: 1622250 - DNA, 15 bp, Homo sapiens
acaattctctgcaaa

SEQ ID NO: 1622251 - DNA, 15 bp, Homo sapiens
caattctctgcaaac

SEQ ID NO: 1622252 - DNA, 15 bp, Homo sapiens
aattctctgcaaacc

SEQ ID NO: 1622253 - DNA, 15 bp, Homo sapiens
attctctgcaaaccc

SEQ ID NO: 1622254 - DNA, 15 bp, Homo sapiens
ttctctgcaaaccca

SEQ ID NO: 1622255 - DNA, 15 bp, Homo sapiens
tctctgcaaacccac

SEQ ID NO: 1622256 - DNA, 15 bp, Homo sapiens
ctctgcaaacccacc

SEQ ID NO: 1622257 - DNA, 15 bp, Homo sapiens
tctgcaaacccaccc

SEQ ID NO: 1622258 - DNA, 15 bp, Homo sapiens
ctgcaaacccacccc

SEQ ID NO: 1622259 - DNA, 15 bp, Homo sapiens
tgcaaacccaccccc

SEQ ID NO: 1622260 - DNA, 15 bp, Homo sapiens
gcaaacccaccccca

SEQ ID NO: 1622261 - DNA, 15 bp, Homo sapiens
caaacccacccccaa

SEQ ID NO: 1622262 - DNA, 15 bp, Homo sapiens
aaacccacccccaaa

SEQ ID NO: 1622263 - DNA, 15 bp, Homo sapiens
aacccacccccaaaa

SEQ ID NO: 1622264 - DNA, 15 bp, Homo sapiens
acccacccccaaaag

SEQ ID NO: 1622265 - DNA, 15 bp, Homo sapiens
cccacccccaaaagt

SEQ ID NO: 1622266 - DNA, 15 bp, Homo sapiens
ccacccccaaaagtc

SEQ ID NO: 1622267 - DNA, 15 bp, Homo sapiens
cacccccaaaagtca

SEQ ID NO: 1622268 - DNA, 15 bp, Homo sapiens
acccccaaaagtcaa

SEQ ID NO: 1622269 - DNA, 15 bp, Homo sapiens
cccccaaaagtcaag

SEQ ID NO: 1622270 - DNA, 15 bp, Homo sapiens
ccccaaaagtcaagg

SEQ ID NO: 1622271 - DNA, 15 bp, Homo sapiens
cccaaaagtcaagga

SEQ ID NO: 1622272 - DNA, 15 bp, Homo sapiens
ccaaaagtcaaggag

SEQ ID NO: 1622273 - DNA, 15 bp, Homo sapiens
caaaagtcaaggagg

SEQ ID NO: 1622274 - DNA, 15 bp, Homo sapiens
aaaagtcaaggaggc

SEQ ID NO: 1622275 - DNA, 15 bp, Homo sapiens
aaagtcaaggaggct

SEQ ID NO: 1622276 - DNA, 15 bp, Homo sapiens
aagtcaaggaggctg

SEQ ID NO: 1622277 - DNA, 15 bp, Homo sapiens
agtcaaggaggctga

SEQ ID NO: 1622278 - DNA, 15 bp, Homo sapiens
gtcaaggaggctgac

SEQ ID NO: 1622279 - DNA, 15 bp, Homo sapiens
tcaaggaggctgaca

SEQ ID NO: 1622280 - DNA, 15 bp, Homo sapiens
caaggaggctgacag

SEQ ID NO: 1622281 - DNA, 15 bp, Homo sapiens
aaggaggctgacagg

SEQ ID NO: 1622282 - DNA, 15 bp, Homo sapiens
aggaggctgacaggc

SEQ ID NO: 1622283 - DNA, 15 bp, Homo sapiens
ggaggctgacaggct

SEQ ID NO: 1622284 - DNA, 15 bp, Homo sapiens
gaggctgacaggctg

SEQ ID NO: 1622285 - DNA, 15 bp, Homo sapiens
aggctgacaggctga

SEQ ID NO: 1622286 - DNA, 15 bp, Homo sapiens
ggctgacaggctgaa

SEQ ID NO: 1622287 - DNA, 15 bp, Homo sapiens
gctgacaggctgaag

SEQ ID NO: 1622288 - DNA, 15 bp, Homo sapiens
ctgacaggctgaaga

SEQ ID NO: 1622289 - DNA, 15 bp, Homo sapiens
tgacaggctgaagaa

SEQ ID NO: 1622290 - DNA, 15 bp, Homo sapiens
gacaggctgaagaaa

SEQ ID NO: 1622291 - DNA, 15 bp, Homo sapiens
acaggctgaagaaag

SEQ ID NO: 1622292 - DNA, 15 bp, Homo sapiens
caggctgaagaaaga

SEQ ID NO: 1622293 - DNA, 15 bp, Homo sapiens
aggctgaagaaagag

SEQ ID NO: 1622294 - DNA, 15 bp, Homo sapiens
ggctgaagaaagagg

SEQ ID NO: 1622295 - DNA, 15 bp, Homo sapiens
gctgaagaaagaggc

SEQ ID NO: 1622296 - DNA, 15 bp, Homo sapiens
ctgaagaaagaggct

SEQ ID NO: 1622297 - DNA, 15 bp, Homo sapiens
tgaagaaagaggctg

SEQ ID NO: 1622298 - DNA, 15 bp, Homo sapiens
gaagaaagaggctgt

SEQ ID NO: 1622299 - DNA, 15 bp, Homo sapiens
aagaaagaggctgtc

SEQ ID NO: 1622300 - DNA, 15 bp, Homo sapiens
agaaagaggctgtca

SEQ ID NO: 1622301 - DNA, 15 bp, Homo sapiens
gaaagaggctgtcaa

SEQ ID NO: 1622302 - DNA, 15 bp, Homo sapiens
aaagaggctgtcaaa

SEQ ID NO: 1622303 - DNA, 15 bp, Homo sapiens
aagaggctgtcaaat

SEQ ID NO: 1622304 - DNA, 15 bp, Homo sapiens
agaggctgtcaaatc

SEQ ID NO: 1622305 - DNA, 15 bp, Homo sapiens
gaggctgtcaaatct

SEQ ID NO: 1622306 - DNA, 15 bp, Homo sapiens
aggctgtcaaatcta

SEQ ID NO: 1622307 - DNA, 15 bp, Homo sapiens
ggctgtcaaatctag

SEQ ID NO: 1622308 - DNA, 15 bp, Homo sapiens
gctgtcaaatctagt

SEQ ID NO: 1622309 - DNA, 15 bp, Homo sapiens
ctgtcaaatctagtt

SEQ ID NO: 1622310 - DNA, 15 bp, Homo sapiens
tgtcaaatctagttt

SEQ ID NO: 1622311 - DNA, 15 bp, Homo sapiens
gtcaaatctagtttc

SEQ ID NO: 1622312 - DNA, 15 bp, Homo sapiens
tcaaatctagtttct

SEQ ID NO: 1622313 - DNA, 15 bp, Homo sapiens
caaatctagtttctc

SEQ ID NO: 1622314 - DNA, 15 bp, Homo sapiens
aaatctagtttctca

SEQ ID NO: 1622315 - DNA, 15 bp, Homo sapiens
aatctagtttctcag

SEQ ID NO: 1622316 - DNA, 15 bp, Homo sapiens
atctagtttctcaga

SEQ ID NO: 1622317 - DNA, 15 bp, Homo sapiens
tctagtttctcagaa

SEQ ID NO: 1622318 - DNA, 15 bp, Homo sapiens
ctagtttctcagaaa

SEQ ID NO: 1622319 - DNA, 15 bp, Homo sapiens
tagtttctcagaaaa

SEQ ID NO: 1622320 - DNA, 15 bp, Homo sapiens
agtttctcagaaaaa

SEQ ID NO: 1622321 - DNA, 15 bp, Homo sapiens
gtttctcagaaaaag

SEQ ID NO: 1622322 - DNA, 15 bp, Homo sapiens
tttctcagaaaaaga

SEQ ID NO: 1622323 - DNA, 15 bp, Homo sapiens
ttctcagaaaaagaa

SEQ ID NO: 1622324 - DNA, 15 bp, Homo sapiens
tctcagaaaaagaaa

SEQ ID NO: 1622325 - DNA, 15 bp, Homo sapiens
ctcagaaaaagaaaa

SEQ ID NO: 1622326 - DNA, 15 bp, Homo sapiens
cagaaaaagaaaaat

SEQ ID NO: 1622327 - DNA, 15 bp, Homo sapiens
agaaaaagaaaaatt

SEQ ID NO: 1622328 - DNA, 15 bp, Homo sapiens
gaaaaagaaaaatta

SEQ ID NO: 1622329 - DNA, 15 bp, Homo sapiens
aaaaagaaaaattaa

SEQ ID NO: 1622330 - DNA, 15 bp, Homo sapiens
aaaagaaaaattaat

SEQ ID NO: 1622331 - DNA, 15 bp, Homo sapiens
aaagaaaaattaata

SEQ ID NO: 1622332 - DNA, 15 bp, Homo sapiens
aagaaaaattaatag

SEQ ID NO: 1622333 - DNA, 15 bp, Homo sapiens
agaaaaattaatagg

SEQ ID NO: 1622334 - DNA, 15 bp, Homo sapiens
gaaaaattaataggg

SEQ ID NO: 1622335 - DNA, 15 bp, Homo sapiens
aaaaattaataggga

SEQ ID NO: 1622336 - DNA, 15 bp, Homo sapiens
aaaattaatagggac

SEQ ID NO: 1622337 - DNA, 15 bp, Homo sapiens
aaattaatagggact

SEQ ID NO: 1622338 - DNA, 15 bp, Homo sapiens
aattaatagggactt

SEQ ID NO: 1622339 - DNA, 15 bp, Homo sapiens
attaatagggactta

SEQ ID NO: 1622340 - DNA, 15 bp, Homo sapiens
ttaatagggacttaa

SEQ ID NO: 1622341 - DNA, 15 bp, Homo sapiens
taatagggacttaag

SEQ ID NO: 1622342 - DNA, 15 bp, Homo sapiens
aatagggacttaaga

SEQ ID NO: 1622343 - DNA, 15 bp, Homo sapiens
atagggacttaagaa

SEQ ID NO: 1622344 - DNA, 15 bp, Homo sapiens
tagggacttaagaac

SEQ ID NO: 1622345 - DNA, 15 bp, Homo sapiens
agggacttaagaaca

SEQ ID NO: 1622346 - DNA, 15 bp, Homo sapiens
gggacttaagaacag

SEQ ID NO: 1622347 - DNA, 15 bp, Homo sapiens
ggacttaagaacaga

SEQ ID NO: 1622348 - DNA, 15 bp, Homo sapiens
gacttaagaacagaa

SEQ ID NO: 1622349 - DNA, 15 bp, Homo sapiens
acttaagaacagaag

SEQ ID NO: 1622350 - DNA, 15 bp, Homo sapiens
cttaagaacagaagc

SEQ ID NO: 1622351 - DNA, 15 bp, Homo sapiens
ttaagaacagaagcc

SEQ ID NO: 1622352 - DNA, 15 bp, Homo sapiens
taagaacagaagcca

SEQ ID NO: 1622353 - DNA, 15 bp, Homo sapiens
aagaacagaagccat

SEQ ID NO: 1622354 - DNA, 15 bp, Homo sapiens
agaacagaagccata

SEQ ID NO: 1622355 - DNA, 15 bp, Homo sapiens
gaacagaagccatat

SEQ ID NO: 1622356 - DNA, 15 bp, Homo sapiens
aacagaagccatata

SEQ ID NO: 1622357 - DNA, 15 bp, Homo sapiens
acagaagccatatat

SEQ ID NO: 1622358 - DNA, 15 bp, Homo sapiens
cagaagccatatatc

SEQ ID NO: 1622359 - DNA, 15 bp, Homo sapiens
agaagccatatatct

SEQ ID NO: 1622360 - DNA, 15 bp, Homo sapiens
gaagccatatatctg

SEQ ID NO: 1622361 - DNA, 15 bp, Homo sapiens
aagccatatatctgc

SEQ ID NO: 1622362 - DNA, 15 bp, Homo sapiens
agccatatatctgcc

SEQ ID NO: 1622363 - DNA, 15 bp, Homo sapiens
gccatatatctgccc

SEQ ID NO: 1622364 - DNA, 15 bp, Homo sapiens
ccatatatctgccct

SEQ ID NO: 1622365 - DNA, 15 bp, Homo sapiens
catatatctgccctg

SEQ ID NO: 1622366 - DNA, 15 bp, Homo sapiens
atatatctgccctga

SEQ ID NO: 1622367 - DNA, 15 bp, Homo sapiens
tatatctgccctgag

SEQ ID NO: 1622368 - DNA, 15 bp, Homo sapiens
atatctgccctgaga

SEQ ID NO: 1622369 - DNA, 15 bp, Homo sapiens
tatctgccctgagat

SEQ ID NO: 1622370 - DNA, 15 bp, Homo sapiens
atctgccctgagatg

SEQ ID NO: 1622371 - DNA, 15 bp, Homo sapiens
tctgccctgagatga

SEQ ID NO: 1622372 - DNA, 15 bp, Homo sapiens
ctgccctgagatgag

SEQ ID NO: 1622373 - DNA, 15 bp, Homo sapiens
tgccctgagatgagc

SEQ ID NO: 1622374 - DNA, 15 bp, Homo sapiens
gccctgagatgagct

SEQ ID NO: 1622375 - DNA, 15 bp, Homo sapiens
ccctgagatgagctg

SEQ ID NO: 1622376 - DNA, 15 bp, Homo sapiens
cctgagatgagctgg

SEQ ID NO: 1622377 - DNA, 15 bp, Homo sapiens
ctgagatgagctggt

SEQ ID NO: 1622378 - DNA, 15 bp, Homo sapiens
tgagatgagctggtg

SEQ ID NO: 1622379 - DNA, 15 bp, Homo sapiens
gagatgagctggtgg

SEQ ID NO: 1622380 - DNA, 15 bp, Homo sapiens
agatgagctggtgga

SEQ ID NO: 1622381 - DNA, 15 bp, Homo sapiens
gatgagctggtggat

SEQ ID NO: 1622382 - DNA, 15 bp, Homo sapiens
atgagctggtggatc

SEQ ID NO: 1622383 - DNA, 15 bp, Homo sapiens
tgagctggtggatcc

SEQ ID NO: 1622384 - DNA, 15 bp, Homo sapiens
gagctggtggatcct

SEQ ID NO: 1622385 - DNA, 15 bp, Homo sapiens
agctggtggatcctc

SEQ ID NO: 1622386 - DNA, 15 bp, Homo sapiens
gctggtggatcctca

SEQ ID NO: 1622387 - DNA, 15 bp, Homo sapiens
ctggtggatcctcac

SEQ ID NO: 1622388 - DNA, 15 bp, Homo sapiens
tggtggatcctcaca

SEQ ID NO: 1622389 - DNA, 15 bp, Homo sapiens
ggtggatcctcacac

SEQ ID NO: 1622390 - DNA, 15 bp, Homo sapiens
gtggatcctcacact

SEQ ID NO: 1622391 - DNA, 15 bp, Homo sapiens
tggatcctcacactg

SEQ ID NO: 1622392 - DNA, 15 bp, Homo sapiens
ggatcctcacactgt

SEQ ID NO: 1622393 - DNA, 15 bp, Homo sapiens
gatcctcacactgtt

SEQ ID NO: 1622394 - DNA, 15 bp, Homo sapiens
atcctcacactgtta

SEQ ID NO: 1622395 - DNA, 15 bp, Homo sapiens
tcctcacactgttac

SEQ ID NO: 1622396 - DNA, 15 bp, Homo sapiens
cctcacactgttacc

SEQ ID NO: 1622397 - DNA, 15 bp, Homo sapiens
ctcacactgttaccc

SEQ ID NO: 1622398 - DNA, 15 bp, Homo sapiens
tcacactgttacccc

SEQ ID NO: 1622399 - DNA, 15 bp, Homo sapiens
cacactgttaccccc

SEQ ID NO: 1622400 - DNA, 15 bp, Homo sapiens
acactgttaccccca

SEQ ID NO: 1622401 - DNA, 15 bp, Homo sapiens
cactgttacccccag

SEQ ID NO: 1622402 - DNA, 15 bp, Homo sapiens
actgttacccccaga

SEQ ID NO: 1622403 - DNA, 15 bp, Homo sapiens
ctgttacccccagac

SEQ ID NO: 1622404 - DNA, 15 bp, Homo sapiens
tgttacccccagacc

SEQ ID NO: 1622405 - DNA, 15 bp, Homo sapiens
gttacccccagaccc

SEQ ID NO: 1622406 - DNA, 15 bp, Homo sapiens
ttacccccagaccca

SEQ ID NO: 1622407 - DNA, 15 bp, Homo sapiens
tacccccagacccag

SEQ ID NO: 1622408 - DNA, 15 bp, Homo sapiens
acccccagacccagg

SEQ ID NO: 1622409 - DNA, 15 bp, Homo sapiens
cccccagacccaggg

SEQ ID NO: 1622410 - DNA, 15 bp, Homo sapiens
ccccagacccagggc

SEQ ID NO: 1622411 - DNA, 15 bp, Homo sapiens
cccagacccagggct

SEQ ID NO: 1622412 - DNA, 15 bp, Homo sapiens
ccagacccagggctt

SEQ ID NO: 1622413 - DNA, 15 bp, Homo sapiens
cagacccagggctta

SEQ ID NO: 1622414 - DNA, 15 bp, Homo sapiens
agacccagggcttat

SEQ ID NO: 1622415 - DNA, 15 bp, Homo sapiens
gacccagggcttata

SEQ ID NO: 1622416 - DNA, 15 bp, Homo sapiens
acccagggcttatat

SEQ ID NO: 1622417 - DNA, 15 bp, Homo sapiens
cccagggcttatata

SEQ ID NO: 1622418 - DNA, 15 bp, Homo sapiens
ccagggcttatatac

SEQ ID NO: 1622419 - DNA, 15 bp, Homo sapiens
cagggcttatatacc

SEQ ID NO: 1622420 - DNA, 15 bp, Homo sapiens
agggcttatatacca

SEQ ID NO: 1622421 - DNA, 15 bp, Homo sapiens
gggcttatataccac

SEQ ID NO: 1622422 - DNA, 15 bp, Homo sapiens
ggcttatataccaca

SEQ ID NO: 1622423 - DNA, 15 bp, Homo sapiens
gcttatataccacag

SEQ ID NO: 1622424 - DNA, 15 bp, Homo sapiens
cttatataccacagg

SEQ ID NO: 1622425 - DNA, 15 bp, Homo sapiens
ttatataccacaggg

SEQ ID NO: 1622426 - DNA, 15 bp, Homo sapiens
tatataccacaggga

SEQ ID NO: 1622427 - DNA, 15 bp, Homo sapiens
atataccacagggaa

SEQ ID NO: 1622428 - DNA, 15 bp, Homo sapiens
tataccacagggaaa

SEQ ID NO: 1622429 - DNA, 15 bp, Homo sapiens
ataccacagggaaag

SEQ ID NO: 1622430 - DNA, 15 bp, Homo sapiens
taccacagggaaaga

SEQ ID NO: 1622431 - DNA, 15 bp, Homo sapiens
accacagggaaagac

SEQ ID NO: 1622432 - DNA, 15 bp, Homo sapiens
ccacagggaaagaca

SEQ ID NO: 1622433 - DNA, 15 bp, Homo sapiens
cacagggaaagacaa

SEQ ID NO: 1622434 - DNA, 15 bp, Homo sapiens
acagggaaagacaat

SEQ ID NO: 1622435 - DNA, 15 bp, Homo sapiens
cagggaaagacaatt

SEQ ID NO: 1622436 - DNA, 15 bp, Homo sapiens
agggaaagacaattg

SEQ ID NO: 1622437 - DNA, 15 bp, Homo sapiens
gggaaagacaattgc

SEQ ID NO: 1622438 - DNA, 15 bp, Homo sapiens
ggaaagacaattgca

SEQ ID NO: 1622439 - DNA, 15 bp, Homo sapiens
gaaagacaattgcag

SEQ ID NO: 1622440 - DNA, 15 bp, Homo sapiens
aaagacaattgcagt

SEQ ID NO: 1622441 - DNA, 15 bp, Homo sapiens
aagacaattgcagta

SEQ ID NO: 1622442 - DNA, 15 bp, Homo sapiens
agacaattgcagtaa

SEQ ID NO: 1622443 - DNA, 15 bp, Homo sapiens
gacaattgcagtaat

SEQ ID NO: 1622444 - DNA, 15 bp, Homo sapiens
acaattgcagtaatt

SEQ ID NO: 1622445 - DNA, 15 bp, Homo sapiens
caattgcagtaattt

SEQ ID NO: 1622446 - DNA, 15 bp, Homo sapiens
aattgcagtaatttg

SEQ ID NO: 1622447 - DNA, 15 bp, Homo sapiens
attgcagtaatttgc

SEQ ID NO: 1622448 - DNA, 15 bp, Homo sapiens
ttgcagtaatttgct

SEQ ID NO: 1622449 - DNA, 15 bp, Homo sapiens
tgcagtaatttgctt

SEQ ID NO: 1622450 - DNA, 15 bp, Homo sapiens
gcagtaatttgctta

SEQ ID NO: 1622451 - DNA, 15 bp, Homo sapiens
cagtaatttgcttaa

SEQ ID NO: 1622452 - DNA, 15 bp, Homo sapiens
agtaatttgcttaac

SEQ ID NO: 1622453 - DNA, 15 bp, Homo sapiens
gtaatttgcttaacg

SEQ ID NO: 1622454 - DNA, 15 bp, Homo sapiens
taatttgcttaacgg

SEQ ID NO: 1622455 - DNA, 15 bp, Homo sapiens
aatttgcttaacggc

SEQ ID NO: 1622456 - DNA, 15 bp, Homo sapiens
atttgcttaacggca

SEQ ID NO: 1622457 - DNA, 15 bp, Homo sapiens
tttgcttaacggcag

SEQ ID NO: 1622458 - DNA, 15 bp, Homo sapiens
ttgcttaacggcagg

SEQ ID NO: 1622459 - DNA, 15 bp, Homo sapiens
tgcttaacggcagga

SEQ ID NO: 1622460 - DNA, 15 bp, Homo sapiens
gcttaacggcaggat

SEQ ID NO: 1622461 - DNA, 15 bp, Homo sapiens
cttaacggcaggatt

SEQ ID NO: 1622462 - DNA, 15 bp, Homo sapiens
ttaacggcaggattt

SEQ ID NO: 1622463 - DNA, 15 bp, Homo sapiens
taacggcaggattta

SEQ ID NO: 1622464 - DNA, 15 bp, Homo sapiens
aacggcaggatttac

SEQ ID NO: 1622465 - DNA, 15 bp, Homo sapiens
acggcaggatttacg

SEQ ID NO: 1622466 - DNA, 15 bp, Homo sapiens
cggcaggatttacgg

SEQ ID NO: 1622467 - DNA, 15 bp, Homo sapiens
ggcaggatttacggc

SEQ ID NO: 1622468 - DNA, 15 bp, Homo sapiens
gcaggatttacggca

SEQ ID NO: 1622469 - DNA, 15 bp, Homo sapiens
caggatttacggcaa

SEQ ID NO: 1622470 - DNA, 15 bp, Homo sapiens
aggatttacggcaag

SEQ ID NO: 1622471 - DNA, 15 bp, Homo sapiens
ggatttacggcaagt

SEQ ID NO: 1622472 - DNA, 15 bp, Homo sapiens
gatttacggcaagta

SEQ ID NO: 1622473 - DNA, 15 bp, Homo sapiens
atttacggcaagtac

SEQ ID NO: 1622474 - DNA, 15 bp, Homo sapiens
tttacggcaagtaca

SEQ ID NO: 1622475 - DNA, 15 bp, Homo sapiens
ttacggcaagtacat

SEQ ID NO: 1622476 - DNA, 15 bp, Homo sapiens
tacggcaagtacatg

SEQ ID NO: 1622477 - DNA, 15 bp, Homo sapiens
acggcaagtacatgc

SEQ ID NO: 1622478 - DNA, 15 bp, Homo sapiens
cggcaagtacatgct

SEQ ID NO: 1622479 - DNA, 15 bp, Homo sapiens
ggcaagtacatgctc

SEQ ID NO: 1622480 - DNA, 15 bp, Homo sapiens
gcaagtacatgctct

SEQ ID NO: 1622481 - DNA, 15 bp, Homo sapiens
caagtacatgctctt

SEQ ID NO: 1622482 - DNA, 15 bp, Homo sapiens
aagtacatgctctta

SEQ ID NO: 1622483 - DNA, 15 bp, Homo sapiens
agtacatgctcttaa

SEQ ID NO: 1622484 - DNA, 15 bp, Homo sapiens
gtacatgctcttaag

SEQ ID NO: 1622485 - DNA, 15 bp, Homo sapiens
tacatgctcttaaga

SEQ ID NO: 1622486 - DNA, 15 bp, Homo sapiens
acatgctcttaagag

SEQ ID NO: 1622487 - DNA, 15 bp, Homo sapiens
catgctcttaagagt

SEQ ID NO: 1622488 - DNA, 15 bp, Homo sapiens
atgctcttaagagta

SEQ ID NO: 1622489 - DNA, 15 bp, Homo sapiens
tgctcttaagagtag

SEQ ID NO: 1622490 - DNA, 15 bp, Homo sapiens
gctcttaagagtaga

SEQ ID NO: 1622491 - DNA, 15 bp, Homo sapiens
ctcttaagagtagat

SEQ ID NO: 1622492 - DNA, 15 bp, Homo sapiens
tcttaagagtagatt

SEQ ID NO: 1622493 - DNA, 15 bp, Homo sapiens
cttaagagtagatta

SEQ ID NO: 1622494 - DNA, 15 bp, Homo sapiens
ttaagagtagattaa

SEQ ID NO: 1622495 - DNA, 15 bp, Homo sapiens
taagagtagattaag

SEQ ID NO: 1622496 - DNA, 15 bp, Homo sapiens
aagagtagattaagt

SEQ ID NO: 1622497 - DNA, 15 bp, Homo sapiens
agagtagattaagta

SEQ ID NO: 1622498 - DNA, 15 bp, Homo sapiens
gagtagattaagtag

SEQ ID NO: 1622499 - DNA, 15 bp, Homo sapiens
agtagattaagtagt

SEQ ID NO: 1622500 - DNA, 15 bp, Homo sapiens
gtagattaagtagta

SEQ ID NO: 1622501 - DNA, 15 bp, Homo sapiens
tagattaagtagtaa

SEQ ID NO: 1622502 - DNA, 15 bp, Homo sapiens
agattaagtagtaac

SEQ ID NO: 1622503 - DNA, 15 bp, Homo sapiens
gattaagtagtaacc

SEQ ID NO: 1622504 - DNA, 15 bp, Homo sapiens
attaagtagtaacct

SEQ ID NO: 1622505 - DNA, 15 bp, Homo sapiens
ttaagtagtaacctt

SEQ ID NO: 1622506 - DNA, 15 bp, Homo sapiens
taagtagtaacctta

SEQ ID NO: 1622507 - DNA, 15 bp, Homo sapiens
aagtagtaaccttag

SEQ ID NO: 1622508 - DNA, 15 bp, Homo sapiens
agtagtaaccttaga

SEQ ID NO: 1622509 - DNA, 15 bp, Homo sapiens
gtagtaaccttagag

SEQ ID NO: 1622510 - DNA, 15 bp, Homo sapiens
tagtaaccttagagg

SEQ ID NO: 1622511 - DNA, 15 bp, Homo sapiens
agtaaccttagaggc

SEQ ID NO: 1622512 - DNA, 15 bp, Homo sapiens
gtaaccttagaggca

SEQ ID NO: 1622513 - DNA, 15 bp, Homo sapiens
taaccttagaggcat

SEQ ID NO: 1622514 - DNA, 15 bp, Homo sapiens
aaccttagaggcatt

SEQ ID NO: 1622515 - DNA, 15 bp, Homo sapiens
accttagaggcattc

SEQ ID NO: 1622516 - DNA, 15 bp, Homo sapiens
ccttagaggcattcc

SEQ ID NO: 1622517 - DNA, 15 bp, Homo sapiens
cttagaggcattcct

SEQ ID NO: 1622518 - DNA, 15 bp, Homo sapiens
ttagaggcattccta

SEQ ID NO: 1622519 - DNA, 15 bp, Homo sapiens
tagaggcattcctag

SEQ ID NO: 1622520 - DNA, 15 bp, Homo sapiens
agaggcattcctaga

SEQ ID NO: 1622521 - DNA, 15 bp, Homo sapiens
gaggcattcctagaa

SEQ ID NO: 1622522 - DNA, 15 bp, Homo sapiens
aggcattcctagaac

SEQ ID NO: 1622523 - DNA, 15 bp, Homo sapiens
ggcattcctagaact

SEQ ID NO: 1622524 - DNA, 15 bp, Homo sapiens
gcattcctagaactg

SEQ ID NO: 1622525 - DNA, 15 bp, Homo sapiens
cattcctagaactgg

SEQ ID NO: 1622526 - DNA, 15 bp, Homo sapiens
attcctagaactgga

SEQ ID NO: 1622527 - DNA, 15 bp, Homo sapiens
ttcctagaactggag

SEQ ID NO: 1622528 - DNA, 15 bp, Homo sapiens
tcctagaactggagt

SEQ ID NO: 1622529 - DNA, 15 bp, Homo sapiens
cctagaactggagtt

SEQ ID NO: 1622530 - DNA, 15 bp, Homo sapiens
ctagaactggagtta

SEQ ID NO: 1622531 - DNA, 15 bp, Homo sapiens
tagaactggagttaa

SEQ ID NO: 1622532 - DNA, 15 bp, Homo sapiens
agaactggagttaat

SEQ ID NO: 1622533 - DNA, 15 bp, Homo sapiens
gaactggagttaatc

SEQ ID NO: 1622534 - DNA, 15 bp, Homo sapiens
aactggagttaatca

SEQ ID NO: 1622535 - DNA, 15 bp, Homo sapiens
actggagttaatcag

SEQ ID NO: 1622536 - DNA, 15 bp, Homo sapiens
ctggagttaatcaga

SEQ ID NO: 1622537 - DNA, 15 bp, Homo sapiens
tggagttaatcagaa

SEQ ID NO: 1622538 - DNA, 15 bp, Homo sapiens
ggagttaatcagaag

SEQ ID NO: 1622539 - DNA, 15 bp, Homo sapiens
gagttaatcagaagt

SEQ ID NO: 1622540 - DNA, 15 bp, Homo sapiens
agttaatcagaagtc

SEQ ID NO: 1622541 - DNA, 15 bp, Homo sapiens
gttaatcagaagtca

SEQ ID NO: 1622542 - DNA, 15 bp, Homo sapiens
ttaatcagaagtcaa

SEQ ID NO: 1622543 - DNA, 15 bp, Homo sapiens
taatcagaagtcaac

SEQ ID NO: 1622544 - DNA, 15 bp, Homo sapiens
aatcagaagtcaaca

SEQ ID NO: 1622545 - DNA, 15 bp, Homo sapiens
atcagaagtcaacac

SEQ ID NO: 1622546 - DNA, 15 bp, Homo sapiens
tcagaagtcaacaca

SEQ ID NO: 1622547 - DNA, 15 bp, Homo sapiens
cagaagtcaacacag

SEQ ID NO: 1622548 - DNA, 15 bp, Homo sapiens
agaagtcaacacagt

SEQ ID NO: 1622549 - DNA, 15 bp, Homo sapiens
gaagtcaacacagtg

SEQ ID NO: 1622550 - DNA, 15 bp, Homo sapiens
aagtcaacacagtgg

SEQ ID NO: 1622551 - DNA, 15 bp, Homo sapiens
agtcaacacagtgga

SEQ ID NO: 1622552 - DNA, 15 bp, Homo sapiens
gtcaacacagtggat

SEQ ID NO: 1622553 - DNA, 15 bp, Homo sapiens
tcaacacagtggatt

SEQ ID NO: 1622554 - DNA, 15 bp, Homo sapiens
caacacagtggatta

SEQ ID NO: 1622555 - DNA, 15 bp, Homo sapiens
aacacagtggattag

SEQ ID NO: 1622556 - DNA, 15 bp, Homo sapiens
acacagtggattagc

SEQ ID NO: 1622557 - DNA, 15 bp, Homo sapiens
cacagtggattagca

SEQ ID NO: 1622558 - DNA, 15 bp, Homo sapiens
acagtggattagcat

SEQ ID NO: 1622559 - DNA, 15 bp, Homo sapiens
cagtggattagcatc

SEQ ID NO: 1622560 - DNA, 15 bp, Homo sapiens
agtggattagcatcc

SEQ ID NO: 1622561 - DNA, 15 bp, Homo sapiens
gtggattagcatcca

SEQ ID NO: 1622562 - DNA, 15 bp, Homo sapiens
tggattagcatccaa

SEQ ID NO: 1622563 - DNA, 15 bp, Homo sapiens
ggattagcatccaag

SEQ ID NO: 1622564 - DNA, 15 bp, Homo sapiens
gattagcatccaaga

SEQ ID NO: 1622565 - DNA, 15 bp, Homo sapiens
attagcatccaagat

SEQ ID NO: 1622566 - DNA, 15 bp, Homo sapiens
ttagcatccaagatg

SEQ ID NO: 1622567 - DNA, 15 bp, Homo sapiens
tagcatccaagatgg

SEQ ID NO: 1622568 - DNA, 15 bp, Homo sapiens
agcatccaagatgga

SEQ ID NO: 1622569 - DNA, 15 bp, Homo sapiens
gcatccaagatggag

SEQ ID NO: 1622570 - DNA, 15 bp, Homo sapiens
catccaagatggagt

SEQ ID NO: 1622571 - DNA, 15 bp, Homo sapiens
atccaagatggagtt

SEQ ID NO: 1622572 - DNA, 15 bp, Homo sapiens
tccaagatggagttg

SEQ ID NO: 1622573 - DNA, 15 bp, Homo sapiens
ccaagatggagttgc

SEQ ID NO: 1622574 - DNA, 15 bp, Homo sapiens
caagatggagttgct

SEQ ID NO: 1622575 - DNA, 15 bp, Homo sapiens
aagatggagttgctt

SEQ ID NO: 1622576 - DNA, 15 bp, Homo sapiens
agatggagttgcttt

SEQ ID NO: 1622577 - DNA, 15 bp, Homo sapiens
gatggagttgcttta

SEQ ID NO: 1622578 - DNA, 15 bp, Homo sapiens
atggagttgctttag

SEQ ID NO: 1622579 - DNA, 15 bp, Homo sapiens
tggagttgctttagc

SEQ ID NO: 1622580 - DNA, 15 bp, Homo sapiens
ggagttgctttagcc

SEQ ID NO: 1622581 - DNA, 15 bp, Homo sapiens
gagttgctttagcct

SEQ ID NO: 1622582 - DNA, 15 bp, Homo sapiens
agttgctttagcctc

SEQ ID NO: 1622583 - DNA, 15 bp, Homo sapiens
gttgctttagcctcc

SEQ ID NO: 1622584 - DNA, 15 bp, Homo sapiens
tgctttagcctccac

SEQ ID NO: 1622585 - DNA, 15 bp, Homo sapiens
gctttagcctccaca

SEQ ID NO: 1622586 - DNA, 15 bp, Homo sapiens
ctttagcctccacaa

SEQ ID NO: 1622587 - DNA, 15 bp, Homo sapiens
tttagcctccacaaa

SEQ ID NO: 1622588 - DNA, 15 bp, Homo sapiens
ttagcctccacaaag

SEQ ID NO: 1622589 - DNA, 15 bp, Homo sapiens
tagcctccacaaaga

SEQ ID NO: 1622590 - DNA, 15 bp, Homo sapiens
agcctccacaaagag

SEQ ID NO: 1622591 - DNA, 15 bp, Homo sapiens
gcctccacaaagaga

SEQ ID NO: 1622592 - DNA, 15 bp, Homo sapiens
cctccacaaagagaa

SEQ ID NO: 1622593 - DNA, 15 bp, Homo sapiens
ctccacaaagagaaa

SEQ ID NO: 1622594 - DNA, 15 bp, Homo sapiens
tccacaaagagaaaa

SEQ ID NO: 1622595 - DNA, 15 bp, Homo sapiens
ccacaaagagaaaat

SEQ ID NO: 1622596 - DNA, 15 bp, Homo sapiens
cacaaagagaaaatg

SEQ ID NO: 1622597 - DNA, 15 bp, Homo sapiens
acaaagagaaaatga

SEQ ID NO: 1622598 - DNA, 15 bp, Homo sapiens
caaagagaaaatgaa

SEQ ID NO: 1622599 - DNA, 15 bp, Homo sapiens
aaagagaaaatgaag

SEQ ID NO: 1622600 - DNA, 15 bp, Homo sapiens
aagagaaaatgaaga

SEQ ID NO: 1622601 - DNA, 15 bp, Homo sapiens
agagaaaatgaagat

SEQ ID NO: 1622602 - DNA, 15 bp, Homo sapiens
gagaaaatgaagata

SEQ ID NO: 1622603 - DNA, 15 bp, Homo sapiens
agaaaatgaagataa

SEQ ID NO: 1622604 - DNA, 15 bp, Homo sapiens
gaaaatgaagataaa

SEQ ID NO: 1622605 - DNA, 15 bp, Homo sapiens
aaaatgaagataaat

SEQ ID NO: 1622606 - DNA, 15 bp, Homo sapiens
aaatgaagataaatt

SEQ ID NO: 1622607 - DNA, 15 bp, Homo sapiens
aatgaagataaattt

SEQ ID NO: 1622608 - DNA, 15 bp, Homo sapiens
atgaagataaatttg

SEQ ID NO: 1622609 - DNA, 15 bp, Homo sapiens
tgaagataaatttgg

SEQ ID NO: 1622610 - DNA, 15 bp, Homo sapiens
gaagataaatttggt

SEQ ID NO: 1622611 - DNA, 15 bp, Homo sapiens
aagataaatttggtc

SEQ ID NO: 1622612 - DNA, 15 bp, Homo sapiens
agataaatttggtcc

SEQ ID NO: 1622613 - DNA, 15 bp, Homo sapiens
gataaatttggtcca

SEQ ID NO: 1622614 - DNA, 15 bp, Homo sapiens
ataaatttggtccat

SEQ ID NO: 1622615 - DNA, 15 bp, Homo sapiens
taaatttggtccatg

SEQ ID NO: 1622616 - DNA, 15 bp, Homo sapiens
aaatttggtccatgc

SEQ ID NO: 1622617 - DNA, 15 bp, Homo sapiens
aatttggtccatgct

SEQ ID NO: 1622618 - DNA, 15 bp, Homo sapiens
atttggtccatgcta

SEQ ID NO: 1622619 - DNA, 15 bp, Homo sapiens
tttggtccatgctaa

SEQ ID NO: 1622620 - DNA, 15 bp, Homo sapiens
ttggtccatgctaat

SEQ ID NO: 1622621 - DNA, 15 bp, Homo sapiens
tggtccatgctaatt

SEQ ID NO: 1622622 - DNA, 15 bp, Homo sapiens
ggtccatgctaatta

SEQ ID NO: 1622623 - DNA, 15 bp, Homo sapiens
gtccatgctaattag

SEQ ID NO: 1622624 - DNA, 15 bp, Homo sapiens
tccatgctaattagg

SEQ ID NO: 1622625 - DNA, 15 bp, Homo sapiens
ccatgctaattaggg

SEQ ID NO: 1622626 - DNA, 15 bp, Homo sapiens
catgctaattagggg

SEQ ID NO: 1622627 - DNA, 15 bp, Homo sapiens
atgctaattaggggg

SEQ ID NO: 1622628 - DNA, 15 bp, Homo sapiens
tgctaattagggggt

SEQ ID NO: 1622629 - DNA, 15 bp, Homo sapiens
gctaattagggggtg

SEQ ID NO: 1622630 - DNA, 15 bp, Homo sapiens
ctaattagggggtgt

SEQ ID NO: 1622631 - DNA, 15 bp, Homo sapiens
taattagggggtgtt

SEQ ID NO: 1622632 - DNA, 15 bp, Homo sapiens
aattagggggtgttc

SEQ ID NO: 1622633 - DNA, 15 bp, Homo sapiens
attagggggtgttcc

SEQ ID NO: 1622634 - DNA, 15 bp, Homo sapiens
ttagggggtgttcca

SEQ ID NO: 1622635 - DNA, 15 bp, Homo sapiens
tagggggtgttccat

SEQ ID NO: 1622636 - DNA, 15 bp, Homo sapiens
agggggtgttccatt

SEQ ID NO: 1622637 - DNA, 15 bp, Homo sapiens
gggggtgttccattt

SEQ ID NO: 1622638 - DNA, 15 bp, Homo sapiens
ggggtgttccatttg

SEQ ID NO: 1622639 - DNA, 15 bp, Homo sapiens
gggtgttccatttgt

SEQ ID NO: 1622640 - DNA, 15 bp, Homo sapiens
ggtgttccatttgtt

SEQ ID NO: 1622641 - DNA, 15 bp, Homo sapiens
gtgttccatttgttt

SEQ ID NO: 1622642 - DNA, 15 bp, Homo sapiens
tgttccatttgtttg

SEQ ID NO: 1622643 - DNA, 15 bp, Homo sapiens
gttccatttgtttga

SEQ ID NO: 1622644 - DNA, 15 bp, Homo sapiens
ttccatttgtttgaa

SEQ ID NO: 1622645 - DNA, 15 bp, Homo sapiens
tccatttgtttgaaa

SEQ ID NO: 1622646 - DNA, 15 bp, Homo sapiens
ccatttgtttgaaac

SEQ ID NO: 1622647 - DNA, 15 bp, Homo sapiens
catttgtttgaaact

SEQ ID NO: 1622648 - DNA, 15 bp, Homo sapiens
atttgtttgaaactg

SEQ ID NO: 1622649 - DNA, 15 bp, Homo sapiens
tttgtttgaaactga

SEQ ID NO: 1622650 - DNA, 15 bp, Homo sapiens
ttgtttgaaactgaa

SEQ ID NO: 1622651 - DNA, 15 bp, Homo sapiens
tgtttgaaactgaaa

SEQ ID NO: 1622652 - DNA, 15 bp, Homo sapiens
gtttgaaactgaaat

SEQ ID NO: 1622653 - DNA, 15 bp, Homo sapiens
tttgaaactgaaatc

SEQ ID NO: 1622654 - DNA, 15 bp, Homo sapiens
ttgaaactgaaatct

SEQ ID NO: 1622655 - DNA, 15 bp, Homo sapiens
tgaaactgaaatcta

SEQ ID NO: 1622656 - DNA, 15 bp, Homo sapiens
gaaactgaaatctat

SEQ ID NO: 1622657 - DNA, 15 bp, Homo sapiens
aaactgaaatctata

SEQ ID NO: 1622658 - DNA, 15 bp, Homo sapiens
aactgaaatctataa

SEQ ID NO: 1622659 - DNA, 15 bp, Homo sapiens
actgaaatctataat

SEQ ID NO: 1622660 - DNA, 15 bp, Homo sapiens
ctgaaatctataatt

SEQ ID NO: 1622661 - DNA, 15 bp, Homo sapiens
tgaaatctataattt

SEQ ID NO: 1622662 - DNA, 15 bp, Homo sapiens
gaaatctataatttc

SEQ ID NO: 1622663 - DNA, 15 bp, Homo sapiens
aaatctataatttcc

SEQ ID NO: 1622664 - DNA, 15 bp, Homo sapiens
aatctataatttcca

SEQ ID NO: 1622665 - DNA, 15 bp, Homo sapiens
atctataatttccaa

SEQ ID NO: 1622666 - DNA, 15 bp, Homo sapiens
tctataatttccaaa

SEQ ID NO: 1622667 - DNA, 15 bp, Homo sapiens
ctataatttccaaag

SEQ ID NO: 1622668 - DNA, 15 bp, Homo sapiens
tataatttccaaaga

SEQ ID NO: 1622669 - DNA, 15 bp, Homo sapiens
ataatttccaaagaa

SEQ ID NO: 1622670 - DNA, 15 bp, Homo sapiens
taatttccaaagaag

SEQ ID NO: 1622671 - DNA, 15 bp, Homo sapiens
aatttccaaagaaga

SEQ ID NO: 1622672 - DNA, 15 bp, Homo sapiens
atttccaaagaagaa

SEQ ID NO: 1622673 - DNA, 15 bp, Homo sapiens
tttccaaagaagaaa

SEQ ID NO: 1622674 - DNA, 15 bp, Homo sapiens
ttccaaagaagaaaa

SEQ ID NO: 1622675 - DNA, 15 bp, Homo sapiens
tccaaagaagaaaat

SEQ ID NO: 1622676 - DNA, 15 bp, Homo sapiens
ccaaagaagaaaata

SEQ ID NO: 1622677 - DNA, 15 bp, Homo sapiens
aagaagaaaataaac

SEQ ID NO: 1622678 - DNA, 15 bp, Homo sapiens
agaagaaaataaacg

SEQ ID NO: 1622679 - DNA, 15 bp, Homo sapiens
gaagaaaataaacgt

SEQ ID NO: 1622680 - DNA, 15 bp, Homo sapiens
aagaaaataaacgtg

SEQ ID NO: 1622681 - DNA, 15 bp, Homo sapiens
agaaaataaacgtgg

SEQ ID NO: 1622682 - DNA, 15 bp, Homo sapiens
gaaaataaacgtgga

SEQ ID NO: 1622683 - DNA, 15 bp, Homo sapiens
aaaataaacgtggaa

SEQ ID NO: 1622684 - DNA, 15 bp, Homo sapiens
aaataaacgtggaag

SEQ ID NO: 1622685 - DNA, 15 bp, Homo sapiens
aataaacgtggaagt

SEQ ID NO: 1622686 - DNA, 15 bp, Homo sapiens
ataaacgtggaagtc

SEQ ID NO: 1622687 - DNA, 15 bp, Homo sapiens
taaacgtggaagtcg

SEQ ID NO: 1622688 - DNA, 15 bp, Homo sapiens
aaacgtggaagtcgt

SEQ ID NO: 1622689 - DNA, 15 bp, Homo sapiens
aacgtggaagtcgtc

SEQ ID NO: 1622690 - DNA, 15 bp, Homo sapiens
acgtggaagtcgtcc

SEQ ID NO: 1622691 - DNA, 15 bp, Homo sapiens
cgtggaagtcgtcct

SEQ ID NO: 1622692 - DNA, 15 bp, Homo sapiens
gtggaagtcgtcctt

SEQ ID NO: 1622693 - DNA, 15 bp, Homo sapiens
tggaagtcgtccttc

SEQ ID NO: 1622694 - DNA, 15 bp, Homo sapiens
ggaagtcgtccttcc

SEQ ID NO: 1622695 - DNA, 15 bp, Homo sapiens
gaagtcgtccttcct

SEQ ID NO: 1622696 - DNA, 15 bp, Homo sapiens
aagtcgtccttcctt

SEQ ID NO: 1622697 - DNA, 15 bp, Homo sapiens
agtcgtccttccttt

SEQ ID NO: 1622698 - DNA, 15 bp, Homo sapiens
gtcgtccttcctttt

SEQ ID NO: 1622699 - DNA, 15 bp, Homo sapiens
tcgtccttccttttt

SEQ ID NO: 1622700 - DNA, 15 bp, Homo sapiens
cgtccttcctttttg

SEQ ID NO: 1622701 - DNA, 15 bp, Homo sapiens
gtccttcctttttgg

SEQ ID NO: 1622702 - DNA, 15 bp, Homo sapiens
tccttcctttttggt

SEQ ID NO: 1622703 - DNA, 15 bp, Homo sapiens
ccttcctttttggta

SEQ ID NO: 1622704 - DNA, 15 bp, Homo sapiens
cttcctttttggtat

SEQ ID NO: 1622705 - DNA, 15 bp, Homo sapiens
ttcctttttggtatg

SEQ ID NO: 1622706 - DNA, 15 bp, Homo sapiens
tcctttttggtatgc

SEQ ID NO: 1622707 - DNA, 15 bp, Homo sapiens
cctttttggtatgca

SEQ ID NO: 1622708 - DNA, 15 bp, Homo sapiens
ctttttggtatgcat

SEQ ID NO: 1622709 - DNA, 15 bp, Homo sapiens
tttttggtatgcata

SEQ ID NO: 1622710 - DNA, 15 bp, Homo sapiens
ttttggtatgcatag

SEQ ID NO: 1622711 - DNA, 15 bp, Homo sapiens
tttggtatgcataga

SEQ ID NO: 1622712 - DNA, 15 bp, Homo sapiens
ttggtatgcatagac

SEQ ID NO: 1622713 - DNA, 15 bp, Homo sapiens
tggtatgcatagaca

SEQ ID NO: 1622714 - DNA, 15 bp, Homo sapiens
ggtatgcatagacaa

SEQ ID NO: 1622715 - DNA, 15 bp, Homo sapiens
gtatgcatagacaat

SEQ ID NO: 1622716 - DNA, 15 bp, Homo sapiens
tatgcatagacaatc

SEQ ID NO: 1622717 - DNA, 15 bp, Homo sapiens
atgcatagacaatct

SEQ ID NO: 1622718 - DNA, 15 bp, Homo sapiens
tgcatagacaatctg

SEQ ID NO: 1622719 - DNA, 15 bp, Homo sapiens
gcatagacaatctgg

SEQ ID NO: 1622720 - DNA, 15 bp, Homo sapiens
catagacaatctggc

SEQ ID NO: 1622721 - DNA, 15 bp, Homo sapiens
atagacaatctggca

SEQ ID NO: 1622722 - DNA, 15 bp, Homo sapiens
tagacaatctggcag

SEQ ID NO: 1622723 - DNA, 15 bp, Homo sapiens
agacaatctggcagt

SEQ ID NO: 1622724 - DNA, 15 bp, Homo sapiens
gacaatctggcagtg

SEQ ID NO: 1622725 - DNA, 15 bp, Homo sapiens
acaatctggcagtgt

SEQ ID NO: 1622726 - DNA, 15 bp, Homo sapiens
caatctggcagtgtt

SEQ ID NO: 1622727 - DNA, 15 bp, Homo sapiens
aatctggcagtgtta

SEQ ID NO: 1622728 - DNA, 15 bp, Homo sapiens
atctggcagtgttag

SEQ ID NO: 1622729 - DNA, 15 bp, Homo sapiens
tctggcagtgttagg

SEQ ID NO: 1622730 - DNA, 15 bp, Homo sapiens
ctggcagtgttaggc

SEQ ID NO: 1622731 - DNA, 15 bp, Homo sapiens
tggcagtgttaggcc

SEQ ID NO: 1622732 - DNA, 15 bp, Homo sapiens
ggcagtgttaggccc

SEQ ID NO: 1622733 - DNA, 15 bp, Homo sapiens
gcagtgttaggcccc

SEQ ID NO: 1622734 - DNA, 15 bp, Homo sapiens
cagtgttaggcccct

SEQ ID NO: 1622735 - DNA, 15 bp, Homo sapiens
agtgttaggccccta

SEQ ID NO: 1622736 - DNA, 15 bp, Homo sapiens
gtgttaggcccctaa

SEQ ID NO: 1622737 - DNA, 15 bp, Homo sapiens
tgttaggcccctaag

SEQ ID NO: 1622738 - DNA, 15 bp, Homo sapiens
gttaggcccctaagg

SEQ ID NO: 1622739 - DNA, 15 bp, Homo sapiens
ttaggcccctaaggc

SEQ ID NO: 1622740 - DNA, 15 bp, Homo sapiens
taggcccctaaggcc

SEQ ID NO: 1622741 - DNA, 15 bp, Homo sapiens
aggcccctaaggcct

SEQ ID NO: 1622742 - DNA, 15 bp, Homo sapiens
ggcccctaaggcctt

SEQ ID NO: 1622743 - DNA, 15 bp, Homo sapiens
gcccctaaggcctta

SEQ ID NO: 1622744 - DNA, 15 bp, Homo sapiens
cccctaaggccttat

SEQ ID NO: 1622745 - DNA, 15 bp, Homo sapiens
ccctaaggccttatc

SEQ ID NO: 1622746 - DNA, 15 bp, Homo sapiens
cctaaggccttatca

SEQ ID NO: 1622747 - DNA, 15 bp, Homo sapiens
ctaaggccttatcac

SEQ ID NO: 1622748 - DNA, 15 bp, Homo sapiens
taaggccttatcacc

SEQ ID NO: 1622749 - DNA, 15 bp, Homo sapiens
aaggccttatcacct

SEQ ID NO: 1622750 - DNA, 15 bp, Homo sapiens
aggccttatcacctc

SEQ ID NO: 1622751 - DNA, 15 bp, Homo sapiens
ggccttatcacctcc

SEQ ID NO: 1622752 - DNA, 15 bp, Homo sapiens
gccttatcacctcct

SEQ ID NO: 1622753 - DNA, 15 bp, Homo sapiens
ccttatcacctcctc

SEQ ID NO: 1622754 - DNA, 15 bp, Homo sapiens
cttatcacctcctcc

SEQ ID NO: 1622755 - DNA, 15 bp, Homo sapiens
ttatcacctcctcct

SEQ ID NO: 1622756 - DNA, 15 bp, Homo sapiens
tatcacctcctcctt

SEQ ID NO: 1622757 - DNA, 15 bp, Homo sapiens
atcacctcctccttc

SEQ ID NO: 1622758 - DNA, 15 bp, Homo sapiens
tcacctcctccttct

SEQ ID NO: 1622759 - DNA, 15 bp, Homo sapiens
cacctcctccttctg

SEQ ID NO: 1622760 - DNA, 15 bp, Homo sapiens
acctcctccttctgt

SEQ ID NO: 1622761 - DNA, 15 bp, Homo sapiens
cctcctccttctgtg

SEQ ID NO: 1622762 - DNA, 15 bp, Homo sapiens
ctcctccttctgtgg

SEQ ID NO: 1622763 - DNA, 15 bp, Homo sapiens
tcctccttctgtggg

SEQ ID NO: 1622764 - DNA, 15 bp, Homo sapiens
cctccttctgtgggt

SEQ ID NO: 1622765 - DNA, 15 bp, Homo sapiens
ctccttctgtgggtc

SEQ ID NO: 1622766 - DNA, 15 bp, Homo sapiens
tccttctgtgggtca

SEQ ID NO: 1622767 - DNA, 15 bp, Homo sapiens
ccttctgtgggtcaa

SEQ ID NO: 1622768 - DNA, 15 bp, Homo sapiens
cttctgtgggtcaaa

SEQ ID NO: 1622769 - DNA, 15 bp, Homo sapiens
ttctgtgggtcaaac

SEQ ID NO: 1622770 - DNA, 15 bp, Homo sapiens
tctgtgggtcaaact

SEQ ID NO: 1622771 - DNA, 15 bp, Homo sapiens
ctgtgggtcaaactt

SEQ ID NO: 1622772 - DNA, 15 bp, Homo sapiens
tgtgggtcaaacttt

SEQ ID NO: 1622773 - DNA, 15 bp, Homo sapiens
gtgggtcaaacttta

SEQ ID NO: 1622774 - DNA, 15 bp, Homo sapiens
tgggtcaaactttac

SEQ ID NO: 1622775 - DNA, 15 bp, Homo sapiens
gggtcaaactttaca

SEQ ID NO: 1622776 - DNA, 15 bp, Homo sapiens
ggtcaaactttacag

SEQ ID NO: 1622777 - DNA, 15 bp, Homo sapiens
gtcaaactttacagt

SEQ ID NO: 1622778 - DNA, 15 bp, Homo sapiens
tcaaactttacagtg

SEQ ID NO: 1622779 - DNA, 15 bp, Homo sapiens
caaactttacagtga

SEQ ID NO: 1622780 - DNA, 15 bp, Homo sapiens
aaactttacagtgag

SEQ ID NO: 1622781 - DNA, 15 bp, Homo sapiens
aactttacagtgaga

SEQ ID NO: 1622782 - DNA, 15 bp, Homo sapiens
actttacagtgagag

SEQ ID NO: 1622783 - DNA, 15 bp, Homo sapiens
ctttacagtgagagg

SEQ ID NO: 1622784 - DNA, 15 bp, Homo sapiens
tttacagtgagagga

SEQ ID NO: 1622785 - DNA, 15 bp, Homo sapiens
ttacagtgagaggaa

SEQ ID NO: 1622786 - DNA, 15 bp, Homo sapiens
tacagtgagaggaaa

SEQ ID NO: 1622787 - DNA, 15 bp, Homo sapiens
acagtgagaggaaag

SEQ ID NO: 1622788 - DNA, 15 bp, Homo sapiens
cagtgagaggaaaga

SEQ ID NO: 1622789 - DNA, 15 bp, Homo sapiens
agtgagaggaaagac

SEQ ID NO: 1622790 - DNA, 15 bp, Homo sapiens
gtgagaggaaagaca

SEQ ID NO: 1622791 - DNA, 15 bp, Homo sapiens
tgagaggaaagacat

SEQ ID NO: 1622792 - DNA, 15 bp, Homo sapiens
gagaggaaagacatc

SEQ ID NO: 1622793 - DNA, 15 bp, Homo sapiens
agaggaaagacatct

SEQ ID NO: 1622794 - DNA, 15 bp, Homo sapiens
gaggaaagacatctt

SEQ ID NO: 1622795 - DNA, 15 bp, Homo sapiens
aggaaagacatcttt

SEQ ID NO: 1622796 - DNA, 15 bp, Homo sapiens
ggaaagacatctttt

SEQ ID NO: 1622797 - DNA, 15 bp, Homo sapiens
gaaagacatctttta

SEQ ID NO: 1622798 - DNA, 15 bp, Homo sapiens
aaagacatcttttaa

SEQ ID NO: 1622799 - DNA, 15 bp, Homo sapiens
aagacatcttttaaa

SEQ ID NO: 1622800 - DNA, 15 bp, Homo sapiens
agacatcttttaaaa

SEQ ID NO: 1622801 - DNA, 15 bp, Homo sapiens
gacatcttttaaaag

SEQ ID NO: 1622802 - DNA, 15 bp, Homo sapiens
acatcttttaaaaga

SEQ ID NO: 1622803 - DNA, 15 bp, Homo sapiens
catcttttaaaagaa

SEQ ID NO: 1622804 - DNA, 15 bp, Homo sapiens
atcttttaaaagaag

SEQ ID NO: 1622805 - DNA, 15 bp, Homo sapiens
cttttaaaagaagaa

SEQ ID NO: 1622806 - DNA, 15 bp, Homo sapiens
ttttaaaagaagaat

SEQ ID NO: 1622807 - DNA, 15 bp, Homo sapiens
tttaaaagaagaata

SEQ ID NO: 1622808 - DNA, 15 bp, Homo sapiens
ttaaaagaagaataa

SEQ ID NO: 1622809 - DNA, 15 bp, Homo sapiens
taaaagaagaataat

SEQ ID NO: 1622810 - DNA, 15 bp, Homo sapiens
aaaagaagaataatc

SEQ ID NO: 1622811 - DNA, 15 bp, Homo sapiens
aaagaagaataatca

SEQ ID NO: 1622812 - DNA, 15 bp, Homo sapiens
aagaagaataatcat

SEQ ID NO: 1622813 - DNA, 15 bp, Homo sapiens
agaagaataatcatg

SEQ ID NO: 1622814 - DNA, 15 bp, Homo sapiens
gaagaataatcatga

SEQ ID NO: 1622815 - DNA, 15 bp, Homo sapiens
aagaataatcatgac

SEQ ID NO: 1622816 - DNA, 15 bp, Homo sapiens
agaataatcatgact

SEQ ID NO: 1622817 - DNA, 15 bp, Homo sapiens
gaataatcatgacta

SEQ ID NO: 1622818 - DNA, 15 bp, Homo sapiens
aataatcatgactag

SEQ ID NO: 1622819 - DNA, 15 bp, Homo sapiens
ataatcatgactagt

SEQ ID NO: 1622820 - DNA, 15 bp, Homo sapiens
taatcatgactagtt

SEQ ID NO: 1622821 - DNA, 15 bp, Homo sapiens
aatcatgactagttt

SEQ ID NO: 1622822 - DNA, 15 bp, Homo sapiens
atcatgactagttta

SEQ ID NO: 1622823 - DNA, 15 bp, Homo sapiens
tcatgactagtttaa

SEQ ID NO: 1622824 - DNA, 15 bp, Homo sapiens
catgactagtttaat

SEQ ID NO: 1622825 - DNA, 15 bp, Homo sapiens
atgactagtttaatc

SEQ ID NO: 1622826 - DNA, 15 bp, Homo sapiens
tgactagtttaatca

SEQ ID NO: 1622827 - DNA, 15 bp, Homo sapiens
gactagtttaatcat

SEQ ID NO: 1622828 - DNA, 15 bp, Homo sapiens
actagtttaatcatg

SEQ ID NO: 1622829 - DNA, 15 bp, Homo sapiens
ctagtttaatcatga

SEQ ID NO: 1622830 - DNA, 15 bp, Homo sapiens
tagtttaatcatgac

SEQ ID NO: 1622831 - DNA, 15 bp, Homo sapiens
agtttaatcatgact

SEQ ID NO: 1622832 - DNA, 15 bp, Homo sapiens
gtttaatcatgacta

SEQ ID NO: 1622833 - DNA, 15 bp, Homo sapiens
tttaatcatgactag

SEQ ID NO: 1622834 - DNA, 15 bp, Homo sapiens
ttaatcatgactagt

SEQ ID NO: 1622835 - DNA, 15 bp, Homo sapiens
aatcatgactagttc

SEQ ID NO: 1622836 - DNA, 15 bp, Homo sapiens
atcatgactagttca

SEQ ID NO: 1622837 - DNA, 15 bp, Homo sapiens
tcatgactagttcat

SEQ ID NO: 1622838 - DNA, 15 bp, Homo sapiens
catgactagttcatc

SEQ ID NO: 1622839 - DNA, 15 bp, Homo sapiens
atgactagttcatct

SEQ ID NO: 1622840 - DNA, 15 bp, Homo sapiens
tgactagttcatctt

SEQ ID NO: 1622841 - DNA, 15 bp, Homo sapiens
gactagttcatcttc

SEQ ID NO: 1622842 - DNA, 15 bp, Homo sapiens
actagttcatcttcc

SEQ ID NO: 1622843 - DNA, 15 bp, Homo sapiens
ctagttcatcttccc

SEQ ID NO: 1622844 - DNA, 15 bp, Homo sapiens
tagttcatcttccct

SEQ ID NO: 1622845 - DNA, 15 bp, Homo sapiens
agttcatcttccctg

SEQ ID NO: 1622846 - DNA, 15 bp, Homo sapiens
gttcatcttccctgc

SEQ ID NO: 1622847 - DNA, 15 bp, Homo sapiens
ttcatcttccctgca

SEQ ID NO: 1622848 - DNA, 15 bp, Homo sapiens
tcatcttccctgcaa

SEQ ID NO: 1622849 - DNA, 15 bp, Homo sapiens
catcttccctgcaat

SEQ ID NO: 1622850 - DNA, 15 bp, Homo sapiens
atcttccctgcaata

SEQ ID NO: 1622851 - DNA, 15 bp, Homo sapiens
tcttccctgcaatag

SEQ ID NO: 1622852 - DNA, 15 bp, Homo sapiens
cttccctgcaataga

SEQ ID NO: 1622853 - DNA, 15 bp, Homo sapiens
ttccctgcaatagat

SEQ ID NO: 1622854 - DNA, 15 bp, Homo sapiens
tccctgcaatagata

SEQ ID NO: 1622855 - DNA, 15 bp, Homo sapiens
ccctgcaatagatac

SEQ ID NO: 1622856 - DNA, 15 bp, Homo sapiens
cctgcaatagatacc

SEQ ID NO: 1622857 - DNA, 15 bp, Homo sapiens
ctgcaatagataccc

SEQ ID NO: 1622858 - DNA, 15 bp, Homo sapiens
tgcaatagataccca

SEQ ID NO: 1622859 - DNA, 15 bp, Homo sapiens
gcaatagatacccat

SEQ ID NO: 1622860 - DNA, 15 bp, Homo sapiens
caatagatacccata

SEQ ID NO: 1622861 - DNA, 15 bp, Homo sapiens
aatagatacccatat

SEQ ID NO: 1622862 - DNA, 15 bp, Homo sapiens
atagatacccatatt

SEQ ID NO: 1622863 - DNA, 15 bp, Homo sapiens
tagatacccatattt

SEQ ID NO: 1622864 - DNA, 15 bp, Homo sapiens
agatacccatattta

SEQ ID NO: 1622865 - DNA, 15 bp, Homo sapiens
gatacccatatttaa

SEQ ID NO: 1622866 - DNA, 15 bp, Homo sapiens
atacccatatttaac

SEQ ID NO: 1622867 - DNA, 15 bp, Homo sapiens
tacccatatttaaca

SEQ ID NO: 1622868 - DNA, 15 bp, Homo sapiens
acccatatttaacat

SEQ ID NO: 1622869 - DNA, 15 bp, Homo sapiens
cccatatttaacata

SEQ ID NO: 1622870 - DNA, 15 bp, Homo sapiens
ccatatttaacatac

SEQ ID NO: 1622871 - DNA, 15 bp, Homo sapiens
catatttaacatacc

SEQ ID NO: 1622872 - DNA, 15 bp, Homo sapiens
atatttaacatacct

SEQ ID NO: 1622873 - DNA, 15 bp, Homo sapiens
tatttaacataccta

SEQ ID NO: 1622874 - DNA, 15 bp, Homo sapiens
atttaacatacctat

SEQ ID NO: 1622875 - DNA, 15 bp, Homo sapiens
tttaacatacctatt

SEQ ID NO: 1622876 - DNA, 15 bp, Homo sapiens
ttaacatacctattg

SEQ ID NO: 1622877 - DNA, 15 bp, Homo sapiens
taacatacctattgt

SEQ ID NO: 1622878 - DNA, 15 bp, Homo sapiens
aacatacctattgta

SEQ ID NO: 1622879 - DNA, 15 bp, Homo sapiens
acatacctattgtac

SEQ ID NO: 1622880 - DNA, 15 bp, Homo sapiens
catacctattgtaca

SEQ ID NO: 1622881 - DNA, 15 bp, Homo sapiens
atacctattgtacaa

SEQ ID NO: 1622882 - DNA, 15 bp, Homo sapiens
tacctattgtacaaa

SEQ ID NO: 1622883 - DNA, 15 bp, Homo sapiens
acctattgtacaaag

SEQ ID NO: 1622884 - DNA, 15 bp, Homo sapiens
cctattgtacaaaga

SEQ ID NO: 1622885 - DNA, 15 bp, Homo sapiens
ctattgtacaaagaa

SEQ ID NO: 1622886 - DNA, 15 bp, Homo sapiens
tattgtacaaagaat

SEQ ID NO: 1622887 - DNA, 15 bp, Homo sapiens
attgtacaaagaata

SEQ ID NO: 1622888 - DNA, 15 bp, Homo sapiens
ttgtacaaagaatat

SEQ ID NO: 1622889 - DNA, 15 bp, Homo sapiens
tgtacaaagaatatg

SEQ ID NO: 1622890 - DNA, 15 bp, Homo sapiens
gtacaaagaatatga

SEQ ID NO: 1622891 - DNA, 15 bp, Homo sapiens
tacaaagaatatgat

SEQ ID NO: 1622892 - DNA, 15 bp, Homo sapiens
acaaagaatatgatt

SEQ ID NO: 1622893 - DNA, 15 bp, Homo sapiens
caaagaatatgattg

SEQ ID NO: 1622894 - DNA, 15 bp, Homo sapiens
aaagaatatgattgc

SEQ ID NO: 1622895 - DNA, 15 bp, Homo sapiens
aagaatatgattgca

SEQ ID NO: 1622896 - DNA, 15 bp, Homo sapiens
agaatatgattgcac

SEQ ID NO: 1622897 - DNA, 15 bp, Homo sapiens
gaatatgattgcaca

SEQ ID NO: 1622898 - DNA, 15 bp, Homo sapiens
aatatgattgcacag

SEQ ID NO: 1622899 - DNA, 15 bp, Homo sapiens
atatgattgcacagc

SEQ ID NO: 1622900 - DNA, 15 bp, Homo sapiens
tatgattgcacagct

SEQ ID NO: 1622901 - DNA, 15 bp, Homo sapiens
atgattgcacagcta

SEQ ID NO: 1622902 - DNA, 15 bp, Homo sapiens
tgattgcacagctac

SEQ ID NO: 1622903 - DNA, 15 bp, Homo sapiens
gattgcacagctaca

SEQ ID NO: 1622904 - DNA, 15 bp, Homo sapiens
attgcacagctacaa

SEQ ID NO: 1622905 - DNA, 15 bp, Homo sapiens
ttgcacagctacaac

SEQ ID NO: 1622906 - DNA, 15 bp, Homo sapiens
tgcacagctacaact

SEQ ID NO: 1622907 - DNA, 15 bp, Homo sapiens
gcacagctacaactt

SEQ ID NO: 1622908 - DNA, 15 bp, Homo sapiens
acagctacaactttg

SEQ ID NO: 1622909 - DNA, 15 bp, Homo sapiens
cagctacaactttgg

SEQ ID NO: 1622910 - DNA, 15 bp, Homo sapiens
agctacaactttggg

SEQ ID NO: 1622911 - DNA, 15 bp, Homo sapiens
gctacaactttggga

SEQ ID NO: 1622912 - DNA, 15 bp, Homo sapiens
ctacaactttgggac

SEQ ID NO: 1622913 - DNA, 15 bp, Homo sapiens
tacaactttgggaca

SEQ ID NO: 1622914 - DNA, 15 bp, Homo sapiens
acaactttgggacaa

SEQ ID NO: 1622915 - DNA, 15 bp, Homo sapiens
caactttgggacaaa

SEQ ID NO: 1622916 - DNA, 15 bp, Homo sapiens
aactttgggacaaac

SEQ ID NO: 1622917 - DNA, 15 bp, Homo sapiens
actttgggacaaact

SEQ ID NO: 1622918 - DNA, 15 bp, Homo sapiens
ctttgggacaaactc

SEQ ID NO: 1622919 - DNA, 15 bp, Homo sapiens
tttgggacaaactcc

SEQ ID NO: 1622920 - DNA, 15 bp, Homo sapiens
ttgggacaaactcct

SEQ ID NO: 1622921 - DNA, 15 bp, Homo sapiens
tgggacaaactcctt

SEQ ID NO: 1622922 - DNA, 15 bp, Homo sapiens
gggacaaactccttt

SEQ ID NO: 1622923 - DNA, 15 bp, Homo sapiens
ggacaaactcctttt

SEQ ID NO: 1622924 - DNA, 15 bp, Homo sapiens
gacaaactccttttc

SEQ ID NO: 1622925 - DNA, 15 bp, Homo sapiens
acaaactccttttct

SEQ ID NO: 1622926 - DNA, 15 bp, Homo sapiens
caaactccttttctg

SEQ ID NO: 1622927 - DNA, 15 bp, Homo sapiens
aaactccttttctgc

SEQ ID NO: 1622928 - DNA, 15 bp, Homo sapiens
aactccttttctgcc

SEQ ID NO: 1622929 - DNA, 15 bp, Homo sapiens
actccttttctgccg

SEQ ID NO: 1622930 - DNA, 15 bp, Homo sapiens
ctccttttctgccgc

SEQ ID NO: 1622931 - DNA, 15 bp, Homo sapiens
tccttttctgccgct

SEQ ID NO: 1622932 - DNA, 15 bp, Homo sapiens
ccttttctgccgctt

SEQ ID NO: 1622933 - DNA, 15 bp, Homo sapiens
cttttctgccgcttt

SEQ ID NO: 1622934 - DNA, 15 bp, Homo sapiens
ttttctgccgctttc

SEQ ID NO: 1622935 - DNA, 15 bp, Homo sapiens
tttctgccgctttca

SEQ ID NO: 1622936 - DNA, 15 bp, Homo sapiens
ttctgccgctttcaa

SEQ ID NO: 1622937 - DNA, 15 bp, Homo sapiens
tctgccgctttcaat

SEQ ID NO: 1622938 - DNA, 15 bp, Homo sapiens
ctgccgctttcaatg

SEQ ID NO: 1622939 - DNA, 15 bp, Homo sapiens
tgccgctttcaatga

SEQ ID NO: 1622940 - DNA, 15 bp, Homo sapiens
gccgctttcaatgat

SEQ ID NO: 1622941 - DNA, 15 bp, Homo sapiens
ccgctttcaatgatc

SEQ ID NO: 1622942 - DNA, 15 bp, Homo sapiens
cgctttcaatgatcg

SEQ ID NO: 1622943 - DNA, 15 bp, Homo sapiens
gctttcaatgatcgt

SEQ ID NO: 1622944 - DNA, 15 bp, Homo sapiens
ctttcaatgatcgtc

SEQ ID NO: 1622945 - DNA, 15 bp, Homo sapiens
tttcaatgatcgtct

SEQ ID NO: 1622946 - DNA, 15 bp, Homo sapiens
ttcaatgatcgtctt

SEQ ID NO: 1622947 - DNA, 15 bp, Homo sapiens
tcaatgatcgtcttc

SEQ ID NO: 1622948 - DNA, 15 bp, Homo sapiens
caatgatcgtcttcc

SEQ ID NO: 1622949 - DNA, 15 bp, Homo sapiens
aatgatcgtcttcca

SEQ ID NO: 1622950 - DNA, 15 bp, Homo sapiens
atgatcgtcttccaa

SEQ ID NO: 1622951 - DNA, 15 bp, Homo sapiens
tgatcgtcttccaaa

SEQ ID NO: 1622952 - DNA, 15 bp, Homo sapiens
gatcgtcttccaaaa

SEQ ID NO: 1622953 - DNA, 15 bp, Homo sapiens
atcgtcttccaaaat

SEQ ID NO: 1622954 - DNA, 15 bp, Homo sapiens
tcgtcttccaaaatc

SEQ ID NO: 1622955 - DNA, 15 bp, Homo sapiens
cgtcttccaaaatca

SEQ ID NO: 1622956 - DNA, 15 bp, Homo sapiens
gtcttccaaaatcag

SEQ ID NO: 1622957 - DNA, 15 bp, Homo sapiens
tcttccaaaatcaga

SEQ ID NO: 1622958 - DNA, 15 bp, Homo sapiens
cttccaaaatcagaa

SEQ ID NO: 1622959 - DNA, 15 bp, Homo sapiens
ttccaaaatcagaac

SEQ ID NO: 1622960 - DNA, 15 bp, Homo sapiens
tccaaaatcagaaca

SEQ ID NO: 1622961 - DNA, 15 bp, Homo sapiens
ccaaaatcagaacag

SEQ ID NO: 1622962 - DNA, 15 bp, Homo sapiens
caaaatcagaacagc

SEQ ID NO: 1622963 - DNA, 15 bp, Homo sapiens
aaaatcagaacagct

SEQ ID NO: 1622964 - DNA, 15 bp, Homo sapiens
aaatcagaacagctt

SEQ ID NO: 1622965 - DNA, 15 bp, Homo sapiens
aatcagaacagcttt

SEQ ID NO: 1622966 - DNA, 15 bp, Homo sapiens
atcagaacagctttt

SEQ ID NO: 1622967 - DNA, 15 bp, Homo sapiens
tcagaacagcttttg

SEQ ID NO: 1622968 - DNA, 15 bp, Homo sapiens
cagaacagcttttga

SEQ ID NO: 1622969 - DNA, 15 bp, Homo sapiens
agaacagcttttgaa

SEQ ID NO: 1622970 - DNA, 15 bp, Homo sapiens
gaacagcttttgaat

SEQ ID NO: 1622971 - DNA, 15 bp, Homo sapiens
aacagcttttgaatt

SEQ ID NO: 1622972 - DNA, 15 bp, Homo sapiens
acagcttttgaattt

SEQ ID NO: 1622973 - DNA, 15 bp, Homo sapiens
cagcttttgaatttt

SEQ ID NO: 1622974 - DNA, 15 bp, Homo sapiens
agcttttgaatttta

SEQ ID NO: 1622975 - DNA, 15 bp, Homo sapiens
gcttttgaattttat

SEQ ID NO: 1622976 - DNA, 15 bp, Homo sapiens
cttttgaattttatt

SEQ ID NO: 1622977 - DNA, 15 bp, Homo sapiens
ttttgaattttattt

SEQ ID NO: 1622978 - DNA, 15 bp, Homo sapiens
tttgaattttatttt

SEQ ID NO: 1622979 - DNA, 15 bp, Homo sapiens
ttgaattttattttg

SEQ ID NO: 1622980 - DNA, 15 bp, Homo sapiens
tgaattttattttgt

SEQ ID NO: 1622981 - DNA, 15 bp, Homo sapiens
gaattttattttgtg

SEQ ID NO: 1622982 - DNA, 15 bp, Homo sapiens
aattttattttgtga

SEQ ID NO: 1622983 - DNA, 15 bp, Homo sapiens
attttattttgtgaa

SEQ ID NO: 1622984 - DNA, 15 bp, Homo sapiens
ttttattttgtgaaa

SEQ ID NO: 1622985 - DNA, 15 bp, Homo sapiens
tttattttgtgaaaa

SEQ ID NO: 1622986 - DNA, 15 bp, Homo sapiens
ttattttgtgaaaaa

SEQ ID NO: 1622987 - DNA, 15 bp, Homo sapiens
tattttgtgaaaaat

SEQ ID NO: 1622988 - DNA, 15 bp, Homo sapiens
attttgtgaaaaatg

SEQ ID NO: 1622989 - DNA, 15 bp, Homo sapiens
ttttgtgaaaaatgt

SEQ ID NO: 1622990 - DNA, 15 bp, Homo sapiens
tttgtgaaaaatgtc

SEQ ID NO: 1622991 - DNA, 15 bp, Homo sapiens
ttgtgaaaaatgtcg

SEQ ID NO: 1622992 - DNA, 15 bp, Homo sapiens
tgtgaaaaatgtcgt

SEQ ID NO: 1622993 - DNA, 15 bp, Homo sapiens
gtgaaaaatgtcgtt

SEQ ID NO: 1622994 - DNA, 15 bp, Homo sapiens
tgaaaaatgtcgttt

SEQ ID NO: 1622995 - DNA, 15 bp, Homo sapiens
gaaaaatgtcgtttg

SEQ ID NO: 1622996 - DNA, 15 bp, Homo sapiens
aaaaatgtcgtttga

SEQ ID NO: 1622997 - DNA, 15 bp, Homo sapiens
aaaatgtcgtttgag

SEQ ID NO: 1622998 - DNA, 15 bp, Homo sapiens
aaatgtcgtttgagt

SEQ ID NO: 1622999 - DNA, 15 bp, Homo sapiens
aatgtcgtttgagtg

SEQ ID NO: 1623000 - DNA, 15 bp, Homo sapiens
atgtcgtttgagtga

SEQ ID NO: 1623001 - DNA, 15 bp, Homo sapiens
tgtcgtttgagtgac

SEQ ID NO: 1623002 - DNA, 15 bp, Homo sapiens
gtcgtttgagtgaca

SEQ ID NO: 1623003 - DNA, 15 bp, Homo sapiens
tcgtttgagtgacac

SEQ ID NO: 1623004 - DNA, 15 bp, Homo sapiens
cgtttgagtgacaca

SEQ ID NO: 1623005 - DNA, 15 bp, Homo sapiens
gtttgagtgacacag

SEQ ID NO: 1623006 - DNA, 15 bp, Homo sapiens
tttgagtgacacagt

SEQ ID NO: 1623007 - DNA, 15 bp, Homo sapiens
ttgagtgacacagta

SEQ ID NO: 1623008 - DNA, 15 bp, Homo sapiens
tgagtgacacagtaa

SEQ ID NO: 1623009 - DNA, 15 bp, Homo sapiens
gagtgacacagtaaa

SEQ ID NO: 1623010 - DNA, 15 bp, Homo sapiens
agtgacacagtaaac

SEQ ID NO: 1623011 - DNA, 15 bp, Homo sapiens
gtgacacagtaaact

SEQ ID NO: 1623012 - DNA, 15 bp, Homo sapiens
tgacacagtaaactc

SEQ ID NO: 1623013 - DNA, 15 bp, Homo sapiens
gacacagtaaactct

SEQ ID NO: 1623014 - DNA, 15 bp, Homo sapiens
acacagtaaactctg

SEQ ID NO: 1623015 - DNA, 15 bp, Homo sapiens
cacagtaaactctgt

SEQ ID NO: 1623016 - DNA, 15 bp, Homo sapiens
acagtaaactctgtg

SEQ ID NO: 1623017 - DNA, 15 bp, Homo sapiens
cagtaaactctgtgg

SEQ ID NO: 1623018 - DNA, 15 bp, Homo sapiens
agtaaactctgtgga

SEQ ID NO: 1623019 - DNA, 15 bp, Homo sapiens
gtaaactctgtggag

SEQ ID NO: 1623020 - DNA, 15 bp, Homo sapiens
taaactctgtggagc

SEQ ID NO: 1623021 - DNA, 15 bp, Homo sapiens
aaactctgtggagct

SEQ ID NO: 1623022 - DNA, 15 bp, Homo sapiens
aactctgtggagctc

SEQ ID NO: 1623023 - DNA, 15 bp, Homo sapiens
actctgtggagctct

SEQ ID NO: 1623024 - DNA, 15 bp, Homo sapiens
ctctgtggagctctg

SEQ ID NO: 1623025 - DNA, 15 bp, Homo sapiens
tctgtggagctctgt

SEQ ID NO: 1623026 - DNA, 15 bp, Homo sapiens
ctgtggagctctgtg

SEQ ID NO: 1623027 - DNA, 15 bp, Homo sapiens
tgtggagctctgtgg

SEQ ID NO: 1623028 - DNA, 15 bp, Homo sapiens
gtggagctctgtgga

SEQ ID NO: 1623029 - DNA, 15 bp, Homo sapiens
tggagctctgtggat

SEQ ID NO: 1623030 - DNA, 15 bp, Homo sapiens
ggagctctgtggata

SEQ ID NO: 1623031 - DNA, 15 bp, Homo sapiens
gagctctgtggatac

SEQ ID NO: 1623032 - DNA, 15 bp, Homo sapiens
agctctgtggataca

SEQ ID NO: 1623033 - DNA, 15 bp, Homo sapiens
gctctgtggatacag

SEQ ID NO: 1623034 - DNA, 15 bp, Homo sapiens
ctctgtggatacagt

SEQ ID NO: 1623035 - DNA, 15 bp, Homo sapiens
tctgtggatacagtt

SEQ ID NO: 1623036 - DNA, 15 bp, Homo sapiens
ctgtggatacagttg

SEQ ID NO: 1623037 - DNA, 15 bp, Homo sapiens
tgtggatacagttga

SEQ ID NO: 1623038 - DNA, 15 bp, Homo sapiens
gtggatacagttgaa

SEQ ID NO: 1623039 - DNA, 15 bp, Homo sapiens
tggatacagttgaat

SEQ ID NO: 1623040 - DNA, 15 bp, Homo sapiens
ggatacagttgaatg

SEQ ID NO: 1623041 - DNA, 15 bp, Homo sapiens
gatacagttgaatga

SEQ ID NO: 1623042 - DNA, 15 bp, Homo sapiens
atacagttgaatgat

SEQ ID NO: 1623043 - DNA, 15 bp, Homo sapiens
tacagttgaatgatg

SEQ ID NO: 1623044 - DNA, 15 bp, Homo sapiens
acagttgaatgatgg

SEQ ID NO: 1623045 - DNA, 15 bp, Homo sapiens
cagttgaatgatggc

SEQ ID NO: 1623046 - DNA, 15 bp, Homo sapiens
agttgaatgatggct

SEQ ID NO: 1623047 - DNA, 15 bp, Homo sapiens
gttgaatgatggctc

SEQ ID NO: 1623048 - DNA, 15 bp, Homo sapiens
ttgaatgatggctcc

SEQ ID NO: 1623049 - DNA, 15 bp, Homo sapiens
tgaatgatggctccc

SEQ ID NO: 1623050 - DNA, 15 bp, Homo sapiens
gaatgatggctccca

SEQ ID NO: 1623051 - DNA, 15 bp, Homo sapiens
aatgatggctcccag

SEQ ID NO: 1623052 - DNA, 15 bp, Homo sapiens
atgatggctcccagt

SEQ ID NO: 1623053 - DNA, 15 bp, Homo sapiens
tgatggctcccagtt

SEQ ID NO: 1623054 - DNA, 15 bp, Homo sapiens
gatggctcccagttt

SEQ ID NO: 1623055 - DNA, 15 bp, Homo sapiens
atggctcccagttta

SEQ ID NO: 1623056 - DNA, 15 bp, Homo sapiens
tggctcccagtttat

SEQ ID NO: 1623057 - DNA, 15 bp, Homo sapiens
ggctcccagtttatc

SEQ ID NO: 1623058 - DNA, 15 bp, Homo sapiens
gctcccagtttatca

SEQ ID NO: 1623059 - DNA, 15 bp, Homo sapiens
ctcccagtttatcat

SEQ ID NO: 1623060 - DNA, 15 bp, Homo sapiens
tcccagtttatcatg

SEQ ID NO: 1623061 - DNA, 15 bp, Homo sapiens
cccagtttatcatgc

SEQ ID NO: 1623062 - DNA, 15 bp, Homo sapiens
ccagtttatcatgca

SEQ ID NO: 1623063 - DNA, 15 bp, Homo sapiens
cagtttatcatgcag

SEQ ID NO: 1623064 - DNA, 15 bp, Homo sapiens
agtttatcatgcagg

SEQ ID NO: 1623065 - DNA, 15 bp, Homo sapiens
gtttatcatgcaggt

SEQ ID NO: 1623066 - DNA, 15 bp, Homo sapiens
tttatcatgcaggtg

SEQ ID NO: 1623067 - DNA, 15 bp, Homo sapiens
ttatcatgcaggtgg

SEQ ID NO: 1623068 - DNA, 15 bp, Homo sapiens
tatcatgcaggtggg

SEQ ID NO: 1623069 - DNA, 15 bp, Homo sapiens
atcatgcaggtggga

SEQ ID NO: 1623070 - DNA, 15 bp, Homo sapiens
tcatgcaggtgggat

SEQ ID NO: 1623071 - DNA, 15 bp, Homo sapiens
catgcaggtgggatt

SEQ ID NO: 1623072 - DNA, 15 bp, Homo sapiens
atgcaggtgggatta

SEQ ID NO: 1623073 - DNA, 15 bp, Homo sapiens
tgcaggtgggattat

SEQ ID NO: 1623074 - DNA, 15 bp, Homo sapiens
gcaggtgggattata

SEQ ID NO: 1623075 - DNA, 15 bp, Homo sapiens
caggtgggattatat

SEQ ID NO: 1623076 - DNA, 15 bp, Homo sapiens
aggtgggattatatt

SEQ ID NO: 1623077 - DNA, 15 bp, Homo sapiens
ggtgggattatattc

SEQ ID NO: 1623078 - DNA, 15 bp, Homo sapiens
gtgggattatattcc

SEQ ID NO: 1623079 - DNA, 15 bp, Homo sapiens
tgggattatattcca

SEQ ID NO: 1623080 - DNA, 15 bp, Homo sapiens
gggattatattccaa

SEQ ID NO: 1623081 - DNA, 15 bp, Homo sapiens
ggattatattccaac

SEQ ID NO: 1623082 - DNA, 15 bp, Homo sapiens
gattatattccaaca

SEQ ID NO: 1623083 - DNA, 15 bp, Homo sapiens
attatattccaacag

SEQ ID NO: 1623084 - DNA, 15 bp, Homo sapiens
ttatattccaacagt

SEQ ID NO: 1623085 - DNA, 15 bp, Homo sapiens
tatattccaacagtt

SEQ ID NO: 1623086 - DNA, 15 bp, Homo sapiens
atattccaacagtta

SEQ ID NO: 1623087 - DNA, 15 bp, Homo sapiens
tattccaacagttat

SEQ ID NO: 1623088 - DNA, 15 bp, Homo sapiens
attccaacagttatg

SEQ ID NO: 1623089 - DNA, 15 bp, Homo sapiens
ttccaacagttatgt

SEQ ID NO: 1623090 - DNA, 15 bp, Homo sapiens
tccaacagttatgtt

SEQ ID NO: 1623091 - DNA, 15 bp, Homo sapiens
ccaacagttatgttt

SEQ ID NO: 1623092 - DNA, 15 bp, Homo sapiens
caacagttatgtttc

SEQ ID NO: 1623093 - DNA, 15 bp, Homo sapiens
aacagttatgtttca

SEQ ID NO: 1623094 - DNA, 15 bp, Homo sapiens
acagttatgtttcac

SEQ ID NO: 1623095 - DNA, 15 bp, Homo sapiens
cagttatgtttcaca

SEQ ID NO: 1623096 - DNA, 15 bp, Homo sapiens
agttatgtttcacag

SEQ ID NO: 1623097 - DNA, 15 bp, Homo sapiens
gttatgtttcacaga

SEQ ID NO: 1623098 - DNA, 15 bp, Homo sapiens
ttatgtttcacagaa

SEQ ID NO: 1623099 - DNA, 15 bp, Homo sapiens
tatgtttcacagaaa

SEQ ID NO: 1623100 - DNA, 15 bp, Homo sapiens
atgtttcacagaaag

SEQ ID NO: 1623101 - DNA, 15 bp, Homo sapiens
tgtttcacagaaagg

SEQ ID NO: 1623102 - DNA, 15 bp, Homo sapiens
gtttcacagaaaggc

SEQ ID NO: 1623103 - DNA, 15 bp, Homo sapiens
tttcacagaaaggca

SEQ ID NO: 1623104 - DNA, 15 bp, Homo sapiens
ttcacagaaaggcaa

SEQ ID NO: 1623105 - DNA, 15 bp, Homo sapiens
tcacagaaaggcaaa

SEQ ID NO: 1623106 - DNA, 15 bp, Homo sapiens
cacagaaaggcaaaa

SEQ ID NO: 1623107 - DNA, 15 bp, Homo sapiens
acagaaaggcaaaat

SEQ ID NO: 1623108 - DNA, 15 bp, Homo sapiens
cagaaaggcaaaata

SEQ ID NO: 1623109 - DNA, 15 bp, Homo sapiens
agaaaggcaaaataa

SEQ ID NO: 1623110 - DNA, 15 bp, Homo sapiens
gaaaggcaaaataac

SEQ ID NO: 1623111 - DNA, 15 bp, Homo sapiens
aaaggcaaaataacc

SEQ ID NO: 1623112 - DNA, 15 bp, Homo sapiens
aaggcaaaataacca

SEQ ID NO: 1623113 - DNA, 15 bp, Homo sapiens
aggcaaaataaccag

SEQ ID NO: 1623114 - DNA, 15 bp, Homo sapiens
ggcaaaataaccagg

SEQ ID NO: 1623115 - DNA, 15 bp, Homo sapiens
gcaaaataaccaggt

SEQ ID NO: 1623116 - DNA, 15 bp, Homo sapiens
caaaataaccaggta

SEQ ID NO: 1623117 - DNA, 15 bp, Homo sapiens
aaaataaccaggtac

SEQ ID NO: 1623118 - DNA, 15 bp, Homo sapiens
aaataaccaggtacg

SEQ ID NO: 1623119 - DNA, 15 bp, Homo sapiens
aataaccaggtacgg

SEQ ID NO: 1623120 - DNA, 15 bp, Homo sapiens
ataaccaggtacgga

SEQ ID NO: 1623121 - DNA, 15 bp, Homo sapiens
taaccaggtacggaa

SEQ ID NO: 1623122 - DNA, 15 bp, Homo sapiens
aaccaggtacggaaa

SEQ ID NO: 1623123 - DNA, 15 bp, Homo sapiens
accaggtacggaaaa

SEQ ID NO: 1623124 - DNA, 15 bp, Homo sapiens
ccaggtacggaaaaa

SEQ ID NO: 1623125 - DNA, 15 bp, Homo sapiens
caggtacggaaaaaa

SEQ ID NO: 1623126 - DNA, 15 bp, Homo sapiens
aggtacggaaaaaat

SEQ ID NO: 1623127 - DNA, 15 bp, Homo sapiens
ggtacggaaaaaatg

SEQ ID NO: 1623128 - DNA, 15 bp, Homo sapiens
gtacggaaaaaatga

SEQ ID NO: 1623129 - DNA, 15 bp, Homo sapiens
tacggaaaaaatgaa

SEQ ID NO: 1623130 - DNA, 15 bp, Homo sapiens
acggaaaaaatgaaa

SEQ ID NO: 1623131 - DNA, 15 bp, Homo sapiens
cggaaaaaatgaaaa

SEQ ID NO: 1623132 - DNA, 15 bp, Homo sapiens
ggaaaaaatgaaaaa

SEQ ID NO: 1623133 - DNA, 15 bp, Homo sapiens
gaaaaaatgaaaaat

SEQ ID NO: 1623134 - DNA, 15 bp, Homo sapiens
aaaaaatgaaaaatt

SEQ ID NO: 1623135 - DNA, 15 bp, Homo sapiens
aaaaatgaaaaattt

SEQ ID NO: 1623136 - DNA, 15 bp, Homo sapiens
aaaatgaaaaatttg

SEQ ID NO: 1623137 - DNA, 15 bp, Homo sapiens
aaatgaaaaatttgc

SEQ ID NO: 1623138 - DNA, 15 bp, Homo sapiens
aatgaaaaatttgca

SEQ ID NO: 1623139 - DNA, 15 bp, Homo sapiens
atgaaaaatttgcag

SEQ ID NO: 1623140 - DNA, 15 bp, Homo sapiens
tgaaaaatttgcagc

SEQ ID NO: 1623141 - DNA, 15 bp, Homo sapiens
gaaaaatttgcagct

SEQ ID NO: 1623142 - DNA, 15 bp, Homo sapiens
aaaaatttgcagctt

SEQ ID NO: 1623143 - DNA, 15 bp, Homo sapiens
aaaatttgcagctta

SEQ ID NO: 1623144 - DNA, 15 bp, Homo sapiens
aaatttgcagcttac

SEQ ID NO: 1623145 - DNA, 15 bp, Homo sapiens
aatttgcagcttaca

SEQ ID NO: 1623146 - DNA, 15 bp, Homo sapiens
atttgcagcttacat

SEQ ID NO: 1623147 - DNA, 15 bp, Homo sapiens
tttgcagcttacatc

SEQ ID NO: 1623148 - DNA, 15 bp, Homo sapiens
ttgcagcttacatca

SEQ ID NO: 1623149 - DNA, 15 bp, Homo sapiens
tgcagcttacatcaa

SEQ ID NO: 1623150 - DNA, 15 bp, Homo sapiens
gcagcttacatcaaa

SEQ ID NO: 1623151 - DNA, 15 bp, Homo sapiens
cagcttacatcaaac

SEQ ID NO: 1623152 - DNA, 15 bp, Homo sapiens
agcttacatcaaaca

SEQ ID NO: 1623153 - DNA, 15 bp, Homo sapiens
gcttacatcaaacag

SEQ ID NO: 1623154 - DNA, 15 bp, Homo sapiens
cttacatcaaacaga

SEQ ID NO: 1623155 - DNA, 15 bp, Homo sapiens
ttacatcaaacagaa

SEQ ID NO: 1623156 - DNA, 15 bp, Homo sapiens
tacatcaaacagaaa

SEQ ID NO: 1623157 - DNA, 15 bp, Homo sapiens
acatcaaacagaaat

SEQ ID NO: 1623158 - DNA, 15 bp, Homo sapiens
catcaaacagaaatt

SEQ ID NO: 1623159 - DNA, 15 bp, Homo sapiens
atcaaacagaaattg

SEQ ID NO: 1623160 - DNA, 15 bp, Homo sapiens
tcaaacagaaattgc

SEQ ID NO: 1623161 - DNA, 15 bp, Homo sapiens
caaacagaaattgca

SEQ ID NO: 1623162 - DNA, 15 bp, Homo sapiens
aaacagaaattgcag

SEQ ID NO: 1623163 - DNA, 15 bp, Homo sapiens
aacagaaattgcagt

SEQ ID NO: 1623164 - DNA, 15 bp, Homo sapiens
acagaaattgcagtg

SEQ ID NO: 1623165 - DNA, 15 bp, Homo sapiens
cagaaattgcagtgt

SEQ ID NO: 1623166 - DNA, 15 bp, Homo sapiens
agaaattgcagtgtc

SEQ ID NO: 1623167 - DNA, 15 bp, Homo sapiens
gaaattgcagtgtct

SEQ ID NO: 1623168 - DNA, 15 bp, Homo sapiens
aaattgcagtgtctt

SEQ ID NO: 1623169 - DNA, 15 bp, Homo sapiens
aattgcagtgtcttt

SEQ ID NO: 1623170 - DNA, 15 bp, Homo sapiens
attgcagtgtctttc

SEQ ID NO: 1623171 - DNA, 15 bp, Homo sapiens
ttgcagtgtctttca

SEQ ID NO: 1623172 - DNA, 15 bp, Homo sapiens
tgcagtgtctttcat

SEQ ID NO: 1623173 - DNA, 15 bp, Homo sapiens
gcagtgtctttcatc

SEQ ID NO: 1623174 - DNA, 15 bp, Homo sapiens
cagtgtctttcatct

SEQ ID NO: 1623175 - DNA, 15 bp, Homo sapiens
agtgtctttcatctc

SEQ ID NO: 1623176 - DNA, 15 bp, Homo sapiens
gtgtctttcatctct

SEQ ID NO: 1623177 - DNA, 15 bp, Homo sapiens
tgtctttcatctctt

SEQ ID NO: 1623178 - DNA, 15 bp, Homo sapiens
gtctttcatctcttt

SEQ ID NO: 1623179 - DNA, 15 bp, Homo sapiens
tctttcatctcttta

SEQ ID NO: 1623180 - DNA, 15 bp, Homo sapiens
ctttcatctctttaa

SEQ ID NO: 1623181 - DNA, 15 bp, Homo sapiens
tttcatctctttaaa

SEQ ID NO: 1623182 - DNA, 15 bp, Homo sapiens
ttcatctctttaaag

SEQ ID NO: 1623183 - DNA, 15 bp, Homo sapiens
tcatctctttaaagt

SEQ ID NO: 1623184 - DNA, 15 bp, Homo sapiens
catctctttaaagtt

SEQ ID NO: 1623185 - DNA, 15 bp, Homo sapiens
atctctttaaagttt

SEQ ID NO: 1623186 - DNA, 15 bp, Homo sapiens
tctctttaaagtttt

SEQ ID NO: 1623187 - DNA, 15 bp, Homo sapiens
ctctttaaagttttc

SEQ ID NO: 1623188 - DNA, 15 bp, Homo sapiens
tctttaaagttttct

SEQ ID NO: 1623189 - DNA, 15 bp, Homo sapiens
ctttaaagttttcta

SEQ ID NO: 1623190 - DNA, 15 bp, Homo sapiens
tttaaagttttctaa

SEQ ID NO: 1623191 - DNA, 15 bp, Homo sapiens
ttaaagttttctaat

SEQ ID NO: 1623192 - DNA, 15 bp, Homo sapiens
taaagttttctaatc

SEQ ID NO: 1623193 - DNA, 15 bp, Homo sapiens
aaagttttctaatca

SEQ ID NO: 1623194 - DNA, 15 bp, Homo sapiens
aagttttctaatcaa

SEQ ID NO: 1623195 - DNA, 15 bp, Homo sapiens
agttttctaatcaaa

SEQ ID NO: 1623196 - DNA, 15 bp, Homo sapiens
gttttctaatcaaaa

SEQ ID NO: 1623197 - DNA, 15 bp, Homo sapiens
ttttctaatcaaaat

SEQ ID NO: 1623198 - DNA, 15 bp, Homo sapiens
tttctaatcaaaatt

SEQ ID NO: 1623199 - DNA, 15 bp, Homo sapiens
ttctaatcaaaattc

SEQ ID NO: 1623200 - DNA, 15 bp, Homo sapiens
tctaatcaaaattct

SEQ ID NO: 1623201 - DNA, 15 bp, Homo sapiens
ctaatcaaaattcta

SEQ ID NO: 1623202 - DNA, 15 bp, Homo sapiens
taatcaaaattctag

SEQ ID NO: 1623203 - DNA, 15 bp, Homo sapiens
aatcaaaattctagt

SEQ ID NO: 1623204 - DNA, 15 bp, Homo sapiens
atcaaaattctagtt

SEQ ID NO: 1623205 - DNA, 15 bp, Homo sapiens
tcaaaattctagttt

SEQ ID NO: 1623206 - DNA, 15 bp, Homo sapiens
caaaattctagtttt

SEQ ID NO: 1623207 - DNA, 15 bp, Homo sapiens
aaaattctagttttc

SEQ ID NO: 1623208 - DNA, 15 bp, Homo sapiens
aaattctagttttca

SEQ ID NO: 1623209 - DNA, 15 bp, Homo sapiens
aattctagttttcat

SEQ ID NO: 1623210 - DNA, 15 bp, Homo sapiens
attctagttttcatc

SEQ ID NO: 1623211 - DNA, 15 bp, Homo sapiens
ttctagttttcatca

SEQ ID NO: 1623212 - DNA, 15 bp, Homo sapiens
tctagttttcatcaa

SEQ ID NO: 1623213 - DNA, 15 bp, Homo sapiens
ctagttttcatcaat

SEQ ID NO: 1623214 - DNA, 15 bp, Homo sapiens
tagttttcatcaatt

SEQ ID NO: 1623215 - DNA, 15 bp, Homo sapiens
agttttcatcaatta

SEQ ID NO: 1623216 - DNA, 15 bp, Homo sapiens
gttttcatcaattaa

SEQ ID NO: 1623217 - DNA, 15 bp, Homo sapiens
ttttcatcaattaaa

SEQ ID NO: 1623218 - DNA, 15 bp, Homo sapiens
tttcatcaattaaaa

SEQ ID NO: 1623219 - DNA, 15 bp, Homo sapiens
ttcatcaattaaaac

SEQ ID NO: 1623220 - DNA, 15 bp, Homo sapiens
tcatcaattaaaact

SEQ ID NO: 1623221 - DNA, 15 bp, Homo sapiens
catcaattaaaactt

SEQ ID NO: 1623222 - DNA, 15 bp, Homo sapiens
atcaattaaaacttt

SEQ ID NO: 1623223 - DNA, 15 bp, Homo sapiens
tcaattaaaacttta

SEQ ID NO: 1623224 - DNA, 15 bp, Homo sapiens
caattaaaactttat

SEQ ID NO: 1623225 - DNA, 15 bp, Homo sapiens
aattaaaactttatt

SEQ ID NO: 1623226 - DNA, 15 bp, Homo sapiens
attaaaactttattt

SEQ ID NO: 1623227 - DNA, 15 bp, Homo sapiens
ttaaaactttattta

SEQ ID NO: 1623228 - DNA, 15 bp, Homo sapiens
taaaactttatttag

SEQ ID NO: 1623229 - DNA, 15 bp, Homo sapiens
aaaactttatttagg

SEQ ID NO: 1623230 - DNA, 15 bp, Homo sapiens
aaactttatttaggt

SEQ ID NO: 1623231 - DNA, 15 bp, Homo sapiens
aactttatttaggta

SEQ ID NO: 1623232 - DNA, 15 bp, Homo sapiens
actttatttaggtag

SEQ ID NO: 1623233 - DNA, 15 bp, Homo sapiens
ctttatttaggtaga

SEQ ID NO: 1623234 - DNA, 15 bp, Homo sapiens
tttatttaggtagat

SEQ ID NO: 1623235 - DNA, 15 bp, Homo sapiens
ttatttaggtagata

SEQ ID NO: 1623236 - DNA, 15 bp, Homo sapiens
tatttaggtagatac

SEQ ID NO: 1623237 - DNA, 15 bp, Homo sapiens
atttaggtagataca

SEQ ID NO: 1623238 - DNA, 15 bp, Homo sapiens
tttaggtagatacat

SEQ ID NO: 1623239 - DNA, 15 bp, Homo sapiens
ttaggtagatacatt

SEQ ID NO: 1623240 - DNA, 15 bp, Homo sapiens
taggtagatacattt

SEQ ID NO: 1623241 - DNA, 15 bp, Homo sapiens
aggtagatacattta

SEQ ID NO: 1623242 - DNA, 15 bp, Homo sapiens
ggtagatacatttaa

SEQ ID NO: 1623243 - DNA, 15 bp, Homo sapiens
gtagatacatttaat

SEQ ID NO: 1623244 - DNA, 15 bp, Homo sapiens
tagatacatttaata

SEQ ID NO: 1623245 - DNA, 15 bp, Homo sapiens
agatacatttaataa

SEQ ID NO: 1623246 - DNA, 15 bp, Homo sapiens
gatacatttaataag

SEQ ID NO: 1623247 - DNA, 15 bp, Homo sapiens
atacatttaataagt

SEQ ID NO: 1623248 - DNA, 15 bp, Homo sapiens
tacatttaataagta

SEQ ID NO: 1623249 - DNA, 15 bp, Homo sapiens
acatttaataagtaa

SEQ ID NO: 1623250 - DNA, 15 bp, Homo sapiens
catttaataagtaac

SEQ ID NO: 1623251 - DNA, 15 bp, Homo sapiens
atttaataagtaact

SEQ ID NO: 1623252 - DNA, 15 bp, Homo sapiens
tttaataagtaactt

SEQ ID NO: 1623253 - DNA, 15 bp, Homo sapiens
ttaataagtaacttt

SEQ ID NO: 1623254 - DNA, 15 bp, Homo sapiens
taataagtaactttt

SEQ ID NO: 1623255 - DNA, 15 bp, Homo sapiens
aataagtaacttttt

SEQ ID NO: 1623256 - DNA, 15 bp, Homo sapiens
ataagtaactttttg

SEQ ID NO: 1623257 - DNA, 15 bp, Homo sapiens
taagtaactttttgt

SEQ ID NO: 1623258 - DNA, 15 bp, Homo sapiens
aagtaactttttgtt

SEQ ID NO: 1623259 - DNA, 15 bp, Homo sapiens
agtaactttttgttg

SEQ ID NO: 1623260 - DNA, 15 bp, Homo sapiens
gtaactttttgttgg

SEQ ID NO: 1623261 - DNA, 15 bp, Homo sapiens
taactttttgttggc

SEQ ID NO: 1623262 - DNA, 15 bp, Homo sapiens
aactttttgttggct

SEQ ID NO: 1623263 - DNA, 15 bp, Homo sapiens
actttttgttggctt

SEQ ID NO: 1623264 - DNA, 15 bp, Homo sapiens
ctttttgttggctta

SEQ ID NO: 1623265 - DNA, 15 bp, Homo sapiens
tttttgttggcttaa

SEQ ID NO: 1623266 - DNA, 15 bp, Homo sapiens
ttttgttggcttaaa

SEQ ID NO: 1623267 - DNA, 15 bp, Homo sapiens
tttgttggcttaaag

SEQ ID NO: 1623268 - DNA, 15 bp, Homo sapiens
ttgttggcttaaagg

SEQ ID NO: 1623269 - DNA, 15 bp, Homo sapiens
tgttggcttaaaggg

SEQ ID NO: 1623270 - DNA, 15 bp, Homo sapiens
gttggcttaaaggga

SEQ ID NO: 1623271 - DNA, 15 bp, Homo sapiens
ttggcttaaagggaa

SEQ ID NO: 1623272 - DNA, 15 bp, Homo sapiens
tggcttaaagggaat

SEQ ID NO: 1623273 - DNA, 15 bp, Homo sapiens
ggcttaaagggaatg

SEQ ID NO: 1623274 - DNA, 15 bp, Homo sapiens
gcttaaagggaatga

SEQ ID NO: 1623275 - DNA, 15 bp, Homo sapiens
cttaaagggaatgaa

SEQ ID NO: 1623276 - DNA, 15 bp, Homo sapiens
ttaaagggaatgaac

SEQ ID NO: 1623277 - DNA, 15 bp, Homo sapiens
taaagggaatgaact

SEQ ID NO: 1623278 - DNA, 15 bp, Homo sapiens
aaagggaatgaactt

SEQ ID NO: 1623279 - DNA, 15 bp, Homo sapiens
aagggaatgaacttt

SEQ ID NO: 1623280 - DNA, 15 bp, Homo sapiens
agggaatgaacttta

SEQ ID NO: 1623281 - DNA, 15 bp, Homo sapiens
gggaatgaactttat

SEQ ID NO: 1623282 - DNA, 15 bp, Homo sapiens
ggaatgaactttatg

SEQ ID NO: 1623283 - DNA, 15 bp, Homo sapiens
gaatgaactttatgt

SEQ ID NO: 1623284 - DNA, 15 bp, Homo sapiens
aatgaactttatgta

SEQ ID NO: 1623285 - DNA, 15 bp, Homo sapiens
atgaactttatgtaa

SEQ ID NO: 1623286 - DNA, 15 bp, Homo sapiens
tgaactttatgtaat

SEQ ID NO: 1623287 - DNA, 15 bp, Homo sapiens
gaactttatgtaatg

SEQ ID NO: 1623288 - DNA, 15 bp, Homo sapiens
aactttatgtaatgt

SEQ ID NO: 1623289 - DNA, 15 bp, Homo sapiens
actttatgtaatgta

SEQ ID NO: 1623290 - DNA, 15 bp, Homo sapiens
ctttatgtaatgtaa

SEQ ID NO: 1623291 - DNA, 15 bp, Homo sapiens
tttatgtaatgtaac

SEQ ID NO: 1623292 - DNA, 15 bp, Homo sapiens
ttatgtaatgtaact

SEQ ID NO: 1623293 - DNA, 15 bp, Homo sapiens
tatgtaatgtaactg

SEQ ID NO: 1623294 - DNA, 15 bp, Homo sapiens
atgtaatgtaactgt

SEQ ID NO: 1623295 - DNA, 15 bp, Homo sapiens
tgtaatgtaactgtc

SEQ ID NO: 1623296 - DNA, 15 bp, Homo sapiens
gtaatgtaactgtct

SEQ ID NO: 1623297 - DNA, 15 bp, Homo sapiens
taatgtaactgtcta

SEQ ID NO: 1623298 - DNA, 15 bp, Homo sapiens
aatgtaactgtctat

SEQ ID NO: 1623299 - DNA, 15 bp, Homo sapiens
atgtaactgtctatt

SEQ ID NO: 1623300 - DNA, 15 bp, Homo sapiens
tgtaactgtctattt

SEQ ID NO: 1623301 - DNA, 15 bp, Homo sapiens
gtaactgtctatttc

SEQ ID NO: 1623302 - DNA, 15 bp, Homo sapiens
taactgtctatttca

SEQ ID NO: 1623303 - DNA, 15 bp, Homo sapiens
aactgtctatttcag

SEQ ID NO: 1623304 - DNA, 15 bp, Homo sapiens
actgtctatttcagg

SEQ ID NO: 1623305 - DNA, 15 bp, Homo sapiens
ctgtctatttcagga

SEQ ID NO: 1623306 - DNA, 15 bp, Homo sapiens
tgtctatttcaggaa

SEQ ID NO: 1623307 - DNA, 15 bp, Homo sapiens
gtctatttcaggaag

SEQ ID NO: 1623308 - DNA, 15 bp, Homo sapiens
tctatttcaggaagc

SEQ ID NO: 1623309 - DNA, 15 bp, Homo sapiens
ctatttcaggaagct

SEQ ID NO: 1623310 - DNA, 15 bp, Homo sapiens
tatttcaggaagctt

SEQ ID NO: 1623311 - DNA, 15 bp, Homo sapiens
atttcaggaagcttt

SEQ ID NO: 1623312 - DNA, 15 bp, Homo sapiens
tttcaggaagctttt

SEQ ID NO: 1623313 - DNA, 15 bp, Homo sapiens
ttcaggaagcttttc

SEQ ID NO: 1623314 - DNA, 15 bp, Homo sapiens
tcaggaagcttttct

SEQ ID NO: 1623315 - DNA, 15 bp, Homo sapiens
caggaagcttttcta

SEQ ID NO: 1623316 - DNA, 15 bp, Homo sapiens
aggaagcttttctat

SEQ ID NO: 1623317 - DNA, 15 bp, Homo sapiens
ggaagcttttctatg

SEQ ID NO: 1623318 - DNA, 15 bp, Homo sapiens
gaagcttttctatga

SEQ ID NO: 1623319 - DNA, 15 bp, Homo sapiens
aagcttttctatgag

SEQ ID NO: 1623320 - DNA, 15 bp, Homo sapiens
agcttttctatgaga

SEQ ID NO: 1623321 - DNA, 15 bp, Homo sapiens
gcttttctatgagaa

SEQ ID NO: 1623322 - DNA, 15 bp, Homo sapiens
cttttctatgagaat

SEQ ID NO: 1623323 - DNA, 15 bp, Homo sapiens
ttttctatgagaatt

SEQ ID NO: 1623324 - DNA, 15 bp, Homo sapiens
tttctatgagaattt

SEQ ID NO: 1623325 - DNA, 15 bp, Homo sapiens
ttctatgagaattta

SEQ ID NO: 1623326 - DNA, 15 bp, Homo sapiens
tctatgagaatttaa

SEQ ID NO: 1623327 - DNA, 15 bp, Homo sapiens
ctatgagaatttaaa

SEQ ID NO: 1623328 - DNA, 15 bp, Homo sapiens
tatgagaatttaaaa

SEQ ID NO: 1623329 - DNA, 15 bp, Homo sapiens
atgagaatttaaaac

SEQ ID NO: 1623330 - DNA, 15 bp, Homo sapiens
tgagaatttaaaact

SEQ ID NO: 1623331 - DNA, 15 bp, Homo sapiens
gagaatttaaaacta

SEQ ID NO: 1623332 - DNA, 15 bp, Homo sapiens
agaatttaaaactac

SEQ ID NO: 1623333 - DNA, 15 bp, Homo sapiens
gaatttaaaactaca

SEQ ID NO: 1623334 - DNA, 15 bp, Homo sapiens
aatttaaaactacac

SEQ ID NO: 1623335 - DNA, 15 bp, Homo sapiens
atttaaaactacacc

SEQ ID NO: 1623336 - DNA, 15 bp, Homo sapiens
tttaaaactacacca

SEQ ID NO: 1623337 - DNA, 15 bp, Homo sapiens
ttaaaactacaccaa

SEQ ID NO: 1623338 - DNA, 15 bp, Homo sapiens
taaaactacaccaaa

SEQ ID NO: 1623339 - DNA, 15 bp, Homo sapiens
aaaactacaccaaaa

SEQ ID NO: 1623340 - DNA, 15 bp, Homo sapiens
aaactacaccaaaat

SEQ ID NO: 1623341 - DNA, 15 bp, Homo sapiens
aactacaccaaaata

SEQ ID NO: 1623342 - DNA, 15 bp, Homo sapiens
actacaccaaaatat

SEQ ID NO: 1623343 - DNA, 15 bp, Homo sapiens
ctacaccaaaatatc

SEQ ID NO: 1623344 - DNA, 15 bp, Homo sapiens
tacaccaaaatatct

SEQ ID NO: 1623345 - DNA, 15 bp, Homo sapiens
acaccaaaatatctt

SEQ ID NO: 1623346 - DNA, 15 bp, Homo sapiens
caccaaaatatcttc

SEQ ID NO: 1623347 - DNA, 15 bp, Homo sapiens
accaaaatatcttct

SEQ ID NO: 1623348 - DNA, 15 bp, Homo sapiens
ccaaaatatcttctt

SEQ ID NO: 1623349 - DNA, 15 bp, Homo sapiens
caaaatatcttcttt

SEQ ID NO: 1623350 - DNA, 15 bp, Homo sapiens
aaaatatcttctttt

SEQ ID NO: 1623351 - DNA, 15 bp, Homo sapiens
aaatatcttcttttt

SEQ ID NO: 1623352 - DNA, 15 bp, Homo sapiens
aatatcttctttttt

SEQ ID NO: 1623353 - DNA, 15 bp, Homo sapiens
atatcttcttttttt

SEQ ID NO: 1623354 - DNA, 15 bp, Homo sapiens
tatcttctttttttt

SEQ ID NO: 1623355 - DNA, 15 bp, Homo sapiens
atcttcttttttttt

SEQ ID NO: 1623356 - DNA, 15 bp, Homo sapiens
tcttctttttttttt

SEQ ID NO: 1623357 - DNA, 15 bp, Homo sapiens
ttttgagacaaggtg

SEQ ID NO: 1623358 - DNA, 15 bp, Homo sapiens
tttgagacaaggtgt

SEQ ID NO: 1623359 - DNA, 15 bp, Homo sapiens
ttgagacaaggtgtc

SEQ ID NO: 1623360 - DNA, 15 bp, Homo sapiens
tgagacaaggtgtca

SEQ ID NO: 1623361 - DNA, 15 bp, Homo sapiens
gagacaaggtgtcac

SEQ ID NO: 1623362 - DNA, 15 bp, Homo sapiens
agacaaggtgtcaca

SEQ ID NO: 1623363 - DNA, 15 bp, Homo sapiens
gacaaggtgtcacat

SEQ ID NO: 1623364 - DNA, 15 bp, Homo sapiens
acaaggtgtcacatt

SEQ ID NO: 1623365 - DNA, 15 bp, Homo sapiens
caaggtgtcacattg

SEQ ID NO: 1623366 - DNA, 15 bp, Homo sapiens
aaggtgtcacattgt

SEQ ID NO: 1623367 - DNA, 15 bp, Homo sapiens
aggtgtcacattgtc

SEQ ID NO: 1623368 - DNA, 15 bp, Homo sapiens
ggtgtcacattgtct

SEQ ID NO: 1623369 - DNA, 15 bp, Homo sapiens
gtgtcacattgtctc

SEQ ID NO: 1623370 - DNA, 15 bp, Homo sapiens
tgtcacattgtctct

SEQ ID NO: 1623371 - DNA, 15 bp, Homo sapiens
gtcacattgtctctc

SEQ ID NO: 1623372 - DNA, 15 bp, Homo sapiens
tcacattgtctctca

SEQ ID NO: 1623373 - DNA, 15 bp, Homo sapiens
cacattgtctctcag

SEQ ID NO: 1623374 - DNA, 15 bp, Homo sapiens
acattgtctctcagg

SEQ ID NO: 1623375 - DNA, 15 bp, Homo sapiens
cattgtctctcaggc

SEQ ID NO: 1623376 - DNA, 15 bp, Homo sapiens
attgtctctcaggct

SEQ ID NO: 1623377 - DNA, 15 bp, Homo sapiens
ttgtctctcaggctg

SEQ ID NO: 1623378 - DNA, 15 bp, Homo sapiens
tgtctctcaggctgg

SEQ ID NO: 1623379 - DNA, 15 bp, Homo sapiens
gtctctcaggctgga

SEQ ID NO: 1623380 - DNA, 15 bp, Homo sapiens
tctctcaggctggag

SEQ ID NO: 1623381 - DNA, 15 bp, Homo sapiens
ctctcaggctggagt

SEQ ID NO: 1623382 - DNA, 15 bp, Homo sapiens
tctcaggctggagtg

SEQ ID NO: 1623383 - DNA, 15 bp, Homo sapiens
gcagtggtgtgatcc

SEQ ID NO: 1623384 - DNA, 15 bp, Homo sapiens
cagtggtgtgatcct

SEQ ID NO: 1623385 - DNA, 15 bp, Homo sapiens
agtggtgtgatccta

SEQ ID NO: 1623386 - DNA, 15 bp, Homo sapiens
gtggtgtgatcctag

SEQ ID NO: 1623387 - DNA, 15 bp, Homo sapiens
tggtgtgatcctagc

SEQ ID NO: 1623388 - DNA, 15 bp, Homo sapiens
ggtgtgatcctagct

SEQ ID NO: 1623389 - DNA, 15 bp, Homo sapiens
gtgtgatcctagctc

SEQ ID NO: 1623390 - DNA, 15 bp, Homo sapiens
tgtgatcctagctca

SEQ ID NO: 1623391 - DNA, 15 bp, Homo sapiens
gtgatcctagctcac

SEQ ID NO: 1623392 - DNA, 15 bp, Homo sapiens
tgatcctagctcact

SEQ ID NO: 1623393 - DNA, 15 bp, Homo sapiens
gatcctagctcactg

SEQ ID NO: 1623394 - DNA, 15 bp, Homo sapiens
atcctagctcactgt

SEQ ID NO: 1623395 - DNA, 15 bp, Homo sapiens
tcctagctcactgta

SEQ ID NO: 1623396 - DNA, 15 bp, Homo sapiens
cctagctcactgtag

SEQ ID NO: 1623397 - DNA, 15 bp, Homo sapiens
ctagctcactgtagc

SEQ ID NO: 1623398 - DNA, 15 bp, Homo sapiens
tagctcactgtagcc

SEQ ID NO: 1623399 - DNA, 15 bp, Homo sapiens
gctcactgtagcctt

SEQ ID NO: 1623400 - DNA, 15 bp, Homo sapiens
ctcactgtagccttg

SEQ ID NO: 1623401 - DNA, 15 bp, Homo sapiens
tcactgtagccttga

SEQ ID NO: 1623402 - DNA, 15 bp, Homo sapiens
cactgtagccttgaa

SEQ ID NO: 1623403 - DNA, 15 bp, Homo sapiens
actgtagccttgaat

SEQ ID NO: 1623404 - DNA, 15 bp, Homo sapiens
ctgtagccttgaatt

SEQ ID NO: 1623405 - DNA, 15 bp, Homo sapiens
tgtagccttgaattc

SEQ ID NO: 1623406 - DNA, 15 bp, Homo sapiens
gtagccttgaattcc

SEQ ID NO: 1623407 - DNA, 15 bp, Homo sapiens
tagccttgaattcct

SEQ ID NO: 1623408 - DNA, 15 bp, Homo sapiens
ccttgaattcctggg

SEQ ID NO: 1623409 - DNA, 15 bp, Homo sapiens
cttgaattcctgggc

SEQ ID NO: 1623410 - DNA, 15 bp, Homo sapiens
ttgaattcctgggct

SEQ ID NO: 1623411 - DNA, 15 bp, Homo sapiens
tgaattcctgggctc

SEQ ID NO: 1623412 - DNA, 15 bp, Homo sapiens
aattcctgggctcaa

SEQ ID NO: 1623413 - DNA, 15 bp, Homo sapiens
attcctgggctcaac

SEQ ID NO: 1623414 - DNA, 15 bp, Homo sapiens
ttcctgggctcaact

SEQ ID NO: 1623415 - DNA, 15 bp, Homo sapiens
tcctgggctcaactg

SEQ ID NO: 1623416 - DNA, 15 bp, Homo sapiens
cctgggctcaactga

SEQ ID NO: 1623417 - DNA, 15 bp, Homo sapiens
ctgggctcaactgat

SEQ ID NO: 1623418 - DNA, 15 bp, Homo sapiens
tgggctcaactgatc

SEQ ID NO: 1623419 - DNA, 15 bp, Homo sapiens
gctcaactgatcctg

SEQ ID NO: 1623420 - DNA, 15 bp, Homo sapiens
ctcaactgatcctgc

SEQ ID NO: 1623421 - DNA, 15 bp, Homo sapiens
tcaactgatcctgct

SEQ ID NO: 1623422 - DNA, 15 bp, Homo sapiens
caactgatcctgcta

SEQ ID NO: 1623423 - DNA, 15 bp, Homo sapiens
aactgatcctgctac

SEQ ID NO: 1623424 - DNA, 15 bp, Homo sapiens
actgatcctgctacc

SEQ ID NO: 1623425 - DNA, 15 bp, Homo sapiens
ctgatcctgctacct

SEQ ID NO: 1623426 - DNA, 15 bp, Homo sapiens
tgatcctgctacctc

SEQ ID NO: 1623427 - DNA, 15 bp, Homo sapiens
gatcctgctacctca

SEQ ID NO: 1623428 - DNA, 15 bp, Homo sapiens
atcctgctacctcaa

SEQ ID NO: 1623429 - DNA, 15 bp, Homo sapiens
tcctgctacctcaac

SEQ ID NO: 1623430 - DNA, 15 bp, Homo sapiens
cctgctacctcaacc

SEQ ID NO: 1623431 - DNA, 15 bp, Homo sapiens
ctgctacctcaaccc

SEQ ID NO: 1623432 - DNA, 15 bp, Homo sapiens
tgctacctcaacccc

SEQ ID NO: 1623433 - DNA, 15 bp, Homo sapiens
gctacctcaaccccc

SEQ ID NO: 1623434 - DNA, 15 bp, Homo sapiens
ctacctcaacccccc

SEQ ID NO: 1623435 - DNA, 15 bp, Homo sapiens
tacctcaacccccca

SEQ ID NO: 1623436 - DNA, 15 bp, Homo sapiens
acctcaaccccccac

SEQ ID NO: 1623437 - DNA, 15 bp, Homo sapiens
cctcaaccccccacg

SEQ ID NO: 1623438 - DNA, 15 bp, Homo sapiens
ctcaaccccccacgt

SEQ ID NO: 1623439 - DNA, 15 bp, Homo sapiens
tcaaccccccacgta

SEQ ID NO: 1623440 - DNA, 15 bp, Homo sapiens
caaccccccacgtag

SEQ ID NO: 1623441 - DNA, 15 bp, Homo sapiens
aaccccccacgtagc

SEQ ID NO: 1623442 - DNA, 15 bp, Homo sapiens
accccccacgtagct

SEQ ID NO: 1623443 - DNA, 15 bp, Homo sapiens
ccccccacgtagcta

SEQ ID NO: 1623444 - DNA, 15 bp, Homo sapiens
cccccacgtagctag

SEQ ID NO: 1623445 - DNA, 15 bp, Homo sapiens
ccccacgtagctagg

SEQ ID NO: 1623446 - DNA, 15 bp, Homo sapiens
cccacgtagctagga

SEQ ID NO: 1623447 - DNA, 15 bp, Homo sapiens
ccacgtagctaggac

SEQ ID NO: 1623448 - DNA, 15 bp, Homo sapiens
cacgtagctaggact

SEQ ID NO: 1623449 - DNA, 15 bp, Homo sapiens
acgtagctaggacta

SEQ ID NO: 1623450 - DNA, 15 bp, Homo sapiens
cgtagctaggactac

SEQ ID NO: 1623451 - DNA, 15 bp, Homo sapiens
gtagctaggactaca

SEQ ID NO: 1623452 - DNA, 15 bp, Homo sapiens
tagctaggactacag

SEQ ID NO: 1623453 - DNA, 15 bp, Homo sapiens
agctaggactacagg

SEQ ID NO: 1623454 - DNA, 15 bp, Homo sapiens
ctaggactacaggcc

SEQ ID NO: 1623455 - DNA, 15 bp, Homo sapiens
taggactacaggcct

SEQ ID NO: 1623456 - DNA, 15 bp, Homo sapiens
aggactacaggcctg

SEQ ID NO: 1623457 - DNA, 15 bp, Homo sapiens
ggactacaggcctgc

SEQ ID NO: 1623458 - DNA, 15 bp, Homo sapiens
gactacaggcctgca

SEQ ID NO: 1623459 - DNA, 15 bp, Homo sapiens
actacaggcctgcac

SEQ ID NO: 1623460 - DNA, 15 bp, Homo sapiens
ctacaggcctgcacc

SEQ ID NO: 1623461 - DNA, 15 bp, Homo sapiens
tacaggcctgcacca

SEQ ID NO: 1623462 - DNA, 15 bp, Homo sapiens
acaggcctgcaccac

SEQ ID NO: 1623463 - DNA, 15 bp, Homo sapiens
caggcctgcaccacc

SEQ ID NO: 1623464 - DNA, 15 bp, Homo sapiens
aggcctgcaccacca

SEQ ID NO: 1623465 - DNA, 15 bp, Homo sapiens
ggcctgcaccaccac

SEQ ID NO: 1623466 - DNA, 15 bp, Homo sapiens
gcctgcaccaccaca

SEQ ID NO: 1623467 - DNA, 15 bp, Homo sapiens
cctgcaccaccacat

SEQ ID NO: 1623468 - DNA, 15 bp, Homo sapiens
ctgcaccaccacatc

SEQ ID NO: 1623469 - DNA, 15 bp, Homo sapiens
tgcaccaccacatct

SEQ ID NO: 1623470 - DNA, 15 bp, Homo sapiens
gcaccaccacatctg

SEQ ID NO: 1623471 - DNA, 15 bp, Homo sapiens
caccaccacatctgg

SEQ ID NO: 1623472 - DNA, 15 bp, Homo sapiens
accaccacatctggc

SEQ ID NO: 1623473 - DNA, 15 bp, Homo sapiens
ccaccacatctggct

SEQ ID NO: 1623474 - DNA, 15 bp, Homo sapiens
caccacatctggcta

SEQ ID NO: 1623475 - DNA, 15 bp, Homo sapiens
accacatctggctaa

SEQ ID NO: 1623476 - DNA, 15 bp, Homo sapiens
ccacatctggctaat

SEQ ID NO: 1623477 - DNA, 15 bp, Homo sapiens
cacatctggctaatt

SEQ ID NO: 1623478 - DNA, 15 bp, Homo sapiens
acatctggctaattt

SEQ ID NO: 1623479 - DNA, 15 bp, Homo sapiens
catctggctaatttt

SEQ ID NO: 1623480 - DNA, 15 bp, Homo sapiens
atctggctaattttt

SEQ ID NO: 1623481 - DNA, 15 bp, Homo sapiens
ggctaattttttata

SEQ ID NO: 1623482 - DNA, 15 bp, Homo sapiens
gctaattttttatat

SEQ ID NO: 1623483 - DNA, 15 bp, Homo sapiens
ctaattttttatatt

SEQ ID NO: 1623484 - DNA, 15 bp, Homo sapiens
taattttttatattt

SEQ ID NO: 1623485 - DNA, 15 bp, Homo sapiens
aattttttatatttt

SEQ ID NO: 1623486 - DNA, 15 bp, Homo sapiens
attttttatattttt

SEQ ID NO: 1623487 - DNA, 15 bp, Homo sapiens
ttttttatatttttg

SEQ ID NO: 1623488 - DNA, 15 bp, Homo sapiens
tatttttgtagagaa

SEQ ID NO: 1623489 - DNA, 15 bp, Homo sapiens
atttttgtagagaaa

SEQ ID NO: 1623490 - DNA, 15 bp, Homo sapiens
tttttgtagagaaat

SEQ ID NO: 1623491 - DNA, 15 bp, Homo sapiens
ttttgtagagaaatg

SEQ ID NO: 1623492 - DNA, 15 bp, Homo sapiens
tttgtagagaaatgg

SEQ ID NO: 1623493 - DNA, 15 bp, Homo sapiens
ttgtagagaaatggt

SEQ ID NO: 1623494 - DNA, 15 bp, Homo sapiens
tgtagagaaatggtc

SEQ ID NO: 1623495 - DNA, 15 bp, Homo sapiens
gtagagaaatggtct

SEQ ID NO: 1623496 - DNA, 15 bp, Homo sapiens
tagagaaatggtctg

SEQ ID NO: 1623497 - DNA, 15 bp, Homo sapiens
agagaaatggtctgg

SEQ ID NO: 1623498 - DNA, 15 bp, Homo sapiens
gagaaatggtctggc

SEQ ID NO: 1623499 - DNA, 15 bp, Homo sapiens
agaaatggtctggct

SEQ ID NO: 1623500 - DNA, 15 bp, Homo sapiens
gaaatggtctggcta

SEQ ID NO: 1623501 - DNA, 15 bp, Homo sapiens
aaatggtctggctac

SEQ ID NO: 1623502 - DNA, 15 bp, Homo sapiens
aatggtctggctacg

SEQ ID NO: 1623503 - DNA, 15 bp, Homo sapiens
atggtctggctacgt

SEQ ID NO: 1623504 - DNA, 15 bp, Homo sapiens
tggtctggctacgtt

SEQ ID NO: 1623505 - DNA, 15 bp, Homo sapiens
ggtctggctacgttg

SEQ ID NO: 1623506 - DNA, 15 bp, Homo sapiens
gtctggctacgttgc

SEQ ID NO: 1623507 - DNA, 15 bp, Homo sapiens
tctggctacgttgcc

SEQ ID NO: 1623508 - DNA, 15 bp, Homo sapiens
ctggctacgttgccc

SEQ ID NO: 1623509 - DNA, 15 bp, Homo sapiens
tggctacgttgccca

SEQ ID NO: 1623510 - DNA, 15 bp, Homo sapiens
ggctacgttgcccag

SEQ ID NO: 1623511 - DNA, 15 bp, Homo sapiens
gctacgttgcccagg

SEQ ID NO: 1623512 - DNA, 15 bp, Homo sapiens
ctacgttgcccaggc

SEQ ID NO: 1623513 - DNA, 15 bp, Homo sapiens
tacgttgcccaggct

SEQ ID NO: 1623514 - DNA, 15 bp, Homo sapiens
acgttgcccaggctg

SEQ ID NO: 1623515 - DNA, 15 bp, Homo sapiens
cgttgcccaggctgg

SEQ ID NO: 1623516 - DNA, 15 bp, Homo sapiens
ggtcccaaactcctg

SEQ ID NO: 1623517 - DNA, 15 bp, Homo sapiens
gtcccaaactcctgg

SEQ ID NO: 1623518 - DNA, 15 bp, Homo sapiens
tcccaaactcctggc

SEQ ID NO: 1623519 - DNA, 15 bp, Homo sapiens
cccaaactcctggcc

SEQ ID NO: 1623520 - DNA, 15 bp, Homo sapiens
ccaaactcctggcct

SEQ ID NO: 1623521 - DNA, 15 bp, Homo sapiens
aactcctggcctcag

SEQ ID NO: 1623522 - DNA, 15 bp, Homo sapiens
actcctggcctcagg

SEQ ID NO: 1623523 - DNA, 15 bp, Homo sapiens
ctcctggcctcaggt

SEQ ID NO: 1623524 - DNA, 15 bp, Homo sapiens
tcctggcctcaggtg

SEQ ID NO: 1623525 - DNA, 15 bp, Homo sapiens
cctggcctcaggtga

SEQ ID NO: 1623526 - DNA, 15 bp, Homo sapiens
ctggcctcaggtgat

SEQ ID NO: 1623527 - DNA, 15 bp, Homo sapiens
tggcctcaggtgatc

SEQ ID NO: 1623528 - DNA, 15 bp, Homo sapiens
ggcctcaggtgatcc

SEQ ID NO: 1623529 - DNA, 15 bp, Homo sapiens
gcctcaggtgatcct

SEQ ID NO: 1623530 - DNA, 15 bp, Homo sapiens
ggtgatcctcctgcg

SEQ ID NO: 1623531 - DNA, 15 bp, Homo sapiens
gtgatcctcctgcgt

SEQ ID NO: 1623532 - DNA, 15 bp, Homo sapiens
tgatcctcctgcgtc

SEQ ID NO: 1623533 - DNA, 15 bp, Homo sapiens
gatcctcctgcgtca

SEQ ID NO: 1623534 - DNA, 15 bp, Homo sapiens
atcctcctgcgtcaa

SEQ ID NO: 1623535 - DNA, 15 bp, Homo sapiens
tcctcctgcgtcaac

SEQ ID NO: 1623536 - DNA, 15 bp, Homo sapiens
cctcctgcgtcaacc

SEQ ID NO: 1623537 - DNA, 15 bp, Homo sapiens
ctcctgcgtcaacct

SEQ ID NO: 1623538 - DNA, 15 bp, Homo sapiens
tcctgcgtcaacctc

SEQ ID NO: 1623539 - DNA, 15 bp, Homo sapiens
cctgcgtcaacctcc

SEQ ID NO: 1623540 - DNA, 15 bp, Homo sapiens
ctgcgtcaacctccc

SEQ ID NO: 1623541 - DNA, 15 bp, Homo sapiens
tgcgtcaacctccca

SEQ ID NO: 1623542 - DNA, 15 bp, Homo sapiens
gcgtcaacctcccaa

SEQ ID NO: 1623543 - DNA, 15 bp, Homo sapiens
cgtcaacctcccaaa

SEQ ID NO: 1623544 - DNA, 15 bp, Homo sapiens
gtcaacctcccaaag

SEQ ID NO: 1623545 - DNA, 15 bp, Homo sapiens
aacctcccaaagtgt

SEQ ID NO: 1623546 - DNA, 15 bp, Homo sapiens
acctcccaaagtgtt

SEQ ID NO: 1623547 - DNA, 15 bp, Homo sapiens
ttacaggtgtgagca

SEQ ID NO: 1623548 - DNA, 15 bp, Homo sapiens
tacaggtgtgagcaa

SEQ ID NO: 1623549 - DNA, 15 bp, Homo sapiens
acaggtgtgagcaaa

SEQ ID NO: 1623550 - DNA, 15 bp, Homo sapiens
caggtgtgagcaaac

SEQ ID NO: 1623551 - DNA, 15 bp, Homo sapiens
aggtgtgagcaaacc

SEQ ID NO: 1623552 - DNA, 15 bp, Homo sapiens
ggtgtgagcaaacct

SEQ ID NO: 1623553 - DNA, 15 bp, Homo sapiens
gtgtgagcaaacctg

SEQ ID NO: 1623554 - DNA, 15 bp, Homo sapiens
tgtgagcaaacctgc

SEQ ID NO: 1623555 - DNA, 15 bp, Homo sapiens
gtgagcaaacctgcc

SEQ ID NO: 1623556 - DNA, 15 bp, Homo sapiens
tgagcaaacctgcca

SEQ ID NO: 1623557 - DNA, 15 bp, Homo sapiens
gagcaaacctgccat

SEQ ID NO: 1623558 - DNA, 15 bp, Homo sapiens
agcaaacctgccatc

SEQ ID NO: 1623559 - DNA, 15 bp, Homo sapiens
gcaaacctgccatct

SEQ ID NO: 1623560 - DNA, 15 bp, Homo sapiens
caaacctgccatctc

SEQ ID NO: 1623561 - DNA, 15 bp, Homo sapiens
aaacctgccatctca

SEQ ID NO: 1623562 - DNA, 15 bp, Homo sapiens
aacctgccatctcaa

SEQ ID NO: 1623563 - DNA, 15 bp, Homo sapiens
acctgccatctcaaa

SEQ ID NO: 1623564 - DNA, 15 bp, Homo sapiens
cctgccatctcaaaa

SEQ ID NO: 1623565 - DNA, 15 bp, Homo sapiens
ctgccatctcaaaac

SEQ ID NO: 1623566 - DNA, 15 bp, Homo sapiens
tgccatctcaaaaca

SEQ ID NO: 1623567 - DNA, 15 bp, Homo sapiens
gccatctcaaaacat

SEQ ID NO: 1623568 - DNA, 15 bp, Homo sapiens
ccatctcaaaacatg

SEQ ID NO: 1623569 - DNA, 15 bp, Homo sapiens
catctcaaaacatgt

SEQ ID NO: 1623570 - DNA, 15 bp, Homo sapiens
atctcaaaacatgtg

SEQ ID NO: 1623571 - DNA, 15 bp, Homo sapiens
tctcaaaacatgtgt

SEQ ID NO: 1623572 - DNA, 15 bp, Homo sapiens
ctcaaaacatgtgta

SEQ ID NO: 1623573 - DNA, 15 bp, Homo sapiens
tcaaaacatgtgtat

SEQ ID NO: 1623574 - DNA, 15 bp, Homo sapiens
caaaacatgtgtatt

SEQ ID NO: 1623575 - DNA, 15 bp, Homo sapiens
aaaacatgtgtattt

SEQ ID NO: 1623576 - DNA, 15 bp, Homo sapiens
aaacatgtgtatttt

SEQ ID NO: 1623577 - DNA, 15 bp, Homo sapiens
aacatgtgtatttta

SEQ ID NO: 1623578 - DNA, 15 bp, Homo sapiens
acatgtgtattttaa

SEQ ID NO: 1623579 - DNA, 15 bp, Homo sapiens
catgtgtattttaat

SEQ ID NO: 1623580 - DNA, 15 bp, Homo sapiens
atgtgtattttaatg

SEQ ID NO: 1623581 - DNA, 15 bp, Homo sapiens
tgtgtattttaatga

SEQ ID NO: 1623582 - DNA, 15 bp, Homo sapiens
gtgtattttaatgag

SEQ ID NO: 1623583 - DNA, 15 bp, Homo sapiens
tgtattttaatgaga

SEQ ID NO: 1623584 - DNA, 15 bp, Homo sapiens
gtattttaatgagac

SEQ ID NO: 1623585 - DNA, 15 bp, Homo sapiens
tattttaatgagaca

SEQ ID NO: 1623586 - DNA, 15 bp, Homo sapiens
attttaatgagacaa

SEQ ID NO: 1623587 - DNA, 15 bp, Homo sapiens
ttttaatgagacaac

SEQ ID NO: 1623588 - DNA, 15 bp, Homo sapiens
tttaatgagacaaca

SEQ ID NO: 1623589 - DNA, 15 bp, Homo sapiens
ttaatgagacaacaa

SEQ ID NO: 1623590 - DNA, 15 bp, Homo sapiens
taatgagacaacaaa

SEQ ID NO: 1623591 - DNA, 15 bp, Homo sapiens
aatgagacaacaaag

SEQ ID NO: 1623592 - DNA, 15 bp, Homo sapiens
atgagacaacaaaga

SEQ ID NO: 1623593 - DNA, 15 bp, Homo sapiens
tgagacaacaaagat

SEQ ID NO: 1623594 - DNA, 15 bp, Homo sapiens
gagacaacaaagatc

SEQ ID NO: 1623595 - DNA, 15 bp, Homo sapiens
agacaacaaagatca

SEQ ID NO: 1623596 - DNA, 15 bp, Homo sapiens
gacaacaaagatcaa

SEQ ID NO: 1623597 - DNA, 15 bp, Homo sapiens
acaacaaagatcaag

SEQ ID NO: 1623598 - DNA, 15 bp, Homo sapiens
caacaaagatcaagg

SEQ ID NO: 1623599 - DNA, 15 bp, Homo sapiens
aacaaagatcaaggg

SEQ ID NO: 1623600 - DNA, 15 bp, Homo sapiens
acaaagatcaaggga

SEQ ID NO: 1623601 - DNA, 15 bp, Homo sapiens
caaagatcaagggaa

SEQ ID NO: 1623602 - DNA, 15 bp, Homo sapiens
aaagatcaagggaac

SEQ ID NO: 1623603 - DNA, 15 bp, Homo sapiens
aagatcaagggaact

SEQ ID NO: 1623604 - DNA, 15 bp, Homo sapiens
agatcaagggaactt

SEQ ID NO: 1623605 - DNA, 15 bp, Homo sapiens
gatcaagggaacttt

SEQ ID NO: 1623606 - DNA, 15 bp, Homo sapiens
atcaagggaacttta

SEQ ID NO: 1623607 - DNA, 15 bp, Homo sapiens
tcaagggaactttag

SEQ ID NO: 1623608 - DNA, 15 bp, Homo sapiens
caagggaactttagt

SEQ ID NO: 1623609 - DNA, 15 bp, Homo sapiens
aagggaactttagtc

SEQ ID NO: 1623610 - DNA, 15 bp, Homo sapiens
agggaactttagtcc

SEQ ID NO: 1623611 - DNA, 15 bp, Homo sapiens
gggaactttagtcct

SEQ ID NO: 1623612 - DNA, 15 bp, Homo sapiens
ggaactttagtcctt

SEQ ID NO: 1623613 - DNA, 15 bp, Homo sapiens
gaactttagtcctta

SEQ ID NO: 1623614 - DNA, 15 bp, Homo sapiens
aactttagtccttac

SEQ ID NO: 1623615 - DNA, 15 bp, Homo sapiens
actttagtccttaca

SEQ ID NO: 1623616 - DNA, 15 bp, Homo sapiens
ctttagtccttacaa

SEQ ID NO: 1623617 - DNA, 15 bp, Homo sapiens
tttagtccttacaat

SEQ ID NO: 1623618 - DNA, 15 bp, Homo sapiens
ttagtccttacaatg

SEQ ID NO: 1623619 - DNA, 15 bp, Homo sapiens
tagtccttacaatgt

SEQ ID NO: 1623620 - DNA, 15 bp, Homo sapiens
agtccttacaatgta

SEQ ID NO: 1623621 - DNA, 15 bp, Homo sapiens
gtccttacaatgtaa

SEQ ID NO: 1623622 - DNA, 15 bp, Homo sapiens
tccttacaatgtaat

SEQ ID NO: 1623623 - DNA, 15 bp, Homo sapiens
ccttacaatgtaatg

SEQ ID NO: 1623624 - DNA, 15 bp, Homo sapiens
cttacaatgtaatga

SEQ ID NO: 1623625 - DNA, 15 bp, Homo sapiens
ttacaatgtaatgat

SEQ ID NO: 1623626 - DNA, 15 bp, Homo sapiens
tacaatgtaatgatc

SEQ ID NO: 1623627 - DNA, 15 bp, Homo sapiens
acaatgtaatgatca

SEQ ID NO: 1623628 - DNA, 15 bp, Homo sapiens
caatgtaatgatcaa

SEQ ID NO: 1623629 - DNA, 15 bp, Homo sapiens
aatgtaatgatcaaa

SEQ ID NO: 1623630 - DNA, 15 bp, Homo sapiens
atgtaatgatcaaaa

SEQ ID NO: 1623631 - DNA, 15 bp, Homo sapiens
tgtaatgatcaaaaa

SEQ ID NO: 1623632 - DNA, 15 bp, Homo sapiens
gtaatgatcaaaaaa

SEQ ID NO: 1623633 - DNA, 15 bp, Homo sapiens
taatgatcaaaaaag

SEQ ID NO: 1623634 - DNA, 15 bp, Homo sapiens
aatgatcaaaaaagt

SEQ ID NO: 1623635 - DNA, 15 bp, Homo sapiens
atgatcaaaaaagtg

SEQ ID NO: 1623636 - DNA, 15 bp, Homo sapiens
tgatcaaaaaagtga

SEQ ID NO: 1623637 - DNA, 15 bp, Homo sapiens
gatcaaaaaagtgaa

SEQ ID NO: 1623638 - DNA, 15 bp, Homo sapiens
atcaaaaaagtgaaa

SEQ ID NO: 1623639 - DNA, 15 bp, Homo sapiens
tcaaaaaagtgaaat

SEQ ID NO: 1623640 - DNA, 15 bp, Homo sapiens
caaaaaagtgaaata

SEQ ID NO: 1623641 - DNA, 15 bp, Homo sapiens
aaaaaagtgaaatag

SEQ ID NO: 1623642 - DNA, 15 bp, Homo sapiens
aaaaagtgaaataga

SEQ ID NO: 1623643 - DNA, 15 bp, Homo sapiens
aaaagtgaaatagat

SEQ ID NO: 1623644 - DNA, 15 bp, Homo sapiens
aaagtgaaatagata

SEQ ID NO: 1623645 - DNA, 15 bp, Homo sapiens
aagtgaaatagataa

SEQ ID NO: 1623646 - DNA, 15 bp, Homo sapiens
agtgaaatagataat

SEQ ID NO: 1623647 - DNA, 15 bp, Homo sapiens
gtgaaatagataatc

SEQ ID NO: 1623648 - DNA, 15 bp, Homo sapiens
tgaaatagataatca

SEQ ID NO: 1623649 - DNA, 15 bp, Homo sapiens
gaaatagataatcaa

SEQ ID NO: 1623650 - DNA, 15 bp, Homo sapiens
aaatagataatcaac

SEQ ID NO: 1623651 - DNA, 15 bp, Homo sapiens
aatagataatcaaca

SEQ ID NO: 1623652 - DNA, 15 bp, Homo sapiens
atagataatcaacat

SEQ ID NO: 1623653 - DNA, 15 bp, Homo sapiens
tagataatcaacata

SEQ ID NO: 1623654 - DNA, 15 bp, Homo sapiens
agataatcaacataa

SEQ ID NO: 1623655 - DNA, 15 bp, Homo sapiens
gataatcaacataac

SEQ ID NO: 1623656 - DNA, 15 bp, Homo sapiens
ataatcaacataaca

SEQ ID NO: 1623657 - DNA, 15 bp, Homo sapiens
taatcaacataacat

SEQ ID NO: 1623658 - DNA, 15 bp, Homo sapiens
aatcaacataacatt

SEQ ID NO: 1623659 - DNA, 15 bp, Homo sapiens
atcaacataacattg

SEQ ID NO: 1623660 - DNA, 15 bp, Homo sapiens
tcaacataacattgc

SEQ ID NO: 1623661 - DNA, 15 bp, Homo sapiens
caacataacattgct

SEQ ID NO: 1623662 - DNA, 15 bp, Homo sapiens
aacataacattgctt

SEQ ID NO: 1623663 - DNA, 15 bp, Homo sapiens
acataacattgcttg

SEQ ID NO: 1623664 - DNA, 15 bp, Homo sapiens
cataacattgcttgt

SEQ ID NO: 1623665 - DNA, 15 bp, Homo sapiens
ataacattgcttgta

SEQ ID NO: 1623666 - DNA, 15 bp, Homo sapiens
taacattgcttgtag

SEQ ID NO: 1623667 - DNA, 15 bp, Homo sapiens
aacattgcttgtaga

SEQ ID NO: 1623668 - DNA, 15 bp, Homo sapiens
acattgcttgtagac

SEQ ID NO: 1623669 - DNA, 15 bp, Homo sapiens
cattgcttgtagacc

SEQ ID NO: 1623670 - DNA, 15 bp, Homo sapiens
attgcttgtagacca

SEQ ID NO: 1623671 - DNA, 15 bp, Homo sapiens
ttgcttgtagaccat

SEQ ID NO: 1623672 - DNA, 15 bp, Homo sapiens
tgcttgtagaccatg

SEQ ID NO: 1623673 - DNA, 15 bp, Homo sapiens
gcttgtagaccatgc

SEQ ID NO: 1623674 - DNA, 15 bp, Homo sapiens
cttgtagaccatgca

SEQ ID NO: 1623675 - DNA, 15 bp, Homo sapiens
ttgtagaccatgcaa

SEQ ID NO: 1623676 - DNA, 15 bp, Homo sapiens
tgtagaccatgcaaa

SEQ ID NO: 1623677 - DNA, 15 bp, Homo sapiens
gtagaccatgcaaac

SEQ ID NO: 1623678 - DNA, 15 bp, Homo sapiens
tagaccatgcaaaca

SEQ ID NO: 1623679 - DNA, 15 bp, Homo sapiens
agaccatgcaaacaa

SEQ ID NO: 1623680 - DNA, 15 bp, Homo sapiens
gaccatgcaaacaat

SEQ ID NO: 1623681 - DNA, 15 bp, Homo sapiens
accatgcaaacaatc

SEQ ID NO: 1623682 - DNA, 15 bp, Homo sapiens
ccatgcaaacaatct

SEQ ID NO: 1623683 - DNA, 15 bp, Homo sapiens
catgcaaacaatctt

SEQ ID NO: 1623684 - DNA, 15 bp, Homo sapiens
atgcaaacaatctta

SEQ ID NO: 1623685 - DNA, 15 bp, Homo sapiens
tgcaaacaatcttat

SEQ ID NO: 1623686 - DNA, 15 bp, Homo sapiens
gcaaacaatcttatt

SEQ ID NO: 1623687 - DNA, 15 bp, Homo sapiens
caaacaatcttattg

SEQ ID NO: 1623688 - DNA, 15 bp, Homo sapiens
aaacaatcttattgc

SEQ ID NO: 1623689 - DNA, 15 bp, Homo sapiens
aacaatcttattgca

SEQ ID NO: 1623690 - DNA, 15 bp, Homo sapiens
acaatcttattgcat

SEQ ID NO: 1623691 - DNA, 15 bp, Homo sapiens
caatcttattgcatt

SEQ ID NO: 1623692 - DNA, 15 bp, Homo sapiens
aatcttattgcattt

SEQ ID NO: 1623693 - DNA, 15 bp, Homo sapiens
atcttattgcatttg

SEQ ID NO: 1623694 - DNA, 15 bp, Homo sapiens
tcttattgcatttgt

SEQ ID NO: 1623695 - DNA, 15 bp, Homo sapiens
cttattgcatttgta

SEQ ID NO: 1623696 - DNA, 15 bp, Homo sapiens
ttattgcatttgtat

SEQ ID NO: 1623697 - DNA, 15 bp, Homo sapiens
tattgcatttgtata

SEQ ID NO: 1623698 - DNA, 15 bp, Homo sapiens
attgcatttgtatat

SEQ ID NO: 1623699 - DNA, 15 bp, Homo sapiens
ttgcatttgtatatt

SEQ ID NO: 1623700 - DNA, 15 bp, Homo sapiens
tgcatttgtatattt

SEQ ID NO: 1623701 - DNA, 15 bp, Homo sapiens
gcatttgtatatttg

SEQ ID NO: 1623702 - DNA, 15 bp, Homo sapiens
catttgtatatttgt

SEQ ID NO: 1623703 - DNA, 15 bp, Homo sapiens
atttgtatatttgta

SEQ ID NO: 1623704 - DNA, 15 bp, Homo sapiens
tttgtatatttgtaa

SEQ ID NO: 1623705 - DNA, 15 bp, Homo sapiens
ttgtatatttgtaat

SEQ ID NO: 1623706 - DNA, 15 bp, Homo sapiens
tgtatatttgtaatg

SEQ ID NO: 1623707 - DNA, 15 bp, Homo sapiens
gtatatttgtaatga

SEQ ID NO: 1623708 - DNA, 15 bp, Homo sapiens
tatatttgtaatgaa

SEQ ID NO: 1623709 - DNA, 15 bp, Homo sapiens
atatttgtaatgaac

SEQ ID NO: 1623710 - DNA, 15 bp, Homo sapiens
tatttgtaatgaact

SEQ ID NO: 1623711 - DNA, 15 bp, Homo sapiens
atttgtaatgaactg

SEQ ID NO: 1623712 - DNA, 15 bp, Homo sapiens
tttgtaatgaactgt

SEQ ID NO: 1623713 - DNA, 15 bp, Homo sapiens
ttgtaatgaactgtt

SEQ ID NO: 1623714 - DNA, 15 bp, Homo sapiens
tgtaatgaactgttt

SEQ ID NO: 1623715 - DNA, 15 bp, Homo sapiens
gtaatgaactgtttt

SEQ ID NO: 1623716 - DNA, 15 bp, Homo sapiens
taatgaactgtttta

SEQ ID NO: 1623717 - DNA, 15 bp, Homo sapiens
aatgaactgttttat

SEQ ID NO: 1623718 - DNA, 15 bp, Homo sapiens
atgaactgttttata

SEQ ID NO: 1623719 - DNA, 15 bp, Homo sapiens
gaactgttttataat

SEQ ID NO: 1623720 - DNA, 15 bp, Homo sapiens
aactgttttataata

SEQ ID NO: 1623721 - DNA, 15 bp, Homo sapiens
actgttttataataa

SEQ ID NO: 1623722 - DNA, 15 bp, Homo sapiens
ctgttttataataac

SEQ ID NO: 1623723 - DNA, 15 bp, Homo sapiens
tgttttataataaca

SEQ ID NO: 1623724 - DNA, 15 bp, Homo sapiens
gttttataataacaa

SEQ ID NO: 1623725 - DNA, 15 bp, Homo sapiens
ttttataataacaaa

SEQ ID NO: 1623726 - DNA, 15 bp, Homo sapiens
tttataataacaaaa

SEQ ID NO: 1623727 - DNA, 15 bp, Homo sapiens
ttataataacaaaat

SEQ ID NO: 1623728 - DNA, 15 bp, Homo sapiens
tataataacaaaatg

SEQ ID NO: 1623729 - DNA, 15 bp, Homo sapiens
ataataacaaaatgt

SEQ ID NO: 1623730 - DNA, 15 bp, Homo sapiens
taataacaaaatgta

SEQ ID NO: 1623731 - DNA, 15 bp, Homo sapiens
aataacaaaatgtaa

SEQ ID NO: 1623732 - DNA, 15 bp, Homo sapiens
ataacaaaatgtaaa

SEQ ID NO: 1623733 - DNA, 15 bp, Homo sapiens
taacaaaatgtaaaa

SEQ ID NO: 1623734 - DNA, 15 bp, Homo sapiens
aacaaaatgtaaaat

SEQ ID NO: 1623735 - DNA, 15 bp, Homo sapiens
acaaaatgtaaaatg

SEQ ID NO: 1623736 - DNA, 15 bp, Homo sapiens
caaaatgtaaaatgt

SEQ ID NO: 1623737 - DNA, 15 bp, Homo sapiens
aaaatgtaaaatgtg

SEQ ID NO: 1623738 - DNA, 15 bp, Homo sapiens
aaatgtaaaatgtgt

SEQ ID NO: 1623739 - DNA, 15 bp, Homo sapiens
aatgtaaaatgtgta

SEQ ID NO: 1623740 - DNA, 15 bp, Homo sapiens
atgtaaaatgtgtat

SEQ ID NO: 1623741 - DNA, 15 bp, Homo sapiens
tgtaaaatgtgtatt

SEQ ID NO: 1623742 - DNA, 15 bp, Homo sapiens
gtaaaatgtgtattt

SEQ ID NO: 1623743 - DNA, 15 bp, Homo sapiens
taaaatgtgtatttt

SEQ ID NO: 1623744 - DNA, 15 bp, Homo sapiens
aaaatgtgtatttta

SEQ ID NO: 1623745 - DNA, 15 bp, Homo sapiens
aaatgtgtattttat

SEQ ID NO: 1623746 - DNA, 15 bp, Homo sapiens
aatgtgtattttatt

SEQ ID NO: 1623747 - DNA, 15 bp, Homo sapiens
atgtgtattttattt

SEQ ID NO: 1623748 - DNA, 15 bp, Homo sapiens
tgtgtattttatttg

SEQ ID NO: 1623749 - DNA, 15 bp, Homo sapiens
gtgtattttatttgt

SEQ ID NO: 1623750 - DNA, 15 bp, Homo sapiens
tgtattttatttgtc

SEQ ID NO: 1623751 - DNA, 15 bp, Homo sapiens
gtattttatttgtcc

SEQ ID NO: 1623752 - DNA, 15 bp, Homo sapiens
tattttatttgtcct

SEQ ID NO: 1623753 - DNA, 15 bp, Homo sapiens
attttatttgtcctt

SEQ ID NO: 1623754 - DNA, 15 bp, Homo sapiens
ttttatttgtccttt

SEQ ID NO: 1623755 - DNA, 15 bp, Homo sapiens
tttatttgtcctttt

SEQ ID NO: 1623756 - DNA, 15 bp, Homo sapiens
ttatttgtcctttta

SEQ ID NO: 1623757 - DNA, 15 bp, Homo sapiens
tatttgtccttttat

SEQ ID NO: 1623758 - DNA, 15 bp, Homo sapiens
atttgtccttttatt

SEQ ID NO: 1623759 - DNA, 15 bp, Homo sapiens
tttgtccttttattg

SEQ ID NO: 1623760 - DNA, 15 bp, Homo sapiens
ttgtccttttattgt

SEQ ID NO: 1623761 - DNA, 15 bp, Homo sapiens
tgtccttttattgtt

SEQ ID NO: 1623762 - DNA, 15 bp, Homo sapiens
gtccttttattgttt

SEQ ID NO: 1623763 - DNA, 15 bp, Homo sapiens
tccttttattgtttt

SEQ ID NO: 1623764 - DNA, 15 bp, Homo sapiens
ccttttattgttttc

SEQ ID NO: 1623765 - DNA, 15 bp, Homo sapiens
cttttattgttttcc

SEQ ID NO: 1623766 - DNA, 15 bp, Homo sapiens
ttttattgttttcct

SEQ ID NO: 1623767 - DNA, 15 bp, Homo sapiens
tttattgttttccta

SEQ ID NO: 1623768 - DNA, 15 bp, Homo sapiens
ttattgttttcctac

SEQ ID NO: 1623769 - DNA, 15 bp, Homo sapiens
tattgttttcctact

SEQ ID NO: 1623770 - DNA, 15 bp, Homo sapiens
attgttttcctactt

SEQ ID NO: 1623771 - DNA, 15 bp, Homo sapiens
ttgttttcctacttc

SEQ ID NO: 1623772 - DNA, 15 bp, Homo sapiens
tgttttcctacttct

SEQ ID NO: 1623773 - DNA, 15 bp, Homo sapiens
gttttcctacttctt

SEQ ID NO: 1623774 - DNA, 15 bp, Homo sapiens
ttttcctacttctta

SEQ ID NO: 1623775 - DNA, 15 bp, Homo sapiens
tttcctacttcttag

SEQ ID NO: 1623776 - DNA, 15 bp, Homo sapiens
ttcctacttcttaga

SEQ ID NO: 1623777 - DNA, 15 bp, Homo sapiens
tcctacttcttagac

SEQ ID NO: 1623778 - DNA, 15 bp, Homo sapiens
cctacttcttagaca

SEQ ID NO: 1623779 - DNA, 15 bp, Homo sapiens
ctacttcttagacat

SEQ ID NO: 1623780 - DNA, 15 bp, Homo sapiens
tacttcttagacatg

SEQ ID NO: 1623781 - DNA, 15 bp, Homo sapiens
acttcttagacatgt

SEQ ID NO: 1623782 - DNA, 15 bp, Homo sapiens
cttcttagacatgtt

SEQ ID NO: 1623783 - DNA, 15 bp, Homo sapiens
ttcttagacatgtta

SEQ ID NO: 1623784 - DNA, 15 bp, Homo sapiens
tcttagacatgttaa

SEQ ID NO: 1623785 - DNA, 15 bp, Homo sapiens
cttagacatgttaag

SEQ ID NO: 1623786 - DNA, 15 bp, Homo sapiens
ttagacatgttaaga

SEQ ID NO: 1623787 - DNA, 15 bp, Homo sapiens
tagacatgttaagaa

SEQ ID NO: 1623788 - DNA, 15 bp, Homo sapiens
agacatgttaagaac

SEQ ID NO: 1623789 - DNA, 15 bp, Homo sapiens
gacatgttaagaact

SEQ ID NO: 1623790 - DNA, 15 bp, Homo sapiens
acatgttaagaacta

SEQ ID NO: 1623791 - DNA, 15 bp, Homo sapiens
catgttaagaactat

SEQ ID NO: 1623792 - DNA, 15 bp, Homo sapiens
atgttaagaactatg

SEQ ID NO: 1623793 - DNA, 15 bp, Homo sapiens
tgttaagaactatgg

SEQ ID NO: 1623794 - DNA, 15 bp, Homo sapiens
gttaagaactatgga

SEQ ID NO: 1623795 - DNA, 15 bp, Homo sapiens
ttaagaactatggaa

SEQ ID NO: 1623796 - DNA, 15 bp, Homo sapiens
taagaactatggaaa

SEQ ID NO: 1623797 - DNA, 15 bp, Homo sapiens
aagaactatggaaaa

SEQ ID NO: 1623798 - DNA, 15 bp, Homo sapiens
agaactatggaaaaa

SEQ ID NO: 1623799 - DNA, 15 bp, Homo sapiens
gaactatggaaaaag

SEQ ID NO: 1623800 - DNA, 15 bp, Homo sapiens
aactatggaaaaaga

SEQ ID NO: 1623801 - DNA, 15 bp, Homo sapiens
actatggaaaaagat

SEQ ID NO: 1623802 - DNA, 15 bp, Homo sapiens
ctatggaaaaagata

SEQ ID NO: 1623803 - DNA, 15 bp, Homo sapiens
tatggaaaaagatat

SEQ ID NO: 1623804 - DNA, 15 bp, Homo sapiens
atggaaaaagatatg

SEQ ID NO: 1623805 - DNA, 15 bp, Homo sapiens
tggaaaaagatatgg

SEQ ID NO: 1623806 - DNA, 15 bp, Homo sapiens
ggaaaaagatatggg

SEQ ID NO: 1623807 - DNA, 15 bp, Homo sapiens
gaaaaagatatggga

SEQ ID NO: 1623808 - DNA, 15 bp, Homo sapiens
aaaaagatatgggag

SEQ ID NO: 1623809 - DNA, 15 bp, Homo sapiens
aaaagatatgggagt

SEQ ID NO: 1623810 - DNA, 15 bp, Homo sapiens
aaagatatgggagtt

SEQ ID NO: 1623811 - DNA, 15 bp, Homo sapiens
aagatatgggagttt

SEQ ID NO: 1623812 - DNA, 15 bp, Homo sapiens
agatatgggagtttg

SEQ ID NO: 1623813 - DNA, 15 bp, Homo sapiens
gatatgggagtttgt

SEQ ID NO: 1623814 - DNA, 15 bp, Homo sapiens
atatgggagtttgtg

SEQ ID NO: 1623815 - DNA, 15 bp, Homo sapiens
tatgggagtttgtga

SEQ ID NO: 1623816 - DNA, 15 bp, Homo sapiens
atgggagtttgtgaa

SEQ ID NO: 1623817 - DNA, 15 bp, Homo sapiens
tgggagtttgtgaaa

SEQ ID NO: 1623818 - DNA, 15 bp, Homo sapiens
gggagtttgtgaaaa

SEQ ID NO: 1623819 - DNA, 15 bp, Homo sapiens
ggagtttgtgaaaat

SEQ ID NO: 1623820 - DNA, 15 bp, Homo sapiens
gagtttgtgaaaatt

SEQ ID NO: 1623821 - DNA, 15 bp, Homo sapiens
agtttgtgaaaattt

SEQ ID NO: 1623822 - DNA, 15 bp, Homo sapiens
gtttgtgaaaattta

SEQ ID NO: 1623823 - DNA, 15 bp, Homo sapiens
tttgtgaaaatttaa

SEQ ID NO: 1623824 - DNA, 15 bp, Homo sapiens
ttgtgaaaatttaaa

SEQ ID NO: 1623825 - DNA, 15 bp, Homo sapiens
tgtgaaaatttaaat

SEQ ID NO: 1623826 - DNA, 15 bp, Homo sapiens
gtgaaaatttaaata

SEQ ID NO: 1623827 - DNA, 15 bp, Homo sapiens
tgaaaatttaaataa

SEQ ID NO: 1623828 - DNA, 15 bp, Homo sapiens
gaaaatttaaataat

SEQ ID NO: 1623829 - DNA, 15 bp, Homo sapiens
atttaaataattcat

SEQ ID NO: 1623830 - DNA, 15 bp, Homo sapiens
tttaaataattcata

SEQ ID NO: 1623831 - DNA, 15 bp, Homo sapiens
ttaaataattcatat

SEQ ID NO: 1623832 - DNA, 15 bp, Homo sapiens
taaataattcatatt

SEQ ID NO: 1623833 - DNA, 15 bp, Homo sapiens
aaataattcatattt

SEQ ID NO: 1623834 - DNA, 15 bp, Homo sapiens
aataattcatattta

SEQ ID NO: 1623835 - DNA, 15 bp, Homo sapiens
ataattcatatttat

SEQ ID NO: 1623836 - DNA, 15 bp, Homo sapiens
taattcatatttata

SEQ ID NO: 1623837 - DNA, 15 bp, Homo sapiens
aattcatatttatat

SEQ ID NO: 1623838 - DNA, 15 bp, Homo sapiens
attcatatttatatt

SEQ ID NO: 1623839 - DNA, 15 bp, Homo sapiens
ttcatatttatatta

SEQ ID NO: 1623840 - DNA, 15 bp, Homo sapiens
tcatatttatattac

SEQ ID NO: 1623841 - DNA, 15 bp, Homo sapiens
catatttatattaca

SEQ ID NO: 1623842 - DNA, 15 bp, Homo sapiens
atatttatattacaa

SEQ ID NO: 1623843 - DNA, 15 bp, Homo sapiens
tatttatattacaag

SEQ ID NO: 1623844 - DNA, 15 bp, Homo sapiens
atttatattacaaga

SEQ ID NO: 1623845 - DNA, 15 bp, Homo sapiens
tttatattacaagaa

SEQ ID NO: 1623846 - DNA, 15 bp, Homo sapiens
ttatattacaagaaa

SEQ ID NO: 1623847 - DNA, 15 bp, Homo sapiens
tatattacaagaaac

SEQ ID NO: 1623848 - DNA, 15 bp, Homo sapiens
atattacaagaaaca

SEQ ID NO: 1623849 - DNA, 15 bp, Homo sapiens
tattacaagaaacag

SEQ ID NO: 1623850 - DNA, 15 bp, Homo sapiens
attacaagaaacaga

SEQ ID NO: 1623851 - DNA, 15 bp, Homo sapiens
ttacaagaaacagat

SEQ ID NO: 1623852 - DNA, 15 bp, Homo sapiens
tacaagaaacagata

SEQ ID NO: 1623853 - DNA, 15 bp, Homo sapiens
acaagaaacagatat

SEQ ID NO: 1623854 - DNA, 15 bp, Homo sapiens
caagaaacagatatt

SEQ ID NO: 1623855 - DNA, 15 bp, Homo sapiens
aagaaacagatatta

SEQ ID NO: 1623856 - DNA, 15 bp, Homo sapiens
agaaacagatattag

SEQ ID NO: 1623857 - DNA, 15 bp, Homo sapiens
gaaacagatattaga

SEQ ID NO: 1623858 - DNA, 15 bp, Homo sapiens
aaacagatattagaa

SEQ ID NO: 1623859 - DNA, 15 bp, Homo sapiens
aacagatattagaat

SEQ ID NO: 1623860 - DNA, 15 bp, Homo sapiens
acagatattagaata

SEQ ID NO: 1623861 - DNA, 15 bp, Homo sapiens
cagatattagaatat

SEQ ID NO: 1623862 - DNA, 15 bp, Homo sapiens
agatattagaatatg

SEQ ID NO: 1623863 - DNA, 15 bp, Homo sapiens
gatattagaatatgt

SEQ ID NO: 1623864 - DNA, 15 bp, Homo sapiens
atattagaatatgtt

SEQ ID NO: 1623865 - DNA, 15 bp, Homo sapiens
tattagaatatgttt

SEQ ID NO: 1623866 - DNA, 15 bp, Homo sapiens
attagaatatgtttg

SEQ ID NO: 1623867 - DNA, 15 bp, Homo sapiens
ttagaatatgtttgt

SEQ ID NO: 1623868 - DNA, 15 bp, Homo sapiens
tagaatatgtttgtt

SEQ ID NO: 1623869 - DNA, 15 bp, Homo sapiens
agaatatgtttgttt

SEQ ID NO: 1623870 - DNA, 15 bp, Homo sapiens
gaatatgtttgtttt

SEQ ID NO: 1623871 - DNA, 15 bp, Homo sapiens
aatatgtttgtttta

SEQ ID NO: 1623872 - DNA, 15 bp, Homo sapiens
atatgtttgttttat

SEQ ID NO: 1623873 - DNA, 15 bp, Homo sapiens
tatgtttgttttata

SEQ ID NO: 1623874 - DNA, 15 bp, Homo sapiens
atgtttgttttatat

SEQ ID NO: 1623875 - DNA, 15 bp, Homo sapiens
tgttttatatttctt

SEQ ID NO: 1623876 - DNA, 15 bp, Homo sapiens
gttttatatttcttt

SEQ ID NO: 1623877 - DNA, 15 bp, Homo sapiens
ttttatatttctttt

SEQ ID NO: 1623878 - DNA, 15 bp, Homo sapiens
tttatatttcttttg

SEQ ID NO: 1623879 - DNA, 15 bp, Homo sapiens
ttatatttcttttgt

SEQ ID NO: 1623880 - DNA, 15 bp, Homo sapiens
tatatttcttttgta

SEQ ID NO: 1623881 - DNA, 15 bp, Homo sapiens
atatttcttttgtag

SEQ ID NO: 1623882 - DNA, 15 bp, Homo sapiens
tatttcttttgtagc

SEQ ID NO: 1623883 - DNA, 15 bp, Homo sapiens
atttcttttgtagca

SEQ ID NO: 1623884 - DNA, 15 bp, Homo sapiens
tttcttttgtagcag

SEQ ID NO: 1623885 - DNA, 15 bp, Homo sapiens
ttcttttgtagcaga

SEQ ID NO: 1623886 - DNA, 15 bp, Homo sapiens
tcttttgtagcagaa

SEQ ID NO: 1623887 - DNA, 15 bp, Homo sapiens
cttttgtagcagaat

SEQ ID NO: 1623888 - DNA, 15 bp, Homo sapiens
ttttgtagcagaatt

SEQ ID NO: 1623889 - DNA, 15 bp, Homo sapiens
tttgtagcagaattt

SEQ ID NO: 1623890 - DNA, 15 bp, Homo sapiens
ttgtagcagaatttt

SEQ ID NO: 1623891 - DNA, 15 bp, Homo sapiens
tgtagcagaattttc

SEQ ID NO: 1623892 - DNA, 15 bp, Homo sapiens
gtagcagaattttct

SEQ ID NO: 1623893 - DNA, 15 bp, Homo sapiens
tagcagaattttcta

SEQ ID NO: 1623894 - DNA, 15 bp, Homo sapiens
agcagaattttctag

SEQ ID NO: 1623895 - DNA, 15 bp, Homo sapiens
gcagaattttctagc

SEQ ID NO: 1623896 - DNA, 15 bp, Homo sapiens
cagaattttctagcc

SEQ ID NO: 1623897 - DNA, 15 bp, Homo sapiens
agaattttctagcca

SEQ ID NO: 1623898 - DNA, 15 bp, Homo sapiens
gaattttctagccag

SEQ ID NO: 1623899 - DNA, 15 bp, Homo sapiens
aattttctagccagg

SEQ ID NO: 1623900 - DNA, 15 bp, Homo sapiens
attttctagccaggc

SEQ ID NO: 1623901 - DNA, 15 bp, Homo sapiens
ttttctagccaggca

SEQ ID NO: 1623902 - DNA, 15 bp, Homo sapiens
tttctagccaggcat

SEQ ID NO: 1623903 - DNA, 15 bp, Homo sapiens
ttctagccaggcatt

SEQ ID NO: 1623904 - DNA, 15 bp, Homo sapiens
tctagccaggcattg

SEQ ID NO: 1623905 - DNA, 15 bp, Homo sapiens
ctagccaggcattgt

SEQ ID NO: 1623906 - DNA, 15 bp, Homo sapiens
caggcattgtggctt

SEQ ID NO: 1623907 - DNA, 15 bp, Homo sapiens
aggcattgtggctta

SEQ ID NO: 1623908 - DNA, 15 bp, Homo sapiens
ggcattgtggcttac

SEQ ID NO: 1623909 - DNA, 15 bp, Homo sapiens
gcattgtggcttaca

SEQ ID NO: 1623910 - DNA, 15 bp, Homo sapiens
cattgtggcttacac

SEQ ID NO: 1623911 - DNA, 15 bp, Homo sapiens
attgtggcttacacc

SEQ ID NO: 1623912 - DNA, 15 bp, Homo sapiens
ttgtggcttacacct

SEQ ID NO: 1623913 - DNA, 15 bp, Homo sapiens
tgtggcttacacctg

SEQ ID NO: 1623914 - DNA, 15 bp, Homo sapiens
cttacacctgtaatt

SEQ ID NO: 1623915 - DNA, 15 bp, Homo sapiens
ttacacctgtaattc

SEQ ID NO: 1623916 - DNA, 15 bp, Homo sapiens
tacacctgtaattcc

SEQ ID NO: 1623917 - DNA, 15 bp, Homo sapiens
aggctgaggtgggac

SEQ ID NO: 1623918 - DNA, 15 bp, Homo sapiens
ggctgaggtgggaca

SEQ ID NO: 1623919 - DNA, 15 bp, Homo sapiens
gctgaggtgggacaa

SEQ ID NO: 1623920 - DNA, 15 bp, Homo sapiens
ctgaggtgggacaat

SEQ ID NO: 1623921 - DNA, 15 bp, Homo sapiens
tgaggtgggacaatc

SEQ ID NO: 1623922 - DNA, 15 bp, Homo sapiens
gaggtgggacaatca

SEQ ID NO: 1623923 - DNA, 15 bp, Homo sapiens
aggtgggacaatcac

SEQ ID NO: 1623924 - DNA, 15 bp, Homo sapiens
ggtgggacaatcact

SEQ ID NO: 1623925 - DNA, 15 bp, Homo sapiens
gtgggacaatcactt

SEQ ID NO: 1623926 - DNA, 15 bp, Homo sapiens
tgggacaatcactta

SEQ ID NO: 1623927 - DNA, 15 bp, Homo sapiens
gggacaatcacttaa

SEQ ID NO: 1623928 - DNA, 15 bp, Homo sapiens
ggacaatcacttaag

SEQ ID NO: 1623929 - DNA, 15 bp, Homo sapiens
gacaatcacttaagc

SEQ ID NO: 1623930 - DNA, 15 bp, Homo sapiens
acaatcacttaagcc

SEQ ID NO: 1623931 - DNA, 15 bp, Homo sapiens
caatcacttaagccc

SEQ ID NO: 1623932 - DNA, 15 bp, Homo sapiens
aatcacttaagccca

SEQ ID NO: 1623933 - DNA, 15 bp, Homo sapiens
atcacttaagcccaa

SEQ ID NO: 1623934 - DNA, 15 bp, Homo sapiens
tcacttaagcccaag

SEQ ID NO: 1623935 - DNA, 15 bp, Homo sapiens
cacttaagcccaaga

SEQ ID NO: 1623936 - DNA, 15 bp, Homo sapiens
acttaagcccaagag

SEQ ID NO: 1623937 - DNA, 15 bp, Homo sapiens
cttaagcccaagagt

SEQ ID NO: 1623938 - DNA, 15 bp, Homo sapiens
ttaagcccaagagtt

SEQ ID NO: 1623939 - DNA, 15 bp, Homo sapiens
taagcccaagagttt

SEQ ID NO: 1623940 - DNA, 15 bp, Homo sapiens
aagcccaagagtttg

SEQ ID NO: 1623941 - DNA, 15 bp, Homo sapiens
gcccaagagtttgaa

SEQ ID NO: 1623942 - DNA, 15 bp, Homo sapiens
cccaagagtttgaaa

SEQ ID NO: 1623943 - DNA, 15 bp, Homo sapiens
ccaagagtttgaaat

SEQ ID NO: 1623944 - DNA, 15 bp, Homo sapiens
caagagtttgaaatc

SEQ ID NO: 1623945 - DNA, 15 bp, Homo sapiens
aagagtttgaaatca

SEQ ID NO: 1623946 - DNA, 15 bp, Homo sapiens
agagtttgaaatcag

SEQ ID NO: 1623947 - DNA, 15 bp, Homo sapiens
gagtttgaaatcagt

SEQ ID NO: 1623948 - DNA, 15 bp, Homo sapiens
agtttgaaatcagtg

SEQ ID NO: 1623949 - DNA, 15 bp, Homo sapiens
gtttgaaatcagtga

SEQ ID NO: 1623950 - DNA, 15 bp, Homo sapiens
tttgaaatcagtgag

SEQ ID NO: 1623951 - DNA, 15 bp, Homo sapiens
ttgaaatcagtgagg

SEQ ID NO: 1623952 - DNA, 15 bp, Homo sapiens
tgaaatcagtgaggg

SEQ ID NO: 1623953 - DNA, 15 bp, Homo sapiens
gaaatcagtgagggc

SEQ ID NO: 1623954 - DNA, 15 bp, Homo sapiens
aaatcagtgagggca

SEQ ID NO: 1623955 - DNA, 15 bp, Homo sapiens
aatcagtgagggcaa

SEQ ID NO: 1623956 - DNA, 15 bp, Homo sapiens
atcagtgagggcaac

SEQ ID NO: 1623957 - DNA, 15 bp, Homo sapiens
tcagtgagggcaaca

SEQ ID NO: 1623958 - DNA, 15 bp, Homo sapiens
cagtgagggcaacat

SEQ ID NO: 1623959 - DNA, 15 bp, Homo sapiens
agtgagggcaacata

SEQ ID NO: 1623960 - DNA, 15 bp, Homo sapiens
gtgagggcaacatag

SEQ ID NO: 1623961 - DNA, 15 bp, Homo sapiens
tgagggcaacatagt

SEQ ID NO: 1623962 - DNA, 15 bp, Homo sapiens
gagggcaacatagtg

SEQ ID NO: 1623963 - DNA, 15 bp, Homo sapiens
agggcaacatagtga

SEQ ID NO: 1623964 - DNA, 15 bp, Homo sapiens
caacatagtgagact

SEQ ID NO: 1623965 - DNA, 15 bp, Homo sapiens
aacatagtgagactc

SEQ ID NO: 1623966 - DNA, 15 bp, Homo sapiens
acatagtgagactct

SEQ ID NO: 1623967 - DNA, 15 bp, Homo sapiens
catagtgagactcta

SEQ ID NO: 1623968 - DNA, 15 bp, Homo sapiens
atagtgagactctat

SEQ ID NO: 1623969 - DNA, 15 bp, Homo sapiens
tagtgagactctatc

SEQ ID NO: 1623970 - DNA, 15 bp, Homo sapiens
tgagactctatctct

SEQ ID NO: 1623971 - DNA, 15 bp, Homo sapiens
gagactctatctcta

SEQ ID NO: 1623972 - DNA, 15 bp, Homo sapiens
agactctatctctac

SEQ ID NO: 1623973 - DNA, 15 bp, Homo sapiens
gactctatctctaca

SEQ ID NO: 1623974 - DNA, 15 bp, Homo sapiens
actctatctctacaa

SEQ ID NO: 1623975 - DNA, 15 bp, Homo sapiens
ctctatctctacaaa

SEQ ID NO: 1623976 - DNA, 15 bp, Homo sapiens
tctatctctacaaaa

SEQ ID NO: 1623977 - DNA, 15 bp, Homo sapiens
ctctacaaaaaattc

SEQ ID NO: 1623978 - DNA, 15 bp, Homo sapiens
tctacaaaaaattct

SEQ ID NO: 1623979 - DNA, 15 bp, Homo sapiens
ctacaaaaaattctc

SEQ ID NO: 1623980 - DNA, 15 bp, Homo sapiens
tacaaaaaattctct

SEQ ID NO: 1623981 - DNA, 15 bp, Homo sapiens
acaaaaaattctcta

SEQ ID NO: 1623982 - DNA, 15 bp, Homo sapiens
caaaaaattctctat

SEQ ID NO: 1623983 - DNA, 15 bp, Homo sapiens
aaaaaattctctatc

SEQ ID NO: 1623984 - DNA, 15 bp, Homo sapiens
aaaaattctctatct

SEQ ID NO: 1623985 - DNA, 15 bp, Homo sapiens
aaaattctctatcta

SEQ ID NO: 1623986 - DNA, 15 bp, Homo sapiens
aaattctctatctat

SEQ ID NO: 1623987 - DNA, 15 bp, Homo sapiens
aattctctatctata

SEQ ID NO: 1623988 - DNA, 15 bp, Homo sapiens
attctctatctatat

SEQ ID NO: 1623989 - DNA, 15 bp, Homo sapiens
ttctctatctatatc

SEQ ID NO: 1623990 - DNA, 15 bp, Homo sapiens
tctctatctatatct

SEQ ID NO: 1623991 - DNA, 15 bp, Homo sapiens
ctctatctatatcta

SEQ ID NO: 1623992 - DNA, 15 bp, Homo sapiens
tctatctatatctat

SEQ ID NO: 1623993 - DNA, 15 bp, Homo sapiens
ctatctatatctata

SEQ ID NO: 1623994 - DNA, 15 bp, Homo sapiens
tatctatatctatat

SEQ ID NO: 1623995 - DNA, 15 bp, Homo sapiens
atctatatctatata

SEQ ID NO: 1623996 - DNA, 15 bp, Homo sapiens
tctatatctatataa

SEQ ID NO: 1623997 - DNA, 15 bp, Homo sapiens
ctatatctatataaa

SEQ ID NO: 1623998 - DNA, 15 bp, Homo sapiens
tatatctatataaag

SEQ ID NO: 1623999 - DNA, 15 bp, Homo sapiens
atatctatataaagg

SEQ ID NO: 1624000 - DNA, 15 bp, Homo sapiens
tatctatataaagga

SEQ ID NO: 1624001 - DNA, 15 bp, Homo sapiens
atctatataaaggaa

SEQ ID NO: 1624002 - DNA, 15 bp, Homo sapiens
tctatataaaggaat

SEQ ID NO: 1624003 - DNA, 15 bp, Homo sapiens
ctatataaaggaatt

SEQ ID NO: 1624004 - DNA, 15 bp, Homo sapiens
tatataaaggaattt

SEQ ID NO: 1624005 - DNA, 15 bp, Homo sapiens
atataaaggaatttt

SEQ ID NO: 1624006 - DNA, 15 bp, Homo sapiens
tataaaggaattttg

SEQ ID NO: 1624007 - DNA, 15 bp, Homo sapiens
ataaaggaattttgt

SEQ ID NO: 1624008 - DNA, 15 bp, Homo sapiens
taaaggaattttgtg

SEQ ID NO: 1624009 - DNA, 15 bp, Homo sapiens
aaaggaattttgtga

SEQ ID NO: 1624010 - DNA, 15 bp, Homo sapiens
aaggaattttgtgag

SEQ ID NO: 1624011 - DNA, 15 bp, Homo sapiens
aggaattttgtgagg

SEQ ID NO: 1624012 - DNA, 15 bp, Homo sapiens
ggaattttgtgagga

SEQ ID NO: 1624013 - DNA, 15 bp, Homo sapiens
gaattttgtgaggaa

SEQ ID NO: 1624014 - DNA, 15 bp, Homo sapiens
aattttgtgaggaaa

SEQ ID NO: 1624015 - DNA, 15 bp, Homo sapiens
attttgtgaggaaaa

SEQ ID NO: 1624016 - DNA, 15 bp, Homo sapiens
ttttgtgaggaaaac

SEQ ID NO: 1624017 - DNA, 15 bp, Homo sapiens
tttgtgaggaaaact

SEQ ID NO: 1624018 - DNA, 15 bp, Homo sapiens
ttgtgaggaaaacta

SEQ ID NO: 1624019 - DNA, 15 bp, Homo sapiens
tgtgaggaaaactat

SEQ ID NO: 1624020 - DNA, 15 bp, Homo sapiens
gtgaggaaaactata

SEQ ID NO: 1624021 - DNA, 15 bp, Homo sapiens
tgaggaaaactatat

SEQ ID NO: 1624022 - DNA, 15 bp, Homo sapiens
gaggaaaactatata

SEQ ID NO: 1624023 - DNA, 15 bp, Homo sapiens
aggaaaactatatat

SEQ ID NO: 1624024 - DNA, 15 bp, Homo sapiens
ggaaaactatatatt

SEQ ID NO: 1624025 - DNA, 15 bp, Homo sapiens
gaaaactatatattt

SEQ ID NO: 1624026 - DNA, 15 bp, Homo sapiens
aaaactatatatttt

SEQ ID NO: 1624027 - DNA, 15 bp, Homo sapiens
aaactatatattttg

SEQ ID NO: 1624028 - DNA, 15 bp, Homo sapiens
aactatatattttgt

SEQ ID NO: 1624029 - DNA, 15 bp, Homo sapiens
actatatattttgta

SEQ ID NO: 1624030 - DNA, 15 bp, Homo sapiens
ctatatattttgtat

SEQ ID NO: 1624031 - DNA, 15 bp, Homo sapiens
tatatattttgtata

SEQ ID NO: 1624032 - DNA, 15 bp, Homo sapiens
atatattttgtatat

SEQ ID NO: 1624033 - DNA, 15 bp, Homo sapiens
tatattttgtatata

SEQ ID NO: 1624034 - DNA, 15 bp, Homo sapiens
atattttgtatataa

SEQ ID NO: 1624035 - DNA, 15 bp, Homo sapiens
tattttgtatataaa

SEQ ID NO: 1624036 - DNA, 15 bp, Homo sapiens
attttgtatataaat

SEQ ID NO: 1624037 - DNA, 15 bp, Homo sapiens
ttttgtatataaatg

SEQ ID NO: 1624038 - DNA, 15 bp, Homo sapiens
tttgtatataaatga

SEQ ID NO: 1624039 - DNA, 15 bp, Homo sapiens
ttgtatataaatgaa

SEQ ID NO: 1624040 - DNA, 15 bp, Homo sapiens
tgtatataaatgaat

SEQ ID NO: 1624041 - DNA, 15 bp, Homo sapiens
gtatataaatgaatt

SEQ ID NO: 1624042 - DNA, 15 bp, Homo sapiens
tatataaatgaattt

SEQ ID NO: 1624043 - DNA, 15 bp, Homo sapiens
atataaatgaatttt

SEQ ID NO: 1624044 - DNA, 15 bp, Homo sapiens
tataaatgaatttta

SEQ ID NO: 1624045 - DNA, 15 bp, Homo sapiens
ataaatgaattttat

SEQ ID NO: 1624046 - DNA, 15 bp, Homo sapiens
taaatgaattttatc

SEQ ID NO: 1624047 - DNA, 15 bp, Homo sapiens
aaatgaattttatca

SEQ ID NO: 1624048 - DNA, 15 bp, Homo sapiens
aatgaattttatcag

SEQ ID NO: 1624049 - DNA, 15 bp, Homo sapiens
atgaattttatcagg

SEQ ID NO: 1624050 - DNA, 15 bp, Homo sapiens
tgaattttatcagga

SEQ ID NO: 1624051 - DNA, 15 bp, Homo sapiens
gaattttatcaggaa

SEQ ID NO: 1624052 - DNA, 15 bp, Homo sapiens
aattttatcaggaaa

SEQ ID NO: 1624053 - DNA, 15 bp, Homo sapiens
attttatcaggaaat

SEQ ID NO: 1624054 - DNA, 15 bp, Homo sapiens
ttttatcaggaaata

SEQ ID NO: 1624055 - DNA, 15 bp, Homo sapiens
tttatcaggaaatat

SEQ ID NO: 1624056 - DNA, 15 bp, Homo sapiens
ttatcaggaaatata

SEQ ID NO: 1624057 - DNA, 15 bp, Homo sapiens
tatcaggaaatatat

SEQ ID NO: 1624058 - DNA, 15 bp, Homo sapiens
atcaggaaatatatc

SEQ ID NO: 1624059 - DNA, 15 bp, Homo sapiens
tcaggaaatatatct

SEQ ID NO: 1624060 - DNA, 15 bp, Homo sapiens
caggaaatatatctg

SEQ ID NO: 1624061 - DNA, 15 bp, Homo sapiens
aggaaatatatctgt

SEQ ID NO: 1624062 - DNA, 15 bp, Homo sapiens
ggaaatatatctgta

SEQ ID NO: 1624063 - DNA, 15 bp, Homo sapiens
gaaatatatctgtaa

SEQ ID NO: 1624064 - DNA, 15 bp, Homo sapiens
aaatatatctgtaaa

SEQ ID NO: 1624065 - DNA, 15 bp, Homo sapiens
aatatatctgtaaat

SEQ ID NO: 1624066 - DNA, 15 bp, Homo sapiens
atatatctgtaaatg

SEQ ID NO: 1624067 - DNA, 15 bp, Homo sapiens
tatatctgtaaatga

SEQ ID NO: 1624068 - DNA, 15 bp, Homo sapiens
atatctgtaaatgaa

SEQ ID NO: 1624069 - DNA, 15 bp, Homo sapiens
tatctgtaaatgaat

SEQ ID NO: 1624070 - DNA, 15 bp, Homo sapiens
atctgtaaatgaatt

SEQ ID NO: 1624071 - DNA, 15 bp, Homo sapiens
tctgtaaatgaattt

SEQ ID NO: 1624072 - DNA, 15 bp, Homo sapiens
ctgtaaatgaatttt

SEQ ID NO: 1624073 - DNA, 15 bp, Homo sapiens
tgtaaatgaatttta

SEQ ID NO: 1624074 - DNA, 15 bp, Homo sapiens
gtaaatgaattttat

SEQ ID NO: 1624075 - DNA, 15 bp, Homo sapiens
taaatgaattttata

SEQ ID NO: 1624076 - DNA, 15 bp, Homo sapiens
aaatgaattttataa

SEQ ID NO: 1624077 - DNA, 15 bp, Homo sapiens
aatgaattttataaa

SEQ ID NO: 1624078 - DNA, 15 bp, Homo sapiens
atgaattttataaaa

SEQ ID NO: 1624079 - DNA, 15 bp, Homo sapiens
tgaattttataaaat

SEQ ID NO: 1624080 - DNA, 15 bp, Homo sapiens
gaattttataaaata

SEQ ID NO: 1624081 - DNA, 15 bp, Homo sapiens
aattttataaaatat

SEQ ID NO: 1624082 - DNA, 15 bp, Homo sapiens
attttataaaatata

SEQ ID NO: 1624083 - DNA, 15 bp, Homo sapiens
ttttataaaatatag

SEQ ID NO: 1624084 - DNA, 15 bp, Homo sapiens
tttataaaatatagc

SEQ ID NO: 1624085 - DNA, 15 bp, Homo sapiens
ttataaaatatagca

SEQ ID NO: 1624086 - DNA, 15 bp, Homo sapiens
tataaaatatagcat

SEQ ID NO: 1624087 - DNA, 15 bp, Homo sapiens
ataaaatatagcatc

SEQ ID NO: 1624088 - DNA, 15 bp, Homo sapiens
taaaatatagcatca

SEQ ID NO: 1624089 - DNA, 15 bp, Homo sapiens
aaaatatagcatcac

SEQ ID NO: 1624090 - DNA, 15 bp, Homo sapiens
aaatatagcatcact

SEQ ID NO: 1624091 - DNA, 15 bp, Homo sapiens
aatatagcatcactt

SEQ ID NO: 1624092 - DNA, 15 bp, Homo sapiens
atatagcatcacttt

SEQ ID NO: 1624093 - DNA, 15 bp, Homo sapiens
tatagcatcacttta

SEQ ID NO: 1624094 - DNA, 15 bp, Homo sapiens
atagcatcactttat

SEQ ID NO: 1624095 - DNA, 15 bp, Homo sapiens
tagcatcactttatc

SEQ ID NO: 1624096 - DNA, 15 bp, Homo sapiens
agcatcactttatcc

SEQ ID NO: 1624097 - DNA, 15 bp, Homo sapiens
gcatcactttatcct

SEQ ID NO: 1624098 - DNA, 15 bp, Homo sapiens
catcactttatcctt

SEQ ID NO: 1624099 - DNA, 15 bp, Homo sapiens
atcactttatccttg

SEQ ID NO: 1624100 - DNA, 15 bp, Homo sapiens
tcactttatccttga

SEQ ID NO: 1624101 - DNA, 15 bp, Homo sapiens
cactttatccttgat

SEQ ID NO: 1624102 - DNA, 15 bp, Homo sapiens
actttatccttgatt

SEQ ID NO: 1624103 - DNA, 15 bp, Homo sapiens
ctttatccttgattt

SEQ ID NO: 1624104 - DNA, 15 bp, Homo sapiens
tttatccttgattta

SEQ ID NO: 1624105 - DNA, 15 bp, Homo sapiens
ttatccttgatttat

SEQ ID NO: 1624106 - DNA, 15 bp, Homo sapiens
tatccttgatttatt

SEQ ID NO: 1624107 - DNA, 15 bp, Homo sapiens
atccttgatttattt

SEQ ID NO: 1624108 - DNA, 15 bp, Homo sapiens
tccttgatttatttc

SEQ ID NO: 1624109 - DNA, 15 bp, Homo sapiens
ccttgatttatttca

SEQ ID NO: 1624110 - DNA, 15 bp, Homo sapiens
cttgatttatttcat

SEQ ID NO: 1624111 - DNA, 15 bp, Homo sapiens
ttgatttatttcatt

SEQ ID NO: 1624112 - DNA, 15 bp, Homo sapiens
tgatttatttcattt

SEQ ID NO: 1624113 - DNA, 15 bp, Homo sapiens
gatttatttcattta

SEQ ID NO: 1624114 - DNA, 15 bp, Homo sapiens
atttatttcatttaa

SEQ ID NO: 1624115 - DNA, 15 bp, Homo sapiens
tatttcatttaataa

SEQ ID NO: 1624116 - DNA, 15 bp, Homo sapiens
atttcatttaataat

SEQ ID NO: 1624117 - DNA, 15 bp, Homo sapiens
tttcatttaataatt

SEQ ID NO: 1624118 - DNA, 15 bp, Homo sapiens
ttcatttaataatta

SEQ ID NO: 1624119 - DNA, 15 bp, Homo sapiens
tcatttaataattat

SEQ ID NO: 1624120 - DNA, 15 bp, Homo sapiens
catttaataattatt

SEQ ID NO: 1624121 - DNA, 15 bp, Homo sapiens
ttaataattatttta

SEQ ID NO: 1624122 - DNA, 15 bp, Homo sapiens
taataattattttaa

SEQ ID NO: 1624123 - DNA, 15 bp, Homo sapiens
aataattattttaaa

SEQ ID NO: 1624124 - DNA, 15 bp, Homo sapiens
ataattattttaaag

SEQ ID NO: 1624125 - DNA, 15 bp, Homo sapiens
taattattttaaagt

SEQ ID NO: 1624126 - DNA, 15 bp, Homo sapiens
aattattttaaagta

SEQ ID NO: 1624127 - DNA, 15 bp, Homo sapiens
attattttaaagtaa

SEQ ID NO: 1624128 - DNA, 15 bp, Homo sapiens
ttattttaaagtaat

SEQ ID NO: 1624129 - DNA, 15 bp, Homo sapiens
tattttaaagtaata

SEQ ID NO: 1624130 - DNA, 15 bp, Homo sapiens
attttaaagtaatat

SEQ ID NO: 1624131 - DNA, 15 bp, Homo sapiens
ttttaaagtaatata

SEQ ID NO: 1624132 - DNA, 15 bp, Homo sapiens
tttaaagtaatatac

SEQ ID NO: 1624133 - DNA, 15 bp, Homo sapiens
ttaaagtaatatact

SEQ ID NO: 1624134 - DNA, 15 bp, Homo sapiens
taaagtaatatacta

SEQ ID NO: 1624135 - DNA, 15 bp, Homo sapiens
aaagtaatatactaa

SEQ ID NO: 1624136 - DNA, 15 bp, Homo sapiens
aagtaatatactaat

SEQ ID NO: 1624137 - DNA, 15 bp, Homo sapiens
agtaatatactaata

SEQ ID NO: 1624138 - DNA, 15 bp, Homo sapiens
gtaatatactaataa

SEQ ID NO: 1624139 - DNA, 15 bp, Homo sapiens
taatatactaataaa

SEQ ID NO: 1624140 - DNA, 15 bp, Homo sapiens
aatatactaataaac

SEQ ID NO: 1624141 - DNA, 15 bp, Homo sapiens
atatactaataaact

SEQ ID NO: 1624142 - DNA, 15 bp, Homo sapiens
tatactaataaactc

SEQ ID NO: 1624143 - DNA, 15 bp, Homo sapiens
atactaataaactca

SEQ ID NO: 1624144 - DNA, 15 bp, Homo sapiens
tactaataaactcat

SEQ ID NO: 1624145 - DNA, 15 bp, Homo sapiens
actaataaactcatt

SEQ ID NO: 1624146 - DNA, 15 bp, Homo sapiens
ctaataaactcattt

SEQ ID NO: 1624147 - DNA, 15 bp, Homo sapiens
taataaactcatttt

SEQ ID NO: 1624148 - DNA, 15 bp, Homo sapiens
aataaactcatttta

SEQ ID NO: 1624149 - DNA, 15 bp, Homo sapiens
ataaactcattttaa

SEQ ID NO: 1624150 - DNA, 15 bp, Homo sapiens
taaactcattttaaa

SEQ ID NO: 1624151 - DNA, 15 bp, Homo sapiens
aaactcattttaaaa

SEQ ID NO: 1624152 - DNA, 15 bp, Homo sapiens
aactcattttaaaaa

SEQ ID NO: 1624153 - DNA, 15 bp, Homo sapiens
actcattttaaaaac

SEQ ID NO: 1624154 - DNA, 15 bp, Homo sapiens
ctcattttaaaaact

SEQ ID NO: 1624155 - DNA, 15 bp, Homo sapiens
tcattttaaaaactg

SEQ ID NO: 1624156 - DNA, 15 bp, Homo sapiens
cattttaaaaactgc

SEQ ID NO: 1624157 - DNA, 15 bp, Homo sapiens
attttaaaaactgct

SEQ ID NO: 1624158 - DNA, 15 bp, Homo sapiens
ttttaaaaactgcta

SEQ ID NO: 1624159 - DNA, 15 bp, Homo sapiens
tttaaaaactgctat

SEQ ID NO: 1624160 - DNA, 15 bp, Homo sapiens
ttaaaaactgctatg

SEQ ID NO: 1624161 - DNA, 15 bp, Homo sapiens
taaaaactgctatga

SEQ ID NO: 1624162 - DNA, 15 bp, Homo sapiens
aaaaactgctatgac

SEQ ID NO: 1624163 - DNA, 15 bp, Homo sapiens
aaaactgctatgacc

SEQ ID NO: 1624164 - DNA, 15 bp, Homo sapiens
aaactgctatgacca

SEQ ID NO: 1624165 - DNA, 15 bp, Homo sapiens
aactgctatgaccat

SEQ ID NO: 1624166 - DNA, 15 bp, Homo sapiens
actgctatgaccata

SEQ ID NO: 1624167 - DNA, 15 bp, Homo sapiens
ctgctatgaccataa

SEQ ID NO: 1624168 - DNA, 15 bp, Homo sapiens
tgctatgaccataaa

SEQ ID NO: 1624169 - DNA, 15 bp, Homo sapiens
gctatgaccataaaa

SEQ ID NO: 1624170 - DNA, 15 bp, Homo sapiens
ctatgaccataaaac

SEQ ID NO: 1624171 - DNA, 15 bp, Homo sapiens
tatgaccataaaact

SEQ ID NO: 1624172 - DNA, 15 bp, Homo sapiens
atgaccataaaacta

SEQ ID NO: 1624173 - DNA, 15 bp, Homo sapiens
tgaccataaaactat

SEQ ID NO: 1624174 - DNA, 15 bp, Homo sapiens
gaccataaaactatt

SEQ ID NO: 1624175 - DNA, 15 bp, Homo sapiens
accataaaactatta

SEQ ID NO: 1624176 - DNA, 15 bp, Homo sapiens
ccataaaactattag

SEQ ID NO: 1624177 - DNA, 15 bp, Homo sapiens
cataaaactattaga

SEQ ID NO: 1624178 - DNA, 15 bp, Homo sapiens
ataaaactattagag

SEQ ID NO: 1624179 - DNA, 15 bp, Homo sapiens
taaaactattagaga

SEQ ID NO: 1624180 - DNA, 15 bp, Homo sapiens
aaaactattagagat

SEQ ID NO: 1624181 - DNA, 15 bp, Homo sapiens
aaactattagagata

SEQ ID NO: 1624182 - DNA, 15 bp, Homo sapiens
aactattagagataa

SEQ ID NO: 1624183 - DNA, 15 bp, Homo sapiens
actattagagataac

SEQ ID NO: 1624184 - DNA, 15 bp, Homo sapiens
ctattagagataaca

SEQ ID NO: 1624185 - DNA, 15 bp, Homo sapiens
tattagagataacat

SEQ ID NO: 1624186 - DNA, 15 bp, Homo sapiens
attagagataacata

SEQ ID NO: 1624187 - DNA, 15 bp, Homo sapiens
ttagagataacataa

SEQ ID NO: 1624188 - DNA, 15 bp, Homo sapiens
tagagataacataag

SEQ ID NO: 1624189 - DNA, 15 bp, Homo sapiens
agagataacataaga

SEQ ID NO: 1624190 - DNA, 15 bp, Homo sapiens
gagataacataagag

SEQ ID NO: 1624191 - DNA, 15 bp, Homo sapiens
agataacataagaga

SEQ ID NO: 1624192 - DNA, 15 bp, Homo sapiens
gataacataagagaa

SEQ ID NO: 1624193 - DNA, 15 bp, Homo sapiens
ataacataagagaaa

SEQ ID NO: 1624194 - DNA, 15 bp, Homo sapiens
taacataagagaaaa

SEQ ID NO: 1624195 - DNA, 15 bp, Homo sapiens
aacataagagaaaat

SEQ ID NO: 1624196 - DNA, 15 bp, Homo sapiens
acataagagaaaatc

SEQ ID NO: 1624197 - DNA, 15 bp, Homo sapiens
cataagagaaaatct

SEQ ID NO: 1624198 - DNA, 15 bp, Homo sapiens
ataagagaaaatcta

SEQ ID NO: 1624199 - DNA, 15 bp, Homo sapiens
taagagaaaatctag

SEQ ID NO: 1624200 - DNA, 15 bp, Homo sapiens
aagagaaaatctagg

SEQ ID NO: 1624201 - DNA, 15 bp, Homo sapiens
agagaaaatctaggt

SEQ ID NO: 1624202 - DNA, 15 bp, Homo sapiens
gagaaaatctaggtg

SEQ ID NO: 1624203 - DNA, 15 bp, Homo sapiens
agaaaatctaggtga

SEQ ID NO: 1624204 - DNA, 15 bp, Homo sapiens
gaaaatctaggtgac

SEQ ID NO: 1624205 - DNA, 15 bp, Homo sapiens
aaaatctaggtgacc

SEQ ID NO: 1624206 - DNA, 15 bp, Homo sapiens
aaatctaggtgacct

SEQ ID NO: 1624207 - DNA, 15 bp, Homo sapiens
aatctaggtgacctt

SEQ ID NO: 1624208 - DNA, 15 bp, Homo sapiens
atctaggtgaccttg

SEQ ID NO: 1624209 - DNA, 15 bp, Homo sapiens
tctaggtgaccttgg

SEQ ID NO: 1624210 - DNA, 15 bp, Homo sapiens
ctaggtgaccttggg

SEQ ID NO: 1624211 - DNA, 15 bp, Homo sapiens
taggtgaccttgggt

SEQ ID NO: 1624212 - DNA, 15 bp, Homo sapiens
aggtgaccttgggtt

SEQ ID NO: 1624213 - DNA, 15 bp, Homo sapiens
ggtgaccttgggttt

SEQ ID NO: 1624214 - DNA, 15 bp, Homo sapiens
gtgaccttgggtttg

SEQ ID NO: 1624215 - DNA, 15 bp, Homo sapiens
tgaccttgggtttgg

SEQ ID NO: 1624216 - DNA, 15 bp, Homo sapiens
gaccttgggtttgga

SEQ ID NO: 1624217 - DNA, 15 bp, Homo sapiens
accttgggtttggag

SEQ ID NO: 1624218 - DNA, 15 bp, Homo sapiens
ccttgggtttggaga

SEQ ID NO: 1624219 - DNA, 15 bp, Homo sapiens
cttgggtttggagat

SEQ ID NO: 1624220 - DNA, 15 bp, Homo sapiens
ttgggtttggagata

SEQ ID NO: 1624221 - DNA, 15 bp, Homo sapiens
tgggtttggagataa

SEQ ID NO: 1624222 - DNA, 15 bp, Homo sapiens
gggtttggagataac

SEQ ID NO: 1624223 - DNA, 15 bp, Homo sapiens
ggtttggagataact

SEQ ID NO: 1624224 - DNA, 15 bp, Homo sapiens
gtttggagataactt

SEQ ID NO: 1624225 - DNA, 15 bp, Homo sapiens
tttggagataacttt

SEQ ID NO: 1624226 - DNA, 15 bp, Homo sapiens
ttggagataactttt

SEQ ID NO: 1624227 - DNA, 15 bp, Homo sapiens
tggagataacttttt

SEQ ID NO: 1624228 - DNA, 15 bp, Homo sapiens
ggagataacttttta

SEQ ID NO: 1624229 - DNA, 15 bp, Homo sapiens
gagataactttttat

SEQ ID NO: 1624230 - DNA, 15 bp, Homo sapiens
agataactttttata

SEQ ID NO: 1624231 - DNA, 15 bp, Homo sapiens
gataactttttatat

SEQ ID NO: 1624232 - DNA, 15 bp, Homo sapiens
ataactttttatata

SEQ ID NO: 1624233 - DNA, 15 bp, Homo sapiens
taactttttatatat

SEQ ID NO: 1624234 - DNA, 15 bp, Homo sapiens
aactttttatatata

SEQ ID NO: 1624235 - DNA, 15 bp, Homo sapiens
actttttatatataa

SEQ ID NO: 1624236 - DNA, 15 bp, Homo sapiens
ctttttatatataac

SEQ ID NO: 1624237 - DNA, 15 bp, Homo sapiens
tttttatatataaca

SEQ ID NO: 1624238 - DNA, 15 bp, Homo sapiens
ttttatatataacac

SEQ ID NO: 1624239 - DNA, 15 bp, Homo sapiens
tttatatataacacc

SEQ ID NO: 1624240 - DNA, 15 bp, Homo sapiens
ttatatataacacca

SEQ ID NO: 1624241 - DNA, 15 bp, Homo sapiens
tatatataacaccaa

SEQ ID NO: 1624242 - DNA, 15 bp, Homo sapiens
atatataacaccaaa

SEQ ID NO: 1624243 - DNA, 15 bp, Homo sapiens
tatataacaccaaag

SEQ ID NO: 1624244 - DNA, 15 bp, Homo sapiens
atataacaccaaagg

SEQ ID NO: 1624245 - DNA, 15 bp, Homo sapiens
tataacaccaaaggc

SEQ ID NO: 1624246 - DNA, 15 bp, Homo sapiens
ataacaccaaaggcg

SEQ ID NO: 1624247 - DNA, 15 bp, Homo sapiens
taacaccaaaggcgc

SEQ ID NO: 1624248 - DNA, 15 bp, Homo sapiens
aacaccaaaggcgca

SEQ ID NO: 1624249 - DNA, 15 bp, Homo sapiens
acaccaaaggcgcaa

SEQ ID NO: 1624250 - DNA, 15 bp, Homo sapiens
caccaaaggcgcaat

SEQ ID NO: 1624251 - DNA, 15 bp, Homo sapiens
accaaaggcgcaatc

SEQ ID NO: 1624252 - DNA, 15 bp, Homo sapiens
ccaaaggcgcaatca

SEQ ID NO: 1624253 - DNA, 15 bp, Homo sapiens
caaaggcgcaatcaa

SEQ ID NO: 1624254 - DNA, 15 bp, Homo sapiens
aaaggcgcaatcaat

SEQ ID NO: 1624255 - DNA, 15 bp, Homo sapiens
aaggcgcaatcaatg

SEQ ID NO: 1624256 - DNA, 15 bp, Homo sapiens
aggcgcaatcaatga

SEQ ID NO: 1624257 - DNA, 15 bp, Homo sapiens
ggcgcaatcaatgaa

SEQ ID NO: 1624258 - DNA, 15 bp, Homo sapiens
gcgcaatcaatgaaa

SEQ ID NO: 1624259 - DNA, 15 bp, Homo sapiens
cgcaatcaatgaaaa

SEQ ID NO: 1624260 - DNA, 15 bp, Homo sapiens
gcaatcaatgaaaaa

SEQ ID NO: 1624261 - DNA, 15 bp, Homo sapiens
caatcaatgaaaaaa

SEQ ID NO: 1624262 - DNA, 15 bp, Homo sapiens
aatcaatgaaaaaaa

SEQ ID NO: 1624263 - DNA, 15 bp, Homo sapiens
atcaatgaaaaaaaa

SEQ ID NO: 1624264 - DNA, 15 bp, Homo sapiens
tcaatgaaaaaaaat

SEQ ID NO: 1624265 - DNA, 15 bp, Homo sapiens
caatgaaaaaaaatg

SEQ ID NO: 1624266 - DNA, 15 bp, Homo sapiens
aatgaaaaaaaatga

SEQ ID NO: 1624267 - DNA, 15 bp, Homo sapiens
atgaaaaaaaatgac

SEQ ID NO: 1624268 - DNA, 15 bp, Homo sapiens
tgaaaaaaaatgaca

SEQ ID NO: 1624269 - DNA, 15 bp, Homo sapiens
gaaaaaaaatgacaa

SEQ ID NO: 1624270 - DNA, 15 bp, Homo sapiens
aaaaaaaatgacaag

SEQ ID NO: 1624271 - DNA, 15 bp, Homo sapiens
aaaaaaatgacaagc

SEQ ID NO: 1624272 - DNA, 15 bp, Homo sapiens
aaaaaatgacaagct

SEQ ID NO: 1624273 - DNA, 15 bp, Homo sapiens
aaaaatgacaagctc

SEQ ID NO: 1624274 - DNA, 15 bp, Homo sapiens
aaaatgacaagctct

SEQ ID NO: 1624275 - DNA, 15 bp, Homo sapiens
aaatgacaagctcta

SEQ ID NO: 1624276 - DNA, 15 bp, Homo sapiens
aatgacaagctctat

SEQ ID NO: 1624277 - DNA, 15 bp, Homo sapiens
atgacaagctctata

SEQ ID NO: 1624278 - DNA, 15 bp, Homo sapiens
tgacaagctctatat

SEQ ID NO: 1624279 - DNA, 15 bp, Homo sapiens
gacaagctctatatc

SEQ ID NO: 1624280 - DNA, 15 bp, Homo sapiens
acaagctctatatca

SEQ ID NO: 1624281 - DNA, 15 bp, Homo sapiens
caagctctatatcac

SEQ ID NO: 1624282 - DNA, 15 bp, Homo sapiens
aagctctatatcaca

SEQ ID NO: 1624283 - DNA, 15 bp, Homo sapiens
agctctatatcacat

SEQ ID NO: 1624284 - DNA, 15 bp, Homo sapiens
gctctatatcacata

SEQ ID NO: 1624285 - DNA, 15 bp, Homo sapiens
ctctatatcacatat

SEQ ID NO: 1624286 - DNA, 15 bp, Homo sapiens
tctatatcacatatc

SEQ ID NO: 1624287 - DNA, 15 bp, Homo sapiens
ctatatcacatatca

SEQ ID NO: 1624288 - DNA, 15 bp, Homo sapiens
tatatcacatatcaa

SEQ ID NO: 1624289 - DNA, 15 bp, Homo sapiens
atatcacatatcaat

SEQ ID NO: 1624290 - DNA, 15 bp, Homo sapiens
tatcacatatcaata

SEQ ID NO: 1624291 - DNA, 15 bp, Homo sapiens
atcacatatcaatat

SEQ ID NO: 1624292 - DNA, 15 bp, Homo sapiens
tcacatatcaatatt

SEQ ID NO: 1624293 - DNA, 15 bp, Homo sapiens
cacatatcaatatta

SEQ ID NO: 1624294 - DNA, 15 bp, Homo sapiens
acatatcaatattaa

SEQ ID NO: 1624295 - DNA, 15 bp, Homo sapiens
catatcaatattaaa

SEQ ID NO: 1624296 - DNA, 15 bp, Homo sapiens
atatcaatattaaaa

SEQ ID NO: 1624297 - DNA, 15 bp, Homo sapiens
tatcaatattaaaat

SEQ ID NO: 1624298 - DNA, 15 bp, Homo sapiens
atcaatattaaaatg

SEQ ID NO: 1624299 - DNA, 15 bp, Homo sapiens
tcaatattaaaatgt

SEQ ID NO: 1624300 - DNA, 15 bp, Homo sapiens
caatattaaaatgtg

SEQ ID NO: 1624301 - DNA, 15 bp, Homo sapiens
aatattaaaatgtga

SEQ ID NO: 1624302 - DNA, 15 bp, Homo sapiens
atattaaaatgtgat

SEQ ID NO: 1624303 - DNA, 15 bp, Homo sapiens
tattaaaatgtgatc

SEQ ID NO: 1624304 - DNA, 15 bp, Homo sapiens
attaaaatgtgatct

SEQ ID NO: 1624305 - DNA, 15 bp, Homo sapiens
ttaaaatgtgatctg

SEQ ID NO: 1624306 - DNA, 15 bp, Homo sapiens
taaaatgtgatctgt

SEQ ID NO: 1624307 - DNA, 15 bp, Homo sapiens
aaaatgtgatctgtg

SEQ ID NO: 1624308 - DNA, 15 bp, Homo sapiens
aaatgtgatctgtga

SEQ ID NO: 1624309 - DNA, 15 bp, Homo sapiens
aatgtgatctgtgaa

SEQ ID NO: 1624310 - DNA, 15 bp, Homo sapiens
atgtgatctgtgaaa

SEQ ID NO: 1624311 - DNA, 15 bp, Homo sapiens
tgtgatctgtgaaag

SEQ ID NO: 1624312 - DNA, 15 bp, Homo sapiens
gtgatctgtgaaagg

SEQ ID NO: 1624313 - DNA, 15 bp, Homo sapiens
tgatctgtgaaaggc

SEQ ID NO: 1624314 - DNA, 15 bp, Homo sapiens
gatctgtgaaaggca

SEQ ID NO: 1624315 - DNA, 15 bp, Homo sapiens
atctgtgaaaggcat

SEQ ID NO: 1624316 - DNA, 15 bp, Homo sapiens
tctgtgaaaggcatc

SEQ ID NO: 1624317 - DNA, 15 bp, Homo sapiens
ctgtgaaaggcatcg

SEQ ID NO: 1624318 - DNA, 15 bp, Homo sapiens
tgtgaaaggcatcgt

SEQ ID NO: 1624319 - DNA, 15 bp, Homo sapiens
gtgaaaggcatcgtc

SEQ ID NO: 1624320 - DNA, 15 bp, Homo sapiens
tgaaaggcatcgtca

SEQ ID NO: 1624321 - DNA, 15 bp, Homo sapiens
gaaaggcatcgtcaa

SEQ ID NO: 1624322 - DNA, 15 bp, Homo sapiens
aaaggcatcgtcaag

SEQ ID NO: 1624323 - DNA, 15 bp, Homo sapiens
aaggcatcgtcaaga

SEQ ID NO: 1624324 - DNA, 15 bp, Homo sapiens
aggcatcgtcaagag

SEQ ID NO: 1624325 - DNA, 15 bp, Homo sapiens
ggcatcgtcaagaga

SEQ ID NO: 1624326 - DNA, 15 bp, Homo sapiens
gcatcgtcaagagaa

SEQ ID NO: 1624327 - DNA, 15 bp, Homo sapiens
catcgtcaagagaac

SEQ ID NO: 1624328 - DNA, 15 bp, Homo sapiens
atcgtcaagagaaca

SEQ ID NO: 1624329 - DNA, 15 bp, Homo sapiens
tcgtcaagagaacaa

SEQ ID NO: 1624330 - DNA, 15 bp, Homo sapiens
cgtcaagagaacaaa

SEQ ID NO: 1624331 - DNA, 15 bp, Homo sapiens
gtcaagagaacaaaa

SEQ ID NO: 1624332 - DNA, 15 bp, Homo sapiens
tcaagagaacaaaaa

SEQ ID NO: 1624333 - DNA, 15 bp, Homo sapiens
caagagaacaaaaag

SEQ ID NO: 1624334 - DNA, 15 bp, Homo sapiens
aagagaacaaaaaga

SEQ ID NO: 1624335 - DNA, 15 bp, Homo sapiens
agagaacaaaaagac

SEQ ID NO: 1624336 - DNA, 15 bp, Homo sapiens
gagaacaaaaagaca

SEQ ID NO: 1624337 - DNA, 15 bp, Homo sapiens
agaacaaaaagacaa

SEQ ID NO: 1624338 - DNA, 15 bp, Homo sapiens
gaacaaaaagacaag

SEQ ID NO: 1624339 - DNA, 15 bp, Homo sapiens
aacaaaaagacaagc

SEQ ID NO: 1624340 - DNA, 15 bp, Homo sapiens
acaaaaagacaagcc

SEQ ID NO: 1624341 - DNA, 15 bp, Homo sapiens
caaaaagacaagcca

SEQ ID NO: 1624342 - DNA, 15 bp, Homo sapiens
aaaaagacaagccac

SEQ ID NO: 1624343 - DNA, 15 bp, Homo sapiens
aaagacaagccacag

SEQ ID NO: 1624344 - DNA, 15 bp, Homo sapiens
aagacaagccacaga

SEQ ID NO: 1624345 - DNA, 15 bp, Homo sapiens
agacaagccacagac

SEQ ID NO: 1624346 - DNA, 15 bp, Homo sapiens
gacaagccacagact

SEQ ID NO: 1624347 - DNA, 15 bp, Homo sapiens
acaagccacagactg

SEQ ID NO: 1624348 - DNA, 15 bp, Homo sapiens
caagccacagactgg

SEQ ID NO: 1624349 - DNA, 15 bp, Homo sapiens
aagccacagactggg

SEQ ID NO: 1624350 - DNA, 15 bp, Homo sapiens
agccacagactggga

SEQ ID NO: 1624351 - DNA, 15 bp, Homo sapiens
gccacagactgggag

SEQ ID NO: 1624352 - DNA, 15 bp, Homo sapiens
ccacagactgggaga

SEQ ID NO: 1624353 - DNA, 15 bp, Homo sapiens
cacagactgggagaa

SEQ ID NO: 1624354 - DNA, 15 bp, Homo sapiens
acagactgggagaaa

SEQ ID NO: 1624355 - DNA, 15 bp, Homo sapiens
cagactgggagaaaa

SEQ ID NO: 1624356 - DNA, 15 bp, Homo sapiens
agactgggagaaaat

SEQ ID NO: 1624357 - DNA, 15 bp, Homo sapiens
gactgggagaaaata

SEQ ID NO: 1624358 - DNA, 15 bp, Homo sapiens
tgcaaaagacatatg

SEQ ID NO: 1624359 - DNA, 15 bp, Homo sapiens
gcaaaagacatatgt

SEQ ID NO: 1624360 - DNA, 15 bp, Homo sapiens
caaaagacatatgtg

SEQ ID NO: 1624361 - DNA, 15 bp, Homo sapiens
aaaagacatatgtga

SEQ ID NO: 1624362 - DNA, 15 bp, Homo sapiens
aaagacatatgtgat

SEQ ID NO: 1624363 - DNA, 15 bp, Homo sapiens
aagacatatgtgata

SEQ ID NO: 1624364 - DNA, 15 bp, Homo sapiens
agacatatgtgataa

SEQ ID NO: 1624365 - DNA, 15 bp, Homo sapiens
gacatatgtgataaa

SEQ ID NO: 1624366 - DNA, 15 bp, Homo sapiens
acatatgtgataaaa

SEQ ID NO: 1624367 - DNA, 15 bp, Homo sapiens
catatgtgataaaag

SEQ ID NO: 1624368 - DNA, 15 bp, Homo sapiens
atatgtgataaaaga

SEQ ID NO: 1624369 - DNA, 15 bp, Homo sapiens
tatgtgataaaagac

SEQ ID NO: 1624370 - DNA, 15 bp, Homo sapiens
atgtgataaaagaca

SEQ ID NO: 1624371 - DNA, 15 bp, Homo sapiens
tgtgataaaagacaa

SEQ ID NO: 1624372 - DNA, 15 bp, Homo sapiens
gtgataaaagacaat

SEQ ID NO: 1624373 - DNA, 15 bp, Homo sapiens
tgataaaagacaatt

SEQ ID NO: 1624374 - DNA, 15 bp, Homo sapiens
gataaaagacaatta

SEQ ID NO: 1624375 - DNA, 15 bp, Homo sapiens
ataaaagacaattat

SEQ ID NO: 1624376 - DNA, 15 bp, Homo sapiens
taaaagacaattatc

SEQ ID NO: 1624377 - DNA, 15 bp, Homo sapiens
aaaagacaattatca

SEQ ID NO: 1624378 - DNA, 15 bp, Homo sapiens
aaagacaattatcaa

SEQ ID NO: 1624379 - DNA, 15 bp, Homo sapiens
aagacaattatcaaa

SEQ ID NO: 1624380 - DNA, 15 bp, Homo sapiens
agacaattatcaaaa

SEQ ID NO: 1624381 - DNA, 15 bp, Homo sapiens
gacaattatcaaaat

SEQ ID NO: 1624382 - DNA, 15 bp, Homo sapiens
acaattatcaaaata

SEQ ID NO: 1624383 - DNA, 15 bp, Homo sapiens
caattatcaaaatat

SEQ ID NO: 1624384 - DNA, 15 bp, Homo sapiens
aattatcaaaatata

SEQ ID NO: 1624385 - DNA, 15 bp, Homo sapiens
attatcaaaatatac

SEQ ID NO: 1624386 - DNA, 15 bp, Homo sapiens
ttatcaaaatataca

SEQ ID NO: 1624387 - DNA, 15 bp, Homo sapiens
tatcaaaatatacaa

SEQ ID NO: 1624388 - DNA, 15 bp, Homo sapiens
atcaaaatatacaaa

SEQ ID NO: 1624389 - DNA, 15 bp, Homo sapiens
tcaaaatatacaaat

SEQ ID NO: 1624390 - DNA, 15 bp, Homo sapiens
caaaatatacaaata

SEQ ID NO: 1624391 - DNA, 15 bp, Homo sapiens
aaaatatacaaataa

SEQ ID NO: 1624392 - DNA, 15 bp, Homo sapiens
aaatatacaaataat

SEQ ID NO: 1624393 - DNA, 15 bp, Homo sapiens
aatatacaaataatt

SEQ ID NO: 1624394 - DNA, 15 bp, Homo sapiens
atatacaaataattc

SEQ ID NO: 1624395 - DNA, 15 bp, Homo sapiens
tatacaaataattct

SEQ ID NO: 1624396 - DNA, 15 bp, Homo sapiens
atacaaataattctt

SEQ ID NO: 1624397 - DNA, 15 bp, Homo sapiens
tacaaataattctta

SEQ ID NO: 1624398 - DNA, 15 bp, Homo sapiens
acaaataattcttaa

SEQ ID NO: 1624399 - DNA, 15 bp, Homo sapiens
caaataattcttaaa

SEQ ID NO: 1624400 - DNA, 15 bp, Homo sapiens
aaataattcttaaaa

SEQ ID NO: 1624401 - DNA, 15 bp, Homo sapiens
aataattcttaaaac

SEQ ID NO: 1624402 - DNA, 15 bp, Homo sapiens
ataattcttaaaact

SEQ ID NO: 1624403 - DNA, 15 bp, Homo sapiens
taattcttaaaactc

SEQ ID NO: 1624404 - DNA, 15 bp, Homo sapiens
aattcttaaaactca

SEQ ID NO: 1624405 - DNA, 15 bp, Homo sapiens
attcttaaaactcaa

SEQ ID NO: 1624406 - DNA, 15 bp, Homo sapiens
ttcttaaaactcaaa

SEQ ID NO: 1624407 - DNA, 15 bp, Homo sapiens
tcttaaaactcaaaa

SEQ ID NO: 1624408 - DNA, 15 bp, Homo sapiens
cttaaaactcaaaaa

SEQ ID NO: 1624409 - DNA, 15 bp, Homo sapiens
ttaaaactcaaaaat

SEQ ID NO: 1624410 - DNA, 15 bp, Homo sapiens
taaaactcaaaaata

SEQ ID NO: 1624411 - DNA, 15 bp, Homo sapiens
aaaactcaaaaataa

SEQ ID NO: 1624412 - DNA, 15 bp, Homo sapiens
aaactcaaaaataag

SEQ ID NO: 1624413 - DNA, 15 bp, Homo sapiens
aactcaaaaataaga

SEQ ID NO: 1624414 - DNA, 15 bp, Homo sapiens
actcaaaaataagaa

SEQ ID NO: 1624415 - DNA, 15 bp, Homo sapiens
ctcaaaaataagaaa

SEQ ID NO: 1624416 - DNA, 15 bp, Homo sapiens
tcaaaaataagaaaa

SEQ ID NO: 1624417 - DNA, 15 bp, Homo sapiens
caaaaataagaaaat

SEQ ID NO: 1624418 - DNA, 15 bp, Homo sapiens
aaaaataagaaaatg

SEQ ID NO: 1624419 - DNA, 15 bp, Homo sapiens
aaaataagaaaatga

SEQ ID NO: 1624420 - DNA, 15 bp, Homo sapiens
aaataagaaaatgaa

SEQ ID NO: 1624421 - DNA, 15 bp, Homo sapiens
aataagaaaatgaac

SEQ ID NO: 1624422 - DNA, 15 bp, Homo sapiens
ataagaaaatgaaca

SEQ ID NO: 1624423 - DNA, 15 bp, Homo sapiens
taagaaaatgaacaa

SEQ ID NO: 1624424 - DNA, 15 bp, Homo sapiens
aagaaaatgaacaac

SEQ ID NO: 1624425 - DNA, 15 bp, Homo sapiens
agaaaatgaacaact

SEQ ID NO: 1624426 - DNA, 15 bp, Homo sapiens
gaaaatgaacaactc

SEQ ID NO: 1624427 - DNA, 15 bp, Homo sapiens
aaaatgaacaactca

SEQ ID NO: 1624428 - DNA, 15 bp, Homo sapiens
aaatgaacaactcag

SEQ ID NO: 1624429 - DNA, 15 bp, Homo sapiens
aatgaacaactcagt

SEQ ID NO: 1624430 - DNA, 15 bp, Homo sapiens
atgaacaactcagtt

SEQ ID NO: 1624431 - DNA, 15 bp, Homo sapiens
tgaacaactcagtta

SEQ ID NO: 1624432 - DNA, 15 bp, Homo sapiens
gaacaactcagttaa

SEQ ID NO: 1624433 - DNA, 15 bp, Homo sapiens
aacaactcagttaaa

SEQ ID NO: 1624434 - DNA, 15 bp, Homo sapiens
acaactcagttaaat

SEQ ID NO: 1624435 - DNA, 15 bp, Homo sapiens
caactcagttaaata

SEQ ID NO: 1624436 - DNA, 15 bp, Homo sapiens
aactcagttaaataa

SEQ ID NO: 1624437 - DNA, 15 bp, Homo sapiens
actcagttaaataat

SEQ ID NO: 1624438 - DNA, 15 bp, Homo sapiens
ctcagttaaataatg

SEQ ID NO: 1624439 - DNA, 15 bp, Homo sapiens
tcagttaaataatgg

SEQ ID NO: 1624440 - DNA, 15 bp, Homo sapiens
cagttaaataatggg

SEQ ID NO: 1624441 - DNA, 15 bp, Homo sapiens
agttaaataatgggc

SEQ ID NO: 1624442 - DNA, 15 bp, Homo sapiens
gttaaataatgggca

SEQ ID NO: 1624443 - DNA, 15 bp, Homo sapiens
ttaaataatgggcaa

SEQ ID NO: 1624444 - DNA, 15 bp, Homo sapiens
taaataatgggcaaa

SEQ ID NO: 1624445 - DNA, 15 bp, Homo sapiens
aaataatgggcaaaa

SEQ ID NO: 1624446 - DNA, 15 bp, Homo sapiens
aataatgggcaaaag

SEQ ID NO: 1624447 - DNA, 15 bp, Homo sapiens
ataatgggcaaaaga

SEQ ID NO: 1624448 - DNA, 15 bp, Homo sapiens
taatgggcaaaagat

SEQ ID NO: 1624449 - DNA, 15 bp, Homo sapiens
aatgggcaaaagatc

SEQ ID NO: 1624450 - DNA, 15 bp, Homo sapiens
atgggcaaaagatct

SEQ ID NO: 1624451 - DNA, 15 bp, Homo sapiens
tgggcaaaagatctc

SEQ ID NO: 1624452 - DNA, 15 bp, Homo sapiens
gggcaaaagatctca

SEQ ID NO: 1624453 - DNA, 15 bp, Homo sapiens
ggcaaaagatctcaa

SEQ ID NO: 1624454 - DNA, 15 bp, Homo sapiens
gcaaaagatctcaac

SEQ ID NO: 1624455 - DNA, 15 bp, Homo sapiens
caaaagatctcaaca

SEQ ID NO: 1624456 - DNA, 15 bp, Homo sapiens
aaaagatctcaacag

SEQ ID NO: 1624457 - DNA, 15 bp, Homo sapiens
aaagatctcaacaga

SEQ ID NO: 1624458 - DNA, 15 bp, Homo sapiens
aagatctcaacagaa

SEQ ID NO: 1624459 - DNA, 15 bp, Homo sapiens
agatctcaacagaaa

SEQ ID NO: 1624460 - DNA, 15 bp, Homo sapiens
gatctcaacagaaac

SEQ ID NO: 1624461 - DNA, 15 bp, Homo sapiens
atctcaacagaaacc

SEQ ID NO: 1624462 - DNA, 15 bp, Homo sapiens
tctcaacagaaaccc

SEQ ID NO: 1624463 - DNA, 15 bp, Homo sapiens
ctcaacagaaacccc

SEQ ID NO: 1624464 - DNA, 15 bp, Homo sapiens
tcaacagaaacccca

SEQ ID NO: 1624465 - DNA, 15 bp, Homo sapiens
caacagaaaccccat

SEQ ID NO: 1624466 - DNA, 15 bp, Homo sapiens
aacagaaaccccatc

SEQ ID NO: 1624467 - DNA, 15 bp, Homo sapiens
acagaaaccccatca

SEQ ID NO: 1624468 - DNA, 15 bp, Homo sapiens
cagaaaccccatcaa

SEQ ID NO: 1624469 - DNA, 15 bp, Homo sapiens
agaaaccccatcaaa

SEQ ID NO: 1624470 - DNA, 15 bp, Homo sapiens
gaaaccccatcaaag

SEQ ID NO: 1624471 - DNA, 15 bp, Homo sapiens
aaaccccatcaaaga

SEQ ID NO: 1624472 - DNA, 15 bp, Homo sapiens
aaccccatcaaagaa

SEQ ID NO: 1624473 - DNA, 15 bp, Homo sapiens
accccatcaaagaag

SEQ ID NO: 1624474 - DNA, 15 bp, Homo sapiens
ccccatcaaagaaga

SEQ ID NO: 1624475 - DNA, 15 bp, Homo sapiens
cccatcaaagaagaa

SEQ ID NO: 1624476 - DNA, 15 bp, Homo sapiens
ccatcaaagaagaaa

SEQ ID NO: 1624477 - DNA, 15 bp, Homo sapiens
catcaaagaagaaac

SEQ ID NO: 1624478 - DNA, 15 bp, Homo sapiens
atcaaagaagaaaca

SEQ ID NO: 1624479 - DNA, 15 bp, Homo sapiens
tcaaagaagaaacac

SEQ ID NO: 1624480 - DNA, 15 bp, Homo sapiens
caaagaagaaacaca

SEQ ID NO: 1624481 - DNA, 15 bp, Homo sapiens
aaagaagaaacacag

SEQ ID NO: 1624482 - DNA, 15 bp, Homo sapiens
aagaagaaacacagt

SEQ ID NO: 1624483 - DNA, 15 bp, Homo sapiens
agaagaaacacagtg

SEQ ID NO: 1624484 - DNA, 15 bp, Homo sapiens
gaagaaacacagtgg

SEQ ID NO: 1624485 - DNA, 15 bp, Homo sapiens
aagaaacacagtggc

SEQ ID NO: 1624486 - DNA, 15 bp, Homo sapiens
agaaacacagtggca

SEQ ID NO: 1624487 - DNA, 15 bp, Homo sapiens
gaaacacagtggcaa

SEQ ID NO: 1624488 - DNA, 15 bp, Homo sapiens
aaacacagtggcaag

SEQ ID NO: 1624489 - DNA, 15 bp, Homo sapiens
aacacagtggcaagc

SEQ ID NO: 1624490 - DNA, 15 bp, Homo sapiens
acacagtggcaagca

SEQ ID NO: 1624491 - DNA, 15 bp, Homo sapiens
cacagtggcaagcat

SEQ ID NO: 1624492 - DNA, 15 bp, Homo sapiens
acagtggcaagcata

SEQ ID NO: 1624493 - DNA, 15 bp, Homo sapiens
cagtggcaagcatat

SEQ ID NO: 1624494 - DNA, 15 bp, Homo sapiens
agtggcaagcatatg

SEQ ID NO: 1624495 - DNA, 15 bp, Homo sapiens
gtggcaagcatatga

SEQ ID NO: 1624496 - DNA, 15 bp, Homo sapiens
tggcaagcatatgaa

SEQ ID NO: 1624497 - DNA, 15 bp, Homo sapiens
ggcaagcatatgaaa

SEQ ID NO: 1624498 - DNA, 15 bp, Homo sapiens
gcaagcatatgaaaa

SEQ ID NO: 1624499 - DNA, 15 bp, Homo sapiens
caagcatatgaaaat

SEQ ID NO: 1624500 - DNA, 15 bp, Homo sapiens
aagcatatgaaaata

SEQ ID NO: 1624501 - DNA, 15 bp, Homo sapiens
agcatatgaaaatat

SEQ ID NO: 1624502 - DNA, 15 bp, Homo sapiens
gcatatgaaaatatg

SEQ ID NO: 1624503 - DNA, 15 bp, Homo sapiens
catatgaaaatatga

SEQ ID NO: 1624504 - DNA, 15 bp, Homo sapiens
atatgaaaatatgat

SEQ ID NO: 1624505 - DNA, 15 bp, Homo sapiens
tatgaaaatatgatc

SEQ ID NO: 1624506 - DNA, 15 bp, Homo sapiens
atgaaaatatgatct

SEQ ID NO: 1624507 - DNA, 15 bp, Homo sapiens
tgaaaatatgatcta

SEQ ID NO: 1624508 - DNA, 15 bp, Homo sapiens
gaaaatatgatctac

SEQ ID NO: 1624509 - DNA, 15 bp, Homo sapiens
aaaatatgatctaca

SEQ ID NO: 1624510 - DNA, 15 bp, Homo sapiens
aaatatgatctacat

SEQ ID NO: 1624511 - DNA, 15 bp, Homo sapiens
aatatgatctacatc

SEQ ID NO: 1624512 - DNA, 15 bp, Homo sapiens
atatgatctacatca

SEQ ID NO: 1624513 - DNA, 15 bp, Homo sapiens
tatgatctacatcat

SEQ ID NO: 1624514 - DNA, 15 bp, Homo sapiens
atgatctacatcata

SEQ ID NO: 1624515 - DNA, 15 bp, Homo sapiens
tgatctacatcatat

SEQ ID NO: 1624516 - DNA, 15 bp, Homo sapiens
gatctacatcatatg

SEQ ID NO: 1624517 - DNA, 15 bp, Homo sapiens
atctacatcatatgc

SEQ ID NO: 1624518 - DNA, 15 bp, Homo sapiens
tctacatcatatgcc

SEQ ID NO: 1624519 - DNA, 15 bp, Homo sapiens
ctacatcatatgcca

SEQ ID NO: 1624520 - DNA, 15 bp, Homo sapiens
tacatcatatgccat

SEQ ID NO: 1624521 - DNA, 15 bp, Homo sapiens
acatcatatgccatt

SEQ ID NO: 1624522 - DNA, 15 bp, Homo sapiens
catcatatgccatta

SEQ ID NO: 1624523 - DNA, 15 bp, Homo sapiens
atcatatgccattag

SEQ ID NO: 1624524 - DNA, 15 bp, Homo sapiens
tcatatgccattagg

SEQ ID NO: 1624525 - DNA, 15 bp, Homo sapiens
catatgccattagga

SEQ ID NO: 1624526 - DNA, 15 bp, Homo sapiens
atatgccattaggaa

SEQ ID NO: 1624527 - DNA, 15 bp, Homo sapiens
tatgccattaggaaa

SEQ ID NO: 1624528 - DNA, 15 bp, Homo sapiens
atgccattaggaaat

SEQ ID NO: 1624529 - DNA, 15 bp, Homo sapiens
tgccattaggaaatt

SEQ ID NO: 1624530 - DNA, 15 bp, Homo sapiens
gccattaggaaattg

SEQ ID NO: 1624531 - DNA, 15 bp, Homo sapiens
ccattaggaaattgc

SEQ ID NO: 1624532 - DNA, 15 bp, Homo sapiens
cattaggaaattgca

SEQ ID NO: 1624533 - DNA, 15 bp, Homo sapiens
attaggaaattgcaa

SEQ ID NO: 1624534 - DNA, 15 bp, Homo sapiens
ttaggaaattgcaaa

SEQ ID NO: 1624535 - DNA, 15 bp, Homo sapiens
taggaaattgcaaat

SEQ ID NO: 1624536 - DNA, 15 bp, Homo sapiens
aggaaattgcaaatt

SEQ ID NO: 1624537 - DNA, 15 bp, Homo sapiens
ggaaattgcaaatta

SEQ ID NO: 1624538 - DNA, 15 bp, Homo sapiens
gaaattgcaaattaa

SEQ ID NO: 1624539 - DNA, 15 bp, Homo sapiens
aaattgcaaattaaa

SEQ ID NO: 1624540 - DNA, 15 bp, Homo sapiens
aattgcaaattaaaa

SEQ ID NO: 1624541 - DNA, 15 bp, Homo sapiens
attgcaaattaaaac

SEQ ID NO: 1624542 - DNA, 15 bp, Homo sapiens
ttgcaaattaaaaca

SEQ ID NO: 1624543 - DNA, 15 bp, Homo sapiens
gcaaattaaaacaat

SEQ ID NO: 1624544 - DNA, 15 bp, Homo sapiens
caaattaaaacaatg

SEQ ID NO: 1624545 - DNA, 15 bp, Homo sapiens
aaattaaaacaatga

SEQ ID NO: 1624546 - DNA, 15 bp, Homo sapiens
aattaaaacaatgag

SEQ ID NO: 1624547 - DNA, 15 bp, Homo sapiens
attaaaacaatgaga

SEQ ID NO: 1624548 - DNA, 15 bp, Homo sapiens
ttaaaacaatgagat

SEQ ID NO: 1624549 - DNA, 15 bp, Homo sapiens
taaaacaatgagata

SEQ ID NO: 1624550 - DNA, 15 bp, Homo sapiens
aaaacaatgagatac

SEQ ID NO: 1624551 - DNA, 15 bp, Homo sapiens
aaacaatgagatacc

SEQ ID NO: 1624552 - DNA, 15 bp, Homo sapiens
aacaatgagatacca

SEQ ID NO: 1624553 - DNA, 15 bp, Homo sapiens
caatgagataccact

SEQ ID NO: 1624554 - DNA, 15 bp, Homo sapiens
aatgagataccacta

SEQ ID NO: 1624555 - DNA, 15 bp, Homo sapiens
atgagataccactac

SEQ ID NO: 1624556 - DNA, 15 bp, Homo sapiens
tgagataccactaca

SEQ ID NO: 1624557 - DNA, 15 bp, Homo sapiens
gagataccactacat

SEQ ID NO: 1624558 - DNA, 15 bp, Homo sapiens
agataccactacatt

SEQ ID NO: 1624559 - DNA, 15 bp, Homo sapiens
gataccactacattt

SEQ ID NO: 1624560 - DNA, 15 bp, Homo sapiens
ataccactacatttc

SEQ ID NO: 1624561 - DNA, 15 bp, Homo sapiens
taccactacatttct

SEQ ID NO: 1624562 - DNA, 15 bp, Homo sapiens
accactacatttcta

SEQ ID NO: 1624563 - DNA, 15 bp, Homo sapiens
ccactacatttctac

SEQ ID NO: 1624564 - DNA, 15 bp, Homo sapiens
cactacatttctaca

SEQ ID NO: 1624565 - DNA, 15 bp, Homo sapiens
actacatttctacat

SEQ ID NO: 1624566 - DNA, 15 bp, Homo sapiens
ctacatttctacatt

SEQ ID NO: 1624567 - DNA, 15 bp, Homo sapiens
tacatttctacattg

SEQ ID NO: 1624568 - DNA, 15 bp, Homo sapiens
acatttctacattgg

SEQ ID NO: 1624569 - DNA, 15 bp, Homo sapiens
catttctacattggt

SEQ ID NO: 1624570 - DNA, 15 bp, Homo sapiens
atttctacattggtg

SEQ ID NO: 1624571 - DNA, 15 bp, Homo sapiens
tttctacattggtga

SEQ ID NO: 1624572 - DNA, 15 bp, Homo sapiens
ttctacattggtgaa

SEQ ID NO: 1624573 - DNA, 15 bp, Homo sapiens
tctacattggtgaaa

SEQ ID NO: 1624574 - DNA, 15 bp, Homo sapiens
ctacattggtgaaaa

SEQ ID NO: 1624575 - DNA, 15 bp, Homo sapiens
tacattggtgaaaat

SEQ ID NO: 1624576 - DNA, 15 bp, Homo sapiens
acattggtgaaaatt

SEQ ID NO: 1624577 - DNA, 15 bp, Homo sapiens
cattggtgaaaattc

SEQ ID NO: 1624578 - DNA, 15 bp, Homo sapiens
attggtgaaaattcc

SEQ ID NO: 1624579 - DNA, 15 bp, Homo sapiens
ttggtgaaaattcca

SEQ ID NO: 1624580 - DNA, 15 bp, Homo sapiens
tggtgaaaattccaa

SEQ ID NO: 1624581 - DNA, 15 bp, Homo sapiens
ggtgaaaattccaag

SEQ ID NO: 1624582 - DNA, 15 bp, Homo sapiens
gtgaaaattccaagt

SEQ ID NO: 1624583 - DNA, 15 bp, Homo sapiens
tgaaaattccaagta

SEQ ID NO: 1624584 - DNA, 15 bp, Homo sapiens
gaaaattccaagtac

SEQ ID NO: 1624585 - DNA, 15 bp, Homo sapiens
aaaattccaagtact

SEQ ID NO: 1624586 - DNA, 15 bp, Homo sapiens
aaattccaagtactg

SEQ ID NO: 1624587 - DNA, 15 bp, Homo sapiens
aattccaagtactga

SEQ ID NO: 1624588 - DNA, 15 bp, Homo sapiens
attccaagtactgac

SEQ ID NO: 1624589 - DNA, 15 bp, Homo sapiens
ttccaagtactgaca

SEQ ID NO: 1624590 - DNA, 15 bp, Homo sapiens
tccaagtactgacag

SEQ ID NO: 1624591 - DNA, 15 bp, Homo sapiens
ccaagtactgacagc

SEQ ID NO: 1624592 - DNA, 15 bp, Homo sapiens
caagtactgacagca

SEQ ID NO: 1624593 - DNA, 15 bp, Homo sapiens
aagtactgacagcac

SEQ ID NO: 1624594 - DNA, 15 bp, Homo sapiens
agtactgacagcact

SEQ ID NO: 1624595 - DNA, 15 bp, Homo sapiens
gtactgacagcactc

SEQ ID NO: 1624596 - DNA, 15 bp, Homo sapiens
tactgacagcactct

SEQ ID NO: 1624597 - DNA, 15 bp, Homo sapiens
actgacagcactctc

SEQ ID NO: 1624598 - DNA, 15 bp, Homo sapiens
ctgacagcactctca

SEQ ID NO: 1624599 - DNA, 15 bp, Homo sapiens
tgacagcactctcag

SEQ ID NO: 1624600 - DNA, 15 bp, Homo sapiens
gacagcactctcagt

SEQ ID NO: 1624601 - DNA, 15 bp, Homo sapiens
acagcactctcagtg

SEQ ID NO: 1624602 - DNA, 15 bp, Homo sapiens
cagcactctcagtgc

SEQ ID NO: 1624603 - DNA, 15 bp, Homo sapiens
agcactctcagtgct

SEQ ID NO: 1624604 - DNA, 15 bp, Homo sapiens
gcactctcagtgctg

SEQ ID NO: 1624605 - DNA, 15 bp, Homo sapiens
cactctcagtgctgg

SEQ ID NO: 1624606 - DNA, 15 bp, Homo sapiens
actctcagtgctggt

SEQ ID NO: 1624607 - DNA, 15 bp, Homo sapiens
ctctcagtgctggtg

SEQ ID NO: 1624608 - DNA, 15 bp, Homo sapiens
tctcagtgctggtga

SEQ ID NO: 1624609 - DNA, 15 bp, Homo sapiens
ctcagtgctggtgag

SEQ ID NO: 1624610 - DNA, 15 bp, Homo sapiens
tcagtgctggtgagg

SEQ ID NO: 1624611 - DNA, 15 bp, Homo sapiens
cagtgctggtgagga

SEQ ID NO: 1624612 - DNA, 15 bp, Homo sapiens
agtgctggtgaggat

SEQ ID NO: 1624613 - DNA, 15 bp, Homo sapiens
gtgctggtgaggata

SEQ ID NO: 1624614 - DNA, 15 bp, Homo sapiens
tgctggtgaggatat

SEQ ID NO: 1624615 - DNA, 15 bp, Homo sapiens
gctggtgaggatatg

SEQ ID NO: 1624616 - DNA, 15 bp, Homo sapiens
ctggtgaggatatgg

SEQ ID NO: 1624617 - DNA, 15 bp, Homo sapiens
tggtgaggatatggt

SEQ ID NO: 1624618 - DNA, 15 bp, Homo sapiens
ggtgaggatatggtg

SEQ ID NO: 1624619 - DNA, 15 bp, Homo sapiens
gtgaggatatggtgc

SEQ ID NO: 1624620 - DNA, 15 bp, Homo sapiens
tgaggatatggtgca

SEQ ID NO: 1624621 - DNA, 15 bp, Homo sapiens
gaggatatggtgcag

SEQ ID NO: 1624622 - DNA, 15 bp, Homo sapiens
aggatatggtgcagt

SEQ ID NO: 1624623 - DNA, 15 bp, Homo sapiens
ggatatggtgcagta

SEQ ID NO: 1624624 - DNA, 15 bp, Homo sapiens
gatatggtgcagtag

SEQ ID NO: 1624625 - DNA, 15 bp, Homo sapiens
atatggtgcagtaga

SEQ ID NO: 1624626 - DNA, 15 bp, Homo sapiens
tatggtgcagtagaa

SEQ ID NO: 1624627 - DNA, 15 bp, Homo sapiens
atggtgcagtagaaa

SEQ ID NO: 1624628 - DNA, 15 bp, Homo sapiens
tggtgcagtagaaat

SEQ ID NO: 1624629 - DNA, 15 bp, Homo sapiens
ggtgcagtagaaatc

SEQ ID NO: 1624630 - DNA, 15 bp, Homo sapiens
gtgcagtagaaatcc

SEQ ID NO: 1624631 - DNA, 15 bp, Homo sapiens
tgcagtagaaatcca

SEQ ID NO: 1624632 - DNA, 15 bp, Homo sapiens
gcagtagaaatccac

SEQ ID NO: 1624633 - DNA, 15 bp, Homo sapiens
cagtagaaatccaca

SEQ ID NO: 1624634 - DNA, 15 bp, Homo sapiens
agtagaaatccacac

SEQ ID NO: 1624635 - DNA, 15 bp, Homo sapiens
gtagaaatccacact

SEQ ID NO: 1624636 - DNA, 15 bp, Homo sapiens
tagaaatccacactc

SEQ ID NO: 1624637 - DNA, 15 bp, Homo sapiens
agaaatccacactca

SEQ ID NO: 1624638 - DNA, 15 bp, Homo sapiens
gaaatccacactcat

SEQ ID NO: 1624639 - DNA, 15 bp, Homo sapiens
aaatccacactcatg

SEQ ID NO: 1624640 - DNA, 15 bp, Homo sapiens
aatccacactcatgc

SEQ ID NO: 1624641 - DNA, 15 bp, Homo sapiens
atccacactcatgcc

SEQ ID NO: 1624642 - DNA, 15 bp, Homo sapiens
tccacactcatgccg

SEQ ID NO: 1624643 - DNA, 15 bp, Homo sapiens
ccacactcatgccgg

SEQ ID NO: 1624644 - DNA, 15 bp, Homo sapiens
cacactcatgccggg

SEQ ID NO: 1624645 - DNA, 15 bp, Homo sapiens
acactcatgccgggc

SEQ ID NO: 1624646 - DNA, 15 bp, Homo sapiens
cactcatgccgggca

SEQ ID NO: 1624647 - DNA, 15 bp, Homo sapiens
actcatgccgggcac

SEQ ID NO: 1624648 - DNA, 15 bp, Homo sapiens
ctcatgccgggcaca

SEQ ID NO: 1624649 - DNA, 15 bp, Homo sapiens
tcatgccgggcacag

SEQ ID NO: 1624650 - DNA, 15 bp, Homo sapiens
catgccgggcacagt

SEQ ID NO: 1624651 - DNA, 15 bp, Homo sapiens
atgccgggcacagtg

SEQ ID NO: 1624652 - DNA, 15 bp, Homo sapiens
tgccgggcacagtgg

SEQ ID NO: 1624653 - DNA, 15 bp, Homo sapiens
gcgggtggatcacca

SEQ ID NO: 1624654 - DNA, 15 bp, Homo sapiens
cgggtggatcaccag

SEQ ID NO: 1624655 - DNA, 15 bp, Homo sapiens
gggtggatcaccagg

SEQ ID NO: 1624656 - DNA, 15 bp, Homo sapiens
ggtggatcaccaggt

SEQ ID NO: 1624657 - DNA, 15 bp, Homo sapiens
gtggatcaccaggtc

SEQ ID NO: 1624658 - DNA, 15 bp, Homo sapiens
tggatcaccaggtca

SEQ ID NO: 1624659 - DNA, 15 bp, Homo sapiens
ggatcaccaggtcag

SEQ ID NO: 1624660 - DNA, 15 bp, Homo sapiens
gatcaccaggtcagg

SEQ ID NO: 1624661 - DNA, 15 bp, Homo sapiens
atcaccaggtcagga

SEQ ID NO: 1624662 - DNA, 15 bp, Homo sapiens
tcaccaggtcaggag

SEQ ID NO: 1624663 - DNA, 15 bp, Homo sapiens
caccaggtcaggagt

SEQ ID NO: 1624664 - DNA, 15 bp, Homo sapiens
accaggtcaggagtt

SEQ ID NO: 1624665 - DNA, 15 bp, Homo sapiens
ccaggtcaggagttt

SEQ ID NO: 1624666 - DNA, 15 bp, Homo sapiens
caggtcaggagtttg

SEQ ID NO: 1624667 - DNA, 15 bp, Homo sapiens
tcaggagtttgagat

SEQ ID NO: 1624668 - DNA, 15 bp, Homo sapiens
caggagtttgagatc

SEQ ID NO: 1624669 - DNA, 15 bp, Homo sapiens
aggagtttgagatca

SEQ ID NO: 1624670 - DNA, 15 bp, Homo sapiens
ggagtttgagatcag

SEQ ID NO: 1624671 - DNA, 15 bp, Homo sapiens
agtttgagatcagcc

SEQ ID NO: 1624672 - DNA, 15 bp, Homo sapiens
gtttgagatcagcct

SEQ ID NO: 1624673 - DNA, 15 bp, Homo sapiens
tttgagatcagcctg

SEQ ID NO: 1624674 - DNA, 15 bp, Homo sapiens
ttgagatcagcctga

SEQ ID NO: 1624675 - DNA, 15 bp, Homo sapiens
tgagatcagcctgac

SEQ ID NO: 1624676 - DNA, 15 bp, Homo sapiens
gagatcagcctgacc

SEQ ID NO: 1624677 - DNA, 15 bp, Homo sapiens
agatcagcctgacca

SEQ ID NO: 1624678 - DNA, 15 bp, Homo sapiens
gatcagcctgaccaa

SEQ ID NO: 1624679 - DNA, 15 bp, Homo sapiens
atcagcctgaccaac

SEQ ID NO: 1624680 - DNA, 15 bp, Homo sapiens
tcagcctgaccaaca

SEQ ID NO: 1624681 - DNA, 15 bp, Homo sapiens
atggtgaaaccccgg

SEQ ID NO: 1624682 - DNA, 15 bp, Homo sapiens
tggtgaaaccccggc

SEQ ID NO: 1624683 - DNA, 15 bp, Homo sapiens
ggtgaaaccccggct

SEQ ID NO: 1624684 - DNA, 15 bp, Homo sapiens
gtgaaaccccggctc

SEQ ID NO: 1624685 - DNA, 15 bp, Homo sapiens
tgaaaccccggctct

SEQ ID NO: 1624686 - DNA, 15 bp, Homo sapiens
gaaaccccggctcta

SEQ ID NO: 1624687 - DNA, 15 bp, Homo sapiens
aaaccccggctctac

SEQ ID NO: 1624688 - DNA, 15 bp, Homo sapiens
aaccccggctctact

SEQ ID NO: 1624689 - DNA, 15 bp, Homo sapiens
accccggctctacta

SEQ ID NO: 1624690 - DNA, 15 bp, Homo sapiens
ccccggctctactaa

SEQ ID NO: 1624691 - DNA, 15 bp, Homo sapiens
cccggctctactaaa

SEQ ID NO: 1624692 - DNA, 15 bp, Homo sapiens
ccggctctactaaaa

SEQ ID NO: 1624693 - DNA, 15 bp, Homo sapiens
cggctctactaaaaa

SEQ ID NO: 1624694 - DNA, 15 bp, Homo sapiens
ggctctactaaaaat

SEQ ID NO: 1624695 - DNA, 15 bp, Homo sapiens
gctctactaaaaata

SEQ ID NO: 1624696 - DNA, 15 bp, Homo sapiens
acaaaaattagcccg

SEQ ID NO: 1624697 - DNA, 15 bp, Homo sapiens
caaaaattagcccgg

SEQ ID NO: 1624698 - DNA, 15 bp, Homo sapiens
aaaaattagcccggt

SEQ ID NO: 1624699 - DNA, 15 bp, Homo sapiens
aaaattagcccggtg

SEQ ID NO: 1624700 - DNA, 15 bp, Homo sapiens
aaattagcccggtgt

SEQ ID NO: 1624701 - DNA, 15 bp, Homo sapiens
aattagcccggtgtg

SEQ ID NO: 1624702 - DNA, 15 bp, Homo sapiens
attagcccggtgtgg

SEQ ID NO: 1624703 - DNA, 15 bp, Homo sapiens
ttagcccggtgtggt

SEQ ID NO: 1624704 - DNA, 15 bp, Homo sapiens
tagcccggtgtggtg

SEQ ID NO: 1624705 - DNA, 15 bp, Homo sapiens
agcccggtgtggtgg

SEQ ID NO: 1624706 - DNA, 15 bp, Homo sapiens
gcccggtgtggtggc

SEQ ID NO: 1624707 - DNA, 15 bp, Homo sapiens
cccggtgtggtggcg

SEQ ID NO: 1624708 - DNA, 15 bp, Homo sapiens
ccggtgtggtggcgg

SEQ ID NO: 1624709 - DNA, 15 bp, Homo sapiens
cggtgtggtggcggg

SEQ ID NO: 1624710 - DNA, 15 bp, Homo sapiens
tggcgggcgcctgct

SEQ ID NO: 1624711 - DNA, 15 bp, Homo sapiens
ggcgggcgcctgcta

SEQ ID NO: 1624712 - DNA, 15 bp, Homo sapiens
gcgggcgcctgctac

SEQ ID NO: 1624713 - DNA, 15 bp, Homo sapiens
cgggcgcctgctact

SEQ ID NO: 1624714 - DNA, 15 bp, Homo sapiens
gggcgcctgctactc

SEQ ID NO: 1624715 - DNA, 15 bp, Homo sapiens
ggcgcctgctactcg

SEQ ID NO: 1624716 - DNA, 15 bp, Homo sapiens
gcgcctgctactcgg

SEQ ID NO: 1624717 - DNA, 15 bp, Homo sapiens
cgcctgctactcggg

SEQ ID NO: 1624718 - DNA, 15 bp, Homo sapiens
gcctgctactcggga

SEQ ID NO: 1624719 - DNA, 15 bp, Homo sapiens
cctgctactcgggag

SEQ ID NO: 1624720 - DNA, 15 bp, Homo sapiens
ctgctactcgggagt

SEQ ID NO: 1624721 - DNA, 15 bp, Homo sapiens
tgctactcgggagtc

SEQ ID NO: 1624722 - DNA, 15 bp, Homo sapiens
gctactcgggagtct

SEQ ID NO: 1624723 - DNA, 15 bp, Homo sapiens
ctactcgggagtctg

SEQ ID NO: 1624724 - DNA, 15 bp, Homo sapiens
tactcgggagtctga

SEQ ID NO: 1624725 - DNA, 15 bp, Homo sapiens
actcgggagtctgag

SEQ ID NO: 1624726 - DNA, 15 bp, Homo sapiens
ctcgggagtctgagg

SEQ ID NO: 1624727 - DNA, 15 bp, Homo sapiens
tcgggagtctgaggc

SEQ ID NO: 1624728 - DNA, 15 bp, Homo sapiens
cgggagtctgaggca

SEQ ID NO: 1624729 - DNA, 15 bp, Homo sapiens
tctagcctgggcgac

SEQ ID NO: 1624730 - DNA, 15 bp, Homo sapiens
ctagcctgggcgaca

SEQ ID NO: 1624731 - DNA, 15 bp, Homo sapiens
aaaaaaaaaagaggc

SEQ ID NO: 1624732 - DNA, 15 bp, Homo sapiens
aaaaaaaaagaggcc

SEQ ID NO: 1624733 - DNA, 15 bp, Homo sapiens
aaaaaaaagaggcca

SEQ ID NO: 1624734 - DNA, 15 bp, Homo sapiens
aaaaaaagaggccag

SEQ ID NO: 1624735 - DNA, 15 bp, Homo sapiens
aaaaaagaggccagg

SEQ ID NO: 1624736 - DNA, 15 bp, Homo sapiens
aaaaagaggccagga

SEQ ID NO: 1624737 - DNA, 15 bp, Homo sapiens
aaaagaggccaggag

SEQ ID NO: 1624738 - DNA, 15 bp, Homo sapiens
aaagaggccaggagt

SEQ ID NO: 1624739 - DNA, 15 bp, Homo sapiens
aagaggccaggagtg

SEQ ID NO: 1624740 - DNA, 15 bp, Homo sapiens
agaggccaggagtgg

SEQ ID NO: 1624741 - DNA, 15 bp, Homo sapiens
gaggccaggagtggt

SEQ ID NO: 1624742 - DNA, 15 bp, Homo sapiens
aggccaggagtggtg

SEQ ID NO: 1624743 - DNA, 15 bp, Homo sapiens
ggccaggagtggtgg

SEQ ID NO: 1624744 - DNA, 15 bp, Homo sapiens
gccaggagtggtggc

SEQ ID NO: 1624745 - DNA, 15 bp, Homo sapiens
ccaggagtggtggct

SEQ ID NO: 1624746 - DNA, 15 bp, Homo sapiens
caggagtggtggctc

SEQ ID NO: 1624747 - DNA, 15 bp, Homo sapiens
aggagtggtggctca

SEQ ID NO: 1624748 - DNA, 15 bp, Homo sapiens
ggagtggtggctcac

SEQ ID NO: 1624749 - DNA, 15 bp, Homo sapiens
gagtggtggctcaca

SEQ ID NO: 1624750 - DNA, 15 bp, Homo sapiens
agtggtggctcacac

SEQ ID NO: 1624751 - DNA, 15 bp, Homo sapiens
ttgggagactgaggt

SEQ ID NO: 1624752 - DNA, 15 bp, Homo sapiens
tgggagactgaggta

SEQ ID NO: 1624753 - DNA, 15 bp, Homo sapiens
gggagactgaggtag

SEQ ID NO: 1624754 - DNA, 15 bp, Homo sapiens
ggagactgaggtagg

SEQ ID NO: 1624755 - DNA, 15 bp, Homo sapiens
gagactgaggtaggc

SEQ ID NO: 1624756 - DNA, 15 bp, Homo sapiens
agactgaggtaggcg

SEQ ID NO: 1624757 - DNA, 15 bp, Homo sapiens
gactgaggtaggcgg

SEQ ID NO: 1624758 - DNA, 15 bp, Homo sapiens
actgaggtaggcgga

SEQ ID NO: 1624759 - DNA, 15 bp, Homo sapiens
ctgaggtaggcggat

SEQ ID NO: 1624760 - DNA, 15 bp, Homo sapiens
tgaggtaggcggatc

SEQ ID NO: 1624761 - DNA, 15 bp, Homo sapiens
gaggtaggcggatca

SEQ ID NO: 1624762 - DNA, 15 bp, Homo sapiens
aggtaggcggatcac

SEQ ID NO: 1624763 - DNA, 15 bp, Homo sapiens
ggtaggcggatcact

SEQ ID NO: 1624764 - DNA, 15 bp, Homo sapiens
gtaggcggatcactt

SEQ ID NO: 1624765 - DNA, 15 bp, Homo sapiens
taggcggatcacttg

SEQ ID NO: 1624766 - DNA, 15 bp, Homo sapiens
ttggagaccagcctt

SEQ ID NO: 1624767 - DNA, 15 bp, Homo sapiens
tggagaccagccttg

SEQ ID NO: 1624768 - DNA, 15 bp, Homo sapiens
ggagaccagccttgc

SEQ ID NO: 1624769 - DNA, 15 bp, Homo sapiens
gagaccagccttgcc

SEQ ID NO: 1624770 - DNA, 15 bp, Homo sapiens
agaccagccttgcca

SEQ ID NO: 1624771 - DNA, 15 bp, Homo sapiens
gaccagccttgccaa

SEQ ID NO: 1624772 - DNA, 15 bp, Homo sapiens
accagccttgccaac

SEQ ID NO: 1624773 - DNA, 15 bp, Homo sapiens
ccagccttgccaaca

SEQ ID NO: 1624774 - DNA, 15 bp, Homo sapiens
cagccttgccaacat

SEQ ID NO: 1624775 - DNA, 15 bp, Homo sapiens
agccttgccaacatg

SEQ ID NO: 1624776 - DNA, 15 bp, Homo sapiens
gccttgccaacatga

SEQ ID NO: 1624777 - DNA, 15 bp, Homo sapiens
ccttgccaacatgac

SEQ ID NO: 1624778 - DNA, 15 bp, Homo sapiens
cttgccaacatgaca

SEQ ID NO: 1624779 - DNA, 15 bp, Homo sapiens
ttgccaacatgacaa

SEQ ID NO: 1624780 - DNA, 15 bp, Homo sapiens
tgccaacatgacaaa

SEQ ID NO: 1624781 - DNA, 15 bp, Homo sapiens
gccaacatgacaaaa

SEQ ID NO: 1624782 - DNA, 15 bp, Homo sapiens
ccaacatgacaaaac

SEQ ID NO: 1624783 - DNA, 15 bp, Homo sapiens
caacatgacaaaacc

SEQ ID NO: 1624784 - DNA, 15 bp, Homo sapiens
aacatgacaaaaccc

SEQ ID NO: 1624785 - DNA, 15 bp, Homo sapiens
acatgacaaaaccct

SEQ ID NO: 1624786 - DNA, 15 bp, Homo sapiens
catgacaaaaccctg

SEQ ID NO: 1624787 - DNA, 15 bp, Homo sapiens
atgacaaaaccctgt

SEQ ID NO: 1624788 - DNA, 15 bp, Homo sapiens
tgacaaaaccctgtc

SEQ ID NO: 1624789 - DNA, 15 bp, Homo sapiens
gacaaaaccctgtct

SEQ ID NO: 1624790 - DNA, 15 bp, Homo sapiens
acaaaaccctgtctc

SEQ ID NO: 1624791 - DNA, 15 bp, Homo sapiens
gtctctactaaaacc

SEQ ID NO: 1624792 - DNA, 15 bp, Homo sapiens
tctctactaaaacca

SEQ ID NO: 1624793 - DNA, 15 bp, Homo sapiens
ctctactaaaaccac

SEQ ID NO: 1624794 - DNA, 15 bp, Homo sapiens
tctactaaaaccaca

SEQ ID NO: 1624795 - DNA, 15 bp, Homo sapiens
ctactaaaaccacaa

SEQ ID NO: 1624796 - DNA, 15 bp, Homo sapiens
tactaaaaccacaaa

SEQ ID NO: 1624797 - DNA, 15 bp, Homo sapiens
actaaaaccacaaaa

SEQ ID NO: 1624798 - DNA, 15 bp, Homo sapiens
ctaaaaccacaaaaa

SEQ ID NO: 1624799 - DNA, 15 bp, Homo sapiens
taaaaccacaaaaat

SEQ ID NO: 1624800 - DNA, 15 bp, Homo sapiens
aaaaccacaaaaatt

SEQ ID NO: 1624801 - DNA, 15 bp, Homo sapiens
aaaccacaaaaatta

SEQ ID NO: 1624802 - DNA, 15 bp, Homo sapiens
aaccacaaaaattag

SEQ ID NO: 1624803 - DNA, 15 bp, Homo sapiens
accacaaaaattagc

SEQ ID NO: 1624804 - DNA, 15 bp, Homo sapiens
ccacaaaaattagcc

SEQ ID NO: 1624805 - DNA, 15 bp, Homo sapiens
cacaaaaattagcca

SEQ ID NO: 1624806 - DNA, 15 bp, Homo sapiens
aaaaattagccagga

SEQ ID NO: 1624807 - DNA, 15 bp, Homo sapiens
aaaattagccaggag

SEQ ID NO: 1624808 - DNA, 15 bp, Homo sapiens
aaattagccaggagt

SEQ ID NO: 1624809 - DNA, 15 bp, Homo sapiens
aattagccaggagta

SEQ ID NO: 1624810 - DNA, 15 bp, Homo sapiens
attagccaggagtat

SEQ ID NO: 1624811 - DNA, 15 bp, Homo sapiens
ttagccaggagtatt

SEQ ID NO: 1624812 - DNA, 15 bp, Homo sapiens
tagccaggagtattg

SEQ ID NO: 1624813 - DNA, 15 bp, Homo sapiens
agccaggagtattgg

SEQ ID NO: 1624814 - DNA, 15 bp, Homo sapiens
gccaggagtattggc

SEQ ID NO: 1624815 - DNA, 15 bp, Homo sapiens
ccaggagtattggca

SEQ ID NO: 1624816 - DNA, 15 bp, Homo sapiens
caggagtattggcac

SEQ ID NO: 1624817 - DNA, 15 bp, Homo sapiens
aggagtattggcaca

SEQ ID NO: 1624818 - DNA, 15 bp, Homo sapiens
ggagtattggcacat

SEQ ID NO: 1624819 - DNA, 15 bp, Homo sapiens
gagtattggcacatg

SEQ ID NO: 1624820 - DNA, 15 bp, Homo sapiens
agtattggcacatgc

SEQ ID NO: 1624821 - DNA, 15 bp, Homo sapiens
gtattggcacatgcc

SEQ ID NO: 1624822 - DNA, 15 bp, Homo sapiens
tattggcacatgcct

SEQ ID NO: 1624823 - DNA, 15 bp, Homo sapiens
attggcacatgcctg

SEQ ID NO: 1624824 - DNA, 15 bp, Homo sapiens
ttggcacatgcctgt

SEQ ID NO: 1624825 - DNA, 15 bp, Homo sapiens
agtcccagttactcg

SEQ ID NO: 1624826 - DNA, 15 bp, Homo sapiens
gtcccagttactcgg

SEQ ID NO: 1624827 - DNA, 15 bp, Homo sapiens
tcccagttactcggg

SEQ ID NO: 1624828 - DNA, 15 bp, Homo sapiens
cccagttactcggga

SEQ ID NO: 1624829 - DNA, 15 bp, Homo sapiens
ccagttactcgggag

SEQ ID NO: 1624830 - DNA, 15 bp, Homo sapiens
gagacaggagaattt

SEQ ID NO: 1624831 - DNA, 15 bp, Homo sapiens
agacaggagaatttc

SEQ ID NO: 1624832 - DNA, 15 bp, Homo sapiens
gacaggagaatttct

SEQ ID NO: 1624833 - DNA, 15 bp, Homo sapiens
acaggagaatttctt

SEQ ID NO: 1624834 - DNA, 15 bp, Homo sapiens
caggagaatttcttg

SEQ ID NO: 1624835 - DNA, 15 bp, Homo sapiens
aggagaatttcttga

SEQ ID NO: 1624836 - DNA, 15 bp, Homo sapiens
ggagaatttcttgaa

SEQ ID NO: 1624837 - DNA, 15 bp, Homo sapiens
gagaatttcttgaac

SEQ ID NO: 1624838 - DNA, 15 bp, Homo sapiens
agaatttcttgaacc

SEQ ID NO: 1624839 - DNA, 15 bp, Homo sapiens
gaatttcttgaaccc

SEQ ID NO: 1624840 - DNA, 15 bp, Homo sapiens
aatttcttgaacccg

SEQ ID NO: 1624841 - DNA, 15 bp, Homo sapiens
atttcttgaacccgg

SEQ ID NO: 1624842 - DNA, 15 bp, Homo sapiens
tttcttgaacccggg

SEQ ID NO: 1624843 - DNA, 15 bp, Homo sapiens
ttcttgaacccggga

SEQ ID NO: 1624844 - DNA, 15 bp, Homo sapiens
tcttgaacccgggag

SEQ ID NO: 1624845 - DNA, 15 bp, Homo sapiens
ccgggaggcggaggc

SEQ ID NO: 1624846 - DNA, 15 bp, Homo sapiens
cgggaggcggaggct

SEQ ID NO: 1624847 - DNA, 15 bp, Homo sapiens
gggaggcggaggctg

SEQ ID NO: 1624848 - DNA, 15 bp, Homo sapiens
ggaggcggaggctgc

SEQ ID NO: 1624849 - DNA, 15 bp, Homo sapiens
gaggcggaggctgca

SEQ ID NO: 1624850 - DNA, 15 bp, Homo sapiens
aggcggaggctgcag

SEQ ID NO: 1624851 - DNA, 15 bp, Homo sapiens
ggcggaggctgcagt

SEQ ID NO: 1624852 - DNA, 15 bp, Homo sapiens
gcggaggctgcagtg

SEQ ID NO: 1624853 - DNA, 15 bp, Homo sapiens
cggaggctgcagtga

SEQ ID NO: 1624854 - DNA, 15 bp, Homo sapiens
ctgcagtgagccgat

SEQ ID NO: 1624855 - DNA, 15 bp, Homo sapiens
tgcagtgagccgata

SEQ ID NO: 1624856 - DNA, 15 bp, Homo sapiens
gcagtgagccgatat

SEQ ID NO: 1624857 - DNA, 15 bp, Homo sapiens
cagtgagccgatatc

SEQ ID NO: 1624858 - DNA, 15 bp, Homo sapiens
agtgagccgatatcg

SEQ ID NO: 1624859 - DNA, 15 bp, Homo sapiens
tgagccgatatcgca

SEQ ID NO: 1624860 - DNA, 15 bp, Homo sapiens
gagccgatatcgcac

SEQ ID NO: 1624861 - DNA, 15 bp, Homo sapiens
agccgatatcgcacc

SEQ ID NO: 1624862 - DNA, 15 bp, Homo sapiens
gccgatatcgcacca

SEQ ID NO: 1624863 - DNA, 15 bp, Homo sapiens
ccgatatcgcaccac

SEQ ID NO: 1624864 - DNA, 15 bp, Homo sapiens
cgatatcgcaccact

SEQ ID NO: 1624865 - DNA, 15 bp, Homo sapiens
gatatcgcaccactg

SEQ ID NO: 1624866 - DNA, 15 bp, Homo sapiens
atatcgcaccactgt

SEQ ID NO: 1624867 - DNA, 15 bp, Homo sapiens
tatcgcaccactgta

SEQ ID NO: 1624868 - DNA, 15 bp, Homo sapiens
atcgcaccactgtac

SEQ ID NO: 1624869 - DNA, 15 bp, Homo sapiens
tcgcaccactgtact

SEQ ID NO: 1624870 - DNA, 15 bp, Homo sapiens
cgcaccactgtactc

SEQ ID NO: 1624871 - DNA, 15 bp, Homo sapiens
gtactccagcctgaa

SEQ ID NO: 1624872 - DNA, 15 bp, Homo sapiens
tactccagcctgaac

SEQ ID NO: 1624873 - DNA, 15 bp, Homo sapiens
actccagcctgaacg

SEQ ID NO: 1624874 - DNA, 15 bp, Homo sapiens
ctccagcctgaacga

SEQ ID NO: 1624875 - DNA, 15 bp, Homo sapiens
tccagcctgaacgac

SEQ ID NO: 1624876 - DNA, 15 bp, Homo sapiens
ccagcctgaacgaca

SEQ ID NO: 1624877 - DNA, 15 bp, Homo sapiens
cagcctgaacgacag

SEQ ID NO: 1624878 - DNA, 15 bp, Homo sapiens
agcctgaacgacagg

SEQ ID NO: 1624879 - DNA, 15 bp, Homo sapiens
gcctgaacgacaggg

SEQ ID NO: 1624880 - DNA, 15 bp, Homo sapiens
cctgaacgacagggc

SEQ ID NO: 1624881 - DNA, 15 bp, Homo sapiens
ctgaacgacagggcg

SEQ ID NO: 1624882 - DNA, 15 bp, Homo sapiens
tgaacgacagggcga

SEQ ID NO: 1624883 - DNA, 15 bp, Homo sapiens
gaacgacagggcgag

SEQ ID NO: 1624884 - DNA, 15 bp, Homo sapiens
aacgacagggcgaga

SEQ ID NO: 1624885 - DNA, 15 bp, Homo sapiens
acgacagggcgagac

SEQ ID NO: 1624886 - DNA, 15 bp, Homo sapiens
cgacagggcgagact

SEQ ID NO: 1624887 - DNA, 15 bp, Homo sapiens
acagggcgagactct

SEQ ID NO: 1624888 - DNA, 15 bp, Homo sapiens
cagggcgagactctg

SEQ ID NO: 1624889 - DNA, 15 bp, Homo sapiens
agggcgagactctgt

SEQ ID NO: 1624890 - DNA, 15 bp, Homo sapiens
gggcgagactctgtc

SEQ ID NO: 1624891 - DNA, 15 bp, Homo sapiens
ggcgagactctgtct

SEQ ID NO: 1624892 - DNA, 15 bp, Homo sapiens
aaaaaaaaaggaaag

SEQ ID NO: 1624893 - DNA, 15 bp, Homo sapiens
aaaaaaaaggaaaga

SEQ ID NO: 1624894 - DNA, 15 bp, Homo sapiens
aaaaaaaggaaagaa

SEQ ID NO: 1624895 - DNA, 15 bp, Homo sapiens
aaaaaaggaaagaaa

SEQ ID NO: 1624896 - DNA, 15 bp, Homo sapiens
aaaaaggaaagaaag

SEQ ID NO: 1624897 - DNA, 15 bp, Homo sapiens
aaaaggaaagaaaga

SEQ ID NO: 1624898 - DNA, 15 bp, Homo sapiens
aggaaagaaagaaag

SEQ ID NO: 1624899 - DNA, 15 bp, Homo sapiens
ggaaagaaagaaaga

SEQ ID NO: 1624900 - DNA, 15 bp, Homo sapiens
gaaagaaagaaaaaa

SEQ ID NO: 1624901 - DNA, 15 bp, Homo sapiens
aaagaaagaaaaaag

SEQ ID NO: 1624902 - DNA, 15 bp, Homo sapiens
aagaaagaaaaaaga

SEQ ID NO: 1624903 - DNA, 15 bp, Homo sapiens
agaaagaaaaaagaa

SEQ ID NO: 1624904 - DNA, 15 bp, Homo sapiens
gaaagaaaaaagaaa

SEQ ID NO: 1624905 - DNA, 15 bp, Homo sapiens
gaaaaaagaaaattc

SEQ ID NO: 1624906 - DNA, 15 bp, Homo sapiens
aaaaaagaaaattcc

SEQ ID NO: 1624907 - DNA, 15 bp, Homo sapiens
aaaaagaaaattccg

SEQ ID NO: 1624908 - DNA, 15 bp, Homo sapiens
aaaagaaaattccgt

SEQ ID NO: 1624909 - DNA, 15 bp, Homo sapiens
aaagaaaattccgtg

SEQ ID NO: 1624910 - DNA, 15 bp, Homo sapiens
aagaaaattccgtga

SEQ ID NO: 1624911 - DNA, 15 bp, Homo sapiens
agaaaattccgtgat

SEQ ID NO: 1624912 - DNA, 15 bp, Homo sapiens
gaaaattccgtgatt

SEQ ID NO: 1624913 - DNA, 15 bp, Homo sapiens
aaaattccgtgattg

SEQ ID NO: 1624914 - DNA, 15 bp, Homo sapiens
aaattccgtgattgc

SEQ ID NO: 1624915 - DNA, 15 bp, Homo sapiens
aattccgtgattgca

SEQ ID NO: 1624916 - DNA, 15 bp, Homo sapiens
attccgtgattgcag

SEQ ID NO: 1624917 - DNA, 15 bp, Homo sapiens
ttccgtgattgcagt

SEQ ID NO: 1624918 - DNA, 15 bp, Homo sapiens
tccgtgattgcagtc

SEQ ID NO: 1624919 - DNA, 15 bp, Homo sapiens
ccgtgattgcagtct

SEQ ID NO: 1624920 - DNA, 15 bp, Homo sapiens
cgtgattgcagtctt

SEQ ID NO: 1624921 - DNA, 15 bp, Homo sapiens
gtgattgcagtcttt

SEQ ID NO: 1624922 - DNA, 15 bp, Homo sapiens
tgattgcagtcttta

SEQ ID NO: 1624923 - DNA, 15 bp, Homo sapiens
gattgcagtctttac

SEQ ID NO: 1624924 - DNA, 15 bp, Homo sapiens
attgcagtctttacg

SEQ ID NO: 1624925 - DNA, 15 bp, Homo sapiens
ttgcagtctttacgt

SEQ ID NO: 1624926 - DNA, 15 bp, Homo sapiens
tgcagtctttacgta

SEQ ID NO: 1624927 - DNA, 15 bp, Homo sapiens
gcagtctttacgtat

SEQ ID NO: 1624928 - DNA, 15 bp, Homo sapiens
cagtctttacgtatt

SEQ ID NO: 1624929 - DNA, 15 bp, Homo sapiens
agtctttacgtattt

SEQ ID NO: 1624930 - DNA, 15 bp, Homo sapiens
gtctttacgtattta

SEQ ID NO: 1624931 - DNA, 15 bp, Homo sapiens
tctttacgtatttat

SEQ ID NO: 1624932 - DNA, 15 bp, Homo sapiens
ctttacgtatttatt

SEQ ID NO: 1624933 - DNA, 15 bp, Homo sapiens
tttacgtatttattt

SEQ ID NO: 1624934 - DNA, 15 bp, Homo sapiens
ttacgtatttatttg

SEQ ID NO: 1624935 - DNA, 15 bp, Homo sapiens
tacgtatttatttgt

SEQ ID NO: 1624936 - DNA, 15 bp, Homo sapiens
acgtatttatttgtt

SEQ ID NO: 1624937 - DNA, 15 bp, Homo sapiens
cgtatttatttgtta

SEQ ID NO: 1624938 - DNA, 15 bp, Homo sapiens
gtatttatttgttat

SEQ ID NO: 1624939 - DNA, 15 bp, Homo sapiens
tatttatttgttatt

SEQ ID NO: 1624940 - DNA, 15 bp, Homo sapiens
atttatttgttatta

SEQ ID NO: 1624941 - DNA, 15 bp, Homo sapiens
tttatttgttattaa

SEQ ID NO: 1624942 - DNA, 15 bp, Homo sapiens
ttatttgttattaag

SEQ ID NO: 1624943 - DNA, 15 bp, Homo sapiens
tatttgttattaagt

SEQ ID NO: 1624944 - DNA, 15 bp, Homo sapiens
atttgttattaagta

SEQ ID NO: 1624945 - DNA, 15 bp, Homo sapiens
tttgttattaagtac

SEQ ID NO: 1624946 - DNA, 15 bp, Homo sapiens
ttgttattaagtaca

SEQ ID NO: 1624947 - DNA, 15 bp, Homo sapiens
tgttattaagtacag

SEQ ID NO: 1624948 - DNA, 15 bp, Homo sapiens
gttattaagtacagt

SEQ ID NO: 1624949 - DNA, 15 bp, Homo sapiens
ttattaagtacagta

SEQ ID NO: 1624950 - DNA, 15 bp, Homo sapiens
tattaagtacagtaa

SEQ ID NO: 1624951 - DNA, 15 bp, Homo sapiens
attaagtacagtaaa

SEQ ID NO: 1624952 - DNA, 15 bp, Homo sapiens
ttaagtacagtaaaa

SEQ ID NO: 1624953 - DNA, 15 bp, Homo sapiens
taagtacagtaaaat

SEQ ID NO: 1624954 - DNA, 15 bp, Homo sapiens
aagtacagtaaaata

SEQ ID NO: 1624955 - DNA, 15 bp, Homo sapiens
agtacagtaaaataa

SEQ ID NO: 1624956 - DNA, 15 bp, Homo sapiens
gtacagtaaaataaa

SEQ ID NO: 1624957 - DNA, 15 bp, Homo sapiens
tacagtaaaataaag

SEQ ID NO: 1624958 - DNA, 15 bp, Homo sapiens
acagtaaaataaaga

SEQ ID NO: 1624959 - DNA, 15 bp, Homo sapiens
cagtaaaataaagaa

SEQ ID NO: 1624960 - DNA, 15 bp, Homo sapiens
agtaaaataaagaag

SEQ ID NO: 1624961 - DNA, 15 bp, Homo sapiens
gtaaaataaagaagg

SEQ ID NO: 1624962 - DNA, 15 bp, Homo sapiens
taaaataaagaagga

SEQ ID NO: 1624963 - DNA, 15 bp, Homo sapiens
aaaataaagaaggat

SEQ ID NO: 1624964 - DNA, 15 bp, Homo sapiens
aaataaagaaggata

SEQ ID NO: 1624965 - DNA, 15 bp, Homo sapiens
aataaagaaggatag

SEQ ID NO: 1624966 - DNA, 15 bp, Homo sapiens
ataaagaaggataga

SEQ ID NO: 1624967 - DNA, 15 bp, Homo sapiens
taaagaaggatagat

SEQ ID NO: 1624968 - DNA, 15 bp, Homo sapiens
aaagaaggatagatg

SEQ ID NO: 1624969 - DNA, 15 bp, Homo sapiens
aagaaggatagatgt

SEQ ID NO: 1624970 - DNA, 15 bp, Homo sapiens
agaaggatagatgtc

SEQ ID NO: 1624971 - DNA, 15 bp, Homo sapiens
gaaggatagatgtca

SEQ ID NO: 1624972 - DNA, 15 bp, Homo sapiens
aaggatagatgtcat

SEQ ID NO: 1624973 - DNA, 15 bp, Homo sapiens
aggatagatgtcatg

SEQ ID NO: 1624974 - DNA, 15 bp, Homo sapiens
ggatagatgtcatgg

SEQ ID NO: 1624975 - DNA, 15 bp, Homo sapiens
gatagatgtcatgga

SEQ ID NO: 1624976 - DNA, 15 bp, Homo sapiens
atagatgtcatggaa

SEQ ID NO: 1624977 - DNA, 15 bp, Homo sapiens
tagatgtcatggaaa

SEQ ID NO: 1624978 - DNA, 15 bp, Homo sapiens
agatgtcatggaaaa

SEQ ID NO: 1624979 - DNA, 15 bp, Homo sapiens
gatgtcatggaaaat

SEQ ID NO: 1624980 - DNA, 15 bp, Homo sapiens
atgtcatggaaaatg

SEQ ID NO: 1624981 - DNA, 15 bp, Homo sapiens
tgtcatggaaaatgt

SEQ ID NO: 1624982 - DNA, 15 bp, Homo sapiens
gtcatggaaaatgtc

SEQ ID NO: 1624983 - DNA, 15 bp, Homo sapiens
tcatggaaaatgtca

SEQ ID NO: 1624984 - DNA, 15 bp, Homo sapiens
catggaaaatgtcac

SEQ ID NO: 1624985 - DNA, 15 bp, Homo sapiens
atggaaaatgtcacg

SEQ ID NO: 1624986 - DNA, 15 bp, Homo sapiens
tggaaaatgtcacga

SEQ ID NO: 1624987 - DNA, 15 bp, Homo sapiens
ggaaaatgtcacgaa

SEQ ID NO: 1624988 - DNA, 15 bp, Homo sapiens
gaaaatgtcacgaaa

SEQ ID NO: 1624989 - DNA, 15 bp, Homo sapiens
aaaatgtcacgaaaa

SEQ ID NO: 1624990 - DNA, 15 bp, Homo sapiens
aaatgtcacgaaaat

SEQ ID NO: 1624991 - DNA, 15 bp, Homo sapiens
aatgtcacgaaaata

SEQ ID NO: 1624992 - DNA, 15 bp, Homo sapiens
atgtcacgaaaataa

SEQ ID NO: 1624993 - DNA, 15 bp, Homo sapiens
tgtcacgaaaataaa

SEQ ID NO: 1624994 - DNA, 15 bp, Homo sapiens
gtcacgaaaataaaa

SEQ ID NO: 1624995 - DNA, 15 bp, Homo sapiens
tcacgaaaataaaag

SEQ ID NO: 1624996 - DNA, 15 bp, Homo sapiens
cacgaaaataaaaga

SEQ ID NO: 1624997 - DNA, 15 bp, Homo sapiens
acgaaaataaaagag

SEQ ID NO: 1624998 - DNA, 15 bp, Homo sapiens
cgaaaataaaagagt

SEQ ID NO: 1624999 - DNA, 15 bp, Homo sapiens
gaaaataaaagagtt

SEQ ID NO: 1625000 - DNA, 15 bp, Homo sapiens
aaaataaaagagtta

SEQ ID NO: 1625001 - DNA, 15 bp, Homo sapiens
aaataaaagagttaa

SEQ ID NO: 1625002 - DNA, 15 bp, Homo sapiens
aataaaagagttaaa

SEQ ID NO: 1625003 - DNA, 15 bp, Homo sapiens
ataaaagagttaaaa

SEQ ID NO: 1625004 - DNA, 15 bp, Homo sapiens
taaaagagttaaaaa

SEQ ID NO: 1625005 - DNA, 15 bp, Homo sapiens
aaaagagttaaaaaa

SEQ ID NO: 1625006 - DNA, 15 bp, Homo sapiens
aaagagttaaaaaaa

SEQ ID NO: 1625007 - DNA, 15 bp, Homo sapiens
aagagttaaaaaaaa

SEQ ID NO: 1625008 - DNA, 15 bp, Homo sapiens
agagttaaaaaaaaa

SEQ ID NO: 1625009 - DNA, 15 bp, Homo sapiens
gagttaaaaaaaaaa

SEQ ID NO: 1625010 - DNA, 15 bp, Homo sapiens
aaaaaaaaaaagtag

SEQ ID NO: 1625011 - DNA, 15 bp, Homo sapiens
aaaaaaaaaagtagg

SEQ ID NO: 1625012 - DNA, 15 bp, Homo sapiens
aaaaaaaaagtaggc

SEQ ID NO: 1625013 - DNA, 15 bp, Homo sapiens
aaaaaaaagtaggct

SEQ ID NO: 1625014 - DNA, 15 bp, Homo sapiens
aaaaaaagtaggctg

SEQ ID NO: 1625015 - DNA, 15 bp, Homo sapiens
aaaaaagtaggctgc

SEQ ID NO: 1625016 - DNA, 15 bp, Homo sapiens
aaaaagtaggctgca

SEQ ID NO: 1625017 - DNA, 15 bp, Homo sapiens
aaaagtaggctgcaa

SEQ ID NO: 1625018 - DNA, 15 bp, Homo sapiens
aaagtaggctgcaat

SEQ ID NO: 1625019 - DNA, 15 bp, Homo sapiens
aagtaggctgcaatg

SEQ ID NO: 1625020 - DNA, 15 bp, Homo sapiens
agtaggctgcaatgc

SEQ ID NO: 1625021 - DNA, 15 bp, Homo sapiens
gtaggctgcaatgcc

SEQ ID NO: 1625022 - DNA, 15 bp, Homo sapiens
taggctgcaatgcca

SEQ ID NO: 1625023 - DNA, 15 bp, Homo sapiens
aggctgcaatgccag

SEQ ID NO: 1625024 - DNA, 15 bp, Homo sapiens
ggctgcaatgccaga

SEQ ID NO: 1625025 - DNA, 15 bp, Homo sapiens
gctgcaatgccagat

SEQ ID NO: 1625026 - DNA, 15 bp, Homo sapiens
ctgcaatgccagatg

SEQ ID NO: 1625027 - DNA, 15 bp, Homo sapiens
tgcaatgccagatgc

SEQ ID NO: 1625028 - DNA, 15 bp, Homo sapiens
gcaatgccagatgcc

SEQ ID NO: 1625029 - DNA, 15 bp, Homo sapiens
caatgccagatgcct

SEQ ID NO: 1625030 - DNA, 15 bp, Homo sapiens
aatgccagatgcctg

SEQ ID NO: 1625031 - DNA, 15 bp, Homo sapiens
atgccagatgcctga

SEQ ID NO: 1625032 - DNA, 15 bp, Homo sapiens
tgccagatgcctgaa

SEQ ID NO: 1625033 - DNA, 15 bp, Homo sapiens
gccagatgcctgaaa

SEQ ID NO: 1625034 - DNA, 15 bp, Homo sapiens
ccagatgcctgaaaa

SEQ ID NO: 1625035 - DNA, 15 bp, Homo sapiens
cagatgcctgaaaag

SEQ ID NO: 1625036 - DNA, 15 bp, Homo sapiens
agatgcctgaaaagt

SEQ ID NO: 1625037 - DNA, 15 bp, Homo sapiens
gatgcctgaaaagtt

SEQ ID NO: 1625038 - DNA, 15 bp, Homo sapiens
atgcctgaaaagtta

SEQ ID NO: 1625039 - DNA, 15 bp, Homo sapiens
tgcctgaaaagttaa

SEQ ID NO: 1625040 - DNA, 15 bp, Homo sapiens
gcctgaaaagttaat

SEQ ID NO: 1625041 - DNA, 15 bp, Homo sapiens
cctgaaaagttaatc

SEQ ID NO: 1625042 - DNA, 15 bp, Homo sapiens
ctgaaaagttaatca

SEQ ID NO: 1625043 - DNA, 15 bp, Homo sapiens
tgaaaagttaatcaa

SEQ ID NO: 1625044 - DNA, 15 bp, Homo sapiens
gaaaagttaatcaac

SEQ ID NO: 1625045 - DNA, 15 bp, Homo sapiens
aaaagttaatcaacg

SEQ ID NO: 1625046 - DNA, 15 bp, Homo sapiens
aaagttaatcaacga

SEQ ID NO: 1625047 - DNA, 15 bp, Homo sapiens
aagttaatcaacgaa

SEQ ID NO: 1625048 - DNA, 15 bp, Homo sapiens
agttaatcaacgaaa

SEQ ID NO: 1625049 - DNA, 15 bp, Homo sapiens
gttaatcaacgaaag

SEQ ID NO: 1625050 - DNA, 15 bp, Homo sapiens
ttaatcaacgaaagg

SEQ ID NO: 1625051 - DNA, 15 bp, Homo sapiens
taatcaacgaaagga

SEQ ID NO: 1625052 - DNA, 15 bp, Homo sapiens
aatcaacgaaaggac

SEQ ID NO: 1625053 - DNA, 15 bp, Homo sapiens
atcaacgaaaggact

SEQ ID NO: 1625054 - DNA, 15 bp, Homo sapiens
tcaacgaaaggactt

SEQ ID NO: 1625055 - DNA, 15 bp, Homo sapiens
caacgaaaggactta

SEQ ID NO: 1625056 - DNA, 15 bp, Homo sapiens
aacgaaaggacttaa

SEQ ID NO: 1625057 - DNA, 15 bp, Homo sapiens
acgaaaggacttaaa

SEQ ID NO: 1625058 - DNA, 15 bp, Homo sapiens
cgaaaggacttaaat

SEQ ID NO: 1625059 - DNA, 15 bp, Homo sapiens
gaaaggacttaaatg

SEQ ID NO: 1625060 - DNA, 15 bp, Homo sapiens
aaaggacttaaatgt

SEQ ID NO: 1625061 - DNA, 15 bp, Homo sapiens
aaggacttaaatgtc

SEQ ID NO: 1625062 - DNA, 15 bp, Homo sapiens
aggacttaaatgtcc

SEQ ID NO: 1625063 - DNA, 15 bp, Homo sapiens
ggacttaaatgtccc

SEQ ID NO: 1625064 - DNA, 15 bp, Homo sapiens
gacttaaatgtcccc

SEQ ID NO: 1625065 - DNA, 15 bp, Homo sapiens
acttaaatgtcccca

SEQ ID NO: 1625066 - DNA, 15 bp, Homo sapiens
cttaaatgtccccat

SEQ ID NO: 1625067 - DNA, 15 bp, Homo sapiens
ttaaatgtccccatt

SEQ ID NO: 1625068 - DNA, 15 bp, Homo sapiens
taaatgtccccattg

SEQ ID NO: 1625069 - DNA, 15 bp, Homo sapiens
aaatgtccccattga

SEQ ID NO: 1625070 - DNA, 15 bp, Homo sapiens
aatgtccccattgaa

SEQ ID NO: 1625071 - DNA, 15 bp, Homo sapiens
atgtccccattgaat

SEQ ID NO: 1625072 - DNA, 15 bp, Homo sapiens
tgtccccattgaatt

SEQ ID NO: 1625073 - DNA, 15 bp, Homo sapiens
gtccccattgaattt

SEQ ID NO: 1625074 - DNA, 15 bp, Homo sapiens
tccccattgaattta

SEQ ID NO: 1625075 - DNA, 15 bp, Homo sapiens
ccccattgaatttag

SEQ ID NO: 1625076 - DNA, 15 bp, Homo sapiens
cccattgaatttagg

SEQ ID NO: 1625077 - DNA, 15 bp, Homo sapiens
ccattgaatttagga

SEQ ID NO: 1625078 - DNA, 15 bp, Homo sapiens
cattgaatttaggaa

SEQ ID NO: 1625079 - DNA, 15 bp, Homo sapiens
attgaatttaggaac

SEQ ID NO: 1625080 - DNA, 15 bp, Homo sapiens
ttgaatttaggaaca

SEQ ID NO: 1625081 - DNA, 15 bp, Homo sapiens
tgaatttaggaacaa

SEQ ID NO: 1625082 - DNA, 15 bp, Homo sapiens
gaatttaggaacaaa

SEQ ID NO: 1625083 - DNA, 15 bp, Homo sapiens
aatttaggaacaaag

SEQ ID NO: 1625084 - DNA, 15 bp, Homo sapiens
atttaggaacaaaga

SEQ ID NO: 1625085 - DNA, 15 bp, Homo sapiens
tttaggaacaaagaa

SEQ ID NO: 1625086 - DNA, 15 bp, Homo sapiens
ttaggaacaaagaag

SEQ ID NO: 1625087 - DNA, 15 bp, Homo sapiens
taggaacaaagaagt

SEQ ID NO: 1625088 - DNA, 15 bp, Homo sapiens
aggaacaaagaagta

SEQ ID NO: 1625089 - DNA, 15 bp, Homo sapiens
ggaacaaagaagtaa

SEQ ID NO: 1625090 - DNA, 15 bp, Homo sapiens
gaacaaagaagtaat

SEQ ID NO: 1625091 - DNA, 15 bp, Homo sapiens
aacaaagaagtaatt

SEQ ID NO: 1625092 - DNA, 15 bp, Homo sapiens
acaaagaagtaatta

SEQ ID NO: 1625093 - DNA, 15 bp, Homo sapiens
caaagaagtaattaa

SEQ ID NO: 1625094 - DNA, 15 bp, Homo sapiens
aaagaagtaattaat

SEQ ID NO: 1625095 - DNA, 15 bp, Homo sapiens
aagaagtaattaatg

SEQ ID NO: 1625096 - DNA, 15 bp, Homo sapiens
agaagtaattaatga

SEQ ID NO: 1625097 - DNA, 15 bp, Homo sapiens
gaagtaattaatgaa

SEQ ID NO: 1625098 - DNA, 15 bp, Homo sapiens
aagtaattaatgaac

SEQ ID NO: 1625099 - DNA, 15 bp, Homo sapiens
agtaattaatgaact

SEQ ID NO: 1625100 - DNA, 15 bp, Homo sapiens
gtaattaatgaactg

SEQ ID NO: 1625101 - DNA, 15 bp, Homo sapiens
taattaatgaactgg

SEQ ID NO: 1625102 - DNA, 15 bp, Homo sapiens
aattaatgaactggg

SEQ ID NO: 1625103 - DNA, 15 bp, Homo sapiens
attaatgaactgggc

SEQ ID NO: 1625104 - DNA, 15 bp, Homo sapiens
ttaatgaactgggca

SEQ ID NO: 1625105 - DNA, 15 bp, Homo sapiens
taatgaactgggcaa

SEQ ID NO: 1625106 - DNA, 15 bp, Homo sapiens
aatgaactgggcaaa

SEQ ID NO: 1625107 - DNA, 15 bp, Homo sapiens
atgaactgggcaaaa

SEQ ID NO: 1625108 - DNA, 15 bp, Homo sapiens
tgaactgggcaaaaa

SEQ ID NO: 1625109 - DNA, 15 bp, Homo sapiens
gaactgggcaaaaac

SEQ ID NO: 1625110 - DNA, 15 bp, Homo sapiens
aactgggcaaaaaca

SEQ ID NO: 1625111 - DNA, 15 bp, Homo sapiens
actgggcaaaaacac

SEQ ID NO: 1625112 - DNA, 15 bp, Homo sapiens
ctgggcaaaaacact

SEQ ID NO: 1625113 - DNA, 15 bp, Homo sapiens
tgggcaaaaacactc

SEQ ID NO: 1625114 - DNA, 15 bp, Homo sapiens
gggcaaaaacactca

SEQ ID NO: 1625115 - DNA, 15 bp, Homo sapiens
ggcaaaaacactcaa

SEQ ID NO: 1625116 - DNA, 15 bp, Homo sapiens
gcaaaaacactcaat

SEQ ID NO: 1625117 - DNA, 15 bp, Homo sapiens
caaaaacactcaatg

SEQ ID NO: 1625118 - DNA, 15 bp, Homo sapiens
aaaaacactcaatgt

SEQ ID NO: 1625119 - DNA, 15 bp, Homo sapiens
aaaacactcaatgta

SEQ ID NO: 1625120 - DNA, 15 bp, Homo sapiens
aaacactcaatgtac

SEQ ID NO: 1625121 - DNA, 15 bp, Homo sapiens
aacactcaatgtacc

SEQ ID NO: 1625122 - DNA, 15 bp, Homo sapiens
acactcaatgtacca

SEQ ID NO: 1625123 - DNA, 15 bp, Homo sapiens
cactcaatgtaccag

SEQ ID NO: 1625124 - DNA, 15 bp, Homo sapiens
actcaatgtaccagc

SEQ ID NO: 1625125 - DNA, 15 bp, Homo sapiens
ctcaatgtaccagcg

SEQ ID NO: 1625126 - DNA, 15 bp, Homo sapiens
tcaatgtaccagcgt

SEQ ID NO: 1625127 - DNA, 15 bp, Homo sapiens
caatgtaccagcgtt

SEQ ID NO: 1625128 - DNA, 15 bp, Homo sapiens
aatgtaccagcgtta

SEQ ID NO: 1625129 - DNA, 15 bp, Homo sapiens
atgtaccagcgttat

SEQ ID NO: 1625130 - DNA, 15 bp, Homo sapiens
tgtaccagcgttatc

SEQ ID NO: 1625131 - DNA, 15 bp, Homo sapiens
gtaccagcgttatcg

SEQ ID NO: 1625132 - DNA, 15 bp, Homo sapiens
taccagcgttatcga

SEQ ID NO: 1625133 - DNA, 15 bp, Homo sapiens
accagcgttatcgat

SEQ ID NO: 1625134 - DNA, 15 bp, Homo sapiens
ccagcgttatcgatt

SEQ ID NO: 1625135 - DNA, 15 bp, Homo sapiens
cagcgttatcgattt

SEQ ID NO: 1625136 - DNA, 15 bp, Homo sapiens
agcgttatcgattta

SEQ ID NO: 1625137 - DNA, 15 bp, Homo sapiens
gcgttatcgatttag

SEQ ID NO: 1625138 - DNA, 15 bp, Homo sapiens
cgttatcgatttaga

SEQ ID NO: 1625139 - DNA, 15 bp, Homo sapiens
gttatcgatttagaa

SEQ ID NO: 1625140 - DNA, 15 bp, Homo sapiens
ttatcgatttagaaa

SEQ ID NO: 1625141 - DNA, 15 bp, Homo sapiens
tatcgatttagaaac

SEQ ID NO: 1625142 - DNA, 15 bp, Homo sapiens
atcgatttagaaact

SEQ ID NO: 1625143 - DNA, 15 bp, Homo sapiens
tcgatttagaaactg

SEQ ID NO: 1625144 - DNA, 15 bp, Homo sapiens
cgatttagaaactga

SEQ ID NO: 1625145 - DNA, 15 bp, Homo sapiens
gatttagaaactgaa

SEQ ID NO: 1625146 - DNA, 15 bp, Homo sapiens
atttagaaactgaaa

SEQ ID NO: 1625147 - DNA, 15 bp, Homo sapiens
tttagaaactgaaac

SEQ ID NO: 1625148 - DNA, 15 bp, Homo sapiens
ttagaaactgaaact

SEQ ID NO: 1625149 - DNA, 15 bp, Homo sapiens
tagaaactgaaacta

SEQ ID NO: 1625150 - DNA, 15 bp, Homo sapiens
agaaactgaaactaa

SEQ ID NO: 1625151 - DNA, 15 bp, Homo sapiens
gaaactgaaactaag

SEQ ID NO: 1625152 - DNA, 15 bp, Homo sapiens
aaactgaaactaagt

SEQ ID NO: 1625153 - DNA, 15 bp, Homo sapiens
aactgaaactaagta

SEQ ID NO: 1625154 - DNA, 15 bp, Homo sapiens
actgaaactaagtat

SEQ ID NO: 1625155 - DNA, 15 bp, Homo sapiens
ctgaaactaagtata

SEQ ID NO: 1625156 - DNA, 15 bp, Homo sapiens
tgaaactaagtatat

SEQ ID NO: 1625157 - DNA, 15 bp, Homo sapiens
gaaactaagtatatc

SEQ ID NO: 1625158 - DNA, 15 bp, Homo sapiens
aaactaagtatatct

SEQ ID NO: 1625159 - DNA, 15 bp, Homo sapiens
aactaagtatatctg

SEQ ID NO: 1625160 - DNA, 15 bp, Homo sapiens
actaagtatatctga

SEQ ID NO: 1625161 - DNA, 15 bp, Homo sapiens
ctaagtatatctgat

SEQ ID NO: 1625162 - DNA, 15 bp, Homo sapiens
taagtatatctgatg

SEQ ID NO: 1625163 - DNA, 15 bp, Homo sapiens
aagtatatctgatgt

SEQ ID NO: 1625164 - DNA, 15 bp, Homo sapiens
agtatatctgatgtt

SEQ ID NO: 1625165 - DNA, 15 bp, Homo sapiens
gtatatctgatgttg

SEQ ID NO: 1625166 - DNA, 15 bp, Homo sapiens
tatatctgatgttgc

SEQ ID NO: 1625167 - DNA, 15 bp, Homo sapiens
atatctgatgttgct

SEQ ID NO: 1625168 - DNA, 15 bp, Homo sapiens
tatctgatgttgctt

SEQ ID NO: 1625169 - DNA, 15 bp, Homo sapiens
atctgatgttgcttt

SEQ ID NO: 1625170 - DNA, 15 bp, Homo sapiens
tctgatgttgctttt

SEQ ID NO: 1625171 - DNA, 15 bp, Homo sapiens
ctgatgttgctttta

SEQ ID NO: 1625172 - DNA, 15 bp, Homo sapiens
tgatgttgcttttag

SEQ ID NO: 1625173 - DNA, 15 bp, Homo sapiens
gatgttgcttttagg

SEQ ID NO: 1625174 - DNA, 15 bp, Homo sapiens
atgttgcttttagga

SEQ ID NO: 1625175 - DNA, 15 bp, Homo sapiens
tgttgcttttaggaa

SEQ ID NO: 1625176 - DNA, 15 bp, Homo sapiens
gttgcttttaggaaa

SEQ ID NO: 1625177 - DNA, 15 bp, Homo sapiens
ttgcttttaggaaac

SEQ ID NO: 1625178 - DNA, 15 bp, Homo sapiens
tgcttttaggaaaca

SEQ ID NO: 1625179 - DNA, 15 bp, Homo sapiens
gcttttaggaaacaa

SEQ ID NO: 1625180 - DNA, 15 bp, Homo sapiens
cttttaggaaacaag

SEQ ID NO: 1625181 - DNA, 15 bp, Homo sapiens
ttttaggaaacaagt

SEQ ID NO: 1625182 - DNA, 15 bp, Homo sapiens
tttaggaaacaagta

SEQ ID NO: 1625183 - DNA, 15 bp, Homo sapiens
ttaggaaacaagtaa

SEQ ID NO: 1625184 - DNA, 15 bp, Homo sapiens
taggaaacaagtaaa

SEQ ID NO: 1625185 - DNA, 15 bp, Homo sapiens
aggaaacaagtaaat

SEQ ID NO: 1625186 - DNA, 15 bp, Homo sapiens
ggaaacaagtaaatg

SEQ ID NO: 1625187 - DNA, 15 bp, Homo sapiens
gaaacaagtaaatga

SEQ ID NO: 1625188 - DNA, 15 bp, Homo sapiens
aaacaagtaaatgag

SEQ ID NO: 1625189 - DNA, 15 bp, Homo sapiens
aacaagtaaatgagg

SEQ ID NO: 1625190 - DNA, 15 bp, Homo sapiens
acaagtaaatgaggt

SEQ ID NO: 1625191 - DNA, 15 bp, Homo sapiens
agtaaatgaggtcct

SEQ ID NO: 1625192 - DNA, 15 bp, Homo sapiens
gtaaatgaggtccta

SEQ ID NO: 1625193 - DNA, 15 bp, Homo sapiens
taaatgaggtcctaa

SEQ ID NO: 1625194 - DNA, 15 bp, Homo sapiens
aaatgaggtcctaaa

SEQ ID NO: 1625195 - DNA, 15 bp, Homo sapiens
aatgaggtcctaaaa

SEQ ID NO: 1625196 - DNA, 15 bp, Homo sapiens
atgaggtcctaaaaa

SEQ ID NO: 1625197 - DNA, 15 bp, Homo sapiens
tgaggtcctaaaaag

SEQ ID NO: 1625198 - DNA, 15 bp, Homo sapiens
gaggtcctaaaaagt

SEQ ID NO: 1625199 - DNA, 15 bp, Homo sapiens
aggtcctaaaaagtt

SEQ ID NO: 1625200 - DNA, 15 bp, Homo sapiens
ggtcctaaaaagtta

SEQ ID NO: 1625201 - DNA, 15 bp, Homo sapiens
gtcctaaaaagttaa

SEQ ID NO: 1625202 - DNA, 15 bp, Homo sapiens
tcctaaaaagttaaa

SEQ ID NO: 1625203 - DNA, 15 bp, Homo sapiens
cctaaaaagttaaac

SEQ ID NO: 1625204 - DNA, 15 bp, Homo sapiens
ctaaaaagttaaact

SEQ ID NO: 1625205 - DNA, 15 bp, Homo sapiens
taaaaagttaaactg

SEQ ID NO: 1625206 - DNA, 15 bp, Homo sapiens
aaaaagttaaactgt

SEQ ID NO: 1625207 - DNA, 15 bp, Homo sapiens
aaaagttaaactgtg

SEQ ID NO: 1625208 - DNA, 15 bp, Homo sapiens
aaagttaaactgtga

SEQ ID NO: 1625209 - DNA, 15 bp, Homo sapiens
aagttaaactgtgac

SEQ ID NO: 1625210 - DNA, 15 bp, Homo sapiens
agttaaactgtgacc

SEQ ID NO: 1625211 - DNA, 15 bp, Homo sapiens
gttaaactgtgacca

SEQ ID NO: 1625212 - DNA, 15 bp, Homo sapiens
ttaaactgtgaccat

SEQ ID NO: 1625213 - DNA, 15 bp, Homo sapiens
taaactgtgaccata

SEQ ID NO: 1625214 - DNA, 15 bp, Homo sapiens
aaactgtgaccatat

SEQ ID NO: 1625215 - DNA, 15 bp, Homo sapiens
aactgtgaccatatt

SEQ ID NO: 1625216 - DNA, 15 bp, Homo sapiens
actgtgaccatattt

SEQ ID NO: 1625217 - DNA, 15 bp, Homo sapiens
ctgtgaccatatttt

SEQ ID NO: 1625218 - DNA, 15 bp, Homo sapiens
tgtgaccatattttc

SEQ ID NO: 1625219 - DNA, 15 bp, Homo sapiens
gtgaccatattttct

SEQ ID NO: 1625220 - DNA, 15 bp, Homo sapiens
tgaccatattttctt

SEQ ID NO: 1625221 - DNA, 15 bp, Homo sapiens
gaccatattttcttt

SEQ ID NO: 1625222 - DNA, 15 bp, Homo sapiens
accatattttctttc

SEQ ID NO: 1625223 - DNA, 15 bp, Homo sapiens
ccatattttctttcc

SEQ ID NO: 1625224 - DNA, 15 bp, Homo sapiens
catattttctttcct

SEQ ID NO: 1625225 - DNA, 15 bp, Homo sapiens
atattttctttcctt

SEQ ID NO: 1625226 - DNA, 15 bp, Homo sapiens
tattttctttccttt

SEQ ID NO: 1625227 - DNA, 15 bp, Homo sapiens
attttctttcctttt

SEQ ID NO: 1625228 - DNA, 15 bp, Homo sapiens
ttttctttccttttt

SEQ ID NO: 1625229 - DNA, 15 bp, Homo sapiens
tttctttcctttttc

SEQ ID NO: 1625230 - DNA, 15 bp, Homo sapiens
ttctttcctttttct

SEQ ID NO: 1625231 - DNA, 15 bp, Homo sapiens
tctttcctttttcta

SEQ ID NO: 1625232 - DNA, 15 bp, Homo sapiens
ctttcctttttctaa

SEQ ID NO: 1625233 - DNA, 15 bp, Homo sapiens
tttcctttttctaat

SEQ ID NO: 1625234 - DNA, 15 bp, Homo sapiens
ttcctttttctaatt

SEQ ID NO: 1625235 - DNA, 15 bp, Homo sapiens
tcctttttctaattt

SEQ ID NO: 1625236 - DNA, 15 bp, Homo sapiens
cctttttctaatttc

SEQ ID NO: 1625237 - DNA, 15 bp, Homo sapiens
ctttttctaatttct

SEQ ID NO: 1625238 - DNA, 15 bp, Homo sapiens
tttttctaatttctc

SEQ ID NO: 1625239 - DNA, 15 bp, Homo sapiens
ttttctaatttctcc

SEQ ID NO: 1625240 - DNA, 15 bp, Homo sapiens
tttctaatttctcct

SEQ ID NO: 1625241 - DNA, 15 bp, Homo sapiens
ttctaatttctcctt

SEQ ID NO: 1625242 - DNA, 15 bp, Homo sapiens
tctaatttctccttg

SEQ ID NO: 1625243 - DNA, 15 bp, Homo sapiens
ctaatttctccttgg

SEQ ID NO: 1625244 - DNA, 15 bp, Homo sapiens
taatttctccttggg

SEQ ID NO: 1625245 - DNA, 15 bp, Homo sapiens
aatttctccttgggc

SEQ ID NO: 1625246 - DNA, 15 bp, Homo sapiens
atttctccttgggcc

SEQ ID NO: 1625247 - DNA, 15 bp, Homo sapiens
tttctccttgggcca

SEQ ID NO: 1625248 - DNA, 15 bp, Homo sapiens
ttctccttgggccat

SEQ ID NO: 1625249 - DNA, 15 bp, Homo sapiens
tctccttgggccatt

SEQ ID NO: 1625250 - DNA, 15 bp, Homo sapiens
ctccttgggccattt

SEQ ID NO: 1625251 - DNA, 15 bp, Homo sapiens
tccttgggccatttc

SEQ ID NO: 1625252 - DNA, 15 bp, Homo sapiens
ccttgggccatttcc

SEQ ID NO: 1625253 - DNA, 15 bp, Homo sapiens
cttgggccatttcca

SEQ ID NO: 1625254 - DNA, 15 bp, Homo sapiens
tgggccatttccaaa

SEQ ID NO: 1625255 - DNA, 15 bp, Homo sapiens
gggccatttccaaaa

SEQ ID NO: 1625256 - DNA, 15 bp, Homo sapiens
ggccatttccaaaaa

SEQ ID NO: 1625257 - DNA, 15 bp, Homo sapiens
gccatttccaaaaag

SEQ ID NO: 1625258 - DNA, 15 bp, Homo sapiens
ccatttccaaaaagc

SEQ ID NO: 1625259 - DNA, 15 bp, Homo sapiens
catttccaaaaagcc

SEQ ID NO: 1625260 - DNA, 15 bp, Homo sapiens
atttccaaaaagccc

SEQ ID NO: 1625261 - DNA, 15 bp, Homo sapiens
tttccaaaaagccct

SEQ ID NO: 1625262 - DNA, 15 bp, Homo sapiens
ttccaaaaagcccta

SEQ ID NO: 1625263 - DNA, 15 bp, Homo sapiens
tccaaaaagccctaa

SEQ ID NO: 1625264 - DNA, 15 bp, Homo sapiens
ccaaaaagccctaat

SEQ ID NO: 1625265 - DNA, 15 bp, Homo sapiens
caaaaagccctaata

SEQ ID NO: 1625266 - DNA, 15 bp, Homo sapiens
aaaaagccctaatac

SEQ ID NO: 1625267 - DNA, 15 bp, Homo sapiens
aaaagccctaatacc

SEQ ID NO: 1625268 - DNA, 15 bp, Homo sapiens
aaagccctaataccc

SEQ ID NO: 1625269 - DNA, 15 bp, Homo sapiens
aagccctaatacccc

SEQ ID NO: 1625270 - DNA, 15 bp, Homo sapiens
agccctaataccccg

SEQ ID NO: 1625271 - DNA, 15 bp, Homo sapiens
gccctaataccccga

SEQ ID NO: 1625272 - DNA, 15 bp, Homo sapiens
ccctaataccccgac

SEQ ID NO: 1625273 - DNA, 15 bp, Homo sapiens
cctaataccccgact

SEQ ID NO: 1625274 - DNA, 15 bp, Homo sapiens
ctaataccccgactg

SEQ ID NO: 1625275 - DNA, 15 bp, Homo sapiens
taataccccgactga

SEQ ID NO: 1625276 - DNA, 15 bp, Homo sapiens
aataccccgactgat

SEQ ID NO: 1625277 - DNA, 15 bp, Homo sapiens
ataccccgactgata

SEQ ID NO: 1625278 - DNA, 15 bp, Homo sapiens
taccccgactgatag

SEQ ID NO: 1625279 - DNA, 15 bp, Homo sapiens
accccgactgataga

SEQ ID NO: 1625280 - DNA, 15 bp, Homo sapiens
ccccgactgatagaa

SEQ ID NO: 1625281 - DNA, 15 bp, Homo sapiens
cccgactgatagaaa

SEQ ID NO: 1625282 - DNA, 15 bp, Homo sapiens
ccgactgatagaaat

SEQ ID NO: 1625283 - DNA, 15 bp, Homo sapiens
cgactgatagaaatg

SEQ ID NO: 1625284 - DNA, 15 bp, Homo sapiens
gactgatagaaatgg

SEQ ID NO: 1625285 - DNA, 15 bp, Homo sapiens
actgatagaaatgga

SEQ ID NO: 1625286 - DNA, 15 bp, Homo sapiens
ctgatagaaatggat

SEQ ID NO: 1625287 - DNA, 15 bp, Homo sapiens
tgatagaaatggata

SEQ ID NO: 1625288 - DNA, 15 bp, Homo sapiens
gatagaaatggatac

SEQ ID NO: 1625289 - DNA, 15 bp, Homo sapiens
atagaaatggatacc

SEQ ID NO: 1625290 - DNA, 15 bp, Homo sapiens
tagaaatggatacct

SEQ ID NO: 1625291 - DNA, 15 bp, Homo sapiens
agaaatggatacctt

SEQ ID NO: 1625292 - DNA, 15 bp, Homo sapiens
gaaatggataccttg

SEQ ID NO: 1625293 - DNA, 15 bp, Homo sapiens
aaatggataccttgc

SEQ ID NO: 1625294 - DNA, 15 bp, Homo sapiens
aatggataccttgct

SEQ ID NO: 1625295 - DNA, 15 bp, Homo sapiens
atggataccttgctg

SEQ ID NO: 1625296 - DNA, 15 bp, Homo sapiens
tggataccttgctgt

SEQ ID NO: 1625297 - DNA, 15 bp, Homo sapiens
ggataccttgctgtg

SEQ ID NO: 1625298 - DNA, 15 bp, Homo sapiens
gataccttgctgtgc

SEQ ID NO: 1625299 - DNA, 15 bp, Homo sapiens
ataccttgctgtgca

SEQ ID NO: 1625300 - DNA, 15 bp, Homo sapiens
taccttgctgtgcac

SEQ ID NO: 1625301 - DNA, 15 bp, Homo sapiens
accttgctgtgcact

SEQ ID NO: 1625302 - DNA, 15 bp, Homo sapiens
ccttgctgtgcactg

SEQ ID NO: 1625303 - DNA, 15 bp, Homo sapiens
cttgctgtgcactgg

SEQ ID NO: 1625304 - DNA, 15 bp, Homo sapiens
ttgctgtgcactggt

SEQ ID NO: 1625305 - DNA, 15 bp, Homo sapiens
tgctgtgcactggta

SEQ ID NO: 1625306 - DNA, 15 bp, Homo sapiens
gctgtgcactggtac

SEQ ID NO: 1625307 - DNA, 15 bp, Homo sapiens
ctgtgcactggtact

SEQ ID NO: 1625308 - DNA, 15 bp, Homo sapiens
tgtgcactggtacta

SEQ ID NO: 1625309 - DNA, 15 bp, Homo sapiens
gtgcactggtactac

SEQ ID NO: 1625310 - DNA, 15 bp, Homo sapiens
tgcactggtactact

SEQ ID NO: 1625311 - DNA, 15 bp, Homo sapiens
gcactggtactactg

SEQ ID NO: 1625312 - DNA, 15 bp, Homo sapiens
cactggtactactgt

SEQ ID NO: 1625313 - DNA, 15 bp, Homo sapiens
actggtactactgtg

SEQ ID NO: 1625314 - DNA, 15 bp, Homo sapiens
ctggtactactgtga

SEQ ID NO: 1625315 - DNA, 15 bp, Homo sapiens
tggtactactgtgat

SEQ ID NO: 1625316 - DNA, 15 bp, Homo sapiens
ggtactactgtgatt

SEQ ID NO: 1625317 - DNA, 15 bp, Homo sapiens
gtactactgtgattc

SEQ ID NO: 1625318 - DNA, 15 bp, Homo sapiens
tactactgtgattca

SEQ ID NO: 1625319 - DNA, 15 bp, Homo sapiens
actactgtgattcat

SEQ ID NO: 1625320 - DNA, 15 bp, Homo sapiens
ctactgtgattcatg

SEQ ID NO: 1625321 - DNA, 15 bp, Homo sapiens
tactgtgattcatgg

SEQ ID NO: 1625322 - DNA, 15 bp, Homo sapiens
actgtgattcatgga

SEQ ID NO: 1625323 - DNA, 15 bp, Homo sapiens
ctgtgattcatggaa

SEQ ID NO: 1625324 - DNA, 15 bp, Homo sapiens
tgtgattcatggaaa

SEQ ID NO: 1625325 - DNA, 15 bp, Homo sapiens
gtgattcatggaaag

SEQ ID NO: 1625326 - DNA, 15 bp, Homo sapiens
tgattcatggaaagc

SEQ ID NO: 1625327 - DNA, 15 bp, Homo sapiens
gattcatggaaagct

SEQ ID NO: 1625328 - DNA, 15 bp, Homo sapiens
attcatggaaagctg

SEQ ID NO: 1625329 - DNA, 15 bp, Homo sapiens
ttcatggaaagctga

SEQ ID NO: 1625330 - DNA, 15 bp, Homo sapiens
tcatggaaagctgat

SEQ ID NO: 1625331 - DNA, 15 bp, Homo sapiens
catggaaagctgatc

SEQ ID NO: 1625332 - DNA, 15 bp, Homo sapiens
atggaaagctgatca

SEQ ID NO: 1625333 - DNA, 15 bp, Homo sapiens
tggaaagctgatcat

SEQ ID NO: 1625334 - DNA, 15 bp, Homo sapiens
ggaaagctgatcatg

SEQ ID NO: 1625335 - DNA, 15 bp, Homo sapiens
gaaagctgatcatgc

SEQ ID NO: 1625336 - DNA, 15 bp, Homo sapiens
aaagctgatcatgca

SEQ ID NO: 1625337 - DNA, 15 bp, Homo sapiens
aagctgatcatgcaa

SEQ ID NO: 1625338 - DNA, 15 bp, Homo sapiens
agctgatcatgcaac

SEQ ID NO: 1625339 - DNA, 15 bp, Homo sapiens
gctgatcatgcaacc

SEQ ID NO: 1625340 - DNA, 15 bp, Homo sapiens
ctgatcatgcaaccc

SEQ ID NO: 1625341 - DNA, 15 bp, Homo sapiens
tgatcatgcaaccca

SEQ ID NO: 1625342 - DNA, 15 bp, Homo sapiens
gatcatgcaacccaa

SEQ ID NO: 1625343 - DNA, 15 bp, Homo sapiens
atcatgcaacccaag

SEQ ID NO: 1625344 - DNA, 15 bp, Homo sapiens
tcatgcaacccaaga

SEQ ID NO: 1625345 - DNA, 15 bp, Homo sapiens
catgcaacccaagac

SEQ ID NO: 1625346 - DNA, 15 bp, Homo sapiens
atgcaacccaagacg

SEQ ID NO: 1625347 - DNA, 15 bp, Homo sapiens
tgcaacccaagacgc

SEQ ID NO: 1625348 - DNA, 15 bp, Homo sapiens
gcaacccaagacgcc

SEQ ID NO: 1625349 - DNA, 15 bp, Homo sapiens
caacccaagacgcca

SEQ ID NO: 1625350 - DNA, 15 bp, Homo sapiens
aacccaagacgccaa

SEQ ID NO: 1625351 - DNA, 15 bp, Homo sapiens
acccaagacgccaaa

SEQ ID NO: 1625352 - DNA, 15 bp, Homo sapiens
cccaagacgccaaaa

SEQ ID NO: 1625353 - DNA, 15 bp, Homo sapiens
ccaagacgccaaaat

SEQ ID NO: 1625354 - DNA, 15 bp, Homo sapiens
caagacgccaaaatt

SEQ ID NO: 1625355 - DNA, 15 bp, Homo sapiens
aagacgccaaaattc

SEQ ID NO: 1625356 - DNA, 15 bp, Homo sapiens
agacgccaaaattcc

SEQ ID NO: 1625357 - DNA, 15 bp, Homo sapiens
gacgccaaaattccc

SEQ ID NO: 1625358 - DNA, 15 bp, Homo sapiens
acgccaaaattccca

SEQ ID NO: 1625359 - DNA, 15 bp, Homo sapiens
cgccaaaattcccag

SEQ ID NO: 1625360 - DNA, 15 bp, Homo sapiens
gccaaaattcccagc

SEQ ID NO: 1625361 - DNA, 15 bp, Homo sapiens
ccaaaattcccagcc

SEQ ID NO: 1625362 - DNA, 15 bp, Homo sapiens
caaaattcccagcct

SEQ ID NO: 1625363 - DNA, 15 bp, Homo sapiens
aaaattcccagcctt

SEQ ID NO: 1625364 - DNA, 15 bp, Homo sapiens
aaattcccagcctta

SEQ ID NO: 1625365 - DNA, 15 bp, Homo sapiens
aattcccagccttac

SEQ ID NO: 1625366 - DNA, 15 bp, Homo sapiens
attcccagccttact

SEQ ID NO: 1625367 - DNA, 15 bp, Homo sapiens
ttcccagccttactg

SEQ ID NO: 1625368 - DNA, 15 bp, Homo sapiens
tcccagccttactgt

SEQ ID NO: 1625369 - DNA, 15 bp, Homo sapiens
cccagccttactgtt

SEQ ID NO: 1625370 - DNA, 15 bp, Homo sapiens
ccagccttactgtta

SEQ ID NO: 1625371 - DNA, 15 bp, Homo sapiens
cagccttactgttac

SEQ ID NO: 1625372 - DNA, 15 bp, Homo sapiens
agccttactgttacg

SEQ ID NO: 1625373 - DNA, 15 bp, Homo sapiens
gccttactgttacga

SEQ ID NO: 1625374 - DNA, 15 bp, Homo sapiens
ccttactgttacgaa

SEQ ID NO: 1625375 - DNA, 15 bp, Homo sapiens
cttactgttacgaaa

SEQ ID NO: 1625376 - DNA, 15 bp, Homo sapiens
ttactgttacgaaag

SEQ ID NO: 1625377 - DNA, 15 bp, Homo sapiens
tactgttacgaaaga

SEQ ID NO: 1625378 - DNA, 15 bp, Homo sapiens
actgttacgaaagaa

SEQ ID NO: 1625379 - DNA, 15 bp, Homo sapiens
ctgttacgaaagaaa

SEQ ID NO: 1625380 - DNA, 15 bp, Homo sapiens
tgttacgaaagaaag

SEQ ID NO: 1625381 - DNA, 15 bp, Homo sapiens
gttacgaaagaaagt

SEQ ID NO: 1625382 - DNA, 15 bp, Homo sapiens
ttacgaaagaaagtt

SEQ ID NO: 1625383 - DNA, 15 bp, Homo sapiens
tacgaaagaaagttt

SEQ ID NO: 1625384 - DNA, 15 bp, Homo sapiens
acgaaagaaagtttc

SEQ ID NO: 1625385 - DNA, 15 bp, Homo sapiens
cgaaagaaagtttct

SEQ ID NO: 1625386 - DNA, 15 bp, Homo sapiens
gaaagaaagtttcta

SEQ ID NO: 1625387 - DNA, 15 bp, Homo sapiens
aaagaaagtttctaa

SEQ ID NO: 1625388 - DNA, 15 bp, Homo sapiens
aagaaagtttctaag

SEQ ID NO: 1625389 - DNA, 15 bp, Homo sapiens
agaaagtttctaagc

SEQ ID NO: 1625390 - DNA, 15 bp, Homo sapiens
gaaagtttctaagca

SEQ ID NO: 1625391 - DNA, 15 bp, Homo sapiens
aaagtttctaagcac

SEQ ID NO: 1625392 - DNA, 15 bp, Homo sapiens
aagtttctaagcaca

SEQ ID NO: 1625393 - DNA, 15 bp, Homo sapiens
agtttctaagcacaa

SEQ ID NO: 1625394 - DNA, 15 bp, Homo sapiens
gtttctaagcacaat

SEQ ID NO: 1625395 - DNA, 15 bp, Homo sapiens
tttctaagcacaatt

SEQ ID NO: 1625396 - DNA, 15 bp, Homo sapiens
ttctaagcacaattg

SEQ ID NO: 1625397 - DNA, 15 bp, Homo sapiens
tctaagcacaattgt

SEQ ID NO: 1625398 - DNA, 15 bp, Homo sapiens
ctaagcacaattgtc

SEQ ID NO: 1625399 - DNA, 15 bp, Homo sapiens
taagcacaattgtct

SEQ ID NO: 1625400 - DNA, 15 bp, Homo sapiens
aagcacaattgtctc

SEQ ID NO: 1625401 - DNA, 15 bp, Homo sapiens
agcacaattgtctct

SEQ ID NO: 1625402 - DNA, 15 bp, Homo sapiens
gcacaattgtctcta

SEQ ID NO: 1625403 - DNA, 15 bp, Homo sapiens
cacaattgtctctag

SEQ ID NO: 1625404 - DNA, 15 bp, Homo sapiens
acaattgtctctagc

SEQ ID NO: 1625405 - DNA, 15 bp, Homo sapiens
caattgtctctagcc

SEQ ID NO: 1625406 - DNA, 15 bp, Homo sapiens
aattgtctctagcca

SEQ ID NO: 1625407 - DNA, 15 bp, Homo sapiens
attgtctctagccaa

SEQ ID NO: 1625408 - DNA, 15 bp, Homo sapiens
ttgtctctagccaac

SEQ ID NO: 1625409 - DNA, 15 bp, Homo sapiens
tgtctctagccaact

SEQ ID NO: 1625410 - DNA, 15 bp, Homo sapiens
gtctctagccaactt

SEQ ID NO: 1625411 - DNA, 15 bp, Homo sapiens
tctctagccaacttc

SEQ ID NO: 1625412 - DNA, 15 bp, Homo sapiens
ctctagccaacttcc

SEQ ID NO: 1625413 - DNA, 15 bp, Homo sapiens
tctagccaacttcct

SEQ ID NO: 1625414 - DNA, 15 bp, Homo sapiens
ctagccaacttcctc

SEQ ID NO: 1625415 - DNA, 15 bp, Homo sapiens
tagccaacttcctct

SEQ ID NO: 1625416 - DNA, 15 bp, Homo sapiens
agccaacttcctctt

SEQ ID NO: 1625417 - DNA, 15 bp, Homo sapiens
gccaacttcctctta

SEQ ID NO: 1625418 - DNA, 15 bp, Homo sapiens
ccaacttcctcttag

SEQ ID NO: 1625419 - DNA, 15 bp, Homo sapiens
caacttcctcttagt

SEQ ID NO: 1625420 - DNA, 15 bp, Homo sapiens
aacttcctcttagta

SEQ ID NO: 1625421 - DNA, 15 bp, Homo sapiens
acttcctcttagtaa

SEQ ID NO: 1625422 - DNA, 15 bp, Homo sapiens
cttcctcttagtaag

SEQ ID NO: 1625423 - DNA, 15 bp, Homo sapiens
ttcctcttagtaaga

SEQ ID NO: 1625424 - DNA, 15 bp, Homo sapiens
tcctcttagtaagaa

SEQ ID NO: 1625425 - DNA, 15 bp, Homo sapiens
cctcttagtaagaaa

SEQ ID NO: 1625426 - DNA, 15 bp, Homo sapiens
ctcttagtaagaaag

SEQ ID NO: 1625427 - DNA, 15 bp, Homo sapiens
tcttagtaagaaaga

SEQ ID NO: 1625428 - DNA, 15 bp, Homo sapiens
cttagtaagaaagag

SEQ ID NO: 1625429 - DNA, 15 bp, Homo sapiens
ttagtaagaaagagg

SEQ ID NO: 1625430 - DNA, 15 bp, Homo sapiens
tagtaagaaagaggc

SEQ ID NO: 1625431 - DNA, 15 bp, Homo sapiens
agtaagaaagaggcc

SEQ ID NO: 1625432 - DNA, 15 bp, Homo sapiens
gtaagaaagaggcca

SEQ ID NO: 1625433 - DNA, 15 bp, Homo sapiens
taagaaagaggccag

SEQ ID NO: 1625434 - DNA, 15 bp, Homo sapiens
aagaaagaggccagg

SEQ ID NO: 1625435 - DNA, 15 bp, Homo sapiens
agaaagaggccaggc

SEQ ID NO: 1625436 - DNA, 15 bp, Homo sapiens
gaaagaggccaggca

SEQ ID NO: 1625437 - DNA, 15 bp, Homo sapiens
aaagaggccaggcag

SEQ ID NO: 1625438 - DNA, 15 bp, Homo sapiens
aagaggccaggcagg

SEQ ID NO: 1625439 - DNA, 15 bp, Homo sapiens
agaggccaggcaggg

SEQ ID NO: 1625440 - DNA, 15 bp, Homo sapiens
gaggccaggcagggc

SEQ ID NO: 1625441 - DNA, 15 bp, Homo sapiens
aggccaggcagggct

SEQ ID NO: 1625442 - DNA, 15 bp, Homo sapiens
ggccaggcagggctt

SEQ ID NO: 1625443 - DNA, 15 bp, Homo sapiens
gccaggcagggcttc

SEQ ID NO: 1625444 - DNA, 15 bp, Homo sapiens
ccaggcagggcttca

SEQ ID NO: 1625445 - DNA, 15 bp, Homo sapiens
caggcagggcttcat

SEQ ID NO: 1625446 - DNA, 15 bp, Homo sapiens
aggcagggcttcatg

SEQ ID NO: 1625447 - DNA, 15 bp, Homo sapiens
ggcagggcttcatgc

SEQ ID NO: 1625448 - DNA, 15 bp, Homo sapiens
gcagggcttcatgca

SEQ ID NO: 1625449 - DNA, 15 bp, Homo sapiens
cagggcttcatgcag

SEQ ID NO: 1625450 - DNA, 15 bp, Homo sapiens
agggcttcatgcagg

SEQ ID NO: 1625451 - DNA, 15 bp, Homo sapiens
gggcttcatgcaggg

SEQ ID NO: 1625452 - DNA, 15 bp, Homo sapiens
ggcttcatgcagggt

SEQ ID NO: 1625453 - DNA, 15 bp, Homo sapiens
gcttcatgcagggta

SEQ ID NO: 1625454 - DNA, 15 bp, Homo sapiens
cttcatgcagggtac

SEQ ID NO: 1625455 - DNA, 15 bp, Homo sapiens
ttcatgcagggtaca

SEQ ID NO: 1625456 - DNA, 15 bp, Homo sapiens
tcatgcagggtacag

SEQ ID NO: 1625457 - DNA, 15 bp, Homo sapiens
catgcagggtacagc

SEQ ID NO: 1625458 - DNA, 15 bp, Homo sapiens
atgcagggtacagcc

SEQ ID NO: 1625459 - DNA, 15 bp, Homo sapiens
tgcagggtacagccc

SEQ ID NO: 1625460 - DNA, 15 bp, Homo sapiens
gcagggtacagccct

SEQ ID NO: 1625461 - DNA, 15 bp, Homo sapiens
cagggtacagccctg

SEQ ID NO: 1625462 - DNA, 15 bp, Homo sapiens
agggtacagccctga

SEQ ID NO: 1625463 - DNA, 15 bp, Homo sapiens
gggtacagccctgag

SEQ ID NO: 1625464 - DNA, 15 bp, Homo sapiens
ggtacagccctgagt

SEQ ID NO: 1625465 - DNA, 15 bp, Homo sapiens
gtacagccctgagtt

SEQ ID NO: 1625466 - DNA, 15 bp, Homo sapiens
tacagccctgagttt

SEQ ID NO: 1625467 - DNA, 15 bp, Homo sapiens
acagccctgagtttc

SEQ ID NO: 1625468 - DNA, 15 bp, Homo sapiens
cagccctgagtttct

SEQ ID NO: 1625469 - DNA, 15 bp, Homo sapiens
agccctgagtttctt

SEQ ID NO: 1625470 - DNA, 15 bp, Homo sapiens
gccctgagtttctta

SEQ ID NO: 1625471 - DNA, 15 bp, Homo sapiens
ccctgagtttcttac

SEQ ID NO: 1625472 - DNA, 15 bp, Homo sapiens
cctgagtttcttact

SEQ ID NO: 1625473 - DNA, 15 bp, Homo sapiens
ctgagtttcttactg

SEQ ID NO: 1625474 - DNA, 15 bp, Homo sapiens
tgagtttcttactgc

SEQ ID NO: 1625475 - DNA, 15 bp, Homo sapiens
gagtttcttactgcg

SEQ ID NO: 1625476 - DNA, 15 bp, Homo sapiens
agtttcttactgcgt

SEQ ID NO: 1625477 - DNA, 15 bp, Homo sapiens
gtttcttactgcgtg

SEQ ID NO: 1625478 - DNA, 15 bp, Homo sapiens
tttcttactgcgtgg

SEQ ID NO: 1625479 - DNA, 15 bp, Homo sapiens
ttcttactgcgtggt

SEQ ID NO: 1625480 - DNA, 15 bp, Homo sapiens
tcttactgcgtggta

SEQ ID NO: 1625481 - DNA, 15 bp, Homo sapiens
cttactgcgtggtaa

SEQ ID NO: 1625482 - DNA, 15 bp, Homo sapiens
ttactgcgtggtaag

SEQ ID NO: 1625483 - DNA, 15 bp, Homo sapiens
tactgcgtggtaagt

SEQ ID NO: 1625484 - DNA, 15 bp, Homo sapiens
actgcgtggtaagtt

SEQ ID NO: 1625485 - DNA, 15 bp, Homo sapiens
ctgcgtggtaagttt

SEQ ID NO: 1625486 - DNA, 15 bp, Homo sapiens
tgcgtggtaagtttc

SEQ ID NO: 1625487 - DNA, 15 bp, Homo sapiens
gcgtggtaagtttct

SEQ ID NO: 1625488 - DNA, 15 bp, Homo sapiens
cgtggtaagtttctg

SEQ ID NO: 1625489 - DNA, 15 bp, Homo sapiens
gtggtaagtttctgg

SEQ ID NO: 1625490 - DNA, 15 bp, Homo sapiens
tggtaagtttctggg

SEQ ID NO: 1625491 - DNA, 15 bp, Homo sapiens
ggtaagtttctgggg

SEQ ID NO: 1625492 - DNA, 15 bp, Homo sapiens
gtaagtttctggggc

SEQ ID NO: 1625493 - DNA, 15 bp, Homo sapiens
taagtttctggggct

SEQ ID NO: 1625494 - DNA, 15 bp, Homo sapiens
aagtttctggggctg

SEQ ID NO: 1625495 - DNA, 15 bp, Homo sapiens
agtttctggggctgg

SEQ ID NO: 1625496 - DNA, 15 bp, Homo sapiens
gtttctggggctggg

SEQ ID NO: 1625497 - DNA, 15 bp, Homo sapiens
tttctggggctggga

SEQ ID NO: 1625498 - DNA, 15 bp, Homo sapiens
ttctggggctgggag

SEQ ID NO: 1625499 - DNA, 15 bp, Homo sapiens
tctggggctgggagt

SEQ ID NO: 1625500 - DNA, 15 bp, Homo sapiens
ctggggctgggagta

SEQ ID NO: 1625501 - DNA, 15 bp, Homo sapiens
tggggctgggagtaa

SEQ ID NO: 1625502 - DNA, 15 bp, Homo sapiens
ggggctgggagtaaa

SEQ ID NO: 1625503 - DNA, 15 bp, Homo sapiens
gggctgggagtaaag

SEQ ID NO: 1625504 - DNA, 15 bp, Homo sapiens
ggctgggagtaaagc

SEQ ID NO: 1625505 - DNA, 15 bp, Homo sapiens
gctgggagtaaagca

SEQ ID NO: 1625506 - DNA, 15 bp, Homo sapiens
ctgggagtaaagcag

SEQ ID NO: 1625507 - DNA, 15 bp, Homo sapiens
tgggagtaaagcagc

SEQ ID NO: 1625508 - DNA, 15 bp, Homo sapiens
gggagtaaagcagcg

SEQ ID NO: 1625509 - DNA, 15 bp, Homo sapiens
ggagtaaagcagcgt

SEQ ID NO: 1625510 - DNA, 15 bp, Homo sapiens
gagtaaagcagcgtg

SEQ ID NO: 1625511 - DNA, 15 bp, Homo sapiens
agtaaagcagcgtga

SEQ ID NO: 1625512 - DNA, 15 bp, Homo sapiens
gtaaagcagcgtgac

SEQ ID NO: 1625513 - DNA, 15 bp, Homo sapiens
taaagcagcgtgacc

SEQ ID NO: 1625514 - DNA, 15 bp, Homo sapiens
aaagcagcgtgaccg

SEQ ID NO: 1625515 - DNA, 15 bp, Homo sapiens
aagcagcgtgaccga

SEQ ID NO: 1625516 - DNA, 15 bp, Homo sapiens
agcagcgtgaccgaa

SEQ ID NO: 1625517 - DNA, 15 bp, Homo sapiens
gcagcgtgaccgaaa

SEQ ID NO: 1625518 - DNA, 15 bp, Homo sapiens
cagcgtgaccgaaag

SEQ ID NO: 1625519 - DNA, 15 bp, Homo sapiens
agcgtgaccgaaagc

SEQ ID NO: 1625520 - DNA, 15 bp, Homo sapiens
gcgtgaccgaaagca

SEQ ID NO: 1625521 - DNA, 15 bp, Homo sapiens
cgtgaccgaaagcag

SEQ ID NO: 1625522 - DNA, 15 bp, Homo sapiens
gtgaccgaaagcagt

SEQ ID NO: 1625523 - DNA, 15 bp, Homo sapiens
tgaccgaaagcagta

SEQ ID NO: 1625524 - DNA, 15 bp, Homo sapiens
gaccgaaagcagtac

SEQ ID NO: 1625525 - DNA, 15 bp, Homo sapiens
accgaaagcagtaca

SEQ ID NO: 1625526 - DNA, 15 bp, Homo sapiens
ccgaaagcagtacaa

SEQ ID NO: 1625527 - DNA, 15 bp, Homo sapiens
cgaaagcagtacaaa

SEQ ID NO: 1625528 - DNA, 15 bp, Homo sapiens
gaaagcagtacaaag

SEQ ID NO: 1625529 - DNA, 15 bp, Homo sapiens
aaagcagtacaaagt

SEQ ID NO: 1625530 - DNA, 15 bp, Homo sapiens
aagcagtacaaagtt

SEQ ID NO: 1625531 - DNA, 15 bp, Homo sapiens
agcagtacaaagttc

SEQ ID NO: 1625532 - DNA, 15 bp, Homo sapiens
gcagtacaaagttct

SEQ ID NO: 1625533 - DNA, 15 bp, Homo sapiens
cagtacaaagttcta

SEQ ID NO: 1625534 - DNA, 15 bp, Homo sapiens
agtacaaagttctac

SEQ ID NO: 1625535 - DNA, 15 bp, Homo sapiens
gtacaaagttctacc

SEQ ID NO: 1625536 - DNA, 15 bp, Homo sapiens
tacaaagttctaccg

SEQ ID NO: 1625537 - DNA, 15 bp, Homo sapiens
acaaagttctaccgg

SEQ ID NO: 1625538 - DNA, 15 bp, Homo sapiens
caaagttctaccgga

SEQ ID NO: 1625539 - DNA, 15 bp, Homo sapiens
aaagttctaccggac

SEQ ID NO: 1625540 - DNA, 15 bp, Homo sapiens
aagttctaccggaca

SEQ ID NO: 1625541 - DNA, 15 bp, Homo sapiens
agttctaccggacac

SEQ ID NO: 1625542 - DNA, 15 bp, Homo sapiens
gttctaccggacacg

SEQ ID NO: 1625543 - DNA, 15 bp, Homo sapiens
ttctaccggacacgc

SEQ ID NO: 1625544 - DNA, 15 bp, Homo sapiens
tctaccggacacgca

SEQ ID NO: 1625545 - DNA, 15 bp, Homo sapiens
ctaccggacacgcag

SEQ ID NO: 1625546 - DNA, 15 bp, Homo sapiens
taccggacacgcaga

SEQ ID NO: 1625547 - DNA, 15 bp, Homo sapiens
accggacacgcagat

SEQ ID NO: 1625548 - DNA, 15 bp, Homo sapiens
ccggacacgcagatc

SEQ ID NO: 1625549 - DNA, 15 bp, Homo sapiens
cggacacgcagatcc

SEQ ID NO: 1625550 - DNA, 15 bp, Homo sapiens
ggacacgcagatccc

SEQ ID NO: 1625551 - DNA, 15 bp, Homo sapiens
gacacgcagatcccg

SEQ ID NO: 1625552 - DNA, 15 bp, Homo sapiens
acacgcagatcccgg

SEQ ID NO: 1625553 - DNA, 15 bp, Homo sapiens
cacgcagatcccggt

SEQ ID NO: 1625554 - DNA, 15 bp, Homo sapiens
acgcagatcccggtc

SEQ ID NO: 1625555 - DNA, 15 bp, Homo sapiens
cgcagatcccggtcc

SEQ ID NO: 1625556 - DNA, 15 bp, Homo sapiens
gcagatcccggtcct

SEQ ID NO: 1625557 - DNA, 15 bp, Homo sapiens
cagatcccggtccta

SEQ ID NO: 1625558 - DNA, 15 bp, Homo sapiens
agatcccggtcctac

SEQ ID NO: 1625559 - DNA, 15 bp, Homo sapiens
gatcccggtcctaca

SEQ ID NO: 1625560 - DNA, 15 bp, Homo sapiens
atcccggtcctacaa

SEQ ID NO: 1625561 - DNA, 15 bp, Homo sapiens
tcccggtcctacaaa

SEQ ID NO: 1625562 - DNA, 15 bp, Homo sapiens
cccggtcctacaaat

SEQ ID NO: 1625563 - DNA, 15 bp, Homo sapiens
ccggtcctacaaata

SEQ ID NO: 1625564 - DNA, 15 bp, Homo sapiens
cggtcctacaaatat

SEQ ID NO: 1625565 - DNA, 15 bp, Homo sapiens
ggtcctacaaatatg

SEQ ID NO: 1625566 - DNA, 15 bp, Homo sapiens
tcctacaaatatgag

SEQ ID NO: 1625567 - DNA, 15 bp, Homo sapiens
cctacaaatatgagg

SEQ ID NO: 1625568 - DNA, 15 bp, Homo sapiens
ctacaaatatgaggt

SEQ ID NO: 1625569 - DNA, 15 bp, Homo sapiens
tacaaatatgaggtc

SEQ ID NO: 1625570 - DNA, 15 bp, Homo sapiens
acaaatatgaggtcc

SEQ ID NO: 1625571 - DNA, 15 bp, Homo sapiens
caaatatgaggtcca

SEQ ID NO: 1625572 - DNA, 15 bp, Homo sapiens
aaatatgaggtccat

SEQ ID NO: 1625573 - DNA, 15 bp, Homo sapiens
aatatgaggtccata

SEQ ID NO: 1625574 - DNA, 15 bp, Homo sapiens
atatgaggtccataa

SEQ ID NO: 1625575 - DNA, 15 bp, Homo sapiens
tatgaggtccataat

SEQ ID NO: 1625576 - DNA, 15 bp, Homo sapiens
atgaggtccataatg

SEQ ID NO: 1625577 - DNA, 15 bp, Homo sapiens
tgaggtccataatga

SEQ ID NO: 1625578 - DNA, 15 bp, Homo sapiens
gaggtccataatgag

SEQ ID NO: 1625579 - DNA, 15 bp, Homo sapiens
aggtccataatgaga

SEQ ID NO: 1625580 - DNA, 15 bp, Homo sapiens
ggtccataatgagac

SEQ ID NO: 1625581 - DNA, 15 bp, Homo sapiens
gtccataatgagact

SEQ ID NO: 1625582 - DNA, 15 bp, Homo sapiens
tccataatgagactg

SEQ ID NO: 1625583 - DNA, 15 bp, Homo sapiens
ccataatgagactga

SEQ ID NO: 1625584 - DNA, 15 bp, Homo sapiens
cataatgagactgag

SEQ ID NO: 1625585 - DNA, 15 bp, Homo sapiens
ataatgagactgaga

SEQ ID NO: 1625586 - DNA, 15 bp, Homo sapiens
taatgagactgagat

SEQ ID NO: 1625587 - DNA, 15 bp, Homo sapiens
aatgagactgagata

SEQ ID NO: 1625588 - DNA, 15 bp, Homo sapiens
atgagactgagatat

SEQ ID NO: 1625589 - DNA, 15 bp, Homo sapiens
tgagactgagatatc

SEQ ID NO: 1625590 - DNA, 15 bp, Homo sapiens
gagactgagatatca

SEQ ID NO: 1625591 - DNA, 15 bp, Homo sapiens
agactgagatatcat

SEQ ID NO: 1625592 - DNA, 15 bp, Homo sapiens
gactgagatatcatt

SEQ ID NO: 1625593 - DNA, 15 bp, Homo sapiens
actgagatatcattc

SEQ ID NO: 1625594 - DNA, 15 bp, Homo sapiens
ctgagatatcattca

SEQ ID NO: 1625595 - DNA, 15 bp, Homo sapiens
tgagatatcattcat

SEQ ID NO: 1625596 - DNA, 15 bp, Homo sapiens
gagatatcattcatc

SEQ ID NO: 1625597 - DNA, 15 bp, Homo sapiens
agatatcattcatcc

SEQ ID NO: 1625598 - DNA, 15 bp, Homo sapiens
gatatcattcatcca

SEQ ID NO: 1625599 - DNA, 15 bp, Homo sapiens
atatcattcatccaa

SEQ ID NO: 1625600 - DNA, 15 bp, Homo sapiens
tatcattcatccaac

SEQ ID NO: 1625601 - DNA, 15 bp, Homo sapiens
atcattcatccaaca

SEQ ID NO: 1625602 - DNA, 15 bp, Homo sapiens
tcattcatccaacaa

SEQ ID NO: 1625603 - DNA, 15 bp, Homo sapiens
cattcatccaacaaa

SEQ ID NO: 1625604 - DNA, 15 bp, Homo sapiens
catccaacaaatatt

SEQ ID NO: 1625605 - DNA, 15 bp, Homo sapiens
atccaacaaatattt

SEQ ID NO: 1625606 - DNA, 15 bp, Homo sapiens
tccaacaaatattta

SEQ ID NO: 1625607 - DNA, 15 bp, Homo sapiens
ccaacaaatatttat

SEQ ID NO: 1625608 - DNA, 15 bp, Homo sapiens
caacaaatatttatt

SEQ ID NO: 1625609 - DNA, 15 bp, Homo sapiens
aacaaatatttattg

SEQ ID NO: 1625610 - DNA, 15 bp, Homo sapiens
acaaatatttattga

SEQ ID NO: 1625611 - DNA, 15 bp, Homo sapiens
caaatatttattgaa

SEQ ID NO: 1625612 - DNA, 15 bp, Homo sapiens
atatttattgaatac

SEQ ID NO: 1625613 - DNA, 15 bp, Homo sapiens
tatttattgaatacc

SEQ ID NO: 1625614 - DNA, 15 bp, Homo sapiens
atttattgaatacca

SEQ ID NO: 1625615 - DNA, 15 bp, Homo sapiens
tttattgaataccaa

SEQ ID NO: 1625616 - DNA, 15 bp, Homo sapiens
ttattgaataccaaa

SEQ ID NO: 1625617 - DNA, 15 bp, Homo sapiens
tattgaataccaaac

SEQ ID NO: 1625618 - DNA, 15 bp, Homo sapiens
attgaataccaaaca

SEQ ID NO: 1625619 - DNA, 15 bp, Homo sapiens
ttgaataccaaacat

SEQ ID NO: 1625620 - DNA, 15 bp, Homo sapiens
tgaataccaaacatt

SEQ ID NO: 1625621 - DNA, 15 bp, Homo sapiens
gaataccaaacattg

SEQ ID NO: 1625622 - DNA, 15 bp, Homo sapiens
aataccaaacattgg

SEQ ID NO: 1625623 - DNA, 15 bp, Homo sapiens
ataccaaacattggg

SEQ ID NO: 1625624 - DNA, 15 bp, Homo sapiens
taccaaacattgggc

SEQ ID NO: 1625625 - DNA, 15 bp, Homo sapiens
accaaacattgggct

SEQ ID NO: 1625626 - DNA, 15 bp, Homo sapiens
ccaaacattgggctt

SEQ ID NO: 1625627 - DNA, 15 bp, Homo sapiens
caaacattgggctta

SEQ ID NO: 1625628 - DNA, 15 bp, Homo sapiens
aaacattgggcttac

SEQ ID NO: 1625629 - DNA, 15 bp, Homo sapiens
aacattgggcttacg

SEQ ID NO: 1625630 - DNA, 15 bp, Homo sapiens
acattgggcttacgg

SEQ ID NO: 1625631 - DNA, 15 bp, Homo sapiens
cattgggcttacggc

SEQ ID NO: 1625632 - DNA, 15 bp, Homo sapiens
attgggcttacggct

SEQ ID NO: 1625633 - DNA, 15 bp, Homo sapiens
ttgggcttacggcta

SEQ ID NO: 1625634 - DNA, 15 bp, Homo sapiens
tgggcttacggctaa

SEQ ID NO: 1625635 - DNA, 15 bp, Homo sapiens
gggcttacggctaaa

SEQ ID NO: 1625636 - DNA, 15 bp, Homo sapiens
ggcttacggctaaag

SEQ ID NO: 1625637 - DNA, 15 bp, Homo sapiens
gcttacggctaaagg

SEQ ID NO: 1625638 - DNA, 15 bp, Homo sapiens
cttacggctaaagga

SEQ ID NO: 1625639 - DNA, 15 bp, Homo sapiens
ttacggctaaaggaa

SEQ ID NO: 1625640 - DNA, 15 bp, Homo sapiens
tacggctaaaggaaa

SEQ ID NO: 1625641 - DNA, 15 bp, Homo sapiens
acggctaaaggaaaa

SEQ ID NO: 1625642 - DNA, 15 bp, Homo sapiens
cggctaaaggaaaat

SEQ ID NO: 1625643 - DNA, 15 bp, Homo sapiens
ggctaaaggaaaata

SEQ ID NO: 1625644 - DNA, 15 bp, Homo sapiens
gctaaaggaaaatac

SEQ ID NO: 1625645 - DNA, 15 bp, Homo sapiens
ctaaaggaaaataca

SEQ ID NO: 1625646 - DNA, 15 bp, Homo sapiens
taaaggaaaatacaa

SEQ ID NO: 1625647 - DNA, 15 bp, Homo sapiens
aaaggaaaatacaaa

SEQ ID NO: 1625648 - DNA, 15 bp, Homo sapiens
aaggaaaatacaaag

SEQ ID NO: 1625649 - DNA, 15 bp, Homo sapiens
aggaaaatacaaagt

SEQ ID NO: 1625650 - DNA, 15 bp, Homo sapiens
ggaaaatacaaagtt

SEQ ID NO: 1625651 - DNA, 15 bp, Homo sapiens
gaaaatacaaagttg

SEQ ID NO: 1625652 - DNA, 15 bp, Homo sapiens
aaaatacaaagttgt

SEQ ID NO: 1625653 - DNA, 15 bp, Homo sapiens
aaatacaaagttgtg

SEQ ID NO: 1625654 - DNA, 15 bp, Homo sapiens
aatacaaagttgtgt

SEQ ID NO: 1625655 - DNA, 15 bp, Homo sapiens
atacaaagttgtgtt

SEQ ID NO: 1625656 - DNA, 15 bp, Homo sapiens
tacaaagttgtgttg

SEQ ID NO: 1625657 - DNA, 15 bp, Homo sapiens
acaaagttgtgttgg

SEQ ID NO: 1625658 - DNA, 15 bp, Homo sapiens
caaagttgtgttgga

SEQ ID NO: 1625659 - DNA, 15 bp, Homo sapiens
aaagttgtgttggat

SEQ ID NO: 1625660 - DNA, 15 bp, Homo sapiens
aagttgtgttggata

SEQ ID NO: 1625661 - DNA, 15 bp, Homo sapiens
agttgtgttggatat

SEQ ID NO: 1625662 - DNA, 15 bp, Homo sapiens
gttgtgttggatatg

SEQ ID NO: 1625663 - DNA, 15 bp, Homo sapiens
ttgtgttggatatgg

SEQ ID NO: 1625664 - DNA, 15 bp, Homo sapiens
tgtgttggatatggg

SEQ ID NO: 1625665 - DNA, 15 bp, Homo sapiens
gtgttggatatgggt

SEQ ID NO: 1625666 - DNA, 15 bp, Homo sapiens
tgttggatatgggtt

SEQ ID NO: 1625667 - DNA, 15 bp, Homo sapiens
gttggatatgggttc

SEQ ID NO: 1625668 - DNA, 15 bp, Homo sapiens
ttggatatgggttct

SEQ ID NO: 1625669 - DNA, 15 bp, Homo sapiens
tggatatgggttctg

SEQ ID NO: 1625670 - DNA, 15 bp, Homo sapiens
ggatatgggttctgt

SEQ ID NO: 1625671 - DNA, 15 bp, Homo sapiens
gatatgggttctgtt

SEQ ID NO: 1625672 - DNA, 15 bp, Homo sapiens
atatgggttctgttt

SEQ ID NO: 1625673 - DNA, 15 bp, Homo sapiens
tatgggttctgtttt

SEQ ID NO: 1625674 - DNA, 15 bp, Homo sapiens
atgggttctgttttc

SEQ ID NO: 1625675 - DNA, 15 bp, Homo sapiens
tgggttctgttttca

SEQ ID NO: 1625676 - DNA, 15 bp, Homo sapiens
gggttctgttttcaa

SEQ ID NO: 1625677 - DNA, 15 bp, Homo sapiens
ggttctgttttcaag

SEQ ID NO: 1625678 - DNA, 15 bp, Homo sapiens
gttctgttttcaagg

SEQ ID NO: 1625679 - DNA, 15 bp, Homo sapiens
ttctgttttcaagga

SEQ ID NO: 1625680 - DNA, 15 bp, Homo sapiens
tctgttttcaaggag

SEQ ID NO: 1625681 - DNA, 15 bp, Homo sapiens
ctgttttcaaggagc

SEQ ID NO: 1625682 - DNA, 15 bp, Homo sapiens
tgttttcaaggagct

SEQ ID NO: 1625683 - DNA, 15 bp, Homo sapiens
gttttcaaggagctt

SEQ ID NO: 1625684 - DNA, 15 bp, Homo sapiens
ttttcaaggagctta

SEQ ID NO: 1625685 - DNA, 15 bp, Homo sapiens
tttcaaggagcttat

SEQ ID NO: 1625686 - DNA, 15 bp, Homo sapiens
ttcaaggagcttata

SEQ ID NO: 1625687 - DNA, 15 bp, Homo sapiens
tcaaggagcttataa

SEQ ID NO: 1625688 - DNA, 15 bp, Homo sapiens
caaggagcttataat

SEQ ID NO: 1625689 - DNA, 15 bp, Homo sapiens
aaggagcttataatc

SEQ ID NO: 1625690 - DNA, 15 bp, Homo sapiens
aggagcttataatct

SEQ ID NO: 1625691 - DNA, 15 bp, Homo sapiens
ggagcttataatcta

SEQ ID NO: 1625692 - DNA, 15 bp, Homo sapiens
gagcttataatctaa

SEQ ID NO: 1625693 - DNA, 15 bp, Homo sapiens
agcttataatctaat

SEQ ID NO: 1625694 - DNA, 15 bp, Homo sapiens
gcttataatctaata

SEQ ID NO: 1625695 - DNA, 15 bp, Homo sapiens
cttataatctaatag

SEQ ID NO: 1625696 - DNA, 15 bp, Homo sapiens
ttataatctaatagg

SEQ ID NO: 1625697 - DNA, 15 bp, Homo sapiens
tataatctaatagga

SEQ ID NO: 1625698 - DNA, 15 bp, Homo sapiens
ataatctaataggaa

SEQ ID NO: 1625699 - DNA, 15 bp, Homo sapiens
taatctaataggaaa

SEQ ID NO: 1625700 - DNA, 15 bp, Homo sapiens
aatctaataggaaag

SEQ ID NO: 1625701 - DNA, 15 bp, Homo sapiens
atctaataggaaaga

SEQ ID NO: 1625702 - DNA, 15 bp, Homo sapiens
tctaataggaaagat

SEQ ID NO: 1625703 - DNA, 15 bp, Homo sapiens
ctaataggaaagatg

SEQ ID NO: 1625704 - DNA, 15 bp, Homo sapiens
taataggaaagatga

SEQ ID NO: 1625705 - DNA, 15 bp, Homo sapiens
aataggaaagatgag

SEQ ID NO: 1625706 - DNA, 15 bp, Homo sapiens
ataggaaagatgagg

SEQ ID NO: 1625707 - DNA, 15 bp, Homo sapiens
taggaaagatgaggt

SEQ ID NO: 1625708 - DNA, 15 bp, Homo sapiens
aggaaagatgaggtt

SEQ ID NO: 1625709 - DNA, 15 bp, Homo sapiens
ggaaagatgaggtta

SEQ ID NO: 1625710 - DNA, 15 bp, Homo sapiens
gaaagatgaggttac

SEQ ID NO: 1625711 - DNA, 15 bp, Homo sapiens
aaagatgaggttact

SEQ ID NO: 1625712 - DNA, 15 bp, Homo sapiens
aagatgaggttacta

SEQ ID NO: 1625713 - DNA, 15 bp, Homo sapiens
agatgaggttactac

SEQ ID NO: 1625714 - DNA, 15 bp, Homo sapiens
gatgaggttactaca

SEQ ID NO: 1625715 - DNA, 15 bp, Homo sapiens
atgaggttactacat

SEQ ID NO: 1625716 - DNA, 15 bp, Homo sapiens
tgaggttactacatt

SEQ ID NO: 1625717 - DNA, 15 bp, Homo sapiens
gaggttactacatta

SEQ ID NO: 1625718 - DNA, 15 bp, Homo sapiens
aggttactacattag

SEQ ID NO: 1625719 - DNA, 15 bp, Homo sapiens
ggttactacattagt

SEQ ID NO: 1625720 - DNA, 15 bp, Homo sapiens
gttactacattagta

SEQ ID NO: 1625721 - DNA, 15 bp, Homo sapiens
ttactacattagtag

SEQ ID NO: 1625722 - DNA, 15 bp, Homo sapiens
tactacattagtagc

SEQ ID NO: 1625723 - DNA, 15 bp, Homo sapiens
actacattagtagca

SEQ ID NO: 1625724 - DNA, 15 bp, Homo sapiens
ctacattagtagcaa

SEQ ID NO: 1625725 - DNA, 15 bp, Homo sapiens
tacattagtagcaat

SEQ ID NO: 1625726 - DNA, 15 bp, Homo sapiens
acattagtagcaatc

SEQ ID NO: 1625727 - DNA, 15 bp, Homo sapiens
cattagtagcaatca

SEQ ID NO: 1625728 - DNA, 15 bp, Homo sapiens
attagtagcaatcag

SEQ ID NO: 1625729 - DNA, 15 bp, Homo sapiens
ttagtagcaatcaga

SEQ ID NO: 1625730 - DNA, 15 bp, Homo sapiens
tagtagcaatcagac

SEQ ID NO: 1625731 - DNA, 15 bp, Homo sapiens
agtagcaatcagacc

SEQ ID NO: 1625732 - DNA, 15 bp, Homo sapiens
gtagcaatcagacca

SEQ ID NO: 1625733 - DNA, 15 bp, Homo sapiens
tagcaatcagaccag

SEQ ID NO: 1625734 - DNA, 15 bp, Homo sapiens
agcaatcagaccaga

SEQ ID NO: 1625735 - DNA, 15 bp, Homo sapiens
gcaatcagaccagat

SEQ ID NO: 1625736 - DNA, 15 bp, Homo sapiens
caatcagaccagata

SEQ ID NO: 1625737 - DNA, 15 bp, Homo sapiens
aatcagaccagatag

SEQ ID NO: 1625738 - DNA, 15 bp, Homo sapiens
atcagaccagataga

SEQ ID NO: 1625739 - DNA, 15 bp, Homo sapiens
tcagaccagatagaa

SEQ ID NO: 1625740 - DNA, 15 bp, Homo sapiens
cagaccagatagaac

SEQ ID NO: 1625741 - DNA, 15 bp, Homo sapiens
agaccagatagaact

SEQ ID NO: 1625742 - DNA, 15 bp, Homo sapiens
gaccagatagaactg

SEQ ID NO: 1625743 - DNA, 15 bp, Homo sapiens
accagatagaactgg

SEQ ID NO: 1625744 - DNA, 15 bp, Homo sapiens
ccagatagaactgga

SEQ ID NO: 1625745 - DNA, 15 bp, Homo sapiens
cagatagaactggaa

SEQ ID NO: 1625746 - DNA, 15 bp, Homo sapiens
agatagaactggaag

SEQ ID NO: 1625747 - DNA, 15 bp, Homo sapiens
gatagaactggaagt

SEQ ID NO: 1625748 - DNA, 15 bp, Homo sapiens
atagaactggaagtg

SEQ ID NO: 1625749 - DNA, 15 bp, Homo sapiens
tagaactggaagtgt

SEQ ID NO: 1625750 - DNA, 15 bp, Homo sapiens
agaactggaagtgtg

SEQ ID NO: 1625751 - DNA, 15 bp, Homo sapiens
gaactggaagtgtga

SEQ ID NO: 1625752 - DNA, 15 bp, Homo sapiens
aactggaagtgtgat

SEQ ID NO: 1625753 - DNA, 15 bp, Homo sapiens
actggaagtgtgatg

SEQ ID NO: 1625754 - DNA, 15 bp, Homo sapiens
ctggaagtgtgatgt

SEQ ID NO: 1625755 - DNA, 15 bp, Homo sapiens
tggaagtgtgatgta

SEQ ID NO: 1625756 - DNA, 15 bp, Homo sapiens
ggaagtgtgatgtaa

SEQ ID NO: 1625757 - DNA, 15 bp, Homo sapiens
gaagtgtgatgtaaa

SEQ ID NO: 1625758 - DNA, 15 bp, Homo sapiens
aagtgtgatgtaaat

SEQ ID NO: 1625759 - DNA, 15 bp, Homo sapiens
agtgtgatgtaaatg

SEQ ID NO: 1625760 - DNA, 15 bp, Homo sapiens
gtgtgatgtaaatga

SEQ ID NO: 1625761 - DNA, 15 bp, Homo sapiens
tgtgatgtaaatgag

SEQ ID NO: 1625762 - DNA, 15 bp, Homo sapiens
gtgatgtaaatgagg

SEQ ID NO: 1625763 - DNA, 15 bp, Homo sapiens
tgatgtaaatgaggt

SEQ ID NO: 1625764 - DNA, 15 bp, Homo sapiens
gatgtaaatgaggta

SEQ ID NO: 1625765 - DNA, 15 bp, Homo sapiens
atgtaaatgaggtac

SEQ ID NO: 1625766 - DNA, 15 bp, Homo sapiens
tgtaaatgaggtaca

SEQ ID NO: 1625767 - DNA, 15 bp, Homo sapiens
gtaaatgaggtacag

SEQ ID NO: 1625768 - DNA, 15 bp, Homo sapiens
taaatgaggtacaga

SEQ ID NO: 1625769 - DNA, 15 bp, Homo sapiens
aaatgaggtacagat

SEQ ID NO: 1625770 - DNA, 15 bp, Homo sapiens
aatgaggtacagatt

SEQ ID NO: 1625771 - DNA, 15 bp, Homo sapiens
atgaggtacagattg

SEQ ID NO: 1625772 - DNA, 15 bp, Homo sapiens
tgaggtacagattga

SEQ ID NO: 1625773 - DNA, 15 bp, Homo sapiens
gaggtacagattgat

SEQ ID NO: 1625774 - DNA, 15 bp, Homo sapiens
aggtacagattgatt

SEQ ID NO: 1625775 - DNA, 15 bp, Homo sapiens
ggtacagattgattg

SEQ ID NO: 1625776 - DNA, 15 bp, Homo sapiens
gtacagattgattgt

SEQ ID NO: 1625777 - DNA, 15 bp, Homo sapiens
tacagattgattgta

SEQ ID NO: 1625778 - DNA, 15 bp, Homo sapiens
acagattgattgtag

SEQ ID NO: 1625779 - DNA, 15 bp, Homo sapiens
cagattgattgtaga

SEQ ID NO: 1625780 - DNA, 15 bp, Homo sapiens
agattgattgtagaa

SEQ ID NO: 1625781 - DNA, 15 bp, Homo sapiens
gattgattgtagaat

SEQ ID NO: 1625782 - DNA, 15 bp, Homo sapiens
attgattgtagaatt

SEQ ID NO: 1625783 - DNA, 15 bp, Homo sapiens
ttgattgtagaattt

SEQ ID NO: 1625784 - DNA, 15 bp, Homo sapiens
tgattgtagaatttt

SEQ ID NO: 1625785 - DNA, 15 bp, Homo sapiens
gattgtagaattttg

SEQ ID NO: 1625786 - DNA, 15 bp, Homo sapiens
attgtagaattttgc

SEQ ID NO: 1625787 - DNA, 15 bp, Homo sapiens
ttgtagaattttgca

SEQ ID NO: 1625788 - DNA, 15 bp, Homo sapiens
tgtagaattttgcag

SEQ ID NO: 1625789 - DNA, 15 bp, Homo sapiens
gtagaattttgcaga

SEQ ID NO: 1625790 - DNA, 15 bp, Homo sapiens
tagaattttgcagaa

SEQ ID NO: 1625791 - DNA, 15 bp, Homo sapiens
agaattttgcagaaa

SEQ ID NO: 1625792 - DNA, 15 bp, Homo sapiens
gaattttgcagaaag

SEQ ID NO: 1625793 - DNA, 15 bp, Homo sapiens
aattttgcagaaaga

SEQ ID NO: 1625794 - DNA, 15 bp, Homo sapiens
attttgcagaaagaa

SEQ ID NO: 1625795 - DNA, 15 bp, Homo sapiens
ttttgcagaaagaaa

SEQ ID NO: 1625796 - DNA, 15 bp, Homo sapiens
tttgcagaaagaaaa

SEQ ID NO: 1625797 - DNA, 15 bp, Homo sapiens
ttgcagaaagaaaac

SEQ ID NO: 1625798 - DNA, 15 bp, Homo sapiens
tgcagaaagaaaaca

SEQ ID NO: 1625799 - DNA, 15 bp, Homo sapiens
gcagaaagaaaacaa

SEQ ID NO: 1625800 - DNA, 15 bp, Homo sapiens
cagaaagaaaacaat

SEQ ID NO: 1625801 - DNA, 15 bp, Homo sapiens
agaaagaaaacaatt

SEQ ID NO: 1625802 - DNA, 15 bp, Homo sapiens
gaaagaaaacaattc

SEQ ID NO: 1625803 - DNA, 15 bp, Homo sapiens
aaagaaaacaattct

SEQ ID NO: 1625804 - DNA, 15 bp, Homo sapiens
aagaaaacaattctg

SEQ ID NO: 1625805 - DNA, 15 bp, Homo sapiens
agaaaacaattctga

SEQ ID NO: 1625806 - DNA, 15 bp, Homo sapiens
gaaaacaattctgaa

SEQ ID NO: 1625807 - DNA, 15 bp, Homo sapiens
aaaacaattctgaag

SEQ ID NO: 1625808 - DNA, 15 bp, Homo sapiens
aaacaattctgaaga

SEQ ID NO: 1625809 - DNA, 15 bp, Homo sapiens
aacaattctgaagaa

SEQ ID NO: 1625810 - DNA, 15 bp, Homo sapiens
acaattctgaagaaa

SEQ ID NO: 1625811 - DNA, 15 bp, Homo sapiens
caattctgaagaaat

SEQ ID NO: 1625812 - DNA, 15 bp, Homo sapiens
aattctgaagaaatg

SEQ ID NO: 1625813 - DNA, 15 bp, Homo sapiens
attctgaagaaatgt

SEQ ID NO: 1625814 - DNA, 15 bp, Homo sapiens
ttctgaagaaatgtt

SEQ ID NO: 1625815 - DNA, 15 bp, Homo sapiens
tctgaagaaatgttc

SEQ ID NO: 1625816 - DNA, 15 bp, Homo sapiens
ctgaagaaatgttca

SEQ ID NO: 1625817 - DNA, 15 bp, Homo sapiens
tgaagaaatgttcat

SEQ ID NO: 1625818 - DNA, 15 bp, Homo sapiens
gaagaaatgttcatg

SEQ ID NO: 1625819 - DNA, 15 bp, Homo sapiens
aagaaatgttcatgg

SEQ ID NO: 1625820 - DNA, 15 bp, Homo sapiens
agaaatgttcatgga

SEQ ID NO: 1625821 - DNA, 15 bp, Homo sapiens
gaaatgttcatggaa

SEQ ID NO: 1625822 - DNA, 15 bp, Homo sapiens
aaatgttcatggaag

SEQ ID NO: 1625823 - DNA, 15 bp, Homo sapiens
aatgttcatggaagt

SEQ ID NO: 1625824 - DNA, 15 bp, Homo sapiens
atgttcatggaagta

SEQ ID NO: 1625825 - DNA, 15 bp, Homo sapiens
tgttcatggaagtat

SEQ ID NO: 1625826 - DNA, 15 bp, Homo sapiens
gttcatggaagtatt

SEQ ID NO: 1625827 - DNA, 15 bp, Homo sapiens
ttcatggaagtatta

SEQ ID NO: 1625828 - DNA, 15 bp, Homo sapiens
tcatggaagtattag

SEQ ID NO: 1625829 - DNA, 15 bp, Homo sapiens
catggaagtattagc

SEQ ID NO: 1625830 - DNA, 15 bp, Homo sapiens
atggaagtattagca

SEQ ID NO: 1625831 - DNA, 15 bp, Homo sapiens
tggaagtattagcag

SEQ ID NO: 1625832 - DNA, 15 bp, Homo sapiens
ggaagtattagcagt

SEQ ID NO: 1625833 - DNA, 15 bp, Homo sapiens
gaagtattagcagtt

SEQ ID NO: 1625834 - DNA, 15 bp, Homo sapiens
aagtattagcagttg

SEQ ID NO: 1625835 - DNA, 15 bp, Homo sapiens
agtattagcagttga

SEQ ID NO: 1625836 - DNA, 15 bp, Homo sapiens
gtattagcagttgag

SEQ ID NO: 1625837 - DNA, 15 bp, Homo sapiens
tattagcagttgaga

SEQ ID NO: 1625838 - DNA, 15 bp, Homo sapiens
attagcagttgagat

SEQ ID NO: 1625839 - DNA, 15 bp, Homo sapiens
ttagcagttgagatg

SEQ ID NO: 1625840 - DNA, 15 bp, Homo sapiens
tagcagttgagatgt

SEQ ID NO: 1625841 - DNA, 15 bp, Homo sapiens
agcagttgagatgta

SEQ ID NO: 1625842 - DNA, 15 bp, Homo sapiens
gcagttgagatgtat

SEQ ID NO: 1625843 - DNA, 15 bp, Homo sapiens
cagttgagatgtatc

SEQ ID NO: 1625844 - DNA, 15 bp, Homo sapiens
agttgagatgtatct

SEQ ID NO: 1625845 - DNA, 15 bp, Homo sapiens
gttgagatgtatctt

SEQ ID NO: 1625846 - DNA, 15 bp, Homo sapiens
ttgagatgtatctta

SEQ ID NO: 1625847 - DNA, 15 bp, Homo sapiens
tgagatgtatcttaa

SEQ ID NO: 1625848 - DNA, 15 bp, Homo sapiens
gagatgtatcttaaa

SEQ ID NO: 1625849 - DNA, 15 bp, Homo sapiens
agatgtatcttaaaa

SEQ ID NO: 1625850 - DNA, 15 bp, Homo sapiens
gatgtatcttaaaag

SEQ ID NO: 1625851 - DNA, 15 bp, Homo sapiens
atgtatcttaaaaga

SEQ ID NO: 1625852 - DNA, 15 bp, Homo sapiens
tgtatcttaaaagat

SEQ ID NO: 1625853 - DNA, 15 bp, Homo sapiens
gtatcttaaaagata

SEQ ID NO: 1625854 - DNA, 15 bp, Homo sapiens
tatcttaaaagataa

SEQ ID NO: 1625855 - DNA, 15 bp, Homo sapiens
atcttaaaagataag

SEQ ID NO: 1625856 - DNA, 15 bp, Homo sapiens
tcttaaaagataagt

SEQ ID NO: 1625857 - DNA, 15 bp, Homo sapiens
cttaaaagataagtg

SEQ ID NO: 1625858 - DNA, 15 bp, Homo sapiens
ttaaaagataagtgg

SEQ ID NO: 1625859 - DNA, 15 bp, Homo sapiens
taaaagataagtggg

SEQ ID NO: 1625860 - DNA, 15 bp, Homo sapiens
aaaagataagtgggg

SEQ ID NO: 1625861 - DNA, 15 bp, Homo sapiens
aaagataagtggggt

SEQ ID NO: 1625862 - DNA, 15 bp, Homo sapiens
aagataagtggggtt

SEQ ID NO: 1625863 - DNA, 15 bp, Homo sapiens
agataagtggggttc

SEQ ID NO: 1625864 - DNA, 15 bp, Homo sapiens
gataagtggggttcc

SEQ ID NO: 1625865 - DNA, 15 bp, Homo sapiens
ataagtggggttcct

SEQ ID NO: 1625866 - DNA, 15 bp, Homo sapiens
taagtggggttcctg

SEQ ID NO: 1625867 - DNA, 15 bp, Homo sapiens
aagtggggttcctgt

SEQ ID NO: 1625868 - DNA, 15 bp, Homo sapiens
agtggggttcctgtt

SEQ ID NO: 1625869 - DNA, 15 bp, Homo sapiens
gtggggttcctgttg

SEQ ID NO: 1625870 - DNA, 15 bp, Homo sapiens
tggggttcctgttgg

SEQ ID NO: 1625871 - DNA, 15 bp, Homo sapiens
ggggttcctgttgga

SEQ ID NO: 1625872 - DNA, 15 bp, Homo sapiens
gggttcctgttggaa

SEQ ID NO: 1625873 - DNA, 15 bp, Homo sapiens
ggttcctgttggaaa

SEQ ID NO: 1625874 - DNA, 15 bp, Homo sapiens
gttcctgttggaaac

SEQ ID NO: 1625875 - DNA, 15 bp, Homo sapiens
ttcctgttggaaaca

SEQ ID NO: 1625876 - DNA, 15 bp, Homo sapiens
tcctgttggaaacat

SEQ ID NO: 1625877 - DNA, 15 bp, Homo sapiens
cctgttggaaacatt

SEQ ID NO: 1625878 - DNA, 15 bp, Homo sapiens
ctgttggaaacattc

SEQ ID NO: 1625879 - DNA, 15 bp, Homo sapiens
tgttggaaacattca

SEQ ID NO: 1625880 - DNA, 15 bp, Homo sapiens
gttggaaacattcaa

SEQ ID NO: 1625881 - DNA, 15 bp, Homo sapiens
ttggaaacattcaaa

SEQ ID NO: 1625882 - DNA, 15 bp, Homo sapiens
tggaaacattcaaaa

SEQ ID NO: 1625883 - DNA, 15 bp, Homo sapiens
ggaaacattcaaaac

SEQ ID NO: 1625884 - DNA, 15 bp, Homo sapiens
gaaacattcaaaact

SEQ ID NO: 1625885 - DNA, 15 bp, Homo sapiens
aaacattcaaaactc

SEQ ID NO: 1625886 - DNA, 15 bp, Homo sapiens
aacattcaaaactct

SEQ ID NO: 1625887 - DNA, 15 bp, Homo sapiens
acattcaaaactctc

SEQ ID NO: 1625888 - DNA, 15 bp, Homo sapiens
cattcaaaactctct

SEQ ID NO: 1625889 - DNA, 15 bp, Homo sapiens
attcaaaactctctc

SEQ ID NO: 1625890 - DNA, 15 bp, Homo sapiens
ttcaaaactctctct

SEQ ID NO: 1625891 - DNA, 15 bp, Homo sapiens
tcaaaactctctctt

SEQ ID NO: 1625892 - DNA, 15 bp, Homo sapiens
caaaactctctcttc

SEQ ID NO: 1625893 - DNA, 15 bp, Homo sapiens
aaaactctctcttct

SEQ ID NO: 1625894 - DNA, 15 bp, Homo sapiens
aaactctctcttcta

SEQ ID NO: 1625895 - DNA, 15 bp, Homo sapiens
aactctctcttctag

SEQ ID NO: 1625896 - DNA, 15 bp, Homo sapiens
actctctcttctagc

SEQ ID NO: 1625897 - DNA, 15 bp, Homo sapiens
ctctctcttctagct

SEQ ID NO: 1625898 - DNA, 15 bp, Homo sapiens
tctctcttctagcta

SEQ ID NO: 1625899 - DNA, 15 bp, Homo sapiens
ctctcttctagctat

SEQ ID NO: 1625900 - DNA, 15 bp, Homo sapiens
tctcttctagctatt

SEQ ID NO: 1625901 - DNA, 15 bp, Homo sapiens
ctcttctagctattt

SEQ ID NO: 1625902 - DNA, 15 bp, Homo sapiens
tcttctagctatttt

SEQ ID NO: 1625903 - DNA, 15 bp, Homo sapiens
cttctagctatttta

SEQ ID NO: 1625904 - DNA, 15 bp, Homo sapiens
ttctagctattttaa

SEQ ID NO: 1625905 - DNA, 15 bp, Homo sapiens
tctagctattttaaa

SEQ ID NO: 1625906 - DNA, 15 bp, Homo sapiens
ctagctattttaaaa

SEQ ID NO: 1625907 - DNA, 15 bp, Homo sapiens
tagctattttaaaat

SEQ ID NO: 1625908 - DNA, 15 bp, Homo sapiens
agctattttaaaata

SEQ ID NO: 1625909 - DNA, 15 bp, Homo sapiens
gctattttaaaatac

SEQ ID NO: 1625910 - DNA, 15 bp, Homo sapiens
ctattttaaaatacg

SEQ ID NO: 1625911 - DNA, 15 bp, Homo sapiens
tattttaaaatacgc

SEQ ID NO: 1625912 - DNA, 15 bp, Homo sapiens
attttaaaatacgca

SEQ ID NO: 1625913 - DNA, 15 bp, Homo sapiens
ttttaaaatacgcaa

SEQ ID NO: 1625914 - DNA, 15 bp, Homo sapiens
tttaaaatacgcaat

SEQ ID NO: 1625915 - DNA, 15 bp, Homo sapiens
ttaaaatacgcaata

SEQ ID NO: 1625916 - DNA, 15 bp, Homo sapiens
taaaatacgcaatat

SEQ ID NO: 1625917 - DNA, 15 bp, Homo sapiens
aaaatacgcaatata

SEQ ID NO: 1625918 - DNA, 15 bp, Homo sapiens
aaatacgcaatatat

SEQ ID NO: 1625919 - DNA, 15 bp, Homo sapiens
aatacgcaatatatt

SEQ ID NO: 1625920 - DNA, 15 bp, Homo sapiens
atacgcaatatatta

SEQ ID NO: 1625921 - DNA, 15 bp, Homo sapiens
tacgcaatatattat

SEQ ID NO: 1625922 - DNA, 15 bp, Homo sapiens
acgcaatatattatt

SEQ ID NO: 1625923 - DNA, 15 bp, Homo sapiens
cgcaatatattatta

SEQ ID NO: 1625924 - DNA, 15 bp, Homo sapiens
gcaatatattattaa

SEQ ID NO: 1625925 - DNA, 15 bp, Homo sapiens
caatatattattaac

SEQ ID NO: 1625926 - DNA, 15 bp, Homo sapiens
aatatattattaact

SEQ ID NO: 1625927 - DNA, 15 bp, Homo sapiens
atatattattaacta

SEQ ID NO: 1625928 - DNA, 15 bp, Homo sapiens
tatattattaactat

SEQ ID NO: 1625929 - DNA, 15 bp, Homo sapiens
atattattaactatg

SEQ ID NO: 1625930 - DNA, 15 bp, Homo sapiens
tattattaactatgg

SEQ ID NO: 1625931 - DNA, 15 bp, Homo sapiens
attattaactatggt

SEQ ID NO: 1625932 - DNA, 15 bp, Homo sapiens
ttattaactatggtc

SEQ ID NO: 1625933 - DNA, 15 bp, Homo sapiens
tattaactatggtca

SEQ ID NO: 1625934 - DNA, 15 bp, Homo sapiens
attaactatggtcac

SEQ ID NO: 1625935 - DNA, 15 bp, Homo sapiens
ttaactatggtcacc

SEQ ID NO: 1625936 - DNA, 15 bp, Homo sapiens
taactatggtcacct

SEQ ID NO: 1625937 - DNA, 15 bp, Homo sapiens
aactatggtcacctt

SEQ ID NO: 1625938 - DNA, 15 bp, Homo sapiens
actatggtcacctta

SEQ ID NO: 1625939 - DNA, 15 bp, Homo sapiens
ctatggtcaccttac

SEQ ID NO: 1625940 - DNA, 15 bp, Homo sapiens
tatggtcaccttact

SEQ ID NO: 1625941 - DNA, 15 bp, Homo sapiens
atggtcaccttactg

SEQ ID NO: 1625942 - DNA, 15 bp, Homo sapiens
tggtcaccttactgt

SEQ ID NO: 1625943 - DNA, 15 bp, Homo sapiens
ggtcaccttactgtg

SEQ ID NO: 1625944 - DNA, 15 bp, Homo sapiens
gtcaccttactgtgc

SEQ ID NO: 1625945 - DNA, 15 bp, Homo sapiens
tcaccttactgtgct

SEQ ID NO: 1625946 - DNA, 15 bp, Homo sapiens
caccttactgtgcta

SEQ ID NO: 1625947 - DNA, 15 bp, Homo sapiens
accttactgtgctat

SEQ ID NO: 1625948 - DNA, 15 bp, Homo sapiens
ccttactgtgctata

SEQ ID NO: 1625949 - DNA, 15 bp, Homo sapiens
cttactgtgctatag

SEQ ID NO: 1625950 - DNA, 15 bp, Homo sapiens
ttactgtgctataga

SEQ ID NO: 1625951 - DNA, 15 bp, Homo sapiens
tactgtgctatagaa

SEQ ID NO: 1625952 - DNA, 15 bp, Homo sapiens
actgtgctatagaac

SEQ ID NO: 1625953 - DNA, 15 bp, Homo sapiens
ctgtgctatagaaca

SEQ ID NO: 1625954 - DNA, 15 bp, Homo sapiens
tgtgctatagaacac

SEQ ID NO: 1625955 - DNA, 15 bp, Homo sapiens
gtgctatagaacact

SEQ ID NO: 1625956 - DNA, 15 bp, Homo sapiens
tgctatagaacacta

SEQ ID NO: 1625957 - DNA, 15 bp, Homo sapiens
gctatagaacactag

SEQ ID NO: 1625958 - DNA, 15 bp, Homo sapiens
ctatagaacactaga

SEQ ID NO: 1625959 - DNA, 15 bp, Homo sapiens
tatagaacactagaa

SEQ ID NO: 1625960 - DNA, 15 bp, Homo sapiens
atagaacactagaac

SEQ ID NO: 1625961 - DNA, 15 bp, Homo sapiens
tagaacactagaact

SEQ ID NO: 1625962 - DNA, 15 bp, Homo sapiens
agaacactagaactt

SEQ ID NO: 1625963 - DNA, 15 bp, Homo sapiens
gaacactagaactta

SEQ ID NO: 1625964 - DNA, 15 bp, Homo sapiens
aacactagaacttat

SEQ ID NO: 1625965 - DNA, 15 bp, Homo sapiens
acactagaacttatt

SEQ ID NO: 1625966 - DNA, 15 bp, Homo sapiens
cactagaacttattc

SEQ ID NO: 1625967 - DNA, 15 bp, Homo sapiens
actagaacttattcc

SEQ ID NO: 1625968 - DNA, 15 bp, Homo sapiens
ctagaacttattcct

SEQ ID NO: 1625969 - DNA, 15 bp, Homo sapiens
tagaacttattccta

SEQ ID NO: 1625970 - DNA, 15 bp, Homo sapiens
agaacttattcctac

SEQ ID NO: 1625971 - DNA, 15 bp, Homo sapiens
gaacttattcctact

SEQ ID NO: 1625972 - DNA, 15 bp, Homo sapiens
aacttattcctacta

SEQ ID NO: 1625973 - DNA, 15 bp, Homo sapiens
acttattcctactat

SEQ ID NO: 1625974 - DNA, 15 bp, Homo sapiens
cttattcctactatc

SEQ ID NO: 1625975 - DNA, 15 bp, Homo sapiens
ttattcctactatct

SEQ ID NO: 1625976 - DNA, 15 bp, Homo sapiens
tattcctactatcta

SEQ ID NO: 1625977 - DNA, 15 bp, Homo sapiens
attcctactatctaa

SEQ ID NO: 1625978 - DNA, 15 bp, Homo sapiens
ttcctactatctaac

SEQ ID NO: 1625979 - DNA, 15 bp, Homo sapiens
tcctactatctaact

SEQ ID NO: 1625980 - DNA, 15 bp, Homo sapiens
cctactatctaacta

SEQ ID NO: 1625981 - DNA, 15 bp, Homo sapiens
ctactatctaactat

SEQ ID NO: 1625982 - DNA, 15 bp, Homo sapiens
tactatctaactata

SEQ ID NO: 1625983 - DNA, 15 bp, Homo sapiens
actatctaactataa

SEQ ID NO: 1625984 - DNA, 15 bp, Homo sapiens
ctatctaactataat

SEQ ID NO: 1625985 - DNA, 15 bp, Homo sapiens
tatctaactataatt

SEQ ID NO: 1625986 - DNA, 15 bp, Homo sapiens
atctaactataattt

SEQ ID NO: 1625987 - DNA, 15 bp, Homo sapiens
tctaactataatttt

SEQ ID NO: 1625988 - DNA, 15 bp, Homo sapiens
ctaactataattttg

SEQ ID NO: 1625989 - DNA, 15 bp, Homo sapiens
taactataattttgt

SEQ ID NO: 1625990 - DNA, 15 bp, Homo sapiens
aactataattttgta

SEQ ID NO: 1625991 - DNA, 15 bp, Homo sapiens
actataattttgtac

SEQ ID NO: 1625992 - DNA, 15 bp, Homo sapiens
ctataattttgtacc

SEQ ID NO: 1625993 - DNA, 15 bp, Homo sapiens
tataattttgtaccc

SEQ ID NO: 1625994 - DNA, 15 bp, Homo sapiens
ataattttgtaccca

SEQ ID NO: 1625995 - DNA, 15 bp, Homo sapiens
taattttgtacccac

SEQ ID NO: 1625996 - DNA, 15 bp, Homo sapiens
aattttgtacccact

SEQ ID NO: 1625997 - DNA, 15 bp, Homo sapiens
attttgtacccacta

SEQ ID NO: 1625998 - DNA, 15 bp, Homo sapiens
ttttgtacccactaa

SEQ ID NO: 1625999 - DNA, 15 bp, Homo sapiens
tttgtacccactaac

SEQ ID NO: 1626000 - DNA, 15 bp, Homo sapiens
ttgtacccactaacc

SEQ ID NO: 1626001 - DNA, 15 bp, Homo sapiens
tgtacccactaacca

SEQ ID NO: 1626002 - DNA, 15 bp, Homo sapiens
gtacccactaaccaa

SEQ ID NO: 1626003 - DNA, 15 bp, Homo sapiens
tacccactaaccaac

SEQ ID NO: 1626004 - DNA, 15 bp, Homo sapiens
acccactaaccaacc

SEQ ID NO: 1626005 - DNA, 15 bp, Homo sapiens
cccactaaccaacct

SEQ ID NO: 1626006 - DNA, 15 bp, Homo sapiens
ccactaaccaacctc

SEQ ID NO: 1626007 - DNA, 15 bp, Homo sapiens
cactaaccaacctct

SEQ ID NO: 1626008 - DNA, 15 bp, Homo sapiens
actaaccaacctctc

SEQ ID NO: 1626009 - DNA, 15 bp, Homo sapiens
ctaaccaacctctcc

SEQ ID NO: 1626010 - DNA, 15 bp, Homo sapiens
taaccaacctctccc

SEQ ID NO: 1626011 - DNA, 15 bp, Homo sapiens
aaccaacctctccct

SEQ ID NO: 1626012 - DNA, 15 bp, Homo sapiens
accaacctctccctg

SEQ ID NO: 1626013 - DNA, 15 bp, Homo sapiens
ccaacctctccctgt

SEQ ID NO: 1626014 - DNA, 15 bp, Homo sapiens
caacctctccctgtc

SEQ ID NO: 1626015 - DNA, 15 bp, Homo sapiens
aacctctccctgtcc

SEQ ID NO: 1626016 - DNA, 15 bp, Homo sapiens
acctctccctgtccc

SEQ ID NO: 1626017 - DNA, 15 bp, Homo sapiens
cctctccctgtccct

SEQ ID NO: 1626018 - DNA, 15 bp, Homo sapiens
ctctccctgtccctc

SEQ ID NO: 1626019 - DNA, 15 bp, Homo sapiens
tctccctgtccctcc

SEQ ID NO: 1626020 - DNA, 15 bp, Homo sapiens
ctccctgtccctcct

SEQ ID NO: 1626021 - DNA, 15 bp, Homo sapiens
tccctgtccctcctc

SEQ ID NO: 1626022 - DNA, 15 bp, Homo sapiens
ccctgtccctcctcc

SEQ ID NO: 1626023 - DNA, 15 bp, Homo sapiens
cctgtccctcctccc

SEQ ID NO: 1626024 - DNA, 15 bp, Homo sapiens
ctgtccctcctcccc

SEQ ID NO: 1626025 - DNA, 15 bp, Homo sapiens
tgtccctcctccccc

SEQ ID NO: 1626026 - DNA, 15 bp, Homo sapiens
gtccctcctccccct

SEQ ID NO: 1626027 - DNA, 15 bp, Homo sapiens
tccctcctcccccta

SEQ ID NO: 1626028 - DNA, 15 bp, Homo sapiens
ccctcctccccctat

SEQ ID NO: 1626029 - DNA, 15 bp, Homo sapiens
cctcctccccctatt

SEQ ID NO: 1626030 - DNA, 15 bp, Homo sapiens
ctcctccccctattc

SEQ ID NO: 1626031 - DNA, 15 bp, Homo sapiens
tcctccccctattca

SEQ ID NO: 1626032 - DNA, 15 bp, Homo sapiens
cctccccctattcat

SEQ ID NO: 1626033 - DNA, 15 bp, Homo sapiens
ctccccctattcatc

SEQ ID NO: 1626034 - DNA, 15 bp, Homo sapiens
tccccctattcatcc

SEQ ID NO: 1626035 - DNA, 15 bp, Homo sapiens
ccccctattcatccc

SEQ ID NO: 1626036 - DNA, 15 bp, Homo sapiens
cccctattcatccca

SEQ ID NO: 1626037 - DNA, 15 bp, Homo sapiens
ccctattcatcccac

SEQ ID NO: 1626038 - DNA, 15 bp, Homo sapiens
cctattcatcccacc

SEQ ID NO: 1626039 - DNA, 15 bp, Homo sapiens
ctattcatcccaccc

SEQ ID NO: 1626040 - DNA, 15 bp, Homo sapiens
tattcatcccaccct

SEQ ID NO: 1626041 - DNA, 15 bp, Homo sapiens
attcatcccaccctc

SEQ ID NO: 1626042 - DNA, 15 bp, Homo sapiens
ttcatcccaccctct

SEQ ID NO: 1626043 - DNA, 15 bp, Homo sapiens
tcatcccaccctctg

SEQ ID NO: 1626044 - DNA, 15 bp, Homo sapiens
catcccaccctctgg

SEQ ID NO: 1626045 - DNA, 15 bp, Homo sapiens
atcccaccctctggt

SEQ ID NO: 1626046 - DNA, 15 bp, Homo sapiens
tcccaccctctggta

SEQ ID NO: 1626047 - DNA, 15 bp, Homo sapiens
cccaccctctggtaa

SEQ ID NO: 1626048 - DNA, 15 bp, Homo sapiens
ccaccctctggtaac

SEQ ID NO: 1626049 - DNA, 15 bp, Homo sapiens
caccctctggtaacc

SEQ ID NO: 1626050 - DNA, 15 bp, Homo sapiens
accctctggtaacca

SEQ ID NO: 1626051 - DNA, 15 bp, Homo sapiens
ccctctggtaaccac

SEQ ID NO: 1626052 - DNA, 15 bp, Homo sapiens
cctctggtaaccact

SEQ ID NO: 1626053 - DNA, 15 bp, Homo sapiens
ctctggtaaccactg

SEQ ID NO: 1626054 - DNA, 15 bp, Homo sapiens
tctggtaaccactgt

SEQ ID NO: 1626055 - DNA, 15 bp, Homo sapiens
ctggtaaccactgtt

SEQ ID NO: 1626056 - DNA, 15 bp, Homo sapiens
tggtaaccactgttc

SEQ ID NO: 1626057 - DNA, 15 bp, Homo sapiens
ggtaaccactgttct

SEQ ID NO: 1626058 - DNA, 15 bp, Homo sapiens
gtaaccactgttcta

SEQ ID NO: 1626059 - DNA, 15 bp, Homo sapiens
taaccactgttctac

SEQ ID NO: 1626060 - DNA, 15 bp, Homo sapiens
aaccactgttctact

SEQ ID NO: 1626061 - DNA, 15 bp, Homo sapiens
accactgttctactc

SEQ ID NO: 1626062 - DNA, 15 bp, Homo sapiens
ccactgttctactct

SEQ ID NO: 1626063 - DNA, 15 bp, Homo sapiens
cactgttctactctc

SEQ ID NO: 1626064 - DNA, 15 bp, Homo sapiens
actgttctactctct

SEQ ID NO: 1626065 - DNA, 15 bp, Homo sapiens
ctgttctactctctg

SEQ ID NO: 1626066 - DNA, 15 bp, Homo sapiens
tgttctactctctgc

SEQ ID NO: 1626067 - DNA, 15 bp, Homo sapiens
gttctactctctgct

SEQ ID NO: 1626068 - DNA, 15 bp, Homo sapiens
ttctactctctgctt

SEQ ID NO: 1626069 - DNA, 15 bp, Homo sapiens
tctactctctgcttc

SEQ ID NO: 1626070 - DNA, 15 bp, Homo sapiens
ctactctctgcttcc

SEQ ID NO: 1626071 - DNA, 15 bp, Homo sapiens
tactctctgcttccc

SEQ ID NO: 1626072 - DNA, 15 bp, Homo sapiens
actctctgcttccca

SEQ ID NO: 1626073 - DNA, 15 bp, Homo sapiens
ctctctgcttcccaa

SEQ ID NO: 1626074 - DNA, 15 bp, Homo sapiens
tctctgcttcccaaa

SEQ ID NO: 1626075 - DNA, 15 bp, Homo sapiens
ctctgcttcccaaaa

SEQ ID NO: 1626076 - DNA, 15 bp, Homo sapiens
attttgtcgccagca

SEQ ID NO: 1626077 - DNA, 15 bp, Homo sapiens
ttttgtcgccagcag

SEQ ID NO: 1626078 - DNA, 15 bp, Homo sapiens
tttgtcgccagcagg

SEQ ID NO: 1626079 - DNA, 15 bp, Homo sapiens
ttgtcgccagcaggc

SEQ ID NO: 1626080 - DNA, 15 bp, Homo sapiens
tgtcgccagcaggcc

SEQ ID NO: 1626081 - DNA, 15 bp, Homo sapiens
gtcgccagcaggcct

SEQ ID NO: 1626082 - DNA, 15 bp, Homo sapiens
tcgccagcaggcctg

SEQ ID NO: 1626083 - DNA, 15 bp, Homo sapiens
cgccagcaggcctgc

SEQ ID NO: 1626084 - DNA, 15 bp, Homo sapiens
gccagcaggcctgcc

SEQ ID NO: 1626085 - DNA, 15 bp, Homo sapiens
ccagcaggcctgcct

SEQ ID NO: 1626086 - DNA, 15 bp, Homo sapiens
cagcaggcctgcctt

SEQ ID NO: 1626087 - DNA, 15 bp, Homo sapiens
agcaggcctgcctta

SEQ ID NO: 1626088 - DNA, 15 bp, Homo sapiens
gcaggcctgccttat

SEQ ID NO: 1626089 - DNA, 15 bp, Homo sapiens
caggcctgccttata

SEQ ID NO: 1626090 - DNA, 15 bp, Homo sapiens
aggcctgccttataa

SEQ ID NO: 1626091 - DNA, 15 bp, Homo sapiens
ggcctgccttataag

SEQ ID NO: 1626092 - DNA, 15 bp, Homo sapiens
gcctgccttataaga

SEQ ID NO: 1626093 - DNA, 15 bp, Homo sapiens
cctgccttataagaa

SEQ ID NO: 1626094 - DNA, 15 bp, Homo sapiens
ctgccttataagaac

SEQ ID NO: 1626095 - DNA, 15 bp, Homo sapiens
tgccttataagaact

SEQ ID NO: 1626096 - DNA, 15 bp, Homo sapiens
gccttataagaactc

SEQ ID NO: 1626097 - DNA, 15 bp, Homo sapiens
ccttataagaactcc

SEQ ID NO: 1626098 - DNA, 15 bp, Homo sapiens
cttataagaactcct

SEQ ID NO: 1626099 - DNA, 15 bp, Homo sapiens
ttataagaactcctg

SEQ ID NO: 1626100 - DNA, 15 bp, Homo sapiens
tataagaactcctga

SEQ ID NO: 1626101 - DNA, 15 bp, Homo sapiens
ataagaactcctgaa

SEQ ID NO: 1626102 - DNA, 15 bp, Homo sapiens
taagaactcctgaag

SEQ ID NO: 1626103 - DNA, 15 bp, Homo sapiens
aagaactcctgaagg

SEQ ID NO: 1626104 - DNA, 15 bp, Homo sapiens
agaactcctgaagga

SEQ ID NO: 1626105 - DNA, 15 bp, Homo sapiens
gaactcctgaaggaa

SEQ ID NO: 1626106 - DNA, 15 bp, Homo sapiens
aactcctgaaggaag

SEQ ID NO: 1626107 - DNA, 15 bp, Homo sapiens
actcctgaaggaagc

SEQ ID NO: 1626108 - DNA, 15 bp, Homo sapiens
ctcctgaaggaagca

SEQ ID NO: 1626109 - DNA, 15 bp, Homo sapiens
tcctgaaggaagcac

SEQ ID NO: 1626110 - DNA, 15 bp, Homo sapiens
cctgaaggaagcact

SEQ ID NO: 1626111 - DNA, 15 bp, Homo sapiens
ctgaaggaagcacta

SEQ ID NO: 1626112 - DNA, 15 bp, Homo sapiens
tgaaggaagcactaa

SEQ ID NO: 1626113 - DNA, 15 bp, Homo sapiens
gaaggaagcactaaa

SEQ ID NO: 1626114 - DNA, 15 bp, Homo sapiens
aaggaagcactaaat

SEQ ID NO: 1626115 - DNA, 15 bp, Homo sapiens
aggaagcactaaatg

SEQ ID NO: 1626116 - DNA, 15 bp, Homo sapiens
ggaagcactaaatgt

SEQ ID NO: 1626117 - DNA, 15 bp, Homo sapiens
gaagcactaaatgtg

SEQ ID NO: 1626118 - DNA, 15 bp, Homo sapiens
aagcactaaatgtgt

SEQ ID NO: 1626119 - DNA, 15 bp, Homo sapiens
agcactaaatgtgta

SEQ ID NO: 1626120 - DNA, 15 bp, Homo sapiens
gcactaaatgtgtaa

SEQ ID NO: 1626121 - DNA, 15 bp, Homo sapiens
cactaaatgtgtaaa

SEQ ID NO: 1626122 - DNA, 15 bp, Homo sapiens
actaaatgtgtaaag

SEQ ID NO: 1626123 - DNA, 15 bp, Homo sapiens
ctaaatgtgtaaagg

SEQ ID NO: 1626124 - DNA, 15 bp, Homo sapiens
taaatgtgtaaagga

SEQ ID NO: 1626125 - DNA, 15 bp, Homo sapiens
aaatgtgtaaaggaa

SEQ ID NO: 1626126 - DNA, 15 bp, Homo sapiens
aatgtgtaaaggaaa

SEQ ID NO: 1626127 - DNA, 15 bp, Homo sapiens
atgtgtaaaggaaaa

SEQ ID NO: 1626128 - DNA, 15 bp, Homo sapiens
tgtgtaaaggaaaaa

SEQ ID NO: 1626129 - DNA, 15 bp, Homo sapiens
gtgtaaaggaaaaac

SEQ ID NO: 1626130 - DNA, 15 bp, Homo sapiens
tgtaaaggaaaaact

SEQ ID NO: 1626131 - DNA, 15 bp, Homo sapiens
gtaaaggaaaaactg

SEQ ID NO: 1626132 - DNA, 15 bp, Homo sapiens
taaaggaaaaactgg

SEQ ID NO: 1626133 - DNA, 15 bp, Homo sapiens
aaaggaaaaactggt

SEQ ID NO: 1626134 - DNA, 15 bp, Homo sapiens
aaggaaaaactggta

SEQ ID NO: 1626135 - DNA, 15 bp, Homo sapiens
aggaaaaactggtac

SEQ ID NO: 1626136 - DNA, 15 bp, Homo sapiens
ggaaaaactggtacc

SEQ ID NO: 1626137 - DNA, 15 bp, Homo sapiens
gaaaaactggtacct

SEQ ID NO: 1626138 - DNA, 15 bp, Homo sapiens
aaaaactggtacctt

SEQ ID NO: 1626139 - DNA, 15 bp, Homo sapiens
aaaactggtacctta

SEQ ID NO: 1626140 - DNA, 15 bp, Homo sapiens
aaactggtaccttaa

SEQ ID NO: 1626141 - DNA, 15 bp, Homo sapiens
aactggtaccttaaa

SEQ ID NO: 1626142 - DNA, 15 bp, Homo sapiens
actggtaccttaaag

SEQ ID NO: 1626143 - DNA, 15 bp, Homo sapiens
ctggtaccttaaaga

SEQ ID NO: 1626144 - DNA, 15 bp, Homo sapiens
tggtaccttaaagat

SEQ ID NO: 1626145 - DNA, 15 bp, Homo sapiens
ggtaccttaaagatc

SEQ ID NO: 1626146 - DNA, 15 bp, Homo sapiens
gtaccttaaagatca

SEQ ID NO: 1626147 - DNA, 15 bp, Homo sapiens
taccttaaagatcat

SEQ ID NO: 1626148 - DNA, 15 bp, Homo sapiens
ccttaaagatcatca

SEQ ID NO: 1626149 - DNA, 15 bp, Homo sapiens
cttaaagatcatcaa

SEQ ID NO: 1626150 - DNA, 15 bp, Homo sapiens
ttaaagatcatcaac

SEQ ID NO: 1626151 - DNA, 15 bp, Homo sapiens
taaagatcatcaaca

SEQ ID NO: 1626152 - DNA, 15 bp, Homo sapiens
aaagatcatcaacac

SEQ ID NO: 1626153 - DNA, 15 bp, Homo sapiens
aagatcatcaacact

SEQ ID NO: 1626154 - DNA, 15 bp, Homo sapiens
agatcatcaacacta

SEQ ID NO: 1626155 - DNA, 15 bp, Homo sapiens
gatcatcaacactat

SEQ ID NO: 1626156 - DNA, 15 bp, Homo sapiens
atcatcaacactatg

SEQ ID NO: 1626157 - DNA, 15 bp, Homo sapiens
tcatcaacactatga

SEQ ID NO: 1626158 - DNA, 15 bp, Homo sapiens
catcaacactatgaa

SEQ ID NO: 1626159 - DNA, 15 bp, Homo sapiens
atcaacactatgaag

SEQ ID NO: 1626160 - DNA, 15 bp, Homo sapiens
tcaacactatgaaga

SEQ ID NO: 1626161 - DNA, 15 bp, Homo sapiens
caacactatgaagaa

SEQ ID NO: 1626162 - DNA, 15 bp, Homo sapiens
aacactatgaagaaa

SEQ ID NO: 1626163 - DNA, 15 bp, Homo sapiens
acactatgaagaaac

SEQ ID NO: 1626164 - DNA, 15 bp, Homo sapiens
cactatgaagaaact

SEQ ID NO: 1626165 - DNA, 15 bp, Homo sapiens
actatgaagaaactg

SEQ ID NO: 1626166 - DNA, 15 bp, Homo sapiens
ctatgaagaaactgc

SEQ ID NO: 1626167 - DNA, 15 bp, Homo sapiens
tatgaagaaactgca

SEQ ID NO: 1626168 - DNA, 15 bp, Homo sapiens
atgaagaaactgcac

SEQ ID NO: 1626169 - DNA, 15 bp, Homo sapiens
tgaagaaactgcacc

SEQ ID NO: 1626170 - DNA, 15 bp, Homo sapiens
gaagaaactgcacca

SEQ ID NO: 1626171 - DNA, 15 bp, Homo sapiens
aagaaactgcaccag

SEQ ID NO: 1626172 - DNA, 15 bp, Homo sapiens
agaaactgcaccagc

SEQ ID NO: 1626173 - DNA, 15 bp, Homo sapiens
gaaactgcaccagct

SEQ ID NO: 1626174 - DNA, 15 bp, Homo sapiens
aaactgcaccagcta

SEQ ID NO: 1626175 - DNA, 15 bp, Homo sapiens
aactgcaccagctaa

SEQ ID NO: 1626176 - DNA, 15 bp, Homo sapiens
actgcaccagctaat

SEQ ID NO: 1626177 - DNA, 15 bp, Homo sapiens
ctgcaccagctaatg

SEQ ID NO: 1626178 - DNA, 15 bp, Homo sapiens
tgcaccagctaatgg

SEQ ID NO: 1626179 - DNA, 15 bp, Homo sapiens
gcaccagctaatggg

SEQ ID NO: 1626180 - DNA, 15 bp, Homo sapiens
caccagctaatgggc

SEQ ID NO: 1626181 - DNA, 15 bp, Homo sapiens
accagctaatgggca

SEQ ID NO: 1626182 - DNA, 15 bp, Homo sapiens
ccagctaatgggcaa

SEQ ID NO: 1626183 - DNA, 15 bp, Homo sapiens
cagctaatgggcaaa

SEQ ID NO: 1626184 - DNA, 15 bp, Homo sapiens
agctaatgggcaaaa

SEQ ID NO: 1626185 - DNA, 15 bp, Homo sapiens
gctaatgggcaaaat

SEQ ID NO: 1626186 - DNA, 15 bp, Homo sapiens
ctaatgggcaaaata

SEQ ID NO: 1626187 - DNA, 15 bp, Homo sapiens
taatgggcaaaataa

SEQ ID NO: 1626188 - DNA, 15 bp, Homo sapiens
aatgggcaaaataag

SEQ ID NO: 1626189 - DNA, 15 bp, Homo sapiens
atgggcaaaataagc

SEQ ID NO: 1626190 - DNA, 15 bp, Homo sapiens
tgggcaaaataagca

SEQ ID NO: 1626191 - DNA, 15 bp, Homo sapiens
gggcaaaataagcag

SEQ ID NO: 1626192 - DNA, 15 bp, Homo sapiens
ggcaaaataagcagc

SEQ ID NO: 1626193 - DNA, 15 bp, Homo sapiens
gcaaaataagcagct

SEQ ID NO: 1626194 - DNA, 15 bp, Homo sapiens
caaaataagcagcta

SEQ ID NO: 1626195 - DNA, 15 bp, Homo sapiens
aaaataagcagctaa

SEQ ID NO: 1626196 - DNA, 15 bp, Homo sapiens
aaataagcagctaac

SEQ ID NO: 1626197 - DNA, 15 bp, Homo sapiens
aataagcagctaaca

SEQ ID NO: 1626198 - DNA, 15 bp, Homo sapiens
ataagcagctaacat

SEQ ID NO: 1626199 - DNA, 15 bp, Homo sapiens
taagcagctaacatc

SEQ ID NO: 1626200 - DNA, 15 bp, Homo sapiens
aagcagctaacatca

SEQ ID NO: 1626201 - DNA, 15 bp, Homo sapiens
agcagctaacatcat

SEQ ID NO: 1626202 - DNA, 15 bp, Homo sapiens
gcagctaacatcata

SEQ ID NO: 1626203 - DNA, 15 bp, Homo sapiens
cagctaacatcataa

SEQ ID NO: 1626204 - DNA, 15 bp, Homo sapiens
agctaacatcataat

SEQ ID NO: 1626205 - DNA, 15 bp, Homo sapiens
gctaacatcataatg

SEQ ID NO: 1626206 - DNA, 15 bp, Homo sapiens
ctaacatcataatga

SEQ ID NO: 1626207 - DNA, 15 bp, Homo sapiens
taacatcataatgat

SEQ ID NO: 1626208 - DNA, 15 bp, Homo sapiens
aacatcataatgata

SEQ ID NO: 1626209 - DNA, 15 bp, Homo sapiens
acatcataatgatag

SEQ ID NO: 1626210 - DNA, 15 bp, Homo sapiens
catcataatgatagg

SEQ ID NO: 1626211 - DNA, 15 bp, Homo sapiens
atcataatgataggt

SEQ ID NO: 1626212 - DNA, 15 bp, Homo sapiens
tcataatgataggtt

SEQ ID NO: 1626213 - DNA, 15 bp, Homo sapiens
cataatgataggttc

SEQ ID NO: 1626214 - DNA, 15 bp, Homo sapiens
ataatgataggttca

SEQ ID NO: 1626215 - DNA, 15 bp, Homo sapiens
taatgataggttcaa

SEQ ID NO: 1626216 - DNA, 15 bp, Homo sapiens
aatgataggttcaaa

SEQ ID NO: 1626217 - DNA, 15 bp, Homo sapiens
atgataggttcaaat

SEQ ID NO: 1626218 - DNA, 15 bp, Homo sapiens
tgataggttcaaatt

SEQ ID NO: 1626219 - DNA, 15 bp, Homo sapiens
gataggttcaaattc

SEQ ID NO: 1626220 - DNA, 15 bp, Homo sapiens
ataggttcaaattca

SEQ ID NO: 1626221 - DNA, 15 bp, Homo sapiens
taggttcaaattcac

SEQ ID NO: 1626222 - DNA, 15 bp, Homo sapiens
aggttcaaattcaca

SEQ ID NO: 1626223 - DNA, 15 bp, Homo sapiens
ggttcaaattcacac

SEQ ID NO: 1626224 - DNA, 15 bp, Homo sapiens
gttcaaattcacaca

SEQ ID NO: 1626225 - DNA, 15 bp, Homo sapiens
ttcaaattcacacat

SEQ ID NO: 1626226 - DNA, 15 bp, Homo sapiens
tcaaattcacacata

SEQ ID NO: 1626227 - DNA, 15 bp, Homo sapiens
caaattcacacataa

SEQ ID NO: 1626228 - DNA, 15 bp, Homo sapiens
aaattcacacataac

SEQ ID NO: 1626229 - DNA, 15 bp, Homo sapiens
aattcacacataaca

SEQ ID NO: 1626230 - DNA, 15 bp, Homo sapiens
attcacacataacaa

SEQ ID NO: 1626231 - DNA, 15 bp, Homo sapiens
ttcacacataacaat

SEQ ID NO: 1626232 - DNA, 15 bp, Homo sapiens
tcacacataacaata

SEQ ID NO: 1626233 - DNA, 15 bp, Homo sapiens
cacacataacaatat

SEQ ID NO: 1626234 - DNA, 15 bp, Homo sapiens
acacataacaatatt

SEQ ID NO: 1626235 - DNA, 15 bp, Homo sapiens
cacataacaatatta

SEQ ID NO: 1626236 - DNA, 15 bp, Homo sapiens
acataacaatattaa

SEQ ID NO: 1626237 - DNA, 15 bp, Homo sapiens
cataacaatattaac

SEQ ID NO: 1626238 - DNA, 15 bp, Homo sapiens
ataacaatattaacc

SEQ ID NO: 1626239 - DNA, 15 bp, Homo sapiens
taacaatattaacct

SEQ ID NO: 1626240 - DNA, 15 bp, Homo sapiens
aacaatattaacctt

SEQ ID NO: 1626241 - DNA, 15 bp, Homo sapiens
acaatattaacctta

SEQ ID NO: 1626242 - DNA, 15 bp, Homo sapiens
caatattaaccttat

SEQ ID NO: 1626243 - DNA, 15 bp, Homo sapiens
aatattaaccttata

SEQ ID NO: 1626244 - DNA, 15 bp, Homo sapiens
atattaaccttatat

SEQ ID NO: 1626245 - DNA, 15 bp, Homo sapiens
tattaaccttatatg

SEQ ID NO: 1626246 - DNA, 15 bp, Homo sapiens
attaaccttatatgt

SEQ ID NO: 1626247 - DNA, 15 bp, Homo sapiens
ttaaccttatatgta

SEQ ID NO: 1626248 - DNA, 15 bp, Homo sapiens
taaccttatatgtaa

SEQ ID NO: 1626249 - DNA, 15 bp, Homo sapiens
aaccttatatgtaaa

SEQ ID NO: 1626250 - DNA, 15 bp, Homo sapiens
accttatatgtaaat

SEQ ID NO: 1626251 - DNA, 15 bp, Homo sapiens
ccttatatgtaaatg

SEQ ID NO: 1626252 - DNA, 15 bp, Homo sapiens
cttatatgtaaatgg

SEQ ID NO: 1626253 - DNA, 15 bp, Homo sapiens
ttatatgtaaatggg

SEQ ID NO: 1626254 - DNA, 15 bp, Homo sapiens
tatatgtaaatgggc

SEQ ID NO: 1626255 - DNA, 15 bp, Homo sapiens
atatgtaaatgggct

SEQ ID NO: 1626256 - DNA, 15 bp, Homo sapiens
tatgtaaatgggcta

SEQ ID NO: 1626257 - DNA, 15 bp, Homo sapiens
atgtaaatgggctaa

SEQ ID NO: 1626258 - DNA, 15 bp, Homo sapiens
tgtaaatgggctaaa

SEQ ID NO: 1626259 - DNA, 15 bp, Homo sapiens
gtaaatgggctaaat

SEQ ID NO: 1626260 - DNA, 15 bp, Homo sapiens
taaatgggctaaatg

SEQ ID NO: 1626261 - DNA, 15 bp, Homo sapiens
aaatgggctaaatgc

SEQ ID NO: 1626262 - DNA, 15 bp, Homo sapiens
aatgggctaaatgcc

SEQ ID NO: 1626263 - DNA, 15 bp, Homo sapiens
atgggctaaatgccc

SEQ ID NO: 1626264 - DNA, 15 bp, Homo sapiens
tgggctaaatgcccc

SEQ ID NO: 1626265 - DNA, 15 bp, Homo sapiens
gggctaaatgcccca

SEQ ID NO: 1626266 - DNA, 15 bp, Homo sapiens
ggctaaatgccccaa

SEQ ID NO: 1626267 - DNA, 15 bp, Homo sapiens
gctaaatgccccaat

SEQ ID NO: 1626268 - DNA, 15 bp, Homo sapiens
ctaaatgccccaatt

SEQ ID NO: 1626269 - DNA, 15 bp, Homo sapiens
taaatgccccaatta

SEQ ID NO: 1626270 - DNA, 15 bp, Homo sapiens
aaatgccccaattaa

SEQ ID NO: 1626271 - DNA, 15 bp, Homo sapiens
aatgccccaattaaa

SEQ ID NO: 1626272 - DNA, 15 bp, Homo sapiens
atgccccaattaaaa

SEQ ID NO: 1626273 - DNA, 15 bp, Homo sapiens
tgccccaattaaaag

SEQ ID NO: 1626274 - DNA, 15 bp, Homo sapiens
gccccaattaaaagg

SEQ ID NO: 1626275 - DNA, 15 bp, Homo sapiens
ccccaattaaaaggc

SEQ ID NO: 1626276 - DNA, 15 bp, Homo sapiens
ccaattaaaaggcac

SEQ ID NO: 1626277 - DNA, 15 bp, Homo sapiens
caattaaaaggcaca

SEQ ID NO: 1626278 - DNA, 15 bp, Homo sapiens
aattaaaaggcacag

SEQ ID NO: 1626279 - DNA, 15 bp, Homo sapiens
attaaaaggcacaga

SEQ ID NO: 1626280 - DNA, 15 bp, Homo sapiens
ttaaaaggcacagac

SEQ ID NO: 1626281 - DNA, 15 bp, Homo sapiens
taaaaggcacagact

SEQ ID NO: 1626282 - DNA, 15 bp, Homo sapiens
aaaaggcacagactg

SEQ ID NO: 1626283 - DNA, 15 bp, Homo sapiens
aaaggcacagactgg

SEQ ID NO: 1626284 - DNA, 15 bp, Homo sapiens
aaggcacagactggc

SEQ ID NO: 1626285 - DNA, 15 bp, Homo sapiens
aggcacagactggca

SEQ ID NO: 1626286 - DNA, 15 bp, Homo sapiens
ggcacagactggcaa

SEQ ID NO: 1626287 - DNA, 15 bp, Homo sapiens
gcacagactggcaaa

SEQ ID NO: 1626288 - DNA, 15 bp, Homo sapiens
cacagactggcaaat

SEQ ID NO: 1626289 - DNA, 15 bp, Homo sapiens
acagactggcaaatt

SEQ ID NO: 1626290 - DNA, 15 bp, Homo sapiens
cagactggcaaattg

SEQ ID NO: 1626291 - DNA, 15 bp, Homo sapiens
agactggcaaattgg

SEQ ID NO: 1626292 - DNA, 15 bp, Homo sapiens
gactggcaaattgga

SEQ ID NO: 1626293 - DNA, 15 bp, Homo sapiens
actggcaaattggat

SEQ ID NO: 1626294 - DNA, 15 bp, Homo sapiens
ctggcaaattggata

SEQ ID NO: 1626295 - DNA, 15 bp, Homo sapiens
tggcaaattggataa

SEQ ID NO: 1626296 - DNA, 15 bp, Homo sapiens
ggcaaattggataaa

SEQ ID NO: 1626297 - DNA, 15 bp, Homo sapiens
gcaaattggataaag

SEQ ID NO: 1626298 - DNA, 15 bp, Homo sapiens
caaattggataaaga

SEQ ID NO: 1626299 - DNA, 15 bp, Homo sapiens
aaattggataaagag

SEQ ID NO: 1626300 - DNA, 15 bp, Homo sapiens
aattggataaagagt

SEQ ID NO: 1626301 - DNA, 15 bp, Homo sapiens
attggataaagagtc

SEQ ID NO: 1626302 - DNA, 15 bp, Homo sapiens
ttggataaagagtca

SEQ ID NO: 1626303 - DNA, 15 bp, Homo sapiens
tggataaagagtcaa

SEQ ID NO: 1626304 - DNA, 15 bp, Homo sapiens
ggataaagagtcaag

SEQ ID NO: 1626305 - DNA, 15 bp, Homo sapiens
gataaagagtcaaga

SEQ ID NO: 1626306 - DNA, 15 bp, Homo sapiens
ataaagagtcaagac

SEQ ID NO: 1626307 - DNA, 15 bp, Homo sapiens
taaagagtcaagacc

SEQ ID NO: 1626308 - DNA, 15 bp, Homo sapiens
aaagagtcaagaccc

SEQ ID NO: 1626309 - DNA, 15 bp, Homo sapiens
aagagtcaagaccca

SEQ ID NO: 1626310 - DNA, 15 bp, Homo sapiens
agagtcaagacccac

SEQ ID NO: 1626311 - DNA, 15 bp, Homo sapiens
gagtcaagacccacc

SEQ ID NO: 1626312 - DNA, 15 bp, Homo sapiens
agtcaagacccacca

SEQ ID NO: 1626313 - DNA, 15 bp, Homo sapiens
gtcaagacccaccag

SEQ ID NO: 1626314 - DNA, 15 bp, Homo sapiens
tcaagacccaccagt

SEQ ID NO: 1626315 - DNA, 15 bp, Homo sapiens
caagacccaccagtg

SEQ ID NO: 1626316 - DNA, 15 bp, Homo sapiens
aagacccaccagtgt

SEQ ID NO: 1626317 - DNA, 15 bp, Homo sapiens
agacccaccagtgtg

SEQ ID NO: 1626318 - DNA, 15 bp, Homo sapiens
gacccaccagtgtgc

SEQ ID NO: 1626319 - DNA, 15 bp, Homo sapiens
acccaccagtgtgct

SEQ ID NO: 1626320 - DNA, 15 bp, Homo sapiens
cccaccagtgtgctg

SEQ ID NO: 1626321 - DNA, 15 bp, Homo sapiens
ccaccagtgtgctgt

SEQ ID NO: 1626322 - DNA, 15 bp, Homo sapiens
caccagtgtgctgta

SEQ ID NO: 1626323 - DNA, 15 bp, Homo sapiens
accagtgtgctgtat

SEQ ID NO: 1626324 - DNA, 15 bp, Homo sapiens
ccagtgtgctgtatt

SEQ ID NO: 1626325 - DNA, 15 bp, Homo sapiens
cagtgtgctgtattc

SEQ ID NO: 1626326 - DNA, 15 bp, Homo sapiens
agtgtgctgtattca

SEQ ID NO: 1626327 - DNA, 15 bp, Homo sapiens
gtgtgctgtattcag

SEQ ID NO: 1626328 - DNA, 15 bp, Homo sapiens
tgtgctgtattcagg

SEQ ID NO: 1626329 - DNA, 15 bp, Homo sapiens
gtgctgtattcagga

SEQ ID NO: 1626330 - DNA, 15 bp, Homo sapiens
tgctgtattcaggag

SEQ ID NO: 1626331 - DNA, 15 bp, Homo sapiens
gctgtattcaggaga

SEQ ID NO: 1626332 - DNA, 15 bp, Homo sapiens
ctgtattcaggagac

SEQ ID NO: 1626333 - DNA, 15 bp, Homo sapiens
tgtattcaggagacc

SEQ ID NO: 1626334 - DNA, 15 bp, Homo sapiens
gtattcaggagacca

SEQ ID NO: 1626335 - DNA, 15 bp, Homo sapiens
tattcaggagaccaa

SEQ ID NO: 1626336 - DNA, 15 bp, Homo sapiens
attcaggagaccaat

SEQ ID NO: 1626337 - DNA, 15 bp, Homo sapiens
ttcaggagaccaatc

SEQ ID NO: 1626338 - DNA, 15 bp, Homo sapiens
tcaggagaccaatct

SEQ ID NO: 1626339 - DNA, 15 bp, Homo sapiens
caggagaccaatctc

SEQ ID NO: 1626340 - DNA, 15 bp, Homo sapiens
aggagaccaatctca

SEQ ID NO: 1626341 - DNA, 15 bp, Homo sapiens
ggagaccaatctcac

SEQ ID NO: 1626342 - DNA, 15 bp, Homo sapiens
gagaccaatctcaca

SEQ ID NO: 1626343 - DNA, 15 bp, Homo sapiens
agaccaatctcacat

SEQ ID NO: 1626344 - DNA, 15 bp, Homo sapiens
gaccaatctcacatg

SEQ ID NO: 1626345 - DNA, 15 bp, Homo sapiens
accaatctcacatgc

SEQ ID NO: 1626346 - DNA, 15 bp, Homo sapiens
ccaatctcacatgca

SEQ ID NO: 1626347 - DNA, 15 bp, Homo sapiens
caatctcacatgcaa

SEQ ID NO: 1626348 - DNA, 15 bp, Homo sapiens
aatctcacatgcaaa

SEQ ID NO: 1626349 - DNA, 15 bp, Homo sapiens
atctcacatgcaaac

SEQ ID NO: 1626350 - DNA, 15 bp, Homo sapiens
tctcacatgcaaaca

SEQ ID NO: 1626351 - DNA, 15 bp, Homo sapiens
ctcacatgcaaacac

SEQ ID NO: 1626352 - DNA, 15 bp, Homo sapiens
tcacatgcaaacaca

SEQ ID NO: 1626353 - DNA, 15 bp, Homo sapiens
cacatgcaaacacac

SEQ ID NO: 1626354 - DNA, 15 bp, Homo sapiens
acatgcaaacacaca

SEQ ID NO: 1626355 - DNA, 15 bp, Homo sapiens
catgcaaacacacac

SEQ ID NO: 1626356 - DNA, 15 bp, Homo sapiens
atgcaaacacacaca

SEQ ID NO: 1626357 - DNA, 15 bp, Homo sapiens
tgcaaacacacacag

SEQ ID NO: 1626358 - DNA, 15 bp, Homo sapiens
gcaaacacacacagg

SEQ ID NO: 1626359 - DNA, 15 bp, Homo sapiens
caaacacacacaggc

SEQ ID NO: 1626360 - DNA, 15 bp, Homo sapiens
aaacacacacaggct

SEQ ID NO: 1626361 - DNA, 15 bp, Homo sapiens
aacacacacaggctc

SEQ ID NO: 1626362 - DNA, 15 bp, Homo sapiens
acacacacaggctca

SEQ ID NO: 1626363 - DNA, 15 bp, Homo sapiens
cacacacaggctcaa

SEQ ID NO: 1626364 - DNA, 15 bp, Homo sapiens
acacacaggctcaaa

SEQ ID NO: 1626365 - DNA, 15 bp, Homo sapiens
cacacaggctcaaaa

SEQ ID NO: 1626366 - DNA, 15 bp, Homo sapiens
acacaggctcaaaat

SEQ ID NO: 1626367 - DNA, 15 bp, Homo sapiens
cacaggctcaaaata

SEQ ID NO: 1626368 - DNA, 15 bp, Homo sapiens
acaggctcaaaataa

SEQ ID NO: 1626369 - DNA, 15 bp, Homo sapiens
caggctcaaaataaa

SEQ ID NO: 1626370 - DNA, 15 bp, Homo sapiens
aggctcaaaataaag

SEQ ID NO: 1626371 - DNA, 15 bp, Homo sapiens
ggctcaaaataaagg

SEQ ID NO: 1626372 - DNA, 15 bp, Homo sapiens
gctcaaaataaaggg

SEQ ID NO: 1626373 - DNA, 15 bp, Homo sapiens
ctcaaaataaaggga

SEQ ID NO: 1626374 - DNA, 15 bp, Homo sapiens
tcaaaataaagggat

SEQ ID NO: 1626375 - DNA, 15 bp, Homo sapiens
caaaataaagggatg

SEQ ID NO: 1626376 - DNA, 15 bp, Homo sapiens
aaaataaagggatgg

SEQ ID NO: 1626377 - DNA, 15 bp, Homo sapiens
aaataaagggatgga

SEQ ID NO: 1626378 - DNA, 15 bp, Homo sapiens
aataaagggatggag

SEQ ID NO: 1626379 - DNA, 15 bp, Homo sapiens
ataaagggatggagg

SEQ ID NO: 1626380 - DNA, 15 bp, Homo sapiens
taaagggatggagga

SEQ ID NO: 1626381 - DNA, 15 bp, Homo sapiens
aaagggatggaggaa

SEQ ID NO: 1626382 - DNA, 15 bp, Homo sapiens
aagggatggaggaag

SEQ ID NO: 1626383 - DNA, 15 bp, Homo sapiens
agggatggaggaaga

SEQ ID NO: 1626384 - DNA, 15 bp, Homo sapiens
gggatggaggaagat

SEQ ID NO: 1626385 - DNA, 15 bp, Homo sapiens
ggatggaggaagatt

SEQ ID NO: 1626386 - DNA, 15 bp, Homo sapiens
gatggaggaagattt

SEQ ID NO: 1626387 - DNA, 15 bp, Homo sapiens
atggaggaagattta

SEQ ID NO: 1626388 - DNA, 15 bp, Homo sapiens
tggaggaagatttac

SEQ ID NO: 1626389 - DNA, 15 bp, Homo sapiens
ggaggaagatttacc

SEQ ID NO: 1626390 - DNA, 15 bp, Homo sapiens
gaggaagatttacca

SEQ ID NO: 1626391 - DNA, 15 bp, Homo sapiens
aggaagatttaccaa

SEQ ID NO: 1626392 - DNA, 15 bp, Homo sapiens
ggaagatttaccaag

SEQ ID NO: 1626393 - DNA, 15 bp, Homo sapiens
gaagatttaccaagc

SEQ ID NO: 1626394 - DNA, 15 bp, Homo sapiens
aagatttaccaagca

SEQ ID NO: 1626395 - DNA, 15 bp, Homo sapiens
agatttaccaagcaa

SEQ ID NO: 1626396 - DNA, 15 bp, Homo sapiens
gatttaccaagcaaa

SEQ ID NO: 1626397 - DNA, 15 bp, Homo sapiens
atttaccaagcaaat

SEQ ID NO: 1626398 - DNA, 15 bp, Homo sapiens
tttaccaagcaaatg

SEQ ID NO: 1626399 - DNA, 15 bp, Homo sapiens
ttaccaagcaaatgg

SEQ ID NO: 1626400 - DNA, 15 bp, Homo sapiens
taccaagcaaatgga

SEQ ID NO: 1626401 - DNA, 15 bp, Homo sapiens
accaagcaaatggaa

SEQ ID NO: 1626402 - DNA, 15 bp, Homo sapiens
ccaagcaaatggaaa

SEQ ID NO: 1626403 - DNA, 15 bp, Homo sapiens
caagcaaatggaaag

SEQ ID NO: 1626404 - DNA, 15 bp, Homo sapiens
aagcaaatggaaagc

SEQ ID NO: 1626405 - DNA, 15 bp, Homo sapiens
agcaaatggaaagca

SEQ ID NO: 1626406 - DNA, 15 bp, Homo sapiens
gcaaatggaaagcaa

SEQ ID NO: 1626407 - DNA, 15 bp, Homo sapiens
caaatggaaagcaaa

SEQ ID NO: 1626408 - DNA, 15 bp, Homo sapiens
aaatggaaagcaaaa

SEQ ID NO: 1626409 - DNA, 15 bp, Homo sapiens
aatggaaagcaaaaa

SEQ ID NO: 1626410 - DNA, 15 bp, Homo sapiens
atggaaagcaaaaaa

SEQ ID NO: 1626411 - DNA, 15 bp, Homo sapiens
tggaaagcaaaaaaa

SEQ ID NO: 1626412 - DNA, 15 bp, Homo sapiens
ggaaagcaaaaaaaa

SEQ ID NO: 1626413 - DNA, 15 bp, Homo sapiens
gaaagcaaaaaaaaa

SEQ ID NO: 1626414 - DNA, 15 bp, Homo sapiens
aaagcaaaaaaaaag

SEQ ID NO: 1626415 - DNA, 15 bp, Homo sapiens
aagcaaaaaaaaagc

SEQ ID NO: 1626416 - DNA, 15 bp, Homo sapiens
agcaaaaaaaaagca

SEQ ID NO: 1626417 - DNA, 15 bp, Homo sapiens
gcaaaaaaaaagcag

SEQ ID NO: 1626418 - DNA, 15 bp, Homo sapiens
caaaaaaaaagcaga

SEQ ID NO: 1626419 - DNA, 15 bp, Homo sapiens
aaaaaaaaagcagag

SEQ ID NO: 1626420 - DNA, 15 bp, Homo sapiens
aaaaaaaagcagagg

SEQ ID NO: 1626421 - DNA, 15 bp, Homo sapiens
aaaaaaagcagaggt

SEQ ID NO: 1626422 - DNA, 15 bp, Homo sapiens
aaaaaagcagaggtt

SEQ ID NO: 1626423 - DNA, 15 bp, Homo sapiens
aaaaagcagaggttg

SEQ ID NO: 1626424 - DNA, 15 bp, Homo sapiens
aaaagcagaggttgc

SEQ ID NO: 1626425 - DNA, 15 bp, Homo sapiens
aaagcagaggttgca

SEQ ID NO: 1626426 - DNA, 15 bp, Homo sapiens
aagcagaggttgcaa

SEQ ID NO: 1626427 - DNA, 15 bp, Homo sapiens
agcagaggttgcaat

SEQ ID NO: 1626428 - DNA, 15 bp, Homo sapiens
gcagaggttgcaatc

SEQ ID NO: 1626429 - DNA, 15 bp, Homo sapiens
cagaggttgcaatcc

SEQ ID NO: 1626430 - DNA, 15 bp, Homo sapiens
agaggttgcaatcct

SEQ ID NO: 1626431 - DNA, 15 bp, Homo sapiens
gaggttgcaatccta

SEQ ID NO: 1626432 - DNA, 15 bp, Homo sapiens
aggttgcaatcctag

SEQ ID NO: 1626433 - DNA, 15 bp, Homo sapiens
ggttgcaatcctagt

SEQ ID NO: 1626434 - DNA, 15 bp, Homo sapiens
gttgcaatcctagtc

SEQ ID NO: 1626435 - DNA, 15 bp, Homo sapiens
ttgcaatcctagtct

SEQ ID NO: 1626436 - DNA, 15 bp, Homo sapiens
tgcaatcctagtctc

SEQ ID NO: 1626437 - DNA, 15 bp, Homo sapiens
gcaatcctagtctct

SEQ ID NO: 1626438 - DNA, 15 bp, Homo sapiens
caatcctagtctctg

SEQ ID NO: 1626439 - DNA, 15 bp, Homo sapiens
aatcctagtctctga

SEQ ID NO: 1626440 - DNA, 15 bp, Homo sapiens
atcctagtctctgat

SEQ ID NO: 1626441 - DNA, 15 bp, Homo sapiens
tcctagtctctgata

SEQ ID NO: 1626442 - DNA, 15 bp, Homo sapiens
cctagtctctgataa

SEQ ID NO: 1626443 - DNA, 15 bp, Homo sapiens
ctagtctctgataaa

SEQ ID NO: 1626444 - DNA, 15 bp, Homo sapiens
tagtctctgataaaa

SEQ ID NO: 1626445 - DNA, 15 bp, Homo sapiens
agtctctgataaaac

SEQ ID NO: 1626446 - DNA, 15 bp, Homo sapiens
gtctctgataaaaca

SEQ ID NO: 1626447 - DNA, 15 bp, Homo sapiens
tctctgataaaacag

SEQ ID NO: 1626448 - DNA, 15 bp, Homo sapiens
ctctgataaaacaga

SEQ ID NO: 1626449 - DNA, 15 bp, Homo sapiens
tctgataaaacagac

SEQ ID NO: 1626450 - DNA, 15 bp, Homo sapiens
ctgataaaacagact

SEQ ID NO: 1626451 - DNA, 15 bp, Homo sapiens
tgataaaacagactt

SEQ ID NO: 1626452 - DNA, 15 bp, Homo sapiens
gataaaacagacttt

SEQ ID NO: 1626453 - DNA, 15 bp, Homo sapiens
ataaaacagacttta

SEQ ID NO: 1626454 - DNA, 15 bp, Homo sapiens
taaaacagactttaa

SEQ ID NO: 1626455 - DNA, 15 bp, Homo sapiens
aaaacagactttaaa

SEQ ID NO: 1626456 - DNA, 15 bp, Homo sapiens
aaacagactttaaac

SEQ ID NO: 1626457 - DNA, 15 bp, Homo sapiens
aacagactttaaacc

SEQ ID NO: 1626458 - DNA, 15 bp, Homo sapiens
acagactttaaacca

SEQ ID NO: 1626459 - DNA, 15 bp, Homo sapiens
cagactttaaaccaa

SEQ ID NO: 1626460 - DNA, 15 bp, Homo sapiens
agactttaaaccaac

SEQ ID NO: 1626461 - DNA, 15 bp, Homo sapiens
gactttaaaccaaca

SEQ ID NO: 1626462 - DNA, 15 bp, Homo sapiens
actttaaaccaacaa

SEQ ID NO: 1626463 - DNA, 15 bp, Homo sapiens
ctttaaaccaacaaa

SEQ ID NO: 1626464 - DNA, 15 bp, Homo sapiens
tttaaaccaacaaag

SEQ ID NO: 1626465 - DNA, 15 bp, Homo sapiens
ttaaaccaacaaaga

SEQ ID NO: 1626466 - DNA, 15 bp, Homo sapiens
taaaccaacaaagat

SEQ ID NO: 1626467 - DNA, 15 bp, Homo sapiens
aaaccaacaaagatc

SEQ ID NO: 1626468 - DNA, 15 bp, Homo sapiens
aaccaacaaagatca

SEQ ID NO: 1626469 - DNA, 15 bp, Homo sapiens
accaacaaagatcaa

SEQ ID NO: 1626470 - DNA, 15 bp, Homo sapiens
ccaacaaagatcaaa

SEQ ID NO: 1626471 - DNA, 15 bp, Homo sapiens
caacaaagatcaaaa

SEQ ID NO: 1626472 - DNA, 15 bp, Homo sapiens
aacaaagatcaaaaa

SEQ ID NO: 1626473 - DNA, 15 bp, Homo sapiens
acaaagatcaaaaaa

SEQ ID NO: 1626474 - DNA, 15 bp, Homo sapiens
caaagatcaaaaaag

SEQ ID NO: 1626475 - DNA, 15 bp, Homo sapiens
aaagatcaaaaaaga

SEQ ID NO: 1626476 - DNA, 15 bp, Homo sapiens
aagatcaaaaaagac

SEQ ID NO: 1626477 - DNA, 15 bp, Homo sapiens
agatcaaaaaagaca

SEQ ID NO: 1626478 - DNA, 15 bp, Homo sapiens
gatcaaaaaagacaa

SEQ ID NO: 1626479 - DNA, 15 bp, Homo sapiens
atcaaaaaagacaaa

SEQ ID NO: 1626480 - DNA, 15 bp, Homo sapiens
tcaaaaaagacaaag

SEQ ID NO: 1626481 - DNA, 15 bp, Homo sapiens
caaaaaagacaaagg

SEQ ID NO: 1626482 - DNA, 15 bp, Homo sapiens
aaaaaagacaaaggg

SEQ ID NO: 1626483 - DNA, 15 bp, Homo sapiens
aaaaagacaaagggt

SEQ ID NO: 1626484 - DNA, 15 bp, Homo sapiens
aaaagacaaagggta

SEQ ID NO: 1626485 - DNA, 15 bp, Homo sapiens
aaagacaaagggtat

SEQ ID NO: 1626486 - DNA, 15 bp, Homo sapiens
aagacaaagggtatt

SEQ ID NO: 1626487 - DNA, 15 bp, Homo sapiens
agacaaagggtatta

SEQ ID NO: 1626488 - DNA, 15 bp, Homo sapiens
gacaaagggtattac

SEQ ID NO: 1626489 - DNA, 15 bp, Homo sapiens
acaaagggtattaca

SEQ ID NO: 1626490 - DNA, 15 bp, Homo sapiens
caaagggtattacat

SEQ ID NO: 1626491 - DNA, 15 bp, Homo sapiens
aaagggtattacata

SEQ ID NO: 1626492 - DNA, 15 bp, Homo sapiens
aagggtattacataa

SEQ ID NO: 1626493 - DNA, 15 bp, Homo sapiens
agggtattacataat

SEQ ID NO: 1626494 - DNA, 15 bp, Homo sapiens
gggtattacataatg

SEQ ID NO: 1626495 - DNA, 15 bp, Homo sapiens
ggtattacataatgg

SEQ ID NO: 1626496 - DNA, 15 bp, Homo sapiens
gtattacataatggt

SEQ ID NO: 1626497 - DNA, 15 bp, Homo sapiens
tattacataatggta

SEQ ID NO: 1626498 - DNA, 15 bp, Homo sapiens
attacataatggtaa

SEQ ID NO: 1626499 - DNA, 15 bp, Homo sapiens
ttacataatggtaaa

SEQ ID NO: 1626500 - DNA, 15 bp, Homo sapiens
tacataatggtaaag

SEQ ID NO: 1626501 - DNA, 15 bp, Homo sapiens
acataatggtaaagg

SEQ ID NO: 1626502 - DNA, 15 bp, Homo sapiens
cataatggtaaaggg

SEQ ID NO: 1626503 - DNA, 15 bp, Homo sapiens
ataatggtaaaggga

SEQ ID NO: 1626504 - DNA, 15 bp, Homo sapiens
taatggtaaagggat

SEQ ID NO: 1626505 - DNA, 15 bp, Homo sapiens
aatggtaaagggatc

SEQ ID NO: 1626506 - DNA, 15 bp, Homo sapiens
atggtaaagggatca

SEQ ID NO: 1626507 - DNA, 15 bp, Homo sapiens
tggtaaagggatcaa

SEQ ID NO: 1626508 - DNA, 15 bp, Homo sapiens
ggtaaagggatcaat

SEQ ID NO: 1626509 - DNA, 15 bp, Homo sapiens
gtaaagggatcaatg

SEQ ID NO: 1626510 - DNA, 15 bp, Homo sapiens
taaagggatcaatgc

SEQ ID NO: 1626511 - DNA, 15 bp, Homo sapiens
aaagggatcaatgca

SEQ ID NO: 1626512 - DNA, 15 bp, Homo sapiens
aagggatcaatgcaa

SEQ ID NO: 1626513 - DNA, 15 bp, Homo sapiens
agggatcaatgcaac

SEQ ID NO: 1626514 - DNA, 15 bp, Homo sapiens
gggatcaatgcaaca

SEQ ID NO: 1626515 - DNA, 15 bp, Homo sapiens
ggatcaatgcaacaa

SEQ ID NO: 1626516 - DNA, 15 bp, Homo sapiens
gatcaatgcaacaag

SEQ ID NO: 1626517 - DNA, 15 bp, Homo sapiens
atcaatgcaacaaga

SEQ ID NO: 1626518 - DNA, 15 bp, Homo sapiens
tcaatgcaacaagaa

SEQ ID NO: 1626519 - DNA, 15 bp, Homo sapiens
caatgcaacaagaag

SEQ ID NO: 1626520 - DNA, 15 bp, Homo sapiens
aatgcaacaagaaga

SEQ ID NO: 1626521 - DNA, 15 bp, Homo sapiens
atgcaacaagaagaa

SEQ ID NO: 1626522 - DNA, 15 bp, Homo sapiens
tgcaacaagaagaac

SEQ ID NO: 1626523 - DNA, 15 bp, Homo sapiens
gcaacaagaagaact

SEQ ID NO: 1626524 - DNA, 15 bp, Homo sapiens
caacaagaagaacta

SEQ ID NO: 1626525 - DNA, 15 bp, Homo sapiens
aacaagaagaactaa

SEQ ID NO: 1626526 - DNA, 15 bp, Homo sapiens
acaagaagaactaac

SEQ ID NO: 1626527 - DNA, 15 bp, Homo sapiens
caagaagaactaact

SEQ ID NO: 1626528 - DNA, 15 bp, Homo sapiens
aagaagaactaacta

SEQ ID NO: 1626529 - DNA, 15 bp, Homo sapiens
agaagaactaactat

SEQ ID NO: 1626530 - DNA, 15 bp, Homo sapiens
gaagaactaactatc

SEQ ID NO: 1626531 - DNA, 15 bp, Homo sapiens
aagaactaactatcc

SEQ ID NO: 1626532 - DNA, 15 bp, Homo sapiens
agaactaactatcct

SEQ ID NO: 1626533 - DNA, 15 bp, Homo sapiens
gaactaactatccta

SEQ ID NO: 1626534 - DNA, 15 bp, Homo sapiens
aactaactatcctaa

SEQ ID NO: 1626535 - DNA, 15 bp, Homo sapiens
actaactatcctaaa

SEQ ID NO: 1626536 - DNA, 15 bp, Homo sapiens
ctaactatcctaaat

SEQ ID NO: 1626537 - DNA, 15 bp, Homo sapiens
taactatcctaaata

SEQ ID NO: 1626538 - DNA, 15 bp, Homo sapiens
aactatcctaaatac

SEQ ID NO: 1626539 - DNA, 15 bp, Homo sapiens
actatcctaaataca

SEQ ID NO: 1626540 - DNA, 15 bp, Homo sapiens
ctatcctaaatacac

SEQ ID NO: 1626541 - DNA, 15 bp, Homo sapiens
tatcctaaatacacc

SEQ ID NO: 1626542 - DNA, 15 bp, Homo sapiens
atcctaaatacacca

SEQ ID NO: 1626543 - DNA, 15 bp, Homo sapiens
tcctaaatacaccac

SEQ ID NO: 1626544 - DNA, 15 bp, Homo sapiens
cctaaatacaccaca

SEQ ID NO: 1626545 - DNA, 15 bp, Homo sapiens
ctaaatacaccacac

SEQ ID NO: 1626546 - DNA, 15 bp, Homo sapiens
taaatacaccacaca

SEQ ID NO: 1626547 - DNA, 15 bp, Homo sapiens
aaatacaccacacaa

SEQ ID NO: 1626548 - DNA, 15 bp, Homo sapiens
aatacaccacacaat

SEQ ID NO: 1626549 - DNA, 15 bp, Homo sapiens
atacaccacacaata

SEQ ID NO: 1626550 - DNA, 15 bp, Homo sapiens
tacaccacacaataa

SEQ ID NO: 1626551 - DNA, 15 bp, Homo sapiens
acaccacacaataat

SEQ ID NO: 1626552 - DNA, 15 bp, Homo sapiens
caccacacaataata

SEQ ID NO: 1626553 - DNA, 15 bp, Homo sapiens
accacacaataatag

SEQ ID NO: 1626554 - DNA, 15 bp, Homo sapiens
ccacacaataatagt

SEQ ID NO: 1626555 - DNA, 15 bp, Homo sapiens
cacacaataatagta

SEQ ID NO: 1626556 - DNA, 15 bp, Homo sapiens
acacaataatagtag

SEQ ID NO: 1626557 - DNA, 15 bp, Homo sapiens
cacaataatagtagg

SEQ ID NO: 1626558 - DNA, 15 bp, Homo sapiens
acaataatagtagga

SEQ ID NO: 1626559 - DNA, 15 bp, Homo sapiens
caataatagtaggag

SEQ ID NO: 1626560 - DNA, 15 bp, Homo sapiens
aataatagtaggaga

SEQ ID NO: 1626561 - DNA, 15 bp, Homo sapiens
ataatagtaggagag

SEQ ID NO: 1626562 - DNA, 15 bp, Homo sapiens
taatagtaggagagt

SEQ ID NO: 1626563 - DNA, 15 bp, Homo sapiens
aatagtaggagagtt

SEQ ID NO: 1626564 - DNA, 15 bp, Homo sapiens
atagtaggagagttt

SEQ ID NO: 1626565 - DNA, 15 bp, Homo sapiens
tagtaggagagttta

SEQ ID NO: 1626566 - DNA, 15 bp, Homo sapiens
agtaggagagtttaa

SEQ ID NO: 1626567 - DNA, 15 bp, Homo sapiens
gtaggagagtttaac

SEQ ID NO: 1626568 - DNA, 15 bp, Homo sapiens
taggagagtttaact

SEQ ID NO: 1626569 - DNA, 15 bp, Homo sapiens
aggagagtttaactc

SEQ ID NO: 1626570 - DNA, 15 bp, Homo sapiens
ggagagtttaactcc

SEQ ID NO: 1626571 - DNA, 15 bp, Homo sapiens
gagagtttaactccc

SEQ ID NO: 1626572 - DNA, 15 bp, Homo sapiens
agagtttaactcccc

SEQ ID NO: 1626573 - DNA, 15 bp, Homo sapiens
gagtttaactcccca

SEQ ID NO: 1626574 - DNA, 15 bp, Homo sapiens
agtttaactccccac

SEQ ID NO: 1626575 - DNA, 15 bp, Homo sapiens
gtttaactccccact

SEQ ID NO: 1626576 - DNA, 15 bp, Homo sapiens
tttaactccccactg

SEQ ID NO: 1626577 - DNA, 15 bp, Homo sapiens
ttaactccccactgt

SEQ ID NO: 1626578 - DNA, 15 bp, Homo sapiens
taactccccactgtg

SEQ ID NO: 1626579 - DNA, 15 bp, Homo sapiens
aactccccactgtga

SEQ ID NO: 1626580 - DNA, 15 bp, Homo sapiens
actccccactgtgaa

SEQ ID NO: 1626581 - DNA, 15 bp, Homo sapiens
ctccccactgtgaat

SEQ ID NO: 1626582 - DNA, 15 bp, Homo sapiens
tccccactgtgaata

SEQ ID NO: 1626583 - DNA, 15 bp, Homo sapiens
ccccactgtgaatat

SEQ ID NO: 1626584 - DNA, 15 bp, Homo sapiens
cccactgtgaatatt

SEQ ID NO: 1626585 - DNA, 15 bp, Homo sapiens
ccactgtgaatatta

SEQ ID NO: 1626586 - DNA, 15 bp, Homo sapiens
cactgtgaatattag

SEQ ID NO: 1626587 - DNA, 15 bp, Homo sapiens
actgtgaatattaga

SEQ ID NO: 1626588 - DNA, 15 bp, Homo sapiens
ctgtgaatattagac

SEQ ID NO: 1626589 - DNA, 15 bp, Homo sapiens
tgtgaatattagaca

SEQ ID NO: 1626590 - DNA, 15 bp, Homo sapiens
gtgaatattagacaa

SEQ ID NO: 1626591 - DNA, 15 bp, Homo sapiens
tgaatattagacaaa

SEQ ID NO: 1626592 - DNA, 15 bp, Homo sapiens
gaatattagacaaat

SEQ ID NO: 1626593 - DNA, 15 bp, Homo sapiens
aatattagacaaatc

SEQ ID NO: 1626594 - DNA, 15 bp, Homo sapiens
atattagacaaatca

SEQ ID NO: 1626595 - DNA, 15 bp, Homo sapiens
tattagacaaatcag

SEQ ID NO: 1626596 - DNA, 15 bp, Homo sapiens
attagacaaatcagt

SEQ ID NO: 1626597 - DNA, 15 bp, Homo sapiens
ttagacaaatcagtg

SEQ ID NO: 1626598 - DNA, 15 bp, Homo sapiens
tagacaaatcagtga

SEQ ID NO: 1626599 - DNA, 15 bp, Homo sapiens
agacaaatcagtgag

SEQ ID NO: 1626600 - DNA, 15 bp, Homo sapiens
gacaaatcagtgaga

SEQ ID NO: 1626601 - DNA, 15 bp, Homo sapiens
acaaatcagtgagac

SEQ ID NO: 1626602 - DNA, 15 bp, Homo sapiens
caaatcagtgagaca

SEQ ID NO: 1626603 - DNA, 15 bp, Homo sapiens
aaatcagtgagacag

SEQ ID NO: 1626604 - DNA, 15 bp, Homo sapiens
aatcagtgagacaga

SEQ ID NO: 1626605 - DNA, 15 bp, Homo sapiens
atcagtgagacagaa

SEQ ID NO: 1626606 - DNA, 15 bp, Homo sapiens
tcagtgagacagaaa

SEQ ID NO: 1626607 - DNA, 15 bp, Homo sapiens
cagtgagacagaaaa

SEQ ID NO: 1626608 - DNA, 15 bp, Homo sapiens
agtgagacagaaaat

SEQ ID NO: 1626609 - DNA, 15 bp, Homo sapiens
gtgagacagaaaatt

SEQ ID NO: 1626610 - DNA, 15 bp, Homo sapiens
tgagacagaaaatta

SEQ ID NO: 1626611 - DNA, 15 bp, Homo sapiens
gagacagaaaattag

SEQ ID NO: 1626612 - DNA, 15 bp, Homo sapiens
agacagaaaattagc

SEQ ID NO: 1626613 - DNA, 15 bp, Homo sapiens
gacagaaaattagca

SEQ ID NO: 1626614 - DNA, 15 bp, Homo sapiens
acagaaaattagcaa

SEQ ID NO: 1626615 - DNA, 15 bp, Homo sapiens
cagaaaattagcaag

SEQ ID NO: 1626616 - DNA, 15 bp, Homo sapiens
agaaaattagcaagg

SEQ ID NO: 1626617 - DNA, 15 bp, Homo sapiens
gaaaattagcaagga

SEQ ID NO: 1626618 - DNA, 15 bp, Homo sapiens
aaaattagcaaggat

SEQ ID NO: 1626619 - DNA, 15 bp, Homo sapiens
aaattagcaaggata

SEQ ID NO: 1626620 - DNA, 15 bp, Homo sapiens
aattagcaaggatat

SEQ ID NO: 1626621 - DNA, 15 bp, Homo sapiens
attagcaaggatatt

SEQ ID NO: 1626622 - DNA, 15 bp, Homo sapiens
ttagcaaggatattc

SEQ ID NO: 1626623 - DNA, 15 bp, Homo sapiens
tagcaaggatattca

SEQ ID NO: 1626624 - DNA, 15 bp, Homo sapiens
agcaaggatattcag

SEQ ID NO: 1626625 - DNA, 15 bp, Homo sapiens
gcaaggatattcagg

SEQ ID NO: 1626626 - DNA, 15 bp, Homo sapiens
caaggatattcagga

SEQ ID NO: 1626627 - DNA, 15 bp, Homo sapiens
aaggatattcaggac

SEQ ID NO: 1626628 - DNA, 15 bp, Homo sapiens
aggatattcaggact

SEQ ID NO: 1626629 - DNA, 15 bp, Homo sapiens
ggatattcaggactt

SEQ ID NO: 1626630 - DNA, 15 bp, Homo sapiens
gatattcaggacttg

SEQ ID NO: 1626631 - DNA, 15 bp, Homo sapiens
atattcaggacttga

SEQ ID NO: 1626632 - DNA, 15 bp, Homo sapiens
tattcaggacttgaa

SEQ ID NO: 1626633 - DNA, 15 bp, Homo sapiens
attcaggacttgaac

SEQ ID NO: 1626634 - DNA, 15 bp, Homo sapiens
ttcaggacttgaact

SEQ ID NO: 1626635 - DNA, 15 bp, Homo sapiens
tcaggacttgaactc

SEQ ID NO: 1626636 - DNA, 15 bp, Homo sapiens
caggacttgaactca

SEQ ID NO: 1626637 - DNA, 15 bp, Homo sapiens
aggacttgaactcag

SEQ ID NO: 1626638 - DNA, 15 bp, Homo sapiens
ggacttgaactcagc

SEQ ID NO: 1626639 - DNA, 15 bp, Homo sapiens
gacttgaactcagct

SEQ ID NO: 1626640 - DNA, 15 bp, Homo sapiens
acttgaactcagctc

SEQ ID NO: 1626641 - DNA, 15 bp, Homo sapiens
cttgaactcagctct

SEQ ID NO: 1626642 - DNA, 15 bp, Homo sapiens
ttgaactcagctctg

SEQ ID NO: 1626643 - DNA, 15 bp, Homo sapiens
tgaactcagctctgg

SEQ ID NO: 1626644 - DNA, 15 bp, Homo sapiens
gaactcagctctgga

SEQ ID NO: 1626645 - DNA, 15 bp, Homo sapiens
aactcagctctggac

SEQ ID NO: 1626646 - DNA, 15 bp, Homo sapiens
actcagctctggacc

SEQ ID NO: 1626647 - DNA, 15 bp, Homo sapiens
ctcagctctggacca

SEQ ID NO: 1626648 - DNA, 15 bp, Homo sapiens
tcagctctggaccaa

SEQ ID NO: 1626649 - DNA, 15 bp, Homo sapiens
cagctctggaccaag

SEQ ID NO: 1626650 - DNA, 15 bp, Homo sapiens
agctctggaccaagt

SEQ ID NO: 1626651 - DNA, 15 bp, Homo sapiens
gctctggaccaagtg

SEQ ID NO: 1626652 - DNA, 15 bp, Homo sapiens
ctctggaccaagtgg

SEQ ID NO: 1626653 - DNA, 15 bp, Homo sapiens
tctggaccaagtgga

SEQ ID NO: 1626654 - DNA, 15 bp, Homo sapiens
ctggaccaagtggac

SEQ ID NO: 1626655 - DNA, 15 bp, Homo sapiens
tggaccaagtggacc

SEQ ID NO: 1626656 - DNA, 15 bp, Homo sapiens
ggaccaagtggacct

SEQ ID NO: 1626657 - DNA, 15 bp, Homo sapiens
gaccaagtggaccta

SEQ ID NO: 1626658 - DNA, 15 bp, Homo sapiens
accaagtggacctaa

SEQ ID NO: 1626659 - DNA, 15 bp, Homo sapiens
ccaagtggacctaat

SEQ ID NO: 1626660 - DNA, 15 bp, Homo sapiens
caagtggacctaata

SEQ ID NO: 1626661 - DNA, 15 bp, Homo sapiens
aagtggacctaatag

SEQ ID NO: 1626662 - DNA, 15 bp, Homo sapiens
agtggacctaataga

SEQ ID NO: 1626663 - DNA, 15 bp, Homo sapiens
gtggacctaatagac

SEQ ID NO: 1626664 - DNA, 15 bp, Homo sapiens
tggacctaatagaca

SEQ ID NO: 1626665 - DNA, 15 bp, Homo sapiens
ggacctaatagacat

SEQ ID NO: 1626666 - DNA, 15 bp, Homo sapiens
gacctaatagacatc

SEQ ID NO: 1626667 - DNA, 15 bp, Homo sapiens
acctaatagacatct

SEQ ID NO: 1626668 - DNA, 15 bp, Homo sapiens
cctaatagacatcta

SEQ ID NO: 1626669 - DNA, 15 bp, Homo sapiens
ctaatagacatctac

SEQ ID NO: 1626670 - DNA, 15 bp, Homo sapiens
taatagacatctaca

SEQ ID NO: 1626671 - DNA, 15 bp, Homo sapiens
aatagacatctacag

SEQ ID NO: 1626672 - DNA, 15 bp, Homo sapiens
atagacatctacaga

SEQ ID NO: 1626673 - DNA, 15 bp, Homo sapiens
tagacatctacagaa

SEQ ID NO: 1626674 - DNA, 15 bp, Homo sapiens
agacatctacagaac

SEQ ID NO: 1626675 - DNA, 15 bp, Homo sapiens
gacatctacagaact

SEQ ID NO: 1626676 - DNA, 15 bp, Homo sapiens
acatctacagaactc

SEQ ID NO: 1626677 - DNA, 15 bp, Homo sapiens
catctacagaactct

SEQ ID NO: 1626678 - DNA, 15 bp, Homo sapiens
atctacagaactctc

SEQ ID NO: 1626679 - DNA, 15 bp, Homo sapiens
tctacagaactctcc

SEQ ID NO: 1626680 - DNA, 15 bp, Homo sapiens
ctacagaactctcca

SEQ ID NO: 1626681 - DNA, 15 bp, Homo sapiens
tacagaactctccac

SEQ ID NO: 1626682 - DNA, 15 bp, Homo sapiens
acagaactctccacc

SEQ ID NO: 1626683 - DNA, 15 bp, Homo sapiens
cagaactctccaccc

SEQ ID NO: 1626684 - DNA, 15 bp, Homo sapiens
agaactctccacccc

SEQ ID NO: 1626685 - DNA, 15 bp, Homo sapiens
gaactctccacccca

SEQ ID NO: 1626686 - DNA, 15 bp, Homo sapiens
aactctccaccccaa

SEQ ID NO: 1626687 - DNA, 15 bp, Homo sapiens
actctccaccccaaa

SEQ ID NO: 1626688 - DNA, 15 bp, Homo sapiens
ctctccaccccaaat

SEQ ID NO: 1626689 - DNA, 15 bp, Homo sapiens
tctccaccccaaatc

SEQ ID NO: 1626690 - DNA, 15 bp, Homo sapiens
ctccaccccaaatca

SEQ ID NO: 1626691 - DNA, 15 bp, Homo sapiens
tccaccccaaatcaa

SEQ ID NO: 1626692 - DNA, 15 bp, Homo sapiens
ccaccccaaatcaac

SEQ ID NO: 1626693 - DNA, 15 bp, Homo sapiens
caccccaaatcaaca

SEQ ID NO: 1626694 - DNA, 15 bp, Homo sapiens
accccaaatcaacag

SEQ ID NO: 1626695 - DNA, 15 bp, Homo sapiens
ccccaaatcaacaga

SEQ ID NO: 1626696 - DNA, 15 bp, Homo sapiens
cccaaatcaacagaa

SEQ ID NO: 1626697 - DNA, 15 bp, Homo sapiens
ccaaatcaacagaat

SEQ ID NO: 1626698 - DNA, 15 bp, Homo sapiens
caaatcaacagaata

SEQ ID NO: 1626699 - DNA, 15 bp, Homo sapiens
aaatcaacagaatat

SEQ ID NO: 1626700 - DNA, 15 bp, Homo sapiens
aatcaacagaatata

SEQ ID NO: 1626701 - DNA, 15 bp, Homo sapiens
atcaacagaatatac

SEQ ID NO: 1626702 - DNA, 15 bp, Homo sapiens
tcaacagaatataca

SEQ ID NO: 1626703 - DNA, 15 bp, Homo sapiens
caacagaatatacat

SEQ ID NO: 1626704 - DNA, 15 bp, Homo sapiens
aacagaatatacatt

SEQ ID NO: 1626705 - DNA, 15 bp, Homo sapiens
acagaatatacattc

SEQ ID NO: 1626706 - DNA, 15 bp, Homo sapiens
cagaatatacattct

SEQ ID NO: 1626707 - DNA, 15 bp, Homo sapiens
agaatatacattctt

SEQ ID NO: 1626708 - DNA, 15 bp, Homo sapiens
gaatatacattcttc

SEQ ID NO: 1626709 - DNA, 15 bp, Homo sapiens
aatatacattcttct

SEQ ID NO: 1626710 - DNA, 15 bp, Homo sapiens
atatacattcttctc

SEQ ID NO: 1626711 - DNA, 15 bp, Homo sapiens
tatacattcttctca

SEQ ID NO: 1626712 - DNA, 15 bp, Homo sapiens
atacattcttctcag

SEQ ID NO: 1626713 - DNA, 15 bp, Homo sapiens
tacattcttctcagc

SEQ ID NO: 1626714 - DNA, 15 bp, Homo sapiens
acattcttctcagca

SEQ ID NO: 1626715 - DNA, 15 bp, Homo sapiens
cattcttctcagcac

SEQ ID NO: 1626716 - DNA, 15 bp, Homo sapiens
attcttctcagcacc

SEQ ID NO: 1626717 - DNA, 15 bp, Homo sapiens
ttcttctcagcacca

SEQ ID NO: 1626718 - DNA, 15 bp, Homo sapiens
tcttctcagcaccac

SEQ ID NO: 1626719 - DNA, 15 bp, Homo sapiens
cttctcagcaccaca

SEQ ID NO: 1626720 - DNA, 15 bp, Homo sapiens
ttctcagcaccacat

SEQ ID NO: 1626721 - DNA, 15 bp, Homo sapiens
tctcagcaccacatc

SEQ ID NO: 1626722 - DNA, 15 bp, Homo sapiens
ctcagcaccacatca

SEQ ID NO: 1626723 - DNA, 15 bp, Homo sapiens
tcagcaccacatcac

SEQ ID NO: 1626724 - DNA, 15 bp, Homo sapiens
cagcaccacatcaca

SEQ ID NO: 1626725 - DNA, 15 bp, Homo sapiens
agcaccacatcacac

SEQ ID NO: 1626726 - DNA, 15 bp, Homo sapiens
gcaccacatcacact

SEQ ID NO: 1626727 - DNA, 15 bp, Homo sapiens
caccacatcacactt

SEQ ID NO: 1626728 - DNA, 15 bp, Homo sapiens
accacatcacactta

SEQ ID NO: 1626729 - DNA, 15 bp, Homo sapiens
ccacatcacacttat

SEQ ID NO: 1626730 - DNA, 15 bp, Homo sapiens
cacatcacacttatt

SEQ ID NO: 1626731 - DNA, 15 bp, Homo sapiens
acatcacacttattc

SEQ ID NO: 1626732 - DNA, 15 bp, Homo sapiens
catcacacttattct

SEQ ID NO: 1626733 - DNA, 15 bp, Homo sapiens
atcacacttattcta

SEQ ID NO: 1626734 - DNA, 15 bp, Homo sapiens
tcacacttattctaa

SEQ ID NO: 1626735 - DNA, 15 bp, Homo sapiens
cacacttattctaaa

SEQ ID NO: 1626736 - DNA, 15 bp, Homo sapiens
acacttattctaaaa

SEQ ID NO: 1626737 - DNA, 15 bp, Homo sapiens
cacttattctaaaac

SEQ ID NO: 1626738 - DNA, 15 bp, Homo sapiens
acttattctaaaact

SEQ ID NO: 1626739 - DNA, 15 bp, Homo sapiens
cttattctaaaactg

SEQ ID NO: 1626740 - DNA, 15 bp, Homo sapiens
ttattctaaaactga

SEQ ID NO: 1626741 - DNA, 15 bp, Homo sapiens
tattctaaaactgac

SEQ ID NO: 1626742 - DNA, 15 bp, Homo sapiens
attctaaaactgacc

SEQ ID NO: 1626743 - DNA, 15 bp, Homo sapiens
ttctaaaactgacca

SEQ ID NO: 1626744 - DNA, 15 bp, Homo sapiens
tctaaaactgaccac

SEQ ID NO: 1626745 - DNA, 15 bp, Homo sapiens
ctaaaactgaccaca

SEQ ID NO: 1626746 - DNA, 15 bp, Homo sapiens
taaaactgaccacat

SEQ ID NO: 1626747 - DNA, 15 bp, Homo sapiens
aaaactgaccacata

SEQ ID NO: 1626748 - DNA, 15 bp, Homo sapiens
aaactgaccacataa

SEQ ID NO: 1626749 - DNA, 15 bp, Homo sapiens
aactgaccacataat

SEQ ID NO: 1626750 - DNA, 15 bp, Homo sapiens
actgaccacataatt

SEQ ID NO: 1626751 - DNA, 15 bp, Homo sapiens
ctgaccacataattg

SEQ ID NO: 1626752 - DNA, 15 bp, Homo sapiens
tgaccacataattgg

SEQ ID NO: 1626753 - DNA, 15 bp, Homo sapiens
gaccacataattgga

SEQ ID NO: 1626754 - DNA, 15 bp, Homo sapiens
accacataattggaa

SEQ ID NO: 1626755 - DNA, 15 bp, Homo sapiens
ccacataattggaag

SEQ ID NO: 1626756 - DNA, 15 bp, Homo sapiens
cacataattggaagt

SEQ ID NO: 1626757 - DNA, 15 bp, Homo sapiens
acataattggaagta

SEQ ID NO: 1626758 - DNA, 15 bp, Homo sapiens
cataattggaagtaa

SEQ ID NO: 1626759 - DNA, 15 bp, Homo sapiens
ataattggaagtaaa

SEQ ID NO: 1626760 - DNA, 15 bp, Homo sapiens
taattggaagtaaaa

SEQ ID NO: 1626761 - DNA, 15 bp, Homo sapiens
aattggaagtaaaac

SEQ ID NO: 1626762 - DNA, 15 bp, Homo sapiens
attggaagtaaaaca

SEQ ID NO: 1626763 - DNA, 15 bp, Homo sapiens
ttggaagtaaaacac

SEQ ID NO: 1626764 - DNA, 15 bp, Homo sapiens
tggaagtaaaacact

SEQ ID NO: 1626765 - DNA, 15 bp, Homo sapiens
ggaagtaaaacactc

SEQ ID NO: 1626766 - DNA, 15 bp, Homo sapiens
gaagtaaaacactcc

SEQ ID NO: 1626767 - DNA, 15 bp, Homo sapiens
aagtaaaacactcct

SEQ ID NO: 1626768 - DNA, 15 bp, Homo sapiens
agtaaaacactcctc

SEQ ID NO: 1626769 - DNA, 15 bp, Homo sapiens
gtaaaacactcctca

SEQ ID NO: 1626770 - DNA, 15 bp, Homo sapiens
taaaacactcctcag

SEQ ID NO: 1626771 - DNA, 15 bp, Homo sapiens
aaaacactcctcagc

SEQ ID NO: 1626772 - DNA, 15 bp, Homo sapiens
aaacactcctcagca

SEQ ID NO: 1626773 - DNA, 15 bp, Homo sapiens
aacactcctcagcaa

SEQ ID NO: 1626774 - DNA, 15 bp, Homo sapiens
acactcctcagcaaa

SEQ ID NO: 1626775 - DNA, 15 bp, Homo sapiens
cactcctcagcaaat

SEQ ID NO: 1626776 - DNA, 15 bp, Homo sapiens
actcctcagcaaatg

SEQ ID NO: 1626777 - DNA, 15 bp, Homo sapiens
ctcctcagcaaatgc

SEQ ID NO: 1626778 - DNA, 15 bp, Homo sapiens
tcctcagcaaatgca

SEQ ID NO: 1626779 - DNA, 15 bp, Homo sapiens
cctcagcaaatgcaa

SEQ ID NO: 1626780 - DNA, 15 bp, Homo sapiens
ctcagcaaatgcaaa

SEQ ID NO: 1626781 - DNA, 15 bp, Homo sapiens
tcagcaaatgcaaaa

SEQ ID NO: 1626782 - DNA, 15 bp, Homo sapiens
cagcaaatgcaaaag

SEQ ID NO: 1626783 - DNA, 15 bp, Homo sapiens
agcaaatgcaaaaga

SEQ ID NO: 1626784 - DNA, 15 bp, Homo sapiens
gcaaatgcaaaagaa

SEQ ID NO: 1626785 - DNA, 15 bp, Homo sapiens
caaatgcaaaagaat

SEQ ID NO: 1626786 - DNA, 15 bp, Homo sapiens
aaatgcaaaagaata

SEQ ID NO: 1626787 - DNA, 15 bp, Homo sapiens
aatgcaaaagaatag

SEQ ID NO: 1626788 - DNA, 15 bp, Homo sapiens
atgcaaaagaataga

SEQ ID NO: 1626789 - DNA, 15 bp, Homo sapiens
tgcaaaagaatagaa

SEQ ID NO: 1626790 - DNA, 15 bp, Homo sapiens
gcaaaagaatagaaa

SEQ ID NO: 1626791 - DNA, 15 bp, Homo sapiens
caaaagaatagaaat

SEQ ID NO: 1626792 - DNA, 15 bp, Homo sapiens
aaaagaatagaaatc

SEQ ID NO: 1626793 - DNA, 15 bp, Homo sapiens
aaagaatagaaatca

SEQ ID NO: 1626794 - DNA, 15 bp, Homo sapiens
aagaatagaaatcat

SEQ ID NO: 1626795 - DNA, 15 bp, Homo sapiens
agaatagaaatcata

SEQ ID NO: 1626796 - DNA, 15 bp, Homo sapiens
gaatagaaatcataa

SEQ ID NO: 1626797 - DNA, 15 bp, Homo sapiens
aatagaaatcataac

SEQ ID NO: 1626798 - DNA, 15 bp, Homo sapiens
atagaaatcataaca

SEQ ID NO: 1626799 - DNA, 15 bp, Homo sapiens
tagaaatcataacaa

SEQ ID NO: 1626800 - DNA, 15 bp, Homo sapiens
agaaatcataacaaa

SEQ ID NO: 1626801 - DNA, 15 bp, Homo sapiens
gaaatcataacaaac

SEQ ID NO: 1626802 - DNA, 15 bp, Homo sapiens
aaatcataacaaaca

SEQ ID NO: 1626803 - DNA, 15 bp, Homo sapiens
aatcataacaaacag

SEQ ID NO: 1626804 - DNA, 15 bp, Homo sapiens
atcataacaaacagt

SEQ ID NO: 1626805 - DNA, 15 bp, Homo sapiens
tcataacaaacagtc

SEQ ID NO: 1626806 - DNA, 15 bp, Homo sapiens
cataacaaacagtct

SEQ ID NO: 1626807 - DNA, 15 bp, Homo sapiens
ataacaaacagtctc

SEQ ID NO: 1626808 - DNA, 15 bp, Homo sapiens
taacaaacagtctct

SEQ ID NO: 1626809 - DNA, 15 bp, Homo sapiens
aacaaacagtctctc

SEQ ID NO: 1626810 - DNA, 15 bp, Homo sapiens
acaaacagtctctcg

SEQ ID NO: 1626811 - DNA, 15 bp, Homo sapiens
caaacagtctctcgg

SEQ ID NO: 1626812 - DNA, 15 bp, Homo sapiens
aaacagtctctcgga

SEQ ID NO: 1626813 - DNA, 15 bp, Homo sapiens
aacagtctctcggac

SEQ ID NO: 1626814 - DNA, 15 bp, Homo sapiens
acagtctctcggacc

SEQ ID NO: 1626815 - DNA, 15 bp, Homo sapiens
cagtctctcggacca

SEQ ID NO: 1626816 - DNA, 15 bp, Homo sapiens
agtctctcggaccac

SEQ ID NO: 1626817 - DNA, 15 bp, Homo sapiens
gtctctcggaccaca

SEQ ID NO: 1626818 - DNA, 15 bp, Homo sapiens
tctctcggaccacag

SEQ ID NO: 1626819 - DNA, 15 bp, Homo sapiens
ctctcggaccacagt

SEQ ID NO: 1626820 - DNA, 15 bp, Homo sapiens
tctcggaccacagtg

SEQ ID NO: 1626821 - DNA, 15 bp, Homo sapiens
ctcggaccacagtgc

SEQ ID NO: 1626822 - DNA, 15 bp, Homo sapiens
tcggaccacagtgca

SEQ ID NO: 1626823 - DNA, 15 bp, Homo sapiens
cggaccacagtgcaa

SEQ ID NO: 1626824 - DNA, 15 bp, Homo sapiens
ggaccacagtgcaat

SEQ ID NO: 1626825 - DNA, 15 bp, Homo sapiens
gaccacagtgcaatc

SEQ ID NO: 1626826 - DNA, 15 bp, Homo sapiens
accacagtgcaatca

SEQ ID NO: 1626827 - DNA, 15 bp, Homo sapiens
ccacagtgcaatcaa

SEQ ID NO: 1626828 - DNA, 15 bp, Homo sapiens
cacagtgcaatcaaa

SEQ ID NO: 1626829 - DNA, 15 bp, Homo sapiens
acagtgcaatcaaat

SEQ ID NO: 1626830 - DNA, 15 bp, Homo sapiens
cagtgcaatcaaatt

SEQ ID NO: 1626831 - DNA, 15 bp, Homo sapiens
agtgcaatcaaatta

SEQ ID NO: 1626832 - DNA, 15 bp, Homo sapiens
gtgcaatcaaattag

SEQ ID NO: 1626833 - DNA, 15 bp, Homo sapiens
tgcaatcaaattaga

SEQ ID NO: 1626834 - DNA, 15 bp, Homo sapiens
gcaatcaaattagaa

SEQ ID NO: 1626835 - DNA, 15 bp, Homo sapiens
caatcaaattagaac

SEQ ID NO: 1626836 - DNA, 15 bp, Homo sapiens
aatcaaattagaact

SEQ ID NO: 1626837 - DNA, 15 bp, Homo sapiens
atcaaattagaactc

SEQ ID NO: 1626838 - DNA, 15 bp, Homo sapiens
tcaaattagaactca

SEQ ID NO: 1626839 - DNA, 15 bp, Homo sapiens
caaattagaactcag

SEQ ID NO: 1626840 - DNA, 15 bp, Homo sapiens
aaattagaactcagg

SEQ ID NO: 1626841 - DNA, 15 bp, Homo sapiens
aattagaactcagga

SEQ ID NO: 1626842 - DNA, 15 bp, Homo sapiens
attagaactcaggat

SEQ ID NO: 1626843 - DNA, 15 bp, Homo sapiens
ttagaactcaggatc

SEQ ID NO: 1626844 - DNA, 15 bp, Homo sapiens
tagaactcaggatca

SEQ ID NO: 1626845 - DNA, 15 bp, Homo sapiens
agaactcaggatcaa

SEQ ID NO: 1626846 - DNA, 15 bp, Homo sapiens
gaactcaggatcaag

SEQ ID NO: 1626847 - DNA, 15 bp, Homo sapiens
aactcaggatcaaga

SEQ ID NO: 1626848 - DNA, 15 bp, Homo sapiens
actcaggatcaagaa

SEQ ID NO: 1626849 - DNA, 15 bp, Homo sapiens
ctcaggatcaagaaa

SEQ ID NO: 1626850 - DNA, 15 bp, Homo sapiens
tcaggatcaagaaac

SEQ ID NO: 1626851 - DNA, 15 bp, Homo sapiens
caggatcaagaaact

SEQ ID NO: 1626852 - DNA, 15 bp, Homo sapiens
aggatcaagaaactc

SEQ ID NO: 1626853 - DNA, 15 bp, Homo sapiens
ggatcaagaaactca

SEQ ID NO: 1626854 - DNA, 15 bp, Homo sapiens
gatcaagaaactcac

SEQ ID NO: 1626855 - DNA, 15 bp, Homo sapiens
atcaagaaactcact

SEQ ID NO: 1626856 - DNA, 15 bp, Homo sapiens
tcaagaaactcactc

SEQ ID NO: 1626857 - DNA, 15 bp, Homo sapiens
caagaaactcactca

SEQ ID NO: 1626858 - DNA, 15 bp, Homo sapiens
aagaaactcactcaa

SEQ ID NO: 1626859 - DNA, 15 bp, Homo sapiens
agaaactcactcaaa

SEQ ID NO: 1626860 - DNA, 15 bp, Homo sapiens
gaaactcactcaaaa

SEQ ID NO: 1626861 - DNA, 15 bp, Homo sapiens
aaactcactcaaaac

SEQ ID NO: 1626862 - DNA, 15 bp, Homo sapiens
aactcactcaaaact

SEQ ID NO: 1626863 - DNA, 15 bp, Homo sapiens
actcactcaaaactt

SEQ ID NO: 1626864 - DNA, 15 bp, Homo sapiens
ctcactcaaaacttc

SEQ ID NO: 1626865 - DNA, 15 bp, Homo sapiens
tcactcaaaacttca

SEQ ID NO: 1626866 - DNA, 15 bp, Homo sapiens
cactcaaaacttcac

SEQ ID NO: 1626867 - DNA, 15 bp, Homo sapiens
actcaaaacttcaca

SEQ ID NO: 1626868 - DNA, 15 bp, Homo sapiens
ctcaaaacttcacaa

SEQ ID NO: 1626869 - DNA, 15 bp, Homo sapiens
tcaaaacttcacaac

SEQ ID NO: 1626870 - DNA, 15 bp, Homo sapiens
caaaacttcacaact

SEQ ID NO: 1626871 - DNA, 15 bp, Homo sapiens
aaaacttcacaacta

SEQ ID NO: 1626872 - DNA, 15 bp, Homo sapiens
aaacttcacaactac

SEQ ID NO: 1626873 - DNA, 15 bp, Homo sapiens
aacttcacaactaca

SEQ ID NO: 1626874 - DNA, 15 bp, Homo sapiens
acttcacaactacat

SEQ ID NO: 1626875 - DNA, 15 bp, Homo sapiens
cttcacaactacata

SEQ ID NO: 1626876 - DNA, 15 bp, Homo sapiens
ttcacaactacataa

SEQ ID NO: 1626877 - DNA, 15 bp, Homo sapiens
tcacaactacataaa

SEQ ID NO: 1626878 - DNA, 15 bp, Homo sapiens
cacaactacataaaa

SEQ ID NO: 1626879 - DNA, 15 bp, Homo sapiens
acaactacataaaaa

SEQ ID NO: 1626880 - DNA, 15 bp, Homo sapiens
caactacataaaaac

SEQ ID NO: 1626881 - DNA, 15 bp, Homo sapiens
aactacataaaaact

SEQ ID NO: 1626882 - DNA, 15 bp, Homo sapiens
actacataaaaactg

SEQ ID NO: 1626883 - DNA, 15 bp, Homo sapiens
ctacataaaaactga

SEQ ID NO: 1626884 - DNA, 15 bp, Homo sapiens
tacataaaaactgaa

SEQ ID NO: 1626885 - DNA, 15 bp, Homo sapiens
acataaaaactgaac

SEQ ID NO: 1626886 - DNA, 15 bp, Homo sapiens
cataaaaactgaaca

SEQ ID NO: 1626887 - DNA, 15 bp, Homo sapiens
ataaaaactgaacaa

SEQ ID NO: 1626888 - DNA, 15 bp, Homo sapiens
taaaaactgaacaac

SEQ ID NO: 1626889 - DNA, 15 bp, Homo sapiens
aaaaactgaacaacc

SEQ ID NO: 1626890 - DNA, 15 bp, Homo sapiens
aaaactgaacaacct

SEQ ID NO: 1626891 - DNA, 15 bp, Homo sapiens
aaactgaacaaccta

SEQ ID NO: 1626892 - DNA, 15 bp, Homo sapiens
aactgaacaacctac

SEQ ID NO: 1626893 - DNA, 15 bp, Homo sapiens
actgaacaacctact

SEQ ID NO: 1626894 - DNA, 15 bp, Homo sapiens
ctgaacaacctactc

SEQ ID NO: 1626895 - DNA, 15 bp, Homo sapiens
tgaacaacctactcc

SEQ ID NO: 1626896 - DNA, 15 bp, Homo sapiens
gaacaacctactcct

SEQ ID NO: 1626897 - DNA, 15 bp, Homo sapiens
aacaacctactcctt

SEQ ID NO: 1626898 - DNA, 15 bp, Homo sapiens
acaacctactcctta

SEQ ID NO: 1626899 - DNA, 15 bp, Homo sapiens
caacctactccttaa

SEQ ID NO: 1626900 - DNA, 15 bp, Homo sapiens
aacctactccttaat

SEQ ID NO: 1626901 - DNA, 15 bp, Homo sapiens
acctactccttaatg

SEQ ID NO: 1626902 - DNA, 15 bp, Homo sapiens
cctactccttaatga

SEQ ID NO: 1626903 - DNA, 15 bp, Homo sapiens
ctactccttaatgaa

SEQ ID NO: 1626904 - DNA, 15 bp, Homo sapiens
tactccttaatgaat

SEQ ID NO: 1626905 - DNA, 15 bp, Homo sapiens
actccttaatgaata

SEQ ID NO: 1626906 - DNA, 15 bp, Homo sapiens
ctccttaatgaatac

SEQ ID NO: 1626907 - DNA, 15 bp, Homo sapiens
tccttaatgaatact

SEQ ID NO: 1626908 - DNA, 15 bp, Homo sapiens
ccttaatgaatactg

SEQ ID NO: 1626909 - DNA, 15 bp, Homo sapiens
cttaatgaatactgg

SEQ ID NO: 1626910 - DNA, 15 bp, Homo sapiens
ttaatgaatactggg

SEQ ID NO: 1626911 - DNA, 15 bp, Homo sapiens
taatgaatactgggt

SEQ ID NO: 1626912 - DNA, 15 bp, Homo sapiens
aatgaatactgggta

SEQ ID NO: 1626913 - DNA, 15 bp, Homo sapiens
atgaatactgggtaa

SEQ ID NO: 1626914 - DNA, 15 bp, Homo sapiens
tgaatactgggtaaa

SEQ ID NO: 1626915 - DNA, 15 bp, Homo sapiens
gaatactgggtaaat

SEQ ID NO: 1626916 - DNA, 15 bp, Homo sapiens
aatactgggtaaata

SEQ ID NO: 1626917 - DNA, 15 bp, Homo sapiens
atactgggtaaataa

SEQ ID NO: 1626918 - DNA, 15 bp, Homo sapiens
tactgggtaaataac

SEQ ID NO: 1626919 - DNA, 15 bp, Homo sapiens
actgggtaaataaca

SEQ ID NO: 1626920 - DNA, 15 bp, Homo sapiens
ctgggtaaataacaa

SEQ ID NO: 1626921 - DNA, 15 bp, Homo sapiens
tgggtaaataacaaa

SEQ ID NO: 1626922 - DNA, 15 bp, Homo sapiens
gggtaaataacaaaa

SEQ ID NO: 1626923 - DNA, 15 bp, Homo sapiens
ggtaaataacaaaat

SEQ ID NO: 1626924 - DNA, 15 bp, Homo sapiens
gtaaataacaaaatg

SEQ ID NO: 1626925 - DNA, 15 bp, Homo sapiens
taaataacaaaatga

SEQ ID NO: 1626926 - DNA, 15 bp, Homo sapiens
aaataacaaaatgaa

SEQ ID NO: 1626927 - DNA, 15 bp, Homo sapiens
aataacaaaatgaag

SEQ ID NO: 1626928 - DNA, 15 bp, Homo sapiens
ataacaaaatgaagg

SEQ ID NO: 1626929 - DNA, 15 bp, Homo sapiens
taacaaaatgaaggc

SEQ ID NO: 1626930 - DNA, 15 bp, Homo sapiens
aacaaaatgaaggca

SEQ ID NO: 1626931 - DNA, 15 bp, Homo sapiens
acaaaatgaaggcag

SEQ ID NO: 1626932 - DNA, 15 bp, Homo sapiens
caaaatgaaggcaga

SEQ ID NO: 1626933 - DNA, 15 bp, Homo sapiens
aaaatgaaggcagaa

SEQ ID NO: 1626934 - DNA, 15 bp, Homo sapiens
aaatgaaggcagaaa

SEQ ID NO: 1626935 - DNA, 15 bp, Homo sapiens
aatgaaggcagaaat

SEQ ID NO: 1626936 - DNA, 15 bp, Homo sapiens
atgaaggcagaaata

SEQ ID NO: 1626937 - DNA, 15 bp, Homo sapiens
tgaaggcagaaataa

SEQ ID NO: 1626938 - DNA, 15 bp, Homo sapiens
gaaggcagaaataaa

SEQ ID NO: 1626939 - DNA, 15 bp, Homo sapiens
aaggcagaaataaat

SEQ ID NO: 1626940 - DNA, 15 bp, Homo sapiens
aggcagaaataaata

SEQ ID NO: 1626941 - DNA, 15 bp, Homo sapiens
ggcagaaataaataa

SEQ ID NO: 1626942 - DNA, 15 bp, Homo sapiens
gcagaaataaataag

SEQ ID NO: 1626943 - DNA, 15 bp, Homo sapiens
cagaaataaataagt

SEQ ID NO: 1626944 - DNA, 15 bp, Homo sapiens
agaaataaataagtt

SEQ ID NO: 1626945 - DNA, 15 bp, Homo sapiens
gaaataaataagttc

SEQ ID NO: 1626946 - DNA, 15 bp, Homo sapiens
aaataaataagttct

SEQ ID NO: 1626947 - DNA, 15 bp, Homo sapiens
aataaataagttctt

SEQ ID NO: 1626948 - DNA, 15 bp, Homo sapiens
ataaataagttcttt

SEQ ID NO: 1626949 - DNA, 15 bp, Homo sapiens
taaataagttctttg

SEQ ID NO: 1626950 - DNA, 15 bp, Homo sapiens
aaataagttctttga

SEQ ID NO: 1626951 - DNA, 15 bp, Homo sapiens
aataagttctttgaa

SEQ ID NO: 1626952 - DNA, 15 bp, Homo sapiens
ataagttctttgaaa

SEQ ID NO: 1626953 - DNA, 15 bp, Homo sapiens
taagttctttgaaac

SEQ ID NO: 1626954 - DNA, 15 bp, Homo sapiens
aagttctttgaaacc

SEQ ID NO: 1626955 - DNA, 15 bp, Homo sapiens
agttctttgaaacca

SEQ ID NO: 1626956 - DNA, 15 bp, Homo sapiens
gttctttgaaaccaa

SEQ ID NO: 1626957 - DNA, 15 bp, Homo sapiens
ttctttgaaaccaat

SEQ ID NO: 1626958 - DNA, 15 bp, Homo sapiens
tctttgaaaccaatg

SEQ ID NO: 1626959 - DNA, 15 bp, Homo sapiens
ctttgaaaccaatga

SEQ ID NO: 1626960 - DNA, 15 bp, Homo sapiens
tttgaaaccaatgag

SEQ ID NO: 1626961 - DNA, 15 bp, Homo sapiens
ttgaaaccaatgaga

SEQ ID NO: 1626962 - DNA, 15 bp, Homo sapiens
tgaaaccaatgagag

SEQ ID NO: 1626963 - DNA, 15 bp, Homo sapiens
gaaaccaatgagagc

SEQ ID NO: 1626964 - DNA, 15 bp, Homo sapiens
aaaccaatgagagca

SEQ ID NO: 1626965 - DNA, 15 bp, Homo sapiens
aaccaatgagagcaa

SEQ ID NO: 1626966 - DNA, 15 bp, Homo sapiens
accaatgagagcaaa

SEQ ID NO: 1626967 - DNA, 15 bp, Homo sapiens
ccaatgagagcaaag

SEQ ID NO: 1626968 - DNA, 15 bp, Homo sapiens
caatgagagcaaaga

SEQ ID NO: 1626969 - DNA, 15 bp, Homo sapiens
atgagagcaaagaca

SEQ ID NO: 1626970 - DNA, 15 bp, Homo sapiens
tgagagcaaagacac

SEQ ID NO: 1626971 - DNA, 15 bp, Homo sapiens
gagagcaaagacaca

SEQ ID NO: 1626972 - DNA, 15 bp, Homo sapiens
agagcaaagacacaa

SEQ ID NO: 1626973 - DNA, 15 bp, Homo sapiens
gagcaaagacacaat

SEQ ID NO: 1626974 - DNA, 15 bp, Homo sapiens
agcaaagacacaatg

SEQ ID NO: 1626975 - DNA, 15 bp, Homo sapiens
gcaaagacacaatgt

SEQ ID NO: 1626976 - DNA, 15 bp, Homo sapiens
caaagacacaatgta

SEQ ID NO: 1626977 - DNA, 15 bp, Homo sapiens
aaagacacaatgtac

SEQ ID NO: 1626978 - DNA, 15 bp, Homo sapiens
aagacacaatgtacc

SEQ ID NO: 1626979 - DNA, 15 bp, Homo sapiens
agacacaatgtacca

SEQ ID NO: 1626980 - DNA, 15 bp, Homo sapiens
gacacaatgtaccag

SEQ ID NO: 1626981 - DNA, 15 bp, Homo sapiens
acacaatgtaccaga

SEQ ID NO: 1626982 - DNA, 15 bp, Homo sapiens
cacaatgtaccagaa

SEQ ID NO: 1626983 - DNA, 15 bp, Homo sapiens
acaatgtaccagaat

SEQ ID NO: 1626984 - DNA, 15 bp, Homo sapiens
caatgtaccagaatc

SEQ ID NO: 1626985 - DNA, 15 bp, Homo sapiens
aatgtaccagaatct

SEQ ID NO: 1626986 - DNA, 15 bp, Homo sapiens
atgtaccagaatctc

SEQ ID NO: 1626987 - DNA, 15 bp, Homo sapiens
tgtaccagaatctct

SEQ ID NO: 1626988 - DNA, 15 bp, Homo sapiens
gtaccagaatctctg

SEQ ID NO: 1626989 - DNA, 15 bp, Homo sapiens
taccagaatctctgg

SEQ ID NO: 1626990 - DNA, 15 bp, Homo sapiens
accagaatctctggg

SEQ ID NO: 1626991 - DNA, 15 bp, Homo sapiens
ccagaatctctggga

SEQ ID NO: 1626992 - DNA, 15 bp, Homo sapiens
cagaatctctgggac

SEQ ID NO: 1626993 - DNA, 15 bp, Homo sapiens
agaatctctgggaca

SEQ ID NO: 1626994 - DNA, 15 bp, Homo sapiens
gaatctctgggacac

SEQ ID NO: 1626995 - DNA, 15 bp, Homo sapiens
aatctctgggacaca

SEQ ID NO: 1626996 - DNA, 15 bp, Homo sapiens
atctctgggacacag

SEQ ID NO: 1626997 - DNA, 15 bp, Homo sapiens
tctctgggacacagc

SEQ ID NO: 1626998 - DNA, 15 bp, Homo sapiens
ctctgggacacagct

SEQ ID NO: 1626999 - DNA, 15 bp, Homo sapiens
tctgggacacagcta

SEQ ID NO: 1627000 - DNA, 15 bp, Homo sapiens
ctgggacacagctaa

SEQ ID NO: 1627001 - DNA, 15 bp, Homo sapiens
tgggacacagctaaa

SEQ ID NO: 1627002 - DNA, 15 bp, Homo sapiens
gggacacagctaaag

SEQ ID NO: 1627003 - DNA, 15 bp, Homo sapiens
ggacacagctaaagc

SEQ ID NO: 1627004 - DNA, 15 bp, Homo sapiens
gacacagctaaagca

SEQ ID NO: 1627005 - DNA, 15 bp, Homo sapiens
acacagctaaagcaa

SEQ ID NO: 1627006 - DNA, 15 bp, Homo sapiens
cacagctaaagcaag

SEQ ID NO: 1627007 - DNA, 15 bp, Homo sapiens
acagctaaagcaagg

SEQ ID NO: 1627008 - DNA, 15 bp, Homo sapiens
cagctaaagcaaggt

SEQ ID NO: 1627009 - DNA, 15 bp, Homo sapiens
agctaaagcaaggtt

SEQ ID NO: 1627010 - DNA, 15 bp, Homo sapiens
gctaaagcaaggttt

SEQ ID NO: 1627011 - DNA, 15 bp, Homo sapiens
ctaaagcaaggtttc

SEQ ID NO: 1627012 - DNA, 15 bp, Homo sapiens
taaagcaaggtttcg

SEQ ID NO: 1627013 - DNA, 15 bp, Homo sapiens
aaagcaaggtttcga

SEQ ID NO: 1627014 - DNA, 15 bp, Homo sapiens
aagcaaggtttcgag

SEQ ID NO: 1627015 - DNA, 15 bp, Homo sapiens
agcaaggtttcgagg

SEQ ID NO: 1627016 - DNA, 15 bp, Homo sapiens
gcaaggtttcgaggg

SEQ ID NO: 1627017 - DNA, 15 bp, Homo sapiens
caaggtttcgaggga

SEQ ID NO: 1627018 - DNA, 15 bp, Homo sapiens
aaggtttcgagggaa

SEQ ID NO: 1627019 - DNA, 15 bp, Homo sapiens
aggtttcgagggaaa

SEQ ID NO: 1627020 - DNA, 15 bp, Homo sapiens
ggtttcgagggaaat

SEQ ID NO: 1627021 - DNA, 15 bp, Homo sapiens
gtttcgagggaaatt

SEQ ID NO: 1627022 - DNA, 15 bp, Homo sapiens
tttcgagggaaattt

SEQ ID NO: 1627023 - DNA, 15 bp, Homo sapiens
ttcgagggaaattta

SEQ ID NO: 1627024 - DNA, 15 bp, Homo sapiens
tcgagggaaatttat

SEQ ID NO: 1627025 - DNA, 15 bp, Homo sapiens
cgagggaaatttata

SEQ ID NO: 1627026 - DNA, 15 bp, Homo sapiens
gagggaaatttatag

SEQ ID NO: 1627027 - DNA, 15 bp, Homo sapiens
agggaaatttatagc

SEQ ID NO: 1627028 - DNA, 15 bp, Homo sapiens
gggaaatttatagca

SEQ ID NO: 1627029 - DNA, 15 bp, Homo sapiens
ggaaatttatagcac

SEQ ID NO: 1627030 - DNA, 15 bp, Homo sapiens
gaaatttatagcact

SEQ ID NO: 1627031 - DNA, 15 bp, Homo sapiens
aaatttatagcacta

SEQ ID NO: 1627032 - DNA, 15 bp, Homo sapiens
aatttatagcactaa

SEQ ID NO: 1627033 - DNA, 15 bp, Homo sapiens
atttatagcactaaa

SEQ ID NO: 1627034 - DNA, 15 bp, Homo sapiens
tttatagcactaaat

SEQ ID NO: 1627035 - DNA, 15 bp, Homo sapiens
ttatagcactaaatg

SEQ ID NO: 1627036 - DNA, 15 bp, Homo sapiens
tatagcactaaatgc

SEQ ID NO: 1627037 - DNA, 15 bp, Homo sapiens
atagcactaaatgcc

SEQ ID NO: 1627038 - DNA, 15 bp, Homo sapiens
tagcactaaatgccc

SEQ ID NO: 1627039 - DNA, 15 bp, Homo sapiens
agcactaaatgccca

SEQ ID NO: 1627040 - DNA, 15 bp, Homo sapiens
gcactaaatgcccac

SEQ ID NO: 1627041 - DNA, 15 bp, Homo sapiens
cactaaatgcccaca

SEQ ID NO: 1627042 - DNA, 15 bp, Homo sapiens
actaaatgcccacag

SEQ ID NO: 1627043 - DNA, 15 bp, Homo sapiens
ctaaatgcccacagg

SEQ ID NO: 1627044 - DNA, 15 bp, Homo sapiens
taaatgcccacagga

SEQ ID NO: 1627045 - DNA, 15 bp, Homo sapiens
aaatgcccacaggaa

SEQ ID NO: 1627046 - DNA, 15 bp, Homo sapiens
aatgcccacaggaaa

SEQ ID NO: 1627047 - DNA, 15 bp, Homo sapiens
atgcccacaggaaag

SEQ ID NO: 1627048 - DNA, 15 bp, Homo sapiens
tgcccacaggaaaga

SEQ ID NO: 1627049 - DNA, 15 bp, Homo sapiens
gcccacaggaaagag

SEQ ID NO: 1627050 - DNA, 15 bp, Homo sapiens
cccacaggaaagagg

SEQ ID NO: 1627051 - DNA, 15 bp, Homo sapiens
ccacaggaaagagga

SEQ ID NO: 1627052 - DNA, 15 bp, Homo sapiens
cacaggaaagaggag

SEQ ID NO: 1627053 - DNA, 15 bp, Homo sapiens
acaggaaagaggaga

SEQ ID NO: 1627054 - DNA, 15 bp, Homo sapiens
caggaaagaggagaa

SEQ ID NO: 1627055 - DNA, 15 bp, Homo sapiens
aggaaagaggagaaa

SEQ ID NO: 1627056 - DNA, 15 bp, Homo sapiens
ggaaagaggagaaaa

SEQ ID NO: 1627057 - DNA, 15 bp, Homo sapiens
gaaagaggagaaaag

SEQ ID NO: 1627058 - DNA, 15 bp, Homo sapiens
aaagaggagaaaaga

SEQ ID NO: 1627059 - DNA, 15 bp, Homo sapiens
aagaggagaaaagat

SEQ ID NO: 1627060 - DNA, 15 bp, Homo sapiens
agaggagaaaagatc

SEQ ID NO: 1627061 - DNA, 15 bp, Homo sapiens
gaggagaaaagatca

SEQ ID NO: 1627062 - DNA, 15 bp, Homo sapiens
aggagaaaagatcaa

SEQ ID NO: 1627063 - DNA, 15 bp, Homo sapiens
ggagaaaagatcaaa

SEQ ID NO: 1627064 - DNA, 15 bp, Homo sapiens
gagaaaagatcaaaa

SEQ ID NO: 1627065 - DNA, 15 bp, Homo sapiens
agaaaagatcaaaaa

SEQ ID NO: 1627066 - DNA, 15 bp, Homo sapiens
gaaaagatcaaaaat

SEQ ID NO: 1627067 - DNA, 15 bp, Homo sapiens
aaaagatcaaaaatt

SEQ ID NO: 1627068 - DNA, 15 bp, Homo sapiens
aaagatcaaaaattg

SEQ ID NO: 1627069 - DNA, 15 bp, Homo sapiens
aagatcaaaaattga

SEQ ID NO: 1627070 - DNA, 15 bp, Homo sapiens
agatcaaaaattgac

SEQ ID NO: 1627071 - DNA, 15 bp, Homo sapiens
gatcaaaaattgaca

SEQ ID NO: 1627072 - DNA, 15 bp, Homo sapiens
atcaaaaattgacac

SEQ ID NO: 1627073 - DNA, 15 bp, Homo sapiens
tcaaaaattgacacc

SEQ ID NO: 1627074 - DNA, 15 bp, Homo sapiens
caaaaattgacaccc

SEQ ID NO: 1627075 - DNA, 15 bp, Homo sapiens
aaaaattgacaccct

SEQ ID NO: 1627076 - DNA, 15 bp, Homo sapiens
aaaattgacacccta

SEQ ID NO: 1627077 - DNA, 15 bp, Homo sapiens
aaattgacaccctaa

SEQ ID NO: 1627078 - DNA, 15 bp, Homo sapiens
aattgacaccctaat

SEQ ID NO: 1627079 - DNA, 15 bp, Homo sapiens
attgacaccctaata

SEQ ID NO: 1627080 - DNA, 15 bp, Homo sapiens
ttgacaccctaatat

SEQ ID NO: 1627081 - DNA, 15 bp, Homo sapiens
tgacaccctaatatc

SEQ ID NO: 1627082 - DNA, 15 bp, Homo sapiens
gacaccctaatatca

SEQ ID NO: 1627083 - DNA, 15 bp, Homo sapiens
acaccctaatatcaa

SEQ ID NO: 1627084 - DNA, 15 bp, Homo sapiens
caccctaatatcaaa

SEQ ID NO: 1627085 - DNA, 15 bp, Homo sapiens
accctaatatcaaaa

SEQ ID NO: 1627086 - DNA, 15 bp, Homo sapiens
ccctaatatcaaaat

SEQ ID NO: 1627087 - DNA, 15 bp, Homo sapiens
cctaatatcaaaatt

SEQ ID NO: 1627088 - DNA, 15 bp, Homo sapiens
ctaatatcaaaatta

SEQ ID NO: 1627089 - DNA, 15 bp, Homo sapiens
taatatcaaaattaa

SEQ ID NO: 1627090 - DNA, 15 bp, Homo sapiens
aatatcaaaattaaa

SEQ ID NO: 1627091 - DNA, 15 bp, Homo sapiens
atatcaaaattaaaa

SEQ ID NO: 1627092 - DNA, 15 bp, Homo sapiens
tatcaaaattaaaag

SEQ ID NO: 1627093 - DNA, 15 bp, Homo sapiens
atcaaaattaaaaga

SEQ ID NO: 1627094 - DNA, 15 bp, Homo sapiens
tcaaaattaaaagaa

SEQ ID NO: 1627095 - DNA, 15 bp, Homo sapiens
caaaattaaaagaac

SEQ ID NO: 1627096 - DNA, 15 bp, Homo sapiens
aaaattaaaagaact

SEQ ID NO: 1627097 - DNA, 15 bp, Homo sapiens
aaattaaaagaacta

SEQ ID NO: 1627098 - DNA, 15 bp, Homo sapiens
aattaaaagaactag

SEQ ID NO: 1627099 - DNA, 15 bp, Homo sapiens
attaaaagaactaga

SEQ ID NO: 1627100 - DNA, 15 bp, Homo sapiens
ttaaaagaactagag

SEQ ID NO: 1627101 - DNA, 15 bp, Homo sapiens
taaaagaactagaga

SEQ ID NO: 1627102 - DNA, 15 bp, Homo sapiens
aaaagaactagagaa

SEQ ID NO: 1627103 - DNA, 15 bp, Homo sapiens
aaagaactagagaag

SEQ ID NO: 1627104 - DNA, 15 bp, Homo sapiens
aagaactagagaagc

SEQ ID NO: 1627105 - DNA, 15 bp, Homo sapiens
agaactagagaagca

SEQ ID NO: 1627106 - DNA, 15 bp, Homo sapiens
gaactagagaagcaa

SEQ ID NO: 1627107 - DNA, 15 bp, Homo sapiens
aactagagaagcaag

SEQ ID NO: 1627108 - DNA, 15 bp, Homo sapiens
actagagaagcaaga

SEQ ID NO: 1627109 - DNA, 15 bp, Homo sapiens
ctagagaagcaagag

SEQ ID NO: 1627110 - DNA, 15 bp, Homo sapiens
tagagaagcaagagc

SEQ ID NO: 1627111 - DNA, 15 bp, Homo sapiens
agagaagcaagagca

SEQ ID NO: 1627112 - DNA, 15 bp, Homo sapiens
gagaagcaagagcaa

SEQ ID NO: 1627113 - DNA, 15 bp, Homo sapiens
agaagcaagagcaaa

SEQ ID NO: 1627114 - DNA, 15 bp, Homo sapiens
gaagcaagagcaaac

SEQ ID NO: 1627115 - DNA, 15 bp, Homo sapiens
aagcaagagcaaaca

SEQ ID NO: 1627116 - DNA, 15 bp, Homo sapiens
agcaagagcaaacaa

SEQ ID NO: 1627117 - DNA, 15 bp, Homo sapiens
gcaagagcaaacaaa

SEQ ID NO: 1627118 - DNA, 15 bp, Homo sapiens
caagagcaaacaaat

SEQ ID NO: 1627119 - DNA, 15 bp, Homo sapiens
aagagcaaacaaatt

SEQ ID NO: 1627120 - DNA, 15 bp, Homo sapiens
agagcaaacaaattc

SEQ ID NO: 1627121 - DNA, 15 bp, Homo sapiens
gagcaaacaaattca

SEQ ID NO: 1627122 - DNA, 15 bp, Homo sapiens
agcaaacaaattcaa

SEQ ID NO: 1627123 - DNA, 15 bp, Homo sapiens
gcaaacaaattcaaa

SEQ ID NO: 1627124 - DNA, 15 bp, Homo sapiens
caaacaaattcaaaa

SEQ ID NO: 1627125 - DNA, 15 bp, Homo sapiens
aaacaaattcaaaag

SEQ ID NO: 1627126 - DNA, 15 bp, Homo sapiens
aacaaattcaaaagc

SEQ ID NO: 1627127 - DNA, 15 bp, Homo sapiens
acaaattcaaaagct

SEQ ID NO: 1627128 - DNA, 15 bp, Homo sapiens
caaattcaaaagcta

SEQ ID NO: 1627129 - DNA, 15 bp, Homo sapiens
aaattcaaaagctag

SEQ ID NO: 1627130 - DNA, 15 bp, Homo sapiens
aattcaaaagctagc

SEQ ID NO: 1627131 - DNA, 15 bp, Homo sapiens
attcaaaagctagca

SEQ ID NO: 1627132 - DNA, 15 bp, Homo sapiens
ttcaaaagctagcag

SEQ ID NO: 1627133 - DNA, 15 bp, Homo sapiens
tcaaaagctagcaga

SEQ ID NO: 1627134 - DNA, 15 bp, Homo sapiens
caaaagctagcagaa

SEQ ID NO: 1627135 - DNA, 15 bp, Homo sapiens
aaaagctagcagaag

SEQ ID NO: 1627136 - DNA, 15 bp, Homo sapiens
aaagctagcagaaga

SEQ ID NO: 1627137 - DNA, 15 bp, Homo sapiens
aagctagcagaagac

SEQ ID NO: 1627138 - DNA, 15 bp, Homo sapiens
agctagcagaagaca

SEQ ID NO: 1627139 - DNA, 15 bp, Homo sapiens
gctagcagaagacac

SEQ ID NO: 1627140 - DNA, 15 bp, Homo sapiens
ctagcagaagacacg

SEQ ID NO: 1627141 - DNA, 15 bp, Homo sapiens
tagcagaagacacga

SEQ ID NO: 1627142 - DNA, 15 bp, Homo sapiens
agcagaagacacgaa

SEQ ID NO: 1627143 - DNA, 15 bp, Homo sapiens
gcagaagacacgaaa

SEQ ID NO: 1627144 - DNA, 15 bp, Homo sapiens
cagaagacacgaaat

SEQ ID NO: 1627145 - DNA, 15 bp, Homo sapiens
agaagacacgaaata

SEQ ID NO: 1627146 - DNA, 15 bp, Homo sapiens
gaagacacgaaataa

SEQ ID NO: 1627147 - DNA, 15 bp, Homo sapiens
aagacacgaaataac

SEQ ID NO: 1627148 - DNA, 15 bp, Homo sapiens
agacacgaaataact

SEQ ID NO: 1627149 - DNA, 15 bp, Homo sapiens
gacacgaaataacta

SEQ ID NO: 1627150 - DNA, 15 bp, Homo sapiens
acacgaaataactaa

SEQ ID NO: 1627151 - DNA, 15 bp, Homo sapiens
cacgaaataactaag

SEQ ID NO: 1627152 - DNA, 15 bp, Homo sapiens
acgaaataactaaga

SEQ ID NO: 1627153 - DNA, 15 bp, Homo sapiens
cgaaataactaagat

SEQ ID NO: 1627154 - DNA, 15 bp, Homo sapiens
gaaataactaagatc

SEQ ID NO: 1627155 - DNA, 15 bp, Homo sapiens
aaataactaagatca

SEQ ID NO: 1627156 - DNA, 15 bp, Homo sapiens
aataactaagatcag

SEQ ID NO: 1627157 - DNA, 15 bp, Homo sapiens
ataactaagatcaga

SEQ ID NO: 1627158 - DNA, 15 bp, Homo sapiens
taactaagatcagag

SEQ ID NO: 1627159 - DNA, 15 bp, Homo sapiens
aactaagatcagagc

SEQ ID NO: 1627160 - DNA, 15 bp, Homo sapiens
actaagatcagagca

SEQ ID NO: 1627161 - DNA, 15 bp, Homo sapiens
ctaagatcagagcag

SEQ ID NO: 1627162 - DNA, 15 bp, Homo sapiens
taagatcagagcaga

SEQ ID NO: 1627163 - DNA, 15 bp, Homo sapiens
aagatcagagcagaa

SEQ ID NO: 1627164 - DNA, 15 bp, Homo sapiens
agatcagagcagaac

SEQ ID NO: 1627165 - DNA, 15 bp, Homo sapiens
gatcagagcagaact

SEQ ID NO: 1627166 - DNA, 15 bp, Homo sapiens
atcagagcagaactg

SEQ ID NO: 1627167 - DNA, 15 bp, Homo sapiens
tcagagcagaactga

SEQ ID NO: 1627168 - DNA, 15 bp, Homo sapiens
cagagcagaactgaa

SEQ ID NO: 1627169 - DNA, 15 bp, Homo sapiens
agagcagaactgaaa

SEQ ID NO: 1627170 - DNA, 15 bp, Homo sapiens
gagcagaactgaaag

SEQ ID NO: 1627171 - DNA, 15 bp, Homo sapiens
agcagaactgaaaga

SEQ ID NO: 1627172 - DNA, 15 bp, Homo sapiens
gcagaactgaaagac

SEQ ID NO: 1627173 - DNA, 15 bp, Homo sapiens
cagaactgaaagaca

SEQ ID NO: 1627174 - DNA, 15 bp, Homo sapiens
agaactgaaagacat

SEQ ID NO: 1627175 - DNA, 15 bp, Homo sapiens
gaactgaaagacata

SEQ ID NO: 1627176 - DNA, 15 bp, Homo sapiens
aactgaaagacatag

SEQ ID NO: 1627177 - DNA, 15 bp, Homo sapiens
actgaaagacataga

SEQ ID NO: 1627178 - DNA, 15 bp, Homo sapiens
ctgaaagacatagag

SEQ ID NO: 1627179 - DNA, 15 bp, Homo sapiens
tgaaagacatagaga

SEQ ID NO: 1627180 - DNA, 15 bp, Homo sapiens
gaaagacatagagac

SEQ ID NO: 1627181 - DNA, 15 bp, Homo sapiens
aaagacatagagaca

SEQ ID NO: 1627182 - DNA, 15 bp, Homo sapiens
aagacatagagacac

SEQ ID NO: 1627183 - DNA, 15 bp, Homo sapiens
agacatagagacacg

SEQ ID NO: 1627184 - DNA, 15 bp, Homo sapiens
gacatagagacacga

SEQ ID NO: 1627185 - DNA, 15 bp, Homo sapiens
acatagagacacgaa

SEQ ID NO: 1627186 - DNA, 15 bp, Homo sapiens
catagagacacgaaa

SEQ ID NO: 1627187 - DNA, 15 bp, Homo sapiens
atagagacacgaaaa

SEQ ID NO: 1627188 - DNA, 15 bp, Homo sapiens
tagagacacgaaaaa

SEQ ID NO: 1627189 - DNA, 15 bp, Homo sapiens
agagacacgaaaaac

SEQ ID NO: 1627190 - DNA, 15 bp, Homo sapiens
gagacacgaaaaacc

SEQ ID NO: 1627191 - DNA, 15 bp, Homo sapiens
agacacgaaaaaccc

SEQ ID NO: 1627192 - DNA, 15 bp, Homo sapiens
gacacgaaaaaccca

SEQ ID NO: 1627193 - DNA, 15 bp, Homo sapiens
acacgaaaaacccat

SEQ ID NO: 1627194 - DNA, 15 bp, Homo sapiens
cacgaaaaacccatc

SEQ ID NO: 1627195 - DNA, 15 bp, Homo sapiens
acgaaaaacccatca

SEQ ID NO: 1627196 - DNA, 15 bp, Homo sapiens
cgaaaaacccatcaa

SEQ ID NO: 1627197 - DNA, 15 bp, Homo sapiens
gaaaaacccatcaaa

SEQ ID NO: 1627198 - DNA, 15 bp, Homo sapiens
aaaaacccatcaaaa

SEQ ID NO: 1627199 - DNA, 15 bp, Homo sapiens
aaaacccatcaaaaa

SEQ ID NO: 1627200 - DNA, 15 bp, Homo sapiens
aaacccatcaaaaaa

SEQ ID NO: 1627201 - DNA, 15 bp, Homo sapiens
aacccatcaaaaaaa

SEQ ID NO: 1627202 - DNA, 15 bp, Homo sapiens
acccatcaaaaaaat

SEQ ID NO: 1627203 - DNA, 15 bp, Homo sapiens
cccatcaaaaaaatc

SEQ ID NO: 1627204 - DNA, 15 bp, Homo sapiens
ccatcaaaaaaatca

SEQ ID NO: 1627205 - DNA, 15 bp, Homo sapiens
catcaaaaaaatcaa

SEQ ID NO: 1627206 - DNA, 15 bp, Homo sapiens
atcaaaaaaatcaat

SEQ ID NO: 1627207 - DNA, 15 bp, Homo sapiens
tcaaaaaaatcaatg

SEQ ID NO: 1627208 - DNA, 15 bp, Homo sapiens
caaaaaaatcaatga

SEQ ID NO: 1627209 - DNA, 15 bp, Homo sapiens
aaaaatcaatgaatc

SEQ ID NO: 1627210 - DNA, 15 bp, Homo sapiens
aaaatcaatgaatcc

SEQ ID NO: 1627211 - DNA, 15 bp, Homo sapiens
aaatcaatgaatcca

SEQ ID NO: 1627212 - DNA, 15 bp, Homo sapiens
aatcaatgaatccag

SEQ ID NO: 1627213 - DNA, 15 bp, Homo sapiens
atcaatgaatccagg

SEQ ID NO: 1627214 - DNA, 15 bp, Homo sapiens
tcaatgaatccagga

SEQ ID NO: 1627215 - DNA, 15 bp, Homo sapiens
caatgaatccaggag

SEQ ID NO: 1627216 - DNA, 15 bp, Homo sapiens
aatgaatccaggagc

SEQ ID NO: 1627217 - DNA, 15 bp, Homo sapiens
atgaatccaggagct

SEQ ID NO: 1627218 - DNA, 15 bp, Homo sapiens
tgaatccaggagctg

SEQ ID NO: 1627219 - DNA, 15 bp, Homo sapiens
gaatccaggagctgg

SEQ ID NO: 1627220 - DNA, 15 bp, Homo sapiens
aatccaggagctggt

SEQ ID NO: 1627221 - DNA, 15 bp, Homo sapiens
atccaggagctggtt

SEQ ID NO: 1627222 - DNA, 15 bp, Homo sapiens
tccaggagctggttt

SEQ ID NO: 1627223 - DNA, 15 bp, Homo sapiens
ccaggagctggtttt

SEQ ID NO: 1627224 - DNA, 15 bp, Homo sapiens
caggagctggttttt

SEQ ID NO: 1627225 - DNA, 15 bp, Homo sapiens
aggagctggtttttt

SEQ ID NO: 1627226 - DNA, 15 bp, Homo sapiens
ggagctggttttttg

SEQ ID NO: 1627227 - DNA, 15 bp, Homo sapiens
gagctggttttttga

SEQ ID NO: 1627228 - DNA, 15 bp, Homo sapiens
agctggttttttgaa

SEQ ID NO: 1627229 - DNA, 15 bp, Homo sapiens
gctggttttttgaaa

SEQ ID NO: 1627230 - DNA, 15 bp, Homo sapiens
ctggttttttgaaag

SEQ ID NO: 1627231 - DNA, 15 bp, Homo sapiens
tggttttttgaaaga

SEQ ID NO: 1627232 - DNA, 15 bp, Homo sapiens
ggttttttgaaagat

SEQ ID NO: 1627233 - DNA, 15 bp, Homo sapiens
gttttttgaaagatt

SEQ ID NO: 1627234 - DNA, 15 bp, Homo sapiens
ttttttgaaagatta

SEQ ID NO: 1627235 - DNA, 15 bp, Homo sapiens
tttttgaaagattaa

SEQ ID NO: 1627236 - DNA, 15 bp, Homo sapiens
ttttgaaagattaac

SEQ ID NO: 1627237 - DNA, 15 bp, Homo sapiens
tttgaaagattaaca

SEQ ID NO: 1627238 - DNA, 15 bp, Homo sapiens
ttgaaagattaacaa

SEQ ID NO: 1627239 - DNA, 15 bp, Homo sapiens
tgaaagattaacaaa

SEQ ID NO: 1627240 - DNA, 15 bp, Homo sapiens
gaaagattaacaaaa

SEQ ID NO: 1627241 - DNA, 15 bp, Homo sapiens
aaagattaacaaaat

SEQ ID NO: 1627242 - DNA, 15 bp, Homo sapiens
aagattaacaaaata

SEQ ID NO: 1627243 - DNA, 15 bp, Homo sapiens
agattaacaaaatag

SEQ ID NO: 1627244 - DNA, 15 bp, Homo sapiens
gattaacaaaataga

SEQ ID NO: 1627245 - DNA, 15 bp, Homo sapiens
attaacaaaatagat

SEQ ID NO: 1627246 - DNA, 15 bp, Homo sapiens
ttaacaaaatagata

SEQ ID NO: 1627247 - DNA, 15 bp, Homo sapiens
taacaaaatagatag

SEQ ID NO: 1627248 - DNA, 15 bp, Homo sapiens
aacaaaatagataga

SEQ ID NO: 1627249 - DNA, 15 bp, Homo sapiens
acaaaatagatagac

SEQ ID NO: 1627250 - DNA, 15 bp, Homo sapiens
caaaatagatagact

SEQ ID NO: 1627251 - DNA, 15 bp, Homo sapiens
aaaatagatagactg

SEQ ID NO: 1627252 - DNA, 15 bp, Homo sapiens
aaatagatagactgt

SEQ ID NO: 1627253 - DNA, 15 bp, Homo sapiens
aatagatagactgtt

SEQ ID NO: 1627254 - DNA, 15 bp, Homo sapiens
atagatagactgtta

SEQ ID NO: 1627255 - DNA, 15 bp, Homo sapiens
tagatagactgttag

SEQ ID NO: 1627256 - DNA, 15 bp, Homo sapiens
agatagactgttagc

SEQ ID NO: 1627257 - DNA, 15 bp, Homo sapiens
gatagactgttagcc

SEQ ID NO: 1627258 - DNA, 15 bp, Homo sapiens
atagactgttagcca

SEQ ID NO: 1627259 - DNA, 15 bp, Homo sapiens
tagactgttagccag

SEQ ID NO: 1627260 - DNA, 15 bp, Homo sapiens
agactgttagccaga

SEQ ID NO: 1627261 - DNA, 15 bp, Homo sapiens
gactgttagccagac

SEQ ID NO: 1627262 - DNA, 15 bp, Homo sapiens
actgttagccagact

SEQ ID NO: 1627263 - DNA, 15 bp, Homo sapiens
ctgttagccagacta

SEQ ID NO: 1627264 - DNA, 15 bp, Homo sapiens
tgttagccagactaa

SEQ ID NO: 1627265 - DNA, 15 bp, Homo sapiens
gttagccagactaat

SEQ ID NO: 1627266 - DNA, 15 bp, Homo sapiens
ttagccagactaata

SEQ ID NO: 1627267 - DNA, 15 bp, Homo sapiens
tagccagactaataa

SEQ ID NO: 1627268 - DNA, 15 bp, Homo sapiens
agccagactaataag

SEQ ID NO: 1627269 - DNA, 15 bp, Homo sapiens
gccagactaataagg

SEQ ID NO: 1627270 - DNA, 15 bp, Homo sapiens
ccagactaataagga

SEQ ID NO: 1627271 - DNA, 15 bp, Homo sapiens
cagactaataaggaa

SEQ ID NO: 1627272 - DNA, 15 bp, Homo sapiens
agactaataaggaag

SEQ ID NO: 1627273 - DNA, 15 bp, Homo sapiens
gactaataaggaaga

SEQ ID NO: 1627274 - DNA, 15 bp, Homo sapiens
actaataaggaagaa

SEQ ID NO: 1627275 - DNA, 15 bp, Homo sapiens
ctaataaggaagaaa

SEQ ID NO: 1627276 - DNA, 15 bp, Homo sapiens
taataaggaagaaaa

SEQ ID NO: 1627277 - DNA, 15 bp, Homo sapiens
aataaggaagaaaag

SEQ ID NO: 1627278 - DNA, 15 bp, Homo sapiens
ataaggaagaaaaga

SEQ ID NO: 1627279 - DNA, 15 bp, Homo sapiens
taaggaagaaaagag

SEQ ID NO: 1627280 - DNA, 15 bp, Homo sapiens
aaggaagaaaagaga

SEQ ID NO: 1627281 - DNA, 15 bp, Homo sapiens
aggaagaaaagagag

SEQ ID NO: 1627282 - DNA, 15 bp, Homo sapiens
ggaagaaaagagaga

SEQ ID NO: 1627283 - DNA, 15 bp, Homo sapiens
gaagaaaagagagaa

SEQ ID NO: 1627284 - DNA, 15 bp, Homo sapiens
aagaaaagagagaag

SEQ ID NO: 1627285 - DNA, 15 bp, Homo sapiens
agaaaagagagaaga

SEQ ID NO: 1627286 - DNA, 15 bp, Homo sapiens
gaaaagagagaagaa

SEQ ID NO: 1627287 - DNA, 15 bp, Homo sapiens
aaaagagagaagaat

SEQ ID NO: 1627288 - DNA, 15 bp, Homo sapiens
aaagagagaagaatc

SEQ ID NO: 1627289 - DNA, 15 bp, Homo sapiens
aagagagaagaatca

SEQ ID NO: 1627290 - DNA, 15 bp, Homo sapiens
agagagaagaatcaa

SEQ ID NO: 1627291 - DNA, 15 bp, Homo sapiens
gagagaagaatcaaa

SEQ ID NO: 1627292 - DNA, 15 bp, Homo sapiens
agagaagaatcaaat

SEQ ID NO: 1627293 - DNA, 15 bp, Homo sapiens
gagaagaatcaaata

SEQ ID NO: 1627294 - DNA, 15 bp, Homo sapiens
agaagaatcaaatag

SEQ ID NO: 1627295 - DNA, 15 bp, Homo sapiens
gaagaatcaaataga

SEQ ID NO: 1627296 - DNA, 15 bp, Homo sapiens
aagaatcaaatagac

SEQ ID NO: 1627297 - DNA, 15 bp, Homo sapiens
agaatcaaatagaca

SEQ ID NO: 1627298 - DNA, 15 bp, Homo sapiens
gaatcaaatagacac

SEQ ID NO: 1627299 - DNA, 15 bp, Homo sapiens
aatcaaatagacaca

SEQ ID NO: 1627300 - DNA, 15 bp, Homo sapiens
atcaaatagacacaa

SEQ ID NO: 1627301 - DNA, 15 bp, Homo sapiens
tcaaatagacacaat

SEQ ID NO: 1627302 - DNA, 15 bp, Homo sapiens
caaatagacacaata

SEQ ID NO: 1627303 - DNA, 15 bp, Homo sapiens
aaatagacacaataa

SEQ ID NO: 1627304 - DNA, 15 bp, Homo sapiens
aatagacacaataaa

SEQ ID NO: 1627305 - DNA, 15 bp, Homo sapiens
atagacacaataaac

SEQ ID NO: 1627306 - DNA, 15 bp, Homo sapiens
tagacacaataaaca

SEQ ID NO: 1627307 - DNA, 15 bp, Homo sapiens
agacacaataaacaa

SEQ ID NO: 1627308 - DNA, 15 bp, Homo sapiens
gacacaataaacaat

SEQ ID NO: 1627309 - DNA, 15 bp, Homo sapiens
acacaataaacaata

SEQ ID NO: 1627310 - DNA, 15 bp, Homo sapiens
cacaataaacaataa

SEQ ID NO: 1627311 - DNA, 15 bp, Homo sapiens
acaataaacaataat

SEQ ID NO: 1627312 - DNA, 15 bp, Homo sapiens
caataaacaataata

SEQ ID NO: 1627313 - DNA, 15 bp, Homo sapiens
aataaacaataataa

SEQ ID NO: 1627314 - DNA, 15 bp, Homo sapiens
ataaacaataataaa

SEQ ID NO: 1627315 - DNA, 15 bp, Homo sapiens
taaacaataataaag

SEQ ID NO: 1627316 - DNA, 15 bp, Homo sapiens
aaacaataataaagg

SEQ ID NO: 1627317 - DNA, 15 bp, Homo sapiens
aacaataataaaggg

SEQ ID NO: 1627318 - DNA, 15 bp, Homo sapiens
acaataataaagggg

SEQ ID NO: 1627319 - DNA, 15 bp, Homo sapiens
caataataaagggga

SEQ ID NO: 1627320 - DNA, 15 bp, Homo sapiens
aataataaaggggat

SEQ ID NO: 1627321 - DNA, 15 bp, Homo sapiens
ataataaaggggata

SEQ ID NO: 1627322 - DNA, 15 bp, Homo sapiens
taataaaggggatat

SEQ ID NO: 1627323 - DNA, 15 bp, Homo sapiens
aataaaggggatatc

SEQ ID NO: 1627324 - DNA, 15 bp, Homo sapiens
ataaaggggatatca

SEQ ID NO: 1627325 - DNA, 15 bp, Homo sapiens
taaaggggatatcac

SEQ ID NO: 1627326 - DNA, 15 bp, Homo sapiens
aaaggggatatcacc

SEQ ID NO: 1627327 - DNA, 15 bp, Homo sapiens
aaggggatatcacca

SEQ ID NO: 1627328 - DNA, 15 bp, Homo sapiens
aggggatatcaccac

SEQ ID NO: 1627329 - DNA, 15 bp, Homo sapiens
ggggatatcaccact

SEQ ID NO: 1627330 - DNA, 15 bp, Homo sapiens
gggatatcaccactg

SEQ ID NO: 1627331 - DNA, 15 bp, Homo sapiens
ggatatcaccactga

SEQ ID NO: 1627332 - DNA, 15 bp, Homo sapiens
gatatcaccactgat

SEQ ID NO: 1627333 - DNA, 15 bp, Homo sapiens
atatcaccactgatc

SEQ ID NO: 1627334 - DNA, 15 bp, Homo sapiens
tatcaccactgatcc

SEQ ID NO: 1627335 - DNA, 15 bp, Homo sapiens
atcaccactgatcct

SEQ ID NO: 1627336 - DNA, 15 bp, Homo sapiens
tcaccactgatccta

SEQ ID NO: 1627337 - DNA, 15 bp, Homo sapiens
caccactgatcctac

SEQ ID NO: 1627338 - DNA, 15 bp, Homo sapiens
accactgatcctaca

SEQ ID NO: 1627339 - DNA, 15 bp, Homo sapiens
ccactgatcctacag

SEQ ID NO: 1627340 - DNA, 15 bp, Homo sapiens
cactgatcctacaga

SEQ ID NO: 1627341 - DNA, 15 bp, Homo sapiens
actgatcctacagaa

SEQ ID NO: 1627342 - DNA, 15 bp, Homo sapiens
ctgatcctacagaaa

SEQ ID NO: 1627343 - DNA, 15 bp, Homo sapiens
tgatcctacagaaat

SEQ ID NO: 1627344 - DNA, 15 bp, Homo sapiens
gatcctacagaaata

SEQ ID NO: 1627345 - DNA, 15 bp, Homo sapiens
atcctacagaaatac

SEQ ID NO: 1627346 - DNA, 15 bp, Homo sapiens
tcctacagaaataca

SEQ ID NO: 1627347 - DNA, 15 bp, Homo sapiens
cctacagaaatacaa

SEQ ID NO: 1627348 - DNA, 15 bp, Homo sapiens
ctacagaaatacaaa

SEQ ID NO: 1627349 - DNA, 15 bp, Homo sapiens
tacagaaatacaaac

SEQ ID NO: 1627350 - DNA, 15 bp, Homo sapiens
acagaaatacaaact

SEQ ID NO: 1627351 - DNA, 15 bp, Homo sapiens
cagaaatacaaacta

SEQ ID NO: 1627352 - DNA, 15 bp, Homo sapiens
agaaatacaaactac

SEQ ID NO: 1627353 - DNA, 15 bp, Homo sapiens
gaaatacaaactacc

SEQ ID NO: 1627354 - DNA, 15 bp, Homo sapiens
aaatacaaactacca

SEQ ID NO: 1627355 - DNA, 15 bp, Homo sapiens
aatacaaactaccat

SEQ ID NO: 1627356 - DNA, 15 bp, Homo sapiens
atacaaactaccatc

SEQ ID NO: 1627357 - DNA, 15 bp, Homo sapiens
tacaaactaccatca

SEQ ID NO: 1627358 - DNA, 15 bp, Homo sapiens
acaaactaccatcag

SEQ ID NO: 1627359 - DNA, 15 bp, Homo sapiens
caaactaccatcaga

SEQ ID NO: 1627360 - DNA, 15 bp, Homo sapiens
aaactaccatcagat

SEQ ID NO: 1627361 - DNA, 15 bp, Homo sapiens
aactaccatcagata

SEQ ID NO: 1627362 - DNA, 15 bp, Homo sapiens
actaccatcagataa

SEQ ID NO: 1627363 - DNA, 15 bp, Homo sapiens
ctaccatcagataat

SEQ ID NO: 1627364 - DNA, 15 bp, Homo sapiens
taccatcagataatg

SEQ ID NO: 1627365 - DNA, 15 bp, Homo sapiens
accatcagataatgc

SEQ ID NO: 1627366 - DNA, 15 bp, Homo sapiens
ccatcagataatgct

SEQ ID NO: 1627367 - DNA, 15 bp, Homo sapiens
catcagataatgcta

SEQ ID NO: 1627368 - DNA, 15 bp, Homo sapiens
atcagataatgctat

SEQ ID NO: 1627369 - DNA, 15 bp, Homo sapiens
tcagataatgctata

SEQ ID NO: 1627370 - DNA, 15 bp, Homo sapiens
cagataatgctataa

SEQ ID NO: 1627371 - DNA, 15 bp, Homo sapiens
agataatgctataaa

SEQ ID NO: 1627372 - DNA, 15 bp, Homo sapiens
gataatgctataaac

SEQ ID NO: 1627373 - DNA, 15 bp, Homo sapiens
ataatgctataaaca

SEQ ID NO: 1627374 - DNA, 15 bp, Homo sapiens
taatgctataaacat

SEQ ID NO: 1627375 - DNA, 15 bp, Homo sapiens
aatgctataaacatc

SEQ ID NO: 1627376 - DNA, 15 bp, Homo sapiens
atgctataaacatct

SEQ ID NO: 1627377 - DNA, 15 bp, Homo sapiens
tgctataaacatctc

SEQ ID NO: 1627378 - DNA, 15 bp, Homo sapiens
gctataaacatctct

SEQ ID NO: 1627379 - DNA, 15 bp, Homo sapiens
ctataaacatctcta

SEQ ID NO: 1627380 - DNA, 15 bp, Homo sapiens
tataaacatctctat

SEQ ID NO: 1627381 - DNA, 15 bp, Homo sapiens
ataaacatctctatg

SEQ ID NO: 1627382 - DNA, 15 bp, Homo sapiens
taaacatctctatgc

SEQ ID NO: 1627383 - DNA, 15 bp, Homo sapiens
aaacatctctatgca

SEQ ID NO: 1627384 - DNA, 15 bp, Homo sapiens
aacatctctatgcaa

SEQ ID NO: 1627385 - DNA, 15 bp, Homo sapiens
acatctctatgcaaa

SEQ ID NO: 1627386 - DNA, 15 bp, Homo sapiens
catctctatgcaaac

SEQ ID NO: 1627387 - DNA, 15 bp, Homo sapiens
atctctatgcaaaca

SEQ ID NO: 1627388 - DNA, 15 bp, Homo sapiens
tctctatgcaaacaa

SEQ ID NO: 1627389 - DNA, 15 bp, Homo sapiens
ctctatgcaaacaaa

SEQ ID NO: 1627390 - DNA, 15 bp, Homo sapiens
tctatgcaaacaaac

SEQ ID NO: 1627391 - DNA, 15 bp, Homo sapiens
ctatgcaaacaaact

SEQ ID NO: 1627392 - DNA, 15 bp, Homo sapiens
tatgcaaacaaacta

SEQ ID NO: 1627393 - DNA, 15 bp, Homo sapiens
atgcaaacaaactag

SEQ ID NO: 1627394 - DNA, 15 bp, Homo sapiens
tgcaaacaaactaga

SEQ ID NO: 1627395 - DNA, 15 bp, Homo sapiens
gcaaacaaactagaa

SEQ ID NO: 1627396 - DNA, 15 bp, Homo sapiens
caaacaaactagaaa

SEQ ID NO: 1627397 - DNA, 15 bp, Homo sapiens
aaacaaactagaaaa

SEQ ID NO: 1627398 - DNA, 15 bp, Homo sapiens
aacaaactagaaaat

SEQ ID NO: 1627399 - DNA, 15 bp, Homo sapiens
acaaactagaaaatc

SEQ ID NO: 1627400 - DNA, 15 bp, Homo sapiens
caaactagaaaatct

SEQ ID NO: 1627401 - DNA, 15 bp, Homo sapiens
aaactagaaaatcta

SEQ ID NO: 1627402 - DNA, 15 bp, Homo sapiens
aactagaaaatctag

SEQ ID NO: 1627403 - DNA, 15 bp, Homo sapiens
actagaaaatctaga

SEQ ID NO: 1627404 - DNA, 15 bp, Homo sapiens
ctagaaaatctagaa

SEQ ID NO: 1627405 - DNA, 15 bp, Homo sapiens
tagaaaatctagaag

SEQ ID NO: 1627406 - DNA, 15 bp, Homo sapiens
agaaaatctagaaga

SEQ ID NO: 1627407 - DNA, 15 bp, Homo sapiens
gaaaatctagaagaa

SEQ ID NO: 1627408 - DNA, 15 bp, Homo sapiens
aaaatctagaagaaa

SEQ ID NO: 1627409 - DNA, 15 bp, Homo sapiens
aaatctagaagaaat

SEQ ID NO: 1627410 - DNA, 15 bp, Homo sapiens
aatctagaagaaatg

SEQ ID NO: 1627411 - DNA, 15 bp, Homo sapiens
atctagaagaaatgg

SEQ ID NO: 1627412 - DNA, 15 bp, Homo sapiens
tctagaagaaatgga

SEQ ID NO: 1627413 - DNA, 15 bp, Homo sapiens
ctagaagaaatggat

SEQ ID NO: 1627414 - DNA, 15 bp, Homo sapiens
tagaagaaatggata

SEQ ID NO: 1627415 - DNA, 15 bp, Homo sapiens
agaagaaatggataa

SEQ ID NO: 1627416 - DNA, 15 bp, Homo sapiens
gaagaaatggataaa

SEQ ID NO: 1627417 - DNA, 15 bp, Homo sapiens
aagaaatggataaat

SEQ ID NO: 1627418 - DNA, 15 bp, Homo sapiens
agaaatggataaatt

SEQ ID NO: 1627419 - DNA, 15 bp, Homo sapiens
gaaatggataaattg

SEQ ID NO: 1627420 - DNA, 15 bp, Homo sapiens
aaatggataaattgc

SEQ ID NO: 1627421 - DNA, 15 bp, Homo sapiens
aatggataaattgct

SEQ ID NO: 1627422 - DNA, 15 bp, Homo sapiens
atggataaattgctg

SEQ ID NO: 1627423 - DNA, 15 bp, Homo sapiens
tggataaattgctgg

SEQ ID NO: 1627424 - DNA, 15 bp, Homo sapiens
ggataaattgctgga

SEQ ID NO: 1627425 - DNA, 15 bp, Homo sapiens
gataaattgctggac

SEQ ID NO: 1627426 - DNA, 15 bp, Homo sapiens
ataaattgctggaca

SEQ ID NO: 1627427 - DNA, 15 bp, Homo sapiens
taaattgctggacac

SEQ ID NO: 1627428 - DNA, 15 bp, Homo sapiens
aaattgctggacaca

SEQ ID NO: 1627429 - DNA, 15 bp, Homo sapiens
aattgctggacacat

SEQ ID NO: 1627430 - DNA, 15 bp, Homo sapiens
attgctggacacata

SEQ ID NO: 1627431 - DNA, 15 bp, Homo sapiens
ttgctggacacatac

SEQ ID NO: 1627432 - DNA, 15 bp, Homo sapiens
tgctggacacataca

SEQ ID NO: 1627433 - DNA, 15 bp, Homo sapiens
gctggacacatacac

SEQ ID NO: 1627434 - DNA, 15 bp, Homo sapiens
ctggacacatacacc

SEQ ID NO: 1627435 - DNA, 15 bp, Homo sapiens
tggacacatacaccc

SEQ ID NO: 1627436 - DNA, 15 bp, Homo sapiens
ggacacatacaccct

SEQ ID NO: 1627437 - DNA, 15 bp, Homo sapiens
gacacatacaccctg

SEQ ID NO: 1627438 - DNA, 15 bp, Homo sapiens
acacatacaccctgc

SEQ ID NO: 1627439 - DNA, 15 bp, Homo sapiens
cacatacaccctgcc

SEQ ID NO: 1627440 - DNA, 15 bp, Homo sapiens
acatacaccctgcca

SEQ ID NO: 1627441 - DNA, 15 bp, Homo sapiens
catacaccctgccaa

SEQ ID NO: 1627442 - DNA, 15 bp, Homo sapiens
atacaccctgccaag

SEQ ID NO: 1627443 - DNA, 15 bp, Homo sapiens
tacaccctgccaaga

SEQ ID NO: 1627444 - DNA, 15 bp, Homo sapiens
acaccctgccaagac

SEQ ID NO: 1627445 - DNA, 15 bp, Homo sapiens
caccctgccaagact

SEQ ID NO: 1627446 - DNA, 15 bp, Homo sapiens
accctgccaagacta

SEQ ID NO: 1627447 - DNA, 15 bp, Homo sapiens
ccctgccaagactaa

SEQ ID NO: 1627448 - DNA, 15 bp, Homo sapiens
cctgccaagactaaa

SEQ ID NO: 1627449 - DNA, 15 bp, Homo sapiens
ctgccaagactaaac

SEQ ID NO: 1627450 - DNA, 15 bp, Homo sapiens
tgccaagactaaacc

SEQ ID NO: 1627451 - DNA, 15 bp, Homo sapiens
gccaagactaaacca

SEQ ID NO: 1627452 - DNA, 15 bp, Homo sapiens
ccaagactaaaccag

SEQ ID NO: 1627453 - DNA, 15 bp, Homo sapiens
caagactaaaccagg

SEQ ID NO: 1627454 - DNA, 15 bp, Homo sapiens
aagactaaaccagga

SEQ ID NO: 1627455 - DNA, 15 bp, Homo sapiens
agactaaaccaggaa

SEQ ID NO: 1627456 - DNA, 15 bp, Homo sapiens
gactaaaccaggaag

SEQ ID NO: 1627457 - DNA, 15 bp, Homo sapiens
actaaaccaggaaga

SEQ ID NO: 1627458 - DNA, 15 bp, Homo sapiens
ctaaaccaggaagaa

SEQ ID NO: 1627459 - DNA, 15 bp, Homo sapiens
taaaccaggaagaag

SEQ ID NO: 1627460 - DNA, 15 bp, Homo sapiens
aaaccaggaagaagt

SEQ ID NO: 1627461 - DNA, 15 bp, Homo sapiens
aaccaggaagaagtc

SEQ ID NO: 1627462 - DNA, 15 bp, Homo sapiens
accaggaagaagtcg

SEQ ID NO: 1627463 - DNA, 15 bp, Homo sapiens
ccaggaagaagtcga

SEQ ID NO: 1627464 - DNA, 15 bp, Homo sapiens
caggaagaagtcgaa

SEQ ID NO: 1627465 - DNA, 15 bp, Homo sapiens
aggaagaagtcgaat

SEQ ID NO: 1627466 - DNA, 15 bp, Homo sapiens
ggaagaagtcgaatc

SEQ ID NO: 1627467 - DNA, 15 bp, Homo sapiens
gaagaagtcgaatcc

SEQ ID NO: 1627468 - DNA, 15 bp, Homo sapiens
aagaagtcgaatccc

SEQ ID NO: 1627469 - DNA, 15 bp, Homo sapiens
agaagtcgaatccct

SEQ ID NO: 1627470 - DNA, 15 bp, Homo sapiens
gaagtcgaatccctg

SEQ ID NO: 1627471 - DNA, 15 bp, Homo sapiens
aagtcgaatccctga

SEQ ID NO: 1627472 - DNA, 15 bp, Homo sapiens
agtcgaatccctgaa

SEQ ID NO: 1627473 - DNA, 15 bp, Homo sapiens
gtcgaatccctgaat

SEQ ID NO: 1627474 - DNA, 15 bp, Homo sapiens
tcgaatccctgaata

SEQ ID NO: 1627475 - DNA, 15 bp, Homo sapiens
cgaatccctgaataa

SEQ ID NO: 1627476 - DNA, 15 bp, Homo sapiens
gaatccctgaataaa

SEQ ID NO: 1627477 - DNA, 15 bp, Homo sapiens
aatccctgaataaac

SEQ ID NO: 1627478 - DNA, 15 bp, Homo sapiens
atccctgaataaacc

SEQ ID NO: 1627479 - DNA, 15 bp, Homo sapiens
tccctgaataaacca

SEQ ID NO: 1627480 - DNA, 15 bp, Homo sapiens
ccctgaataaaccaa

SEQ ID NO: 1627481 - DNA, 15 bp, Homo sapiens
cctgaataaaccaat

SEQ ID NO: 1627482 - DNA, 15 bp, Homo sapiens
ctgaataaaccaata

SEQ ID NO: 1627483 - DNA, 15 bp, Homo sapiens
tgaataaaccaataa

SEQ ID NO: 1627484 - DNA, 15 bp, Homo sapiens
gaataaaccaataac

SEQ ID NO: 1627485 - DNA, 15 bp, Homo sapiens
aataaaccaataaca

SEQ ID NO: 1627486 - DNA, 15 bp, Homo sapiens
ataaaccaataacaa

SEQ ID NO: 1627487 - DNA, 15 bp, Homo sapiens
taaaccaataacaag

SEQ ID NO: 1627488 - DNA, 15 bp, Homo sapiens
aaaccaataacaagt

SEQ ID NO: 1627489 - DNA, 15 bp, Homo sapiens
aaccaataacaagta

SEQ ID NO: 1627490 - DNA, 15 bp, Homo sapiens
accaataacaagtac

SEQ ID NO: 1627491 - DNA, 15 bp, Homo sapiens
ccaataacaagtact

SEQ ID NO: 1627492 - DNA, 15 bp, Homo sapiens
caataacaagtactg

SEQ ID NO: 1627493 - DNA, 15 bp, Homo sapiens
aataacaagtactga

SEQ ID NO: 1627494 - DNA, 15 bp, Homo sapiens
ataacaagtactgaa

SEQ ID NO: 1627495 - DNA, 15 bp, Homo sapiens
taacaagtactgaaa

SEQ ID NO: 1627496 - DNA, 15 bp, Homo sapiens
aacaagtactgaaat

SEQ ID NO: 1627497 - DNA, 15 bp, Homo sapiens
acaagtactgaaatt

SEQ ID NO: 1627498 - DNA, 15 bp, Homo sapiens
caagtactgaaattg

SEQ ID NO: 1627499 - DNA, 15 bp, Homo sapiens
aagtactgaaattga

SEQ ID NO: 1627500 - DNA, 15 bp, Homo sapiens
agtactgaaattgag

SEQ ID NO: 1627501 - DNA, 15 bp, Homo sapiens
gtactgaaattgagg

SEQ ID NO: 1627502 - DNA, 15 bp, Homo sapiens
tactgaaattgaggc

SEQ ID NO: 1627503 - DNA, 15 bp, Homo sapiens
actgaaattgaggca

SEQ ID NO: 1627504 - DNA, 15 bp, Homo sapiens
ctgaaattgaggcag

SEQ ID NO: 1627505 - DNA, 15 bp, Homo sapiens
tgaaattgaggcagt

SEQ ID NO: 1627506 - DNA, 15 bp, Homo sapiens
gaaattgaggcagta

SEQ ID NO: 1627507 - DNA, 15 bp, Homo sapiens
aaattgaggcagtaa

SEQ ID NO: 1627508 - DNA, 15 bp, Homo sapiens
aattgaggcagtaat

SEQ ID NO: 1627509 - DNA, 15 bp, Homo sapiens
attgaggcagtaatt

SEQ ID NO: 1627510 - DNA, 15 bp, Homo sapiens
ttgaggcagtaatta

SEQ ID NO: 1627511 - DNA, 15 bp, Homo sapiens
tgaggcagtaattaa

SEQ ID NO: 1627512 - DNA, 15 bp, Homo sapiens
gaggcagtaattaat

SEQ ID NO: 1627513 - DNA, 15 bp, Homo sapiens
aggcagtaattaata

SEQ ID NO: 1627514 - DNA, 15 bp, Homo sapiens
ggcagtaattaatag

SEQ ID NO: 1627515 - DNA, 15 bp, Homo sapiens
gcagtaattaatagc

SEQ ID NO: 1627516 - DNA, 15 bp, Homo sapiens
cagtaattaatagcc

SEQ ID NO: 1627517 - DNA, 15 bp, Homo sapiens
agtaattaatagcct

SEQ ID NO: 1627518 - DNA, 15 bp, Homo sapiens
gtaattaatagccta

SEQ ID NO: 1627519 - DNA, 15 bp, Homo sapiens
taattaatagcctac

SEQ ID NO: 1627520 - DNA, 15 bp, Homo sapiens
aattaatagcctacc

SEQ ID NO: 1627521 - DNA, 15 bp, Homo sapiens
attaatagcctacca

SEQ ID NO: 1627522 - DNA, 15 bp, Homo sapiens
ttaatagcctaccaa

SEQ ID NO: 1627523 - DNA, 15 bp, Homo sapiens
taatagcctaccaac

SEQ ID NO: 1627524 - DNA, 15 bp, Homo sapiens
aatagcctaccaact

SEQ ID NO: 1627525 - DNA, 15 bp, Homo sapiens
atagcctaccaacta

SEQ ID NO: 1627526 - DNA, 15 bp, Homo sapiens
tagcctaccaactaa

SEQ ID NO: 1627527 - DNA, 15 bp, Homo sapiens
agcctaccaactaaa

SEQ ID NO: 1627528 - DNA, 15 bp, Homo sapiens
gcctaccaactaaaa

SEQ ID NO: 1627529 - DNA, 15 bp, Homo sapiens
cctaccaactaaaaa

SEQ ID NO: 1627530 - DNA, 15 bp, Homo sapiens
ctaccaactaaaaaa

SEQ ID NO: 1627531 - DNA, 15 bp, Homo sapiens
taccaactaaaaaaa

SEQ ID NO: 1627532 - DNA, 15 bp, Homo sapiens
accaactaaaaaaat

SEQ ID NO: 1627533 - DNA, 15 bp, Homo sapiens
ccaactaaaaaaatc

SEQ ID NO: 1627534 - DNA, 15 bp, Homo sapiens
caactaaaaaaatct

SEQ ID NO: 1627535 - DNA, 15 bp, Homo sapiens
aactaaaaaaatctc

SEQ ID NO: 1627536 - DNA, 15 bp, Homo sapiens
actaaaaaaatctca

SEQ ID NO: 1627537 - DNA, 15 bp, Homo sapiens
ctaaaaaaatctcag

SEQ ID NO: 1627538 - DNA, 15 bp, Homo sapiens
taaaaaaatctcagg

SEQ ID NO: 1627539 - DNA, 15 bp, Homo sapiens
aaaaaaatctcagga

SEQ ID NO: 1627540 - DNA, 15 bp, Homo sapiens
aaaaaatctcaggac

SEQ ID NO: 1627541 - DNA, 15 bp, Homo sapiens
aaaaatctcaggacc

SEQ ID NO: 1627542 - DNA, 15 bp, Homo sapiens
aaaatctcaggacca

SEQ ID NO: 1627543 - DNA, 15 bp, Homo sapiens
aaatctcaggaccag

SEQ ID NO: 1627544 - DNA, 15 bp, Homo sapiens
aatctcaggaccaga

SEQ ID NO: 1627545 - DNA, 15 bp, Homo sapiens
atctcaggaccagat

SEQ ID NO: 1627546 - DNA, 15 bp, Homo sapiens
tctcaggaccagatg

SEQ ID NO: 1627547 - DNA, 15 bp, Homo sapiens
ctcaggaccagatgg

SEQ ID NO: 1627548 - DNA, 15 bp, Homo sapiens
tcaggaccagatgga

SEQ ID NO: 1627549 - DNA, 15 bp, Homo sapiens
caggaccagatggat

SEQ ID NO: 1627550 - DNA, 15 bp, Homo sapiens
aggaccagatggatt

SEQ ID NO: 1627551 - DNA, 15 bp, Homo sapiens
ggaccagatggattc

SEQ ID NO: 1627552 - DNA, 15 bp, Homo sapiens
gaccagatggattca

SEQ ID NO: 1627553 - DNA, 15 bp, Homo sapiens
accagatggattcac

SEQ ID NO: 1627554 - DNA, 15 bp, Homo sapiens
ccagatggattcaca

SEQ ID NO: 1627555 - DNA, 15 bp, Homo sapiens
cagatggattcacag

SEQ ID NO: 1627556 - DNA, 15 bp, Homo sapiens
agatggattcacagc

SEQ ID NO: 1627557 - DNA, 15 bp, Homo sapiens
gatggattcacagcc

SEQ ID NO: 1627558 - DNA, 15 bp, Homo sapiens
atggattcacagcca

SEQ ID NO: 1627559 - DNA, 15 bp, Homo sapiens
tggattcacagccaa

SEQ ID NO: 1627560 - DNA, 15 bp, Homo sapiens
ggattcacagccaaa

SEQ ID NO: 1627561 - DNA, 15 bp, Homo sapiens
gattcacagccaaat

SEQ ID NO: 1627562 - DNA, 15 bp, Homo sapiens
attcacagccaaatt

SEQ ID NO: 1627563 - DNA, 15 bp, Homo sapiens
ttcacagccaaattc

SEQ ID NO: 1627564 - DNA, 15 bp, Homo sapiens
tcacagccaaattct

SEQ ID NO: 1627565 - DNA, 15 bp, Homo sapiens
cacagccaaattctt

SEQ ID NO: 1627566 - DNA, 15 bp, Homo sapiens
acagccaaattcttc

SEQ ID NO: 1627567 - DNA, 15 bp, Homo sapiens
cagccaaattcttcc

SEQ ID NO: 1627568 - DNA, 15 bp, Homo sapiens
agccaaattcttcca

SEQ ID NO: 1627569 - DNA, 15 bp, Homo sapiens
gccaaattcttccag

SEQ ID NO: 1627570 - DNA, 15 bp, Homo sapiens
ccaaattcttccaga

SEQ ID NO: 1627571 - DNA, 15 bp, Homo sapiens
caaattcttccagag

SEQ ID NO: 1627572 - DNA, 15 bp, Homo sapiens
aaattcttccagagg

SEQ ID NO: 1627573 - DNA, 15 bp, Homo sapiens
aattcttccagaggt

SEQ ID NO: 1627574 - DNA, 15 bp, Homo sapiens
attcttccagaggta

SEQ ID NO: 1627575 - DNA, 15 bp, Homo sapiens
ttcttccagaggtac

SEQ ID NO: 1627576 - DNA, 15 bp, Homo sapiens
tcttccagaggtaca

SEQ ID NO: 1627577 - DNA, 15 bp, Homo sapiens
cttccagaggtacaa

SEQ ID NO: 1627578 - DNA, 15 bp, Homo sapiens
tccagaggtacaaag

SEQ ID NO: 1627579 - DNA, 15 bp, Homo sapiens
ccagaggtacaaaga

SEQ ID NO: 1627580 - DNA, 15 bp, Homo sapiens
cagaggtacaaagag

SEQ ID NO: 1627581 - DNA, 15 bp, Homo sapiens
agaggtacaaagagg

SEQ ID NO: 1627582 - DNA, 15 bp, Homo sapiens
gaggtacaaagagga

SEQ ID NO: 1627583 - DNA, 15 bp, Homo sapiens
aggtacaaagaggag

SEQ ID NO: 1627584 - DNA, 15 bp, Homo sapiens
ggtacaaagaggagc

SEQ ID NO: 1627585 - DNA, 15 bp, Homo sapiens
gtacaaagaggagct

SEQ ID NO: 1627586 - DNA, 15 bp, Homo sapiens
tacaaagaggagctg

SEQ ID NO: 1627587 - DNA, 15 bp, Homo sapiens
acaaagaggagctgg

SEQ ID NO: 1627588 - DNA, 15 bp, Homo sapiens
caaagaggagctggt

SEQ ID NO: 1627589 - DNA, 15 bp, Homo sapiens
aaagaggagctggta

SEQ ID NO: 1627590 - DNA, 15 bp, Homo sapiens
aagaggagctggtac

SEQ ID NO: 1627591 - DNA, 15 bp, Homo sapiens
agaggagctggtacc

SEQ ID NO: 1627592 - DNA, 15 bp, Homo sapiens
gaggagctggtacca

SEQ ID NO: 1627593 - DNA, 15 bp, Homo sapiens
aggagctggtaccat

SEQ ID NO: 1627594 - DNA, 15 bp, Homo sapiens
ggagctggtaccatt

SEQ ID NO: 1627595 - DNA, 15 bp, Homo sapiens
gagctggtaccattc

SEQ ID NO: 1627596 - DNA, 15 bp, Homo sapiens
agctggtaccattcc

SEQ ID NO: 1627597 - DNA, 15 bp, Homo sapiens
gctggtaccattcct

SEQ ID NO: 1627598 - DNA, 15 bp, Homo sapiens
ctggtaccattcctt

SEQ ID NO: 1627599 - DNA, 15 bp, Homo sapiens
tggtaccattccttc

SEQ ID NO: 1627600 - DNA, 15 bp, Homo sapiens
ggtaccattccttct

SEQ ID NO: 1627601 - DNA, 15 bp, Homo sapiens
gtaccattccttctg

SEQ ID NO: 1627602 - DNA, 15 bp, Homo sapiens
taccattccttctga

SEQ ID NO: 1627603 - DNA, 15 bp, Homo sapiens
accattccttctgaa

SEQ ID NO: 1627604 - DNA, 15 bp, Homo sapiens
ccattccttctgaaa

SEQ ID NO: 1627605 - DNA, 15 bp, Homo sapiens
cattccttctgaaac

SEQ ID NO: 1627606 - DNA, 15 bp, Homo sapiens
attccttctgaaact

SEQ ID NO: 1627607 - DNA, 15 bp, Homo sapiens
ttccttctgaaacta

SEQ ID NO: 1627608 - DNA, 15 bp, Homo sapiens
tccttctgaaactat

SEQ ID NO: 1627609 - DNA, 15 bp, Homo sapiens
ccttctgaaactata

SEQ ID NO: 1627610 - DNA, 15 bp, Homo sapiens
cttctgaaactatac

SEQ ID NO: 1627611 - DNA, 15 bp, Homo sapiens
ttctgaaactatacc

SEQ ID NO: 1627612 - DNA, 15 bp, Homo sapiens
tctgaaactatacca

SEQ ID NO: 1627613 - DNA, 15 bp, Homo sapiens
ctgaaactataccaa

SEQ ID NO: 1627614 - DNA, 15 bp, Homo sapiens
tgaaactataccaaa

SEQ ID NO: 1627615 - DNA, 15 bp, Homo sapiens
gaaactataccaaac

SEQ ID NO: 1627616 - DNA, 15 bp, Homo sapiens
aaactataccaaaca

SEQ ID NO: 1627617 - DNA, 15 bp, Homo sapiens
aactataccaaacaa

SEQ ID NO: 1627618 - DNA, 15 bp, Homo sapiens
actataccaaacaag

SEQ ID NO: 1627619 - DNA, 15 bp, Homo sapiens
ctataccaaacaaga

SEQ ID NO: 1627620 - DNA, 15 bp, Homo sapiens
tataccaaacaagag

SEQ ID NO: 1627621 - DNA, 15 bp, Homo sapiens
ataccaaacaagaga

SEQ ID NO: 1627622 - DNA, 15 bp, Homo sapiens
taccaaacaagagaa

SEQ ID NO: 1627623 - DNA, 15 bp, Homo sapiens
accaaacaagagaaa

SEQ ID NO: 1627624 - DNA, 15 bp, Homo sapiens
ccaaacaagagaaaa

SEQ ID NO: 1627625 - DNA, 15 bp, Homo sapiens
caaacaagagaaaaa

SEQ ID NO: 1627626 - DNA, 15 bp, Homo sapiens
aaacaagagaaaaag

SEQ ID NO: 1627627 - DNA, 15 bp, Homo sapiens
aacaagagaaaaaga

SEQ ID NO: 1627628 - DNA, 15 bp, Homo sapiens
acaagagaaaaagag

SEQ ID NO: 1627629 - DNA, 15 bp, Homo sapiens
caagagaaaaagagg

SEQ ID NO: 1627630 - DNA, 15 bp, Homo sapiens
aagagaaaaagaggg

SEQ ID NO: 1627631 - DNA, 15 bp, Homo sapiens
agagaaaaagaggga

SEQ ID NO: 1627632 - DNA, 15 bp, Homo sapiens
gagaaaaagagggac

SEQ ID NO: 1627633 - DNA, 15 bp, Homo sapiens
agaaaaagagggact

SEQ ID NO: 1627634 - DNA, 15 bp, Homo sapiens
gaaaaagagggactc

SEQ ID NO: 1627635 - DNA, 15 bp, Homo sapiens
aaaaagagggactcc

SEQ ID NO: 1627636 - DNA, 15 bp, Homo sapiens
aaaagagggactcct

SEQ ID NO: 1627637 - DNA, 15 bp, Homo sapiens
aaagagggactcctc

SEQ ID NO: 1627638 - DNA, 15 bp, Homo sapiens
aagagggactcctcc

SEQ ID NO: 1627639 - DNA, 15 bp, Homo sapiens
agagggactcctccc

SEQ ID NO: 1627640 - DNA, 15 bp, Homo sapiens
gagggactcctccct

SEQ ID NO: 1627641 - DNA, 15 bp, Homo sapiens
agggactcctcccta

SEQ ID NO: 1627642 - DNA, 15 bp, Homo sapiens
gggactcctccctaa

SEQ ID NO: 1627643 - DNA, 15 bp, Homo sapiens
ggactcctccctaac

SEQ ID NO: 1627644 - DNA, 15 bp, Homo sapiens
gactcctccctaact

SEQ ID NO: 1627645 - DNA, 15 bp, Homo sapiens
actcctccctaactc

SEQ ID NO: 1627646 - DNA, 15 bp, Homo sapiens
ctcctccctaactca

SEQ ID NO: 1627647 - DNA, 15 bp, Homo sapiens
tcctccctaactcat

SEQ ID NO: 1627648 - DNA, 15 bp, Homo sapiens
cctccctaactcatt

SEQ ID NO: 1627649 - DNA, 15 bp, Homo sapiens
ctccctaactcattt

SEQ ID NO: 1627650 - DNA, 15 bp, Homo sapiens
tccctaactcatttt

SEQ ID NO: 1627651 - DNA, 15 bp, Homo sapiens
ccctaactcatttta

SEQ ID NO: 1627652 - DNA, 15 bp, Homo sapiens
cctaactcattttat

SEQ ID NO: 1627653 - DNA, 15 bp, Homo sapiens
ctaactcattttatg

SEQ ID NO: 1627654 - DNA, 15 bp, Homo sapiens
taactcattttatga

SEQ ID NO: 1627655 - DNA, 15 bp, Homo sapiens
aactcattttatgaa

SEQ ID NO: 1627656 - DNA, 15 bp, Homo sapiens
actcattttatgaag

SEQ ID NO: 1627657 - DNA, 15 bp, Homo sapiens
ctcattttatgaagc

SEQ ID NO: 1627658 - DNA, 15 bp, Homo sapiens
tcattttatgaagcc

SEQ ID NO: 1627659 - DNA, 15 bp, Homo sapiens
cattttatgaagcca

SEQ ID NO: 1627660 - DNA, 15 bp, Homo sapiens
attttatgaagccag

SEQ ID NO: 1627661 - DNA, 15 bp, Homo sapiens
ttttatgaagccagc

SEQ ID NO: 1627662 - DNA, 15 bp, Homo sapiens
tttatgaagccagca

SEQ ID NO: 1627663 - DNA, 15 bp, Homo sapiens
ttatgaagccagcat

SEQ ID NO: 1627664 - DNA, 15 bp, Homo sapiens
tatgaagccagcatc

SEQ ID NO: 1627665 - DNA, 15 bp, Homo sapiens
atgaagccagcatca

SEQ ID NO: 1627666 - DNA, 15 bp, Homo sapiens
tgaagccagcatcat

SEQ ID NO: 1627667 - DNA, 15 bp, Homo sapiens
gaagccagcatcatt

SEQ ID NO: 1627668 - DNA, 15 bp, Homo sapiens
aagccagcatcattc

SEQ ID NO: 1627669 - DNA, 15 bp, Homo sapiens
agccagcatcattct

SEQ ID NO: 1627670 - DNA, 15 bp, Homo sapiens
gccagcatcattctg

SEQ ID NO: 1627671 - DNA, 15 bp, Homo sapiens
ccagcatcattctga

SEQ ID NO: 1627672 - DNA, 15 bp, Homo sapiens
cagcatcattctgat

SEQ ID NO: 1627673 - DNA, 15 bp, Homo sapiens
agcatcattctgata

SEQ ID NO: 1627674 - DNA, 15 bp, Homo sapiens
gcatcattctgatac

SEQ ID NO: 1627675 - DNA, 15 bp, Homo sapiens
catcattctgatacc

SEQ ID NO: 1627676 - DNA, 15 bp, Homo sapiens
atcattctgatacca

SEQ ID NO: 1627677 - DNA, 15 bp, Homo sapiens
tcattctgataccaa

SEQ ID NO: 1627678 - DNA, 15 bp, Homo sapiens
cattctgataccaaa

SEQ ID NO: 1627679 - DNA, 15 bp, Homo sapiens
attctgataccaaaa

SEQ ID NO: 1627680 - DNA, 15 bp, Homo sapiens
ttctgataccaaaac

SEQ ID NO: 1627681 - DNA, 15 bp, Homo sapiens
tctgataccaaaacc

SEQ ID NO: 1627682 - DNA, 15 bp, Homo sapiens
ctgataccaaaacct

SEQ ID NO: 1627683 - DNA, 15 bp, Homo sapiens
tgataccaaaacctg

SEQ ID NO: 1627684 - DNA, 15 bp, Homo sapiens
gataccaaaacctgg

SEQ ID NO: 1627685 - DNA, 15 bp, Homo sapiens
ataccaaaacctggc

SEQ ID NO: 1627686 - DNA, 15 bp, Homo sapiens
taccaaaacctggca

SEQ ID NO: 1627687 - DNA, 15 bp, Homo sapiens
accaaaacctggcac

SEQ ID NO: 1627688 - DNA, 15 bp, Homo sapiens
ccaaaacctggcaca

SEQ ID NO: 1627689 - DNA, 15 bp, Homo sapiens
caaaacctggcacag

SEQ ID NO: 1627690 - DNA, 15 bp, Homo sapiens
aaaacctggcacaga

SEQ ID NO: 1627691 - DNA, 15 bp, Homo sapiens
aaacctggcacagac

SEQ ID NO: 1627692 - DNA, 15 bp, Homo sapiens
aacctggcacagaca

SEQ ID NO: 1627693 - DNA, 15 bp, Homo sapiens
acctggcacagacac

SEQ ID NO: 1627694 - DNA, 15 bp, Homo sapiens
cctggcacagacaca

SEQ ID NO: 1627695 - DNA, 15 bp, Homo sapiens
ctggcacagacacaa

SEQ ID NO: 1627696 - DNA, 15 bp, Homo sapiens
tggcacagacacaac

SEQ ID NO: 1627697 - DNA, 15 bp, Homo sapiens
ggcacagacacaaca

SEQ ID NO: 1627698 - DNA, 15 bp, Homo sapiens
gcacagacacaacaa

SEQ ID NO: 1627699 - DNA, 15 bp, Homo sapiens
cacagacacaacaaa

SEQ ID NO: 1627700 - DNA, 15 bp, Homo sapiens
acagacacaacaaaa

SEQ ID NO: 1627701 - DNA, 15 bp, Homo sapiens
cagacacaacaaaaa

SEQ ID NO: 1627702 - DNA, 15 bp, Homo sapiens
agacacaacaaaaaa

SEQ ID NO: 1627703 - DNA, 15 bp, Homo sapiens
gacacaacaaaaaaa

SEQ ID NO: 1627704 - DNA, 15 bp, Homo sapiens
acacaacaaaaaaag

SEQ ID NO: 1627705 - DNA, 15 bp, Homo sapiens
cacaacaaaaaaaga

SEQ ID NO: 1627706 - DNA, 15 bp, Homo sapiens
acaacaaaaaaagaa

SEQ ID NO: 1627707 - DNA, 15 bp, Homo sapiens
caacaaaaaaagaaa

SEQ ID NO: 1627708 - DNA, 15 bp, Homo sapiens
caaaaaaagaaaatt

SEQ ID NO: 1627709 - DNA, 15 bp, Homo sapiens
aaaaaaagaaaattt

SEQ ID NO: 1627710 - DNA, 15 bp, Homo sapiens
aaaaaagaaaatttc

SEQ ID NO: 1627711 - DNA, 15 bp, Homo sapiens
aaaaagaaaatttca

SEQ ID NO: 1627712 - DNA, 15 bp, Homo sapiens
aaaagaaaatttcag

SEQ ID NO: 1627713 - DNA, 15 bp, Homo sapiens
aaagaaaatttcagg

SEQ ID NO: 1627714 - DNA, 15 bp, Homo sapiens
aagaaaatttcaggc

SEQ ID NO: 1627715 - DNA, 15 bp, Homo sapiens
agaaaatttcaggcc

SEQ ID NO: 1627716 - DNA, 15 bp, Homo sapiens
gaaaatttcaggcca

SEQ ID NO: 1627717 - DNA, 15 bp, Homo sapiens
aaaatttcaggccaa

SEQ ID NO: 1627718 - DNA, 15 bp, Homo sapiens
aaatttcaggccaat

SEQ ID NO: 1627719 - DNA, 15 bp, Homo sapiens
aatttcaggccaata

SEQ ID NO: 1627720 - DNA, 15 bp, Homo sapiens
atttcaggccaatat

SEQ ID NO: 1627721 - DNA, 15 bp, Homo sapiens
tttcaggccaatatc

SEQ ID NO: 1627722 - DNA, 15 bp, Homo sapiens
ttcaggccaatatcc

SEQ ID NO: 1627723 - DNA, 15 bp, Homo sapiens
tcaggccaatatccc

SEQ ID NO: 1627724 - DNA, 15 bp, Homo sapiens
caggccaatatccct

SEQ ID NO: 1627725 - DNA, 15 bp, Homo sapiens
aggccaatatccctg

SEQ ID NO: 1627726 - DNA, 15 bp, Homo sapiens
ggccaatatccctga

SEQ ID NO: 1627727 - DNA, 15 bp, Homo sapiens
gccaatatccctgat

SEQ ID NO: 1627728 - DNA, 15 bp, Homo sapiens
ccaatatccctgatg

SEQ ID NO: 1627729 - DNA, 15 bp, Homo sapiens
caatatccctgatga

SEQ ID NO: 1627730 - DNA, 15 bp, Homo sapiens
aatatccctgatgaa

SEQ ID NO: 1627731 - DNA, 15 bp, Homo sapiens
atatccctgatgaac

SEQ ID NO: 1627732 - DNA, 15 bp, Homo sapiens
tatccctgatgaacg

SEQ ID NO: 1627733 - DNA, 15 bp, Homo sapiens
atccctgatgaacgt

SEQ ID NO: 1627734 - DNA, 15 bp, Homo sapiens
tccctgatgaacgtc

SEQ ID NO: 1627735 - DNA, 15 bp, Homo sapiens
ccctgatgaacgtca

SEQ ID NO: 1627736 - DNA, 15 bp, Homo sapiens
cctgatgaacgtcaa

SEQ ID NO: 1627737 - DNA, 15 bp, Homo sapiens
ctgatgaacgtcaat

SEQ ID NO: 1627738 - DNA, 15 bp, Homo sapiens
tgatgaacgtcaatg

SEQ ID NO: 1627739 - DNA, 15 bp, Homo sapiens
gatgaacgtcaatgc

SEQ ID NO: 1627740 - DNA, 15 bp, Homo sapiens
atgaacgtcaatgca

SEQ ID NO: 1627741 - DNA, 15 bp, Homo sapiens
tgaacgtcaatgcaa

SEQ ID NO: 1627742 - DNA, 15 bp, Homo sapiens
gaacgtcaatgcaaa

SEQ ID NO: 1627743 - DNA, 15 bp, Homo sapiens
aacgtcaatgcaaaa

SEQ ID NO: 1627744 - DNA, 15 bp, Homo sapiens
acgtcaatgcaaaaa

SEQ ID NO: 1627745 - DNA, 15 bp, Homo sapiens
cgtcaatgcaaaaat

SEQ ID NO: 1627746 - DNA, 15 bp, Homo sapiens
gtcaatgcaaaaatc

SEQ ID NO: 1627747 - DNA, 15 bp, Homo sapiens
tcaatgcaaaaatcc

SEQ ID NO: 1627748 - DNA, 15 bp, Homo sapiens
caatgcaaaaatcct

SEQ ID NO: 1627749 - DNA, 15 bp, Homo sapiens
aatgcaaaaatcctc

SEQ ID NO: 1627750 - DNA, 15 bp, Homo sapiens
atgcaaaaatcctca

SEQ ID NO: 1627751 - DNA, 15 bp, Homo sapiens
tgcaaaaatcctcaa

SEQ ID NO: 1627752 - DNA, 15 bp, Homo sapiens
gcaaaaatcctcaat

SEQ ID NO: 1627753 - DNA, 15 bp, Homo sapiens
caaaaatcctcaata

SEQ ID NO: 1627754 - DNA, 15 bp, Homo sapiens
aaaaatcctcaataa

SEQ ID NO: 1627755 - DNA, 15 bp, Homo sapiens
aaaatcctcaataaa

SEQ ID NO: 1627756 - DNA, 15 bp, Homo sapiens
aaatcctcaataaaa

SEQ ID NO: 1627757 - DNA, 15 bp, Homo sapiens
aatcctcaataaaat

SEQ ID NO: 1627758 - DNA, 15 bp, Homo sapiens
atcctcaataaaata

SEQ ID NO: 1627759 - DNA, 15 bp, Homo sapiens
tcctcaataaaatac

SEQ ID NO: 1627760 - DNA, 15 bp, Homo sapiens
cctcaataaaatact

SEQ ID NO: 1627761 - DNA, 15 bp, Homo sapiens
ctcaataaaatacta

SEQ ID NO: 1627762 - DNA, 15 bp, Homo sapiens
tcaataaaatactag

SEQ ID NO: 1627763 - DNA, 15 bp, Homo sapiens
caataaaatactagc

SEQ ID NO: 1627764 - DNA, 15 bp, Homo sapiens
aataaaatactagca

SEQ ID NO: 1627765 - DNA, 15 bp, Homo sapiens
ataaaatactagcaa

SEQ ID NO: 1627766 - DNA, 15 bp, Homo sapiens
taaaatactagcaaa

SEQ ID NO: 1627767 - DNA, 15 bp, Homo sapiens
aaaatactagcaaac

SEQ ID NO: 1627768 - DNA, 15 bp, Homo sapiens
aaatactagcaaacc

SEQ ID NO: 1627769 - DNA, 15 bp, Homo sapiens
aatactagcaaaccg

SEQ ID NO: 1627770 - DNA, 15 bp, Homo sapiens
atactagcaaaccga

SEQ ID NO: 1627771 - DNA, 15 bp, Homo sapiens
tactagcaaaccgaa

SEQ ID NO: 1627772 - DNA, 15 bp, Homo sapiens
actagcaaaccgaat

SEQ ID NO: 1627773 - DNA, 15 bp, Homo sapiens
ctagcaaaccgaatc

SEQ ID NO: 1627774 - DNA, 15 bp, Homo sapiens
tagcaaaccgaatcc

SEQ ID NO: 1627775 - DNA, 15 bp, Homo sapiens
agcaaaccgaatcca

SEQ ID NO: 1627776 - DNA, 15 bp, Homo sapiens
gcaaaccgaatccag

SEQ ID NO: 1627777 - DNA, 15 bp, Homo sapiens
caaaccgaatccagc

SEQ ID NO: 1627778 - DNA, 15 bp, Homo sapiens
aaaccgaatccagca

SEQ ID NO: 1627779 - DNA, 15 bp, Homo sapiens
aaccgaatccagcag

SEQ ID NO: 1627780 - DNA, 15 bp, Homo sapiens
accgaatccagcagc

SEQ ID NO: 1627781 - DNA, 15 bp, Homo sapiens
ccgaatccagcagca

SEQ ID NO: 1627782 - DNA, 15 bp, Homo sapiens
cgaatccagcagcac

SEQ ID NO: 1627783 - DNA, 15 bp, Homo sapiens
gaatccagcagcaca

SEQ ID NO: 1627784 - DNA, 15 bp, Homo sapiens
aatccagcagcacat

SEQ ID NO: 1627785 - DNA, 15 bp, Homo sapiens
atccagcagcacatc

SEQ ID NO: 1627786 - DNA, 15 bp, Homo sapiens
tccagcagcacatca

SEQ ID NO: 1627787 - DNA, 15 bp, Homo sapiens
ccagcagcacatcaa

SEQ ID NO: 1627788 - DNA, 15 bp, Homo sapiens
cagcagcacatcaaa

SEQ ID NO: 1627789 - DNA, 15 bp, Homo sapiens
agcagcacatcaaaa

SEQ ID NO: 1627790 - DNA, 15 bp, Homo sapiens
gcagcacatcaaaaa

SEQ ID NO: 1627791 - DNA, 15 bp, Homo sapiens
cagcacatcaaaaag

SEQ ID NO: 1627792 - DNA, 15 bp, Homo sapiens
agcacatcaaaaagc

SEQ ID NO: 1627793 - DNA, 15 bp, Homo sapiens
gcacatcaaaaagct

SEQ ID NO: 1627794 - DNA, 15 bp, Homo sapiens
cacatcaaaaagctt

SEQ ID NO: 1627795 - DNA, 15 bp, Homo sapiens
acatcaaaaagctta

SEQ ID NO: 1627796 - DNA, 15 bp, Homo sapiens
catcaaaaagcttat

SEQ ID NO: 1627797 - DNA, 15 bp, Homo sapiens
atcaaaaagcttatc

SEQ ID NO: 1627798 - DNA, 15 bp, Homo sapiens
tcaaaaagcttatcc

SEQ ID NO: 1627799 - DNA, 15 bp, Homo sapiens
caaaaagcttatcca

SEQ ID NO: 1627800 - DNA, 15 bp, Homo sapiens
aaaaagcttatccat

SEQ ID NO: 1627801 - DNA, 15 bp, Homo sapiens
aaaagcttatccatg

SEQ ID NO: 1627802 - DNA, 15 bp, Homo sapiens
aaagcttatccatga

SEQ ID NO: 1627803 - DNA, 15 bp, Homo sapiens
aagcttatccatgat

SEQ ID NO: 1627804 - DNA, 15 bp, Homo sapiens
agcttatccatgatg

SEQ ID NO: 1627805 - DNA, 15 bp, Homo sapiens
gcttatccatgatga

SEQ ID NO: 1627806 - DNA, 15 bp, Homo sapiens
cttatccatgatgac

SEQ ID NO: 1627807 - DNA, 15 bp, Homo sapiens
ttatccatgatgacc

SEQ ID NO: 1627808 - DNA, 15 bp, Homo sapiens
tatccatgatgacca

SEQ ID NO: 1627809 - DNA, 15 bp, Homo sapiens
atccatgatgaccaa

SEQ ID NO: 1627810 - DNA, 15 bp, Homo sapiens
tccatgatgaccaag

SEQ ID NO: 1627811 - DNA, 15 bp, Homo sapiens
ccatgatgaccaagt

SEQ ID NO: 1627812 - DNA, 15 bp, Homo sapiens
catgatgaccaagtc

SEQ ID NO: 1627813 - DNA, 15 bp, Homo sapiens
atgatgaccaagtca

SEQ ID NO: 1627814 - DNA, 15 bp, Homo sapiens
tgatgaccaagtcag

SEQ ID NO: 1627815 - DNA, 15 bp, Homo sapiens
gatgaccaagtcagc

SEQ ID NO: 1627816 - DNA, 15 bp, Homo sapiens
atgaccaagtcagct

SEQ ID NO: 1627817 - DNA, 15 bp, Homo sapiens
tgaccaagtcagctt

SEQ ID NO: 1627818 - DNA, 15 bp, Homo sapiens
gaccaagtcagcttc

SEQ ID NO: 1627819 - DNA, 15 bp, Homo sapiens
accaagtcagcttca

SEQ ID NO: 1627820 - DNA, 15 bp, Homo sapiens
ccaagtcagcttcat

SEQ ID NO: 1627821 - DNA, 15 bp, Homo sapiens
caagtcagcttcatc

SEQ ID NO: 1627822 - DNA, 15 bp, Homo sapiens
aagtcagcttcatcc

SEQ ID NO: 1627823 - DNA, 15 bp, Homo sapiens
agtcagcttcatccc

SEQ ID NO: 1627824 - DNA, 15 bp, Homo sapiens
gtcagcttcatccct

SEQ ID NO: 1627825 - DNA, 15 bp, Homo sapiens
tcagcttcatccctg

SEQ ID NO: 1627826 - DNA, 15 bp, Homo sapiens
cagcttcatccctgg

SEQ ID NO: 1627827 - DNA, 15 bp, Homo sapiens
agcttcatccctggg

SEQ ID NO: 1627828 - DNA, 15 bp, Homo sapiens
gcttcatccctggga

SEQ ID NO: 1627829 - DNA, 15 bp, Homo sapiens
cttcatccctgggat

SEQ ID NO: 1627830 - DNA, 15 bp, Homo sapiens
ttcatccctgggatg

SEQ ID NO: 1627831 - DNA, 15 bp, Homo sapiens
tcatccctgggatgc

SEQ ID NO: 1627832 - DNA, 15 bp, Homo sapiens
catccctgggatgca

SEQ ID NO: 1627833 - DNA, 15 bp, Homo sapiens
atccctgggatgcaa

SEQ ID NO: 1627834 - DNA, 15 bp, Homo sapiens
tccctgggatgcaag

SEQ ID NO: 1627835 - DNA, 15 bp, Homo sapiens
ccctgggatgcaagg

SEQ ID NO: 1627836 - DNA, 15 bp, Homo sapiens
cctgggatgcaaggc

SEQ ID NO: 1627837 - DNA, 15 bp, Homo sapiens
ctgggatgcaaggct

SEQ ID NO: 1627838 - DNA, 15 bp, Homo sapiens
tgggatgcaaggctg

SEQ ID NO: 1627839 - DNA, 15 bp, Homo sapiens
gggatgcaaggctgg

SEQ ID NO: 1627840 - DNA, 15 bp, Homo sapiens
ggatgcaaggctggt

SEQ ID NO: 1627841 - DNA, 15 bp, Homo sapiens
gatgcaaggctggtt

SEQ ID NO: 1627842 - DNA, 15 bp, Homo sapiens
atgcaaggctggttc

SEQ ID NO: 1627843 - DNA, 15 bp, Homo sapiens
tgcaaggctggttca

SEQ ID NO: 1627844 - DNA, 15 bp, Homo sapiens
gcaaggctggttcag

SEQ ID NO: 1627845 - DNA, 15 bp, Homo sapiens
caaggctggttcagc

SEQ ID NO: 1627846 - DNA, 15 bp, Homo sapiens
aaggctggttcagca

SEQ ID NO: 1627847 - DNA, 15 bp, Homo sapiens
aggctggttcagcat

SEQ ID NO: 1627848 - DNA, 15 bp, Homo sapiens
ggctggttcagcata

SEQ ID NO: 1627849 - DNA, 15 bp, Homo sapiens
gctggttcagcatat

SEQ ID NO: 1627850 - DNA, 15 bp, Homo sapiens
ctggttcagcatatg

SEQ ID NO: 1627851 - DNA, 15 bp, Homo sapiens
tggttcagcatatgc

SEQ ID NO: 1627852 - DNA, 15 bp, Homo sapiens
ggttcagcatatgca

SEQ ID NO: 1627853 - DNA, 15 bp, Homo sapiens
gttcagcatatgcaa

SEQ ID NO: 1627854 - DNA, 15 bp, Homo sapiens
ttcagcatatgcaaa

SEQ ID NO: 1627855 - DNA, 15 bp, Homo sapiens
tcagcatatgcaaac

SEQ ID NO: 1627856 - DNA, 15 bp, Homo sapiens
cagcatatgcaaacc

SEQ ID NO: 1627857 - DNA, 15 bp, Homo sapiens
agcatatgcaaacca

SEQ ID NO: 1627858 - DNA, 15 bp, Homo sapiens
gcatatgcaaaccaa

SEQ ID NO: 1627859 - DNA, 15 bp, Homo sapiens
catatgcaaaccaat

SEQ ID NO: 1627860 - DNA, 15 bp, Homo sapiens
atatgcaaaccaata

SEQ ID NO: 1627861 - DNA, 15 bp, Homo sapiens
tatgcaaaccaataa

SEQ ID NO: 1627862 - DNA, 15 bp, Homo sapiens
atgcaaaccaataaa

SEQ ID NO: 1627863 - DNA, 15 bp, Homo sapiens
tgcaaaccaataaac

SEQ ID NO: 1627864 - DNA, 15 bp, Homo sapiens
gcaaaccaataaaca

SEQ ID NO: 1627865 - DNA, 15 bp, Homo sapiens
caaaccaataaacat

SEQ ID NO: 1627866 - DNA, 15 bp, Homo sapiens
aaaccaataaacata

SEQ ID NO: 1627867 - DNA, 15 bp, Homo sapiens
aaccaataaacataa

SEQ ID NO: 1627868 - DNA, 15 bp, Homo sapiens
accaataaacataat

SEQ ID NO: 1627869 - DNA, 15 bp, Homo sapiens
ccaataaacataatc

SEQ ID NO: 1627870 - DNA, 15 bp, Homo sapiens
caataaacataatcc

SEQ ID NO: 1627871 - DNA, 15 bp, Homo sapiens
aataaacataatcca

SEQ ID NO: 1627872 - DNA, 15 bp, Homo sapiens
ataaacataatccat

SEQ ID NO: 1627873 - DNA, 15 bp, Homo sapiens
taaacataatccatc

SEQ ID NO: 1627874 - DNA, 15 bp, Homo sapiens
aaacataatccatca

SEQ ID NO: 1627875 - DNA, 15 bp, Homo sapiens
aacataatccatcac

SEQ ID NO: 1627876 - DNA, 15 bp, Homo sapiens
acataatccatcaca

SEQ ID NO: 1627877 - DNA, 15 bp, Homo sapiens
cataatccatcacat

SEQ ID NO: 1627878 - DNA, 15 bp, Homo sapiens
ataatccatcacata

SEQ ID NO: 1627879 - DNA, 15 bp, Homo sapiens
taatccatcacataa

SEQ ID NO: 1627880 - DNA, 15 bp, Homo sapiens
aatccatcacataaa

SEQ ID NO: 1627881 - DNA, 15 bp, Homo sapiens
atccatcacataaac

SEQ ID NO: 1627882 - DNA, 15 bp, Homo sapiens
tccatcacataaaca

SEQ ID NO: 1627883 - DNA, 15 bp, Homo sapiens
ccatcacataaacag

SEQ ID NO: 1627884 - DNA, 15 bp, Homo sapiens
catcacataaacaga

SEQ ID NO: 1627885 - DNA, 15 bp, Homo sapiens
atcacataaacagaa

SEQ ID NO: 1627886 - DNA, 15 bp, Homo sapiens
tcacataaacagaac

SEQ ID NO: 1627887 - DNA, 15 bp, Homo sapiens
cacataaacagaacc

SEQ ID NO: 1627888 - DNA, 15 bp, Homo sapiens
acataaacagaaccg

SEQ ID NO: 1627889 - DNA, 15 bp, Homo sapiens
cataaacagaaccga

SEQ ID NO: 1627890 - DNA, 15 bp, Homo sapiens
ataaacagaaccgat

SEQ ID NO: 1627891 - DNA, 15 bp, Homo sapiens
taaacagaaccgatg

SEQ ID NO: 1627892 - DNA, 15 bp, Homo sapiens
aaacagaaccgatga

SEQ ID NO: 1627893 - DNA, 15 bp, Homo sapiens
aacagaaccgatgac

SEQ ID NO: 1627894 - DNA, 15 bp, Homo sapiens
acagaaccgatgaca

SEQ ID NO: 1627895 - DNA, 15 bp, Homo sapiens
cagaaccgatgacaa

SEQ ID NO: 1627896 - DNA, 15 bp, Homo sapiens
agaaccgatgacaaa

SEQ ID NO: 1627897 - DNA, 15 bp, Homo sapiens
gaaccgatgacaaaa

SEQ ID NO: 1627898 - DNA, 15 bp, Homo sapiens
aaccgatgacaaaaa

SEQ ID NO: 1627899 - DNA, 15 bp, Homo sapiens
accgatgacaaaaac

SEQ ID NO: 1627900 - DNA, 15 bp, Homo sapiens
ccgatgacaaaaacc

SEQ ID NO: 1627901 - DNA, 15 bp, Homo sapiens
cgatgacaaaaacca

SEQ ID NO: 1627902 - DNA, 15 bp, Homo sapiens
gatgacaaaaaccac

SEQ ID NO: 1627903 - DNA, 15 bp, Homo sapiens
atgacaaaaaccaca

SEQ ID NO: 1627904 - DNA, 15 bp, Homo sapiens
tgacaaaaaccacat

SEQ ID NO: 1627905 - DNA, 15 bp, Homo sapiens
gacaaaaaccacatg

SEQ ID NO: 1627906 - DNA, 15 bp, Homo sapiens
acaaaaaccacatga

SEQ ID NO: 1627907 - DNA, 15 bp, Homo sapiens
caaaaaccacatgat

SEQ ID NO: 1627908 - DNA, 15 bp, Homo sapiens
aaaaaccacatgatt

SEQ ID NO: 1627909 - DNA, 15 bp, Homo sapiens
aaaaccacatgatta

SEQ ID NO: 1627910 - DNA, 15 bp, Homo sapiens
aaaccacatgattat

SEQ ID NO: 1627911 - DNA, 15 bp, Homo sapiens
aaccacatgattatc

SEQ ID NO: 1627912 - DNA, 15 bp, Homo sapiens
accacatgattatct

SEQ ID NO: 1627913 - DNA, 15 bp, Homo sapiens
ccacatgattatctc

SEQ ID NO: 1627914 - DNA, 15 bp, Homo sapiens
cacatgattatctca

SEQ ID NO: 1627915 - DNA, 15 bp, Homo sapiens
acatgattatctcaa

SEQ ID NO: 1627916 - DNA, 15 bp, Homo sapiens
catgattatctcaag

SEQ ID NO: 1627917 - DNA, 15 bp, Homo sapiens
atgattatctcaaga

SEQ ID NO: 1627918 - DNA, 15 bp, Homo sapiens
tgattatctcaagag

SEQ ID NO: 1627919 - DNA, 15 bp, Homo sapiens
gattatctcaagaga

SEQ ID NO: 1627920 - DNA, 15 bp, Homo sapiens
attatctcaagagat

SEQ ID NO: 1627921 - DNA, 15 bp, Homo sapiens
ttatctcaagagatg

SEQ ID NO: 1627922 - DNA, 15 bp, Homo sapiens
tatctcaagagatgc

SEQ ID NO: 1627923 - DNA, 15 bp, Homo sapiens
atctcaagagatgca

SEQ ID NO: 1627924 - DNA, 15 bp, Homo sapiens
tctcaagagatgcag

SEQ ID NO: 1627925 - DNA, 15 bp, Homo sapiens
ctcaagagatgcaga

SEQ ID NO: 1627926 - DNA, 15 bp, Homo sapiens
tcaagagatgcagaa

SEQ ID NO: 1627927 - DNA, 15 bp, Homo sapiens
caagagatgcagaaa

SEQ ID NO: 1627928 - DNA, 15 bp, Homo sapiens
aagagatgcagaaaa

SEQ ID NO: 1627929 - DNA, 15 bp, Homo sapiens
agagatgcagaaaag

SEQ ID NO: 1627930 - DNA, 15 bp, Homo sapiens
gagatgcagaaaagt

SEQ ID NO: 1627931 - DNA, 15 bp, Homo sapiens
agatgcagaaaagtc

SEQ ID NO: 1627932 - DNA, 15 bp, Homo sapiens
gatgcagaaaagtcc

SEQ ID NO: 1627933 - DNA, 15 bp, Homo sapiens
atgcagaaaagtcct

SEQ ID NO: 1627934 - DNA, 15 bp, Homo sapiens
tgcagaaaagtcctt

SEQ ID NO: 1627935 - DNA, 15 bp, Homo sapiens
gcagaaaagtccttc

SEQ ID NO: 1627936 - DNA, 15 bp, Homo sapiens
cagaaaagtccttca

SEQ ID NO: 1627937 - DNA, 15 bp, Homo sapiens
agaaaagtccttcaa

SEQ ID NO: 1627938 - DNA, 15 bp, Homo sapiens
gaaaagtccttcaat

SEQ ID NO: 1627939 - DNA, 15 bp, Homo sapiens
aaaagtccttcaata

SEQ ID NO: 1627940 - DNA, 15 bp, Homo sapiens
aaagtccttcaataa

SEQ ID NO: 1627941 - DNA, 15 bp, Homo sapiens
aagtccttcaataaa

SEQ ID NO: 1627942 - DNA, 15 bp, Homo sapiens
agtccttcaataaaa

SEQ ID NO: 1627943 - DNA, 15 bp, Homo sapiens
gtccttcaataaaat

SEQ ID NO: 1627944 - DNA, 15 bp, Homo sapiens
tccttcaataaaatt

SEQ ID NO: 1627945 - DNA, 15 bp, Homo sapiens
ccttcaataaaattc

SEQ ID NO: 1627946 - DNA, 15 bp, Homo sapiens
cttcaataaaattca

SEQ ID NO: 1627947 - DNA, 15 bp, Homo sapiens
ttcaataaaattcaa

SEQ ID NO: 1627948 - DNA, 15 bp, Homo sapiens
tcaataaaattcaac

SEQ ID NO: 1627949 - DNA, 15 bp, Homo sapiens
caataaaattcaaca

SEQ ID NO: 1627950 - DNA, 15 bp, Homo sapiens
aataaaattcaacag

SEQ ID NO: 1627951 - DNA, 15 bp, Homo sapiens
ataaaattcaacagc

SEQ ID NO: 1627952 - DNA, 15 bp, Homo sapiens
taaaattcaacagcc

SEQ ID NO: 1627953 - DNA, 15 bp, Homo sapiens
aaaattcaacagccc

SEQ ID NO: 1627954 - DNA, 15 bp, Homo sapiens
aaattcaacagccct

SEQ ID NO: 1627955 - DNA, 15 bp, Homo sapiens
aattcaacagccctt

SEQ ID NO: 1627956 - DNA, 15 bp, Homo sapiens
attcaacagcccttc

SEQ ID NO: 1627957 - DNA, 15 bp, Homo sapiens
ttcaacagcccttca

SEQ ID NO: 1627958 - DNA, 15 bp, Homo sapiens
tcaacagcccttcat

SEQ ID NO: 1627959 - DNA, 15 bp, Homo sapiens
caacagcccttcatg

SEQ ID NO: 1627960 - DNA, 15 bp, Homo sapiens
aacagcccttcatgc

SEQ ID NO: 1627961 - DNA, 15 bp, Homo sapiens
acagcccttcatgct

SEQ ID NO: 1627962 - DNA, 15 bp, Homo sapiens
cagcccttcatgcta

SEQ ID NO: 1627963 - DNA, 15 bp, Homo sapiens
agcccttcatgctaa

SEQ ID NO: 1627964 - DNA, 15 bp, Homo sapiens
gcccttcatgctaaa

SEQ ID NO: 1627965 - DNA, 15 bp, Homo sapiens
cccttcatgctaaaa

SEQ ID NO: 1627966 - DNA, 15 bp, Homo sapiens
ccttcatgctaaaaa

SEQ ID NO: 1627967 - DNA, 15 bp, Homo sapiens
cttcatgctaaaaac

SEQ ID NO: 1627968 - DNA, 15 bp, Homo sapiens
ttcatgctaaaaact

SEQ ID NO: 1627969 - DNA, 15 bp, Homo sapiens
tcatgctaaaaactc

SEQ ID NO: 1627970 - DNA, 15 bp, Homo sapiens
catgctaaaaactct

SEQ ID NO: 1627971 - DNA, 15 bp, Homo sapiens
atgctaaaaactctc

SEQ ID NO: 1627972 - DNA, 15 bp, Homo sapiens
tgctaaaaactctca

SEQ ID NO: 1627973 - DNA, 15 bp, Homo sapiens
gctaaaaactctcaa

SEQ ID NO: 1627974 - DNA, 15 bp, Homo sapiens
ctaaaaactctcaat

SEQ ID NO: 1627975 - DNA, 15 bp, Homo sapiens
taaaaactctcaata

SEQ ID NO: 1627976 - DNA, 15 bp, Homo sapiens
aaaaactctcaataa

SEQ ID NO: 1627977 - DNA, 15 bp, Homo sapiens
aaaactctcaataaa

SEQ ID NO: 1627978 - DNA, 15 bp, Homo sapiens
aaactctcaataaac

SEQ ID NO: 1627979 - DNA, 15 bp, Homo sapiens
aactctcaataaact

SEQ ID NO: 1627980 - DNA, 15 bp, Homo sapiens
actctcaataaacta

SEQ ID NO: 1627981 - DNA, 15 bp, Homo sapiens
ctctcaataaactag

SEQ ID NO: 1627982 - DNA, 15 bp, Homo sapiens
tctcaataaactagg

SEQ ID NO: 1627983 - DNA, 15 bp, Homo sapiens
ctcaataaactaggt

SEQ ID NO: 1627984 - DNA, 15 bp, Homo sapiens
tcaataaactaggta

SEQ ID NO: 1627985 - DNA, 15 bp, Homo sapiens
caataaactaggtat

SEQ ID NO: 1627986 - DNA, 15 bp, Homo sapiens
aataaactaggtatc

SEQ ID NO: 1627987 - DNA, 15 bp, Homo sapiens
ataaactaggtatca

SEQ ID NO: 1627988 - DNA, 15 bp, Homo sapiens
taaactaggtatcag

SEQ ID NO: 1627989 - DNA, 15 bp, Homo sapiens
aaactaggtatcagt

SEQ ID NO: 1627990 - DNA, 15 bp, Homo sapiens
aactaggtatcagtg

SEQ ID NO: 1627991 - DNA, 15 bp, Homo sapiens
actaggtatcagtgg

SEQ ID NO: 1627992 - DNA, 15 bp, Homo sapiens
ctaggtatcagtgga

SEQ ID NO: 1627993 - DNA, 15 bp, Homo sapiens
taggtatcagtggaa

SEQ ID NO: 1627994 - DNA, 15 bp, Homo sapiens
aggtatcagtggaac

SEQ ID NO: 1627995 - DNA, 15 bp, Homo sapiens
ggtatcagtggaaca

SEQ ID NO: 1627996 - DNA, 15 bp, Homo sapiens
gtatcagtggaacat

SEQ ID NO: 1627997 - DNA, 15 bp, Homo sapiens
tatcagtggaacata

SEQ ID NO: 1627998 - DNA, 15 bp, Homo sapiens
atcagtggaacatat

SEQ ID NO: 1627999 - DNA, 15 bp, Homo sapiens
tcagtggaacatatc

SEQ ID NO: 1628000 - DNA, 15 bp, Homo sapiens
cagtggaacatatct

SEQ ID NO: 1628001 - DNA, 15 bp, Homo sapiens
agtggaacatatctc

SEQ ID NO: 1628002 - DNA, 15 bp, Homo sapiens
gtggaacatatctca

SEQ ID NO: 1628003 - DNA, 15 bp, Homo sapiens
tggaacatatctcaa

SEQ ID NO: 1628004 - DNA, 15 bp, Homo sapiens
ggaacatatctcaaa

SEQ ID NO: 1628005 - DNA, 15 bp, Homo sapiens
gaacatatctcaaaa

SEQ ID NO: 1628006 - DNA, 15 bp, Homo sapiens
aacatatctcaaaat

SEQ ID NO: 1628007 - DNA, 15 bp, Homo sapiens
acatatctcaaaata

SEQ ID NO: 1628008 - DNA, 15 bp, Homo sapiens
catatctcaaaatag

SEQ ID NO: 1628009 - DNA, 15 bp, Homo sapiens
atatctcaaaatagt

SEQ ID NO: 1628010 - DNA, 15 bp, Homo sapiens
tatctcaaaatagta

SEQ ID NO: 1628011 - DNA, 15 bp, Homo sapiens
atctcaaaatagtaa

SEQ ID NO: 1628012 - DNA, 15 bp, Homo sapiens
tctcaaaatagtaag

SEQ ID NO: 1628013 - DNA, 15 bp, Homo sapiens
ctcaaaatagtaagt

SEQ ID NO: 1628014 - DNA, 15 bp, Homo sapiens
tcaaaatagtaagtg

SEQ ID NO: 1628015 - DNA, 15 bp, Homo sapiens
caaaatagtaagtgc

SEQ ID NO: 1628016 - DNA, 15 bp, Homo sapiens
aaaatagtaagtgct

SEQ ID NO: 1628017 - DNA, 15 bp, Homo sapiens
aaatagtaagtgcta

SEQ ID NO: 1628018 - DNA, 15 bp, Homo sapiens
aatagtaagtgctaa

SEQ ID NO: 1628019 - DNA, 15 bp, Homo sapiens
atagtaagtgctaat

SEQ ID NO: 1628020 - DNA, 15 bp, Homo sapiens
tagtaagtgctaatt

SEQ ID NO: 1628021 - DNA, 15 bp, Homo sapiens
agtaagtgctaatta

SEQ ID NO: 1628022 - DNA, 15 bp, Homo sapiens
gtaagtgctaattat

SEQ ID NO: 1628023 - DNA, 15 bp, Homo sapiens
taagtgctaattatg

SEQ ID NO: 1628024 - DNA, 15 bp, Homo sapiens
aagtgctaattatga

SEQ ID NO: 1628025 - DNA, 15 bp, Homo sapiens
agtgctaattatgac

SEQ ID NO: 1628026 - DNA, 15 bp, Homo sapiens
gtgctaattatgaca

SEQ ID NO: 1628027 - DNA, 15 bp, Homo sapiens
tgctaattatgacaa

SEQ ID NO: 1628028 - DNA, 15 bp, Homo sapiens
gctaattatgacaaa

SEQ ID NO: 1628029 - DNA, 15 bp, Homo sapiens
ctaattatgacaaac

SEQ ID NO: 1628030 - DNA, 15 bp, Homo sapiens
taattatgacaaacc

SEQ ID NO: 1628031 - DNA, 15 bp, Homo sapiens
aattatgacaaaccc

SEQ ID NO: 1628032 - DNA, 15 bp, Homo sapiens
attatgacaaaccca

SEQ ID NO: 1628033 - DNA, 15 bp, Homo sapiens
ttatgacaaacccac

SEQ ID NO: 1628034 - DNA, 15 bp, Homo sapiens
tatgacaaacccaca

SEQ ID NO: 1628035 - DNA, 15 bp, Homo sapiens
atgacaaacccacag

SEQ ID NO: 1628036 - DNA, 15 bp, Homo sapiens
tgacaaacccacagc

SEQ ID NO: 1628037 - DNA, 15 bp, Homo sapiens
gacaaacccacagcc

SEQ ID NO: 1628038 - DNA, 15 bp, Homo sapiens
acaaacccacagcca

SEQ ID NO: 1628039 - DNA, 15 bp, Homo sapiens
caaacccacagccaa

SEQ ID NO: 1628040 - DNA, 15 bp, Homo sapiens
aaacccacagccaat

SEQ ID NO: 1628041 - DNA, 15 bp, Homo sapiens
aacccacagccaata

SEQ ID NO: 1628042 - DNA, 15 bp, Homo sapiens
acccacagccaatat

SEQ ID NO: 1628043 - DNA, 15 bp, Homo sapiens
cccacagccaatatc

SEQ ID NO: 1628044 - DNA, 15 bp, Homo sapiens
ccacagccaatatca

SEQ ID NO: 1628045 - DNA, 15 bp, Homo sapiens
cacagccaatatcat

SEQ ID NO: 1628046 - DNA, 15 bp, Homo sapiens
acagccaatatcata

SEQ ID NO: 1628047 - DNA, 15 bp, Homo sapiens
cagccaatatcatac

SEQ ID NO: 1628048 - DNA, 15 bp, Homo sapiens
agccaatatcatact

SEQ ID NO: 1628049 - DNA, 15 bp, Homo sapiens
gccaatatcatactg

SEQ ID NO: 1628050 - DNA, 15 bp, Homo sapiens
ccaatatcatactga

SEQ ID NO: 1628051 - DNA, 15 bp, Homo sapiens
caatatcatactgaa

SEQ ID NO: 1628052 - DNA, 15 bp, Homo sapiens
aatatcatactgaat

SEQ ID NO: 1628053 - DNA, 15 bp, Homo sapiens
atatcatactgaatg

SEQ ID NO: 1628054 - DNA, 15 bp, Homo sapiens
tatcatactgaatgg

SEQ ID NO: 1628055 - DNA, 15 bp, Homo sapiens
atcatactgaatggg

SEQ ID NO: 1628056 - DNA, 15 bp, Homo sapiens
tcatactgaatgggc

SEQ ID NO: 1628057 - DNA, 15 bp, Homo sapiens
catactgaatgggca

SEQ ID NO: 1628058 - DNA, 15 bp, Homo sapiens
atactgaatgggcaa

SEQ ID NO: 1628059 - DNA, 15 bp, Homo sapiens
tactgaatgggcaaa

SEQ ID NO: 1628060 - DNA, 15 bp, Homo sapiens
actgaatgggcaaaa

SEQ ID NO: 1628061 - DNA, 15 bp, Homo sapiens
ctgaatgggcaaaag

SEQ ID NO: 1628062 - DNA, 15 bp, Homo sapiens
tgaatgggcaaaagc

SEQ ID NO: 1628063 - DNA, 15 bp, Homo sapiens
gaatgggcaaaagct

SEQ ID NO: 1628064 - DNA, 15 bp, Homo sapiens
aatgggcaaaagctg

SEQ ID NO: 1628065 - DNA, 15 bp, Homo sapiens
atgggcaaaagctgg

SEQ ID NO: 1628066 - DNA, 15 bp, Homo sapiens
tgggcaaaagctgga

SEQ ID NO: 1628067 - DNA, 15 bp, Homo sapiens
gggcaaaagctggaa

SEQ ID NO: 1628068 - DNA, 15 bp, Homo sapiens
ggcaaaagctggaag

SEQ ID NO: 1628069 - DNA, 15 bp, Homo sapiens
gcaaaagctggaagc

SEQ ID NO: 1628070 - DNA, 15 bp, Homo sapiens
caaaagctggaagca

SEQ ID NO: 1628071 - DNA, 15 bp, Homo sapiens
aaaagctggaagcat

SEQ ID NO: 1628072 - DNA, 15 bp, Homo sapiens
aaagctggaagcatt

SEQ ID NO: 1628073 - DNA, 15 bp, Homo sapiens
aagctggaagcattc

SEQ ID NO: 1628074 - DNA, 15 bp, Homo sapiens
agctggaagcattcc

SEQ ID NO: 1628075 - DNA, 15 bp, Homo sapiens
gctggaagcattccc

SEQ ID NO: 1628076 - DNA, 15 bp, Homo sapiens
ctggaagcattccct

SEQ ID NO: 1628077 - DNA, 15 bp, Homo sapiens
tggaagcattccctc

SEQ ID NO: 1628078 - DNA, 15 bp, Homo sapiens
ggaagcattccctct

SEQ ID NO: 1628079 - DNA, 15 bp, Homo sapiens
gaagcattccctctg

SEQ ID NO: 1628080 - DNA, 15 bp, Homo sapiens
aagcattccctctga

SEQ ID NO: 1628081 - DNA, 15 bp, Homo sapiens
agcattccctctgaa

SEQ ID NO: 1628082 - DNA, 15 bp, Homo sapiens
gcattccctctgaaa

SEQ ID NO: 1628083 - DNA, 15 bp, Homo sapiens
cattccctctgaaaa

SEQ ID NO: 1628084 - DNA, 15 bp, Homo sapiens
attccctctgaaaac

SEQ ID NO: 1628085 - DNA, 15 bp, Homo sapiens
ttccctctgaaaacc

SEQ ID NO: 1628086 - DNA, 15 bp, Homo sapiens
tccctctgaaaacca

SEQ ID NO: 1628087 - DNA, 15 bp, Homo sapiens
ccctctgaaaaccag

SEQ ID NO: 1628088 - DNA, 15 bp, Homo sapiens
cctctgaaaaccagc

SEQ ID NO: 1628089 - DNA, 15 bp, Homo sapiens
ctctgaaaaccagca

SEQ ID NO: 1628090 - DNA, 15 bp, Homo sapiens
tctgaaaaccagcac

SEQ ID NO: 1628091 - DNA, 15 bp, Homo sapiens
ctgaaaaccagcaca

SEQ ID NO: 1628092 - DNA, 15 bp, Homo sapiens
tgaaaaccagcacaa

SEQ ID NO: 1628093 - DNA, 15 bp, Homo sapiens
gaaaaccagcacaag

SEQ ID NO: 1628094 - DNA, 15 bp, Homo sapiens
aaaaccagcacaaga

SEQ ID NO: 1628095 - DNA, 15 bp, Homo sapiens
aaaccagcacaagac

SEQ ID NO: 1628096 - DNA, 15 bp, Homo sapiens
aaccagcacaagaca

SEQ ID NO: 1628097 - DNA, 15 bp, Homo sapiens
accagcacaagacaa

SEQ ID NO: 1628098 - DNA, 15 bp, Homo sapiens
ccagcacaagacaaa

SEQ ID NO: 1628099 - DNA, 15 bp, Homo sapiens
cagcacaagacaaat

SEQ ID NO: 1628100 - DNA, 15 bp, Homo sapiens
agcacaagacaaata

SEQ ID NO: 1628101 - DNA, 15 bp, Homo sapiens
gcacaagacaaatat

SEQ ID NO: 1628102 - DNA, 15 bp, Homo sapiens
cacaagacaaatatg

SEQ ID NO: 1628103 - DNA, 15 bp, Homo sapiens
acaagacaaatatgc

SEQ ID NO: 1628104 - DNA, 15 bp, Homo sapiens
caagacaaatatgcc

SEQ ID NO: 1628105 - DNA, 15 bp, Homo sapiens
aagacaaatatgccc

SEQ ID NO: 1628106 - DNA, 15 bp, Homo sapiens
agacaaatatgccct

SEQ ID NO: 1628107 - DNA, 15 bp, Homo sapiens
gacaaatatgccctc

SEQ ID NO: 1628108 - DNA, 15 bp, Homo sapiens
acaaatatgccctct

SEQ ID NO: 1628109 - DNA, 15 bp, Homo sapiens
caaatatgccctctc

SEQ ID NO: 1628110 - DNA, 15 bp, Homo sapiens
aaatatgccctctct

SEQ ID NO: 1628111 - DNA, 15 bp, Homo sapiens
aatatgccctctctc

SEQ ID NO: 1628112 - DNA, 15 bp, Homo sapiens
atatgccctctctca

SEQ ID NO: 1628113 - DNA, 15 bp, Homo sapiens
tatgccctctctcag

SEQ ID NO: 1628114 - DNA, 15 bp, Homo sapiens
atgccctctctcagc

SEQ ID NO: 1628115 - DNA, 15 bp, Homo sapiens
tgccctctctcagca

SEQ ID NO: 1628116 - DNA, 15 bp, Homo sapiens
gccctctctcagcac

SEQ ID NO: 1628117 - DNA, 15 bp, Homo sapiens
ccctctctcagcact

SEQ ID NO: 1628118 - DNA, 15 bp, Homo sapiens
cctctctcagcactc

SEQ ID NO: 1628119 - DNA, 15 bp, Homo sapiens
ctctctcagcactcc

SEQ ID NO: 1628120 - DNA, 15 bp, Homo sapiens
tctctcagcactcct

SEQ ID NO: 1628121 - DNA, 15 bp, Homo sapiens
ctctcagcactccta

SEQ ID NO: 1628122 - DNA, 15 bp, Homo sapiens
tctcagcactcctat

SEQ ID NO: 1628123 - DNA, 15 bp, Homo sapiens
ctcagcactcctatc

SEQ ID NO: 1628124 - DNA, 15 bp, Homo sapiens
tcagcactcctatcc

SEQ ID NO: 1628125 - DNA, 15 bp, Homo sapiens
cagcactcctatcca

SEQ ID NO: 1628126 - DNA, 15 bp, Homo sapiens
agcactcctatccaa

SEQ ID NO: 1628127 - DNA, 15 bp, Homo sapiens
gcactcctatccaac

SEQ ID NO: 1628128 - DNA, 15 bp, Homo sapiens
cactcctatccaaca

SEQ ID NO: 1628129 - DNA, 15 bp, Homo sapiens
actcctatccaacac

SEQ ID NO: 1628130 - DNA, 15 bp, Homo sapiens
ctcctatccaacaca

SEQ ID NO: 1628131 - DNA, 15 bp, Homo sapiens
tcctatccaacacat

SEQ ID NO: 1628132 - DNA, 15 bp, Homo sapiens
cctatccaacacatt

SEQ ID NO: 1628133 - DNA, 15 bp, Homo sapiens
ctatccaacacatta

SEQ ID NO: 1628134 - DNA, 15 bp, Homo sapiens
tatccaacacattat

SEQ ID NO: 1628135 - DNA, 15 bp, Homo sapiens
atccaacacattatt

SEQ ID NO: 1628136 - DNA, 15 bp, Homo sapiens
tccaacacattattg

SEQ ID NO: 1628137 - DNA, 15 bp, Homo sapiens
ccaacacattattgg

SEQ ID NO: 1628138 - DNA, 15 bp, Homo sapiens
caacacattattgga

SEQ ID NO: 1628139 - DNA, 15 bp, Homo sapiens
aacacattattggac

SEQ ID NO: 1628140 - DNA, 15 bp, Homo sapiens
acacattattggaca

SEQ ID NO: 1628141 - DNA, 15 bp, Homo sapiens
cacattattggacat

SEQ ID NO: 1628142 - DNA, 15 bp, Homo sapiens
acattattggacatt

SEQ ID NO: 1628143 - DNA, 15 bp, Homo sapiens
cattattggacattc

SEQ ID NO: 1628144 - DNA, 15 bp, Homo sapiens
attattggacattct

SEQ ID NO: 1628145 - DNA, 15 bp, Homo sapiens
ttattggacattctg

SEQ ID NO: 1628146 - DNA, 15 bp, Homo sapiens
tattggacattctgg

SEQ ID NO: 1628147 - DNA, 15 bp, Homo sapiens
attggacattctggc

SEQ ID NO: 1628148 - DNA, 15 bp, Homo sapiens
ttggacattctggcc

SEQ ID NO: 1628149 - DNA, 15 bp, Homo sapiens
tggacattctggcca

SEQ ID NO: 1628150 - DNA, 15 bp, Homo sapiens
ggacattctggccag

SEQ ID NO: 1628151 - DNA, 15 bp, Homo sapiens
gacattctggccagg

SEQ ID NO: 1628152 - DNA, 15 bp, Homo sapiens
acattctggccaggg

SEQ ID NO: 1628153 - DNA, 15 bp, Homo sapiens
cattctggccagggc

SEQ ID NO: 1628154 - DNA, 15 bp, Homo sapiens
attctggccagggca

SEQ ID NO: 1628155 - DNA, 15 bp, Homo sapiens
ttctggccagggcaa

SEQ ID NO: 1628156 - DNA, 15 bp, Homo sapiens
tctggccagggcaat

SEQ ID NO: 1628157 - DNA, 15 bp, Homo sapiens
ctggccagggcaatc

SEQ ID NO: 1628158 - DNA, 15 bp, Homo sapiens
tggccagggcaatca

SEQ ID NO: 1628159 - DNA, 15 bp, Homo sapiens
ggccagggcaatcaa

SEQ ID NO: 1628160 - DNA, 15 bp, Homo sapiens
gccagggcaatcaag

SEQ ID NO: 1628161 - DNA, 15 bp, Homo sapiens
ccagggcaatcaagc

SEQ ID NO: 1628162 - DNA, 15 bp, Homo sapiens
cagggcaatcaagca

SEQ ID NO: 1628163 - DNA, 15 bp, Homo sapiens
agggcaatcaagcaa

SEQ ID NO: 1628164 - DNA, 15 bp, Homo sapiens
gggcaatcaagcaag

SEQ ID NO: 1628165 - DNA, 15 bp, Homo sapiens
ggcaatcaagcaaga

SEQ ID NO: 1628166 - DNA, 15 bp, Homo sapiens
gcaatcaagcaagag

SEQ ID NO: 1628167 - DNA, 15 bp, Homo sapiens
caatcaagcaagaga

SEQ ID NO: 1628168 - DNA, 15 bp, Homo sapiens
aatcaagcaagagaa

SEQ ID NO: 1628169 - DNA, 15 bp, Homo sapiens
atcaagcaagagaaa

SEQ ID NO: 1628170 - DNA, 15 bp, Homo sapiens
tcaagcaagagaaag

SEQ ID NO: 1628171 - DNA, 15 bp, Homo sapiens
caagcaagagaaaga

SEQ ID NO: 1628172 - DNA, 15 bp, Homo sapiens
aagcaagagaaagaa

SEQ ID NO: 1628173 - DNA, 15 bp, Homo sapiens
agcaagagaaagaaa

SEQ ID NO: 1628174 - DNA, 15 bp, Homo sapiens
gcaagagaaagaaac

SEQ ID NO: 1628175 - DNA, 15 bp, Homo sapiens
caagagaaagaaaca

SEQ ID NO: 1628176 - DNA, 15 bp, Homo sapiens
aagagaaagaaacaa

SEQ ID NO: 1628177 - DNA, 15 bp, Homo sapiens
agagaaagaaacaaa

SEQ ID NO: 1628178 - DNA, 15 bp, Homo sapiens
gagaaagaaacaaag

SEQ ID NO: 1628179 - DNA, 15 bp, Homo sapiens
agaaagaaacaaagc

SEQ ID NO: 1628180 - DNA, 15 bp, Homo sapiens
gaaagaaacaaagca

SEQ ID NO: 1628181 - DNA, 15 bp, Homo sapiens
aaagaaacaaagcat

SEQ ID NO: 1628182 - DNA, 15 bp, Homo sapiens
aagaaacaaagcata

SEQ ID NO: 1628183 - DNA, 15 bp, Homo sapiens
agaaacaaagcatat

SEQ ID NO: 1628184 - DNA, 15 bp, Homo sapiens
gaaacaaagcatatt

SEQ ID NO: 1628185 - DNA, 15 bp, Homo sapiens
aaacaaagcatattc

SEQ ID NO: 1628186 - DNA, 15 bp, Homo sapiens
aacaaagcatattca

SEQ ID NO: 1628187 - DNA, 15 bp, Homo sapiens
acaaagcatattcaa

SEQ ID NO: 1628188 - DNA, 15 bp, Homo sapiens
caaagcatattcaaa

SEQ ID NO: 1628189 - DNA, 15 bp, Homo sapiens
aaagcatattcaaat

SEQ ID NO: 1628190 - DNA, 15 bp, Homo sapiens
aagcatattcaaatg

SEQ ID NO: 1628191 - DNA, 15 bp, Homo sapiens
agcatattcaaatgg

SEQ ID NO: 1628192 - DNA, 15 bp, Homo sapiens
gcatattcaaatggg

SEQ ID NO: 1628193 - DNA, 15 bp, Homo sapiens
catattcaaatggga

SEQ ID NO: 1628194 - DNA, 15 bp, Homo sapiens
atattcaaatgggaa

SEQ ID NO: 1628195 - DNA, 15 bp, Homo sapiens
tattcaaatgggaag

SEQ ID NO: 1628196 - DNA, 15 bp, Homo sapiens
attcaaatgggaaga

SEQ ID NO: 1628197 - DNA, 15 bp, Homo sapiens
ttcaaatgggaagag

SEQ ID NO: 1628198 - DNA, 15 bp, Homo sapiens
tcaaatgggaagaga

SEQ ID NO: 1628199 - DNA, 15 bp, Homo sapiens
caaatgggaagagag

SEQ ID NO: 1628200 - DNA, 15 bp, Homo sapiens
aaatgggaagagagg

SEQ ID NO: 1628201 - DNA, 15 bp, Homo sapiens
aatgggaagagagga

SEQ ID NO: 1628202 - DNA, 15 bp, Homo sapiens
atgggaagagaggaa

SEQ ID NO: 1628203 - DNA, 15 bp, Homo sapiens
tgggaagagaggaag

SEQ ID NO: 1628204 - DNA, 15 bp, Homo sapiens
gggaagagaggaagt

SEQ ID NO: 1628205 - DNA, 15 bp, Homo sapiens
ggaagagaggaagtc

SEQ ID NO: 1628206 - DNA, 15 bp, Homo sapiens
gaagagaggaagtca

SEQ ID NO: 1628207 - DNA, 15 bp, Homo sapiens
aagagaggaagtcaa

SEQ ID NO: 1628208 - DNA, 15 bp, Homo sapiens
agagaggaagtcaaa

SEQ ID NO: 1628209 - DNA, 15 bp, Homo sapiens
gagaggaagtcaaat

SEQ ID NO: 1628210 - DNA, 15 bp, Homo sapiens
agaggaagtcaaatt

SEQ ID NO: 1628211 - DNA, 15 bp, Homo sapiens
gaggaagtcaaattg

SEQ ID NO: 1628212 - DNA, 15 bp, Homo sapiens
aggaagtcaaattgt

SEQ ID NO: 1628213 - DNA, 15 bp, Homo sapiens
ggaagtcaaattgtt

SEQ ID NO: 1628214 - DNA, 15 bp, Homo sapiens
gaagtcaaattgttt

SEQ ID NO: 1628215 - DNA, 15 bp, Homo sapiens
aagtcaaattgtttg

SEQ ID NO: 1628216 - DNA, 15 bp, Homo sapiens
agtcaaattgtttgt

SEQ ID NO: 1628217 - DNA, 15 bp, Homo sapiens
gtcaaattgtttgta

SEQ ID NO: 1628218 - DNA, 15 bp, Homo sapiens
tcaaattgtttgtag

SEQ ID NO: 1628219 - DNA, 15 bp, Homo sapiens
caaattgtttgtaga

SEQ ID NO: 1628220 - DNA, 15 bp, Homo sapiens
aaattgtttgtagat

SEQ ID NO: 1628221 - DNA, 15 bp, Homo sapiens
aattgtttgtagatg

SEQ ID NO: 1628222 - DNA, 15 bp, Homo sapiens
attgtttgtagatga

SEQ ID NO: 1628223 - DNA, 15 bp, Homo sapiens
ttgtttgtagatgac

SEQ ID NO: 1628224 - DNA, 15 bp, Homo sapiens
tgtttgtagatgaca

SEQ ID NO: 1628225 - DNA, 15 bp, Homo sapiens
gtttgtagatgacat

SEQ ID NO: 1628226 - DNA, 15 bp, Homo sapiens
tttgtagatgacatg

SEQ ID NO: 1628227 - DNA, 15 bp, Homo sapiens
ttgtagatgacatga

SEQ ID NO: 1628228 - DNA, 15 bp, Homo sapiens
tgtagatgacatgat

SEQ ID NO: 1628229 - DNA, 15 bp, Homo sapiens
gtagatgacatgatt

SEQ ID NO: 1628230 - DNA, 15 bp, Homo sapiens
tagatgacatgattg

SEQ ID NO: 1628231 - DNA, 15 bp, Homo sapiens
agatgacatgattgt

SEQ ID NO: 1628232 - DNA, 15 bp, Homo sapiens
gatgacatgattgtg

SEQ ID NO: 1628233 - DNA, 15 bp, Homo sapiens
atgacatgattgtgt

SEQ ID NO: 1628234 - DNA, 15 bp, Homo sapiens
tgacatgattgtgta

SEQ ID NO: 1628235 - DNA, 15 bp, Homo sapiens
gacatgattgtgtat

SEQ ID NO: 1628236 - DNA, 15 bp, Homo sapiens
acatgattgtgtatt

SEQ ID NO: 1628237 - DNA, 15 bp, Homo sapiens
catgattgtgtatta

SEQ ID NO: 1628238 - DNA, 15 bp, Homo sapiens
atgattgtgtattaa

SEQ ID NO: 1628239 - DNA, 15 bp, Homo sapiens
tgattgtgtattaag

SEQ ID NO: 1628240 - DNA, 15 bp, Homo sapiens
gattgtgtattaaga

SEQ ID NO: 1628241 - DNA, 15 bp, Homo sapiens
attgtgtattaagaa

SEQ ID NO: 1628242 - DNA, 15 bp, Homo sapiens
ttgtgtattaagaaa

SEQ ID NO: 1628243 - DNA, 15 bp, Homo sapiens
tgtgtattaagaaaa

SEQ ID NO: 1628244 - DNA, 15 bp, Homo sapiens
gtgtattaagaaaac

SEQ ID NO: 1628245 - DNA, 15 bp, Homo sapiens
tgtattaagaaaacc

SEQ ID NO: 1628246 - DNA, 15 bp, Homo sapiens
gtattaagaaaaccc

SEQ ID NO: 1628247 - DNA, 15 bp, Homo sapiens
tattaagaaaacccc

SEQ ID NO: 1628248 - DNA, 15 bp, Homo sapiens
attaagaaaacccca

SEQ ID NO: 1628249 - DNA, 15 bp, Homo sapiens
ttaagaaaaccccat

SEQ ID NO: 1628250 - DNA, 15 bp, Homo sapiens
taagaaaaccccatc

SEQ ID NO: 1628251 - DNA, 15 bp, Homo sapiens
aagaaaaccccatca

SEQ ID NO: 1628252 - DNA, 15 bp, Homo sapiens
agaaaaccccatcat

SEQ ID NO: 1628253 - DNA, 15 bp, Homo sapiens
gaaaaccccatcatc

SEQ ID NO: 1628254 - DNA, 15 bp, Homo sapiens
aaaaccccatcatct

SEQ ID NO: 1628255 - DNA, 15 bp, Homo sapiens
aaaccccatcatctc

SEQ ID NO: 1628256 - DNA, 15 bp, Homo sapiens
aaccccatcatctca

SEQ ID NO: 1628257 - DNA, 15 bp, Homo sapiens
accccatcatctcag

SEQ ID NO: 1628258 - DNA, 15 bp, Homo sapiens
ccccatcatctcagc

SEQ ID NO: 1628259 - DNA, 15 bp, Homo sapiens
cccatcatctcagcc

SEQ ID NO: 1628260 - DNA, 15 bp, Homo sapiens
ccatcatctcagccc

SEQ ID NO: 1628261 - DNA, 15 bp, Homo sapiens
catcatctcagcccc

SEQ ID NO: 1628262 - DNA, 15 bp, Homo sapiens
atcatctcagcccca

SEQ ID NO: 1628263 - DNA, 15 bp, Homo sapiens
tcatctcagccccaa

SEQ ID NO: 1628264 - DNA, 15 bp, Homo sapiens
catctcagccccaaa

SEQ ID NO: 1628265 - DNA, 15 bp, Homo sapiens
atctcagccccaaat

SEQ ID NO: 1628266 - DNA, 15 bp, Homo sapiens
tctcagccccaaatc

SEQ ID NO: 1628267 - DNA, 15 bp, Homo sapiens
ctcagccccaaatct

SEQ ID NO: 1628268 - DNA, 15 bp, Homo sapiens
tcagccccaaatctc

SEQ ID NO: 1628269 - DNA, 15 bp, Homo sapiens
cagccccaaatctcc

SEQ ID NO: 1628270 - DNA, 15 bp, Homo sapiens
agccccaaatctcct

SEQ ID NO: 1628271 - DNA, 15 bp, Homo sapiens
gccccaaatctcctt

SEQ ID NO: 1628272 - DNA, 15 bp, Homo sapiens
ccccaaatctcctta

SEQ ID NO: 1628273 - DNA, 15 bp, Homo sapiens
cccaaatctccttaa

SEQ ID NO: 1628274 - DNA, 15 bp, Homo sapiens
ccaaatctccttaag

SEQ ID NO: 1628275 - DNA, 15 bp, Homo sapiens
caaatctccttaagc

SEQ ID NO: 1628276 - DNA, 15 bp, Homo sapiens
aaatctccttaagct

SEQ ID NO: 1628277 - DNA, 15 bp, Homo sapiens
aatctccttaagctg

SEQ ID NO: 1628278 - DNA, 15 bp, Homo sapiens
atctccttaagctga

SEQ ID NO: 1628279 - DNA, 15 bp, Homo sapiens
tctccttaagctgat

SEQ ID NO: 1628280 - DNA, 15 bp, Homo sapiens
ctccttaagctgata

SEQ ID NO: 1628281 - DNA, 15 bp, Homo sapiens
tccttaagctgataa

SEQ ID NO: 1628282 - DNA, 15 bp, Homo sapiens
ccttaagctgataag

SEQ ID NO: 1628283 - DNA, 15 bp, Homo sapiens
cttaagctgataagc

SEQ ID NO: 1628284 - DNA, 15 bp, Homo sapiens
ttaagctgataagca

SEQ ID NO: 1628285 - DNA, 15 bp, Homo sapiens
taagctgataagcaa

SEQ ID NO: 1628286 - DNA, 15 bp, Homo sapiens
aagctgataagcaac

SEQ ID NO: 1628287 - DNA, 15 bp, Homo sapiens
agctgataagcaact

SEQ ID NO: 1628288 - DNA, 15 bp, Homo sapiens
gctgataagcaactt

SEQ ID NO: 1628289 - DNA, 15 bp, Homo sapiens
ctgataagcaacttc

SEQ ID NO: 1628290 - DNA, 15 bp, Homo sapiens
tgataagcaacttca

SEQ ID NO: 1628291 - DNA, 15 bp, Homo sapiens
gataagcaacttcag

SEQ ID NO: 1628292 - DNA, 15 bp, Homo sapiens
ataagcaacttcagc

SEQ ID NO: 1628293 - DNA, 15 bp, Homo sapiens
taagcaacttcagca

SEQ ID NO: 1628294 - DNA, 15 bp, Homo sapiens
aagcaacttcagcaa

SEQ ID NO: 1628295 - DNA, 15 bp, Homo sapiens
agcaacttcagcaaa

SEQ ID NO: 1628296 - DNA, 15 bp, Homo sapiens
gcaacttcagcaaag

SEQ ID NO: 1628297 - DNA, 15 bp, Homo sapiens
caacttcagcaaagt

SEQ ID NO: 1628298 - DNA, 15 bp, Homo sapiens
aacttcagcaaagtc

SEQ ID NO: 1628299 - DNA, 15 bp, Homo sapiens
acttcagcaaagtct

SEQ ID NO: 1628300 - DNA, 15 bp, Homo sapiens
cttcagcaaagtctc

SEQ ID NO: 1628301 - DNA, 15 bp, Homo sapiens
ttcagcaaagtctca

SEQ ID NO: 1628302 - DNA, 15 bp, Homo sapiens
tcagcaaagtctcag

SEQ ID NO: 1628303 - DNA, 15 bp, Homo sapiens
cagcaaagtctcagg

SEQ ID NO: 1628304 - DNA, 15 bp, Homo sapiens
agcaaagtctcagga

SEQ ID NO: 1628305 - DNA, 15 bp, Homo sapiens
gcaaagtctcaggat

SEQ ID NO: 1628306 - DNA, 15 bp, Homo sapiens
caaagtctcaggata

SEQ ID NO: 1628307 - DNA, 15 bp, Homo sapiens
aaagtctcaggatac

SEQ ID NO: 1628308 - DNA, 15 bp, Homo sapiens
aagtctcaggataca

SEQ ID NO: 1628309 - DNA, 15 bp, Homo sapiens
agtctcaggatacaa

SEQ ID NO: 1628310 - DNA, 15 bp, Homo sapiens
gtctcaggatacaaa

SEQ ID NO: 1628311 - DNA, 15 bp, Homo sapiens
tctcaggatacaaag

SEQ ID NO: 1628312 - DNA, 15 bp, Homo sapiens
ctcaggatacaaagt

SEQ ID NO: 1628313 - DNA, 15 bp, Homo sapiens
tcaggatacaaagtc

SEQ ID NO: 1628314 - DNA, 15 bp, Homo sapiens
caggatacaaagtca

SEQ ID NO: 1628315 - DNA, 15 bp, Homo sapiens
aggatacaaagtcaa

SEQ ID NO: 1628316 - DNA, 15 bp, Homo sapiens
ggatacaaagtcaat

SEQ ID NO: 1628317 - DNA, 15 bp, Homo sapiens
gatacaaagtcaatg

SEQ ID NO: 1628318 - DNA, 15 bp, Homo sapiens
atacaaagtcaatgt

SEQ ID NO: 1628319 - DNA, 15 bp, Homo sapiens
tacaaagtcaatgtg

SEQ ID NO: 1628320 - DNA, 15 bp, Homo sapiens
acaaagtcaatgtgc

SEQ ID NO: 1628321 - DNA, 15 bp, Homo sapiens
caaagtcaatgtgca

SEQ ID NO: 1628322 - DNA, 15 bp, Homo sapiens
aaagtcaatgtgcaa

SEQ ID NO: 1628323 - DNA, 15 bp, Homo sapiens
aagtcaatgtgcaaa

SEQ ID NO: 1628324 - DNA, 15 bp, Homo sapiens
agtcaatgtgcaaaa

SEQ ID NO: 1628325 - DNA, 15 bp, Homo sapiens
gtcaatgtgcaaaat

SEQ ID NO: 1628326 - DNA, 15 bp, Homo sapiens
tcaatgtgcaaaatt

SEQ ID NO: 1628327 - DNA, 15 bp, Homo sapiens
caatgtgcaaaattc

SEQ ID NO: 1628328 - DNA, 15 bp, Homo sapiens
aatgtgcaaaattca

SEQ ID NO: 1628329 - DNA, 15 bp, Homo sapiens
atgtgcaaaattcac

SEQ ID NO: 1628330 - DNA, 15 bp, Homo sapiens
tgtgcaaaattcaca

SEQ ID NO: 1628331 - DNA, 15 bp, Homo sapiens
gtgcaaaattcacaa

SEQ ID NO: 1628332 - DNA, 15 bp, Homo sapiens
tgcaaaattcacaag

SEQ ID NO: 1628333 - DNA, 15 bp, Homo sapiens
gcaaaattcacaagc

SEQ ID NO: 1628334 - DNA, 15 bp, Homo sapiens
caaaattcacaagca

SEQ ID NO: 1628335 - DNA, 15 bp, Homo sapiens
aaaattcacaagcat

SEQ ID NO: 1628336 - DNA, 15 bp, Homo sapiens
aaattcacaagcatt

SEQ ID NO: 1628337 - DNA, 15 bp, Homo sapiens
aattcacaagcattc

SEQ ID NO: 1628338 - DNA, 15 bp, Homo sapiens
attcacaagcattcc

SEQ ID NO: 1628339 - DNA, 15 bp, Homo sapiens
ttcacaagcattcct

SEQ ID NO: 1628340 - DNA, 15 bp, Homo sapiens
tcacaagcattccta

SEQ ID NO: 1628341 - DNA, 15 bp, Homo sapiens
cacaagcattcctat

SEQ ID NO: 1628342 - DNA, 15 bp, Homo sapiens
acaagcattcctata

SEQ ID NO: 1628343 - DNA, 15 bp, Homo sapiens
caagcattcctatac

SEQ ID NO: 1628344 - DNA, 15 bp, Homo sapiens
aagcattcctataca

SEQ ID NO: 1628345 - DNA, 15 bp, Homo sapiens
agcattcctatacac

SEQ ID NO: 1628346 - DNA, 15 bp, Homo sapiens
gcattcctatacacc

SEQ ID NO: 1628347 - DNA, 15 bp, Homo sapiens
cattcctatacacca

SEQ ID NO: 1628348 - DNA, 15 bp, Homo sapiens
attcctatacaccaa

SEQ ID NO: 1628349 - DNA, 15 bp, Homo sapiens
ttcctatacaccaat

SEQ ID NO: 1628350 - DNA, 15 bp, Homo sapiens
tcctatacaccaata

SEQ ID NO: 1628351 - DNA, 15 bp, Homo sapiens
cctatacaccaataa

SEQ ID NO: 1628352 - DNA, 15 bp, Homo sapiens
ctatacaccaataac

SEQ ID NO: 1628353 - DNA, 15 bp, Homo sapiens
tatacaccaataaca

SEQ ID NO: 1628354 - DNA, 15 bp, Homo sapiens
atacaccaataacag

SEQ ID NO: 1628355 - DNA, 15 bp, Homo sapiens
tacaccaataacaga

SEQ ID NO: 1628356 - DNA, 15 bp, Homo sapiens
acaccaataacagac

SEQ ID NO: 1628357 - DNA, 15 bp, Homo sapiens
caccaataacagaca

SEQ ID NO: 1628358 - DNA, 15 bp, Homo sapiens
accaataacagacaa

SEQ ID NO: 1628359 - DNA, 15 bp, Homo sapiens
ccaataacagacaaa

SEQ ID NO: 1628360 - DNA, 15 bp, Homo sapiens
caataacagacaaac

SEQ ID NO: 1628361 - DNA, 15 bp, Homo sapiens
aataacagacaaaca

SEQ ID NO: 1628362 - DNA, 15 bp, Homo sapiens
ataacagacaaacag

SEQ ID NO: 1628363 - DNA, 15 bp, Homo sapiens
taacagacaaacaga

SEQ ID NO: 1628364 - DNA, 15 bp, Homo sapiens
aacagacaaacagag

SEQ ID NO: 1628365 - DNA, 15 bp, Homo sapiens
acagacaaacagaga

SEQ ID NO: 1628366 - DNA, 15 bp, Homo sapiens
cagacaaacagagag

SEQ ID NO: 1628367 - DNA, 15 bp, Homo sapiens
agacaaacagagagc

SEQ ID NO: 1628368 - DNA, 15 bp, Homo sapiens
gacaaacagagagcc

SEQ ID NO: 1628369 - DNA, 15 bp, Homo sapiens
acaaacagagagcca

SEQ ID NO: 1628370 - DNA, 15 bp, Homo sapiens
caaacagagagccaa

SEQ ID NO: 1628371 - DNA, 15 bp, Homo sapiens
aaacagagagccaaa

SEQ ID NO: 1628372 - DNA, 15 bp, Homo sapiens
aacagagagccaaat

SEQ ID NO: 1628373 - DNA, 15 bp, Homo sapiens
acagagagccaaatc

SEQ ID NO: 1628374 - DNA, 15 bp, Homo sapiens
cagagagccaaatca

SEQ ID NO: 1628375 - DNA, 15 bp, Homo sapiens
agagagccaaatcat

SEQ ID NO: 1628376 - DNA, 15 bp, Homo sapiens
gagagccaaatcatg

SEQ ID NO: 1628377 - DNA, 15 bp, Homo sapiens
agagccaaatcatga

SEQ ID NO: 1628378 - DNA, 15 bp, Homo sapiens
gagccaaatcatgag

SEQ ID NO: 1628379 - DNA, 15 bp, Homo sapiens
agccaaatcatgagt

SEQ ID NO: 1628380 - DNA, 15 bp, Homo sapiens
gccaaatcatgagtg

SEQ ID NO: 1628381 - DNA, 15 bp, Homo sapiens
ccaaatcatgagtga

SEQ ID NO: 1628382 - DNA, 15 bp, Homo sapiens
caaatcatgagtgaa

SEQ ID NO: 1628383 - DNA, 15 bp, Homo sapiens
aaatcatgagtgaac

SEQ ID NO: 1628384 - DNA, 15 bp, Homo sapiens
aatcatgagtgaact

SEQ ID NO: 1628385 - DNA, 15 bp, Homo sapiens
atcatgagtgaactc

SEQ ID NO: 1628386 - DNA, 15 bp, Homo sapiens
tcatgagtgaactcc

SEQ ID NO: 1628387 - DNA, 15 bp, Homo sapiens
catgagtgaactccc

SEQ ID NO: 1628388 - DNA, 15 bp, Homo sapiens
atgagtgaactccca

SEQ ID NO: 1628389 - DNA, 15 bp, Homo sapiens
tgagtgaactcccat

SEQ ID NO: 1628390 - DNA, 15 bp, Homo sapiens
gagtgaactcccatt

SEQ ID NO: 1628391 - DNA, 15 bp, Homo sapiens
agtgaactcccatta

SEQ ID NO: 1628392 - DNA, 15 bp, Homo sapiens
gtgaactcccattag

SEQ ID NO: 1628393 - DNA, 15 bp, Homo sapiens
tgaactcccattagc

SEQ ID NO: 1628394 - DNA, 15 bp, Homo sapiens
gaactcccattagca

SEQ ID NO: 1628395 - DNA, 15 bp, Homo sapiens
aactcccattagcaa

SEQ ID NO: 1628396 - DNA, 15 bp, Homo sapiens
actcccattagcaat

SEQ ID NO: 1628397 - DNA, 15 bp, Homo sapiens
ctcccattagcaatt

SEQ ID NO: 1628398 - DNA, 15 bp, Homo sapiens
tcccattagcaattg

SEQ ID NO: 1628399 - DNA, 15 bp, Homo sapiens
cccattagcaattgc

SEQ ID NO: 1628400 - DNA, 15 bp, Homo sapiens
ccattagcaattgct

SEQ ID NO: 1628401 - DNA, 15 bp, Homo sapiens
cattagcaattgcta

SEQ ID NO: 1628402 - DNA, 15 bp, Homo sapiens
attagcaattgctac

SEQ ID NO: 1628403 - DNA, 15 bp, Homo sapiens
ttagcaattgctaca

SEQ ID NO: 1628404 - DNA, 15 bp, Homo sapiens
tagcaattgctacaa

SEQ ID NO: 1628405 - DNA, 15 bp, Homo sapiens
agcaattgctacaaa

SEQ ID NO: 1628406 - DNA, 15 bp, Homo sapiens
gcaattgctacaaag

SEQ ID NO: 1628407 - DNA, 15 bp, Homo sapiens
caattgctacaaaga

SEQ ID NO: 1628408 - DNA, 15 bp, Homo sapiens
aattgctacaaagag

SEQ ID NO: 1628409 - DNA, 15 bp, Homo sapiens
attgctacaaagaga

SEQ ID NO: 1628410 - DNA, 15 bp, Homo sapiens
ttgctacaaagagaa

SEQ ID NO: 1628411 - DNA, 15 bp, Homo sapiens
tgctacaaagagaat

SEQ ID NO: 1628412 - DNA, 15 bp, Homo sapiens
gctacaaagagaata

SEQ ID NO: 1628413 - DNA, 15 bp, Homo sapiens
ctacaaagagaataa

SEQ ID NO: 1628414 - DNA, 15 bp, Homo sapiens
tacaaagagaataaa

SEQ ID NO: 1628415 - DNA, 15 bp, Homo sapiens
acaaagagaataaaa

SEQ ID NO: 1628416 - DNA, 15 bp, Homo sapiens
caaagagaataaaat

SEQ ID NO: 1628417 - DNA, 15 bp, Homo sapiens
aaagagaataaaata

SEQ ID NO: 1628418 - DNA, 15 bp, Homo sapiens
aagagaataaaatac

SEQ ID NO: 1628419 - DNA, 15 bp, Homo sapiens
agagaataaaatacc

SEQ ID NO: 1628420 - DNA, 15 bp, Homo sapiens
gagaataaaatacct

SEQ ID NO: 1628421 - DNA, 15 bp, Homo sapiens
agaataaaataccta

SEQ ID NO: 1628422 - DNA, 15 bp, Homo sapiens
gaataaaatacctag

SEQ ID NO: 1628423 - DNA, 15 bp, Homo sapiens
aataaaatacctaga

SEQ ID NO: 1628424 - DNA, 15 bp, Homo sapiens
ataaaatacctagaa

SEQ ID NO: 1628425 - DNA, 15 bp, Homo sapiens
taaaatacctagaaa

SEQ ID NO: 1628426 - DNA, 15 bp, Homo sapiens
aaaatacctagaaat

SEQ ID NO: 1628427 - DNA, 15 bp, Homo sapiens
aaatacctagaaata

SEQ ID NO: 1628428 - DNA, 15 bp, Homo sapiens
aatacctagaaatac

SEQ ID NO: 1628429 - DNA, 15 bp, Homo sapiens
atacctagaaataca

SEQ ID NO: 1628430 - DNA, 15 bp, Homo sapiens
tacctagaaatacaa

SEQ ID NO: 1628431 - DNA, 15 bp, Homo sapiens
acctagaaatacaac

SEQ ID NO: 1628432 - DNA, 15 bp, Homo sapiens
cctagaaatacaact

SEQ ID NO: 1628433 - DNA, 15 bp, Homo sapiens
ctagaaatacaacta

SEQ ID NO: 1628434 - DNA, 15 bp, Homo sapiens
tagaaatacaactaa

SEQ ID NO: 1628435 - DNA, 15 bp, Homo sapiens
agaaatacaactaac

SEQ ID NO: 1628436 - DNA, 15 bp, Homo sapiens
gaaatacaactaaca

SEQ ID NO: 1628437 - DNA, 15 bp, Homo sapiens
aaatacaactaacaa

SEQ ID NO: 1628438 - DNA, 15 bp, Homo sapiens
aatacaactaacaag

SEQ ID NO: 1628439 - DNA, 15 bp, Homo sapiens
atacaactaacaagg

SEQ ID NO: 1628440 - DNA, 15 bp, Homo sapiens
tacaactaacaaggg

SEQ ID NO: 1628441 - DNA, 15 bp, Homo sapiens
acaactaacaaggga

SEQ ID NO: 1628442 - DNA, 15 bp, Homo sapiens
caactaacaagggat

SEQ ID NO: 1628443 - DNA, 15 bp, Homo sapiens
aactaacaagggatg

SEQ ID NO: 1628444 - DNA, 15 bp, Homo sapiens
actaacaagggatgt

SEQ ID NO: 1628445 - DNA, 15 bp, Homo sapiens
ctaacaagggatgtg

SEQ ID NO: 1628446 - DNA, 15 bp, Homo sapiens
taacaagggatgtga

SEQ ID NO: 1628447 - DNA, 15 bp, Homo sapiens
aacaagggatgtgaa

SEQ ID NO: 1628448 - DNA, 15 bp, Homo sapiens
acaagggatgtgaag

SEQ ID NO: 1628449 - DNA, 15 bp, Homo sapiens
caagggatgtgaagg

SEQ ID NO: 1628450 - DNA, 15 bp, Homo sapiens
aagggatgtgaagga

SEQ ID NO: 1628451 - DNA, 15 bp, Homo sapiens
agggatgtgaaggac

SEQ ID NO: 1628452 - DNA, 15 bp, Homo sapiens
gggatgtgaaggacc

SEQ ID NO: 1628453 - DNA, 15 bp, Homo sapiens
ggatgtgaaggacct

SEQ ID NO: 1628454 - DNA, 15 bp, Homo sapiens
gatgtgaaggacctc

SEQ ID NO: 1628455 - DNA, 15 bp, Homo sapiens
atgtgaaggacctct

SEQ ID NO: 1628456 - DNA, 15 bp, Homo sapiens
tgtgaaggacctctt

SEQ ID NO: 1628457 - DNA, 15 bp, Homo sapiens
gtgaaggacctcttc

SEQ ID NO: 1628458 - DNA, 15 bp, Homo sapiens
tgaaggacctcttca

SEQ ID NO: 1628459 - DNA, 15 bp, Homo sapiens
gaaggacctcttcaa

SEQ ID NO: 1628460 - DNA, 15 bp, Homo sapiens
aaggacctcttcaag

SEQ ID NO: 1628461 - DNA, 15 bp, Homo sapiens
aggacctcttcaagg

SEQ ID NO: 1628462 - DNA, 15 bp, Homo sapiens
ggacctcttcaagga

SEQ ID NO: 1628463 - DNA, 15 bp, Homo sapiens
gacctcttcaaggag

SEQ ID NO: 1628464 - DNA, 15 bp, Homo sapiens
acctcttcaaggaga

SEQ ID NO: 1628465 - DNA, 15 bp, Homo sapiens
cctcttcaaggagaa

SEQ ID NO: 1628466 - DNA, 15 bp, Homo sapiens
ctcttcaaggagaac

SEQ ID NO: 1628467 - DNA, 15 bp, Homo sapiens
tcttcaaggagaact

SEQ ID NO: 1628468 - DNA, 15 bp, Homo sapiens
cttcaaggagaacta

SEQ ID NO: 1628469 - DNA, 15 bp, Homo sapiens
ttcaaggagaactac

SEQ ID NO: 1628470 - DNA, 15 bp, Homo sapiens
tcaaggagaactaca

SEQ ID NO: 1628471 - DNA, 15 bp, Homo sapiens
caaggagaactacaa

SEQ ID NO: 1628472 - DNA, 15 bp, Homo sapiens
aaggagaactacaaa

SEQ ID NO: 1628473 - DNA, 15 bp, Homo sapiens
aggagaactacaaac

SEQ ID NO: 1628474 - DNA, 15 bp, Homo sapiens
ggagaactacaaacc

SEQ ID NO: 1628475 - DNA, 15 bp, Homo sapiens
gagaactacaaacca

SEQ ID NO: 1628476 - DNA, 15 bp, Homo sapiens
agaactacaaaccac

SEQ ID NO: 1628477 - DNA, 15 bp, Homo sapiens
gaactacaaaccact

SEQ ID NO: 1628478 - DNA, 15 bp, Homo sapiens
aactacaaaccactg

SEQ ID NO: 1628479 - DNA, 15 bp, Homo sapiens
actacaaaccactgc

SEQ ID NO: 1628480 - DNA, 15 bp, Homo sapiens
ctacaaaccactgct

SEQ ID NO: 1628481 - DNA, 15 bp, Homo sapiens
tacaaaccactgctc

SEQ ID NO: 1628482 - DNA, 15 bp, Homo sapiens
acaaaccactgctca

SEQ ID NO: 1628483 - DNA, 15 bp, Homo sapiens
caaaccactgctcaa

SEQ ID NO: 1628484 - DNA, 15 bp, Homo sapiens
aaaccactgctcaag

SEQ ID NO: 1628485 - DNA, 15 bp, Homo sapiens
aaccactgctcaagg

SEQ ID NO: 1628486 - DNA, 15 bp, Homo sapiens
accactgctcaagga

SEQ ID NO: 1628487 - DNA, 15 bp, Homo sapiens
ccactgctcaaggaa

SEQ ID NO: 1628488 - DNA, 15 bp, Homo sapiens
cactgctcaaggaaa

SEQ ID NO: 1628489 - DNA, 15 bp, Homo sapiens
actgctcaaggaaat

SEQ ID NO: 1628490 - DNA, 15 bp, Homo sapiens
ctgctcaaggaaatc

SEQ ID NO: 1628491 - DNA, 15 bp, Homo sapiens
tgctcaaggaaatca

SEQ ID NO: 1628492 - DNA, 15 bp, Homo sapiens
gctcaaggaaatcag

SEQ ID NO: 1628493 - DNA, 15 bp, Homo sapiens
ctcaaggaaatcaga

SEQ ID NO: 1628494 - DNA, 15 bp, Homo sapiens
tcaaggaaatcagag

SEQ ID NO: 1628495 - DNA, 15 bp, Homo sapiens
caaggaaatcagaga

SEQ ID NO: 1628496 - DNA, 15 bp, Homo sapiens
aaggaaatcagagag

SEQ ID NO: 1628497 - DNA, 15 bp, Homo sapiens
aggaaatcagagagg

SEQ ID NO: 1628498 - DNA, 15 bp, Homo sapiens
ggaaatcagagagga

SEQ ID NO: 1628499 - DNA, 15 bp, Homo sapiens
gaaatcagagaggac

SEQ ID NO: 1628500 - DNA, 15 bp, Homo sapiens
aaatcagagaggaca

SEQ ID NO: 1628501 - DNA, 15 bp, Homo sapiens
aatcagagaggacac

SEQ ID NO: 1628502 - DNA, 15 bp, Homo sapiens
atcagagaggacaca

SEQ ID NO: 1628503 - DNA, 15 bp, Homo sapiens
tcagagaggacacaa

SEQ ID NO: 1628504 - DNA, 15 bp, Homo sapiens
cagagaggacacaaa

SEQ ID NO: 1628505 - DNA, 15 bp, Homo sapiens
agagaggacacaaac

SEQ ID NO: 1628506 - DNA, 15 bp, Homo sapiens
gagaggacacaaaca

SEQ ID NO: 1628507 - DNA, 15 bp, Homo sapiens
agaggacacaaacaa

SEQ ID NO: 1628508 - DNA, 15 bp, Homo sapiens
gaggacacaaacaaa

SEQ ID NO: 1628509 - DNA, 15 bp, Homo sapiens
aggacacaaacaaat

SEQ ID NO: 1628510 - DNA, 15 bp, Homo sapiens
ggacacaaacaaatg

SEQ ID NO: 1628511 - DNA, 15 bp, Homo sapiens
gacacaaacaaatga

SEQ ID NO: 1628512 - DNA, 15 bp, Homo sapiens
acacaaacaaatgaa

SEQ ID NO: 1628513 - DNA, 15 bp, Homo sapiens
cacaaacaaatgaaa

SEQ ID NO: 1628514 - DNA, 15 bp, Homo sapiens
acaaacaaatgaaaa

SEQ ID NO: 1628515 - DNA, 15 bp, Homo sapiens
caaacaaatgaaaaa

SEQ ID NO: 1628516 - DNA, 15 bp, Homo sapiens
aaacaaatgaaaaaa

SEQ ID NO: 1628517 - DNA, 15 bp, Homo sapiens
aacaaatgaaaaaat

SEQ ID NO: 1628518 - DNA, 15 bp, Homo sapiens
acaaatgaaaaaata

SEQ ID NO: 1628519 - DNA, 15 bp, Homo sapiens
caaatgaaaaaatat

SEQ ID NO: 1628520 - DNA, 15 bp, Homo sapiens
aaatgaaaaaatatt

SEQ ID NO: 1628521 - DNA, 15 bp, Homo sapiens
aatgaaaaaatattc

SEQ ID NO: 1628522 - DNA, 15 bp, Homo sapiens
atgaaaaaatattct

SEQ ID NO: 1628523 - DNA, 15 bp, Homo sapiens
tgaaaaaatattcta

SEQ ID NO: 1628524 - DNA, 15 bp, Homo sapiens
gaaaaaatattctat

SEQ ID NO: 1628525 - DNA, 15 bp, Homo sapiens
aaaaaatattctatg

SEQ ID NO: 1628526 - DNA, 15 bp, Homo sapiens
aaaaatattctatgc

SEQ ID NO: 1628527 - DNA, 15 bp, Homo sapiens
aaaatattctatgct

SEQ ID NO: 1628528 - DNA, 15 bp, Homo sapiens
aaatattctatgctc

SEQ ID NO: 1628529 - DNA, 15 bp, Homo sapiens
aatattctatgctca

SEQ ID NO: 1628530 - DNA, 15 bp, Homo sapiens
atattctatgctcat

SEQ ID NO: 1628531 - DNA, 15 bp, Homo sapiens
tattctatgctcatg

SEQ ID NO: 1628532 - DNA, 15 bp, Homo sapiens
attctatgctcatgg

SEQ ID NO: 1628533 - DNA, 15 bp, Homo sapiens
ttctatgctcatgga

SEQ ID NO: 1628534 - DNA, 15 bp, Homo sapiens
tctatgctcatggat

SEQ ID NO: 1628535 - DNA, 15 bp, Homo sapiens
ctatgctcatggata

SEQ ID NO: 1628536 - DNA, 15 bp, Homo sapiens
tatgctcatggatag

SEQ ID NO: 1628537 - DNA, 15 bp, Homo sapiens
atgctcatggatagg

SEQ ID NO: 1628538 - DNA, 15 bp, Homo sapiens
tgctcatggatagga

SEQ ID NO: 1628539 - DNA, 15 bp, Homo sapiens
gctcatggataggaa

SEQ ID NO: 1628540 - DNA, 15 bp, Homo sapiens
ctcatggataggaag

SEQ ID NO: 1628541 - DNA, 15 bp, Homo sapiens
tcatggataggaaga

SEQ ID NO: 1628542 - DNA, 15 bp, Homo sapiens
catggataggaagaa

SEQ ID NO: 1628543 - DNA, 15 bp, Homo sapiens
atggataggaagaat

SEQ ID NO: 1628544 - DNA, 15 bp, Homo sapiens
tggataggaagaatc

SEQ ID NO: 1628545 - DNA, 15 bp, Homo sapiens
ggataggaagaatca

SEQ ID NO: 1628546 - DNA, 15 bp, Homo sapiens
gataggaagaatcaa

SEQ ID NO: 1628547 - DNA, 15 bp, Homo sapiens
ataggaagaatcaat

SEQ ID NO: 1628548 - DNA, 15 bp, Homo sapiens
taggaagaatcaata

SEQ ID NO: 1628549 - DNA, 15 bp, Homo sapiens
aggaagaatcaatat

SEQ ID NO: 1628550 - DNA, 15 bp, Homo sapiens
ggaagaatcaatatt

SEQ ID NO: 1628551 - DNA, 15 bp, Homo sapiens
gaagaatcaatattg

SEQ ID NO: 1628552 - DNA, 15 bp, Homo sapiens
aagaatcaatattgt

SEQ ID NO: 1628553 - DNA, 15 bp, Homo sapiens
agaatcaatattgtg

SEQ ID NO: 1628554 - DNA, 15 bp, Homo sapiens
gaatcaatattgtga

SEQ ID NO: 1628555 - DNA, 15 bp, Homo sapiens
aatcaatattgtgaa

SEQ ID NO: 1628556 - DNA, 15 bp, Homo sapiens
atcaatattgtgaaa

SEQ ID NO: 1628557 - DNA, 15 bp, Homo sapiens
tcaatattgtgaaaa

SEQ ID NO: 1628558 - DNA, 15 bp, Homo sapiens
caatattgtgaaaat

SEQ ID NO: 1628559 - DNA, 15 bp, Homo sapiens
aatattgtgaaaatg

SEQ ID NO: 1628560 - DNA, 15 bp, Homo sapiens
atattgtgaaaatgg

SEQ ID NO: 1628561 - DNA, 15 bp, Homo sapiens
tattgtgaaaatggt

SEQ ID NO: 1628562 - DNA, 15 bp, Homo sapiens
attgtgaaaatggtc

SEQ ID NO: 1628563 - DNA, 15 bp, Homo sapiens
ttgtgaaaatggtca

SEQ ID NO: 1628564 - DNA, 15 bp, Homo sapiens
tgtgaaaatggtcat

SEQ ID NO: 1628565 - DNA, 15 bp, Homo sapiens
gtgaaaatggtcata

SEQ ID NO: 1628566 - DNA, 15 bp, Homo sapiens
tgaaaatggtcatac

SEQ ID NO: 1628567 - DNA, 15 bp, Homo sapiens
gaaaatggtcatact

SEQ ID NO: 1628568 - DNA, 15 bp, Homo sapiens
aaaatggtcatactg

SEQ ID NO: 1628569 - DNA, 15 bp, Homo sapiens
aaatggtcatactgc

SEQ ID NO: 1628570 - DNA, 15 bp, Homo sapiens
aatggtcatactgcc

SEQ ID NO: 1628571 - DNA, 15 bp, Homo sapiens
atggtcatactgccc

SEQ ID NO: 1628572 - DNA, 15 bp, Homo sapiens
tggtcatactgccca

SEQ ID NO: 1628573 - DNA, 15 bp, Homo sapiens
ggtcatactgcccat

SEQ ID NO: 1628574 - DNA, 15 bp, Homo sapiens
gtcatactgcccata

SEQ ID NO: 1628575 - DNA, 15 bp, Homo sapiens
tcatactgcccatag

SEQ ID NO: 1628576 - DNA, 15 bp, Homo sapiens
catactgcccatagt

SEQ ID NO: 1628577 - DNA, 15 bp, Homo sapiens
atactgcccatagta

SEQ ID NO: 1628578 - DNA, 15 bp, Homo sapiens
tactgcccatagtaa

SEQ ID NO: 1628579 - DNA, 15 bp, Homo sapiens
actgcccatagtaat

SEQ ID NO: 1628580 - DNA, 15 bp, Homo sapiens
ctgcccatagtaatt

SEQ ID NO: 1628581 - DNA, 15 bp, Homo sapiens
tgcccatagtaattt

SEQ ID NO: 1628582 - DNA, 15 bp, Homo sapiens
gcccatagtaattta

SEQ ID NO: 1628583 - DNA, 15 bp, Homo sapiens
cccatagtaatttat

SEQ ID NO: 1628584 - DNA, 15 bp, Homo sapiens
ccatagtaatttata

SEQ ID NO: 1628585 - DNA, 15 bp, Homo sapiens
catagtaatttatag

SEQ ID NO: 1628586 - DNA, 15 bp, Homo sapiens
atagtaatttataga

SEQ ID NO: 1628587 - DNA, 15 bp, Homo sapiens
tagtaatttatagat

SEQ ID NO: 1628588 - DNA, 15 bp, Homo sapiens
agtaatttatagatt

SEQ ID NO: 1628589 - DNA, 15 bp, Homo sapiens
gtaatttatagattc

SEQ ID NO: 1628590 - DNA, 15 bp, Homo sapiens
taatttatagattca

SEQ ID NO: 1628591 - DNA, 15 bp, Homo sapiens
aatttatagattcaa

SEQ ID NO: 1628592 - DNA, 15 bp, Homo sapiens
atttatagattcaat

SEQ ID NO: 1628593 - DNA, 15 bp, Homo sapiens
tttatagattcaatg

SEQ ID NO: 1628594 - DNA, 15 bp, Homo sapiens
ttatagattcaatgc

SEQ ID NO: 1628595 - DNA, 15 bp, Homo sapiens
tatagattcaatgct

SEQ ID NO: 1628596 - DNA, 15 bp, Homo sapiens
atagattcaatgcta

SEQ ID NO: 1628597 - DNA, 15 bp, Homo sapiens
tagattcaatgctat

SEQ ID NO: 1628598 - DNA, 15 bp, Homo sapiens
agattcaatgctatt

SEQ ID NO: 1628599 - DNA, 15 bp, Homo sapiens
gattcaatgctattc

SEQ ID NO: 1628600 - DNA, 15 bp, Homo sapiens
attcaatgctattcc

SEQ ID NO: 1628601 - DNA, 15 bp, Homo sapiens
ttcaatgctattccc

SEQ ID NO: 1628602 - DNA, 15 bp, Homo sapiens
tcaatgctattccca

SEQ ID NO: 1628603 - DNA, 15 bp, Homo sapiens
caatgctattcccat

SEQ ID NO: 1628604 - DNA, 15 bp, Homo sapiens
aatgctattcccatc

SEQ ID NO: 1628605 - DNA, 15 bp, Homo sapiens
atgctattcccatca

SEQ ID NO: 1628606 - DNA, 15 bp, Homo sapiens
tgctattcccatcaa

SEQ ID NO: 1628607 - DNA, 15 bp, Homo sapiens
gctattcccatcaag

SEQ ID NO: 1628608 - DNA, 15 bp, Homo sapiens
ctattcccatcaagg

SEQ ID NO: 1628609 - DNA, 15 bp, Homo sapiens
tattcccatcaaggt

SEQ ID NO: 1628610 - DNA, 15 bp, Homo sapiens
attcccatcaaggta

SEQ ID NO: 1628611 - DNA, 15 bp, Homo sapiens
ttcccatcaaggtac

SEQ ID NO: 1628612 - DNA, 15 bp, Homo sapiens
tcccatcaaggtacc

SEQ ID NO: 1628613 - DNA, 15 bp, Homo sapiens
cccatcaaggtacca

SEQ ID NO: 1628614 - DNA, 15 bp, Homo sapiens
ccatcaaggtaccat

SEQ ID NO: 1628615 - DNA, 15 bp, Homo sapiens
catcaaggtaccatt

SEQ ID NO: 1628616 - DNA, 15 bp, Homo sapiens
atcaaggtaccattg

SEQ ID NO: 1628617 - DNA, 15 bp, Homo sapiens
tcaaggtaccattga

SEQ ID NO: 1628618 - DNA, 15 bp, Homo sapiens
caaggtaccattgac

SEQ ID NO: 1628619 - DNA, 15 bp, Homo sapiens
aaggtaccattgact

SEQ ID NO: 1628620 - DNA, 15 bp, Homo sapiens
aggtaccattgactt

SEQ ID NO: 1628621 - DNA, 15 bp, Homo sapiens
ggtaccattgacttt

SEQ ID NO: 1628622 - DNA, 15 bp, Homo sapiens
gtaccattgactttc

SEQ ID NO: 1628623 - DNA, 15 bp, Homo sapiens
taccattgactttct

SEQ ID NO: 1628624 - DNA, 15 bp, Homo sapiens
accattgactttctt

SEQ ID NO: 1628625 - DNA, 15 bp, Homo sapiens
ccattgactttcttc

SEQ ID NO: 1628626 - DNA, 15 bp, Homo sapiens
cattgactttcttca

SEQ ID NO: 1628627 - DNA, 15 bp, Homo sapiens
attgactttcttcac

SEQ ID NO: 1628628 - DNA, 15 bp, Homo sapiens
ttgactttcttcaca

SEQ ID NO: 1628629 - DNA, 15 bp, Homo sapiens
tgactttcttcacag

SEQ ID NO: 1628630 - DNA, 15 bp, Homo sapiens
gactttcttcacaga

SEQ ID NO: 1628631 - DNA, 15 bp, Homo sapiens
actttcttcacagaa

SEQ ID NO: 1628632 - DNA, 15 bp, Homo sapiens
ctttcttcacagaat

SEQ ID NO: 1628633 - DNA, 15 bp, Homo sapiens
tttcttcacagaatt

SEQ ID NO: 1628634 - DNA, 15 bp, Homo sapiens
ttcttcacagaatta

SEQ ID NO: 1628635 - DNA, 15 bp, Homo sapiens
tcttcacagaattag

SEQ ID NO: 1628636 - DNA, 15 bp, Homo sapiens
cttcacagaattaga

SEQ ID NO: 1628637 - DNA, 15 bp, Homo sapiens
ttcacagaattagaa

SEQ ID NO: 1628638 - DNA, 15 bp, Homo sapiens
tcacagaattagaaa

SEQ ID NO: 1628639 - DNA, 15 bp, Homo sapiens
cacagaattagaaaa

SEQ ID NO: 1628640 - DNA, 15 bp, Homo sapiens
acagaattagaaaaa

SEQ ID NO: 1628641 - DNA, 15 bp, Homo sapiens
cagaattagaaaaaa

SEQ ID NO: 1628642 - DNA, 15 bp, Homo sapiens
agaattagaaaaaaa

SEQ ID NO: 1628643 - DNA, 15 bp, Homo sapiens
gaattagaaaaaaaa

SEQ ID NO: 1628644 - DNA, 15 bp, Homo sapiens
aattagaaaaaaaaa

SEQ ID NO: 1628645 - DNA, 15 bp, Homo sapiens
attagaaaaaaaaaa

SEQ ID NO: 1628646 - DNA, 15 bp, Homo sapiens
tagaaaaaaaaaaac

SEQ ID NO: 1628647 - DNA, 15 bp, Homo sapiens
agaaaaaaaaaaact

SEQ ID NO: 1628648 - DNA, 15 bp, Homo sapiens
gaaaaaaaaaaacta

SEQ ID NO: 1628649 - DNA, 15 bp, Homo sapiens
aaaaaaaaaaactac

SEQ ID NO: 1628650 - DNA, 15 bp, Homo sapiens
aaaaaaaaaactact

SEQ ID NO: 1628651 - DNA, 15 bp, Homo sapiens
aaaaaaaaactactt

SEQ ID NO: 1628652 - DNA, 15 bp, Homo sapiens
aaaaaaaactacttt

SEQ ID NO: 1628653 - DNA, 15 bp, Homo sapiens
aaaaaaactacttta

SEQ ID NO: 1628654 - DNA, 15 bp, Homo sapiens
aaaaaactactttaa

SEQ ID NO: 1628655 - DNA, 15 bp, Homo sapiens
aaaaactactttaaa

SEQ ID NO: 1628656 - DNA, 15 bp, Homo sapiens
aaaactactttaaat

SEQ ID NO: 1628657 - DNA, 15 bp, Homo sapiens
aaactactttaaatt

SEQ ID NO: 1628658 - DNA, 15 bp, Homo sapiens
aactactttaaattt

SEQ ID NO: 1628659 - DNA, 15 bp, Homo sapiens
actactttaaatttc

SEQ ID NO: 1628660 - DNA, 15 bp, Homo sapiens
ctactttaaatttca

SEQ ID NO: 1628661 - DNA, 15 bp, Homo sapiens
tactttaaatttcat

SEQ ID NO: 1628662 - DNA, 15 bp, Homo sapiens
actttaaatttcata

SEQ ID NO: 1628663 - DNA, 15 bp, Homo sapiens
ctttaaatttcatat

SEQ ID NO: 1628664 - DNA, 15 bp, Homo sapiens
tttaaatttcatatg

SEQ ID NO: 1628665 - DNA, 15 bp, Homo sapiens
ttaaatttcatatgg

SEQ ID NO: 1628666 - DNA, 15 bp, Homo sapiens
taaatttcatatgga

SEQ ID NO: 1628667 - DNA, 15 bp, Homo sapiens
aatttcatatggaac

SEQ ID NO: 1628668 - DNA, 15 bp, Homo sapiens
atttcatatggaacc

SEQ ID NO: 1628669 - DNA, 15 bp, Homo sapiens
tttcatatggaacca

SEQ ID NO: 1628670 - DNA, 15 bp, Homo sapiens
ttcatatggaaccaa

SEQ ID NO: 1628671 - DNA, 15 bp, Homo sapiens
tcatatggaaccaaa

SEQ ID NO: 1628672 - DNA, 15 bp, Homo sapiens
catatggaaccaaaa

SEQ ID NO: 1628673 - DNA, 15 bp, Homo sapiens
atatggaaccaaaaa

SEQ ID NO: 1628674 - DNA, 15 bp, Homo sapiens
tatggaaccaaaaaa

SEQ ID NO: 1628675 - DNA, 15 bp, Homo sapiens
atggaaccaaaaaaa

SEQ ID NO: 1628676 - DNA, 15 bp, Homo sapiens
tggaaccaaaaaaat

SEQ ID NO: 1628677 - DNA, 15 bp, Homo sapiens
ggaaccaaaaaaatg

SEQ ID NO: 1628678 - DNA, 15 bp, Homo sapiens
gaaccaaaaaaatgc

SEQ ID NO: 1628679 - DNA, 15 bp, Homo sapiens
aaccaaaaaaatgcc

SEQ ID NO: 1628680 - DNA, 15 bp, Homo sapiens
accaaaaaaatgccc

SEQ ID NO: 1628681 - DNA, 15 bp, Homo sapiens
ccaaaaaaatgcccg

SEQ ID NO: 1628682 - DNA, 15 bp, Homo sapiens
caaaaaaatgcccgt

SEQ ID NO: 1628683 - DNA, 15 bp, Homo sapiens
aaaaaaatgcccgtg

SEQ ID NO: 1628684 - DNA, 15 bp, Homo sapiens
aaaaaatgcccgtgt

SEQ ID NO: 1628685 - DNA, 15 bp, Homo sapiens
aaaaatgcccgtgta

SEQ ID NO: 1628686 - DNA, 15 bp, Homo sapiens
aaaatgcccgtgtag

SEQ ID NO: 1628687 - DNA, 15 bp, Homo sapiens
aaatgcccgtgtagc

SEQ ID NO: 1628688 - DNA, 15 bp, Homo sapiens
aatgcccgtgtagcc

SEQ ID NO: 1628689 - DNA, 15 bp, Homo sapiens
atgcccgtgtagcca

SEQ ID NO: 1628690 - DNA, 15 bp, Homo sapiens
tgcccgtgtagccaa

SEQ ID NO: 1628691 - DNA, 15 bp, Homo sapiens
gcccgtgtagccaag

SEQ ID NO: 1628692 - DNA, 15 bp, Homo sapiens
cccgtgtagccaaga

SEQ ID NO: 1628693 - DNA, 15 bp, Homo sapiens
ccgtgtagccaagac

SEQ ID NO: 1628694 - DNA, 15 bp, Homo sapiens
cgtgtagccaagaca

SEQ ID NO: 1628695 - DNA, 15 bp, Homo sapiens
gtgtagccaagacaa

SEQ ID NO: 1628696 - DNA, 15 bp, Homo sapiens
tgtagccaagacaat

SEQ ID NO: 1628697 - DNA, 15 bp, Homo sapiens
gtagccaagacaatc

SEQ ID NO: 1628698 - DNA, 15 bp, Homo sapiens
tagccaagacaatcc

SEQ ID NO: 1628699 - DNA, 15 bp, Homo sapiens
agccaagacaatcct

SEQ ID NO: 1628700 - DNA, 15 bp, Homo sapiens
gccaagacaatccta

SEQ ID NO: 1628701 - DNA, 15 bp, Homo sapiens
ccaagacaatcctaa

SEQ ID NO: 1628702 - DNA, 15 bp, Homo sapiens
caagacaatcctaag

SEQ ID NO: 1628703 - DNA, 15 bp, Homo sapiens
aagacaatcctaagc

SEQ ID NO: 1628704 - DNA, 15 bp, Homo sapiens
agacaatcctaagca

SEQ ID NO: 1628705 - DNA, 15 bp, Homo sapiens
gacaatcctaagcaa

SEQ ID NO: 1628706 - DNA, 15 bp, Homo sapiens
acaatcctaagcaaa

SEQ ID NO: 1628707 - DNA, 15 bp, Homo sapiens
caatcctaagcaaaa

SEQ ID NO: 1628708 - DNA, 15 bp, Homo sapiens
aatcctaagcaaaag

SEQ ID NO: 1628709 - DNA, 15 bp, Homo sapiens
atcctaagcaaaagg

SEQ ID NO: 1628710 - DNA, 15 bp, Homo sapiens
tcctaagcaaaagga

SEQ ID NO: 1628711 - DNA, 15 bp, Homo sapiens
cctaagcaaaaggaa

SEQ ID NO: 1628712 - DNA, 15 bp, Homo sapiens
ctaagcaaaaggaac

SEQ ID NO: 1628713 - DNA, 15 bp, Homo sapiens
taagcaaaaggaaca

SEQ ID NO: 1628714 - DNA, 15 bp, Homo sapiens
aagcaaaaggaacaa

SEQ ID NO: 1628715 - DNA, 15 bp, Homo sapiens
agcaaaaggaacaaa

SEQ ID NO: 1628716 - DNA, 15 bp, Homo sapiens
gcaaaaggaacaaag

SEQ ID NO: 1628717 - DNA, 15 bp, Homo sapiens
caaaaggaacaaagt

SEQ ID NO: 1628718 - DNA, 15 bp, Homo sapiens
aaaaggaacaaagtg

SEQ ID NO: 1628719 - DNA, 15 bp, Homo sapiens
aaaggaacaaagtgg

SEQ ID NO: 1628720 - DNA, 15 bp, Homo sapiens
aaggaacaaagtgga

SEQ ID NO: 1628721 - DNA, 15 bp, Homo sapiens
aggaacaaagtggag

SEQ ID NO: 1628722 - DNA, 15 bp, Homo sapiens
ggaacaaagtggagg

SEQ ID NO: 1628723 - DNA, 15 bp, Homo sapiens
gaacaaagtggaggc

SEQ ID NO: 1628724 - DNA, 15 bp, Homo sapiens
aacaaagtggaggca

SEQ ID NO: 1628725 - DNA, 15 bp, Homo sapiens
acaaagtggaggcat

SEQ ID NO: 1628726 - DNA, 15 bp, Homo sapiens
caaagtggaggcatc

SEQ ID NO: 1628727 - DNA, 15 bp, Homo sapiens
aaagtggaggcatca

SEQ ID NO: 1628728 - DNA, 15 bp, Homo sapiens
aagtggaggcatcat

SEQ ID NO: 1628729 - DNA, 15 bp, Homo sapiens
agtggaggcatcatg

SEQ ID NO: 1628730 - DNA, 15 bp, Homo sapiens
gtggaggcatcatgc

SEQ ID NO: 1628731 - DNA, 15 bp, Homo sapiens
tggaggcatcatgct

SEQ ID NO: 1628732 - DNA, 15 bp, Homo sapiens
ggaggcatcatgcta

SEQ ID NO: 1628733 - DNA, 15 bp, Homo sapiens
gaggcatcatgctac

SEQ ID NO: 1628734 - DNA, 15 bp, Homo sapiens
aggcatcatgctacc

SEQ ID NO: 1628735 - DNA, 15 bp, Homo sapiens
ggcatcatgctacct

SEQ ID NO: 1628736 - DNA, 15 bp, Homo sapiens
gcatcatgctacctg

SEQ ID NO: 1628737 - DNA, 15 bp, Homo sapiens
catcatgctacctga

SEQ ID NO: 1628738 - DNA, 15 bp, Homo sapiens
atcatgctacctgac

SEQ ID NO: 1628739 - DNA, 15 bp, Homo sapiens
tcatgctacctgact

SEQ ID NO: 1628740 - DNA, 15 bp, Homo sapiens
catgctacctgactt

SEQ ID NO: 1628741 - DNA, 15 bp, Homo sapiens
atgctacctgacttt

SEQ ID NO: 1628742 - DNA, 15 bp, Homo sapiens
tgctacctgacttta

SEQ ID NO: 1628743 - DNA, 15 bp, Homo sapiens
gctacctgactttaa

SEQ ID NO: 1628744 - DNA, 15 bp, Homo sapiens
ctacctgactttaaa

SEQ ID NO: 1628745 - DNA, 15 bp, Homo sapiens
tacctgactttaaac

SEQ ID NO: 1628746 - DNA, 15 bp, Homo sapiens
acctgactttaaact

SEQ ID NO: 1628747 - DNA, 15 bp, Homo sapiens
cctgactttaaacta

SEQ ID NO: 1628748 - DNA, 15 bp, Homo sapiens
ctgactttaaactac

SEQ ID NO: 1628749 - DNA, 15 bp, Homo sapiens
tgactttaaactaca

SEQ ID NO: 1628750 - DNA, 15 bp, Homo sapiens
gactttaaactacac

SEQ ID NO: 1628751 - DNA, 15 bp, Homo sapiens
actttaaactacact

SEQ ID NO: 1628752 - DNA, 15 bp, Homo sapiens
ctttaaactacacta

SEQ ID NO: 1628753 - DNA, 15 bp, Homo sapiens
tttaaactacactac

SEQ ID NO: 1628754 - DNA, 15 bp, Homo sapiens
ttaaactacactaca

SEQ ID NO: 1628755 - DNA, 15 bp, Homo sapiens
taaactacactacaa

SEQ ID NO: 1628756 - DNA, 15 bp, Homo sapiens
aaactacactacaag

SEQ ID NO: 1628757 - DNA, 15 bp, Homo sapiens
aactacactacaagg

SEQ ID NO: 1628758 - DNA, 15 bp, Homo sapiens
actacactacaaggc

SEQ ID NO: 1628759 - DNA, 15 bp, Homo sapiens
ctacactacaaggct

SEQ ID NO: 1628760 - DNA, 15 bp, Homo sapiens
tacactacaaggcta

SEQ ID NO: 1628761 - DNA, 15 bp, Homo sapiens
acactacaaggctac

SEQ ID NO: 1628762 - DNA, 15 bp, Homo sapiens
cactacaaggctaca

SEQ ID NO: 1628763 - DNA, 15 bp, Homo sapiens
actacaaggctacag

SEQ ID NO: 1628764 - DNA, 15 bp, Homo sapiens
ctacaaggctacagt

SEQ ID NO: 1628765 - DNA, 15 bp, Homo sapiens
tacaaggctacagta

SEQ ID NO: 1628766 - DNA, 15 bp, Homo sapiens
acaaggctacagtaa

SEQ ID NO: 1628767 - DNA, 15 bp, Homo sapiens
caaggctacagtaac

SEQ ID NO: 1628768 - DNA, 15 bp, Homo sapiens
aaggctacagtaacc

SEQ ID NO: 1628769 - DNA, 15 bp, Homo sapiens
aggctacagtaacca

SEQ ID NO: 1628770 - DNA, 15 bp, Homo sapiens
ggctacagtaaccaa

SEQ ID NO: 1628771 - DNA, 15 bp, Homo sapiens
gctacagtaaccaaa

SEQ ID NO: 1628772 - DNA, 15 bp, Homo sapiens
ctacagtaaccaaaa

SEQ ID NO: 1628773 - DNA, 15 bp, Homo sapiens
tacagtaaccaaaac

SEQ ID NO: 1628774 - DNA, 15 bp, Homo sapiens
acagtaaccaaaaca

SEQ ID NO: 1628775 - DNA, 15 bp, Homo sapiens
cagtaaccaaaacag

SEQ ID NO: 1628776 - DNA, 15 bp, Homo sapiens
agtaaccaaaacagc

SEQ ID NO: 1628777 - DNA, 15 bp, Homo sapiens
gtaaccaaaacagca

SEQ ID NO: 1628778 - DNA, 15 bp, Homo sapiens
taaccaaaacagcat

SEQ ID NO: 1628779 - DNA, 15 bp, Homo sapiens
aaccaaaacagcatg

SEQ ID NO: 1628780 - DNA, 15 bp, Homo sapiens
accaaaacagcatgg

SEQ ID NO: 1628781 - DNA, 15 bp, Homo sapiens
ccaaaacagcatggt

SEQ ID NO: 1628782 - DNA, 15 bp, Homo sapiens
caaaacagcatggta

SEQ ID NO: 1628783 - DNA, 15 bp, Homo sapiens
aaaacagcatggtac

SEQ ID NO: 1628784 - DNA, 15 bp, Homo sapiens
aaacagcatggtact

SEQ ID NO: 1628785 - DNA, 15 bp, Homo sapiens
aacagcatggtactg

SEQ ID NO: 1628786 - DNA, 15 bp, Homo sapiens
acagcatggtactgg

SEQ ID NO: 1628787 - DNA, 15 bp, Homo sapiens
cagcatggtactggt

SEQ ID NO: 1628788 - DNA, 15 bp, Homo sapiens
agcatggtactggta

SEQ ID NO: 1628789 - DNA, 15 bp, Homo sapiens
gcatggtactggtac

SEQ ID NO: 1628790 - DNA, 15 bp, Homo sapiens
catggtactggtacc

SEQ ID NO: 1628791 - DNA, 15 bp, Homo sapiens
atggtactggtacca

SEQ ID NO: 1628792 - DNA, 15 bp, Homo sapiens
tggtactggtaccaa

SEQ ID NO: 1628793 - DNA, 15 bp, Homo sapiens
ggtactggtaccaaa

SEQ ID NO: 1628794 - DNA, 15 bp, Homo sapiens
gtactggtaccaaaa

SEQ ID NO: 1628795 - DNA, 15 bp, Homo sapiens
tactggtaccaaaac

SEQ ID NO: 1628796 - DNA, 15 bp, Homo sapiens
actggtaccaaaacc

SEQ ID NO: 1628797 - DNA, 15 bp, Homo sapiens
ctggtaccaaaaccg

SEQ ID NO: 1628798 - DNA, 15 bp, Homo sapiens
tggtaccaaaaccga

SEQ ID NO: 1628799 - DNA, 15 bp, Homo sapiens
ggtaccaaaaccgat

SEQ ID NO: 1628800 - DNA, 15 bp, Homo sapiens
gtaccaaaaccgata

SEQ ID NO: 1628801 - DNA, 15 bp, Homo sapiens
taccaaaaccgataa

SEQ ID NO: 1628802 - DNA, 15 bp, Homo sapiens
accaaaaccgataaa

SEQ ID NO: 1628803 - DNA, 15 bp, Homo sapiens
ccaaaaccgataaat

SEQ ID NO: 1628804 - DNA, 15 bp, Homo sapiens
caaaaccgataaata

SEQ ID NO: 1628805 - DNA, 15 bp, Homo sapiens
aaaaccgataaatag

SEQ ID NO: 1628806 - DNA, 15 bp, Homo sapiens
aaaccgataaatagt

SEQ ID NO: 1628807 - DNA, 15 bp, Homo sapiens
aaccgataaatagtc

SEQ ID NO: 1628808 - DNA, 15 bp, Homo sapiens
accgataaatagtcc

SEQ ID NO: 1628809 - DNA, 15 bp, Homo sapiens
ccgataaatagtcca

SEQ ID NO: 1628810 - DNA, 15 bp, Homo sapiens
cgataaatagtccaa

SEQ ID NO: 1628811 - DNA, 15 bp, Homo sapiens
gataaatagtccaat

SEQ ID NO: 1628812 - DNA, 15 bp, Homo sapiens
ataaatagtccaatg

SEQ ID NO: 1628813 - DNA, 15 bp, Homo sapiens
taaatagtccaatgg

SEQ ID NO: 1628814 - DNA, 15 bp, Homo sapiens
aaatagtccaatgga

SEQ ID NO: 1628815 - DNA, 15 bp, Homo sapiens
aatagtccaatggaa

SEQ ID NO: 1628816 - DNA, 15 bp, Homo sapiens
atagtccaatggaac

SEQ ID NO: 1628817 - DNA, 15 bp, Homo sapiens
tagtccaatggaaca

SEQ ID NO: 1628818 - DNA, 15 bp, Homo sapiens
agtccaatggaacag

SEQ ID NO: 1628819 - DNA, 15 bp, Homo sapiens
gtccaatggaacaga

SEQ ID NO: 1628820 - DNA, 15 bp, Homo sapiens
tccaatggaacagaa

SEQ ID NO: 1628821 - DNA, 15 bp, Homo sapiens
ccaatggaacagaac

SEQ ID NO: 1628822 - DNA, 15 bp, Homo sapiens
caatggaacagaaca

SEQ ID NO: 1628823 - DNA, 15 bp, Homo sapiens
aatggaacagaacag

SEQ ID NO: 1628824 - DNA, 15 bp, Homo sapiens
atggaacagaacaga

SEQ ID NO: 1628825 - DNA, 15 bp, Homo sapiens
tggaacagaacagag

SEQ ID NO: 1628826 - DNA, 15 bp, Homo sapiens
ggaacagaacagagg

SEQ ID NO: 1628827 - DNA, 15 bp, Homo sapiens
gaacagaacagaggc

SEQ ID NO: 1628828 - DNA, 15 bp, Homo sapiens
aacagaacagaggcc

SEQ ID NO: 1628829 - DNA, 15 bp, Homo sapiens
acagaacagaggcct

SEQ ID NO: 1628830 - DNA, 15 bp, Homo sapiens
cagaacagaggcctc

SEQ ID NO: 1628831 - DNA, 15 bp, Homo sapiens
agaacagaggcctca

SEQ ID NO: 1628832 - DNA, 15 bp, Homo sapiens
gaacagaggcctcag

SEQ ID NO: 1628833 - DNA, 15 bp, Homo sapiens
aacagaggcctcaga

SEQ ID NO: 1628834 - DNA, 15 bp, Homo sapiens
acagaggcctcagaa

SEQ ID NO: 1628835 - DNA, 15 bp, Homo sapiens
cagaggcctcagaaa

SEQ ID NO: 1628836 - DNA, 15 bp, Homo sapiens
agaggcctcagaaat

SEQ ID NO: 1628837 - DNA, 15 bp, Homo sapiens
gaggcctcagaaata

SEQ ID NO: 1628838 - DNA, 15 bp, Homo sapiens
aggcctcagaaatag

SEQ ID NO: 1628839 - DNA, 15 bp, Homo sapiens
ggcctcagaaatagt

SEQ ID NO: 1628840 - DNA, 15 bp, Homo sapiens
gcctcagaaatagtg

SEQ ID NO: 1628841 - DNA, 15 bp, Homo sapiens
cctcagaaatagtgc

SEQ ID NO: 1628842 - DNA, 15 bp, Homo sapiens
ctcagaaatagtgcc

SEQ ID NO: 1628843 - DNA, 15 bp, Homo sapiens
tcagaaatagtgcca

SEQ ID NO: 1628844 - DNA, 15 bp, Homo sapiens
cagaaatagtgccac

SEQ ID NO: 1628845 - DNA, 15 bp, Homo sapiens
agaaatagtgccaca

SEQ ID NO: 1628846 - DNA, 15 bp, Homo sapiens
gaaatagtgccacac

SEQ ID NO: 1628847 - DNA, 15 bp, Homo sapiens
aaatagtgccacaca

SEQ ID NO: 1628848 - DNA, 15 bp, Homo sapiens
aatagtgccacacat

SEQ ID NO: 1628849 - DNA, 15 bp, Homo sapiens
atagtgccacacatc

SEQ ID NO: 1628850 - DNA, 15 bp, Homo sapiens
tagtgccacacatct

SEQ ID NO: 1628851 - DNA, 15 bp, Homo sapiens
agtgccacacatcta

SEQ ID NO: 1628852 - DNA, 15 bp, Homo sapiens
gtgccacacatctac

SEQ ID NO: 1628853 - DNA, 15 bp, Homo sapiens
tgccacacatctaca

SEQ ID NO: 1628854 - DNA, 15 bp, Homo sapiens
gccacacatctacaa

SEQ ID NO: 1628855 - DNA, 15 bp, Homo sapiens
ccacacatctacaac

SEQ ID NO: 1628856 - DNA, 15 bp, Homo sapiens
cacacatctacaacc

SEQ ID NO: 1628857 - DNA, 15 bp, Homo sapiens
acacatctacaacca

SEQ ID NO: 1628858 - DNA, 15 bp, Homo sapiens
cacatctacaaccat

SEQ ID NO: 1628859 - DNA, 15 bp, Homo sapiens
acatctacaaccatc

SEQ ID NO: 1628860 - DNA, 15 bp, Homo sapiens
catctacaaccatct

SEQ ID NO: 1628861 - DNA, 15 bp, Homo sapiens
atctacaaccatctg

SEQ ID NO: 1628862 - DNA, 15 bp, Homo sapiens
tctacaaccatctga

SEQ ID NO: 1628863 - DNA, 15 bp, Homo sapiens
ctacaaccatctgat

SEQ ID NO: 1628864 - DNA, 15 bp, Homo sapiens
tacaaccatctgatc

SEQ ID NO: 1628865 - DNA, 15 bp, Homo sapiens
acaaccatctgatct

SEQ ID NO: 1628866 - DNA, 15 bp, Homo sapiens
caaccatctgatctt

SEQ ID NO: 1628867 - DNA, 15 bp, Homo sapiens
aaccatctgatcttt

SEQ ID NO: 1628868 - DNA, 15 bp, Homo sapiens
accatctgatctttg

SEQ ID NO: 1628869 - DNA, 15 bp, Homo sapiens
ccatctgatctttga

SEQ ID NO: 1628870 - DNA, 15 bp, Homo sapiens
catctgatctttgac

SEQ ID NO: 1628871 - DNA, 15 bp, Homo sapiens
atctgatctttgaca

SEQ ID NO: 1628872 - DNA, 15 bp, Homo sapiens
tctgatctttgacaa

SEQ ID NO: 1628873 - DNA, 15 bp, Homo sapiens
ctgatctttgacaaa

SEQ ID NO: 1628874 - DNA, 15 bp, Homo sapiens
tgatctttgacaaac

SEQ ID NO: 1628875 - DNA, 15 bp, Homo sapiens
gatctttgacaaacc

SEQ ID NO: 1628876 - DNA, 15 bp, Homo sapiens
atctttgacaaacct

SEQ ID NO: 1628877 - DNA, 15 bp, Homo sapiens
tctttgacaaacctg

SEQ ID NO: 1628878 - DNA, 15 bp, Homo sapiens
ctttgacaaacctgc

SEQ ID NO: 1628879 - DNA, 15 bp, Homo sapiens
tttgacaaacctgca

SEQ ID NO: 1628880 - DNA, 15 bp, Homo sapiens
ttgacaaacctgcaa

SEQ ID NO: 1628881 - DNA, 15 bp, Homo sapiens
tgacaaacctgcaat

SEQ ID NO: 1628882 - DNA, 15 bp, Homo sapiens
gacaaacctgcaatg

SEQ ID NO: 1628883 - DNA, 15 bp, Homo sapiens
acaaacctgcaatgg

SEQ ID NO: 1628884 - DNA, 15 bp, Homo sapiens
caaacctgcaatgga

SEQ ID NO: 1628885 - DNA, 15 bp, Homo sapiens
aaacctgcaatggag

SEQ ID NO: 1628886 - DNA, 15 bp, Homo sapiens
aacctgcaatggagg

SEQ ID NO: 1628887 - DNA, 15 bp, Homo sapiens
acctgcaatggaggt

SEQ ID NO: 1628888 - DNA, 15 bp, Homo sapiens
cctgcaatggaggtt

SEQ ID NO: 1628889 - DNA, 15 bp, Homo sapiens
ctgcaatggaggttt

SEQ ID NO: 1628890 - DNA, 15 bp, Homo sapiens
tgcaatggaggtttt

SEQ ID NO: 1628891 - DNA, 15 bp, Homo sapiens
gcaatggaggttttt

SEQ ID NO: 1628892 - DNA, 15 bp, Homo sapiens
caatggaggtttttg

SEQ ID NO: 1628893 - DNA, 15 bp, Homo sapiens
aatggaggtttttgt

SEQ ID NO: 1628894 - DNA, 15 bp, Homo sapiens
atggaggtttttgtc

SEQ ID NO: 1628895 - DNA, 15 bp, Homo sapiens
tggaggtttttgtcc

SEQ ID NO: 1628896 - DNA, 15 bp, Homo sapiens
ggaggtttttgtcct

SEQ ID NO: 1628897 - DNA, 15 bp, Homo sapiens
gaggtttttgtcctg

SEQ ID NO: 1628898 - DNA, 15 bp, Homo sapiens
aggtttttgtcctga

SEQ ID NO: 1628899 - DNA, 15 bp, Homo sapiens
ggtttttgtcctgac

SEQ ID NO: 1628900 - DNA, 15 bp, Homo sapiens
gtttttgtcctgaca

SEQ ID NO: 1628901 - DNA, 15 bp, Homo sapiens
tttttgtcctgacaa

SEQ ID NO: 1628902 - DNA, 15 bp, Homo sapiens
ttttgtcctgacaaa

SEQ ID NO: 1628903 - DNA, 15 bp, Homo sapiens
tttgtcctgacaaaa

SEQ ID NO: 1628904 - DNA, 15 bp, Homo sapiens
ttgtcctgacaaaaa

SEQ ID NO: 1628905 - DNA, 15 bp, Homo sapiens
tgtcctgacaaaaac

SEQ ID NO: 1628906 - DNA, 15 bp, Homo sapiens
gtcctgacaaaaaca

SEQ ID NO: 1628907 - DNA, 15 bp, Homo sapiens
tcctgacaaaaacaa

SEQ ID NO: 1628908 - DNA, 15 bp, Homo sapiens
cctgacaaaaacaag

SEQ ID NO: 1628909 - DNA, 15 bp, Homo sapiens
ctgacaaaaacaagc

SEQ ID NO: 1628910 - DNA, 15 bp, Homo sapiens
tgacaaaaacaagca

SEQ ID NO: 1628911 - DNA, 15 bp, Homo sapiens
gacaaaaacaagcaa

SEQ ID NO: 1628912 - DNA, 15 bp, Homo sapiens
acaaaaacaagcaat

SEQ ID NO: 1628913 - DNA, 15 bp, Homo sapiens
caaaaacaagcaatg

SEQ ID NO: 1628914 - DNA, 15 bp, Homo sapiens
aaaaacaagcaatgg

SEQ ID NO: 1628915 - DNA, 15 bp, Homo sapiens
aaaacaagcaatgga

SEQ ID NO: 1628916 - DNA, 15 bp, Homo sapiens
aaacaagcaatggag

SEQ ID NO: 1628917 - DNA, 15 bp, Homo sapiens
aacaagcaatggaga

SEQ ID NO: 1628918 - DNA, 15 bp, Homo sapiens
acaagcaatggagaa

SEQ ID NO: 1628919 - DNA, 15 bp, Homo sapiens
caagcaatggagaaa

SEQ ID NO: 1628920 - DNA, 15 bp, Homo sapiens
aagcaatggagaaag

SEQ ID NO: 1628921 - DNA, 15 bp, Homo sapiens
agcaatggagaaagg

SEQ ID NO: 1628922 - DNA, 15 bp, Homo sapiens
gcaatggagaaaggg

SEQ ID NO: 1628923 - DNA, 15 bp, Homo sapiens
caatggagaaagggt

SEQ ID NO: 1628924 - DNA, 15 bp, Homo sapiens
aatggagaaagggtt

SEQ ID NO: 1628925 - DNA, 15 bp, Homo sapiens
atggagaaagggttc

SEQ ID NO: 1628926 - DNA, 15 bp, Homo sapiens
tggagaaagggttcc

SEQ ID NO: 1628927 - DNA, 15 bp, Homo sapiens
ggagaaagggttccc

SEQ ID NO: 1628928 - DNA, 15 bp, Homo sapiens
gagaaagggttccct

SEQ ID NO: 1628929 - DNA, 15 bp, Homo sapiens
agaaagggttcccta

SEQ ID NO: 1628930 - DNA, 15 bp, Homo sapiens
gaaagggttccctat

SEQ ID NO: 1628931 - DNA, 15 bp, Homo sapiens
aaagggttccctatt

SEQ ID NO: 1628932 - DNA, 15 bp, Homo sapiens
aagggttccctattt

SEQ ID NO: 1628933 - DNA, 15 bp, Homo sapiens
agggttccctattta

SEQ ID NO: 1628934 - DNA, 15 bp, Homo sapiens
gggttccctatttaa

SEQ ID NO: 1628935 - DNA, 15 bp, Homo sapiens
ggttccctatttaat

SEQ ID NO: 1628936 - DNA, 15 bp, Homo sapiens
gttccctatttaata

SEQ ID NO: 1628937 - DNA, 15 bp, Homo sapiens
ttccctatttaataa

SEQ ID NO: 1628938 - DNA, 15 bp, Homo sapiens
tccctatttaataaa

SEQ ID NO: 1628939 - DNA, 15 bp, Homo sapiens
ccctatttaataaat

SEQ ID NO: 1628940 - DNA, 15 bp, Homo sapiens
cctatttaataaatg

SEQ ID NO: 1628941 - DNA, 15 bp, Homo sapiens
ctatttaataaatgg

SEQ ID NO: 1628942 - DNA, 15 bp, Homo sapiens
tatttaataaatggt

SEQ ID NO: 1628943 - DNA, 15 bp, Homo sapiens
atttaataaatggtg

SEQ ID NO: 1628944 - DNA, 15 bp, Homo sapiens
tttaataaatggtgc

SEQ ID NO: 1628945 - DNA, 15 bp, Homo sapiens
ttaataaatggtgct

SEQ ID NO: 1628946 - DNA, 15 bp, Homo sapiens
taataaatggtgctg

SEQ ID NO: 1628947 - DNA, 15 bp, Homo sapiens
aataaatggtgctgg

SEQ ID NO: 1628948 - DNA, 15 bp, Homo sapiens
ataaatggtgctggg

SEQ ID NO: 1628949 - DNA, 15 bp, Homo sapiens
taaatggtgctggga

SEQ ID NO: 1628950 - DNA, 15 bp, Homo sapiens
aaatggtgctgggaa

SEQ ID NO: 1628951 - DNA, 15 bp, Homo sapiens
aatggtgctgggaaa

SEQ ID NO: 1628952 - DNA, 15 bp, Homo sapiens
atggtgctgggaaaa

SEQ ID NO: 1628953 - DNA, 15 bp, Homo sapiens
tggtgctgggaaaac

SEQ ID NO: 1628954 - DNA, 15 bp, Homo sapiens
ggtgctgggaaaact

SEQ ID NO: 1628955 - DNA, 15 bp, Homo sapiens
gtgctgggaaaactg

SEQ ID NO: 1628956 - DNA, 15 bp, Homo sapiens
tgctgggaaaactgg

SEQ ID NO: 1628957 - DNA, 15 bp, Homo sapiens
gctgggaaaactggc

SEQ ID NO: 1628958 - DNA, 15 bp, Homo sapiens
ctgggaaaactggct

SEQ ID NO: 1628959 - DNA, 15 bp, Homo sapiens
tgggaaaactggcta

SEQ ID NO: 1628960 - DNA, 15 bp, Homo sapiens
gggaaaactggctag

SEQ ID NO: 1628961 - DNA, 15 bp, Homo sapiens
ggaaaactggctagc

SEQ ID NO: 1628962 - DNA, 15 bp, Homo sapiens
gaaaactggctagcc

SEQ ID NO: 1628963 - DNA, 15 bp, Homo sapiens
aaaactggctagcca

SEQ ID NO: 1628964 - DNA, 15 bp, Homo sapiens
aaactggctagccat

SEQ ID NO: 1628965 - DNA, 15 bp, Homo sapiens
aactggctagccata

SEQ ID NO: 1628966 - DNA, 15 bp, Homo sapiens
actggctagccatat

SEQ ID NO: 1628967 - DNA, 15 bp, Homo sapiens
ctggctagccatatg

SEQ ID NO: 1628968 - DNA, 15 bp, Homo sapiens
tggctagccatatgc

SEQ ID NO: 1628969 - DNA, 15 bp, Homo sapiens
ggctagccatatgca

SEQ ID NO: 1628970 - DNA, 15 bp, Homo sapiens
gctagccatatgcag

SEQ ID NO: 1628971 - DNA, 15 bp, Homo sapiens
ctagccatatgcagg

SEQ ID NO: 1628972 - DNA, 15 bp, Homo sapiens
tagccatatgcagga

SEQ ID NO: 1628973 - DNA, 15 bp, Homo sapiens
agccatatgcaggaa

SEQ ID NO: 1628974 - DNA, 15 bp, Homo sapiens
gccatatgcaggaaa

SEQ ID NO: 1628975 - DNA, 15 bp, Homo sapiens
ccatatgcaggaaac

SEQ ID NO: 1628976 - DNA, 15 bp, Homo sapiens
catatgcaggaaact

SEQ ID NO: 1628977 - DNA, 15 bp, Homo sapiens
atatgcaggaaactg

SEQ ID NO: 1628978 - DNA, 15 bp, Homo sapiens
tatgcaggaaactga

SEQ ID NO: 1628979 - DNA, 15 bp, Homo sapiens
atgcaggaaactgaa

SEQ ID NO: 1628980 - DNA, 15 bp, Homo sapiens
tgcaggaaactgaaa

SEQ ID NO: 1628981 - DNA, 15 bp, Homo sapiens
gcaggaaactgaaac

SEQ ID NO: 1628982 - DNA, 15 bp, Homo sapiens
caggaaactgaaact

SEQ ID NO: 1628983 - DNA, 15 bp, Homo sapiens
aggaaactgaaactg

SEQ ID NO: 1628984 - DNA, 15 bp, Homo sapiens
ggaaactgaaactgg

SEQ ID NO: 1628985 - DNA, 15 bp, Homo sapiens
gaaactgaaactgga

SEQ ID NO: 1628986 - DNA, 15 bp, Homo sapiens
aaactgaaactggac

SEQ ID NO: 1628987 - DNA, 15 bp, Homo sapiens
aactgaaactggacc

SEQ ID NO: 1628988 - DNA, 15 bp, Homo sapiens
actgaaactggaccc

SEQ ID NO: 1628989 - DNA, 15 bp, Homo sapiens
ctgaaactggacccc

SEQ ID NO: 1628990 - DNA, 15 bp, Homo sapiens
tgaaactggacccct

SEQ ID NO: 1628991 - DNA, 15 bp, Homo sapiens
gaaactggacccctt

SEQ ID NO: 1628992 - DNA, 15 bp, Homo sapiens
aaactggaccccttc

SEQ ID NO: 1628993 - DNA, 15 bp, Homo sapiens
aactggaccccttcc

SEQ ID NO: 1628994 - DNA, 15 bp, Homo sapiens
actggaccccttcct

SEQ ID NO: 1628995 - DNA, 15 bp, Homo sapiens
ctggaccccttcctt

SEQ ID NO: 1628996 - DNA, 15 bp, Homo sapiens
tggaccccttcctta

SEQ ID NO: 1628997 - DNA, 15 bp, Homo sapiens
ggaccccttccttat

SEQ ID NO: 1628998 - DNA, 15 bp, Homo sapiens
gaccccttccttata

SEQ ID NO: 1628999 - DNA, 15 bp, Homo sapiens
accccttccttatac

SEQ ID NO: 1629000 - DNA, 15 bp, Homo sapiens
ccccttccttatacc

SEQ ID NO: 1629001 - DNA, 15 bp, Homo sapiens
cccttccttatacct

SEQ ID NO: 1629002 - DNA, 15 bp, Homo sapiens
ccttccttatacctt

SEQ ID NO: 1629003 - DNA, 15 bp, Homo sapiens
cttccttatacctta

SEQ ID NO: 1629004 - DNA, 15 bp, Homo sapiens
ttccttataccttat

SEQ ID NO: 1629005 - DNA, 15 bp, Homo sapiens
tccttataccttata

SEQ ID NO: 1629006 - DNA, 15 bp, Homo sapiens
ccttataccttatac

SEQ ID NO: 1629007 - DNA, 15 bp, Homo sapiens
cttataccttataca

SEQ ID NO: 1629008 - DNA, 15 bp, Homo sapiens
ttataccttatacaa

SEQ ID NO: 1629009 - DNA, 15 bp, Homo sapiens
tataccttatacaaa

SEQ ID NO: 1629010 - DNA, 15 bp, Homo sapiens
ataccttatacaaaa

SEQ ID NO: 1629011 - DNA, 15 bp, Homo sapiens
taccttatacaaaaa

SEQ ID NO: 1629012 - DNA, 15 bp, Homo sapiens
accttatacaaaaat

SEQ ID NO: 1629013 - DNA, 15 bp, Homo sapiens
ccttatacaaaaatt

SEQ ID NO: 1629014 - DNA, 15 bp, Homo sapiens
cttatacaaaaatta

SEQ ID NO: 1629015 - DNA, 15 bp, Homo sapiens
ttatacaaaaattaa

SEQ ID NO: 1629016 - DNA, 15 bp, Homo sapiens
tatacaaaaattaac

SEQ ID NO: 1629017 - DNA, 15 bp, Homo sapiens
tacaaaaattaactc

SEQ ID NO: 1629018 - DNA, 15 bp, Homo sapiens
acaaaaattaactca

SEQ ID NO: 1629019 - DNA, 15 bp, Homo sapiens
caaaaattaactcaa

SEQ ID NO: 1629020 - DNA, 15 bp, Homo sapiens
aaaaattaactcaag

SEQ ID NO: 1629021 - DNA, 15 bp, Homo sapiens
aaaattaactcaaga

SEQ ID NO: 1629022 - DNA, 15 bp, Homo sapiens
aaattaactcaagat

SEQ ID NO: 1629023 - DNA, 15 bp, Homo sapiens
aattaactcaagatg

SEQ ID NO: 1629024 - DNA, 15 bp, Homo sapiens
attaactcaagatga

SEQ ID NO: 1629025 - DNA, 15 bp, Homo sapiens
ttaactcaagatgaa

SEQ ID NO: 1629026 - DNA, 15 bp, Homo sapiens
taactcaagatgaat

SEQ ID NO: 1629027 - DNA, 15 bp, Homo sapiens
aactcaagatgaatt

SEQ ID NO: 1629028 - DNA, 15 bp, Homo sapiens
actcaagatgaatta

SEQ ID NO: 1629029 - DNA, 15 bp, Homo sapiens
ctcaagatgaattaa

SEQ ID NO: 1629030 - DNA, 15 bp, Homo sapiens
tcaagatgaattaac

SEQ ID NO: 1629031 - DNA, 15 bp, Homo sapiens
caagatgaattaaca

SEQ ID NO: 1629032 - DNA, 15 bp, Homo sapiens
aagatgaattaacaa

SEQ ID NO: 1629033 - DNA, 15 bp, Homo sapiens
agatgaattaacaac

SEQ ID NO: 1629034 - DNA, 15 bp, Homo sapiens
gatgaattaacaact

SEQ ID NO: 1629035 - DNA, 15 bp, Homo sapiens
atgaattaacaactt

SEQ ID NO: 1629036 - DNA, 15 bp, Homo sapiens
tgaattaacaactta

SEQ ID NO: 1629037 - DNA, 15 bp, Homo sapiens
gaattaacaacttaa

SEQ ID NO: 1629038 - DNA, 15 bp, Homo sapiens
aattaacaacttaaa

SEQ ID NO: 1629039 - DNA, 15 bp, Homo sapiens
attaacaacttaaat

SEQ ID NO: 1629040 - DNA, 15 bp, Homo sapiens
ttaacaacttaaatg

SEQ ID NO: 1629041 - DNA, 15 bp, Homo sapiens
taacaacttaaatgg

SEQ ID NO: 1629042 - DNA, 15 bp, Homo sapiens
aacaacttaaatgga

SEQ ID NO: 1629043 - DNA, 15 bp, Homo sapiens
acaacttaaatggaa

SEQ ID NO: 1629044 - DNA, 15 bp, Homo sapiens
caacttaaatggaag

SEQ ID NO: 1629045 - DNA, 15 bp, Homo sapiens
aacttaaatggaaga

SEQ ID NO: 1629046 - DNA, 15 bp, Homo sapiens
acttaaatggaagac

SEQ ID NO: 1629047 - DNA, 15 bp, Homo sapiens
cttaaatggaagact

SEQ ID NO: 1629048 - DNA, 15 bp, Homo sapiens
ttaaatggaagactt

SEQ ID NO: 1629049 - DNA, 15 bp, Homo sapiens
taaatggaagactta

SEQ ID NO: 1629050 - DNA, 15 bp, Homo sapiens
aaatggaagacttaa

SEQ ID NO: 1629051 - DNA, 15 bp, Homo sapiens
aatggaagacttaaa

SEQ ID NO: 1629052 - DNA, 15 bp, Homo sapiens
atggaagacttaaaa

SEQ ID NO: 1629053 - DNA, 15 bp, Homo sapiens
tggaagacttaaaac

SEQ ID NO: 1629054 - DNA, 15 bp, Homo sapiens
ggaagacttaaaacc

SEQ ID NO: 1629055 - DNA, 15 bp, Homo sapiens
gaagacttaaaacca

SEQ ID NO: 1629056 - DNA, 15 bp, Homo sapiens
aagacttaaaaccat

SEQ ID NO: 1629057 - DNA, 15 bp, Homo sapiens
agacttaaaaccata

SEQ ID NO: 1629058 - DNA, 15 bp, Homo sapiens
gacttaaaaccataa

SEQ ID NO: 1629059 - DNA, 15 bp, Homo sapiens
acttaaaaccataaa

SEQ ID NO: 1629060 - DNA, 15 bp, Homo sapiens
cttaaaaccataaaa

SEQ ID NO: 1629061 - DNA, 15 bp, Homo sapiens
ttaaaaccataaaaa

SEQ ID NO: 1629062 - DNA, 15 bp, Homo sapiens
taaaaccataaaaat

SEQ ID NO: 1629063 - DNA, 15 bp, Homo sapiens
aaaaccataaaaatc

SEQ ID NO: 1629064 - DNA, 15 bp, Homo sapiens
aaaccataaaaatct

SEQ ID NO: 1629065 - DNA, 15 bp, Homo sapiens
aaccataaaaatctt

SEQ ID NO: 1629066 - DNA, 15 bp, Homo sapiens
accataaaaatctta

SEQ ID NO: 1629067 - DNA, 15 bp, Homo sapiens
ccataaaaatcttag

SEQ ID NO: 1629068 - DNA, 15 bp, Homo sapiens
cataaaaatcttaga

SEQ ID NO: 1629069 - DNA, 15 bp, Homo sapiens
ataaaaatcttagaa

SEQ ID NO: 1629070 - DNA, 15 bp, Homo sapiens
taaaaatcttagaag

SEQ ID NO: 1629071 - DNA, 15 bp, Homo sapiens
aaaaatcttagaaga

SEQ ID NO: 1629072 - DNA, 15 bp, Homo sapiens
aaaatcttagaagaa

SEQ ID NO: 1629073 - DNA, 15 bp, Homo sapiens
aaatcttagaagaaa

SEQ ID NO: 1629074 - DNA, 15 bp, Homo sapiens
aatcttagaagaaaa

SEQ ID NO: 1629075 - DNA, 15 bp, Homo sapiens
atcttagaagaaaac

SEQ ID NO: 1629076 - DNA, 15 bp, Homo sapiens
tcttagaagaaaacc

SEQ ID NO: 1629077 - DNA, 15 bp, Homo sapiens
cttagaagaaaacct

SEQ ID NO: 1629078 - DNA, 15 bp, Homo sapiens
ttagaagaaaaccta

SEQ ID NO: 1629079 - DNA, 15 bp, Homo sapiens
tagaagaaaacctag

SEQ ID NO: 1629080 - DNA, 15 bp, Homo sapiens
agaagaaaacctagg

SEQ ID NO: 1629081 - DNA, 15 bp, Homo sapiens
gaagaaaacctaggc

SEQ ID NO: 1629082 - DNA, 15 bp, Homo sapiens
aagaaaacctaggca

SEQ ID NO: 1629083 - DNA, 15 bp, Homo sapiens
agaaaacctaggcaa

SEQ ID NO: 1629084 - DNA, 15 bp, Homo sapiens
gaaaacctaggcaat

SEQ ID NO: 1629085 - DNA, 15 bp, Homo sapiens
aaaacctaggcaata

SEQ ID NO: 1629086 - DNA, 15 bp, Homo sapiens
aaacctaggcaatac

SEQ ID NO: 1629087 - DNA, 15 bp, Homo sapiens
aacctaggcaatact

SEQ ID NO: 1629088 - DNA, 15 bp, Homo sapiens
acctaggcaatacta

SEQ ID NO: 1629089 - DNA, 15 bp, Homo sapiens
cctaggcaatactat

SEQ ID NO: 1629090 - DNA, 15 bp, Homo sapiens
ctaggcaatactatt

SEQ ID NO: 1629091 - DNA, 15 bp, Homo sapiens
taggcaatactattc

SEQ ID NO: 1629092 - DNA, 15 bp, Homo sapiens
aggcaatactattca

SEQ ID NO: 1629093 - DNA, 15 bp, Homo sapiens
ggcaatactattcag

SEQ ID NO: 1629094 - DNA, 15 bp, Homo sapiens
gcaatactattcagg

SEQ ID NO: 1629095 - DNA, 15 bp, Homo sapiens
caatactattcagga

SEQ ID NO: 1629096 - DNA, 15 bp, Homo sapiens
aatactattcaggac

SEQ ID NO: 1629097 - DNA, 15 bp, Homo sapiens
atactattcaggaca

SEQ ID NO: 1629098 - DNA, 15 bp, Homo sapiens
tactattcaggacat

SEQ ID NO: 1629099 - DNA, 15 bp, Homo sapiens
actattcaggacata

SEQ ID NO: 1629100 - DNA, 15 bp, Homo sapiens
ctattcaggacatag

SEQ ID NO: 1629101 - DNA, 15 bp, Homo sapiens
tattcaggacatagg

SEQ ID NO: 1629102 - DNA, 15 bp, Homo sapiens
attcaggacataggc

SEQ ID NO: 1629103 - DNA, 15 bp, Homo sapiens
ttcaggacataggca

SEQ ID NO: 1629104 - DNA, 15 bp, Homo sapiens
tcaggacataggcat

SEQ ID NO: 1629105 - DNA, 15 bp, Homo sapiens
caggacataggcata

SEQ ID NO: 1629106 - DNA, 15 bp, Homo sapiens
aggacataggcatag

SEQ ID NO: 1629107 - DNA, 15 bp, Homo sapiens
ggacataggcatagg

SEQ ID NO: 1629108 - DNA, 15 bp, Homo sapiens
gacataggcataggc

SEQ ID NO: 1629109 - DNA, 15 bp, Homo sapiens
acataggcataggca

SEQ ID NO: 1629110 - DNA, 15 bp, Homo sapiens
cataggcataggcaa

SEQ ID NO: 1629111 - DNA, 15 bp, Homo sapiens
ataggcataggcaaa

SEQ ID NO: 1629112 - DNA, 15 bp, Homo sapiens
taggcataggcaaac

SEQ ID NO: 1629113 - DNA, 15 bp, Homo sapiens
aggcataggcaaaca

SEQ ID NO: 1629114 - DNA, 15 bp, Homo sapiens
ggcataggcaaacac

SEQ ID NO: 1629115 - DNA, 15 bp, Homo sapiens
gcataggcaaacact

SEQ ID NO: 1629116 - DNA, 15 bp, Homo sapiens
cataggcaaacactc

SEQ ID NO: 1629117 - DNA, 15 bp, Homo sapiens
ataggcaaacactcc

SEQ ID NO: 1629118 - DNA, 15 bp, Homo sapiens
taggcaaacactcca

SEQ ID NO: 1629119 - DNA, 15 bp, Homo sapiens
aggcaaacactccat

SEQ ID NO: 1629120 - DNA, 15 bp, Homo sapiens
ggcaaacactccata

SEQ ID NO: 1629121 - DNA, 15 bp, Homo sapiens
gcaaacactccataa

SEQ ID NO: 1629122 - DNA, 15 bp, Homo sapiens
caaacactccataac

SEQ ID NO: 1629123 - DNA, 15 bp, Homo sapiens
aaacactccataact

SEQ ID NO: 1629124 - DNA, 15 bp, Homo sapiens
aacactccataacta

SEQ ID NO: 1629125 - DNA, 15 bp, Homo sapiens
acactccataactaa

SEQ ID NO: 1629126 - DNA, 15 bp, Homo sapiens
cactccataactaaa

SEQ ID NO: 1629127 - DNA, 15 bp, Homo sapiens
actccataactaaaa

SEQ ID NO: 1629128 - DNA, 15 bp, Homo sapiens
ctccataactaaaac

SEQ ID NO: 1629129 - DNA, 15 bp, Homo sapiens
tccataactaaaaca

SEQ ID NO: 1629130 - DNA, 15 bp, Homo sapiens
ccataactaaaacac

SEQ ID NO: 1629131 - DNA, 15 bp, Homo sapiens
cataactaaaacacc

SEQ ID NO: 1629132 - DNA, 15 bp, Homo sapiens
ataactaaaacacca

SEQ ID NO: 1629133 - DNA, 15 bp, Homo sapiens
taactaaaacaccaa

SEQ ID NO: 1629134 - DNA, 15 bp, Homo sapiens
aactaaaacaccaaa

SEQ ID NO: 1629135 - DNA, 15 bp, Homo sapiens
actaaaacaccaaaa

SEQ ID NO: 1629136 - DNA, 15 bp, Homo sapiens
ctaaaacaccaaaag

SEQ ID NO: 1629137 - DNA, 15 bp, Homo sapiens
taaaacaccaaaagc

SEQ ID NO: 1629138 - DNA, 15 bp, Homo sapiens
aaaacaccaaaagca

SEQ ID NO: 1629139 - DNA, 15 bp, Homo sapiens
aaacaccaaaagcaa

SEQ ID NO: 1629140 - DNA, 15 bp, Homo sapiens
aacaccaaaagcaat

SEQ ID NO: 1629141 - DNA, 15 bp, Homo sapiens
acaccaaaagcaatt

SEQ ID NO: 1629142 - DNA, 15 bp, Homo sapiens
caccaaaagcaattg

SEQ ID NO: 1629143 - DNA, 15 bp, Homo sapiens
accaaaagcaattgc

SEQ ID NO: 1629144 - DNA, 15 bp, Homo sapiens
ccaaaagcaattgca

SEQ ID NO: 1629145 - DNA, 15 bp, Homo sapiens
caaaagcaattgcaa

SEQ ID NO: 1629146 - DNA, 15 bp, Homo sapiens
aaaagcaattgcaac

SEQ ID NO: 1629147 - DNA, 15 bp, Homo sapiens
aaagcaattgcaaca

SEQ ID NO: 1629148 - DNA, 15 bp, Homo sapiens
aagcaattgcaacaa

SEQ ID NO: 1629149 - DNA, 15 bp, Homo sapiens
agcaattgcaacaaa

SEQ ID NO: 1629150 - DNA, 15 bp, Homo sapiens
gcaattgcaacaaaa

SEQ ID NO: 1629151 - DNA, 15 bp, Homo sapiens
caattgcaacaaaag

SEQ ID NO: 1629152 - DNA, 15 bp, Homo sapiens
aattgcaacaaaagc

SEQ ID NO: 1629153 - DNA, 15 bp, Homo sapiens
attgcaacaaaagcc

SEQ ID NO: 1629154 - DNA, 15 bp, Homo sapiens
ttgcaacaaaagcca

SEQ ID NO: 1629155 - DNA, 15 bp, Homo sapiens
tgcaacaaaagccaa

SEQ ID NO: 1629156 - DNA, 15 bp, Homo sapiens
gcaacaaaagccaag

SEQ ID NO: 1629157 - DNA, 15 bp, Homo sapiens
caacaaaagccaaga

SEQ ID NO: 1629158 - DNA, 15 bp, Homo sapiens
aacaaaagccaagat

SEQ ID NO: 1629159 - DNA, 15 bp, Homo sapiens
acaaaagccaagatt

SEQ ID NO: 1629160 - DNA, 15 bp, Homo sapiens
caaaagccaagattg

SEQ ID NO: 1629161 - DNA, 15 bp, Homo sapiens
aaaagccaagattga

SEQ ID NO: 1629162 - DNA, 15 bp, Homo sapiens
aaagccaagattgac

SEQ ID NO: 1629163 - DNA, 15 bp, Homo sapiens
aagccaagattgaca

SEQ ID NO: 1629164 - DNA, 15 bp, Homo sapiens
agccaagattgacaa

SEQ ID NO: 1629165 - DNA, 15 bp, Homo sapiens
gccaagattgacaaa

SEQ ID NO: 1629166 - DNA, 15 bp, Homo sapiens
ccaagattgacaaat

SEQ ID NO: 1629167 - DNA, 15 bp, Homo sapiens
caagattgacaaatg

SEQ ID NO: 1629168 - DNA, 15 bp, Homo sapiens
aagattgacaaatgg

SEQ ID NO: 1629169 - DNA, 15 bp, Homo sapiens
agattgacaaatggg

SEQ ID NO: 1629170 - DNA, 15 bp, Homo sapiens
gattgacaaatggga

SEQ ID NO: 1629171 - DNA, 15 bp, Homo sapiens
attgacaaatgggat

SEQ ID NO: 1629172 - DNA, 15 bp, Homo sapiens
ttgacaaatgggatc

SEQ ID NO: 1629173 - DNA, 15 bp, Homo sapiens
tgacaaatgggatct

SEQ ID NO: 1629174 - DNA, 15 bp, Homo sapiens
gacaaatgggatcta

SEQ ID NO: 1629175 - DNA, 15 bp, Homo sapiens
acaaatgggatctaa

SEQ ID NO: 1629176 - DNA, 15 bp, Homo sapiens
caaatgggatctaat

SEQ ID NO: 1629177 - DNA, 15 bp, Homo sapiens
aaatgggatctaatt

SEQ ID NO: 1629178 - DNA, 15 bp, Homo sapiens
aatgggatctaatta

SEQ ID NO: 1629179 - DNA, 15 bp, Homo sapiens
atgggatctaattaa

SEQ ID NO: 1629180 - DNA, 15 bp, Homo sapiens
tgggatctaattaaa

SEQ ID NO: 1629181 - DNA, 15 bp, Homo sapiens
gggatctaattaaac

SEQ ID NO: 1629182 - DNA, 15 bp, Homo sapiens
ggatctaattaaact

SEQ ID NO: 1629183 - DNA, 15 bp, Homo sapiens
gatctaattaaacta

SEQ ID NO: 1629184 - DNA, 15 bp, Homo sapiens
atctaattaaactaa

SEQ ID NO: 1629185 - DNA, 15 bp, Homo sapiens
tctaattaaactaaa

SEQ ID NO: 1629186 - DNA, 15 bp, Homo sapiens
ctaattaaactaaag

SEQ ID NO: 1629187 - DNA, 15 bp, Homo sapiens
taattaaactaaaga

SEQ ID NO: 1629188 - DNA, 15 bp, Homo sapiens
aattaaactaaagag

SEQ ID NO: 1629189 - DNA, 15 bp, Homo sapiens
attaaactaaagagt

SEQ ID NO: 1629190 - DNA, 15 bp, Homo sapiens
ttaaactaaagagtt

SEQ ID NO: 1629191 - DNA, 15 bp, Homo sapiens
taaactaaagagttt

SEQ ID NO: 1629192 - DNA, 15 bp, Homo sapiens
aaactaaagagtttc

SEQ ID NO: 1629193 - DNA, 15 bp, Homo sapiens
aactaaagagtttct

SEQ ID NO: 1629194 - DNA, 15 bp, Homo sapiens
actaaagagtttctg

SEQ ID NO: 1629195 - DNA, 15 bp, Homo sapiens
ctaaagagtttctgc

SEQ ID NO: 1629196 - DNA, 15 bp, Homo sapiens
taaagagtttctgca

SEQ ID NO: 1629197 - DNA, 15 bp, Homo sapiens
aaagagtttctgcac

SEQ ID NO: 1629198 - DNA, 15 bp, Homo sapiens
aagagtttctgcaca

SEQ ID NO: 1629199 - DNA, 15 bp, Homo sapiens
agagtttctgcacag

SEQ ID NO: 1629200 - DNA, 15 bp, Homo sapiens
gagtttctgcacagc

SEQ ID NO: 1629201 - DNA, 15 bp, Homo sapiens
agtttctgcacagca

SEQ ID NO: 1629202 - DNA, 15 bp, Homo sapiens
gtttctgcacagcaa

SEQ ID NO: 1629203 - DNA, 15 bp, Homo sapiens
tttctgcacagcaaa

SEQ ID NO: 1629204 - DNA, 15 bp, Homo sapiens
ttctgcacagcaaaa

SEQ ID NO: 1629205 - DNA, 15 bp, Homo sapiens
tctgcacagcaaaag

SEQ ID NO: 1629206 - DNA, 15 bp, Homo sapiens
ctgcacagcaaaaga

SEQ ID NO: 1629207 - DNA, 15 bp, Homo sapiens
tgcacagcaaaagaa

SEQ ID NO: 1629208 - DNA, 15 bp, Homo sapiens
gcacagcaaaagaaa

SEQ ID NO: 1629209 - DNA, 15 bp, Homo sapiens
cacagcaaaagaaac

SEQ ID NO: 1629210 - DNA, 15 bp, Homo sapiens
acagcaaaagaaact

SEQ ID NO: 1629211 - DNA, 15 bp, Homo sapiens
cagcaaaagaaacta

SEQ ID NO: 1629212 - DNA, 15 bp, Homo sapiens
agcaaaagaaactat

SEQ ID NO: 1629213 - DNA, 15 bp, Homo sapiens
gcaaaagaaactatc

SEQ ID NO: 1629214 - DNA, 15 bp, Homo sapiens
caaaagaaactatca

SEQ ID NO: 1629215 - DNA, 15 bp, Homo sapiens
aaaagaaactatcat

SEQ ID NO: 1629216 - DNA, 15 bp, Homo sapiens
aaagaaactatcatc

SEQ ID NO: 1629217 - DNA, 15 bp, Homo sapiens
aagaaactatcatca

SEQ ID NO: 1629218 - DNA, 15 bp, Homo sapiens
agaaactatcatcag

SEQ ID NO: 1629219 - DNA, 15 bp, Homo sapiens
gaaactatcatcaga

SEQ ID NO: 1629220 - DNA, 15 bp, Homo sapiens
aaactatcatcagag

SEQ ID NO: 1629221 - DNA, 15 bp, Homo sapiens
aactatcatcagagt

SEQ ID NO: 1629222 - DNA, 15 bp, Homo sapiens
actatcatcagagtg

SEQ ID NO: 1629223 - DNA, 15 bp, Homo sapiens
ctatcatcagagtga

SEQ ID NO: 1629224 - DNA, 15 bp, Homo sapiens
tatcatcagagtgaa

SEQ ID NO: 1629225 - DNA, 15 bp, Homo sapiens
atcatcagagtgaac

SEQ ID NO: 1629226 - DNA, 15 bp, Homo sapiens
tcatcagagtgaaca

SEQ ID NO: 1629227 - DNA, 15 bp, Homo sapiens
catcagagtgaacag

SEQ ID NO: 1629228 - DNA, 15 bp, Homo sapiens
atcagagtgaacagg

SEQ ID NO: 1629229 - DNA, 15 bp, Homo sapiens
tcagagtgaacaggc

SEQ ID NO: 1629230 - DNA, 15 bp, Homo sapiens
cagagtgaacaggca

SEQ ID NO: 1629231 - DNA, 15 bp, Homo sapiens
agagtgaacaggcaa

SEQ ID NO: 1629232 - DNA, 15 bp, Homo sapiens
gagtgaacaggcaac

SEQ ID NO: 1629233 - DNA, 15 bp, Homo sapiens
agtgaacaggcaacc

SEQ ID NO: 1629234 - DNA, 15 bp, Homo sapiens
gtgaacaggcaacct

SEQ ID NO: 1629235 - DNA, 15 bp, Homo sapiens
tgaacaggcaaccta

SEQ ID NO: 1629236 - DNA, 15 bp, Homo sapiens
gaacaggcaacctac

SEQ ID NO: 1629237 - DNA, 15 bp, Homo sapiens
aacaggcaacctaca

SEQ ID NO: 1629238 - DNA, 15 bp, Homo sapiens
acaggcaacctacag

SEQ ID NO: 1629239 - DNA, 15 bp, Homo sapiens
caggcaacctacaga

SEQ ID NO: 1629240 - DNA, 15 bp, Homo sapiens
aggcaacctacagaa

SEQ ID NO: 1629241 - DNA, 15 bp, Homo sapiens
ggcaacctacagaat

SEQ ID NO: 1629242 - DNA, 15 bp, Homo sapiens
gcaacctacagaatg

SEQ ID NO: 1629243 - DNA, 15 bp, Homo sapiens
caacctacagaatgg

SEQ ID NO: 1629244 - DNA, 15 bp, Homo sapiens
aacctacagaatggg

SEQ ID NO: 1629245 - DNA, 15 bp, Homo sapiens
acctacagaatggga

SEQ ID NO: 1629246 - DNA, 15 bp, Homo sapiens
cctacagaatgggag

SEQ ID NO: 1629247 - DNA, 15 bp, Homo sapiens
ctacagaatgggaga

SEQ ID NO: 1629248 - DNA, 15 bp, Homo sapiens
tacagaatgggagaa

SEQ ID NO: 1629249 - DNA, 15 bp, Homo sapiens
acagaatgggagaag

SEQ ID NO: 1629250 - DNA, 15 bp, Homo sapiens
cagaatgggagaaga

SEQ ID NO: 1629251 - DNA, 15 bp, Homo sapiens
agaatgggagaagat

SEQ ID NO: 1629252 - DNA, 15 bp, Homo sapiens
gaatgggagaagatt

SEQ ID NO: 1629253 - DNA, 15 bp, Homo sapiens
aatgggagaagattt

SEQ ID NO: 1629254 - DNA, 15 bp, Homo sapiens
atgggagaagatttt

SEQ ID NO: 1629255 - DNA, 15 bp, Homo sapiens
tgggagaagattttt

SEQ ID NO: 1629256 - DNA, 15 bp, Homo sapiens
gggagaagatttttg

SEQ ID NO: 1629257 - DNA, 15 bp, Homo sapiens
ggagaagatttttgc

SEQ ID NO: 1629258 - DNA, 15 bp, Homo sapiens
gagaagatttttgca

SEQ ID NO: 1629259 - DNA, 15 bp, Homo sapiens
agaagatttttgcaa

SEQ ID NO: 1629260 - DNA, 15 bp, Homo sapiens
gaagatttttgcaac

SEQ ID NO: 1629261 - DNA, 15 bp, Homo sapiens
aagatttttgcaacg

SEQ ID NO: 1629262 - DNA, 15 bp, Homo sapiens
agatttttgcaacgt

SEQ ID NO: 1629263 - DNA, 15 bp, Homo sapiens
gatttttgcaacgta

SEQ ID NO: 1629264 - DNA, 15 bp, Homo sapiens
atttttgcaacgtat

SEQ ID NO: 1629265 - DNA, 15 bp, Homo sapiens
tttttgcaacgtatc

SEQ ID NO: 1629266 - DNA, 15 bp, Homo sapiens
ttttgcaacgtatcc

SEQ ID NO: 1629267 - DNA, 15 bp, Homo sapiens
tttgcaacgtatcca

SEQ ID NO: 1629268 - DNA, 15 bp, Homo sapiens
ttgcaacgtatccat

SEQ ID NO: 1629269 - DNA, 15 bp, Homo sapiens
tgcaacgtatccatc

SEQ ID NO: 1629270 - DNA, 15 bp, Homo sapiens
gcaacgtatccatct

SEQ ID NO: 1629271 - DNA, 15 bp, Homo sapiens
caacgtatccatctg

SEQ ID NO: 1629272 - DNA, 15 bp, Homo sapiens
aacgtatccatctga

SEQ ID NO: 1629273 - DNA, 15 bp, Homo sapiens
acgtatccatctgac

SEQ ID NO: 1629274 - DNA, 15 bp, Homo sapiens
cgtatccatctgaca

SEQ ID NO: 1629275 - DNA, 15 bp, Homo sapiens
gtatccatctgacaa

SEQ ID NO: 1629276 - DNA, 15 bp, Homo sapiens
tatccatctgacaaa

SEQ ID NO: 1629277 - DNA, 15 bp, Homo sapiens
atccatctgacaaag

SEQ ID NO: 1629278 - DNA, 15 bp, Homo sapiens
tccatctgacaaagg

SEQ ID NO: 1629279 - DNA, 15 bp, Homo sapiens
ccatctgacaaaggg

SEQ ID NO: 1629280 - DNA, 15 bp, Homo sapiens
catctgacaaagggc

SEQ ID NO: 1629281 - DNA, 15 bp, Homo sapiens
atctgacaaagggct

SEQ ID NO: 1629282 - DNA, 15 bp, Homo sapiens
tctgacaaagggcta

SEQ ID NO: 1629283 - DNA, 15 bp, Homo sapiens
ctgacaaagggctaa

SEQ ID NO: 1629284 - DNA, 15 bp, Homo sapiens
tgacaaagggctaat

SEQ ID NO: 1629285 - DNA, 15 bp, Homo sapiens
gacaaagggctaata

SEQ ID NO: 1629286 - DNA, 15 bp, Homo sapiens
acaaagggctaatat

SEQ ID NO: 1629287 - DNA, 15 bp, Homo sapiens
caaagggctaatatc

SEQ ID NO: 1629288 - DNA, 15 bp, Homo sapiens
aaagggctaatatcc

SEQ ID NO: 1629289 - DNA, 15 bp, Homo sapiens
aagggctaatatcca

SEQ ID NO: 1629290 - DNA, 15 bp, Homo sapiens
agggctaatatccag

SEQ ID NO: 1629291 - DNA, 15 bp, Homo sapiens
gggctaatatccaga

SEQ ID NO: 1629292 - DNA, 15 bp, Homo sapiens
ggctaatatccagaa

SEQ ID NO: 1629293 - DNA, 15 bp, Homo sapiens
gctaatatccagaat

SEQ ID NO: 1629294 - DNA, 15 bp, Homo sapiens
ctaatatccagaatc

SEQ ID NO: 1629295 - DNA, 15 bp, Homo sapiens
taatatccagaatct

SEQ ID NO: 1629296 - DNA, 15 bp, Homo sapiens
aatatccagaatcta

SEQ ID NO: 1629297 - DNA, 15 bp, Homo sapiens
atatccagaatctac

SEQ ID NO: 1629298 - DNA, 15 bp, Homo sapiens
tatccagaatctaca

SEQ ID NO: 1629299 - DNA, 15 bp, Homo sapiens
atccagaatctacaa

SEQ ID NO: 1629300 - DNA, 15 bp, Homo sapiens
tccagaatctacaaa

SEQ ID NO: 1629301 - DNA, 15 bp, Homo sapiens
ccagaatctacaaag

SEQ ID NO: 1629302 - DNA, 15 bp, Homo sapiens
cagaatctacaaaga

SEQ ID NO: 1629303 - DNA, 15 bp, Homo sapiens
agaatctacaaagaa

SEQ ID NO: 1629304 - DNA, 15 bp, Homo sapiens
gaatctacaaagaac

SEQ ID NO: 1629305 - DNA, 15 bp, Homo sapiens
aatctacaaagaact

SEQ ID NO: 1629306 - DNA, 15 bp, Homo sapiens
atctacaaagaactt

SEQ ID NO: 1629307 - DNA, 15 bp, Homo sapiens
tctacaaagaactta

SEQ ID NO: 1629308 - DNA, 15 bp, Homo sapiens
ctacaaagaacttaa

SEQ ID NO: 1629309 - DNA, 15 bp, Homo sapiens
tacaaagaacttaaa

SEQ ID NO: 1629310 - DNA, 15 bp, Homo sapiens
acaaagaacttaaac

SEQ ID NO: 1629311 - DNA, 15 bp, Homo sapiens
caaagaacttaaaca

SEQ ID NO: 1629312 - DNA, 15 bp, Homo sapiens
aaagaacttaaacaa

SEQ ID NO: 1629313 - DNA, 15 bp, Homo sapiens
aagaacttaaacaaa

SEQ ID NO: 1629314 - DNA, 15 bp, Homo sapiens
agaacttaaacaaat

SEQ ID NO: 1629315 - DNA, 15 bp, Homo sapiens
gaacttaaacaaatt

SEQ ID NO: 1629316 - DNA, 15 bp, Homo sapiens
aacttaaacaaattt

SEQ ID NO: 1629317 - DNA, 15 bp, Homo sapiens
acttaaacaaattta

SEQ ID NO: 1629318 - DNA, 15 bp, Homo sapiens
cttaaacaaatttac

SEQ ID NO: 1629319 - DNA, 15 bp, Homo sapiens
ttaaacaaatttaca

SEQ ID NO: 1629320 - DNA, 15 bp, Homo sapiens
taaacaaatttacaa

SEQ ID NO: 1629321 - DNA, 15 bp, Homo sapiens
aaacaaatttacaag

SEQ ID NO: 1629322 - DNA, 15 bp, Homo sapiens
aacaaatttacaaga

SEQ ID NO: 1629323 - DNA, 15 bp, Homo sapiens
acaaatttacaagaa

SEQ ID NO: 1629324 - DNA, 15 bp, Homo sapiens
caaatttacaagaaa

SEQ ID NO: 1629325 - DNA, 15 bp, Homo sapiens
aaatttacaagaaaa

SEQ ID NO: 1629326 - DNA, 15 bp, Homo sapiens
aatttacaagaaaaa

SEQ ID NO: 1629327 - DNA, 15 bp, Homo sapiens
atttacaagaaaaaa

SEQ ID NO: 1629328 - DNA, 15 bp, Homo sapiens
tttacaagaaaaaaa

SEQ ID NO: 1629329 - DNA, 15 bp, Homo sapiens
ttacaagaaaaaaac

SEQ ID NO: 1629330 - DNA, 15 bp, Homo sapiens
tacaagaaaaaaaca

SEQ ID NO: 1629331 - DNA, 15 bp, Homo sapiens
acaagaaaaaaacaa

SEQ ID NO: 1629332 - DNA, 15 bp, Homo sapiens
caagaaaaaaacaaa

SEQ ID NO: 1629333 - DNA, 15 bp, Homo sapiens
aagaaaaaaacaaac

SEQ ID NO: 1629334 - DNA, 15 bp, Homo sapiens
agaaaaaaacaaaca

SEQ ID NO: 1629335 - DNA, 15 bp, Homo sapiens
gaaaaaaacaaacaa

SEQ ID NO: 1629336 - DNA, 15 bp, Homo sapiens
aaaaaaacaaacaac

SEQ ID NO: 1629337 - DNA, 15 bp, Homo sapiens
aaaaaacaaacaacc

SEQ ID NO: 1629338 - DNA, 15 bp, Homo sapiens
aaaaacaaacaaccc

SEQ ID NO: 1629339 - DNA, 15 bp, Homo sapiens
aaaacaaacaacccc

SEQ ID NO: 1629340 - DNA, 15 bp, Homo sapiens
aaacaaacaacccca

SEQ ID NO: 1629341 - DNA, 15 bp, Homo sapiens
aacaaacaaccccat

SEQ ID NO: 1629342 - DNA, 15 bp, Homo sapiens
acaaacaaccccatc

SEQ ID NO: 1629343 - DNA, 15 bp, Homo sapiens
caaacaaccccatca

SEQ ID NO: 1629344 - DNA, 15 bp, Homo sapiens
aaacaaccccatcaa

SEQ ID NO: 1629345 - DNA, 15 bp, Homo sapiens
aacaaccccatcaaa

SEQ ID NO: 1629346 - DNA, 15 bp, Homo sapiens
acaaccccatcaaaa

SEQ ID NO: 1629347 - DNA, 15 bp, Homo sapiens
caaccccatcaaaaa

SEQ ID NO: 1629348 - DNA, 15 bp, Homo sapiens
aaccccatcaaaaag

SEQ ID NO: 1629349 - DNA, 15 bp, Homo sapiens
accccatcaaaaagt

SEQ ID NO: 1629350 - DNA, 15 bp, Homo sapiens
ccccatcaaaaagtg

SEQ ID NO: 1629351 - DNA, 15 bp, Homo sapiens
cccatcaaaaagtgg

SEQ ID NO: 1629352 - DNA, 15 bp, Homo sapiens
ccatcaaaaagtggg

SEQ ID NO: 1629353 - DNA, 15 bp, Homo sapiens
catcaaaaagtgggc

SEQ ID NO: 1629354 - DNA, 15 bp, Homo sapiens
atcaaaaagtgggca

SEQ ID NO: 1629355 - DNA, 15 bp, Homo sapiens
tcaaaaagtgggcaa

SEQ ID NO: 1629356 - DNA, 15 bp, Homo sapiens
caaaaagtgggcaaa

SEQ ID NO: 1629357 - DNA, 15 bp, Homo sapiens
aaaaagtgggcaaag

SEQ ID NO: 1629358 - DNA, 15 bp, Homo sapiens
aaaagtgggcaaagg

SEQ ID NO: 1629359 - DNA, 15 bp, Homo sapiens
aaagtgggcaaagga

SEQ ID NO: 1629360 - DNA, 15 bp, Homo sapiens
aagtgggcaaaggat

SEQ ID NO: 1629361 - DNA, 15 bp, Homo sapiens
agtgggcaaaggata

SEQ ID NO: 1629362 - DNA, 15 bp, Homo sapiens
gtgggcaaaggatat

SEQ ID NO: 1629363 - DNA, 15 bp, Homo sapiens
tgggcaaaggatatg

SEQ ID NO: 1629364 - DNA, 15 bp, Homo sapiens
gggcaaaggatatga

SEQ ID NO: 1629365 - DNA, 15 bp, Homo sapiens
ggcaaaggatatgaa

SEQ ID NO: 1629366 - DNA, 15 bp, Homo sapiens
gcaaaggatatgaac

SEQ ID NO: 1629367 - DNA, 15 bp, Homo sapiens
caaaggatatgaaca

SEQ ID NO: 1629368 - DNA, 15 bp, Homo sapiens
aaaggatatgaacag

SEQ ID NO: 1629369 - DNA, 15 bp, Homo sapiens
gatatgaacagacac

SEQ ID NO: 1629370 - DNA, 15 bp, Homo sapiens
atatgaacagacact

SEQ ID NO: 1629371 - DNA, 15 bp, Homo sapiens
tatgaacagacactt

SEQ ID NO: 1629372 - DNA, 15 bp, Homo sapiens
atgaacagacacttt

SEQ ID NO: 1629373 - DNA, 15 bp, Homo sapiens
tgaacagacactttt

SEQ ID NO: 1629374 - DNA, 15 bp, Homo sapiens
gaacagacacttttc

SEQ ID NO: 1629375 - DNA, 15 bp, Homo sapiens
aacagacacttttca

SEQ ID NO: 1629376 - DNA, 15 bp, Homo sapiens
acagacacttttcaa

SEQ ID NO: 1629377 - DNA, 15 bp, Homo sapiens
cagacacttttcaaa

SEQ ID NO: 1629378 - DNA, 15 bp, Homo sapiens
agacacttttcaaaa

SEQ ID NO: 1629379 - DNA, 15 bp, Homo sapiens
gacacttttcaaaag

SEQ ID NO: 1629380 - DNA, 15 bp, Homo sapiens
acacttttcaaaaga

SEQ ID NO: 1629381 - DNA, 15 bp, Homo sapiens
cacttttcaaaagaa

SEQ ID NO: 1629382 - DNA, 15 bp, Homo sapiens
acttttcaaaagaag

SEQ ID NO: 1629383 - DNA, 15 bp, Homo sapiens
cttttcaaaagaaga

SEQ ID NO: 1629384 - DNA, 15 bp, Homo sapiens
ttttcaaaagaagac

SEQ ID NO: 1629385 - DNA, 15 bp, Homo sapiens
tttcaaaagaagaca

SEQ ID NO: 1629386 - DNA, 15 bp, Homo sapiens
ttcaaaagaagacat

SEQ ID NO: 1629387 - DNA, 15 bp, Homo sapiens
tcaaaagaagacatt

SEQ ID NO: 1629388 - DNA, 15 bp, Homo sapiens
caaaagaagacattt

SEQ ID NO: 1629389 - DNA, 15 bp, Homo sapiens
aaaagaagacattta

SEQ ID NO: 1629390 - DNA, 15 bp, Homo sapiens
aaagaagacatttat

SEQ ID NO: 1629391 - DNA, 15 bp, Homo sapiens
aagaagacatttatg

SEQ ID NO: 1629392 - DNA, 15 bp, Homo sapiens
agaagacatttatgt

SEQ ID NO: 1629393 - DNA, 15 bp, Homo sapiens
gaagacatttatgtg

SEQ ID NO: 1629394 - DNA, 15 bp, Homo sapiens
aagacatttatgtgg

SEQ ID NO: 1629395 - DNA, 15 bp, Homo sapiens
agacatttatgtggc

SEQ ID NO: 1629396 - DNA, 15 bp, Homo sapiens
gacatttatgtggcc

SEQ ID NO: 1629397 - DNA, 15 bp, Homo sapiens
acatttatgtggcca

SEQ ID NO: 1629398 - DNA, 15 bp, Homo sapiens
catttatgtggccaa

SEQ ID NO: 1629399 - DNA, 15 bp, Homo sapiens
atttatgtggccaaa

SEQ ID NO: 1629400 - DNA, 15 bp, Homo sapiens
tttatgtggccaaaa

SEQ ID NO: 1629401 - DNA, 15 bp, Homo sapiens
ttatgtggccaaaaa

SEQ ID NO: 1629402 - DNA, 15 bp, Homo sapiens
tatgtggccaaaaaa

SEQ ID NO: 1629403 - DNA, 15 bp, Homo sapiens
atgtggccaaaaaat

SEQ ID NO: 1629404 - DNA, 15 bp, Homo sapiens
tgtggccaaaaaata

SEQ ID NO: 1629405 - DNA, 15 bp, Homo sapiens
gtggccaaaaaatat

SEQ ID NO: 1629406 - DNA, 15 bp, Homo sapiens
tggccaaaaaatata

SEQ ID NO: 1629407 - DNA, 15 bp, Homo sapiens
ggccaaaaaatatat

SEQ ID NO: 1629408 - DNA, 15 bp, Homo sapiens
gccaaaaaatatatg

SEQ ID NO: 1629409 - DNA, 15 bp, Homo sapiens
ccaaaaaatatatga

SEQ ID NO: 1629410 - DNA, 15 bp, Homo sapiens
caaaaaatatatgaa

SEQ ID NO: 1629411 - DNA, 15 bp, Homo sapiens
aaaaaatatatgaaa

SEQ ID NO: 1629412 - DNA, 15 bp, Homo sapiens
aaaaatatatgaaaa

SEQ ID NO: 1629413 - DNA, 15 bp, Homo sapiens
aaaatatatgaaaaa

SEQ ID NO: 1629414 - DNA, 15 bp, Homo sapiens
aaatatatgaaaaaa

SEQ ID NO: 1629415 - DNA, 15 bp, Homo sapiens
aatatatgaaaaaag

SEQ ID NO: 1629416 - DNA, 15 bp, Homo sapiens
atatatgaaaaaagc

SEQ ID NO: 1629417 - DNA, 15 bp, Homo sapiens
tatatgaaaaaagct

SEQ ID NO: 1629418 - DNA, 15 bp, Homo sapiens
atatgaaaaaagctc

SEQ ID NO: 1629419 - DNA, 15 bp, Homo sapiens
tatgaaaaaagctct

SEQ ID NO: 1629420 - DNA, 15 bp, Homo sapiens
atgaaaaaagctctt

SEQ ID NO: 1629421 - DNA, 15 bp, Homo sapiens
tgaaaaaagctcttc

SEQ ID NO: 1629422 - DNA, 15 bp, Homo sapiens
gaaaaaagctcttca

SEQ ID NO: 1629423 - DNA, 15 bp, Homo sapiens
aaaaaagctcttcat

SEQ ID NO: 1629424 - DNA, 15 bp, Homo sapiens
aaaaagctcttcatc

SEQ ID NO: 1629425 - DNA, 15 bp, Homo sapiens
aaaagctcttcatca

SEQ ID NO: 1629426 - DNA, 15 bp, Homo sapiens
aaagctcttcatcac

SEQ ID NO: 1629427 - DNA, 15 bp, Homo sapiens
aagctcttcatcact

SEQ ID NO: 1629428 - DNA, 15 bp, Homo sapiens
agctcttcatcactg

SEQ ID NO: 1629429 - DNA, 15 bp, Homo sapiens
gctcttcatcactgg

SEQ ID NO: 1629430 - DNA, 15 bp, Homo sapiens
ctcttcatcactggt

SEQ ID NO: 1629431 - DNA, 15 bp, Homo sapiens
tcttcatcactggtc

SEQ ID NO: 1629432 - DNA, 15 bp, Homo sapiens
cttcatcactggtca

SEQ ID NO: 1629433 - DNA, 15 bp, Homo sapiens
ttcatcactggtcat

SEQ ID NO: 1629434 - DNA, 15 bp, Homo sapiens
tcatcactggtcatt

SEQ ID NO: 1629435 - DNA, 15 bp, Homo sapiens
catcactggtcatta

SEQ ID NO: 1629436 - DNA, 15 bp, Homo sapiens
atcactggtcattag

SEQ ID NO: 1629437 - DNA, 15 bp, Homo sapiens
tcactggtcattaga

SEQ ID NO: 1629438 - DNA, 15 bp, Homo sapiens
cactggtcattagag

SEQ ID NO: 1629439 - DNA, 15 bp, Homo sapiens
actggtcattagaga

SEQ ID NO: 1629440 - DNA, 15 bp, Homo sapiens
ctggtcattagagaa

SEQ ID NO: 1629441 - DNA, 15 bp, Homo sapiens
tggtcattagagaaa

SEQ ID NO: 1629442 - DNA, 15 bp, Homo sapiens
ggtcattagagaaat

SEQ ID NO: 1629443 - DNA, 15 bp, Homo sapiens
gtcattagagaaatg

SEQ ID NO: 1629444 - DNA, 15 bp, Homo sapiens
tcattagagaaatgc

SEQ ID NO: 1629445 - DNA, 15 bp, Homo sapiens
cattagagaaatgca

SEQ ID NO: 1629446 - DNA, 15 bp, Homo sapiens
attagagaaatgcaa

SEQ ID NO: 1629447 - DNA, 15 bp, Homo sapiens
ttagagaaatgcaaa

SEQ ID NO: 1629448 - DNA, 15 bp, Homo sapiens
tagagaaatgcaaat

SEQ ID NO: 1629449 - DNA, 15 bp, Homo sapiens
agagaaatgcaaatc

SEQ ID NO: 1629450 - DNA, 15 bp, Homo sapiens
gagaaatgcaaatca

SEQ ID NO: 1629451 - DNA, 15 bp, Homo sapiens
agaaatgcaaatcaa

SEQ ID NO: 1629452 - DNA, 15 bp, Homo sapiens
gaaatgcaaatcaaa

SEQ ID NO: 1629453 - DNA, 15 bp, Homo sapiens
gagataccatctcat

SEQ ID NO: 1629454 - DNA, 15 bp, Homo sapiens
agataccatctcatg

SEQ ID NO: 1629455 - DNA, 15 bp, Homo sapiens
gataccatctcatgc

SEQ ID NO: 1629456 - DNA, 15 bp, Homo sapiens
ataccatctcatgcc

SEQ ID NO: 1629457 - DNA, 15 bp, Homo sapiens
taccatctcatgcca

SEQ ID NO: 1629458 - DNA, 15 bp, Homo sapiens
accatctcatgccag

SEQ ID NO: 1629459 - DNA, 15 bp, Homo sapiens
ccatctcatgccagt

SEQ ID NO: 1629460 - DNA, 15 bp, Homo sapiens
catctcatgccagtt

SEQ ID NO: 1629461 - DNA, 15 bp, Homo sapiens
atctcatgccagtta

SEQ ID NO: 1629462 - DNA, 15 bp, Homo sapiens
tctcatgccagttag

SEQ ID NO: 1629463 - DNA, 15 bp, Homo sapiens
ctcatgccagttaga

SEQ ID NO: 1629464 - DNA, 15 bp, Homo sapiens
tcatgccagttagaa

SEQ ID NO: 1629465 - DNA, 15 bp, Homo sapiens
catgccagttagaat

SEQ ID NO: 1629466 - DNA, 15 bp, Homo sapiens
atgccagttagaatg

SEQ ID NO: 1629467 - DNA, 15 bp, Homo sapiens
tgccagttagaatgg

SEQ ID NO: 1629468 - DNA, 15 bp, Homo sapiens
gccagttagaatggc

SEQ ID NO: 1629469 - DNA, 15 bp, Homo sapiens
cgatcattaaaaagc

SEQ ID NO: 1629470 - DNA, 15 bp, Homo sapiens
gatcattaaaaagcc

SEQ ID NO: 1629471 - DNA, 15 bp, Homo sapiens
atcattaaaaagcca

SEQ ID NO: 1629472 - DNA, 15 bp, Homo sapiens
tcattaaaaagccag

SEQ ID NO: 1629473 - DNA, 15 bp, Homo sapiens
cattaaaaagccagg

SEQ ID NO: 1629474 - DNA, 15 bp, Homo sapiens
attaaaaagccagga

SEQ ID NO: 1629475 - DNA, 15 bp, Homo sapiens
ttaaaaagccaggaa

SEQ ID NO: 1629476 - DNA, 15 bp, Homo sapiens
taaaaagccaggaaa

SEQ ID NO: 1629477 - DNA, 15 bp, Homo sapiens
aaaaagccaggaaac

SEQ ID NO: 1629478 - DNA, 15 bp, Homo sapiens
aaaagccaggaaaca

SEQ ID NO: 1629479 - DNA, 15 bp, Homo sapiens
aaagccaggaaacaa

SEQ ID NO: 1629480 - DNA, 15 bp, Homo sapiens
aagccaggaaacaac

SEQ ID NO: 1629481 - DNA, 15 bp, Homo sapiens
agccaggaaacaaca

SEQ ID NO: 1629482 - DNA, 15 bp, Homo sapiens
gccaggaaacaacag

SEQ ID NO: 1629483 - DNA, 15 bp, Homo sapiens
ccaggaaacaacaga

SEQ ID NO: 1629484 - DNA, 15 bp, Homo sapiens
caggaaacaacagat

SEQ ID NO: 1629485 - DNA, 15 bp, Homo sapiens
aggaaacaacagatg

SEQ ID NO: 1629486 - DNA, 15 bp, Homo sapiens
ggaaacaacagatgc

SEQ ID NO: 1629487 - DNA, 15 bp, Homo sapiens
gaaacaacagatgct

SEQ ID NO: 1629488 - DNA, 15 bp, Homo sapiens
aaacaacagatgctg

SEQ ID NO: 1629489 - DNA, 15 bp, Homo sapiens
aacaacagatgctga

SEQ ID NO: 1629490 - DNA, 15 bp, Homo sapiens
acaacagatgctgaa

SEQ ID NO: 1629491 - DNA, 15 bp, Homo sapiens
caacagatgctgaag

SEQ ID NO: 1629492 - DNA, 15 bp, Homo sapiens
aacagatgctgaaga

SEQ ID NO: 1629493 - DNA, 15 bp, Homo sapiens
acagatgctgaagag

SEQ ID NO: 1629494 - DNA, 15 bp, Homo sapiens
cagatgctgaagagg

SEQ ID NO: 1629495 - DNA, 15 bp, Homo sapiens
agatgctgaagagga

SEQ ID NO: 1629496 - DNA, 15 bp, Homo sapiens
gatgctgaagaggat

SEQ ID NO: 1629497 - DNA, 15 bp, Homo sapiens
atgctgaagaggatt

SEQ ID NO: 1629498 - DNA, 15 bp, Homo sapiens
tgctgaagaggattt

SEQ ID NO: 1629499 - DNA, 15 bp, Homo sapiens
gctgaagaggatttg

SEQ ID NO: 1629500 - DNA, 15 bp, Homo sapiens
ctgaagaggatttgg

SEQ ID NO: 1629501 - DNA, 15 bp, Homo sapiens
tgaagaggatttgga

SEQ ID NO: 1629502 - DNA, 15 bp, Homo sapiens
gaagaggatttggag

SEQ ID NO: 1629503 - DNA, 15 bp, Homo sapiens
aagaggatttggaga

SEQ ID NO: 1629504 - DNA, 15 bp, Homo sapiens
agaggatttggagaa

SEQ ID NO: 1629505 - DNA, 15 bp, Homo sapiens
gaggatttggagaaa

SEQ ID NO: 1629506 - DNA, 15 bp, Homo sapiens
aggatttggagaaat

SEQ ID NO: 1629507 - DNA, 15 bp, Homo sapiens
ggatttggagaaata

SEQ ID NO: 1629508 - DNA, 15 bp, Homo sapiens
gatttggagaaatag

SEQ ID NO: 1629509 - DNA, 15 bp, Homo sapiens
atttggagaaataga

SEQ ID NO: 1629510 - DNA, 15 bp, Homo sapiens
tttggagaaatagag

SEQ ID NO: 1629511 - DNA, 15 bp, Homo sapiens
ttggagaaatagagg

SEQ ID NO: 1629512 - DNA, 15 bp, Homo sapiens
tggagaaatagagga

SEQ ID NO: 1629513 - DNA, 15 bp, Homo sapiens
ggagaaatagaggaa

SEQ ID NO: 1629514 - DNA, 15 bp, Homo sapiens
gagaaatagaggaaa

SEQ ID NO: 1629515 - DNA, 15 bp, Homo sapiens
agaaatagaggaaat

SEQ ID NO: 1629516 - DNA, 15 bp, Homo sapiens
gaaatagaggaaatg

SEQ ID NO: 1629517 - DNA, 15 bp, Homo sapiens
aaatagaggaaatgc

SEQ ID NO: 1629518 - DNA, 15 bp, Homo sapiens
aatagaggaaatgct

SEQ ID NO: 1629519 - DNA, 15 bp, Homo sapiens
atagaggaaatgctt

SEQ ID NO: 1629520 - DNA, 15 bp, Homo sapiens
tagaggaaatgcttt

SEQ ID NO: 1629521 - DNA, 15 bp, Homo sapiens
agaggaaatgctttt

SEQ ID NO: 1629522 - DNA, 15 bp, Homo sapiens
gaggaaatgctttta

SEQ ID NO: 1629523 - DNA, 15 bp, Homo sapiens
aggaaatgcttttac

SEQ ID NO: 1629524 - DNA, 15 bp, Homo sapiens
ggaaatgcttttaca

SEQ ID NO: 1629525 - DNA, 15 bp, Homo sapiens
gaaatgcttttacac

SEQ ID NO: 1629526 - DNA, 15 bp, Homo sapiens
aaatgcttttacact

SEQ ID NO: 1629527 - DNA, 15 bp, Homo sapiens
aatgcttttacactg

SEQ ID NO: 1629528 - DNA, 15 bp, Homo sapiens
atgcttttacactgt

SEQ ID NO: 1629529 - DNA, 15 bp, Homo sapiens
tgcttttacactgtt

SEQ ID NO: 1629530 - DNA, 15 bp, Homo sapiens
gcttttacactgttg

SEQ ID NO: 1629531 - DNA, 15 bp, Homo sapiens
cttttacactgttga

SEQ ID NO: 1629532 - DNA, 15 bp, Homo sapiens
ttttacactgttgat

SEQ ID NO: 1629533 - DNA, 15 bp, Homo sapiens
tttacactgttgatg

SEQ ID NO: 1629534 - DNA, 15 bp, Homo sapiens
ttacactgttgatgg

SEQ ID NO: 1629535 - DNA, 15 bp, Homo sapiens
tacactgttgatggg

SEQ ID NO: 1629536 - DNA, 15 bp, Homo sapiens
acactgttgatggga

SEQ ID NO: 1629537 - DNA, 15 bp, Homo sapiens
cactgttgatgggag

SEQ ID NO: 1629538 - DNA, 15 bp, Homo sapiens
actgttgatgggagt

SEQ ID NO: 1629539 - DNA, 15 bp, Homo sapiens
ctgttgatgggagtg

SEQ ID NO: 1629540 - DNA, 15 bp, Homo sapiens
tgttgatgggagtgt

SEQ ID NO: 1629541 - DNA, 15 bp, Homo sapiens
gttgatgggagtgta

SEQ ID NO: 1629542 - DNA, 15 bp, Homo sapiens
ttgatgggagtgtaa

SEQ ID NO: 1629543 - DNA, 15 bp, Homo sapiens
tgatgggagtgtaaa

SEQ ID NO: 1629544 - DNA, 15 bp, Homo sapiens
gatgggagtgtaaat

SEQ ID NO: 1629545 - DNA, 15 bp, Homo sapiens
atgggagtgtaaatt

SEQ ID NO: 1629546 - DNA, 15 bp, Homo sapiens
tgggagtgtaaatta

SEQ ID NO: 1629547 - DNA, 15 bp, Homo sapiens
gggagtgtaaattag

SEQ ID NO: 1629548 - DNA, 15 bp, Homo sapiens
ggagtgtaaattagt

SEQ ID NO: 1629549 - DNA, 15 bp, Homo sapiens
gagtgtaaattagtt

SEQ ID NO: 1629550 - DNA, 15 bp, Homo sapiens
agtgtaaattagttc

SEQ ID NO: 1629551 - DNA, 15 bp, Homo sapiens
gtgtaaattagttca

SEQ ID NO: 1629552 - DNA, 15 bp, Homo sapiens
tgtaaattagttcaa

SEQ ID NO: 1629553 - DNA, 15 bp, Homo sapiens
gtaaattagttcaac

SEQ ID NO: 1629554 - DNA, 15 bp, Homo sapiens
taaattagttcaacc

SEQ ID NO: 1629555 - DNA, 15 bp, Homo sapiens
aaattagttcaacca

SEQ ID NO: 1629556 - DNA, 15 bp, Homo sapiens
aattagttcaaccat

SEQ ID NO: 1629557 - DNA, 15 bp, Homo sapiens
attagttcaaccatt

SEQ ID NO: 1629558 - DNA, 15 bp, Homo sapiens
ttagttcaaccattg

SEQ ID NO: 1629559 - DNA, 15 bp, Homo sapiens
tagttcaaccattgt

SEQ ID NO: 1629560 - DNA, 15 bp, Homo sapiens
agttcaaccattgtg

SEQ ID NO: 1629561 - DNA, 15 bp, Homo sapiens
gttcaaccattgtgg

SEQ ID NO: 1629562 - DNA, 15 bp, Homo sapiens
ttcaaccattgtgga

SEQ ID NO: 1629563 - DNA, 15 bp, Homo sapiens
tcaaccattgtggaa

SEQ ID NO: 1629564 - DNA, 15 bp, Homo sapiens
caaccattgtggaag

SEQ ID NO: 1629565 - DNA, 15 bp, Homo sapiens
aaccattgtggaaga

SEQ ID NO: 1629566 - DNA, 15 bp, Homo sapiens
accattgtggaagac

SEQ ID NO: 1629567 - DNA, 15 bp, Homo sapiens
ccattgtggaagaca

SEQ ID NO: 1629568 - DNA, 15 bp, Homo sapiens
ggaagacagtgtggc

SEQ ID NO: 1629569 - DNA, 15 bp, Homo sapiens
gaagacagtgtggca

SEQ ID NO: 1629570 - DNA, 15 bp, Homo sapiens
aagacagtgtggcaa

SEQ ID NO: 1629571 - DNA, 15 bp, Homo sapiens
agacagtgtggcaat

SEQ ID NO: 1629572 - DNA, 15 bp, Homo sapiens
gacagtgtggcaatt

SEQ ID NO: 1629573 - DNA, 15 bp, Homo sapiens
acagtgtggcaattc

SEQ ID NO: 1629574 - DNA, 15 bp, Homo sapiens
cagtgtggcaattct

SEQ ID NO: 1629575 - DNA, 15 bp, Homo sapiens
agtgtggcaattctt

SEQ ID NO: 1629576 - DNA, 15 bp, Homo sapiens
gtgtggcaattcttc

SEQ ID NO: 1629577 - DNA, 15 bp, Homo sapiens
tgtggcaattcttca

SEQ ID NO: 1629578 - DNA, 15 bp, Homo sapiens
gtggcaattcttcaa

SEQ ID NO: 1629579 - DNA, 15 bp, Homo sapiens
tggcaattcttcaag

SEQ ID NO: 1629580 - DNA, 15 bp, Homo sapiens
ggcaattcttcaagg

SEQ ID NO: 1629581 - DNA, 15 bp, Homo sapiens
gcaattcttcaagga

SEQ ID NO: 1629582 - DNA, 15 bp, Homo sapiens
caattcttcaaggat

SEQ ID NO: 1629583 - DNA, 15 bp, Homo sapiens
aattcttcaaggatc

SEQ ID NO: 1629584 - DNA, 15 bp, Homo sapiens
attcttcaaggatct

SEQ ID NO: 1629585 - DNA, 15 bp, Homo sapiens
ttcttcaaggatcta

SEQ ID NO: 1629586 - DNA, 15 bp, Homo sapiens
tcttcaaggatctag

SEQ ID NO: 1629587 - DNA, 15 bp, Homo sapiens
cttcaaggatctaga

SEQ ID NO: 1629588 - DNA, 15 bp, Homo sapiens
ttcaaggatctagaa

SEQ ID NO: 1629589 - DNA, 15 bp, Homo sapiens
caaggatctagaacc

SEQ ID NO: 1629590 - DNA, 15 bp, Homo sapiens
aaggatctagaacca

SEQ ID NO: 1629591 - DNA, 15 bp, Homo sapiens
aggatctagaaccag

SEQ ID NO: 1629592 - DNA, 15 bp, Homo sapiens
ggatctagaaccaga

SEQ ID NO: 1629593 - DNA, 15 bp, Homo sapiens
gatctagaaccagaa

SEQ ID NO: 1629594 - DNA, 15 bp, Homo sapiens
atctagaaccagaaa

SEQ ID NO: 1629595 - DNA, 15 bp, Homo sapiens
tctagaaccagaaat

SEQ ID NO: 1629596 - DNA, 15 bp, Homo sapiens
ctagaaccagaaata

SEQ ID NO: 1629597 - DNA, 15 bp, Homo sapiens
tagaaccagaaatac

SEQ ID NO: 1629598 - DNA, 15 bp, Homo sapiens
agaaccagaaataca

SEQ ID NO: 1629599 - DNA, 15 bp, Homo sapiens
gaaccagaaatacaa

SEQ ID NO: 1629600 - DNA, 15 bp, Homo sapiens
aaccagaaatacaat

SEQ ID NO: 1629601 - DNA, 15 bp, Homo sapiens
accagaaatacaatt

SEQ ID NO: 1629602 - DNA, 15 bp, Homo sapiens
ccagaaatacaattt

SEQ ID NO: 1629603 - DNA, 15 bp, Homo sapiens
cagaaatacaatttg

SEQ ID NO: 1629604 - DNA, 15 bp, Homo sapiens
agaaatacaatttga

SEQ ID NO: 1629605 - DNA, 15 bp, Homo sapiens
gaaatacaatttgac

SEQ ID NO: 1629606 - DNA, 15 bp, Homo sapiens
aaatacaatttgacc

SEQ ID NO: 1629607 - DNA, 15 bp, Homo sapiens
aatacaatttgaccc

SEQ ID NO: 1629608 - DNA, 15 bp, Homo sapiens
atacaatttgaccca

SEQ ID NO: 1629609 - DNA, 15 bp, Homo sapiens
tacaatttgacccag

SEQ ID NO: 1629610 - DNA, 15 bp, Homo sapiens
acaatttgacccagc

SEQ ID NO: 1629611 - DNA, 15 bp, Homo sapiens
caatttgacccagca

SEQ ID NO: 1629612 - DNA, 15 bp, Homo sapiens
aatttgacccagcaa

SEQ ID NO: 1629613 - DNA, 15 bp, Homo sapiens
atttgacccagcaat

SEQ ID NO: 1629614 - DNA, 15 bp, Homo sapiens
tttgacccagcaatc

SEQ ID NO: 1629615 - DNA, 15 bp, Homo sapiens
ttgacccagcaatcc

SEQ ID NO: 1629616 - DNA, 15 bp, Homo sapiens
tgacccagcaatccc

SEQ ID NO: 1629617 - DNA, 15 bp, Homo sapiens
gacccagcaatccca

SEQ ID NO: 1629618 - DNA, 15 bp, Homo sapiens
acccagcaatcccat

SEQ ID NO: 1629619 - DNA, 15 bp, Homo sapiens
cccagcaatcccatt

SEQ ID NO: 1629620 - DNA, 15 bp, Homo sapiens
ccagcaatcccatta

SEQ ID NO: 1629621 - DNA, 15 bp, Homo sapiens
cagcaatcccattac

SEQ ID NO: 1629622 - DNA, 15 bp, Homo sapiens
agcaatcccattact

SEQ ID NO: 1629623 - DNA, 15 bp, Homo sapiens
gcaatcccattactg

SEQ ID NO: 1629624 - DNA, 15 bp, Homo sapiens
caatcccattactgg

SEQ ID NO: 1629625 - DNA, 15 bp, Homo sapiens
aatcccattactggg

SEQ ID NO: 1629626 - DNA, 15 bp, Homo sapiens
atcccattactgggt

SEQ ID NO: 1629627 - DNA, 15 bp, Homo sapiens
tcccattactgggta

SEQ ID NO: 1629628 - DNA, 15 bp, Homo sapiens
cccattactgggtat

SEQ ID NO: 1629629 - DNA, 15 bp, Homo sapiens
ccattactgggtata

SEQ ID NO: 1629630 - DNA, 15 bp, Homo sapiens
gcacacgtatgttta

SEQ ID NO: 1629631 - DNA, 15 bp, Homo sapiens
cacacgtatgtttat

SEQ ID NO: 1629632 - DNA, 15 bp, Homo sapiens
acacgtatgtttatt

SEQ ID NO: 1629633 - DNA, 15 bp, Homo sapiens
cacgtatgtttattg

SEQ ID NO: 1629634 - DNA, 15 bp, Homo sapiens
acgtatgtttattgt

SEQ ID NO: 1629635 - DNA, 15 bp, Homo sapiens
cgtatgtttattgtg

SEQ ID NO: 1629636 - DNA, 15 bp, Homo sapiens
gtatgtttattgtgg

SEQ ID NO: 1629637 - DNA, 15 bp, Homo sapiens
tatgtttattgtggc

SEQ ID NO: 1629638 - DNA, 15 bp, Homo sapiens
atgtttattgtggca

SEQ ID NO: 1629639 - DNA, 15 bp, Homo sapiens
tgtttattgtggcag

SEQ ID NO: 1629640 - DNA, 15 bp, Homo sapiens
gtttattgtggcagt

SEQ ID NO: 1629641 - DNA, 15 bp, Homo sapiens
tttattgtggcagta

SEQ ID NO: 1629642 - DNA, 15 bp, Homo sapiens
ttattgtggcagtat

SEQ ID NO: 1629643 - DNA, 15 bp, Homo sapiens
tattgtggcagtatt

SEQ ID NO: 1629644 - DNA, 15 bp, Homo sapiens
attgtggcagtattc

SEQ ID NO: 1629645 - DNA, 15 bp, Homo sapiens
ttgtggcagtattca

SEQ ID NO: 1629646 - DNA, 15 bp, Homo sapiens
tgtggcagtattcac

SEQ ID NO: 1629647 - DNA, 15 bp, Homo sapiens
gtggcagtattcaca

SEQ ID NO: 1629648 - DNA, 15 bp, Homo sapiens
tggcagtattcacaa

SEQ ID NO: 1629649 - DNA, 15 bp, Homo sapiens
ggcagtattcacaat

SEQ ID NO: 1629650 - DNA, 15 bp, Homo sapiens
gcagtattcacaata

SEQ ID NO: 1629651 - DNA, 15 bp, Homo sapiens
cagtattcacaatag

SEQ ID NO: 1629652 - DNA, 15 bp, Homo sapiens
agtattcacaatagc

SEQ ID NO: 1629653 - DNA, 15 bp, Homo sapiens
gtattcacaatagca

SEQ ID NO: 1629654 - DNA, 15 bp, Homo sapiens
gaaccaacccaaata

SEQ ID NO: 1629655 - DNA, 15 bp, Homo sapiens
aaccaacccaaatac

SEQ ID NO: 1629656 - DNA, 15 bp, Homo sapiens
accaacccaaatacc

SEQ ID NO: 1629657 - DNA, 15 bp, Homo sapiens
ccaacccaaataccc

SEQ ID NO: 1629658 - DNA, 15 bp, Homo sapiens
caacccaaataccca

SEQ ID NO: 1629659 - DNA, 15 bp, Homo sapiens
aacccaaatacccat

SEQ ID NO: 1629660 - DNA, 15 bp, Homo sapiens
acccaaatacccatc

SEQ ID NO: 1629661 - DNA, 15 bp, Homo sapiens
cccaaatacccatca

SEQ ID NO: 1629662 - DNA, 15 bp, Homo sapiens
ccaaatacccatcaa

SEQ ID NO: 1629663 - DNA, 15 bp, Homo sapiens
caaatacccatcaat

SEQ ID NO: 1629664 - DNA, 15 bp, Homo sapiens
aaatacccatcaatg

SEQ ID NO: 1629665 - DNA, 15 bp, Homo sapiens
aatacccatcaatga

SEQ ID NO: 1629666 - DNA, 15 bp, Homo sapiens
atacccatcaatgat

SEQ ID NO: 1629667 - DNA, 15 bp, Homo sapiens
tacccatcaatgata

SEQ ID NO: 1629668 - DNA, 15 bp, Homo sapiens
acccatcaatgatag

SEQ ID NO: 1629669 - DNA, 15 bp, Homo sapiens
atgatagactggata

SEQ ID NO: 1629670 - DNA, 15 bp, Homo sapiens
tgatagactggataa

SEQ ID NO: 1629671 - DNA, 15 bp, Homo sapiens
gatagactggataaa

SEQ ID NO: 1629672 - DNA, 15 bp, Homo sapiens
atagactggataaag

SEQ ID NO: 1629673 - DNA, 15 bp, Homo sapiens
tagactggataaaga

SEQ ID NO: 1629674 - DNA, 15 bp, Homo sapiens
agactggataaagaa

SEQ ID NO: 1629675 - DNA, 15 bp, Homo sapiens
gactggataaagaaa

SEQ ID NO: 1629676 - DNA, 15 bp, Homo sapiens
actggataaagaaaa

SEQ ID NO: 1629677 - DNA, 15 bp, Homo sapiens
ctggataaagaaaat

SEQ ID NO: 1629678 - DNA, 15 bp, Homo sapiens
tggataaagaaaata

SEQ ID NO: 1629679 - DNA, 15 bp, Homo sapiens
ggataaagaaaatat

SEQ ID NO: 1629680 - DNA, 15 bp, Homo sapiens
ataaagaaaatatgg

SEQ ID NO: 1629681 - DNA, 15 bp, Homo sapiens
taaagaaaatatggc

SEQ ID NO: 1629682 - DNA, 15 bp, Homo sapiens
aaagaaaatatggca

SEQ ID NO: 1629683 - DNA, 15 bp, Homo sapiens
aagaaaatatggcac

SEQ ID NO: 1629684 - DNA, 15 bp, Homo sapiens
agaaaatatggcaca

SEQ ID NO: 1629685 - DNA, 15 bp, Homo sapiens
gaaaatatggcacat

SEQ ID NO: 1629686 - DNA, 15 bp, Homo sapiens
aaaatatggcacata

SEQ ID NO: 1629687 - DNA, 15 bp, Homo sapiens
aaatatggcacatac

SEQ ID NO: 1629688 - DNA, 15 bp, Homo sapiens
aatatggcacataca

SEQ ID NO: 1629689 - DNA, 15 bp, Homo sapiens
atatggcacatacat

SEQ ID NO: 1629690 - DNA, 15 bp, Homo sapiens
tatggcacatacata

SEQ ID NO: 1629691 - DNA, 15 bp, Homo sapiens
atggcacatacatac

SEQ ID NO: 1629692 - DNA, 15 bp, Homo sapiens
tggcacatacatacc

SEQ ID NO: 1629693 - DNA, 15 bp, Homo sapiens
ggcacatacatacca

SEQ ID NO: 1629694 - DNA, 15 bp, Homo sapiens
gcacatacataccat

SEQ ID NO: 1629695 - DNA, 15 bp, Homo sapiens
cacatacataccata

SEQ ID NO: 1629696 - DNA, 15 bp, Homo sapiens
acatacataccatag

SEQ ID NO: 1629697 - DNA, 15 bp, Homo sapiens
catacataccataga

SEQ ID NO: 1629698 - DNA, 15 bp, Homo sapiens
atacataccatagaa

SEQ ID NO: 1629699 - DNA, 15 bp, Homo sapiens
tacataccatagaat

SEQ ID NO: 1629700 - DNA, 15 bp, Homo sapiens
acataccatagaata

SEQ ID NO: 1629701 - DNA, 15 bp, Homo sapiens
cataccatagaatac

SEQ ID NO: 1629702 - DNA, 15 bp, Homo sapiens
ataccatagaatact

SEQ ID NO: 1629703 - DNA, 15 bp, Homo sapiens
taccatagaatacta

SEQ ID NO: 1629704 - DNA, 15 bp, Homo sapiens
accatagaatactat

SEQ ID NO: 1629705 - DNA, 15 bp, Homo sapiens
ccatagaatactatg

SEQ ID NO: 1629706 - DNA, 15 bp, Homo sapiens
catagaatactatgc

SEQ ID NO: 1629707 - DNA, 15 bp, Homo sapiens
atagaatactatgca

SEQ ID NO: 1629708 - DNA, 15 bp, Homo sapiens
tagaatactatgcag

SEQ ID NO: 1629709 - DNA, 15 bp, Homo sapiens
agaatactatgcagc

SEQ ID NO: 1629710 - DNA, 15 bp, Homo sapiens
tactatgcagccata

SEQ ID NO: 1629711 - DNA, 15 bp, Homo sapiens
actatgcagccataa

SEQ ID NO: 1629712 - DNA, 15 bp, Homo sapiens
ctatgcagccataaa

SEQ ID NO: 1629713 - DNA, 15 bp, Homo sapiens
tatgcagccataaaa

SEQ ID NO: 1629714 - DNA, 15 bp, Homo sapiens
atgcagccataaaaa

SEQ ID NO: 1629715 - DNA, 15 bp, Homo sapiens
tgcagccataaaaaa

SEQ ID NO: 1629716 - DNA, 15 bp, Homo sapiens
gcagccataaaaaag

SEQ ID NO: 1629717 - DNA, 15 bp, Homo sapiens
cagccataaaaaaga

SEQ ID NO: 1629718 - DNA, 15 bp, Homo sapiens
agccataaaaaagaa

SEQ ID NO: 1629719 - DNA, 15 bp, Homo sapiens
taaaaaagaatgagt

SEQ ID NO: 1629720 - DNA, 15 bp, Homo sapiens
aaaaaagaatgagtt

SEQ ID NO: 1629721 - DNA, 15 bp, Homo sapiens
aaaaagaatgagttc

SEQ ID NO: 1629722 - DNA, 15 bp, Homo sapiens
aaaagaatgagttca

SEQ ID NO: 1629723 - DNA, 15 bp, Homo sapiens
aaagaatgagttcat

SEQ ID NO: 1629724 - DNA, 15 bp, Homo sapiens
aagaatgagttcatg

SEQ ID NO: 1629725 - DNA, 15 bp, Homo sapiens
agaatgagttcatgt

SEQ ID NO: 1629726 - DNA, 15 bp, Homo sapiens
gaatgagttcatgtt

SEQ ID NO: 1629727 - DNA, 15 bp, Homo sapiens
aatgagttcatgttc

SEQ ID NO: 1629728 - DNA, 15 bp, Homo sapiens
atgagttcatgttct

SEQ ID NO: 1629729 - DNA, 15 bp, Homo sapiens
tgagttcatgttctt

SEQ ID NO: 1629730 - DNA, 15 bp, Homo sapiens
gagttcatgttcttt

SEQ ID NO: 1629731 - DNA, 15 bp, Homo sapiens
agttcatgttctttg

SEQ ID NO: 1629732 - DNA, 15 bp, Homo sapiens
gttcatgttctttgc

SEQ ID NO: 1629733 - DNA, 15 bp, Homo sapiens
ttcatgttctttgca

SEQ ID NO: 1629734 - DNA, 15 bp, Homo sapiens
tcatgttctttgcag

SEQ ID NO: 1629735 - DNA, 15 bp, Homo sapiens
catgttctttgcagg

SEQ ID NO: 1629736 - DNA, 15 bp, Homo sapiens
atgttctttgcaggg

SEQ ID NO: 1629737 - DNA, 15 bp, Homo sapiens
tgttctttgcaggga

SEQ ID NO: 1629738 - DNA, 15 bp, Homo sapiens
gttctttgcagggac

SEQ ID NO: 1629739 - DNA, 15 bp, Homo sapiens
ttctttgcagggaca

SEQ ID NO: 1629740 - DNA, 15 bp, Homo sapiens
tctttgcagggacat

SEQ ID NO: 1629741 - DNA, 15 bp, Homo sapiens
ctttgcagggacatc

SEQ ID NO: 1629742 - DNA, 15 bp, Homo sapiens
tttgcagggacatca

SEQ ID NO: 1629743 - DNA, 15 bp, Homo sapiens
ttgcagggacatcat

SEQ ID NO: 1629744 - DNA, 15 bp, Homo sapiens
tgcagggacatcatt

SEQ ID NO: 1629745 - DNA, 15 bp, Homo sapiens
gcagggacatcattc

SEQ ID NO: 1629746 - DNA, 15 bp, Homo sapiens
cagggacatcattct

SEQ ID NO: 1629747 - DNA, 15 bp, Homo sapiens
agggacatcattctc

SEQ ID NO: 1629748 - DNA, 15 bp, Homo sapiens
ggacatcattctccg

SEQ ID NO: 1629749 - DNA, 15 bp, Homo sapiens
gacatcattctccgc

SEQ ID NO: 1629750 - DNA, 15 bp, Homo sapiens
acatcattctccgca

SEQ ID NO: 1629751 - DNA, 15 bp, Homo sapiens
catcattctccgcaa

SEQ ID NO: 1629752 - DNA, 15 bp, Homo sapiens
atcattctccgcaaa

SEQ ID NO: 1629753 - DNA, 15 bp, Homo sapiens
tcattctccgcaaac

SEQ ID NO: 1629754 - DNA, 15 bp, Homo sapiens
cattctccgcaaact

SEQ ID NO: 1629755 - DNA, 15 bp, Homo sapiens
attctccgcaaacta

SEQ ID NO: 1629756 - DNA, 15 bp, Homo sapiens
ttctccgcaaactaa

SEQ ID NO: 1629757 - DNA, 15 bp, Homo sapiens
tctccgcaaactaac

SEQ ID NO: 1629758 - DNA, 15 bp, Homo sapiens
ctccgcaaactaaca

SEQ ID NO: 1629759 - DNA, 15 bp, Homo sapiens
tccgcaaactaacac

SEQ ID NO: 1629760 - DNA, 15 bp, Homo sapiens
ccgcaaactaacaca

SEQ ID NO: 1629761 - DNA, 15 bp, Homo sapiens
cgcaaactaacacag

SEQ ID NO: 1629762 - DNA, 15 bp, Homo sapiens
aacagaaaaccaaat

SEQ ID NO: 1629763 - DNA, 15 bp, Homo sapiens
acagaaaaccaaatg

SEQ ID NO: 1629764 - DNA, 15 bp, Homo sapiens
cagaaaaccaaatgt

SEQ ID NO: 1629765 - DNA, 15 bp, Homo sapiens
agaaaaccaaatgtc

SEQ ID NO: 1629766 - DNA, 15 bp, Homo sapiens
gaaaaccaaatgtcg

SEQ ID NO: 1629767 - DNA, 15 bp, Homo sapiens
aaaaccaaatgtcgc

SEQ ID NO: 1629768 - DNA, 15 bp, Homo sapiens
aaaccaaatgtcgca

SEQ ID NO: 1629769 - DNA, 15 bp, Homo sapiens
aaccaaatgtcgcat

SEQ ID NO: 1629770 - DNA, 15 bp, Homo sapiens
accaaatgtcgcatg

SEQ ID NO: 1629771 - DNA, 15 bp, Homo sapiens
ccaaatgtcgcatgt

SEQ ID NO: 1629772 - DNA, 15 bp, Homo sapiens
caaatgtcgcatgtt

SEQ ID NO: 1629773 - DNA, 15 bp, Homo sapiens
aaatgtcgcatgttc

SEQ ID NO: 1629774 - DNA, 15 bp, Homo sapiens
aatgtcgcatgttct

SEQ ID NO: 1629775 - DNA, 15 bp, Homo sapiens
atgtcgcatgttctc

SEQ ID NO: 1629776 - DNA, 15 bp, Homo sapiens
tgtcgcatgttctca

SEQ ID NO: 1629777 - DNA, 15 bp, Homo sapiens
gtcgcatgttctcac

SEQ ID NO: 1629778 - DNA, 15 bp, Homo sapiens
tcgcatgttctcact

SEQ ID NO: 1629779 - DNA, 15 bp, Homo sapiens
cgcatgttctcactt

SEQ ID NO: 1629780 - DNA, 15 bp, Homo sapiens
gcatgttctcactta

SEQ ID NO: 1629781 - DNA, 15 bp, Homo sapiens
catgttctcacttat

SEQ ID NO: 1629782 - DNA, 15 bp, Homo sapiens
atgttctcacttata

SEQ ID NO: 1629783 - DNA, 15 bp, Homo sapiens
tgttctcacttatat

SEQ ID NO: 1629784 - DNA, 15 bp, Homo sapiens
gttctcacttatatg

SEQ ID NO: 1629785 - DNA, 15 bp, Homo sapiens
ttctcacttatatgt

SEQ ID NO: 1629786 - DNA, 15 bp, Homo sapiens
tctcacttatatgtg

SEQ ID NO: 1629787 - DNA, 15 bp, Homo sapiens
ctcacttatatgtgg

SEQ ID NO: 1629788 - DNA, 15 bp, Homo sapiens
tcacttatatgtggg

SEQ ID NO: 1629789 - DNA, 15 bp, Homo sapiens
cacttatatgtggga

SEQ ID NO: 1629790 - DNA, 15 bp, Homo sapiens
acttatatgtgggag

SEQ ID NO: 1629791 - DNA, 15 bp, Homo sapiens
cttatatgtgggagt

SEQ ID NO: 1629792 - DNA, 15 bp, Homo sapiens
ttatatgtgggagtt

SEQ ID NO: 1629793 - DNA, 15 bp, Homo sapiens
tatatgtgggagttg

SEQ ID NO: 1629794 - DNA, 15 bp, Homo sapiens
atatgtgggagttga

SEQ ID NO: 1629795 - DNA, 15 bp, Homo sapiens
tatgtgggagttgaa

SEQ ID NO: 1629796 - DNA, 15 bp, Homo sapiens
atgtgggagttgaac

SEQ ID NO: 1629797 - DNA, 15 bp, Homo sapiens
tgtgggagttgaaca

SEQ ID NO: 1629798 - DNA, 15 bp, Homo sapiens
gttgaacaatgagaa

SEQ ID NO: 1629799 - DNA, 15 bp, Homo sapiens
atgagaacacatggg

SEQ ID NO: 1629800 - DNA, 15 bp, Homo sapiens
tgagaacacatgggc

SEQ ID NO: 1629801 - DNA, 15 bp, Homo sapiens
gagaacacatgggca

SEQ ID NO: 1629802 - DNA, 15 bp, Homo sapiens
agaacacatgggcac

SEQ ID NO: 1629803 - DNA, 15 bp, Homo sapiens
gaacacatgggcaca

SEQ ID NO: 1629804 - DNA, 15 bp, Homo sapiens
aacacatgggcacag

SEQ ID NO: 1629805 - DNA, 15 bp, Homo sapiens
acacatgggcacagg

SEQ ID NO: 1629806 - DNA, 15 bp, Homo sapiens
cacatgggcacaggg

SEQ ID NO: 1629807 - DNA, 15 bp, Homo sapiens
acatgggcacaggga

SEQ ID NO: 1629808 - DNA, 15 bp, Homo sapiens
catgggcacagggat

SEQ ID NO: 1629809 - DNA, 15 bp, Homo sapiens
atgggcacagggatg

SEQ ID NO: 1629810 - DNA, 15 bp, Homo sapiens
tgggcacagggatgg

SEQ ID NO: 1629811 - DNA, 15 bp, Homo sapiens
gggcacagggatggg

SEQ ID NO: 1629812 - DNA, 15 bp, Homo sapiens
ggcacagggatggga

SEQ ID NO: 1629813 - DNA, 15 bp, Homo sapiens
gcacagggatgggaa

SEQ ID NO: 1629814 - DNA, 15 bp, Homo sapiens
cacagggatgggaac

SEQ ID NO: 1629815 - DNA, 15 bp, Homo sapiens
acagggatgggaaca

SEQ ID NO: 1629816 - DNA, 15 bp, Homo sapiens
cagggatgggaacat

SEQ ID NO: 1629817 - DNA, 15 bp, Homo sapiens
agggatgggaacatc

SEQ ID NO: 1629818 - DNA, 15 bp, Homo sapiens
gggatgggaacatca

SEQ ID NO: 1629819 - DNA, 15 bp, Homo sapiens
ggatgggaacatcac

SEQ ID NO: 1629820 - DNA, 15 bp, Homo sapiens
gatgggaacatcaca

SEQ ID NO: 1629821 - DNA, 15 bp, Homo sapiens
atgggaacatcacac

SEQ ID NO: 1629822 - DNA, 15 bp, Homo sapiens
tgggaacatcacaca

SEQ ID NO: 1629823 - DNA, 15 bp, Homo sapiens
gggaacatcacacac

SEQ ID NO: 1629824 - DNA, 15 bp, Homo sapiens
ggaacatcacacacc

SEQ ID NO: 1629825 - DNA, 15 bp, Homo sapiens
gaacatcacacacca

SEQ ID NO: 1629826 - DNA, 15 bp, Homo sapiens
aacatcacacaccag

SEQ ID NO: 1629827 - DNA, 15 bp, Homo sapiens
acatcacacaccagg

SEQ ID NO: 1629828 - DNA, 15 bp, Homo sapiens
catcacacaccaggg

SEQ ID NO: 1629829 - DNA, 15 bp, Homo sapiens
atcacacaccagggc

SEQ ID NO: 1629830 - DNA, 15 bp, Homo sapiens
tcacacaccagggcc

SEQ ID NO: 1629831 - DNA, 15 bp, Homo sapiens
cacacaccagggcct

SEQ ID NO: 1629832 - DNA, 15 bp, Homo sapiens
acacaccagggcctt

SEQ ID NO: 1629833 - DNA, 15 bp, Homo sapiens
cacaccagggccttt

SEQ ID NO: 1629834 - DNA, 15 bp, Homo sapiens
acaccagggcctttc

SEQ ID NO: 1629835 - DNA, 15 bp, Homo sapiens
caccagggcctttct

SEQ ID NO: 1629836 - DNA, 15 bp, Homo sapiens
accagggcctttctg

SEQ ID NO: 1629837 - DNA, 15 bp, Homo sapiens
ccagggcctttctgg

SEQ ID NO: 1629838 - DNA, 15 bp, Homo sapiens
cagggcctttctggc

SEQ ID NO: 1629839 - DNA, 15 bp, Homo sapiens
agggcctttctggcg

SEQ ID NO: 1629840 - DNA, 15 bp, Homo sapiens
gggcctttctggcgt

SEQ ID NO: 1629841 - DNA, 15 bp, Homo sapiens
ggcctttctggcgtg

SEQ ID NO: 1629842 - DNA, 15 bp, Homo sapiens
gcctttctggcgtgg

SEQ ID NO: 1629843 - DNA, 15 bp, Homo sapiens
cctttctggcgtggg

SEQ ID NO: 1629844 - DNA, 15 bp, Homo sapiens
ctttctggcgtggga

SEQ ID NO: 1629845 - DNA, 15 bp, Homo sapiens
tttctggcgtgggag

SEQ ID NO: 1629846 - DNA, 15 bp, Homo sapiens
ttctggcgtgggagg

SEQ ID NO: 1629847 - DNA, 15 bp, Homo sapiens
tctggcgtgggaggc

SEQ ID NO: 1629848 - DNA, 15 bp, Homo sapiens
ctggcgtgggaggct

SEQ ID NO: 1629849 - DNA, 15 bp, Homo sapiens
tggcgtgggaggcta

SEQ ID NO: 1629850 - DNA, 15 bp, Homo sapiens
ggcgtgggaggctag

SEQ ID NO: 1629851 - DNA, 15 bp, Homo sapiens
gcgtgggaggctagg

SEQ ID NO: 1629852 - DNA, 15 bp, Homo sapiens
cgtgggaggctaggg

SEQ ID NO: 1629853 - DNA, 15 bp, Homo sapiens
gtgggaggctagggg

SEQ ID NO: 1629854 - DNA, 15 bp, Homo sapiens
tgggaggctagggga

SEQ ID NO: 1629855 - DNA, 15 bp, Homo sapiens
gggaggctaggggag

SEQ ID NO: 1629856 - DNA, 15 bp, Homo sapiens
ggaggctaggggagg

SEQ ID NO: 1629857 - DNA, 15 bp, Homo sapiens
gaggctaggggaggg

SEQ ID NO: 1629858 - DNA, 15 bp, Homo sapiens
aggctaggggaggga

SEQ ID NO: 1629859 - DNA, 15 bp, Homo sapiens
gagggatagcattag

SEQ ID NO: 1629860 - DNA, 15 bp, Homo sapiens
agggatagcattagg

SEQ ID NO: 1629861 - DNA, 15 bp, Homo sapiens
gggatagcattagga

SEQ ID NO: 1629862 - DNA, 15 bp, Homo sapiens
ggatagcattaggag

SEQ ID NO: 1629863 - DNA, 15 bp, Homo sapiens
gatagcattaggaga

SEQ ID NO: 1629864 - DNA, 15 bp, Homo sapiens
atagcattaggagaa

SEQ ID NO: 1629865 - DNA, 15 bp, Homo sapiens
tagcattaggagaaa

SEQ ID NO: 1629866 - DNA, 15 bp, Homo sapiens
agcattaggagaaat

SEQ ID NO: 1629867 - DNA, 15 bp, Homo sapiens
gcattaggagaaata

SEQ ID NO: 1629868 - DNA, 15 bp, Homo sapiens
cattaggagaaatac

SEQ ID NO: 1629869 - DNA, 15 bp, Homo sapiens
attaggagaaatact

SEQ ID NO: 1629870 - DNA, 15 bp, Homo sapiens
ttaggagaaatactt

SEQ ID NO: 1629871 - DNA, 15 bp, Homo sapiens
taggagaaatactta

SEQ ID NO: 1629872 - DNA, 15 bp, Homo sapiens
aggagaaatacttaa

SEQ ID NO: 1629873 - DNA, 15 bp, Homo sapiens
ggagaaatacttaat

SEQ ID NO: 1629874 - DNA, 15 bp, Homo sapiens
gagaaatacttaata

SEQ ID NO: 1629875 - DNA, 15 bp, Homo sapiens
agaaatacttaatat

SEQ ID NO: 1629876 - DNA, 15 bp, Homo sapiens
gaaatacttaatata

SEQ ID NO: 1629877 - DNA, 15 bp, Homo sapiens
aaatacttaatatag

SEQ ID NO: 1629878 - DNA, 15 bp, Homo sapiens
aatacttaatataga

SEQ ID NO: 1629879 - DNA, 15 bp, Homo sapiens
atacttaatatagat

SEQ ID NO: 1629880 - DNA, 15 bp, Homo sapiens
tacttaatatagatg

SEQ ID NO: 1629881 - DNA, 15 bp, Homo sapiens
acttaatatagatga

SEQ ID NO: 1629882 - DNA, 15 bp, Homo sapiens
cttaatatagatgac

SEQ ID NO: 1629883 - DNA, 15 bp, Homo sapiens
ttaatatagatgaca

SEQ ID NO: 1629884 - DNA, 15 bp, Homo sapiens
taatatagatgacag

SEQ ID NO: 1629885 - DNA, 15 bp, Homo sapiens
aatatagatgacagg

SEQ ID NO: 1629886 - DNA, 15 bp, Homo sapiens
atatagatgacaggt

SEQ ID NO: 1629887 - DNA, 15 bp, Homo sapiens
tatagatgacaggtt

SEQ ID NO: 1629888 - DNA, 15 bp, Homo sapiens
atagatgacaggttg

SEQ ID NO: 1629889 - DNA, 15 bp, Homo sapiens
tagatgacaggttga

SEQ ID NO: 1629890 - DNA, 15 bp, Homo sapiens
agatgacaggttgat

SEQ ID NO: 1629891 - DNA, 15 bp, Homo sapiens
gatgacaggttgatg

SEQ ID NO: 1629892 - DNA, 15 bp, Homo sapiens
atgacaggttgatgg

SEQ ID NO: 1629893 - DNA, 15 bp, Homo sapiens
tgacaggttgatggg

SEQ ID NO: 1629894 - DNA, 15 bp, Homo sapiens
gacaggttgatgggt

SEQ ID NO: 1629895 - DNA, 15 bp, Homo sapiens
acaggttgatgggtg

SEQ ID NO: 1629896 - DNA, 15 bp, Homo sapiens
caggttgatgggtgc

SEQ ID NO: 1629897 - DNA, 15 bp, Homo sapiens
aggttgatgggtgca

SEQ ID NO: 1629898 - DNA, 15 bp, Homo sapiens
ggttgatgggtgcag

SEQ ID NO: 1629899 - DNA, 15 bp, Homo sapiens
caaaccaccatggca

SEQ ID NO: 1629900 - DNA, 15 bp, Homo sapiens
aaaccaccatggcac

SEQ ID NO: 1629901 - DNA, 15 bp, Homo sapiens
aaccaccatggcaca

SEQ ID NO: 1629902 - DNA, 15 bp, Homo sapiens
accaccatggcacat

SEQ ID NO: 1629903 - DNA, 15 bp, Homo sapiens
ccaccatggcacatg

SEQ ID NO: 1629904 - DNA, 15 bp, Homo sapiens
caccatggcacatgt

SEQ ID NO: 1629905 - DNA, 15 bp, Homo sapiens
accatggcacatgta

SEQ ID NO: 1629906 - DNA, 15 bp, Homo sapiens
ccatggcacatgtat

SEQ ID NO: 1629907 - DNA, 15 bp, Homo sapiens
catggcacatgtata

SEQ ID NO: 1629908 - DNA, 15 bp, Homo sapiens
atggcacatgtatac

SEQ ID NO: 1629909 - DNA, 15 bp, Homo sapiens
tggcacatgtatacc

SEQ ID NO: 1629910 - DNA, 15 bp, Homo sapiens
ggcacatgtatacct

SEQ ID NO: 1629911 - DNA, 15 bp, Homo sapiens
gcacatgtataccta

SEQ ID NO: 1629912 - DNA, 15 bp, Homo sapiens
cacatgtatacctat

SEQ ID NO: 1629913 - DNA, 15 bp, Homo sapiens
acatgtatacctatg

SEQ ID NO: 1629914 - DNA, 15 bp, Homo sapiens
taacaaacctgcacc

SEQ ID NO: 1629915 - DNA, 15 bp, Homo sapiens
aacaaacctgcaccg

SEQ ID NO: 1629916 - DNA, 15 bp, Homo sapiens
acaaacctgcaccgt

SEQ ID NO: 1629917 - DNA, 15 bp, Homo sapiens
caaacctgcaccgtc

SEQ ID NO: 1629918 - DNA, 15 bp, Homo sapiens
aaacctgcaccgtcc

SEQ ID NO: 1629919 - DNA, 15 bp, Homo sapiens
aacctgcaccgtcca

SEQ ID NO: 1629920 - DNA, 15 bp, Homo sapiens
acctgcaccgtccac

SEQ ID NO: 1629921 - DNA, 15 bp, Homo sapiens
cctgcaccgtccaca

SEQ ID NO: 1629922 - DNA, 15 bp, Homo sapiens
ctgcaccgtccacac

SEQ ID NO: 1629923 - DNA, 15 bp, Homo sapiens
tgcaccgtccacaca

SEQ ID NO: 1629924 - DNA, 15 bp, Homo sapiens
gcaccgtccacacat

SEQ ID NO: 1629925 - DNA, 15 bp, Homo sapiens
caccgtccacacatg

SEQ ID NO: 1629926 - DNA, 15 bp, Homo sapiens
accgtccacacatgt

SEQ ID NO: 1629927 - DNA, 15 bp, Homo sapiens
ccgtccacacatgta

SEQ ID NO: 1629928 - DNA, 15 bp, Homo sapiens
cgtccacacatgtat

SEQ ID NO: 1629929 - DNA, 15 bp, Homo sapiens
gtccacacatgtatt

SEQ ID NO: 1629930 - DNA, 15 bp, Homo sapiens
tccacacatgtattc

SEQ ID NO: 1629931 - DNA, 15 bp, Homo sapiens
ccacacatgtattcc

SEQ ID NO: 1629932 - DNA, 15 bp, Homo sapiens
cacacatgtattcca

SEQ ID NO: 1629933 - DNA, 15 bp, Homo sapiens
acacatgtattccag

SEQ ID NO: 1629934 - DNA, 15 bp, Homo sapiens
cacatgtattccaga

SEQ ID NO: 1629935 - DNA, 15 bp, Homo sapiens
acatgtattccagaa

SEQ ID NO: 1629936 - DNA, 15 bp, Homo sapiens
catgtattccagaac

SEQ ID NO: 1629937 - DNA, 15 bp, Homo sapiens
atgtattccagaact

SEQ ID NO: 1629938 - DNA, 15 bp, Homo sapiens
tgtattccagaactt

SEQ ID NO: 1629939 - DNA, 15 bp, Homo sapiens
gtattccagaactta

SEQ ID NO: 1629940 - DNA, 15 bp, Homo sapiens
tattccagaacttaa

SEQ ID NO: 1629941 - DNA, 15 bp, Homo sapiens
attccagaacttaaa

SEQ ID NO: 1629942 - DNA, 15 bp, Homo sapiens
ttccagaacttaaag

SEQ ID NO: 1629943 - DNA, 15 bp, Homo sapiens
tccagaacttaaagt

SEQ ID NO: 1629944 - DNA, 15 bp, Homo sapiens
aacttaaagtataat

SEQ ID NO: 1629945 - DNA, 15 bp, Homo sapiens
acttaaagtataatt

SEQ ID NO: 1629946 - DNA, 15 bp, Homo sapiens
cttaaagtataattt

SEQ ID NO: 1629947 - DNA, 15 bp, Homo sapiens
ttaaagtataattta

SEQ ID NO: 1629948 - DNA, 15 bp, Homo sapiens
taaagtataatttaa

SEQ ID NO: 1629949 - DNA, 15 bp, Homo sapiens
aaagtataatttaaa

SEQ ID NO: 1629950 - DNA, 15 bp, Homo sapiens
aagtataatttaaaa

SEQ ID NO: 1629951 - DNA, 15 bp, Homo sapiens
agtataatttaaaaa

SEQ ID NO: 1629952 - DNA, 15 bp, Homo sapiens
gtataatttaaaaaa

SEQ ID NO: 1629953 - DNA, 15 bp, Homo sapiens
tataatttaaaaaat

SEQ ID NO: 1629954 - DNA, 15 bp, Homo sapiens
ataatttaaaaaata

SEQ ID NO: 1629955 - DNA, 15 bp, Homo sapiens
taatttaaaaaatac

SEQ ID NO: 1629956 - DNA, 15 bp, Homo sapiens
aatttaaaaaataca

SEQ ID NO: 1629957 - DNA, 15 bp, Homo sapiens
atttaaaaaatacac

SEQ ID NO: 1629958 - DNA, 15 bp, Homo sapiens
tttaaaaaatacaca

SEQ ID NO: 1629959 - DNA, 15 bp, Homo sapiens
ttaaaaaatacacat

SEQ ID NO: 1629960 - DNA, 15 bp, Homo sapiens
taaaaaatacacatc

SEQ ID NO: 1629961 - DNA, 15 bp, Homo sapiens
aaaaaatacacatcc

SEQ ID NO: 1629962 - DNA, 15 bp, Homo sapiens
aaaaatacacatcca

SEQ ID NO: 1629963 - DNA, 15 bp, Homo sapiens
aaaatacacatccac

SEQ ID NO: 1629964 - DNA, 15 bp, Homo sapiens
aaatacacatccaca

SEQ ID NO: 1629965 - DNA, 15 bp, Homo sapiens
aatacacatccacat

SEQ ID NO: 1629966 - DNA, 15 bp, Homo sapiens
atacacatccacata

SEQ ID NO: 1629967 - DNA, 15 bp, Homo sapiens
tacacatccacataa

SEQ ID NO: 1629968 - DNA, 15 bp, Homo sapiens
acacatccacataaa

SEQ ID NO: 1629969 - DNA, 15 bp, Homo sapiens
cacatccacataaac

SEQ ID NO: 1629970 - DNA, 15 bp, Homo sapiens
acatccacataaaca

SEQ ID NO: 1629971 - DNA, 15 bp, Homo sapiens
catccacataaacac

SEQ ID NO: 1629972 - DNA, 15 bp, Homo sapiens
atccacataaacaca

SEQ ID NO: 1629973 - DNA, 15 bp, Homo sapiens
tccacataaacacac

SEQ ID NO: 1629974 - DNA, 15 bp, Homo sapiens
ccacataaacacaca

SEQ ID NO: 1629975 - DNA, 15 bp, Homo sapiens
cacataaacacacat

SEQ ID NO: 1629976 - DNA, 15 bp, Homo sapiens
acataaacacacatg

SEQ ID NO: 1629977 - DNA, 15 bp, Homo sapiens
cataaacacacatgt

SEQ ID NO: 1629978 - DNA, 15 bp, Homo sapiens
ataaacacacatgta

SEQ ID NO: 1629979 - DNA, 15 bp, Homo sapiens
taaacacacatgtat

SEQ ID NO: 1629980 - DNA, 15 bp, Homo sapiens
aaacacacatgtata

SEQ ID NO: 1629981 - DNA, 15 bp, Homo sapiens
aacacacatgtatat

SEQ ID NO: 1629982 - DNA, 15 bp, Homo sapiens
acacacatgtatatg

SEQ ID NO: 1629983 - DNA, 15 bp, Homo sapiens
cacacatgtatatgc

SEQ ID NO: 1629984 - DNA, 15 bp, Homo sapiens
acacatgtatatgct

SEQ ID NO: 1629985 - DNA, 15 bp, Homo sapiens
cacatgtatatgcta

SEQ ID NO: 1629986 - DNA, 15 bp, Homo sapiens
acatgtatatgctac

SEQ ID NO: 1629987 - DNA, 15 bp, Homo sapiens
catgtatatgctaca

SEQ ID NO: 1629988 - DNA, 15 bp, Homo sapiens
atgtatatgctacat

SEQ ID NO: 1629989 - DNA, 15 bp, Homo sapiens
tgtatatgctacatt

SEQ ID NO: 1629990 - DNA, 15 bp, Homo sapiens
gtatatgctacattt

SEQ ID NO: 1629991 - DNA, 15 bp, Homo sapiens
tatatgctacatttt

SEQ ID NO: 1629992 - DNA, 15 bp, Homo sapiens
atatgctacattttc

SEQ ID NO: 1629993 - DNA, 15 bp, Homo sapiens
tatgctacattttca

SEQ ID NO: 1629994 - DNA, 15 bp, Homo sapiens
atgctacattttcag

SEQ ID NO: 1629995 - DNA, 15 bp, Homo sapiens
tgctacattttcagt

SEQ ID NO: 1629996 - DNA, 15 bp, Homo sapiens
gctacattttcagtc

SEQ ID NO: 1629997 - DNA, 15 bp, Homo sapiens
ctacattttcagtca

SEQ ID NO: 1629998 - DNA, 15 bp, Homo sapiens
tacattttcagtcaa

SEQ ID NO: 1629999 - DNA, 15 bp, Homo sapiens
acattttcagtcaac

SEQ ID NO: 1630000 - DNA, 15 bp, Homo sapiens
cattttcagtcaaca

SEQ ID NO: 1630001 - DNA, 15 bp, Homo sapiens
attttcagtcaacac

SEQ ID NO: 1630002 - DNA, 15 bp, Homo sapiens
ttttcagtcaacact

SEQ ID NO: 1630003 - DNA, 15 bp, Homo sapiens
tttcagtcaacacta

SEQ ID NO: 1630004 - DNA, 15 bp, Homo sapiens
ttcagtcaacactaa

SEQ ID NO: 1630005 - DNA, 15 bp, Homo sapiens
tcagtcaacactaag

SEQ ID NO: 1630006 - DNA, 15 bp, Homo sapiens
cagtcaacactaaga

SEQ ID NO: 1630007 - DNA, 15 bp, Homo sapiens
agtcaacactaagaa

SEQ ID NO: 1630008 - DNA, 15 bp, Homo sapiens
gtcaacactaagaac

SEQ ID NO: 1630009 - DNA, 15 bp, Homo sapiens
tcaacactaagaaca

SEQ ID NO: 1630010 - DNA, 15 bp, Homo sapiens
caacactaagaacag

SEQ ID NO: 1630011 - DNA, 15 bp, Homo sapiens
aacactaagaacaga

SEQ ID NO: 1630012 - DNA, 15 bp, Homo sapiens
acactaagaacagat

SEQ ID NO: 1630013 - DNA, 15 bp, Homo sapiens
cactaagaacagatg

SEQ ID NO: 1630014 - DNA, 15 bp, Homo sapiens
actaagaacagatgg

SEQ ID NO: 1630015 - DNA, 15 bp, Homo sapiens
ctaagaacagatggt

SEQ ID NO: 1630016 - DNA, 15 bp, Homo sapiens
taagaacagatggta

SEQ ID NO: 1630017 - DNA, 15 bp, Homo sapiens
aagaacagatggtac

SEQ ID NO: 1630018 - DNA, 15 bp, Homo sapiens
agaacagatggtaca

SEQ ID NO: 1630019 - DNA, 15 bp, Homo sapiens
gaacagatggtacaa

SEQ ID NO: 1630020 - DNA, 15 bp, Homo sapiens
aacagatggtacaaa

SEQ ID NO: 1630021 - DNA, 15 bp, Homo sapiens
acagatggtacaaag

SEQ ID NO: 1630022 - DNA, 15 bp, Homo sapiens
cagatggtacaaaga

SEQ ID NO: 1630023 - DNA, 15 bp, Homo sapiens
agatggtacaaagag

SEQ ID NO: 1630024 - DNA, 15 bp, Homo sapiens
gatggtacaaagagc

SEQ ID NO: 1630025 - DNA, 15 bp, Homo sapiens
atggtacaaagagca

SEQ ID NO: 1630026 - DNA, 15 bp, Homo sapiens
tggtacaaagagcac

SEQ ID NO: 1630027 - DNA, 15 bp, Homo sapiens
ggtacaaagagcacc

SEQ ID NO: 1630028 - DNA, 15 bp, Homo sapiens
gtacaaagagcacct

SEQ ID NO: 1630029 - DNA, 15 bp, Homo sapiens
tacaaagagcaccta

SEQ ID NO: 1630030 - DNA, 15 bp, Homo sapiens
acaaagagcacctat

SEQ ID NO: 1630031 - DNA, 15 bp, Homo sapiens
caaagagcacctatc

SEQ ID NO: 1630032 - DNA, 15 bp, Homo sapiens
aaagagcacctatca

SEQ ID NO: 1630033 - DNA, 15 bp, Homo sapiens
aagagcacctatcaa

SEQ ID NO: 1630034 - DNA, 15 bp, Homo sapiens
agagcacctatcaat

SEQ ID NO: 1630035 - DNA, 15 bp, Homo sapiens
gagcacctatcaatc

SEQ ID NO: 1630036 - DNA, 15 bp, Homo sapiens
agcacctatcaatca

SEQ ID NO: 1630037 - DNA, 15 bp, Homo sapiens
gcacctatcaatcat

SEQ ID NO: 1630038 - DNA, 15 bp, Homo sapiens
cacctatcaatcatg

SEQ ID NO: 1630039 - DNA, 15 bp, Homo sapiens
acctatcaatcatgt

SEQ ID NO: 1630040 - DNA, 15 bp, Homo sapiens
cctatcaatcatgtt

SEQ ID NO: 1630041 - DNA, 15 bp, Homo sapiens
ctatcaatcatgttt

SEQ ID NO: 1630042 - DNA, 15 bp, Homo sapiens
tatcaatcatgtttc

SEQ ID NO: 1630043 - DNA, 15 bp, Homo sapiens
atcaatcatgtttcc

SEQ ID NO: 1630044 - DNA, 15 bp, Homo sapiens
tcaatcatgtttcca

SEQ ID NO: 1630045 - DNA, 15 bp, Homo sapiens
caatcatgtttccaa

SEQ ID NO: 1630046 - DNA, 15 bp, Homo sapiens
aatcatgtttccaat

SEQ ID NO: 1630047 - DNA, 15 bp, Homo sapiens
atcatgtttccaatc

SEQ ID NO: 1630048 - DNA, 15 bp, Homo sapiens
tcatgtttccaatca

SEQ ID NO: 1630049 - DNA, 15 bp, Homo sapiens
catgtttccaatcat

SEQ ID NO: 1630050 - DNA, 15 bp, Homo sapiens
atgtttccaatcatt

SEQ ID NO: 1630051 - DNA, 15 bp, Homo sapiens
tgtttccaatcattg

SEQ ID NO: 1630052 - DNA, 15 bp, Homo sapiens
gtttccaatcattgt

SEQ ID NO: 1630053 - DNA, 15 bp, Homo sapiens
tttccaatcattgtt

SEQ ID NO: 1630054 - DNA, 15 bp, Homo sapiens
ttccaatcattgttt

SEQ ID NO: 1630055 - DNA, 15 bp, Homo sapiens
tccaatcattgtttt

SEQ ID NO: 1630056 - DNA, 15 bp, Homo sapiens
ccaatcattgttttg

SEQ ID NO: 1630057 - DNA, 15 bp, Homo sapiens
caatcattgttttgg

SEQ ID NO: 1630058 - DNA, 15 bp, Homo sapiens
aatcattgttttggg

SEQ ID NO: 1630059 - DNA, 15 bp, Homo sapiens
atcattgttttggga

SEQ ID NO: 1630060 - DNA, 15 bp, Homo sapiens
tcattgttttgggag

SEQ ID NO: 1630061 - DNA, 15 bp, Homo sapiens
cattgttttgggaga

SEQ ID NO: 1630062 - DNA, 15 bp, Homo sapiens
attgttttgggagac

SEQ ID NO: 1630063 - DNA, 15 bp, Homo sapiens
ttgttttgggagact

SEQ ID NO: 1630064 - DNA, 15 bp, Homo sapiens
tgttttgggagactt

SEQ ID NO: 1630065 - DNA, 15 bp, Homo sapiens
gttttgggagacttt

SEQ ID NO: 1630066 - DNA, 15 bp, Homo sapiens
ttttgggagactttt

SEQ ID NO: 1630067 - DNA, 15 bp, Homo sapiens
tttgggagacttttc

SEQ ID NO: 1630068 - DNA, 15 bp, Homo sapiens
ttgggagacttttcc

SEQ ID NO: 1630069 - DNA, 15 bp, Homo sapiens
tgggagacttttcct

SEQ ID NO: 1630070 - DNA, 15 bp, Homo sapiens
gggagacttttcctg

SEQ ID NO: 1630071 - DNA, 15 bp, Homo sapiens
ggagacttttcctga

SEQ ID NO: 1630072 - DNA, 15 bp, Homo sapiens
gagacttttcctgac

SEQ ID NO: 1630073 - DNA, 15 bp, Homo sapiens
agacttttcctgact

SEQ ID NO: 1630074 - DNA, 15 bp, Homo sapiens
gacttttcctgactg

SEQ ID NO: 1630075 - DNA, 15 bp, Homo sapiens
acttttcctgactgt

SEQ ID NO: 1630076 - DNA, 15 bp, Homo sapiens
cttttcctgactgta

SEQ ID NO: 1630077 - DNA, 15 bp, Homo sapiens
ttttcctgactgtaa

SEQ ID NO: 1630078 - DNA, 15 bp, Homo sapiens
tttcctgactgtaaa

SEQ ID NO: 1630079 - DNA, 15 bp, Homo sapiens
ttcctgactgtaaaa

SEQ ID NO: 1630080 - DNA, 15 bp, Homo sapiens
tcctgactgtaaaat

SEQ ID NO: 1630081 - DNA, 15 bp, Homo sapiens
cctgactgtaaaata

SEQ ID NO: 1630082 - DNA, 15 bp, Homo sapiens
ctgactgtaaaatac

SEQ ID NO: 1630083 - DNA, 15 bp, Homo sapiens
tgactgtaaaatacc

SEQ ID NO: 1630084 - DNA, 15 bp, Homo sapiens
gactgtaaaatacct

SEQ ID NO: 1630085 - DNA, 15 bp, Homo sapiens
actgtaaaatacctg

SEQ ID NO: 1630086 - DNA, 15 bp, Homo sapiens
ctgtaaaatacctgc

SEQ ID NO: 1630087 - DNA, 15 bp, Homo sapiens
tgtaaaatacctgct

SEQ ID NO: 1630088 - DNA, 15 bp, Homo sapiens
gtaaaatacctgctt

SEQ ID NO: 1630089 - DNA, 15 bp, Homo sapiens
taaaatacctgctta

SEQ ID NO: 1630090 - DNA, 15 bp, Homo sapiens
aaaatacctgcttaa

SEQ ID NO: 1630091 - DNA, 15 bp, Homo sapiens
aaatacctgcttaag

SEQ ID NO: 1630092 - DNA, 15 bp, Homo sapiens
aatacctgcttaagg

SEQ ID NO: 1630093 - DNA, 15 bp, Homo sapiens
atacctgcttaaggt

SEQ ID NO: 1630094 - DNA, 15 bp, Homo sapiens
tacctgcttaaggta

SEQ ID NO: 1630095 - DNA, 15 bp, Homo sapiens
acctgcttaaggtaa

SEQ ID NO: 1630096 - DNA, 15 bp, Homo sapiens
cctgcttaaggtaaa

SEQ ID NO: 1630097 - DNA, 15 bp, Homo sapiens
ctgcttaaggtaaaa

SEQ ID NO: 1630098 - DNA, 15 bp, Homo sapiens
tgcttaaggtaaaaa

SEQ ID NO: 1630099 - DNA, 15 bp, Homo sapiens
gcttaaggtaaaaaa

SEQ ID NO: 1630100 - DNA, 15 bp, Homo sapiens
cttaaggtaaaaaaa

SEQ ID NO: 1630101 - DNA, 15 bp, Homo sapiens
ttaaggtaaaaaaaa

SEQ ID NO: 1630102 - DNA, 15 bp, Homo sapiens
taaggtaaaaaaaaa

SEQ ID NO: 1630103 - DNA, 15 bp, Homo sapiens
aaggtaaaaaaaaaa

SEQ ID NO: 1630104 - DNA, 15 bp, Homo sapiens
taaaaaaaaaaaatg

SEQ ID NO: 1630105 - DNA, 15 bp, Homo sapiens
aaaaaaaaaaaatgc

SEQ ID NO: 1630106 - DNA, 15 bp, Homo sapiens
aaaaaaaaaaatgca

SEQ ID NO: 1630107 - DNA, 15 bp, Homo sapiens
aaaaaaaaaatgcaa

SEQ ID NO: 1630108 - DNA, 15 bp, Homo sapiens
aaaaaaaaatgcaaa

SEQ ID NO: 1630109 - DNA, 15 bp, Homo sapiens
aaaaaaaatgcaaaa

SEQ ID NO: 1630110 - DNA, 15 bp, Homo sapiens
aaaaaaatgcaaaaa

SEQ ID NO: 1630111 - DNA, 15 bp, Homo sapiens
aaaaaatgcaaaaaa

SEQ ID NO: 1630112 - DNA, 15 bp, Homo sapiens
aaaaatgcaaaaaag

SEQ ID NO: 1630113 - DNA, 15 bp, Homo sapiens
aaaatgcaaaaaagt

SEQ ID NO: 1630114 - DNA, 15 bp, Homo sapiens
aaatgcaaaaaagta

SEQ ID NO: 1630115 - DNA, 15 bp, Homo sapiens
aatgcaaaaaagtat

SEQ ID NO: 1630116 - DNA, 15 bp, Homo sapiens
atgcaaaaaagtatt

SEQ ID NO: 1630117 - DNA, 15 bp, Homo sapiens
tgcaaaaaagtatta

SEQ ID NO: 1630118 - DNA, 15 bp, Homo sapiens
aaaaaagtattagag

SEQ ID NO: 1630119 - DNA, 15 bp, Homo sapiens
aaaaagtattagagg

SEQ ID NO: 1630120 - DNA, 15 bp, Homo sapiens
aaaagtattagaggt

SEQ ID NO: 1630121 - DNA, 15 bp, Homo sapiens
aaagtattagaggtg

SEQ ID NO: 1630122 - DNA, 15 bp, Homo sapiens
aagtattagaggtgc

SEQ ID NO: 1630123 - DNA, 15 bp, Homo sapiens
agtattagaggtgct

SEQ ID NO: 1630124 - DNA, 15 bp, Homo sapiens
gtattagaggtgcta

SEQ ID NO: 1630125 - DNA, 15 bp, Homo sapiens
tattagaggtgctaa

SEQ ID NO: 1630126 - DNA, 15 bp, Homo sapiens
attagaggtgctaaa

SEQ ID NO: 1630127 - DNA, 15 bp, Homo sapiens
ttagaggtgctaaaa

SEQ ID NO: 1630128 - DNA, 15 bp, Homo sapiens
tagaggtgctaaaaa

SEQ ID NO: 1630129 - DNA, 15 bp, Homo sapiens
agaggtgctaaaaat

SEQ ID NO: 1630130 - DNA, 15 bp, Homo sapiens
gaggtgctaaaaatc

SEQ ID NO: 1630131 - DNA, 15 bp, Homo sapiens
aggtgctaaaaatca

SEQ ID NO: 1630132 - DNA, 15 bp, Homo sapiens
ggtgctaaaaatcac

SEQ ID NO: 1630133 - DNA, 15 bp, Homo sapiens
gtgctaaaaatcact

SEQ ID NO: 1630134 - DNA, 15 bp, Homo sapiens
tgctaaaaatcactt

SEQ ID NO: 1630135 - DNA, 15 bp, Homo sapiens
gctaaaaatcacttg

SEQ ID NO: 1630136 - DNA, 15 bp, Homo sapiens
ctaaaaatcacttgc

SEQ ID NO: 1630137 - DNA, 15 bp, Homo sapiens
taaaaatcacttgcc

SEQ ID NO: 1630138 - DNA, 15 bp, Homo sapiens
aaaaatcacttgcct

SEQ ID NO: 1630139 - DNA, 15 bp, Homo sapiens
aaaatcacttgcctc

SEQ ID NO: 1630140 - DNA, 15 bp, Homo sapiens
aaatcacttgcctca

SEQ ID NO: 1630141 - DNA, 15 bp, Homo sapiens
aatcacttgcctcat

SEQ ID NO: 1630142 - DNA, 15 bp, Homo sapiens
atcacttgcctcatg

SEQ ID NO: 1630143 - DNA, 15 bp, Homo sapiens
tcacttgcctcatgc

SEQ ID NO: 1630144 - DNA, 15 bp, Homo sapiens
cacttgcctcatgct

SEQ ID NO: 1630145 - DNA, 15 bp, Homo sapiens
acttgcctcatgcta

SEQ ID NO: 1630146 - DNA, 15 bp, Homo sapiens
cttgcctcatgctac

SEQ ID NO: 1630147 - DNA, 15 bp, Homo sapiens
ttgcctcatgctaca

SEQ ID NO: 1630148 - DNA, 15 bp, Homo sapiens
tgcctcatgctacac

SEQ ID NO: 1630149 - DNA, 15 bp, Homo sapiens
gcctcatgctacaca

SEQ ID NO: 1630150 - DNA, 15 bp, Homo sapiens
cctcatgctacacaa

SEQ ID NO: 1630151 - DNA, 15 bp, Homo sapiens
ctcatgctacacaaa

SEQ ID NO: 1630152 - DNA, 15 bp, Homo sapiens
tcatgctacacaaag

SEQ ID NO: 1630153 - DNA, 15 bp, Homo sapiens
catgctacacaaagg

SEQ ID NO: 1630154 - DNA, 15 bp, Homo sapiens
atgctacacaaaggt

SEQ ID NO: 1630155 - DNA, 15 bp, Homo sapiens
tgctacacaaaggtt

SEQ ID NO: 1630156 - DNA, 15 bp, Homo sapiens
gctacacaaaggttc

SEQ ID NO: 1630157 - DNA, 15 bp, Homo sapiens
ctacacaaaggttca

SEQ ID NO: 1630158 - DNA, 15 bp, Homo sapiens
tacacaaaggttcat

SEQ ID NO: 1630159 - DNA, 15 bp, Homo sapiens
acacaaaggttcata

SEQ ID NO: 1630160 - DNA, 15 bp, Homo sapiens
cacaaaggttcatag

SEQ ID NO: 1630161 - DNA, 15 bp, Homo sapiens
acaaaggttcatagt

SEQ ID NO: 1630162 - DNA, 15 bp, Homo sapiens
caaaggttcatagtc

SEQ ID NO: 1630163 - DNA, 15 bp, Homo sapiens
aaaggttcatagtcc

SEQ ID NO: 1630164 - DNA, 15 bp, Homo sapiens
aaggttcatagtccc

SEQ ID NO: 1630165 - DNA, 15 bp, Homo sapiens
aggttcatagtccca

SEQ ID NO: 1630166 - DNA, 15 bp, Homo sapiens
ggttcatagtcccac

SEQ ID NO: 1630167 - DNA, 15 bp, Homo sapiens
gttcatagtcccaca

SEQ ID NO: 1630168 - DNA, 15 bp, Homo sapiens
ttcatagtcccacat

SEQ ID NO: 1630169 - DNA, 15 bp, Homo sapiens
tcatagtcccacata

SEQ ID NO: 1630170 - DNA, 15 bp, Homo sapiens
catagtcccacatag

SEQ ID NO: 1630171 - DNA, 15 bp, Homo sapiens
atagtcccacatagg

SEQ ID NO: 1630172 - DNA, 15 bp, Homo sapiens
tagtcccacataggg

SEQ ID NO: 1630173 - DNA, 15 bp, Homo sapiens
agtcccacatagggt

SEQ ID NO: 1630174 - DNA, 15 bp, Homo sapiens
gtcccacatagggtc

SEQ ID NO: 1630175 - DNA, 15 bp, Homo sapiens
tcccacatagggtca

SEQ ID NO: 1630176 - DNA, 15 bp, Homo sapiens
cccacatagggtcag

SEQ ID NO: 1630177 - DNA, 15 bp, Homo sapiens
ccacatagggtcagg

SEQ ID NO: 1630178 - DNA, 15 bp, Homo sapiens
cacatagggtcaggc

SEQ ID NO: 1630179 - DNA, 15 bp, Homo sapiens
acatagggtcaggca

SEQ ID NO: 1630180 - DNA, 15 bp, Homo sapiens
catagggtcaggcac

SEQ ID NO: 1630181 - DNA, 15 bp, Homo sapiens
atagggtcaggcaca

SEQ ID NO: 1630182 - DNA, 15 bp, Homo sapiens
tagggtcaggcacag

SEQ ID NO: 1630183 - DNA, 15 bp, Homo sapiens
agggtcaggcacaga

SEQ ID NO: 1630184 - DNA, 15 bp, Homo sapiens
gggtcaggcacagag

SEQ ID NO: 1630185 - DNA, 15 bp, Homo sapiens
ggtcaggcacagagt

SEQ ID NO: 1630186 - DNA, 15 bp, Homo sapiens
gtcaggcacagagtc

SEQ ID NO: 1630187 - DNA, 15 bp, Homo sapiens
tcaggcacagagtca

SEQ ID NO: 1630188 - DNA, 15 bp, Homo sapiens
caggcacagagtcag

SEQ ID NO: 1630189 - DNA, 15 bp, Homo sapiens
aggcacagagtcagt

SEQ ID NO: 1630190 - DNA, 15 bp, Homo sapiens
ggcacagagtcagtc

SEQ ID NO: 1630191 - DNA, 15 bp, Homo sapiens
gcacagagtcagtct

SEQ ID NO: 1630192 - DNA, 15 bp, Homo sapiens
cacagagtcagtctc

SEQ ID NO: 1630193 - DNA, 15 bp, Homo sapiens
acagagtcagtctct

SEQ ID NO: 1630194 - DNA, 15 bp, Homo sapiens
cagagtcagtctcta

SEQ ID NO: 1630195 - DNA, 15 bp, Homo sapiens
agagtcagtctctag

SEQ ID NO: 1630196 - DNA, 15 bp, Homo sapiens
gagtcagtctctaga

SEQ ID NO: 1630197 - DNA, 15 bp, Homo sapiens
agtcagtctctagag

SEQ ID NO: 1630198 - DNA, 15 bp, Homo sapiens
gtcagtctctagagg

SEQ ID NO: 1630199 - DNA, 15 bp, Homo sapiens
tcagtctctagaggc

SEQ ID NO: 1630200 - DNA, 15 bp, Homo sapiens
cagtctctagaggca

SEQ ID NO: 1630201 - DNA, 15 bp, Homo sapiens
agtctctagaggcat

SEQ ID NO: 1630202 - DNA, 15 bp, Homo sapiens
gtctctagaggcata

SEQ ID NO: 1630203 - DNA, 15 bp, Homo sapiens
tctctagaggcataa

SEQ ID NO: 1630204 - DNA, 15 bp, Homo sapiens
ctctagaggcataaa

SEQ ID NO: 1630205 - DNA, 15 bp, Homo sapiens
tctagaggcataaac

SEQ ID NO: 1630206 - DNA, 15 bp, Homo sapiens
ctagaggcataaaca

SEQ ID NO: 1630207 - DNA, 15 bp, Homo sapiens
tagaggcataaacat

SEQ ID NO: 1630208 - DNA, 15 bp, Homo sapiens
agaggcataaacatg

SEQ ID NO: 1630209 - DNA, 15 bp, Homo sapiens
gaggcataaacatgt

SEQ ID NO: 1630210 - DNA, 15 bp, Homo sapiens
aggcataaacatgtt

SEQ ID NO: 1630211 - DNA, 15 bp, Homo sapiens
ggcataaacatgttg

SEQ ID NO: 1630212 - DNA, 15 bp, Homo sapiens
gcataaacatgttgt

SEQ ID NO: 1630213 - DNA, 15 bp, Homo sapiens
cataaacatgttgta

SEQ ID NO: 1630214 - DNA, 15 bp, Homo sapiens
ataaacatgttgtaa

SEQ ID NO: 1630215 - DNA, 15 bp, Homo sapiens
taaacatgttgtaaa

SEQ ID NO: 1630216 - DNA, 15 bp, Homo sapiens
aaacatgttgtaaaa

SEQ ID NO: 1630217 - DNA, 15 bp, Homo sapiens
aacatgttgtaaaag

SEQ ID NO: 1630218 - DNA, 15 bp, Homo sapiens
acatgttgtaaaagc

SEQ ID NO: 1630219 - DNA, 15 bp, Homo sapiens
catgttgtaaaagct

SEQ ID NO: 1630220 - DNA, 15 bp, Homo sapiens
atgttgtaaaagctc

SEQ ID NO: 1630221 - DNA, 15 bp, Homo sapiens
tgttgtaaaagctct

SEQ ID NO: 1630222 - DNA, 15 bp, Homo sapiens
gttgtaaaagctctc

SEQ ID NO: 1630223 - DNA, 15 bp, Homo sapiens
ttgtaaaagctctct

SEQ ID NO: 1630224 - DNA, 15 bp, Homo sapiens
tgtaaaagctctctc

SEQ ID NO: 1630225 - DNA, 15 bp, Homo sapiens
gtaaaagctctctct

SEQ ID NO: 1630226 - DNA, 15 bp, Homo sapiens
taaaagctctctctc

SEQ ID NO: 1630227 - DNA, 15 bp, Homo sapiens
aaaagctctctctca

SEQ ID NO: 1630228 - DNA, 15 bp, Homo sapiens
aaagctctctctcat

SEQ ID NO: 1630229 - DNA, 15 bp, Homo sapiens
aagctctctctcatt

SEQ ID NO: 1630230 - DNA, 15 bp, Homo sapiens
agctctctctcattg

SEQ ID NO: 1630231 - DNA, 15 bp, Homo sapiens
gctctctctcattgt

SEQ ID NO: 1630232 - DNA, 15 bp, Homo sapiens
ctctctctcattgtt

SEQ ID NO: 1630233 - DNA, 15 bp, Homo sapiens
tctctctcattgttg

SEQ ID NO: 1630234 - DNA, 15 bp, Homo sapiens
ctctctcattgttgc

SEQ ID NO: 1630235 - DNA, 15 bp, Homo sapiens
tctctcattgttgct

SEQ ID NO: 1630236 - DNA, 15 bp, Homo sapiens
ctctcattgttgcta

SEQ ID NO: 1630237 - DNA, 15 bp, Homo sapiens
tctcattgttgctaa

SEQ ID NO: 1630238 - DNA, 15 bp, Homo sapiens
ctcattgttgctaaa

SEQ ID NO: 1630239 - DNA, 15 bp, Homo sapiens
tcattgttgctaaag

SEQ ID NO: 1630240 - DNA, 15 bp, Homo sapiens
cattgttgctaaagg

SEQ ID NO: 1630241 - DNA, 15 bp, Homo sapiens
attgttgctaaaggg

SEQ ID NO: 1630242 - DNA, 15 bp, Homo sapiens
ttgttgctaaagggc

SEQ ID NO: 1630243 - DNA, 15 bp, Homo sapiens
tgttgctaaagggca

SEQ ID NO: 1630244 - DNA, 15 bp, Homo sapiens
gttgctaaagggcag

SEQ ID NO: 1630245 - DNA, 15 bp, Homo sapiens
ttgctaaagggcagg

SEQ ID NO: 1630246 - DNA, 15 bp, Homo sapiens
tgctaaagggcagga

SEQ ID NO: 1630247 - DNA, 15 bp, Homo sapiens
gctaaagggcaggaa

SEQ ID NO: 1630248 - DNA, 15 bp, Homo sapiens
ctaaagggcaggaaa

SEQ ID NO: 1630249 - DNA, 15 bp, Homo sapiens
taaagggcaggaaat

SEQ ID NO: 1630250 - DNA, 15 bp, Homo sapiens
aaagggcaggaaatc

SEQ ID NO: 1630251 - DNA, 15 bp, Homo sapiens
aagggcaggaaatca

SEQ ID NO: 1630252 - DNA, 15 bp, Homo sapiens
agggcaggaaatcat

SEQ ID NO: 1630253 - DNA, 15 bp, Homo sapiens
gggcaggaaatcatc

SEQ ID NO: 1630254 - DNA, 15 bp, Homo sapiens
ggcaggaaatcatcc

SEQ ID NO: 1630255 - DNA, 15 bp, Homo sapiens
gcaggaaatcatccc

SEQ ID NO: 1630256 - DNA, 15 bp, Homo sapiens
caggaaatcatccca

SEQ ID NO: 1630257 - DNA, 15 bp, Homo sapiens
aggaaatcatcccaa

SEQ ID NO: 1630258 - DNA, 15 bp, Homo sapiens
ggaaatcatcccaac

SEQ ID NO: 1630259 - DNA, 15 bp, Homo sapiens
gaaatcatcccaact

SEQ ID NO: 1630260 - DNA, 15 bp, Homo sapiens
aaatcatcccaactc

SEQ ID NO: 1630261 - DNA, 15 bp, Homo sapiens
aatcatcccaactca

SEQ ID NO: 1630262 - DNA, 15 bp, Homo sapiens
atcatcccaactcaa

SEQ ID NO: 1630263 - DNA, 15 bp, Homo sapiens
tcatcccaactcaaa

SEQ ID NO: 1630264 - DNA, 15 bp, Homo sapiens
catcccaactcaaat

SEQ ID NO: 1630265 - DNA, 15 bp, Homo sapiens
atcccaactcaaata

SEQ ID NO: 1630266 - DNA, 15 bp, Homo sapiens
tcccaactcaaatat

SEQ ID NO: 1630267 - DNA, 15 bp, Homo sapiens
cccaactcaaatatc

SEQ ID NO: 1630268 - DNA, 15 bp, Homo sapiens
ccaactcaaatatca

SEQ ID NO: 1630269 - DNA, 15 bp, Homo sapiens
caactcaaatatcac

SEQ ID NO: 1630270 - DNA, 15 bp, Homo sapiens
aactcaaatatcacc

SEQ ID NO: 1630271 - DNA, 15 bp, Homo sapiens
actcaaatatcacct

SEQ ID NO: 1630272 - DNA, 15 bp, Homo sapiens
ctcaaatatcacctt

SEQ ID NO: 1630273 - DNA, 15 bp, Homo sapiens
tcaaatatcacctta

SEQ ID NO: 1630274 - DNA, 15 bp, Homo sapiens
caaatatcaccttag

SEQ ID NO: 1630275 - DNA, 15 bp, Homo sapiens
aaatatcaccttagg

SEQ ID NO: 1630276 - DNA, 15 bp, Homo sapiens
aatatcaccttaggc

SEQ ID NO: 1630277 - DNA, 15 bp, Homo sapiens
atatcaccttaggct

SEQ ID NO: 1630278 - DNA, 15 bp, Homo sapiens
tatcaccttaggctt

SEQ ID NO: 1630279 - DNA, 15 bp, Homo sapiens
atcaccttaggcttg

SEQ ID NO: 1630280 - DNA, 15 bp, Homo sapiens
tcaccttaggcttga

SEQ ID NO: 1630281 - DNA, 15 bp, Homo sapiens
caccttaggcttgaa

SEQ ID NO: 1630282 - DNA, 15 bp, Homo sapiens
accttaggcttgaaa

SEQ ID NO: 1630283 - DNA, 15 bp, Homo sapiens
ccttaggcttgaaac

SEQ ID NO: 1630284 - DNA, 15 bp, Homo sapiens
cttaggcttgaaact

SEQ ID NO: 1630285 - DNA, 15 bp, Homo sapiens
ttaggcttgaaactt

SEQ ID NO: 1630286 - DNA, 15 bp, Homo sapiens
taggcttgaaacttc

SEQ ID NO: 1630287 - DNA, 15 bp, Homo sapiens
aggcttgaaacttct

SEQ ID NO: 1630288 - DNA, 15 bp, Homo sapiens
ggcttgaaacttctc

SEQ ID NO: 1630289 - DNA, 15 bp, Homo sapiens
gcttgaaacttctct

SEQ ID NO: 1630290 - DNA, 15 bp, Homo sapiens
cttgaaacttctctc

SEQ ID NO: 1630291 - DNA, 15 bp, Homo sapiens
ttgaaacttctctcc

SEQ ID NO: 1630292 - DNA, 15 bp, Homo sapiens
tgaaacttctctcca

SEQ ID NO: 1630293 - DNA, 15 bp, Homo sapiens
gaaacttctctccat

SEQ ID NO: 1630294 - DNA, 15 bp, Homo sapiens
aaacttctctccatt

SEQ ID NO: 1630295 - DNA, 15 bp, Homo sapiens
aacttctctccattg

SEQ ID NO: 1630296 - DNA, 15 bp, Homo sapiens
acttctctccattgg

SEQ ID NO: 1630297 - DNA, 15 bp, Homo sapiens
cttctctccattggt

SEQ ID NO: 1630298 - DNA, 15 bp, Homo sapiens
ttctctccattggtc

SEQ ID NO: 1630299 - DNA, 15 bp, Homo sapiens
tctctccattggtct

SEQ ID NO: 1630300 - DNA, 15 bp, Homo sapiens
ctctccattggtcta

SEQ ID NO: 1630301 - DNA, 15 bp, Homo sapiens
tctccattggtctaa

SEQ ID NO: 1630302 - DNA, 15 bp, Homo sapiens
ctccattggtctaaa

SEQ ID NO: 1630303 - DNA, 15 bp, Homo sapiens
tccattggtctaaac

SEQ ID NO: 1630304 - DNA, 15 bp, Homo sapiens
ccattggtctaaaca

SEQ ID NO: 1630305 - DNA, 15 bp, Homo sapiens
cattggtctaaacag

SEQ ID NO: 1630306 - DNA, 15 bp, Homo sapiens
attggtctaaacagc

SEQ ID NO: 1630307 - DNA, 15 bp, Homo sapiens
ttggtctaaacagct

SEQ ID NO: 1630308 - DNA, 15 bp, Homo sapiens
tggtctaaacagcta

SEQ ID NO: 1630309 - DNA, 15 bp, Homo sapiens
ggtctaaacagctaa

SEQ ID NO: 1630310 - DNA, 15 bp, Homo sapiens
gtctaaacagctaac

SEQ ID NO: 1630311 - DNA, 15 bp, Homo sapiens
tctaaacagctaact

SEQ ID NO: 1630312 - DNA, 15 bp, Homo sapiens
ctaaacagctaactt

SEQ ID NO: 1630313 - DNA, 15 bp, Homo sapiens
taaacagctaacttt

SEQ ID NO: 1630314 - DNA, 15 bp, Homo sapiens
aaacagctaactttc

SEQ ID NO: 1630315 - DNA, 15 bp, Homo sapiens
aacagctaactttct

SEQ ID NO: 1630316 - DNA, 15 bp, Homo sapiens
acagctaactttctt

SEQ ID NO: 1630317 - DNA, 15 bp, Homo sapiens
cagctaactttctta

SEQ ID NO: 1630318 - DNA, 15 bp, Homo sapiens
agctaactttcttat

SEQ ID NO: 1630319 - DNA, 15 bp, Homo sapiens
gctaactttcttatg

SEQ ID NO: 1630320 - DNA, 15 bp, Homo sapiens
ctaactttcttatga

SEQ ID NO: 1630321 - DNA, 15 bp, Homo sapiens
taactttcttatgag

SEQ ID NO: 1630322 - DNA, 15 bp, Homo sapiens
aactttcttatgagg

SEQ ID NO: 1630323 - DNA, 15 bp, Homo sapiens
actttcttatgaggg

SEQ ID NO: 1630324 - DNA, 15 bp, Homo sapiens
ctttcttatgaggga

SEQ ID NO: 1630325 - DNA, 15 bp, Homo sapiens
tttcttatgagggaa

SEQ ID NO: 1630326 - DNA, 15 bp, Homo sapiens
ttcttatgagggaat

SEQ ID NO: 1630327 - DNA, 15 bp, Homo sapiens
tcttatgagggaatg

SEQ ID NO: 1630328 - DNA, 15 bp, Homo sapiens
cttatgagggaatga

SEQ ID NO: 1630329 - DNA, 15 bp, Homo sapiens
ttatgagggaatgag

SEQ ID NO: 1630330 - DNA, 15 bp, Homo sapiens
tatgagggaatgagt

SEQ ID NO: 1630331 - DNA, 15 bp, Homo sapiens
atgagggaatgagtg

SEQ ID NO: 1630332 - DNA, 15 bp, Homo sapiens
tgagggaatgagtgt

SEQ ID NO: 1630333 - DNA, 15 bp, Homo sapiens
gagggaatgagtgta

SEQ ID NO: 1630334 - DNA, 15 bp, Homo sapiens
agggaatgagtgtac

SEQ ID NO: 1630335 - DNA, 15 bp, Homo sapiens
gggaatgagtgtact

SEQ ID NO: 1630336 - DNA, 15 bp, Homo sapiens
ggaatgagtgtactt

SEQ ID NO: 1630337 - DNA, 15 bp, Homo sapiens
gaatgagtgtacttc

SEQ ID NO: 1630338 - DNA, 15 bp, Homo sapiens
aatgagtgtacttct

SEQ ID NO: 1630339 - DNA, 15 bp, Homo sapiens
atgagtgtacttctt

SEQ ID NO: 1630340 - DNA, 15 bp, Homo sapiens
tgagtgtacttctta

SEQ ID NO: 1630341 - DNA, 15 bp, Homo sapiens
gagtgtacttcttat

SEQ ID NO: 1630342 - DNA, 15 bp, Homo sapiens
agtgtacttcttatt

SEQ ID NO: 1630343 - DNA, 15 bp, Homo sapiens
gtgtacttcttatta

SEQ ID NO: 1630344 - DNA, 15 bp, Homo sapiens
tgtacttcttattat

SEQ ID NO: 1630345 - DNA, 15 bp, Homo sapiens
gtacttcttattatc

SEQ ID NO: 1630346 - DNA, 15 bp, Homo sapiens
tacttcttattatct

SEQ ID NO: 1630347 - DNA, 15 bp, Homo sapiens
acttcttattatcta

SEQ ID NO: 1630348 - DNA, 15 bp, Homo sapiens
cttcttattatctag

SEQ ID NO: 1630349 - DNA, 15 bp, Homo sapiens
ttcttattatctaga

SEQ ID NO: 1630350 - DNA, 15 bp, Homo sapiens
tcttattatctagag

SEQ ID NO: 1630351 - DNA, 15 bp, Homo sapiens
cttattatctagaga

SEQ ID NO: 1630352 - DNA, 15 bp, Homo sapiens
ttattatctagagaa

SEQ ID NO: 1630353 - DNA, 15 bp, Homo sapiens
tattatctagagaaa

SEQ ID NO: 1630354 - DNA, 15 bp, Homo sapiens
attatctagagaaac

SEQ ID NO: 1630355 - DNA, 15 bp, Homo sapiens
ttatctagagaaact

SEQ ID NO: 1630356 - DNA, 15 bp, Homo sapiens
tatctagagaaacta

SEQ ID NO: 1630357 - DNA, 15 bp, Homo sapiens
atctagagaaactaa

SEQ ID NO: 1630358 - DNA, 15 bp, Homo sapiens
tctagagaaactaag

SEQ ID NO: 1630359 - DNA, 15 bp, Homo sapiens
ctagagaaactaagc

SEQ ID NO: 1630360 - DNA, 15 bp, Homo sapiens
tagagaaactaagca

SEQ ID NO: 1630361 - DNA, 15 bp, Homo sapiens
agagaaactaagcac

SEQ ID NO: 1630362 - DNA, 15 bp, Homo sapiens
gagaaactaagcaca

SEQ ID NO: 1630363 - DNA, 15 bp, Homo sapiens
agaaactaagcacag

SEQ ID NO: 1630364 - DNA, 15 bp, Homo sapiens
gaaactaagcacagg

SEQ ID NO: 1630365 - DNA, 15 bp, Homo sapiens
aaactaagcacaggt

SEQ ID NO: 1630366 - DNA, 15 bp, Homo sapiens
aactaagcacaggtg

SEQ ID NO: 1630367 - DNA, 15 bp, Homo sapiens
actaagcacaggtgc

SEQ ID NO: 1630368 - DNA, 15 bp, Homo sapiens
ctaagcacaggtgcc

SEQ ID NO: 1630369 - DNA, 15 bp, Homo sapiens
taagcacaggtgcct

SEQ ID NO: 1630370 - DNA, 15 bp, Homo sapiens
aagcacaggtgccta

SEQ ID NO: 1630371 - DNA, 15 bp, Homo sapiens
agcacaggtgcctat

SEQ ID NO: 1630372 - DNA, 15 bp, Homo sapiens
gcacaggtgcctatt

SEQ ID NO: 1630373 - DNA, 15 bp, Homo sapiens
cacaggtgcctattt

SEQ ID NO: 1630374 - DNA, 15 bp, Homo sapiens
acaggtgcctatttt

SEQ ID NO: 1630375 - DNA, 15 bp, Homo sapiens
caggtgcctattttt

SEQ ID NO: 1630376 - DNA, 15 bp, Homo sapiens
aggtgcctatttttg

SEQ ID NO: 1630377 - DNA, 15 bp, Homo sapiens
ggtgcctatttttgt

SEQ ID NO: 1630378 - DNA, 15 bp, Homo sapiens
gtgcctatttttgta

SEQ ID NO: 1630379 - DNA, 15 bp, Homo sapiens
tgcctatttttgtat

SEQ ID NO: 1630380 - DNA, 15 bp, Homo sapiens
gcctatttttgtatt

SEQ ID NO: 1630381 - DNA, 15 bp, Homo sapiens
cctatttttgtattt

SEQ ID NO: 1630382 - DNA, 15 bp, Homo sapiens
ctatttttgtatttg

SEQ ID NO: 1630383 - DNA, 15 bp, Homo sapiens
tatttttgtatttgt

SEQ ID NO: 1630384 - DNA, 15 bp, Homo sapiens
atttttgtatttgtt

SEQ ID NO: 1630385 - DNA, 15 bp, Homo sapiens
tttttgtatttgttt

SEQ ID NO: 1630386 - DNA, 15 bp, Homo sapiens
ttttgtatttgtttg

SEQ ID NO: 1630387 - DNA, 15 bp, Homo sapiens
tttgtatttgtttgc

SEQ ID NO: 1630388 - DNA, 15 bp, Homo sapiens
ttgtatttgtttgca

SEQ ID NO: 1630389 - DNA, 15 bp, Homo sapiens
tgtatttgtttgcat

SEQ ID NO: 1630390 - DNA, 15 bp, Homo sapiens
gtatttgtttgcatg

SEQ ID NO: 1630391 - DNA, 15 bp, Homo sapiens
tatttgtttgcatgt

SEQ ID NO: 1630392 - DNA, 15 bp, Homo sapiens
atttgtttgcatgtg

SEQ ID NO: 1630393 - DNA, 15 bp, Homo sapiens
tttgtttgcatgtgt

SEQ ID NO: 1630394 - DNA, 15 bp, Homo sapiens
ttgtttgcatgtgtt

SEQ ID NO: 1630395 - DNA, 15 bp, Homo sapiens
tgtttgcatgtgttt

SEQ ID NO: 1630396 - DNA, 15 bp, Homo sapiens
gtttgcatgtgtttg

SEQ ID NO: 1630397 - DNA, 15 bp, Homo sapiens
tttgcatgtgtttga

SEQ ID NO: 1630398 - DNA, 15 bp, Homo sapiens
ttgcatgtgtttgag

SEQ ID NO: 1630399 - DNA, 15 bp, Homo sapiens
tgcatgtgtttgagt

SEQ ID NO: 1630400 - DNA, 15 bp, Homo sapiens
gcatgtgtttgagtg

SEQ ID NO: 1630401 - DNA, 15 bp, Homo sapiens
catgtgtttgagtgc

SEQ ID NO: 1630402 - DNA, 15 bp, Homo sapiens
atgtgtttgagtgct

SEQ ID NO: 1630403 - DNA, 15 bp, Homo sapiens
tgtgtttgagtgctg

SEQ ID NO: 1630404 - DNA, 15 bp, Homo sapiens
gtgtttgagtgctgt

SEQ ID NO: 1630405 - DNA, 15 bp, Homo sapiens
tgtttgagtgctgtg

SEQ ID NO: 1630406 - DNA, 15 bp, Homo sapiens
gtttgagtgctgtgt

SEQ ID NO: 1630407 - DNA, 15 bp, Homo sapiens
tttgagtgctgtgtg

SEQ ID NO: 1630408 - DNA, 15 bp, Homo sapiens
ttgagtgctgtgtgc

SEQ ID NO: 1630409 - DNA, 15 bp, Homo sapiens
tgagtgctgtgtgcg

SEQ ID NO: 1630410 - DNA, 15 bp, Homo sapiens
gagtgctgtgtgcgt

SEQ ID NO: 1630411 - DNA, 15 bp, Homo sapiens
agtgctgtgtgcgtt

SEQ ID NO: 1630412 - DNA, 15 bp, Homo sapiens
gtgctgtgtgcgttc

SEQ ID NO: 1630413 - DNA, 15 bp, Homo sapiens
tgctgtgtgcgttct

SEQ ID NO: 1630414 - DNA, 15 bp, Homo sapiens
gctgtgtgcgttcta

SEQ ID NO: 1630415 - DNA, 15 bp, Homo sapiens
ctgtgtgcgttctag

SEQ ID NO: 1630416 - DNA, 15 bp, Homo sapiens
tgtgtgcgttctaga

SEQ ID NO: 1630417 - DNA, 15 bp, Homo sapiens
gtgtgcgttctagaa

SEQ ID NO: 1630418 - DNA, 15 bp, Homo sapiens
tgtgcgttctagaat

SEQ ID NO: 1630419 - DNA, 15 bp, Homo sapiens
gtgcgttctagaata

SEQ ID NO: 1630420 - DNA, 15 bp, Homo sapiens
tgcgttctagaataa

SEQ ID NO: 1630421 - DNA, 15 bp, Homo sapiens
gcgttctagaataag

SEQ ID NO: 1630422 - DNA, 15 bp, Homo sapiens
cgttctagaataaga

SEQ ID NO: 1630423 - DNA, 15 bp, Homo sapiens
gttctagaataagac

SEQ ID NO: 1630424 - DNA, 15 bp, Homo sapiens
ttctagaataagaca

SEQ ID NO: 1630425 - DNA, 15 bp, Homo sapiens
tctagaataagacaa

SEQ ID NO: 1630426 - DNA, 15 bp, Homo sapiens
ctagaataagacaaa

SEQ ID NO: 1630427 - DNA, 15 bp, Homo sapiens
tagaataagacaaaa

SEQ ID NO: 1630428 - DNA, 15 bp, Homo sapiens
agaataagacaaaaa

SEQ ID NO: 1630429 - DNA, 15 bp, Homo sapiens
gaataagacaaaaaa

SEQ ID NO: 1630430 - DNA, 15 bp, Homo sapiens
taagacaaaaaaaaa

SEQ ID NO: 1630431 - DNA, 15 bp, Homo sapiens
aagacaaaaaaaaac

SEQ ID NO: 1630432 - DNA, 15 bp, Homo sapiens
agacaaaaaaaaacc

SEQ ID NO: 1630433 - DNA, 15 bp, Homo sapiens
gacaaaaaaaaaccc

SEQ ID NO: 1630434 - DNA, 15 bp, Homo sapiens
acaaaaaaaaaccca

SEQ ID NO: 1630435 - DNA, 15 bp, Homo sapiens
caaaaaaaaacccac

SEQ ID NO: 1630436 - DNA, 15 bp, Homo sapiens
aaaaaaaaacccact

SEQ ID NO: 1630437 - DNA, 15 bp, Homo sapiens
aaaaaaaacccactg

SEQ ID NO: 1630438 - DNA, 15 bp, Homo sapiens
aaaaaaacccactgt

SEQ ID NO: 1630439 - DNA, 15 bp, Homo sapiens
aaaaaacccactgtt

SEQ ID NO: 1630440 - DNA, 15 bp, Homo sapiens
aaaaacccactgttt

SEQ ID NO: 1630441 - DNA, 15 bp, Homo sapiens
aaaacccactgttta

SEQ ID NO: 1630442 - DNA, 15 bp, Homo sapiens
aaacccactgtttat

SEQ ID NO: 1630443 - DNA, 15 bp, Homo sapiens
aacccactgtttatt

SEQ ID NO: 1630444 - DNA, 15 bp, Homo sapiens
acccactgtttattt

SEQ ID NO: 1630445 - DNA, 15 bp, Homo sapiens
cccactgtttatttt

SEQ ID NO: 1630446 - DNA, 15 bp, Homo sapiens
ccactgtttattttc

SEQ ID NO: 1630447 - DNA, 15 bp, Homo sapiens
cactgtttattttct

SEQ ID NO: 1630448 - DNA, 15 bp, Homo sapiens
actgtttattttctt

SEQ ID NO: 1630449 - DNA, 15 bp, Homo sapiens
ctgtttattttcttg

SEQ ID NO: 1630450 - DNA, 15 bp, Homo sapiens
tgtttattttcttgt

SEQ ID NO: 1630451 - DNA, 15 bp, Homo sapiens
gtttattttcttgtt

SEQ ID NO: 1630452 - DNA, 15 bp, Homo sapiens
tttattttcttgttg

SEQ ID NO: 1630453 - DNA, 15 bp, Homo sapiens
ttattttcttgttgc

SEQ ID NO: 1630454 - DNA, 15 bp, Homo sapiens
tattttcttgttgcc

SEQ ID NO: 1630455 - DNA, 15 bp, Homo sapiens
attttcttgttgcca

SEQ ID NO: 1630456 - DNA, 15 bp, Homo sapiens
ttttcttgttgccaa

SEQ ID NO: 1630457 - DNA, 15 bp, Homo sapiens
tttcttgttgccaat

SEQ ID NO: 1630458 - DNA, 15 bp, Homo sapiens
ttcttgttgccaatg

SEQ ID NO: 1630459 - DNA, 15 bp, Homo sapiens
tcttgttgccaatga

SEQ ID NO: 1630460 - DNA, 15 bp, Homo sapiens
cttgttgccaatgag

SEQ ID NO: 1630461 - DNA, 15 bp, Homo sapiens
ttgttgccaatgagt

SEQ ID NO: 1630462 - DNA, 15 bp, Homo sapiens
tgttgccaatgagtg

SEQ ID NO: 1630463 - DNA, 15 bp, Homo sapiens
gttgccaatgagtgt

SEQ ID NO: 1630464 - DNA, 15 bp, Homo sapiens
ttgccaatgagtgtc

SEQ ID NO: 1630465 - DNA, 15 bp, Homo sapiens
tgccaatgagtgtca

SEQ ID NO: 1630466 - DNA, 15 bp, Homo sapiens
gccaatgagtgtcat

SEQ ID NO: 1630467 - DNA, 15 bp, Homo sapiens
ccaatgagtgtcatc

SEQ ID NO: 1630468 - DNA, 15 bp, Homo sapiens
caatgagtgtcatct

SEQ ID NO: 1630469 - DNA, 15 bp, Homo sapiens
aatgagtgtcatctt

SEQ ID NO: 1630470 - DNA, 15 bp, Homo sapiens
atgagtgtcatcttc

SEQ ID NO: 1630471 - DNA, 15 bp, Homo sapiens
tgagtgtcatcttca

SEQ ID NO: 1630472 - DNA, 15 bp, Homo sapiens
gagtgtcatcttcat

SEQ ID NO: 1630473 - DNA, 15 bp, Homo sapiens
agtgtcatcttcata

SEQ ID NO: 1630474 - DNA, 15 bp, Homo sapiens
gtgtcatcttcatac

SEQ ID NO: 1630475 - DNA, 15 bp, Homo sapiens
tgtcatcttcataca

SEQ ID NO: 1630476 - DNA, 15 bp, Homo sapiens
gtcatcttcatacaa

SEQ ID NO: 1630477 - DNA, 15 bp, Homo sapiens
tcatcttcatacaat

SEQ ID NO: 1630478 - DNA, 15 bp, Homo sapiens
catcttcatacaata

SEQ ID NO: 1630479 - DNA, 15 bp, Homo sapiens
atcttcatacaatat

SEQ ID NO: 1630480 - DNA, 15 bp, Homo sapiens
tcttcatacaatatt

SEQ ID NO: 1630481 - DNA, 15 bp, Homo sapiens
cttcatacaatatta

SEQ ID NO: 1630482 - DNA, 15 bp, Homo sapiens
ttcatacaatattaa

SEQ ID NO: 1630483 - DNA, 15 bp, Homo sapiens
tcatacaatattaat

SEQ ID NO: 1630484 - DNA, 15 bp, Homo sapiens
catacaatattaatg

SEQ ID NO: 1630485 - DNA, 15 bp, Homo sapiens
atacaatattaatga

SEQ ID NO: 1630486 - DNA, 15 bp, Homo sapiens
tacaatattaatgac

SEQ ID NO: 1630487 - DNA, 15 bp, Homo sapiens
acaatattaatgaca

SEQ ID NO: 1630488 - DNA, 15 bp, Homo sapiens
caatattaatgacac

SEQ ID NO: 1630489 - DNA, 15 bp, Homo sapiens
aatattaatgacaca

SEQ ID NO: 1630490 - DNA, 15 bp, Homo sapiens
atattaatgacacag

SEQ ID NO: 1630491 - DNA, 15 bp, Homo sapiens
tattaatgacacagc

SEQ ID NO: 1630492 - DNA, 15 bp, Homo sapiens
attaatgacacagcc

SEQ ID NO: 1630493 - DNA, 15 bp, Homo sapiens
ttaatgacacagcca

SEQ ID NO: 1630494 - DNA, 15 bp, Homo sapiens
taatgacacagccaa

SEQ ID NO: 1630495 - DNA, 15 bp, Homo sapiens
aatgacacagccaag

SEQ ID NO: 1630496 - DNA, 15 bp, Homo sapiens
atgacacagccaagt

SEQ ID NO: 1630497 - DNA, 15 bp, Homo sapiens
tgacacagccaagtc

SEQ ID NO: 1630498 - DNA, 15 bp, Homo sapiens
gacacagccaagtca

SEQ ID NO: 1630499 - DNA, 15 bp, Homo sapiens
acacagccaagtcaa

SEQ ID NO: 1630500 - DNA, 15 bp, Homo sapiens
cacagccaagtcaag

SEQ ID NO: 1630501 - DNA, 15 bp, Homo sapiens
acagccaagtcaagt

SEQ ID NO: 1630502 - DNA, 15 bp, Homo sapiens
cagccaagtcaagtg

SEQ ID NO: 1630503 - DNA, 15 bp, Homo sapiens
agccaagtcaagtgg

SEQ ID NO: 1630504 - DNA, 15 bp, Homo sapiens
gccaagtcaagtggt

SEQ ID NO: 1630505 - DNA, 15 bp, Homo sapiens
ccaagtcaagtggtc

SEQ ID NO: 1630506 - DNA, 15 bp, Homo sapiens
caagtcaagtggtca

SEQ ID NO: 1630507 - DNA, 15 bp, Homo sapiens
aagtcaagtggtcac

SEQ ID NO: 1630508 - DNA, 15 bp, Homo sapiens
agtcaagtggtcaca

SEQ ID NO: 1630509 - DNA, 15 bp, Homo sapiens
gtcaagtggtcacaa

SEQ ID NO: 1630510 - DNA, 15 bp, Homo sapiens
tcaagtggtcacaac

SEQ ID NO: 1630511 - DNA, 15 bp, Homo sapiens
caagtggtcacaact

SEQ ID NO: 1630512 - DNA, 15 bp, Homo sapiens
aagtggtcacaactt

SEQ ID NO: 1630513 - DNA, 15 bp, Homo sapiens
agtggtcacaacttc

SEQ ID NO: 1630514 - DNA, 15 bp, Homo sapiens
gtggtcacaacttct

SEQ ID NO: 1630515 - DNA, 15 bp, Homo sapiens
tggtcacaacttctc

SEQ ID NO: 1630516 - DNA, 15 bp, Homo sapiens
ggtcacaacttctct

SEQ ID NO: 1630517 - DNA, 15 bp, Homo sapiens
gtcacaacttctctt

SEQ ID NO: 1630518 - DNA, 15 bp, Homo sapiens
tcacaacttctcttt

SEQ ID NO: 1630519 - DNA, 15 bp, Homo sapiens
cacaacttctctttg

SEQ ID NO: 1630520 - DNA, 15 bp, Homo sapiens
acaacttctctttgg

SEQ ID NO: 1630521 - DNA, 15 bp, Homo sapiens
caacttctctttgga

SEQ ID NO: 1630522 - DNA, 15 bp, Homo sapiens
aacttctctttggaa

SEQ ID NO: 1630523 - DNA, 15 bp, Homo sapiens
acttctctttggaaa

SEQ ID NO: 1630524 - DNA, 15 bp, Homo sapiens
cttctctttggaaat

SEQ ID NO: 1630525 - DNA, 15 bp, Homo sapiens
ttctctttggaaatg

SEQ ID NO: 1630526 - DNA, 15 bp, Homo sapiens
tctctttggaaatga

SEQ ID NO: 1630527 - DNA, 15 bp, Homo sapiens
ctctttggaaatgat

SEQ ID NO: 1630528 - DNA, 15 bp, Homo sapiens
tctttggaaatgatc

SEQ ID NO: 1630529 - DNA, 15 bp, Homo sapiens
ctttggaaatgatca

SEQ ID NO: 1630530 - DNA, 15 bp, Homo sapiens
tttggaaatgatcaa

SEQ ID NO: 1630531 - DNA, 15 bp, Homo sapiens
ttggaaatgatcaag

SEQ ID NO: 1630532 - DNA, 15 bp, Homo sapiens
tggaaatgatcaaga

SEQ ID NO: 1630533 - DNA, 15 bp, Homo sapiens
ggaaatgatcaagaa

SEQ ID NO: 1630534 - DNA, 15 bp, Homo sapiens
gaaatgatcaagaaa

SEQ ID NO: 1630535 - DNA, 15 bp, Homo sapiens
aaatgatcaagaaac

SEQ ID NO: 1630536 - DNA, 15 bp, Homo sapiens
aatgatcaagaaaca

SEQ ID NO: 1630537 - DNA, 15 bp, Homo sapiens
atgatcaagaaacag

SEQ ID NO: 1630538 - DNA, 15 bp, Homo sapiens
tgatcaagaaacagt

SEQ ID NO: 1630539 - DNA, 15 bp, Homo sapiens
gatcaagaaacagta

SEQ ID NO: 1630540 - DNA, 15 bp, Homo sapiens
atcaagaaacagtaa

SEQ ID NO: 1630541 - DNA, 15 bp, Homo sapiens
tcaagaaacagtaag

SEQ ID NO: 1630542 - DNA, 15 bp, Homo sapiens
caagaaacagtaagt

SEQ ID NO: 1630543 - DNA, 15 bp, Homo sapiens
aagaaacagtaagtg

SEQ ID NO: 1630544 - DNA, 15 bp, Homo sapiens
agaaacagtaagtgc

SEQ ID NO: 1630545 - DNA, 15 bp, Homo sapiens
gaaacagtaagtgca

SEQ ID NO: 1630546 - DNA, 15 bp, Homo sapiens
aaacagtaagtgcag

SEQ ID NO: 1630547 - DNA, 15 bp, Homo sapiens
aacagtaagtgcagg

SEQ ID NO: 1630548 - DNA, 15 bp, Homo sapiens
acagtaagtgcagga

SEQ ID NO: 1630549 - DNA, 15 bp, Homo sapiens
cagtaagtgcaggag

SEQ ID NO: 1630550 - DNA, 15 bp, Homo sapiens
agtaagtgcaggagc

SEQ ID NO: 1630551 - DNA, 15 bp, Homo sapiens
gtaagtgcaggagcc

SEQ ID NO: 1630552 - DNA, 15 bp, Homo sapiens
taagtgcaggagcca

SEQ ID NO: 1630553 - DNA, 15 bp, Homo sapiens
aagtgcaggagccac

SEQ ID NO: 1630554 - DNA, 15 bp, Homo sapiens
agtgcaggagccaca

SEQ ID NO: 1630555 - DNA, 15 bp, Homo sapiens
gtgcaggagccacag

SEQ ID NO: 1630556 - DNA, 15 bp, Homo sapiens
tgcaggagccacagg

SEQ ID NO: 1630557 - DNA, 15 bp, Homo sapiens
gcaggagccacaggt

SEQ ID NO: 1630558 - DNA, 15 bp, Homo sapiens
caggagccacaggtg

SEQ ID NO: 1630559 - DNA, 15 bp, Homo sapiens
aggagccacaggtga

SEQ ID NO: 1630560 - DNA, 15 bp, Homo sapiens
ggagccacaggtgaa

SEQ ID NO: 1630561 - DNA, 15 bp, Homo sapiens
gagccacaggtgaaa

SEQ ID NO: 1630562 - DNA, 15 bp, Homo sapiens
agccacaggtgaaag

SEQ ID NO: 1630563 - DNA, 15 bp, Homo sapiens
gccacaggtgaaaga

SEQ ID NO: 1630564 - DNA, 15 bp, Homo sapiens
ccacaggtgaaagaa

SEQ ID NO: 1630565 - DNA, 15 bp, Homo sapiens
cacaggtgaaagaaa

SEQ ID NO: 1630566 - DNA, 15 bp, Homo sapiens
acaggtgaaagaaaa

SEQ ID NO: 1630567 - DNA, 15 bp, Homo sapiens
caggtgaaagaaaaa

SEQ ID NO: 1630568 - DNA, 15 bp, Homo sapiens
aggtgaaagaaaaat

SEQ ID NO: 1630569 - DNA, 15 bp, Homo sapiens
ggtgaaagaaaaatg

SEQ ID NO: 1630570 - DNA, 15 bp, Homo sapiens
gtgaaagaaaaatga

SEQ ID NO: 1630571 - DNA, 15 bp, Homo sapiens
tgaaagaaaaatgag

SEQ ID NO: 1630572 - DNA, 15 bp, Homo sapiens
gaaagaaaaatgagt

SEQ ID NO: 1630573 - DNA, 15 bp, Homo sapiens
aaagaaaaatgagta

SEQ ID NO: 1630574 - DNA, 15 bp, Homo sapiens
aagaaaaatgagtaa

SEQ ID NO: 1630575 - DNA, 15 bp, Homo sapiens
agaaaaatgagtaag

SEQ ID NO: 1630576 - DNA, 15 bp, Homo sapiens
gaaaaatgagtaaga

SEQ ID NO: 1630577 - DNA, 15 bp, Homo sapiens
aaaaatgagtaagaa

SEQ ID NO: 1630578 - DNA, 15 bp, Homo sapiens
aaaatgagtaagaaa

SEQ ID NO: 1630579 - DNA, 15 bp, Homo sapiens
aaatgagtaagaaaa

SEQ ID NO: 1630580 - DNA, 15 bp, Homo sapiens
aatgagtaagaaaac

SEQ ID NO: 1630581 - DNA, 15 bp, Homo sapiens
atgagtaagaaaact

SEQ ID NO: 1630582 - DNA, 15 bp, Homo sapiens
tgagtaagaaaactt

SEQ ID NO: 1630583 - DNA, 15 bp, Homo sapiens
gagtaagaaaactta

SEQ ID NO: 1630584 - DNA, 15 bp, Homo sapiens
agtaagaaaacttag

SEQ ID NO: 1630585 - DNA, 15 bp, Homo sapiens
gtaagaaaacttaga

SEQ ID NO: 1630586 - DNA, 15 bp, Homo sapiens
taagaaaacttagaa

SEQ ID NO: 1630587 - DNA, 15 bp, Homo sapiens
aagaaaacttagaat

SEQ ID NO: 1630588 - DNA, 15 bp, Homo sapiens
agaaaacttagaatt

SEQ ID NO: 1630589 - DNA, 15 bp, Homo sapiens
gaaaacttagaattg

SEQ ID NO: 1630590 - DNA, 15 bp, Homo sapiens
aaaacttagaattgg

SEQ ID NO: 1630591 - DNA, 15 bp, Homo sapiens
aaacttagaattgga

SEQ ID NO: 1630592 - DNA, 15 bp, Homo sapiens
aacttagaattggaa

SEQ ID NO: 1630593 - DNA, 15 bp, Homo sapiens
acttagaattggaaa

SEQ ID NO: 1630594 - DNA, 15 bp, Homo sapiens
cttagaattggaaaa

SEQ ID NO: 1630595 - DNA, 15 bp, Homo sapiens
ttagaattggaaaat

SEQ ID NO: 1630596 - DNA, 15 bp, Homo sapiens
tagaattggaaaata

SEQ ID NO: 1630597 - DNA, 15 bp, Homo sapiens
agaattggaaaatat

SEQ ID NO: 1630598 - DNA, 15 bp, Homo sapiens
gaattggaaaatata

SEQ ID NO: 1630599 - DNA, 15 bp, Homo sapiens
aattggaaaatataa

SEQ ID NO: 1630600 - DNA, 15 bp, Homo sapiens
attggaaaatataat

SEQ ID NO: 1630601 - DNA, 15 bp, Homo sapiens
ttggaaaatataatt

SEQ ID NO: 1630602 - DNA, 15 bp, Homo sapiens
tggaaaatataattt

SEQ ID NO: 1630603 - DNA, 15 bp, Homo sapiens
ggaaaatataattta

SEQ ID NO: 1630604 - DNA, 15 bp, Homo sapiens
gaaaatataatttat

SEQ ID NO: 1630605 - DNA, 15 bp, Homo sapiens
aaaatataatttatt

SEQ ID NO: 1630606 - DNA, 15 bp, Homo sapiens
aaatataatttatta

SEQ ID NO: 1630607 - DNA, 15 bp, Homo sapiens
aatataatttattaa

SEQ ID NO: 1630608 - DNA, 15 bp, Homo sapiens
atataatttattaac

SEQ ID NO: 1630609 - DNA, 15 bp, Homo sapiens
tataatttattaact

SEQ ID NO: 1630610 - DNA, 15 bp, Homo sapiens
ataatttattaactt

SEQ ID NO: 1630611 - DNA, 15 bp, Homo sapiens
taatttattaacttg

SEQ ID NO: 1630612 - DNA, 15 bp, Homo sapiens
aatttattaacttgg

SEQ ID NO: 1630613 - DNA, 15 bp, Homo sapiens
atttattaacttggg

SEQ ID NO: 1630614 - DNA, 15 bp, Homo sapiens
tttattaacttgggt

SEQ ID NO: 1630615 - DNA, 15 bp, Homo sapiens
ttattaacttgggtt

SEQ ID NO: 1630616 - DNA, 15 bp, Homo sapiens
tattaacttgggttt

SEQ ID NO: 1630617 - DNA, 15 bp, Homo sapiens
attaacttgggtttt

SEQ ID NO: 1630618 - DNA, 15 bp, Homo sapiens
ttaacttgggttttc

SEQ ID NO: 1630619 - DNA, 15 bp, Homo sapiens
taacttgggttttct

SEQ ID NO: 1630620 - DNA, 15 bp, Homo sapiens
aacttgggttttctt

SEQ ID NO: 1630621 - DNA, 15 bp, Homo sapiens
acttgggttttcttt

SEQ ID NO: 1630622 - DNA, 15 bp, Homo sapiens
cttgggttttctttt

SEQ ID NO: 1630623 - DNA, 15 bp, Homo sapiens
ttgggttttcttttt

SEQ ID NO: 1630624 - DNA, 15 bp, Homo sapiens
tgggttttctttttt

SEQ ID NO: 1630625 - DNA, 15 bp, Homo sapiens
gggttttcttttttg

SEQ ID NO: 1630626 - DNA, 15 bp, Homo sapiens
ggttttcttttttgc

SEQ ID NO: 1630627 - DNA, 15 bp, Homo sapiens
gttttcttttttgcc

SEQ ID NO: 1630628 - DNA, 15 bp, Homo sapiens
ttttcttttttgcca

SEQ ID NO: 1630629 - DNA, 15 bp, Homo sapiens
tttcttttttgccac

SEQ ID NO: 1630630 - DNA, 15 bp, Homo sapiens
ttcttttttgccact

SEQ ID NO: 1630631 - DNA, 15 bp, Homo sapiens
tcttttttgccactt

SEQ ID NO: 1630632 - DNA, 15 bp, Homo sapiens
cttttttgccacttg

SEQ ID NO: 1630633 - DNA, 15 bp, Homo sapiens
ttttttgccacttgg

SEQ ID NO: 1630634 - DNA, 15 bp, Homo sapiens
tttttgccacttgga

SEQ ID NO: 1630635 - DNA, 15 bp, Homo sapiens
ttttgccacttggaa

SEQ ID NO: 1630636 - DNA, 15 bp, Homo sapiens
tttgccacttggaaa

SEQ ID NO: 1630637 - DNA, 15 bp, Homo sapiens
ttgccacttggaaaa

SEQ ID NO: 1630638 - DNA, 15 bp, Homo sapiens
tgccacttggaaaat

SEQ ID NO: 1630639 - DNA, 15 bp, Homo sapiens
gccacttggaaaata

SEQ ID NO: 1630640 - DNA, 15 bp, Homo sapiens
ccacttggaaaatag

SEQ ID NO: 1630641 - DNA, 15 bp, Homo sapiens
cacttggaaaatagt

SEQ ID NO: 1630642 - DNA, 15 bp, Homo sapiens
acttggaaaatagta

SEQ ID NO: 1630643 - DNA, 15 bp, Homo sapiens
cttggaaaatagtat

SEQ ID NO: 1630644 - DNA, 15 bp, Homo sapiens
ttggaaaatagtatt

SEQ ID NO: 1630645 - DNA, 15 bp, Homo sapiens
tggaaaatagtatta

SEQ ID NO: 1630646 - DNA, 15 bp, Homo sapiens
ggaaaatagtattat

SEQ ID NO: 1630647 - DNA, 15 bp, Homo sapiens
gaaaatagtattatt

SEQ ID NO: 1630648 - DNA, 15 bp, Homo sapiens
aaaatagtattatta

SEQ ID NO: 1630649 - DNA, 15 bp, Homo sapiens
aaatagtattattac

SEQ ID NO: 1630650 - DNA, 15 bp, Homo sapiens
aatagtattattact

SEQ ID NO: 1630651 - DNA, 15 bp, Homo sapiens
atagtattattacta

SEQ ID NO: 1630652 - DNA, 15 bp, Homo sapiens
tagtattattactac

SEQ ID NO: 1630653 - DNA, 15 bp, Homo sapiens
agtattattactact

SEQ ID NO: 1630654 - DNA, 15 bp, Homo sapiens
gtattattactactc

SEQ ID NO: 1630655 - DNA, 15 bp, Homo sapiens
tattattactactca

SEQ ID NO: 1630656 - DNA, 15 bp, Homo sapiens
attattactactcag

SEQ ID NO: 1630657 - DNA, 15 bp, Homo sapiens
ttattactactcagt

SEQ ID NO: 1630658 - DNA, 15 bp, Homo sapiens
tattactactcagtt

SEQ ID NO: 1630659 - DNA, 15 bp, Homo sapiens
attactactcagttt

SEQ ID NO: 1630660 - DNA, 15 bp, Homo sapiens
ttactactcagtttt

SEQ ID NO: 1630661 - DNA, 15 bp, Homo sapiens
tactactcagtttta

SEQ ID NO: 1630662 - DNA, 15 bp, Homo sapiens
actactcagttttag

SEQ ID NO: 1630663 - DNA, 15 bp, Homo sapiens
ctactcagttttagt

SEQ ID NO: 1630664 - DNA, 15 bp, Homo sapiens
tactcagttttagtg

SEQ ID NO: 1630665 - DNA, 15 bp, Homo sapiens
actcagttttagtga

SEQ ID NO: 1630666 - DNA, 15 bp, Homo sapiens
ctcagttttagtgag

SEQ ID NO: 1630667 - DNA, 15 bp, Homo sapiens
tcagttttagtgagg

SEQ ID NO: 1630668 - DNA, 15 bp, Homo sapiens
cagttttagtgaggg

SEQ ID NO: 1630669 - DNA, 15 bp, Homo sapiens
agttttagtgaggga

SEQ ID NO: 1630670 - DNA, 15 bp, Homo sapiens
gttttagtgagggag

SEQ ID NO: 1630671 - DNA, 15 bp, Homo sapiens
ttttagtgagggagg

SEQ ID NO: 1630672 - DNA, 15 bp, Homo sapiens
tttagtgagggagga

SEQ ID NO: 1630673 - DNA, 15 bp, Homo sapiens
ttagtgagggaggac

SEQ ID NO: 1630674 - DNA, 15 bp, Homo sapiens
tagtgagggaggacc

SEQ ID NO: 1630675 - DNA, 15 bp, Homo sapiens
agtgagggaggacca

SEQ ID NO: 1630676 - DNA, 15 bp, Homo sapiens
gtgagggaggaccag

SEQ ID NO: 1630677 - DNA, 15 bp, Homo sapiens
tgagggaggaccagt

SEQ ID NO: 1630678 - DNA, 15 bp, Homo sapiens
gagggaggaccagtg

SEQ ID NO: 1630679 - DNA, 15 bp, Homo sapiens
agggaggaccagtga

SEQ ID NO: 1630680 - DNA, 15 bp, Homo sapiens
gggaggaccagtgag

SEQ ID NO: 1630681 - DNA, 15 bp, Homo sapiens
ggaggaccagtgagc

SEQ ID NO: 1630682 - DNA, 15 bp, Homo sapiens
gaggaccagtgagcg

SEQ ID NO: 1630683 - DNA, 15 bp, Homo sapiens
aggaccagtgagcgc

SEQ ID NO: 1630684 - DNA, 15 bp, Homo sapiens
ggaccagtgagcgca

SEQ ID NO: 1630685 - DNA, 15 bp, Homo sapiens
gaccagtgagcgcac

SEQ ID NO: 1630686 - DNA, 15 bp, Homo sapiens
accagtgagcgcacc

SEQ ID NO: 1630687 - DNA, 15 bp, Homo sapiens
ccagtgagcgcacct

SEQ ID NO: 1630688 - DNA, 15 bp, Homo sapiens
cagtgagcgcacctt

SEQ ID NO: 1630689 - DNA, 15 bp, Homo sapiens
agtgagcgcaccttt

SEQ ID NO: 1630690 - DNA, 15 bp, Homo sapiens
gtgagcgcacctttt

SEQ ID NO: 1630691 - DNA, 15 bp, Homo sapiens
tgagcgcaccttttg

SEQ ID NO: 1630692 - DNA, 15 bp, Homo sapiens
gagcgcaccttttga

SEQ ID NO: 1630693 - DNA, 15 bp, Homo sapiens
agcgcaccttttgag

SEQ ID NO: 1630694 - DNA, 15 bp, Homo sapiens
gcgcaccttttgaga

SEQ ID NO: 1630695 - DNA, 15 bp, Homo sapiens
cgcaccttttgagag

SEQ ID NO: 1630696 - DNA, 15 bp, Homo sapiens
gcaccttttgagagg

SEQ ID NO: 1630697 - DNA, 15 bp, Homo sapiens
caccttttgagaggc

SEQ ID NO: 1630698 - DNA, 15 bp, Homo sapiens
accttttgagaggca

SEQ ID NO: 1630699 - DNA, 15 bp, Homo sapiens
ccttttgagaggcac

SEQ ID NO: 1630700 - DNA, 15 bp, Homo sapiens
cttttgagaggcact

SEQ ID NO: 1630701 - DNA, 15 bp, Homo sapiens
ttttgagaggcactg

SEQ ID NO: 1630702 - DNA, 15 bp, Homo sapiens
tttgagaggcactga

SEQ ID NO: 1630703 - DNA, 15 bp, Homo sapiens
ttgagaggcactgat

SEQ ID NO: 1630704 - DNA, 15 bp, Homo sapiens
tgagaggcactgata

SEQ ID NO: 1630705 - DNA, 15 bp, Homo sapiens
gagaggcactgatac

SEQ ID NO: 1630706 - DNA, 15 bp, Homo sapiens
agaggcactgatacg

SEQ ID NO: 1630707 - DNA, 15 bp, Homo sapiens
gaggcactgatacga

SEQ ID NO: 1630708 - DNA, 15 bp, Homo sapiens
aggcactgatacgat

SEQ ID NO: 1630709 - DNA, 15 bp, Homo sapiens
ggcactgatacgatg

SEQ ID NO: 1630710 - DNA, 15 bp, Homo sapiens
gcactgatacgatgg

SEQ ID NO: 1630711 - DNA, 15 bp, Homo sapiens
cactgatacgatggt

SEQ ID NO: 1630712 - DNA, 15 bp, Homo sapiens
actgatacgatggtt

SEQ ID NO: 1630713 - DNA, 15 bp, Homo sapiens
ctgatacgatggtta

SEQ ID NO: 1630714 - DNA, 15 bp, Homo sapiens
tgatacgatggttaa

SEQ ID NO: 1630715 - DNA, 15 bp, Homo sapiens
gatacgatggttaat

SEQ ID NO: 1630716 - DNA, 15 bp, Homo sapiens
atacgatggttaatt

SEQ ID NO: 1630717 - DNA, 15 bp, Homo sapiens
tacgatggttaattt

SEQ ID NO: 1630718 - DNA, 15 bp, Homo sapiens
acgatggttaatttt

SEQ ID NO: 1630719 - DNA, 15 bp, Homo sapiens
cgatggttaatttta

SEQ ID NO: 1630720 - DNA, 15 bp, Homo sapiens
taattttatgtgtcc

SEQ ID NO: 1630721 - DNA, 15 bp, Homo sapiens
aattttatgtgtcca

SEQ ID NO: 1630722 - DNA, 15 bp, Homo sapiens
attttatgtgtccac

SEQ ID NO: 1630723 - DNA, 15 bp, Homo sapiens
ttttatgtgtccact

SEQ ID NO: 1630724 - DNA, 15 bp, Homo sapiens
tttatgtgtccactt

SEQ ID NO: 1630725 - DNA, 15 bp, Homo sapiens
ttatgtgtccactta

SEQ ID NO: 1630726 - DNA, 15 bp, Homo sapiens
tatgtgtccacttag

SEQ ID NO: 1630727 - DNA, 15 bp, Homo sapiens
atgtgtccacttagc

SEQ ID NO: 1630728 - DNA, 15 bp, Homo sapiens
tgtgtccacttagct

SEQ ID NO: 1630729 - DNA, 15 bp, Homo sapiens
gtgtccacttagcta

SEQ ID NO: 1630730 - DNA, 15 bp, Homo sapiens
tgtccacttagctag

SEQ ID NO: 1630731 - DNA, 15 bp, Homo sapiens
gtccacttagctagg

SEQ ID NO: 1630732 - DNA, 15 bp, Homo sapiens
tccacttagctaggc

SEQ ID NO: 1630733 - DNA, 15 bp, Homo sapiens
ccacttagctaggcc

SEQ ID NO: 1630734 - DNA, 15 bp, Homo sapiens
cacttagctaggcca

SEQ ID NO: 1630735 - DNA, 15 bp, Homo sapiens
acttagctaggccac

SEQ ID NO: 1630736 - DNA, 15 bp, Homo sapiens
cttagctaggccaca

SEQ ID NO: 1630737 - DNA, 15 bp, Homo sapiens
ttagctaggccacag

SEQ ID NO: 1630738 - DNA, 15 bp, Homo sapiens
tagctaggccacagt

SEQ ID NO: 1630739 - DNA, 15 bp, Homo sapiens
agctaggccacagta

SEQ ID NO: 1630740 - DNA, 15 bp, Homo sapiens
gctaggccacagtac

SEQ ID NO: 1630741 - DNA, 15 bp, Homo sapiens
ctaggccacagtacc

SEQ ID NO: 1630742 - DNA, 15 bp, Homo sapiens
taggccacagtaccc

SEQ ID NO: 1630743 - DNA, 15 bp, Homo sapiens
aggccacagtaccca

SEQ ID NO: 1630744 - DNA, 15 bp, Homo sapiens
ggccacagtacccaa

SEQ ID NO: 1630745 - DNA, 15 bp, Homo sapiens
gccacagtacccaaa

SEQ ID NO: 1630746 - DNA, 15 bp, Homo sapiens
ccacagtacccaaat

SEQ ID NO: 1630747 - DNA, 15 bp, Homo sapiens
cacagtacccaaata

SEQ ID NO: 1630748 - DNA, 15 bp, Homo sapiens
acagtacccaaatac

SEQ ID NO: 1630749 - DNA, 15 bp, Homo sapiens
cagtacccaaatact

SEQ ID NO: 1630750 - DNA, 15 bp, Homo sapiens
agtacccaaatactt

SEQ ID NO: 1630751 - DNA, 15 bp, Homo sapiens
gtacccaaatacttt

SEQ ID NO: 1630752 - DNA, 15 bp, Homo sapiens
tacccaaatactttg

SEQ ID NO: 1630753 - DNA, 15 bp, Homo sapiens
acccaaatactttgt

SEQ ID NO: 1630754 - DNA, 15 bp, Homo sapiens
cccaaatactttgtc

SEQ ID NO: 1630755 - DNA, 15 bp, Homo sapiens
ccaaatactttgtca

SEQ ID NO: 1630756 - DNA, 15 bp, Homo sapiens
caaatactttgtcaa

SEQ ID NO: 1630757 - DNA, 15 bp, Homo sapiens
aaatactttgtcaag

SEQ ID NO: 1630758 - DNA, 15 bp, Homo sapiens
aatactttgtcaagc

SEQ ID NO: 1630759 - DNA, 15 bp, Homo sapiens
atactttgtcaagca

SEQ ID NO: 1630760 - DNA, 15 bp, Homo sapiens
tactttgtcaagcat

SEQ ID NO: 1630761 - DNA, 15 bp, Homo sapiens
actttgtcaagcatc

SEQ ID NO: 1630762 - DNA, 15 bp, Homo sapiens
ctttgtcaagcatca

SEQ ID NO: 1630763 - DNA, 15 bp, Homo sapiens
tttgtcaagcatcat

SEQ ID NO: 1630764 - DNA, 15 bp, Homo sapiens
ttgtcaagcatcatt

SEQ ID NO: 1630765 - DNA, 15 bp, Homo sapiens
tgtcaagcatcattg

SEQ ID NO: 1630766 - DNA, 15 bp, Homo sapiens
gtcaagcatcattgt

SEQ ID NO: 1630767 - DNA, 15 bp, Homo sapiens
tcaagcatcattgta

SEQ ID NO: 1630768 - DNA, 15 bp, Homo sapiens
caagcatcattgtac

SEQ ID NO: 1630769 - DNA, 15 bp, Homo sapiens
aagcatcattgtaca

SEQ ID NO: 1630770 - DNA, 15 bp, Homo sapiens
agcatcattgtacat

SEQ ID NO: 1630771 - DNA, 15 bp, Homo sapiens
gcatcattgtacatg

SEQ ID NO: 1630772 - DNA, 15 bp, Homo sapiens
catcattgtacatgt

SEQ ID NO: 1630773 - DNA, 15 bp, Homo sapiens
atcattgtacatgtc

SEQ ID NO: 1630774 - DNA, 15 bp, Homo sapiens
tcattgtacatgtct

SEQ ID NO: 1630775 - DNA, 15 bp, Homo sapiens
cattgtacatgtctc

SEQ ID NO: 1630776 - DNA, 15 bp, Homo sapiens
attgtacatgtctct

SEQ ID NO: 1630777 - DNA, 15 bp, Homo sapiens
ttgtacatgtctctg

SEQ ID NO: 1630778 - DNA, 15 bp, Homo sapiens
tgtacatgtctctgt

SEQ ID NO: 1630779 - DNA, 15 bp, Homo sapiens
gtacatgtctctgtg

SEQ ID NO: 1630780 - DNA, 15 bp, Homo sapiens
tacatgtctctgtga

SEQ ID NO: 1630781 - DNA, 15 bp, Homo sapiens
acatgtctctgtgac

SEQ ID NO: 1630782 - DNA, 15 bp, Homo sapiens
catgtctctgtgact

SEQ ID NO: 1630783 - DNA, 15 bp, Homo sapiens
atgtctctgtgactt

SEQ ID NO: 1630784 - DNA, 15 bp, Homo sapiens
tgtctctgtgacttt

SEQ ID NO: 1630785 - DNA, 15 bp, Homo sapiens
gtctctgtgactttt

SEQ ID NO: 1630786 - DNA, 15 bp, Homo sapiens
tctctgtgacttttt

SEQ ID NO: 1630787 - DNA, 15 bp, Homo sapiens
ctctgtgacttttta

SEQ ID NO: 1630788 - DNA, 15 bp, Homo sapiens
tctgtgactttttaa

SEQ ID NO: 1630789 - DNA, 15 bp, Homo sapiens
ctgtgactttttaag

SEQ ID NO: 1630790 - DNA, 15 bp, Homo sapiens
tgtgactttttaagg

SEQ ID NO: 1630791 - DNA, 15 bp, Homo sapiens
gtgactttttaaggt

SEQ ID NO: 1630792 - DNA, 15 bp, Homo sapiens
tgactttttaaggtg

SEQ ID NO: 1630793 - DNA, 15 bp, Homo sapiens
gactttttaaggtga

SEQ ID NO: 1630794 - DNA, 15 bp, Homo sapiens
actttttaaggtgag

SEQ ID NO: 1630795 - DNA, 15 bp, Homo sapiens
ctttttaaggtgaga

SEQ ID NO: 1630796 - DNA, 15 bp, Homo sapiens
tttttaaggtgagat

SEQ ID NO: 1630797 - DNA, 15 bp, Homo sapiens
ttttaaggtgagatt

SEQ ID NO: 1630798 - DNA, 15 bp, Homo sapiens
tttaaggtgagatta

SEQ ID NO: 1630799 - DNA, 15 bp, Homo sapiens
ttaaggtgagattaa

SEQ ID NO: 1630800 - DNA, 15 bp, Homo sapiens
taaggtgagattaac

SEQ ID NO: 1630801 - DNA, 15 bp, Homo sapiens
aaggtgagattaaca

SEQ ID NO: 1630802 - DNA, 15 bp, Homo sapiens
aggtgagattaacat

SEQ ID NO: 1630803 - DNA, 15 bp, Homo sapiens
ggtgagattaacatg

SEQ ID NO: 1630804 - DNA, 15 bp, Homo sapiens
gtgagattaacatgt

SEQ ID NO: 1630805 - DNA, 15 bp, Homo sapiens
tgagattaacatgta

SEQ ID NO: 1630806 - DNA, 15 bp, Homo sapiens
gagattaacatgtaa

SEQ ID NO: 1630807 - DNA, 15 bp, Homo sapiens
agattaacatgtaag

SEQ ID NO: 1630808 - DNA, 15 bp, Homo sapiens
gattaacatgtaagt

SEQ ID NO: 1630809 - DNA, 15 bp, Homo sapiens
attaacatgtaagtc

SEQ ID NO: 1630810 - DNA, 15 bp, Homo sapiens
ttaacatgtaagtca

SEQ ID NO: 1630811 - DNA, 15 bp, Homo sapiens
taacatgtaagtcag

SEQ ID NO: 1630812 - DNA, 15 bp, Homo sapiens
aacatgtaagtcagt

SEQ ID NO: 1630813 - DNA, 15 bp, Homo sapiens
acatgtaagtcagta

SEQ ID NO: 1630814 - DNA, 15 bp, Homo sapiens
catgtaagtcagtag

SEQ ID NO: 1630815 - DNA, 15 bp, Homo sapiens
atgtaagtcagtaga

SEQ ID NO: 1630816 - DNA, 15 bp, Homo sapiens
tgtaagtcagtagac

SEQ ID NO: 1630817 - DNA, 15 bp, Homo sapiens
gtaagtcagtagact

SEQ ID NO: 1630818 - DNA, 15 bp, Homo sapiens
taagtcagtagactt

SEQ ID NO: 1630819 - DNA, 15 bp, Homo sapiens
aagtcagtagacttt

SEQ ID NO: 1630820 - DNA, 15 bp, Homo sapiens
agtcagtagactttg

SEQ ID NO: 1630821 - DNA, 15 bp, Homo sapiens
gtcagtagactttga

SEQ ID NO: 1630822 - DNA, 15 bp, Homo sapiens
tcagtagactttgag

SEQ ID NO: 1630823 - DNA, 15 bp, Homo sapiens
cagtagactttgagc

SEQ ID NO: 1630824 - DNA, 15 bp, Homo sapiens
agtagactttgagca

SEQ ID NO: 1630825 - DNA, 15 bp, Homo sapiens
gtagactttgagcaa

SEQ ID NO: 1630826 - DNA, 15 bp, Homo sapiens
tagactttgagcaaa

SEQ ID NO: 1630827 - DNA, 15 bp, Homo sapiens
agactttgagcaaag

SEQ ID NO: 1630828 - DNA, 15 bp, Homo sapiens
gactttgagcaaagg

SEQ ID NO: 1630829 - DNA, 15 bp, Homo sapiens
actttgagcaaagga

SEQ ID NO: 1630830 - DNA, 15 bp, Homo sapiens
ctttgagcaaaggag

SEQ ID NO: 1630831 - DNA, 15 bp, Homo sapiens
ttgagcaaaggagat

SEQ ID NO: 1630832 - DNA, 15 bp, Homo sapiens
tgagcaaaggagatt

SEQ ID NO: 1630833 - DNA, 15 bp, Homo sapiens
gagcaaaggagatta

SEQ ID NO: 1630834 - DNA, 15 bp, Homo sapiens
agcaaaggagattac

SEQ ID NO: 1630835 - DNA, 15 bp, Homo sapiens
gcaaaggagattacc

SEQ ID NO: 1630836 - DNA, 15 bp, Homo sapiens
caaaggagattacct

SEQ ID NO: 1630837 - DNA, 15 bp, Homo sapiens
aaaggagattacctc

SEQ ID NO: 1630838 - DNA, 15 bp, Homo sapiens
aaggagattacctcc

SEQ ID NO: 1630839 - DNA, 15 bp, Homo sapiens
aggagattacctcca

SEQ ID NO: 1630840 - DNA, 15 bp, Homo sapiens
ggagattacctccat

SEQ ID NO: 1630841 - DNA, 15 bp, Homo sapiens
gagattacctccata

SEQ ID NO: 1630842 - DNA, 15 bp, Homo sapiens
agattacctccataa

SEQ ID NO: 1630843 - DNA, 15 bp, Homo sapiens
gattacctccataat

SEQ ID NO: 1630844 - DNA, 15 bp, Homo sapiens
attacctccataatg

SEQ ID NO: 1630845 - DNA, 15 bp, Homo sapiens
ttacctccataatgc

SEQ ID NO: 1630846 - DNA, 15 bp, Homo sapiens
tacctccataatgcg

SEQ ID NO: 1630847 - DNA, 15 bp, Homo sapiens
acctccataatgcga

SEQ ID NO: 1630848 - DNA, 15 bp, Homo sapiens
cctccataatgcgag

SEQ ID NO: 1630849 - DNA, 15 bp, Homo sapiens
ctccataatgcgagt

SEQ ID NO: 1630850 - DNA, 15 bp, Homo sapiens
tccataatgcgagtg

SEQ ID NO: 1630851 - DNA, 15 bp, Homo sapiens
ccataatgcgagtgg

SEQ ID NO: 1630852 - DNA, 15 bp, Homo sapiens
cataatgcgagtggt

SEQ ID NO: 1630853 - DNA, 15 bp, Homo sapiens
ataatgcgagtggtc

SEQ ID NO: 1630854 - DNA, 15 bp, Homo sapiens
taatgcgagtggtct

SEQ ID NO: 1630855 - DNA, 15 bp, Homo sapiens
aatgcgagtggtctc

SEQ ID NO: 1630856 - DNA, 15 bp, Homo sapiens
atgcgagtggtctca

SEQ ID NO: 1630857 - DNA, 15 bp, Homo sapiens
tgcgagtggtctcat

SEQ ID NO: 1630858 - DNA, 15 bp, Homo sapiens
gcgagtggtctcatc

SEQ ID NO: 1630859 - DNA, 15 bp, Homo sapiens
cgagtggtctcatct

SEQ ID NO: 1630860 - DNA, 15 bp, Homo sapiens
gagtggtctcatcta

SEQ ID NO: 1630861 - DNA, 15 bp, Homo sapiens
agtggtctcatctaa

SEQ ID NO: 1630862 - DNA, 15 bp, Homo sapiens
gtggtctcatctaat

SEQ ID NO: 1630863 - DNA, 15 bp, Homo sapiens
tggtctcatctaatc

SEQ ID NO: 1630864 - DNA, 15 bp, Homo sapiens
ggtctcatctaatca

SEQ ID NO: 1630865 - DNA, 15 bp, Homo sapiens
gtctcatctaatcag

SEQ ID NO: 1630866 - DNA, 15 bp, Homo sapiens
tctcatctaatcagt

SEQ ID NO: 1630867 - DNA, 15 bp, Homo sapiens
ctcatctaatcagtt

SEQ ID NO: 1630868 - DNA, 15 bp, Homo sapiens
tcatctaatcagttg

SEQ ID NO: 1630869 - DNA, 15 bp, Homo sapiens
catctaatcagttga

SEQ ID NO: 1630870 - DNA, 15 bp, Homo sapiens
atctaatcagttgaa

SEQ ID NO: 1630871 - DNA, 15 bp, Homo sapiens
tctaatcagttgaag

SEQ ID NO: 1630872 - DNA, 15 bp, Homo sapiens
ctaatcagttgaagg

SEQ ID NO: 1630873 - DNA, 15 bp, Homo sapiens
taatcagttgaaggc

SEQ ID NO: 1630874 - DNA, 15 bp, Homo sapiens
aatcagttgaaggcc

SEQ ID NO: 1630875 - DNA, 15 bp, Homo sapiens
atcagttgaaggcct

SEQ ID NO: 1630876 - DNA, 15 bp, Homo sapiens
tcagttgaaggcctt

SEQ ID NO: 1630877 - DNA, 15 bp, Homo sapiens
cagttgaaggcctta

SEQ ID NO: 1630878 - DNA, 15 bp, Homo sapiens
agttgaaggccttaa

SEQ ID NO: 1630879 - DNA, 15 bp, Homo sapiens
gttgaaggccttaat

SEQ ID NO: 1630880 - DNA, 15 bp, Homo sapiens
ttgaaggccttaata

SEQ ID NO: 1630881 - DNA, 15 bp, Homo sapiens
tgaaggccttaataa

SEQ ID NO: 1630882 - DNA, 15 bp, Homo sapiens
gaaggccttaataaa

SEQ ID NO: 1630883 - DNA, 15 bp, Homo sapiens
aaggccttaataaaa

SEQ ID NO: 1630884 - DNA, 15 bp, Homo sapiens
aggccttaataaaaa

SEQ ID NO: 1630885 - DNA, 15 bp, Homo sapiens
ggccttaataaaaag

SEQ ID NO: 1630886 - DNA, 15 bp, Homo sapiens
gccttaataaaaaga

SEQ ID NO: 1630887 - DNA, 15 bp, Homo sapiens
ccttaataaaaagag

SEQ ID NO: 1630888 - DNA, 15 bp, Homo sapiens
cttaataaaaagaga

SEQ ID NO: 1630889 - DNA, 15 bp, Homo sapiens
ttaataaaaagagac

SEQ ID NO: 1630890 - DNA, 15 bp, Homo sapiens
taataaaaagagact

SEQ ID NO: 1630891 - DNA, 15 bp, Homo sapiens
aataaaaagagactg

SEQ ID NO: 1630892 - DNA, 15 bp, Homo sapiens
ataaaaagagactga

SEQ ID NO: 1630893 - DNA, 15 bp, Homo sapiens
taaaaagagactgac

SEQ ID NO: 1630894 - DNA, 15 bp, Homo sapiens
aaaaagagactgacc

SEQ ID NO: 1630895 - DNA, 15 bp, Homo sapiens
aaaagagactgacct

SEQ ID NO: 1630896 - DNA, 15 bp, Homo sapiens
aaagagactgacctc

SEQ ID NO: 1630897 - DNA, 15 bp, Homo sapiens
aagagactgacctct

SEQ ID NO: 1630898 - DNA, 15 bp, Homo sapiens
agagactgacctctt

SEQ ID NO: 1630899 - DNA, 15 bp, Homo sapiens
gagactgacctcttc

SEQ ID NO: 1630900 - DNA, 15 bp, Homo sapiens
agactgacctcttcc

SEQ ID NO: 1630901 - DNA, 15 bp, Homo sapiens
gactgacctcttcct

SEQ ID NO: 1630902 - DNA, 15 bp, Homo sapiens
actgacctcttcctc

SEQ ID NO: 1630903 - DNA, 15 bp, Homo sapiens
ctgacctcttcctca

SEQ ID NO: 1630904 - DNA, 15 bp, Homo sapiens
tgacctcttcctcag

SEQ ID NO: 1630905 - DNA, 15 bp, Homo sapiens
gacctcttcctcaga

SEQ ID NO: 1630906 - DNA, 15 bp, Homo sapiens
acctcttcctcagaa

SEQ ID NO: 1630907 - DNA, 15 bp, Homo sapiens
cctcttcctcagaag

SEQ ID NO: 1630908 - DNA, 15 bp, Homo sapiens
ctcttcctcagaaga

SEQ ID NO: 1630909 - DNA, 15 bp, Homo sapiens
tcttcctcagaagaa

SEQ ID NO: 1630910 - DNA, 15 bp, Homo sapiens
cttcctcagaagaag

SEQ ID NO: 1630911 - DNA, 15 bp, Homo sapiens
ttcctcagaagaaga

SEQ ID NO: 1630912 - DNA, 15 bp, Homo sapiens
tcctcagaagaagaa

SEQ ID NO: 1630913 - DNA, 15 bp, Homo sapiens
cctcagaagaagaaa

SEQ ID NO: 1630914 - DNA, 15 bp, Homo sapiens
ctcagaagaagaaat

SEQ ID NO: 1630915 - DNA, 15 bp, Homo sapiens
tcagaagaagaaatt

SEQ ID NO: 1630916 - DNA, 15 bp, Homo sapiens
cagaagaagaaattc

SEQ ID NO: 1630917 - DNA, 15 bp, Homo sapiens
agaagaagaaattct

SEQ ID NO: 1630918 - DNA, 15 bp, Homo sapiens
gaagaagaaattctg

SEQ ID NO: 1630919 - DNA, 15 bp, Homo sapiens
aagaagaaattctgc

SEQ ID NO: 1630920 - DNA, 15 bp, Homo sapiens
agaagaaattctgct

SEQ ID NO: 1630921 - DNA, 15 bp, Homo sapiens
gaagaaattctgcta

SEQ ID NO: 1630922 - DNA, 15 bp, Homo sapiens
aagaaattctgctag

SEQ ID NO: 1630923 - DNA, 15 bp, Homo sapiens
agaaattctgctagc

SEQ ID NO: 1630924 - DNA, 15 bp, Homo sapiens
gaaattctgctagca

SEQ ID NO: 1630925 - DNA, 15 bp, Homo sapiens
aaattctgctagcag

SEQ ID NO: 1630926 - DNA, 15 bp, Homo sapiens
aattctgctagcaga

SEQ ID NO: 1630927 - DNA, 15 bp, Homo sapiens
attctgctagcagac

SEQ ID NO: 1630928 - DNA, 15 bp, Homo sapiens
ttctgctagcagact

SEQ ID NO: 1630929 - DNA, 15 bp, Homo sapiens
tctgctagcagactg

SEQ ID NO: 1630930 - DNA, 15 bp, Homo sapiens
ctgctagcagactgc

SEQ ID NO: 1630931 - DNA, 15 bp, Homo sapiens
tgctagcagactgcc

SEQ ID NO: 1630932 - DNA, 15 bp, Homo sapiens
gctagcagactgcct

SEQ ID NO: 1630933 - DNA, 15 bp, Homo sapiens
ctagcagactgcctt

SEQ ID NO: 1630934 - DNA, 15 bp, Homo sapiens
tagcagactgccttt

SEQ ID NO: 1630935 - DNA, 15 bp, Homo sapiens
agcagactgcctttg

SEQ ID NO: 1630936 - DNA, 15 bp, Homo sapiens
gcagactgcctttgc

SEQ ID NO: 1630937 - DNA, 15 bp, Homo sapiens
cagactgcctttgct

SEQ ID NO: 1630938 - DNA, 15 bp, Homo sapiens
agactgcctttgctc

SEQ ID NO: 1630939 - DNA, 15 bp, Homo sapiens
gactgcctttgctcc

SEQ ID NO: 1630940 - DNA, 15 bp, Homo sapiens
actgcctttgctccc

SEQ ID NO: 1630941 - DNA, 15 bp, Homo sapiens
ctgcctttgctcccc

SEQ ID NO: 1630942 - DNA, 15 bp, Homo sapiens
tgcctttgctcccct

SEQ ID NO: 1630943 - DNA, 15 bp, Homo sapiens
gcctttgctcccctc

SEQ ID NO: 1630944 - DNA, 15 bp, Homo sapiens
cctttgctcccctcc

SEQ ID NO: 1630945 - DNA, 15 bp, Homo sapiens
ctttgctcccctccc

SEQ ID NO: 1630946 - DNA, 15 bp, Homo sapiens
tttgctcccctccct

SEQ ID NO: 1630947 - DNA, 15 bp, Homo sapiens
ttgctcccctccctg

SEQ ID NO: 1630948 - DNA, 15 bp, Homo sapiens
tgctcccctccctgg

SEQ ID NO: 1630949 - DNA, 15 bp, Homo sapiens
gctcccctccctggt

SEQ ID NO: 1630950 - DNA, 15 bp, Homo sapiens
ctcccctccctggtt

SEQ ID NO: 1630951 - DNA, 15 bp, Homo sapiens
tcccctccctggttc

SEQ ID NO: 1630952 - DNA, 15 bp, Homo sapiens
cccctccctggttct

SEQ ID NO: 1630953 - DNA, 15 bp, Homo sapiens
ccctccctggttctc

SEQ ID NO: 1630954 - DNA, 15 bp, Homo sapiens
cctccctggttctcc

SEQ ID NO: 1630955 - DNA, 15 bp, Homo sapiens
ctccctggttctcca

SEQ ID NO: 1630956 - DNA, 15 bp, Homo sapiens
tccctggttctccag

SEQ ID NO: 1630957 - DNA, 15 bp, Homo sapiens
ccctggttctccagc

SEQ ID NO: 1630958 - DNA, 15 bp, Homo sapiens
cctggttctccagcc

SEQ ID NO: 1630959 - DNA, 15 bp, Homo sapiens
ctggttctccagcct

SEQ ID NO: 1630960 - DNA, 15 bp, Homo sapiens
tggttctccagcctg

SEQ ID NO: 1630961 - DNA, 15 bp, Homo sapiens
ggttctccagcctgc

SEQ ID NO: 1630962 - DNA, 15 bp, Homo sapiens
gttctccagcctgct

SEQ ID NO: 1630963 - DNA, 15 bp, Homo sapiens
ttctccagcctgctg

SEQ ID NO: 1630964 - DNA, 15 bp, Homo sapiens
tctccagcctgctgg

SEQ ID NO: 1630965 - DNA, 15 bp, Homo sapiens
ctccagcctgctggt

SEQ ID NO: 1630966 - DNA, 15 bp, Homo sapiens
tccagcctgctggtc

SEQ ID NO: 1630967 - DNA, 15 bp, Homo sapiens
ccagcctgctggtct

SEQ ID NO: 1630968 - DNA, 15 bp, Homo sapiens
cagcctgctggtcta

SEQ ID NO: 1630969 - DNA, 15 bp, Homo sapiens
agcctgctggtctac

SEQ ID NO: 1630970 - DNA, 15 bp, Homo sapiens
gcctgctggtctacc

SEQ ID NO: 1630971 - DNA, 15 bp, Homo sapiens
cctgctggtctaccc

SEQ ID NO: 1630972 - DNA, 15 bp, Homo sapiens
ctgctggtctaccct

SEQ ID NO: 1630973 - DNA, 15 bp, Homo sapiens
tgctggtctaccctg

SEQ ID NO: 1630974 - DNA, 15 bp, Homo sapiens
gctggtctaccctgc

SEQ ID NO: 1630975 - DNA, 15 bp, Homo sapiens
ctggtctaccctgca

SEQ ID NO: 1630976 - DNA, 15 bp, Homo sapiens
tggtctaccctgcag

SEQ ID NO: 1630977 - DNA, 15 bp, Homo sapiens
ggtctaccctgcaga

SEQ ID NO: 1630978 - DNA, 15 bp, Homo sapiens
gtctaccctgcagac

SEQ ID NO: 1630979 - DNA, 15 bp, Homo sapiens
tctaccctgcagact

SEQ ID NO: 1630980 - DNA, 15 bp, Homo sapiens
ctaccctgcagactt

SEQ ID NO: 1630981 - DNA, 15 bp, Homo sapiens
taccctgcagacttt

SEQ ID NO: 1630982 - DNA, 15 bp, Homo sapiens
accctgcagactttg

SEQ ID NO: 1630983 - DNA, 15 bp, Homo sapiens
ccctgcagactttga

SEQ ID NO: 1630984 - DNA, 15 bp, Homo sapiens
cctgcagactttgac

SEQ ID NO: 1630985 - DNA, 15 bp, Homo sapiens
ctgcagactttgact

SEQ ID NO: 1630986 - DNA, 15 bp, Homo sapiens
tgcagactttgactt

SEQ ID NO: 1630987 - DNA, 15 bp, Homo sapiens
gcagactttgacttt

SEQ ID NO: 1630988 - DNA, 15 bp, Homo sapiens
cagactttgactttc

SEQ ID NO: 1630989 - DNA, 15 bp, Homo sapiens
agactttgactttcc

SEQ ID NO: 1630990 - DNA, 15 bp, Homo sapiens
gactttgactttcca

SEQ ID NO: 1630991 - DNA, 15 bp, Homo sapiens
actttgactttccaa

SEQ ID NO: 1630992 - DNA, 15 bp, Homo sapiens
ctttgactttccaag

SEQ ID NO: 1630993 - DNA, 15 bp, Homo sapiens
tttgactttccaagc

SEQ ID NO: 1630994 - DNA, 15 bp, Homo sapiens
ttgactttccaagct

SEQ ID NO: 1630995 - DNA, 15 bp, Homo sapiens
tgactttccaagctg

SEQ ID NO: 1630996 - DNA, 15 bp, Homo sapiens
gactttccaagctgc

SEQ ID NO: 1630997 - DNA, 15 bp, Homo sapiens
actttccaagctgcc

SEQ ID NO: 1630998 - DNA, 15 bp, Homo sapiens
ctttccaagctgcca

SEQ ID NO: 1630999 - DNA, 15 bp, Homo sapiens
tttccaagctgccac

SEQ ID NO: 1631000 - DNA, 15 bp, Homo sapiens
ttccaagctgccaca

SEQ ID NO: 1631001 - DNA, 15 bp, Homo sapiens
tccaagctgccacaa

SEQ ID NO: 1631002 - DNA, 15 bp, Homo sapiens
ccaagctgccacaat

SEQ ID NO: 1631003 - DNA, 15 bp, Homo sapiens
caagctgccacaatc

SEQ ID NO: 1631004 - DNA, 15 bp, Homo sapiens
aagctgccacaatca

SEQ ID NO: 1631005 - DNA, 15 bp, Homo sapiens
agctgccacaatcat

SEQ ID NO: 1631006 - DNA, 15 bp, Homo sapiens
gctgccacaatcatg

SEQ ID NO: 1631007 - DNA, 15 bp, Homo sapiens
ctgccacaatcatgt

SEQ ID NO: 1631008 - DNA, 15 bp, Homo sapiens
tgccacaatcatgtg

SEQ ID NO: 1631009 - DNA, 15 bp, Homo sapiens
gccacaatcatgtga

SEQ ID NO: 1631010 - DNA, 15 bp, Homo sapiens
ccacaatcatgtgag

SEQ ID NO: 1631011 - DNA, 15 bp, Homo sapiens
cacaatcatgtgagc

SEQ ID NO: 1631012 - DNA, 15 bp, Homo sapiens
acaatcatgtgagcc

SEQ ID NO: 1631013 - DNA, 15 bp, Homo sapiens
caatcatgtgagcca

SEQ ID NO: 1631014 - DNA, 15 bp, Homo sapiens
aatcatgtgagccaa

SEQ ID NO: 1631015 - DNA, 15 bp, Homo sapiens
atcatgtgagccaat

SEQ ID NO: 1631016 - DNA, 15 bp, Homo sapiens
tcatgtgagccaatt

SEQ ID NO: 1631017 - DNA, 15 bp, Homo sapiens
catgtgagccaattc

SEQ ID NO: 1631018 - DNA, 15 bp, Homo sapiens
atgtgagccaattcc

SEQ ID NO: 1631019 - DNA, 15 bp, Homo sapiens
tgtgagccaattccc

SEQ ID NO: 1631020 - DNA, 15 bp, Homo sapiens
gtgagccaattccct

SEQ ID NO: 1631021 - DNA, 15 bp, Homo sapiens
tgagccaattcccta

SEQ ID NO: 1631022 - DNA, 15 bp, Homo sapiens
gagccaattccctaa

SEQ ID NO: 1631023 - DNA, 15 bp, Homo sapiens
agccaattccctaaa

SEQ ID NO: 1631024 - DNA, 15 bp, Homo sapiens
gccaattccctaaaa

SEQ ID NO: 1631025 - DNA, 15 bp, Homo sapiens
ccaattccctaaaat

SEQ ID NO: 1631026 - DNA, 15 bp, Homo sapiens
caattccctaaaata

SEQ ID NO: 1631027 - DNA, 15 bp, Homo sapiens
aattccctaaaataa

SEQ ID NO: 1631028 - DNA, 15 bp, Homo sapiens
attccctaaaataaa

SEQ ID NO: 1631029 - DNA, 15 bp, Homo sapiens
ttccctaaaataaac

SEQ ID NO: 1631030 - DNA, 15 bp, Homo sapiens
tccctaaaataaacc

SEQ ID NO: 1631031 - DNA, 15 bp, Homo sapiens
ccctaaaataaacct

SEQ ID NO: 1631032 - DNA, 15 bp, Homo sapiens
cctaaaataaacctc

SEQ ID NO: 1631033 - DNA, 15 bp, Homo sapiens
ctaaaataaacctct

SEQ ID NO: 1631034 - DNA, 15 bp, Homo sapiens
taaaataaacctctc

SEQ ID NO: 1631035 - DNA, 15 bp, Homo sapiens
aaaataaacctctct

SEQ ID NO: 1631036 - DNA, 15 bp, Homo sapiens
aaataaacctctcta

SEQ ID NO: 1631037 - DNA, 15 bp, Homo sapiens
aataaacctctctat

SEQ ID NO: 1631038 - DNA, 15 bp, Homo sapiens
ataaacctctctata

SEQ ID NO: 1631039 - DNA, 15 bp, Homo sapiens
taaacctctctatat

SEQ ID NO: 1631040 - DNA, 15 bp, Homo sapiens
aaacctctctatata

SEQ ID NO: 1631041 - DNA, 15 bp, Homo sapiens
aacctctctatatat

SEQ ID NO: 1631042 - DNA, 15 bp, Homo sapiens
acctctctatatata

SEQ ID NO: 1631043 - DNA, 15 bp, Homo sapiens
cctctctatatatac

SEQ ID NO: 1631044 - DNA, 15 bp, Homo sapiens
ctctctatatatact

SEQ ID NO: 1631045 - DNA, 15 bp, Homo sapiens
tctctatatatactt

SEQ ID NO: 1631046 - DNA, 15 bp, Homo sapiens
ctctatatatacttg

SEQ ID NO: 1631047 - DNA, 15 bp, Homo sapiens
tctatatatacttgt

SEQ ID NO: 1631048 - DNA, 15 bp, Homo sapiens
ctatatatacttgta

SEQ ID NO: 1631049 - DNA, 15 bp, Homo sapiens
tatatatacttgtat

SEQ ID NO: 1631050 - DNA, 15 bp, Homo sapiens
atatatacttgtata

SEQ ID NO: 1631051 - DNA, 15 bp, Homo sapiens
tatatacttgtatac

SEQ ID NO: 1631052 - DNA, 15 bp, Homo sapiens
atatacttgtataca

SEQ ID NO: 1631053 - DNA, 15 bp, Homo sapiens
tatacttgtatacat

SEQ ID NO: 1631054 - DNA, 15 bp, Homo sapiens
atacttgtatacatc

SEQ ID NO: 1631055 - DNA, 15 bp, Homo sapiens
tacttgtatacatcc

SEQ ID NO: 1631056 - DNA, 15 bp, Homo sapiens
acttgtatacatcct

SEQ ID NO: 1631057 - DNA, 15 bp, Homo sapiens
cttgtatacatcctg

SEQ ID NO: 1631058 - DNA, 15 bp, Homo sapiens
ttgtatacatcctgt

SEQ ID NO: 1631059 - DNA, 15 bp, Homo sapiens
tgtatacatcctgtt

SEQ ID NO: 1631060 - DNA, 15 bp, Homo sapiens
gtatacatcctgttg

SEQ ID NO: 1631061 - DNA, 15 bp, Homo sapiens
tatacatcctgttga

SEQ ID NO: 1631062 - DNA, 15 bp, Homo sapiens
atacatcctgttgat

SEQ ID NO: 1631063 - DNA, 15 bp, Homo sapiens
tacatcctgttgatt

SEQ ID NO: 1631064 - DNA, 15 bp, Homo sapiens
acatcctgttgattt

SEQ ID NO: 1631065 - DNA, 15 bp, Homo sapiens
catcctgttgatttt

SEQ ID NO: 1631066 - DNA, 15 bp, Homo sapiens
atcctgttgattttg

SEQ ID NO: 1631067 - DNA, 15 bp, Homo sapiens
tcctgttgattttgg

SEQ ID NO: 1631068 - DNA, 15 bp, Homo sapiens
cctgttgattttggt

SEQ ID NO: 1631069 - DNA, 15 bp, Homo sapiens
ctgttgattttggtt

SEQ ID NO: 1631070 - DNA, 15 bp, Homo sapiens
tgttgattttggttc

SEQ ID NO: 1631071 - DNA, 15 bp, Homo sapiens
gttgattttggttct

SEQ ID NO: 1631072 - DNA, 15 bp, Homo sapiens
ttgattttggttctc

SEQ ID NO: 1631073 - DNA, 15 bp, Homo sapiens
tgattttggttctct

SEQ ID NO: 1631074 - DNA, 15 bp, Homo sapiens
gattttggttctctg

SEQ ID NO: 1631075 - DNA, 15 bp, Homo sapiens
attttggttctctgg

SEQ ID NO: 1631076 - DNA, 15 bp, Homo sapiens
ttttggttctctgga

SEQ ID NO: 1631077 - DNA, 15 bp, Homo sapiens
tttggttctctggag

SEQ ID NO: 1631078 - DNA, 15 bp, Homo sapiens
ttggttctctggaga

SEQ ID NO: 1631079 - DNA, 15 bp, Homo sapiens
tggttctctggagaa

SEQ ID NO: 1631080 - DNA, 15 bp, Homo sapiens
ggttctctggagaac

SEQ ID NO: 1631081 - DNA, 15 bp, Homo sapiens
gttctctggagaacc

SEQ ID NO: 1631082 - DNA, 15 bp, Homo sapiens
ttctctggagaacca

SEQ ID NO: 1631083 - DNA, 15 bp, Homo sapiens
tctctggagaaccat

SEQ ID NO: 1631084 - DNA, 15 bp, Homo sapiens
ctctggagaaccatg

SEQ ID NO: 1631085 - DNA, 15 bp, Homo sapiens
tctggagaaccatga

SEQ ID NO: 1631086 - DNA, 15 bp, Homo sapiens
ctggagaaccatgac

SEQ ID NO: 1631087 - DNA, 15 bp, Homo sapiens
tggagaaccatgact

SEQ ID NO: 1631088 - DNA, 15 bp, Homo sapiens
ggagaaccatgacta

SEQ ID NO: 1631089 - DNA, 15 bp, Homo sapiens
gagaaccatgactaa

SEQ ID NO: 1631090 - DNA, 15 bp, Homo sapiens
agaaccatgactaat

SEQ ID NO: 1631091 - DNA, 15 bp, Homo sapiens
gaaccatgactaata

SEQ ID NO: 1631092 - DNA, 15 bp, Homo sapiens
aaccatgactaatac

SEQ ID NO: 1631093 - DNA, 15 bp, Homo sapiens
accatgactaataca

SEQ ID NO: 1631094 - DNA, 15 bp, Homo sapiens
ccatgactaatacaa

SEQ ID NO: 1631095 - DNA, 15 bp, Homo sapiens
catgactaatacaac

SEQ ID NO: 1631096 - DNA, 15 bp, Homo sapiens
atgactaatacaact

SEQ ID NO: 1631097 - DNA, 15 bp, Homo sapiens
tgactaatacaactg

SEQ ID NO: 1631098 - DNA, 15 bp, Homo sapiens
gactaatacaactgg

SEQ ID NO: 1631099 - DNA, 15 bp, Homo sapiens
actaatacaactggg

SEQ ID NO: 1631100 - DNA, 15 bp, Homo sapiens
ctaatacaactgggc

SEQ ID NO: 1631101 - DNA, 15 bp, Homo sapiens
taatacaactgggct

SEQ ID NO: 1631102 - DNA, 15 bp, Homo sapiens
aatacaactgggctt

SEQ ID NO: 1631103 - DNA, 15 bp, Homo sapiens
atacaactgggctta

SEQ ID NO: 1631104 - DNA, 15 bp, Homo sapiens
tacaactgggcttaa

SEQ ID NO: 1631105 - DNA, 15 bp, Homo sapiens
acaactgggcttaac

SEQ ID NO: 1631106 - DNA, 15 bp, Homo sapiens
caactgggcttaaca

SEQ ID NO: 1631107 - DNA, 15 bp, Homo sapiens
aactgggcttaacat

SEQ ID NO: 1631108 - DNA, 15 bp, Homo sapiens
actgggcttaacatt

SEQ ID NO: 1631109 - DNA, 15 bp, Homo sapiens
ctgggcttaacattt

SEQ ID NO: 1631110 - DNA, 15 bp, Homo sapiens
tgggcttaacatttt

SEQ ID NO: 1631111 - DNA, 15 bp, Homo sapiens
gggcttaacatttta

SEQ ID NO: 1631112 - DNA, 15 bp, Homo sapiens
ggcttaacattttat

SEQ ID NO: 1631113 - DNA, 15 bp, Homo sapiens
gcttaacattttatc

SEQ ID NO: 1631114 - DNA, 15 bp, Homo sapiens
cttaacattttatct

SEQ ID NO: 1631115 - DNA, 15 bp, Homo sapiens
ttaacattttatctg

SEQ ID NO: 1631116 - DNA, 15 bp, Homo sapiens
taacattttatctgg

SEQ ID NO: 1631117 - DNA, 15 bp, Homo sapiens
aacattttatctgga

SEQ ID NO: 1631118 - DNA, 15 bp, Homo sapiens
acattttatctggag

SEQ ID NO: 1631119 - DNA, 15 bp, Homo sapiens
cattttatctggagc

SEQ ID NO: 1631120 - DNA, 15 bp, Homo sapiens
attttatctggagct

SEQ ID NO: 1631121 - DNA, 15 bp, Homo sapiens
ttttatctggagctc

SEQ ID NO: 1631122 - DNA, 15 bp, Homo sapiens
tttatctggagctcc

SEQ ID NO: 1631123 - DNA, 15 bp, Homo sapiens
ttatctggagctccg

SEQ ID NO: 1631124 - DNA, 15 bp, Homo sapiens
tatctggagctccga

SEQ ID NO: 1631125 - DNA, 15 bp, Homo sapiens
atctggagctccgaa

SEQ ID NO: 1631126 - DNA, 15 bp, Homo sapiens
tctggagctccgaaa

SEQ ID NO: 1631127 - DNA, 15 bp, Homo sapiens
ctggagctccgaaag

SEQ ID NO: 1631128 - DNA, 15 bp, Homo sapiens
tggagctccgaaaga

SEQ ID NO: 1631129 - DNA, 15 bp, Homo sapiens
ggagctccgaaagaa

SEQ ID NO: 1631130 - DNA, 15 bp, Homo sapiens
gagctccgaaagaag

SEQ ID NO: 1631131 - DNA, 15 bp, Homo sapiens
agctccgaaagaagc

SEQ ID NO: 1631132 - DNA, 15 bp, Homo sapiens
gctccgaaagaagct

SEQ ID NO: 1631133 - DNA, 15 bp, Homo sapiens
ctccgaaagaagctg

SEQ ID NO: 1631134 - DNA, 15 bp, Homo sapiens
tccgaaagaagctga

SEQ ID NO: 1631135 - DNA, 15 bp, Homo sapiens
ccgaaagaagctgag

SEQ ID NO: 1631136 - DNA, 15 bp, Homo sapiens
cgaaagaagctgagg

SEQ ID NO: 1631137 - DNA, 15 bp, Homo sapiens
gaaagaagctgaggt

SEQ ID NO: 1631138 - DNA, 15 bp, Homo sapiens
aaagaagctgaggtc

SEQ ID NO: 1631139 - DNA, 15 bp, Homo sapiens
aagaagctgaggtct

SEQ ID NO: 1631140 - DNA, 15 bp, Homo sapiens
agaagctgaggtctt

SEQ ID NO: 1631141 - DNA, 15 bp, Homo sapiens
gaagctgaggtcttc

SEQ ID NO: 1631142 - DNA, 15 bp, Homo sapiens
aagctgaggtcttca

SEQ ID NO: 1631143 - DNA, 15 bp, Homo sapiens
agctgaggtcttcac

SEQ ID NO: 1631144 - DNA, 15 bp, Homo sapiens
gctgaggtcttcacc

SEQ ID NO: 1631145 - DNA, 15 bp, Homo sapiens
ctgaggtcttcacca

SEQ ID NO: 1631146 - DNA, 15 bp, Homo sapiens
tgaggtcttcaccaa

SEQ ID NO: 1631147 - DNA, 15 bp, Homo sapiens
gaggtcttcaccaag

SEQ ID NO: 1631148 - DNA, 15 bp, Homo sapiens
aggtcttcaccaagg

SEQ ID NO: 1631149 - DNA, 15 bp, Homo sapiens
ggtcttcaccaaggt

SEQ ID NO: 1631150 - DNA, 15 bp, Homo sapiens
gtcttcaccaaggta

SEQ ID NO: 1631151 - DNA, 15 bp, Homo sapiens
tcttcaccaaggtat

SEQ ID NO: 1631152 - DNA, 15 bp, Homo sapiens
cttcaccaaggtatt

SEQ ID NO: 1631153 - DNA, 15 bp, Homo sapiens
ttcaccaaggtatta

SEQ ID NO: 1631154 - DNA, 15 bp, Homo sapiens
tcaccaaggtattat

SEQ ID NO: 1631155 - DNA, 15 bp, Homo sapiens
caccaaggtattatg

SEQ ID NO: 1631156 - DNA, 15 bp, Homo sapiens
accaaggtattatga

SEQ ID NO: 1631157 - DNA, 15 bp, Homo sapiens
ccaaggtattatgaa

SEQ ID NO: 1631158 - DNA, 15 bp, Homo sapiens
caaggtattatgaaa

SEQ ID NO: 1631159 - DNA, 15 bp, Homo sapiens
aaggtattatgaaag

SEQ ID NO: 1631160 - DNA, 15 bp, Homo sapiens
aggtattatgaaagg

SEQ ID NO: 1631161 - DNA, 15 bp, Homo sapiens
ggtattatgaaagga

SEQ ID NO: 1631162 - DNA, 15 bp, Homo sapiens
gtattatgaaaggag

SEQ ID NO: 1631163 - DNA, 15 bp, Homo sapiens
tattatgaaaggagc

SEQ ID NO: 1631164 - DNA, 15 bp, Homo sapiens
attatgaaaggagca

SEQ ID NO: 1631165 - DNA, 15 bp, Homo sapiens
ttatgaaaggagcaa

SEQ ID NO: 1631166 - DNA, 15 bp, Homo sapiens
tatgaaaggagcaaa

SEQ ID NO: 1631167 - DNA, 15 bp, Homo sapiens
atgaaaggagcaaag

SEQ ID NO: 1631168 - DNA, 15 bp, Homo sapiens
tgaaaggagcaaagg

SEQ ID NO: 1631169 - DNA, 15 bp, Homo sapiens
gaaaggagcaaaggg

SEQ ID NO: 1631170 - DNA, 15 bp, Homo sapiens
aaaggagcaaagggt

SEQ ID NO: 1631171 - DNA, 15 bp, Homo sapiens
aaggagcaaagggtg

SEQ ID NO: 1631172 - DNA, 15 bp, Homo sapiens
aggagcaaagggtgt

SEQ ID NO: 1631173 - DNA, 15 bp, Homo sapiens
ggagcaaagggtgtc

SEQ ID NO: 1631174 - DNA, 15 bp, Homo sapiens
gagcaaagggtgtcc

SEQ ID NO: 1631175 - DNA, 15 bp, Homo sapiens
agcaaagggtgtcct

SEQ ID NO: 1631176 - DNA, 15 bp, Homo sapiens
gcaaagggtgtccta

SEQ ID NO: 1631177 - DNA, 15 bp, Homo sapiens
caaagggtgtcctaa

SEQ ID NO: 1631178 - DNA, 15 bp, Homo sapiens
aaagggtgtcctaag

SEQ ID NO: 1631179 - DNA, 15 bp, Homo sapiens
aagggtgtcctaaga

SEQ ID NO: 1631180 - DNA, 15 bp, Homo sapiens
agggtgtcctaagaa

SEQ ID NO: 1631181 - DNA, 15 bp, Homo sapiens
gggtgtcctaagaat

SEQ ID NO: 1631182 - DNA, 15 bp, Homo sapiens
ggtgtcctaagaata

SEQ ID NO: 1631183 - DNA, 15 bp, Homo sapiens
gtgtcctaagaatat

SEQ ID NO: 1631184 - DNA, 15 bp, Homo sapiens
tgtcctaagaatatc

SEQ ID NO: 1631185 - DNA, 15 bp, Homo sapiens
gtcctaagaatatct

SEQ ID NO: 1631186 - DNA, 15 bp, Homo sapiens
tcctaagaatatctg

SEQ ID NO: 1631187 - DNA, 15 bp, Homo sapiens
cctaagaatatctga

SEQ ID NO: 1631188 - DNA, 15 bp, Homo sapiens
ctaagaatatctgag

SEQ ID NO: 1631189 - DNA, 15 bp, Homo sapiens
taagaatatctgagt

SEQ ID NO: 1631190 - DNA, 15 bp, Homo sapiens
aagaatatctgagtg

SEQ ID NO: 1631191 - DNA, 15 bp, Homo sapiens
agaatatctgagtgt

SEQ ID NO: 1631192 - DNA, 15 bp, Homo sapiens
gaatatctgagtgtc

SEQ ID NO: 1631193 - DNA, 15 bp, Homo sapiens
aatatctgagtgtct

SEQ ID NO: 1631194 - DNA, 15 bp, Homo sapiens
atatctgagtgtctg

SEQ ID NO: 1631195 - DNA, 15 bp, Homo sapiens
tatctgagtgtctgc

SEQ ID NO: 1631196 - DNA, 15 bp, Homo sapiens
atctgagtgtctgca

SEQ ID NO: 1631197 - DNA, 15 bp, Homo sapiens
tctgagtgtctgcaa

SEQ ID NO: 1631198 - DNA, 15 bp, Homo sapiens
ctgagtgtctgcaag

SEQ ID NO: 1631199 - DNA, 15 bp, Homo sapiens
tgagtgtctgcaagg

SEQ ID NO: 1631200 - DNA, 15 bp, Homo sapiens
gagtgtctgcaaggt

SEQ ID NO: 1631201 - DNA, 15 bp, Homo sapiens
agtgtctgcaaggtg

SEQ ID NO: 1631202 - DNA, 15 bp, Homo sapiens
gtgtctgcaaggtgt

SEQ ID NO: 1631203 - DNA, 15 bp, Homo sapiens
tgtctgcaaggtgtt

SEQ ID NO: 1631204 - DNA, 15 bp, Homo sapiens
gtctgcaaggtgttt

SEQ ID NO: 1631205 - DNA, 15 bp, Homo sapiens
tctgcaaggtgttta

SEQ ID NO: 1631206 - DNA, 15 bp, Homo sapiens
ctgcaaggtgtttaa

SEQ ID NO: 1631207 - DNA, 15 bp, Homo sapiens
tgcaaggtgtttaac

SEQ ID NO: 1631208 - DNA, 15 bp, Homo sapiens
gcaaggtgtttaact

SEQ ID NO: 1631209 - DNA, 15 bp, Homo sapiens
caaggtgtttaactc

SEQ ID NO: 1631210 - DNA, 15 bp, Homo sapiens
aaggtgtttaactcg

SEQ ID NO: 1631211 - DNA, 15 bp, Homo sapiens
aggtgtttaactcgt

SEQ ID NO: 1631212 - DNA, 15 bp, Homo sapiens
ggtgtttaactcgtg

SEQ ID NO: 1631213 - DNA, 15 bp, Homo sapiens
gtgtttaactcgtgt

SEQ ID NO: 1631214 - DNA, 15 bp, Homo sapiens
tgtttaactcgtgtt

SEQ ID NO: 1631215 - DNA, 15 bp, Homo sapiens
gtttaactcgtgtta

SEQ ID NO: 1631216 - DNA, 15 bp, Homo sapiens
tttaactcgtgttaa

SEQ ID NO: 1631217 - DNA, 15 bp, Homo sapiens
ttaactcgtgttaaa

SEQ ID NO: 1631218 - DNA, 15 bp, Homo sapiens
taactcgtgttaaag

SEQ ID NO: 1631219 - DNA, 15 bp, Homo sapiens
aactcgtgttaaagg

SEQ ID NO: 1631220 - DNA, 15 bp, Homo sapiens
actcgtgttaaaggg

SEQ ID NO: 1631221 - DNA, 15 bp, Homo sapiens
ctcgtgttaaagggt

SEQ ID NO: 1631222 - DNA, 15 bp, Homo sapiens
tcgtgttaaagggtt

SEQ ID NO: 1631223 - DNA, 15 bp, Homo sapiens
cgtgttaaagggttt

SEQ ID NO: 1631224 - DNA, 15 bp, Homo sapiens
gtgttaaagggtttg

SEQ ID NO: 1631225 - DNA, 15 bp, Homo sapiens
tgttaaagggtttgt

SEQ ID NO: 1631226 - DNA, 15 bp, Homo sapiens
gttaaagggtttgtg

SEQ ID NO: 1631227 - DNA, 15 bp, Homo sapiens
ttaaagggtttgtgc

SEQ ID NO: 1631228 - DNA, 15 bp, Homo sapiens
taaagggtttgtgct

SEQ ID NO: 1631229 - DNA, 15 bp, Homo sapiens
aaagggtttgtgctg

SEQ ID NO: 1631230 - DNA, 15 bp, Homo sapiens
aagggtttgtgctgg

SEQ ID NO: 1631231 - DNA, 15 bp, Homo sapiens
agggtttgtgctggg

SEQ ID NO: 1631232 - DNA, 15 bp, Homo sapiens
gggtttgtgctgggc

SEQ ID NO: 1631233 - DNA, 15 bp, Homo sapiens
ggtttgtgctgggca

SEQ ID NO: 1631234 - DNA, 15 bp, Homo sapiens
gtttgtgctgggcag

SEQ ID NO: 1631235 - DNA, 15 bp, Homo sapiens
tttgtgctgggcaga

SEQ ID NO: 1631236 - DNA, 15 bp, Homo sapiens
ttgtgctgggcagag

SEQ ID NO: 1631237 - DNA, 15 bp, Homo sapiens
tgtgctgggcagagg

SEQ ID NO: 1631238 - DNA, 15 bp, Homo sapiens
gtgctgggcagagga

SEQ ID NO: 1631239 - DNA, 15 bp, Homo sapiens
tgctgggcagaggac

SEQ ID NO: 1631240 - DNA, 15 bp, Homo sapiens
gctgggcagaggaca

SEQ ID NO: 1631241 - DNA, 15 bp, Homo sapiens
ctgggcagaggacaa

SEQ ID NO: 1631242 - DNA, 15 bp, Homo sapiens
tgggcagaggacaag

SEQ ID NO: 1631243 - DNA, 15 bp, Homo sapiens
gggcagaggacaagg

SEQ ID NO: 1631244 - DNA, 15 bp, Homo sapiens
ggcagaggacaaggt

SEQ ID NO: 1631245 - DNA, 15 bp, Homo sapiens
gcagaggacaaggta

SEQ ID NO: 1631246 - DNA, 15 bp, Homo sapiens
cagaggacaaggtac

SEQ ID NO: 1631247 - DNA, 15 bp, Homo sapiens
agaggacaaggtact

SEQ ID NO: 1631248 - DNA, 15 bp, Homo sapiens
gaggacaaggtactt

SEQ ID NO: 1631249 - DNA, 15 bp, Homo sapiens
aggacaaggtacttt

SEQ ID NO: 1631250 - DNA, 15 bp, Homo sapiens
ggacaaggtactttt

SEQ ID NO: 1631251 - DNA, 15 bp, Homo sapiens
gacaaggtacttttt

SEQ ID NO: 1631252 - DNA, 15 bp, Homo sapiens
acaaggtactttttt

SEQ ID NO: 1631253 - DNA, 15 bp, Homo sapiens
caaggtacttttttt

SEQ ID NO: 1631254 - DNA, 15 bp, Homo sapiens
aaggtactttttttt

SEQ ID NO: 1631255 - DNA, 15 bp, Homo sapiens
aggtacttttttttt

SEQ ID NO: 1631256 - DNA, 15 bp, Homo sapiens
ggtactttttttttt

SEQ ID NO: 1631257 - DNA, 15 bp, Homo sapiens
gtacttttttttttt

SEQ ID NO: 1631258 - DNA, 15 bp, Homo sapiens
gagatggagtttttc

SEQ ID NO: 1631259 - DNA, 15 bp, Homo sapiens
agatggagtttttct

SEQ ID NO: 1631260 - DNA, 15 bp, Homo sapiens
gatggagtttttctc

SEQ ID NO: 1631261 - DNA, 15 bp, Homo sapiens
atggagtttttctct

SEQ ID NO: 1631262 - DNA, 15 bp, Homo sapiens
tggagtttttctctc

SEQ ID NO: 1631263 - DNA, 15 bp, Homo sapiens
ggagtttttctctcg

SEQ ID NO: 1631264 - DNA, 15 bp, Homo sapiens
gagtttttctctcgt

SEQ ID NO: 1631265 - DNA, 15 bp, Homo sapiens
agtttttctctcgtt

SEQ ID NO: 1631266 - DNA, 15 bp, Homo sapiens
gtttttctctcgttg

SEQ ID NO: 1631267 - DNA, 15 bp, Homo sapiens
tttttctctcgttgc

SEQ ID NO: 1631268 - DNA, 15 bp, Homo sapiens
ttttctctcgttgcc

SEQ ID NO: 1631269 - DNA, 15 bp, Homo sapiens
tttctctcgttgccc

SEQ ID NO: 1631270 - DNA, 15 bp, Homo sapiens
ttctctcgttgccca

SEQ ID NO: 1631271 - DNA, 15 bp, Homo sapiens
tctctcgttgcccag

SEQ ID NO: 1631272 - DNA, 15 bp, Homo sapiens
ctctcgttgcccagg

SEQ ID NO: 1631273 - DNA, 15 bp, Homo sapiens
tctcgttgcccaggc

SEQ ID NO: 1631274 - DNA, 15 bp, Homo sapiens
ctcgttgcccaggct

SEQ ID NO: 1631275 - DNA, 15 bp, Homo sapiens
tcgttgcccaggctg

SEQ ID NO: 1631276 - DNA, 15 bp, Homo sapiens
cgttgcccaggctgg

SEQ ID NO: 1631277 - DNA, 15 bp, Homo sapiens
gcccaggctggagca

SEQ ID NO: 1631278 - DNA, 15 bp, Homo sapiens
cccaggctggagcac

SEQ ID NO: 1631279 - DNA, 15 bp, Homo sapiens
ccaggctggagcaca

SEQ ID NO: 1631280 - DNA, 15 bp, Homo sapiens
caggctggagcacaa

SEQ ID NO: 1631281 - DNA, 15 bp, Homo sapiens
aggctggagcacaat

SEQ ID NO: 1631282 - DNA, 15 bp, Homo sapiens
ggctggagcacaatg

SEQ ID NO: 1631283 - DNA, 15 bp, Homo sapiens
gctggagcacaatgg

SEQ ID NO: 1631284 - DNA, 15 bp, Homo sapiens
ctggagcacaatggc

SEQ ID NO: 1631285 - DNA, 15 bp, Homo sapiens
tggagcacaatggca

SEQ ID NO: 1631286 - DNA, 15 bp, Homo sapiens
ggagcacaatggcac

SEQ ID NO: 1631287 - DNA, 15 bp, Homo sapiens
gagcacaatggcacg

SEQ ID NO: 1631288 - DNA, 15 bp, Homo sapiens
agcacaatggcacga

SEQ ID NO: 1631289 - DNA, 15 bp, Homo sapiens
gcacaatggcacgat

SEQ ID NO: 1631290 - DNA, 15 bp, Homo sapiens
cacaatggcacgatc

SEQ ID NO: 1631291 - DNA, 15 bp, Homo sapiens
acaatggcacgatct

SEQ ID NO: 1631292 - DNA, 15 bp, Homo sapiens
cacccgccaccacac

SEQ ID NO: 1631293 - DNA, 15 bp, Homo sapiens
acccgccaccacacc

SEQ ID NO: 1631294 - DNA, 15 bp, Homo sapiens
cccgccaccacaccc

SEQ ID NO: 1631295 - DNA, 15 bp, Homo sapiens
ccgccaccacacccc

SEQ ID NO: 1631296 - DNA, 15 bp, Homo sapiens
cgccaccacaccccg

SEQ ID NO: 1631297 - DNA, 15 bp, Homo sapiens
gccaccacaccccgc

SEQ ID NO: 1631298 - DNA, 15 bp, Homo sapiens
ccaccacaccccgct

SEQ ID NO: 1631299 - DNA, 15 bp, Homo sapiens
caccacaccccgcta

SEQ ID NO: 1631300 - DNA, 15 bp, Homo sapiens
accacaccccgctaa

SEQ ID NO: 1631301 - DNA, 15 bp, Homo sapiens
ccacaccccgctaat

SEQ ID NO: 1631302 - DNA, 15 bp, Homo sapiens
cacaccccgctaatt

SEQ ID NO: 1631303 - DNA, 15 bp, Homo sapiens
acaccccgctaattc

SEQ ID NO: 1631304 - DNA, 15 bp, Homo sapiens
caccccgctaattct

SEQ ID NO: 1631305 - DNA, 15 bp, Homo sapiens
accccgctaattctt

SEQ ID NO: 1631306 - DNA, 15 bp, Homo sapiens
ccccgctaattcttt

SEQ ID NO: 1631307 - DNA, 15 bp, Homo sapiens
cccgctaattctttt

SEQ ID NO: 1631308 - DNA, 15 bp, Homo sapiens
ccgctaattcttttt

SEQ ID NO: 1631309 - DNA, 15 bp, Homo sapiens
cgctaattctttttg

SEQ ID NO: 1631310 - DNA, 15 bp, Homo sapiens
gctaattctttttgt

SEQ ID NO: 1631311 - DNA, 15 bp, Homo sapiens
ctaattctttttgta

SEQ ID NO: 1631312 - DNA, 15 bp, Homo sapiens
taattctttttgtat

SEQ ID NO: 1631313 - DNA, 15 bp, Homo sapiens
aattctttttgtatt

SEQ ID NO: 1631314 - DNA, 15 bp, Homo sapiens
attctttttgtattt

SEQ ID NO: 1631315 - DNA, 15 bp, Homo sapiens
ttctttttgtatttt

SEQ ID NO: 1631316 - DNA, 15 bp, Homo sapiens
tctttttgtattttt

SEQ ID NO: 1631317 - DNA, 15 bp, Homo sapiens
ctttttgtattttta

SEQ ID NO: 1631318 - DNA, 15 bp, Homo sapiens
tggtcttgaactccc

SEQ ID NO: 1631319 - DNA, 15 bp, Homo sapiens
ggtcttgaactcccg

SEQ ID NO: 1631320 - DNA, 15 bp, Homo sapiens
gtcttgaactcccga

SEQ ID NO: 1631321 - DNA, 15 bp, Homo sapiens
tcttgaactcccgac

SEQ ID NO: 1631322 - DNA, 15 bp, Homo sapiens
ggtgatccgcccgct

SEQ ID NO: 1631323 - DNA, 15 bp, Homo sapiens
gtgatccgcccgctt

SEQ ID NO: 1631324 - DNA, 15 bp, Homo sapiens
tgatccgcccgcttc

SEQ ID NO: 1631325 - DNA, 15 bp, Homo sapiens
gatccgcccgcttct

SEQ ID NO: 1631326 - DNA, 15 bp, Homo sapiens
atccgcccgcttctg

SEQ ID NO: 1631327 - DNA, 15 bp, Homo sapiens
tccgcccgcttctgc

SEQ ID NO: 1631328 - DNA, 15 bp, Homo sapiens
ccgcccgcttctgcc

SEQ ID NO: 1631329 - DNA, 15 bp, Homo sapiens
cgcccgcttctgcct

SEQ ID NO: 1631330 - DNA, 15 bp, Homo sapiens
gcccgcttctgcctc

SEQ ID NO: 1631331 - DNA, 15 bp, Homo sapiens
cccgcttctgcctcc

SEQ ID NO: 1631332 - DNA, 15 bp, Homo sapiens
ccgcttctgcctccc

SEQ ID NO: 1631333 - DNA, 15 bp, Homo sapiens
cgcttctgcctccca

SEQ ID NO: 1631334 - DNA, 15 bp, Homo sapiens
gcttctgcctcccaa

SEQ ID NO: 1631335 - DNA, 15 bp, Homo sapiens
cttctgcctcccaaa

SEQ ID NO: 1631336 - DNA, 15 bp, Homo sapiens
ttctgcctcccaaag

SEQ ID NO: 1631337 - DNA, 15 bp, Homo sapiens
tgcctcccaaagcac

SEQ ID NO: 1631338 - DNA, 15 bp, Homo sapiens
caggcttgagccaca

SEQ ID NO: 1631339 - DNA, 15 bp, Homo sapiens
aggcttgagccacag

SEQ ID NO: 1631340 - DNA, 15 bp, Homo sapiens
ggcttgagccacagc

SEQ ID NO: 1631341 - DNA, 15 bp, Homo sapiens
gcttgagccacagca

SEQ ID NO: 1631342 - DNA, 15 bp, Homo sapiens
cttgagccacagcac

SEQ ID NO: 1631343 - DNA, 15 bp, Homo sapiens
ttgagccacagcacc

SEQ ID NO: 1631344 - DNA, 15 bp, Homo sapiens
tgagccacagcaccc

SEQ ID NO: 1631345 - DNA, 15 bp, Homo sapiens
gagccacagcaccca

SEQ ID NO: 1631346 - DNA, 15 bp, Homo sapiens
agccacagcacccag

SEQ ID NO: 1631347 - DNA, 15 bp, Homo sapiens
gccacagcacccaga

SEQ ID NO: 1631348 - DNA, 15 bp, Homo sapiens
ccacagcacccagac

SEQ ID NO: 1631349 - DNA, 15 bp, Homo sapiens
cacagcacccagaca

SEQ ID NO: 1631350 - DNA, 15 bp, Homo sapiens
acagcacccagacag

SEQ ID NO: 1631351 - DNA, 15 bp, Homo sapiens
cagcacccagacagg

SEQ ID NO: 1631352 - DNA, 15 bp, Homo sapiens
agcacccagacagga

SEQ ID NO: 1631353 - DNA, 15 bp, Homo sapiens
gcacccagacaggac

SEQ ID NO: 1631354 - DNA, 15 bp, Homo sapiens
cacccagacaggaca

SEQ ID NO: 1631355 - DNA, 15 bp, Homo sapiens
acccagacaggacaa

SEQ ID NO: 1631356 - DNA, 15 bp, Homo sapiens
cccagacaggacaag

SEQ ID NO: 1631357 - DNA, 15 bp, Homo sapiens
ccagacaggacaaga

SEQ ID NO: 1631358 - DNA, 15 bp, Homo sapiens
cagacaggacaagat

SEQ ID NO: 1631359 - DNA, 15 bp, Homo sapiens
agacaggacaagata

SEQ ID NO: 1631360 - DNA, 15 bp, Homo sapiens
gacaggacaagatac

SEQ ID NO: 1631361 - DNA, 15 bp, Homo sapiens
acaggacaagatact

SEQ ID NO: 1631362 - DNA, 15 bp, Homo sapiens
caggacaagatacta

SEQ ID NO: 1631363 - DNA, 15 bp, Homo sapiens
aggacaagatactat

SEQ ID NO: 1631364 - DNA, 15 bp, Homo sapiens
ggacaagatactatt

SEQ ID NO: 1631365 - DNA, 15 bp, Homo sapiens
gacaagatactattt

SEQ ID NO: 1631366 - DNA, 15 bp, Homo sapiens
acaagatactatttt

SEQ ID NO: 1631367 - DNA, 15 bp, Homo sapiens
caagatactattttg

SEQ ID NO: 1631368 - DNA, 15 bp, Homo sapiens
aagatactattttga

SEQ ID NO: 1631369 - DNA, 15 bp, Homo sapiens
agatactattttgaa

SEQ ID NO: 1631370 - DNA, 15 bp, Homo sapiens
gatactattttgaag

SEQ ID NO: 1631371 - DNA, 15 bp, Homo sapiens
atactattttgaagg

SEQ ID NO: 1631372 - DNA, 15 bp, Homo sapiens
tactattttgaaggg

SEQ ID NO: 1631373 - DNA, 15 bp, Homo sapiens
actattttgaagggt

SEQ ID NO: 1631374 - DNA, 15 bp, Homo sapiens
ctattttgaagggta

SEQ ID NO: 1631375 - DNA, 15 bp, Homo sapiens
tattttgaagggtat

SEQ ID NO: 1631376 - DNA, 15 bp, Homo sapiens
attttgaagggtatg

SEQ ID NO: 1631377 - DNA, 15 bp, Homo sapiens
ttttgaagggtatgt

SEQ ID NO: 1631378 - DNA, 15 bp, Homo sapiens
tttgaagggtatgtg

SEQ ID NO: 1631379 - DNA, 15 bp, Homo sapiens
ttgaagggtatgtgc

SEQ ID NO: 1631380 - DNA, 15 bp, Homo sapiens
tgaagggtatgtgct

SEQ ID NO: 1631381 - DNA, 15 bp, Homo sapiens
gaagggtatgtgctt

SEQ ID NO: 1631382 - DNA, 15 bp, Homo sapiens
aagggtatgtgcttc

SEQ ID NO: 1631383 - DNA, 15 bp, Homo sapiens
agggtatgtgcttcc

SEQ ID NO: 1631384 - DNA, 15 bp, Homo sapiens
gggtatgtgcttccc

SEQ ID NO: 1631385 - DNA, 15 bp, Homo sapiens
ggtatgtgcttccca

SEQ ID NO: 1631386 - DNA, 15 bp, Homo sapiens
gtatgtgcttcccag

SEQ ID NO: 1631387 - DNA, 15 bp, Homo sapiens
tatgtgcttcccagg

SEQ ID NO: 1631388 - DNA, 15 bp, Homo sapiens
atgtgcttcccaggt

SEQ ID NO: 1631389 - DNA, 15 bp, Homo sapiens
tgtgcttcccaggta

SEQ ID NO: 1631390 - DNA, 15 bp, Homo sapiens
gtgcttcccaggtag

SEQ ID NO: 1631391 - DNA, 15 bp, Homo sapiens
tgcttcccaggtaga

SEQ ID NO: 1631392 - DNA, 15 bp, Homo sapiens
gcttcccaggtagag

SEQ ID NO: 1631393 - DNA, 15 bp, Homo sapiens
cttcccaggtagagc

SEQ ID NO: 1631394 - DNA, 15 bp, Homo sapiens
ttcccaggtagagca

SEQ ID NO: 1631395 - DNA, 15 bp, Homo sapiens
tcccaggtagagcat

SEQ ID NO: 1631396 - DNA, 15 bp, Homo sapiens
cccaggtagagcatt

SEQ ID NO: 1631397 - DNA, 15 bp, Homo sapiens
ccaggtagagcatta

SEQ ID NO: 1631398 - DNA, 15 bp, Homo sapiens
caggtagagcattac

SEQ ID NO: 1631399 - DNA, 15 bp, Homo sapiens
aggtagagcattaca

SEQ ID NO: 1631400 - DNA, 15 bp, Homo sapiens
ggtagagcattacaa

SEQ ID NO: 1631401 - DNA, 15 bp, Homo sapiens
gtagagcattacaaa

SEQ ID NO: 1631402 - DNA, 15 bp, Homo sapiens
tagagcattacaaag

SEQ ID NO: 1631403 - DNA, 15 bp, Homo sapiens
agagcattacaaagg

SEQ ID NO: 1631404 - DNA, 15 bp, Homo sapiens
gagcattacaaaggg

SEQ ID NO: 1631405 - DNA, 15 bp, Homo sapiens
agcattacaaagggc

SEQ ID NO: 1631406 - DNA, 15 bp, Homo sapiens
gcattacaaagggct

SEQ ID NO: 1631407 - DNA, 15 bp, Homo sapiens
cattacaaagggctc

SEQ ID NO: 1631408 - DNA, 15 bp, Homo sapiens
attacaaagggctct

SEQ ID NO: 1631409 - DNA, 15 bp, Homo sapiens
ttacaaagggctctt

SEQ ID NO: 1631410 - DNA, 15 bp, Homo sapiens
tacaaagggctcttc

SEQ ID NO: 1631411 - DNA, 15 bp, Homo sapiens
acaaagggctcttct

SEQ ID NO: 1631412 - DNA, 15 bp, Homo sapiens
caaagggctcttctg

SEQ ID NO: 1631413 - DNA, 15 bp, Homo sapiens
aaagggctcttctgg

SEQ ID NO: 1631414 - DNA, 15 bp, Homo sapiens
aagggctcttctgga

SEQ ID NO: 1631415 - DNA, 15 bp, Homo sapiens
agggctcttctggat

SEQ ID NO: 1631416 - DNA, 15 bp, Homo sapiens
gggctcttctggatg

SEQ ID NO: 1631417 - DNA, 15 bp, Homo sapiens
ggctcttctggatgc

SEQ ID NO: 1631418 - DNA, 15 bp, Homo sapiens
gctcttctggatgca

SEQ ID NO: 1631419 - DNA, 15 bp, Homo sapiens
ctcttctggatgcag

SEQ ID NO: 1631420 - DNA, 15 bp, Homo sapiens
tcttctggatgcagc

SEQ ID NO: 1631421 - DNA, 15 bp, Homo sapiens
cttctggatgcagca

SEQ ID NO: 1631422 - DNA, 15 bp, Homo sapiens
ttctggatgcagcat

SEQ ID NO: 1631423 - DNA, 15 bp, Homo sapiens
tctggatgcagcatc

SEQ ID NO: 1631424 - DNA, 15 bp, Homo sapiens
ctggatgcagcatcc

SEQ ID NO: 1631425 - DNA, 15 bp, Homo sapiens
tggatgcagcatccc

SEQ ID NO: 1631426 - DNA, 15 bp, Homo sapiens
ggatgcagcatcccc

SEQ ID NO: 1631427 - DNA, 15 bp, Homo sapiens
gatgcagcatccccg

SEQ ID NO: 1631428 - DNA, 15 bp, Homo sapiens
atgcagcatccccgc

SEQ ID NO: 1631429 - DNA, 15 bp, Homo sapiens
tgcagcatccccgct

SEQ ID NO: 1631430 - DNA, 15 bp, Homo sapiens
gcagcatccccgctg

SEQ ID NO: 1631431 - DNA, 15 bp, Homo sapiens
cagcatccccgctgc

SEQ ID NO: 1631432 - DNA, 15 bp, Homo sapiens
agcatccccgctgca

SEQ ID NO: 1631433 - DNA, 15 bp, Homo sapiens
gcatccccgctgcaa

SEQ ID NO: 1631434 - DNA, 15 bp, Homo sapiens
catccccgctgcaat

SEQ ID NO: 1631435 - DNA, 15 bp, Homo sapiens
atccccgctgcaatt

SEQ ID NO: 1631436 - DNA, 15 bp, Homo sapiens
tccccgctgcaattg

SEQ ID NO: 1631437 - DNA, 15 bp, Homo sapiens
ccccgctgcaattga

SEQ ID NO: 1631438 - DNA, 15 bp, Homo sapiens
cccgctgcaattgag

SEQ ID NO: 1631439 - DNA, 15 bp, Homo sapiens
ccgctgcaattgagt

SEQ ID NO: 1631440 - DNA, 15 bp, Homo sapiens
cgctgcaattgagtg

SEQ ID NO: 1631441 - DNA, 15 bp, Homo sapiens
gctgcaattgagtgt

SEQ ID NO: 1631442 - DNA, 15 bp, Homo sapiens
ctgcaattgagtgtc

SEQ ID NO: 1631443 - DNA, 15 bp, Homo sapiens
tgcaattgagtgtcc

SEQ ID NO: 1631444 - DNA, 15 bp, Homo sapiens
gcaattgagtgtcct

SEQ ID NO: 1631445 - DNA, 15 bp, Homo sapiens
caattgagtgtccta

SEQ ID NO: 1631446 - DNA, 15 bp, Homo sapiens
aattgagtgtcctaa

SEQ ID NO: 1631447 - DNA, 15 bp, Homo sapiens
attgagtgtcctaac

SEQ ID NO: 1631448 - DNA, 15 bp, Homo sapiens
ttgagtgtcctaact

SEQ ID NO: 1631449 - DNA, 15 bp, Homo sapiens
tgagtgtcctaactt

SEQ ID NO: 1631450 - DNA, 15 bp, Homo sapiens
gagtgtcctaacttc

SEQ ID NO: 1631451 - DNA, 15 bp, Homo sapiens
agtgtcctaacttct

SEQ ID NO: 1631452 - DNA, 15 bp, Homo sapiens
gtgtcctaacttctg

SEQ ID NO: 1631453 - DNA, 15 bp, Homo sapiens
tgtcctaacttctgt

SEQ ID NO: 1631454 - DNA, 15 bp, Homo sapiens
gtcctaacttctgtt

SEQ ID NO: 1631455 - DNA, 15 bp, Homo sapiens
tcctaacttctgttt

SEQ ID NO: 1631456 - DNA, 15 bp, Homo sapiens
cctaacttctgttta

SEQ ID NO: 1631457 - DNA, 15 bp, Homo sapiens
ctaacttctgtttat

SEQ ID NO: 1631458 - DNA, 15 bp, Homo sapiens
taacttctgtttata

SEQ ID NO: 1631459 - DNA, 15 bp, Homo sapiens
aacttctgtttataa

SEQ ID NO: 1631460 - DNA, 15 bp, Homo sapiens
acttctgtttataaa

SEQ ID NO: 1631461 - DNA, 15 bp, Homo sapiens
cttctgtttataaag

SEQ ID NO: 1631462 - DNA, 15 bp, Homo sapiens
ttctgtttataaagg

SEQ ID NO: 1631463 - DNA, 15 bp, Homo sapiens
tctgtttataaaggg

SEQ ID NO: 1631464 - DNA, 15 bp, Homo sapiens
ctgtttataaagggg

SEQ ID NO: 1631465 - DNA, 15 bp, Homo sapiens
tgtttataaagggga

SEQ ID NO: 1631466 - DNA, 15 bp, Homo sapiens
gtttataaaggggac

SEQ ID NO: 1631467 - DNA, 15 bp, Homo sapiens
tttataaaggggacc

SEQ ID NO: 1631468 - DNA, 15 bp, Homo sapiens
ttataaaggggaccc

SEQ ID NO: 1631469 - DNA, 15 bp, Homo sapiens
tataaaggggacccc

SEQ ID NO: 1631470 - DNA, 15 bp, Homo sapiens
ataaaggggacccca

SEQ ID NO: 1631471 - DNA, 15 bp, Homo sapiens
taaaggggaccccaa

SEQ ID NO: 1631472 - DNA, 15 bp, Homo sapiens
aaaggggaccccaac

SEQ ID NO: 1631473 - DNA, 15 bp, Homo sapiens
aaggggaccccaaca

SEQ ID NO: 1631474 - DNA, 15 bp, Homo sapiens
aggggaccccaacag

SEQ ID NO: 1631475 - DNA, 15 bp, Homo sapiens
ggggaccccaacagg

SEQ ID NO: 1631476 - DNA, 15 bp, Homo sapiens
gggaccccaacagga

SEQ ID NO: 1631477 - DNA, 15 bp, Homo sapiens
ggaccccaacaggaa

SEQ ID NO: 1631478 - DNA, 15 bp, Homo sapiens
gaccccaacaggaag

SEQ ID NO: 1631479 - DNA, 15 bp, Homo sapiens
accccaacaggaagc

SEQ ID NO: 1631480 - DNA, 15 bp, Homo sapiens
ccccaacaggaagca

SEQ ID NO: 1631481 - DNA, 15 bp, Homo sapiens
cccaacaggaagcac

SEQ ID NO: 1631482 - DNA, 15 bp, Homo sapiens
ccaacaggaagcacc

SEQ ID NO: 1631483 - DNA, 15 bp, Homo sapiens
caacaggaagcaccc

SEQ ID NO: 1631484 - DNA, 15 bp, Homo sapiens
aacaggaagcaccct

SEQ ID NO: 1631485 - DNA, 15 bp, Homo sapiens
acaggaagcaccctg

SEQ ID NO: 1631486 - DNA, 15 bp, Homo sapiens
caggaagcaccctga

SEQ ID NO: 1631487 - DNA, 15 bp, Homo sapiens
aggaagcaccctgag

SEQ ID NO: 1631488 - DNA, 15 bp, Homo sapiens
ggaagcaccctgaga

SEQ ID NO: 1631489 - DNA, 15 bp, Homo sapiens
gaagcaccctgagaa

SEQ ID NO: 1631490 - DNA, 15 bp, Homo sapiens
aagcaccctgagaag

SEQ ID NO: 1631491 - DNA, 15 bp, Homo sapiens
agcaccctgagaagt

SEQ ID NO: 1631492 - DNA, 15 bp, Homo sapiens
gcaccctgagaagtt

SEQ ID NO: 1631493 - DNA, 15 bp, Homo sapiens
caccctgagaagttt

SEQ ID NO: 1631494 - DNA, 15 bp, Homo sapiens
accctgagaagtttc

SEQ ID NO: 1631495 - DNA, 15 bp, Homo sapiens
ccctgagaagtttcc

SEQ ID NO: 1631496 - DNA, 15 bp, Homo sapiens
cctgagaagtttccc

SEQ ID NO: 1631497 - DNA, 15 bp, Homo sapiens
ctgagaagtttcccc

SEQ ID NO: 1631498 - DNA, 15 bp, Homo sapiens
tgagaagtttcccca

SEQ ID NO: 1631499 - DNA, 15 bp, Homo sapiens
gagaagtttccccag

SEQ ID NO: 1631500 - DNA, 15 bp, Homo sapiens
agaagtttccccagt

SEQ ID NO: 1631501 - DNA, 15 bp, Homo sapiens
gaagtttccccagtt

SEQ ID NO: 1631502 - DNA, 15 bp, Homo sapiens
aagtttccccagtta

SEQ ID NO: 1631503 - DNA, 15 bp, Homo sapiens
agtttccccagttag

SEQ ID NO: 1631504 - DNA, 15 bp, Homo sapiens
gtttccccagttagc

SEQ ID NO: 1631505 - DNA, 15 bp, Homo sapiens
tttccccagttagcc

SEQ ID NO: 1631506 - DNA, 15 bp, Homo sapiens
ttccccagttagcca

SEQ ID NO: 1631507 - DNA, 15 bp, Homo sapiens
tccccagttagccac

SEQ ID NO: 1631508 - DNA, 15 bp, Homo sapiens
ccccagttagccacc

SEQ ID NO: 1631509 - DNA, 15 bp, Homo sapiens
cccagttagccacct

SEQ ID NO: 1631510 - DNA, 15 bp, Homo sapiens
ccagttagccacctt

SEQ ID NO: 1631511 - DNA, 15 bp, Homo sapiens
cagttagccaccttg

SEQ ID NO: 1631512 - DNA, 15 bp, Homo sapiens
agttagccaccttga

SEQ ID NO: 1631513 - DNA, 15 bp, Homo sapiens
gttagccaccttgag

SEQ ID NO: 1631514 - DNA, 15 bp, Homo sapiens
ttagccaccttgagg

SEQ ID NO: 1631515 - DNA, 15 bp, Homo sapiens
tagccaccttgaggt

SEQ ID NO: 1631516 - DNA, 15 bp, Homo sapiens
agccaccttgaggta

SEQ ID NO: 1631517 - DNA, 15 bp, Homo sapiens
gccaccttgaggtaa

SEQ ID NO: 1631518 - DNA, 15 bp, Homo sapiens
ccaccttgaggtaaa

SEQ ID NO: 1631519 - DNA, 15 bp, Homo sapiens
caccttgaggtaaaa

SEQ ID NO: 1631520 - DNA, 15 bp, Homo sapiens
accttgaggtaaaag

SEQ ID NO: 1631521 - DNA, 15 bp, Homo sapiens
ccttgaggtaaaaga

SEQ ID NO: 1631522 - DNA, 15 bp, Homo sapiens
cttgaggtaaaagat

SEQ ID NO: 1631523 - DNA, 15 bp, Homo sapiens
ttgaggtaaaagatt

SEQ ID NO: 1631524 - DNA, 15 bp, Homo sapiens
tgaggtaaaagattg

SEQ ID NO: 1631525 - DNA, 15 bp, Homo sapiens
gaggtaaaagattga

SEQ ID NO: 1631526 - DNA, 15 bp, Homo sapiens
aggtaaaagattgag

SEQ ID NO: 1631527 - DNA, 15 bp, Homo sapiens
ggtaaaagattgagt

SEQ ID NO: 1631528 - DNA, 15 bp, Homo sapiens
gtaaaagattgagtc

SEQ ID NO: 1631529 - DNA, 15 bp, Homo sapiens
taaaagattgagtct

SEQ ID NO: 1631530 - DNA, 15 bp, Homo sapiens
aaaagattgagtctg

SEQ ID NO: 1631531 - DNA, 15 bp, Homo sapiens
aaagattgagtctgg

SEQ ID NO: 1631532 - DNA, 15 bp, Homo sapiens
aagattgagtctggg

SEQ ID NO: 1631533 - DNA, 15 bp, Homo sapiens
agattgagtctgggg

SEQ ID NO: 1631534 - DNA, 15 bp, Homo sapiens
gattgagtctggggc

SEQ ID NO: 1631535 - DNA, 15 bp, Homo sapiens
attgagtctggggct

SEQ ID NO: 1631536 - DNA, 15 bp, Homo sapiens
ttgagtctggggctc

SEQ ID NO: 1631537 - DNA, 15 bp, Homo sapiens
tgagtctggggctcc

SEQ ID NO: 1631538 - DNA, 15 bp, Homo sapiens
gagtctggggctcca

SEQ ID NO: 1631539 - DNA, 15 bp, Homo sapiens
agtctggggctccat

SEQ ID NO: 1631540 - DNA, 15 bp, Homo sapiens
gtctggggctccatg

SEQ ID NO: 1631541 - DNA, 15 bp, Homo sapiens
tctggggctccatgc

SEQ ID NO: 1631542 - DNA, 15 bp, Homo sapiens
ctggggctccatgcc

SEQ ID NO: 1631543 - DNA, 15 bp, Homo sapiens
tggggctccatgccc

SEQ ID NO: 1631544 - DNA, 15 bp, Homo sapiens
ggggctccatgccct

SEQ ID NO: 1631545 - DNA, 15 bp, Homo sapiens
gggctccatgccctg

SEQ ID NO: 1631546 - DNA, 15 bp, Homo sapiens
ggctccatgccctgc

SEQ ID NO: 1631547 - DNA, 15 bp, Homo sapiens
gctccatgccctgct

SEQ ID NO: 1631548 - DNA, 15 bp, Homo sapiens
ctccatgccctgctt

SEQ ID NO: 1631549 - DNA, 15 bp, Homo sapiens
tccatgccctgcttt

SEQ ID NO: 1631550 - DNA, 15 bp, Homo sapiens
ccatgccctgctttc

SEQ ID NO: 1631551 - DNA, 15 bp, Homo sapiens
catgccctgctttca

SEQ ID NO: 1631552 - DNA, 15 bp, Homo sapiens
atgccctgctttcac

SEQ ID NO: 1631553 - DNA, 15 bp, Homo sapiens
tgccctgctttcacg

SEQ ID NO: 1631554 - DNA, 15 bp, Homo sapiens
gccctgctttcacgg

SEQ ID NO: 1631555 - DNA, 15 bp, Homo sapiens
ccctgctttcacgga

SEQ ID NO: 1631556 - DNA, 15 bp, Homo sapiens
cctgctttcacggag

SEQ ID NO: 1631557 - DNA, 15 bp, Homo sapiens
ctgctttcacggagc

SEQ ID NO: 1631558 - DNA, 15 bp, Homo sapiens
tgctttcacggagca

SEQ ID NO: 1631559 - DNA, 15 bp, Homo sapiens
gctttcacggagcat

SEQ ID NO: 1631560 - DNA, 15 bp, Homo sapiens
ctttcacggagcata

SEQ ID NO: 1631561 - DNA, 15 bp, Homo sapiens
tttcacggagcataa

SEQ ID NO: 1631562 - DNA, 15 bp, Homo sapiens
ttcacggagcataat

SEQ ID NO: 1631563 - DNA, 15 bp, Homo sapiens
tcacggagcataata

SEQ ID NO: 1631564 - DNA, 15 bp, Homo sapiens
cacggagcataataa

SEQ ID NO: 1631565 - DNA, 15 bp, Homo sapiens
acggagcataataaa

SEQ ID NO: 1631566 - DNA, 15 bp, Homo sapiens
cggagcataataaaa

SEQ ID NO: 1631567 - DNA, 15 bp, Homo sapiens
ggagcataataaaac

SEQ ID NO: 1631568 - DNA, 15 bp, Homo sapiens
gagcataataaaact

SEQ ID NO: 1631569 - DNA, 15 bp, Homo sapiens
agcataataaaactt

SEQ ID NO: 1631570 - DNA, 15 bp, Homo sapiens
gcataataaaacttc

SEQ ID NO: 1631571 - DNA, 15 bp, Homo sapiens
cataataaaacttcc

SEQ ID NO: 1631572 - DNA, 15 bp, Homo sapiens
ataataaaacttcct

SEQ ID NO: 1631573 - DNA, 15 bp, Homo sapiens
taataaaacttcctt

SEQ ID NO: 1631574 - DNA, 15 bp, Homo sapiens
aataaaacttcctta

SEQ ID NO: 1631575 - DNA, 15 bp, Homo sapiens
ataaaacttccttaa

SEQ ID NO: 1631576 - DNA, 15 bp, Homo sapiens
taaaacttccttaat

SEQ ID NO: 1631577 - DNA, 15 bp, Homo sapiens
aaaacttccttaatc

SEQ ID NO: 1631578 - DNA, 15 bp, Homo sapiens
aaacttccttaatca

SEQ ID NO: 1631579 - DNA, 15 bp, Homo sapiens
aacttccttaatcag

SEQ ID NO: 1631580 - DNA, 15 bp, Homo sapiens
acttccttaatcagc

SEQ ID NO: 1631581 - DNA, 15 bp, Homo sapiens
cttccttaatcagcc

SEQ ID NO: 1631582 - DNA, 15 bp, Homo sapiens
ttccttaatcagccc

SEQ ID NO: 1631583 - DNA, 15 bp, Homo sapiens
tccttaatcagccca

SEQ ID NO: 1631584 - DNA, 15 bp, Homo sapiens
ccttaatcagcccac

SEQ ID NO: 1631585 - DNA, 15 bp, Homo sapiens
cttaatcagcccaca

SEQ ID NO: 1631586 - DNA, 15 bp, Homo sapiens
ttaatcagcccacat

SEQ ID NO: 1631587 - DNA, 15 bp, Homo sapiens
taatcagcccacatg

SEQ ID NO: 1631588 - DNA, 15 bp, Homo sapiens
aatcagcccacatga

SEQ ID NO: 1631589 - DNA, 15 bp, Homo sapiens
atcagcccacatgaa

SEQ ID NO: 1631590 - DNA, 15 bp, Homo sapiens
tcagcccacatgaag

SEQ ID NO: 1631591 - DNA, 15 bp, Homo sapiens
cagcccacatgaagt

SEQ ID NO: 1631592 - DNA, 15 bp, Homo sapiens
agcccacatgaagta

SEQ ID NO: 1631593 - DNA, 15 bp, Homo sapiens
gcccacatgaagtat

SEQ ID NO: 1631594 - DNA, 15 bp, Homo sapiens
cccacatgaagtatg

SEQ ID NO: 1631595 - DNA, 15 bp, Homo sapiens
ccacatgaagtatgt

SEQ ID NO: 1631596 - DNA, 15 bp, Homo sapiens
cacatgaagtatgtg

SEQ ID NO: 1631597 - DNA, 15 bp, Homo sapiens
acatgaagtatgtga

SEQ ID NO: 1631598 - DNA, 15 bp, Homo sapiens
catgaagtatgtgat

SEQ ID NO: 1631599 - DNA, 15 bp, Homo sapiens
atgaagtatgtgatg

SEQ ID NO: 1631600 - DNA, 15 bp, Homo sapiens
tgaagtatgtgatgc

SEQ ID NO: 1631601 - DNA, 15 bp, Homo sapiens
gaagtatgtgatgct

SEQ ID NO: 1631602 - DNA, 15 bp, Homo sapiens
aagtatgtgatgctc

SEQ ID NO: 1631603 - DNA, 15 bp, Homo sapiens
agtatgtgatgctct

SEQ ID NO: 1631604 - DNA, 15 bp, Homo sapiens
gtatgtgatgctctg

SEQ ID NO: 1631605 - DNA, 15 bp, Homo sapiens
tatgtgatgctctga

SEQ ID NO: 1631606 - DNA, 15 bp, Homo sapiens
atgtgatgctctgat

SEQ ID NO: 1631607 - DNA, 15 bp, Homo sapiens
tgtgatgctctgatg

SEQ ID NO: 1631608 - DNA, 15 bp, Homo sapiens
gtgatgctctgatga

SEQ ID NO: 1631609 - DNA, 15 bp, Homo sapiens
tgatgctctgatgaa

SEQ ID NO: 1631610 - DNA, 15 bp, Homo sapiens
gatgctctgatgaac

SEQ ID NO: 1631611 - DNA, 15 bp, Homo sapiens
atgctctgatgaacc

SEQ ID NO: 1631612 - DNA, 15 bp, Homo sapiens
tgctctgatgaacct

SEQ ID NO: 1631613 - DNA, 15 bp, Homo sapiens
gctctgatgaacctg

SEQ ID NO: 1631614 - DNA, 15 bp, Homo sapiens
ctctgatgaacctgc

SEQ ID NO: 1631615 - DNA, 15 bp, Homo sapiens
tctgatgaacctgca

SEQ ID NO: 1631616 - DNA, 15 bp, Homo sapiens
ctgatgaacctgcat

SEQ ID NO: 1631617 - DNA, 15 bp, Homo sapiens
tgatgaacctgcatt

SEQ ID NO: 1631618 - DNA, 15 bp, Homo sapiens
gatgaacctgcattc

SEQ ID NO: 1631619 - DNA, 15 bp, Homo sapiens
atgaacctgcattcc

SEQ ID NO: 1631620 - DNA, 15 bp, Homo sapiens
tgaacctgcattcct

SEQ ID NO: 1631621 - DNA, 15 bp, Homo sapiens
gaacctgcattccta

SEQ ID NO: 1631622 - DNA, 15 bp, Homo sapiens
aacctgcattcctag

SEQ ID NO: 1631623 - DNA, 15 bp, Homo sapiens
acctgcattcctaga

SEQ ID NO: 1631624 - DNA, 15 bp, Homo sapiens
cctgcattcctagag

SEQ ID NO: 1631625 - DNA, 15 bp, Homo sapiens
ctgcattcctagaga

SEQ ID NO: 1631626 - DNA, 15 bp, Homo sapiens
tgcattcctagagag

SEQ ID NO: 1631627 - DNA, 15 bp, Homo sapiens
gcattcctagagagt

SEQ ID NO: 1631628 - DNA, 15 bp, Homo sapiens
cattcctagagagtt

SEQ ID NO: 1631629 - DNA, 15 bp, Homo sapiens
attcctagagagttc

SEQ ID NO: 1631630 - DNA, 15 bp, Homo sapiens
ttcctagagagttca

SEQ ID NO: 1631631 - DNA, 15 bp, Homo sapiens
tcctagagagttcac

SEQ ID NO: 1631632 - DNA, 15 bp, Homo sapiens
cctagagagttcact

SEQ ID NO: 1631633 - DNA, 15 bp, Homo sapiens
ctagagagttcactg

SEQ ID NO: 1631634 - DNA, 15 bp, Homo sapiens
tagagagttcactgc

SEQ ID NO: 1631635 - DNA, 15 bp, Homo sapiens
agagagttcactgct

SEQ ID NO: 1631636 - DNA, 15 bp, Homo sapiens
gagagttcactgctc

SEQ ID NO: 1631637 - DNA, 15 bp, Homo sapiens
agagttcactgctcc

SEQ ID NO: 1631638 - DNA, 15 bp, Homo sapiens
gagttcactgctccc

SEQ ID NO: 1631639 - DNA, 15 bp, Homo sapiens
agttcactgctcccc

SEQ ID NO: 1631640 - DNA, 15 bp, Homo sapiens
gttcactgctcccca

SEQ ID NO: 1631641 - DNA, 15 bp, Homo sapiens
ttcactgctccccag

SEQ ID NO: 1631642 - DNA, 15 bp, Homo sapiens
tcactgctccccaga

SEQ ID NO: 1631643 - DNA, 15 bp, Homo sapiens
cactgctccccagaa

SEQ ID NO: 1631644 - DNA, 15 bp, Homo sapiens
actgctccccagaaa

SEQ ID NO: 1631645 - DNA, 15 bp, Homo sapiens
ctgctccccagaaac

SEQ ID NO: 1631646 - DNA, 15 bp, Homo sapiens
tgctccccagaaaca

SEQ ID NO: 1631647 - DNA, 15 bp, Homo sapiens
gctccccagaaacaa

SEQ ID NO: 1631648 - DNA, 15 bp, Homo sapiens
ctccccagaaacaag

SEQ ID NO: 1631649 - DNA, 15 bp, Homo sapiens
tccccagaaacaaga

SEQ ID NO: 1631650 - DNA, 15 bp, Homo sapiens
ccccagaaacaagat

SEQ ID NO: 1631651 - DNA, 15 bp, Homo sapiens
cccagaaacaagatc

SEQ ID NO: 1631652 - DNA, 15 bp, Homo sapiens
ccagaaacaagatct

SEQ ID NO: 1631653 - DNA, 15 bp, Homo sapiens
cagaaacaagatctt

SEQ ID NO: 1631654 - DNA, 15 bp, Homo sapiens
agaaacaagatcttg

SEQ ID NO: 1631655 - DNA, 15 bp, Homo sapiens
gaaacaagatcttgc

SEQ ID NO: 1631656 - DNA, 15 bp, Homo sapiens
aaacaagatcttgcc

SEQ ID NO: 1631657 - DNA, 15 bp, Homo sapiens
aacaagatcttgcct

SEQ ID NO: 1631658 - DNA, 15 bp, Homo sapiens
acaagatcttgcctc

SEQ ID NO: 1631659 - DNA, 15 bp, Homo sapiens
caagatcttgcctca

SEQ ID NO: 1631660 - DNA, 15 bp, Homo sapiens
aagatcttgcctcaa

SEQ ID NO: 1631661 - DNA, 15 bp, Homo sapiens
agatcttgcctcaac

SEQ ID NO: 1631662 - DNA, 15 bp, Homo sapiens
gatcttgcctcaact

SEQ ID NO: 1631663 - DNA, 15 bp, Homo sapiens
atcttgcctcaactc

SEQ ID NO: 1631664 - DNA, 15 bp, Homo sapiens
tcttgcctcaactct

SEQ ID NO: 1631665 - DNA, 15 bp, Homo sapiens
cttgcctcaactctt

SEQ ID NO: 1631666 - DNA, 15 bp, Homo sapiens
ttgcctcaactctta

SEQ ID NO: 1631667 - DNA, 15 bp, Homo sapiens
tgcctcaactcttac

SEQ ID NO: 1631668 - DNA, 15 bp, Homo sapiens
gcctcaactcttaca

SEQ ID NO: 1631669 - DNA, 15 bp, Homo sapiens
cctcaactcttacag

SEQ ID NO: 1631670 - DNA, 15 bp, Homo sapiens
ctcaactcttacagt

SEQ ID NO: 1631671 - DNA, 15 bp, Homo sapiens
tcaactcttacagtg

SEQ ID NO: 1631672 - DNA, 15 bp, Homo sapiens
caactcttacagtga

SEQ ID NO: 1631673 - DNA, 15 bp, Homo sapiens
aactcttacagtgaa

SEQ ID NO: 1631674 - DNA, 15 bp, Homo sapiens
actcttacagtgaaa

SEQ ID NO: 1631675 - DNA, 15 bp, Homo sapiens
ctcttacagtgaaaa

SEQ ID NO: 1631676 - DNA, 15 bp, Homo sapiens
tcttacagtgaaaaa

SEQ ID NO: 1631677 - DNA, 15 bp, Homo sapiens
cttacagtgaaaaat

SEQ ID NO: 1631678 - DNA, 15 bp, Homo sapiens
ttacagtgaaaaatc

SEQ ID NO: 1631679 - DNA, 15 bp, Homo sapiens
tacagtgaaaaatct

SEQ ID NO: 1631680 - DNA, 15 bp, Homo sapiens
acagtgaaaaatctt

SEQ ID NO: 1631681 - DNA, 15 bp, Homo sapiens
cagtgaaaaatcttt

SEQ ID NO: 1631682 - DNA, 15 bp, Homo sapiens
agtgaaaaatcttta

SEQ ID NO: 1631683 - DNA, 15 bp, Homo sapiens
gtgaaaaatctttat

SEQ ID NO: 1631684 - DNA, 15 bp, Homo sapiens
tgaaaaatctttatc

SEQ ID NO: 1631685 - DNA, 15 bp, Homo sapiens
gaaaaatctttatca

SEQ ID NO: 1631686 - DNA, 15 bp, Homo sapiens
aaaaatctttatcaa

SEQ ID NO: 1631687 - DNA, 15 bp, Homo sapiens
aaaatctttatcaag

SEQ ID NO: 1631688 - DNA, 15 bp, Homo sapiens
aaatctttatcaagt

SEQ ID NO: 1631689 - DNA, 15 bp, Homo sapiens
aatctttatcaagtg

SEQ ID NO: 1631690 - DNA, 15 bp, Homo sapiens
atctttatcaagtgt

SEQ ID NO: 1631691 - DNA, 15 bp, Homo sapiens
tctttatcaagtgta

SEQ ID NO: 1631692 - DNA, 15 bp, Homo sapiens
ctttatcaagtgtaa

SEQ ID NO: 1631693 - DNA, 15 bp, Homo sapiens
tttatcaagtgtaat

SEQ ID NO: 1631694 - DNA, 15 bp, Homo sapiens
ttatcaagtgtaatc

SEQ ID NO: 1631695 - DNA, 15 bp, Homo sapiens
tatcaagtgtaatca

SEQ ID NO: 1631696 - DNA, 15 bp, Homo sapiens
atcaagtgtaatcat

SEQ ID NO: 1631697 - DNA, 15 bp, Homo sapiens
tcaagtgtaatcatt

SEQ ID NO: 1631698 - DNA, 15 bp, Homo sapiens
caagtgtaatcatta

SEQ ID NO: 1631699 - DNA, 15 bp, Homo sapiens
aagtgtaatcattaa

SEQ ID NO: 1631700 - DNA, 15 bp, Homo sapiens
agtgtaatcattaaa

SEQ ID NO: 1631701 - DNA, 15 bp, Homo sapiens
gtgtaatcattaaaa

SEQ ID NO: 1631702 - DNA, 15 bp, Homo sapiens
tgtaatcattaaaat

SEQ ID NO: 1631703 - DNA, 15 bp, Homo sapiens
gtaatcattaaaatc

SEQ ID NO: 1631704 - DNA, 15 bp, Homo sapiens
taatcattaaaatct

SEQ ID NO: 1631705 - DNA, 15 bp, Homo sapiens
aatcattaaaatcta

SEQ ID NO: 1631706 - DNA, 15 bp, Homo sapiens
atcattaaaatctac

SEQ ID NO: 1631707 - DNA, 15 bp, Homo sapiens
tcattaaaatctacc

SEQ ID NO: 1631708 - DNA, 15 bp, Homo sapiens
cattaaaatctacct

SEQ ID NO: 1631709 - DNA, 15 bp, Homo sapiens
attaaaatctacctc

SEQ ID NO: 1631710 - DNA, 15 bp, Homo sapiens
ttaaaatctacctcc

SEQ ID NO: 1631711 - DNA, 15 bp, Homo sapiens
taaaatctacctccc

SEQ ID NO: 1631712 - DNA, 15 bp, Homo sapiens
aaaatctacctccca

SEQ ID NO: 1631713 - DNA, 15 bp, Homo sapiens
aaatctacctcccaa

SEQ ID NO: 1631714 - DNA, 15 bp, Homo sapiens
aatctacctcccaaa

SEQ ID NO: 1631715 - DNA, 15 bp, Homo sapiens
atctacctcccaaag

SEQ ID NO: 1631716 - DNA, 15 bp, Homo sapiens
tctacctcccaaagt

SEQ ID NO: 1631717 - DNA, 15 bp, Homo sapiens
ctacctcccaaagta

SEQ ID NO: 1631718 - DNA, 15 bp, Homo sapiens
tacctcccaaagtat

SEQ ID NO: 1631719 - DNA, 15 bp, Homo sapiens
acctcccaaagtata

SEQ ID NO: 1631720 - DNA, 15 bp, Homo sapiens
cctcccaaagtataa

SEQ ID NO: 1631721 - DNA, 15 bp, Homo sapiens
ctcccaaagtataaa

SEQ ID NO: 1631722 - DNA, 15 bp, Homo sapiens
tcccaaagtataaac

SEQ ID NO: 1631723 - DNA, 15 bp, Homo sapiens
cccaaagtataaaca

SEQ ID NO: 1631724 - DNA, 15 bp, Homo sapiens
ccaaagtataaacac

SEQ ID NO: 1631725 - DNA, 15 bp, Homo sapiens
caaagtataaacact

SEQ ID NO: 1631726 - DNA, 15 bp, Homo sapiens
aaagtataaacactg

SEQ ID NO: 1631727 - DNA, 15 bp, Homo sapiens
aagtataaacactgc

SEQ ID NO: 1631728 - DNA, 15 bp, Homo sapiens
agtataaacactgca

SEQ ID NO: 1631729 - DNA, 15 bp, Homo sapiens
gtataaacactgcaa

SEQ ID NO: 1631730 - DNA, 15 bp, Homo sapiens
tataaacactgcaat

SEQ ID NO: 1631731 - DNA, 15 bp, Homo sapiens
ataaacactgcaatt

SEQ ID NO: 1631732 - DNA, 15 bp, Homo sapiens
taaacactgcaatta

SEQ ID NO: 1631733 - DNA, 15 bp, Homo sapiens
aaacactgcaattaa

SEQ ID NO: 1631734 - DNA, 15 bp, Homo sapiens
aacactgcaattaag

SEQ ID NO: 1631735 - DNA, 15 bp, Homo sapiens
acactgcaattaagc

SEQ ID NO: 1631736 - DNA, 15 bp, Homo sapiens
cactgcaattaagct

SEQ ID NO: 1631737 - DNA, 15 bp, Homo sapiens
actgcaattaagctt

SEQ ID NO: 1631738 - DNA, 15 bp, Homo sapiens
ctgcaattaagcttt

SEQ ID NO: 1631739 - DNA, 15 bp, Homo sapiens
tgcaattaagcttta

SEQ ID NO: 1631740 - DNA, 15 bp, Homo sapiens
gcaattaagctttac

SEQ ID NO: 1631741 - DNA, 15 bp, Homo sapiens
caattaagctttaca

SEQ ID NO: 1631742 - DNA, 15 bp, Homo sapiens
aattaagctttacaa

SEQ ID NO: 1631743 - DNA, 15 bp, Homo sapiens
attaagctttacaaa

SEQ ID NO: 1631744 - DNA, 15 bp, Homo sapiens
ttaagctttacaaat

SEQ ID NO: 1631745 - DNA, 15 bp, Homo sapiens
taagctttacaaatg

SEQ ID NO: 1631746 - DNA, 15 bp, Homo sapiens
aagctttacaaatgg

SEQ ID NO: 1631747 - DNA, 15 bp, Homo sapiens
agctttacaaatgga

SEQ ID NO: 1631748 - DNA, 15 bp, Homo sapiens
gctttacaaatggaa

SEQ ID NO: 1631749 - DNA, 15 bp, Homo sapiens
ctttacaaatggaat

SEQ ID NO: 1631750 - DNA, 15 bp, Homo sapiens
tttacaaatggaata

SEQ ID NO: 1631751 - DNA, 15 bp, Homo sapiens
ttacaaatggaatat

SEQ ID NO: 1631752 - DNA, 15 bp, Homo sapiens
tacaaatggaatatc

SEQ ID NO: 1631753 - DNA, 15 bp, Homo sapiens
acaaatggaatatct

SEQ ID NO: 1631754 - DNA, 15 bp, Homo sapiens
caaatggaatatctg

SEQ ID NO: 1631755 - DNA, 15 bp, Homo sapiens
aaatggaatatctgg

SEQ ID NO: 1631756 - DNA, 15 bp, Homo sapiens
aatggaatatctgga

SEQ ID NO: 1631757 - DNA, 15 bp, Homo sapiens
atggaatatctggaa

SEQ ID NO: 1631758 - DNA, 15 bp, Homo sapiens
tggaatatctggaaa

SEQ ID NO: 1631759 - DNA, 15 bp, Homo sapiens
ggaatatctggaaag

SEQ ID NO: 1631760 - DNA, 15 bp, Homo sapiens
gaatatctggaaagg

SEQ ID NO: 1631761 - DNA, 15 bp, Homo sapiens
aatatctggaaaggt

SEQ ID NO: 1631762 - DNA, 15 bp, Homo sapiens
atatctggaaaggtg

SEQ ID NO: 1631763 - DNA, 15 bp, Homo sapiens
tatctggaaaggtga

SEQ ID NO: 1631764 - DNA, 15 bp, Homo sapiens
atctggaaaggtgaa

SEQ ID NO: 1631765 - DNA, 15 bp, Homo sapiens
tctggaaaggtgaat

SEQ ID NO: 1631766 - DNA, 15 bp, Homo sapiens
ctggaaaggtgaata

SEQ ID NO: 1631767 - DNA, 15 bp, Homo sapiens
tggaaaggtgaatag

SEQ ID NO: 1631768 - DNA, 15 bp, Homo sapiens
ggaaaggtgaataga

SEQ ID NO: 1631769 - DNA, 15 bp, Homo sapiens
gaaaggtgaatagat

SEQ ID NO: 1631770 - DNA, 15 bp, Homo sapiens
aaaggtgaatagatg

SEQ ID NO: 1631771 - DNA, 15 bp, Homo sapiens
aaggtgaatagatga

SEQ ID NO: 1631772 - DNA, 15 bp, Homo sapiens
aggtgaatagatgat

SEQ ID NO: 1631773 - DNA, 15 bp, Homo sapiens
ggtgaatagatgatc

SEQ ID NO: 1631774 - DNA, 15 bp, Homo sapiens
gtgaatagatgatca

SEQ ID NO: 1631775 - DNA, 15 bp, Homo sapiens
tgaatagatgatcaa

SEQ ID NO: 1631776 - DNA, 15 bp, Homo sapiens
gaatagatgatcaat

SEQ ID NO: 1631777 - DNA, 15 bp, Homo sapiens
aatagatgatcaata

SEQ ID NO: 1631778 - DNA, 15 bp, Homo sapiens
atagatgatcaatag

SEQ ID NO: 1631779 - DNA, 15 bp, Homo sapiens
tagatgatcaatagg

SEQ ID NO: 1631780 - DNA, 15 bp, Homo sapiens
agatgatcaataggt

SEQ ID NO: 1631781 - DNA, 15 bp, Homo sapiens
gatgatcaataggta

SEQ ID NO: 1631782 - DNA, 15 bp, Homo sapiens
atgatcaataggtac

SEQ ID NO: 1631783 - DNA, 15 bp, Homo sapiens
tgatcaataggtacc

SEQ ID NO: 1631784 - DNA, 15 bp, Homo sapiens
gatcaataggtacct

SEQ ID NO: 1631785 - DNA, 15 bp, Homo sapiens
atcaataggtacctc

SEQ ID NO: 1631786 - DNA, 15 bp, Homo sapiens
tcaataggtacctca

SEQ ID NO: 1631787 - DNA, 15 bp, Homo sapiens
caataggtacctcag

SEQ ID NO: 1631788 - DNA, 15 bp, Homo sapiens
aataggtacctcagt

SEQ ID NO: 1631789 - DNA, 15 bp, Homo sapiens
ataggtacctcagtt

SEQ ID NO: 1631790 - DNA, 15 bp, Homo sapiens
taggtacctcagttc

SEQ ID NO: 1631791 - DNA, 15 bp, Homo sapiens
aggtacctcagttct

SEQ ID NO: 1631792 - DNA, 15 bp, Homo sapiens
ggtacctcagttctt

SEQ ID NO: 1631793 - DNA, 15 bp, Homo sapiens
gtacctcagttctta

SEQ ID NO: 1631794 - DNA, 15 bp, Homo sapiens
tacctcagttcttac

SEQ ID NO: 1631795 - DNA, 15 bp, Homo sapiens
acctcagttcttacc

SEQ ID NO: 1631796 - DNA, 15 bp, Homo sapiens
cctcagttcttaccc

SEQ ID NO: 1631797 - DNA, 15 bp, Homo sapiens
ctcagttcttaccca

SEQ ID NO: 1631798 - DNA, 15 bp, Homo sapiens
tcagttcttacccag

SEQ ID NO: 1631799 - DNA, 15 bp, Homo sapiens
cagttcttacccagg

SEQ ID NO: 1631800 - DNA, 15 bp, Homo sapiens
agttcttacccaggc

SEQ ID NO: 1631801 - DNA, 15 bp, Homo sapiens
gttcttacccaggcc

SEQ ID NO: 1631802 - DNA, 15 bp, Homo sapiens
ttcttacccaggcct

SEQ ID NO: 1631803 - DNA, 15 bp, Homo sapiens
tcttacccaggcctg

SEQ ID NO: 1631804 - DNA, 15 bp, Homo sapiens
cttacccaggcctgc

SEQ ID NO: 1631805 - DNA, 15 bp, Homo sapiens
ttacccaggcctgcc

SEQ ID NO: 1631806 - DNA, 15 bp, Homo sapiens
tacccaggcctgcct

SEQ ID NO: 1631807 - DNA, 15 bp, Homo sapiens
acccaggcctgcctc

SEQ ID NO: 1631808 - DNA, 15 bp, Homo sapiens
cccaggcctgcctct

SEQ ID NO: 1631809 - DNA, 15 bp, Homo sapiens
ccaggcctgcctctt

SEQ ID NO: 1631810 - DNA, 15 bp, Homo sapiens
caggcctgcctcttg

SEQ ID NO: 1631811 - DNA, 15 bp, Homo sapiens
aggcctgcctcttgt

SEQ ID NO: 1631812 - DNA, 15 bp, Homo sapiens
ggcctgcctcttgtg

SEQ ID NO: 1631813 - DNA, 15 bp, Homo sapiens
gcctgcctcttgtgg

SEQ ID NO: 1631814 - DNA, 15 bp, Homo sapiens
cctgcctcttgtggg

SEQ ID NO: 1631815 - DNA, 15 bp, Homo sapiens
ctgcctcttgtgggc

SEQ ID NO: 1631816 - DNA, 15 bp, Homo sapiens
tgcctcttgtgggcc

SEQ ID NO: 1631817 - DNA, 15 bp, Homo sapiens
gcctcttgtgggcct

SEQ ID NO: 1631818 - DNA, 15 bp, Homo sapiens
cctcttgtgggccta

SEQ ID NO: 1631819 - DNA, 15 bp, Homo sapiens
ctcttgtgggcctag

SEQ ID NO: 1631820 - DNA, 15 bp, Homo sapiens
tcttgtgggcctagg

SEQ ID NO: 1631821 - DNA, 15 bp, Homo sapiens
cttgtgggcctaggc

SEQ ID NO: 1631822 - DNA, 15 bp, Homo sapiens
ttgtgggcctaggct

SEQ ID NO: 1631823 - DNA, 15 bp, Homo sapiens
tgtgggcctaggctc

SEQ ID NO: 1631824 - DNA, 15 bp, Homo sapiens
gtgggcctaggctct

SEQ ID NO: 1631825 - DNA, 15 bp, Homo sapiens
tgggcctaggctctg

SEQ ID NO: 1631826 - DNA, 15 bp, Homo sapiens
gggcctaggctctga

SEQ ID NO: 1631827 - DNA, 15 bp, Homo sapiens
ggcctaggctctgat

SEQ ID NO: 1631828 - DNA, 15 bp, Homo sapiens
gcctaggctctgatg

SEQ ID NO: 1631829 - DNA, 15 bp, Homo sapiens
cctaggctctgatgt

SEQ ID NO: 1631830 - DNA, 15 bp, Homo sapiens
ctaggctctgatgta

SEQ ID NO: 1631831 - DNA, 15 bp, Homo sapiens
taggctctgatgtaa

SEQ ID NO: 1631832 - DNA, 15 bp, Homo sapiens
aggctctgatgtaac

SEQ ID NO: 1631833 - DNA, 15 bp, Homo sapiens
ggctctgatgtaacc

SEQ ID NO: 1631834 - DNA, 15 bp, Homo sapiens
gctctgatgtaaccc

SEQ ID NO: 1631835 - DNA, 15 bp, Homo sapiens
ctctgatgtaaccca

SEQ ID NO: 1631836 - DNA, 15 bp, Homo sapiens
tctgatgtaacccac

SEQ ID NO: 1631837 - DNA, 15 bp, Homo sapiens
ctgatgtaacccacg

SEQ ID NO: 1631838 - DNA, 15 bp, Homo sapiens
tgatgtaacccacgt

SEQ ID NO: 1631839 - DNA, 15 bp, Homo sapiens
gatgtaacccacgtc

SEQ ID NO: 1631840 - DNA, 15 bp, Homo sapiens
atgtaacccacgtct

SEQ ID NO: 1631841 - DNA, 15 bp, Homo sapiens
tgtaacccacgtctg

SEQ ID NO: 1631842 - DNA, 15 bp, Homo sapiens
gtaacccacgtctgc

SEQ ID NO: 1631843 - DNA, 15 bp, Homo sapiens
taacccacgtctgct

SEQ ID NO: 1631844 - DNA, 15 bp, Homo sapiens
aacccacgtctgcta

SEQ ID NO: 1631845 - DNA, 15 bp, Homo sapiens
acccacgtctgctat

SEQ ID NO: 1631846 - DNA, 15 bp, Homo sapiens
cccacgtctgctatt

SEQ ID NO: 1631847 - DNA, 15 bp, Homo sapiens
ccacgtctgctatta

SEQ ID NO: 1631848 - DNA, 15 bp, Homo sapiens
cacgtctgctattac

SEQ ID NO: 1631849 - DNA, 15 bp, Homo sapiens
acgtctgctattaca

SEQ ID NO: 1631850 - DNA, 15 bp, Homo sapiens
cgtctgctattacat

SEQ ID NO: 1631851 - DNA, 15 bp, Homo sapiens
gtctgctattacata

SEQ ID NO: 1631852 - DNA, 15 bp, Homo sapiens
tctgctattacatat

SEQ ID NO: 1631853 - DNA, 15 bp, Homo sapiens
ctgctattacatatt

SEQ ID NO: 1631854 - DNA, 15 bp, Homo sapiens
tgctattacatattt

SEQ ID NO: 1631855 - DNA, 15 bp, Homo sapiens
gctattacatattta

SEQ ID NO: 1631856 - DNA, 15 bp, Homo sapiens
ctattacatatttac

SEQ ID NO: 1631857 - DNA, 15 bp, Homo sapiens
tattacatatttacc

SEQ ID NO: 1631858 - DNA, 15 bp, Homo sapiens
attacatatttacct

SEQ ID NO: 1631859 - DNA, 15 bp, Homo sapiens
ttacatatttacctt

SEQ ID NO: 1631860 - DNA, 15 bp, Homo sapiens
tacatatttaccttg

SEQ ID NO: 1631861 - DNA, 15 bp, Homo sapiens
acatatttaccttga

SEQ ID NO: 1631862 - DNA, 15 bp, Homo sapiens
catatttaccttgag

SEQ ID NO: 1631863 - DNA, 15 bp, Homo sapiens
atatttaccttgagg

SEQ ID NO: 1631864 - DNA, 15 bp, Homo sapiens
tatttaccttgaggc

SEQ ID NO: 1631865 - DNA, 15 bp, Homo sapiens
atttaccttgaggca

SEQ ID NO: 1631866 - DNA, 15 bp, Homo sapiens
tttaccttgaggcac

SEQ ID NO: 1631867 - DNA, 15 bp, Homo sapiens
ttaccttgaggcact

SEQ ID NO: 1631868 - DNA, 15 bp, Homo sapiens
taccttgaggcactg

SEQ ID NO: 1631869 - DNA, 15 bp, Homo sapiens
accttgaggcactgt

SEQ ID NO: 1631870 - DNA, 15 bp, Homo sapiens
ccttgaggcactgtg

SEQ ID NO: 1631871 - DNA, 15 bp, Homo sapiens
cttgaggcactgtgc

SEQ ID NO: 1631872 - DNA, 15 bp, Homo sapiens
ttgaggcactgtgcc

SEQ ID NO: 1631873 - DNA, 15 bp, Homo sapiens
tgaggcactgtgcca

SEQ ID NO: 1631874 - DNA, 15 bp, Homo sapiens
gaggcactgtgccat

SEQ ID NO: 1631875 - DNA, 15 bp, Homo sapiens
aggcactgtgccatt

SEQ ID NO: 1631876 - DNA, 15 bp, Homo sapiens
ggcactgtgccattc

SEQ ID NO: 1631877 - DNA, 15 bp, Homo sapiens
gcactgtgccattcc

SEQ ID NO: 1631878 - DNA, 15 bp, Homo sapiens
cactgtgccattccc

SEQ ID NO: 1631879 - DNA, 15 bp, Homo sapiens
actgtgccattccca

SEQ ID NO: 1631880 - DNA, 15 bp, Homo sapiens
ctgtgccattcccag

SEQ ID NO: 1631881 - DNA, 15 bp, Homo sapiens
tgtgccattcccaga

SEQ ID NO: 1631882 - DNA, 15 bp, Homo sapiens
gtgccattcccagag

SEQ ID NO: 1631883 - DNA, 15 bp, Homo sapiens
tgccattcccagagt

SEQ ID NO: 1631884 - DNA, 15 bp, Homo sapiens
gccattcccagagtt

SEQ ID NO: 1631885 - DNA, 15 bp, Homo sapiens
ccattcccagagtta

SEQ ID NO: 1631886 - DNA, 15 bp, Homo sapiens
cattcccagagttaa

SEQ ID NO: 1631887 - DNA, 15 bp, Homo sapiens
attcccagagttaat

SEQ ID NO: 1631888 - DNA, 15 bp, Homo sapiens
ttcccagagttaatc

SEQ ID NO: 1631889 - DNA, 15 bp, Homo sapiens
tcccagagttaatca

SEQ ID NO: 1631890 - DNA, 15 bp, Homo sapiens
cccagagttaatcac

SEQ ID NO: 1631891 - DNA, 15 bp, Homo sapiens
ccagagttaatcaca

SEQ ID NO: 1631892 - DNA, 15 bp, Homo sapiens
cagagttaatcacag

SEQ ID NO: 1631893 - DNA, 15 bp, Homo sapiens
agagttaatcacaga

SEQ ID NO: 1631894 - DNA, 15 bp, Homo sapiens
gagttaatcacagac

SEQ ID NO: 1631895 - DNA, 15 bp, Homo sapiens
agttaatcacagact

SEQ ID NO: 1631896 - DNA, 15 bp, Homo sapiens
gttaatcacagactt

SEQ ID NO: 1631897 - DNA, 15 bp, Homo sapiens
ttaatcacagactta

SEQ ID NO: 1631898 - DNA, 15 bp, Homo sapiens
taatcacagacttag

SEQ ID NO: 1631899 - DNA, 15 bp, Homo sapiens
aatcacagacttagt

SEQ ID NO: 1631900 - DNA, 15 bp, Homo sapiens
atcacagacttagtt

SEQ ID NO: 1631901 - DNA, 15 bp, Homo sapiens
tcacagacttagtta

SEQ ID NO: 1631902 - DNA, 15 bp, Homo sapiens
cacagacttagttac

SEQ ID NO: 1631903 - DNA, 15 bp, Homo sapiens
acagacttagttaca

SEQ ID NO: 1631904 - DNA, 15 bp, Homo sapiens
cagacttagttacac

SEQ ID NO: 1631905 - DNA, 15 bp, Homo sapiens
agacttagttacaca

SEQ ID NO: 1631906 - DNA, 15 bp, Homo sapiens
gacttagttacacac

SEQ ID NO: 1631907 - DNA, 15 bp, Homo sapiens
acttagttacacaca

SEQ ID NO: 1631908 - DNA, 15 bp, Homo sapiens
cttagttacacacaa

SEQ ID NO: 1631909 - DNA, 15 bp, Homo sapiens
ttagttacacacaaa

SEQ ID NO: 1631910 - DNA, 15 bp, Homo sapiens
tagttacacacaaat

SEQ ID NO: 1631911 - DNA, 15 bp, Homo sapiens
agttacacacaaatc

SEQ ID NO: 1631912 - DNA, 15 bp, Homo sapiens
gttacacacaaatct

SEQ ID NO: 1631913 - DNA, 15 bp, Homo sapiens
ttacacacaaatctt

SEQ ID NO: 1631914 - DNA, 15 bp, Homo sapiens
tacacacaaatcttt

SEQ ID NO: 1631915 - DNA, 15 bp, Homo sapiens
acacacaaatctttg

SEQ ID NO: 1631916 - DNA, 15 bp, Homo sapiens
cacacaaatctttgt

SEQ ID NO: 1631917 - DNA, 15 bp, Homo sapiens
acacaaatctttgtg

SEQ ID NO: 1631918 - DNA, 15 bp, Homo sapiens
cacaaatctttgtgt

SEQ ID NO: 1631919 - DNA, 15 bp, Homo sapiens
acaaatctttgtgta

SEQ ID NO: 1631920 - DNA, 15 bp, Homo sapiens
caaatctttgtgtac

SEQ ID NO: 1631921 - DNA, 15 bp, Homo sapiens
aaatctttgtgtaca

SEQ ID NO: 1631922 - DNA, 15 bp, Homo sapiens
aatctttgtgtacaa

SEQ ID NO: 1631923 - DNA, 15 bp, Homo sapiens
atctttgtgtacaag

SEQ ID NO: 1631924 - DNA, 15 bp, Homo sapiens
tctttgtgtacaagg

SEQ ID NO: 1631925 - DNA, 15 bp, Homo sapiens
ctttgtgtacaaggg

SEQ ID NO: 1631926 - DNA, 15 bp, Homo sapiens
tttgtgtacaaggga

SEQ ID NO: 1631927 - DNA, 15 bp, Homo sapiens
ttgtgtacaagggaa

SEQ ID NO: 1631928 - DNA, 15 bp, Homo sapiens
tgtgtacaagggaac

SEQ ID NO: 1631929 - DNA, 15 bp, Homo sapiens
gtgtacaagggaaca

SEQ ID NO: 1631930 - DNA, 15 bp, Homo sapiens
tgtacaagggaacat

SEQ ID NO: 1631931 - DNA, 15 bp, Homo sapiens
gtacaagggaacatg

SEQ ID NO: 1631932 - DNA, 15 bp, Homo sapiens
tacaagggaacatga

SEQ ID NO: 1631933 - DNA, 15 bp, Homo sapiens
acaagggaacatgag

SEQ ID NO: 1631934 - DNA, 15 bp, Homo sapiens
caagggaacatgagg

SEQ ID NO: 1631935 - DNA, 15 bp, Homo sapiens
aagggaacatgagga

SEQ ID NO: 1631936 - DNA, 15 bp, Homo sapiens
agggaacatgaggaa

SEQ ID NO: 1631937 - DNA, 15 bp, Homo sapiens
gggaacatgaggaaa

SEQ ID NO: 1631938 - DNA, 15 bp, Homo sapiens
ggaacatgaggaaat

SEQ ID NO: 1631939 - DNA, 15 bp, Homo sapiens
gaacatgaggaaatt

SEQ ID NO: 1631940 - DNA, 15 bp, Homo sapiens
aacatgaggaaatta

SEQ ID NO: 1631941 - DNA, 15 bp, Homo sapiens
acatgaggaaattaa

SEQ ID NO: 1631942 - DNA, 15 bp, Homo sapiens
catgaggaaattaag

SEQ ID NO: 1631943 - DNA, 15 bp, Homo sapiens
atgaggaaattaaga

SEQ ID NO: 1631944 - DNA, 15 bp, Homo sapiens
tgaggaaattaagac

SEQ ID NO: 1631945 - DNA, 15 bp, Homo sapiens
gaggaaattaagact

SEQ ID NO: 1631946 - DNA, 15 bp, Homo sapiens
aggaaattaagactg

SEQ ID NO: 1631947 - DNA, 15 bp, Homo sapiens
ggaaattaagactgt

SEQ ID NO: 1631948 - DNA, 15 bp, Homo sapiens
gaaattaagactgtt

SEQ ID NO: 1631949 - DNA, 15 bp, Homo sapiens
aaattaagactgttt

SEQ ID NO: 1631950 - DNA, 15 bp, Homo sapiens
aattaagactgtttt

SEQ ID NO: 1631951 - DNA, 15 bp, Homo sapiens
attaagactgttttc

SEQ ID NO: 1631952 - DNA, 15 bp, Homo sapiens
ttaagactgttttca

SEQ ID NO: 1631953 - DNA, 15 bp, Homo sapiens
taagactgttttcaa

SEQ ID NO: 1631954 - DNA, 15 bp, Homo sapiens
aagactgttttcaag

SEQ ID NO: 1631955 - DNA, 15 bp, Homo sapiens
agactgttttcaagt

SEQ ID NO: 1631956 - DNA, 15 bp, Homo sapiens
gactgttttcaagtc

SEQ ID NO: 1631957 - DNA, 15 bp, Homo sapiens
actgttttcaagtca

SEQ ID NO: 1631958 - DNA, 15 bp, Homo sapiens
ctgttttcaagtcat

SEQ ID NO: 1631959 - DNA, 15 bp, Homo sapiens
tgttttcaagtcatc

SEQ ID NO: 1631960 - DNA, 15 bp, Homo sapiens
gttttcaagtcatcc

SEQ ID NO: 1631961 - DNA, 15 bp, Homo sapiens
ttttcaagtcatcca

SEQ ID NO: 1631962 - DNA, 15 bp, Homo sapiens
tttcaagtcatccaa

SEQ ID NO: 1631963 - DNA, 15 bp, Homo sapiens
ttcaagtcatccaac

SEQ ID NO: 1631964 - DNA, 15 bp, Homo sapiens
tcaagtcatccaact

SEQ ID NO: 1631965 - DNA, 15 bp, Homo sapiens
caagtcatccaactg

SEQ ID NO: 1631966 - DNA, 15 bp, Homo sapiens
aagtcatccaactgt

SEQ ID NO: 1631967 - DNA, 15 bp, Homo sapiens
agtcatccaactgtg

SEQ ID NO: 1631968 - DNA, 15 bp, Homo sapiens
gtcatccaactgtgt

SEQ ID NO: 1631969 - DNA, 15 bp, Homo sapiens
tcatccaactgtgtg

SEQ ID NO: 1631970 - DNA, 15 bp, Homo sapiens
catccaactgtgtga

SEQ ID NO: 1631971 - DNA, 15 bp, Homo sapiens
atccaactgtgtgaa

SEQ ID NO: 1631972 - DNA, 15 bp, Homo sapiens
tccaactgtgtgaag

SEQ ID NO: 1631973 - DNA, 15 bp, Homo sapiens
ccaactgtgtgaagg

SEQ ID NO: 1631974 - DNA, 15 bp, Homo sapiens
caactgtgtgaagga

SEQ ID NO: 1631975 - DNA, 15 bp, Homo sapiens
aactgtgtgaaggag

SEQ ID NO: 1631976 - DNA, 15 bp, Homo sapiens
actgtgtgaaggagg

SEQ ID NO: 1631977 - DNA, 15 bp, Homo sapiens
ctgtgtgaaggaggc

SEQ ID NO: 1631978 - DNA, 15 bp, Homo sapiens
tgtgtgaaggaggct

SEQ ID NO: 1631979 - DNA, 15 bp, Homo sapiens
gtgtgaaggaggcta

SEQ ID NO: 1631980 - DNA, 15 bp, Homo sapiens
tgtgaaggaggctac

SEQ ID NO: 1631981 - DNA, 15 bp, Homo sapiens
gtgaaggaggctact

SEQ ID NO: 1631982 - DNA, 15 bp, Homo sapiens
tgaaggaggctactg

SEQ ID NO: 1631983 - DNA, 15 bp, Homo sapiens
gaaggaggctactga

SEQ ID NO: 1631984 - DNA, 15 bp, Homo sapiens
aaggaggctactgac

SEQ ID NO: 1631985 - DNA, 15 bp, Homo sapiens
aggaggctactgacg

SEQ ID NO: 1631986 - DNA, 15 bp, Homo sapiens
ggaggctactgacgg

SEQ ID NO: 1631987 - DNA, 15 bp, Homo sapiens
gaggctactgacggg

SEQ ID NO: 1631988 - DNA, 15 bp, Homo sapiens
aggctactgacgggg

SEQ ID NO: 1631989 - DNA, 15 bp, Homo sapiens
ggctactgacgggga

SEQ ID NO: 1631990 - DNA, 15 bp, Homo sapiens
gctactgacggggag

SEQ ID NO: 1631991 - DNA, 15 bp, Homo sapiens
ctactgacggggagt

SEQ ID NO: 1631992 - DNA, 15 bp, Homo sapiens
tactgacggggagtg

SEQ ID NO: 1631993 - DNA, 15 bp, Homo sapiens
actgacggggagtgg

SEQ ID NO: 1631994 - DNA, 15 bp, Homo sapiens
ctgacggggagtggg

SEQ ID NO: 1631995 - DNA, 15 bp, Homo sapiens
tgacggggagtggga

SEQ ID NO: 1631996 - DNA, 15 bp, Homo sapiens
gacggggagtgggag

SEQ ID NO: 1631997 - DNA, 15 bp, Homo sapiens
acggggagtgggagg

SEQ ID NO: 1631998 - DNA, 15 bp, Homo sapiens
cggggagtgggaggt

SEQ ID NO: 1631999 - DNA, 15 bp, Homo sapiens
ggggagtgggaggta

SEQ ID NO: 1632000 - DNA, 15 bp, Homo sapiens
gggagtgggaggtaa

SEQ ID NO: 1632001 - DNA, 15 bp, Homo sapiens
ggagtgggaggtaaa

SEQ ID NO: 1632002 - DNA, 15 bp, Homo sapiens
gagtgggaggtaaaa

SEQ ID NO: 1632003 - DNA, 15 bp, Homo sapiens
agtgggaggtaaaag

SEQ ID NO: 1632004 - DNA, 15 bp, Homo sapiens
gtgggaggtaaaagg

SEQ ID NO: 1632005 - DNA, 15 bp, Homo sapiens
tgggaggtaaaaggg

SEQ ID NO: 1632006 - DNA, 15 bp, Homo sapiens
gggaggtaaaagggt

SEQ ID NO: 1632007 - DNA, 15 bp, Homo sapiens
ggaggtaaaagggtt

SEQ ID NO: 1632008 - DNA, 15 bp, Homo sapiens
gaggtaaaagggttc

SEQ ID NO: 1632009 - DNA, 15 bp, Homo sapiens
aggtaaaagggttcc

SEQ ID NO: 1632010 - DNA, 15 bp, Homo sapiens
ggtaaaagggttcca

SEQ ID NO: 1632011 - DNA, 15 bp, Homo sapiens
gtaaaagggttccac

SEQ ID NO: 1632012 - DNA, 15 bp, Homo sapiens
taaaagggttccaca

SEQ ID NO: 1632013 - DNA, 15 bp, Homo sapiens
aaaagggttccacag

SEQ ID NO: 1632014 - DNA, 15 bp, Homo sapiens
aaagggttccacagg

SEQ ID NO: 1632015 - DNA, 15 bp, Homo sapiens
aagggttccacaggt

SEQ ID NO: 1632016 - DNA, 15 bp, Homo sapiens
agggttccacaggta

SEQ ID NO: 1632017 - DNA, 15 bp, Homo sapiens
gggttccacaggtag

SEQ ID NO: 1632018 - DNA, 15 bp, Homo sapiens
ggttccacaggtagg

SEQ ID NO: 1632019 - DNA, 15 bp, Homo sapiens
gttccacaggtagga

SEQ ID NO: 1632020 - DNA, 15 bp, Homo sapiens
ttccacaggtaggac

SEQ ID NO: 1632021 - DNA, 15 bp, Homo sapiens
tccacaggtaggact

SEQ ID NO: 1632022 - DNA, 15 bp, Homo sapiens
ccacaggtaggactc

SEQ ID NO: 1632023 - DNA, 15 bp, Homo sapiens
cacaggtaggactct

SEQ ID NO: 1632024 - DNA, 15 bp, Homo sapiens
acaggtaggactctg

SEQ ID NO: 1632025 - DNA, 15 bp, Homo sapiens
caggtaggactctga

SEQ ID NO: 1632026 - DNA, 15 bp, Homo sapiens
aggtaggactctgag

SEQ ID NO: 1632027 - DNA, 15 bp, Homo sapiens
ggtaggactctgagc

SEQ ID NO: 1632028 - DNA, 15 bp, Homo sapiens
gtaggactctgagct

SEQ ID NO: 1632029 - DNA, 15 bp, Homo sapiens
taggactctgagctc

SEQ ID NO: 1632030 - DNA, 15 bp, Homo sapiens
aggactctgagctca

SEQ ID NO: 1632031 - DNA, 15 bp, Homo sapiens
ggactctgagctcac

SEQ ID NO: 1632032 - DNA, 15 bp, Homo sapiens
gactctgagctcaca

SEQ ID NO: 1632033 - DNA, 15 bp, Homo sapiens
actctgagctcacag

SEQ ID NO: 1632034 - DNA, 15 bp, Homo sapiens
ctctgagctcacagc

SEQ ID NO: 1632035 - DNA, 15 bp, Homo sapiens
tctgagctcacagcc

SEQ ID NO: 1632036 - DNA, 15 bp, Homo sapiens
ctgagctcacagcca

SEQ ID NO: 1632037 - DNA, 15 bp, Homo sapiens
tgagctcacagccac

SEQ ID NO: 1632038 - DNA, 15 bp, Homo sapiens
gagctcacagccaca

SEQ ID NO: 1632039 - DNA, 15 bp, Homo sapiens
agctcacagccacag

SEQ ID NO: 1632040 - DNA, 15 bp, Homo sapiens
gctcacagccacagc

SEQ ID NO: 1632041 - DNA, 15 bp, Homo sapiens
ctcacagccacagcc

SEQ ID NO: 1632042 - DNA, 15 bp, Homo sapiens
tcacagccacagcct

SEQ ID NO: 1632043 - DNA, 15 bp, Homo sapiens
cacagccacagcctc

SEQ ID NO: 1632044 - DNA, 15 bp, Homo sapiens
acagccacagcctca

SEQ ID NO: 1632045 - DNA, 15 bp, Homo sapiens
cagccacagcctcat

SEQ ID NO: 1632046 - DNA, 15 bp, Homo sapiens
agccacagcctcatc

SEQ ID NO: 1632047 - DNA, 15 bp, Homo sapiens
gccacagcctcatct

SEQ ID NO: 1632048 - DNA, 15 bp, Homo sapiens
ccacagcctcatctc

SEQ ID NO: 1632049 - DNA, 15 bp, Homo sapiens
cacagcctcatctcc

SEQ ID NO: 1632050 - DNA, 15 bp, Homo sapiens
acagcctcatctccc

SEQ ID NO: 1632051 - DNA, 15 bp, Homo sapiens
cagcctcatctccca

SEQ ID NO: 1632052 - DNA, 15 bp, Homo sapiens
agcctcatctcccac

SEQ ID NO: 1632053 - DNA, 15 bp, Homo sapiens
gcctcatctcccaca

SEQ ID NO: 1632054 - DNA, 15 bp, Homo sapiens
cctcatctcccacat

SEQ ID NO: 1632055 - DNA, 15 bp, Homo sapiens
ctcatctcccacatc

SEQ ID NO: 1632056 - DNA, 15 bp, Homo sapiens
tcatctcccacatcc

SEQ ID NO: 1632057 - DNA, 15 bp, Homo sapiens
catctcccacatccc

SEQ ID NO: 1632058 - DNA, 15 bp, Homo sapiens
atctcccacatcccc

SEQ ID NO: 1632059 - DNA, 15 bp, Homo sapiens
tctcccacatccccc

SEQ ID NO: 1632060 - DNA, 15 bp, Homo sapiens
ctcccacatcccccc

SEQ ID NO: 1632061 - DNA, 15 bp, Homo sapiens
tcccacatcccccca

SEQ ID NO: 1632062 - DNA, 15 bp, Homo sapiens
cccacatccccccat

SEQ ID NO: 1632063 - DNA, 15 bp, Homo sapiens
ccacatccccccatc

SEQ ID NO: 1632064 - DNA, 15 bp, Homo sapiens
cacatccccccatca

SEQ ID NO: 1632065 - DNA, 15 bp, Homo sapiens
acatccccccatcac

SEQ ID NO: 1632066 - DNA, 15 bp, Homo sapiens
catccccccatcact

SEQ ID NO: 1632067 - DNA, 15 bp, Homo sapiens
atccccccatcactg

SEQ ID NO: 1632068 - DNA, 15 bp, Homo sapiens
tccccccatcactgt

SEQ ID NO: 1632069 - DNA, 15 bp, Homo sapiens
ccccccatcactgtg

SEQ ID NO: 1632070 - DNA, 15 bp, Homo sapiens
cccccatcactgtga

SEQ ID NO: 1632071 - DNA, 15 bp, Homo sapiens
ccccatcactgtgaa

SEQ ID NO: 1632072 - DNA, 15 bp, Homo sapiens
cccatcactgtgaac

SEQ ID NO: 1632073 - DNA, 15 bp, Homo sapiens
ccatcactgtgaact

SEQ ID NO: 1632074 - DNA, 15 bp, Homo sapiens
catcactgtgaactt

SEQ ID NO: 1632075 - DNA, 15 bp, Homo sapiens
atcactgtgaacttt

SEQ ID NO: 1632076 - DNA, 15 bp, Homo sapiens
tcactgtgaactttc

SEQ ID NO: 1632077 - DNA, 15 bp, Homo sapiens
cactgtgaactttct

SEQ ID NO: 1632078 - DNA, 15 bp, Homo sapiens
actgtgaactttctc

SEQ ID NO: 1632079 - DNA, 15 bp, Homo sapiens
ctgtgaactttctca

SEQ ID NO: 1632080 - DNA, 15 bp, Homo sapiens
tgtgaactttctcat

SEQ ID NO: 1632081 - DNA, 15 bp, Homo sapiens
gtgaactttctcatg

SEQ ID NO: 1632082 - DNA, 15 bp, Homo sapiens
tgaactttctcatgc

SEQ ID NO: 1632083 - DNA, 15 bp, Homo sapiens
gaactttctcatgcc

SEQ ID NO: 1632084 - DNA, 15 bp, Homo sapiens
aactttctcatgcct

SEQ ID NO: 1632085 - DNA, 15 bp, Homo sapiens
actttctcatgccta

SEQ ID NO: 1632086 - DNA, 15 bp, Homo sapiens
ctttctcatgcctac

SEQ ID NO: 1632087 - DNA, 15 bp, Homo sapiens
tttctcatgcctacg

SEQ ID NO: 1632088 - DNA, 15 bp, Homo sapiens
ttctcatgcctacgt

SEQ ID NO: 1632089 - DNA, 15 bp, Homo sapiens
tctcatgcctacgta

SEQ ID NO: 1632090 - DNA, 15 bp, Homo sapiens
ctcatgcctacgtaa

SEQ ID NO: 1632091 - DNA, 15 bp, Homo sapiens
tcatgcctacgtaag

SEQ ID NO: 1632092 - DNA, 15 bp, Homo sapiens
catgcctacgtaagt

SEQ ID NO: 1632093 - DNA, 15 bp, Homo sapiens
atgcctacgtaagtt

SEQ ID NO: 1632094 - DNA, 15 bp, Homo sapiens
tgcctacgtaagttt

SEQ ID NO: 1632095 - DNA, 15 bp, Homo sapiens
gcctacgtaagtttg

SEQ ID NO: 1632096 - DNA, 15 bp, Homo sapiens
cctacgtaagtttgc

SEQ ID NO: 1632097 - DNA, 15 bp, Homo sapiens
ctacgtaagtttgct

SEQ ID NO: 1632098 - DNA, 15 bp, Homo sapiens
tacgtaagtttgctc

SEQ ID NO: 1632099 - DNA, 15 bp, Homo sapiens
acgtaagtttgctca

SEQ ID NO: 1632100 - DNA, 15 bp, Homo sapiens
cgtaagtttgctcat

SEQ ID NO: 1632101 - DNA, 15 bp, Homo sapiens
gtaagtttgctcatg

SEQ ID NO: 1632102 - DNA, 15 bp, Homo sapiens
taagtttgctcatgc

SEQ ID NO: 1632103 - DNA, 15 bp, Homo sapiens
aagtttgctcatgct

SEQ ID NO: 1632104 - DNA, 15 bp, Homo sapiens
agtttgctcatgctg

SEQ ID NO: 1632105 - DNA, 15 bp, Homo sapiens
gtttgctcatgctgt

SEQ ID NO: 1632106 - DNA, 15 bp, Homo sapiens
tttgctcatgctgtt

SEQ ID NO: 1632107 - DNA, 15 bp, Homo sapiens
ttgctcatgctgttc

SEQ ID NO: 1632108 - DNA, 15 bp, Homo sapiens
tgctcatgctgttcc

SEQ ID NO: 1632109 - DNA, 15 bp, Homo sapiens
gctcatgctgttccc

SEQ ID NO: 1632110 - DNA, 15 bp, Homo sapiens
ctcatgctgttccct

SEQ ID NO: 1632111 - DNA, 15 bp, Homo sapiens
tcatgctgttccctc

SEQ ID NO: 1632112 - DNA, 15 bp, Homo sapiens
catgctgttccctct

SEQ ID NO: 1632113 - DNA, 15 bp, Homo sapiens
atgctgttccctctg

SEQ ID NO: 1632114 - DNA, 15 bp, Homo sapiens
tgctgttccctctgc

SEQ ID NO: 1632115 - DNA, 15 bp, Homo sapiens
gctgttccctctgcc

SEQ ID NO: 1632116 - DNA, 15 bp, Homo sapiens
ctgttccctctgcct

SEQ ID NO: 1632117 - DNA, 15 bp, Homo sapiens
tgttccctctgcctg

SEQ ID NO: 1632118 - DNA, 15 bp, Homo sapiens
gttccctctgcctgg

SEQ ID NO: 1632119 - DNA, 15 bp, Homo sapiens
ttccctctgcctgga

SEQ ID NO: 1632120 - DNA, 15 bp, Homo sapiens
tccctctgcctggaa

SEQ ID NO: 1632121 - DNA, 15 bp, Homo sapiens
ccctctgcctggaat

SEQ ID NO: 1632122 - DNA, 15 bp, Homo sapiens
cctctgcctggaata

SEQ ID NO: 1632123 - DNA, 15 bp, Homo sapiens
ctctgcctggaatag

SEQ ID NO: 1632124 - DNA, 15 bp, Homo sapiens
tctgcctggaatagc

SEQ ID NO: 1632125 - DNA, 15 bp, Homo sapiens
ctgcctggaatagcc

SEQ ID NO: 1632126 - DNA, 15 bp, Homo sapiens
tgcctggaatagcct

SEQ ID NO: 1632127 - DNA, 15 bp, Homo sapiens
gcctggaatagcctt

SEQ ID NO: 1632128 - DNA, 15 bp, Homo sapiens
cctggaatagccttt

SEQ ID NO: 1632129 - DNA, 15 bp, Homo sapiens
ctggaatagccttta

SEQ ID NO: 1632130 - DNA, 15 bp, Homo sapiens
tggaatagcctttat

SEQ ID NO: 1632131 - DNA, 15 bp, Homo sapiens
ggaatagcctttatc

SEQ ID NO: 1632132 - DNA, 15 bp, Homo sapiens
gaatagcctttatca

SEQ ID NO: 1632133 - DNA, 15 bp, Homo sapiens
aatagcctttatcat

SEQ ID NO: 1632134 - DNA, 15 bp, Homo sapiens
atagcctttatcatt

SEQ ID NO: 1632135 - DNA, 15 bp, Homo sapiens
tagcctttatcattg

SEQ ID NO: 1632136 - DNA, 15 bp, Homo sapiens
agcctttatcattgt

SEQ ID NO: 1632137 - DNA, 15 bp, Homo sapiens
gcctttatcattgtt

SEQ ID NO: 1632138 - DNA, 15 bp, Homo sapiens
cctttatcattgttt

SEQ ID NO: 1632139 - DNA, 15 bp, Homo sapiens
ctttatcattgtttt

SEQ ID NO: 1632140 - DNA, 15 bp, Homo sapiens
tttatcattgttttt

SEQ ID NO: 1632141 - DNA, 15 bp, Homo sapiens
ttatcattgtttttc

SEQ ID NO: 1632142 - DNA, 15 bp, Homo sapiens
tatcattgtttttcc

SEQ ID NO: 1632143 - DNA, 15 bp, Homo sapiens
atcattgtttttcca

SEQ ID NO: 1632144 - DNA, 15 bp, Homo sapiens
tcattgtttttccat

SEQ ID NO: 1632145 - DNA, 15 bp, Homo sapiens
cattgtttttccatc

SEQ ID NO: 1632146 - DNA, 15 bp, Homo sapiens
attgtttttccatct

SEQ ID NO: 1632147 - DNA, 15 bp, Homo sapiens
ttgtttttccatctt

SEQ ID NO: 1632148 - DNA, 15 bp, Homo sapiens
tgtttttccatcttg

SEQ ID NO: 1632149 - DNA, 15 bp, Homo sapiens
gtttttccatcttgg

SEQ ID NO: 1632150 - DNA, 15 bp, Homo sapiens
tttttccatcttggt

SEQ ID NO: 1632151 - DNA, 15 bp, Homo sapiens
ttttccatcttggtg

SEQ ID NO: 1632152 - DNA, 15 bp, Homo sapiens
tttccatcttggtgg

SEQ ID NO: 1632153 - DNA, 15 bp, Homo sapiens
ttccatcttggtggt

SEQ ID NO: 1632154 - DNA, 15 bp, Homo sapiens
tccatcttggtggtg

SEQ ID NO: 1632155 - DNA, 15 bp, Homo sapiens
ccatcttggtggtga

SEQ ID NO: 1632156 - DNA, 15 bp, Homo sapiens
catcttggtggtgaa

SEQ ID NO: 1632157 - DNA, 15 bp, Homo sapiens
atcttggtggtgaat

SEQ ID NO: 1632158 - DNA, 15 bp, Homo sapiens
tcttggtggtgaatt

SEQ ID NO: 1632159 - DNA, 15 bp, Homo sapiens
cttggtggtgaattc

SEQ ID NO: 1632160 - DNA, 15 bp, Homo sapiens
ttggtggtgaattca

SEQ ID NO: 1632161 - DNA, 15 bp, Homo sapiens
tggtggtgaattcat

SEQ ID NO: 1632162 - DNA, 15 bp, Homo sapiens
ggtggtgaattcatg

SEQ ID NO: 1632163 - DNA, 15 bp, Homo sapiens
gtggtgaattcatgc

SEQ ID NO: 1632164 - DNA, 15 bp, Homo sapiens
tggtgaattcatgct

SEQ ID NO: 1632165 - DNA, 15 bp, Homo sapiens
ggtgaattcatgctt

SEQ ID NO: 1632166 - DNA, 15 bp, Homo sapiens
gtgaattcatgcttc

SEQ ID NO: 1632167 - DNA, 15 bp, Homo sapiens
tgaattcatgcttca

SEQ ID NO: 1632168 - DNA, 15 bp, Homo sapiens
gaattcatgcttcaa

SEQ ID NO: 1632169 - DNA, 15 bp, Homo sapiens
aattcatgcttcaag

SEQ ID NO: 1632170 - DNA, 15 bp, Homo sapiens
attcatgcttcaagg

SEQ ID NO: 1632171 - DNA, 15 bp, Homo sapiens
ttcatgcttcaaggc

SEQ ID NO: 1632172 - DNA, 15 bp, Homo sapiens
tcatgcttcaaggcc

SEQ ID NO: 1632173 - DNA, 15 bp, Homo sapiens
catgcttcaaggcct

SEQ ID NO: 1632174 - DNA, 15 bp, Homo sapiens
atgcttcaaggccta

SEQ ID NO: 1632175 - DNA, 15 bp, Homo sapiens
tgcttcaaggcctaa

SEQ ID NO: 1632176 - DNA, 15 bp, Homo sapiens
gcttcaaggcctaac

SEQ ID NO: 1632177 - DNA, 15 bp, Homo sapiens
cttcaaggcctaact

SEQ ID NO: 1632178 - DNA, 15 bp, Homo sapiens
ttcaaggcctaactc

SEQ ID NO: 1632179 - DNA, 15 bp, Homo sapiens
tcaaggcctaactca

SEQ ID NO: 1632180 - DNA, 15 bp, Homo sapiens
caaggcctaactcag

SEQ ID NO: 1632181 - DNA, 15 bp, Homo sapiens
aaggcctaactcaga

SEQ ID NO: 1632182 - DNA, 15 bp, Homo sapiens
aggcctaactcagat

SEQ ID NO: 1632183 - DNA, 15 bp, Homo sapiens
ggcctaactcagatg

SEQ ID NO: 1632184 - DNA, 15 bp, Homo sapiens
gcctaactcagatgc

SEQ ID NO: 1632185 - DNA, 15 bp, Homo sapiens
cctaactcagatgct

SEQ ID NO: 1632186 - DNA, 15 bp, Homo sapiens
ctaactcagatgctt

SEQ ID NO: 1632187 - DNA, 15 bp, Homo sapiens
taactcagatgcttt

SEQ ID NO: 1632188 - DNA, 15 bp, Homo sapiens
aactcagatgctttt

SEQ ID NO: 1632189 - DNA, 15 bp, Homo sapiens
actcagatgcttttc

SEQ ID NO: 1632190 - DNA, 15 bp, Homo sapiens
ctcagatgcttttct

SEQ ID NO: 1632191 - DNA, 15 bp, Homo sapiens
tcagatgcttttctg

SEQ ID NO: 1632192 - DNA, 15 bp, Homo sapiens
cagatgcttttctgt

SEQ ID NO: 1632193 - DNA, 15 bp, Homo sapiens
agatgcttttctgtc

SEQ ID NO: 1632194 - DNA, 15 bp, Homo sapiens
gatgcttttctgtct

SEQ ID NO: 1632195 - DNA, 15 bp, Homo sapiens
atgcttttctgtctg

SEQ ID NO: 1632196 - DNA, 15 bp, Homo sapiens
tgcttttctgtctgc

SEQ ID NO: 1632197 - DNA, 15 bp, Homo sapiens
gcttttctgtctgcc

SEQ ID NO: 1632198 - DNA, 15 bp, Homo sapiens
cttttctgtctgcca

SEQ ID NO: 1632199 - DNA, 15 bp, Homo sapiens
ttttctgtctgccaa

SEQ ID NO: 1632200 - DNA, 15 bp, Homo sapiens
tttctgtctgccaac

SEQ ID NO: 1632201 - DNA, 15 bp, Homo sapiens
ttctgtctgccaacc

SEQ ID NO: 1632202 - DNA, 15 bp, Homo sapiens
tctgtctgccaaccc

SEQ ID NO: 1632203 - DNA, 15 bp, Homo sapiens
ctgtctgccaacccc

SEQ ID NO: 1632204 - DNA, 15 bp, Homo sapiens
tgtctgccaacccct

SEQ ID NO: 1632205 - DNA, 15 bp, Homo sapiens
gtctgccaacccctc

SEQ ID NO: 1632206 - DNA, 15 bp, Homo sapiens
tctgccaacccctct

SEQ ID NO: 1632207 - DNA, 15 bp, Homo sapiens
ctgccaacccctctt

SEQ ID NO: 1632208 - DNA, 15 bp, Homo sapiens
tgccaacccctcttc

SEQ ID NO: 1632209 - DNA, 15 bp, Homo sapiens
gccaacccctcttca

SEQ ID NO: 1632210 - DNA, 15 bp, Homo sapiens
ccaacccctcttcaa

SEQ ID NO: 1632211 - DNA, 15 bp, Homo sapiens
caacccctcttcaac

SEQ ID NO: 1632212 - DNA, 15 bp, Homo sapiens
aacccctcttcaaca

SEQ ID NO: 1632213 - DNA, 15 bp, Homo sapiens
acccctcttcaacat

SEQ ID NO: 1632214 - DNA, 15 bp, Homo sapiens
cccctcttcaacatt

SEQ ID NO: 1632215 - DNA, 15 bp, Homo sapiens
ccctcttcaacattt

SEQ ID NO: 1632216 - DNA, 15 bp, Homo sapiens
cctcttcaacatttc

SEQ ID NO: 1632217 - DNA, 15 bp, Homo sapiens
ctcttcaacatttcc

SEQ ID NO: 1632218 - DNA, 15 bp, Homo sapiens
tcttcaacatttcca

SEQ ID NO: 1632219 - DNA, 15 bp, Homo sapiens
cttcaacatttccag

SEQ ID NO: 1632220 - DNA, 15 bp, Homo sapiens
ttcaacatttccagt

SEQ ID NO: 1632221 - DNA, 15 bp, Homo sapiens
tcaacatttccagtc

SEQ ID NO: 1632222 - DNA, 15 bp, Homo sapiens
caacatttccagtct

SEQ ID NO: 1632223 - DNA, 15 bp, Homo sapiens
aacatttccagtctc

SEQ ID NO: 1632224 - DNA, 15 bp, Homo sapiens
acatttccagtctct

SEQ ID NO: 1632225 - DNA, 15 bp, Homo sapiens
catttccagtctcta

SEQ ID NO: 1632226 - DNA, 15 bp, Homo sapiens
atttccagtctctat

SEQ ID NO: 1632227 - DNA, 15 bp, Homo sapiens
tttccagtctctatg

SEQ ID NO: 1632228 - DNA, 15 bp, Homo sapiens
ttccagtctctatga

SEQ ID NO: 1632229 - DNA, 15 bp, Homo sapiens
tccagtctctatgaa

SEQ ID NO: 1632230 - DNA, 15 bp, Homo sapiens
ccagtctctatgaaa

SEQ ID NO: 1632231 - DNA, 15 bp, Homo sapiens
cagtctctatgaaag

SEQ ID NO: 1632232 - DNA, 15 bp, Homo sapiens
agtctctatgaaaga

SEQ ID NO: 1632233 - DNA, 15 bp, Homo sapiens
gtctctatgaaagac

SEQ ID NO: 1632234 - DNA, 15 bp, Homo sapiens
tctctatgaaagact

SEQ ID NO: 1632235 - DNA, 15 bp, Homo sapiens
ctctatgaaagactg

SEQ ID NO: 1632236 - DNA, 15 bp, Homo sapiens
tctatgaaagactga

SEQ ID NO: 1632237 - DNA, 15 bp, Homo sapiens
ctatgaaagactgaa

SEQ ID NO: 1632238 - DNA, 15 bp, Homo sapiens
tatgaaagactgaag

SEQ ID NO: 1632239 - DNA, 15 bp, Homo sapiens
atgaaagactgaagt

SEQ ID NO: 1632240 - DNA, 15 bp, Homo sapiens
tgaaagactgaagtg

SEQ ID NO: 1632241 - DNA, 15 bp, Homo sapiens
gaaagactgaagtga

SEQ ID NO: 1632242 - DNA, 15 bp, Homo sapiens
aaagactgaagtgaa

SEQ ID NO: 1632243 - DNA, 15 bp, Homo sapiens
aagactgaagtgaaa

SEQ ID NO: 1632244 - DNA, 15 bp, Homo sapiens
agactgaagtgaaaa

SEQ ID NO: 1632245 - DNA, 15 bp, Homo sapiens
gactgaagtgaaaaa

SEQ ID NO: 1632246 - DNA, 15 bp, Homo sapiens
actgaagtgaaaaat

SEQ ID NO: 1632247 - DNA, 15 bp, Homo sapiens
ctgaagtgaaaaatg

SEQ ID NO: 1632248 - DNA, 15 bp, Homo sapiens
tgaagtgaaaaatga

SEQ ID NO: 1632249 - DNA, 15 bp, Homo sapiens
gaagtgaaaaatgag

SEQ ID NO: 1632250 - DNA, 15 bp, Homo sapiens
aagtgaaaaatgagt

SEQ ID NO: 1632251 - DNA, 15 bp, Homo sapiens
agtgaaaaatgagtg

SEQ ID NO: 1632252 - DNA, 15 bp, Homo sapiens
gtgaaaaatgagtga

SEQ ID NO: 1632253 - DNA, 15 bp, Homo sapiens
gaaaaatgagtgagc

SEQ ID NO: 1632254 - DNA, 15 bp, Homo sapiens
aaaaatgagtgagct

SEQ ID NO: 1632255 - DNA, 15 bp, Homo sapiens
aaaatgagtgagctt

SEQ ID NO: 1632256 - DNA, 15 bp, Homo sapiens
aaatgagtgagctta

SEQ ID NO: 1632257 - DNA, 15 bp, Homo sapiens
aatgagtgagcttaa

SEQ ID NO: 1632258 - DNA, 15 bp, Homo sapiens
atgagtgagcttaat

SEQ ID NO: 1632259 - DNA, 15 bp, Homo sapiens
tgagtgagcttaatg

SEQ ID NO: 1632260 - DNA, 15 bp, Homo sapiens
gagtgagcttaatgg

SEQ ID NO: 1632261 - DNA, 15 bp, Homo sapiens
agtgagcttaatgga

SEQ ID NO: 1632262 - DNA, 15 bp, Homo sapiens
gtgagcttaatggag

SEQ ID NO: 1632263 - DNA, 15 bp, Homo sapiens
tgagcttaatggaga

SEQ ID NO: 1632264 - DNA, 15 bp, Homo sapiens
gagcttaatggagat

SEQ ID NO: 1632265 - DNA, 15 bp, Homo sapiens
agcttaatggagatc

SEQ ID NO: 1632266 - DNA, 15 bp, Homo sapiens
gcttaatggagatca

SEQ ID NO: 1632267 - DNA, 15 bp, Homo sapiens
cttaatggagatcaa

SEQ ID NO: 1632268 - DNA, 15 bp, Homo sapiens
ttaatggagatcaaa

SEQ ID NO: 1632269 - DNA, 15 bp, Homo sapiens
atggagatcaaaatt

SEQ ID NO: 1632270 - DNA, 15 bp, Homo sapiens
tggagatcaaaatta

SEQ ID NO: 1632271 - DNA, 15 bp, Homo sapiens
ggagatcaaaattat

SEQ ID NO: 1632272 - DNA, 15 bp, Homo sapiens
gagatcaaaattatc

SEQ ID NO: 1632273 - DNA, 15 bp, Homo sapiens
agatcaaaattatct

SEQ ID NO: 1632274 - DNA, 15 bp, Homo sapiens
gatcaaaattatcta

SEQ ID NO: 1632275 - DNA, 15 bp, Homo sapiens
atcaaaattatctag

SEQ ID NO: 1632276 - DNA, 15 bp, Homo sapiens
tcaaaattatctaga

SEQ ID NO: 1632277 - DNA, 15 bp, Homo sapiens
caaaattatctagaa

SEQ ID NO: 1632278 - DNA, 15 bp, Homo sapiens
aaaattatctagaaa

SEQ ID NO: 1632279 - DNA, 15 bp, Homo sapiens
aaattatctagaaat

SEQ ID NO: 1632280 - DNA, 15 bp, Homo sapiens
aattatctagaaatg

SEQ ID NO: 1632281 - DNA, 15 bp, Homo sapiens
attatctagaaatgt

SEQ ID NO: 1632282 - DNA, 15 bp, Homo sapiens
ttatctagaaatgta

SEQ ID NO: 1632283 - DNA, 15 bp, Homo sapiens
tatctagaaatgtaa

SEQ ID NO: 1632284 - DNA, 15 bp, Homo sapiens
atctagaaatgtaat

SEQ ID NO: 1632285 - DNA, 15 bp, Homo sapiens
tctagaaatgtaatt

SEQ ID NO: 1632286 - DNA, 15 bp, Homo sapiens
ctagaaatgtaatta

SEQ ID NO: 1632287 - DNA, 15 bp, Homo sapiens
tagaaatgtaattaa

SEQ ID NO: 1632288 - DNA, 15 bp, Homo sapiens
agaaatgtaattaat

SEQ ID NO: 1632289 - DNA, 15 bp, Homo sapiens
gaaatgtaattaatg

SEQ ID NO: 1632290 - DNA, 15 bp, Homo sapiens
aaatgtaattaatgc

SEQ ID NO: 1632291 - DNA, 15 bp, Homo sapiens
aatgtaattaatgca

SEQ ID NO: 1632292 - DNA, 15 bp, Homo sapiens
atgtaattaatgcat

SEQ ID NO: 1632293 - DNA, 15 bp, Homo sapiens
tgtaattaatgcatt

SEQ ID NO: 1632294 - DNA, 15 bp, Homo sapiens
gtaattaatgcattt

SEQ ID NO: 1632295 - DNA, 15 bp, Homo sapiens
taattaatgcattta

SEQ ID NO: 1632296 - DNA, 15 bp, Homo sapiens
aattaatgcatttat

SEQ ID NO: 1632297 - DNA, 15 bp, Homo sapiens
attaatgcatttata

SEQ ID NO: 1632298 - DNA, 15 bp, Homo sapiens
ttaatgcatttatat

SEQ ID NO: 1632299 - DNA, 15 bp, Homo sapiens
taatgcatttatatg

SEQ ID NO: 1632300 - DNA, 15 bp, Homo sapiens
aatgcatttatatgg

SEQ ID NO: 1632301 - DNA, 15 bp, Homo sapiens
atgcatttatatggt

SEQ ID NO: 1632302 - DNA, 15 bp, Homo sapiens
tgcatttatatggtg

SEQ ID NO: 1632303 - DNA, 15 bp, Homo sapiens
gcatttatatggtgg

SEQ ID NO: 1632304 - DNA, 15 bp, Homo sapiens
catttatatggtggc

SEQ ID NO: 1632305 - DNA, 15 bp, Homo sapiens
atttatatggtggca

SEQ ID NO: 1632306 - DNA, 15 bp, Homo sapiens
tttatatggtggcat

SEQ ID NO: 1632307 - DNA, 15 bp, Homo sapiens
ttatatggtggcatc

SEQ ID NO: 1632308 - DNA, 15 bp, Homo sapiens
tatatggtggcatct

SEQ ID NO: 1632309 - DNA, 15 bp, Homo sapiens
atatggtggcatctt

SEQ ID NO: 1632310 - DNA, 15 bp, Homo sapiens
tatggtggcatcttt

SEQ ID NO: 1632311 - DNA, 15 bp, Homo sapiens
atggtggcatctttt

SEQ ID NO: 1632312 - DNA, 15 bp, Homo sapiens
tggtggcatcttttt

SEQ ID NO: 1632313 - DNA, 15 bp, Homo sapiens
ggtggcatcttttta

SEQ ID NO: 1632314 - DNA, 15 bp, Homo sapiens
gtggcatctttttat

SEQ ID NO: 1632315 - DNA, 15 bp, Homo sapiens
tggcatctttttatg

SEQ ID NO: 1632316 - DNA, 15 bp, Homo sapiens
ggcatctttttatgt

SEQ ID NO: 1632317 - DNA, 15 bp, Homo sapiens
gcatctttttatgta

SEQ ID NO: 1632318 - DNA, 15 bp, Homo sapiens
catctttttatgtag

SEQ ID NO: 1632319 - DNA, 15 bp, Homo sapiens
atctttttatgtaga

SEQ ID NO: 1632320 - DNA, 15 bp, Homo sapiens
tctttttatgtagag

SEQ ID NO: 1632321 - DNA, 15 bp, Homo sapiens
ctttttatgtagagg

SEQ ID NO: 1632322 - DNA, 15 bp, Homo sapiens
tttttatgtagaggg

SEQ ID NO: 1632323 - DNA, 15 bp, Homo sapiens
ttttatgtagagggt

SEQ ID NO: 1632324 - DNA, 15 bp, Homo sapiens
tttatgtagagggtc

SEQ ID NO: 1632325 - DNA, 15 bp, Homo sapiens
ttatgtagagggtct

SEQ ID NO: 1632326 - DNA, 15 bp, Homo sapiens
tatgtagagggtctt

SEQ ID NO: 1632327 - DNA, 15 bp, Homo sapiens
atgtagagggtcttt

SEQ ID NO: 1632328 - DNA, 15 bp, Homo sapiens
tgtagagggtctttg

SEQ ID NO: 1632329 - DNA, 15 bp, Homo sapiens
gtagagggtctttgt

SEQ ID NO: 1632330 - DNA, 15 bp, Homo sapiens
tagagggtctttgtt

SEQ ID NO: 1632331 - DNA, 15 bp, Homo sapiens
agagggtctttgttc

SEQ ID NO: 1632332 - DNA, 15 bp, Homo sapiens
gagggtctttgttcc

SEQ ID NO: 1632333 - DNA, 15 bp, Homo sapiens
agggtctttgttccc

SEQ ID NO: 1632334 - DNA, 15 bp, Homo sapiens
gggtctttgttccct

SEQ ID NO: 1632335 - DNA, 15 bp, Homo sapiens
ggtctttgttccctg

SEQ ID NO: 1632336 - DNA, 15 bp, Homo sapiens
gtctttgttccctgt

SEQ ID NO: 1632337 - DNA, 15 bp, Homo sapiens
tctttgttccctgtc

SEQ ID NO: 1632338 - DNA, 15 bp, Homo sapiens
ctttgttccctgtct

SEQ ID NO: 1632339 - DNA, 15 bp, Homo sapiens
tttgttccctgtctt

SEQ ID NO: 1632340 - DNA, 15 bp, Homo sapiens
ttgttccctgtcttt

SEQ ID NO: 1632341 - DNA, 15 bp, Homo sapiens
tgttccctgtcttta

SEQ ID NO: 1632342 - DNA, 15 bp, Homo sapiens
gttccctgtctttat

SEQ ID NO: 1632343 - DNA, 15 bp, Homo sapiens
ttccctgtctttatg

SEQ ID NO: 1632344 - DNA, 15 bp, Homo sapiens
tccctgtctttatgt

SEQ ID NO: 1632345 - DNA, 15 bp, Homo sapiens
ccctgtctttatgtt

SEQ ID NO: 1632346 - DNA, 15 bp, Homo sapiens
cctgtctttatgttg

SEQ ID NO: 1632347 - DNA, 15 bp, Homo sapiens
ctgtctttatgttgt

SEQ ID NO: 1632348 - DNA, 15 bp, Homo sapiens
tgtctttatgttgtg

SEQ ID NO: 1632349 - DNA, 15 bp, Homo sapiens
gtctttatgttgtgg

SEQ ID NO: 1632350 - DNA, 15 bp, Homo sapiens
tctttatgttgtggc

SEQ ID NO: 1632351 - DNA, 15 bp, Homo sapiens
ctttatgttgtggct

SEQ ID NO: 1632352 - DNA, 15 bp, Homo sapiens
tttatgttgtggcta

SEQ ID NO: 1632353 - DNA, 15 bp, Homo sapiens
ttatgttgtggctat

SEQ ID NO: 1632354 - DNA, 15 bp, Homo sapiens
tatgttgtggctatg

SEQ ID NO: 1632355 - DNA, 15 bp, Homo sapiens
atgttgtggctatgt

SEQ ID NO: 1632356 - DNA, 15 bp, Homo sapiens
tgttgtggctatgta

SEQ ID NO: 1632357 - DNA, 15 bp, Homo sapiens
gttgtggctatgtat

SEQ ID NO: 1632358 - DNA, 15 bp, Homo sapiens
ttgtggctatgtatt

SEQ ID NO: 1632359 - DNA, 15 bp, Homo sapiens
tgtggctatgtattt

SEQ ID NO: 1632360 - DNA, 15 bp, Homo sapiens
gtggctatgtatttg

SEQ ID NO: 1632361 - DNA, 15 bp, Homo sapiens
tggctatgtatttgt

SEQ ID NO: 1632362 - DNA, 15 bp, Homo sapiens
ggctatgtatttgtt

SEQ ID NO: 1632363 - DNA, 15 bp, Homo sapiens
gctatgtatttgttt

SEQ ID NO: 1632364 - DNA, 15 bp, Homo sapiens
ctatgtatttgtttt

SEQ ID NO: 1632365 - DNA, 15 bp, Homo sapiens
tatgtatttgttttt

SEQ ID NO: 1632366 - DNA, 15 bp, Homo sapiens
atgtatttgtttttc

SEQ ID NO: 1632367 - DNA, 15 bp, Homo sapiens
tgtatttgtttttct

SEQ ID NO: 1632368 - DNA, 15 bp, Homo sapiens
gtatttgtttttcta

SEQ ID NO: 1632369 - DNA, 15 bp, Homo sapiens
tatttgtttttctaa

SEQ ID NO: 1632370 - DNA, 15 bp, Homo sapiens
atttgtttttctaac

SEQ ID NO: 1632371 - DNA, 15 bp, Homo sapiens
tttgtttttctaaca

SEQ ID NO: 1632372 - DNA, 15 bp, Homo sapiens
ttgtttttctaacac

SEQ ID NO: 1632373 - DNA, 15 bp, Homo sapiens
tgtttttctaacaca

SEQ ID NO: 1632374 - DNA, 15 bp, Homo sapiens
gtttttctaacacaa

SEQ ID NO: 1632375 - DNA, 15 bp, Homo sapiens
tttttctaacacaat

SEQ ID NO: 1632376 - DNA, 15 bp, Homo sapiens
ttttctaacacaatg

SEQ ID NO: 1632377 - DNA, 15 bp, Homo sapiens
tttctaacacaatga

SEQ ID NO: 1632378 - DNA, 15 bp, Homo sapiens
ttctaacacaatgac

SEQ ID NO: 1632379 - DNA, 15 bp, Homo sapiens
tctaacacaatgaca

SEQ ID NO: 1632380 - DNA, 15 bp, Homo sapiens
ctaacacaatgacat

SEQ ID NO: 1632381 - DNA, 15 bp, Homo sapiens
taacacaatgacatg

SEQ ID NO: 1632382 - DNA, 15 bp, Homo sapiens
aacacaatgacatgt

SEQ ID NO: 1632383 - DNA, 15 bp, Homo sapiens
acacaatgacatgtt

SEQ ID NO: 1632384 - DNA, 15 bp, Homo sapiens
cacaatgacatgtta

SEQ ID NO: 1632385 - DNA, 15 bp, Homo sapiens
acaatgacatgttat

SEQ ID NO: 1632386 - DNA, 15 bp, Homo sapiens
caatgacatgttatt

SEQ ID NO: 1632387 - DNA, 15 bp, Homo sapiens
aatgacatgttattg

SEQ ID NO: 1632388 - DNA, 15 bp, Homo sapiens
atgacatgttattgt

SEQ ID NO: 1632389 - DNA, 15 bp, Homo sapiens
tgacatgttattgta

SEQ ID NO: 1632390 - DNA, 15 bp, Homo sapiens
gacatgttattgtag

SEQ ID NO: 1632391 - DNA, 15 bp, Homo sapiens
acatgttattgtagt

SEQ ID NO: 1632392 - DNA, 15 bp, Homo sapiens
catgttattgtagtg

SEQ ID NO: 1632393 - DNA, 15 bp, Homo sapiens
atgttattgtagtga

SEQ ID NO: 1632394 - DNA, 15 bp, Homo sapiens
tgttattgtagtgat

SEQ ID NO: 1632395 - DNA, 15 bp, Homo sapiens
gttattgtagtgatt

SEQ ID NO: 1632396 - DNA, 15 bp, Homo sapiens
ttattgtagtgattt

SEQ ID NO: 1632397 - DNA, 15 bp, Homo sapiens
tattgtagtgatttc

SEQ ID NO: 1632398 - DNA, 15 bp, Homo sapiens
attgtagtgatttcc

SEQ ID NO: 1632399 - DNA, 15 bp, Homo sapiens
ttgtagtgatttcca

SEQ ID NO: 1632400 - DNA, 15 bp, Homo sapiens
tgtagtgatttccaa

SEQ ID NO: 1632401 - DNA, 15 bp, Homo sapiens
gtagtgatttccaaa

SEQ ID NO: 1632402 - DNA, 15 bp, Homo sapiens
tagtgatttccaaac

SEQ ID NO: 1632403 - DNA, 15 bp, Homo sapiens
agtgatttccaaaca

SEQ ID NO: 1632404 - DNA, 15 bp, Homo sapiens
gtgatttccaaacat

SEQ ID NO: 1632405 - DNA, 15 bp, Homo sapiens
tgatttccaaacatc

SEQ ID NO: 1632406 - DNA, 15 bp, Homo sapiens
gatttccaaacatca

SEQ ID NO: 1632407 - DNA, 15 bp, Homo sapiens
atttccaaacatcag

SEQ ID NO: 1632408 - DNA, 15 bp, Homo sapiens
tttccaaacatcagg

SEQ ID NO: 1632409 - DNA, 15 bp, Homo sapiens
ttccaaacatcaggg

SEQ ID NO: 1632410 - DNA, 15 bp, Homo sapiens
tccaaacatcagggt

SEQ ID NO: 1632411 - DNA, 15 bp, Homo sapiens
ccaaacatcagggtt

SEQ ID NO: 1632412 - DNA, 15 bp, Homo sapiens
caaacatcagggttt

SEQ ID NO: 1632413 - DNA, 15 bp, Homo sapiens
aaacatcagggtttc

SEQ ID NO: 1632414 - DNA, 15 bp, Homo sapiens
aacatcagggtttca

SEQ ID NO: 1632415 - DNA, 15 bp, Homo sapiens
acatcagggtttcaa

SEQ ID NO: 1632416 - DNA, 15 bp, Homo sapiens
catcagggtttcaaa

SEQ ID NO: 1632417 - DNA, 15 bp, Homo sapiens
atcagggtttcaaac

SEQ ID NO: 1632418 - DNA, 15 bp, Homo sapiens
tcagggtttcaaaca

SEQ ID NO: 1632419 - DNA, 15 bp, Homo sapiens
cagggtttcaaacac

SEQ ID NO: 1632420 - DNA, 15 bp, Homo sapiens
agggtttcaaacacc

SEQ ID NO: 1632421 - DNA, 15 bp, Homo sapiens
gggtttcaaacacca

SEQ ID NO: 1632422 - DNA, 15 bp, Homo sapiens
ggtttcaaacaccac

SEQ ID NO: 1632423 - DNA, 15 bp, Homo sapiens
gtttcaaacaccacc

SEQ ID NO: 1632424 - DNA, 15 bp, Homo sapiens
tttcaaacaccacct

SEQ ID NO: 1632425 - DNA, 15 bp, Homo sapiens
ttcaaacaccaccta

SEQ ID NO: 1632426 - DNA, 15 bp, Homo sapiens
tcaaacaccacctac

SEQ ID NO: 1632427 - DNA, 15 bp, Homo sapiens
caaacaccacctaca

SEQ ID NO: 1632428 - DNA, 15 bp, Homo sapiens
aaacaccacctacaa

SEQ ID NO: 1632429 - DNA, 15 bp, Homo sapiens
aacaccacctacaat

SEQ ID NO: 1632430 - DNA, 15 bp, Homo sapiens
acaccacctacaatt

SEQ ID NO: 1632431 - DNA, 15 bp, Homo sapiens
caccacctacaattg

SEQ ID NO: 1632432 - DNA, 15 bp, Homo sapiens
accacctacaattgt

SEQ ID NO: 1632433 - DNA, 15 bp, Homo sapiens
ccacctacaattgtg

SEQ ID NO: 1632434 - DNA, 15 bp, Homo sapiens
cacctacaattgtgt

SEQ ID NO: 1632435 - DNA, 15 bp, Homo sapiens
acctacaattgtgtg

SEQ ID NO: 1632436 - DNA, 15 bp, Homo sapiens
cctacaattgtgtgt

SEQ ID NO: 1632437 - DNA, 15 bp, Homo sapiens
ctacaattgtgtgtc

SEQ ID NO: 1632438 - DNA, 15 bp, Homo sapiens
tacaattgtgtgtca

SEQ ID NO: 1632439 - DNA, 15 bp, Homo sapiens
acaattgtgtgtcat

SEQ ID NO: 1632440 - DNA, 15 bp, Homo sapiens
caattgtgtgtcata

SEQ ID NO: 1632441 - DNA, 15 bp, Homo sapiens
aattgtgtgtcataa

SEQ ID NO: 1632442 - DNA, 15 bp, Homo sapiens
attgtgtgtcataac

SEQ ID NO: 1632443 - DNA, 15 bp, Homo sapiens
ttgtgtgtcataacg

SEQ ID NO: 1632444 - DNA, 15 bp, Homo sapiens
tgtgtgtcataacgg

SEQ ID NO: 1632445 - DNA, 15 bp, Homo sapiens
gtgtgtcataacggt

SEQ ID NO: 1632446 - DNA, 15 bp, Homo sapiens
tgtgtcataacggtc

SEQ ID NO: 1632447 - DNA, 15 bp, Homo sapiens
gtgtcataacggtcg

SEQ ID NO: 1632448 - DNA, 15 bp, Homo sapiens
tgtcataacggtcgg

SEQ ID NO: 1632449 - DNA, 15 bp, Homo sapiens
gtcataacggtcggc

SEQ ID NO: 1632450 - DNA, 15 bp, Homo sapiens
tcataacggtcggcc

SEQ ID NO: 1632451 - DNA, 15 bp, Homo sapiens
cataacggtcggcca

SEQ ID NO: 1632452 - DNA, 15 bp, Homo sapiens
ataacggtcggccac

SEQ ID NO: 1632453 - DNA, 15 bp, Homo sapiens
taacggtcggccacc

SEQ ID NO: 1632454 - DNA, 15 bp, Homo sapiens
aacggtcggccacct

SEQ ID NO: 1632455 - DNA, 15 bp, Homo sapiens
acggtcggccacctg

SEQ ID NO: 1632456 - DNA, 15 bp, Homo sapiens
cggtcggccacctgt

SEQ ID NO: 1632457 - DNA, 15 bp, Homo sapiens
ggtcggccacctgtc

SEQ ID NO: 1632458 - DNA, 15 bp, Homo sapiens
gtcggccacctgtca

SEQ ID NO: 1632459 - DNA, 15 bp, Homo sapiens
tcggccacctgtcaa

SEQ ID NO: 1632460 - DNA, 15 bp, Homo sapiens
cggccacctgtcaaa

SEQ ID NO: 1632461 - DNA, 15 bp, Homo sapiens
ggccacctgtcaaat

SEQ ID NO: 1632462 - DNA, 15 bp, Homo sapiens
gccacctgtcaaatt

SEQ ID NO: 1632463 - DNA, 15 bp, Homo sapiens
ccacctgtcaaatta

SEQ ID NO: 1632464 - DNA, 15 bp, Homo sapiens
cacctgtcaaattat

SEQ ID NO: 1632465 - DNA, 15 bp, Homo sapiens
acctgtcaaattatt

SEQ ID NO: 1632466 - DNA, 15 bp, Homo sapiens
cctgtcaaattattt

SEQ ID NO: 1632467 - DNA, 15 bp, Homo sapiens
ctgtcaaattattta

SEQ ID NO: 1632468 - DNA, 15 bp, Homo sapiens
tgtcaaattatttac

SEQ ID NO: 1632469 - DNA, 15 bp, Homo sapiens
gtcaaattatttact

SEQ ID NO: 1632470 - DNA, 15 bp, Homo sapiens
tcaaattatttactt

SEQ ID NO: 1632471 - DNA, 15 bp, Homo sapiens
caaattatttactta

SEQ ID NO: 1632472 - DNA, 15 bp, Homo sapiens
aaattatttacttac

SEQ ID NO: 1632473 - DNA, 15 bp, Homo sapiens
attatttacttactt

SEQ ID NO: 1632474 - DNA, 15 bp, Homo sapiens
ttatttacttacttt

SEQ ID NO: 1632475 - DNA, 15 bp, Homo sapiens
tatttacttacttta

SEQ ID NO: 1632476 - DNA, 15 bp, Homo sapiens
atttacttactttaa

SEQ ID NO: 1632477 - DNA, 15 bp, Homo sapiens
tttacttactttaaa

SEQ ID NO: 1632478 - DNA, 15 bp, Homo sapiens
ttacttactttaaat

SEQ ID NO: 1632479 - DNA, 15 bp, Homo sapiens
tacttactttaaata

SEQ ID NO: 1632480 - DNA, 15 bp, Homo sapiens
acttactttaaatat

SEQ ID NO: 1632481 - DNA, 15 bp, Homo sapiens
cttactttaaatata

SEQ ID NO: 1632482 - DNA, 15 bp, Homo sapiens
ttactttaaatatat

SEQ ID NO: 1632483 - DNA, 15 bp, Homo sapiens
tactttaaatatata

SEQ ID NO: 1632484 - DNA, 15 bp, Homo sapiens
actttaaatatatat

SEQ ID NO: 1632485 - DNA, 15 bp, Homo sapiens
ctttaaatatatatg

SEQ ID NO: 1632486 - DNA, 15 bp, Homo sapiens
tttaaatatatatgt

SEQ ID NO: 1632487 - DNA, 15 bp, Homo sapiens
ttaaatatatatgtt

SEQ ID NO: 1632488 - DNA, 15 bp, Homo sapiens
taaatatatatgttt

SEQ ID NO: 1632489 - DNA, 15 bp, Homo sapiens
aaatatatatgtttt

SEQ ID NO: 1632490 - DNA, 15 bp, Homo sapiens
aatatatatgttttt

SEQ ID NO: 1632491 - DNA, 15 bp, Homo sapiens
atatatatgtttttc

SEQ ID NO: 1632492 - DNA, 15 bp, Homo sapiens
tatatatgtttttct

SEQ ID NO: 1632493 - DNA, 15 bp, Homo sapiens
atatatgtttttctt

SEQ ID NO: 1632494 - DNA, 15 bp, Homo sapiens
tatatgtttttcttg

SEQ ID NO: 1632495 - DNA, 15 bp, Homo sapiens
atatgtttttcttga

SEQ ID NO: 1632496 - DNA, 15 bp, Homo sapiens
tatgtttttcttgac

SEQ ID NO: 1632497 - DNA, 15 bp, Homo sapiens
atgtttttcttgact

SEQ ID NO: 1632498 - DNA, 15 bp, Homo sapiens
tgtttttcttgactt

SEQ ID NO: 1632499 - DNA, 15 bp, Homo sapiens
gtttttcttgacttg

SEQ ID NO: 1632500 - DNA, 15 bp, Homo sapiens
tttttcttgacttga

SEQ ID NO: 1632501 - DNA, 15 bp, Homo sapiens
ttttcttgacttgat

SEQ ID NO: 1632502 - DNA, 15 bp, Homo sapiens
tttcttgacttgatg

SEQ ID NO: 1632503 - DNA, 15 bp, Homo sapiens
ttcttgacttgatgt

SEQ ID NO: 1632504 - DNA, 15 bp, Homo sapiens
tcttgacttgatgtt

SEQ ID NO: 1632505 - DNA, 15 bp, Homo sapiens
cttgacttgatgttc

SEQ ID NO: 1632506 - DNA, 15 bp, Homo sapiens
ttgacttgatgttct

SEQ ID NO: 1632507 - DNA, 15 bp, Homo sapiens
tgacttgatgttctt

SEQ ID NO: 1632508 - DNA, 15 bp, Homo sapiens
gacttgatgttctta

SEQ ID NO: 1632509 - DNA, 15 bp, Homo sapiens
acttgatgttcttaa

SEQ ID NO: 1632510 - DNA, 15 bp, Homo sapiens
cttgatgttcttaag

SEQ ID NO: 1632511 - DNA, 15 bp, Homo sapiens
ttgatgttcttaaga

SEQ ID NO: 1632512 - DNA, 15 bp, Homo sapiens
tgatgttcttaagac

SEQ ID NO: 1632513 - DNA, 15 bp, Homo sapiens
gatgttcttaagact

SEQ ID NO: 1632514 - DNA, 15 bp, Homo sapiens
atgttcttaagactt

SEQ ID NO: 1632515 - DNA, 15 bp, Homo sapiens
tgttcttaagactta

SEQ ID NO: 1632516 - DNA, 15 bp, Homo sapiens
gttcttaagacttat

SEQ ID NO: 1632517 - DNA, 15 bp, Homo sapiens
ttcttaagacttata

SEQ ID NO: 1632518 - DNA, 15 bp, Homo sapiens
tcttaagacttatat

SEQ ID NO: 1632519 - DNA, 15 bp, Homo sapiens
cttaagacttatata

SEQ ID NO: 1632520 - DNA, 15 bp, Homo sapiens
ttaagacttatatac

SEQ ID NO: 1632521 - DNA, 15 bp, Homo sapiens
taagacttatataca

SEQ ID NO: 1632522 - DNA, 15 bp, Homo sapiens
aagacttatatacat

SEQ ID NO: 1632523 - DNA, 15 bp, Homo sapiens
agacttatatacata

SEQ ID NO: 1632524 - DNA, 15 bp, Homo sapiens
gacttatatacatac

SEQ ID NO: 1632525 - DNA, 15 bp, Homo sapiens
acttatatacataca

SEQ ID NO: 1632526 - DNA, 15 bp, Homo sapiens
cttatatacatacat

SEQ ID NO: 1632527 - DNA, 15 bp, Homo sapiens
ttatatacatacatt

SEQ ID NO: 1632528 - DNA, 15 bp, Homo sapiens
tatatacatacattt

SEQ ID NO: 1632529 - DNA, 15 bp, Homo sapiens
atatacatacatttt

SEQ ID NO: 1632530 - DNA, 15 bp, Homo sapiens
tatacatacatttta

SEQ ID NO: 1632531 - DNA, 15 bp, Homo sapiens
atacatacattttaa

SEQ ID NO: 1632532 - DNA, 15 bp, Homo sapiens
tacatacattttaaa

SEQ ID NO: 1632533 - DNA, 15 bp, Homo sapiens
acatacattttaaaa

SEQ ID NO: 1632534 - DNA, 15 bp, Homo sapiens
catacattttaaaac

SEQ ID NO: 1632535 - DNA, 15 bp, Homo sapiens
atacattttaaaact

SEQ ID NO: 1632536 - DNA, 15 bp, Homo sapiens
tacattttaaaacta

SEQ ID NO: 1632537 - DNA, 15 bp, Homo sapiens
acattttaaaactaa

SEQ ID NO: 1632538 - DNA, 15 bp, Homo sapiens
cattttaaaactaaa

SEQ ID NO: 1632539 - DNA, 15 bp, Homo sapiens
attttaaaactaaac

SEQ ID NO: 1632540 - DNA, 15 bp, Homo sapiens
ttttaaaactaaact

SEQ ID NO: 1632541 - DNA, 15 bp, Homo sapiens
tttaaaactaaactt

SEQ ID NO: 1632542 - DNA, 15 bp, Homo sapiens
ttaaaactaaacttt

SEQ ID NO: 1632543 - DNA, 15 bp, Homo sapiens
taaaactaaacttta

SEQ ID NO: 1632544 - DNA, 15 bp, Homo sapiens
aaaactaaactttaa

SEQ ID NO: 1632545 - DNA, 15 bp, Homo sapiens
aaactaaactttaaa

SEQ ID NO: 1632546 - DNA, 15 bp, Homo sapiens
aactaaactttaaaa

SEQ ID NO: 1632547 - DNA, 15 bp, Homo sapiens
actaaactttaaaat

SEQ ID NO: 1632548 - DNA, 15 bp, Homo sapiens
ctaaactttaaaata

SEQ ID NO: 1632549 - DNA, 15 bp, Homo sapiens
taaactttaaaatat

SEQ ID NO: 1632550 - DNA, 15 bp, Homo sapiens
aaactttaaaatatc

SEQ ID NO: 1632551 - DNA, 15 bp, Homo sapiens
aactttaaaatatct

SEQ ID NO: 1632552 - DNA, 15 bp, Homo sapiens
actttaaaatatctt

SEQ ID NO: 1632553 - DNA, 15 bp, Homo sapiens
ctttaaaatatcttt

SEQ ID NO: 1632554 - DNA, 15 bp, Homo sapiens
tttaaaatatctttt

SEQ ID NO: 1632555 - DNA, 15 bp, Homo sapiens
ttaaaatatcttttt

SEQ ID NO: 1632556 - DNA, 15 bp, Homo sapiens
taaaatatctttttt

SEQ ID NO: 1632557 - DNA, 15 bp, Homo sapiens
aaaatatctttttta

SEQ ID NO: 1632558 - DNA, 15 bp, Homo sapiens
aaatatcttttttaa

SEQ ID NO: 1632559 - DNA, 15 bp, Homo sapiens
aatatcttttttaaa

SEQ ID NO: 1632560 - DNA, 15 bp, Homo sapiens
atatcttttttaaat

SEQ ID NO: 1632561 - DNA, 15 bp, Homo sapiens
tatcttttttaaata

SEQ ID NO: 1632562 - DNA, 15 bp, Homo sapiens
atcttttttaaatat

SEQ ID NO: 1632563 - DNA, 15 bp, Homo sapiens
tcttttttaaatata

SEQ ID NO: 1632564 - DNA, 15 bp, Homo sapiens
cttttttaaatatag

SEQ ID NO: 1632565 - DNA, 15 bp, Homo sapiens
ttttttaaatatagc

SEQ ID NO: 1632566 - DNA, 15 bp, Homo sapiens
tttttaaatatagca

SEQ ID NO: 1632567 - DNA, 15 bp, Homo sapiens
ttttaaatatagcat

SEQ ID NO: 1632568 - DNA, 15 bp, Homo sapiens
tttaaatatagcatc

SEQ ID NO: 1632569 - DNA, 15 bp, Homo sapiens
ttaaatatagcatca

SEQ ID NO: 1632570 - DNA, 15 bp, Homo sapiens
taaatatagcatcat

SEQ ID NO: 1632571 - DNA, 15 bp, Homo sapiens
aaatatagcatcatt

SEQ ID NO: 1632572 - DNA, 15 bp, Homo sapiens
aatatagcatcattt

SEQ ID NO: 1632573 - DNA, 15 bp, Homo sapiens
atatagcatcatttg

SEQ ID NO: 1632574 - DNA, 15 bp, Homo sapiens
tatagcatcatttgc

SEQ ID NO: 1632575 - DNA, 15 bp, Homo sapiens
atagcatcatttgcc

SEQ ID NO: 1632576 - DNA, 15 bp, Homo sapiens
tagcatcatttgcct

SEQ ID NO: 1632577 - DNA, 15 bp, Homo sapiens
agcatcatttgcctt

SEQ ID NO: 1632578 - DNA, 15 bp, Homo sapiens
gcatcatttgcctta

SEQ ID NO: 1632579 - DNA, 15 bp, Homo sapiens
catcatttgccttaa

SEQ ID NO: 1632580 - DNA, 15 bp, Homo sapiens
atcatttgccttaaa

SEQ ID NO: 1632581 - DNA, 15 bp, Homo sapiens
tcatttgccttaaat

SEQ ID NO: 1632582 - DNA, 15 bp, Homo sapiens
catttgccttaaata

SEQ ID NO: 1632583 - DNA, 15 bp, Homo sapiens
atttgccttaaatag

SEQ ID NO: 1632584 - DNA, 15 bp, Homo sapiens
tttgccttaaataga

SEQ ID NO: 1632585 - DNA, 15 bp, Homo sapiens
ttgccttaaatagaa

SEQ ID NO: 1632586 - DNA, 15 bp, Homo sapiens
tgccttaaatagaag

SEQ ID NO: 1632587 - DNA, 15 bp, Homo sapiens
gccttaaatagaagt

SEQ ID NO: 1632588 - DNA, 15 bp, Homo sapiens
ccttaaatagaagtt

SEQ ID NO: 1632589 - DNA, 15 bp, Homo sapiens
cttaaatagaagttt

SEQ ID NO: 1632590 - DNA, 15 bp, Homo sapiens
ttaaatagaagtttt

SEQ ID NO: 1632591 - DNA, 15 bp, Homo sapiens
taaatagaagttttg

SEQ ID NO: 1632592 - DNA, 15 bp, Homo sapiens
aaatagaagttttgc

SEQ ID NO: 1632593 - DNA, 15 bp, Homo sapiens
aatagaagttttgct

SEQ ID NO: 1632594 - DNA, 15 bp, Homo sapiens
atagaagttttgctt

SEQ ID NO: 1632595 - DNA, 15 bp, Homo sapiens
tagaagttttgctta

SEQ ID NO: 1632596 - DNA, 15 bp, Homo sapiens
agaagttttgcttaa

SEQ ID NO: 1632597 - DNA, 15 bp, Homo sapiens
gaagttttgcttaaa

SEQ ID NO: 1632598 - DNA, 15 bp, Homo sapiens
aagttttgcttaaaa

SEQ ID NO: 1632599 - DNA, 15 bp, Homo sapiens
agttttgcttaaaag

SEQ ID NO: 1632600 - DNA, 15 bp, Homo sapiens
gttttgcttaaaagc

SEQ ID NO: 1632601 - DNA, 15 bp, Homo sapiens
ttttgcttaaaagca

SEQ ID NO: 1632602 - DNA, 15 bp, Homo sapiens
tttgcttaaaagcaa

SEQ ID NO: 1632603 - DNA, 15 bp, Homo sapiens
ttgcttaaaagcaaa

SEQ ID NO: 1632604 - DNA, 15 bp, Homo sapiens
tgcttaaaagcaaat

SEQ ID NO: 1632605 - DNA, 15 bp, Homo sapiens
gcttaaaagcaaatt

SEQ ID NO: 1632606 - DNA, 15 bp, Homo sapiens
cttaaaagcaaattc

SEQ ID NO: 1632607 - DNA, 15 bp, Homo sapiens
ttaaaagcaaattcc

SEQ ID NO: 1632608 - DNA, 15 bp, Homo sapiens
taaaagcaaattcca

SEQ ID NO: 1632609 - DNA, 15 bp, Homo sapiens
aaaagcaaattccat

SEQ ID NO: 1632610 - DNA, 15 bp, Homo sapiens
aaagcaaattccata

SEQ ID NO: 1632611 - DNA, 15 bp, Homo sapiens
aagcaaattccataa

SEQ ID NO: 1632612 - DNA, 15 bp, Homo sapiens
agcaaattccataaa

SEQ ID NO: 1632613 - DNA, 15 bp, Homo sapiens
gcaaattccataaaa

SEQ ID NO: 1632614 - DNA, 15 bp, Homo sapiens
caaattccataaaaa

SEQ ID NO: 1632615 - DNA, 15 bp, Homo sapiens
aaattccataaaaac

SEQ ID NO: 1632616 - DNA, 15 bp, Homo sapiens
aattccataaaaaca

SEQ ID NO: 1632617 - DNA, 15 bp, Homo sapiens
attccataaaaacaa

SEQ ID NO: 1632618 - DNA, 15 bp, Homo sapiens
ttccataaaaacaaa

SEQ ID NO: 1632619 - DNA, 15 bp, Homo sapiens
tccataaaaacaaaa

SEQ ID NO: 1632620 - DNA, 15 bp, Homo sapiens
ccataaaaacaaaat

SEQ ID NO: 1632621 - DNA, 15 bp, Homo sapiens
cataaaaacaaaata

SEQ ID NO: 1632622 - DNA, 15 bp, Homo sapiens
ataaaaacaaaatag

SEQ ID NO: 1632623 - DNA, 15 bp, Homo sapiens
taaaaacaaaatagg

SEQ ID NO: 1632624 - DNA, 15 bp, Homo sapiens
aaaaacaaaatagga

SEQ ID NO: 1632625 - DNA, 15 bp, Homo sapiens
aaaacaaaataggaa

SEQ ID NO: 1632626 - DNA, 15 bp, Homo sapiens
aaacaaaataggaac

SEQ ID NO: 1632627 - DNA, 15 bp, Homo sapiens
aacaaaataggaact

SEQ ID NO: 1632628 - DNA, 15 bp, Homo sapiens
acaaaataggaactt

SEQ ID NO: 1632629 - DNA, 15 bp, Homo sapiens
caaaataggaacttc

SEQ ID NO: 1632630 - DNA, 15 bp, Homo sapiens
aaaataggaacttct

SEQ ID NO: 1632631 - DNA, 15 bp, Homo sapiens
aaataggaacttctg

SEQ ID NO: 1632632 - DNA, 15 bp, Homo sapiens
aataggaacttctgt

SEQ ID NO: 1632633 - DNA, 15 bp, Homo sapiens
ataggaacttctgtc

SEQ ID NO: 1632634 - DNA, 15 bp, Homo sapiens
taggaacttctgtct

SEQ ID NO: 1632635 - DNA, 15 bp, Homo sapiens
aggaacttctgtctg

SEQ ID NO: 1632636 - DNA, 15 bp, Homo sapiens
ggaacttctgtctgg

SEQ ID NO: 1632637 - DNA, 15 bp, Homo sapiens
gaacttctgtctgga

SEQ ID NO: 1632638 - DNA, 15 bp, Homo sapiens
aacttctgtctggaa

SEQ ID NO: 1632639 - DNA, 15 bp, Homo sapiens
acttctgtctggaaa

SEQ ID NO: 1632640 - DNA, 15 bp, Homo sapiens
cttctgtctggaaag

SEQ ID NO: 1632641 - DNA, 15 bp, Homo sapiens
ttctgtctggaaaga

SEQ ID NO: 1632642 - DNA, 15 bp, Homo sapiens
tctgtctggaaagat

SEQ ID NO: 1632643 - DNA, 15 bp, Homo sapiens
ctgtctggaaagatt

SEQ ID NO: 1632644 - DNA, 15 bp, Homo sapiens
tgtctggaaagattt

SEQ ID NO: 1632645 - DNA, 15 bp, Homo sapiens
gtctggaaagatttt

SEQ ID NO: 1632646 - DNA, 15 bp, Homo sapiens
tctggaaagattttg

SEQ ID NO: 1632647 - DNA, 15 bp, Homo sapiens
ctggaaagattttgg

SEQ ID NO: 1632648 - DNA, 15 bp, Homo sapiens
tggaaagattttgga

SEQ ID NO: 1632649 - DNA, 15 bp, Homo sapiens
ggaaagattttggac

SEQ ID NO: 1632650 - DNA, 15 bp, Homo sapiens
gaaagattttggact

SEQ ID NO: 1632651 - DNA, 15 bp, Homo sapiens
aaagattttggactt

SEQ ID NO: 1632652 - DNA, 15 bp, Homo sapiens
aagattttggacttg

SEQ ID NO: 1632653 - DNA, 15 bp, Homo sapiens
agattttggacttga

SEQ ID NO: 1632654 - DNA, 15 bp, Homo sapiens
gattttggacttgag

SEQ ID NO: 1632655 - DNA, 15 bp, Homo sapiens
attttggacttgaga

SEQ ID NO: 1632656 - DNA, 15 bp, Homo sapiens
ttttggacttgagat

SEQ ID NO: 1632657 - DNA, 15 bp, Homo sapiens
tttggacttgagatt

SEQ ID NO: 1632658 - DNA, 15 bp, Homo sapiens
ttggacttgagattc

SEQ ID NO: 1632659 - DNA, 15 bp, Homo sapiens
tggacttgagattca

SEQ ID NO: 1632660 - DNA, 15 bp, Homo sapiens
ggacttgagattcac

SEQ ID NO: 1632661 - DNA, 15 bp, Homo sapiens
gacttgagattcact

SEQ ID NO: 1632662 - DNA, 15 bp, Homo sapiens
acttgagattcactt

SEQ ID NO: 1632663 - DNA, 15 bp, Homo sapiens
cttgagattcacttt

SEQ ID NO: 1632664 - DNA, 15 bp, Homo sapiens
ttgagattcactttt

SEQ ID NO: 1632665 - DNA, 15 bp, Homo sapiens
tgagattcacttttt

SEQ ID NO: 1632666 - DNA, 15 bp, Homo sapiens
gagattcactttttg

SEQ ID NO: 1632667 - DNA, 15 bp, Homo sapiens
agattcactttttgg

SEQ ID NO: 1632668 - DNA, 15 bp, Homo sapiens
gattcactttttggt

SEQ ID NO: 1632669 - DNA, 15 bp, Homo sapiens
attcactttttggtt

SEQ ID NO: 1632670 - DNA, 15 bp, Homo sapiens
ttcactttttggttg

SEQ ID NO: 1632671 - DNA, 15 bp, Homo sapiens
tcactttttggttgt

SEQ ID NO: 1632672 - DNA, 15 bp, Homo sapiens
cactttttggttgtt

SEQ ID NO: 1632673 - DNA, 15 bp, Homo sapiens
actttttggttgtta

SEQ ID NO: 1632674 - DNA, 15 bp, Homo sapiens
ctttttggttgttaa

SEQ ID NO: 1632675 - DNA, 15 bp, Homo sapiens
tttttggttgttaaa

SEQ ID NO: 1632676 - DNA, 15 bp, Homo sapiens
ttttggttgttaaaa

SEQ ID NO: 1632677 - DNA, 15 bp, Homo sapiens
tttggttgttaaaac

SEQ ID NO: 1632678 - DNA, 15 bp, Homo sapiens
ttggttgttaaaacg

SEQ ID NO: 1632679 - DNA, 15 bp, Homo sapiens
tggttgttaaaacga

SEQ ID NO: 1632680 - DNA, 15 bp, Homo sapiens
ggttgttaaaacgag

SEQ ID NO: 1632681 - DNA, 15 bp, Homo sapiens
gttgttaaaacgaga

SEQ ID NO: 1632682 - DNA, 15 bp, Homo sapiens
ttgttaaaacgagag

SEQ ID NO: 1632683 - DNA, 15 bp, Homo sapiens
tgttaaaacgagagg

SEQ ID NO: 1632684 - DNA, 15 bp, Homo sapiens
gttaaaacgagaggt

SEQ ID NO: 1632685 - DNA, 15 bp, Homo sapiens
ttaaaacgagaggtt

SEQ ID NO: 1632686 - DNA, 15 bp, Homo sapiens
taaaacgagaggttt

SEQ ID NO: 1632687 - DNA, 15 bp, Homo sapiens
aaaacgagaggtttt

SEQ ID NO: 1632688 - DNA, 15 bp, Homo sapiens
aaacgagaggttttt

SEQ ID NO: 1632689 - DNA, 15 bp, Homo sapiens
aacgagaggtttttg

SEQ ID NO: 1632690 - DNA, 15 bp, Homo sapiens
acgagaggtttttgc

SEQ ID NO: 1632691 - DNA, 15 bp, Homo sapiens
cgagaggtttttgca

SEQ ID NO: 1632692 - DNA, 15 bp, Homo sapiens
gagaggtttttgcaa

SEQ ID NO: 1632693 - DNA, 15 bp, Homo sapiens
agaggtttttgcaac

SEQ ID NO: 1632694 - DNA, 15 bp, Homo sapiens
gaggtttttgcaaca

SEQ ID NO: 1632695 - DNA, 15 bp, Homo sapiens
aggtttttgcaacac

SEQ ID NO: 1632696 - DNA, 15 bp, Homo sapiens
ggtttttgcaacaca

SEQ ID NO: 1632697 - DNA, 15 bp, Homo sapiens
gtttttgcaacacaa

SEQ ID NO: 1632698 - DNA, 15 bp, Homo sapiens
tttttgcaacacaaa

SEQ ID NO: 1632699 - DNA, 15 bp, Homo sapiens
ttttgcaacacaaag

SEQ ID NO: 1632700 - DNA, 15 bp, Homo sapiens
tttgcaacacaaagg

SEQ ID NO: 1632701 - DNA, 15 bp, Homo sapiens
ttgcaacacaaagga

SEQ ID NO: 1632702 - DNA, 15 bp, Homo sapiens
tgcaacacaaaggat

SEQ ID NO: 1632703 - DNA, 15 bp, Homo sapiens
gcaacacaaaggata

SEQ ID NO: 1632704 - DNA, 15 bp, Homo sapiens
caacacaaaggataa

SEQ ID NO: 1632705 - DNA, 15 bp, Homo sapiens
acaaaggataaatgt

SEQ ID NO: 1632706 - DNA, 15 bp, Homo sapiens
caaaggataaatgtt

SEQ ID NO: 1632707 - DNA, 15 bp, Homo sapiens
aaaggataaatgttt

SEQ ID NO: 1632708 - DNA, 15 bp, Homo sapiens
aaggataaatgtttg

SEQ ID NO: 1632709 - DNA, 15 bp, Homo sapiens
aggataaatgtttga

SEQ ID NO: 1632710 - DNA, 15 bp, Homo sapiens
ggataaatgtttgag

SEQ ID NO: 1632711 - DNA, 15 bp, Homo sapiens
gataaatgtttgagg

SEQ ID NO: 1632712 - DNA, 15 bp, Homo sapiens
ataaatgtttgaggg

SEQ ID NO: 1632713 - DNA, 15 bp, Homo sapiens
taaatgtttgagggg

SEQ ID NO: 1632714 - DNA, 15 bp, Homo sapiens
aaatgtttgagggga

SEQ ID NO: 1632715 - DNA, 15 bp, Homo sapiens
aatgtttgaggggat

SEQ ID NO: 1632716 - DNA, 15 bp, Homo sapiens
ttgcaggagcagcag

SEQ ID NO: 1632717 - DNA, 15 bp, Homo sapiens
tgcaggagcagcagg

SEQ ID NO: 1632718 - DNA, 15 bp, Homo sapiens
gcaggagcagcaggc

SEQ ID NO: 1632719 - DNA, 15 bp, Homo sapiens
caggagcagcaggca

SEQ ID NO: 1632720 - DNA, 15 bp, Homo sapiens
aggagcagcaggcag

SEQ ID NO: 1632721 - DNA, 15 bp, Homo sapiens
ggagcagcaggcagt

SEQ ID NO: 1632722 - DNA, 15 bp, Homo sapiens
gagcagcaggcagta

SEQ ID NO: 1632723 - DNA, 15 bp, Homo sapiens
agcagcaggcagtaa

SEQ ID NO: 1632724 - DNA, 15 bp, Homo sapiens
gcagcaggcagtaag

SEQ ID NO: 1632725 - DNA, 15 bp, Homo sapiens
cagcaggcagtaaga

SEQ ID NO: 1632726 - DNA, 15 bp, Homo sapiens
agcaggcagtaagag

SEQ ID NO: 1632727 - DNA, 15 bp, Homo sapiens
gcaggcagtaagagt

SEQ ID NO: 1632728 - DNA, 15 bp, Homo sapiens
caggcagtaagagtg

SEQ ID NO: 1632729 - DNA, 15 bp, Homo sapiens
aggcagtaagagtgg

SEQ ID NO: 1632730 - DNA, 15 bp, Homo sapiens
ggcagtaagagtggg

SEQ ID NO: 1632731 - DNA, 15 bp, Homo sapiens
gcagtaagagtggga

SEQ ID NO: 1632732 - DNA, 15 bp, Homo sapiens
cagtaagagtgggag

SEQ ID NO: 1632733 - DNA, 15 bp, Homo sapiens
agtaagagtgggagg

SEQ ID NO: 1632734 - DNA, 15 bp, Homo sapiens
gtaagagtgggagga

SEQ ID NO: 1632735 - DNA, 15 bp, Homo sapiens
taagagtgggaggac

SEQ ID NO: 1632736 - DNA, 15 bp, Homo sapiens
aagagtgggaggacc

SEQ ID NO: 1632737 - DNA, 15 bp, Homo sapiens
agagtgggaggacct

SEQ ID NO: 1632738 - DNA, 15 bp, Homo sapiens
gagtgggaggacctg

SEQ ID NO: 1632739 - DNA, 15 bp, Homo sapiens
agtgggaggacctga

SEQ ID NO: 1632740 - DNA, 15 bp, Homo sapiens
gtgggaggacctgag

SEQ ID NO: 1632741 - DNA, 15 bp, Homo sapiens
tgggaggacctgaga

SEQ ID NO: 1632742 - DNA, 15 bp, Homo sapiens
gggaggacctgagat

SEQ ID NO: 1632743 - DNA, 15 bp, Homo sapiens
ggaggacctgagatc

SEQ ID NO: 1632744 - DNA, 15 bp, Homo sapiens
gaggacctgagatct

SEQ ID NO: 1632745 - DNA, 15 bp, Homo sapiens
aggacctgagatcta

SEQ ID NO: 1632746 - DNA, 15 bp, Homo sapiens
ggacctgagatctat

SEQ ID NO: 1632747 - DNA, 15 bp, Homo sapiens
gacctgagatctatg

SEQ ID NO: 1632748 - DNA, 15 bp, Homo sapiens
acctgagatctatga

SEQ ID NO: 1632749 - DNA, 15 bp, Homo sapiens
cctgagatctatgat

SEQ ID NO: 1632750 - DNA, 15 bp, Homo sapiens
ctgagatctatgata

SEQ ID NO: 1632751 - DNA, 15 bp, Homo sapiens
tgagatctatgatag

SEQ ID NO: 1632752 - DNA, 15 bp, Homo sapiens
gagatctatgatagt

SEQ ID NO: 1632753 - DNA, 15 bp, Homo sapiens
agatctatgatagtg

SEQ ID NO: 1632754 - DNA, 15 bp, Homo sapiens
gatctatgatagtga

SEQ ID NO: 1632755 - DNA, 15 bp, Homo sapiens
atctatgatagtgaa

SEQ ID NO: 1632756 - DNA, 15 bp, Homo sapiens
tctatgatagtgaaa

SEQ ID NO: 1632757 - DNA, 15 bp, Homo sapiens
ctatgatagtgaaag

SEQ ID NO: 1632758 - DNA, 15 bp, Homo sapiens
tatgatagtgaaaga

SEQ ID NO: 1632759 - DNA, 15 bp, Homo sapiens
atgatagtgaaagac

SEQ ID NO: 1632760 - DNA, 15 bp, Homo sapiens
tgatagtgaaagaca

SEQ ID NO: 1632761 - DNA, 15 bp, Homo sapiens
gatagtgaaagacat

SEQ ID NO: 1632762 - DNA, 15 bp, Homo sapiens
atagtgaaagacatg

SEQ ID NO: 1632763 - DNA, 15 bp, Homo sapiens
tagtgaaagacatga

SEQ ID NO: 1632764 - DNA, 15 bp, Homo sapiens
agtgaaagacatgat

SEQ ID NO: 1632765 - DNA, 15 bp, Homo sapiens
gtgaaagacatgatg

SEQ ID NO: 1632766 - DNA, 15 bp, Homo sapiens
tgaaagacatgatgc

SEQ ID NO: 1632767 - DNA, 15 bp, Homo sapiens
gaaagacatgatgca

SEQ ID NO: 1632768 - DNA, 15 bp, Homo sapiens
aaagacatgatgcaa

SEQ ID NO: 1632769 - DNA, 15 bp, Homo sapiens
aagacatgatgcaat

SEQ ID NO: 1632770 - DNA, 15 bp, Homo sapiens
agacatgatgcaata

SEQ ID NO: 1632771 - DNA, 15 bp, Homo sapiens
gacatgatgcaatat

SEQ ID NO: 1632772 - DNA, 15 bp, Homo sapiens
acatgatgcaatata

SEQ ID NO: 1632773 - DNA, 15 bp, Homo sapiens
catgatgcaatatat

SEQ ID NO: 1632774 - DNA, 15 bp, Homo sapiens
atgatgcaatatatt

SEQ ID NO: 1632775 - DNA, 15 bp, Homo sapiens
tgatgcaatatattg

SEQ ID NO: 1632776 - DNA, 15 bp, Homo sapiens
gatgcaatatattgc

SEQ ID NO: 1632777 - DNA, 15 bp, Homo sapiens
atgcaatatattgcc

SEQ ID NO: 1632778 - DNA, 15 bp, Homo sapiens
tgcaatatattgcct

SEQ ID NO: 1632779 - DNA, 15 bp, Homo sapiens
gcaatatattgcctg

SEQ ID NO: 1632780 - DNA, 15 bp, Homo sapiens
caatatattgcctgc

SEQ ID NO: 1632781 - DNA, 15 bp, Homo sapiens
aatatattgcctgcc

SEQ ID NO: 1632782 - DNA, 15 bp, Homo sapiens
atatattgcctgcct

SEQ ID NO: 1632783 - DNA, 15 bp, Homo sapiens
tatattgcctgcctg

SEQ ID NO: 1632784 - DNA, 15 bp, Homo sapiens
atattgcctgcctgg

SEQ ID NO: 1632785 - DNA, 15 bp, Homo sapiens
ttgcctgcctggtta

SEQ ID NO: 1632786 - DNA, 15 bp, Homo sapiens
tgcctgcctggttaa

SEQ ID NO: 1632787 - DNA, 15 bp, Homo sapiens
gcctgcctggttaaa

SEQ ID NO: 1632788 - DNA, 15 bp, Homo sapiens
cctgcctggttaaag

SEQ ID NO: 1632789 - DNA, 15 bp, Homo sapiens
ctgcctggttaaagg

SEQ ID NO: 1632790 - DNA, 15 bp, Homo sapiens
tgcctggttaaagga

SEQ ID NO: 1632791 - DNA, 15 bp, Homo sapiens
gcctggttaaaggag

SEQ ID NO: 1632792 - DNA, 15 bp, Homo sapiens
cctggttaaaggagt

SEQ ID NO: 1632793 - DNA, 15 bp, Homo sapiens
ctggttaaaggagta

SEQ ID NO: 1632794 - DNA, 15 bp, Homo sapiens
tggttaaaggagtag

SEQ ID NO: 1632795 - DNA, 15 bp, Homo sapiens
ggttaaaggagtaga

SEQ ID NO: 1632796 - DNA, 15 bp, Homo sapiens
gttaaaggagtagaa

SEQ ID NO: 1632797 - DNA, 15 bp, Homo sapiens
ttaaaggagtagaaa

SEQ ID NO: 1632798 - DNA, 15 bp, Homo sapiens
taaaggagtagaaag

SEQ ID NO: 1632799 - DNA, 15 bp, Homo sapiens
aaaggagtagaaagg

SEQ ID NO: 1632800 - DNA, 15 bp, Homo sapiens
aaggagtagaaagga

SEQ ID NO: 1632801 - DNA, 15 bp, Homo sapiens
aggagtagaaaggag

SEQ ID NO: 1632802 - DNA, 15 bp, Homo sapiens
ggagtagaaaggagt

SEQ ID NO: 1632803 - DNA, 15 bp, Homo sapiens
gagtagaaaggagtc

SEQ ID NO: 1632804 - DNA, 15 bp, Homo sapiens
agtagaaaggagtca

SEQ ID NO: 1632805 - DNA, 15 bp, Homo sapiens
gtagaaaggagtcaa

SEQ ID NO: 1632806 - DNA, 15 bp, Homo sapiens
tagaaaggagtcaaa

SEQ ID NO: 1632807 - DNA, 15 bp, Homo sapiens
agaaaggagtcaaag

SEQ ID NO: 1632808 - DNA, 15 bp, Homo sapiens
gaaaggagtcaaaga

SEQ ID NO: 1632809 - DNA, 15 bp, Homo sapiens
aaaggagtcaaagat

SEQ ID NO: 1632810 - DNA, 15 bp, Homo sapiens
aaggagtcaaagatg

SEQ ID NO: 1632811 - DNA, 15 bp, Homo sapiens
aggagtcaaagatga

SEQ ID NO: 1632812 - DNA, 15 bp, Homo sapiens
ggagtcaaagatgac

SEQ ID NO: 1632813 - DNA, 15 bp, Homo sapiens
gagtcaaagatgact

SEQ ID NO: 1632814 - DNA, 15 bp, Homo sapiens
agtcaaagatgactg

SEQ ID NO: 1632815 - DNA, 15 bp, Homo sapiens
gtcaaagatgactgt

SEQ ID NO: 1632816 - DNA, 15 bp, Homo sapiens
tcaaagatgactgta

SEQ ID NO: 1632817 - DNA, 15 bp, Homo sapiens
caaagatgactgtaa

SEQ ID NO: 1632818 - DNA, 15 bp, Homo sapiens
aaagatgactgtaac

SEQ ID NO: 1632819 - DNA, 15 bp, Homo sapiens
aagatgactgtaaca

SEQ ID NO: 1632820 - DNA, 15 bp, Homo sapiens
agatgactgtaacat

SEQ ID NO: 1632821 - DNA, 15 bp, Homo sapiens
gatgactgtaacatt

SEQ ID NO: 1632822 - DNA, 15 bp, Homo sapiens
atgactgtaacattt

SEQ ID NO: 1632823 - DNA, 15 bp, Homo sapiens
tgactgtaacatttt

SEQ ID NO: 1632824 - DNA, 15 bp, Homo sapiens
gactgtaacattttg

SEQ ID NO: 1632825 - DNA, 15 bp, Homo sapiens
actgtaacattttga

SEQ ID NO: 1632826 - DNA, 15 bp, Homo sapiens
ctgtaacattttgag

SEQ ID NO: 1632827 - DNA, 15 bp, Homo sapiens
tgtaacattttgagt

SEQ ID NO: 1632828 - DNA, 15 bp, Homo sapiens
gtaacattttgagtc

SEQ ID NO: 1632829 - DNA, 15 bp, Homo sapiens
taacattttgagtct

SEQ ID NO: 1632830 - DNA, 15 bp, Homo sapiens
aacattttgagtctg

SEQ ID NO: 1632831 - DNA, 15 bp, Homo sapiens
acattttgagtctga

SEQ ID NO: 1632832 - DNA, 15 bp, Homo sapiens
cattttgagtctgag

SEQ ID NO: 1632833 - DNA, 15 bp, Homo sapiens
attttgagtctgagt

SEQ ID NO: 1632834 - DNA, 15 bp, Homo sapiens
ttttgagtctgagta

SEQ ID NO: 1632835 - DNA, 15 bp, Homo sapiens
tttgagtctgagtaa

SEQ ID NO: 1632836 - DNA, 15 bp, Homo sapiens
ttgagtctgagtaag

SEQ ID NO: 1632837 - DNA, 15 bp, Homo sapiens
tgagtctgagtaagc

SEQ ID NO: 1632838 - DNA, 15 bp, Homo sapiens
gagtctgagtaagca

SEQ ID NO: 1632839 - DNA, 15 bp, Homo sapiens
agtctgagtaagcaa

SEQ ID NO: 1632840 - DNA, 15 bp, Homo sapiens
gtctgagtaagcaag

SEQ ID NO: 1632841 - DNA, 15 bp, Homo sapiens
tctgagtaagcaaga

SEQ ID NO: 1632842 - DNA, 15 bp, Homo sapiens
ctgagtaagcaagaa

SEQ ID NO: 1632843 - DNA, 15 bp, Homo sapiens
tgagtaagcaagaag

SEQ ID NO: 1632844 - DNA, 15 bp, Homo sapiens
gagtaagcaagaaga

SEQ ID NO: 1632845 - DNA, 15 bp, Homo sapiens
agtaagcaagaagat

SEQ ID NO: 1632846 - DNA, 15 bp, Homo sapiens
gtaagcaagaagata

SEQ ID NO: 1632847 - DNA, 15 bp, Homo sapiens
taagcaagaagataa

SEQ ID NO: 1632848 - DNA, 15 bp, Homo sapiens
aagcaagaagataat

SEQ ID NO: 1632849 - DNA, 15 bp, Homo sapiens
agcaagaagataatg

SEQ ID NO: 1632850 - DNA, 15 bp, Homo sapiens
gcaagaagataatgg

SEQ ID NO: 1632851 - DNA, 15 bp, Homo sapiens
caagaagataatggt

SEQ ID NO: 1632852 - DNA, 15 bp, Homo sapiens
aagaagataatggtg

SEQ ID NO: 1632853 - DNA, 15 bp, Homo sapiens
agaagataatggtgc

SEQ ID NO: 1632854 - DNA, 15 bp, Homo sapiens
gaagataatggtgca

SEQ ID NO: 1632855 - DNA, 15 bp, Homo sapiens
aagataatggtgcag

SEQ ID NO: 1632856 - DNA, 15 bp, Homo sapiens
agataatggtgcaga

SEQ ID NO: 1632857 - DNA, 15 bp, Homo sapiens
gataatggtgcagat

SEQ ID NO: 1632858 - DNA, 15 bp, Homo sapiens
ataatggtgcagata

SEQ ID NO: 1632859 - DNA, 15 bp, Homo sapiens
taatggtgcagatac

SEQ ID NO: 1632860 - DNA, 15 bp, Homo sapiens
aatggtgcagatacc

SEQ ID NO: 1632861 - DNA, 15 bp, Homo sapiens
atggtgcagatacca

SEQ ID NO: 1632862 - DNA, 15 bp, Homo sapiens
tggtgcagataccag

SEQ ID NO: 1632863 - DNA, 15 bp, Homo sapiens
ggtgcagataccagc

SEQ ID NO: 1632864 - DNA, 15 bp, Homo sapiens
gtgcagataccagca

SEQ ID NO: 1632865 - DNA, 15 bp, Homo sapiens
tgcagataccagcaa

SEQ ID NO: 1632866 - DNA, 15 bp, Homo sapiens
gcagataccagcaag

SEQ ID NO: 1632867 - DNA, 15 bp, Homo sapiens
cagataccagcaagt

SEQ ID NO: 1632868 - DNA, 15 bp, Homo sapiens
agataccagcaagtc

SEQ ID NO: 1632869 - DNA, 15 bp, Homo sapiens
gataccagcaagtcc

SEQ ID NO: 1632870 - DNA, 15 bp, Homo sapiens
ataccagcaagtcca

SEQ ID NO: 1632871 - DNA, 15 bp, Homo sapiens
taccagcaagtccag

SEQ ID NO: 1632872 - DNA, 15 bp, Homo sapiens
accagcaagtccaga

SEQ ID NO: 1632873 - DNA, 15 bp, Homo sapiens
ccagcaagtccagag

SEQ ID NO: 1632874 - DNA, 15 bp, Homo sapiens
cagcaagtccagagg

SEQ ID NO: 1632875 - DNA, 15 bp, Homo sapiens
agcaagtccagagga

SEQ ID NO: 1632876 - DNA, 15 bp, Homo sapiens
gcaagtccagaggag

SEQ ID NO: 1632877 - DNA, 15 bp, Homo sapiens
caagtccagaggagg

SEQ ID NO: 1632878 - DNA, 15 bp, Homo sapiens
aagtccagaggagga

SEQ ID NO: 1632879 - DNA, 15 bp, Homo sapiens
agtccagaggaggat

SEQ ID NO: 1632880 - DNA, 15 bp, Homo sapiens
gtccagaggaggatt

SEQ ID NO: 1632881 - DNA, 15 bp, Homo sapiens
tccagaggaggattt

SEQ ID NO: 1632882 - DNA, 15 bp, Homo sapiens
ccagaggaggatttg

SEQ ID NO: 1632883 - DNA, 15 bp, Homo sapiens
cagaggaggatttga

SEQ ID NO: 1632884 - DNA, 15 bp, Homo sapiens
agaggaggatttgac

SEQ ID NO: 1632885 - DNA, 15 bp, Homo sapiens
gaggaggatttgact

SEQ ID NO: 1632886 - DNA, 15 bp, Homo sapiens
aggaggatttgactt

SEQ ID NO: 1632887 - DNA, 15 bp, Homo sapiens
ggaggatttgacttt

SEQ ID NO: 1632888 - DNA, 15 bp, Homo sapiens
gaggatttgactttg

SEQ ID NO: 1632889 - DNA, 15 bp, Homo sapiens
aggatttgactttgt

SEQ ID NO: 1632890 - DNA, 15 bp, Homo sapiens
ggatttgactttgtt

SEQ ID NO: 1632891 - DNA, 15 bp, Homo sapiens
gatttgactttgttg

SEQ ID NO: 1632892 - DNA, 15 bp, Homo sapiens
atttgactttgttga

SEQ ID NO: 1632893 - DNA, 15 bp, Homo sapiens
tttgactttgttgac

SEQ ID NO: 1632894 - DNA, 15 bp, Homo sapiens
ttgactttgttgact

SEQ ID NO: 1632895 - DNA, 15 bp, Homo sapiens
tgactttgttgactt

SEQ ID NO: 1632896 - DNA, 15 bp, Homo sapiens
gactttgttgacttg

SEQ ID NO: 1632897 - DNA, 15 bp, Homo sapiens
actttgttgacttga

SEQ ID NO: 1632898 - DNA, 15 bp, Homo sapiens
ctttgttgacttgac

SEQ ID NO: 1632899 - DNA, 15 bp, Homo sapiens
tttgttgacttgact

SEQ ID NO: 1632900 - DNA, 15 bp, Homo sapiens
ttgttgacttgactt

SEQ ID NO: 1632901 - DNA, 15 bp, Homo sapiens
tgttgacttgacttt

SEQ ID NO: 1632902 - DNA, 15 bp, Homo sapiens
gttgacttgactttg

SEQ ID NO: 1632903 - DNA, 15 bp, Homo sapiens
ttgacttgactttgg

SEQ ID NO: 1632904 - DNA, 15 bp, Homo sapiens
tgacttgactttggt

SEQ ID NO: 1632905 - DNA, 15 bp, Homo sapiens
gacttgactttggtt

SEQ ID NO: 1632906 - DNA, 15 bp, Homo sapiens
acttgactttggttg

SEQ ID NO: 1632907 - DNA, 15 bp, Homo sapiens
cttgactttggttga

SEQ ID NO: 1632908 - DNA, 15 bp, Homo sapiens
ttgactttggttgac

SEQ ID NO: 1632909 - DNA, 15 bp, Homo sapiens
tgactttggttgaca

SEQ ID NO: 1632910 - DNA, 15 bp, Homo sapiens
gactttggttgacat

SEQ ID NO: 1632911 - DNA, 15 bp, Homo sapiens
actttggttgacatt

SEQ ID NO: 1632912 - DNA, 15 bp, Homo sapiens
ctttggttgacattg

SEQ ID NO: 1632913 - DNA, 15 bp, Homo sapiens
tttggttgacattga

SEQ ID NO: 1632914 - DNA, 15 bp, Homo sapiens
ttggttgacattgac

SEQ ID NO: 1632915 - DNA, 15 bp, Homo sapiens
tggttgacattgact

SEQ ID NO: 1632916 - DNA, 15 bp, Homo sapiens
ggttgacattgactt

SEQ ID NO: 1632917 - DNA, 15 bp, Homo sapiens
gttgacattgacttt

SEQ ID NO: 1632918 - DNA, 15 bp, Homo sapiens
ttgacattgactttg

SEQ ID NO: 1632919 - DNA, 15 bp, Homo sapiens
tgacattgactttgg

SEQ ID NO: 1632920 - DNA, 15 bp, Homo sapiens
gacattgactttggt

SEQ ID NO: 1632921 - DNA, 15 bp, Homo sapiens
acattgactttggtc

SEQ ID NO: 1632922 - DNA, 15 bp, Homo sapiens
cattgactttggtca

SEQ ID NO: 1632923 - DNA, 15 bp, Homo sapiens
attgactttggtcaa

SEQ ID NO: 1632924 - DNA, 15 bp, Homo sapiens
ttgactttggtcaat

SEQ ID NO: 1632925 - DNA, 15 bp, Homo sapiens
tgactttggtcaatg

SEQ ID NO: 1632926 - DNA, 15 bp, Homo sapiens
gactttggtcaatgg

SEQ ID NO: 1632927 - DNA, 15 bp, Homo sapiens
actttggtcaatggc

SEQ ID NO: 1632928 - DNA, 15 bp, Homo sapiens
ctttggtcaatggca

SEQ ID NO: 1632929 - DNA, 15 bp, Homo sapiens
tttggtcaatggcaa

SEQ ID NO: 1632930 - DNA, 15 bp, Homo sapiens
ttggtcaatggcaaa

SEQ ID NO: 1632931 - DNA, 15 bp, Homo sapiens
tggtcaatggcaaag

SEQ ID NO: 1632932 - DNA, 15 bp, Homo sapiens
ggtcaatggcaaaga

SEQ ID NO: 1632933 - DNA, 15 bp, Homo sapiens
gtcaatggcaaagat

SEQ ID NO: 1632934 - DNA, 15 bp, Homo sapiens
tcaatggcaaagatt

SEQ ID NO: 1632935 - DNA, 15 bp, Homo sapiens
caatggcaaagattg

SEQ ID NO: 1632936 - DNA, 15 bp, Homo sapiens
aatggcaaagattga

SEQ ID NO: 1632937 - DNA, 15 bp, Homo sapiens
atggcaaagattgac

SEQ ID NO: 1632938 - DNA, 15 bp, Homo sapiens
tggcaaagattgact

SEQ ID NO: 1632939 - DNA, 15 bp, Homo sapiens
ggcaaagattgactt

SEQ ID NO: 1632940 - DNA, 15 bp, Homo sapiens
gcaaagattgacttt

SEQ ID NO: 1632941 - DNA, 15 bp, Homo sapiens
caaagattgactttg

SEQ ID NO: 1632942 - DNA, 15 bp, Homo sapiens
aaagattgactttgg

SEQ ID NO: 1632943 - DNA, 15 bp, Homo sapiens
aagattgactttggt

SEQ ID NO: 1632944 - DNA, 15 bp, Homo sapiens
agattgactttggtt

SEQ ID NO: 1632945 - DNA, 15 bp, Homo sapiens
gattgactttggttt

SEQ ID NO: 1632946 - DNA, 15 bp, Homo sapiens
attgactttggtttc

SEQ ID NO: 1632947 - DNA, 15 bp, Homo sapiens
ttgactttggtttca

SEQ ID NO: 1632948 - DNA, 15 bp, Homo sapiens
tgactttggtttcag

SEQ ID NO: 1632949 - DNA, 15 bp, Homo sapiens
gactttggtttcaga

SEQ ID NO: 1632950 - DNA, 15 bp, Homo sapiens
actttggtttcagag

SEQ ID NO: 1632951 - DNA, 15 bp, Homo sapiens
ctttggtttcagaga

SEQ ID NO: 1632952 - DNA, 15 bp, Homo sapiens
tttggtttcagagac

SEQ ID NO: 1632953 - DNA, 15 bp, Homo sapiens
ttggtttcagagaca

SEQ ID NO: 1632954 - DNA, 15 bp, Homo sapiens
tggtttcagagacac

SEQ ID NO: 1632955 - DNA, 15 bp, Homo sapiens
ggtttcagagacact

SEQ ID NO: 1632956 - DNA, 15 bp, Homo sapiens
gtttcagagacactg

SEQ ID NO: 1632957 - DNA, 15 bp, Homo sapiens
tttcagagacactga

SEQ ID NO: 1632958 - DNA, 15 bp, Homo sapiens
ttcagagacactgat

SEQ ID NO: 1632959 - DNA, 15 bp, Homo sapiens
tcagagacactgatg

SEQ ID NO: 1632960 - DNA, 15 bp, Homo sapiens
cagagacactgatgt

SEQ ID NO: 1632961 - DNA, 15 bp, Homo sapiens
agagacactgatgta

SEQ ID NO: 1632962 - DNA, 15 bp, Homo sapiens
gagacactgatgtat

SEQ ID NO: 1632963 - DNA, 15 bp, Homo sapiens
agacactgatgtata

SEQ ID NO: 1632964 - DNA, 15 bp, Homo sapiens
gacactgatgtataa

SEQ ID NO: 1632965 - DNA, 15 bp, Homo sapiens
acactgatgtataat

SEQ ID NO: 1632966 - DNA, 15 bp, Homo sapiens
cactgatgtataata

SEQ ID NO: 1632967 - DNA, 15 bp, Homo sapiens
actgatgtataatag

SEQ ID NO: 1632968 - DNA, 15 bp, Homo sapiens
ctgatgtataataga

SEQ ID NO: 1632969 - DNA, 15 bp, Homo sapiens
tgatgtataatagag

SEQ ID NO: 1632970 - DNA, 15 bp, Homo sapiens
gatgtataatagagc

SEQ ID NO: 1632971 - DNA, 15 bp, Homo sapiens
atgtataatagagct

SEQ ID NO: 1632972 - DNA, 15 bp, Homo sapiens
tgtataatagagctt

SEQ ID NO: 1632973 - DNA, 15 bp, Homo sapiens
gtataatagagcttt

SEQ ID NO: 1632974 - DNA, 15 bp, Homo sapiens
tataatagagctttt

SEQ ID NO: 1632975 - DNA, 15 bp, Homo sapiens
ataatagagctttta

SEQ ID NO: 1632976 - DNA, 15 bp, Homo sapiens
taatagagcttttag

SEQ ID NO: 1632977 - DNA, 15 bp, Homo sapiens
aatagagcttttaga

SEQ ID NO: 1632978 - DNA, 15 bp, Homo sapiens
atagagcttttagaa

SEQ ID NO: 1632979 - DNA, 15 bp, Homo sapiens
tagagcttttagaaa

SEQ ID NO: 1632980 - DNA, 15 bp, Homo sapiens
agagcttttagaaaa

SEQ ID NO: 1632981 - DNA, 15 bp, Homo sapiens
gagcttttagaaaat

SEQ ID NO: 1632982 - DNA, 15 bp, Homo sapiens
agcttttagaaaata

SEQ ID NO: 1632983 - DNA, 15 bp, Homo sapiens
gcttttagaaaataa

SEQ ID NO: 1632984 - DNA, 15 bp, Homo sapiens
cttttagaaaataat

SEQ ID NO: 1632985 - DNA, 15 bp, Homo sapiens
ttttagaaaataatt

SEQ ID NO: 1632986 - DNA, 15 bp, Homo sapiens
tttagaaaataattc

SEQ ID NO: 1632987 - DNA, 15 bp, Homo sapiens
ttagaaaataattcc

SEQ ID NO: 1632988 - DNA, 15 bp, Homo sapiens
tagaaaataattccc

SEQ ID NO: 1632989 - DNA, 15 bp, Homo sapiens
agaaaataattccca

SEQ ID NO: 1632990 - DNA, 15 bp, Homo sapiens
gaaaataattcccat

SEQ ID NO: 1632991 - DNA, 15 bp, Homo sapiens
aaaataattcccatg

SEQ ID NO: 1632992 - DNA, 15 bp, Homo sapiens
aaataattcccatga

SEQ ID NO: 1632993 - DNA, 15 bp, Homo sapiens
aataattcccatgag

SEQ ID NO: 1632994 - DNA, 15 bp, Homo sapiens
ataattcccatgagt

SEQ ID NO: 1632995 - DNA, 15 bp, Homo sapiens
taattcccatgagtc

SEQ ID NO: 1632996 - DNA, 15 bp, Homo sapiens
aattcccatgagtca

SEQ ID NO: 1632997 - DNA, 15 bp, Homo sapiens
attcccatgagtcac

SEQ ID NO: 1632998 - DNA, 15 bp, Homo sapiens
ttcccatgagtcact

SEQ ID NO: 1632999 - DNA, 15 bp, Homo sapiens
tcccatgagtcacta

SEQ ID NO: 1633000 - DNA, 15 bp, Homo sapiens
cccatgagtcactag

SEQ ID NO: 1633001 - DNA, 15 bp, Homo sapiens
ccatgagtcactagg

SEQ ID NO: 1633002 - DNA, 15 bp, Homo sapiens
catgagtcactaggg

SEQ ID NO: 1633003 - DNA, 15 bp, Homo sapiens
atgagtcactagggt

SEQ ID NO: 1633004 - DNA, 15 bp, Homo sapiens
tgagtcactagggtg

SEQ ID NO: 1633005 - DNA, 15 bp, Homo sapiens
gagtcactagggtgc

SEQ ID NO: 1633006 - DNA, 15 bp, Homo sapiens
agtcactagggtgcc

SEQ ID NO: 1633007 - DNA, 15 bp, Homo sapiens
gtcactagggtgcct

SEQ ID NO: 1633008 - DNA, 15 bp, Homo sapiens
tcactagggtgcctg

SEQ ID NO: 1633009 - DNA, 15 bp, Homo sapiens
cactagggtgcctgt

SEQ ID NO: 1633010 - DNA, 15 bp, Homo sapiens
actagggtgcctgtc

SEQ ID NO: 1633011 - DNA, 15 bp, Homo sapiens
ctagggtgcctgtcc

SEQ ID NO: 1633012 - DNA, 15 bp, Homo sapiens
tagggtgcctgtcca

SEQ ID NO: 1633013 - DNA, 15 bp, Homo sapiens
agggtgcctgtccaa

SEQ ID NO: 1633014 - DNA, 15 bp, Homo sapiens
gggtgcctgtccaaa

SEQ ID NO: 1633015 - DNA, 15 bp, Homo sapiens
ggtgcctgtccaaag

SEQ ID NO: 1633016 - DNA, 15 bp, Homo sapiens
gtgcctgtccaaagt

SEQ ID NO: 1633017 - DNA, 15 bp, Homo sapiens
tgcctgtccaaagtg

SEQ ID NO: 1633018 - DNA, 15 bp, Homo sapiens
gcctgtccaaagtgc

SEQ ID NO: 1633019 - DNA, 15 bp, Homo sapiens
cctgtccaaagtgca

SEQ ID NO: 1633020 - DNA, 15 bp, Homo sapiens
ctgtccaaagtgcag

SEQ ID NO: 1633021 - DNA, 15 bp, Homo sapiens
tgtccaaagtgcagt

SEQ ID NO: 1633022 - DNA, 15 bp, Homo sapiens
gtccaaagtgcagtg

SEQ ID NO: 1633023 - DNA, 15 bp, Homo sapiens
tccaaagtgcagtga

SEQ ID NO: 1633024 - DNA, 15 bp, Homo sapiens
ccaaagtgcagtgaa

SEQ ID NO: 1633025 - DNA, 15 bp, Homo sapiens
caaagtgcagtgaag

SEQ ID NO: 1633026 - DNA, 15 bp, Homo sapiens
aaagtgcagtgaagg

SEQ ID NO: 1633027 - DNA, 15 bp, Homo sapiens
aagtgcagtgaaggg

SEQ ID NO: 1633028 - DNA, 15 bp, Homo sapiens
agtgcagtgaaggga

SEQ ID NO: 1633029 - DNA, 15 bp, Homo sapiens
gtgcagtgaagggac

SEQ ID NO: 1633030 - DNA, 15 bp, Homo sapiens
tgcagtgaagggact

SEQ ID NO: 1633031 - DNA, 15 bp, Homo sapiens
gcagtgaagggactg

SEQ ID NO: 1633032 - DNA, 15 bp, Homo sapiens
cagtgaagggactgc

SEQ ID NO: 1633033 - DNA, 15 bp, Homo sapiens
agtgaagggactgca

SEQ ID NO: 1633034 - DNA, 15 bp, Homo sapiens
gtgaagggactgcat

SEQ ID NO: 1633035 - DNA, 15 bp, Homo sapiens
tgaagggactgcata

SEQ ID NO: 1633036 - DNA, 15 bp, Homo sapiens
gaagggactgcatag

SEQ ID NO: 1633037 - DNA, 15 bp, Homo sapiens
aagggactgcataga

SEQ ID NO: 1633038 - DNA, 15 bp, Homo sapiens
agggactgcatagaa

SEQ ID NO: 1633039 - DNA, 15 bp, Homo sapiens
gggactgcatagaag

SEQ ID NO: 1633040 - DNA, 15 bp, Homo sapiens
ggactgcatagaaga

SEQ ID NO: 1633041 - DNA, 15 bp, Homo sapiens
gactgcatagaagaa

SEQ ID NO: 1633042 - DNA, 15 bp, Homo sapiens
actgcatagaagaag

SEQ ID NO: 1633043 - DNA, 15 bp, Homo sapiens
ctgcatagaagaaga

SEQ ID NO: 1633044 - DNA, 15 bp, Homo sapiens
tgcatagaagaagag

SEQ ID NO: 1633045 - DNA, 15 bp, Homo sapiens
gcatagaagaagagg

SEQ ID NO: 1633046 - DNA, 15 bp, Homo sapiens
catagaagaagaggc

SEQ ID NO: 1633047 - DNA, 15 bp, Homo sapiens
atagaagaagaggct

SEQ ID NO: 1633048 - DNA, 15 bp, Homo sapiens
tagaagaagaggctt

SEQ ID NO: 1633049 - DNA, 15 bp, Homo sapiens
agaagaagaggcttg

SEQ ID NO: 1633050 - DNA, 15 bp, Homo sapiens
gaagaagaggcttgg

SEQ ID NO: 1633051 - DNA, 15 bp, Homo sapiens
aagaagaggcttgga

SEQ ID NO: 1633052 - DNA, 15 bp, Homo sapiens
agaagaggcttggag

SEQ ID NO: 1633053 - DNA, 15 bp, Homo sapiens
gaagaggcttggaga

SEQ ID NO: 1633054 - DNA, 15 bp, Homo sapiens
aagaggcttggagat

SEQ ID NO: 1633055 - DNA, 15 bp, Homo sapiens
agaggcttggagatt

SEQ ID NO: 1633056 - DNA, 15 bp, Homo sapiens
gaggcttggagattt

SEQ ID NO: 1633057 - DNA, 15 bp, Homo sapiens
aggcttggagatttc

SEQ ID NO: 1633058 - DNA, 15 bp, Homo sapiens
ggcttggagatttcc

SEQ ID NO: 1633059 - DNA, 15 bp, Homo sapiens
gcttggagatttcct

SEQ ID NO: 1633060 - DNA, 15 bp, Homo sapiens
cttggagatttcctt

SEQ ID NO: 1633061 - DNA, 15 bp, Homo sapiens
ttggagatttccttg

SEQ ID NO: 1633062 - DNA, 15 bp, Homo sapiens
tggagatttccttgt

SEQ ID NO: 1633063 - DNA, 15 bp, Homo sapiens
ggagatttccttgta

SEQ ID NO: 1633064 - DNA, 15 bp, Homo sapiens
gagatttccttgtac

SEQ ID NO: 1633065 - DNA, 15 bp, Homo sapiens
agatttccttgtaca

SEQ ID NO: 1633066 - DNA, 15 bp, Homo sapiens
gatttccttgtacag

SEQ ID NO: 1633067 - DNA, 15 bp, Homo sapiens
atttccttgtacagg

SEQ ID NO: 1633068 - DNA, 15 bp, Homo sapiens
tttccttgtacaggg

SEQ ID NO: 1633069 - DNA, 15 bp, Homo sapiens
ttccttgtacagggg

SEQ ID NO: 1633070 - DNA, 15 bp, Homo sapiens
tccttgtacagggga

SEQ ID NO: 1633071 - DNA, 15 bp, Homo sapiens
ccttgtacaggggat

SEQ ID NO: 1633072 - DNA, 15 bp, Homo sapiens
cttgtacaggggata

SEQ ID NO: 1633073 - DNA, 15 bp, Homo sapiens
ttgtacaggggatag

SEQ ID NO: 1633074 - DNA, 15 bp, Homo sapiens
tgtacaggggatagc

SEQ ID NO: 1633075 - DNA, 15 bp, Homo sapiens
gtacaggggatagct

SEQ ID NO: 1633076 - DNA, 15 bp, Homo sapiens
tacaggggatagctg

SEQ ID NO: 1633077 - DNA, 15 bp, Homo sapiens
acaggggatagctga

SEQ ID NO: 1633078 - DNA, 15 bp, Homo sapiens
caggggatagctgaa

SEQ ID NO: 1633079 - DNA, 15 bp, Homo sapiens
aggggatagctgaag

SEQ ID NO: 1633080 - DNA, 15 bp, Homo sapiens
ggggatagctgaagc

SEQ ID NO: 1633081 - DNA, 15 bp, Homo sapiens
gggatagctgaagca

SEQ ID NO: 1633082 - DNA, 15 bp, Homo sapiens
ggatagctgaagcat

SEQ ID NO: 1633083 - DNA, 15 bp, Homo sapiens
gatagctgaagcata

SEQ ID NO: 1633084 - DNA, 15 bp, Homo sapiens
atagctgaagcatat

SEQ ID NO: 1633085 - DNA, 15 bp, Homo sapiens
tagctgaagcatatt

SEQ ID NO: 1633086 - DNA, 15 bp, Homo sapiens
agctgaagcatattc

SEQ ID NO: 1633087 - DNA, 15 bp, Homo sapiens
gctgaagcatattcc

SEQ ID NO: 1633088 - DNA, 15 bp, Homo sapiens
ctgaagcatattccc

SEQ ID NO: 1633089 - DNA, 15 bp, Homo sapiens
tgaagcatattcccc

SEQ ID NO: 1633090 - DNA, 15 bp, Homo sapiens
gaagcatattcccca

SEQ ID NO: 1633091 - DNA, 15 bp, Homo sapiens
aagcatattccccaa

SEQ ID NO: 1633092 - DNA, 15 bp, Homo sapiens
agcatattccccaac

SEQ ID NO: 1633093 - DNA, 15 bp, Homo sapiens
gcatattccccaaca

SEQ ID NO: 1633094 - DNA, 15 bp, Homo sapiens
catattccccaacac

SEQ ID NO: 1633095 - DNA, 15 bp, Homo sapiens
atattccccaacaca

SEQ ID NO: 1633096 - DNA, 15 bp, Homo sapiens
tattccccaacacaa

SEQ ID NO: 1633097 - DNA, 15 bp, Homo sapiens
attccccaacacaat

SEQ ID NO: 1633098 - DNA, 15 bp, Homo sapiens
ttccccaacacaata

SEQ ID NO: 1633099 - DNA, 15 bp, Homo sapiens
tccccaacacaatat

SEQ ID NO: 1633100 - DNA, 15 bp, Homo sapiens
ccccaacacaatatt

SEQ ID NO: 1633101 - DNA, 15 bp, Homo sapiens
cccaacacaatatta

SEQ ID NO: 1633102 - DNA, 15 bp, Homo sapiens
ccaacacaatattaa

SEQ ID NO: 1633103 - DNA, 15 bp, Homo sapiens
caacacaatattaaa

SEQ ID NO: 1633104 - DNA, 15 bp, Homo sapiens
aacacaatattaaat

SEQ ID NO: 1633105 - DNA, 15 bp, Homo sapiens
acacaatattaaatt

SEQ ID NO: 1633106 - DNA, 15 bp, Homo sapiens
cacaatattaaattt

SEQ ID NO: 1633107 - DNA, 15 bp, Homo sapiens
acaatattaaatttg

SEQ ID NO: 1633108 - DNA, 15 bp, Homo sapiens
caatattaaatttgt

SEQ ID NO: 1633109 - DNA, 15 bp, Homo sapiens
aatattaaatttgta

SEQ ID NO: 1633110 - DNA, 15 bp, Homo sapiens
atattaaatttgtaa

SEQ ID NO: 1633111 - DNA, 15 bp, Homo sapiens
tattaaatttgtaaa

SEQ ID NO: 1633112 - DNA, 15 bp, Homo sapiens
attaaatttgtaaat

SEQ ID NO: 1633113 - DNA, 15 bp, Homo sapiens
ttaaatttgtaaatt

SEQ ID NO: 1633114 - DNA, 15 bp, Homo sapiens
taaatttgtaaatta

SEQ ID NO: 1633115 - DNA, 15 bp, Homo sapiens
aaatttgtaaattac

SEQ ID NO: 1633116 - DNA, 15 bp, Homo sapiens
aatttgtaaattacc

SEQ ID NO: 1633117 - DNA, 15 bp, Homo sapiens
atttgtaaattacct

SEQ ID NO: 1633118 - DNA, 15 bp, Homo sapiens
tttgtaaattacctt

SEQ ID NO: 1633119 - DNA, 15 bp, Homo sapiens
ttgtaaattaccttt

SEQ ID NO: 1633120 - DNA, 15 bp, Homo sapiens
tgtaaattaccttta

SEQ ID NO: 1633121 - DNA, 15 bp, Homo sapiens
gtaaattacctttaa

SEQ ID NO: 1633122 - DNA, 15 bp, Homo sapiens
taaattacctttaaa

SEQ ID NO: 1633123 - DNA, 15 bp, Homo sapiens
aaattacctttaaaa

SEQ ID NO: 1633124 - DNA, 15 bp, Homo sapiens
aattacctttaaaaa

SEQ ID NO: 1633125 - DNA, 15 bp, Homo sapiens
attacctttaaaaat

SEQ ID NO: 1633126 - DNA, 15 bp, Homo sapiens
ttacctttaaaaata

SEQ ID NO: 1633127 - DNA, 15 bp, Homo sapiens
tacctttaaaaatag

SEQ ID NO: 1633128 - DNA, 15 bp, Homo sapiens
acctttaaaaataga

SEQ ID NO: 1633129 - DNA, 15 bp, Homo sapiens
cctttaaaaatagaa

SEQ ID NO: 1633130 - DNA, 15 bp, Homo sapiens
ctttaaaaatagaaa

SEQ ID NO: 1633131 - DNA, 15 bp, Homo sapiens
tttaaaaatagaaag

SEQ ID NO: 1633132 - DNA, 15 bp, Homo sapiens
ttaaaaatagaaaga

SEQ ID NO: 1633133 - DNA, 15 bp, Homo sapiens
taaaaatagaaagaa

SEQ ID NO: 1633134 - DNA, 15 bp, Homo sapiens
aaaaatagaaagaaa

SEQ ID NO: 1633135 - DNA, 15 bp, Homo sapiens
aaaatagaaagaaaa

SEQ ID NO: 1633136 - DNA, 15 bp, Homo sapiens
aaatagaaagaaaat

SEQ ID NO: 1633137 - DNA, 15 bp, Homo sapiens
aatagaaagaaaatt

SEQ ID NO: 1633138 - DNA, 15 bp, Homo sapiens
atagaaagaaaattg

SEQ ID NO: 1633139 - DNA, 15 bp, Homo sapiens
tagaaagaaaattgc

SEQ ID NO: 1633140 - DNA, 15 bp, Homo sapiens
agaaagaaaattgcc

SEQ ID NO: 1633141 - DNA, 15 bp, Homo sapiens
gaaagaaaattgcca

SEQ ID NO: 1633142 - DNA, 15 bp, Homo sapiens
aaagaaaattgccat

SEQ ID NO: 1633143 - DNA, 15 bp, Homo sapiens
aagaaaattgccatt

SEQ ID NO: 1633144 - DNA, 15 bp, Homo sapiens
agaaaattgccattt

SEQ ID NO: 1633145 - DNA, 15 bp, Homo sapiens
gaaaattgccatttt

SEQ ID NO: 1633146 - DNA, 15 bp, Homo sapiens
aaaattgccatttta

SEQ ID NO: 1633147 - DNA, 15 bp, Homo sapiens
aaattgccattttag

SEQ ID NO: 1633148 - DNA, 15 bp, Homo sapiens
aattgccattttaga

SEQ ID NO: 1633149 - DNA, 15 bp, Homo sapiens
attgccattttagag

SEQ ID NO: 1633150 - DNA, 15 bp, Homo sapiens
ttgccattttagagt

SEQ ID NO: 1633151 - DNA, 15 bp, Homo sapiens
tgccattttagagtc

SEQ ID NO: 1633152 - DNA, 15 bp, Homo sapiens
gccattttagagtct

SEQ ID NO: 1633153 - DNA, 15 bp, Homo sapiens
ccattttagagtctc

SEQ ID NO: 1633154 - DNA, 15 bp, Homo sapiens
cattttagagtctca

SEQ ID NO: 1633155 - DNA, 15 bp, Homo sapiens
attttagagtctcaa

SEQ ID NO: 1633156 - DNA, 15 bp, Homo sapiens
ttttagagtctcaaa

SEQ ID NO: 1633157 - DNA, 15 bp, Homo sapiens
tttagagtctcaaaa

SEQ ID NO: 1633158 - DNA, 15 bp, Homo sapiens
ttagagtctcaaaag

SEQ ID NO: 1633159 - DNA, 15 bp, Homo sapiens
tagagtctcaaaagg

SEQ ID NO: 1633160 - DNA, 15 bp, Homo sapiens
agagtctcaaaagga

SEQ ID NO: 1633161 - DNA, 15 bp, Homo sapiens
gagtctcaaaaggac

SEQ ID NO: 1633162 - DNA, 15 bp, Homo sapiens
agtctcaaaaggact

SEQ ID NO: 1633163 - DNA, 15 bp, Homo sapiens
gtctcaaaaggactg

SEQ ID NO: 1633164 - DNA, 15 bp, Homo sapiens
tctcaaaaggactga

SEQ ID NO: 1633165 - DNA, 15 bp, Homo sapiens
ctcaaaaggactgag

SEQ ID NO: 1633166 - DNA, 15 bp, Homo sapiens
tcaaaaggactgagc

SEQ ID NO: 1633167 - DNA, 15 bp, Homo sapiens
caaaaggactgagca

SEQ ID NO: 1633168 - DNA, 15 bp, Homo sapiens
aaaaggactgagcac

SEQ ID NO: 1633169 - DNA, 15 bp, Homo sapiens
aaaggactgagcacc

SEQ ID NO: 1633170 - DNA, 15 bp, Homo sapiens
aaggactgagcacca

SEQ ID NO: 1633171 - DNA, 15 bp, Homo sapiens
aggactgagcaccat

SEQ ID NO: 1633172 - DNA, 15 bp, Homo sapiens
ggactgagcaccatc

SEQ ID NO: 1633173 - DNA, 15 bp, Homo sapiens
gactgagcaccatct

SEQ ID NO: 1633174 - DNA, 15 bp, Homo sapiens
actgagcaccatcta

SEQ ID NO: 1633175 - DNA, 15 bp, Homo sapiens
ctgagcaccatctaa

SEQ ID NO: 1633176 - DNA, 15 bp, Homo sapiens
tgagcaccatctaat

SEQ ID NO: 1633177 - DNA, 15 bp, Homo sapiens
gagcaccatctaatt

SEQ ID NO: 1633178 - DNA, 15 bp, Homo sapiens
agcaccatctaatta

SEQ ID NO: 1633179 - DNA, 15 bp, Homo sapiens
gcaccatctaattac

SEQ ID NO: 1633180 - DNA, 15 bp, Homo sapiens
caccatctaattaca

SEQ ID NO: 1633181 - DNA, 15 bp, Homo sapiens
accatctaattacat

SEQ ID NO: 1633182 - DNA, 15 bp, Homo sapiens
ccatctaattacatc

SEQ ID NO: 1633183 - DNA, 15 bp, Homo sapiens
catctaattacatca

SEQ ID NO: 1633184 - DNA, 15 bp, Homo sapiens
atctaattacatcac

SEQ ID NO: 1633185 - DNA, 15 bp, Homo sapiens
tctaattacatcaca

SEQ ID NO: 1633186 - DNA, 15 bp, Homo sapiens
ctaattacatcacaa

SEQ ID NO: 1633187 - DNA, 15 bp, Homo sapiens
taattacatcacaaa

SEQ ID NO: 1633188 - DNA, 15 bp, Homo sapiens
aattacatcacaaat

SEQ ID NO: 1633189 - DNA, 15 bp, Homo sapiens
attacatcacaaatg

SEQ ID NO: 1633190 - DNA, 15 bp, Homo sapiens
ttacatcacaaatga

SEQ ID NO: 1633191 - DNA, 15 bp, Homo sapiens
tacatcacaaatgat

SEQ ID NO: 1633192 - DNA, 15 bp, Homo sapiens
acatcacaaatgatc

SEQ ID NO: 1633193 - DNA, 15 bp, Homo sapiens
catcacaaatgatct

SEQ ID NO: 1633194 - DNA, 15 bp, Homo sapiens
atcacaaatgatctc

SEQ ID NO: 1633195 - DNA, 15 bp, Homo sapiens
tcacaaatgatctcc

SEQ ID NO: 1633196 - DNA, 15 bp, Homo sapiens
cacaaatgatctccc

SEQ ID NO: 1633197 - DNA, 15 bp, Homo sapiens
acaaatgatctccca

SEQ ID NO: 1633198 - DNA, 15 bp, Homo sapiens
caaatgatctcccaa

SEQ ID NO: 1633199 - DNA, 15 bp, Homo sapiens
aaatgatctcccaaa

SEQ ID NO: 1633200 - DNA, 15 bp, Homo sapiens
aatgatctcccaaaa

SEQ ID NO: 1633201 - DNA, 15 bp, Homo sapiens
atgatctcccaaaaa

SEQ ID NO: 1633202 - DNA, 15 bp, Homo sapiens
tgatctcccaaaaaa

SEQ ID NO: 1633203 - DNA, 15 bp, Homo sapiens
gatctcccaaaaaac

SEQ ID NO: 1633204 - DNA, 15 bp, Homo sapiens
atctcccaaaaaact

SEQ ID NO: 1633205 - DNA, 15 bp, Homo sapiens
tctcccaaaaaactc

SEQ ID NO: 1633206 - DNA, 15 bp, Homo sapiens
ctcccaaaaaactca

SEQ ID NO: 1633207 - DNA, 15 bp, Homo sapiens
tcccaaaaaactcat

SEQ ID NO: 1633208 - DNA, 15 bp, Homo sapiens
cccaaaaaactcatt

SEQ ID NO: 1633209 - DNA, 15 bp, Homo sapiens
ccaaaaaactcattc

SEQ ID NO: 1633210 - DNA, 15 bp, Homo sapiens
caaaaaactcattcc

SEQ ID NO: 1633211 - DNA, 15 bp, Homo sapiens
aaaaaactcattcct

SEQ ID NO: 1633212 - DNA, 15 bp, Homo sapiens
aaaaactcattcctt

SEQ ID NO: 1633213 - DNA, 15 bp, Homo sapiens
aaaactcattccttt

SEQ ID NO: 1633214 - DNA, 15 bp, Homo sapiens
aaactcattccttta

SEQ ID NO: 1633215 - DNA, 15 bp, Homo sapiens
aactcattcctttag

SEQ ID NO: 1633216 - DNA, 15 bp, Homo sapiens
actcattcctttaga

SEQ ID NO: 1633217 - DNA, 15 bp, Homo sapiens
ctcattcctttagac

SEQ ID NO: 1633218 - DNA, 15 bp, Homo sapiens
tcattcctttagacc

SEQ ID NO: 1633219 - DNA, 15 bp, Homo sapiens
cattcctttagacca

SEQ ID NO: 1633220 - DNA, 15 bp, Homo sapiens
attcctttagaccag

SEQ ID NO: 1633221 - DNA, 15 bp, Homo sapiens
ttcctttagaccagg

SEQ ID NO: 1633222 - DNA, 15 bp, Homo sapiens
tcctttagaccagga

SEQ ID NO: 1633223 - DNA, 15 bp, Homo sapiens
cctttagaccaggag

SEQ ID NO: 1633224 - DNA, 15 bp, Homo sapiens
ctttagaccaggaga

SEQ ID NO: 1633225 - DNA, 15 bp, Homo sapiens
tttagaccaggagat

SEQ ID NO: 1633226 - DNA, 15 bp, Homo sapiens
ttagaccaggagatg

SEQ ID NO: 1633227 - DNA, 15 bp, Homo sapiens
tagaccaggagatga

SEQ ID NO: 1633228 - DNA, 15 bp, Homo sapiens
agaccaggagatgag

SEQ ID NO: 1633229 - DNA, 15 bp, Homo sapiens
gaccaggagatgagt

SEQ ID NO: 1633230 - DNA, 15 bp, Homo sapiens
accaggagatgagtt

SEQ ID NO: 1633231 - DNA, 15 bp, Homo sapiens
ccaggagatgagttt

SEQ ID NO: 1633232 - DNA, 15 bp, Homo sapiens
caggagatgagtttc

SEQ ID NO: 1633233 - DNA, 15 bp, Homo sapiens
aggagatgagtttct

SEQ ID NO: 1633234 - DNA, 15 bp, Homo sapiens
ggagatgagtttcta

SEQ ID NO: 1633235 - DNA, 15 bp, Homo sapiens
gagatgagtttctat

SEQ ID NO: 1633236 - DNA, 15 bp, Homo sapiens
agatgagtttctatt

SEQ ID NO: 1633237 - DNA, 15 bp, Homo sapiens
gatgagtttctattc

SEQ ID NO: 1633238 - DNA, 15 bp, Homo sapiens
atgagtttctattca

SEQ ID NO: 1633239 - DNA, 15 bp, Homo sapiens
tgagtttctattcat

SEQ ID NO: 1633240 - DNA, 15 bp, Homo sapiens
gagtttctattcatt

SEQ ID NO: 1633241 - DNA, 15 bp, Homo sapiens
agtttctattcatta

SEQ ID NO: 1633242 - DNA, 15 bp, Homo sapiens
gtttctattcattat

SEQ ID NO: 1633243 - DNA, 15 bp, Homo sapiens
tttctattcattatt

SEQ ID NO: 1633244 - DNA, 15 bp, Homo sapiens
ttctattcattatta

SEQ ID NO: 1633245 - DNA, 15 bp, Homo sapiens
tctattcattattat

SEQ ID NO: 1633246 - DNA, 15 bp, Homo sapiens
ctattcattattatt

SEQ ID NO: 1633247 - DNA, 15 bp, Homo sapiens
tattcattattattt

SEQ ID NO: 1633248 - DNA, 15 bp, Homo sapiens
attcattattatttt

SEQ ID NO: 1633249 - DNA, 15 bp, Homo sapiens
ttcattattattttt

SEQ ID NO: 1633250 - DNA, 15 bp, Homo sapiens
tcattattatttttg

SEQ ID NO: 1633251 - DNA, 15 bp, Homo sapiens
cattattatttttgt

SEQ ID NO: 1633252 - DNA, 15 bp, Homo sapiens
attattatttttgta

SEQ ID NO: 1633253 - DNA, 15 bp, Homo sapiens
ttattatttttgtag

SEQ ID NO: 1633254 - DNA, 15 bp, Homo sapiens
tattatttttgtagc

SEQ ID NO: 1633255 - DNA, 15 bp, Homo sapiens
attatttttgtagct

SEQ ID NO: 1633256 - DNA, 15 bp, Homo sapiens
ttatttttgtagcta

SEQ ID NO: 1633257 - DNA, 15 bp, Homo sapiens
tatttttgtagctaa

SEQ ID NO: 1633258 - DNA, 15 bp, Homo sapiens
atttttgtagctaaa

SEQ ID NO: 1633259 - DNA, 15 bp, Homo sapiens
tttttgtagctaaaa

SEQ ID NO: 1633260 - DNA, 15 bp, Homo sapiens
ttttgtagctaaaat

SEQ ID NO: 1633261 - DNA, 15 bp, Homo sapiens
tttgtagctaaaatt

SEQ ID NO: 1633262 - DNA, 15 bp, Homo sapiens
ttgtagctaaaattt

SEQ ID NO: 1633263 - DNA, 15 bp, Homo sapiens
tgtagctaaaatttc

SEQ ID NO: 1633264 - DNA, 15 bp, Homo sapiens
gtagctaaaatttca

SEQ ID NO: 1633265 - DNA, 15 bp, Homo sapiens
tagctaaaatttcaa

SEQ ID NO: 1633266 - DNA, 15 bp, Homo sapiens
agctaaaatttcaaa

SEQ ID NO: 1633267 - DNA, 15 bp, Homo sapiens
gctaaaatttcaaat

SEQ ID NO: 1633268 - DNA, 15 bp, Homo sapiens
ctaaaatttcaaatc

SEQ ID NO: 1633269 - DNA, 15 bp, Homo sapiens
taaaatttcaaatca

SEQ ID NO: 1633270 - DNA, 15 bp, Homo sapiens
aaaatttcaaatcac

SEQ ID NO: 1633271 - DNA, 15 bp, Homo sapiens
aaatttcaaatcaca

SEQ ID NO: 1633272 - DNA, 15 bp, Homo sapiens
aatttcaaatcacag

SEQ ID NO: 1633273 - DNA, 15 bp, Homo sapiens
atttcaaatcacaga

SEQ ID NO: 1633274 - DNA, 15 bp, Homo sapiens
tttcaaatcacagaa

SEQ ID NO: 1633275 - DNA, 15 bp, Homo sapiens
ttcaaatcacagaat

SEQ ID NO: 1633276 - DNA, 15 bp, Homo sapiens
tcaaatcacagaatc

SEQ ID NO: 1633277 - DNA, 15 bp, Homo sapiens
caaatcacagaatca

SEQ ID NO: 1633278 - DNA, 15 bp, Homo sapiens
aaatcacagaatcat

SEQ ID NO: 1633279 - DNA, 15 bp, Homo sapiens
aatcacagaatcata

SEQ ID NO: 1633280 - DNA, 15 bp, Homo sapiens
atcacagaatcataa

SEQ ID NO: 1633281 - DNA, 15 bp, Homo sapiens
tcacagaatcataat

SEQ ID NO: 1633282 - DNA, 15 bp, Homo sapiens
cacagaatcataata

SEQ ID NO: 1633283 - DNA, 15 bp, Homo sapiens
acagaatcataatat

SEQ ID NO: 1633284 - DNA, 15 bp, Homo sapiens
cagaatcataatata

SEQ ID NO: 1633285 - DNA, 15 bp, Homo sapiens
agaatcataatatat

SEQ ID NO: 1633286 - DNA, 15 bp, Homo sapiens
gaatcataatatatt

SEQ ID NO: 1633287 - DNA, 15 bp, Homo sapiens
aatcataatatattg

SEQ ID NO: 1633288 - DNA, 15 bp, Homo sapiens
atcataatatattgc

SEQ ID NO: 1633289 - DNA, 15 bp, Homo sapiens
tcataatatattgca

SEQ ID NO: 1633290 - DNA, 15 bp, Homo sapiens
cataatatattgcag

SEQ ID NO: 1633291 - DNA, 15 bp, Homo sapiens
ataatatattgcagt

SEQ ID NO: 1633292 - DNA, 15 bp, Homo sapiens
taatatattgcagtt

SEQ ID NO: 1633293 - DNA, 15 bp, Homo sapiens
aatatattgcagttt

SEQ ID NO: 1633294 - DNA, 15 bp, Homo sapiens
atatattgcagtttg

SEQ ID NO: 1633295 - DNA, 15 bp, Homo sapiens
tatattgcagtttgt

SEQ ID NO: 1633296 - DNA, 15 bp, Homo sapiens
atattgcagtttgtt

SEQ ID NO: 1633297 - DNA, 15 bp, Homo sapiens
tattgcagtttgttt

SEQ ID NO: 1633298 - DNA, 15 bp, Homo sapiens
attgcagtttgttta

SEQ ID NO: 1633299 - DNA, 15 bp, Homo sapiens
ttgcagtttgtttaa

SEQ ID NO: 1633300 - DNA, 15 bp, Homo sapiens
tgcagtttgtttaag

SEQ ID NO: 1633301 - DNA, 15 bp, Homo sapiens
gcagtttgtttaagc

SEQ ID NO: 1633302 - DNA, 15 bp, Homo sapiens
cagtttgtttaagcc

SEQ ID NO: 1633303 - DNA, 15 bp, Homo sapiens
agtttgtttaagcct

SEQ ID NO: 1633304 - DNA, 15 bp, Homo sapiens
gtttgtttaagcctt

SEQ ID NO: 1633305 - DNA, 15 bp, Homo sapiens
tttgtttaagcctta

SEQ ID NO: 1633306 - DNA, 15 bp, Homo sapiens
ttgtttaagccttaa

SEQ ID NO: 1633307 - DNA, 15 bp, Homo sapiens
tgtttaagccttaaa

SEQ ID NO: 1633308 - DNA, 15 bp, Homo sapiens
gtttaagccttaaaa

SEQ ID NO: 1633309 - DNA, 15 bp, Homo sapiens
tttaagccttaaaat

SEQ ID NO: 1633310 - DNA, 15 bp, Homo sapiens
ttaagccttaaaatg

SEQ ID NO: 1633311 - DNA, 15 bp, Homo sapiens
taagccttaaaatgt

SEQ ID NO: 1633312 - DNA, 15 bp, Homo sapiens
aagccttaaaatgtt

SEQ ID NO: 1633313 - DNA, 15 bp, Homo sapiens
agccttaaaatgttc

SEQ ID NO: 1633314 - DNA, 15 bp, Homo sapiens
gccttaaaatgttcc

SEQ ID NO: 1633315 - DNA, 15 bp, Homo sapiens
ccttaaaatgttcct

SEQ ID NO: 1633316 - DNA, 15 bp, Homo sapiens
cttaaaatgttcctg

SEQ ID NO: 1633317 - DNA, 15 bp, Homo sapiens
ttaaaatgttcctgg

SEQ ID NO: 1633318 - DNA, 15 bp, Homo sapiens
taaaatgttcctggc

SEQ ID NO: 1633319 - DNA, 15 bp, Homo sapiens
aaaatgttcctggcc

SEQ ID NO: 1633320 - DNA, 15 bp, Homo sapiens
aaatgttcctggccc

SEQ ID NO: 1633321 - DNA, 15 bp, Homo sapiens
aatgttcctggccca

SEQ ID NO: 1633322 - DNA, 15 bp, Homo sapiens
atgttcctggcccaa

SEQ ID NO: 1633323 - DNA, 15 bp, Homo sapiens
tgttcctggcccaaa

SEQ ID NO: 1633324 - DNA, 15 bp, Homo sapiens
gttcctggcccaaat

SEQ ID NO: 1633325 - DNA, 15 bp, Homo sapiens
ttcctggcccaaatg

SEQ ID NO: 1633326 - DNA, 15 bp, Homo sapiens
tcctggcccaaatgc

SEQ ID NO: 1633327 - DNA, 15 bp, Homo sapiens
cctggcccaaatgcc

SEQ ID NO: 1633328 - DNA, 15 bp, Homo sapiens
ctggcccaaatgcct

SEQ ID NO: 1633329 - DNA, 15 bp, Homo sapiens
tggcccaaatgcctc

SEQ ID NO: 1633330 - DNA, 15 bp, Homo sapiens
ggcccaaatgcctca

SEQ ID NO: 1633331 - DNA, 15 bp, Homo sapiens
gcccaaatgcctcac

SEQ ID NO: 1633332 - DNA, 15 bp, Homo sapiens
cccaaatgcctcact

SEQ ID NO: 1633333 - DNA, 15 bp, Homo sapiens
ccaaatgcctcactt

SEQ ID NO: 1633334 - DNA, 15 bp, Homo sapiens
caaatgcctcactta

SEQ ID NO: 1633335 - DNA, 15 bp, Homo sapiens
aaatgcctcacttaa

SEQ ID NO: 1633336 - DNA, 15 bp, Homo sapiens
aatgcctcacttaaa

SEQ ID NO: 1633337 - DNA, 15 bp, Homo sapiens
atgcctcacttaaat

SEQ ID NO: 1633338 - DNA, 15 bp, Homo sapiens
tgcctcacttaaata

SEQ ID NO: 1633339 - DNA, 15 bp, Homo sapiens
gcctcacttaaatac

SEQ ID NO: 1633340 - DNA, 15 bp, Homo sapiens
cctcacttaaatacg

SEQ ID NO: 1633341 - DNA, 15 bp, Homo sapiens
ctcacttaaatacgg

SEQ ID NO: 1633342 - DNA, 15 bp, Homo sapiens
tcacttaaatacggg

SEQ ID NO: 1633343 - DNA, 15 bp, Homo sapiens
cacttaaatacgggg

SEQ ID NO: 1633344 - DNA, 15 bp, Homo sapiens
acttaaatacgggga

SEQ ID NO: 1633345 - DNA, 15 bp, Homo sapiens
cttaaatacggggaa

SEQ ID NO: 1633346 - DNA, 15 bp, Homo sapiens
ttaaatacggggaaa

SEQ ID NO: 1633347 - DNA, 15 bp, Homo sapiens
taaatacggggaaac

SEQ ID NO: 1633348 - DNA, 15 bp, Homo sapiens
aaatacggggaaact

SEQ ID NO: 1633349 - DNA, 15 bp, Homo sapiens
aatacggggaaactg

SEQ ID NO: 1633350 - DNA, 15 bp, Homo sapiens
atacggggaaactga

SEQ ID NO: 1633351 - DNA, 15 bp, Homo sapiens
tacggggaaactgac

SEQ ID NO: 1633352 - DNA, 15 bp, Homo sapiens
acggggaaactgaca

SEQ ID NO: 1633353 - DNA, 15 bp, Homo sapiens
cggggaaactgacat

SEQ ID NO: 1633354 - DNA, 15 bp, Homo sapiens
ggggaaactgacatg

SEQ ID NO: 1633355 - DNA, 15 bp, Homo sapiens
gggaaactgacatgc

SEQ ID NO: 1633356 - DNA, 15 bp, Homo sapiens
ggaaactgacatgct

SEQ ID NO: 1633357 - DNA, 15 bp, Homo sapiens
gaaactgacatgctg

SEQ ID NO: 1633358 - DNA, 15 bp, Homo sapiens
aaactgacatgctga

SEQ ID NO: 1633359 - DNA, 15 bp, Homo sapiens
aactgacatgctgaa

SEQ ID NO: 1633360 - DNA, 15 bp, Homo sapiens
actgacatgctgaag

SEQ ID NO: 1633361 - DNA, 15 bp, Homo sapiens
ctgacatgctgaaga

SEQ ID NO: 1633362 - DNA, 15 bp, Homo sapiens
tgacatgctgaagag

SEQ ID NO: 1633363 - DNA, 15 bp, Homo sapiens
gacatgctgaagagt

SEQ ID NO: 1633364 - DNA, 15 bp, Homo sapiens
acatgctgaagagtc

SEQ ID NO: 1633365 - DNA, 15 bp, Homo sapiens
catgctgaagagtct

SEQ ID NO: 1633366 - DNA, 15 bp, Homo sapiens
atgctgaagagtctg

SEQ ID NO: 1633367 - DNA, 15 bp, Homo sapiens
tgctgaagagtctga

SEQ ID NO: 1633368 - DNA, 15 bp, Homo sapiens
gctgaagagtctgag

SEQ ID NO: 1633369 - DNA, 15 bp, Homo sapiens
ctgaagagtctgagt

SEQ ID NO: 1633370 - DNA, 15 bp, Homo sapiens
tgaagagtctgagtg

SEQ ID NO: 1633371 - DNA, 15 bp, Homo sapiens
gaagagtctgagtga

SEQ ID NO: 1633372 - DNA, 15 bp, Homo sapiens
aagagtctgagtgac

SEQ ID NO: 1633373 - DNA, 15 bp, Homo sapiens
agagtctgagtgacc

SEQ ID NO: 1633374 - DNA, 15 bp, Homo sapiens
gagtctgagtgacct

SEQ ID NO: 1633375 - DNA, 15 bp, Homo sapiens
agtctgagtgaccta

SEQ ID NO: 1633376 - DNA, 15 bp, Homo sapiens
gtctgagtgacctat

SEQ ID NO: 1633377 - DNA, 15 bp, Homo sapiens
tctgagtgacctatc

SEQ ID NO: 1633378 - DNA, 15 bp, Homo sapiens
ctgagtgacctatcc

SEQ ID NO: 1633379 - DNA, 15 bp, Homo sapiens
tgagtgacctatcct

SEQ ID NO: 1633380 - DNA, 15 bp, Homo sapiens
gagtgacctatcctt

SEQ ID NO: 1633381 - DNA, 15 bp, Homo sapiens
agtgacctatccttg

SEQ ID NO: 1633382 - DNA, 15 bp, Homo sapiens
gtgacctatccttgt

SEQ ID NO: 1633383 - DNA, 15 bp, Homo sapiens
tgacctatccttgtt

SEQ ID NO: 1633384 - DNA, 15 bp, Homo sapiens
gacctatccttgttc

SEQ ID NO: 1633385 - DNA, 15 bp, Homo sapiens
acctatccttgttca

SEQ ID NO: 1633386 - DNA, 15 bp, Homo sapiens
cctatccttgttcac

SEQ ID NO: 1633387 - DNA, 15 bp, Homo sapiens
ctatccttgttcact

SEQ ID NO: 1633388 - DNA, 15 bp, Homo sapiens
tatccttgttcactc

SEQ ID NO: 1633389 - DNA, 15 bp, Homo sapiens
atccttgttcactca

SEQ ID NO: 1633390 - DNA, 15 bp, Homo sapiens
tccttgttcactcaa

SEQ ID NO: 1633391 - DNA, 15 bp, Homo sapiens
ccttgttcactcaag

SEQ ID NO: 1633392 - DNA, 15 bp, Homo sapiens
cttgttcactcaagt

SEQ ID NO: 1633393 - DNA, 15 bp, Homo sapiens
ttgttcactcaagtt

SEQ ID NO: 1633394 - DNA, 15 bp, Homo sapiens
tgttcactcaagttg

SEQ ID NO: 1633395 - DNA, 15 bp, Homo sapiens
gttcactcaagttga

SEQ ID NO: 1633396 - DNA, 15 bp, Homo sapiens
ttcactcaagttgaa

SEQ ID NO: 1633397 - DNA, 15 bp, Homo sapiens
tcactcaagttgaat

SEQ ID NO: 1633398 - DNA, 15 bp, Homo sapiens
cactcaagttgaata

SEQ ID NO: 1633399 - DNA, 15 bp, Homo sapiens
actcaagttgaataa

SEQ ID NO: 1633400 - DNA, 15 bp, Homo sapiens
ctcaagttgaataat

SEQ ID NO: 1633401 - DNA, 15 bp, Homo sapiens
tcaagttgaataatg

SEQ ID NO: 1633402 - DNA, 15 bp, Homo sapiens
caagttgaataatgc

SEQ ID NO: 1633403 - DNA, 15 bp, Homo sapiens
aagttgaataatgct

SEQ ID NO: 1633404 - DNA, 15 bp, Homo sapiens
agttgaataatgctg

SEQ ID NO: 1633405 - DNA, 15 bp, Homo sapiens
gttgaataatgctgc

SEQ ID NO: 1633406 - DNA, 15 bp, Homo sapiens
ttgaataatgctgcc

SEQ ID NO: 1633407 - DNA, 15 bp, Homo sapiens
tgaataatgctgcca

SEQ ID NO: 1633408 - DNA, 15 bp, Homo sapiens
gaataatgctgccag

SEQ ID NO: 1633409 - DNA, 15 bp, Homo sapiens
aataatgctgccaga

SEQ ID NO: 1633410 - DNA, 15 bp, Homo sapiens
ataatgctgccagaa

SEQ ID NO: 1633411 - DNA, 15 bp, Homo sapiens
taatgctgccagaaa

SEQ ID NO: 1633412 - DNA, 15 bp, Homo sapiens
aatgctgccagaaat

SEQ ID NO: 1633413 - DNA, 15 bp, Homo sapiens
atgctgccagaaatt

SEQ ID NO: 1633414 - DNA, 15 bp, Homo sapiens
tgctgccagaaattc

SEQ ID NO: 1633415 - DNA, 15 bp, Homo sapiens
gctgccagaaattct

SEQ ID NO: 1633416 - DNA, 15 bp, Homo sapiens
ctgccagaaattcta

SEQ ID NO: 1633417 - DNA, 15 bp, Homo sapiens
tgccagaaattctac

SEQ ID NO: 1633418 - DNA, 15 bp, Homo sapiens
gccagaaattctact

SEQ ID NO: 1633419 - DNA, 15 bp, Homo sapiens
ccagaaattctactg

SEQ ID NO: 1633420 - DNA, 15 bp, Homo sapiens
cagaaattctactgt

SEQ ID NO: 1633421 - DNA, 15 bp, Homo sapiens
agaaattctactgtt

SEQ ID NO: 1633422 - DNA, 15 bp, Homo sapiens
gaaattctactgtta

SEQ ID NO: 1633423 - DNA, 15 bp, Homo sapiens
aaattctactgttag

SEQ ID NO: 1633424 - DNA, 15 bp, Homo sapiens
aattctactgttaga

SEQ ID NO: 1633425 - DNA, 15 bp, Homo sapiens
attctactgttagaa

SEQ ID NO: 1633426 - DNA, 15 bp, Homo sapiens
ttctactgttagaat

SEQ ID NO: 1633427 - DNA, 15 bp, Homo sapiens
tctactgttagaatt

SEQ ID NO: 1633428 - DNA, 15 bp, Homo sapiens
ctactgttagaattt

SEQ ID NO: 1633429 - DNA, 15 bp, Homo sapiens
tactgttagaatttc

SEQ ID NO: 1633430 - DNA, 15 bp, Homo sapiens
actgttagaatttct

SEQ ID NO: 1633431 - DNA, 15 bp, Homo sapiens
ctgttagaatttctg

SEQ ID NO: 1633432 - DNA, 15 bp, Homo sapiens
tgttagaatttctgc

SEQ ID NO: 1633433 - DNA, 15 bp, Homo sapiens
gttagaatttctgct

SEQ ID NO: 1633434 - DNA, 15 bp, Homo sapiens
ttagaatttctgctc

SEQ ID NO: 1633435 - DNA, 15 bp, Homo sapiens
tatagatacctttat

SEQ ID NO: 1633436 - DNA, 15 bp, Homo sapiens
atagatacctttatt

SEQ ID NO: 1633437 - DNA, 15 bp, Homo sapiens
tagatacctttatta

SEQ ID NO: 1633438 - DNA, 15 bp, Homo sapiens
agatacctttattag

SEQ ID NO: 1633439 - DNA, 15 bp, Homo sapiens
gatacctttattagg

SEQ ID NO: 1633440 - DNA, 15 bp, Homo sapiens
atacctttattaggc

SEQ ID NO: 1633441 - DNA, 15 bp, Homo sapiens
tacctttattaggca

SEQ ID NO: 1633442 - DNA, 15 bp, Homo sapiens
acctttattaggcaa

SEQ ID NO: 1633443 - DNA, 15 bp, Homo sapiens
cctttattaggcaat

SEQ ID NO: 1633444 - DNA, 15 bp, Homo sapiens
ctttattaggcaatt

SEQ ID NO: 1633445 - DNA, 15 bp, Homo sapiens
tttattaggcaatta

SEQ ID NO: 1633446 - DNA, 15 bp, Homo sapiens
ttattaggcaattat

SEQ ID NO: 1633447 - DNA, 15 bp, Homo sapiens
tattaggcaattatc

SEQ ID NO: 1633448 - DNA, 15 bp, Homo sapiens
attaggcaattatca

SEQ ID NO: 1633449 - DNA, 15 bp, Homo sapiens
ttaggcaattatcac

SEQ ID NO: 1633450 - DNA, 15 bp, Homo sapiens
taggcaattatcaca

SEQ ID NO: 1633451 - DNA, 15 bp, Homo sapiens
aggcaattatcacaa

SEQ ID NO: 1633452 - DNA, 15 bp, Homo sapiens
ggcaattatcacaag

SEQ ID NO: 1633453 - DNA, 15 bp, Homo sapiens
gcaattatcacaaga

SEQ ID NO: 1633454 - DNA, 15 bp, Homo sapiens
caattatcacaagag

SEQ ID NO: 1633455 - DNA, 15 bp, Homo sapiens
aattatcacaagaga

SEQ ID NO: 1633456 - DNA, 15 bp, Homo sapiens
attatcacaagagat

SEQ ID NO: 1633457 - DNA, 15 bp, Homo sapiens
ttatcacaagagata

SEQ ID NO: 1633458 - DNA, 15 bp, Homo sapiens
tatcacaagagatat

SEQ ID NO: 1633459 - DNA, 15 bp, Homo sapiens
atcacaagagatatg

SEQ ID NO: 1633460 - DNA, 15 bp, Homo sapiens
tcacaagagatatga

SEQ ID NO: 1633461 - DNA, 15 bp, Homo sapiens
cacaagagatatgaa

SEQ ID NO: 1633462 - DNA, 15 bp, Homo sapiens
acaagagatatgaag

SEQ ID NO: 1633463 - DNA, 15 bp, Homo sapiens
caagagatatgaagg

SEQ ID NO: 1633464 - DNA, 15 bp, Homo sapiens
aagagatatgaaggc

SEQ ID NO: 1633465 - DNA, 15 bp, Homo sapiens
agagatatgaaggct

SEQ ID NO: 1633466 - DNA, 15 bp, Homo sapiens
gagatatgaaggctt

SEQ ID NO: 1633467 - DNA, 15 bp, Homo sapiens
agatatgaaggcttt

SEQ ID NO: 1633468 - DNA, 15 bp, Homo sapiens
gatatgaaggctttc

SEQ ID NO: 1633469 - DNA, 15 bp, Homo sapiens
atatgaaggctttct

SEQ ID NO: 1633470 - DNA, 15 bp, Homo sapiens
tatgaaggctttctg

SEQ ID NO: 1633471 - DNA, 15 bp, Homo sapiens
atgaaggctttctgt

SEQ ID NO: 1633472 - DNA, 15 bp, Homo sapiens
tgaaggctttctgtg

SEQ ID NO: 1633473 - DNA, 15 bp, Homo sapiens
gaaggctttctgtgt

SEQ ID NO: 1633474 - DNA, 15 bp, Homo sapiens
aaggctttctgtgta

SEQ ID NO: 1633475 - DNA, 15 bp, Homo sapiens
aggctttctgtgtaa

SEQ ID NO: 1633476 - DNA, 15 bp, Homo sapiens
ggctttctgtgtaag

SEQ ID NO: 1633477 - DNA, 15 bp, Homo sapiens
gctttctgtgtaaga

SEQ ID NO: 1633478 - DNA, 15 bp, Homo sapiens
ctttctgtgtaagaa

SEQ ID NO: 1633479 - DNA, 15 bp, Homo sapiens
tttctgtgtaagaaa

SEQ ID NO: 1633480 - DNA, 15 bp, Homo sapiens
ttctgtgtaagaaag

SEQ ID NO: 1633481 - DNA, 15 bp, Homo sapiens
tctgtgtaagaaagt

SEQ ID NO: 1633482 - DNA, 15 bp, Homo sapiens
ctgtgtaagaaagta

SEQ ID NO: 1633483 - DNA, 15 bp, Homo sapiens
tgtgtaagaaagtat

SEQ ID NO: 1633484 - DNA, 15 bp, Homo sapiens
gtgtaagaaagtata

SEQ ID NO: 1633485 - DNA, 15 bp, Homo sapiens
tgtaagaaagtataa

SEQ ID NO: 1633486 - DNA, 15 bp, Homo sapiens
gtaagaaagtataag

SEQ ID NO: 1633487 - DNA, 15 bp, Homo sapiens
taagaaagtataaga

SEQ ID NO: 1633488 - DNA, 15 bp, Homo sapiens
aagaaagtataagag

SEQ ID NO: 1633489 - DNA, 15 bp, Homo sapiens
agaaagtataagagg

SEQ ID NO: 1633490 - DNA, 15 bp, Homo sapiens
gaaagtataagaggt

SEQ ID NO: 1633491 - DNA, 15 bp, Homo sapiens
aaagtataagaggtc

SEQ ID NO: 1633492 - DNA, 15 bp, Homo sapiens
aagtataagaggtct

SEQ ID NO: 1633493 - DNA, 15 bp, Homo sapiens
agtataagaggtctt

SEQ ID NO: 1633494 - DNA, 15 bp, Homo sapiens
gtataagaggtcttt

SEQ ID NO: 1633495 - DNA, 15 bp, Homo sapiens
tataagaggtctttc

SEQ ID NO: 1633496 - DNA, 15 bp, Homo sapiens
ataagaggtctttcc

SEQ ID NO: 1633497 - DNA, 15 bp, Homo sapiens
taagaggtctttccc

SEQ ID NO: 1633498 - DNA, 15 bp, Homo sapiens
aagaggtctttccca

SEQ ID NO: 1633499 - DNA, 15 bp, Homo sapiens
agaggtctttcccag

SEQ ID NO: 1633500 - DNA, 15 bp, Homo sapiens
gaggtctttcccagg

SEQ ID NO: 1633501 - DNA, 15 bp, Homo sapiens
aggtctttcccagga

SEQ ID NO: 1633502 - DNA, 15 bp, Homo sapiens
ggtctttcccaggac

SEQ ID NO: 1633503 - DNA, 15 bp, Homo sapiens
gtctttcccaggact

SEQ ID NO: 1633504 - DNA, 15 bp, Homo sapiens
tctttcccaggactg

SEQ ID NO: 1633505 - DNA, 15 bp, Homo sapiens
ctttcccaggactgc

SEQ ID NO: 1633506 - DNA, 15 bp, Homo sapiens
tttcccaggactgca

SEQ ID NO: 1633507 - DNA, 15 bp, Homo sapiens
ttcccaggactgcag

SEQ ID NO: 1633508 - DNA, 15 bp, Homo sapiens
tcccaggactgcagt

SEQ ID NO: 1633509 - DNA, 15 bp, Homo sapiens
cccaggactgcagtt

SEQ ID NO: 1633510 - DNA, 15 bp, Homo sapiens
ccaggactgcagttc

SEQ ID NO: 1633511 - DNA, 15 bp, Homo sapiens
caggactgcagttct

SEQ ID NO: 1633512 - DNA, 15 bp, Homo sapiens
aggactgcagttctt

SEQ ID NO: 1633513 - DNA, 15 bp, Homo sapiens
ggactgcagttcttc

SEQ ID NO: 1633514 - DNA, 15 bp, Homo sapiens
gactgcagttcttcc

SEQ ID NO: 1633515 - DNA, 15 bp, Homo sapiens
actgcagttcttccc

SEQ ID NO: 1633516 - DNA, 15 bp, Homo sapiens
ctgcagttcttccct

SEQ ID NO: 1633517 - DNA, 15 bp, Homo sapiens
tgcagttcttccctt

SEQ ID NO: 1633518 - DNA, 15 bp, Homo sapiens
gcagttcttcccttc

SEQ ID NO: 1633519 - DNA, 15 bp, Homo sapiens
cagttcttcccttct

SEQ ID NO: 1633520 - DNA, 15 bp, Homo sapiens
agttcttcccttctc

SEQ ID NO: 1633521 - DNA, 15 bp, Homo sapiens
gttcttcccttctct

SEQ ID NO: 1633522 - DNA, 15 bp, Homo sapiens
ttcttcccttctctc

SEQ ID NO: 1633523 - DNA, 15 bp, Homo sapiens
tcttcccttctctcc

SEQ ID NO: 1633524 - DNA, 15 bp, Homo sapiens
cttcccttctctcca

SEQ ID NO: 1633525 - DNA, 15 bp, Homo sapiens
ttcccttctctccag

SEQ ID NO: 1633526 - DNA, 15 bp, Homo sapiens
tcccttctctccagt

SEQ ID NO: 1633527 - DNA, 15 bp, Homo sapiens
cccttctctccagtg

SEQ ID NO: 1633528 - DNA, 15 bp, Homo sapiens
ccttctctccagtgc

SEQ ID NO: 1633529 - DNA, 15 bp, Homo sapiens
cttctctccagtgcc

SEQ ID NO: 1633530 - DNA, 15 bp, Homo sapiens
ttctctccagtgcca

SEQ ID NO: 1633531 - DNA, 15 bp, Homo sapiens
tctctccagtgccac

SEQ ID NO: 1633532 - DNA, 15 bp, Homo sapiens
ctctccagtgccaca

SEQ ID NO: 1633533 - DNA, 15 bp, Homo sapiens
tctccagtgccacag

SEQ ID NO: 1633534 - DNA, 15 bp, Homo sapiens
ctccagtgccacagg

SEQ ID NO: 1633535 - DNA, 15 bp, Homo sapiens
tccagtgccacagga

SEQ ID NO: 1633536 - DNA, 15 bp, Homo sapiens
ccagtgccacaggac

SEQ ID NO: 1633537 - DNA, 15 bp, Homo sapiens
cagtgccacaggacg

SEQ ID NO: 1633538 - DNA, 15 bp, Homo sapiens
agtgccacaggacgt

SEQ ID NO: 1633539 - DNA, 15 bp, Homo sapiens
gtgccacaggacgtg

SEQ ID NO: 1633540 - DNA, 15 bp, Homo sapiens
tgccacaggacgtga

SEQ ID NO: 1633541 - DNA, 15 bp, Homo sapiens
gccacaggacgtgat

SEQ ID NO: 1633542 - DNA, 15 bp, Homo sapiens
ccacaggacgtgatc

SEQ ID NO: 1633543 - DNA, 15 bp, Homo sapiens
cacaggacgtgatcg

SEQ ID NO: 1633544 - DNA, 15 bp, Homo sapiens
acaggacgtgatcgt

SEQ ID NO: 1633545 - DNA, 15 bp, Homo sapiens
caggacgtgatcgta

SEQ ID NO: 1633546 - DNA, 15 bp, Homo sapiens
aggacgtgatcgtat

SEQ ID NO: 1633547 - DNA, 15 bp, Homo sapiens
ggacgtgatcgtata

SEQ ID NO: 1633548 - DNA, 15 bp, Homo sapiens
gacgtgatcgtatat

SEQ ID NO: 1633549 - DNA, 15 bp, Homo sapiens
acgtgatcgtatatt

SEQ ID NO: 1633550 - DNA, 15 bp, Homo sapiens
cgtgatcgtatatta

SEQ ID NO: 1633551 - DNA, 15 bp, Homo sapiens
gtgatcgtatattat

SEQ ID NO: 1633552 - DNA, 15 bp, Homo sapiens
tgatcgtatattata

SEQ ID NO: 1633553 - DNA, 15 bp, Homo sapiens
gatcgtatattatat

SEQ ID NO: 1633554 - DNA, 15 bp, Homo sapiens
atcgtatattatata

SEQ ID NO: 1633555 - DNA, 15 bp, Homo sapiens
tcgtatattatatac

SEQ ID NO: 1633556 - DNA, 15 bp, Homo sapiens
cgtatattatataca

SEQ ID NO: 1633557 - DNA, 15 bp, Homo sapiens
gtatattatatacac

SEQ ID NO: 1633558 - DNA, 15 bp, Homo sapiens
tatattatatacaca

SEQ ID NO: 1633559 - DNA, 15 bp, Homo sapiens
atattatatacacac

SEQ ID NO: 1633560 - DNA, 15 bp, Homo sapiens
tattatatacacaca

SEQ ID NO: 1633561 - DNA, 15 bp, Homo sapiens
attatatacacacat

SEQ ID NO: 1633562 - DNA, 15 bp, Homo sapiens
ttatatacacacata

SEQ ID NO: 1633563 - DNA, 15 bp, Homo sapiens
tatatacacacatat

SEQ ID NO: 1633564 - DNA, 15 bp, Homo sapiens
atatacacacatatt

SEQ ID NO: 1633565 - DNA, 15 bp, Homo sapiens
tatacacacatatta

SEQ ID NO: 1633566 - DNA, 15 bp, Homo sapiens
atacacacatattag

SEQ ID NO: 1633567 - DNA, 15 bp, Homo sapiens
tacacacatattagg

SEQ ID NO: 1633568 - DNA, 15 bp, Homo sapiens
acacacatattagga

SEQ ID NO: 1633569 - DNA, 15 bp, Homo sapiens
cacacatattaggag

SEQ ID NO: 1633570 - DNA, 15 bp, Homo sapiens
acacatattaggagt

SEQ ID NO: 1633571 - DNA, 15 bp, Homo sapiens
cacatattaggagtt

SEQ ID NO: 1633572 - DNA, 15 bp, Homo sapiens
acatattaggagttg

SEQ ID NO: 1633573 - DNA, 15 bp, Homo sapiens
catattaggagttga

SEQ ID NO: 1633574 - DNA, 15 bp, Homo sapiens
atattaggagttgat

SEQ ID NO: 1633575 - DNA, 15 bp, Homo sapiens
tattaggagttgata

SEQ ID NO: 1633576 - DNA, 15 bp, Homo sapiens
attaggagttgatat

SEQ ID NO: 1633577 - DNA, 15 bp, Homo sapiens
ttaggagttgatatt

SEQ ID NO: 1633578 - DNA, 15 bp, Homo sapiens
taggagttgatattg

SEQ ID NO: 1633579 - DNA, 15 bp, Homo sapiens
aggagttgatattgc

SEQ ID NO: 1633580 - DNA, 15 bp, Homo sapiens
ggagttgatattgca

SEQ ID NO: 1633581 - DNA, 15 bp, Homo sapiens
gagttgatattgcac

SEQ ID NO: 1633582 - DNA, 15 bp, Homo sapiens
agttgatattgcaca

SEQ ID NO: 1633583 - DNA, 15 bp, Homo sapiens
gttgatattgcacac

SEQ ID NO: 1633584 - DNA, 15 bp, Homo sapiens
ttgatattgcacaca

SEQ ID NO: 1633585 - DNA, 15 bp, Homo sapiens
tgatattgcacacag

SEQ ID NO: 1633586 - DNA, 15 bp, Homo sapiens
gatattgcacacagg

SEQ ID NO: 1633587 - DNA, 15 bp, Homo sapiens
atattgcacacaggc

SEQ ID NO: 1633588 - DNA, 15 bp, Homo sapiens
tattgcacacaggca

SEQ ID NO: 1633589 - DNA, 15 bp, Homo sapiens
attgcacacaggcac

SEQ ID NO: 1633590 - DNA, 15 bp, Homo sapiens
ttgcacacaggcact

SEQ ID NO: 1633591 - DNA, 15 bp, Homo sapiens
tgcacacaggcactg

SEQ ID NO: 1633592 - DNA, 15 bp, Homo sapiens
gcacacaggcactgg

SEQ ID NO: 1633593 - DNA, 15 bp, Homo sapiens
cacacaggcactggc

SEQ ID NO: 1633594 - DNA, 15 bp, Homo sapiens
acacaggcactggca

SEQ ID NO: 1633595 - DNA, 15 bp, Homo sapiens
cacaggcactggcat

SEQ ID NO: 1633596 - DNA, 15 bp, Homo sapiens
acaggcactggcatc

SEQ ID NO: 1633597 - DNA, 15 bp, Homo sapiens
caggcactggcatca

SEQ ID NO: 1633598 - DNA, 15 bp, Homo sapiens
aggcactggcatcat

SEQ ID NO: 1633599 - DNA, 15 bp, Homo sapiens
ggcactggcatcatt

SEQ ID NO: 1633600 - DNA, 15 bp, Homo sapiens
gcactggcatcattt

SEQ ID NO: 1633601 - DNA, 15 bp, Homo sapiens
cactggcatcatttg

SEQ ID NO: 1633602 - DNA, 15 bp, Homo sapiens
actggcatcatttga

SEQ ID NO: 1633603 - DNA, 15 bp, Homo sapiens
ctggcatcatttgag

SEQ ID NO: 1633604 - DNA, 15 bp, Homo sapiens
tggcatcatttgaga

SEQ ID NO: 1633605 - DNA, 15 bp, Homo sapiens
ggcatcatttgagaa

SEQ ID NO: 1633606 - DNA, 15 bp, Homo sapiens
gcatcatttgagaac

SEQ ID NO: 1633607 - DNA, 15 bp, Homo sapiens
catcatttgagaact

SEQ ID NO: 1633608 - DNA, 15 bp, Homo sapiens
atcatttgagaactt

SEQ ID NO: 1633609 - DNA, 15 bp, Homo sapiens
tcatttgagaactta

SEQ ID NO: 1633610 - DNA, 15 bp, Homo sapiens
catttgagaacttat

SEQ ID NO: 1633611 - DNA, 15 bp, Homo sapiens
atttgagaacttatg

SEQ ID NO: 1633612 - DNA, 15 bp, Homo sapiens
tttgagaacttatgg

SEQ ID NO: 1633613 - DNA, 15 bp, Homo sapiens
ttgagaacttatgga

SEQ ID NO: 1633614 - DNA, 15 bp, Homo sapiens
tgagaacttatggaa

SEQ ID NO: 1633615 - DNA, 15 bp, Homo sapiens
gagaacttatggaaa

SEQ ID NO: 1633616 - DNA, 15 bp, Homo sapiens
agaacttatggaaaa

SEQ ID NO: 1633617 - DNA, 15 bp, Homo sapiens
gaacttatggaaaat

SEQ ID NO: 1633618 - DNA, 15 bp, Homo sapiens
aacttatggaaaatg

SEQ ID NO: 1633619 - DNA, 15 bp, Homo sapiens
acttatggaaaatgc

SEQ ID NO: 1633620 - DNA, 15 bp, Homo sapiens
cttatggaaaatgca

SEQ ID NO: 1633621 - DNA, 15 bp, Homo sapiens
ttatggaaaatgcaa

SEQ ID NO: 1633622 - DNA, 15 bp, Homo sapiens
tatggaaaatgcaag

SEQ ID NO: 1633623 - DNA, 15 bp, Homo sapiens
atggaaaatgcaagt

SEQ ID NO: 1633624 - DNA, 15 bp, Homo sapiens
tggaaaatgcaagtg

SEQ ID NO: 1633625 - DNA, 15 bp, Homo sapiens
ggaaaatgcaagtgc

SEQ ID NO: 1633626 - DNA, 15 bp, Homo sapiens
gaaaatgcaagtgct

SEQ ID NO: 1633627 - DNA, 15 bp, Homo sapiens
aaaatgcaagtgctt

SEQ ID NO: 1633628 - DNA, 15 bp, Homo sapiens
aaatgcaagtgcttg

SEQ ID NO: 1633629 - DNA, 15 bp, Homo sapiens
aatgcaagtgcttga

SEQ ID NO: 1633630 - DNA, 15 bp, Homo sapiens
atgcaagtgcttgag

SEQ ID NO: 1633631 - DNA, 15 bp, Homo sapiens
tgcaagtgcttgagc

SEQ ID NO: 1633632 - DNA, 15 bp, Homo sapiens
gcaagtgcttgagca

SEQ ID NO: 1633633 - DNA, 15 bp, Homo sapiens
caagtgcttgagcac

SEQ ID NO: 1633634 - DNA, 15 bp, Homo sapiens
aagtgcttgagcacc

SEQ ID NO: 1633635 - DNA, 15 bp, Homo sapiens
agtgcttgagcacca

SEQ ID NO: 1633636 - DNA, 15 bp, Homo sapiens
gtgcttgagcaccac

SEQ ID NO: 1633637 - DNA, 15 bp, Homo sapiens
tgcttgagcaccacc

SEQ ID NO: 1633638 - DNA, 15 bp, Homo sapiens
gcttgagcaccaccc

SEQ ID NO: 1633639 - DNA, 15 bp, Homo sapiens
cttgagcaccacccc

SEQ ID NO: 1633640 - DNA, 15 bp, Homo sapiens
ttgagcaccacccca

SEQ ID NO: 1633641 - DNA, 15 bp, Homo sapiens
tgagcaccaccccag

SEQ ID NO: 1633642 - DNA, 15 bp, Homo sapiens
gagcaccaccccagt

SEQ ID NO: 1633643 - DNA, 15 bp, Homo sapiens
agcaccaccccagta

SEQ ID NO: 1633644 - DNA, 15 bp, Homo sapiens
gcaccaccccagtac

SEQ ID NO: 1633645 - DNA, 15 bp, Homo sapiens
caccaccccagtacc

SEQ ID NO: 1633646 - DNA, 15 bp, Homo sapiens
accaccccagtacct

SEQ ID NO: 1633647 - DNA, 15 bp, Homo sapiens
ccaccccagtacctg

SEQ ID NO: 1633648 - DNA, 15 bp, Homo sapiens
caccccagtacctgt

SEQ ID NO: 1633649 - DNA, 15 bp, Homo sapiens
accccagtacctgtt

SEQ ID NO: 1633650 - DNA, 15 bp, Homo sapiens
ccccagtacctgttg

SEQ ID NO: 1633651 - DNA, 15 bp, Homo sapiens
cccagtacctgttga

SEQ ID NO: 1633652 - DNA, 15 bp, Homo sapiens
ccagtacctgttgaa

SEQ ID NO: 1633653 - DNA, 15 bp, Homo sapiens
cagtacctgttgaaa

SEQ ID NO: 1633654 - DNA, 15 bp, Homo sapiens
agtacctgttgaaac

SEQ ID NO: 1633655 - DNA, 15 bp, Homo sapiens
gtacctgttgaaaca

SEQ ID NO: 1633656 - DNA, 15 bp, Homo sapiens
tacctgttgaaacag

SEQ ID NO: 1633657 - DNA, 15 bp, Homo sapiens
acctgttgaaacagc

SEQ ID NO: 1633658 - DNA, 15 bp, Homo sapiens
cctgttgaaacagca

SEQ ID NO: 1633659 - DNA, 15 bp, Homo sapiens
ctgttgaaacagcaa

SEQ ID NO: 1633660 - DNA, 15 bp, Homo sapiens
tgttgaaacagcaac

SEQ ID NO: 1633661 - DNA, 15 bp, Homo sapiens
gttgaaacagcaact

SEQ ID NO: 1633662 - DNA, 15 bp, Homo sapiens
ttgaaacagcaactc

SEQ ID NO: 1633663 - DNA, 15 bp, Homo sapiens
tgaaacagcaactct

SEQ ID NO: 1633664 - DNA, 15 bp, Homo sapiens
gaaacagcaactcta

SEQ ID NO: 1633665 - DNA, 15 bp, Homo sapiens
aaacagcaactctaa

SEQ ID NO: 1633666 - DNA, 15 bp, Homo sapiens
aacagcaactctaaa

SEQ ID NO: 1633667 - DNA, 15 bp, Homo sapiens
acagcaactctaaaa

SEQ ID NO: 1633668 - DNA, 15 bp, Homo sapiens
cagcaactctaaaag

SEQ ID NO: 1633669 - DNA, 15 bp, Homo sapiens
agcaactctaaaagt

SEQ ID NO: 1633670 - DNA, 15 bp, Homo sapiens
gcaactctaaaagtg

SEQ ID NO: 1633671 - DNA, 15 bp, Homo sapiens
caactctaaaagtgg

SEQ ID NO: 1633672 - DNA, 15 bp, Homo sapiens
aactctaaaagtggg

SEQ ID NO: 1633673 - DNA, 15 bp, Homo sapiens
actctaaaagtgggg

SEQ ID NO: 1633674 - DNA, 15 bp, Homo sapiens
ctctaaaagtggggc

SEQ ID NO: 1633675 - DNA, 15 bp, Homo sapiens
tctaaaagtggggcc

SEQ ID NO: 1633676 - DNA, 15 bp, Homo sapiens
ctaaaagtggggcct

SEQ ID NO: 1633677 - DNA, 15 bp, Homo sapiens
taaaagtggggcctg

SEQ ID NO: 1633678 - DNA, 15 bp, Homo sapiens
aaaagtggggcctgt

SEQ ID NO: 1633679 - DNA, 15 bp, Homo sapiens
aaagtggggcctgtt

SEQ ID NO: 1633680 - DNA, 15 bp, Homo sapiens
aagtggggcctgttg

SEQ ID NO: 1633681 - DNA, 15 bp, Homo sapiens
agtggggcctgttga

SEQ ID NO: 1633682 - DNA, 15 bp, Homo sapiens
gtggggcctgttgat

SEQ ID NO: 1633683 - DNA, 15 bp, Homo sapiens
tggggcctgttgatc

SEQ ID NO: 1633684 - DNA, 15 bp, Homo sapiens
ggggcctgttgatcg

SEQ ID NO: 1633685 - DNA, 15 bp, Homo sapiens
gggcctgttgatcgt

SEQ ID NO: 1633686 - DNA, 15 bp, Homo sapiens
ggcctgttgatcgtg

SEQ ID NO: 1633687 - DNA, 15 bp, Homo sapiens
gcctgttgatcgtgt

SEQ ID NO: 1633688 - DNA, 15 bp, Homo sapiens
cctgttgatcgtgtt

SEQ ID NO: 1633689 - DNA, 15 bp, Homo sapiens
ctgttgatcgtgttt

SEQ ID NO: 1633690 - DNA, 15 bp, Homo sapiens
tgttgatcgtgtttt

SEQ ID NO: 1633691 - DNA, 15 bp, Homo sapiens
gttgatcgtgtttta

SEQ ID NO: 1633692 - DNA, 15 bp, Homo sapiens
ttgatcgtgttttaa

SEQ ID NO: 1633693 - DNA, 15 bp, Homo sapiens
tgatcgtgttttaat

SEQ ID NO: 1633694 - DNA, 15 bp, Homo sapiens
gatcgtgttttaata

SEQ ID NO: 1633695 - DNA, 15 bp, Homo sapiens
atcgtgttttaataa

SEQ ID NO: 1633696 - DNA, 15 bp, Homo sapiens
tcgtgttttaataag

SEQ ID NO: 1633697 - DNA, 15 bp, Homo sapiens
cgtgttttaataagc

SEQ ID NO: 1633698 - DNA, 15 bp, Homo sapiens
gtgttttaataagcc

SEQ ID NO: 1633699 - DNA, 15 bp, Homo sapiens
tgttttaataagcca

SEQ ID NO: 1633700 - DNA, 15 bp, Homo sapiens
gttttaataagccat

SEQ ID NO: 1633701 - DNA, 15 bp, Homo sapiens
ttttaataagccatc

SEQ ID NO: 1633702 - DNA, 15 bp, Homo sapiens
tttaataagccatcc

SEQ ID NO: 1633703 - DNA, 15 bp, Homo sapiens
ttaataagccatcca

SEQ ID NO: 1633704 - DNA, 15 bp, Homo sapiens
taataagccatccag

SEQ ID NO: 1633705 - DNA, 15 bp, Homo sapiens
aataagccatccagg

SEQ ID NO: 1633706 - DNA, 15 bp, Homo sapiens
ataagccatccaggt

SEQ ID NO: 1633707 - DNA, 15 bp, Homo sapiens
taagccatccaggtg

SEQ ID NO: 1633708 - DNA, 15 bp, Homo sapiens
aagccatccaggtga

SEQ ID NO: 1633709 - DNA, 15 bp, Homo sapiens
agccatccaggtgat

SEQ ID NO: 1633710 - DNA, 15 bp, Homo sapiens
gccatccaggtgata

SEQ ID NO: 1633711 - DNA, 15 bp, Homo sapiens
ccatccaggtgataa

SEQ ID NO: 1633712 - DNA, 15 bp, Homo sapiens
catccaggtgataaa

SEQ ID NO: 1633713 - DNA, 15 bp, Homo sapiens
atccaggtgataaac

SEQ ID NO: 1633714 - DNA, 15 bp, Homo sapiens
tccaggtgataaaca

SEQ ID NO: 1633715 - DNA, 15 bp, Homo sapiens
ccaggtgataaacat

SEQ ID NO: 1633716 - DNA, 15 bp, Homo sapiens
caggtgataaacatg

SEQ ID NO: 1633717 - DNA, 15 bp, Homo sapiens
aggtgataaacatgc

SEQ ID NO: 1633718 - DNA, 15 bp, Homo sapiens
ggtgataaacatgca

SEQ ID NO: 1633719 - DNA, 15 bp, Homo sapiens
gtgataaacatgcag

SEQ ID NO: 1633720 - DNA, 15 bp, Homo sapiens
tgataaacatgcagg

SEQ ID NO: 1633721 - DNA, 15 bp, Homo sapiens
gataaacatgcaggc

SEQ ID NO: 1633722 - DNA, 15 bp, Homo sapiens
ataaacatgcaggct

SEQ ID NO: 1633723 - DNA, 15 bp, Homo sapiens
taaacatgcaggctc

SEQ ID NO: 1633724 - DNA, 15 bp, Homo sapiens
aaacatgcaggctca

SEQ ID NO: 1633725 - DNA, 15 bp, Homo sapiens
aacatgcaggctcaa

SEQ ID NO: 1633726 - DNA, 15 bp, Homo sapiens
acatgcaggctcaag

SEQ ID NO: 1633727 - DNA, 15 bp, Homo sapiens
catgcaggctcaagt

SEQ ID NO: 1633728 - DNA, 15 bp, Homo sapiens
atgcaggctcaagtt

SEQ ID NO: 1633729 - DNA, 15 bp, Homo sapiens
tgcaggctcaagttt

SEQ ID NO: 1633730 - DNA, 15 bp, Homo sapiens
gcaggctcaagtttg

SEQ ID NO: 1633731 - DNA, 15 bp, Homo sapiens
caggctcaagtttga

SEQ ID NO: 1633732 - DNA, 15 bp, Homo sapiens
aggctcaagtttgaa

SEQ ID NO: 1633733 - DNA, 15 bp, Homo sapiens
ggctcaagtttgaaa

SEQ ID NO: 1633734 - DNA, 15 bp, Homo sapiens
gctcaagtttgaaaa

SEQ ID NO: 1633735 - DNA, 15 bp, Homo sapiens
ctcaagtttgaaaac

SEQ ID NO: 1633736 - DNA, 15 bp, Homo sapiens
tcaagtttgaaaacc

SEQ ID NO: 1633737 - DNA, 15 bp, Homo sapiens
caagtttgaaaacca

SEQ ID NO: 1633738 - DNA, 15 bp, Homo sapiens
aagtttgaaaaccac

SEQ ID NO: 1633739 - DNA, 15 bp, Homo sapiens
agtttgaaaaccact

SEQ ID NO: 1633740 - DNA, 15 bp, Homo sapiens
gtttgaaaaccacta

SEQ ID NO: 1633741 - DNA, 15 bp, Homo sapiens
tttgaaaaccactag

SEQ ID NO: 1633742 - DNA, 15 bp, Homo sapiens
ttgaaaaccactagt

SEQ ID NO: 1633743 - DNA, 15 bp, Homo sapiens
tgaaaaccactagta

SEQ ID NO: 1633744 - DNA, 15 bp, Homo sapiens
gaaaaccactagtat

SEQ ID NO: 1633745 - DNA, 15 bp, Homo sapiens
aaaaccactagtatg

SEQ ID NO: 1633746 - DNA, 15 bp, Homo sapiens
aaaccactagtatgt

SEQ ID NO: 1633747 - DNA, 15 bp, Homo sapiens
aaccactagtatgtg

SEQ ID NO: 1633748 - DNA, 15 bp, Homo sapiens
accactagtatgtgt

SEQ ID NO: 1633749 - DNA, 15 bp, Homo sapiens
ccactagtatgtgtt

SEQ ID NO: 1633750 - DNA, 15 bp, Homo sapiens
cactagtatgtgtta

SEQ ID NO: 1633751 - DNA, 15 bp, Homo sapiens
actagtatgtgttag

SEQ ID NO: 1633752 - DNA, 15 bp, Homo sapiens
ctagtatgtgttagt

SEQ ID NO: 1633753 - DNA, 15 bp, Homo sapiens
tagtatgtgttagtt

SEQ ID NO: 1633754 - DNA, 15 bp, Homo sapiens
agtatgtgttagtta

SEQ ID NO: 1633755 - DNA, 15 bp, Homo sapiens
gtatgtgttagttat

SEQ ID NO: 1633756 - DNA, 15 bp, Homo sapiens
tatgtgttagttatc

SEQ ID NO: 1633757 - DNA, 15 bp, Homo sapiens
atgtgttagttatct

SEQ ID NO: 1633758 - DNA, 15 bp, Homo sapiens
tgtgttagttatctt

SEQ ID NO: 1633759 - DNA, 15 bp, Homo sapiens
gtgttagttatcttg

SEQ ID NO: 1633760 - DNA, 15 bp, Homo sapiens
tgttagttatcttgg

SEQ ID NO: 1633761 - DNA, 15 bp, Homo sapiens
gttagttatcttggg

SEQ ID NO: 1633762 - DNA, 15 bp, Homo sapiens
ttagttatcttgggc

SEQ ID NO: 1633763 - DNA, 15 bp, Homo sapiens
tagttatcttgggca

SEQ ID NO: 1633764 - DNA, 15 bp, Homo sapiens
agttatcttgggcac

SEQ ID NO: 1633765 - DNA, 15 bp, Homo sapiens
gttatcttgggcact

SEQ ID NO: 1633766 - DNA, 15 bp, Homo sapiens
ttatcttgggcacta

SEQ ID NO: 1633767 - DNA, 15 bp, Homo sapiens
tatcttgggcactac

SEQ ID NO: 1633768 - DNA, 15 bp, Homo sapiens
atcttgggcactacc

SEQ ID NO: 1633769 - DNA, 15 bp, Homo sapiens
tcttgggcactacct

SEQ ID NO: 1633770 - DNA, 15 bp, Homo sapiens
cttgggcactacctg

SEQ ID NO: 1633771 - DNA, 15 bp, Homo sapiens
ttgggcactacctgc

SEQ ID NO: 1633772 - DNA, 15 bp, Homo sapiens
tgggcactacctgct

SEQ ID NO: 1633773 - DNA, 15 bp, Homo sapiens
gggcactacctgctt

SEQ ID NO: 1633774 - DNA, 15 bp, Homo sapiens
ggcactacctgcttc

SEQ ID NO: 1633775 - DNA, 15 bp, Homo sapiens
gcactacctgcttca

SEQ ID NO: 1633776 - DNA, 15 bp, Homo sapiens
cactacctgcttcag

SEQ ID NO: 1633777 - DNA, 15 bp, Homo sapiens
actacctgcttcagg

SEQ ID NO: 1633778 - DNA, 15 bp, Homo sapiens
ctacctgcttcagga

SEQ ID NO: 1633779 - DNA, 15 bp, Homo sapiens
tacctgcttcaggaa

SEQ ID NO: 1633780 - DNA, 15 bp, Homo sapiens
acctgcttcaggaac

SEQ ID NO: 1633781 - DNA, 15 bp, Homo sapiens
cctgcttcaggaacc

SEQ ID NO: 1633782 - DNA, 15 bp, Homo sapiens
ctgcttcaggaaccc

SEQ ID NO: 1633783 - DNA, 15 bp, Homo sapiens
tgcttcaggaacccc

SEQ ID NO: 1633784 - DNA, 15 bp, Homo sapiens
gcttcaggaaccccc

SEQ ID NO: 1633785 - DNA, 15 bp, Homo sapiens
cttcaggaaccccca

SEQ ID NO: 1633786 - DNA, 15 bp, Homo sapiens
ttcaggaacccccac

SEQ ID NO: 1633787 - DNA, 15 bp, Homo sapiens
tcaggaacccccaca

SEQ ID NO: 1633788 - DNA, 15 bp, Homo sapiens
caggaacccccacag

SEQ ID NO: 1633789 - DNA, 15 bp, Homo sapiens
aggaacccccacaga

SEQ ID NO: 1633790 - DNA, 15 bp, Homo sapiens
ggaacccccacagaa

SEQ ID NO: 1633791 - DNA, 15 bp, Homo sapiens
gaacccccacagaat

SEQ ID NO: 1633792 - DNA, 15 bp, Homo sapiens
aacccccacagaatt

SEQ ID NO: 1633793 - DNA, 15 bp, Homo sapiens
acccccacagaatta

SEQ ID NO: 1633794 - DNA, 15 bp, Homo sapiens
cccccacagaattat

SEQ ID NO: 1633795 - DNA, 15 bp, Homo sapiens
ccccacagaattatg

SEQ ID NO: 1633796 - DNA, 15 bp, Homo sapiens
cccacagaattatgg

SEQ ID NO: 1633797 - DNA, 15 bp, Homo sapiens
ccacagaattatggg

SEQ ID NO: 1633798 - DNA, 15 bp, Homo sapiens
cacagaattatgggc

SEQ ID NO: 1633799 - DNA, 15 bp, Homo sapiens
acagaattatgggcc

SEQ ID NO: 1633800 - DNA, 15 bp, Homo sapiens
cagaattatgggcct

SEQ ID NO: 1633801 - DNA, 15 bp, Homo sapiens
agaattatgggcctg

SEQ ID NO: 1633802 - DNA, 15 bp, Homo sapiens
gaattatgggcctga

SEQ ID NO: 1633803 - DNA, 15 bp, Homo sapiens
aattatgggcctgaa

SEQ ID NO: 1633804 - DNA, 15 bp, Homo sapiens
attatgggcctgaat

SEQ ID NO: 1633805 - DNA, 15 bp, Homo sapiens
ttatgggcctgaatt

SEQ ID NO: 1633806 - DNA, 15 bp, Homo sapiens
tatgggcctgaattt

SEQ ID NO: 1633807 - DNA, 15 bp, Homo sapiens
atgggcctgaatttc

SEQ ID NO: 1633808 - DNA, 15 bp, Homo sapiens
tgggcctgaatttca

SEQ ID NO: 1633809 - DNA, 15 bp, Homo sapiens
gggcctgaatttcat

SEQ ID NO: 1633810 - DNA, 15 bp, Homo sapiens
ggcctgaatttcatc

SEQ ID NO: 1633811 - DNA, 15 bp, Homo sapiens
gcctgaatttcatcc

SEQ ID NO: 1633812 - DNA, 15 bp, Homo sapiens
cctgaatttcatcct

SEQ ID NO: 1633813 - DNA, 15 bp, Homo sapiens
ctgaatttcatcctt

SEQ ID NO: 1633814 - DNA, 15 bp, Homo sapiens
tgaatttcatccttt

SEQ ID NO: 1633815 - DNA, 15 bp, Homo sapiens
gaatttcatcctttc

SEQ ID NO: 1633816 - DNA, 15 bp, Homo sapiens
aatttcatcctttca

SEQ ID NO: 1633817 - DNA, 15 bp, Homo sapiens
atttcatcctttcat

SEQ ID NO: 1633818 - DNA, 15 bp, Homo sapiens
tttcatcctttcatg

SEQ ID NO: 1633819 - DNA, 15 bp, Homo sapiens
ttcatcctttcatga

SEQ ID NO: 1633820 - DNA, 15 bp, Homo sapiens
tcatcctttcatgag

SEQ ID NO: 1633821 - DNA, 15 bp, Homo sapiens
catcctttcatgagg

SEQ ID NO: 1633822 - DNA, 15 bp, Homo sapiens
atcctttcatgaggt

SEQ ID NO: 1633823 - DNA, 15 bp, Homo sapiens
tcctttcatgaggtt

SEQ ID NO: 1633824 - DNA, 15 bp, Homo sapiens
cctttcatgaggttt

SEQ ID NO: 1633825 - DNA, 15 bp, Homo sapiens
ctttcatgaggtttg

SEQ ID NO: 1633826 - DNA, 15 bp, Homo sapiens
tttcatgaggtttgg

SEQ ID NO: 1633827 - DNA, 15 bp, Homo sapiens
ttcatgaggtttggg

SEQ ID NO: 1633828 - DNA, 15 bp, Homo sapiens
tcatgaggtttgggg

SEQ ID NO: 1633829 - DNA, 15 bp, Homo sapiens
catgaggtttgggga

SEQ ID NO: 1633830 - DNA, 15 bp, Homo sapiens
atgaggtttggggac

SEQ ID NO: 1633831 - DNA, 15 bp, Homo sapiens
tgaggtttggggaca

SEQ ID NO: 1633832 - DNA, 15 bp, Homo sapiens
gaggtttggggacaa

SEQ ID NO: 1633833 - DNA, 15 bp, Homo sapiens
aggtttggggacaag

SEQ ID NO: 1633834 - DNA, 15 bp, Homo sapiens
ggtttggggacaagt

SEQ ID NO: 1633835 - DNA, 15 bp, Homo sapiens
gtttggggacaagta

SEQ ID NO: 1633836 - DNA, 15 bp, Homo sapiens
tttggggacaagtat

SEQ ID NO: 1633837 - DNA, 15 bp, Homo sapiens
ttggggacaagtatg

SEQ ID NO: 1633838 - DNA, 15 bp, Homo sapiens
tggggacaagtatgt

SEQ ID NO: 1633839 - DNA, 15 bp, Homo sapiens
ggggacaagtatgtg

SEQ ID NO: 1633840 - DNA, 15 bp, Homo sapiens
gggacaagtatgtgg

SEQ ID NO: 1633841 - DNA, 15 bp, Homo sapiens
ggacaagtatgtggg

SEQ ID NO: 1633842 - DNA, 15 bp, Homo sapiens
gacaagtatgtgggt

SEQ ID NO: 1633843 - DNA, 15 bp, Homo sapiens
acaagtatgtgggtg

SEQ ID NO: 1633844 - DNA, 15 bp, Homo sapiens
caagtatgtgggtgg

SEQ ID NO: 1633845 - DNA, 15 bp, Homo sapiens
aagtatgtgggtgga

SEQ ID NO: 1633846 - DNA, 15 bp, Homo sapiens
agtatgtgggtggag

SEQ ID NO: 1633847 - DNA, 15 bp, Homo sapiens
gtatgtgggtggaga

SEQ ID NO: 1633848 - DNA, 15 bp, Homo sapiens
tatgtgggtggagaa

SEQ ID NO: 1633849 - DNA, 15 bp, Homo sapiens
atgtgggtggagaag

SEQ ID NO: 1633850 - DNA, 15 bp, Homo sapiens
tgtgggtggagaagt

SEQ ID NO: 1633851 - DNA, 15 bp, Homo sapiens
gtgggtggagaagtc

SEQ ID NO: 1633852 - DNA, 15 bp, Homo sapiens
tgggtggagaagtct

SEQ ID NO: 1633853 - DNA, 15 bp, Homo sapiens
gggtggagaagtctt

SEQ ID NO: 1633854 - DNA, 15 bp, Homo sapiens
ggtggagaagtcttg

SEQ ID NO: 1633855 - DNA, 15 bp, Homo sapiens
gtggagaagtcttgc

SEQ ID NO: 1633856 - DNA, 15 bp, Homo sapiens
tggagaagtcttgcc

SEQ ID NO: 1633857 - DNA, 15 bp, Homo sapiens
ggagaagtcttgcca

SEQ ID NO: 1633858 - DNA, 15 bp, Homo sapiens
gagaagtcttgccat

SEQ ID NO: 1633859 - DNA, 15 bp, Homo sapiens
agaagtcttgccatt

SEQ ID NO: 1633860 - DNA, 15 bp, Homo sapiens
gaagtcttgccattt

SEQ ID NO: 1633861 - DNA, 15 bp, Homo sapiens
aagtcttgccatttg

SEQ ID NO: 1633862 - DNA, 15 bp, Homo sapiens
agtcttgccatttga

SEQ ID NO: 1633863 - DNA, 15 bp, Homo sapiens
gtcttgccatttgaa

SEQ ID NO: 1633864 - DNA, 15 bp, Homo sapiens
tcttgccatttgaaa

SEQ ID NO: 1633865 - DNA, 15 bp, Homo sapiens
cttgccatttgaaat

SEQ ID NO: 1633866 - DNA, 15 bp, Homo sapiens
ttgccatttgaaatc

SEQ ID NO: 1633867 - DNA, 15 bp, Homo sapiens
tgccatttgaaatca

SEQ ID NO: 1633868 - DNA, 15 bp, Homo sapiens
gccatttgaaatcaa

SEQ ID NO: 1633869 - DNA, 15 bp, Homo sapiens
ccatttgaaatcaaa

SEQ ID NO: 1633870 - DNA, 15 bp, Homo sapiens
catttgaaatcaaag

SEQ ID NO: 1633871 - DNA, 15 bp, Homo sapiens
atttgaaatcaaagg

SEQ ID NO: 1633872 - DNA, 15 bp, Homo sapiens
tttgaaatcaaagga

SEQ ID NO: 1633873 - DNA, 15 bp, Homo sapiens
ttgaaatcaaaggaa

SEQ ID NO: 1633874 - DNA, 15 bp, Homo sapiens
tgaaatcaaaggaac

SEQ ID NO: 1633875 - DNA, 15 bp, Homo sapiens
gaaatcaaaggaact

SEQ ID NO: 1633876 - DNA, 15 bp, Homo sapiens
aaatcaaaggaactt

SEQ ID NO: 1633877 - DNA, 15 bp, Homo sapiens
aatcaaaggaacttc

SEQ ID NO: 1633878 - DNA, 15 bp, Homo sapiens
atcaaaggaacttcc

SEQ ID NO: 1633879 - DNA, 15 bp, Homo sapiens
tcaaaggaacttcca

SEQ ID NO: 1633880 - DNA, 15 bp, Homo sapiens
caaaggaacttccag

SEQ ID NO: 1633881 - DNA, 15 bp, Homo sapiens
aaaggaacttccaga

SEQ ID NO: 1633882 - DNA, 15 bp, Homo sapiens
gaacttccagattca

SEQ ID NO: 1633883 - DNA, 15 bp, Homo sapiens
aacttccagattcat

SEQ ID NO: 1633884 - DNA, 15 bp, Homo sapiens
acttccagattcata

SEQ ID NO: 1633885 - DNA, 15 bp, Homo sapiens
cttccagattcataa

SEQ ID NO: 1633886 - DNA, 15 bp, Homo sapiens
ttccagattcataag

SEQ ID NO: 1633887 - DNA, 15 bp, Homo sapiens
tccagattcataagc

SEQ ID NO: 1633888 - DNA, 15 bp, Homo sapiens
ccagattcataagcc

SEQ ID NO: 1633889 - DNA, 15 bp, Homo sapiens
cagattcataagcca

SEQ ID NO: 1633890 - DNA, 15 bp, Homo sapiens
agattcataagccac

SEQ ID NO: 1633891 - DNA, 15 bp, Homo sapiens
gattcataagccact

SEQ ID NO: 1633892 - DNA, 15 bp, Homo sapiens
attcataagccactt

SEQ ID NO: 1633893 - DNA, 15 bp, Homo sapiens
ttcataagccactta

SEQ ID NO: 1633894 - DNA, 15 bp, Homo sapiens
tcataagccacttaa

SEQ ID NO: 1633895 - DNA, 15 bp, Homo sapiens
cataagccacttaaa

SEQ ID NO: 1633896 - DNA, 15 bp, Homo sapiens
ataagccacttaaac

SEQ ID NO: 1633897 - DNA, 15 bp, Homo sapiens
taagccacttaaact

SEQ ID NO: 1633898 - DNA, 15 bp, Homo sapiens
aagccacttaaactc

SEQ ID NO: 1633899 - DNA, 15 bp, Homo sapiens
agccacttaaactct

SEQ ID NO: 1633900 - DNA, 15 bp, Homo sapiens
gccacttaaactctc

SEQ ID NO: 1633901 - DNA, 15 bp, Homo sapiens
ccacttaaactctca

SEQ ID NO: 1633902 - DNA, 15 bp, Homo sapiens
cacttaaactctcag

SEQ ID NO: 1633903 - DNA, 15 bp, Homo sapiens
acttaaactctcagt

SEQ ID NO: 1633904 - DNA, 15 bp, Homo sapiens
cttaaactctcagtt

SEQ ID NO: 1633905 - DNA, 15 bp, Homo sapiens
ttaaactctcagttt

SEQ ID NO: 1633906 - DNA, 15 bp, Homo sapiens
taaactctcagtttt

SEQ ID NO: 1633907 - DNA, 15 bp, Homo sapiens
aaactctcagttttt

SEQ ID NO: 1633908 - DNA, 15 bp, Homo sapiens
aactctcagtttttt

SEQ ID NO: 1633909 - DNA, 15 bp, Homo sapiens
actctcagttttttc

SEQ ID NO: 1633910 - DNA, 15 bp, Homo sapiens
ctctcagttttttca

SEQ ID NO: 1633911 - DNA, 15 bp, Homo sapiens
tctcagttttttcat

SEQ ID NO: 1633912 - DNA, 15 bp, Homo sapiens
ctcagttttttcatt

SEQ ID NO: 1633913 - DNA, 15 bp, Homo sapiens
tcagttttttcattt

SEQ ID NO: 1633914 - DNA, 15 bp, Homo sapiens
cagttttttcattta

SEQ ID NO: 1633915 - DNA, 15 bp, Homo sapiens
agttttttcatttat

SEQ ID NO: 1633916 - DNA, 15 bp, Homo sapiens
gttttttcatttata

SEQ ID NO: 1633917 - DNA, 15 bp, Homo sapiens
ttttttcatttataa

SEQ ID NO: 1633918 - DNA, 15 bp, Homo sapiens
tttttcatttataaa

SEQ ID NO: 1633919 - DNA, 15 bp, Homo sapiens
ttttcatttataaaa

SEQ ID NO: 1633920 - DNA, 15 bp, Homo sapiens
tttcatttataaaag

SEQ ID NO: 1633921 - DNA, 15 bp, Homo sapiens
ttcatttataaaagt

SEQ ID NO: 1633922 - DNA, 15 bp, Homo sapiens
tcatttataaaagtg

SEQ ID NO: 1633923 - DNA, 15 bp, Homo sapiens
catttataaaagtga

SEQ ID NO: 1633924 - DNA, 15 bp, Homo sapiens
atttataaaagtgag

SEQ ID NO: 1633925 - DNA, 15 bp, Homo sapiens
tttataaaagtgaga

SEQ ID NO: 1633926 - DNA, 15 bp, Homo sapiens
ttataaaagtgagaa

SEQ ID NO: 1633927 - DNA, 15 bp, Homo sapiens
tataaaagtgagaat

SEQ ID NO: 1633928 - DNA, 15 bp, Homo sapiens
ataaaagtgagaata

SEQ ID NO: 1633929 - DNA, 15 bp, Homo sapiens
taaaagtgagaataa

SEQ ID NO: 1633930 - DNA, 15 bp, Homo sapiens
aaaagtgagaataat

SEQ ID NO: 1633931 - DNA, 15 bp, Homo sapiens
aaagtgagaataatt

SEQ ID NO: 1633932 - DNA, 15 bp, Homo sapiens
aagtgagaataattc

SEQ ID NO: 1633933 - DNA, 15 bp, Homo sapiens
agtgagaataattcc

SEQ ID NO: 1633934 - DNA, 15 bp, Homo sapiens
gtgagaataattcca

SEQ ID NO: 1633935 - DNA, 15 bp, Homo sapiens
tgagaataattccat

SEQ ID NO: 1633936 - DNA, 15 bp, Homo sapiens
gagaataattccatt

SEQ ID NO: 1633937 - DNA, 15 bp, Homo sapiens
agaataattccattg

SEQ ID NO: 1633938 - DNA, 15 bp, Homo sapiens
gaataattccattgg

SEQ ID NO: 1633939 - DNA, 15 bp, Homo sapiens
aataattccattggc

SEQ ID NO: 1633940 - DNA, 15 bp, Homo sapiens
ataattccattggca

SEQ ID NO: 1633941 - DNA, 15 bp, Homo sapiens
taattccattggcac

SEQ ID NO: 1633942 - DNA, 15 bp, Homo sapiens
aattccattggcacc

SEQ ID NO: 1633943 - DNA, 15 bp, Homo sapiens
attccattggcacca

SEQ ID NO: 1633944 - DNA, 15 bp, Homo sapiens
ttccattggcaccat

SEQ ID NO: 1633945 - DNA, 15 bp, Homo sapiens
tccattggcaccata

SEQ ID NO: 1633946 - DNA, 15 bp, Homo sapiens
ccattggcaccataa

SEQ ID NO: 1633947 - DNA, 15 bp, Homo sapiens
cattggcaccataag

SEQ ID NO: 1633948 - DNA, 15 bp, Homo sapiens
attggcaccataagg

SEQ ID NO: 1633949 - DNA, 15 bp, Homo sapiens
ttggcaccataaggt

SEQ ID NO: 1633950 - DNA, 15 bp, Homo sapiens
tggcaccataaggtt

SEQ ID NO: 1633951 - DNA, 15 bp, Homo sapiens
ggcaccataaggttg

SEQ ID NO: 1633952 - DNA, 15 bp, Homo sapiens
gcaccataaggttgt

SEQ ID NO: 1633953 - DNA, 15 bp, Homo sapiens
caccataaggttgtt

SEQ ID NO: 1633954 - DNA, 15 bp, Homo sapiens
accataaggttgttg

SEQ ID NO: 1633955 - DNA, 15 bp, Homo sapiens
ccataaggttgttga

SEQ ID NO: 1633956 - DNA, 15 bp, Homo sapiens
cataaggttgttgaa

SEQ ID NO: 1633957 - DNA, 15 bp, Homo sapiens
ataaggttgttgaaa

SEQ ID NO: 1633958 - DNA, 15 bp, Homo sapiens
taaggttgttgaaat

SEQ ID NO: 1633959 - DNA, 15 bp, Homo sapiens
aaggttgttgaaatg

SEQ ID NO: 1633960 - DNA, 15 bp, Homo sapiens
aggttgttgaaatgg

SEQ ID NO: 1633961 - DNA, 15 bp, Homo sapiens
ggttgttgaaatggc

SEQ ID NO: 1633962 - DNA, 15 bp, Homo sapiens
gttgttgaaatggct

SEQ ID NO: 1633963 - DNA, 15 bp, Homo sapiens
ttgttgaaatggctg

SEQ ID NO: 1633964 - DNA, 15 bp, Homo sapiens
tgttgaaatggctga

SEQ ID NO: 1633965 - DNA, 15 bp, Homo sapiens
gttgaaatggctgat

SEQ ID NO: 1633966 - DNA, 15 bp, Homo sapiens
ttgaaatggctgatg

SEQ ID NO: 1633967 - DNA, 15 bp, Homo sapiens
tgaaatggctgatgc

SEQ ID NO: 1633968 - DNA, 15 bp, Homo sapiens
gaaatggctgatgca

SEQ ID NO: 1633969 - DNA, 15 bp, Homo sapiens
aaatggctgatgcac

SEQ ID NO: 1633970 - DNA, 15 bp, Homo sapiens
aatggctgatgcaca

SEQ ID NO: 1633971 - DNA, 15 bp, Homo sapiens
atggctgatgcacaa

SEQ ID NO: 1633972 - DNA, 15 bp, Homo sapiens
tggctgatgcacaaa

SEQ ID NO: 1633973 - DNA, 15 bp, Homo sapiens
ggctgatgcacaaaa

SEQ ID NO: 1633974 - DNA, 15 bp, Homo sapiens
gctgatgcacaaaag

SEQ ID NO: 1633975 - DNA, 15 bp, Homo sapiens
ctgatgcacaaaagg

SEQ ID NO: 1633976 - DNA, 15 bp, Homo sapiens
tgatgcacaaaaggt

SEQ ID NO: 1633977 - DNA, 15 bp, Homo sapiens
gatgcacaaaaggta

SEQ ID NO: 1633978 - DNA, 15 bp, Homo sapiens
atgcacaaaaggtat

SEQ ID NO: 1633979 - DNA, 15 bp, Homo sapiens
tgcacaaaaggtatg

SEQ ID NO: 1633980 - DNA, 15 bp, Homo sapiens
gcacaaaaggtatgt

SEQ ID NO: 1633981 - DNA, 15 bp, Homo sapiens
cacaaaaggtatgtg

SEQ ID NO: 1633982 - DNA, 15 bp, Homo sapiens
acaaaaggtatgtga

SEQ ID NO: 1633983 - DNA, 15 bp, Homo sapiens
caaaaggtatgtgaa

SEQ ID NO: 1633984 - DNA, 15 bp, Homo sapiens
aaaaggtatgtgaaa

SEQ ID NO: 1633985 - DNA, 15 bp, Homo sapiens
aaaggtatgtgaaaa

SEQ ID NO: 1633986 - DNA, 15 bp, Homo sapiens
aaggtatgtgaaaat

SEQ ID NO: 1633987 - DNA, 15 bp, Homo sapiens
aggtatgtgaaaatg

SEQ ID NO: 1633988 - DNA, 15 bp, Homo sapiens
ggtatgtgaaaatga

SEQ ID NO: 1633989 - DNA, 15 bp, Homo sapiens
gtatgtgaaaatgat

SEQ ID NO: 1633990 - DNA, 15 bp, Homo sapiens
tatgtgaaaatgatt

SEQ ID NO: 1633991 - DNA, 15 bp, Homo sapiens
atgtgaaaatgattt

SEQ ID NO: 1633992 - DNA, 15 bp, Homo sapiens
tgtgaaaatgatttt

SEQ ID NO: 1633993 - DNA, 15 bp, Homo sapiens
gtgaaaatgattttt

SEQ ID NO: 1633994 - DNA, 15 bp, Homo sapiens
tgaaaatgatttttg

SEQ ID NO: 1633995 - DNA, 15 bp, Homo sapiens
gaaaatgatttttga

SEQ ID NO: 1633996 - DNA, 15 bp, Homo sapiens
aaaatgatttttgaa

SEQ ID NO: 1633997 - DNA, 15 bp, Homo sapiens
aaatgatttttgaac

SEQ ID NO: 1633998 - DNA, 15 bp, Homo sapiens
aatgatttttgaact

SEQ ID NO: 1633999 - DNA, 15 bp, Homo sapiens
atgatttttgaactg

SEQ ID NO: 1634000 - DNA, 15 bp, Homo sapiens
tgatttttgaactgc

SEQ ID NO: 1634001 - DNA, 15 bp, Homo sapiens
gatttttgaactgcc

SEQ ID NO: 1634002 - DNA, 15 bp, Homo sapiens
atttttgaactgcca

SEQ ID NO: 1634003 - DNA, 15 bp, Homo sapiens
tttttgaactgccag

SEQ ID NO: 1634004 - DNA, 15 bp, Homo sapiens
ttttgaactgccagg

SEQ ID NO: 1634005 - DNA, 15 bp, Homo sapiens
tttgaactgccaggc

SEQ ID NO: 1634006 - DNA, 15 bp, Homo sapiens
ttgaactgccaggca

SEQ ID NO: 1634007 - DNA, 15 bp, Homo sapiens
tgaactgccaggcac

SEQ ID NO: 1634008 - DNA, 15 bp, Homo sapiens
gaactgccaggcact

SEQ ID NO: 1634009 - DNA, 15 bp, Homo sapiens
aactgccaggcactc

SEQ ID NO: 1634010 - DNA, 15 bp, Homo sapiens
actgccaggcactct

SEQ ID NO: 1634011 - DNA, 15 bp, Homo sapiens
ctgccaggcactctc

SEQ ID NO: 1634012 - DNA, 15 bp, Homo sapiens
tgccaggcactctct

SEQ ID NO: 1634013 - DNA, 15 bp, Homo sapiens
gccaggcactctctg

SEQ ID NO: 1634014 - DNA, 15 bp, Homo sapiens
ccaggcactctctgg

SEQ ID NO: 1634015 - DNA, 15 bp, Homo sapiens
caggcactctctgga

SEQ ID NO: 1634016 - DNA, 15 bp, Homo sapiens
aggcactctctggaa

SEQ ID NO: 1634017 - DNA, 15 bp, Homo sapiens
ggcactctctggaat

SEQ ID NO: 1634018 - DNA, 15 bp, Homo sapiens
gcactctctggaatt

SEQ ID NO: 1634019 - DNA, 15 bp, Homo sapiens
cactctctggaatta

SEQ ID NO: 1634020 - DNA, 15 bp, Homo sapiens
actctctggaattag

SEQ ID NO: 1634021 - DNA, 15 bp, Homo sapiens
ctctctggaattagc

SEQ ID NO: 1634022 - DNA, 15 bp, Homo sapiens
tctctggaattagct

SEQ ID NO: 1634023 - DNA, 15 bp, Homo sapiens
ctctggaattagcta

SEQ ID NO: 1634024 - DNA, 15 bp, Homo sapiens
tctggaattagctat

SEQ ID NO: 1634025 - DNA, 15 bp, Homo sapiens
ctggaattagctata

SEQ ID NO: 1634026 - DNA, 15 bp, Homo sapiens
tggaattagctatat

SEQ ID NO: 1634027 - DNA, 15 bp, Homo sapiens
ggaattagctatatg

SEQ ID NO: 1634028 - DNA, 15 bp, Homo sapiens
gaattagctatatgg

SEQ ID NO: 1634029 - DNA, 15 bp, Homo sapiens
aattagctatatgga

SEQ ID NO: 1634030 - DNA, 15 bp, Homo sapiens
attagctatatggat

SEQ ID NO: 1634031 - DNA, 15 bp, Homo sapiens
ttagctatatggatt

SEQ ID NO: 1634032 - DNA, 15 bp, Homo sapiens
tagctatatggattg

SEQ ID NO: 1634033 - DNA, 15 bp, Homo sapiens
agctatatggattga

SEQ ID NO: 1634034 - DNA, 15 bp, Homo sapiens
gctatatggattgat

SEQ ID NO: 1634035 - DNA, 15 bp, Homo sapiens
ctatatggattgatg

SEQ ID NO: 1634036 - DNA, 15 bp, Homo sapiens
tatatggattgatga

SEQ ID NO: 1634037 - DNA, 15 bp, Homo sapiens
atatggattgatgat

SEQ ID NO: 1634038 - DNA, 15 bp, Homo sapiens
tatggattgatgatg

SEQ ID NO: 1634039 - DNA, 15 bp, Homo sapiens
atggattgatgatgc

SEQ ID NO: 1634040 - DNA, 15 bp, Homo sapiens
tggattgatgatgcc

SEQ ID NO: 1634041 - DNA, 15 bp, Homo sapiens
ggattgatgatgcca

SEQ ID NO: 1634042 - DNA, 15 bp, Homo sapiens
gattgatgatgccaa

SEQ ID NO: 1634043 - DNA, 15 bp, Homo sapiens
attgatgatgccaat

SEQ ID NO: 1634044 - DNA, 15 bp, Homo sapiens
ttgatgatgccaata

SEQ ID NO: 1634045 - DNA, 15 bp, Homo sapiens
tgatgatgccaatac

SEQ ID NO: 1634046 - DNA, 15 bp, Homo sapiens
gatgatgccaataca

SEQ ID NO: 1634047 - DNA, 15 bp, Homo sapiens
atgatgccaatacac

SEQ ID NO: 1634048 - DNA, 15 bp, Homo sapiens
tgatgccaatacaca

SEQ ID NO: 1634049 - DNA, 15 bp, Homo sapiens
gatgccaatacacat

SEQ ID NO: 1634050 - DNA, 15 bp, Homo sapiens
atgccaatacacatt

SEQ ID NO: 1634051 - DNA, 15 bp, Homo sapiens
tgccaatacacatta

SEQ ID NO: 1634052 - DNA, 15 bp, Homo sapiens
gccaatacacattat

SEQ ID NO: 1634053 - DNA, 15 bp, Homo sapiens
ccaatacacattatg

SEQ ID NO: 1634054 - DNA, 15 bp, Homo sapiens
caatacacattatgg

SEQ ID NO: 1634055 - DNA, 15 bp, Homo sapiens
aatacacattatgga

SEQ ID NO: 1634056 - DNA, 15 bp, Homo sapiens
atacacattatggac

SEQ ID NO: 1634057 - DNA, 15 bp, Homo sapiens
tacacattatggacc

SEQ ID NO: 1634058 - DNA, 15 bp, Homo sapiens
acacattatggacca

SEQ ID NO: 1634059 - DNA, 15 bp, Homo sapiens
cacattatggaccac

SEQ ID NO: 1634060 - DNA, 15 bp, Homo sapiens
acattatggaccaca

SEQ ID NO: 1634061 - DNA, 15 bp, Homo sapiens
cattatggaccacag

SEQ ID NO: 1634062 - DNA, 15 bp, Homo sapiens
attatggaccacagg

SEQ ID NO: 1634063 - DNA, 15 bp, Homo sapiens
ttatggaccacaggc

SEQ ID NO: 1634064 - DNA, 15 bp, Homo sapiens
tatggaccacaggca

SEQ ID NO: 1634065 - DNA, 15 bp, Homo sapiens
atggaccacaggcat

SEQ ID NO: 1634066 - DNA, 15 bp, Homo sapiens
tggaccacaggcatg

SEQ ID NO: 1634067 - DNA, 15 bp, Homo sapiens
ggaccacaggcatgc

SEQ ID NO: 1634068 - DNA, 15 bp, Homo sapiens
gaccacaggcatgct

SEQ ID NO: 1634069 - DNA, 15 bp, Homo sapiens
accacaggcatgctg

SEQ ID NO: 1634070 - DNA, 15 bp, Homo sapiens
ccacaggcatgctgg

SEQ ID NO: 1634071 - DNA, 15 bp, Homo sapiens
cacaggcatgctggg

SEQ ID NO: 1634072 - DNA, 15 bp, Homo sapiens
acaggcatgctgggg

SEQ ID NO: 1634073 - DNA, 15 bp, Homo sapiens
caggcatgctggggg

SEQ ID NO: 1634074 - DNA, 15 bp, Homo sapiens
aggcatgctggggga

SEQ ID NO: 1634075 - DNA, 15 bp, Homo sapiens
ggcatgctgggggat

SEQ ID NO: 1634076 - DNA, 15 bp, Homo sapiens
gcatgctgggggatg

SEQ ID NO: 1634077 - DNA, 15 bp, Homo sapiens
catgctgggggatgt

SEQ ID NO: 1634078 - DNA, 15 bp, Homo sapiens
atgctgggggatgtg

SEQ ID NO: 1634079 - DNA, 15 bp, Homo sapiens
tgctgggggatgtgg

SEQ ID NO: 1634080 - DNA, 15 bp, Homo sapiens
gctgggggatgtggg

SEQ ID NO: 1634081 - DNA, 15 bp, Homo sapiens
ctgggggatgtgggg

SEQ ID NO: 1634082 - DNA, 15 bp, Homo sapiens
tgggggatgtgggga

SEQ ID NO: 1634083 - DNA, 15 bp, Homo sapiens
gggggatgtggggag

SEQ ID NO: 1634084 - DNA, 15 bp, Homo sapiens
ggggatgtggggaga

SEQ ID NO: 1634085 - DNA, 15 bp, Homo sapiens
gggatgtggggagac

SEQ ID NO: 1634086 - DNA, 15 bp, Homo sapiens
ggatgtggggagact

SEQ ID NO: 1634087 - DNA, 15 bp, Homo sapiens
gatgtggggagactg

SEQ ID NO: 1634088 - DNA, 15 bp, Homo sapiens
atgtggggagactgt

SEQ ID NO: 1634089 - DNA, 15 bp, Homo sapiens
tgtggggagactgtg

SEQ ID NO: 1634090 - DNA, 15 bp, Homo sapiens
gtggggagactgtgt

SEQ ID NO: 1634091 - DNA, 15 bp, Homo sapiens
tggggagactgtgta

SEQ ID NO: 1634092 - DNA, 15 bp, Homo sapiens
ggggagactgtgtaa

SEQ ID NO: 1634093 - DNA, 15 bp, Homo sapiens
gggagactgtgtaac

SEQ ID NO: 1634094 - DNA, 15 bp, Homo sapiens
ggagactgtgtaacc

SEQ ID NO: 1634095 - DNA, 15 bp, Homo sapiens
gagactgtgtaacct

SEQ ID NO: 1634096 - DNA, 15 bp, Homo sapiens
agactgtgtaacctg

SEQ ID NO: 1634097 - DNA, 15 bp, Homo sapiens
gactgtgtaacctgc

SEQ ID NO: 1634098 - DNA, 15 bp, Homo sapiens
actgtgtaacctgcg

SEQ ID NO: 1634099 - DNA, 15 bp, Homo sapiens
ctgtgtaacctgcgt

SEQ ID NO: 1634100 - DNA, 15 bp, Homo sapiens
tgtgtaacctgcgta

SEQ ID NO: 1634101 - DNA, 15 bp, Homo sapiens
gtgtaacctgcgtat

SEQ ID NO: 1634102 - DNA, 15 bp, Homo sapiens
tgtaacctgcgtatc

SEQ ID NO: 1634103 - DNA, 15 bp, Homo sapiens
gtaacctgcgtatcc

SEQ ID NO: 1634104 - DNA, 15 bp, Homo sapiens
taacctgcgtatcct

SEQ ID NO: 1634105 - DNA, 15 bp, Homo sapiens
aacctgcgtatcctg

SEQ ID NO: 1634106 - DNA, 15 bp, Homo sapiens
acctgcgtatcctgt

SEQ ID NO: 1634107 - DNA, 15 bp, Homo sapiens
cctgcgtatcctgtg

SEQ ID NO: 1634108 - DNA, 15 bp, Homo sapiens
ctgcgtatcctgtgt

SEQ ID NO: 1634109 - DNA, 15 bp, Homo sapiens
tgcgtatcctgtgtc

SEQ ID NO: 1634110 - DNA, 15 bp, Homo sapiens
gcgtatcctgtgtcc

SEQ ID NO: 1634111 - DNA, 15 bp, Homo sapiens
cgtatcctgtgtcct

SEQ ID NO: 1634112 - DNA, 15 bp, Homo sapiens
gtatcctgtgtcctc

SEQ ID NO: 1634113 - DNA, 15 bp, Homo sapiens
tatcctgtgtcctct

SEQ ID NO: 1634114 - DNA, 15 bp, Homo sapiens
atcctgtgtcctctt

SEQ ID NO: 1634115 - DNA, 15 bp, Homo sapiens
tcctgtgtcctcttc

SEQ ID NO: 1634116 - DNA, 15 bp, Homo sapiens
cctgtgtcctcttct

SEQ ID NO: 1634117 - DNA, 15 bp, Homo sapiens
ctgtgtcctcttcta

SEQ ID NO: 1634118 - DNA, 15 bp, Homo sapiens
tgtgtcctcttctat

SEQ ID NO: 1634119 - DNA, 15 bp, Homo sapiens
gtgtcctcttctata

SEQ ID NO: 1634120 - DNA, 15 bp, Homo sapiens
tgtcctcttctatat

SEQ ID NO: 1634121 - DNA, 15 bp, Homo sapiens
gtcctcttctatatt

SEQ ID NO: 1634122 - DNA, 15 bp, Homo sapiens
tcctcttctatattc

SEQ ID NO: 1634123 - DNA, 15 bp, Homo sapiens
cctcttctatattct

SEQ ID NO: 1634124 - DNA, 15 bp, Homo sapiens
ctcttctatattctg

SEQ ID NO: 1634125 - DNA, 15 bp, Homo sapiens
tcttctatattctga

SEQ ID NO: 1634126 - DNA, 15 bp, Homo sapiens
cttctatattctgag

SEQ ID NO: 1634127 - DNA, 15 bp, Homo sapiens
ttctatattctgagc

SEQ ID NO: 1634128 - DNA, 15 bp, Homo sapiens
tctatattctgagca

SEQ ID NO: 1634129 - DNA, 15 bp, Homo sapiens
ctatattctgagcac

SEQ ID NO: 1634130 - DNA, 15 bp, Homo sapiens
tatattctgagcacc

SEQ ID NO: 1634131 - DNA, 15 bp, Homo sapiens
atattctgagcacca

SEQ ID NO: 1634132 - DNA, 15 bp, Homo sapiens
tattctgagcaccaa

SEQ ID NO: 1634133 - DNA, 15 bp, Homo sapiens
attctgagcaccaag

SEQ ID NO: 1634134 - DNA, 15 bp, Homo sapiens
ttctgagcaccaagc

SEQ ID NO: 1634135 - DNA, 15 bp, Homo sapiens
tctgagcaccaagcc

SEQ ID NO: 1634136 - DNA, 15 bp, Homo sapiens
ctgagcaccaagccc

SEQ ID NO: 1634137 - DNA, 15 bp, Homo sapiens
tgagcaccaagccca

SEQ ID NO: 1634138 - DNA, 15 bp, Homo sapiens
gagcaccaagcccag

SEQ ID NO: 1634139 - DNA, 15 bp, Homo sapiens
agcaccaagcccagg

SEQ ID NO: 1634140 - DNA, 15 bp, Homo sapiens
gcaccaagcccaggc

SEQ ID NO: 1634141 - DNA, 15 bp, Homo sapiens
caccaagcccaggca

SEQ ID NO: 1634142 - DNA, 15 bp, Homo sapiens
accaagcccaggcag

SEQ ID NO: 1634143 - DNA, 15 bp, Homo sapiens
ccaagcccaggcaga

SEQ ID NO: 1634144 - DNA, 15 bp, Homo sapiens
caagcccaggcagat

SEQ ID NO: 1634145 - DNA, 15 bp, Homo sapiens
aagcccaggcagata

SEQ ID NO: 1634146 - DNA, 15 bp, Homo sapiens
agcccaggcagataa

SEQ ID NO: 1634147 - DNA, 15 bp, Homo sapiens
gcccaggcagataat

SEQ ID NO: 1634148 - DNA, 15 bp, Homo sapiens
cccaggcagataatg

SEQ ID NO: 1634149 - DNA, 15 bp, Homo sapiens
ccaggcagataatgg

SEQ ID NO: 1634150 - DNA, 15 bp, Homo sapiens
caggcagataatggc

SEQ ID NO: 1634151 - DNA, 15 bp, Homo sapiens
aggcagataatggcc

SEQ ID NO: 1634152 - DNA, 15 bp, Homo sapiens
ggcagataatggcca

SEQ ID NO: 1634153 - DNA, 15 bp, Homo sapiens
gcagataatggccat

SEQ ID NO: 1634154 - DNA, 15 bp, Homo sapiens
cagataatggccatt

SEQ ID NO: 1634155 - DNA, 15 bp, Homo sapiens
agataatggccattc

SEQ ID NO: 1634156 - DNA, 15 bp, Homo sapiens
gataatggccattca

SEQ ID NO: 1634157 - DNA, 15 bp, Homo sapiens
ataatggccattcac

SEQ ID NO: 1634158 - DNA, 15 bp, Homo sapiens
taatggccattcact

SEQ ID NO: 1634159 - DNA, 15 bp, Homo sapiens
aatggccattcactg

SEQ ID NO: 1634160 - DNA, 15 bp, Homo sapiens
atggccattcactga

SEQ ID NO: 1634161 - DNA, 15 bp, Homo sapiens
tggccattcactgag

SEQ ID NO: 1634162 - DNA, 15 bp, Homo sapiens
ggccattcactgagt

SEQ ID NO: 1634163 - DNA, 15 bp, Homo sapiens
gccattcactgagtc

SEQ ID NO: 1634164 - DNA, 15 bp, Homo sapiens
ccattcactgagtct

SEQ ID NO: 1634165 - DNA, 15 bp, Homo sapiens
cattcactgagtctt

SEQ ID NO: 1634166 - DNA, 15 bp, Homo sapiens
attcactgagtcttt

SEQ ID NO: 1634167 - DNA, 15 bp, Homo sapiens
ttcactgagtctttg

SEQ ID NO: 1634168 - DNA, 15 bp, Homo sapiens
tcactgagtctttgc

SEQ ID NO: 1634169 - DNA, 15 bp, Homo sapiens
cactgagtctttgct

SEQ ID NO: 1634170 - DNA, 15 bp, Homo sapiens
actgagtctttgctg

SEQ ID NO: 1634171 - DNA, 15 bp, Homo sapiens
ctgagtctttgctga

SEQ ID NO: 1634172 - DNA, 15 bp, Homo sapiens
tgagtctttgctgag

SEQ ID NO: 1634173 - DNA, 15 bp, Homo sapiens
gagtctttgctgagt

SEQ ID NO: 1634174 - DNA, 15 bp, Homo sapiens
agtctttgctgagta

SEQ ID NO: 1634175 - DNA, 15 bp, Homo sapiens
gtctttgctgagtaa

SEQ ID NO: 1634176 - DNA, 15 bp, Homo sapiens
tctttgctgagtaat

SEQ ID NO: 1634177 - DNA, 15 bp, Homo sapiens
ctttgctgagtaatt

SEQ ID NO: 1634178 - DNA, 15 bp, Homo sapiens
tttgctgagtaattt

SEQ ID NO: 1634179 - DNA, 15 bp, Homo sapiens
ttgctgagtaatttt

SEQ ID NO: 1634180 - DNA, 15 bp, Homo sapiens
tgctgagtaatttta

SEQ ID NO: 1634181 - DNA, 15 bp, Homo sapiens
gctgagtaattttaa

SEQ ID NO: 1634182 - DNA, 15 bp, Homo sapiens
ctgagtaattttaac

SEQ ID NO: 1634183 - DNA, 15 bp, Homo sapiens
tgagtaattttaact

SEQ ID NO: 1634184 - DNA, 15 bp, Homo sapiens
gagtaattttaacta

SEQ ID NO: 1634185 - DNA, 15 bp, Homo sapiens
agtaattttaactaa

SEQ ID NO: 1634186 - DNA, 15 bp, Homo sapiens
gtaattttaactaat

SEQ ID NO: 1634187 - DNA, 15 bp, Homo sapiens
taattttaactaata

SEQ ID NO: 1634188 - DNA, 15 bp, Homo sapiens
aattttaactaatat

SEQ ID NO: 1634189 - DNA, 15 bp, Homo sapiens
attttaactaatatt

SEQ ID NO: 1634190 - DNA, 15 bp, Homo sapiens
ttttaactaatattg

SEQ ID NO: 1634191 - DNA, 15 bp, Homo sapiens
tttaactaatattgg

SEQ ID NO: 1634192 - DNA, 15 bp, Homo sapiens
ttaactaatattggg

SEQ ID NO: 1634193 - DNA, 15 bp, Homo sapiens
taactaatattgggt

SEQ ID NO: 1634194 - DNA, 15 bp, Homo sapiens
aactaatattgggta

SEQ ID NO: 1634195 - DNA, 15 bp, Homo sapiens
actaatattgggtaa

SEQ ID NO: 1634196 - DNA, 15 bp, Homo sapiens
ctaatattgggtaag

SEQ ID NO: 1634197 - DNA, 15 bp, Homo sapiens
taatattgggtaagt

SEQ ID NO: 1634198 - DNA, 15 bp, Homo sapiens
aatattgggtaagtg

SEQ ID NO: 1634199 - DNA, 15 bp, Homo sapiens
atattgggtaagtgt

SEQ ID NO: 1634200 - DNA, 15 bp, Homo sapiens
tattgggtaagtgtt

SEQ ID NO: 1634201 - DNA, 15 bp, Homo sapiens
attgggtaagtgttc

SEQ ID NO: 1634202 - DNA, 15 bp, Homo sapiens
ttgggtaagtgttca

SEQ ID NO: 1634203 - DNA, 15 bp, Homo sapiens
tgggtaagtgttcac

SEQ ID NO: 1634204 - DNA, 15 bp, Homo sapiens
gggtaagtgttcact

SEQ ID NO: 1634205 - DNA, 15 bp, Homo sapiens
ggtaagtgttcactc

SEQ ID NO: 1634206 - DNA, 15 bp, Homo sapiens
gtaagtgttcactca

SEQ ID NO: 1634207 - DNA, 15 bp, Homo sapiens
taagtgttcactcat

SEQ ID NO: 1634208 - DNA, 15 bp, Homo sapiens
aagtgttcactcatg

SEQ ID NO: 1634209 - DNA, 15 bp, Homo sapiens
agtgttcactcatgc

SEQ ID NO: 1634210 - DNA, 15 bp, Homo sapiens
gtgttcactcatgca

SEQ ID NO: 1634211 - DNA, 15 bp, Homo sapiens
tgttcactcatgcat

SEQ ID NO: 1634212 - DNA, 15 bp, Homo sapiens
gttcactcatgcatg

SEQ ID NO: 1634213 - DNA, 15 bp, Homo sapiens
ttcactcatgcatgc

SEQ ID NO: 1634214 - DNA, 15 bp, Homo sapiens
tcactcatgcatgca

SEQ ID NO: 1634215 - DNA, 15 bp, Homo sapiens
cactcatgcatgcat

SEQ ID NO: 1634216 - DNA, 15 bp, Homo sapiens
actcatgcatgcatc

SEQ ID NO: 1634217 - DNA, 15 bp, Homo sapiens
ctcatgcatgcatca

SEQ ID NO: 1634218 - DNA, 15 bp, Homo sapiens
tcatgcatgcatcac

SEQ ID NO: 1634219 - DNA, 15 bp, Homo sapiens
catgcatgcatcaca

SEQ ID NO: 1634220 - DNA, 15 bp, Homo sapiens
atgcatgcatcacaa

SEQ ID NO: 1634221 - DNA, 15 bp, Homo sapiens
tgcatgcatcacaag

SEQ ID NO: 1634222 - DNA, 15 bp, Homo sapiens
gcatgcatcacaagc

SEQ ID NO: 1634223 - DNA, 15 bp, Homo sapiens
catgcatcacaagca

SEQ ID NO: 1634224 - DNA, 15 bp, Homo sapiens
atgcatcacaagcac

SEQ ID NO: 1634225 - DNA, 15 bp, Homo sapiens
tgcatcacaagcacc

SEQ ID NO: 1634226 - DNA, 15 bp, Homo sapiens
gcatcacaagcacct

SEQ ID NO: 1634227 - DNA, 15 bp, Homo sapiens
catcacaagcacctt

SEQ ID NO: 1634228 - DNA, 15 bp, Homo sapiens
atcacaagcaccttg

SEQ ID NO: 1634229 - DNA, 15 bp, Homo sapiens
tcacaagcaccttgt

SEQ ID NO: 1634230 - DNA, 15 bp, Homo sapiens
cacaagcaccttgtg

SEQ ID NO: 1634231 - DNA, 15 bp, Homo sapiens
acaagcaccttgtga

SEQ ID NO: 1634232 - DNA, 15 bp, Homo sapiens
caagcaccttgtgag

SEQ ID NO: 1634233 - DNA, 15 bp, Homo sapiens
aagcaccttgtgagg

SEQ ID NO: 1634234 - DNA, 15 bp, Homo sapiens
agcaccttgtgaggt

SEQ ID NO: 1634235 - DNA, 15 bp, Homo sapiens
gcaccttgtgaggtg

SEQ ID NO: 1634236 - DNA, 15 bp, Homo sapiens
caccttgtgaggtga

SEQ ID NO: 1634237 - DNA, 15 bp, Homo sapiens
accttgtgaggtgag

SEQ ID NO: 1634238 - DNA, 15 bp, Homo sapiens
ccttgtgaggtgagt

SEQ ID NO: 1634239 - DNA, 15 bp, Homo sapiens
cttgtgaggtgagta

SEQ ID NO: 1634240 - DNA, 15 bp, Homo sapiens
ttgtgaggtgagtat

SEQ ID NO: 1634241 - DNA, 15 bp, Homo sapiens
tgtgaggtgagtatg

SEQ ID NO: 1634242 - DNA, 15 bp, Homo sapiens
gtgaggtgagtatgt

SEQ ID NO: 1634243 - DNA, 15 bp, Homo sapiens
tgaggtgagtatgtg

SEQ ID NO: 1634244 - DNA, 15 bp, Homo sapiens
gaggtgagtatgtgc

SEQ ID NO: 1634245 - DNA, 15 bp, Homo sapiens
aggtgagtatgtgcc

SEQ ID NO: 1634246 - DNA, 15 bp, Homo sapiens
ggtgagtatgtgcct

SEQ ID NO: 1634247 - DNA, 15 bp, Homo sapiens
gtgagtatgtgcctc

SEQ ID NO: 1634248 - DNA, 15 bp, Homo sapiens
tgagtatgtgcctct

SEQ ID NO: 1634249 - DNA, 15 bp, Homo sapiens
gagtatgtgcctctt

SEQ ID NO: 1634250 - DNA, 15 bp, Homo sapiens
agtatgtgcctcttt

SEQ ID NO: 1634251 - DNA, 15 bp, Homo sapiens
gtatgtgcctctttt

SEQ ID NO: 1634252 - DNA, 15 bp, Homo sapiens
tatgtgcctcttttt

SEQ ID NO: 1634253 - DNA, 15 bp, Homo sapiens
atgtgcctctttttg

SEQ ID NO: 1634254 - DNA, 15 bp, Homo sapiens
tgtgcctctttttgg

SEQ ID NO: 1634255 - DNA, 15 bp, Homo sapiens
gtgcctctttttgga

SEQ ID NO: 1634256 - DNA, 15 bp, Homo sapiens
tgcctctttttggat

SEQ ID NO: 1634257 - DNA, 15 bp, Homo sapiens
gcctctttttggatg

SEQ ID NO: 1634258 - DNA, 15 bp, Homo sapiens
cctctttttggatgc

SEQ ID NO: 1634259 - DNA, 15 bp, Homo sapiens
ctctttttggatgca

SEQ ID NO: 1634260 - DNA, 15 bp, Homo sapiens
tctttttggatgcaa

SEQ ID NO: 1634261 - DNA, 15 bp, Homo sapiens
ctttttggatgcaac

SEQ ID NO: 1634262 - DNA, 15 bp, Homo sapiens
tttttggatgcaacc

SEQ ID NO: 1634263 - DNA, 15 bp, Homo sapiens
ttttggatgcaacct

SEQ ID NO: 1634264 - DNA, 15 bp, Homo sapiens
tttggatgcaacctg

SEQ ID NO: 1634265 - DNA, 15 bp, Homo sapiens
ttggatgcaacctga

SEQ ID NO: 1634266 - DNA, 15 bp, Homo sapiens
tggatgcaacctgag

SEQ ID NO: 1634267 - DNA, 15 bp, Homo sapiens
ggatgcaacctgaga

SEQ ID NO: 1634268 - DNA, 15 bp, Homo sapiens
gatgcaacctgagag

SEQ ID NO: 1634269 - DNA, 15 bp, Homo sapiens
atgcaacctgagagg

SEQ ID NO: 1634270 - DNA, 15 bp, Homo sapiens
tgcaacctgagaggt

SEQ ID NO: 1634271 - DNA, 15 bp, Homo sapiens
gcaacctgagaggtt

SEQ ID NO: 1634272 - DNA, 15 bp, Homo sapiens
caacctgagaggtta

SEQ ID NO: 1634273 - DNA, 15 bp, Homo sapiens
aacctgagaggttaa

SEQ ID NO: 1634274 - DNA, 15 bp, Homo sapiens
acctgagaggttaag

SEQ ID NO: 1634275 - DNA, 15 bp, Homo sapiens
cctgagaggttaagg

SEQ ID NO: 1634276 - DNA, 15 bp, Homo sapiens
ctgagaggttaagga

SEQ ID NO: 1634277 - DNA, 15 bp, Homo sapiens
tgagaggttaaggag

SEQ ID NO: 1634278 - DNA, 15 bp, Homo sapiens
gagaggttaaggagc

SEQ ID NO: 1634279 - DNA, 15 bp, Homo sapiens
agaggttaaggagct

SEQ ID NO: 1634280 - DNA, 15 bp, Homo sapiens
gaggttaaggagctt

SEQ ID NO: 1634281 - DNA, 15 bp, Homo sapiens
aggttaaggagcttc

SEQ ID NO: 1634282 - DNA, 15 bp, Homo sapiens
ggttaaggagcttcc

SEQ ID NO: 1634283 - DNA, 15 bp, Homo sapiens
gttaaggagcttcct

SEQ ID NO: 1634284 - DNA, 15 bp, Homo sapiens
ttaaggagcttcctc

SEQ ID NO: 1634285 - DNA, 15 bp, Homo sapiens
taaggagcttcctca

SEQ ID NO: 1634286 - DNA, 15 bp, Homo sapiens
aaggagcttcctcac

SEQ ID NO: 1634287 - DNA, 15 bp, Homo sapiens
aggagcttcctcaca

SEQ ID NO: 1634288 - DNA, 15 bp, Homo sapiens
ggagcttcctcacat

SEQ ID NO: 1634289 - DNA, 15 bp, Homo sapiens
gagcttcctcacatc

SEQ ID NO: 1634290 - DNA, 15 bp, Homo sapiens
agcttcctcacatca

SEQ ID NO: 1634291 - DNA, 15 bp, Homo sapiens
gcttcctcacatcac

SEQ ID NO: 1634292 - DNA, 15 bp, Homo sapiens
cttcctcacatcaca

SEQ ID NO: 1634293 - DNA, 15 bp, Homo sapiens
ttcctcacatcacat

SEQ ID NO: 1634294 - DNA, 15 bp, Homo sapiens
tcctcacatcacata

SEQ ID NO: 1634295 - DNA, 15 bp, Homo sapiens
cctcacatcacatag

SEQ ID NO: 1634296 - DNA, 15 bp, Homo sapiens
ctcacatcacatagt

SEQ ID NO: 1634297 - DNA, 15 bp, Homo sapiens
tcacatcacatagtt

SEQ ID NO: 1634298 - DNA, 15 bp, Homo sapiens
cacatcacatagtta

SEQ ID NO: 1634299 - DNA, 15 bp, Homo sapiens
acatcacatagttag

SEQ ID NO: 1634300 - DNA, 15 bp, Homo sapiens
catcacatagttaga

SEQ ID NO: 1634301 - DNA, 15 bp, Homo sapiens
atcacatagttagaa

SEQ ID NO: 1634302 - DNA, 15 bp, Homo sapiens
tcacatagttagaaa

SEQ ID NO: 1634303 - DNA, 15 bp, Homo sapiens
cacatagttagaaat

SEQ ID NO: 1634304 - DNA, 15 bp, Homo sapiens
acatagttagaaatg

SEQ ID NO: 1634305 - DNA, 15 bp, Homo sapiens
catagttagaaatgg

SEQ ID NO: 1634306 - DNA, 15 bp, Homo sapiens
atagttagaaatggt

SEQ ID NO: 1634307 - DNA, 15 bp, Homo sapiens
tagttagaaatggta

SEQ ID NO: 1634308 - DNA, 15 bp, Homo sapiens
agttagaaatggtat

SEQ ID NO: 1634309 - DNA, 15 bp, Homo sapiens
gttagaaatggtatg

SEQ ID NO: 1634310 - DNA, 15 bp, Homo sapiens
ttagaaatggtatgc

SEQ ID NO: 1634311 - DNA, 15 bp, Homo sapiens
tagaaatggtatgct

SEQ ID NO: 1634312 - DNA, 15 bp, Homo sapiens
agaaatggtatgctc

SEQ ID NO: 1634313 - DNA, 15 bp, Homo sapiens
gaaatggtatgctca

SEQ ID NO: 1634314 - DNA, 15 bp, Homo sapiens
aaatggtatgctcaa

SEQ ID NO: 1634315 - DNA, 15 bp, Homo sapiens
aatggtatgctcaag

SEQ ID NO: 1634316 - DNA, 15 bp, Homo sapiens
atggtatgctcaagg

SEQ ID NO: 1634317 - DNA, 15 bp, Homo sapiens
tggtatgctcaaggc

SEQ ID NO: 1634318 - DNA, 15 bp, Homo sapiens
ggtatgctcaaggct

SEQ ID NO: 1634319 - DNA, 15 bp, Homo sapiens
gtatgctcaaggctc

SEQ ID NO: 1634320 - DNA, 15 bp, Homo sapiens
tatgctcaaggctct

SEQ ID NO: 1634321 - DNA, 15 bp, Homo sapiens
atgctcaaggctctt

SEQ ID NO: 1634322 - DNA, 15 bp, Homo sapiens
tgctcaaggctcttc

SEQ ID NO: 1634323 - DNA, 15 bp, Homo sapiens
gctcaaggctcttct

SEQ ID NO: 1634324 - DNA, 15 bp, Homo sapiens
ctcaaggctcttctt

SEQ ID NO: 1634325 - DNA, 15 bp, Homo sapiens
tcaaggctcttcttt

SEQ ID NO: 1634326 - DNA, 15 bp, Homo sapiens
caaggctcttcttta

SEQ ID NO: 1634327 - DNA, 15 bp, Homo sapiens
aaggctcttctttaa

SEQ ID NO: 1634328 - DNA, 15 bp, Homo sapiens
aggctcttctttaaa

SEQ ID NO: 1634329 - DNA, 15 bp, Homo sapiens
ggctcttctttaaaa

SEQ ID NO: 1634330 - DNA, 15 bp, Homo sapiens
gctcttctttaaaat

SEQ ID NO: 1634331 - DNA, 15 bp, Homo sapiens
ctcttctttaaaatg

SEQ ID NO: 1634332 - DNA, 15 bp, Homo sapiens
tcttctttaaaatgg

SEQ ID NO: 1634333 - DNA, 15 bp, Homo sapiens
cttctttaaaatggc

SEQ ID NO: 1634334 - DNA, 15 bp, Homo sapiens
ttctttaaaatggca

SEQ ID NO: 1634335 - DNA, 15 bp, Homo sapiens
tctttaaaatggcat

SEQ ID NO: 1634336 - DNA, 15 bp, Homo sapiens
ctttaaaatggcatg

SEQ ID NO: 1634337 - DNA, 15 bp, Homo sapiens
tttaaaatggcatgg

SEQ ID NO: 1634338 - DNA, 15 bp, Homo sapiens
ttaaaatggcatggt

SEQ ID NO: 1634339 - DNA, 15 bp, Homo sapiens
taaaatggcatggta

SEQ ID NO: 1634340 - DNA, 15 bp, Homo sapiens
aaaatggcatggtat

SEQ ID NO: 1634341 - DNA, 15 bp, Homo sapiens
aaatggcatggtatt

SEQ ID NO: 1634342 - DNA, 15 bp, Homo sapiens
aatggcatggtatta

SEQ ID NO: 1634343 - DNA, 15 bp, Homo sapiens
atggcatggtattaa

SEQ ID NO: 1634344 - DNA, 15 bp, Homo sapiens
tggcatggtattaat

SEQ ID NO: 1634345 - DNA, 15 bp, Homo sapiens
ggcatggtattaata

SEQ ID NO: 1634346 - DNA, 15 bp, Homo sapiens
gcatggtattaatac

SEQ ID NO: 1634347 - DNA, 15 bp, Homo sapiens
catggtattaatact

SEQ ID NO: 1634348 - DNA, 15 bp, Homo sapiens
atggtattaatactt

SEQ ID NO: 1634349 - DNA, 15 bp, Homo sapiens
tggtattaatacttg

SEQ ID NO: 1634350 - DNA, 15 bp, Homo sapiens
ggtattaatacttgc

SEQ ID NO: 1634351 - DNA, 15 bp, Homo sapiens
gtattaatacttgca

SEQ ID NO: 1634352 - DNA, 15 bp, Homo sapiens
tattaatacttgcat

SEQ ID NO: 1634353 - DNA, 15 bp, Homo sapiens
attaatacttgcatg

SEQ ID NO: 1634354 - DNA, 15 bp, Homo sapiens
ttaatacttgcatgt

SEQ ID NO: 1634355 - DNA, 15 bp, Homo sapiens
taatacttgcatgta

SEQ ID NO: 1634356 - DNA, 15 bp, Homo sapiens
aatacttgcatgtaa

SEQ ID NO: 1634357 - DNA, 15 bp, Homo sapiens
atacttgcatgtaac

SEQ ID NO: 1634358 - DNA, 15 bp, Homo sapiens
tacttgcatgtaacc

SEQ ID NO: 1634359 - DNA, 15 bp, Homo sapiens
acttgcatgtaacct

SEQ ID NO: 1634360 - DNA, 15 bp, Homo sapiens
cttgcatgtaaccta

SEQ ID NO: 1634361 - DNA, 15 bp, Homo sapiens
ttgcatgtaacctat

SEQ ID NO: 1634362 - DNA, 15 bp, Homo sapiens
tgcatgtaacctatg

SEQ ID NO: 1634363 - DNA, 15 bp, Homo sapiens
gcatgtaacctatgc

SEQ ID NO: 1634364 - DNA, 15 bp, Homo sapiens
catgtaacctatgca

SEQ ID NO: 1634365 - DNA, 15 bp, Homo sapiens
atgtaacctatgcac

SEQ ID NO: 1634366 - DNA, 15 bp, Homo sapiens
tgtaacctatgcact

SEQ ID NO: 1634367 - DNA, 15 bp, Homo sapiens
gtaacctatgcactt

SEQ ID NO: 1634368 - DNA, 15 bp, Homo sapiens
taacctatgcacttt

SEQ ID NO: 1634369 - DNA, 15 bp, Homo sapiens
aacctatgcactttt

SEQ ID NO: 1634370 - DNA, 15 bp, Homo sapiens
acctatgcacttttc

SEQ ID NO: 1634371 - DNA, 15 bp, Homo sapiens
cctatgcacttttct

SEQ ID NO: 1634372 - DNA, 15 bp, Homo sapiens
ctatgcacttttctt

SEQ ID NO: 1634373 - DNA, 15 bp, Homo sapiens
tatgcacttttcttg

SEQ ID NO: 1634374 - DNA, 15 bp, Homo sapiens
atgcacttttcttgt

SEQ ID NO: 1634375 - DNA, 15 bp, Homo sapiens
tgcacttttcttgtg

SEQ ID NO: 1634376 - DNA, 15 bp, Homo sapiens
gcacttttcttgtgc

SEQ ID NO: 1634377 - DNA, 15 bp, Homo sapiens
cacttttcttgtgca

SEQ ID NO: 1634378 - DNA, 15 bp, Homo sapiens
acttttcttgtgcac

SEQ ID NO: 1634379 - DNA, 15 bp, Homo sapiens
cttttcttgtgcact

SEQ ID NO: 1634380 - DNA, 15 bp, Homo sapiens
ttttcttgtgcactt

SEQ ID NO: 1634381 - DNA, 15 bp, Homo sapiens
tttcttgtgcacttt

SEQ ID NO: 1634382 - DNA, 15 bp, Homo sapiens
ttcttgtgcacttta

SEQ ID NO: 1634383 - DNA, 15 bp, Homo sapiens
tcttgtgcactttaa

SEQ ID NO: 1634384 - DNA, 15 bp, Homo sapiens
cttgtgcactttaaa

SEQ ID NO: 1634385 - DNA, 15 bp, Homo sapiens
ttgtgcactttaaaa

SEQ ID NO: 1634386 - DNA, 15 bp, Homo sapiens
tgtgcactttaaaat

SEQ ID NO: 1634387 - DNA, 15 bp, Homo sapiens
gtgcactttaaaatc

SEQ ID NO: 1634388 - DNA, 15 bp, Homo sapiens
tgcactttaaaatca

SEQ ID NO: 1634389 - DNA, 15 bp, Homo sapiens
gcactttaaaatcat

SEQ ID NO: 1634390 - DNA, 15 bp, Homo sapiens
cactttaaaatcatc

SEQ ID NO: 1634391 - DNA, 15 bp, Homo sapiens
actttaaaatcatct

SEQ ID NO: 1634392 - DNA, 15 bp, Homo sapiens
ctttaaaatcatctc

SEQ ID NO: 1634393 - DNA, 15 bp, Homo sapiens
tttaaaatcatctct

SEQ ID NO: 1634394 - DNA, 15 bp, Homo sapiens
ttaaaatcatctctg

SEQ ID NO: 1634395 - DNA, 15 bp, Homo sapiens
taaaatcatctctgg

SEQ ID NO: 1634396 - DNA, 15 bp, Homo sapiens
aaaatcatctctgga

SEQ ID NO: 1634397 - DNA, 15 bp, Homo sapiens
aaatcatctctggat

SEQ ID NO: 1634398 - DNA, 15 bp, Homo sapiens
aatcatctctggatc

SEQ ID NO: 1634399 - DNA, 15 bp, Homo sapiens
atcatctctggatca

SEQ ID NO: 1634400 - DNA, 15 bp, Homo sapiens
tcatctctggatcac

SEQ ID NO: 1634401 - DNA, 15 bp, Homo sapiens
catctctggatcact

SEQ ID NO: 1634402 - DNA, 15 bp, Homo sapiens
atctctggatcactt

SEQ ID NO: 1634403 - DNA, 15 bp, Homo sapiens
tctctggatcactta

SEQ ID NO: 1634404 - DNA, 15 bp, Homo sapiens
ctctggatcacttat

SEQ ID NO: 1634405 - DNA, 15 bp, Homo sapiens
tctggatcacttata

SEQ ID NO: 1634406 - DNA, 15 bp, Homo sapiens
ctggatcacttataa

SEQ ID NO: 1634407 - DNA, 15 bp, Homo sapiens
tggatcacttataac

SEQ ID NO: 1634408 - DNA, 15 bp, Homo sapiens
ggatcacttataaca

SEQ ID NO: 1634409 - DNA, 15 bp, Homo sapiens
gatcacttataacat

SEQ ID NO: 1634410 - DNA, 15 bp, Homo sapiens
atcacttataacatc

SEQ ID NO: 1634411 - DNA, 15 bp, Homo sapiens
tcacttataacatct

SEQ ID NO: 1634412 - DNA, 15 bp, Homo sapiens
cacttataacatcta

SEQ ID NO: 1634413 - DNA, 15 bp, Homo sapiens
acttataacatctaa

SEQ ID NO: 1634414 - DNA, 15 bp, Homo sapiens
cttataacatctaat

SEQ ID NO: 1634415 - DNA, 15 bp, Homo sapiens
ttataacatctaata

SEQ ID NO: 1634416 - DNA, 15 bp, Homo sapiens
tataacatctaatat

SEQ ID NO: 1634417 - DNA, 15 bp, Homo sapiens
ataacatctaatata

SEQ ID NO: 1634418 - DNA, 15 bp, Homo sapiens
taacatctaatataa

SEQ ID NO: 1634419 - DNA, 15 bp, Homo sapiens
aacatctaatataat

SEQ ID NO: 1634420 - DNA, 15 bp, Homo sapiens
acatctaatataatg

SEQ ID NO: 1634421 - DNA, 15 bp, Homo sapiens
catctaatataatgt

SEQ ID NO: 1634422 - DNA, 15 bp, Homo sapiens
atctaatataatgta

SEQ ID NO: 1634423 - DNA, 15 bp, Homo sapiens
tctaatataatgtaa

SEQ ID NO: 1634424 - DNA, 15 bp, Homo sapiens
ctaatataatgtaaa

SEQ ID NO: 1634425 - DNA, 15 bp, Homo sapiens
taatataatgtaaat

SEQ ID NO: 1634426 - DNA, 15 bp, Homo sapiens
aatataatgtaaatt

SEQ ID NO: 1634427 - DNA, 15 bp, Homo sapiens
atataatgtaaattc

SEQ ID NO: 1634428 - DNA, 15 bp, Homo sapiens
tataatgtaaattct

SEQ ID NO: 1634429 - DNA, 15 bp, Homo sapiens
ataatgtaaattcta

SEQ ID NO: 1634430 - DNA, 15 bp, Homo sapiens
taatgtaaattctat

SEQ ID NO: 1634431 - DNA, 15 bp, Homo sapiens
atgtaaattctatgt

SEQ ID NO: 1634432 - DNA, 15 bp, Homo sapiens
tgtaaattctatgta

SEQ ID NO: 1634433 - DNA, 15 bp, Homo sapiens
gtaaattctatgtaa

SEQ ID NO: 1634434 - DNA, 15 bp, Homo sapiens
taaattctatgtaaa

SEQ ID NO: 1634435 - DNA, 15 bp, Homo sapiens
aaattctatgtaaac

SEQ ID NO: 1634436 - DNA, 15 bp, Homo sapiens
aattctatgtaaaca

SEQ ID NO: 1634437 - DNA, 15 bp, Homo sapiens
attctatgtaaacac

SEQ ID NO: 1634438 - DNA, 15 bp, Homo sapiens
ttctatgtaaacacc

SEQ ID NO: 1634439 - DNA, 15 bp, Homo sapiens
tctatgtaaacacct

SEQ ID NO: 1634440 - DNA, 15 bp, Homo sapiens
ctatgtaaacacctg

SEQ ID NO: 1634441 - DNA, 15 bp, Homo sapiens
tatgtaaacacctgt

SEQ ID NO: 1634442 - DNA, 15 bp, Homo sapiens
atgtaaacacctgtt

SEQ ID NO: 1634443 - DNA, 15 bp, Homo sapiens
tgtaaacacctgtta

SEQ ID NO: 1634444 - DNA, 15 bp, Homo sapiens
gtaaacacctgttat

SEQ ID NO: 1634445 - DNA, 15 bp, Homo sapiens
taaacacctgttata

SEQ ID NO: 1634446 - DNA, 15 bp, Homo sapiens
aaacacctgttatac

SEQ ID NO: 1634447 - DNA, 15 bp, Homo sapiens
aacacctgttatact

SEQ ID NO: 1634448 - DNA, 15 bp, Homo sapiens
acacctgttatactg

SEQ ID NO: 1634449 - DNA, 15 bp, Homo sapiens
cacctgttatactgt

SEQ ID NO: 1634450 - DNA, 15 bp, Homo sapiens
acctgttatactgta

SEQ ID NO: 1634451 - DNA, 15 bp, Homo sapiens
cctgttatactgtat

SEQ ID NO: 1634452 - DNA, 15 bp, Homo sapiens
ctgttatactgtatt

SEQ ID NO: 1634453 - DNA, 15 bp, Homo sapiens
tgttatactgtattt

SEQ ID NO: 1634454 - DNA, 15 bp, Homo sapiens
gttatactgtatttt

SEQ ID NO: 1634455 - DNA, 15 bp, Homo sapiens
ttatactgtatttta

SEQ ID NO: 1634456 - DNA, 15 bp, Homo sapiens
tatactgtattttaa

SEQ ID NO: 1634457 - DNA, 15 bp, Homo sapiens
atactgtattttaaa

SEQ ID NO: 1634458 - DNA, 15 bp, Homo sapiens
tactgtattttaaaa

SEQ ID NO: 1634459 - DNA, 15 bp, Homo sapiens
actgtattttaaaaa

SEQ ID NO: 1634460 - DNA, 15 bp, Homo sapiens
ctgtattttaaaaat

SEQ ID NO: 1634461 - DNA, 15 bp, Homo sapiens
tgtattttaaaaatg

SEQ ID NO: 1634462 - DNA, 15 bp, Homo sapiens
gtattttaaaaatgt

SEQ ID NO: 1634463 - DNA, 15 bp, Homo sapiens
attttaaaaatgtgt

SEQ ID NO: 1634464 - DNA, 15 bp, Homo sapiens
ttttaaaaatgtgta

SEQ ID NO: 1634465 - DNA, 15 bp, Homo sapiens
tttaaaaatgtgtat

SEQ ID NO: 1634466 - DNA, 15 bp, Homo sapiens
ttaaaaatgtgtatt

SEQ ID NO: 1634467 - DNA, 15 bp, Homo sapiens
taaaaatgtgtatta

SEQ ID NO: 1634468 - DNA, 15 bp, Homo sapiens
aaaaatgtgtattat

SEQ ID NO: 1634469 - DNA, 15 bp, Homo sapiens
aaaatgtgtattatt

SEQ ID NO: 1634470 - DNA, 15 bp, Homo sapiens
aaatgtgtattattt

SEQ ID NO: 1634471 - DNA, 15 bp, Homo sapiens
aatgtgtattatttt

SEQ ID NO: 1634472 - DNA, 15 bp, Homo sapiens
atgtgtattattttt

SEQ ID NO: 1634473 - DNA, 15 bp, Homo sapiens
tgtgtattattttta

SEQ ID NO: 1634474 - DNA, 15 bp, Homo sapiens
gtgtattatttttaa

SEQ ID NO: 1634475 - DNA, 15 bp, Homo sapiens
tgtattatttttaat

SEQ ID NO: 1634476 - DNA, 15 bp, Homo sapiens
gtattatttttaatt

SEQ ID NO: 1634477 - DNA, 15 bp, Homo sapiens
tattatttttaattg

SEQ ID NO: 1634478 - DNA, 15 bp, Homo sapiens
attatttttaattgt

SEQ ID NO: 1634479 - DNA, 15 bp, Homo sapiens
ttatttttaattgtt

SEQ ID NO: 1634480 - DNA, 15 bp, Homo sapiens
tatttttaattgtta

SEQ ID NO: 1634481 - DNA, 15 bp, Homo sapiens
atttttaattgttat

SEQ ID NO: 1634482 - DNA, 15 bp, Homo sapiens
tttttaattgttata

SEQ ID NO: 1634483 - DNA, 15 bp, Homo sapiens
ttttaattgttatat

SEQ ID NO: 1634484 - DNA, 15 bp, Homo sapiens
tttaattgttatatt

SEQ ID NO: 1634485 - DNA, 15 bp, Homo sapiens
ttaattgttatattg

SEQ ID NO: 1634486 - DNA, 15 bp, Homo sapiens
taattgttatattgt

SEQ ID NO: 1634487 - DNA, 15 bp, Homo sapiens
aattgttatattgtt

SEQ ID NO: 1634488 - DNA, 15 bp, Homo sapiens
attgttatattgtta

SEQ ID NO: 1634489 - DNA, 15 bp, Homo sapiens
ttgttatattgttat

SEQ ID NO: 1634490 - DNA, 15 bp, Homo sapiens
tgttatattgttatt

SEQ ID NO: 1634491 - DNA, 15 bp, Homo sapiens
gttatattgttattt

SEQ ID NO: 1634492 - DNA, 15 bp, Homo sapiens
ttatattgttatttt

SEQ ID NO: 1634493 - DNA, 15 bp, Homo sapiens
tatattgttattttt

SEQ ID NO: 1634494 - DNA, 15 bp, Homo sapiens
atattgttattttta

SEQ ID NO: 1634495 - DNA, 15 bp, Homo sapiens
tattgttatttttaa

SEQ ID NO: 1634496 - DNA, 15 bp, Homo sapiens
attgttatttttaat

SEQ ID NO: 1634497 - DNA, 15 bp, Homo sapiens
ttgttatttttaatt

SEQ ID NO: 1634498 - DNA, 15 bp, Homo sapiens
tgttatttttaattt

SEQ ID NO: 1634499 - DNA, 15 bp, Homo sapiens
gttatttttaatttt

SEQ ID NO: 1634500 - DNA, 15 bp, Homo sapiens
ttatttttaattttc

SEQ ID NO: 1634501 - DNA, 15 bp, Homo sapiens
tatttttaattttcg

SEQ ID NO: 1634502 - DNA, 15 bp, Homo sapiens
atttttaattttcgt

SEQ ID NO: 1634503 - DNA, 15 bp, Homo sapiens
tttttaattttcgtt

SEQ ID NO: 1634504 - DNA, 15 bp, Homo sapiens
ttttaattttcgttc

SEQ ID NO: 1634505 - DNA, 15 bp, Homo sapiens
tttaattttcgttca

SEQ ID NO: 1634506 - DNA, 15 bp, Homo sapiens
ttaattttcgttcaa

SEQ ID NO: 1634507 - DNA, 15 bp, Homo sapiens
taattttcgttcaaa

SEQ ID NO: 1634508 - DNA, 15 bp, Homo sapiens
aattttcgttcaaat

SEQ ID NO: 1634509 - DNA, 15 bp, Homo sapiens
attttcgttcaaata

SEQ ID NO: 1634510 - DNA, 15 bp, Homo sapiens
ttttcgttcaaatat

SEQ ID NO: 1634511 - DNA, 15 bp, Homo sapiens
tttcgttcaaatatt

SEQ ID NO: 1634512 - DNA, 15 bp, Homo sapiens
ttcgttcaaatattt

SEQ ID NO: 1634513 - DNA, 15 bp, Homo sapiens
tcgttcaaatatttt

SEQ ID NO: 1634514 - DNA, 15 bp, Homo sapiens
cgttcaaatattttc

SEQ ID NO: 1634515 - DNA, 15 bp, Homo sapiens
gttcaaatattttct

SEQ ID NO: 1634516 - DNA, 15 bp, Homo sapiens
ttcaaatattttcta

SEQ ID NO: 1634517 - DNA, 15 bp, Homo sapiens
tcaaatattttctat

SEQ ID NO: 1634518 - DNA, 15 bp, Homo sapiens
caaatattttctatc

SEQ ID NO: 1634519 - DNA, 15 bp, Homo sapiens
aaatattttctatcc

SEQ ID NO: 1634520 - DNA, 15 bp, Homo sapiens
aatattttctatcca

SEQ ID NO: 1634521 - DNA, 15 bp, Homo sapiens
atattttctatccat

SEQ ID NO: 1634522 - DNA, 15 bp, Homo sapiens
tattttctatccatg

SEQ ID NO: 1634523 - DNA, 15 bp, Homo sapiens
attttctatccatgg

SEQ ID NO: 1634524 - DNA, 15 bp, Homo sapiens
ttttctatccatggt

SEQ ID NO: 1634525 - DNA, 15 bp, Homo sapiens
tttctatccatggtt

SEQ ID NO: 1634526 - DNA, 15 bp, Homo sapiens
ttctatccatggttg

SEQ ID NO: 1634527 - DNA, 15 bp, Homo sapiens
tctatccatggttgt

SEQ ID NO: 1634528 - DNA, 15 bp, Homo sapiens
ctatccatggttgtg

SEQ ID NO: 1634529 - DNA, 15 bp, Homo sapiens
tatccatggttgtgg

SEQ ID NO: 1634530 - DNA, 15 bp, Homo sapiens
atccatggttgtgga

SEQ ID NO: 1634531 - DNA, 15 bp, Homo sapiens
tccatggttgtggac

SEQ ID NO: 1634532 - DNA, 15 bp, Homo sapiens
ccatggttgtggaca

SEQ ID NO: 1634533 - DNA, 15 bp, Homo sapiens
catggttgtggacat

SEQ ID NO: 1634534 - DNA, 15 bp, Homo sapiens
atggttgtggacatg

SEQ ID NO: 1634535 - DNA, 15 bp, Homo sapiens
tggttgtggacatga

SEQ ID NO: 1634536 - DNA, 15 bp, Homo sapiens
ggttgtggacatgaa

SEQ ID NO: 1634537 - DNA, 15 bp, Homo sapiens
gttgtggacatgaaa

SEQ ID NO: 1634538 - DNA, 15 bp, Homo sapiens
ttgtggacatgaaac

SEQ ID NO: 1634539 - DNA, 15 bp, Homo sapiens
tgtggacatgaaacc

SEQ ID NO: 1634540 - DNA, 15 bp, Homo sapiens
gtggacatgaaacct

SEQ ID NO: 1634541 - DNA, 15 bp, Homo sapiens
tggacatgaaacctg

SEQ ID NO: 1634542 - DNA, 15 bp, Homo sapiens
ggacatgaaacctgc

SEQ ID NO: 1634543 - DNA, 15 bp, Homo sapiens
gacatgaaacctgca

SEQ ID NO: 1634544 - DNA, 15 bp, Homo sapiens
acatgaaacctgcaa

SEQ ID NO: 1634545 - DNA, 15 bp, Homo sapiens
catgaaacctgcaaa

SEQ ID NO: 1634546 - DNA, 15 bp, Homo sapiens
atgaaacctgcaaat

SEQ ID NO: 1634547 - DNA, 15 bp, Homo sapiens
tgaaacctgcaaata

SEQ ID NO: 1634548 - DNA, 15 bp, Homo sapiens
gaaacctgcaaatac

SEQ ID NO: 1634549 - DNA, 15 bp, Homo sapiens
aaacctgcaaataca

SEQ ID NO: 1634550 - DNA, 15 bp, Homo sapiens
aacctgcaaatacag

SEQ ID NO: 1634551 - DNA, 15 bp, Homo sapiens
acctgcaaatacaga

SEQ ID NO: 1634552 - DNA, 15 bp, Homo sapiens
cctgcaaatacagag

SEQ ID NO: 1634553 - DNA, 15 bp, Homo sapiens
ctgcaaatacagaga

SEQ ID NO: 1634554 - DNA, 15 bp, Homo sapiens
tgcaaatacagagaa

SEQ ID NO: 1634555 - DNA, 15 bp, Homo sapiens
gcaaatacagagaag

SEQ ID NO: 1634556 - DNA, 15 bp, Homo sapiens
caaatacagagaaga

SEQ ID NO: 1634557 - DNA, 15 bp, Homo sapiens
aaatacagagaagac

SEQ ID NO: 1634558 - DNA, 15 bp, Homo sapiens
aatacagagaagaca

SEQ ID NO: 1634559 - DNA, 15 bp, Homo sapiens
atacagagaagacat

SEQ ID NO: 1634560 - DNA, 15 bp, Homo sapiens
tacagagaagacatt

SEQ ID NO: 1634561 - DNA, 15 bp, Homo sapiens
acagagaagacattt

SEQ ID NO: 1634562 - DNA, 15 bp, Homo sapiens
cagagaagacattta

SEQ ID NO: 1634563 - DNA, 15 bp, Homo sapiens
agagaagacatttat

SEQ ID NO: 1634564 - DNA, 15 bp, Homo sapiens
gagaagacatttatg

SEQ ID NO: 1634565 - DNA, 15 bp, Homo sapiens
agaagacatttatgc

SEQ ID NO: 1634566 - DNA, 15 bp, Homo sapiens
gaagacatttatgca

SEQ ID NO: 1634567 - DNA, 15 bp, Homo sapiens
aagacatttatgcag

SEQ ID NO: 1634568 - DNA, 15 bp, Homo sapiens
agacatttatgcagc

SEQ ID NO: 1634569 - DNA, 15 bp, Homo sapiens
gacatttatgcagcc

SEQ ID NO: 1634570 - DNA, 15 bp, Homo sapiens
acatttatgcagcca

SEQ ID NO: 1634571 - DNA, 15 bp, Homo sapiens
catttatgcagccaa

SEQ ID NO: 1634572 - DNA, 15 bp, Homo sapiens
atttatgcagccaaa

SEQ ID NO: 1634573 - DNA, 15 bp, Homo sapiens
tttatgcagccaaaa

SEQ ID NO: 1634574 - DNA, 15 bp, Homo sapiens
ttatgcagccaaaaa

SEQ ID NO: 1634575 - DNA, 15 bp, Homo sapiens
tatgcagccaaaaaa

SEQ ID NO: 1634576 - DNA, 15 bp, Homo sapiens
atgcagccaaaaaat

SEQ ID NO: 1634577 - DNA, 15 bp, Homo sapiens
tgcagccaaaaaata

SEQ ID NO: 1634578 - DNA, 15 bp, Homo sapiens
gcagccaaaaaatac

SEQ ID NO: 1634579 - DNA, 15 bp, Homo sapiens
cagccaaaaaataca

SEQ ID NO: 1634580 - DNA, 15 bp, Homo sapiens
agccaaaaaatacat

SEQ ID NO: 1634581 - DNA, 15 bp, Homo sapiens
gccaaaaaatacatg

SEQ ID NO: 1634582 - DNA, 15 bp, Homo sapiens
ccaaaaaatacatga

SEQ ID NO: 1634583 - DNA, 15 bp, Homo sapiens
caaaaaatacatgaa

SEQ ID NO: 1634584 - DNA, 15 bp, Homo sapiens
aaaaaatacatgaaa

SEQ ID NO: 1634585 - DNA, 15 bp, Homo sapiens
aaaaatacatgaaaa

SEQ ID NO: 1634586 - DNA, 15 bp, Homo sapiens
aaaatacatgaaaaa

SEQ ID NO: 1634587 - DNA, 15 bp, Homo sapiens
aaatacatgaaaaaa

SEQ ID NO: 1634588 - DNA, 15 bp, Homo sapiens
aatacatgaaaaaat

SEQ ID NO: 1634589 - DNA, 15 bp, Homo sapiens
atacatgaaaaaatg

SEQ ID NO: 1634590 - DNA, 15 bp, Homo sapiens
tacatgaaaaaatgc

SEQ ID NO: 1634591 - DNA, 15 bp, Homo sapiens
cactggccatcagag

SEQ ID NO: 1634592 - DNA, 15 bp, Homo sapiens
actggccatcagaga

SEQ ID NO: 1634593 - DNA, 15 bp, Homo sapiens
ctggccatcagagaa

SEQ ID NO: 1634594 - DNA, 15 bp, Homo sapiens
tggccatcagagaaa

SEQ ID NO: 1634595 - DNA, 15 bp, Homo sapiens
ggccatcagagaaat

SEQ ID NO: 1634596 - DNA, 15 bp, Homo sapiens
gccatcagagaaatg

SEQ ID NO: 1634597 - DNA, 15 bp, Homo sapiens
ccatcagagaaatgc

SEQ ID NO: 1634598 - DNA, 15 bp, Homo sapiens
catcagagaaatgca

SEQ ID NO: 1634599 - DNA, 15 bp, Homo sapiens
atcagagaaatgcaa

SEQ ID NO: 1634600 - DNA, 15 bp, Homo sapiens
tcagagaaatgcaaa

SEQ ID NO: 1634601 - DNA, 15 bp, Homo sapiens
cagagaaatgcaaat

SEQ ID NO: 1634602 - DNA, 15 bp, Homo sapiens
caaatcaaaaccact

SEQ ID NO: 1634603 - DNA, 15 bp, Homo sapiens
aaatcaaaaccacta

SEQ ID NO: 1634604 - DNA, 15 bp, Homo sapiens
aatcaaaaccactat

SEQ ID NO: 1634605 - DNA, 15 bp, Homo sapiens
atcaaaaccactatg

SEQ ID NO: 1634606 - DNA, 15 bp, Homo sapiens
tcaaaaccactatga

SEQ ID NO: 1634607 - DNA, 15 bp, Homo sapiens
caaaaccactatgag

SEQ ID NO: 1634608 - DNA, 15 bp, Homo sapiens
aaaaccactatgaga

SEQ ID NO: 1634609 - DNA, 15 bp, Homo sapiens
aaaccactatgagat

SEQ ID NO: 1634610 - DNA, 15 bp, Homo sapiens
aaccactatgagata

SEQ ID NO: 1634611 - DNA, 15 bp, Homo sapiens
accactatgagatac

SEQ ID NO: 1634612 - DNA, 15 bp, Homo sapiens
ccactatgagatacc

SEQ ID NO: 1634613 - DNA, 15 bp, Homo sapiens
cactatgagatacca

SEQ ID NO: 1634614 - DNA, 15 bp, Homo sapiens
actatgagataccat

SEQ ID NO: 1634615 - DNA, 15 bp, Homo sapiens
ctatgagataccatc

SEQ ID NO: 1634616 - DNA, 15 bp, Homo sapiens
tatgagataccatct

SEQ ID NO: 1634617 - DNA, 15 bp, Homo sapiens
ccagttagaatggca

SEQ ID NO: 1634618 - DNA, 15 bp, Homo sapiens
cagttagaatggcaa

SEQ ID NO: 1634619 - DNA, 15 bp, Homo sapiens
agttagaatggcaat

SEQ ID NO: 1634620 - DNA, 15 bp, Homo sapiens
gttagaatggcaatc

SEQ ID NO: 1634621 - DNA, 15 bp, Homo sapiens
ttagaatggcaatca

SEQ ID NO: 1634622 - DNA, 15 bp, Homo sapiens
tagaatggcaatcat

SEQ ID NO: 1634623 - DNA, 15 bp, Homo sapiens
agaatggcaatcatt

SEQ ID NO: 1634624 - DNA, 15 bp, Homo sapiens
gaatggcaatcatta

SEQ ID NO: 1634625 - DNA, 15 bp, Homo sapiens
aatggcaatcattaa

SEQ ID NO: 1634626 - DNA, 15 bp, Homo sapiens
atggcaatcattaaa

SEQ ID NO: 1634627 - DNA, 15 bp, Homo sapiens
tggcaatcattaaaa

SEQ ID NO: 1634628 - DNA, 15 bp, Homo sapiens
ggcaatcattaaaaa

SEQ ID NO: 1634629 - DNA, 15 bp, Homo sapiens
gcaatcattaaaaag

SEQ ID NO: 1634630 - DNA, 15 bp, Homo sapiens
caatcattaaaaagt

SEQ ID NO: 1634631 - DNA, 15 bp, Homo sapiens
aatcattaaaaagtc

SEQ ID NO: 1634632 - DNA, 15 bp, Homo sapiens
gtaaactagttcaac

SEQ ID NO: 1634633 - DNA, 15 bp, Homo sapiens
taaactagttcaacc

SEQ ID NO: 1634634 - DNA, 15 bp, Homo sapiens
aaactagttcaacca

SEQ ID NO: 1634635 - DNA, 15 bp, Homo sapiens
aactagttcaaccat

SEQ ID NO: 1634636 - DNA, 15 bp, Homo sapiens
actagttcaaccatt

SEQ ID NO: 1634637 - DNA, 15 bp, Homo sapiens
ctagttcaaccattg

SEQ ID NO: 1634638 - DNA, 15 bp, Homo sapiens
aaccattgtggaagt

SEQ ID NO: 1634639 - DNA, 15 bp, Homo sapiens
accattgtggaagtc

SEQ ID NO: 1634640 - DNA, 15 bp, Homo sapiens
ccattgtggaagtca

SEQ ID NO: 1634641 - DNA, 15 bp, Homo sapiens
cattgtggaagtcag

SEQ ID NO: 1634642 - DNA, 15 bp, Homo sapiens
attgtggaagtcagt

SEQ ID NO: 1634643 - DNA, 15 bp, Homo sapiens
ttgtggaagtcagtg

SEQ ID NO: 1634644 - DNA, 15 bp, Homo sapiens
tgtggaagtcagtgt

SEQ ID NO: 1634645 - DNA, 15 bp, Homo sapiens
gtggaagtcagtgtg

SEQ ID NO: 1634646 - DNA, 15 bp, Homo sapiens
tggaagtcagtgtgg

SEQ ID NO: 1634647 - DNA, 15 bp, Homo sapiens
ggaagtcagtgtggc

SEQ ID NO: 1634648 - DNA, 15 bp, Homo sapiens
gaagtcagtgtggcg

SEQ ID NO: 1634649 - DNA, 15 bp, Homo sapiens
aagtcagtgtggcga

SEQ ID NO: 1634650 - DNA, 15 bp, Homo sapiens
agtcagtgtggcgat

SEQ ID NO: 1634651 - DNA, 15 bp, Homo sapiens
gtcagtgtggcgatt

SEQ ID NO: 1634652 - DNA, 15 bp, Homo sapiens
tcagtgtggcgattc

SEQ ID NO: 1634653 - DNA, 15 bp, Homo sapiens
cagtgtggcgattcc

SEQ ID NO: 1634654 - DNA, 15 bp, Homo sapiens
agtgtggcgattcct

SEQ ID NO: 1634655 - DNA, 15 bp, Homo sapiens
gtgtggcgattcctc

SEQ ID NO: 1634656 - DNA, 15 bp, Homo sapiens
tgtggcgattcctca

SEQ ID NO: 1634657 - DNA, 15 bp, Homo sapiens
gtggcgattcctcag

SEQ ID NO: 1634658 - DNA, 15 bp, Homo sapiens
tggcgattcctcagg

SEQ ID NO: 1634659 - DNA, 15 bp, Homo sapiens
ggcgattcctcaggg

SEQ ID NO: 1634660 - DNA, 15 bp, Homo sapiens
gcgattcctcaggga

SEQ ID NO: 1634661 - DNA, 15 bp, Homo sapiens
cgattcctcagggat

SEQ ID NO: 1634662 - DNA, 15 bp, Homo sapiens
gattcctcagggatc

SEQ ID NO: 1634663 - DNA, 15 bp, Homo sapiens
attcctcagggatct

SEQ ID NO: 1634664 - DNA, 15 bp, Homo sapiens
ttcctcagggatcta

SEQ ID NO: 1634665 - DNA, 15 bp, Homo sapiens
tcctcagggatctag

SEQ ID NO: 1634666 - DNA, 15 bp, Homo sapiens
cctcagggatctaga

SEQ ID NO: 1634667 - DNA, 15 bp, Homo sapiens
ctcagggatctagaa

SEQ ID NO: 1634668 - DNA, 15 bp, Homo sapiens
tcagggatctagaac

SEQ ID NO: 1634669 - DNA, 15 bp, Homo sapiens
cagggatctagaact

SEQ ID NO: 1634670 - DNA, 15 bp, Homo sapiens
agggatctagaacta

SEQ ID NO: 1634671 - DNA, 15 bp, Homo sapiens
gggatctagaactag

SEQ ID NO: 1634672 - DNA, 15 bp, Homo sapiens
ccatttgacccagcc

SEQ ID NO: 1634673 - DNA, 15 bp, Homo sapiens
catttgacccagcca

SEQ ID NO: 1634674 - DNA, 15 bp, Homo sapiens
atttgacccagccat

SEQ ID NO: 1634675 - DNA, 15 bp, Homo sapiens
tttgacccagccatc

SEQ ID NO: 1634676 - DNA, 15 bp, Homo sapiens
ttgacccagccatcc

SEQ ID NO: 1634677 - DNA, 15 bp, Homo sapiens
tgacccagccatccc

SEQ ID NO: 1634678 - DNA, 15 bp, Homo sapiens
gacccagccatccca

SEQ ID NO: 1634679 - DNA, 15 bp, Homo sapiens
acccagccatcccat

SEQ ID NO: 1634680 - DNA, 15 bp, Homo sapiens
cccagccatcccatt

SEQ ID NO: 1634681 - DNA, 15 bp, Homo sapiens
ccagccatcccatta

SEQ ID NO: 1634682 - DNA, 15 bp, Homo sapiens
cagccatcccattac

SEQ ID NO: 1634683 - DNA, 15 bp, Homo sapiens
agccatcccattact

SEQ ID NO: 1634684 - DNA, 15 bp, Homo sapiens
gccatcccattactt

SEQ ID NO: 1634685 - DNA, 15 bp, Homo sapiens
ccatcccattactta

SEQ ID NO: 1634686 - DNA, 15 bp, Homo sapiens
catcccattacttat

SEQ ID NO: 1634687 - DNA, 15 bp, Homo sapiens
atcccattacttata

SEQ ID NO: 1634688 - DNA, 15 bp, Homo sapiens
tcccattacttatat

SEQ ID NO: 1634689 - DNA, 15 bp, Homo sapiens
cccattacttatata

SEQ ID NO: 1634690 - DNA, 15 bp, Homo sapiens
ccattacttatatac

SEQ ID NO: 1634691 - DNA, 15 bp, Homo sapiens
cattacttatatacc

SEQ ID NO: 1634692 - DNA, 15 bp, Homo sapiens
attacttatataccc

SEQ ID NO: 1634693 - DNA, 15 bp, Homo sapiens
ttacttatataccca

SEQ ID NO: 1634694 - DNA, 15 bp, Homo sapiens
tacttatatacccaa

SEQ ID NO: 1634695 - DNA, 15 bp, Homo sapiens
acttatatacccaaa

SEQ ID NO: 1634696 - DNA, 15 bp, Homo sapiens
cttatatacccaaat

SEQ ID NO: 1634697 - DNA, 15 bp, Homo sapiens
ttatatacccaaatg

SEQ ID NO: 1634698 - DNA, 15 bp, Homo sapiens
tatatacccaaatga

SEQ ID NO: 1634699 - DNA, 15 bp, Homo sapiens
atatacccaaatgat

SEQ ID NO: 1634700 - DNA, 15 bp, Homo sapiens
tatacccaaatgatt

SEQ ID NO: 1634701 - DNA, 15 bp, Homo sapiens
atacccaaatgatta

SEQ ID NO: 1634702 - DNA, 15 bp, Homo sapiens
tacccaaatgattat

SEQ ID NO: 1634703 - DNA, 15 bp, Homo sapiens
acccaaatgattata

SEQ ID NO: 1634704 - DNA, 15 bp, Homo sapiens
cccaaatgattataa

SEQ ID NO: 1634705 - DNA, 15 bp, Homo sapiens
ccaaatgattataaa

SEQ ID NO: 1634706 - DNA, 15 bp, Homo sapiens
caaatgattataaat

SEQ ID NO: 1634707 - DNA, 15 bp, Homo sapiens
aaatgattataaatc

SEQ ID NO: 1634708 - DNA, 15 bp, Homo sapiens
aatgattataaatca

SEQ ID NO: 1634709 - DNA, 15 bp, Homo sapiens
atgattataaatcat

SEQ ID NO: 1634710 - DNA, 15 bp, Homo sapiens
tgattataaatcatg

SEQ ID NO: 1634711 - DNA, 15 bp, Homo sapiens
ttataaatcatgctg

SEQ ID NO: 1634712 - DNA, 15 bp, Homo sapiens
tataaatcatgctgc

SEQ ID NO: 1634713 - DNA, 15 bp, Homo sapiens
ataaatcatgctgct

SEQ ID NO: 1634714 - DNA, 15 bp, Homo sapiens
taaatcatgctgcta

SEQ ID NO: 1634715 - DNA, 15 bp, Homo sapiens
aaatcatgctgctat

SEQ ID NO: 1634716 - DNA, 15 bp, Homo sapiens
aatcatgctgctata

SEQ ID NO: 1634717 - DNA, 15 bp, Homo sapiens
atcatgctgctataa

SEQ ID NO: 1634718 - DNA, 15 bp, Homo sapiens
tcatgctgctataaa

SEQ ID NO: 1634719 - DNA, 15 bp, Homo sapiens
catgctgctataaag

SEQ ID NO: 1634720 - DNA, 15 bp, Homo sapiens
atgctgctataaaga

SEQ ID NO: 1634721 - DNA, 15 bp, Homo sapiens
tgctgctataaagac

SEQ ID NO: 1634722 - DNA, 15 bp, Homo sapiens
gctgctataaagaca

SEQ ID NO: 1634723 - DNA, 15 bp, Homo sapiens
ctgctataaagacac

SEQ ID NO: 1634724 - DNA, 15 bp, Homo sapiens
tgctataaagacaca

SEQ ID NO: 1634725 - DNA, 15 bp, Homo sapiens
gctataaagacacat

SEQ ID NO: 1634726 - DNA, 15 bp, Homo sapiens
acgtatgtttattgc

SEQ ID NO: 1634727 - DNA, 15 bp, Homo sapiens
cgtatgtttattgcg

SEQ ID NO: 1634728 - DNA, 15 bp, Homo sapiens
gtatgtttattgcgg

SEQ ID NO: 1634729 - DNA, 15 bp, Homo sapiens
tatgtttattgcggc

SEQ ID NO: 1634730 - DNA, 15 bp, Homo sapiens
atgtttattgcggca

SEQ ID NO: 1634731 - DNA, 15 bp, Homo sapiens
tgtttattgcggcat

SEQ ID NO: 1634732 - DNA, 15 bp, Homo sapiens
gtttattgcggcatt

SEQ ID NO: 1634733 - DNA, 15 bp, Homo sapiens
tttattgcggcatta

SEQ ID NO: 1634734 - DNA, 15 bp, Homo sapiens
ttattgcggcattat

SEQ ID NO: 1634735 - DNA, 15 bp, Homo sapiens
tattgcggcattatt

SEQ ID NO: 1634736 - DNA, 15 bp, Homo sapiens
attgcggcattattc

SEQ ID NO: 1634737 - DNA, 15 bp, Homo sapiens
ttgcggcattattca

SEQ ID NO: 1634738 - DNA, 15 bp, Homo sapiens
tgcggcattattcac

SEQ ID NO: 1634739 - DNA, 15 bp, Homo sapiens
gcggcattattcaca

SEQ ID NO: 1634740 - DNA, 15 bp, Homo sapiens
cggcattattcacaa

SEQ ID NO: 1634741 - DNA, 15 bp, Homo sapiens
ggcattattcacaat

SEQ ID NO: 1634742 - DNA, 15 bp, Homo sapiens
ttattcacaatagca

SEQ ID NO: 1634743 - DNA, 15 bp, Homo sapiens
aaccaacccaaatgt

SEQ ID NO: 1634744 - DNA, 15 bp, Homo sapiens
accaacccaaatgtc

SEQ ID NO: 1634745 - DNA, 15 bp, Homo sapiens
ccaacccaaatgtcc

SEQ ID NO: 1634746 - DNA, 15 bp, Homo sapiens
caacccaaatgtcca

SEQ ID NO: 1634747 - DNA, 15 bp, Homo sapiens
aacccaaatgtccaa

SEQ ID NO: 1634748 - DNA, 15 bp, Homo sapiens
acccaaatgtccaac

SEQ ID NO: 1634749 - DNA, 15 bp, Homo sapiens
cccaaatgtccaaca

SEQ ID NO: 1634750 - DNA, 15 bp, Homo sapiens
ccaaatgtccaacaa

SEQ ID NO: 1634751 - DNA, 15 bp, Homo sapiens
caaatgtccaacaat

SEQ ID NO: 1634752 - DNA, 15 bp, Homo sapiens
aaatgtccaacaatg

SEQ ID NO: 1634753 - DNA, 15 bp, Homo sapiens
aatgtccaacaatga

SEQ ID NO: 1634754 - DNA, 15 bp, Homo sapiens
atgtccaacaatgat

SEQ ID NO: 1634755 - DNA, 15 bp, Homo sapiens
tgtccaacaatgata

SEQ ID NO: 1634756 - DNA, 15 bp, Homo sapiens
gtccaacaatgatag

SEQ ID NO: 1634757 - DNA, 15 bp, Homo sapiens
tccaacaatgataga

SEQ ID NO: 1634758 - DNA, 15 bp, Homo sapiens
ccaacaatgatagac

SEQ ID NO: 1634759 - DNA, 15 bp, Homo sapiens
caacaatgatagact

SEQ ID NO: 1634760 - DNA, 15 bp, Homo sapiens
aacaatgatagactg

SEQ ID NO: 1634761 - DNA, 15 bp, Homo sapiens
acaatgatagactgg

SEQ ID NO: 1634762 - DNA, 15 bp, Homo sapiens
gatagactggattaa

SEQ ID NO: 1634763 - DNA, 15 bp, Homo sapiens
atagactggattaag

SEQ ID NO: 1634764 - DNA, 15 bp, Homo sapiens
tagactggattaaga

SEQ ID NO: 1634765 - DNA, 15 bp, Homo sapiens
agactggattaagaa

SEQ ID NO: 1634766 - DNA, 15 bp, Homo sapiens
gactggattaagaaa

SEQ ID NO: 1634767 - DNA, 15 bp, Homo sapiens
actggattaagaaaa

SEQ ID NO: 1634768 - DNA, 15 bp, Homo sapiens
ctggattaagaaaat

SEQ ID NO: 1634769 - DNA, 15 bp, Homo sapiens
tggattaagaaaatg

SEQ ID NO: 1634770 - DNA, 15 bp, Homo sapiens
ggattaagaaaatgt

SEQ ID NO: 1634771 - DNA, 15 bp, Homo sapiens
gattaagaaaatgtg

SEQ ID NO: 1634772 - DNA, 15 bp, Homo sapiens
attaagaaaatgtgg

SEQ ID NO: 1634773 - DNA, 15 bp, Homo sapiens
ttaagaaaatgtggc

SEQ ID NO: 1634774 - DNA, 15 bp, Homo sapiens
taagaaaatgtggca

SEQ ID NO: 1634775 - DNA, 15 bp, Homo sapiens
aagaaaatgtggcac

SEQ ID NO: 1634776 - DNA, 15 bp, Homo sapiens
agaaaatgtggcaca

SEQ ID NO: 1634777 - DNA, 15 bp, Homo sapiens
gaaaatgtggcacat

SEQ ID NO: 1634778 - DNA, 15 bp, Homo sapiens
aaaatgtggcacata

SEQ ID NO: 1634779 - DNA, 15 bp, Homo sapiens
aaatgtggcacatat

SEQ ID NO: 1634780 - DNA, 15 bp, Homo sapiens
aatgtggcacatata

SEQ ID NO: 1634781 - DNA, 15 bp, Homo sapiens
atgtggcacatatac

SEQ ID NO: 1634782 - DNA, 15 bp, Homo sapiens
tgtggcacatataca

SEQ ID NO: 1634783 - DNA, 15 bp, Homo sapiens
gtggcacatatacac

SEQ ID NO: 1634784 - DNA, 15 bp, Homo sapiens
tggcacatatacacc

SEQ ID NO: 1634785 - DNA, 15 bp, Homo sapiens
ggcacatatacacca

SEQ ID NO: 1634786 - DNA, 15 bp, Homo sapiens
gcacatatacaccat

SEQ ID NO: 1634787 - DNA, 15 bp, Homo sapiens
cacatatacaccatg

SEQ ID NO: 1634788 - DNA, 15 bp, Homo sapiens
acatatacaccatgg

SEQ ID NO: 1634789 - DNA, 15 bp, Homo sapiens
catatacaccatgga

SEQ ID NO: 1634790 - DNA, 15 bp, Homo sapiens
atatacaccatggaa

SEQ ID NO: 1634791 - DNA, 15 bp, Homo sapiens
tatacaccatggaat

SEQ ID NO: 1634792 - DNA, 15 bp, Homo sapiens
atacaccatggaata

SEQ ID NO: 1634793 - DNA, 15 bp, Homo sapiens
tacaccatggaatac

SEQ ID NO: 1634794 - DNA, 15 bp, Homo sapiens
acaccatggaatact

SEQ ID NO: 1634795 - DNA, 15 bp, Homo sapiens
caccatggaatacta

SEQ ID NO: 1634796 - DNA, 15 bp, Homo sapiens
accatggaatactat

SEQ ID NO: 1634797 - DNA, 15 bp, Homo sapiens
gcagccataaaaaat

SEQ ID NO: 1634798 - DNA, 15 bp, Homo sapiens
cagccataaaaaatg

SEQ ID NO: 1634799 - DNA, 15 bp, Homo sapiens
agccataaaaaatga

SEQ ID NO: 1634800 - DNA, 15 bp, Homo sapiens
gccataaaaaatgat

SEQ ID NO: 1634801 - DNA, 15 bp, Homo sapiens
ccataaaaaatgatg

SEQ ID NO: 1634802 - DNA, 15 bp, Homo sapiens
cataaaaaatgatga

SEQ ID NO: 1634803 - DNA, 15 bp, Homo sapiens
ataaaaaatgatgag

SEQ ID NO: 1634804 - DNA, 15 bp, Homo sapiens
taaaaaatgatgagt

SEQ ID NO: 1634805 - DNA, 15 bp, Homo sapiens
aaaaaatgatgagtt

SEQ ID NO: 1634806 - DNA, 15 bp, Homo sapiens
aaaaatgatgagttc

SEQ ID NO: 1634807 - DNA, 15 bp, Homo sapiens
aaaatgatgagttca

SEQ ID NO: 1634808 - DNA, 15 bp, Homo sapiens
aaatgatgagttcat

SEQ ID NO: 1634809 - DNA, 15 bp, Homo sapiens
aatgatgagttcatg

SEQ ID NO: 1634810 - DNA, 15 bp, Homo sapiens
atgatgagttcatgt

SEQ ID NO: 1634811 - DNA, 15 bp, Homo sapiens
tgatgagttcatgtc

SEQ ID NO: 1634812 - DNA, 15 bp, Homo sapiens
gatgagttcatgtcc

SEQ ID NO: 1634813 - DNA, 15 bp, Homo sapiens
atgagttcatgtcct

SEQ ID NO: 1634814 - DNA, 15 bp, Homo sapiens
tgagttcatgtcctt

SEQ ID NO: 1634815 - DNA, 15 bp, Homo sapiens
gagttcatgtccttt

SEQ ID NO: 1634816 - DNA, 15 bp, Homo sapiens
agttcatgtcctttg

SEQ ID NO: 1634817 - DNA, 15 bp, Homo sapiens
gttcatgtcctttgt

SEQ ID NO: 1634818 - DNA, 15 bp, Homo sapiens
ttcatgtcctttgta

SEQ ID NO: 1634819 - DNA, 15 bp, Homo sapiens
tcatgtcctttgtag

SEQ ID NO: 1634820 - DNA, 15 bp, Homo sapiens
catgtcctttgtagg

SEQ ID NO: 1634821 - DNA, 15 bp, Homo sapiens
atgtcctttgtaggg

SEQ ID NO: 1634822 - DNA, 15 bp, Homo sapiens
tgtcctttgtaggga

SEQ ID NO: 1634823 - DNA, 15 bp, Homo sapiens
gtcctttgtagggac

SEQ ID NO: 1634824 - DNA, 15 bp, Homo sapiens
tcctttgtagggaca

SEQ ID NO: 1634825 - DNA, 15 bp, Homo sapiens
cctttgtagggacat

SEQ ID NO: 1634826 - DNA, 15 bp, Homo sapiens
ctttgtagggacatg

SEQ ID NO: 1634827 - DNA, 15 bp, Homo sapiens
tttgtagggacatgg

SEQ ID NO: 1634828 - DNA, 15 bp, Homo sapiens
ttgtagggacatgga

SEQ ID NO: 1634829 - DNA, 15 bp, Homo sapiens
tgtagggacatggat

SEQ ID NO: 1634830 - DNA, 15 bp, Homo sapiens
gtagggacatggatg

SEQ ID NO: 1634831 - DNA, 15 bp, Homo sapiens
tagggacatggatga

SEQ ID NO: 1634832 - DNA, 15 bp, Homo sapiens
agggacatggatgaa

SEQ ID NO: 1634833 - DNA, 15 bp, Homo sapiens
gggacatggatgaaa

SEQ ID NO: 1634834 - DNA, 15 bp, Homo sapiens
ggacatggatgaaat

SEQ ID NO: 1634835 - DNA, 15 bp, Homo sapiens
gacatggatgaaatt

SEQ ID NO: 1634836 - DNA, 15 bp, Homo sapiens
acatggatgaaattg

SEQ ID NO: 1634837 - DNA, 15 bp, Homo sapiens
catggatgaaattgg

SEQ ID NO: 1634838 - DNA, 15 bp, Homo sapiens
atggatgaaattgga

SEQ ID NO: 1634839 - DNA, 15 bp, Homo sapiens
tggatgaaattggaa

SEQ ID NO: 1634840 - DNA, 15 bp, Homo sapiens
ggatgaaattggaaa

SEQ ID NO: 1634841 - DNA, 15 bp, Homo sapiens
gatgaaattggaaac

SEQ ID NO: 1634842 - DNA, 15 bp, Homo sapiens
atgaaattggaaacc

SEQ ID NO: 1634843 - DNA, 15 bp, Homo sapiens
tgaaattggaaacca

SEQ ID NO: 1634844 - DNA, 15 bp, Homo sapiens
gaaattggaaaccat

SEQ ID NO: 1634845 - DNA, 15 bp, Homo sapiens
aaattggaaaccatc

SEQ ID NO: 1634846 - DNA, 15 bp, Homo sapiens
aattggaaaccatca

SEQ ID NO: 1634847 - DNA, 15 bp, Homo sapiens
attggaaaccatcat

SEQ ID NO: 1634848 - DNA, 15 bp, Homo sapiens
ttggaaaccatcatt

SEQ ID NO: 1634849 - DNA, 15 bp, Homo sapiens
tggaaaccatcattc

SEQ ID NO: 1634850 - DNA, 15 bp, Homo sapiens
ggaaaccatcattct

SEQ ID NO: 1634851 - DNA, 15 bp, Homo sapiens
gaaaccatcattctc

SEQ ID NO: 1634852 - DNA, 15 bp, Homo sapiens
aaaccatcattctca

SEQ ID NO: 1634853 - DNA, 15 bp, Homo sapiens
aaccatcattctcag

SEQ ID NO: 1634854 - DNA, 15 bp, Homo sapiens
accatcattctcagt

SEQ ID NO: 1634855 - DNA, 15 bp, Homo sapiens
ccatcattctcagta

SEQ ID NO: 1634856 - DNA, 15 bp, Homo sapiens
catcattctcagtaa

SEQ ID NO: 1634857 - DNA, 15 bp, Homo sapiens
atcattctcagtaaa

SEQ ID NO: 1634858 - DNA, 15 bp, Homo sapiens
tcattctcagtaaac

SEQ ID NO: 1634859 - DNA, 15 bp, Homo sapiens
cattctcagtaaact

SEQ ID NO: 1634860 - DNA, 15 bp, Homo sapiens
attctcagtaaacta

SEQ ID NO: 1634861 - DNA, 15 bp, Homo sapiens
ttctcagtaaactat

SEQ ID NO: 1634862 - DNA, 15 bp, Homo sapiens
tctcagtaaactatc

SEQ ID NO: 1634863 - DNA, 15 bp, Homo sapiens
ctcagtaaactatcg

SEQ ID NO: 1634864 - DNA, 15 bp, Homo sapiens
tcagtaaactatcgc

SEQ ID NO: 1634865 - DNA, 15 bp, Homo sapiens
cagtaaactatcgca

SEQ ID NO: 1634866 - DNA, 15 bp, Homo sapiens
agtaaactatcgcag

SEQ ID NO: 1634867 - DNA, 15 bp, Homo sapiens
gtaaactatcgcagg

SEQ ID NO: 1634868 - DNA, 15 bp, Homo sapiens
taaactatcgcaggg

SEQ ID NO: 1634869 - DNA, 15 bp, Homo sapiens
aaactatcgcaggga

SEQ ID NO: 1634870 - DNA, 15 bp, Homo sapiens
aactatcgcagggac

SEQ ID NO: 1634871 - DNA, 15 bp, Homo sapiens
actatcgcagggaca

SEQ ID NO: 1634872 - DNA, 15 bp, Homo sapiens
ctatcgcagggacag

SEQ ID NO: 1634873 - DNA, 15 bp, Homo sapiens
tatcgcagggacaga

SEQ ID NO: 1634874 - DNA, 15 bp, Homo sapiens
atcgcagggacagaa

SEQ ID NO: 1634875 - DNA, 15 bp, Homo sapiens
tcgcagggacagaaa

SEQ ID NO: 1634876 - DNA, 15 bp, Homo sapiens
cgcagggacagaaaa

SEQ ID NO: 1634877 - DNA, 15 bp, Homo sapiens
gcagggacagaaaac

SEQ ID NO: 1634878 - DNA, 15 bp, Homo sapiens
cagggacagaaaacc

SEQ ID NO: 1634879 - DNA, 15 bp, Homo sapiens
agggacagaaaacca

SEQ ID NO: 1634880 - DNA, 15 bp, Homo sapiens
gggacagaaaaccaa

SEQ ID NO: 1634881 - DNA, 15 bp, Homo sapiens
ggacagaaaaccaaa

SEQ ID NO: 1634882 - DNA, 15 bp, Homo sapiens
gacagaaaaccaaac

SEQ ID NO: 1634883 - DNA, 15 bp, Homo sapiens
acagaaaaccaaaca

SEQ ID NO: 1634884 - DNA, 15 bp, Homo sapiens
cagaaaaccaaacac

SEQ ID NO: 1634885 - DNA, 15 bp, Homo sapiens
agaaaaccaaacacc

SEQ ID NO: 1634886 - DNA, 15 bp, Homo sapiens
gaaaaccaaacaccg

SEQ ID NO: 1634887 - DNA, 15 bp, Homo sapiens
aaaaccaaacaccgc

SEQ ID NO: 1634888 - DNA, 15 bp, Homo sapiens
aaaccaaacaccgca

SEQ ID NO: 1634889 - DNA, 15 bp, Homo sapiens
aaccaaacaccgcat

SEQ ID NO: 1634890 - DNA, 15 bp, Homo sapiens
accaaacaccgcatg

SEQ ID NO: 1634891 - DNA, 15 bp, Homo sapiens
ccaaacaccgcatgt

SEQ ID NO: 1634892 - DNA, 15 bp, Homo sapiens
caaacaccgcatgtt

SEQ ID NO: 1634893 - DNA, 15 bp, Homo sapiens
aaacaccgcatgttc

SEQ ID NO: 1634894 - DNA, 15 bp, Homo sapiens
aacaccgcatgttct

SEQ ID NO: 1634895 - DNA, 15 bp, Homo sapiens
acaccgcatgttctc

SEQ ID NO: 1634896 - DNA, 15 bp, Homo sapiens
caccgcatgttctca

SEQ ID NO: 1634897 - DNA, 15 bp, Homo sapiens
accgcatgttctcat

SEQ ID NO: 1634898 - DNA, 15 bp, Homo sapiens
ccgcatgttctcatt

SEQ ID NO: 1634899 - DNA, 15 bp, Homo sapiens
cgcatgttctcattc

SEQ ID NO: 1634900 - DNA, 15 bp, Homo sapiens
gcatgttctcattca

SEQ ID NO: 1634901 - DNA, 15 bp, Homo sapiens
catgttctcattcat

SEQ ID NO: 1634902 - DNA, 15 bp, Homo sapiens
atgttctcattcata

SEQ ID NO: 1634903 - DNA, 15 bp, Homo sapiens
tgttctcattcatag

SEQ ID NO: 1634904 - DNA, 15 bp, Homo sapiens
gttctcattcatagg

SEQ ID NO: 1634905 - DNA, 15 bp, Homo sapiens
ttctcattcataggt

SEQ ID NO: 1634906 - DNA, 15 bp, Homo sapiens
tctcattcataggtg

SEQ ID NO: 1634907 - DNA, 15 bp, Homo sapiens
ctcattcataggtgg

SEQ ID NO: 1634908 - DNA, 15 bp, Homo sapiens
tcattcataggtggg

SEQ ID NO: 1634909 - DNA, 15 bp, Homo sapiens
cattcataggtggga

SEQ ID NO: 1634910 - DNA, 15 bp, Homo sapiens
attcataggtgggaa

SEQ ID NO: 1634911 - DNA, 15 bp, Homo sapiens
ttcataggtgggaat

SEQ ID NO: 1634912 - DNA, 15 bp, Homo sapiens
tcataggtgggaatt

SEQ ID NO: 1634913 - DNA, 15 bp, Homo sapiens
cataggtgggaattg

SEQ ID NO: 1634914 - DNA, 15 bp, Homo sapiens
ataggtgggaattga

SEQ ID NO: 1634915 - DNA, 15 bp, Homo sapiens
taggtgggaattgaa

SEQ ID NO: 1634916 - DNA, 15 bp, Homo sapiens
aggtgggaattgaac

SEQ ID NO: 1634917 - DNA, 15 bp, Homo sapiens
ggtgggaattgaaca

SEQ ID NO: 1634918 - DNA, 15 bp, Homo sapiens
gtgggaattgaacaa

SEQ ID NO: 1634919 - DNA, 15 bp, Homo sapiens
tgggaattgaacaat

SEQ ID NO: 1634920 - DNA, 15 bp, Homo sapiens
gggaattgaacaatg

SEQ ID NO: 1634921 - DNA, 15 bp, Homo sapiens
ggaattgaacaatga

SEQ ID NO: 1634922 - DNA, 15 bp, Homo sapiens
gaattgaacaatgag

SEQ ID NO: 1634923 - DNA, 15 bp, Homo sapiens
aattgaacaatgaga

SEQ ID NO: 1634924 - DNA, 15 bp, Homo sapiens
attgaacaatgagat

SEQ ID NO: 1634925 - DNA, 15 bp, Homo sapiens
ttgaacaatgagatc

SEQ ID NO: 1634926 - DNA, 15 bp, Homo sapiens
tgaacaatgagatca

SEQ ID NO: 1634927 - DNA, 15 bp, Homo sapiens
gaacaatgagatcac

SEQ ID NO: 1634928 - DNA, 15 bp, Homo sapiens
aacaatgagatcaca

SEQ ID NO: 1634929 - DNA, 15 bp, Homo sapiens
acaatgagatcacat

SEQ ID NO: 1634930 - DNA, 15 bp, Homo sapiens
caatgagatcacatg

SEQ ID NO: 1634931 - DNA, 15 bp, Homo sapiens
aatgagatcacatgg

SEQ ID NO: 1634932 - DNA, 15 bp, Homo sapiens
atgagatcacatggt

SEQ ID NO: 1634933 - DNA, 15 bp, Homo sapiens
tgagatcacatggtc

SEQ ID NO: 1634934 - DNA, 15 bp, Homo sapiens
gagatcacatggtca

SEQ ID NO: 1634935 - DNA, 15 bp, Homo sapiens
agatcacatggtcac

SEQ ID NO: 1634936 - DNA, 15 bp, Homo sapiens
gatcacatggtcaca

SEQ ID NO: 1634937 - DNA, 15 bp, Homo sapiens
atcacatggtcacag

SEQ ID NO: 1634938 - DNA, 15 bp, Homo sapiens
tcacatggtcacagg

SEQ ID NO: 1634939 - DNA, 15 bp, Homo sapiens
cacatggtcacagga

SEQ ID NO: 1634940 - DNA, 15 bp, Homo sapiens
acatggtcacaggaa

SEQ ID NO: 1634941 - DNA, 15 bp, Homo sapiens
catggtcacaggaag

SEQ ID NO: 1634942 - DNA, 15 bp, Homo sapiens
atggtcacaggaagg

SEQ ID NO: 1634943 - DNA, 15 bp, Homo sapiens
tggtcacaggaaggg

SEQ ID NO: 1634944 - DNA, 15 bp, Homo sapiens
ggtcacaggaagggg

SEQ ID NO: 1634945 - DNA, 15 bp, Homo sapiens
gtcacaggaagggga

SEQ ID NO: 1634946 - DNA, 15 bp, Homo sapiens
tcacaggaaggggaa

SEQ ID NO: 1634947 - DNA, 15 bp, Homo sapiens
gggggagggatagca

SEQ ID NO: 1634948 - DNA, 15 bp, Homo sapiens
ggagggatagcattg

SEQ ID NO: 1634949 - DNA, 15 bp, Homo sapiens
gagggatagcattgg

SEQ ID NO: 1634950 - DNA, 15 bp, Homo sapiens
agggatagcattggg

SEQ ID NO: 1634951 - DNA, 15 bp, Homo sapiens
gggatagcattggga

SEQ ID NO: 1634952 - DNA, 15 bp, Homo sapiens
ggatagcattgggag

SEQ ID NO: 1634953 - DNA, 15 bp, Homo sapiens
gatagcattgggaga

SEQ ID NO: 1634954 - DNA, 15 bp, Homo sapiens
atagcattgggagat

SEQ ID NO: 1634955 - DNA, 15 bp, Homo sapiens
tagcattgggagata

SEQ ID NO: 1634956 - DNA, 15 bp, Homo sapiens
agcattgggagatat

SEQ ID NO: 1634957 - DNA, 15 bp, Homo sapiens
gcattgggagatata

SEQ ID NO: 1634958 - DNA, 15 bp, Homo sapiens
cattgggagatatac

SEQ ID NO: 1634959 - DNA, 15 bp, Homo sapiens
attgggagatatacc

SEQ ID NO: 1634960 - DNA, 15 bp, Homo sapiens
taatgctagatgacg

SEQ ID NO: 1634961 - DNA, 15 bp, Homo sapiens
aatgctagatgacga

SEQ ID NO: 1634962 - DNA, 15 bp, Homo sapiens
atgctagatgacgag

SEQ ID NO: 1634963 - DNA, 15 bp, Homo sapiens
tgctagatgacgagt

SEQ ID NO: 1634964 - DNA, 15 bp, Homo sapiens
gctagatgacgagtt

SEQ ID NO: 1634965 - DNA, 15 bp, Homo sapiens
ctagatgacgagtta

SEQ ID NO: 1634966 - DNA, 15 bp, Homo sapiens
tagatgacgagttag

SEQ ID NO: 1634967 - DNA, 15 bp, Homo sapiens
agatgacgagttagt

SEQ ID NO: 1634968 - DNA, 15 bp, Homo sapiens
gatgacgagttagtg

SEQ ID NO: 1634969 - DNA, 15 bp, Homo sapiens
atgacgagttagtgg

SEQ ID NO: 1634970 - DNA, 15 bp, Homo sapiens
tgacgagttagtggg

SEQ ID NO: 1634971 - DNA, 15 bp, Homo sapiens
gacgagttagtgggt

SEQ ID NO: 1634972 - DNA, 15 bp, Homo sapiens
acgagttagtgggtg

SEQ ID NO: 1634973 - DNA, 15 bp, Homo sapiens
cgagttagtgggtgc

SEQ ID NO: 1634974 - DNA, 15 bp, Homo sapiens
gagttagtgggtgca

SEQ ID NO: 1634975 - DNA, 15 bp, Homo sapiens
agcgcaccagcatgg

SEQ ID NO: 1634976 - DNA, 15 bp, Homo sapiens
gcgcaccagcatggc

SEQ ID NO: 1634977 - DNA, 15 bp, Homo sapiens
cgcaccagcatggca

SEQ ID NO: 1634978 - DNA, 15 bp, Homo sapiens
gcaccagcatggcac

SEQ ID NO: 1634979 - DNA, 15 bp, Homo sapiens
caccagcatggcaca

SEQ ID NO: 1634980 - DNA, 15 bp, Homo sapiens
accagcatggcacat

SEQ ID NO: 1634981 - DNA, 15 bp, Homo sapiens
ccagcatggcacatg

SEQ ID NO: 1634982 - DNA, 15 bp, Homo sapiens
cagcatggcacatgt

SEQ ID NO: 1634983 - DNA, 15 bp, Homo sapiens
agcatggcacatgta

SEQ ID NO: 1634984 - DNA, 15 bp, Homo sapiens
gcatggcacatgtat

SEQ ID NO: 1634985 - DNA, 15 bp, Homo sapiens
tggcacatgtataca

SEQ ID NO: 1634986 - DNA, 15 bp, Homo sapiens
ggcacatgtatacat

SEQ ID NO: 1634987 - DNA, 15 bp, Homo sapiens
gcacatgtatacata

SEQ ID NO: 1634988 - DNA, 15 bp, Homo sapiens
cacatgtatacatat

SEQ ID NO: 1634989 - DNA, 15 bp, Homo sapiens
acatgtatacatatg

SEQ ID NO: 1634990 - DNA, 15 bp, Homo sapiens
catgtatacatatgt

SEQ ID NO: 1634991 - DNA, 15 bp, Homo sapiens
atgtatacatatgta

SEQ ID NO: 1634992 - DNA, 15 bp, Homo sapiens
aactaacctgcacaa

SEQ ID NO: 1634993 - DNA, 15 bp, Homo sapiens
actaacctgcacaat

SEQ ID NO: 1634994 - DNA, 15 bp, Homo sapiens
ctaacctgcacaatg

SEQ ID NO: 1634995 - DNA, 15 bp, Homo sapiens
taacctgcacaatgt

SEQ ID NO: 1634996 - DNA, 15 bp, Homo sapiens
aacctgcacaatgtg

SEQ ID NO: 1634997 - DNA, 15 bp, Homo sapiens
acctgcacaatgtgc

SEQ ID NO: 1634998 - DNA, 15 bp, Homo sapiens
cctgcacaatgtgca

SEQ ID NO: 1634999 - DNA, 15 bp, Homo sapiens
ctgcacaatgtgcac

SEQ ID NO: 1635000 - DNA, 15 bp, Homo sapiens
tgcacaatgtgcaca

SEQ ID NO: 1635001 - DNA, 15 bp, Homo sapiens
gcacaatgtgcacat

SEQ ID NO: 1635002 - DNA, 15 bp, Homo sapiens
cacaatgtgcacatg

SEQ ID NO: 1635003 - DNA, 15 bp, Homo sapiens
acaatgtgcacatgt

SEQ ID NO: 1635004 - DNA, 15 bp, Homo sapiens
caatgtgcacatgta

SEQ ID NO: 1635005 - DNA, 15 bp, Homo sapiens
aatgtgcacatgtac

SEQ ID NO: 1635006 - DNA, 15 bp, Homo sapiens
atgtgcacatgtacc

SEQ ID NO: 1635007 - DNA, 15 bp, Homo sapiens
ccctaaaacttaaag

SEQ ID NO: 1635008 - DNA, 15 bp, Homo sapiens
cctaaaacttaaagt

SEQ ID NO: 1635009 - DNA, 15 bp, Homo sapiens
ctaaaacttaaagta

SEQ ID NO: 1635010 - DNA, 15 bp, Homo sapiens
taaaacttaaagtat

SEQ ID NO: 1635011 - DNA, 15 bp, Homo sapiens
aaaacttaaagtata

SEQ ID NO: 1635012 - DNA, 15 bp, Homo sapiens
aaacttaaagtataa

SEQ ID NO: 1635013 - DNA, 15 bp, Homo sapiens
acttaaagtataata

SEQ ID NO: 1635014 - DNA, 15 bp, Homo sapiens
cttaaagtataataa

SEQ ID NO: 1635015 - DNA, 15 bp, Homo sapiens
ttaaagtataataaa

SEQ ID NO: 1635016 - DNA, 15 bp, Homo sapiens
taaagtataataaaa

SEQ ID NO: 1635017 - DNA, 15 bp, Homo sapiens
aaagtataataaaaa

SEQ ID NO: 1635018 - DNA, 15 bp, Homo sapiens
aagtataataaaaaa

SEQ ID NO: 1635019 - DNA, 15 bp, Homo sapiens
agtataataaaaaaa

SEQ ID NO: 1635020 - DNA, 15 bp, Homo sapiens
gtataataaaaaaaa

SEQ ID NO: 1635021 - DNA, 15 bp, Homo sapiens
tataataaaaaaaaa

SEQ ID NO: 1635022 - DNA, 15 bp, Homo sapiens
ataataaaaaaaaaa

SEQ ID NO: 1635023 - DNA, 15 bp, Homo sapiens
taataaaaaaaaaaa

SEQ ID NO: 1635024 - DNA, 15 bp, Homo sapiens
aaaaaaaaaagagat

SEQ ID NO: 1635025 - DNA, 15 bp, Homo sapiens
aaaaaaaaagagatg

SEQ ID NO: 1635026 - DNA, 15 bp, Homo sapiens
aaaaaaaagagatga

SEQ ID NO: 1635027 - DNA, 15 bp, Homo sapiens
aaaaaaagagatgac

SEQ ID NO: 1635028 - DNA, 15 bp, Homo sapiens
aaaaaagagatgact

SEQ ID NO: 1635029 - DNA, 15 bp, Homo sapiens
aaagagatgactgta

SEQ ID NO: 1635030 - DNA, 15 bp, Homo sapiens
aagagatgactgtac

SEQ ID NO: 1635031 - DNA, 15 bp, Homo sapiens
agagatgactgtact

SEQ ID NO: 1635032 - DNA, 15 bp, Homo sapiens
gagatgactgtactt

SEQ ID NO: 1635033 - DNA, 15 bp, Homo sapiens
agatgactgtacttt

SEQ ID NO: 1635034 - DNA, 15 bp, Homo sapiens
gatgactgtactttt

SEQ ID NO: 1635035 - DNA, 15 bp, Homo sapiens
atgactgtacttttg

SEQ ID NO: 1635036 - DNA, 15 bp, Homo sapiens
tgactgtacttttga

SEQ ID NO: 1635037 - DNA, 15 bp, Homo sapiens
gactgtacttttgaa

SEQ ID NO: 1635038 - DNA, 15 bp, Homo sapiens
actgtacttttgaaa

SEQ ID NO: 1635039 - DNA, 15 bp, Homo sapiens
ctgtacttttgaaat

SEQ ID NO: 1635040 - DNA, 15 bp, Homo sapiens
tgtacttttgaaatg

SEQ ID NO: 1635041 - DNA, 15 bp, Homo sapiens
gtacttttgaaatgc

SEQ ID NO: 1635042 - DNA, 15 bp, Homo sapiens
tacttttgaaatgcc

SEQ ID NO: 1635043 - DNA, 15 bp, Homo sapiens
acttttgaaatgccc

SEQ ID NO: 1635044 - DNA, 15 bp, Homo sapiens
cttttgaaatgccct

SEQ ID NO: 1635045 - DNA, 15 bp, Homo sapiens
ttttgaaatgccctc

SEQ ID NO: 1635046 - DNA, 15 bp, Homo sapiens
tttgaaatgccctct

SEQ ID NO: 1635047 - DNA, 15 bp, Homo sapiens
ttgaaatgccctctg

SEQ ID NO: 1635048 - DNA, 15 bp, Homo sapiens
tgaaatgccctctga

SEQ ID NO: 1635049 - DNA, 15 bp, Homo sapiens
gaaatgccctctgaa

SEQ ID NO: 1635050 - DNA, 15 bp, Homo sapiens
aaatgccctctgaac

SEQ ID NO: 1635051 - DNA, 15 bp, Homo sapiens
aatgccctctgaact

SEQ ID NO: 1635052 - DNA, 15 bp, Homo sapiens
atgccctctgaactc

SEQ ID NO: 1635053 - DNA, 15 bp, Homo sapiens
tgccctctgaactca

SEQ ID NO: 1635054 - DNA, 15 bp, Homo sapiens
gccctctgaactcaa

SEQ ID NO: 1635055 - DNA, 15 bp, Homo sapiens
ccctctgaactcaaa

SEQ ID NO: 1635056 - DNA, 15 bp, Homo sapiens
cctctgaactcaaat

SEQ ID NO: 1635057 - DNA, 15 bp, Homo sapiens
ctctgaactcaaatg

SEQ ID NO: 1635058 - DNA, 15 bp, Homo sapiens
tctgaactcaaatga

SEQ ID NO: 1635059 - DNA, 15 bp, Homo sapiens
ctgaactcaaatgat

SEQ ID NO: 1635060 - DNA, 15 bp, Homo sapiens
tgaactcaaatgatg

SEQ ID NO: 1635061 - DNA, 15 bp, Homo sapiens
gaactcaaatgatga

SEQ ID NO: 1635062 - DNA, 15 bp, Homo sapiens
aactcaaatgatgaa

SEQ ID NO: 1635063 - DNA, 15 bp, Homo sapiens
actcaaatgatgaaa

SEQ ID NO: 1635064 - DNA, 15 bp, Homo sapiens
ctcaaatgatgaaac

SEQ ID NO: 1635065 - DNA, 15 bp, Homo sapiens
tcaaatgatgaaaca

SEQ ID NO: 1635066 - DNA, 15 bp, Homo sapiens
caaatgatgaaacaa

SEQ ID NO: 1635067 - DNA, 15 bp, Homo sapiens
aaatgatgaaacaag

SEQ ID NO: 1635068 - DNA, 15 bp, Homo sapiens
aatgatgaaacaagt

SEQ ID NO: 1635069 - DNA, 15 bp, Homo sapiens
atgatgaaacaagtg

SEQ ID NO: 1635070 - DNA, 15 bp, Homo sapiens
tgatgaaacaagtga

SEQ ID NO: 1635071 - DNA, 15 bp, Homo sapiens
gatgaaacaagtgaa

SEQ ID NO: 1635072 - DNA, 15 bp, Homo sapiens
atgaaacaagtgaaa

SEQ ID NO: 1635073 - DNA, 15 bp, Homo sapiens
tgaaacaagtgaaat

SEQ ID NO: 1635074 - DNA, 15 bp, Homo sapiens
gaaacaagtgaaatc

SEQ ID NO: 1635075 - DNA, 15 bp, Homo sapiens
aaacaagtgaaatca

SEQ ID NO: 1635076 - DNA, 15 bp, Homo sapiens
aacaagtgaaatcaa

SEQ ID NO: 1635077 - DNA, 15 bp, Homo sapiens
acaagtgaaatcaaa

SEQ ID NO: 1635078 - DNA, 15 bp, Homo sapiens
caagtgaaatcaaaa

SEQ ID NO: 1635079 - DNA, 15 bp, Homo sapiens
aagtgaaatcaaaaa

SEQ ID NO: 1635080 - DNA, 15 bp, Homo sapiens
agtgaaatcaaaaaa

SEQ ID NO: 1635081 - DNA, 15 bp, Homo sapiens
gtgaaatcaaaaaat

SEQ ID NO: 1635082 - DNA, 15 bp, Homo sapiens
tgaaatcaaaaaatt

SEQ ID NO: 1635083 - DNA, 15 bp, Homo sapiens
gaaatcaaaaaattt

SEQ ID NO: 1635084 - DNA, 15 bp, Homo sapiens
aaatcaaaaaatttg

SEQ ID NO: 1635085 - DNA, 15 bp, Homo sapiens
aatcaaaaaatttgt

SEQ ID NO: 1635086 - DNA, 15 bp, Homo sapiens
atcaaaaaatttgtt

SEQ ID NO: 1635087 - DNA, 15 bp, Homo sapiens
tcaaaaaatttgttt

SEQ ID NO: 1635088 - DNA, 15 bp, Homo sapiens
caaaaaatttgtttt

SEQ ID NO: 1635089 - DNA, 15 bp, Homo sapiens
aaaaaatttgttttt

SEQ ID NO: 1635090 - DNA, 15 bp, Homo sapiens
aaaaatttgtttttc

SEQ ID NO: 1635091 - DNA, 15 bp, Homo sapiens
aaaatttgtttttca

SEQ ID NO: 1635092 - DNA, 15 bp, Homo sapiens
aaatttgtttttcaa

SEQ ID NO: 1635093 - DNA, 15 bp, Homo sapiens
aatttgtttttcaag

SEQ ID NO: 1635094 - DNA, 15 bp, Homo sapiens
atttgtttttcaagt

SEQ ID NO: 1635095 - DNA, 15 bp, Homo sapiens
tttgtttttcaagta

SEQ ID NO: 1635096 - DNA, 15 bp, Homo sapiens
ttgtttttcaagtaa

SEQ ID NO: 1635097 - DNA, 15 bp, Homo sapiens
tgtttttcaagtaaa

SEQ ID NO: 1635098 - DNA, 15 bp, Homo sapiens
gtttttcaagtaaaa

SEQ ID NO: 1635099 - DNA, 15 bp, Homo sapiens
tttttcaagtaaaaa

SEQ ID NO: 1635100 - DNA, 15 bp, Homo sapiens
ttttcaagtaaaaaa

SEQ ID NO: 1635101 - DNA, 15 bp, Homo sapiens
tttcaagtaaaaaaa

SEQ ID NO: 1635102 - DNA, 15 bp, Homo sapiens
ttcaagtaaaaaaag

SEQ ID NO: 1635103 - DNA, 15 bp, Homo sapiens
tcaagtaaaaaaaga

SEQ ID NO: 1635104 - DNA, 15 bp, Homo sapiens
caagtaaaaaaagaa

SEQ ID NO: 1635105 - DNA, 15 bp, Homo sapiens
aagtaaaaaaagaaa

SEQ ID NO: 1635106 - DNA, 15 bp, Homo sapiens
agtaaaaaaagaaat

SEQ ID NO: 1635107 - DNA, 15 bp, Homo sapiens
gtaaaaaaagaaatg

SEQ ID NO: 1635108 - DNA, 15 bp, Homo sapiens
taaaaaaagaaatgg

SEQ ID NO: 1635109 - DNA, 15 bp, Homo sapiens
aaaaaaagaaatggt

SEQ ID NO: 1635110 - DNA, 15 bp, Homo sapiens
aaaaaagaaatggtt

SEQ ID NO: 1635111 - DNA, 15 bp, Homo sapiens
aaaaagaaatggttt

SEQ ID NO: 1635112 - DNA, 15 bp, Homo sapiens
aaaagaaatggttta

SEQ ID NO: 1635113 - DNA, 15 bp, Homo sapiens
aaagaaatggtttag

SEQ ID NO: 1635114 - DNA, 15 bp, Homo sapiens
aagaaatggtttagc

SEQ ID NO: 1635115 - DNA, 15 bp, Homo sapiens
agaaatggtttagcc

SEQ ID NO: 1635116 - DNA, 15 bp, Homo sapiens
gaaatggtttagcca

SEQ ID NO: 1635117 - DNA, 15 bp, Homo sapiens
aaatggtttagccag

SEQ ID NO: 1635118 - DNA, 15 bp, Homo sapiens
aatggtttagccagc

SEQ ID NO: 1635119 - DNA, 15 bp, Homo sapiens
atggtttagccagca

SEQ ID NO: 1635120 - DNA, 15 bp, Homo sapiens
tggtttagccagcat

SEQ ID NO: 1635121 - DNA, 15 bp, Homo sapiens
ggtttagccagcatc

SEQ ID NO: 1635122 - DNA, 15 bp, Homo sapiens
gtttagccagcatct

SEQ ID NO: 1635123 - DNA, 15 bp, Homo sapiens
tttagccagcatctg

SEQ ID NO: 1635124 - DNA, 15 bp, Homo sapiens
ttagccagcatctga

SEQ ID NO: 1635125 - DNA, 15 bp, Homo sapiens
tagccagcatctgaa

SEQ ID NO: 1635126 - DNA, 15 bp, Homo sapiens
agccagcatctgaac

SEQ ID NO: 1635127 - DNA, 15 bp, Homo sapiens
gccagcatctgaacc

SEQ ID NO: 1635128 - DNA, 15 bp, Homo sapiens
ccagcatctgaaccc

SEQ ID NO: 1635129 - DNA, 15 bp, Homo sapiens
cagcatctgaaccca

SEQ ID NO: 1635130 - DNA, 15 bp, Homo sapiens
agcatctgaacccag

SEQ ID NO: 1635131 - DNA, 15 bp, Homo sapiens
gcatctgaacccagg

SEQ ID NO: 1635132 - DNA, 15 bp, Homo sapiens
catctgaacccaggc

SEQ ID NO: 1635133 - DNA, 15 bp, Homo sapiens
atctgaacccaggca

SEQ ID NO: 1635134 - DNA, 15 bp, Homo sapiens
tctgaacccaggcaa

SEQ ID NO: 1635135 - DNA, 15 bp, Homo sapiens
ctgaacccaggcaat

SEQ ID NO: 1635136 - DNA, 15 bp, Homo sapiens
tgaacccaggcaatc

SEQ ID NO: 1635137 - DNA, 15 bp, Homo sapiens
gaacccaggcaatct

SEQ ID NO: 1635138 - DNA, 15 bp, Homo sapiens
aacccaggcaatctc

SEQ ID NO: 1635139 - DNA, 15 bp, Homo sapiens
acccaggcaatctcc

SEQ ID NO: 1635140 - DNA, 15 bp, Homo sapiens
cccaggcaatctcct

SEQ ID NO: 1635141 - DNA, 15 bp, Homo sapiens
ccaggcaatctcctc

SEQ ID NO: 1635142 - DNA, 15 bp, Homo sapiens
caggcaatctcctcc

SEQ ID NO: 1635143 - DNA, 15 bp, Homo sapiens
aggcaatctcctcca

SEQ ID NO: 1635144 - DNA, 15 bp, Homo sapiens
ggcaatctcctccag

SEQ ID NO: 1635145 - DNA, 15 bp, Homo sapiens
gcaatctcctccaga

SEQ ID NO: 1635146 - DNA, 15 bp, Homo sapiens
caatctcctccagag

SEQ ID NO: 1635147 - DNA, 15 bp, Homo sapiens
aatctcctccagagc

SEQ ID NO: 1635148 - DNA, 15 bp, Homo sapiens
atctcctccagagcc

SEQ ID NO: 1635149 - DNA, 15 bp, Homo sapiens
tctcctccagagcct

SEQ ID NO: 1635150 - DNA, 15 bp, Homo sapiens
ctcctccagagcctg

SEQ ID NO: 1635151 - DNA, 15 bp, Homo sapiens
tcctccagagcctgt

SEQ ID NO: 1635152 - DNA, 15 bp, Homo sapiens
cctccagagcctgtg

SEQ ID NO: 1635153 - DNA, 15 bp, Homo sapiens
ctccagagcctgtgt

SEQ ID NO: 1635154 - DNA, 15 bp, Homo sapiens
tccagagcctgtgtt

SEQ ID NO: 1635155 - DNA, 15 bp, Homo sapiens
ccagagcctgtgttc

SEQ ID NO: 1635156 - DNA, 15 bp, Homo sapiens
cagagcctgtgttct

SEQ ID NO: 1635157 - DNA, 15 bp, Homo sapiens
agagcctgtgttcta

SEQ ID NO: 1635158 - DNA, 15 bp, Homo sapiens
gagcctgtgttctaa

SEQ ID NO: 1635159 - DNA, 15 bp, Homo sapiens
agcctgtgttctaag

SEQ ID NO: 1635160 - DNA, 15 bp, Homo sapiens
gcctgtgttctaagc

SEQ ID NO: 1635161 - DNA, 15 bp, Homo sapiens
cctgtgttctaagca

SEQ ID NO: 1635162 - DNA, 15 bp, Homo sapiens
ctgtgttctaagcac

SEQ ID NO: 1635163 - DNA, 15 bp, Homo sapiens
tgtgttctaagcact

SEQ ID NO: 1635164 - DNA, 15 bp, Homo sapiens
gtgttctaagcactt

SEQ ID NO: 1635165 - DNA, 15 bp, Homo sapiens
tgttctaagcacttc

SEQ ID NO: 1635166 - DNA, 15 bp, Homo sapiens
gttctaagcacttca

SEQ ID NO: 1635167 - DNA, 15 bp, Homo sapiens
ttctaagcacttcac

SEQ ID NO: 1635168 - DNA, 15 bp, Homo sapiens
tctaagcacttcacc

SEQ ID NO: 1635169 - DNA, 15 bp, Homo sapiens
ctaagcacttcacca

SEQ ID NO: 1635170 - DNA, 15 bp, Homo sapiens
taagcacttcaccac

SEQ ID NO: 1635171 - DNA, 15 bp, Homo sapiens
aagcacttcaccaca

SEQ ID NO: 1635172 - DNA, 15 bp, Homo sapiens
agcacttcaccacac

SEQ ID NO: 1635173 - DNA, 15 bp, Homo sapiens
gcacttcaccacaca

SEQ ID NO: 1635174 - DNA, 15 bp, Homo sapiens
cacttcaccacacaa

SEQ ID NO: 1635175 - DNA, 15 bp, Homo sapiens
acttcaccacacaac

SEQ ID NO: 1635176 - DNA, 15 bp, Homo sapiens
cttcaccacacaacg

SEQ ID NO: 1635177 - DNA, 15 bp, Homo sapiens
ttcaccacacaacgt

SEQ ID NO: 1635178 - DNA, 15 bp, Homo sapiens
tcaccacacaacgtc

SEQ ID NO: 1635179 - DNA, 15 bp, Homo sapiens
caccacacaacgtca

SEQ ID NO: 1635180 - DNA, 15 bp, Homo sapiens
accacacaacgtcac

SEQ ID NO: 1635181 - DNA, 15 bp, Homo sapiens
ccacacaacgtcaca

SEQ ID NO: 1635182 - DNA, 15 bp, Homo sapiens
cacacaacgtcacaa

SEQ ID NO: 1635183 - DNA, 15 bp, Homo sapiens
acacaacgtcacaat

SEQ ID NO: 1635184 - DNA, 15 bp, Homo sapiens
cacaacgtcacaatc

SEQ ID NO: 1635185 - DNA, 15 bp, Homo sapiens
acaacgtcacaatca

SEQ ID NO: 1635186 - DNA, 15 bp, Homo sapiens
caacgtcacaatcag

SEQ ID NO: 1635187 - DNA, 15 bp, Homo sapiens
aacgtcacaatcagt

SEQ ID NO: 1635188 - DNA, 15 bp, Homo sapiens
acgtcacaatcagtt

SEQ ID NO: 1635189 - DNA, 15 bp, Homo sapiens
cgtcacaatcagttc

SEQ ID NO: 1635190 - DNA, 15 bp, Homo sapiens
gtcacaatcagttct

SEQ ID NO: 1635191 - DNA, 15 bp, Homo sapiens
tcacaatcagttctt

SEQ ID NO: 1635192 - DNA, 15 bp, Homo sapiens
cacaatcagttcttc

SEQ ID NO: 1635193 - DNA, 15 bp, Homo sapiens
acaatcagttcttca

SEQ ID NO: 1635194 - DNA, 15 bp, Homo sapiens
caatcagttcttcat

SEQ ID NO: 1635195 - DNA, 15 bp, Homo sapiens
aatcagttcttcata

SEQ ID NO: 1635196 - DNA, 15 bp, Homo sapiens
atcagttcttcataa

SEQ ID NO: 1635197 - DNA, 15 bp, Homo sapiens
tcagttcttcataat

SEQ ID NO: 1635198 - DNA, 15 bp, Homo sapiens
cagttcttcataatg

SEQ ID NO: 1635199 - DNA, 15 bp, Homo sapiens
agttcttcataatga

SEQ ID NO: 1635200 - DNA, 15 bp, Homo sapiens
gttcttcataatgat

SEQ ID NO: 1635201 - DNA, 15 bp, Homo sapiens
ttcttcataatgatg

SEQ ID NO: 1635202 - DNA, 15 bp, Homo sapiens
tcttcataatgatgc

SEQ ID NO: 1635203 - DNA, 15 bp, Homo sapiens
cttcataatgatgct

SEQ ID NO: 1635204 - DNA, 15 bp, Homo sapiens
ttcataatgatgcta

SEQ ID NO: 1635205 - DNA, 15 bp, Homo sapiens
tcataatgatgctaa

SEQ ID NO: 1635206 - DNA, 15 bp, Homo sapiens
cataatgatgctaag

SEQ ID NO: 1635207 - DNA, 15 bp, Homo sapiens
ataatgatgctaagg

SEQ ID NO: 1635208 - DNA, 15 bp, Homo sapiens
taatgatgctaagga

SEQ ID NO: 1635209 - DNA, 15 bp, Homo sapiens
aatgatgctaaggag

SEQ ID NO: 1635210 - DNA, 15 bp, Homo sapiens
atgatgctaaggagg

SEQ ID NO: 1635211 - DNA, 15 bp, Homo sapiens
tgatgctaaggaggg

SEQ ID NO: 1635212 - DNA, 15 bp, Homo sapiens
gatgctaaggagggt

SEQ ID NO: 1635213 - DNA, 15 bp, Homo sapiens
atgctaaggagggtg

SEQ ID NO: 1635214 - DNA, 15 bp, Homo sapiens
tgctaaggagggtgg

SEQ ID NO: 1635215 - DNA, 15 bp, Homo sapiens
gctaaggagggtggg

SEQ ID NO: 1635216 - DNA, 15 bp, Homo sapiens
ctaaggagggtgggg

SEQ ID NO: 1635217 - DNA, 15 bp, Homo sapiens
taaggagggtggggt

SEQ ID NO: 1635218 - DNA, 15 bp, Homo sapiens
aaggagggtggggtg

SEQ ID NO: 1635219 - DNA, 15 bp, Homo sapiens
aggagggtggggtga

SEQ ID NO: 1635220 - DNA, 15 bp, Homo sapiens
ggagggtggggtgag

SEQ ID NO: 1635221 - DNA, 15 bp, Homo sapiens
gagggtggggtgaga

SEQ ID NO: 1635222 - DNA, 15 bp, Homo sapiens
agggtggggtgagat

SEQ ID NO: 1635223 - DNA, 15 bp, Homo sapiens
gggtggggtgagatg

SEQ ID NO: 1635224 - DNA, 15 bp, Homo sapiens
ggtggggtgagatga

SEQ ID NO: 1635225 - DNA, 15 bp, Homo sapiens
gtggggtgagatgac

SEQ ID NO: 1635226 - DNA, 15 bp, Homo sapiens
tggggtgagatgaca

SEQ ID NO: 1635227 - DNA, 15 bp, Homo sapiens
ggggtgagatgacat

SEQ ID NO: 1635228 - DNA, 15 bp, Homo sapiens
gggtgagatgacatt

SEQ ID NO: 1635229 - DNA, 15 bp, Homo sapiens
ggtgagatgacattc

SEQ ID NO: 1635230 - DNA, 15 bp, Homo sapiens
gtgagatgacattct

SEQ ID NO: 1635231 - DNA, 15 bp, Homo sapiens
tgagatgacattctg

SEQ ID NO: 1635232 - DNA, 15 bp, Homo sapiens
gagatgacattctgg

SEQ ID NO: 1635233 - DNA, 15 bp, Homo sapiens
agatgacattctggg

SEQ ID NO: 1635234 - DNA, 15 bp, Homo sapiens
gatgacattctggga

SEQ ID NO: 1635235 - DNA, 15 bp, Homo sapiens
atgacattctgggag

SEQ ID NO: 1635236 - DNA, 15 bp, Homo sapiens
tgacattctgggagt

SEQ ID NO: 1635237 - DNA, 15 bp, Homo sapiens
gacattctgggagtg

SEQ ID NO: 1635238 - DNA, 15 bp, Homo sapiens
acattctgggagtgc

SEQ ID NO: 1635239 - DNA, 15 bp, Homo sapiens
cattctgggagtgct

SEQ ID NO: 1635240 - DNA, 15 bp, Homo sapiens
attctgggagtgctt

SEQ ID NO: 1635241 - DNA, 15 bp, Homo sapiens
ttctgggagtgcttg

SEQ ID NO: 1635242 - DNA, 15 bp, Homo sapiens
tctgggagtgcttgc

SEQ ID NO: 1635243 - DNA, 15 bp, Homo sapiens
ctgggagtgcttgct

SEQ ID NO: 1635244 - DNA, 15 bp, Homo sapiens
tgggagtgcttgctc

SEQ ID NO: 1635245 - DNA, 15 bp, Homo sapiens
gggagtgcttgctct

SEQ ID NO: 1635246 - DNA, 15 bp, Homo sapiens
ggagtgcttgctctg

SEQ ID NO: 1635247 - DNA, 15 bp, Homo sapiens
gagtgcttgctctgt

SEQ ID NO: 1635248 - DNA, 15 bp, Homo sapiens
agtgcttgctctgtg

SEQ ID NO: 1635249 - DNA, 15 bp, Homo sapiens
gtgcttgctctgtgc

SEQ ID NO: 1635250 - DNA, 15 bp, Homo sapiens
tgcttgctctgtgcc

SEQ ID NO: 1635251 - DNA, 15 bp, Homo sapiens
gcttgctctgtgcca

SEQ ID NO: 1635252 - DNA, 15 bp, Homo sapiens
cttgctctgtgccac

SEQ ID NO: 1635253 - DNA, 15 bp, Homo sapiens
ttgctctgtgccaca

SEQ ID NO: 1635254 - DNA, 15 bp, Homo sapiens
tgctctgtgccacaa

SEQ ID NO: 1635255 - DNA, 15 bp, Homo sapiens
gctctgtgccacaag

SEQ ID NO: 1635256 - DNA, 15 bp, Homo sapiens
ctctgtgccacaagc

SEQ ID NO: 1635257 - DNA, 15 bp, Homo sapiens
tctgtgccacaagct

SEQ ID NO: 1635258 - DNA, 15 bp, Homo sapiens
ctgtgccacaagctg

SEQ ID NO: 1635259 - DNA, 15 bp, Homo sapiens
tgtgccacaagctgt

SEQ ID NO: 1635260 - DNA, 15 bp, Homo sapiens
gtgccacaagctgtc

SEQ ID NO: 1635261 - DNA, 15 bp, Homo sapiens
tgccacaagctgtct

SEQ ID NO: 1635262 - DNA, 15 bp, Homo sapiens
gccacaagctgtctc

SEQ ID NO: 1635263 - DNA, 15 bp, Homo sapiens
ccacaagctgtctca

SEQ ID NO: 1635264 - DNA, 15 bp, Homo sapiens
cacaagctgtctcaa

SEQ ID NO: 1635265 - DNA, 15 bp, Homo sapiens
acaagctgtctcaag

SEQ ID NO: 1635266 - DNA, 15 bp, Homo sapiens
caagctgtctcaagc

SEQ ID NO: 1635267 - DNA, 15 bp, Homo sapiens
aagctgtctcaagct

SEQ ID NO: 1635268 - DNA, 15 bp, Homo sapiens
agctgtctcaagctc

SEQ ID NO: 1635269 - DNA, 15 bp, Homo sapiens
gctgtctcaagctct

SEQ ID NO: 1635270 - DNA, 15 bp, Homo sapiens
ctgtctcaagctctc

SEQ ID NO: 1635271 - DNA, 15 bp, Homo sapiens
tgtctcaagctctct

SEQ ID NO: 1635272 - DNA, 15 bp, Homo sapiens
gtctcaagctctctt

SEQ ID NO: 1635273 - DNA, 15 bp, Homo sapiens
tctcaagctctcttt

SEQ ID NO: 1635274 - DNA, 15 bp, Homo sapiens
ctcaagctctctttg

SEQ ID NO: 1635275 - DNA, 15 bp, Homo sapiens
tcaagctctctttgt

SEQ ID NO: 1635276 - DNA, 15 bp, Homo sapiens
caagctctctttgtg

SEQ ID NO: 1635277 - DNA, 15 bp, Homo sapiens
aagctctctttgtgc

SEQ ID NO: 1635278 - DNA, 15 bp, Homo sapiens
agctctctttgtgcc

SEQ ID NO: 1635279 - DNA, 15 bp, Homo sapiens
gctctctttgtgcct

SEQ ID NO: 1635280 - DNA, 15 bp, Homo sapiens
ctctctttgtgcctt

SEQ ID NO: 1635281 - DNA, 15 bp, Homo sapiens
tctctttgtgcctta

SEQ ID NO: 1635282 - DNA, 15 bp, Homo sapiens
tctttgtgccttaac

SEQ ID NO: 1635283 - DNA, 15 bp, Homo sapiens
ctttgtgccttaact

SEQ ID NO: 1635284 - DNA, 15 bp, Homo sapiens
tttgtgccttaactc

SEQ ID NO: 1635285 - DNA, 15 bp, Homo sapiens
ttgtgccttaactca

SEQ ID NO: 1635286 - DNA, 15 bp, Homo sapiens
tgtgccttaactcac

SEQ ID NO: 1635287 - DNA, 15 bp, Homo sapiens
gtgccttaactcaca

SEQ ID NO: 1635288 - DNA, 15 bp, Homo sapiens
tgccttaactcacaa

SEQ ID NO: 1635289 - DNA, 15 bp, Homo sapiens
gccttaactcacaaa

SEQ ID NO: 1635290 - DNA, 15 bp, Homo sapiens
ccttaactcacaaaa

SEQ ID NO: 1635291 - DNA, 15 bp, Homo sapiens
cttaactcacaaaaa

SEQ ID NO: 1635292 - DNA, 15 bp, Homo sapiens
ttaactcacaaaaac

SEQ ID NO: 1635293 - DNA, 15 bp, Homo sapiens
taactcacaaaaacc

SEQ ID NO: 1635294 - DNA, 15 bp, Homo sapiens
aactcacaaaaaccc

SEQ ID NO: 1635295 - DNA, 15 bp, Homo sapiens
actcacaaaaaccct

SEQ ID NO: 1635296 - DNA, 15 bp, Homo sapiens
ctcacaaaaaccctg

SEQ ID NO: 1635297 - DNA, 15 bp, Homo sapiens
tcacaaaaaccctgt

SEQ ID NO: 1635298 - DNA, 15 bp, Homo sapiens
cacaaaaaccctgta

SEQ ID NO: 1635299 - DNA, 15 bp, Homo sapiens
acaaaaaccctgtag

SEQ ID NO: 1635300 - DNA, 15 bp, Homo sapiens
caaaaaccctgtaga

SEQ ID NO: 1635301 - DNA, 15 bp, Homo sapiens
aaaaaccctgtagag

SEQ ID NO: 1635302 - DNA, 15 bp, Homo sapiens
aaaaccctgtagagg

SEQ ID NO: 1635303 - DNA, 15 bp, Homo sapiens
aaaccctgtagaggg

SEQ ID NO: 1635304 - DNA, 15 bp, Homo sapiens
aaccctgtagaggga

SEQ ID NO: 1635305 - DNA, 15 bp, Homo sapiens
accctgtagagggaa

SEQ ID NO: 1635306 - DNA, 15 bp, Homo sapiens
ccctgtagagggaaa

SEQ ID NO: 1635307 - DNA, 15 bp, Homo sapiens
cctgtagagggaaat

SEQ ID NO: 1635308 - DNA, 15 bp, Homo sapiens
ctgtagagggaaatg

SEQ ID NO: 1635309 - DNA, 15 bp, Homo sapiens
tgtagagggaaatga

SEQ ID NO: 1635310 - DNA, 15 bp, Homo sapiens
gtagagggaaatgat

SEQ ID NO: 1635311 - DNA, 15 bp, Homo sapiens
tagagggaaatgatg

SEQ ID NO: 1635312 - DNA, 15 bp, Homo sapiens
agagggaaatgatga

SEQ ID NO: 1635313 - DNA, 15 bp, Homo sapiens
gagggaaatgatgat

SEQ ID NO: 1635314 - DNA, 15 bp, Homo sapiens
agggaaatgatgatc

SEQ ID NO: 1635315 - DNA, 15 bp, Homo sapiens
gggaaatgatgatca

SEQ ID NO: 1635316 - DNA, 15 bp, Homo sapiens
ggaaatgatgatcat

SEQ ID NO: 1635317 - DNA, 15 bp, Homo sapiens
gaaatgatgatcatc

SEQ ID NO: 1635318 - DNA, 15 bp, Homo sapiens
aaatgatgatcatcc

SEQ ID NO: 1635319 - DNA, 15 bp, Homo sapiens
aatgatgatcatcct

SEQ ID NO: 1635320 - DNA, 15 bp, Homo sapiens
atgatgatcatcctc

SEQ ID NO: 1635321 - DNA, 15 bp, Homo sapiens
tgatgatcatcctct

SEQ ID NO: 1635322 - DNA, 15 bp, Homo sapiens
gatgatcatcctctt

SEQ ID NO: 1635323 - DNA, 15 bp, Homo sapiens
atgatcatcctcttt

SEQ ID NO: 1635324 - DNA, 15 bp, Homo sapiens
tgatcatcctctttt

SEQ ID NO: 1635325 - DNA, 15 bp, Homo sapiens
gatcatcctctttta

SEQ ID NO: 1635326 - DNA, 15 bp, Homo sapiens
atcatcctcttttaa

SEQ ID NO: 1635327 - DNA, 15 bp, Homo sapiens
tcatcctcttttaac

SEQ ID NO: 1635328 - DNA, 15 bp, Homo sapiens
catcctcttttaaca

SEQ ID NO: 1635329 - DNA, 15 bp, Homo sapiens
atcctcttttaacaa

SEQ ID NO: 1635330 - DNA, 15 bp, Homo sapiens
tcctcttttaacaag

SEQ ID NO: 1635331 - DNA, 15 bp, Homo sapiens
cctcttttaacaaga

SEQ ID NO: 1635332 - DNA, 15 bp, Homo sapiens
ctcttttaacaagaa

SEQ ID NO: 1635333 - DNA, 15 bp, Homo sapiens
tcttttaacaagaaa

SEQ ID NO: 1635334 - DNA, 15 bp, Homo sapiens
cttttaacaagaaag

SEQ ID NO: 1635335 - DNA, 15 bp, Homo sapiens
ttttaacaagaaagg

SEQ ID NO: 1635336 - DNA, 15 bp, Homo sapiens
tttaacaagaaagga

SEQ ID NO: 1635337 - DNA, 15 bp, Homo sapiens
ttaacaagaaaggaa

SEQ ID NO: 1635338 - DNA, 15 bp, Homo sapiens
taacaagaaaggaaa

SEQ ID NO: 1635339 - DNA, 15 bp, Homo sapiens
aacaagaaaggaaat

SEQ ID NO: 1635340 - DNA, 15 bp, Homo sapiens
acaagaaaggaaatg

SEQ ID NO: 1635341 - DNA, 15 bp, Homo sapiens
caagaaaggaaatgg

SEQ ID NO: 1635342 - DNA, 15 bp, Homo sapiens
aagaaaggaaatgga

SEQ ID NO: 1635343 - DNA, 15 bp, Homo sapiens
agaaaggaaatggag

SEQ ID NO: 1635344 - DNA, 15 bp, Homo sapiens
gaaaggaaatggaga

SEQ ID NO: 1635345 - DNA, 15 bp, Homo sapiens
aaaggaaatggagac

SEQ ID NO: 1635346 - DNA, 15 bp, Homo sapiens
aaggaaatggagact

SEQ ID NO: 1635347 - DNA, 15 bp, Homo sapiens
aggaaatggagactt

SEQ ID NO: 1635348 - DNA, 15 bp, Homo sapiens
ggaaatggagacttg

SEQ ID NO: 1635349 - DNA, 15 bp, Homo sapiens
gaaatggagacttga

SEQ ID NO: 1635350 - DNA, 15 bp, Homo sapiens
aaatggagacttgag

SEQ ID NO: 1635351 - DNA, 15 bp, Homo sapiens
aatggagacttgaga

SEQ ID NO: 1635352 - DNA, 15 bp, Homo sapiens
atggagacttgagac

SEQ ID NO: 1635353 - DNA, 15 bp, Homo sapiens
tggagacttgagact

SEQ ID NO: 1635354 - DNA, 15 bp, Homo sapiens
ggagacttgagactg

SEQ ID NO: 1635355 - DNA, 15 bp, Homo sapiens
gagacttgagactgg

SEQ ID NO: 1635356 - DNA, 15 bp, Homo sapiens
agacttgagactggc

SEQ ID NO: 1635357 - DNA, 15 bp, Homo sapiens
gacttgagactggcc

SEQ ID NO: 1635358 - DNA, 15 bp, Homo sapiens
acttgagactggccc

SEQ ID NO: 1635359 - DNA, 15 bp, Homo sapiens
cttgagactggccct

SEQ ID NO: 1635360 - DNA, 15 bp, Homo sapiens
ttgagactggccctg

SEQ ID NO: 1635361 - DNA, 15 bp, Homo sapiens
tgagactggccctgg

SEQ ID NO: 1635362 - DNA, 15 bp, Homo sapiens
gagactggccctggt

SEQ ID NO: 1635363 - DNA, 15 bp, Homo sapiens
agactggccctggtg

SEQ ID NO: 1635364 - DNA, 15 bp, Homo sapiens
gactggccctggtgt

SEQ ID NO: 1635365 - DNA, 15 bp, Homo sapiens
actggccctggtgtt

SEQ ID NO: 1635366 - DNA, 15 bp, Homo sapiens
ctggccctggtgtta

SEQ ID NO: 1635367 - DNA, 15 bp, Homo sapiens
tggccctggtgttag

SEQ ID NO: 1635368 - DNA, 15 bp, Homo sapiens
ggccctggtgttagg

SEQ ID NO: 1635369 - DNA, 15 bp, Homo sapiens
gccctggtgttaggt

SEQ ID NO: 1635370 - DNA, 15 bp, Homo sapiens
ccctggtgttaggtt

SEQ ID NO: 1635371 - DNA, 15 bp, Homo sapiens
cctggtgttaggttt

SEQ ID NO: 1635372 - DNA, 15 bp, Homo sapiens
ctggtgttaggtttc

SEQ ID NO: 1635373 - DNA, 15 bp, Homo sapiens
tggtgttaggtttct

SEQ ID NO: 1635374 - DNA, 15 bp, Homo sapiens
ggtgttaggtttctt

SEQ ID NO: 1635375 - DNA, 15 bp, Homo sapiens
gtgttaggtttcttc

SEQ ID NO: 1635376 - DNA, 15 bp, Homo sapiens
tgttaggtttcttct

SEQ ID NO: 1635377 - DNA, 15 bp, Homo sapiens
gttaggtttcttctt

SEQ ID NO: 1635378 - DNA, 15 bp, Homo sapiens
ttaggtttcttcttt

SEQ ID NO: 1635379 - DNA, 15 bp, Homo sapiens
taggtttcttctttc

SEQ ID NO: 1635380 - DNA, 15 bp, Homo sapiens
aggtttcttctttcc

SEQ ID NO: 1635381 - DNA, 15 bp, Homo sapiens
ggtttcttctttcca

SEQ ID NO: 1635382 - DNA, 15 bp, Homo sapiens
gtttcttctttccaa

SEQ ID NO: 1635383 - DNA, 15 bp, Homo sapiens
tttcttctttccaaa

SEQ ID NO: 1635384 - DNA, 15 bp, Homo sapiens
ttcttctttccaaag

SEQ ID NO: 1635385 - DNA, 15 bp, Homo sapiens
tcttctttccaaagt

SEQ ID NO: 1635386 - DNA, 15 bp, Homo sapiens
cttctttccaaagta

SEQ ID NO: 1635387 - DNA, 15 bp, Homo sapiens
ttctttccaaagtac

SEQ ID NO: 1635388 - DNA, 15 bp, Homo sapiens
tctttccaaagtaca

SEQ ID NO: 1635389 - DNA, 15 bp, Homo sapiens
ctttccaaagtacaa

SEQ ID NO: 1635390 - DNA, 15 bp, Homo sapiens
tttccaaagtacaaa

SEQ ID NO: 1635391 - DNA, 15 bp, Homo sapiens
ttccaaagtacaaat

SEQ ID NO: 1635392 - DNA, 15 bp, Homo sapiens
tccaaagtacaaatt

SEQ ID NO: 1635393 - DNA, 15 bp, Homo sapiens
ccaaagtacaaattt

SEQ ID NO: 1635394 - DNA, 15 bp, Homo sapiens
caaagtacaaatttc

SEQ ID NO: 1635395 - DNA, 15 bp, Homo sapiens
aaagtacaaatttct

SEQ ID NO: 1635396 - DNA, 15 bp, Homo sapiens
aagtacaaatttctt

SEQ ID NO: 1635397 - DNA, 15 bp, Homo sapiens
agtacaaatttcttc

SEQ ID NO: 1635398 - DNA, 15 bp, Homo sapiens
gtacaaatttcttct

SEQ ID NO: 1635399 - DNA, 15 bp, Homo sapiens
tacaaatttcttcta

SEQ ID NO: 1635400 - DNA, 15 bp, Homo sapiens
acaaatttcttctat

SEQ ID NO: 1635401 - DNA, 15 bp, Homo sapiens
caaatttcttctatt

SEQ ID NO: 1635402 - DNA, 15 bp, Homo sapiens
aaatttcttctattg

SEQ ID NO: 1635403 - DNA, 15 bp, Homo sapiens
aatttcttctattgc

SEQ ID NO: 1635404 - DNA, 15 bp, Homo sapiens
atttcttctattgct

SEQ ID NO: 1635405 - DNA, 15 bp, Homo sapiens
tttcttctattgctt

SEQ ID NO: 1635406 - DNA, 15 bp, Homo sapiens
ttcttctattgcttc

SEQ ID NO: 1635407 - DNA, 15 bp, Homo sapiens
tcttctattgcttct

SEQ ID NO: 1635408 - DNA, 15 bp, Homo sapiens
cttctattgcttctc

SEQ ID NO: 1635409 - DNA, 15 bp, Homo sapiens
ttctattgcttctct

SEQ ID NO: 1635410 - DNA, 15 bp, Homo sapiens
tctattgcttctctc

SEQ ID NO: 1635411 - DNA, 15 bp, Homo sapiens
ctattgcttctctct

SEQ ID NO: 1635412 - DNA, 15 bp, Homo sapiens
tattgcttctctctt

SEQ ID NO: 1635413 - DNA, 15 bp, Homo sapiens
attgcttctctcttt

SEQ ID NO: 1635414 - DNA, 15 bp, Homo sapiens
ttgcttctctctttg

SEQ ID NO: 1635415 - DNA, 15 bp, Homo sapiens
tgcttctctctttgt

SEQ ID NO: 1635416 - DNA, 15 bp, Homo sapiens
gcttctctctttgta

SEQ ID NO: 1635417 - DNA, 15 bp, Homo sapiens
cttctctctttgtac

SEQ ID NO: 1635418 - DNA, 15 bp, Homo sapiens
ttctctctttgtacc

SEQ ID NO: 1635419 - DNA, 15 bp, Homo sapiens
tctctctttgtaccg

SEQ ID NO: 1635420 - DNA, 15 bp, Homo sapiens
ctctctttgtaccgt

SEQ ID NO: 1635421 - DNA, 15 bp, Homo sapiens
tctctttgtaccgtt

SEQ ID NO: 1635422 - DNA, 15 bp, Homo sapiens
ctctttgtaccgttt

SEQ ID NO: 1635423 - DNA, 15 bp, Homo sapiens
tctttgtaccgtttg

SEQ ID NO: 1635424 - DNA, 15 bp, Homo sapiens
ctttgtaccgtttgt

SEQ ID NO: 1635425 - DNA, 15 bp, Homo sapiens
tttgtaccgtttgtg

SEQ ID NO: 1635426 - DNA, 15 bp, Homo sapiens
ttgtaccgtttgtgc

SEQ ID NO: 1635427 - DNA, 15 bp, Homo sapiens
tgtaccgtttgtgca

SEQ ID NO: 1635428 - DNA, 15 bp, Homo sapiens
gtaccgtttgtgcac

SEQ ID NO: 1635429 - DNA, 15 bp, Homo sapiens
taccgtttgtgcacc

SEQ ID NO: 1635430 - DNA, 15 bp, Homo sapiens
accgtttgtgcaccc

SEQ ID NO: 1635431 - DNA, 15 bp, Homo sapiens
ccgtttgtgcaccca

SEQ ID NO: 1635432 - DNA, 15 bp, Homo sapiens
cgtttgtgcacccaa

SEQ ID NO: 1635433 - DNA, 15 bp, Homo sapiens
gtttgtgcacccaac

SEQ ID NO: 1635434 - DNA, 15 bp, Homo sapiens
tttgtgcacccaact

SEQ ID NO: 1635435 - DNA, 15 bp, Homo sapiens
ttgtgcacccaactt

SEQ ID NO: 1635436 - DNA, 15 bp, Homo sapiens
tgtgcacccaacttg

SEQ ID NO: 1635437 - DNA, 15 bp, Homo sapiens
gtgcacccaacttgt

SEQ ID NO: 1635438 - DNA, 15 bp, Homo sapiens
tgcacccaacttgtc

SEQ ID NO: 1635439 - DNA, 15 bp, Homo sapiens
gcacccaacttgtca

SEQ ID NO: 1635440 - DNA, 15 bp, Homo sapiens
cacccaacttgtcaa

SEQ ID NO: 1635441 - DNA, 15 bp, Homo sapiens
acccaacttgtcaat

SEQ ID NO: 1635442 - DNA, 15 bp, Homo sapiens
cccaacttgtcaatc

SEQ ID NO: 1635443 - DNA, 15 bp, Homo sapiens
ccaacttgtcaatcc

SEQ ID NO: 1635444 - DNA, 15 bp, Homo sapiens
caacttgtcaatcca

SEQ ID NO: 1635445 - DNA, 15 bp, Homo sapiens
aacttgtcaatccac

SEQ ID NO: 1635446 - DNA, 15 bp, Homo sapiens
acttgtcaatccacc

SEQ ID NO: 1635447 - DNA, 15 bp, Homo sapiens
cttgtcaatccacca

SEQ ID NO: 1635448 - DNA, 15 bp, Homo sapiens
ttgtcaatccaccaa

SEQ ID NO: 1635449 - DNA, 15 bp, Homo sapiens
tgtcaatccaccaat

SEQ ID NO: 1635450 - DNA, 15 bp, Homo sapiens
gtcaatccaccaatc

SEQ ID NO: 1635451 - DNA, 15 bp, Homo sapiens
tcaatccaccaatca

SEQ ID NO: 1635452 - DNA, 15 bp, Homo sapiens
caatccaccaatcag

SEQ ID NO: 1635453 - DNA, 15 bp, Homo sapiens
aatccaccaatcagt

SEQ ID NO: 1635454 - DNA, 15 bp, Homo sapiens
atccaccaatcagtg

SEQ ID NO: 1635455 - DNA, 15 bp, Homo sapiens
tccaccaatcagtga

SEQ ID NO: 1635456 - DNA, 15 bp, Homo sapiens
ccaccaatcagtgag

SEQ ID NO: 1635457 - DNA, 15 bp, Homo sapiens
caccaatcagtgagc

SEQ ID NO: 1635458 - DNA, 15 bp, Homo sapiens
accaatcagtgagca

SEQ ID NO: 1635459 - DNA, 15 bp, Homo sapiens
ccaatcagtgagcat

SEQ ID NO: 1635460 - DNA, 15 bp, Homo sapiens
caatcagtgagcatt

SEQ ID NO: 1635461 - DNA, 15 bp, Homo sapiens
aatcagtgagcattt

SEQ ID NO: 1635462 - DNA, 15 bp, Homo sapiens
atcagtgagcatttg

SEQ ID NO: 1635463 - DNA, 15 bp, Homo sapiens
tcagtgagcatttgt

SEQ ID NO: 1635464 - DNA, 15 bp, Homo sapiens
cagtgagcatttgtg

SEQ ID NO: 1635465 - DNA, 15 bp, Homo sapiens
agtgagcatttgtga

SEQ ID NO: 1635466 - DNA, 15 bp, Homo sapiens
gtgagcatttgtgaa

SEQ ID NO: 1635467 - DNA, 15 bp, Homo sapiens
tgagcatttgtgaag

SEQ ID NO: 1635468 - DNA, 15 bp, Homo sapiens
gagcatttgtgaagt

SEQ ID NO: 1635469 - DNA, 15 bp, Homo sapiens
agcatttgtgaagtg

SEQ ID NO: 1635470 - DNA, 15 bp, Homo sapiens
gcatttgtgaagtgt

SEQ ID NO: 1635471 - DNA, 15 bp, Homo sapiens
catttgtgaagtgtc

SEQ ID NO: 1635472 - DNA, 15 bp, Homo sapiens
atttgtgaagtgtcc

SEQ ID NO: 1635473 - DNA, 15 bp, Homo sapiens
tttgtgaagtgtcca

SEQ ID NO: 1635474 - DNA, 15 bp, Homo sapiens
ttgtgaagtgtccaa

SEQ ID NO: 1635475 - DNA, 15 bp, Homo sapiens
tgtgaagtgtccaaa

SEQ ID NO: 1635476 - DNA, 15 bp, Homo sapiens
gtgaagtgtccaaat

SEQ ID NO: 1635477 - DNA, 15 bp, Homo sapiens
tgaagtgtccaaatg

SEQ ID NO: 1635478 - DNA, 15 bp, Homo sapiens
gaagtgtccaaatgc

SEQ ID NO: 1635479 - DNA, 15 bp, Homo sapiens
aagtgtccaaatgcc

SEQ ID NO: 1635480 - DNA, 15 bp, Homo sapiens
agtgtccaaatgccc

SEQ ID NO: 1635481 - DNA, 15 bp, Homo sapiens
gtgtccaaatgccca

SEQ ID NO: 1635482 - DNA, 15 bp, Homo sapiens
tgtccaaatgcccag

SEQ ID NO: 1635483 - DNA, 15 bp, Homo sapiens
gtccaaatgcccagt

SEQ ID NO: 1635484 - DNA, 15 bp, Homo sapiens
tccaaatgcccagtg

SEQ ID NO: 1635485 - DNA, 15 bp, Homo sapiens
ccaaatgcccagtgt

SEQ ID NO: 1635486 - DNA, 15 bp, Homo sapiens
caaatgcccagtgta

SEQ ID NO: 1635487 - DNA, 15 bp, Homo sapiens
aaatgcccagtgtag

SEQ ID NO: 1635488 - DNA, 15 bp, Homo sapiens
aatgcccagtgtagt

SEQ ID NO: 1635489 - DNA, 15 bp, Homo sapiens
atgcccagtgtagtg

SEQ ID NO: 1635490 - DNA, 15 bp, Homo sapiens
tgcccagtgtagtgc

SEQ ID NO: 1635491 - DNA, 15 bp, Homo sapiens
gcccagtgtagtgct

SEQ ID NO: 1635492 - DNA, 15 bp, Homo sapiens
cccagtgtagtgctt

SEQ ID NO: 1635493 - DNA, 15 bp, Homo sapiens
ccagtgtagtgcttc

SEQ ID NO: 1635494 - DNA, 15 bp, Homo sapiens
cagtgtagtgcttct

SEQ ID NO: 1635495 - DNA, 15 bp, Homo sapiens
agtgtagtgcttcta

SEQ ID NO: 1635496 - DNA, 15 bp, Homo sapiens
gtgtagtgcttctaa

SEQ ID NO: 1635497 - DNA, 15 bp, Homo sapiens
tgtagtgcttctaaa

SEQ ID NO: 1635498 - DNA, 15 bp, Homo sapiens
gtagtgcttctaaac

SEQ ID NO: 1635499 - DNA, 15 bp, Homo sapiens
tagtgcttctaaaca

SEQ ID NO: 1635500 - DNA, 15 bp, Homo sapiens
agtgcttctaaacac

SEQ ID NO: 1635501 - DNA, 15 bp, Homo sapiens
gtgcttctaaacaca

SEQ ID NO: 1635502 - DNA, 15 bp, Homo sapiens
tgcttctaaacacag

SEQ ID NO: 1635503 - DNA, 15 bp, Homo sapiens
gcttctaaacacaga

SEQ ID NO: 1635504 - DNA, 15 bp, Homo sapiens
cttctaaacacagaa

SEQ ID NO: 1635505 - DNA, 15 bp, Homo sapiens
ttctaaacacagaag

SEQ ID NO: 1635506 - DNA, 15 bp, Homo sapiens
tctaaacacagaagg

SEQ ID NO: 1635507 - DNA, 15 bp, Homo sapiens
ctaaacacagaagga

SEQ ID NO: 1635508 - DNA, 15 bp, Homo sapiens
taaacacagaaggat

SEQ ID NO: 1635509 - DNA, 15 bp, Homo sapiens
aaacacagaaggatg

SEQ ID NO: 1635510 - DNA, 15 bp, Homo sapiens
aacacagaaggatga

SEQ ID NO: 1635511 - DNA, 15 bp, Homo sapiens
acacagaaggatgag

SEQ ID NO: 1635512 - DNA, 15 bp, Homo sapiens
cacagaaggatgaga

SEQ ID NO: 1635513 - DNA, 15 bp, Homo sapiens
acagaaggatgagat

SEQ ID NO: 1635514 - DNA, 15 bp, Homo sapiens
cagaaggatgagatg

SEQ ID NO: 1635515 - DNA, 15 bp, Homo sapiens
agaaggatgagatga

SEQ ID NO: 1635516 - DNA, 15 bp, Homo sapiens
gaaggatgagatgac

SEQ ID NO: 1635517 - DNA, 15 bp, Homo sapiens
aaggatgagatgaca

SEQ ID NO: 1635518 - DNA, 15 bp, Homo sapiens
aggatgagatgacag

SEQ ID NO: 1635519 - DNA, 15 bp, Homo sapiens
ggatgagatgacagt

SEQ ID NO: 1635520 - DNA, 15 bp, Homo sapiens
gatgagatgacagtg

SEQ ID NO: 1635521 - DNA, 15 bp, Homo sapiens
atgagatgacagtgt

SEQ ID NO: 1635522 - DNA, 15 bp, Homo sapiens
tgagatgacagtgtc

SEQ ID NO: 1635523 - DNA, 15 bp, Homo sapiens
gagatgacagtgtct

SEQ ID NO: 1635524 - DNA, 15 bp, Homo sapiens
agatgacagtgtctg

SEQ ID NO: 1635525 - DNA, 15 bp, Homo sapiens
gatgacagtgtctgc

SEQ ID NO: 1635526 - DNA, 15 bp, Homo sapiens
atgacagtgtctgcc

SEQ ID NO: 1635527 - DNA, 15 bp, Homo sapiens
tgacagtgtctgccc

SEQ ID NO: 1635528 - DNA, 15 bp, Homo sapiens
gacagtgtctgccct

SEQ ID NO: 1635529 - DNA, 15 bp, Homo sapiens
acagtgtctgccctc

SEQ ID NO: 1635530 - DNA, 15 bp, Homo sapiens
cagtgtctgccctcg

SEQ ID NO: 1635531 - DNA, 15 bp, Homo sapiens
agtgtctgccctcga

SEQ ID NO: 1635532 - DNA, 15 bp, Homo sapiens
gtgtctgccctcgag

SEQ ID NO: 1635533 - DNA, 15 bp, Homo sapiens
tgtctgccctcgaga

SEQ ID NO: 1635534 - DNA, 15 bp, Homo sapiens
gtctgccctcgagat

SEQ ID NO: 1635535 - DNA, 15 bp, Homo sapiens
tctgccctcgagatg

SEQ ID NO: 1635536 - DNA, 15 bp, Homo sapiens
ctgccctcgagatgc

SEQ ID NO: 1635537 - DNA, 15 bp, Homo sapiens
tgccctcgagatgct

SEQ ID NO: 1635538 - DNA, 15 bp, Homo sapiens
gccctcgagatgctc

SEQ ID NO: 1635539 - DNA, 15 bp, Homo sapiens
ccctcgagatgctca

SEQ ID NO: 1635540 - DNA, 15 bp, Homo sapiens
cctcgagatgctcaa

SEQ ID NO: 1635541 - DNA, 15 bp, Homo sapiens
ctcgagatgctcaaa

SEQ ID NO: 1635542 - DNA, 15 bp, Homo sapiens
tcgagatgctcaaaa

SEQ ID NO: 1635543 - DNA, 15 bp, Homo sapiens
cgagatgctcaaaat

SEQ ID NO: 1635544 - DNA, 15 bp, Homo sapiens
gagatgctcaaaatc

SEQ ID NO: 1635545 - DNA, 15 bp, Homo sapiens
agatgctcaaaatca

SEQ ID NO: 1635546 - DNA, 15 bp, Homo sapiens
gatgctcaaaatcaa

SEQ ID NO: 1635547 - DNA, 15 bp, Homo sapiens
atgctcaaaatcaaa

SEQ ID NO: 1635548 - DNA, 15 bp, Homo sapiens
tgctcaaaatcaaat

SEQ ID NO: 1635549 - DNA, 15 bp, Homo sapiens
gctcaaaatcaaata

SEQ ID NO: 1635550 - DNA, 15 bp, Homo sapiens
ctcaaaatcaaatag

SEQ ID NO: 1635551 - DNA, 15 bp, Homo sapiens
tcaaaatcaaatagg

SEQ ID NO: 1635552 - DNA, 15 bp, Homo sapiens
caaaatcaaatagga

SEQ ID NO: 1635553 - DNA, 15 bp, Homo sapiens
aaaatcaaataggaa

SEQ ID NO: 1635554 - DNA, 15 bp, Homo sapiens
aaatcaaataggaaa

SEQ ID NO: 1635555 - DNA, 15 bp, Homo sapiens
aatcaaataggaaag

SEQ ID NO: 1635556 - DNA, 15 bp, Homo sapiens
atcaaataggaaaga

SEQ ID NO: 1635557 - DNA, 15 bp, Homo sapiens
tcaaataggaaagaa

SEQ ID NO: 1635558 - DNA, 15 bp, Homo sapiens
caaataggaaagaat

SEQ ID NO: 1635559 - DNA, 15 bp, Homo sapiens
aaataggaaagaata

SEQ ID NO: 1635560 - DNA, 15 bp, Homo sapiens
aataggaaagaatag

SEQ ID NO: 1635561 - DNA, 15 bp, Homo sapiens
ataggaaagaatagg

SEQ ID NO: 1635562 - DNA, 15 bp, Homo sapiens
taggaaagaataggc

SEQ ID NO: 1635563 - DNA, 15 bp, Homo sapiens
aggaaagaataggcc

SEQ ID NO: 1635564 - DNA, 15 bp, Homo sapiens
ggaaagaataggcca

SEQ ID NO: 1635565 - DNA, 15 bp, Homo sapiens
gaaagaataggccag

SEQ ID NO: 1635566 - DNA, 15 bp, Homo sapiens
aaagaataggccagt

SEQ ID NO: 1635567 - DNA, 15 bp, Homo sapiens
aagaataggccagtc

SEQ ID NO: 1635568 - DNA, 15 bp, Homo sapiens
agaataggccagtct

SEQ ID NO: 1635569 - DNA, 15 bp, Homo sapiens
gaataggccagtctt

SEQ ID NO: 1635570 - DNA, 15 bp, Homo sapiens
aataggccagtcttc

SEQ ID NO: 1635571 - DNA, 15 bp, Homo sapiens
ataggccagtcttca

SEQ ID NO: 1635572 - DNA, 15 bp, Homo sapiens
taggccagtcttcac

SEQ ID NO: 1635573 - DNA, 15 bp, Homo sapiens
aggccagtcttcaca

SEQ ID NO: 1635574 - DNA, 15 bp, Homo sapiens
ggccagtcttcacaa

SEQ ID NO: 1635575 - DNA, 15 bp, Homo sapiens
gccagtcttcacaaa

SEQ ID NO: 1635576 - DNA, 15 bp, Homo sapiens
ccagtcttcacaaaa

SEQ ID NO: 1635577 - DNA, 15 bp, Homo sapiens
cagtcttcacaaaac

SEQ ID NO: 1635578 - DNA, 15 bp, Homo sapiens
agtcttcacaaaaca

SEQ ID NO: 1635579 - DNA, 15 bp, Homo sapiens
gtcttcacaaaacag

SEQ ID NO: 1635580 - DNA, 15 bp, Homo sapiens
tcttcacaaaacaga

SEQ ID NO: 1635581 - DNA, 15 bp, Homo sapiens
cttcacaaaacagaa

SEQ ID NO: 1635582 - DNA, 15 bp, Homo sapiens
ttcacaaaacagaaa

SEQ ID NO: 1635583 - DNA, 15 bp, Homo sapiens
tcacaaaacagaaaa

SEQ ID NO: 1635584 - DNA, 15 bp, Homo sapiens
cacaaaacagaaaaa

SEQ ID NO: 1635585 - DNA, 15 bp, Homo sapiens
acaaaacagaaaaaa

SEQ ID NO: 1635586 - DNA, 15 bp, Homo sapiens
caaaacagaaaaaaa

SEQ ID NO: 1635587 - DNA, 15 bp, Homo sapiens
aaaacagaaaaaaaa

SEQ ID NO: 1635588 - DNA, 15 bp, Homo sapiens
aaacagaaaaaaaag

SEQ ID NO: 1635589 - DNA, 15 bp, Homo sapiens
aacagaaaaaaaagg

SEQ ID NO: 1635590 - DNA, 15 bp, Homo sapiens
acagaaaaaaaaggc

SEQ ID NO: 1635591 - DNA, 15 bp, Homo sapiens
cagaaaaaaaaggct

SEQ ID NO: 1635592 - DNA, 15 bp, Homo sapiens
agaaaaaaaaggcta

SEQ ID NO: 1635593 - DNA, 15 bp, Homo sapiens
gaaaaaaaaggctaa

SEQ ID NO: 1635594 - DNA, 15 bp, Homo sapiens
aaaaaaaaggctaat

SEQ ID NO: 1635595 - DNA, 15 bp, Homo sapiens
aaaaaaaggctaata

SEQ ID NO: 1635596 - DNA, 15 bp, Homo sapiens
aaaaaaggctaatat

SEQ ID NO: 1635597 - DNA, 15 bp, Homo sapiens
aaaaaggctaatata

SEQ ID NO: 1635598 - DNA, 15 bp, Homo sapiens
aaaaggctaatatac

SEQ ID NO: 1635599 - DNA, 15 bp, Homo sapiens
aaaggctaatataca

SEQ ID NO: 1635600 - DNA, 15 bp, Homo sapiens
aaggctaatatacag

SEQ ID NO: 1635601 - DNA, 15 bp, Homo sapiens
aggctaatatacagt

SEQ ID NO: 1635602 - DNA, 15 bp, Homo sapiens
ggctaatatacagtt

SEQ ID NO: 1635603 - DNA, 15 bp, Homo sapiens
gctaatatacagtta

SEQ ID NO: 1635604 - DNA, 15 bp, Homo sapiens
ctaatatacagttaa

SEQ ID NO: 1635605 - DNA, 15 bp, Homo sapiens
taatatacagttaag

SEQ ID NO: 1635606 - DNA, 15 bp, Homo sapiens
aatatacagttaaga

SEQ ID NO: 1635607 - DNA, 15 bp, Homo sapiens
atatacagttaagag

SEQ ID NO: 1635608 - DNA, 15 bp, Homo sapiens
tatacagttaagagc

SEQ ID NO: 1635609 - DNA, 15 bp, Homo sapiens
atacagttaagagct

SEQ ID NO: 1635610 - DNA, 15 bp, Homo sapiens
tacagttaagagctt

SEQ ID NO: 1635611 - DNA, 15 bp, Homo sapiens
acagttaagagcttg

SEQ ID NO: 1635612 - DNA, 15 bp, Homo sapiens
cagttaagagcttgt

SEQ ID NO: 1635613 - DNA, 15 bp, Homo sapiens
agttaagagcttgtt

SEQ ID NO: 1635614 - DNA, 15 bp, Homo sapiens
gttaagagcttgttt

SEQ ID NO: 1635615 - DNA, 15 bp, Homo sapiens
ttaagagcttgttta

SEQ ID NO: 1635616 - DNA, 15 bp, Homo sapiens
taagagcttgtttat

SEQ ID NO: 1635617 - DNA, 15 bp, Homo sapiens
aagagcttgtttatg

SEQ ID NO: 1635618 - DNA, 15 bp, Homo sapiens
agagcttgtttatga

SEQ ID NO: 1635619 - DNA, 15 bp, Homo sapiens
gagcttgtttatgat

SEQ ID NO: 1635620 - DNA, 15 bp, Homo sapiens
agcttgtttatgata

SEQ ID NO: 1635621 - DNA, 15 bp, Homo sapiens
gcttgtttatgatac

SEQ ID NO: 1635622 - DNA, 15 bp, Homo sapiens
cttgtttatgataca

SEQ ID NO: 1635623 - DNA, 15 bp, Homo sapiens
ttgtttatgatacat

SEQ ID NO: 1635624 - DNA, 15 bp, Homo sapiens
tgtttatgatacata

SEQ ID NO: 1635625 - DNA, 15 bp, Homo sapiens
gtttatgatacataa

SEQ ID NO: 1635626 - DNA, 15 bp, Homo sapiens
tttatgatacataaa

SEQ ID NO: 1635627 - DNA, 15 bp, Homo sapiens
ttatgatacataaag

SEQ ID NO: 1635628 - DNA, 15 bp, Homo sapiens
tatgatacataaagt

SEQ ID NO: 1635629 - DNA, 15 bp, Homo sapiens
atgatacataaagta

SEQ ID NO: 1635630 - DNA, 15 bp, Homo sapiens
tgatacataaagtaa

SEQ ID NO: 1635631 - DNA, 15 bp, Homo sapiens
gatacataaagtaat

SEQ ID NO: 1635632 - DNA, 15 bp, Homo sapiens
atacataaagtaatc

SEQ ID NO: 1635633 - DNA, 15 bp, Homo sapiens
tacataaagtaatca

SEQ ID NO: 1635634 - DNA, 15 bp, Homo sapiens
acataaagtaatcat

SEQ ID NO: 1635635 - DNA, 15 bp, Homo sapiens
cataaagtaatcatt

SEQ ID NO: 1635636 - DNA, 15 bp, Homo sapiens
ataaagtaatcattt

SEQ ID NO: 1635637 - DNA, 15 bp, Homo sapiens
taaagtaatcatttt

SEQ ID NO: 1635638 - DNA, 15 bp, Homo sapiens
aaagtaatcattttc

SEQ ID NO: 1635639 - DNA, 15 bp, Homo sapiens
aagtaatcattttcc

SEQ ID NO: 1635640 - DNA, 15 bp, Homo sapiens
agtaatcattttcca

SEQ ID NO: 1635641 - DNA, 15 bp, Homo sapiens
gtaatcattttccat

SEQ ID NO: 1635642 - DNA, 15 bp, Homo sapiens
taatcattttccata

SEQ ID NO: 1635643 - DNA, 15 bp, Homo sapiens
aatcattttccatat

SEQ ID NO: 1635644 - DNA, 15 bp, Homo sapiens
atcattttccatatt

SEQ ID NO: 1635645 - DNA, 15 bp, Homo sapiens
tcattttccatattt

SEQ ID NO: 1635646 - DNA, 15 bp, Homo sapiens
cattttccatattta

SEQ ID NO: 1635647 - DNA, 15 bp, Homo sapiens
attttccatatttag

SEQ ID NO: 1635648 - DNA, 15 bp, Homo sapiens
ttttccatatttaga

SEQ ID NO: 1635649 - DNA, 15 bp, Homo sapiens
tttccatatttagaa

SEQ ID NO: 1635650 - DNA, 15 bp, Homo sapiens
ttccatatttagaag

SEQ ID NO: 1635651 - DNA, 15 bp, Homo sapiens
tccatatttagaagg

SEQ ID NO: 1635652 - DNA, 15 bp, Homo sapiens
ccatatttagaaggt

SEQ ID NO: 1635653 - DNA, 15 bp, Homo sapiens
catatttagaaggtt

SEQ ID NO: 1635654 - DNA, 15 bp, Homo sapiens
atatttagaaggtta

SEQ ID NO: 1635655 - DNA, 15 bp, Homo sapiens
tatttagaaggttaa

SEQ ID NO: 1635656 - DNA, 15 bp, Homo sapiens
atttagaaggttaat

SEQ ID NO: 1635657 - DNA, 15 bp, Homo sapiens
tttagaaggttaatg

SEQ ID NO: 1635658 - DNA, 15 bp, Homo sapiens
ttagaaggttaatgg

SEQ ID NO: 1635659 - DNA, 15 bp, Homo sapiens
tagaaggttaatggg

SEQ ID NO: 1635660 - DNA, 15 bp, Homo sapiens
agaaggttaatggga

SEQ ID NO: 1635661 - DNA, 15 bp, Homo sapiens
gaaggttaatgggaa

SEQ ID NO: 1635662 - DNA, 15 bp, Homo sapiens
aaggttaatgggaat

SEQ ID NO: 1635663 - DNA, 15 bp, Homo sapiens
aggttaatgggaatg

SEQ ID NO: 1635664 - DNA, 15 bp, Homo sapiens
ggttaatgggaatga

SEQ ID NO: 1635665 - DNA, 15 bp, Homo sapiens
gttaatgggaatgag

SEQ ID NO: 1635666 - DNA, 15 bp, Homo sapiens
ttaatgggaatgagg

SEQ ID NO: 1635667 - DNA, 15 bp, Homo sapiens
taatgggaatgaggt

SEQ ID NO: 1635668 - DNA, 15 bp, Homo sapiens
aatgggaatgaggtc

SEQ ID NO: 1635669 - DNA, 15 bp, Homo sapiens
atgggaatgaggtca

SEQ ID NO: 1635670 - DNA, 15 bp, Homo sapiens
tgggaatgaggtcat

SEQ ID NO: 1635671 - DNA, 15 bp, Homo sapiens
gggaatgaggtcatc

SEQ ID NO: 1635672 - DNA, 15 bp, Homo sapiens
ggaatgaggtcatca

SEQ ID NO: 1635673 - DNA, 15 bp, Homo sapiens
gaatgaggtcatcac

SEQ ID NO: 1635674 - DNA, 15 bp, Homo sapiens
aatgaggtcatcaca

SEQ ID NO: 1635675 - DNA, 15 bp, Homo sapiens
atgaggtcatcacac

SEQ ID NO: 1635676 - DNA, 15 bp, Homo sapiens
tgaggtcatcacaca

SEQ ID NO: 1635677 - DNA, 15 bp, Homo sapiens
gaggtcatcacacaa

SEQ ID NO: 1635678 - DNA, 15 bp, Homo sapiens
aggtcatcacacaag

SEQ ID NO: 1635679 - DNA, 15 bp, Homo sapiens
ggtcatcacacaaga

SEQ ID NO: 1635680 - DNA, 15 bp, Homo sapiens
gtcatcacacaagaa

SEQ ID NO: 1635681 - DNA, 15 bp, Homo sapiens
tcatcacacaagaat

SEQ ID NO: 1635682 - DNA, 15 bp, Homo sapiens
catcacacaagaatt

SEQ ID NO: 1635683 - DNA, 15 bp, Homo sapiens
atcacacaagaattc

SEQ ID NO: 1635684 - DNA, 15 bp, Homo sapiens
tcacacaagaattct

SEQ ID NO: 1635685 - DNA, 15 bp, Homo sapiens
cacacaagaattctc

SEQ ID NO: 1635686 - DNA, 15 bp, Homo sapiens
acacaagaattctca

SEQ ID NO: 1635687 - DNA, 15 bp, Homo sapiens
cacaagaattctcat

SEQ ID NO: 1635688 - DNA, 15 bp, Homo sapiens
acaagaattctcatg

SEQ ID NO: 1635689 - DNA, 15 bp, Homo sapiens
caagaattctcatgg

SEQ ID NO: 1635690 - DNA, 15 bp, Homo sapiens
aagaattctcatggg

SEQ ID NO: 1635691 - DNA, 15 bp, Homo sapiens
agaattctcatgggg

SEQ ID NO: 1635692 - DNA, 15 bp, Homo sapiens
gaattctcatggggg

SEQ ID NO: 1635693 - DNA, 15 bp, Homo sapiens
aattctcatgggggc

SEQ ID NO: 1635694 - DNA, 15 bp, Homo sapiens
attctcatgggggcc

SEQ ID NO: 1635695 - DNA, 15 bp, Homo sapiens
ttctcatgggggcct

SEQ ID NO: 1635696 - DNA, 15 bp, Homo sapiens
tctcatgggggcctg

SEQ ID NO: 1635697 - DNA, 15 bp, Homo sapiens
ctcatgggggcctga

SEQ ID NO: 1635698 - DNA, 15 bp, Homo sapiens
tcatgggggcctgaa

SEQ ID NO: 1635699 - DNA, 15 bp, Homo sapiens
catgggggcctgaag

SEQ ID NO: 1635700 - DNA, 15 bp, Homo sapiens
atgggggcctgaaga

SEQ ID NO: 1635701 - DNA, 15 bp, Homo sapiens
tgggggcctgaagaa

SEQ ID NO: 1635702 - DNA, 15 bp, Homo sapiens
gggggcctgaagaaa

SEQ ID NO: 1635703 - DNA, 15 bp, Homo sapiens
ggggcctgaagaaat

SEQ ID NO: 1635704 - DNA, 15 bp, Homo sapiens
gggcctgaagaaatt

SEQ ID NO: 1635705 - DNA, 15 bp, Homo sapiens
ggcctgaagaaattt

SEQ ID NO: 1635706 - DNA, 15 bp, Homo sapiens
gcctgaagaaatttt

SEQ ID NO: 1635707 - DNA, 15 bp, Homo sapiens
cctgaagaaattttg

SEQ ID NO: 1635708 - DNA, 15 bp, Homo sapiens
ctgaagaaattttgt

SEQ ID NO: 1635709 - DNA, 15 bp, Homo sapiens
tgaagaaattttgtg

SEQ ID NO: 1635710 - DNA, 15 bp, Homo sapiens
gaagaaattttgtgt

SEQ ID NO: 1635711 - DNA, 15 bp, Homo sapiens
aagaaattttgtgtt

SEQ ID NO: 1635712 - DNA, 15 bp, Homo sapiens
agaaattttgtgttg

SEQ ID NO: 1635713 - DNA, 15 bp, Homo sapiens
gaaattttgtgttgc

SEQ ID NO: 1635714 - DNA, 15 bp, Homo sapiens
aaattttgtgttgct

SEQ ID NO: 1635715 - DNA, 15 bp, Homo sapiens
aattttgtgttgcta

SEQ ID NO: 1635716 - DNA, 15 bp, Homo sapiens
attttgtgttgctag

SEQ ID NO: 1635717 - DNA, 15 bp, Homo sapiens
ttttgtgttgctaga

SEQ ID NO: 1635718 - DNA, 15 bp, Homo sapiens
tttgtgttgctagac

SEQ ID NO: 1635719 - DNA, 15 bp, Homo sapiens
ttgtgttgctagact

SEQ ID NO: 1635720 - DNA, 15 bp, Homo sapiens
tgtgttgctagactg

SEQ ID NO: 1635721 - DNA, 15 bp, Homo sapiens
gtgttgctagactga

SEQ ID NO: 1635722 - DNA, 15 bp, Homo sapiens
tgttgctagactgag

SEQ ID NO: 1635723 - DNA, 15 bp, Homo sapiens
gttgctagactgaga

SEQ ID NO: 1635724 - DNA, 15 bp, Homo sapiens
ttgctagactgagac

SEQ ID NO: 1635725 - DNA, 15 bp, Homo sapiens
tgctagactgagact

SEQ ID NO: 1635726 - DNA, 15 bp, Homo sapiens
gctagactgagactt

SEQ ID NO: 1635727 - DNA, 15 bp, Homo sapiens
ctagactgagacttc

SEQ ID NO: 1635728 - DNA, 15 bp, Homo sapiens
tagactgagacttca

SEQ ID NO: 1635729 - DNA, 15 bp, Homo sapiens
agactgagacttcaa

SEQ ID NO: 1635730 - DNA, 15 bp, Homo sapiens
gactgagacttcaac

SEQ ID NO: 1635731 - DNA, 15 bp, Homo sapiens
actgagacttcaaca

SEQ ID NO: 1635732 - DNA, 15 bp, Homo sapiens
ctgagacttcaacaa

SEQ ID NO: 1635733 - DNA, 15 bp, Homo sapiens
tgagacttcaacaat

SEQ ID NO: 1635734 - DNA, 15 bp, Homo sapiens
gagacttcaacaatt

SEQ ID NO: 1635735 - DNA, 15 bp, Homo sapiens
agacttcaacaattt

SEQ ID NO: 1635736 - DNA, 15 bp, Homo sapiens
gacttcaacaatttc

SEQ ID NO: 1635737 - DNA, 15 bp, Homo sapiens
acttcaacaatttct

SEQ ID NO: 1635738 - DNA, 15 bp, Homo sapiens
cttcaacaatttctc

SEQ ID NO: 1635739 - DNA, 15 bp, Homo sapiens
ttcaacaatttctct

SEQ ID NO: 1635740 - DNA, 15 bp, Homo sapiens
tcaacaatttctctg

SEQ ID NO: 1635741 - DNA, 15 bp, Homo sapiens
caacaatttctctga

SEQ ID NO: 1635742 - DNA, 15 bp, Homo sapiens
aacaatttctctgag

SEQ ID NO: 1635743 - DNA, 15 bp, Homo sapiens
acaatttctctgagc

SEQ ID NO: 1635744 - DNA, 15 bp, Homo sapiens
caatttctctgagca

SEQ ID NO: 1635745 - DNA, 15 bp, Homo sapiens
aatttctctgagcaa

SEQ ID NO: 1635746 - DNA, 15 bp, Homo sapiens
atttctctgagcaat

SEQ ID NO: 1635747 - DNA, 15 bp, Homo sapiens
tttctctgagcaatt

SEQ ID NO: 1635748 - DNA, 15 bp, Homo sapiens
ttctctgagcaatta

SEQ ID NO: 1635749 - DNA, 15 bp, Homo sapiens
tctctgagcaattat

SEQ ID NO: 1635750 - DNA, 15 bp, Homo sapiens
ctctgagcaattatc

SEQ ID NO: 1635751 - DNA, 15 bp, Homo sapiens
tctgagcaattatcc

SEQ ID NO: 1635752 - DNA, 15 bp, Homo sapiens
ctgagcaattatcct

SEQ ID NO: 1635753 - DNA, 15 bp, Homo sapiens
tgagcaattatcctt

SEQ ID NO: 1635754 - DNA, 15 bp, Homo sapiens
gagcaattatccttg

SEQ ID NO: 1635755 - DNA, 15 bp, Homo sapiens
agcaattatccttga

SEQ ID NO: 1635756 - DNA, 15 bp, Homo sapiens
gcaattatccttgaa

SEQ ID NO: 1635757 - DNA, 15 bp, Homo sapiens
caattatccttgaac

SEQ ID NO: 1635758 - DNA, 15 bp, Homo sapiens
aattatccttgaact

SEQ ID NO: 1635759 - DNA, 15 bp, Homo sapiens
attatccttgaactg

SEQ ID NO: 1635760 - DNA, 15 bp, Homo sapiens
ttatccttgaactgt

SEQ ID NO: 1635761 - DNA, 15 bp, Homo sapiens
tatccttgaactgtt

SEQ ID NO: 1635762 - DNA, 15 bp, Homo sapiens
atccttgaactgttg

SEQ ID NO: 1635763 - DNA, 15 bp, Homo sapiens
tccttgaactgttga

SEQ ID NO: 1635764 - DNA, 15 bp, Homo sapiens
ccttgaactgttgag

SEQ ID NO: 1635765 - DNA, 15 bp, Homo sapiens
cttgaactgttgagt

SEQ ID NO: 1635766 - DNA, 15 bp, Homo sapiens
ttgaactgttgagtt

SEQ ID NO: 1635767 - DNA, 15 bp, Homo sapiens
tgaactgttgagttc

SEQ ID NO: 1635768 - DNA, 15 bp, Homo sapiens
gaactgttgagttca

SEQ ID NO: 1635769 - DNA, 15 bp, Homo sapiens
aactgttgagttcag

SEQ ID NO: 1635770 - DNA, 15 bp, Homo sapiens
actgttgagttcagc

SEQ ID NO: 1635771 - DNA, 15 bp, Homo sapiens
ctgttgagttcagca

SEQ ID NO: 1635772 - DNA, 15 bp, Homo sapiens
tgttgagttcagcat

SEQ ID NO: 1635773 - DNA, 15 bp, Homo sapiens
gttgagttcagcatc

SEQ ID NO: 1635774 - DNA, 15 bp, Homo sapiens
ttgagttcagcatcc

SEQ ID NO: 1635775 - DNA, 15 bp, Homo sapiens
tgagttcagcatccc

SEQ ID NO: 1635776 - DNA, 15 bp, Homo sapiens
gagttcagcatccct

SEQ ID NO: 1635777 - DNA, 15 bp, Homo sapiens
agttcagcatccctg

SEQ ID NO: 1635778 - DNA, 15 bp, Homo sapiens
gttcagcatccctgc

SEQ ID NO: 1635779 - DNA, 15 bp, Homo sapiens
ttcagcatccctgca

SEQ ID NO: 1635780 - DNA, 15 bp, Homo sapiens
tcagcatccctgcat

SEQ ID NO: 1635781 - DNA, 15 bp, Homo sapiens
cagcatccctgcatt

SEQ ID NO: 1635782 - DNA, 15 bp, Homo sapiens
agcatccctgcattg

SEQ ID NO: 1635783 - DNA, 15 bp, Homo sapiens
gcatccctgcattgc

SEQ ID NO: 1635784 - DNA, 15 bp, Homo sapiens
catccctgcattgca

SEQ ID NO: 1635785 - DNA, 15 bp, Homo sapiens
atccctgcattgcag

SEQ ID NO: 1635786 - DNA, 15 bp, Homo sapiens
tccctgcattgcagt

SEQ ID NO: 1635787 - DNA, 15 bp, Homo sapiens
ccctgcattgcagtt

SEQ ID NO: 1635788 - DNA, 15 bp, Homo sapiens
cctgcattgcagttt

SEQ ID NO: 1635789 - DNA, 15 bp, Homo sapiens
ctgcattgcagtttc

SEQ ID NO: 1635790 - DNA, 15 bp, Homo sapiens
tgcattgcagtttcc

SEQ ID NO: 1635791 - DNA, 15 bp, Homo sapiens
gcattgcagtttcct

SEQ ID NO: 1635792 - DNA, 15 bp, Homo sapiens
cattgcagtttcctt

SEQ ID NO: 1635793 - DNA, 15 bp, Homo sapiens
attgcagtttccttt

SEQ ID NO: 1635794 - DNA, 15 bp, Homo sapiens
ttgcagtttccttta

SEQ ID NO: 1635795 - DNA, 15 bp, Homo sapiens
tgcagtttcctttaa

SEQ ID NO: 1635796 - DNA, 15 bp, Homo sapiens
gcagtttcctttaag

SEQ ID NO: 1635797 - DNA, 15 bp, Homo sapiens
cagtttcctttaagt

SEQ ID NO: 1635798 - DNA, 15 bp, Homo sapiens
agtttcctttaagtt

SEQ ID NO: 1635799 - DNA, 15 bp, Homo sapiens
gtttcctttaagttt

SEQ ID NO: 1635800 - DNA, 15 bp, Homo sapiens
tttcctttaagtttg

SEQ ID NO: 1635801 - DNA, 15 bp, Homo sapiens
ttcctttaagtttgt

SEQ ID NO: 1635802 - DNA, 15 bp, Homo sapiens
tcctttaagtttgtt

SEQ ID NO: 1635803 - DNA, 15 bp, Homo sapiens
cctttaagtttgtta

SEQ ID NO: 1635804 - DNA, 15 bp, Homo sapiens
ctttaagtttgttac

SEQ ID NO: 1635805 - DNA, 15 bp, Homo sapiens
tttaagtttgttaca

SEQ ID NO: 1635806 - DNA, 15 bp, Homo sapiens
ttaagtttgttacag

SEQ ID NO: 1635807 - DNA, 15 bp, Homo sapiens
taagtttgttacagt

SEQ ID NO: 1635808 - DNA, 15 bp, Homo sapiens
aagtttgttacagtt

SEQ ID NO: 1635809 - DNA, 15 bp, Homo sapiens
agtttgttacagtta

SEQ ID NO: 1635810 - DNA, 15 bp, Homo sapiens
gtttgttacagttac

SEQ ID NO: 1635811 - DNA, 15 bp, Homo sapiens
tttgttacagttacc

SEQ ID NO: 1635812 - DNA, 15 bp, Homo sapiens
ttgttacagttaccc

SEQ ID NO: 1635813 - DNA, 15 bp, Homo sapiens
tgttacagttaccct

SEQ ID NO: 1635814 - DNA, 15 bp, Homo sapiens
gttacagttaccctg

SEQ ID NO: 1635815 - DNA, 15 bp, Homo sapiens
ttacagttaccctga

SEQ ID NO: 1635816 - DNA, 15 bp, Homo sapiens
tacagttaccctgat

SEQ ID NO: 1635817 - DNA, 15 bp, Homo sapiens
acagttaccctgatt

SEQ ID NO: 1635818 - DNA, 15 bp, Homo sapiens
cagttaccctgatta

SEQ ID NO: 1635819 - DNA, 15 bp, Homo sapiens
agttaccctgattat

SEQ ID NO: 1635820 - DNA, 15 bp, Homo sapiens
gttaccctgattata

SEQ ID NO: 1635821 - DNA, 15 bp, Homo sapiens
ttaccctgattataa

SEQ ID NO: 1635822 - DNA, 15 bp, Homo sapiens
taccctgattataag

SEQ ID NO: 1635823 - DNA, 15 bp, Homo sapiens
accctgattataagg

SEQ ID NO: 1635824 - DNA, 15 bp, Homo sapiens
ccctgattataagga

SEQ ID NO: 1635825 - DNA, 15 bp, Homo sapiens
cctgattataaggag

SEQ ID NO: 1635826 - DNA, 15 bp, Homo sapiens
ctgattataaggaga

SEQ ID NO: 1635827 - DNA, 15 bp, Homo sapiens
tgattataaggagat

SEQ ID NO: 1635828 - DNA, 15 bp, Homo sapiens
gattataaggagata

SEQ ID NO: 1635829 - DNA, 15 bp, Homo sapiens
attataaggagatag

SEQ ID NO: 1635830 - DNA, 15 bp, Homo sapiens
ttataaggagatagt

SEQ ID NO: 1635831 - DNA, 15 bp, Homo sapiens
tataaggagatagtg

SEQ ID NO: 1635832 - DNA, 15 bp, Homo sapiens
ataaggagatagtga

SEQ ID NO: 1635833 - DNA, 15 bp, Homo sapiens
taaggagatagtgac

SEQ ID NO: 1635834 - DNA, 15 bp, Homo sapiens
aaggagatagtgacc

SEQ ID NO: 1635835 - DNA, 15 bp, Homo sapiens
aggagatagtgacct

SEQ ID NO: 1635836 - DNA, 15 bp, Homo sapiens
ggagatagtgacctg

SEQ ID NO: 1635837 - DNA, 15 bp, Homo sapiens
gagatagtgacctgt

SEQ ID NO: 1635838 - DNA, 15 bp, Homo sapiens
agatagtgacctgtt

SEQ ID NO: 1635839 - DNA, 15 bp, Homo sapiens
gatagtgacctgtta

SEQ ID NO: 1635840 - DNA, 15 bp, Homo sapiens
atagtgacctgttat

SEQ ID NO: 1635841 - DNA, 15 bp, Homo sapiens
tagtgacctgttatc

SEQ ID NO: 1635842 - DNA, 15 bp, Homo sapiens
agtgacctgttatcc

SEQ ID NO: 1635843 - DNA, 15 bp, Homo sapiens
gtgacctgttatcct

SEQ ID NO: 1635844 - DNA, 15 bp, Homo sapiens
tgacctgttatcctg

SEQ ID NO: 1635845 - DNA, 15 bp, Homo sapiens
gacctgttatcctgt

SEQ ID NO: 1635846 - DNA, 15 bp, Homo sapiens
acctgttatcctgtt

SEQ ID NO: 1635847 - DNA, 15 bp, Homo sapiens
cctgttatcctgttt

SEQ ID NO: 1635848 - DNA, 15 bp, Homo sapiens
ctgttatcctgtttt

SEQ ID NO: 1635849 - DNA, 15 bp, Homo sapiens
tgttatcctgttttt

SEQ ID NO: 1635850 - DNA, 15 bp, Homo sapiens
gttatcctgtttttt

SEQ ID NO: 1635851 - DNA, 15 bp, Homo sapiens
ttatcctgttttttt

SEQ ID NO: 1635852 - DNA, 15 bp, Homo sapiens
tatcctgtttttttc

SEQ ID NO: 1635853 - DNA, 15 bp, Homo sapiens
atcctgtttttttct

SEQ ID NO: 1635854 - DNA, 15 bp, Homo sapiens
tcctgtttttttctg

SEQ ID NO: 1635855 - DNA, 15 bp, Homo sapiens
cctgtttttttctgt

SEQ ID NO: 1635856 - DNA, 15 bp, Homo sapiens
ctgtttttttctgtg

SEQ ID NO: 1635857 - DNA, 15 bp, Homo sapiens
tgtttttttctgtgt

SEQ ID NO: 1635858 - DNA, 15 bp, Homo sapiens
gtttttttctgtgtt

SEQ ID NO: 1635859 - DNA, 15 bp, Homo sapiens
tttttttctgtgttg

SEQ ID NO: 1635860 - DNA, 15 bp, Homo sapiens
ttttttctgtgttgt

SEQ ID NO: 1635861 - DNA, 15 bp, Homo sapiens
tttttctgtgttgtt

SEQ ID NO: 1635862 - DNA, 15 bp, Homo sapiens
ttttctgtgttgtta

SEQ ID NO: 1635863 - DNA, 15 bp, Homo sapiens
tttctgtgttgttaa

SEQ ID NO: 1635864 - DNA, 15 bp, Homo sapiens
ttctgtgttgttaac

SEQ ID NO: 1635865 - DNA, 15 bp, Homo sapiens
tctgtgttgttaact

SEQ ID NO: 1635866 - DNA, 15 bp, Homo sapiens
ctgtgttgttaactt

SEQ ID NO: 1635867 - DNA, 15 bp, Homo sapiens
tgtgttgttaacttc

SEQ ID NO: 1635868 - DNA, 15 bp, Homo sapiens
gtgttgttaacttct

SEQ ID NO: 1635869 - DNA, 15 bp, Homo sapiens
tgttgttaacttctt

SEQ ID NO: 1635870 - DNA, 15 bp, Homo sapiens
gttgttaacttctta

SEQ ID NO: 1635871 - DNA, 15 bp, Homo sapiens
ttgttaacttcttat

SEQ ID NO: 1635872 - DNA, 15 bp, Homo sapiens
tgttaacttcttatc

SEQ ID NO: 1635873 - DNA, 15 bp, Homo sapiens
gttaacttcttatcc

SEQ ID NO: 1635874 - DNA, 15 bp, Homo sapiens
ttaacttcttatccc

SEQ ID NO: 1635875 - DNA, 15 bp, Homo sapiens
taacttcttatccct

SEQ ID NO: 1635876 - DNA, 15 bp, Homo sapiens
aacttcttatccctg

SEQ ID NO: 1635877 - DNA, 15 bp, Homo sapiens
acttcttatccctgg

SEQ ID NO: 1635878 - DNA, 15 bp, Homo sapiens
cttcttatccctggt

SEQ ID NO: 1635879 - DNA, 15 bp, Homo sapiens
ttcttatccctggta

SEQ ID NO: 1635880 - DNA, 15 bp, Homo sapiens
tcttatccctggtac

SEQ ID NO: 1635881 - DNA, 15 bp, Homo sapiens
cttatccctggtact

SEQ ID NO: 1635882 - DNA, 15 bp, Homo sapiens
ttatccctggtactg

SEQ ID NO: 1635883 - DNA, 15 bp, Homo sapiens
tatccctggtactga

SEQ ID NO: 1635884 - DNA, 15 bp, Homo sapiens
atccctggtactgag

SEQ ID NO: 1635885 - DNA, 15 bp, Homo sapiens
tccctggtactgaga

SEQ ID NO: 1635886 - DNA, 15 bp, Homo sapiens
ccctggtactgagaa

SEQ ID NO: 1635887 - DNA, 15 bp, Homo sapiens
cctggtactgagaat

SEQ ID NO: 1635888 - DNA, 15 bp, Homo sapiens
ctggtactgagaata

SEQ ID NO: 1635889 - DNA, 15 bp, Homo sapiens
tggtactgagaatag

SEQ ID NO: 1635890 - DNA, 15 bp, Homo sapiens
ggtactgagaatagc

SEQ ID NO: 1635891 - DNA, 15 bp, Homo sapiens
gtactgagaatagcg

SEQ ID NO: 1635892 - DNA, 15 bp, Homo sapiens
tactgagaatagcgt

SEQ ID NO: 1635893 - DNA, 15 bp, Homo sapiens
actgagaatagcgtc

SEQ ID NO: 1635894 - DNA, 15 bp, Homo sapiens
ctgagaatagcgtct

SEQ ID NO: 1635895 - DNA, 15 bp, Homo sapiens
tgagaatagcgtcta

SEQ ID NO: 1635896 - DNA, 15 bp, Homo sapiens
gagaatagcgtctac

SEQ ID NO: 1635897 - DNA, 15 bp, Homo sapiens
agaatagcgtctaca

SEQ ID NO: 1635898 - DNA, 15 bp, Homo sapiens
gaatagcgtctacaa

SEQ ID NO: 1635899 - DNA, 15 bp, Homo sapiens
aatagcgtctacaat

SEQ ID NO: 1635900 - DNA, 15 bp, Homo sapiens
atagcgtctacaatt

SEQ ID NO: 1635901 - DNA, 15 bp, Homo sapiens
tagcgtctacaattc

SEQ ID NO: 1635902 - DNA, 15 bp, Homo sapiens
agcgtctacaattca

SEQ ID NO: 1635903 - DNA, 15 bp, Homo sapiens
gcgtctacaattcag

SEQ ID NO: 1635904 - DNA, 15 bp, Homo sapiens
cgtctacaattcagt

SEQ ID NO: 1635905 - DNA, 15 bp, Homo sapiens
gtctacaattcagta

SEQ ID NO: 1635906 - DNA, 15 bp, Homo sapiens
tctacaattcagtag

SEQ ID NO: 1635907 - DNA, 15 bp, Homo sapiens
ctacaattcagtagg

SEQ ID NO: 1635908 - DNA, 15 bp, Homo sapiens
tacaattcagtaggt

SEQ ID NO: 1635909 - DNA, 15 bp, Homo sapiens
acaattcagtaggtg

SEQ ID NO: 1635910 - DNA, 15 bp, Homo sapiens
caattcagtaggtgc

SEQ ID NO: 1635911 - DNA, 15 bp, Homo sapiens
aattcagtaggtgct

SEQ ID NO: 1635912 - DNA, 15 bp, Homo sapiens
attcagtaggtgctc

SEQ ID NO: 1635913 - DNA, 15 bp, Homo sapiens
ttcagtaggtgctca

SEQ ID NO: 1635914 - DNA, 15 bp, Homo sapiens
tcagtaggtgctcaa

SEQ ID NO: 1635915 - DNA, 15 bp, Homo sapiens
cagtaggtgctcaag

SEQ ID NO: 1635916 - DNA, 15 bp, Homo sapiens
agtaggtgctcaagt

SEQ ID NO: 1635917 - DNA, 15 bp, Homo sapiens
gtaggtgctcaagtt

SEQ ID NO: 1635918 - DNA, 15 bp, Homo sapiens
taggtgctcaagttt

SEQ ID NO: 1635919 - DNA, 15 bp, Homo sapiens
aggtgctcaagttta

SEQ ID NO: 1635920 - DNA, 15 bp, Homo sapiens
ggtgctcaagtttac

SEQ ID NO: 1635921 - DNA, 15 bp, Homo sapiens
gtgctcaagtttaca

SEQ ID NO: 1635922 - DNA, 15 bp, Homo sapiens
tgctcaagtttacat

SEQ ID NO: 1635923 - DNA, 15 bp, Homo sapiens
gctcaagtttacatg

SEQ ID NO: 1635924 - DNA, 15 bp, Homo sapiens
ctcaagtttacatgt

SEQ ID NO: 1635925 - DNA, 15 bp, Homo sapiens
tcaagtttacatgtg

SEQ ID NO: 1635926 - DNA, 15 bp, Homo sapiens
caagtttacatgtga

SEQ ID NO: 1635927 - DNA, 15 bp, Homo sapiens
aagtttacatgtgac

SEQ ID NO: 1635928 - DNA, 15 bp, Homo sapiens
agtttacatgtgacc

SEQ ID NO: 1635929 - DNA, 15 bp, Homo sapiens
gtttacatgtgacca

SEQ ID NO: 1635930 - DNA, 15 bp, Homo sapiens
tttacatgtgaccaa

SEQ ID NO: 1635931 - DNA, 15 bp, Homo sapiens
ttacatgtgaccaaa

SEQ ID NO: 1635932 - DNA, 15 bp, Homo sapiens
tacatgtgaccaaat

SEQ ID NO: 1635933 - DNA, 15 bp, Homo sapiens
acatgtgaccaaatg

SEQ ID NO: 1635934 - DNA, 15 bp, Homo sapiens
catgtgaccaaatgt

SEQ ID NO: 1635935 - DNA, 15 bp, Homo sapiens
atgtgaccaaatgtt

SEQ ID NO: 1635936 - DNA, 15 bp, Homo sapiens
tgtgaccaaatgttt

SEQ ID NO: 1635937 - DNA, 15 bp, Homo sapiens
gtgaccaaatgttta

SEQ ID NO: 1635938 - DNA, 15 bp, Homo sapiens
tgaccaaatgtttat

SEQ ID NO: 1635939 - DNA, 15 bp, Homo sapiens
gaccaaatgtttata

SEQ ID NO: 1635940 - DNA, 15 bp, Homo sapiens
accaaatgtttataa

SEQ ID NO: 1635941 - DNA, 15 bp, Homo sapiens
ccaaatgtttataaa

SEQ ID NO: 1635942 - DNA, 15 bp, Homo sapiens
caaatgtttataaaa

SEQ ID NO: 1635943 - DNA, 15 bp, Homo sapiens
aaatgtttataaaaa

SEQ ID NO: 1635944 - DNA, 15 bp, Homo sapiens
aatgtttataaaaag

SEQ ID NO: 1635945 - DNA, 15 bp, Homo sapiens
atgtttataaaaagg

SEQ ID NO: 1635946 - DNA, 15 bp, Homo sapiens
tgtttataaaaagga

SEQ ID NO: 1635947 - DNA, 15 bp, Homo sapiens
gtttataaaaaggag

SEQ ID NO: 1635948 - DNA, 15 bp, Homo sapiens
tttataaaaaggaga

SEQ ID NO: 1635949 - DNA, 15 bp, Homo sapiens
ttataaaaaggagaa

SEQ ID NO: 1635950 - DNA, 15 bp, Homo sapiens
tataaaaaggagaat

SEQ ID NO: 1635951 - DNA, 15 bp, Homo sapiens
ataaaaaggagaata

SEQ ID NO: 1635952 - DNA, 15 bp, Homo sapiens
taaaaaggagaataa

SEQ ID NO: 1635953 - DNA, 15 bp, Homo sapiens
aaaaaggagaataat

SEQ ID NO: 1635954 - DNA, 15 bp, Homo sapiens
aaaaggagaataata

SEQ ID NO: 1635955 - DNA, 15 bp, Homo sapiens
aaaggagaataataa

SEQ ID NO: 1635956 - DNA, 15 bp, Homo sapiens
aaggagaataataat

SEQ ID NO: 1635957 - DNA, 15 bp, Homo sapiens
aggagaataataatg

SEQ ID NO: 1635958 - DNA, 15 bp, Homo sapiens
ggagaataataatgt

SEQ ID NO: 1635959 - DNA, 15 bp, Homo sapiens
gagaataataatgtg

SEQ ID NO: 1635960 - DNA, 15 bp, Homo sapiens
agaataataatgtgg

SEQ ID NO: 1635961 - DNA, 15 bp, Homo sapiens
gaataataatgtggt

SEQ ID NO: 1635962 - DNA, 15 bp, Homo sapiens
aataataatgtggtg

SEQ ID NO: 1635963 - DNA, 15 bp, Homo sapiens
ataataatgtggtga

SEQ ID NO: 1635964 - DNA, 15 bp, Homo sapiens
taataatgtggtgaa

SEQ ID NO: 1635965 - DNA, 15 bp, Homo sapiens
aataatgtggtgaaa

SEQ ID NO: 1635966 - DNA, 15 bp, Homo sapiens
ataatgtggtgaaag

SEQ ID NO: 1635967 - DNA, 15 bp, Homo sapiens
taatgtggtgaaaga

SEQ ID NO: 1635968 - DNA, 15 bp, Homo sapiens
aatgtggtgaaagaa

SEQ ID NO: 1635969 - DNA, 15 bp, Homo sapiens
atgtggtgaaagaag

SEQ ID NO: 1635970 - DNA, 15 bp, Homo sapiens
tgtggtgaaagaagg

SEQ ID NO: 1635971 - DNA, 15 bp, Homo sapiens
gtggtgaaagaagga

SEQ ID NO: 1635972 - DNA, 15 bp, Homo sapiens
tggtgaaagaaggac

SEQ ID NO: 1635973 - DNA, 15 bp, Homo sapiens
ggtgaaagaaggaca

SEQ ID NO: 1635974 - DNA, 15 bp, Homo sapiens
gtgaaagaaggacag

SEQ ID NO: 1635975 - DNA, 15 bp, Homo sapiens
tgaaagaaggacagg

SEQ ID NO: 1635976 - DNA, 15 bp, Homo sapiens
gaaagaaggacagga

SEQ ID NO: 1635977 - DNA, 15 bp, Homo sapiens
aaagaaggacaggag

SEQ ID NO: 1635978 - DNA, 15 bp, Homo sapiens
aagaaggacaggagt

SEQ ID NO: 1635979 - DNA, 15 bp, Homo sapiens
agaaggacaggagtg

SEQ ID NO: 1635980 - DNA, 15 bp, Homo sapiens
gaaggacaggagtgt

SEQ ID NO: 1635981 - DNA, 15 bp, Homo sapiens
aaggacaggagtgtt

SEQ ID NO: 1635982 - DNA, 15 bp, Homo sapiens
aggacaggagtgttc

SEQ ID NO: 1635983 - DNA, 15 bp, Homo sapiens
ggacaggagtgttca

SEQ ID NO: 1635984 - DNA, 15 bp, Homo sapiens
gacaggagtgttcag

SEQ ID NO: 1635985 - DNA, 15 bp, Homo sapiens
acaggagtgttcagc

SEQ ID NO: 1635986 - DNA, 15 bp, Homo sapiens
caggagtgttcagcc

SEQ ID NO: 1635987 - DNA, 15 bp, Homo sapiens
aggagtgttcagcca

SEQ ID NO: 1635988 - DNA, 15 bp, Homo sapiens
ggagtgttcagccaa

SEQ ID NO: 1635989 - DNA, 15 bp, Homo sapiens
gagtgttcagccaaa

SEQ ID NO: 1635990 - DNA, 15 bp, Homo sapiens
agtgttcagccaaat

SEQ ID NO: 1635991 - DNA, 15 bp, Homo sapiens
gtgttcagccaaatt

SEQ ID NO: 1635992 - DNA, 15 bp, Homo sapiens
tgttcagccaaattt

SEQ ID NO: 1635993 - DNA, 15 bp, Homo sapiens
gttcagccaaatttt

SEQ ID NO: 1635994 - DNA, 15 bp, Homo sapiens
ttcagccaaattttg

SEQ ID NO: 1635995 - DNA, 15 bp, Homo sapiens
tcagccaaattttgg

SEQ ID NO: 1635996 - DNA, 15 bp, Homo sapiens
cagccaaattttgga

SEQ ID NO: 1635997 - DNA, 15 bp, Homo sapiens
agccaaattttggat

SEQ ID NO: 1635998 - DNA, 15 bp, Homo sapiens
gccaaattttggatt

SEQ ID NO: 1635999 - DNA, 15 bp, Homo sapiens
ccaaattttggattg

SEQ ID NO: 1636000 - DNA, 15 bp, Homo sapiens
caaattttggattgg

SEQ ID NO: 1636001 - DNA, 15 bp, Homo sapiens
aaattttggattgga

SEQ ID NO: 1636002 - DNA, 15 bp, Homo sapiens
aattttggattggat

SEQ ID NO: 1636003 - DNA, 15 bp, Homo sapiens
attttggattggatg

SEQ ID NO: 1636004 - DNA, 15 bp, Homo sapiens
ttttggattggatga

SEQ ID NO: 1636005 - DNA, 15 bp, Homo sapiens
tttggattggatgag

SEQ ID NO: 1636006 - DNA, 15 bp, Homo sapiens
ttggattggatgaga

SEQ ID NO: 1636007 - DNA, 15 bp, Homo sapiens
tggattggatgagaa

SEQ ID NO: 1636008 - DNA, 15 bp, Homo sapiens
ggattggatgagaag

SEQ ID NO: 1636009 - DNA, 15 bp, Homo sapiens
gattggatgagaagg

SEQ ID NO: 1636010 - DNA, 15 bp, Homo sapiens
attggatgagaaggc

SEQ ID NO: 1636011 - DNA, 15 bp, Homo sapiens
ttggatgagaaggca

SEQ ID NO: 1636012 - DNA, 15 bp, Homo sapiens
tggatgagaaggcag

SEQ ID NO: 1636013 - DNA, 15 bp, Homo sapiens
ggatgagaaggcaga

SEQ ID NO: 1636014 - DNA, 15 bp, Homo sapiens
gatgagaaggcagat

SEQ ID NO: 1636015 - DNA, 15 bp, Homo sapiens
atgagaaggcagatt

SEQ ID NO: 1636016 - DNA, 15 bp, Homo sapiens
tgagaaggcagattg

SEQ ID NO: 1636017 - DNA, 15 bp, Homo sapiens
gagaaggcagattgt

SEQ ID NO: 1636018 - DNA, 15 bp, Homo sapiens
agaaggcagattgtc

SEQ ID NO: 1636019 - DNA, 15 bp, Homo sapiens
gaaggcagattgtca

SEQ ID NO: 1636020 - DNA, 15 bp, Homo sapiens
aaggcagattgtcag

SEQ ID NO: 1636021 - DNA, 15 bp, Homo sapiens
aggcagattgtcagg

SEQ ID NO: 1636022 - DNA, 15 bp, Homo sapiens
ggcagattgtcaggg

SEQ ID NO: 1636023 - DNA, 15 bp, Homo sapiens
gcagattgtcaggga

SEQ ID NO: 1636024 - DNA, 15 bp, Homo sapiens
cagattgtcagggat

SEQ ID NO: 1636025 - DNA, 15 bp, Homo sapiens
agattgtcagggata

SEQ ID NO: 1636026 - DNA, 15 bp, Homo sapiens
gattgtcagggatat

SEQ ID NO: 1636027 - DNA, 15 bp, Homo sapiens
attgtcagggatatc

SEQ ID NO: 1636028 - DNA, 15 bp, Homo sapiens
ttgtcagggatatca

SEQ ID NO: 1636029 - DNA, 15 bp, Homo sapiens
tgtcagggatatcat

SEQ ID NO: 1636030 - DNA, 15 bp, Homo sapiens
gtcagggatatcatg

SEQ ID NO: 1636031 - DNA, 15 bp, Homo sapiens
tcagggatatcatga

SEQ ID NO: 1636032 - DNA, 15 bp, Homo sapiens
cagggatatcatgac

SEQ ID NO: 1636033 - DNA, 15 bp, Homo sapiens
agggatatcatgacc

SEQ ID NO: 1636034 - DNA, 15 bp, Homo sapiens
gggatatcatgaccc

SEQ ID NO: 1636035 - DNA, 15 bp, Homo sapiens
ggatatcatgaccca

SEQ ID NO: 1636036 - DNA, 15 bp, Homo sapiens
gatatcatgacccaa

SEQ ID NO: 1636037 - DNA, 15 bp, Homo sapiens
atatcatgacccaaa

SEQ ID NO: 1636038 - DNA, 15 bp, Homo sapiens
tatcatgacccaaac

SEQ ID NO: 1636039 - DNA, 15 bp, Homo sapiens
atcatgacccaaaca

SEQ ID NO: 1636040 - DNA, 15 bp, Homo sapiens
tcatgacccaaacaa

SEQ ID NO: 1636041 - DNA, 15 bp, Homo sapiens
catgacccaaacaaa

SEQ ID NO: 1636042 - DNA, 15 bp, Homo sapiens
atgacccaaacaaag

SEQ ID NO: 1636043 - DNA, 15 bp, Homo sapiens
tgacccaaacaaagg

SEQ ID NO: 1636044 - DNA, 15 bp, Homo sapiens
gacccaaacaaaggt

SEQ ID NO: 1636045 - DNA, 15 bp, Homo sapiens
acccaaacaaaggtg

SEQ ID NO: 1636046 - DNA, 15 bp, Homo sapiens
cccaaacaaaggtgg

SEQ ID NO: 1636047 - DNA, 15 bp, Homo sapiens
ccaaacaaaggtgga

SEQ ID NO: 1636048 - DNA, 15 bp, Homo sapiens
caaacaaaggtggag

SEQ ID NO: 1636049 - DNA, 15 bp, Homo sapiens
aaacaaaggtggaga

SEQ ID NO: 1636050 - DNA, 15 bp, Homo sapiens
aacaaaggtggagag

SEQ ID NO: 1636051 - DNA, 15 bp, Homo sapiens
acaaaggtggagaga

SEQ ID NO: 1636052 - DNA, 15 bp, Homo sapiens
caaaggtggagagac

SEQ ID NO: 1636053 - DNA, 15 bp, Homo sapiens
aaaggtggagagaca

SEQ ID NO: 1636054 - DNA, 15 bp, Homo sapiens
aaggtggagagacac

SEQ ID NO: 1636055 - DNA, 15 bp, Homo sapiens
aggtggagagacacc

SEQ ID NO: 1636056 - DNA, 15 bp, Homo sapiens
ggtggagagacacca

SEQ ID NO: 1636057 - DNA, 15 bp, Homo sapiens
gtggagagacaccag

SEQ ID NO: 1636058 - DNA, 15 bp, Homo sapiens
tggagagacaccaga

SEQ ID NO: 1636059 - DNA, 15 bp, Homo sapiens
ggagagacaccagat

SEQ ID NO: 1636060 - DNA, 15 bp, Homo sapiens
gagagacaccagatt

SEQ ID NO: 1636061 - DNA, 15 bp, Homo sapiens
agagacaccagatta

SEQ ID NO: 1636062 - DNA, 15 bp, Homo sapiens
gagacaccagattag

SEQ ID NO: 1636063 - DNA, 15 bp, Homo sapiens
agacaccagattagg

SEQ ID NO: 1636064 - DNA, 15 bp, Homo sapiens
gacaccagattaggg

SEQ ID NO: 1636065 - DNA, 15 bp, Homo sapiens
acaccagattaggga

SEQ ID NO: 1636066 - DNA, 15 bp, Homo sapiens
caccagattagggag

SEQ ID NO: 1636067 - DNA, 15 bp, Homo sapiens
accagattagggagg

SEQ ID NO: 1636068 - DNA, 15 bp, Homo sapiens
ccagattagggagga

SEQ ID NO: 1636069 - DNA, 15 bp, Homo sapiens
cagattagggaggag

SEQ ID NO: 1636070 - DNA, 15 bp, Homo sapiens
agattagggaggagc

SEQ ID NO: 1636071 - DNA, 15 bp, Homo sapiens
gattagggaggagcc

SEQ ID NO: 1636072 - DNA, 15 bp, Homo sapiens
attagggaggagcca

SEQ ID NO: 1636073 - DNA, 15 bp, Homo sapiens
ttagggaggagccag

SEQ ID NO: 1636074 - DNA, 15 bp, Homo sapiens
tagggaggagccagg

SEQ ID NO: 1636075 - DNA, 15 bp, Homo sapiens
agggaggagccaggt

SEQ ID NO: 1636076 - DNA, 15 bp, Homo sapiens
gggaggagccaggtt

SEQ ID NO: 1636077 - DNA, 15 bp, Homo sapiens
ggaggagccaggttc

SEQ ID NO: 1636078 - DNA, 15 bp, Homo sapiens
gaggagccaggttct

SEQ ID NO: 1636079 - DNA, 15 bp, Homo sapiens
aggagccaggttctc

SEQ ID NO: 1636080 - DNA, 15 bp, Homo sapiens
ggagccaggttctcc

SEQ ID NO: 1636081 - DNA, 15 bp, Homo sapiens
gagccaggttctcca

SEQ ID NO: 1636082 - DNA, 15 bp, Homo sapiens
agccaggttctccag

SEQ ID NO: 1636083 - DNA, 15 bp, Homo sapiens
gccaggttctccaga

SEQ ID NO: 1636084 - DNA, 15 bp, Homo sapiens
ccaggttctccagag

SEQ ID NO: 1636085 - DNA, 15 bp, Homo sapiens
caggttctccagaga

SEQ ID NO: 1636086 - DNA, 15 bp, Homo sapiens
aggttctccagagag

SEQ ID NO: 1636087 - DNA, 15 bp, Homo sapiens
ggttctccagagagg

SEQ ID NO: 1636088 - DNA, 15 bp, Homo sapiens
gttctccagagagga

SEQ ID NO: 1636089 - DNA, 15 bp, Homo sapiens
ttctccagagaggac

SEQ ID NO: 1636090 - DNA, 15 bp, Homo sapiens
tctccagagaggacc

SEQ ID NO: 1636091 - DNA, 15 bp, Homo sapiens
ctccagagaggacct

SEQ ID NO: 1636092 - DNA, 15 bp, Homo sapiens
tccagagaggacctg

SEQ ID NO: 1636093 - DNA, 15 bp, Homo sapiens
ccagagaggacctga

SEQ ID NO: 1636094 - DNA, 15 bp, Homo sapiens
cagagaggacctgag

SEQ ID NO: 1636095 - DNA, 15 bp, Homo sapiens
agagaggacctgagt

SEQ ID NO: 1636096 - DNA, 15 bp, Homo sapiens
gagaggacctgagtt

SEQ ID NO: 1636097 - DNA, 15 bp, Homo sapiens
agaggacctgagttc

SEQ ID NO: 1636098 - DNA, 15 bp, Homo sapiens
gaggacctgagttca

SEQ ID NO: 1636099 - DNA, 15 bp, Homo sapiens
aggacctgagttcag

SEQ ID NO: 1636100 - DNA, 15 bp, Homo sapiens
ggacctgagttcaga

SEQ ID NO: 1636101 - DNA, 15 bp, Homo sapiens
gacctgagttcagaa

SEQ ID NO: 1636102 - DNA, 15 bp, Homo sapiens
acctgagttcagaag

SEQ ID NO: 1636103 - DNA, 15 bp, Homo sapiens
cctgagttcagaagg

SEQ ID NO: 1636104 - DNA, 15 bp, Homo sapiens
ctgagttcagaagga

SEQ ID NO: 1636105 - DNA, 15 bp, Homo sapiens
tgagttcagaaggag

SEQ ID NO: 1636106 - DNA, 15 bp, Homo sapiens
gagttcagaaggagc

SEQ ID NO: 1636107 - DNA, 15 bp, Homo sapiens
agttcagaaggagca

SEQ ID NO: 1636108 - DNA, 15 bp, Homo sapiens
gttcagaaggagcac

SEQ ID NO: 1636109 - DNA, 15 bp, Homo sapiens
ttcagaaggagcaca

SEQ ID NO: 1636110 - DNA, 15 bp, Homo sapiens
tcagaaggagcacag

SEQ ID NO: 1636111 - DNA, 15 bp, Homo sapiens
cagaaggagcacagg

SEQ ID NO: 1636112 - DNA, 15 bp, Homo sapiens
agaaggagcacagga

SEQ ID NO: 1636113 - DNA, 15 bp, Homo sapiens
gaaggagcacaggag

SEQ ID NO: 1636114 - DNA, 15 bp, Homo sapiens
aaggagcacaggagc

SEQ ID NO: 1636115 - DNA, 15 bp, Homo sapiens
aggagcacaggagca

SEQ ID NO: 1636116 - DNA, 15 bp, Homo sapiens
ggagcacaggagcag

SEQ ID NO: 1636117 - DNA, 15 bp, Homo sapiens
gagcacaggagcaga

SEQ ID NO: 1636118 - DNA, 15 bp, Homo sapiens
agcacaggagcagag

SEQ ID NO: 1636119 - DNA, 15 bp, Homo sapiens
gcacaggagcagagc

SEQ ID NO: 1636120 - DNA, 15 bp, Homo sapiens
cacaggagcagagcc

SEQ ID NO: 1636121 - DNA, 15 bp, Homo sapiens
acaggagcagagcct

SEQ ID NO: 1636122 - DNA, 15 bp, Homo sapiens
caggagcagagcctt

SEQ ID NO: 1636123 - DNA, 15 bp, Homo sapiens
aggagcagagccttt

SEQ ID NO: 1636124 - DNA, 15 bp, Homo sapiens
ggagcagagcctttg

SEQ ID NO: 1636125 - DNA, 15 bp, Homo sapiens
gagcagagcctttgt

SEQ ID NO: 1636126 - DNA, 15 bp, Homo sapiens
agcagagcctttgtt

SEQ ID NO: 1636127 - DNA, 15 bp, Homo sapiens
gcagagcctttgtta

SEQ ID NO: 1636128 - DNA, 15 bp, Homo sapiens
cagagcctttgttat

SEQ ID NO: 1636129 - DNA, 15 bp, Homo sapiens
agagcctttgttatt

SEQ ID NO: 1636130 - DNA, 15 bp, Homo sapiens
gagcctttgttattt

SEQ ID NO: 1636131 - DNA, 15 bp, Homo sapiens
agcctttgttattta

SEQ ID NO: 1636132 - DNA, 15 bp, Homo sapiens
gcctttgttatttag

SEQ ID NO: 1636133 - DNA, 15 bp, Homo sapiens
cctttgttatttagg

SEQ ID NO: 1636134 - DNA, 15 bp, Homo sapiens
ctttgttatttagga

SEQ ID NO: 1636135 - DNA, 15 bp, Homo sapiens
tttgttatttaggat

SEQ ID NO: 1636136 - DNA, 15 bp, Homo sapiens
ttgttatttaggatg

SEQ ID NO: 1636137 - DNA, 15 bp, Homo sapiens
tgttatttaggatgc

SEQ ID NO: 1636138 - DNA, 15 bp, Homo sapiens
gttatttaggatgca

SEQ ID NO: 1636139 - DNA, 15 bp, Homo sapiens
ttatttaggatgcaa

SEQ ID NO: 1636140 - DNA, 15 bp, Homo sapiens
tatttaggatgcaaa

SEQ ID NO: 1636141 - DNA, 15 bp, Homo sapiens
atttaggatgcaaac

SEQ ID NO: 1636142 - DNA, 15 bp, Homo sapiens
tttaggatgcaaact

SEQ ID NO: 1636143 - DNA, 15 bp, Homo sapiens
ttaggatgcaaactc

SEQ ID NO: 1636144 - DNA, 15 bp, Homo sapiens
taggatgcaaactct

SEQ ID NO: 1636145 - DNA, 15 bp, Homo sapiens
aggatgcaaactctc

SEQ ID NO: 1636146 - DNA, 15 bp, Homo sapiens
ggatgcaaactctcc

SEQ ID NO: 1636147 - DNA, 15 bp, Homo sapiens
gatgcaaactctccc

SEQ ID NO: 1636148 - DNA, 15 bp, Homo sapiens
atgcaaactctccca

SEQ ID NO: 1636149 - DNA, 15 bp, Homo sapiens
tgcaaactctcccac

SEQ ID NO: 1636150 - DNA, 15 bp, Homo sapiens
gcaaactctcccact

SEQ ID NO: 1636151 - DNA, 15 bp, Homo sapiens
caaactctcccactc

SEQ ID NO: 1636152 - DNA, 15 bp, Homo sapiens
aaactctcccactcc

SEQ ID NO: 1636153 - DNA, 15 bp, Homo sapiens
aactctcccactccc

SEQ ID NO: 1636154 - DNA, 15 bp, Homo sapiens
actctcccactccca

SEQ ID NO: 1636155 - DNA, 15 bp, Homo sapiens
ctctcccactcccat

SEQ ID NO: 1636156 - DNA, 15 bp, Homo sapiens
tctcccactcccata

SEQ ID NO: 1636157 - DNA, 15 bp, Homo sapiens
ctcccactcccatac

SEQ ID NO: 1636158 - DNA, 15 bp, Homo sapiens
tcccactcccataca

SEQ ID NO: 1636159 - DNA, 15 bp, Homo sapiens
cccactcccatacac

SEQ ID NO: 1636160 - DNA, 15 bp, Homo sapiens
ccactcccatacact

SEQ ID NO: 1636161 - DNA, 15 bp, Homo sapiens
cactcccatacactg

SEQ ID NO: 1636162 - DNA, 15 bp, Homo sapiens
actcccatacactga

SEQ ID NO: 1636163 - DNA, 15 bp, Homo sapiens
ctcccatacactgaa

SEQ ID NO: 1636164 - DNA, 15 bp, Homo sapiens
tcccatacactgaag

SEQ ID NO: 1636165 - DNA, 15 bp, Homo sapiens
cccatacactgaagt

SEQ ID NO: 1636166 - DNA, 15 bp, Homo sapiens
ccatacactgaagtg

SEQ ID NO: 1636167 - DNA, 15 bp, Homo sapiens
catacactgaagtgt

SEQ ID NO: 1636168 - DNA, 15 bp, Homo sapiens
atacactgaagtgtg

SEQ ID NO: 1636169 - DNA, 15 bp, Homo sapiens
tacactgaagtgtgg

SEQ ID NO: 1636170 - DNA, 15 bp, Homo sapiens
acactgaagtgtggt

SEQ ID NO: 1636171 - DNA, 15 bp, Homo sapiens
cactgaagtgtggtg

SEQ ID NO: 1636172 - DNA, 15 bp, Homo sapiens
actgaagtgtggtgc

SEQ ID NO: 1636173 - DNA, 15 bp, Homo sapiens
ctgaagtgtggtgct

SEQ ID NO: 1636174 - DNA, 15 bp, Homo sapiens
tgaagtgtggtgctg

SEQ ID NO: 1636175 - DNA, 15 bp, Homo sapiens
gaagtgtggtgctgt

SEQ ID NO: 1636176 - DNA, 15 bp, Homo sapiens
aagtgtggtgctgtc

SEQ ID NO: 1636177 - DNA, 15 bp, Homo sapiens
agtgtggtgctgtct

SEQ ID NO: 1636178 - DNA, 15 bp, Homo sapiens
gtgtggtgctgtctt

SEQ ID NO: 1636179 - DNA, 15 bp, Homo sapiens
tgtggtgctgtcttg

SEQ ID NO: 1636180 - DNA, 15 bp, Homo sapiens
gtggtgctgtcttgg

SEQ ID NO: 1636181 - DNA, 15 bp, Homo sapiens
tggtgctgtcttggc

SEQ ID NO: 1636182 - DNA, 15 bp, Homo sapiens
ggtgctgtcttggca

SEQ ID NO: 1636183 - DNA, 15 bp, Homo sapiens
gtgctgtcttggcag

SEQ ID NO: 1636184 - DNA, 15 bp, Homo sapiens
tgctgtcttggcagc

SEQ ID NO: 1636185 - DNA, 15 bp, Homo sapiens
gctgtcttggcagct

SEQ ID NO: 1636186 - DNA, 15 bp, Homo sapiens
ctgtcttggcagctg

SEQ ID NO: 1636187 - DNA, 15 bp, Homo sapiens
tgtcttggcagctgt

SEQ ID NO: 1636188 - DNA, 15 bp, Homo sapiens
gtcttggcagctgtg

SEQ ID NO: 1636189 - DNA, 15 bp, Homo sapiens
tcttggcagctgtgt

SEQ ID NO: 1636190 - DNA, 15 bp, Homo sapiens
cttggcagctgtgtg

SEQ ID NO: 1636191 - DNA, 15 bp, Homo sapiens
ttggcagctgtgtgt

SEQ ID NO: 1636192 - DNA, 15 bp, Homo sapiens
tggcagctgtgtgtt

SEQ ID NO: 1636193 - DNA, 15 bp, Homo sapiens
ggcagctgtgtgttg

SEQ ID NO: 1636194 - DNA, 15 bp, Homo sapiens
gcagctgtgtgttga

SEQ ID NO: 1636195 - DNA, 15 bp, Homo sapiens
cagctgtgtgttgaa

SEQ ID NO: 1636196 - DNA, 15 bp, Homo sapiens
agctgtgtgttgaac

SEQ ID NO: 1636197 - DNA, 15 bp, Homo sapiens
gctgtgtgttgaacc

SEQ ID NO: 1636198 - DNA, 15 bp, Homo sapiens
ctgtgtgttgaacct

SEQ ID NO: 1636199 - DNA, 15 bp, Homo sapiens
tgtgtgttgaacctc

SEQ ID NO: 1636200 - DNA, 15 bp, Homo sapiens
gtgtgttgaacctct

SEQ ID NO: 1636201 - DNA, 15 bp, Homo sapiens
tgtgttgaacctctc

SEQ ID NO: 1636202 - DNA, 15 bp, Homo sapiens
gtgttgaacctctct

SEQ ID NO: 1636203 - DNA, 15 bp, Homo sapiens
tgttgaacctctctc

SEQ ID NO: 1636204 - DNA, 15 bp, Homo sapiens
gttgaacctctctcc

SEQ ID NO: 1636205 - DNA, 15 bp, Homo sapiens
ttgaacctctctccc

SEQ ID NO: 1636206 - DNA, 15 bp, Homo sapiens
tgaacctctctccct

SEQ ID NO: 1636207 - DNA, 15 bp, Homo sapiens
gaacctctctcccta

SEQ ID NO: 1636208 - DNA, 15 bp, Homo sapiens
aacctctctccctac

SEQ ID NO: 1636209 - DNA, 15 bp, Homo sapiens
acctctctccctacc

SEQ ID NO: 1636210 - DNA, 15 bp, Homo sapiens
cctctctccctaccc

SEQ ID NO: 1636211 - DNA, 15 bp, Homo sapiens
ctctctccctacccc

SEQ ID NO: 1636212 - DNA, 15 bp, Homo sapiens
tctctccctacccca

SEQ ID NO: 1636213 - DNA, 15 bp, Homo sapiens
ctctccctaccccag

SEQ ID NO: 1636214 - DNA, 15 bp, Homo sapiens
tctccctaccccaga

SEQ ID NO: 1636215 - DNA, 15 bp, Homo sapiens
ctccctaccccagag

SEQ ID NO: 1636216 - DNA, 15 bp, Homo sapiens
tccctaccccagaga

SEQ ID NO: 1636217 - DNA, 15 bp, Homo sapiens
ccctaccccagagaa

SEQ ID NO: 1636218 - DNA, 15 bp, Homo sapiens
cctaccccagagaag

SEQ ID NO: 1636219 - DNA, 15 bp, Homo sapiens
ctaccccagagaaga

SEQ ID NO: 1636220 - DNA, 15 bp, Homo sapiens
taccccagagaagaa

SEQ ID NO: 1636221 - DNA, 15 bp, Homo sapiens
accccagagaagaaa

SEQ ID NO: 1636222 - DNA, 15 bp, Homo sapiens
ccccagagaagaaac

SEQ ID NO: 1636223 - DNA, 15 bp, Homo sapiens
cccagagaagaaacc

SEQ ID NO: 1636224 - DNA, 15 bp, Homo sapiens
ccagagaagaaacct

SEQ ID NO: 1636225 - DNA, 15 bp, Homo sapiens
cagagaagaaacctc

SEQ ID NO: 1636226 - DNA, 15 bp, Homo sapiens
agagaagaaacctca

SEQ ID NO: 1636227 - DNA, 15 bp, Homo sapiens
gagaagaaacctcat

SEQ ID NO: 1636228 - DNA, 15 bp, Homo sapiens
agaagaaacctcata

SEQ ID NO: 1636229 - DNA, 15 bp, Homo sapiens
gaagaaacctcatac

SEQ ID NO: 1636230 - DNA, 15 bp, Homo sapiens
aagaaacctcatacg

SEQ ID NO: 1636231 - DNA, 15 bp, Homo sapiens
agaaacctcatacgt

SEQ ID NO: 1636232 - DNA, 15 bp, Homo sapiens
gaaacctcatacgta

SEQ ID NO: 1636233 - DNA, 15 bp, Homo sapiens
aaacctcatacgtac

SEQ ID NO: 1636234 - DNA, 15 bp, Homo sapiens
aacctcatacgtact

SEQ ID NO: 1636235 - DNA, 15 bp, Homo sapiens
acctcatacgtactt

SEQ ID NO: 1636236 - DNA, 15 bp, Homo sapiens
cctcatacgtacttg

SEQ ID NO: 1636237 - DNA, 15 bp, Homo sapiens
ctcatacgtacttgg

SEQ ID NO: 1636238 - DNA, 15 bp, Homo sapiens
tcatacgtacttggt

SEQ ID NO: 1636239 - DNA, 15 bp, Homo sapiens
catacgtacttggtg

SEQ ID NO: 1636240 - DNA, 15 bp, Homo sapiens
atacgtacttggtga

SEQ ID NO: 1636241 - DNA, 15 bp, Homo sapiens
tacgtacttggtgat

SEQ ID NO: 1636242 - DNA, 15 bp, Homo sapiens
acgtacttggtgatt

SEQ ID NO: 1636243 - DNA, 15 bp, Homo sapiens
cgtacttggtgattt

SEQ ID NO: 1636244 - DNA, 15 bp, Homo sapiens
gtacttggtgatttt

SEQ ID NO: 1636245 - DNA, 15 bp, Homo sapiens
tacttggtgattttc

SEQ ID NO: 1636246 - DNA, 15 bp, Homo sapiens
acttggtgattttct

SEQ ID NO: 1636247 - DNA, 15 bp, Homo sapiens
cttggtgattttctt

SEQ ID NO: 1636248 - DNA, 15 bp, Homo sapiens
ttggtgattttcttt

SEQ ID NO: 1636249 - DNA, 15 bp, Homo sapiens
tggtgattttctttt

SEQ ID NO: 1636250 - DNA, 15 bp, Homo sapiens
ggtgattttcttttt

SEQ ID NO: 1636251 - DNA, 15 bp, Homo sapiens
gtgattttcttttta

SEQ ID NO: 1636252 - DNA, 15 bp, Homo sapiens
tgattttctttttaa

SEQ ID NO: 1636253 - DNA, 15 bp, Homo sapiens
gattttctttttaag

SEQ ID NO: 1636254 - DNA, 15 bp, Homo sapiens
attttctttttaagt

SEQ ID NO: 1636255 - DNA, 15 bp, Homo sapiens
ttttctttttaagtt

SEQ ID NO: 1636256 - DNA, 15 bp, Homo sapiens
tttctttttaagttt

SEQ ID NO: 1636257 - DNA, 15 bp, Homo sapiens
ttctttttaagtttt

SEQ ID NO: 1636258 - DNA, 15 bp, Homo sapiens
tctttttaagttttt

SEQ ID NO: 1636259 - DNA, 15 bp, Homo sapiens
ctttttaagtttttt

SEQ ID NO: 1636260 - DNA, 15 bp, Homo sapiens
tttttaagtttttta

SEQ ID NO: 1636261 - DNA, 15 bp, Homo sapiens
ttttaagttttttat

SEQ ID NO: 1636262 - DNA, 15 bp, Homo sapiens
tttaagttttttatt

SEQ ID NO: 1636263 - DNA, 15 bp, Homo sapiens
ttaagttttttattt

SEQ ID NO: 1636264 - DNA, 15 bp, Homo sapiens
taagttttttatttt

SEQ ID NO: 1636265 - DNA, 15 bp, Homo sapiens
aagttttttattttt

SEQ ID NO: 1636266 - DNA, 15 bp, Homo sapiens
agttttttattttta

SEQ ID NO: 1636267 - DNA, 15 bp, Homo sapiens
gttttttatttttat

SEQ ID NO: 1636268 - DNA, 15 bp, Homo sapiens
ttttttatttttatt

SEQ ID NO: 1636269 - DNA, 15 bp, Homo sapiens
tttttatttatttgt

SEQ ID NO: 1636270 - DNA, 15 bp, Homo sapiens
ttttatttatttgtt

SEQ ID NO: 1636271 - DNA, 15 bp, Homo sapiens
tttatttatttgttt

SEQ ID NO: 1636272 - DNA, 15 bp, Homo sapiens
ttatttatttgttta

SEQ ID NO: 1636273 - DNA, 15 bp, Homo sapiens
tatttatttgtttat

SEQ ID NO: 1636274 - DNA, 15 bp, Homo sapiens
atttatttgtttatg

SEQ ID NO: 1636275 - DNA, 15 bp, Homo sapiens
tttatttgtttatgt

SEQ ID NO: 1636276 - DNA, 15 bp, Homo sapiens
ttatttgtttatgta

SEQ ID NO: 1636277 - DNA, 15 bp, Homo sapiens
tatttgtttatgtat

SEQ ID NO: 1636278 - DNA, 15 bp, Homo sapiens
atttgtttatgtatt

SEQ ID NO: 1636279 - DNA, 15 bp, Homo sapiens
tttgtttatgtattt

SEQ ID NO: 1636280 - DNA, 15 bp, Homo sapiens
ttgtttatgtattta

SEQ ID NO: 1636281 - DNA, 15 bp, Homo sapiens
tgtttatgtatttat

SEQ ID NO: 1636282 - DNA, 15 bp, Homo sapiens
gtttatgtatttatg

SEQ ID NO: 1636283 - DNA, 15 bp, Homo sapiens
tttatgtatttatgt

SEQ ID NO: 1636284 - DNA, 15 bp, Homo sapiens
ttatgtatttatgta

SEQ ID NO: 1636285 - DNA, 15 bp, Homo sapiens
tatgtatttatgtat

SEQ ID NO: 1636286 - DNA, 15 bp, Homo sapiens
atgtatttatgtatg

SEQ ID NO: 1636287 - DNA, 15 bp, Homo sapiens
tgtatttatgtatgt

SEQ ID NO: 1636288 - DNA, 15 bp, Homo sapiens
gtatttatgtatgta

SEQ ID NO: 1636289 - DNA, 15 bp, Homo sapiens
tatttatgtatgtat

SEQ ID NO: 1636290 - DNA, 15 bp, Homo sapiens
atttatgtatgtatg

SEQ ID NO: 1636291 - DNA, 15 bp, Homo sapiens
tttatgtatgtatgt

SEQ ID NO: 1636292 - DNA, 15 bp, Homo sapiens
ttatgtatgtatgta

SEQ ID NO: 1636293 - DNA, 15 bp, Homo sapiens
tatgtatgtatgtat

SEQ ID NO: 1636294 - DNA, 15 bp, Homo sapiens
atgtatgtatgtatg

SEQ ID NO: 1636295 - DNA, 15 bp, Homo sapiens
tgtatgtatgtatgt

SEQ ID NO: 1636296 - DNA, 15 bp, Homo sapiens
gtatgtatgtatgta

SEQ ID NO: 1636297 - DNA, 15 bp, Homo sapiens
atgtatgtatgtatt

SEQ ID NO: 1636298 - DNA, 15 bp, Homo sapiens
tgtatgtatgtattt

SEQ ID NO: 1636299 - DNA, 15 bp, Homo sapiens
gtatgtatgtatttt

SEQ ID NO: 1636300 - DNA, 15 bp, Homo sapiens
tatgtatgtattttt

SEQ ID NO: 1636301 - DNA, 15 bp, Homo sapiens
atgtatgtattttta

SEQ ID NO: 1636302 - DNA, 15 bp, Homo sapiens
tgtatgtatttttat

SEQ ID NO: 1636303 - DNA, 15 bp, Homo sapiens
gtatgtatttttatt

SEQ ID NO: 1636304 - DNA, 15 bp, Homo sapiens
tatgtatttttatta

SEQ ID NO: 1636305 - DNA, 15 bp, Homo sapiens
atgtatttttattat

SEQ ID NO: 1636306 - DNA, 15 bp, Homo sapiens
tgtatttttattata

SEQ ID NO: 1636307 - DNA, 15 bp, Homo sapiens
gtatttttattatac

SEQ ID NO: 1636308 - DNA, 15 bp, Homo sapiens
tatttttattatact

SEQ ID NO: 1636309 - DNA, 15 bp, Homo sapiens
atttttattatactt

SEQ ID NO: 1636310 - DNA, 15 bp, Homo sapiens
tttttattatacttt

SEQ ID NO: 1636311 - DNA, 15 bp, Homo sapiens
ttttattatacttta

SEQ ID NO: 1636312 - DNA, 15 bp, Homo sapiens
tttattatactttaa

SEQ ID NO: 1636313 - DNA, 15 bp, Homo sapiens
acaacgtgcaggtta

SEQ ID NO: 1636314 - DNA, 15 bp, Homo sapiens
caacgtgcaggttag

SEQ ID NO: 1636315 - DNA, 15 bp, Homo sapiens
aacgtgcaggttagt

SEQ ID NO: 1636316 - DNA, 15 bp, Homo sapiens
acgtgcaggttagtt

SEQ ID NO: 1636317 - DNA, 15 bp, Homo sapiens
cgtgcaggttagtta

SEQ ID NO: 1636318 - DNA, 15 bp, Homo sapiens
aggttagttacatat

SEQ ID NO: 1636319 - DNA, 15 bp, Homo sapiens
ggttagttacatatg

SEQ ID NO: 1636320 - DNA, 15 bp, Homo sapiens
tacatatgtatacaa

SEQ ID NO: 1636321 - DNA, 15 bp, Homo sapiens
acatatgtatacaag

SEQ ID NO: 1636322 - DNA, 15 bp, Homo sapiens
catatgtatacaagt

SEQ ID NO: 1636323 - DNA, 15 bp, Homo sapiens
atatgtatacaagta

SEQ ID NO: 1636324 - DNA, 15 bp, Homo sapiens
tatgtatacaagtac

SEQ ID NO: 1636325 - DNA, 15 bp, Homo sapiens
atgtatacaagtact

SEQ ID NO: 1636326 - DNA, 15 bp, Homo sapiens
tgtatacaagtactt

SEQ ID NO: 1636327 - DNA, 15 bp, Homo sapiens
gtatacaagtacttg

SEQ ID NO: 1636328 - DNA, 15 bp, Homo sapiens
tatacaagtacttgg

SEQ ID NO: 1636329 - DNA, 15 bp, Homo sapiens
atacaagtacttggt

SEQ ID NO: 1636330 - DNA, 15 bp, Homo sapiens
tacaagtacttggtg

SEQ ID NO: 1636331 - DNA, 15 bp, Homo sapiens
acaagtacttggtga

SEQ ID NO: 1636332 - DNA, 15 bp, Homo sapiens
caagtacttggtgat

SEQ ID NO: 1636333 - DNA, 15 bp, Homo sapiens
aagtacttggtgatt

SEQ ID NO: 1636334 - DNA, 15 bp, Homo sapiens
agtacttggtgattt

SEQ ID NO: 1636335 - DNA, 15 bp, Homo sapiens
acttggtgattttca

SEQ ID NO: 1636336 - DNA, 15 bp, Homo sapiens
cttggtgattttcaa

SEQ ID NO: 1636337 - DNA, 15 bp, Homo sapiens
ttggtgattttcaaa

SEQ ID NO: 1636338 - DNA, 15 bp, Homo sapiens
tggtgattttcaaag

SEQ ID NO: 1636339 - DNA, 15 bp, Homo sapiens
ggtgattttcaaagt

SEQ ID NO: 1636340 - DNA, 15 bp, Homo sapiens
gtgattttcaaagtt

SEQ ID NO: 1636341 - DNA, 15 bp, Homo sapiens
tgattttcaaagttg

SEQ ID NO: 1636342 - DNA, 15 bp, Homo sapiens
gattttcaaagttga

SEQ ID NO: 1636343 - DNA, 15 bp, Homo sapiens
attttcaaagttgag

SEQ ID NO: 1636344 - DNA, 15 bp, Homo sapiens
ttttcaaagttgaga

SEQ ID NO: 1636345 - DNA, 15 bp, Homo sapiens
tttcaaagttgagag

SEQ ID NO: 1636346 - DNA, 15 bp, Homo sapiens
ttcaaagttgagaga

SEQ ID NO: 1636347 - DNA, 15 bp, Homo sapiens
tcaaagttgagagac

SEQ ID NO: 1636348 - DNA, 15 bp, Homo sapiens
caaagttgagagacc

SEQ ID NO: 1636349 - DNA, 15 bp, Homo sapiens
aaagttgagagacca

SEQ ID NO: 1636350 - DNA, 15 bp, Homo sapiens
aagttgagagaccag

SEQ ID NO: 1636351 - DNA, 15 bp, Homo sapiens
agttgagagaccaga

SEQ ID NO: 1636352 - DNA, 15 bp, Homo sapiens
gttgagagaccagag

SEQ ID NO: 1636353 - DNA, 15 bp, Homo sapiens
ttgagagaccagagt

SEQ ID NO: 1636354 - DNA, 15 bp, Homo sapiens
tgagagaccagagtc

SEQ ID NO: 1636355 - DNA, 15 bp, Homo sapiens
gagagaccagagtcc

SEQ ID NO: 1636356 - DNA, 15 bp, Homo sapiens
agagaccagagtccc

SEQ ID NO: 1636357 - DNA, 15 bp, Homo sapiens
gagaccagagtccct

SEQ ID NO: 1636358 - DNA, 15 bp, Homo sapiens
agaccagagtccctt

SEQ ID NO: 1636359 - DNA, 15 bp, Homo sapiens
gaccagagtcccttg

SEQ ID NO: 1636360 - DNA, 15 bp, Homo sapiens
accagagtcccttgt

SEQ ID NO: 1636361 - DNA, 15 bp, Homo sapiens
ccagagtcccttgtc

SEQ ID NO: 1636362 - DNA, 15 bp, Homo sapiens
cagagtcccttgtca

SEQ ID NO: 1636363 - DNA, 15 bp, Homo sapiens
agagtcccttgtcat

SEQ ID NO: 1636364 - DNA, 15 bp, Homo sapiens
gagtcccttgtcatc

SEQ ID NO: 1636365 - DNA, 15 bp, Homo sapiens
agtcccttgtcatca

SEQ ID NO: 1636366 - DNA, 15 bp, Homo sapiens
gtcccttgtcatcaa

SEQ ID NO: 1636367 - DNA, 15 bp, Homo sapiens
tcccttgtcatcaat

SEQ ID NO: 1636368 - DNA, 15 bp, Homo sapiens
cccttgtcatcaatt

SEQ ID NO: 1636369 - DNA, 15 bp, Homo sapiens
ccttgtcatcaattt

SEQ ID NO: 1636370 - DNA, 15 bp, Homo sapiens
cttgtcatcaatttc

SEQ ID NO: 1636371 - DNA, 15 bp, Homo sapiens
ttgtcatcaatttca

SEQ ID NO: 1636372 - DNA, 15 bp, Homo sapiens
tgtcatcaatttcat

SEQ ID NO: 1636373 - DNA, 15 bp, Homo sapiens
gtcatcaatttcatt

SEQ ID NO: 1636374 - DNA, 15 bp, Homo sapiens
tcatcaatttcattt

SEQ ID NO: 1636375 - DNA, 15 bp, Homo sapiens
catcaatttcatttt

SEQ ID NO: 1636376 - DNA, 15 bp, Homo sapiens
atcaatttcattttc

SEQ ID NO: 1636377 - DNA, 15 bp, Homo sapiens
tcaatttcattttcc

SEQ ID NO: 1636378 - DNA, 15 bp, Homo sapiens
caatttcattttcct

SEQ ID NO: 1636379 - DNA, 15 bp, Homo sapiens
aatttcattttcctt

SEQ ID NO: 1636380 - DNA, 15 bp, Homo sapiens
atttcattttccttg

SEQ ID NO: 1636381 - DNA, 15 bp, Homo sapiens
tttcattttccttgg

SEQ ID NO: 1636382 - DNA, 15 bp, Homo sapiens
ttcattttccttggt

SEQ ID NO: 1636383 - DNA, 15 bp, Homo sapiens
tcattttccttggtt

SEQ ID NO: 1636384 - DNA, 15 bp, Homo sapiens
cattttccttggttt

SEQ ID NO: 1636385 - DNA, 15 bp, Homo sapiens
attttccttggtttt

SEQ ID NO: 1636386 - DNA, 15 bp, Homo sapiens
ttttccttggtttta

SEQ ID NO: 1636387 - DNA, 15 bp, Homo sapiens
tttccttggttttac

SEQ ID NO: 1636388 - DNA, 15 bp, Homo sapiens
ttccttggttttact

SEQ ID NO: 1636389 - DNA, 15 bp, Homo sapiens
tccttggttttactt

SEQ ID NO: 1636390 - DNA, 15 bp, Homo sapiens
ccttggttttacttc

SEQ ID NO: 1636391 - DNA, 15 bp, Homo sapiens
cttggttttacttct

SEQ ID NO: 1636392 - DNA, 15 bp, Homo sapiens
ttggttttacttcta

SEQ ID NO: 1636393 - DNA, 15 bp, Homo sapiens
tggttttacttctac

SEQ ID NO: 1636394 - DNA, 15 bp, Homo sapiens
ggttttacttctact

SEQ ID NO: 1636395 - DNA, 15 bp, Homo sapiens
gttttacttctactt

SEQ ID NO: 1636396 - DNA, 15 bp, Homo sapiens
ttttacttctactta

SEQ ID NO: 1636397 - DNA, 15 bp, Homo sapiens
tttacttctacttag

SEQ ID NO: 1636398 - DNA, 15 bp, Homo sapiens
ttacttctacttaga

SEQ ID NO: 1636399 - DNA, 15 bp, Homo sapiens
tacttctacttagaa

SEQ ID NO: 1636400 - DNA, 15 bp, Homo sapiens
acttctacttagaaa

SEQ ID NO: 1636401 - DNA, 15 bp, Homo sapiens
cttctacttagaaaa

SEQ ID NO: 1636402 - DNA, 15 bp, Homo sapiens
ttctacttagaaaac

SEQ ID NO: 1636403 - DNA, 15 bp, Homo sapiens
tctacttagaaaacc

SEQ ID NO: 1636404 - DNA, 15 bp, Homo sapiens
ctacttagaaaacct

SEQ ID NO: 1636405 - DNA, 15 bp, Homo sapiens
tacttagaaaacctt

SEQ ID NO: 1636406 - DNA, 15 bp, Homo sapiens
acttagaaaaccttt

SEQ ID NO: 1636407 - DNA, 15 bp, Homo sapiens
cttagaaaacctttg

SEQ ID NO: 1636408 - DNA, 15 bp, Homo sapiens
ttagaaaacctttgg

SEQ ID NO: 1636409 - DNA, 15 bp, Homo sapiens
tagaaaacctttgga

SEQ ID NO: 1636410 - DNA, 15 bp, Homo sapiens
agaaaacctttggat

SEQ ID NO: 1636411 - DNA, 15 bp, Homo sapiens
gaaaacctttggatg

SEQ ID NO: 1636412 - DNA, 15 bp, Homo sapiens
aaaacctttggatgc

SEQ ID NO: 1636413 - DNA, 15 bp, Homo sapiens
aaacctttggatgcc

SEQ ID NO: 1636414 - DNA, 15 bp, Homo sapiens
aacctttggatgcca

SEQ ID NO: 1636415 - DNA, 15 bp, Homo sapiens
acctttggatgccaa

SEQ ID NO: 1636416 - DNA, 15 bp, Homo sapiens
cctttggatgccaaa

SEQ ID NO: 1636417 - DNA, 15 bp, Homo sapiens
ctttggatgccaaac

SEQ ID NO: 1636418 - DNA, 15 bp, Homo sapiens
tttggatgccaaact

SEQ ID NO: 1636419 - DNA, 15 bp, Homo sapiens
ttggatgccaaactc

SEQ ID NO: 1636420 - DNA, 15 bp, Homo sapiens
tggatgccaaactca

SEQ ID NO: 1636421 - DNA, 15 bp, Homo sapiens
ggatgccaaactcaa

SEQ ID NO: 1636422 - DNA, 15 bp, Homo sapiens
gatgccaaactcaag

SEQ ID NO: 1636423 - DNA, 15 bp, Homo sapiens
atgccaaactcaagt

SEQ ID NO: 1636424 - DNA, 15 bp, Homo sapiens
tgccaaactcaagtc

SEQ ID NO: 1636425 - DNA, 15 bp, Homo sapiens
gccaaactcaagtct

SEQ ID NO: 1636426 - DNA, 15 bp, Homo sapiens
ccaaactcaagtctt

SEQ ID NO: 1636427 - DNA, 15 bp, Homo sapiens
caaactcaagtcttg

SEQ ID NO: 1636428 - DNA, 15 bp, Homo sapiens
aaactcaagtcttgg

SEQ ID NO: 1636429 - DNA, 15 bp, Homo sapiens
aactcaagtcttggt

SEQ ID NO: 1636430 - DNA, 15 bp, Homo sapiens
actcaagtcttggtt

SEQ ID NO: 1636431 - DNA, 15 bp, Homo sapiens
ctcaagtcttggtta

SEQ ID NO: 1636432 - DNA, 15 bp, Homo sapiens
tcaagtcttggttac

SEQ ID NO: 1636433 - DNA, 15 bp, Homo sapiens
caagtcttggttacg

SEQ ID NO: 1636434 - DNA, 15 bp, Homo sapiens
aagtcttggttacgc

SEQ ID NO: 1636435 - DNA, 15 bp, Homo sapiens
agtcttggttacgcc

SEQ ID NO: 1636436 - DNA, 15 bp, Homo sapiens
gtcttggttacgccc

SEQ ID NO: 1636437 - DNA, 15 bp, Homo sapiens
tcttggttacgcccc

SEQ ID NO: 1636438 - DNA, 15 bp, Homo sapiens
cttggttacgcccca

SEQ ID NO: 1636439 - DNA, 15 bp, Homo sapiens
ttggttacgccccat

SEQ ID NO: 1636440 - DNA, 15 bp, Homo sapiens
tggttacgccccatg

SEQ ID NO: 1636441 - DNA, 15 bp, Homo sapiens
ggttacgccccatgt

SEQ ID NO: 1636442 - DNA, 15 bp, Homo sapiens
gttacgccccatgtt

SEQ ID NO: 1636443 - DNA, 15 bp, Homo sapiens
ttacgccccatgttt

SEQ ID NO: 1636444 - DNA, 15 bp, Homo sapiens
tacgccccatgtttc

SEQ ID NO: 1636445 - DNA, 15 bp, Homo sapiens
acgccccatgtttcc

SEQ ID NO: 1636446 - DNA, 15 bp, Homo sapiens
cgccccatgtttcct

SEQ ID NO: 1636447 - DNA, 15 bp, Homo sapiens
gccccatgtttcctt

SEQ ID NO: 1636448 - DNA, 15 bp, Homo sapiens
ccccatgtttccttc

SEQ ID NO: 1636449 - DNA, 15 bp, Homo sapiens
cccatgtttccttca

SEQ ID NO: 1636450 - DNA, 15 bp, Homo sapiens
ccatgtttccttcaa

SEQ ID NO: 1636451 - DNA, 15 bp, Homo sapiens
catgtttccttcaaa

SEQ ID NO: 1636452 - DNA, 15 bp, Homo sapiens
atgtttccttcaaag

SEQ ID NO: 1636453 - DNA, 15 bp, Homo sapiens
tgtttccttcaaagg

SEQ ID NO: 1636454 - DNA, 15 bp, Homo sapiens
gtttccttcaaagga

SEQ ID NO: 1636455 - DNA, 15 bp, Homo sapiens
tttccttcaaaggaa

SEQ ID NO: 1636456 - DNA, 15 bp, Homo sapiens
ttccttcaaaggaaa

SEQ ID NO: 1636457 - DNA, 15 bp, Homo sapiens
tccttcaaaggaaac

SEQ ID NO: 1636458 - DNA, 15 bp, Homo sapiens
ccttcaaaggaaact

SEQ ID NO: 1636459 - DNA, 15 bp, Homo sapiens
cttcaaaggaaactg

SEQ ID NO: 1636460 - DNA, 15 bp, Homo sapiens
ttcaaaggaaactgc

SEQ ID NO: 1636461 - DNA, 15 bp, Homo sapiens
tcaaaggaaactgca

SEQ ID NO: 1636462 - DNA, 15 bp, Homo sapiens
caaaggaaactgcac

SEQ ID NO: 1636463 - DNA, 15 bp, Homo sapiens
aaaggaaactgcact

SEQ ID NO: 1636464 - DNA, 15 bp, Homo sapiens
aaggaaactgcacta

SEQ ID NO: 1636465 - DNA, 15 bp, Homo sapiens
aggaaactgcactag

SEQ ID NO: 1636466 - DNA, 15 bp, Homo sapiens
ggaaactgcactagt

SEQ ID NO: 1636467 - DNA, 15 bp, Homo sapiens
gaaactgcactagta

SEQ ID NO: 1636468 - DNA, 15 bp, Homo sapiens
aaactgcactagtaa

SEQ ID NO: 1636469 - DNA, 15 bp, Homo sapiens
aactgcactagtaat

SEQ ID NO: 1636470 - DNA, 15 bp, Homo sapiens
actgcactagtaatt

SEQ ID NO: 1636471 - DNA, 15 bp, Homo sapiens
ctgcactagtaattg

SEQ ID NO: 1636472 - DNA, 15 bp, Homo sapiens
tgcactagtaattga

SEQ ID NO: 1636473 - DNA, 15 bp, Homo sapiens
gcactagtaattgaa

SEQ ID NO: 1636474 - DNA, 15 bp, Homo sapiens
cactagtaattgaaa

SEQ ID NO: 1636475 - DNA, 15 bp, Homo sapiens
actagtaattgaaaa

SEQ ID NO: 1636476 - DNA, 15 bp, Homo sapiens
ctagtaattgaaaac

SEQ ID NO: 1636477 - DNA, 15 bp, Homo sapiens
tagtaattgaaaaca

SEQ ID NO: 1636478 - DNA, 15 bp, Homo sapiens
agtaattgaaaacag

SEQ ID NO: 1636479 - DNA, 15 bp, Homo sapiens
gtaattgaaaacaga

SEQ ID NO: 1636480 - DNA, 15 bp, Homo sapiens
taattgaaaacagaa

SEQ ID NO: 1636481 - DNA, 15 bp, Homo sapiens
aattgaaaacagaaa

SEQ ID NO: 1636482 - DNA, 15 bp, Homo sapiens
attgaaaacagaaat

SEQ ID NO: 1636483 - DNA, 15 bp, Homo sapiens
ttgaaaacagaaatt

SEQ ID NO: 1636484 - DNA, 15 bp, Homo sapiens
tgaaaacagaaattg

SEQ ID NO: 1636485 - DNA, 15 bp, Homo sapiens
gaaaacagaaattgg

SEQ ID NO: 1636486 - DNA, 15 bp, Homo sapiens
aaaacagaaattggt

SEQ ID NO: 1636487 - DNA, 15 bp, Homo sapiens
aaacagaaattggtt

SEQ ID NO: 1636488 - DNA, 15 bp, Homo sapiens
aacagaaattggttc

SEQ ID NO: 1636489 - DNA, 15 bp, Homo sapiens
acagaaattggttca

SEQ ID NO: 1636490 - DNA, 15 bp, Homo sapiens
cagaaattggttcat

SEQ ID NO: 1636491 - DNA, 15 bp, Homo sapiens
agaaattggttcatt

SEQ ID NO: 1636492 - DNA, 15 bp, Homo sapiens
gaaattggttcattt

SEQ ID NO: 1636493 - DNA, 15 bp, Homo sapiens
aattggttcatttat

SEQ ID NO: 1636494 - DNA, 15 bp, Homo sapiens
attggttcatttatt

SEQ ID NO: 1636495 - DNA, 15 bp, Homo sapiens
ttggttcatttattc

SEQ ID NO: 1636496 - DNA, 15 bp, Homo sapiens
tggttcatttattct

SEQ ID NO: 1636497 - DNA, 15 bp, Homo sapiens
ggttcatttattcta

SEQ ID NO: 1636498 - DNA, 15 bp, Homo sapiens
gttcatttattctaa

SEQ ID NO: 1636499 - DNA, 15 bp, Homo sapiens
ttcatttattctaac

SEQ ID NO: 1636500 - DNA, 15 bp, Homo sapiens
tcatttattctaact

SEQ ID NO: 1636501 - DNA, 15 bp, Homo sapiens
catttattctaactc

SEQ ID NO: 1636502 - DNA, 15 bp, Homo sapiens
atttattctaactca

SEQ ID NO: 1636503 - DNA, 15 bp, Homo sapiens
tttattctaactcac

SEQ ID NO: 1636504 - DNA, 15 bp, Homo sapiens
ttattctaactcaca

SEQ ID NO: 1636505 - DNA, 15 bp, Homo sapiens
tattctaactcacag

SEQ ID NO: 1636506 - DNA, 15 bp, Homo sapiens
attctaactcacagg

SEQ ID NO: 1636507 - DNA, 15 bp, Homo sapiens
ttctaactcacagga

SEQ ID NO: 1636508 - DNA, 15 bp, Homo sapiens
tctaactcacaggac

SEQ ID NO: 1636509 - DNA, 15 bp, Homo sapiens
ctaactcacaggaca

SEQ ID NO: 1636510 - DNA, 15 bp, Homo sapiens
taactcacaggacac

SEQ ID NO: 1636511 - DNA, 15 bp, Homo sapiens
aactcacaggacaca

SEQ ID NO: 1636512 - DNA, 15 bp, Homo sapiens
actcacaggacacag

SEQ ID NO: 1636513 - DNA, 15 bp, Homo sapiens
ctcacaggacacagg

SEQ ID NO: 1636514 - DNA, 15 bp, Homo sapiens
tcacaggacacaggt

SEQ ID NO: 1636515 - DNA, 15 bp, Homo sapiens
cacaggacacaggta

SEQ ID NO: 1636516 - DNA, 15 bp, Homo sapiens
acaggacacaggtaa

SEQ ID NO: 1636517 - DNA, 15 bp, Homo sapiens
caggacacaggtaag

SEQ ID NO: 1636518 - DNA, 15 bp, Homo sapiens
aggacacaggtaaga

SEQ ID NO: 1636519 - DNA, 15 bp, Homo sapiens
ggacacaggtaagat

SEQ ID NO: 1636520 - DNA, 15 bp, Homo sapiens
gacacaggtaagatc

SEQ ID NO: 1636521 - DNA, 15 bp, Homo sapiens
acacaggtaagatcc

SEQ ID NO: 1636522 - DNA, 15 bp, Homo sapiens
cacaggtaagatccc

SEQ ID NO: 1636523 - DNA, 15 bp, Homo sapiens
acaggtaagatccct

SEQ ID NO: 1636524 - DNA, 15 bp, Homo sapiens
caggtaagatccctg

SEQ ID NO: 1636525 - DNA, 15 bp, Homo sapiens
aggtaagatccctgt

SEQ ID NO: 1636526 - DNA, 15 bp, Homo sapiens
ggtaagatccctgtc

SEQ ID NO: 1636527 - DNA, 15 bp, Homo sapiens
gtaagatccctgtct

SEQ ID NO: 1636528 - DNA, 15 bp, Homo sapiens
taagatccctgtctg

SEQ ID NO: 1636529 - DNA, 15 bp, Homo sapiens
aagatccctgtctgt

SEQ ID NO: 1636530 - DNA, 15 bp, Homo sapiens
agatccctgtctgtg

SEQ ID NO: 1636531 - DNA, 15 bp, Homo sapiens
gatccctgtctgtgc

SEQ ID NO: 1636532 - DNA, 15 bp, Homo sapiens
atccctgtctgtgct

SEQ ID NO: 1636533 - DNA, 15 bp, Homo sapiens
tccctgtctgtgctc

SEQ ID NO: 1636534 - DNA, 15 bp, Homo sapiens
ccctgtctgtgctcc

SEQ ID NO: 1636535 - DNA, 15 bp, Homo sapiens
cctgtctgtgctcca

SEQ ID NO: 1636536 - DNA, 15 bp, Homo sapiens
ctgtctgtgctccac

SEQ ID NO: 1636537 - DNA, 15 bp, Homo sapiens
tgtctgtgctccacc

SEQ ID NO: 1636538 - DNA, 15 bp, Homo sapiens
gtctgtgctccacct

SEQ ID NO: 1636539 - DNA, 15 bp, Homo sapiens
tctgtgctccacctt

SEQ ID NO: 1636540 - DNA, 15 bp, Homo sapiens
ctgtgctccaccttg

SEQ ID NO: 1636541 - DNA, 15 bp, Homo sapiens
tgtgctccaccttgg

SEQ ID NO: 1636542 - DNA, 15 bp, Homo sapiens
gtgctccaccttggc

SEQ ID NO: 1636543 - DNA, 15 bp, Homo sapiens
tgctccaccttggct

SEQ ID NO: 1636544 - DNA, 15 bp, Homo sapiens
gctccaccttggctg

SEQ ID NO: 1636545 - DNA, 15 bp, Homo sapiens
ctccaccttggctgt

SEQ ID NO: 1636546 - DNA, 15 bp, Homo sapiens
tccaccttggctgtc

SEQ ID NO: 1636547 - DNA, 15 bp, Homo sapiens
ccaccttggctgtct

SEQ ID NO: 1636548 - DNA, 15 bp, Homo sapiens
caccttggctgtctc

SEQ ID NO: 1636549 - DNA, 15 bp, Homo sapiens
accttggctgtctct

SEQ ID NO: 1636550 - DNA, 15 bp, Homo sapiens
ccttggctgtctctt

SEQ ID NO: 1636551 - DNA, 15 bp, Homo sapiens
cttggctgtctcttt

SEQ ID NO: 1636552 - DNA, 15 bp, Homo sapiens
ttggctgtctctttt

SEQ ID NO: 1636553 - DNA, 15 bp, Homo sapiens
tggctgtctcttttc

SEQ ID NO: 1636554 - DNA, 15 bp, Homo sapiens
ggctgtctcttttct

SEQ ID NO: 1636555 - DNA, 15 bp, Homo sapiens
gctgtctcttttcta

SEQ ID NO: 1636556 - DNA, 15 bp, Homo sapiens
ctgtctcttttctaa

SEQ ID NO: 1636557 - DNA, 15 bp, Homo sapiens
tgtctcttttctaat

SEQ ID NO: 1636558 - DNA, 15 bp, Homo sapiens
gtctcttttctaatc

SEQ ID NO: 1636559 - DNA, 15 bp, Homo sapiens
tctcttttctaatcc

SEQ ID NO: 1636560 - DNA, 15 bp, Homo sapiens
ctcttttctaatccc

SEQ ID NO: 1636561 - DNA, 15 bp, Homo sapiens
tcttttctaatcccg

SEQ ID NO: 1636562 - DNA, 15 bp, Homo sapiens
cttttctaatcccgg

SEQ ID NO: 1636563 - DNA, 15 bp, Homo sapiens
ttttctaatcccggg

SEQ ID NO: 1636564 - DNA, 15 bp, Homo sapiens
tttctaatcccggga

SEQ ID NO: 1636565 - DNA, 15 bp, Homo sapiens
ttctaatcccgggag

SEQ ID NO: 1636566 - DNA, 15 bp, Homo sapiens
tctaatcccgggaga

SEQ ID NO: 1636567 - DNA, 15 bp, Homo sapiens
ctaatcccgggagaa

SEQ ID NO: 1636568 - DNA, 15 bp, Homo sapiens
taatcccgggagaaa

SEQ ID NO: 1636569 - DNA, 15 bp, Homo sapiens
aatcccgggagaaaa

SEQ ID NO: 1636570 - DNA, 15 bp, Homo sapiens
atcccgggagaaaat

SEQ ID NO: 1636571 - DNA, 15 bp, Homo sapiens
tcccgggagaaaatc

SEQ ID NO: 1636572 - DNA, 15 bp, Homo sapiens
cccgggagaaaatct

SEQ ID NO: 1636573 - DNA, 15 bp, Homo sapiens
ccgggagaaaatctg

SEQ ID NO: 1636574 - DNA, 15 bp, Homo sapiens
cgggagaaaatctgg

SEQ ID NO: 1636575 - DNA, 15 bp, Homo sapiens
gggagaaaatctgga

SEQ ID NO: 1636576 - DNA, 15 bp, Homo sapiens
ggagaaaatctggat

SEQ ID NO: 1636577 - DNA, 15 bp, Homo sapiens
gagaaaatctggata

SEQ ID NO: 1636578 - DNA, 15 bp, Homo sapiens
agaaaatctggatat

SEQ ID NO: 1636579 - DNA, 15 bp, Homo sapiens
gaaaatctggatata

SEQ ID NO: 1636580 - DNA, 15 bp, Homo sapiens
aaaatctggatataa

SEQ ID NO: 1636581 - DNA, 15 bp, Homo sapiens
aaatctggatataat

SEQ ID NO: 1636582 - DNA, 15 bp, Homo sapiens
aatctggatataatt

SEQ ID NO: 1636583 - DNA, 15 bp, Homo sapiens
atctggatataattc

SEQ ID NO: 1636584 - DNA, 15 bp, Homo sapiens
tctggatataattct

SEQ ID NO: 1636585 - DNA, 15 bp, Homo sapiens
ctggatataattctc

SEQ ID NO: 1636586 - DNA, 15 bp, Homo sapiens
tggatataattctct

SEQ ID NO: 1636587 - DNA, 15 bp, Homo sapiens
ggatataattctctg

SEQ ID NO: 1636588 - DNA, 15 bp, Homo sapiens
gatataattctctgc

SEQ ID NO: 1636589 - DNA, 15 bp, Homo sapiens
atataattctctgct

SEQ ID NO: 1636590 - DNA, 15 bp, Homo sapiens
tataattctctgctt

SEQ ID NO: 1636591 - DNA, 15 bp, Homo sapiens
ataattctctgcttt

SEQ ID NO: 1636592 - DNA, 15 bp, Homo sapiens
taattctctgctttg

SEQ ID NO: 1636593 - DNA, 15 bp, Homo sapiens
aattctctgctttgt

SEQ ID NO: 1636594 - DNA, 15 bp, Homo sapiens
attctctgctttgtt

SEQ ID NO: 1636595 - DNA, 15 bp, Homo sapiens
ttctctgctttgttg

SEQ ID NO: 1636596 - DNA, 15 bp, Homo sapiens
tctctgctttgttga

SEQ ID NO: 1636597 - DNA, 15 bp, Homo sapiens
ctctgctttgttgat

SEQ ID NO: 1636598 - DNA, 15 bp, Homo sapiens
tctgctttgttgatt

SEQ ID NO: 1636599 - DNA, 15 bp, Homo sapiens
ctgctttgttgatta

SEQ ID NO: 1636600 - DNA, 15 bp, Homo sapiens
tgctttgttgattaa

SEQ ID NO: 1636601 - DNA, 15 bp, Homo sapiens
gctttgttgattaaa

SEQ ID NO: 1636602 - DNA, 15 bp, Homo sapiens
ctttgttgattaaat

SEQ ID NO: 1636603 - DNA, 15 bp, Homo sapiens
tttgttgattaaatt

SEQ ID NO: 1636604 - DNA, 15 bp, Homo sapiens
ttgttgattaaattc

SEQ ID NO: 1636605 - DNA, 15 bp, Homo sapiens
tgttgattaaattcc

SEQ ID NO: 1636606 - DNA, 15 bp, Homo sapiens
gttgattaaattcct

SEQ ID NO: 1636607 - DNA, 15 bp, Homo sapiens
ttgattaaattcctc

SEQ ID NO: 1636608 - DNA, 15 bp, Homo sapiens
tgattaaattcctct

SEQ ID NO: 1636609 - DNA, 15 bp, Homo sapiens
gattaaattcctctg

SEQ ID NO: 1636610 - DNA, 15 bp, Homo sapiens
attaaattcctctgg

SEQ ID NO: 1636611 - DNA, 15 bp, Homo sapiens
ttaaattcctctggt

SEQ ID NO: 1636612 - DNA, 15 bp, Homo sapiens
taaattcctctggtc

SEQ ID NO: 1636613 - DNA, 15 bp, Homo sapiens
aaattcctctggtcc

SEQ ID NO: 1636614 - DNA, 15 bp, Homo sapiens
aattcctctggtcct

SEQ ID NO: 1636615 - DNA, 15 bp, Homo sapiens
attcctctggtcctt

SEQ ID NO: 1636616 - DNA, 15 bp, Homo sapiens
ttcctctggtcctta

SEQ ID NO: 1636617 - DNA, 15 bp, Homo sapiens
tcctctggtccttat

SEQ ID NO: 1636618 - DNA, 15 bp, Homo sapiens
cctctggtccttatg

SEQ ID NO: 1636619 - DNA, 15 bp, Homo sapiens
ctctggtccttatgc

SEQ ID NO: 1636620 - DNA, 15 bp, Homo sapiens
tctggtccttatgca

SEQ ID NO: 1636621 - DNA, 15 bp, Homo sapiens
ctggtccttatgcaa

SEQ ID NO: 1636622 - DNA, 15 bp, Homo sapiens
tggtccttatgcaaa

SEQ ID NO: 1636623 - DNA, 15 bp, Homo sapiens
ggtccttatgcaaaa

SEQ ID NO: 1636624 - DNA, 15 bp, Homo sapiens
gtccttatgcaaaat

SEQ ID NO: 1636625 - DNA, 15 bp, Homo sapiens
tccttatgcaaaatt

SEQ ID NO: 1636626 - DNA, 15 bp, Homo sapiens
ccttatgcaaaattg

SEQ ID NO: 1636627 - DNA, 15 bp, Homo sapiens
cttatgcaaaattgt

SEQ ID NO: 1636628 - DNA, 15 bp, Homo sapiens
ttatgcaaaattgtg

SEQ ID NO: 1636629 - DNA, 15 bp, Homo sapiens
tatgcaaaattgtgg

SEQ ID NO: 1636630 - DNA, 15 bp, Homo sapiens
atgcaaaattgtggg

SEQ ID NO: 1636631 - DNA, 15 bp, Homo sapiens
tgcaaaattgtgggc

SEQ ID NO: 1636632 - DNA, 15 bp, Homo sapiens
gcaaaattgtgggct

SEQ ID NO: 1636633 - DNA, 15 bp, Homo sapiens
caaaattgtgggctt

SEQ ID NO: 1636634 - DNA, 15 bp, Homo sapiens
aaaattgtgggcttt

SEQ ID NO: 1636635 - DNA, 15 bp, Homo sapiens
aaattgtgggctttc

SEQ ID NO: 1636636 - DNA, 15 bp, Homo sapiens
aattgtgggctttca

SEQ ID NO: 1636637 - DNA, 15 bp, Homo sapiens
attgtgggctttcat

SEQ ID NO: 1636638 - DNA, 15 bp, Homo sapiens
ttgtgggctttcatc

SEQ ID NO: 1636639 - DNA, 15 bp, Homo sapiens
tgtgggctttcatca

SEQ ID NO: 1636640 - DNA, 15 bp, Homo sapiens
gtgggctttcatcaa

SEQ ID NO: 1636641 - DNA, 15 bp, Homo sapiens
tgggctttcatcaaa

SEQ ID NO: 1636642 - DNA, 15 bp, Homo sapiens
gggctttcatcaaaa

SEQ ID NO: 1636643 - DNA, 15 bp, Homo sapiens
ggctttcatcaaaat

SEQ ID NO: 1636644 - DNA, 15 bp, Homo sapiens
gctttcatcaaaata

SEQ ID NO: 1636645 - DNA, 15 bp, Homo sapiens
ctttcatcaaaatag

SEQ ID NO: 1636646 - DNA, 15 bp, Homo sapiens
tttcatcaaaatagg

SEQ ID NO: 1636647 - DNA, 15 bp, Homo sapiens
ttcatcaaaatagga

SEQ ID NO: 1636648 - DNA, 15 bp, Homo sapiens
tcatcaaaataggat

SEQ ID NO: 1636649 - DNA, 15 bp, Homo sapiens
catcaaaataggatt

SEQ ID NO: 1636650 - DNA, 15 bp, Homo sapiens
atcaaaataggattg

SEQ ID NO: 1636651 - DNA, 15 bp, Homo sapiens
tcaaaataggattgt

SEQ ID NO: 1636652 - DNA, 15 bp, Homo sapiens
caaaataggattgtc

SEQ ID NO: 1636653 - DNA, 15 bp, Homo sapiens
aaaataggattgtct

SEQ ID NO: 1636654 - DNA, 15 bp, Homo sapiens
aaataggattgtctg

SEQ ID NO: 1636655 - DNA, 15 bp, Homo sapiens
aataggattgtctga

SEQ ID NO: 1636656 - DNA, 15 bp, Homo sapiens
ataggattgtctgat

SEQ ID NO: 1636657 - DNA, 15 bp, Homo sapiens
taggattgtctgata

SEQ ID NO: 1636658 - DNA, 15 bp, Homo sapiens
aggattgtctgataa

SEQ ID NO: 1636659 - DNA, 15 bp, Homo sapiens
ggattgtctgataat

SEQ ID NO: 1636660 - DNA, 15 bp, Homo sapiens
gattgtctgataata

SEQ ID NO: 1636661 - DNA, 15 bp, Homo sapiens
attgtctgataatac

SEQ ID NO: 1636662 - DNA, 15 bp, Homo sapiens
ttgtctgataatacc

SEQ ID NO: 1636663 - DNA, 15 bp, Homo sapiens
tgtctgataataccc

SEQ ID NO: 1636664 - DNA, 15 bp, Homo sapiens
gtctgataataccct

SEQ ID NO: 1636665 - DNA, 15 bp, Homo sapiens
tctgataataccctt

SEQ ID NO: 1636666 - DNA, 15 bp, Homo sapiens
ctgataatacccttt

SEQ ID NO: 1636667 - DNA, 15 bp, Homo sapiens
tgataataccctttg

SEQ ID NO: 1636668 - DNA, 15 bp, Homo sapiens
gataataccctttga

SEQ ID NO: 1636669 - DNA, 15 bp, Homo sapiens
ataataccctttgac

SEQ ID NO: 1636670 - DNA, 15 bp, Homo sapiens
taataccctttgact

SEQ ID NO: 1636671 - DNA, 15 bp, Homo sapiens
aataccctttgactc

SEQ ID NO: 1636672 - DNA, 15 bp, Homo sapiens
ataccctttgactca

SEQ ID NO: 1636673 - DNA, 15 bp, Homo sapiens
taccctttgactcag

SEQ ID NO: 1636674 - DNA, 15 bp, Homo sapiens
accctttgactcagt

SEQ ID NO: 1636675 - DNA, 15 bp, Homo sapiens
ccctttgactcagta

SEQ ID NO: 1636676 - DNA, 15 bp, Homo sapiens
cctttgactcagtaa

SEQ ID NO: 1636677 - DNA, 15 bp, Homo sapiens
ctttgactcagtaat

SEQ ID NO: 1636678 - DNA, 15 bp, Homo sapiens
tttgactcagtaatt

SEQ ID NO: 1636679 - DNA, 15 bp, Homo sapiens
ttgactcagtaattc

SEQ ID NO: 1636680 - DNA, 15 bp, Homo sapiens
tgactcagtaattcc

SEQ ID NO: 1636681 - DNA, 15 bp, Homo sapiens
gactcagtaattcca

SEQ ID NO: 1636682 - DNA, 15 bp, Homo sapiens
actcagtaattccat

SEQ ID NO: 1636683 - DNA, 15 bp, Homo sapiens
ctcagtaattccatt

SEQ ID NO: 1636684 - DNA, 15 bp, Homo sapiens
tcagtaattccattc

SEQ ID NO: 1636685 - DNA, 15 bp, Homo sapiens
cagtaattccattcc

SEQ ID NO: 1636686 - DNA, 15 bp, Homo sapiens
agtaattccattcct

SEQ ID NO: 1636687 - DNA, 15 bp, Homo sapiens
gtaattccattcctt

SEQ ID NO: 1636688 - DNA, 15 bp, Homo sapiens
taattccattccttg

SEQ ID NO: 1636689 - DNA, 15 bp, Homo sapiens
aattccattccttgg

SEQ ID NO: 1636690 - DNA, 15 bp, Homo sapiens
attccattccttgga

SEQ ID NO: 1636691 - DNA, 15 bp, Homo sapiens
ttccattccttggaa

SEQ ID NO: 1636692 - DNA, 15 bp, Homo sapiens
tccattccttggaat

SEQ ID NO: 1636693 - DNA, 15 bp, Homo sapiens
ccattccttggaatt

SEQ ID NO: 1636694 - DNA, 15 bp, Homo sapiens
cattccttggaattt

SEQ ID NO: 1636695 - DNA, 15 bp, Homo sapiens
attccttggaattta

SEQ ID NO: 1636696 - DNA, 15 bp, Homo sapiens
ttccttggaatttat

SEQ ID NO: 1636697 - DNA, 15 bp, Homo sapiens
tccttggaatttatt

SEQ ID NO: 1636698 - DNA, 15 bp, Homo sapiens
ccttggaatttattc

SEQ ID NO: 1636699 - DNA, 15 bp, Homo sapiens
cttggaatttattct

SEQ ID NO: 1636700 - DNA, 15 bp, Homo sapiens
ttggaatttattctt

SEQ ID NO: 1636701 - DNA, 15 bp, Homo sapiens
tggaatttattctta

SEQ ID NO: 1636702 - DNA, 15 bp, Homo sapiens
ggaatttattcttat

SEQ ID NO: 1636703 - DNA, 15 bp, Homo sapiens
gaatttattcttata

SEQ ID NO: 1636704 - DNA, 15 bp, Homo sapiens
aatttattcttataa

SEQ ID NO: 1636705 - DNA, 15 bp, Homo sapiens
atttattcttataaa

SEQ ID NO: 1636706 - DNA, 15 bp, Homo sapiens
tttattcttataaat

SEQ ID NO: 1636707 - DNA, 15 bp, Homo sapiens
ttattcttataaatg

SEQ ID NO: 1636708 - DNA, 15 bp, Homo sapiens
tattcttataaatga

SEQ ID NO: 1636709 - DNA, 15 bp, Homo sapiens
attcttataaatgat

SEQ ID NO: 1636710 - DNA, 15 bp, Homo sapiens
ttcttataaatgatc

SEQ ID NO: 1636711 - DNA, 15 bp, Homo sapiens
tcttataaatgatct

SEQ ID NO: 1636712 - DNA, 15 bp, Homo sapiens
cttataaatgatcta

SEQ ID NO: 1636713 - DNA, 15 bp, Homo sapiens
ttataaatgatctat

SEQ ID NO: 1636714 - DNA, 15 bp, Homo sapiens
tataaatgatctatg

SEQ ID NO: 1636715 - DNA, 15 bp, Homo sapiens
ataaatgatctatga

SEQ ID NO: 1636716 - DNA, 15 bp, Homo sapiens
taaatgatctatgag

SEQ ID NO: 1636717 - DNA, 15 bp, Homo sapiens
aaatgatctatgagt

SEQ ID NO: 1636718 - DNA, 15 bp, Homo sapiens
aatgatctatgagta

SEQ ID NO: 1636719 - DNA, 15 bp, Homo sapiens
atgatctatgagtag

SEQ ID NO: 1636720 - DNA, 15 bp, Homo sapiens
tgatctatgagtagt

SEQ ID NO: 1636721 - DNA, 15 bp, Homo sapiens
gatctatgagtagta

SEQ ID NO: 1636722 - DNA, 15 bp, Homo sapiens
atctatgagtagtag

SEQ ID NO: 1636723 - DNA, 15 bp, Homo sapiens
tctatgagtagtaga

SEQ ID NO: 1636724 - DNA, 15 bp, Homo sapiens
ctatgagtagtagaa

SEQ ID NO: 1636725 - DNA, 15 bp, Homo sapiens
tatgagtagtagaat

SEQ ID NO: 1636726 - DNA, 15 bp, Homo sapiens
atgagtagtagaatg

SEQ ID NO: 1636727 - DNA, 15 bp, Homo sapiens
tgagtagtagaatgt

SEQ ID NO: 1636728 - DNA, 15 bp, Homo sapiens
gagtagtagaatgtt

SEQ ID NO: 1636729 - DNA, 15 bp, Homo sapiens
agtagtagaatgtta

SEQ ID NO: 1636730 - DNA, 15 bp, Homo sapiens
gtagtagaatgttat

SEQ ID NO: 1636731 - DNA, 15 bp, Homo sapiens
tagtagaatgttatg

SEQ ID NO: 1636732 - DNA, 15 bp, Homo sapiens
agtagaatgttatgt

SEQ ID NO: 1636733 - DNA, 15 bp, Homo sapiens
gtagaatgttatgtg

SEQ ID NO: 1636734 - DNA, 15 bp, Homo sapiens
tagaatgttatgtgt

SEQ ID NO: 1636735 - DNA, 15 bp, Homo sapiens
agaatgttatgtgta

SEQ ID NO: 1636736 - DNA, 15 bp, Homo sapiens
gaatgttatgtgtac

SEQ ID NO: 1636737 - DNA, 15 bp, Homo sapiens
aatgttatgtgtaca

SEQ ID NO: 1636738 - DNA, 15 bp, Homo sapiens
atgttatgtgtacaa

SEQ ID NO: 1636739 - DNA, 15 bp, Homo sapiens
tgttatgtgtacaaa

SEQ ID NO: 1636740 - DNA, 15 bp, Homo sapiens
gttatgtgtacaaag

SEQ ID NO: 1636741 - DNA, 15 bp, Homo sapiens
ttatgtgtacaaaga

SEQ ID NO: 1636742 - DNA, 15 bp, Homo sapiens
tatgtgtacaaagac

SEQ ID NO: 1636743 - DNA, 15 bp, Homo sapiens
atgtgtacaaagaca

SEQ ID NO: 1636744 - DNA, 15 bp, Homo sapiens
tgtgtacaaagacat

SEQ ID NO: 1636745 - DNA, 15 bp, Homo sapiens
gtgtacaaagacatt

SEQ ID NO: 1636746 - DNA, 15 bp, Homo sapiens
tgtacaaagacattt

SEQ ID NO: 1636747 - DNA, 15 bp, Homo sapiens
gtacaaagacattta

SEQ ID NO: 1636748 - DNA, 15 bp, Homo sapiens
tacaaagacatttat

SEQ ID NO: 1636749 - DNA, 15 bp, Homo sapiens
acaaagacatttatt

SEQ ID NO: 1636750 - DNA, 15 bp, Homo sapiens
caaagacatttattg

SEQ ID NO: 1636751 - DNA, 15 bp, Homo sapiens
aaagacatttattgc

SEQ ID NO: 1636752 - DNA, 15 bp, Homo sapiens
aagacatttattgct

SEQ ID NO: 1636753 - DNA, 15 bp, Homo sapiens
agacatttattgctg

SEQ ID NO: 1636754 - DNA, 15 bp, Homo sapiens
gacatttattgctgc

SEQ ID NO: 1636755 - DNA, 15 bp, Homo sapiens
acatttattgctgca

SEQ ID NO: 1636756 - DNA, 15 bp, Homo sapiens
catttattgctgcat

SEQ ID NO: 1636757 - DNA, 15 bp, Homo sapiens
atttattgctgcatt

SEQ ID NO: 1636758 - DNA, 15 bp, Homo sapiens
tttattgctgcatta

SEQ ID NO: 1636759 - DNA, 15 bp, Homo sapiens
ttattgctgcattag

SEQ ID NO: 1636760 - DNA, 15 bp, Homo sapiens
tattgctgcattagt

SEQ ID NO: 1636761 - DNA, 15 bp, Homo sapiens
attgctgcattagtt

SEQ ID NO: 1636762 - DNA, 15 bp, Homo sapiens
ttgctgcattagtta

SEQ ID NO: 1636763 - DNA, 15 bp, Homo sapiens
tgctgcattagttaa

SEQ ID NO: 1636764 - DNA, 15 bp, Homo sapiens
gctgcattagttaaa

SEQ ID NO: 1636765 - DNA, 15 bp, Homo sapiens
ctgcattagttaaaa

SEQ ID NO: 1636766 - DNA, 15 bp, Homo sapiens
tgcattagttaaaat

SEQ ID NO: 1636767 - DNA, 15 bp, Homo sapiens
gcattagttaaaatg

SEQ ID NO: 1636768 - DNA, 15 bp, Homo sapiens
cattagttaaaatga

SEQ ID NO: 1636769 - DNA, 15 bp, Homo sapiens
attagttaaaatgat

SEQ ID NO: 1636770 - DNA, 15 bp, Homo sapiens
ttagttaaaatgatg

SEQ ID NO: 1636771 - DNA, 15 bp, Homo sapiens
tagttaaaatgatga

SEQ ID NO: 1636772 - DNA, 15 bp, Homo sapiens
agttaaaatgatgat

SEQ ID NO: 1636773 - DNA, 15 bp, Homo sapiens
gttaaaatgatgata

SEQ ID NO: 1636774 - DNA, 15 bp, Homo sapiens
ttaaaatgatgataa

SEQ ID NO: 1636775 - DNA, 15 bp, Homo sapiens
taaaatgatgataaa

SEQ ID NO: 1636776 - DNA, 15 bp, Homo sapiens
aaaatgatgataaaa

SEQ ID NO: 1636777 - DNA, 15 bp, Homo sapiens
aaatgatgataaaac

SEQ ID NO: 1636778 - DNA, 15 bp, Homo sapiens
aatgatgataaaact

SEQ ID NO: 1636779 - DNA, 15 bp, Homo sapiens
atgatgataaaacta

SEQ ID NO: 1636780 - DNA, 15 bp, Homo sapiens
tgatgataaaactag

SEQ ID NO: 1636781 - DNA, 15 bp, Homo sapiens
gatgataaaactaga

SEQ ID NO: 1636782 - DNA, 15 bp, Homo sapiens
atgataaaactagaa

SEQ ID NO: 1636783 - DNA, 15 bp, Homo sapiens
tgataaaactagaaa

SEQ ID NO: 1636784 - DNA, 15 bp, Homo sapiens
gataaaactagaaat

SEQ ID NO: 1636785 - DNA, 15 bp, Homo sapiens
ataaaactagaaata

SEQ ID NO: 1636786 - DNA, 15 bp, Homo sapiens
taaaactagaaatag

SEQ ID NO: 1636787 - DNA, 15 bp, Homo sapiens
aaaactagaaatagc

SEQ ID NO: 1636788 - DNA, 15 bp, Homo sapiens
aaactagaaatagcc

SEQ ID NO: 1636789 - DNA, 15 bp, Homo sapiens
aactagaaatagcct

SEQ ID NO: 1636790 - DNA, 15 bp, Homo sapiens
actagaaatagccta

SEQ ID NO: 1636791 - DNA, 15 bp, Homo sapiens
ctagaaatagcctaa

SEQ ID NO: 1636792 - DNA, 15 bp, Homo sapiens
tagaaatagcctaaa

SEQ ID NO: 1636793 - DNA, 15 bp, Homo sapiens
agaaatagcctaaat

SEQ ID NO: 1636794 - DNA, 15 bp, Homo sapiens
gaaatagcctaaatg

SEQ ID NO: 1636795 - DNA, 15 bp, Homo sapiens
aaatagcctaaatgc

SEQ ID NO: 1636796 - DNA, 15 bp, Homo sapiens
aatagcctaaatgcc

SEQ ID NO: 1636797 - DNA, 15 bp, Homo sapiens
atagcctaaatgcct

SEQ ID NO: 1636798 - DNA, 15 bp, Homo sapiens
tagcctaaatgccta

SEQ ID NO: 1636799 - DNA, 15 bp, Homo sapiens
agcctaaatgcctag

SEQ ID NO: 1636800 - DNA, 15 bp, Homo sapiens
gcctaaatgcctagt

SEQ ID NO: 1636801 - DNA, 15 bp, Homo sapiens
cctaaatgcctagta

SEQ ID NO: 1636802 - DNA, 15 bp, Homo sapiens
ctaaatgcctagtaa

SEQ ID NO: 1636803 - DNA, 15 bp, Homo sapiens
taaatgcctagtaat

SEQ ID NO: 1636804 - DNA, 15 bp, Homo sapiens
aaatgcctagtaata

SEQ ID NO: 1636805 - DNA, 15 bp, Homo sapiens
aatgcctagtaatag

SEQ ID NO: 1636806 - DNA, 15 bp, Homo sapiens
atgcctagtaatagg

SEQ ID NO: 1636807 - DNA, 15 bp, Homo sapiens
tgcctagtaatagga

SEQ ID NO: 1636808 - DNA, 15 bp, Homo sapiens
gcctagtaataggaa

SEQ ID NO: 1636809 - DNA, 15 bp, Homo sapiens
cctagtaataggaaa

SEQ ID NO: 1636810 - DNA, 15 bp, Homo sapiens
ctagtaataggaaaa

SEQ ID NO: 1636811 - DNA, 15 bp, Homo sapiens
tagtaataggaaaat

SEQ ID NO: 1636812 - DNA, 15 bp, Homo sapiens
agtaataggaaaatg

SEQ ID NO: 1636813 - DNA, 15 bp, Homo sapiens
gtaataggaaaatgg

SEQ ID NO: 1636814 - DNA, 15 bp, Homo sapiens
taataggaaaatggt

SEQ ID NO: 1636815 - DNA, 15 bp, Homo sapiens
aataggaaaatggtt

SEQ ID NO: 1636816 - DNA, 15 bp, Homo sapiens
ataggaaaatggtta

SEQ ID NO: 1636817 - DNA, 15 bp, Homo sapiens
taggaaaatggttac

SEQ ID NO: 1636818 - DNA, 15 bp, Homo sapiens
aggaaaatggttaca

SEQ ID NO: 1636819 - DNA, 15 bp, Homo sapiens
ggaaaatggttacag

SEQ ID NO: 1636820 - DNA, 15 bp, Homo sapiens
gaaaatggttacagc

SEQ ID NO: 1636821 - DNA, 15 bp, Homo sapiens
aaaatggttacagca

SEQ ID NO: 1636822 - DNA, 15 bp, Homo sapiens
aaatggttacagcaa

SEQ ID NO: 1636823 - DNA, 15 bp, Homo sapiens
aatggttacagcaac

SEQ ID NO: 1636824 - DNA, 15 bp, Homo sapiens
atggttacagcaaca

SEQ ID NO: 1636825 - DNA, 15 bp, Homo sapiens
tggttacagcaacaa

SEQ ID NO: 1636826 - DNA, 15 bp, Homo sapiens
ggttacagcaacaaa

SEQ ID NO: 1636827 - DNA, 15 bp, Homo sapiens
gttacagcaacaaat

SEQ ID NO: 1636828 - DNA, 15 bp, Homo sapiens
ttacagcaacaaatg

SEQ ID NO: 1636829 - DNA, 15 bp, Homo sapiens
tacagcaacaaatga

SEQ ID NO: 1636830 - DNA, 15 bp, Homo sapiens
acagcaacaaatgat

SEQ ID NO: 1636831 - DNA, 15 bp, Homo sapiens
cagcaacaaatgatg

SEQ ID NO: 1636832 - DNA, 15 bp, Homo sapiens
agcaacaaatgatgg

SEQ ID NO: 1636833 - DNA, 15 bp, Homo sapiens
gcaacaaatgatggc

SEQ ID NO: 1636834 - DNA, 15 bp, Homo sapiens
caacaaatgatggca

SEQ ID NO: 1636835 - DNA, 15 bp, Homo sapiens
aacaaatgatggcat

SEQ ID NO: 1636836 - DNA, 15 bp, Homo sapiens
acaaatgatggcata

SEQ ID NO: 1636837 - DNA, 15 bp, Homo sapiens
aaatgatggcatatc

SEQ ID NO: 1636838 - DNA, 15 bp, Homo sapiens
aatgatggcatatct

SEQ ID NO: 1636839 - DNA, 15 bp, Homo sapiens
atgatggcatatcta

SEQ ID NO: 1636840 - DNA, 15 bp, Homo sapiens
tgatggcatatctac

SEQ ID NO: 1636841 - DNA, 15 bp, Homo sapiens
gatggcatatctact

SEQ ID NO: 1636842 - DNA, 15 bp, Homo sapiens
atggcatatctactc

SEQ ID NO: 1636843 - DNA, 15 bp, Homo sapiens
tggcatatctactca

SEQ ID NO: 1636844 - DNA, 15 bp, Homo sapiens
ggcatatctactcag

SEQ ID NO: 1636845 - DNA, 15 bp, Homo sapiens
gcatatctactcagt

SEQ ID NO: 1636846 - DNA, 15 bp, Homo sapiens
catatctactcagta

SEQ ID NO: 1636847 - DNA, 15 bp, Homo sapiens
atatctactcagtaa

SEQ ID NO: 1636848 - DNA, 15 bp, Homo sapiens
tatctactcagtaaa

SEQ ID NO: 1636849 - DNA, 15 bp, Homo sapiens
atctactcagtaaaa

SEQ ID NO: 1636850 - DNA, 15 bp, Homo sapiens
tctactcagtaaaat

SEQ ID NO: 1636851 - DNA, 15 bp, Homo sapiens
ctactcagtaaaata

SEQ ID NO: 1636852 - DNA, 15 bp, Homo sapiens
tactcagtaaaatat

SEQ ID NO: 1636853 - DNA, 15 bp, Homo sapiens
actcagtaaaatatt

SEQ ID NO: 1636854 - DNA, 15 bp, Homo sapiens
ctcagtaaaatattc

SEQ ID NO: 1636855 - DNA, 15 bp, Homo sapiens
tcagtaaaatattct

SEQ ID NO: 1636856 - DNA, 15 bp, Homo sapiens
cagtaaaatattctg

SEQ ID NO: 1636857 - DNA, 15 bp, Homo sapiens
agtaaaatattctgc

SEQ ID NO: 1636858 - DNA, 15 bp, Homo sapiens
gtaaaatattctgca

SEQ ID NO: 1636859 - DNA, 15 bp, Homo sapiens
taaaatattctgcag

SEQ ID NO: 1636860 - DNA, 15 bp, Homo sapiens
aaaatattctgcagt

SEQ ID NO: 1636861 - DNA, 15 bp, Homo sapiens
aaatattctgcagtt

SEQ ID NO: 1636862 - DNA, 15 bp, Homo sapiens
aatattctgcagttt

SEQ ID NO: 1636863 - DNA, 15 bp, Homo sapiens
atattctgcagtttt

SEQ ID NO: 1636864 - DNA, 15 bp, Homo sapiens
tattctgcagtttta

SEQ ID NO: 1636865 - DNA, 15 bp, Homo sapiens
attctgcagttttaa

SEQ ID NO: 1636866 - DNA, 15 bp, Homo sapiens
ttctgcagttttaaa

SEQ ID NO: 1636867 - DNA, 15 bp, Homo sapiens
tctgcagttttaaaa

SEQ ID NO: 1636868 - DNA, 15 bp, Homo sapiens
ctgcagttttaaaat

SEQ ID NO: 1636869 - DNA, 15 bp, Homo sapiens
tgcagttttaaaatt

SEQ ID NO: 1636870 - DNA, 15 bp, Homo sapiens
gcagttttaaaatta

SEQ ID NO: 1636871 - DNA, 15 bp, Homo sapiens
cagttttaaaattat

SEQ ID NO: 1636872 - DNA, 15 bp, Homo sapiens
agttttaaaattata

SEQ ID NO: 1636873 - DNA, 15 bp, Homo sapiens
gttttaaaattataa

SEQ ID NO: 1636874 - DNA, 15 bp, Homo sapiens
tttaaaattataatt

SEQ ID NO: 1636875 - DNA, 15 bp, Homo sapiens
ttaaaattataatta

SEQ ID NO: 1636876 - DNA, 15 bp, Homo sapiens
taaaattataattat

SEQ ID NO: 1636877 - DNA, 15 bp, Homo sapiens
aaaattataattatg

SEQ ID NO: 1636878 - DNA, 15 bp, Homo sapiens
aaattataattatga

SEQ ID NO: 1636879 - DNA, 15 bp, Homo sapiens
aattataattatgaa

SEQ ID NO: 1636880 - DNA, 15 bp, Homo sapiens
attataattatgaaa

SEQ ID NO: 1636881 - DNA, 15 bp, Homo sapiens
ttataattatgaaaa

SEQ ID NO: 1636882 - DNA, 15 bp, Homo sapiens
tataattatgaaaac

SEQ ID NO: 1636883 - DNA, 15 bp, Homo sapiens
ataattatgaaaact

SEQ ID NO: 1636884 - DNA, 15 bp, Homo sapiens
taattatgaaaacta

SEQ ID NO: 1636885 - DNA, 15 bp, Homo sapiens
aattatgaaaactat

SEQ ID NO: 1636886 - DNA, 15 bp, Homo sapiens
attatgaaaactata

SEQ ID NO: 1636887 - DNA, 15 bp, Homo sapiens
ttatgaaaactatat

SEQ ID NO: 1636888 - DNA, 15 bp, Homo sapiens
tatgaaaactatata

SEQ ID NO: 1636889 - DNA, 15 bp, Homo sapiens
atgaaaactatatag

SEQ ID NO: 1636890 - DNA, 15 bp, Homo sapiens
tgaaaactatatagc

SEQ ID NO: 1636891 - DNA, 15 bp, Homo sapiens
gaaaactatatagca

SEQ ID NO: 1636892 - DNA, 15 bp, Homo sapiens
aaaactatatagcaa

SEQ ID NO: 1636893 - DNA, 15 bp, Homo sapiens
aaactatatagcaat

SEQ ID NO: 1636894 - DNA, 15 bp, Homo sapiens
aactatatagcaata

SEQ ID NO: 1636895 - DNA, 15 bp, Homo sapiens
actatatagcaatat

SEQ ID NO: 1636896 - DNA, 15 bp, Homo sapiens
ctatatagcaatatg

SEQ ID NO: 1636897 - DNA, 15 bp, Homo sapiens
tatatagcaatatgg

SEQ ID NO: 1636898 - DNA, 15 bp, Homo sapiens
atatagcaatatggg

SEQ ID NO: 1636899 - DNA, 15 bp, Homo sapiens
tatagcaatatggga

SEQ ID NO: 1636900 - DNA, 15 bp, Homo sapiens
atagcaatatgggaa

SEQ ID NO: 1636901 - DNA, 15 bp, Homo sapiens
tagcaatatgggaaa

SEQ ID NO: 1636902 - DNA, 15 bp, Homo sapiens
agcaatatgggaaac

SEQ ID NO: 1636903 - DNA, 15 bp, Homo sapiens
gcaatatgggaaacg

SEQ ID NO: 1636904 - DNA, 15 bp, Homo sapiens
caatatgggaaacgc

SEQ ID NO: 1636905 - DNA, 15 bp, Homo sapiens
aatatgggaaacgct

SEQ ID NO: 1636906 - DNA, 15 bp, Homo sapiens
atatgggaaacgctt

SEQ ID NO: 1636907 - DNA, 15 bp, Homo sapiens
tatgggaaacgctta

SEQ ID NO: 1636908 - DNA, 15 bp, Homo sapiens
atgggaaacgcttac

SEQ ID NO: 1636909 - DNA, 15 bp, Homo sapiens
tgggaaacgcttaca

SEQ ID NO: 1636910 - DNA, 15 bp, Homo sapiens
gggaaacgcttacaa

SEQ ID NO: 1636911 - DNA, 15 bp, Homo sapiens
ggaaacgcttacaat

SEQ ID NO: 1636912 - DNA, 15 bp, Homo sapiens
gaaacgcttacaatg

SEQ ID NO: 1636913 - DNA, 15 bp, Homo sapiens
aaacgcttacaatgt

SEQ ID NO: 1636914 - DNA, 15 bp, Homo sapiens
aacgcttacaatgtc

SEQ ID NO: 1636915 - DNA, 15 bp, Homo sapiens
acgcttacaatgtca

SEQ ID NO: 1636916 - DNA, 15 bp, Homo sapiens
cgcttacaatgtcat

SEQ ID NO: 1636917 - DNA, 15 bp, Homo sapiens
gcttacaatgtcatg

SEQ ID NO: 1636918 - DNA, 15 bp, Homo sapiens
cttacaatgtcatgt

SEQ ID NO: 1636919 - DNA, 15 bp, Homo sapiens
ttacaatgtcatgtt

SEQ ID NO: 1636920 - DNA, 15 bp, Homo sapiens
tacaatgtcatgtta

SEQ ID NO: 1636921 - DNA, 15 bp, Homo sapiens
acaatgtcatgttaa

SEQ ID NO: 1636922 - DNA, 15 bp, Homo sapiens
caatgtcatgttaag

SEQ ID NO: 1636923 - DNA, 15 bp, Homo sapiens
aatgtcatgttaagt

SEQ ID NO: 1636924 - DNA, 15 bp, Homo sapiens
atgtcatgttaagtg

SEQ ID NO: 1636925 - DNA, 15 bp, Homo sapiens
tgtcatgttaagtgg

SEQ ID NO: 1636926 - DNA, 15 bp, Homo sapiens
gtcatgttaagtggg

SEQ ID NO: 1636927 - DNA, 15 bp, Homo sapiens
tcatgttaagtggga

SEQ ID NO: 1636928 - DNA, 15 bp, Homo sapiens
catgttaagtgggaa

SEQ ID NO: 1636929 - DNA, 15 bp, Homo sapiens
atgttaagtgggaaa

SEQ ID NO: 1636930 - DNA, 15 bp, Homo sapiens
tgttaagtgggaaaa

SEQ ID NO: 1636931 - DNA, 15 bp, Homo sapiens
gttaagtgggaaaaa

SEQ ID NO: 1636932 - DNA, 15 bp, Homo sapiens
ttaagtgggaaaaaa

SEQ ID NO: 1636933 - DNA, 15 bp, Homo sapiens
taagtgggaaaaaat

SEQ ID NO: 1636934 - DNA, 15 bp, Homo sapiens
aagtgggaaaaaata

SEQ ID NO: 1636935 - DNA, 15 bp, Homo sapiens
agtgggaaaaaatac

SEQ ID NO: 1636936 - DNA, 15 bp, Homo sapiens
gtgggaaaaaataca

SEQ ID NO: 1636937 - DNA, 15 bp, Homo sapiens
tgggaaaaaatacag

SEQ ID NO: 1636938 - DNA, 15 bp, Homo sapiens
gggaaaaaatacagt

SEQ ID NO: 1636939 - DNA, 15 bp, Homo sapiens
ggaaaaaatacagta

SEQ ID NO: 1636940 - DNA, 15 bp, Homo sapiens
gaaaaaatacagtac

SEQ ID NO: 1636941 - DNA, 15 bp, Homo sapiens
aaaaaatacagtact

SEQ ID NO: 1636942 - DNA, 15 bp, Homo sapiens
aaaaatacagtactg

SEQ ID NO: 1636943 - DNA, 15 bp, Homo sapiens
aaaatacagtactgc

SEQ ID NO: 1636944 - DNA, 15 bp, Homo sapiens
aaatacagtactgca

SEQ ID NO: 1636945 - DNA, 15 bp, Homo sapiens
aatacagtactgcat

SEQ ID NO: 1636946 - DNA, 15 bp, Homo sapiens
atacagtactgcatt

SEQ ID NO: 1636947 - DNA, 15 bp, Homo sapiens
tacagtactgcatta

SEQ ID NO: 1636948 - DNA, 15 bp, Homo sapiens
acagtactgcattaa

SEQ ID NO: 1636949 - DNA, 15 bp, Homo sapiens
cagtactgcattaaa

SEQ ID NO: 1636950 - DNA, 15 bp, Homo sapiens
agtactgcattaaat

SEQ ID NO: 1636951 - DNA, 15 bp, Homo sapiens
gtactgcattaaatt

SEQ ID NO: 1636952 - DNA, 15 bp, Homo sapiens
tactgcattaaattt

SEQ ID NO: 1636953 - DNA, 15 bp, Homo sapiens
actgcattaaattta

SEQ ID NO: 1636954 - DNA, 15 bp, Homo sapiens
ctgcattaaatttag

SEQ ID NO: 1636955 - DNA, 15 bp, Homo sapiens
tgcattaaatttagg

SEQ ID NO: 1636956 - DNA, 15 bp, Homo sapiens
gcattaaatttaggt

SEQ ID NO: 1636957 - DNA, 15 bp, Homo sapiens
cattaaatttaggtt

SEQ ID NO: 1636958 - DNA, 15 bp, Homo sapiens
attaaatttaggtta

SEQ ID NO: 1636959 - DNA, 15 bp, Homo sapiens
ttaaatttaggttat

SEQ ID NO: 1636960 - DNA, 15 bp, Homo sapiens
taaatttaggttatg

SEQ ID NO: 1636961 - DNA, 15 bp, Homo sapiens
aaatttaggttatgg

SEQ ID NO: 1636962 - DNA, 15 bp, Homo sapiens
aatttaggttatggc

SEQ ID NO: 1636963 - DNA, 15 bp, Homo sapiens
atttaggttatggct

SEQ ID NO: 1636964 - DNA, 15 bp, Homo sapiens
tttaggttatggctg

SEQ ID NO: 1636965 - DNA, 15 bp, Homo sapiens
ttaggttatggctgt

SEQ ID NO: 1636966 - DNA, 15 bp, Homo sapiens
taggttatggctgta

SEQ ID NO: 1636967 - DNA, 15 bp, Homo sapiens
aggttatggctgtag

SEQ ID NO: 1636968 - DNA, 15 bp, Homo sapiens
ggttatggctgtagc

SEQ ID NO: 1636969 - DNA, 15 bp, Homo sapiens
gttatggctgtagct

SEQ ID NO: 1636970 - DNA, 15 bp, Homo sapiens
ttatggctgtagcta

SEQ ID NO: 1636971 - DNA, 15 bp, Homo sapiens
tatggctgtagctat

SEQ ID NO: 1636972 - DNA, 15 bp, Homo sapiens
atggctgtagctatg

SEQ ID NO: 1636973 - DNA, 15 bp, Homo sapiens
tggctgtagctatgc

SEQ ID NO: 1636974 - DNA, 15 bp, Homo sapiens
ggctgtagctatgcc

SEQ ID NO: 1636975 - DNA, 15 bp, Homo sapiens
gctgtagctatgcca

SEQ ID NO: 1636976 - DNA, 15 bp, Homo sapiens
ctgtagctatgccaa

SEQ ID NO: 1636977 - DNA, 15 bp, Homo sapiens
tgtagctatgccaaa

SEQ ID NO: 1636978 - DNA, 15 bp, Homo sapiens
gtagctatgccaaaa

SEQ ID NO: 1636979 - DNA, 15 bp, Homo sapiens
tagctatgccaaaat

SEQ ID NO: 1636980 - DNA, 15 bp, Homo sapiens
agctatgccaaaata

SEQ ID NO: 1636981 - DNA, 15 bp, Homo sapiens
gctatgccaaaataa

SEQ ID NO: 1636982 - DNA, 15 bp, Homo sapiens
ctatgccaaaataat

SEQ ID NO: 1636983 - DNA, 15 bp, Homo sapiens
tatgccaaaataatg

SEQ ID NO: 1636984 - DNA, 15 bp, Homo sapiens
atgccaaaataatgt

SEQ ID NO: 1636985 - DNA, 15 bp, Homo sapiens
tgccaaaataatgta

SEQ ID NO: 1636986 - DNA, 15 bp, Homo sapiens
gccaaaataatgtat

SEQ ID NO: 1636987 - DNA, 15 bp, Homo sapiens
ccaaaataatgtatg

SEQ ID NO: 1636988 - DNA, 15 bp, Homo sapiens
caaaataatgtatgt

SEQ ID NO: 1636989 - DNA, 15 bp, Homo sapiens
aaaataatgtatgta

SEQ ID NO: 1636990 - DNA, 15 bp, Homo sapiens
aaataatgtatgtat

SEQ ID NO: 1636991 - DNA, 15 bp, Homo sapiens
aataatgtatgtatc

SEQ ID NO: 1636992 - DNA, 15 bp, Homo sapiens
ataatgtatgtatct

SEQ ID NO: 1636993 - DNA, 15 bp, Homo sapiens
taatgtatgtatctg

SEQ ID NO: 1636994 - DNA, 15 bp, Homo sapiens
aatgtatgtatctgg

SEQ ID NO: 1636995 - DNA, 15 bp, Homo sapiens
atgtatgtatctgga

SEQ ID NO: 1636996 - DNA, 15 bp, Homo sapiens
tgtatgtatctggat

SEQ ID NO: 1636997 - DNA, 15 bp, Homo sapiens
gtatgtatctggatg

SEQ ID NO: 1636998 - DNA, 15 bp, Homo sapiens
tatgtatctggatga

SEQ ID NO: 1636999 - DNA, 15 bp, Homo sapiens
atgtatctggatgag

SEQ ID NO: 1637000 - DNA, 15 bp, Homo sapiens
tgtatctggatgaga

SEQ ID NO: 1637001 - DNA, 15 bp, Homo sapiens
gtatctggatgagaa

SEQ ID NO: 1637002 - DNA, 15 bp, Homo sapiens
tatctggatgagaaa

SEQ ID NO: 1637003 - DNA, 15 bp, Homo sapiens
atctggatgagaaac

SEQ ID NO: 1637004 - DNA, 15 bp, Homo sapiens
tctggatgagaaaca

SEQ ID NO: 1637005 - DNA, 15 bp, Homo sapiens
ctggatgagaaacag

SEQ ID NO: 1637006 - DNA, 15 bp, Homo sapiens
tggatgagaaacaga

SEQ ID NO: 1637007 - DNA, 15 bp, Homo sapiens
ggatgagaaacagaa

SEQ ID NO: 1637008 - DNA, 15 bp, Homo sapiens
gatgagaaacagaaa

SEQ ID NO: 1637009 - DNA, 15 bp, Homo sapiens
atgagaaacagaaac

SEQ ID NO: 1637010 - DNA, 15 bp, Homo sapiens
tgagaaacagaaaca

SEQ ID NO: 1637011 - DNA, 15 bp, Homo sapiens
gagaaacagaaacaa

SEQ ID NO: 1637012 - DNA, 15 bp, Homo sapiens
agaaacagaaacaat

SEQ ID NO: 1637013 - DNA, 15 bp, Homo sapiens
gaaacagaaacaatt

SEQ ID NO: 1637014 - DNA, 15 bp, Homo sapiens
aaacagaaacaattt

SEQ ID NO: 1637015 - DNA, 15 bp, Homo sapiens
aacagaaacaatttt

SEQ ID NO: 1637016 - DNA, 15 bp, Homo sapiens
acagaaacaattttg

SEQ ID NO: 1637017 - DNA, 15 bp, Homo sapiens
cagaaacaattttga

SEQ ID NO: 1637018 - DNA, 15 bp, Homo sapiens
agaaacaattttgaa

SEQ ID NO: 1637019 - DNA, 15 bp, Homo sapiens
gaaacaattttgaaa

SEQ ID NO: 1637020 - DNA, 15 bp, Homo sapiens
aaacaattttgaaaa

SEQ ID NO: 1637021 - DNA, 15 bp, Homo sapiens
aacaattttgaaaaa

SEQ ID NO: 1637022 - DNA, 15 bp, Homo sapiens
acaattttgaaaaat

SEQ ID NO: 1637023 - DNA, 15 bp, Homo sapiens
caattttgaaaaatg

SEQ ID NO: 1637024 - DNA, 15 bp, Homo sapiens
aattttgaaaaatga

SEQ ID NO: 1637025 - DNA, 15 bp, Homo sapiens
attttgaaaaatgaa

SEQ ID NO: 1637026 - DNA, 15 bp, Homo sapiens
ttttgaaaaatgaag

SEQ ID NO: 1637027 - DNA, 15 bp, Homo sapiens
tttgaaaaatgaaga

SEQ ID NO: 1637028 - DNA, 15 bp, Homo sapiens
ttgaaaaatgaagat

SEQ ID NO: 1637029 - DNA, 15 bp, Homo sapiens
tgaaaaatgaagata

SEQ ID NO: 1637030 - DNA, 15 bp, Homo sapiens
gaaaaatgaagataa

SEQ ID NO: 1637031 - DNA, 15 bp, Homo sapiens
aaaaatgaagataaa

SEQ ID NO: 1637032 - DNA, 15 bp, Homo sapiens
aaaatgaagataaag

SEQ ID NO: 1637033 - DNA, 15 bp, Homo sapiens
aaatgaagataaagt

SEQ ID NO: 1637034 - DNA, 15 bp, Homo sapiens
aatgaagataaagtg

SEQ ID NO: 1637035 - DNA, 15 bp, Homo sapiens
atgaagataaagtga

SEQ ID NO: 1637036 - DNA, 15 bp, Homo sapiens
tgaagataaagtgat

SEQ ID NO: 1637037 - DNA, 15 bp, Homo sapiens
gaagataaagtgatt

SEQ ID NO: 1637038 - DNA, 15 bp, Homo sapiens
aagataaagtgattt

SEQ ID NO: 1637039 - DNA, 15 bp, Homo sapiens
agataaagtgatttg

SEQ ID NO: 1637040 - DNA, 15 bp, Homo sapiens
gataaagtgatttgc

SEQ ID NO: 1637041 - DNA, 15 bp, Homo sapiens
ataaagtgatttgct

SEQ ID NO: 1637042 - DNA, 15 bp, Homo sapiens
taaagtgatttgctg

SEQ ID NO: 1637043 - DNA, 15 bp, Homo sapiens
aaagtgatttgctgg

SEQ ID NO: 1637044 - DNA, 15 bp, Homo sapiens
aagtgatttgctggg

SEQ ID NO: 1637045 - DNA, 15 bp, Homo sapiens
agtgatttgctggga

SEQ ID NO: 1637046 - DNA, 15 bp, Homo sapiens
gtgatttgctgggat

SEQ ID NO: 1637047 - DNA, 15 bp, Homo sapiens
tgatttgctgggata

SEQ ID NO: 1637048 - DNA, 15 bp, Homo sapiens
gatttgctgggatat

SEQ ID NO: 1637049 - DNA, 15 bp, Homo sapiens
atttgctgggatatc

SEQ ID NO: 1637050 - DNA, 15 bp, Homo sapiens
tttgctgggatatca

SEQ ID NO: 1637051 - DNA, 15 bp, Homo sapiens
ttgctgggatatcaa

SEQ ID NO: 1637052 - DNA, 15 bp, Homo sapiens
tgctgggatatcaag

SEQ ID NO: 1637053 - DNA, 15 bp, Homo sapiens
gctgggatatcaaga

SEQ ID NO: 1637054 - DNA, 15 bp, Homo sapiens
ctgggatatcaagat

SEQ ID NO: 1637055 - DNA, 15 bp, Homo sapiens
tgggatatcaagatt

SEQ ID NO: 1637056 - DNA, 15 bp, Homo sapiens
gggatatcaagatta

SEQ ID NO: 1637057 - DNA, 15 bp, Homo sapiens
ggatatcaagattat

SEQ ID NO: 1637058 - DNA, 15 bp, Homo sapiens
gatatcaagattatg

SEQ ID NO: 1637059 - DNA, 15 bp, Homo sapiens
atatcaagattatgg

SEQ ID NO: 1637060 - DNA, 15 bp, Homo sapiens
tatcaagattatggg

SEQ ID NO: 1637061 - DNA, 15 bp, Homo sapiens
atcaagattatgggt

SEQ ID NO: 1637062 - DNA, 15 bp, Homo sapiens
tcaagattatgggta

SEQ ID NO: 1637063 - DNA, 15 bp, Homo sapiens
caagattatgggtaa

SEQ ID NO: 1637064 - DNA, 15 bp, Homo sapiens
aagattatgggtaaa

SEQ ID NO: 1637065 - DNA, 15 bp, Homo sapiens
agattatgggtaaaa

SEQ ID NO: 1637066 - DNA, 15 bp, Homo sapiens
gattatgggtaaaaa

SEQ ID NO: 1637067 - DNA, 15 bp, Homo sapiens
attatgggtaaaaac

SEQ ID NO: 1637068 - DNA, 15 bp, Homo sapiens
ttatgggtaaaaact

SEQ ID NO: 1637069 - DNA, 15 bp, Homo sapiens
tatgggtaaaaactt

SEQ ID NO: 1637070 - DNA, 15 bp, Homo sapiens
atgggtaaaaacttc

SEQ ID NO: 1637071 - DNA, 15 bp, Homo sapiens
tgggtaaaaacttct

SEQ ID NO: 1637072 - DNA, 15 bp, Homo sapiens
gggtaaaaacttctc

SEQ ID NO: 1637073 - DNA, 15 bp, Homo sapiens
ggtaaaaacttctct

SEQ ID NO: 1637074 - DNA, 15 bp, Homo sapiens
gtaaaaacttctcta

SEQ ID NO: 1637075 - DNA, 15 bp, Homo sapiens
taaaaacttctctat

SEQ ID NO: 1637076 - DNA, 15 bp, Homo sapiens
aaaaacttctctatt

SEQ ID NO: 1637077 - DNA, 15 bp, Homo sapiens
aaaacttctctattt

SEQ ID NO: 1637078 - DNA, 15 bp, Homo sapiens
aaacttctctatttc

SEQ ID NO: 1637079 - DNA, 15 bp, Homo sapiens
aacttctctatttca

SEQ ID NO: 1637080 - DNA, 15 bp, Homo sapiens
acttctctatttcag

SEQ ID NO: 1637081 - DNA, 15 bp, Homo sapiens
cttctctatttcagt

SEQ ID NO: 1637082 - DNA, 15 bp, Homo sapiens
ttctctatttcagtg

SEQ ID NO: 1637083 - DNA, 15 bp, Homo sapiens
tctctatttcagtgt

SEQ ID NO: 1637084 - DNA, 15 bp, Homo sapiens
ctctatttcagtgtc

SEQ ID NO: 1637085 - DNA, 15 bp, Homo sapiens
tctatttcagtgtct

SEQ ID NO: 1637086 - DNA, 15 bp, Homo sapiens
ctatttcagtgtctg

SEQ ID NO: 1637087 - DNA, 15 bp, Homo sapiens
tatttcagtgtctgc

SEQ ID NO: 1637088 - DNA, 15 bp, Homo sapiens
atttcagtgtctgct

SEQ ID NO: 1637089 - DNA, 15 bp, Homo sapiens
tttcagtgtctgcta

SEQ ID NO: 1637090 - DNA, 15 bp, Homo sapiens
ttcagtgtctgctaa

SEQ ID NO: 1637091 - DNA, 15 bp, Homo sapiens
tcagtgtctgctaaa

SEQ ID NO: 1637092 - DNA, 15 bp, Homo sapiens
cagtgtctgctaaag

SEQ ID NO: 1637093 - DNA, 15 bp, Homo sapiens
agtgtctgctaaagt

SEQ ID NO: 1637094 - DNA, 15 bp, Homo sapiens
gtgtctgctaaagtt

SEQ ID NO: 1637095 - DNA, 15 bp, Homo sapiens
tgtctgctaaagttg

SEQ ID NO: 1637096 - DNA, 15 bp, Homo sapiens
gtctgctaaagttgt

SEQ ID NO: 1637097 - DNA, 15 bp, Homo sapiens
tctgctaaagttgtt

SEQ ID NO: 1637098 - DNA, 15 bp, Homo sapiens
ctgctaaagttgtta

SEQ ID NO: 1637099 - DNA, 15 bp, Homo sapiens
tgctaaagttgttat

SEQ ID NO: 1637100 - DNA, 15 bp, Homo sapiens
gctaaagttgttata

SEQ ID NO: 1637101 - DNA, 15 bp, Homo sapiens
ctaaagttgttataa

SEQ ID NO: 1637102 - DNA, 15 bp, Homo sapiens
taaagttgttataac

SEQ ID NO: 1637103 - DNA, 15 bp, Homo sapiens
aaagttgttataact

SEQ ID NO: 1637104 - DNA, 15 bp, Homo sapiens
aagttgttataactt

SEQ ID NO: 1637105 - DNA, 15 bp, Homo sapiens
agttgttataacttt

SEQ ID NO: 1637106 - DNA, 15 bp, Homo sapiens
gttgttataacttta

SEQ ID NO: 1637107 - DNA, 15 bp, Homo sapiens
ttgttataactttat

SEQ ID NO: 1637108 - DNA, 15 bp, Homo sapiens
tgttataactttatg

SEQ ID NO: 1637109 - DNA, 15 bp, Homo sapiens
gttataactttatgc

SEQ ID NO: 1637110 - DNA, 15 bp, Homo sapiens
ttataactttatgca

SEQ ID NO: 1637111 - DNA, 15 bp, Homo sapiens
tataactttatgcaa

SEQ ID NO: 1637112 - DNA, 15 bp, Homo sapiens
ataactttatgcaat

SEQ ID NO: 1637113 - DNA, 15 bp, Homo sapiens
taactttatgcaatt

SEQ ID NO: 1637114 - DNA, 15 bp, Homo sapiens
aactttatgcaattc

SEQ ID NO: 1637115 - DNA, 15 bp, Homo sapiens
actttatgcaattca

SEQ ID NO: 1637116 - DNA, 15 bp, Homo sapiens
ctttatgcaattcaa

SEQ ID NO: 1637117 - DNA, 15 bp, Homo sapiens
tttatgcaattcaag

SEQ ID NO: 1637118 - DNA, 15 bp, Homo sapiens
ttatgcaattcaagg

SEQ ID NO: 1637119 - DNA, 15 bp, Homo sapiens
tatgcaattcaaggg

SEQ ID NO: 1637120 - DNA, 15 bp, Homo sapiens
atgcaattcaagggt

SEQ ID NO: 1637121 - DNA, 15 bp, Homo sapiens
tgcaattcaagggtc

SEQ ID NO: 1637122 - DNA, 15 bp, Homo sapiens
gcaattcaagggtct

SEQ ID NO: 1637123 - DNA, 15 bp, Homo sapiens
caattcaagggtctt

SEQ ID NO: 1637124 - DNA, 15 bp, Homo sapiens
aattcaagggtcttg

SEQ ID NO: 1637125 - DNA, 15 bp, Homo sapiens
attcaagggtcttgg

SEQ ID NO: 1637126 - DNA, 15 bp, Homo sapiens
ttcaagggtcttggc

SEQ ID NO: 1637127 - DNA, 15 bp, Homo sapiens
tcaagggtcttggca

SEQ ID NO: 1637128 - DNA, 15 bp, Homo sapiens
caagggtcttggcag

SEQ ID NO: 1637129 - DNA, 15 bp, Homo sapiens
aagggtcttggcagg

SEQ ID NO: 1637130 - DNA, 15 bp, Homo sapiens
agggtcttggcaggc

SEQ ID NO: 1637131 - DNA, 15 bp, Homo sapiens
gggtcttggcaggct

SEQ ID NO: 1637132 - DNA, 15 bp, Homo sapiens
ggtcttggcaggcta

SEQ ID NO: 1637133 - DNA, 15 bp, Homo sapiens
gtcttggcaggctat

SEQ ID NO: 1637134 - DNA, 15 bp, Homo sapiens
tcttggcaggctatg

SEQ ID NO: 1637135 - DNA, 15 bp, Homo sapiens
cttggcaggctatga

SEQ ID NO: 1637136 - DNA, 15 bp, Homo sapiens
ttggcaggctatgaa

SEQ ID NO: 1637137 - DNA, 15 bp, Homo sapiens
tggcaggctatgaaa

SEQ ID NO: 1637138 - DNA, 15 bp, Homo sapiens
ggcaggctatgaaac

SEQ ID NO: 1637139 - DNA, 15 bp, Homo sapiens
gcaggctatgaaaca

SEQ ID NO: 1637140 - DNA, 15 bp, Homo sapiens
caggctatgaaacaa

SEQ ID NO: 1637141 - DNA, 15 bp, Homo sapiens
aggctatgaaacaag

SEQ ID NO: 1637142 - DNA, 15 bp, Homo sapiens
ggctatgaaacaagg

SEQ ID NO: 1637143 - DNA, 15 bp, Homo sapiens
gctatgaaacaaggc

SEQ ID NO: 1637144 - DNA, 15 bp, Homo sapiens
ctatgaaacaaggct

SEQ ID NO: 1637145 - DNA, 15 bp, Homo sapiens
tatgaaacaaggctg

SEQ ID NO: 1637146 - DNA, 15 bp, Homo sapiens
atgaaacaaggctga

SEQ ID NO: 1637147 - DNA, 15 bp, Homo sapiens
tgaaacaaggctgac

SEQ ID NO: 1637148 - DNA, 15 bp, Homo sapiens
gaaacaaggctgact

SEQ ID NO: 1637149 - DNA, 15 bp, Homo sapiens
aaacaaggctgactg

SEQ ID NO: 1637150 - DNA, 15 bp, Homo sapiens
aacaaggctgactgc

SEQ ID NO: 1637151 - DNA, 15 bp, Homo sapiens
acaaggctgactgcc

SEQ ID NO: 1637152 - DNA, 15 bp, Homo sapiens
caaggctgactgccc

SEQ ID NO: 1637153 - DNA, 15 bp, Homo sapiens
aaggctgactgcccc

SEQ ID NO: 1637154 - DNA, 15 bp, Homo sapiens
aggctgactgcccca

SEQ ID NO: 1637155 - DNA, 15 bp, Homo sapiens
ggctgactgccccat

SEQ ID NO: 1637156 - DNA, 15 bp, Homo sapiens
gctgactgccccatc

SEQ ID NO: 1637157 - DNA, 15 bp, Homo sapiens
ctgactgccccatct

SEQ ID NO: 1637158 - DNA, 15 bp, Homo sapiens
tgactgccccatctg

SEQ ID NO: 1637159 - DNA, 15 bp, Homo sapiens
gactgccccatctga

SEQ ID NO: 1637160 - DNA, 15 bp, Homo sapiens
actgccccatctgaa

SEQ ID NO: 1637161 - DNA, 15 bp, Homo sapiens
ctgccccatctgaaa

SEQ ID NO: 1637162 - DNA, 15 bp, Homo sapiens
tgccccatctgaaac

SEQ ID NO: 1637163 - DNA, 15 bp, Homo sapiens
gccccatctgaaact

SEQ ID NO: 1637164 - DNA, 15 bp, Homo sapiens
ccccatctgaaactg

SEQ ID NO: 1637165 - DNA, 15 bp, Homo sapiens
cccatctgaaactga

SEQ ID NO: 1637166 - DNA, 15 bp, Homo sapiens
ccatctgaaactgaa

SEQ ID NO: 1637167 - DNA, 15 bp, Homo sapiens
catctgaaactgaaa

SEQ ID NO: 1637168 - DNA, 15 bp, Homo sapiens
atctgaaactgaaag

SEQ ID NO: 1637169 - DNA, 15 bp, Homo sapiens
tctgaaactgaaagg

SEQ ID NO: 1637170 - DNA, 15 bp, Homo sapiens
ctgaaactgaaaggg

SEQ ID NO: 1637171 - DNA, 15 bp, Homo sapiens
tgaaactgaaagggt

SEQ ID NO: 1637172 - DNA, 15 bp, Homo sapiens
gaaactgaaagggtc

SEQ ID NO: 1637173 - DNA, 15 bp, Homo sapiens
aaactgaaagggtca

SEQ ID NO: 1637174 - DNA, 15 bp, Homo sapiens
aactgaaagggtcac

SEQ ID NO: 1637175 - DNA, 15 bp, Homo sapiens
actgaaagggtcaca

SEQ ID NO: 1637176 - DNA, 15 bp, Homo sapiens
ctgaaagggtcacaa

SEQ ID NO: 1637177 - DNA, 15 bp, Homo sapiens
tgaaagggtcacaat

SEQ ID NO: 1637178 - DNA, 15 bp, Homo sapiens
gaaagggtcacaatg

SEQ ID NO: 1637179 - DNA, 15 bp, Homo sapiens
aaagggtcacaatgc

SEQ ID NO: 1637180 - DNA, 15 bp, Homo sapiens
aagggtcacaatgca

SEQ ID NO: 1637181 - DNA, 15 bp, Homo sapiens
agggtcacaatgcac

SEQ ID NO: 1637182 - DNA, 15 bp, Homo sapiens
gggtcacaatgcact

SEQ ID NO: 1637183 - DNA, 15 bp, Homo sapiens
ggtcacaatgcactg

SEQ ID NO: 1637184 - DNA, 15 bp, Homo sapiens
gtcacaatgcactgg

SEQ ID NO: 1637185 - DNA, 15 bp, Homo sapiens
tcacaatgcactggg

SEQ ID NO: 1637186 - DNA, 15 bp, Homo sapiens
cacaatgcactgggt

SEQ ID NO: 1637187 - DNA, 15 bp, Homo sapiens
acaatgcactgggta

SEQ ID NO: 1637188 - DNA, 15 bp, Homo sapiens
caatgcactgggtaa

SEQ ID NO: 1637189 - DNA, 15 bp, Homo sapiens
aatgcactgggtaag

SEQ ID NO: 1637190 - DNA, 15 bp, Homo sapiens
atgcactgggtaaga

SEQ ID NO: 1637191 - DNA, 15 bp, Homo sapiens
tgcactgggtaagat

SEQ ID NO: 1637192 - DNA, 15 bp, Homo sapiens
gcactgggtaagatg

SEQ ID NO: 1637193 - DNA, 15 bp, Homo sapiens
cactgggtaagatgt

SEQ ID NO: 1637194 - DNA, 15 bp, Homo sapiens
actgggtaagatgtg

SEQ ID NO: 1637195 - DNA, 15 bp, Homo sapiens
ctgggtaagatgtga

SEQ ID NO: 1637196 - DNA, 15 bp, Homo sapiens
tgggtaagatgtgag

SEQ ID NO: 1637197 - DNA, 15 bp, Homo sapiens
gggtaagatgtgagc

SEQ ID NO: 1637198 - DNA, 15 bp, Homo sapiens
ggtaagatgtgagca

SEQ ID NO: 1637199 - DNA, 15 bp, Homo sapiens
gtaagatgtgagcat

SEQ ID NO: 1637200 - DNA, 15 bp, Homo sapiens
taagatgtgagcatg

SEQ ID NO: 1637201 - DNA, 15 bp, Homo sapiens
aagatgtgagcatgc

SEQ ID NO: 1637202 - DNA, 15 bp, Homo sapiens
agatgtgagcatgca

SEQ ID NO: 1637203 - DNA, 15 bp, Homo sapiens
gatgtgagcatgcaa

SEQ ID NO: 1637204 - DNA, 15 bp, Homo sapiens
atgtgagcatgcaag

SEQ ID NO: 1637205 - DNA, 15 bp, Homo sapiens
tgtgagcatgcaaga

SEQ ID NO: 1637206 - DNA, 15 bp, Homo sapiens
gtgagcatgcaagag

SEQ ID NO: 1637207 - DNA, 15 bp, Homo sapiens
tgagcatgcaagagc

SEQ ID NO: 1637208 - DNA, 15 bp, Homo sapiens
gagcatgcaagagct

SEQ ID NO: 1637209 - DNA, 15 bp, Homo sapiens
agcatgcaagagcta

SEQ ID NO: 1637210 - DNA, 15 bp, Homo sapiens
gcatgcaagagctat

SEQ ID NO: 1637211 - DNA, 15 bp, Homo sapiens
catgcaagagctatg

SEQ ID NO: 1637212 - DNA, 15 bp, Homo sapiens
atgcaagagctatgt

SEQ ID NO: 1637213 - DNA, 15 bp, Homo sapiens
tgcaagagctatgtc

SEQ ID NO: 1637214 - DNA, 15 bp, Homo sapiens
gcaagagctatgtcc

SEQ ID NO: 1637215 - DNA, 15 bp, Homo sapiens
caagagctatgtcct

SEQ ID NO: 1637216 - DNA, 15 bp, Homo sapiens
aagagctatgtccta

SEQ ID NO: 1637217 - DNA, 15 bp, Homo sapiens
agagctatgtcctaa

SEQ ID NO: 1637218 - DNA, 15 bp, Homo sapiens
gagctatgtcctaaa

SEQ ID NO: 1637219 - DNA, 15 bp, Homo sapiens
agctatgtcctaaac

SEQ ID NO: 1637220 - DNA, 15 bp, Homo sapiens
gctatgtcctaaact

SEQ ID NO: 1637221 - DNA, 15 bp, Homo sapiens
ctatgtcctaaactg

SEQ ID NO: 1637222 - DNA, 15 bp, Homo sapiens
tatgtcctaaactgc

SEQ ID NO: 1637223 - DNA, 15 bp, Homo sapiens
atgtcctaaactgcg

SEQ ID NO: 1637224 - DNA, 15 bp, Homo sapiens
tgtcctaaactgcgg

SEQ ID NO: 1637225 - DNA, 15 bp, Homo sapiens
gtcctaaactgcgga

SEQ ID NO: 1637226 - DNA, 15 bp, Homo sapiens
tcctaaactgcggaa

SEQ ID NO: 1637227 - DNA, 15 bp, Homo sapiens
cctaaactgcggaag

SEQ ID NO: 1637228 - DNA, 15 bp, Homo sapiens
ctaaactgcggaagt

SEQ ID NO: 1637229 - DNA, 15 bp, Homo sapiens
taaactgcggaagtg

SEQ ID NO: 1637230 - DNA, 15 bp, Homo sapiens
aaactgcggaagtgc

SEQ ID NO: 1637231 - DNA, 15 bp, Homo sapiens
aactgcggaagtgca

SEQ ID NO: 1637232 - DNA, 15 bp, Homo sapiens
actgcggaagtgcac

SEQ ID NO: 1637233 - DNA, 15 bp, Homo sapiens
ctgcggaagtgcaca

SEQ ID NO: 1637234 - DNA, 15 bp, Homo sapiens
tgcggaagtgcacag

SEQ ID NO: 1637235 - DNA, 15 bp, Homo sapiens
gcggaagtgcacaga

SEQ ID NO: 1637236 - DNA, 15 bp, Homo sapiens
cggaagtgcacagac

SEQ ID NO: 1637237 - DNA, 15 bp, Homo sapiens
ggaagtgcacagact

SEQ ID NO: 1637238 - DNA, 15 bp, Homo sapiens
gaagtgcacagactt

SEQ ID NO: 1637239 - DNA, 15 bp, Homo sapiens
aagtgcacagacttc

SEQ ID NO: 1637240 - DNA, 15 bp, Homo sapiens
agtgcacagacttct

SEQ ID NO: 1637241 - DNA, 15 bp, Homo sapiens
gtgcacagacttctc

SEQ ID NO: 1637242 - DNA, 15 bp, Homo sapiens
tgcacagacttctct

SEQ ID NO: 1637243 - DNA, 15 bp, Homo sapiens
gcacagacttctctc

SEQ ID NO: 1637244 - DNA, 15 bp, Homo sapiens
cacagacttctctct

SEQ ID NO: 1637245 - DNA, 15 bp, Homo sapiens
acagacttctctctc

SEQ ID NO: 1637246 - DNA, 15 bp, Homo sapiens
cagacttctctctca

SEQ ID NO: 1637247 - DNA, 15 bp, Homo sapiens
agacttctctctcaa

SEQ ID NO: 1637248 - DNA, 15 bp, Homo sapiens
gacttctctctcaag

SEQ ID NO: 1637249 - DNA, 15 bp, Homo sapiens
acttctctctcaagg

SEQ ID NO: 1637250 - DNA, 15 bp, Homo sapiens
cttctctctcaaggg

SEQ ID NO: 1637251 - DNA, 15 bp, Homo sapiens
ttctctctcaaggga

SEQ ID NO: 1637252 - DNA, 15 bp, Homo sapiens
tctctctcaagggaa

SEQ ID NO: 1637253 - DNA, 15 bp, Homo sapiens
ctctctcaagggaaa

SEQ ID NO: 1637254 - DNA, 15 bp, Homo sapiens
tctctcaagggaaaa

SEQ ID NO: 1637255 - DNA, 15 bp, Homo sapiens
ctctcaagggaaaaa

SEQ ID NO: 1637256 - DNA, 15 bp, Homo sapiens
tctcaagggaaaaag

SEQ ID NO: 1637257 - DNA, 15 bp, Homo sapiens
ctcaagggaaaaagc

SEQ ID NO: 1637258 - DNA, 15 bp, Homo sapiens
tcaagggaaaaagcc

SEQ ID NO: 1637259 - DNA, 15 bp, Homo sapiens
caagggaaaaagcca

SEQ ID NO: 1637260 - DNA, 15 bp, Homo sapiens
aagggaaaaagccat

SEQ ID NO: 1637261 - DNA, 15 bp, Homo sapiens
agggaaaaagccatg

SEQ ID NO: 1637262 - DNA, 15 bp, Homo sapiens
gggaaaaagccatgc

SEQ ID NO: 1637263 - DNA, 15 bp, Homo sapiens
ggaaaaagccatgca

SEQ ID NO: 1637264 - DNA, 15 bp, Homo sapiens
gaaaaagccatgcat

SEQ ID NO: 1637265 - DNA, 15 bp, Homo sapiens
aaaaagccatgcatg

SEQ ID NO: 1637266 - DNA, 15 bp, Homo sapiens
aaaagccatgcatgg

SEQ ID NO: 1637267 - DNA, 15 bp, Homo sapiens
aaagccatgcatggc

SEQ ID NO: 1637268 - DNA, 15 bp, Homo sapiens
aagccatgcatggca

SEQ ID NO: 1637269 - DNA, 15 bp, Homo sapiens
agccatgcatggcat

SEQ ID NO: 1637270 - DNA, 15 bp, Homo sapiens
gccatgcatggcatt

SEQ ID NO: 1637271 - DNA, 15 bp, Homo sapiens
ccatgcatggcattc

SEQ ID NO: 1637272 - DNA, 15 bp, Homo sapiens
catgcatggcattcc

SEQ ID NO: 1637273 - DNA, 15 bp, Homo sapiens
atgcatggcattcct

SEQ ID NO: 1637274 - DNA, 15 bp, Homo sapiens
tgcatggcattcctt

SEQ ID NO: 1637275 - DNA, 15 bp, Homo sapiens
gcatggcattccttc

SEQ ID NO: 1637276 - DNA, 15 bp, Homo sapiens
catggcattccttct

SEQ ID NO: 1637277 - DNA, 15 bp, Homo sapiens
atggcattccttctg

SEQ ID NO: 1637278 - DNA, 15 bp, Homo sapiens
tggcattccttctgg

SEQ ID NO: 1637279 - DNA, 15 bp, Homo sapiens
ggcattccttctggc

SEQ ID NO: 1637280 - DNA, 15 bp, Homo sapiens
gcattccttctggca

SEQ ID NO: 1637281 - DNA, 15 bp, Homo sapiens
cattccttctggcat

SEQ ID NO: 1637282 - DNA, 15 bp, Homo sapiens
attccttctggcatt

SEQ ID NO: 1637283 - DNA, 15 bp, Homo sapiens
ttccttctggcattc

SEQ ID NO: 1637284 - DNA, 15 bp, Homo sapiens
tccttctggcattct

SEQ ID NO: 1637285 - DNA, 15 bp, Homo sapiens
ccttctggcattctc

SEQ ID NO: 1637286 - DNA, 15 bp, Homo sapiens
cttctggcattctct

SEQ ID NO: 1637287 - DNA, 15 bp, Homo sapiens
ttctggcattctcta

SEQ ID NO: 1637288 - DNA, 15 bp, Homo sapiens
tctggcattctctag

SEQ ID NO: 1637289 - DNA, 15 bp, Homo sapiens
ctggcattctctaga

SEQ ID NO: 1637290 - DNA, 15 bp, Homo sapiens
tggcattctctagaa

SEQ ID NO: 1637291 - DNA, 15 bp, Homo sapiens
ggcattctctagaat

SEQ ID NO: 1637292 - DNA, 15 bp, Homo sapiens
gcattctctagaata

SEQ ID NO: 1637293 - DNA, 15 bp, Homo sapiens
cattctctagaatac

SEQ ID NO: 1637294 - DNA, 15 bp, Homo sapiens
attctctagaatacc

SEQ ID NO: 1637295 - DNA, 15 bp, Homo sapiens
ttctctagaatacct

SEQ ID NO: 1637296 - DNA, 15 bp, Homo sapiens
tctctagaataccta

SEQ ID NO: 1637297 - DNA, 15 bp, Homo sapiens
ctctagaatacctag

SEQ ID NO: 1637298 - DNA, 15 bp, Homo sapiens
tctagaatacctagg

SEQ ID NO: 1637299 - DNA, 15 bp, Homo sapiens
ctagaatacctagga

SEQ ID NO: 1637300 - DNA, 15 bp, Homo sapiens
tagaatacctaggat

SEQ ID NO: 1637301 - DNA, 15 bp, Homo sapiens
agaatacctaggata

SEQ ID NO: 1637302 - DNA, 15 bp, Homo sapiens
gaatacctaggataa

SEQ ID NO: 1637303 - DNA, 15 bp, Homo sapiens
aatacctaggataaa

SEQ ID NO: 1637304 - DNA, 15 bp, Homo sapiens
atacctaggataaaa

SEQ ID NO: 1637305 - DNA, 15 bp, Homo sapiens
tacctaggataaaac

SEQ ID NO: 1637306 - DNA, 15 bp, Homo sapiens
acctaggataaaact

SEQ ID NO: 1637307 - DNA, 15 bp, Homo sapiens
cctaggataaaactc

SEQ ID NO: 1637308 - DNA, 15 bp, Homo sapiens
ctaggataaaactct

SEQ ID NO: 1637309 - DNA, 15 bp, Homo sapiens
taggataaaactctg

SEQ ID NO: 1637310 - DNA, 15 bp, Homo sapiens
aggataaaactctgt

SEQ ID NO: 1637311 - DNA, 15 bp, Homo sapiens
ggataaaactctgtg

SEQ ID NO: 1637312 - DNA, 15 bp, Homo sapiens
gataaaactctgtgc

SEQ ID NO: 1637313 - DNA, 15 bp, Homo sapiens
ataaaactctgtgca

SEQ ID NO: 1637314 - DNA, 15 bp, Homo sapiens
taaaactctgtgcaa

SEQ ID NO: 1637315 - DNA, 15 bp, Homo sapiens
aaaactctgtgcaac

SEQ ID NO: 1637316 - DNA, 15 bp, Homo sapiens
aaactctgtgcaact

SEQ ID NO: 1637317 - DNA, 15 bp, Homo sapiens
aactctgtgcaactc

SEQ ID NO: 1637318 - DNA, 15 bp, Homo sapiens
actctgtgcaactcc

SEQ ID NO: 1637319 - DNA, 15 bp, Homo sapiens
ctctgtgcaactcca

SEQ ID NO: 1637320 - DNA, 15 bp, Homo sapiens
tctgtgcaactccat

SEQ ID NO: 1637321 - DNA, 15 bp, Homo sapiens
ctgtgcaactccatg

SEQ ID NO: 1637322 - DNA, 15 bp, Homo sapiens
tgtgcaactccatgt

SEQ ID NO: 1637323 - DNA, 15 bp, Homo sapiens
gtgcaactccatgta

SEQ ID NO: 1637324 - DNA, 15 bp, Homo sapiens
tgcaactccatgtac

SEQ ID NO: 1637325 - DNA, 15 bp, Homo sapiens
gcaactccatgtact

SEQ ID NO: 1637326 - DNA, 15 bp, Homo sapiens
caactccatgtactc

SEQ ID NO: 1637327 - DNA, 15 bp, Homo sapiens
aactccatgtactca

SEQ ID NO: 1637328 - DNA, 15 bp, Homo sapiens
actccatgtactcaa

SEQ ID NO: 1637329 - DNA, 15 bp, Homo sapiens
ctccatgtactcaaa

SEQ ID NO: 1637330 - DNA, 15 bp, Homo sapiens
tccatgtactcaaat

SEQ ID NO: 1637331 - DNA, 15 bp, Homo sapiens
ccatgtactcaaatc

SEQ ID NO: 1637332 - DNA, 15 bp, Homo sapiens
catgtactcaaatcc

SEQ ID NO: 1637333 - DNA, 15 bp, Homo sapiens
atgtactcaaatcct

SEQ ID NO: 1637334 - DNA, 15 bp, Homo sapiens
tgtactcaaatcctg

SEQ ID NO: 1637335 - DNA, 15 bp, Homo sapiens
gtactcaaatcctgg

SEQ ID NO: 1637336 - DNA, 15 bp, Homo sapiens
tactcaaatcctggg

SEQ ID NO: 1637337 - DNA, 15 bp, Homo sapiens
actcaaatcctgggg

SEQ ID NO: 1637338 - DNA, 15 bp, Homo sapiens
ctcaaatcctggggt

SEQ ID NO: 1637339 - DNA, 15 bp, Homo sapiens
tcaaatcctggggtt

SEQ ID NO: 1637340 - DNA, 15 bp, Homo sapiens
caaatcctggggtta

SEQ ID NO: 1637341 - DNA, 15 bp, Homo sapiens
aaatcctggggttag

SEQ ID NO: 1637342 - DNA, 15 bp, Homo sapiens
aatcctggggttagt

SEQ ID NO: 1637343 - DNA, 15 bp, Homo sapiens
atcctggggttagtg

SEQ ID NO: 1637344 - DNA, 15 bp, Homo sapiens
tcctggggttagtgg

SEQ ID NO: 1637345 - DNA, 15 bp, Homo sapiens
cctggggttagtggg

SEQ ID NO: 1637346 - DNA, 15 bp, Homo sapiens
ctggggttagtgggt

SEQ ID NO: 1637347 - DNA, 15 bp, Homo sapiens
tggggttagtgggtc

SEQ ID NO: 1637348 - DNA, 15 bp, Homo sapiens
ggggttagtgggtcc

SEQ ID NO: 1637349 - DNA, 15 bp, Homo sapiens
gggttagtgggtcca

SEQ ID NO: 1637350 - DNA, 15 bp, Homo sapiens
ggttagtgggtccat

SEQ ID NO: 1637351 - DNA, 15 bp, Homo sapiens
gttagtgggtccatt

SEQ ID NO: 1637352 - DNA, 15 bp, Homo sapiens
ttagtgggtccattt

SEQ ID NO: 1637353 - DNA, 15 bp, Homo sapiens
tagtgggtccattta

SEQ ID NO: 1637354 - DNA, 15 bp, Homo sapiens
agtgggtccatttag

SEQ ID NO: 1637355 - DNA, 15 bp, Homo sapiens
gtgggtccatttaga

SEQ ID NO: 1637356 - DNA, 15 bp, Homo sapiens
tgggtccatttagat

SEQ ID NO: 1637357 - DNA, 15 bp, Homo sapiens
gggtccatttagatg

SEQ ID NO: 1637358 - DNA, 15 bp, Homo sapiens
ggtccatttagatgc

SEQ ID NO: 1637359 - DNA, 15 bp, Homo sapiens
gtccatttagatgcc

SEQ ID NO: 1637360 - DNA, 15 bp, Homo sapiens
tccatttagatgcct

SEQ ID NO: 1637361 - DNA, 15 bp, Homo sapiens
ccatttagatgcctt

SEQ ID NO: 1637362 - DNA, 15 bp, Homo sapiens
catttagatgccttc

SEQ ID NO: 1637363 - DNA, 15 bp, Homo sapiens
atttagatgccttca

SEQ ID NO: 1637364 - DNA, 15 bp, Homo sapiens
tttagatgccttcac

SEQ ID NO: 1637365 - DNA, 15 bp, Homo sapiens
ttagatgccttcacc

SEQ ID NO: 1637366 - DNA, 15 bp, Homo sapiens
tagatgccttcaccc

SEQ ID NO: 1637367 - DNA, 15 bp, Homo sapiens
agatgccttcaccca

SEQ ID NO: 1637368 - DNA, 15 bp, Homo sapiens
gatgccttcacccat

SEQ ID NO: 1637369 - DNA, 15 bp, Homo sapiens
atgccttcacccata

SEQ ID NO: 1637370 - DNA, 15 bp, Homo sapiens
tgccttcacccatat

SEQ ID NO: 1637371 - DNA, 15 bp, Homo sapiens
gccttcacccatatt

SEQ ID NO: 1637372 - DNA, 15 bp, Homo sapiens
ccttcacccatattc

SEQ ID NO: 1637373 - DNA, 15 bp, Homo sapiens
cttcacccatattct

SEQ ID NO: 1637374 - DNA, 15 bp, Homo sapiens
ttcacccatattctt

SEQ ID NO: 1637375 - DNA, 15 bp, Homo sapiens
tcacccatattcttc

SEQ ID NO: 1637376 - DNA, 15 bp, Homo sapiens
cacccatattcttca

SEQ ID NO: 1637377 - DNA, 15 bp, Homo sapiens
acccatattcttcat

SEQ ID NO: 1637378 - DNA, 15 bp, Homo sapiens
cccatattcttcatt

SEQ ID NO: 1637379 - DNA, 15 bp, Homo sapiens
ccatattcttcattg

SEQ ID NO: 1637380 - DNA, 15 bp, Homo sapiens
catattcttcattga

SEQ ID NO: 1637381 - DNA, 15 bp, Homo sapiens
atattcttcattgat

SEQ ID NO: 1637382 - DNA, 15 bp, Homo sapiens
tattcttcattgata

SEQ ID NO: 1637383 - DNA, 15 bp, Homo sapiens
attcttcattgatat

SEQ ID NO: 1637384 - DNA, 15 bp, Homo sapiens
ttcttcattgatatt

SEQ ID NO: 1637385 - DNA, 15 bp, Homo sapiens
tcttcattgatatta

SEQ ID NO: 1637386 - DNA, 15 bp, Homo sapiens
cttcattgatattag

SEQ ID NO: 1637387 - DNA, 15 bp, Homo sapiens
ttcattgatattagc

SEQ ID NO: 1637388 - DNA, 15 bp, Homo sapiens
tcattgatattagca

SEQ ID NO: 1637389 - DNA, 15 bp, Homo sapiens
cattgatattagcat

SEQ ID NO: 1637390 - DNA, 15 bp, Homo sapiens
attgatattagcatc

SEQ ID NO: 1637391 - DNA, 15 bp, Homo sapiens
ttgatattagcatca

SEQ ID NO: 1637392 - DNA, 15 bp, Homo sapiens
tgatattagcatcat

SEQ ID NO: 1637393 - DNA, 15 bp, Homo sapiens
gatattagcatcatg

SEQ ID NO: 1637394 - DNA, 15 bp, Homo sapiens
atattagcatcatgt

SEQ ID NO: 1637395 - DNA, 15 bp, Homo sapiens
tattagcatcatgtg

SEQ ID NO: 1637396 - DNA, 15 bp, Homo sapiens
attagcatcatgtgc

SEQ ID NO: 1637397 - DNA, 15 bp, Homo sapiens
ttagcatcatgtgcc

SEQ ID NO: 1637398 - DNA, 15 bp, Homo sapiens
tagcatcatgtgccc

SEQ ID NO: 1637399 - DNA, 15 bp, Homo sapiens
agcatcatgtgccca

SEQ ID NO: 1637400 - DNA, 15 bp, Homo sapiens
gcatcatgtgcccac

SEQ ID NO: 1637401 - DNA, 15 bp, Homo sapiens
catcatgtgcccaca

SEQ ID NO: 1637402 - DNA, 15 bp, Homo sapiens
atcatgtgcccacaa

SEQ ID NO: 1637403 - DNA, 15 bp, Homo sapiens
tcatgtgcccacaag

SEQ ID NO: 1637404 - DNA, 15 bp, Homo sapiens
catgtgcccacaaga

SEQ ID NO: 1637405 - DNA, 15 bp, Homo sapiens
atgtgcccacaagaa

SEQ ID NO: 1637406 - DNA, 15 bp, Homo sapiens
tgtgcccacaagaat

SEQ ID NO: 1637407 - DNA, 15 bp, Homo sapiens
gtgcccacaagaatc

SEQ ID NO: 1637408 - DNA, 15 bp, Homo sapiens
tgcccacaagaatcc

SEQ ID NO: 1637409 - DNA, 15 bp, Homo sapiens
gcccacaagaatccc

SEQ ID NO: 1637410 - DNA, 15 bp, Homo sapiens
cccacaagaatccca

SEQ ID NO: 1637411 - DNA, 15 bp, Homo sapiens
ccacaagaatcccag

SEQ ID NO: 1637412 - DNA, 15 bp, Homo sapiens
cacaagaatcccagt

SEQ ID NO: 1637413 - DNA, 15 bp, Homo sapiens
acaagaatcccagta

SEQ ID NO: 1637414 - DNA, 15 bp, Homo sapiens
caagaatcccagtaa

SEQ ID NO: 1637415 - DNA, 15 bp, Homo sapiens
aagaatcccagtaaa

SEQ ID NO: 1637416 - DNA, 15 bp, Homo sapiens
agaatcccagtaaag

SEQ ID NO: 1637417 - DNA, 15 bp, Homo sapiens
gaatcccagtaaagg

SEQ ID NO: 1637418 - DNA, 15 bp, Homo sapiens
aatcccagtaaaggt

SEQ ID NO: 1637419 - DNA, 15 bp, Homo sapiens
atcccagtaaaggta

SEQ ID NO: 1637420 - DNA, 15 bp, Homo sapiens
tcccagtaaaggtat

SEQ ID NO: 1637421 - DNA, 15 bp, Homo sapiens
cccagtaaaggtatc

SEQ ID NO: 1637422 - DNA, 15 bp, Homo sapiens
ccagtaaaggtatca

SEQ ID NO: 1637423 - DNA, 15 bp, Homo sapiens
cagtaaaggtatcaa

SEQ ID NO: 1637424 - DNA, 15 bp, Homo sapiens
agtaaaggtatcaac

SEQ ID NO: 1637425 - DNA, 15 bp, Homo sapiens
gtaaaggtatcaact

SEQ ID NO: 1637426 - DNA, 15 bp, Homo sapiens
taaaggtatcaactt

SEQ ID NO: 1637427 - DNA, 15 bp, Homo sapiens
aaaggtatcaacttc

SEQ ID NO: 1637428 - DNA, 15 bp, Homo sapiens
aaggtatcaacttca

SEQ ID NO: 1637429 - DNA, 15 bp, Homo sapiens
aggtatcaacttcag

SEQ ID NO: 1637430 - DNA, 15 bp, Homo sapiens
ggtatcaacttcaga

SEQ ID NO: 1637431 - DNA, 15 bp, Homo sapiens
gtatcaacttcagag

SEQ ID NO: 1637432 - DNA, 15 bp, Homo sapiens
tatcaacttcagagt

SEQ ID NO: 1637433 - DNA, 15 bp, Homo sapiens
atcaacttcagagtt

SEQ ID NO: 1637434 - DNA, 15 bp, Homo sapiens
tcaacttcagagttc

SEQ ID NO: 1637435 - DNA, 15 bp, Homo sapiens
caacttcagagttct

SEQ ID NO: 1637436 - DNA, 15 bp, Homo sapiens
aacttcagagttctt

SEQ ID NO: 1637437 - DNA, 15 bp, Homo sapiens
acttcagagttcttc

SEQ ID NO: 1637438 - DNA, 15 bp, Homo sapiens
cttcagagttcttca

SEQ ID NO: 1637439 - DNA, 15 bp, Homo sapiens
ttcagagttcttcat

SEQ ID NO: 1637440 - DNA, 15 bp, Homo sapiens
tcagagttcttcatc

SEQ ID NO: 1637441 - DNA, 15 bp, Homo sapiens
cagagttcttcatca

SEQ ID NO: 1637442 - DNA, 15 bp, Homo sapiens
agagttcttcatcac

SEQ ID NO: 1637443 - DNA, 15 bp, Homo sapiens
gagttcttcatcacc

SEQ ID NO: 1637444 - DNA, 15 bp, Homo sapiens
agttcttcatcacca

SEQ ID NO: 1637445 - DNA, 15 bp, Homo sapiens
gttcttcatcaccag

SEQ ID NO: 1637446 - DNA, 15 bp, Homo sapiens
ttcttcatcaccagg

SEQ ID NO: 1637447 - DNA, 15 bp, Homo sapiens
tcttcatcaccaggg

SEQ ID NO: 1637448 - DNA, 15 bp, Homo sapiens
cttcatcaccaggga

SEQ ID NO: 1637449 - DNA, 15 bp, Homo sapiens
ttcatcaccagggaa

SEQ ID NO: 1637450 - DNA, 15 bp, Homo sapiens
tcatcaccagggaat

SEQ ID NO: 1637451 - DNA, 15 bp, Homo sapiens
catcaccagggaatt

SEQ ID NO: 1637452 - DNA, 15 bp, Homo sapiens
atcaccagggaattc

SEQ ID NO: 1637453 - DNA, 15 bp, Homo sapiens
tcaccagggaattct

SEQ ID NO: 1637454 - DNA, 15 bp, Homo sapiens
caccagggaattctc

SEQ ID NO: 1637455 - DNA, 15 bp, Homo sapiens
accagggaattctct

SEQ ID NO: 1637456 - DNA, 15 bp, Homo sapiens
ccagggaattctctc

SEQ ID NO: 1637457 - DNA, 15 bp, Homo sapiens
cagggaattctctca

SEQ ID NO: 1637458 - DNA, 15 bp, Homo sapiens
agggaattctctcac

SEQ ID NO: 1637459 - DNA, 15 bp, Homo sapiens
gggaattctctcact

SEQ ID NO: 1637460 - DNA, 15 bp, Homo sapiens
ggaattctctcactt

SEQ ID NO: 1637461 - DNA, 15 bp, Homo sapiens
gaattctctcacttt

SEQ ID NO: 1637462 - DNA, 15 bp, Homo sapiens
aattctctcactttc

SEQ ID NO: 1637463 - DNA, 15 bp, Homo sapiens
attctctcactttca

SEQ ID NO: 1637464 - DNA, 15 bp, Homo sapiens
ttctctcactttcaa

SEQ ID NO: 1637465 - DNA, 15 bp, Homo sapiens
tctctcactttcaag

SEQ ID NO: 1637466 - DNA, 15 bp, Homo sapiens
ctctcactttcaagg

SEQ ID NO: 1637467 - DNA, 15 bp, Homo sapiens
tctcactttcaaggt

SEQ ID NO: 1637468 - DNA, 15 bp, Homo sapiens
ctcactttcaaggtg

SEQ ID NO: 1637469 - DNA, 15 bp, Homo sapiens
tcactttcaaggtgt

SEQ ID NO: 1637470 - DNA, 15 bp, Homo sapiens
cactttcaaggtgtt

SEQ ID NO: 1637471 - DNA, 15 bp, Homo sapiens
actttcaaggtgttc

SEQ ID NO: 1637472 - DNA, 15 bp, Homo sapiens
ctttcaaggtgttcc

SEQ ID NO: 1637473 - DNA, 15 bp, Homo sapiens
tttcaaggtgttccc

SEQ ID NO: 1637474 - DNA, 15 bp, Homo sapiens
ttcaaggtgttcccg

SEQ ID NO: 1637475 - DNA, 15 bp, Homo sapiens
tcaaggtgttcccga

SEQ ID NO: 1637476 - DNA, 15 bp, Homo sapiens
caaggtgttcccgag

SEQ ID NO: 1637477 - DNA, 15 bp, Homo sapiens
aaggtgttcccgagt

SEQ ID NO: 1637478 - DNA, 15 bp, Homo sapiens
aggtgttcccgagta

SEQ ID NO: 1637479 - DNA, 15 bp, Homo sapiens
ggtgttcccgagtaa

SEQ ID NO: 1637480 - DNA, 15 bp, Homo sapiens
gtgttcccgagtaag

SEQ ID NO: 1637481 - DNA, 15 bp, Homo sapiens
tgttcccgagtaagg

SEQ ID NO: 1637482 - DNA, 15 bp, Homo sapiens
gttcccgagtaaggt

SEQ ID NO: 1637483 - DNA, 15 bp, Homo sapiens
ttcccgagtaaggtg

SEQ ID NO: 1637484 - DNA, 15 bp, Homo sapiens
tcccgagtaaggtga

SEQ ID NO: 1637485 - DNA, 15 bp, Homo sapiens
cccgagtaaggtgac

SEQ ID NO: 1637486 - DNA, 15 bp, Homo sapiens
ccgagtaaggtgacc

SEQ ID NO: 1637487 - DNA, 15 bp, Homo sapiens
cgagtaaggtgacct

SEQ ID NO: 1637488 - DNA, 15 bp, Homo sapiens
gagtaaggtgacctg

SEQ ID NO: 1637489 - DNA, 15 bp, Homo sapiens
agtaaggtgacctgg

SEQ ID NO: 1637490 - DNA, 15 bp, Homo sapiens
gtaaggtgacctggc

SEQ ID NO: 1637491 - DNA, 15 bp, Homo sapiens
taaggtgacctggct

SEQ ID NO: 1637492 - DNA, 15 bp, Homo sapiens
aaggtgacctggctt

SEQ ID NO: 1637493 - DNA, 15 bp, Homo sapiens
aggtgacctggcttt

SEQ ID NO: 1637494 - DNA, 15 bp, Homo sapiens
ggtgacctggctttg

SEQ ID NO: 1637495 - DNA, 15 bp, Homo sapiens
gtgacctggctttgc

SEQ ID NO: 1637496 - DNA, 15 bp, Homo sapiens
tgacctggctttgca

SEQ ID NO: 1637497 - DNA, 15 bp, Homo sapiens
gacctggctttgcag

SEQ ID NO: 1637498 - DNA, 15 bp, Homo sapiens
acctggctttgcagc

SEQ ID NO: 1637499 - DNA, 15 bp, Homo sapiens
cctggctttgcagct

SEQ ID NO: 1637500 - DNA, 15 bp, Homo sapiens
ctggctttgcagctt

SEQ ID NO: 1637501 - DNA, 15 bp, Homo sapiens
tggctttgcagctta

SEQ ID NO: 1637502 - DNA, 15 bp, Homo sapiens
ggctttgcagcttac

SEQ ID NO: 1637503 - DNA, 15 bp, Homo sapiens
gctttgcagcttact

SEQ ID NO: 1637504 - DNA, 15 bp, Homo sapiens
ctttgcagcttacta

SEQ ID NO: 1637505 - DNA, 15 bp, Homo sapiens
tttgcagcttactag

SEQ ID NO: 1637506 - DNA, 15 bp, Homo sapiens
ttgcagcttactaga

SEQ ID NO: 1637507 - DNA, 15 bp, Homo sapiens
tgcagcttactagat

SEQ ID NO: 1637508 - DNA, 15 bp, Homo sapiens
gcagcttactagatg

SEQ ID NO: 1637509 - DNA, 15 bp, Homo sapiens
cagcttactagatgt

SEQ ID NO: 1637510 - DNA, 15 bp, Homo sapiens
agcttactagatgta

SEQ ID NO: 1637511 - DNA, 15 bp, Homo sapiens
gcttactagatgtat

SEQ ID NO: 1637512 - DNA, 15 bp, Homo sapiens
cttactagatgtatg

SEQ ID NO: 1637513 - DNA, 15 bp, Homo sapiens
ttactagatgtatga

SEQ ID NO: 1637514 - DNA, 15 bp, Homo sapiens
tactagatgtatgat

SEQ ID NO: 1637515 - DNA, 15 bp, Homo sapiens
actagatgtatgatt

SEQ ID NO: 1637516 - DNA, 15 bp, Homo sapiens
ctagatgtatgattt

SEQ ID NO: 1637517 - DNA, 15 bp, Homo sapiens
tagatgtatgattta

SEQ ID NO: 1637518 - DNA, 15 bp, Homo sapiens
agatgtatgatttag

SEQ ID NO: 1637519 - DNA, 15 bp, Homo sapiens
gatgtatgatttagg

SEQ ID NO: 1637520 - DNA, 15 bp, Homo sapiens
atgtatgatttaggt

SEQ ID NO: 1637521 - DNA, 15 bp, Homo sapiens
tgtatgatttaggtc

SEQ ID NO: 1637522 - DNA, 15 bp, Homo sapiens
gtatgatttaggtca

SEQ ID NO: 1637523 - DNA, 15 bp, Homo sapiens
tatgatttaggtcaa

SEQ ID NO: 1637524 - DNA, 15 bp, Homo sapiens
atgatttaggtcaag

SEQ ID NO: 1637525 - DNA, 15 bp, Homo sapiens
tgatttaggtcaagg

SEQ ID NO: 1637526 - DNA, 15 bp, Homo sapiens
gatttaggtcaaggt

SEQ ID NO: 1637527 - DNA, 15 bp, Homo sapiens
atttaggtcaaggta

SEQ ID NO: 1637528 - DNA, 15 bp, Homo sapiens
tttaggtcaaggtac

SEQ ID NO: 1637529 - DNA, 15 bp, Homo sapiens
ttaggtcaaggtact

SEQ ID NO: 1637530 - DNA, 15 bp, Homo sapiens
taggtcaaggtactt

SEQ ID NO: 1637531 - DNA, 15 bp, Homo sapiens
aggtcaaggtactta

SEQ ID NO: 1637532 - DNA, 15 bp, Homo sapiens
ggtcaaggtacttaa

SEQ ID NO: 1637533 - DNA, 15 bp, Homo sapiens
gtcaaggtacttaac

SEQ ID NO: 1637534 - DNA, 15 bp, Homo sapiens
tcaaggtacttaacc

SEQ ID NO: 1637535 - DNA, 15 bp, Homo sapiens
caaggtacttaacct

SEQ ID NO: 1637536 - DNA, 15 bp, Homo sapiens
aaggtacttaacctt

SEQ ID NO: 1637537 - DNA, 15 bp, Homo sapiens
aggtacttaaccttg

SEQ ID NO: 1637538 - DNA, 15 bp, Homo sapiens
ggtacttaaccttgc

SEQ ID NO: 1637539 - DNA, 15 bp, Homo sapiens
gtacttaaccttgct

SEQ ID NO: 1637540 - DNA, 15 bp, Homo sapiens
tacttaaccttgcta

SEQ ID NO: 1637541 - DNA, 15 bp, Homo sapiens
acttaaccttgctaa

SEQ ID NO: 1637542 - DNA, 15 bp, Homo sapiens
cttaaccttgctaag

SEQ ID NO: 1637543 - DNA, 15 bp, Homo sapiens
ttaaccttgctaagc

SEQ ID NO: 1637544 - DNA, 15 bp, Homo sapiens
taaccttgctaagcc

SEQ ID NO: 1637545 - DNA, 15 bp, Homo sapiens
aaccttgctaagcct

SEQ ID NO: 1637546 - DNA, 15 bp, Homo sapiens
accttgctaagcctc

SEQ ID NO: 1637547 - DNA, 15 bp, Homo sapiens
ccttgctaagcctca

SEQ ID NO: 1637548 - DNA, 15 bp, Homo sapiens
cttgctaagcctcag

SEQ ID NO: 1637549 - DNA, 15 bp, Homo sapiens
ttgctaagcctcagc

SEQ ID NO: 1637550 - DNA, 15 bp, Homo sapiens
tgctaagcctcagct

SEQ ID NO: 1637551 - DNA, 15 bp, Homo sapiens
gctaagcctcagctt

SEQ ID NO: 1637552 - DNA, 15 bp, Homo sapiens
ctaagcctcagcttt

SEQ ID NO: 1637553 - DNA, 15 bp, Homo sapiens
taagcctcagctttc

SEQ ID NO: 1637554 - DNA, 15 bp, Homo sapiens
aagcctcagctttct

SEQ ID NO: 1637555 - DNA, 15 bp, Homo sapiens
agcctcagctttcta

SEQ ID NO: 1637556 - DNA, 15 bp, Homo sapiens
gcctcagctttctaa

SEQ ID NO: 1637557 - DNA, 15 bp, Homo sapiens
cctcagctttctaaa

SEQ ID NO: 1637558 - DNA, 15 bp, Homo sapiens
ctcagctttctaaaa

SEQ ID NO: 1637559 - DNA, 15 bp, Homo sapiens
tcagctttctaaaat

SEQ ID NO: 1637560 - DNA, 15 bp, Homo sapiens
cagctttctaaaatg

SEQ ID NO: 1637561 - DNA, 15 bp, Homo sapiens
agctttctaaaatgt

SEQ ID NO: 1637562 - DNA, 15 bp, Homo sapiens
gctttctaaaatgta

SEQ ID NO: 1637563 - DNA, 15 bp, Homo sapiens
ctttctaaaatgtaa

SEQ ID NO: 1637564 - DNA, 15 bp, Homo sapiens
tttctaaaatgtaaa

SEQ ID NO: 1637565 - DNA, 15 bp, Homo sapiens
ttctaaaatgtaaaa

SEQ ID NO: 1637566 - DNA, 15 bp, Homo sapiens
tctaaaatgtaaaat

SEQ ID NO: 1637567 - DNA, 15 bp, Homo sapiens
ctaaaatgtaaaatg

SEQ ID NO: 1637568 - DNA, 15 bp, Homo sapiens
taaaatgtaaaatgg

SEQ ID NO: 1637569 - DNA, 15 bp, Homo sapiens
aaaatgtaaaatgga

SEQ ID NO: 1637570 - DNA, 15 bp, Homo sapiens
aaatgtaaaatggat

SEQ ID NO: 1637571 - DNA, 15 bp, Homo sapiens
aatgtaaaatggatg

SEQ ID NO: 1637572 - DNA, 15 bp, Homo sapiens
atgtaaaatggatgt

SEQ ID NO: 1637573 - DNA, 15 bp, Homo sapiens
tgtaaaatggatgta

SEQ ID NO: 1637574 - DNA, 15 bp, Homo sapiens
gtaaaatggatgtag

SEQ ID NO: 1637575 - DNA, 15 bp, Homo sapiens
taaaatggatgtagt

SEQ ID NO: 1637576 - DNA, 15 bp, Homo sapiens
aaaatggatgtagta

SEQ ID NO: 1637577 - DNA, 15 bp, Homo sapiens
aaatggatgtagtaa

SEQ ID NO: 1637578 - DNA, 15 bp, Homo sapiens
aatggatgtagtaat

SEQ ID NO: 1637579 - DNA, 15 bp, Homo sapiens
agcaaactatgtact

SEQ ID NO: 1637580 - DNA, 15 bp, Homo sapiens
gcaaactatgtacta

SEQ ID NO: 1637581 - DNA, 15 bp, Homo sapiens
caaactatgtactat

SEQ ID NO: 1637582 - DNA, 15 bp, Homo sapiens
aaactatgtactata

SEQ ID NO: 1637583 - DNA, 15 bp, Homo sapiens
aactatgtactataa

SEQ ID NO: 1637584 - DNA, 15 bp, Homo sapiens
actatgtactataag

SEQ ID NO: 1637585 - DNA, 15 bp, Homo sapiens
ctatgtactataaga

SEQ ID NO: 1637586 - DNA, 15 bp, Homo sapiens
tatgtactataagac

SEQ ID NO: 1637587 - DNA, 15 bp, Homo sapiens
atgtactataagaca

SEQ ID NO: 1637588 - DNA, 15 bp, Homo sapiens
tgtactataagacag

SEQ ID NO: 1637589 - DNA, 15 bp, Homo sapiens
gtactataagacagt

SEQ ID NO: 1637590 - DNA, 15 bp, Homo sapiens
tactataagacagtt

SEQ ID NO: 1637591 - DNA, 15 bp, Homo sapiens
actataagacagttc

SEQ ID NO: 1637592 - DNA, 15 bp, Homo sapiens
ctataagacagttct

SEQ ID NO: 1637593 - DNA, 15 bp, Homo sapiens
tataagacagttctt

SEQ ID NO: 1637594 - DNA, 15 bp, Homo sapiens
ataagacagttcttt

SEQ ID NO: 1637595 - DNA, 15 bp, Homo sapiens
taagacagttctttt

SEQ ID NO: 1637596 - DNA, 15 bp, Homo sapiens
aagacagttcttttc

SEQ ID NO: 1637597 - DNA, 15 bp, Homo sapiens
agacagttcttttcg

SEQ ID NO: 1637598 - DNA, 15 bp, Homo sapiens
gacagttcttttcgg

SEQ ID NO: 1637599 - DNA, 15 bp, Homo sapiens
acagttcttttcgga

SEQ ID NO: 1637600 - DNA, 15 bp, Homo sapiens
cagttcttttcggaa

SEQ ID NO: 1637601 - DNA, 15 bp, Homo sapiens
agttcttttcggaat

SEQ ID NO: 1637602 - DNA, 15 bp, Homo sapiens
gttcttttcggaatg

SEQ ID NO: 1637603 - DNA, 15 bp, Homo sapiens
ttcttttcggaatga

SEQ ID NO: 1637604 - DNA, 15 bp, Homo sapiens
tcttttcggaatgag

SEQ ID NO: 1637605 - DNA, 15 bp, Homo sapiens
cttttcggaatgagt

SEQ ID NO: 1637606 - DNA, 15 bp, Homo sapiens
ttttcggaatgagtt

SEQ ID NO: 1637607 - DNA, 15 bp, Homo sapiens
tttcggaatgagttt

SEQ ID NO: 1637608 - DNA, 15 bp, Homo sapiens
ttcggaatgagtttt

SEQ ID NO: 1637609 - DNA, 15 bp, Homo sapiens
tcggaatgagtttta

SEQ ID NO: 1637610 - DNA, 15 bp, Homo sapiens
cggaatgagttttat

SEQ ID NO: 1637611 - DNA, 15 bp, Homo sapiens
ggaatgagttttatc

SEQ ID NO: 1637612 - DNA, 15 bp, Homo sapiens
gaatgagttttatca

SEQ ID NO: 1637613 - DNA, 15 bp, Homo sapiens
aatgagttttatcaa

SEQ ID NO: 1637614 - DNA, 15 bp, Homo sapiens
atgagttttatcaac

SEQ ID NO: 1637615 - DNA, 15 bp, Homo sapiens
tgagttttatcaact

SEQ ID NO: 1637616 - DNA, 15 bp, Homo sapiens
gagttttatcaactc

SEQ ID NO: 1637617 - DNA, 15 bp, Homo sapiens
agttttatcaactct

SEQ ID NO: 1637618 - DNA, 15 bp, Homo sapiens
gttttatcaactcta

SEQ ID NO: 1637619 - DNA, 15 bp, Homo sapiens
ttttatcaactctaa

SEQ ID NO: 1637620 - DNA, 15 bp, Homo sapiens
tttatcaactctaaa

SEQ ID NO: 1637621 - DNA, 15 bp, Homo sapiens
ttatcaactctaaag

SEQ ID NO: 1637622 - DNA, 15 bp, Homo sapiens
tatcaactctaaagc

SEQ ID NO: 1637623 - DNA, 15 bp, Homo sapiens
atcaactctaaagca

SEQ ID NO: 1637624 - DNA, 15 bp, Homo sapiens
tcaactctaaagcaa

SEQ ID NO: 1637625 - DNA, 15 bp, Homo sapiens
caactctaaagcaat

SEQ ID NO: 1637626 - DNA, 15 bp, Homo sapiens
aactctaaagcaatt

SEQ ID NO: 1637627 - DNA, 15 bp, Homo sapiens
actctaaagcaatta

SEQ ID NO: 1637628 - DNA, 15 bp, Homo sapiens
ctctaaagcaattat

SEQ ID NO: 1637629 - DNA, 15 bp, Homo sapiens
tctaaagcaattatc

SEQ ID NO: 1637630 - DNA, 15 bp, Homo sapiens
aaagcaattatcttg

SEQ ID NO: 1637631 - DNA, 15 bp, Homo sapiens
aagcaattatcttga

SEQ ID NO: 1637632 - DNA, 15 bp, Homo sapiens
agcaattatcttgaa

SEQ ID NO: 1637633 - DNA, 15 bp, Homo sapiens
gcaattatcttgaat

SEQ ID NO: 1637634 - DNA, 15 bp, Homo sapiens
caattatcttgaatg

SEQ ID NO: 1637635 - DNA, 15 bp, Homo sapiens
aattatcttgaatgc

SEQ ID NO: 1637636 - DNA, 15 bp, Homo sapiens
attatcttgaatgcc

SEQ ID NO: 1637637 - DNA, 15 bp, Homo sapiens
ttatcttgaatgcct

SEQ ID NO: 1637638 - DNA, 15 bp, Homo sapiens
tatcttgaatgccta

SEQ ID NO: 1637639 - DNA, 15 bp, Homo sapiens
atcttgaatgcctac

SEQ ID NO: 1637640 - DNA, 15 bp, Homo sapiens
tcttgaatgcctaca

SEQ ID NO: 1637641 - DNA, 15 bp, Homo sapiens
cttgaatgcctacat

SEQ ID NO: 1637642 - DNA, 15 bp, Homo sapiens
ttgaatgcctacatg

SEQ ID NO: 1637643 - DNA, 15 bp, Homo sapiens
tgaatgcctacatgt

SEQ ID NO: 1637644 - DNA, 15 bp, Homo sapiens
gaatgcctacatgtg

SEQ ID NO: 1637645 - DNA, 15 bp, Homo sapiens
aatgcctacatgtga

SEQ ID NO: 1637646 - DNA, 15 bp, Homo sapiens
atgcctacatgtgat

SEQ ID NO: 1637647 - DNA, 15 bp, Homo sapiens
tgcctacatgtgatt

SEQ ID NO: 1637648 - DNA, 15 bp, Homo sapiens
gcctacatgtgatta

SEQ ID NO: 1637649 - DNA, 15 bp, Homo sapiens
cctacatgtgattac

SEQ ID NO: 1637650 - DNA, 15 bp, Homo sapiens
ctacatgtgattact

SEQ ID NO: 1637651 - DNA, 15 bp, Homo sapiens
tacatgtgattactg

SEQ ID NO: 1637652 - DNA, 15 bp, Homo sapiens
acatgtgattactga

SEQ ID NO: 1637653 - DNA, 15 bp, Homo sapiens
catgtgattactgaa

SEQ ID NO: 1637654 - DNA, 15 bp, Homo sapiens
atgtgattactgaat

SEQ ID NO: 1637655 - DNA, 15 bp, Homo sapiens
tgtgattactgaata

SEQ ID NO: 1637656 - DNA, 15 bp, Homo sapiens
gtgattactgaataa

SEQ ID NO: 1637657 - DNA, 15 bp, Homo sapiens
tgattactgaataat

SEQ ID NO: 1637658 - DNA, 15 bp, Homo sapiens
gattactgaataata

SEQ ID NO: 1637659 - DNA, 15 bp, Homo sapiens
attactgaataatat

SEQ ID NO: 1637660 - DNA, 15 bp, Homo sapiens
ttactgaataatatg

SEQ ID NO: 1637661 - DNA, 15 bp, Homo sapiens
tactgaataatatga

SEQ ID NO: 1637662 - DNA, 15 bp, Homo sapiens
actgaataatatgaa

SEQ ID NO: 1637663 - DNA, 15 bp, Homo sapiens
ctgaataatatgaac

SEQ ID NO: 1637664 - DNA, 15 bp, Homo sapiens
tgaataatatgaacc

SEQ ID NO: 1637665 - DNA, 15 bp, Homo sapiens
gaataatatgaacca

SEQ ID NO: 1637666 - DNA, 15 bp, Homo sapiens
aataatatgaaccaa

SEQ ID NO: 1637667 - DNA, 15 bp, Homo sapiens
ataatatgaaccaag

SEQ ID NO: 1637668 - DNA, 15 bp, Homo sapiens
taatatgaaccaaga

SEQ ID NO: 1637669 - DNA, 15 bp, Homo sapiens
aatatgaaccaagaa

SEQ ID NO: 1637670 - DNA, 15 bp, Homo sapiens
atatgaaccaagaaa

SEQ ID NO: 1637671 - DNA, 15 bp, Homo sapiens
tatgaaccaagaaaa

SEQ ID NO: 1637672 - DNA, 15 bp, Homo sapiens
atgaaccaagaaaac

SEQ ID NO: 1637673 - DNA, 15 bp, Homo sapiens
tgaaccaagaaaaca

SEQ ID NO: 1637674 - DNA, 15 bp, Homo sapiens
gaaccaagaaaacag

SEQ ID NO: 1637675 - DNA, 15 bp, Homo sapiens
aaccaagaaaacaga

SEQ ID NO: 1637676 - DNA, 15 bp, Homo sapiens
accaagaaaacagaa

SEQ ID NO: 1637677 - DNA, 15 bp, Homo sapiens
ccaagaaaacagaaa

SEQ ID NO: 1637678 - DNA, 15 bp, Homo sapiens
caagaaaacagaaag

SEQ ID NO: 1637679 - DNA, 15 bp, Homo sapiens
aagaaaacagaaaga

SEQ ID NO: 1637680 - DNA, 15 bp, Homo sapiens
agaaaacagaaagaa

SEQ ID NO: 1637681 - DNA, 15 bp, Homo sapiens
gaaaacagaaagaat

SEQ ID NO: 1637682 - DNA, 15 bp, Homo sapiens
aaaacagaaagaatc

SEQ ID NO: 1637683 - DNA, 15 bp, Homo sapiens
aaacagaaagaatct

SEQ ID NO: 1637684 - DNA, 15 bp, Homo sapiens
aacagaaagaatcta

SEQ ID NO: 1637685 - DNA, 15 bp, Homo sapiens
acagaaagaatctat

SEQ ID NO: 1637686 - DNA, 15 bp, Homo sapiens
cagaaagaatctata

SEQ ID NO: 1637687 - DNA, 15 bp, Homo sapiens
agaaagaatctatat

SEQ ID NO: 1637688 - DNA, 15 bp, Homo sapiens
gaaagaatctatatt

SEQ ID NO: 1637689 - DNA, 15 bp, Homo sapiens
aaagaatctatatta

SEQ ID NO: 1637690 - DNA, 15 bp, Homo sapiens
aagaatctatattat

SEQ ID NO: 1637691 - DNA, 15 bp, Homo sapiens
agaatctatattatc

SEQ ID NO: 1637692 - DNA, 15 bp, Homo sapiens
gaatctatattatct

SEQ ID NO: 1637693 - DNA, 15 bp, Homo sapiens
aatctatattatctt

SEQ ID NO: 1637694 - DNA, 15 bp, Homo sapiens
atctatattatcttt

SEQ ID NO: 1637695 - DNA, 15 bp, Homo sapiens
tctatattatctttc

SEQ ID NO: 1637696 - DNA, 15 bp, Homo sapiens
ctatattatctttcc

SEQ ID NO: 1637697 - DNA, 15 bp, Homo sapiens
tatattatctttcca

SEQ ID NO: 1637698 - DNA, 15 bp, Homo sapiens
atattatctttccat

SEQ ID NO: 1637699 - DNA, 15 bp, Homo sapiens
tattatctttccatt

SEQ ID NO: 1637700 - DNA, 15 bp, Homo sapiens
attatctttccattt

SEQ ID NO: 1637701 - DNA, 15 bp, Homo sapiens
ttatctttccatttc

SEQ ID NO: 1637702 - DNA, 15 bp, Homo sapiens
tatctttccatttcc

SEQ ID NO: 1637703 - DNA, 15 bp, Homo sapiens
atctttccatttcct

SEQ ID NO: 1637704 - DNA, 15 bp, Homo sapiens
tctttccatttcctt

SEQ ID NO: 1637705 - DNA, 15 bp, Homo sapiens
ctttccatttccttc

SEQ ID NO: 1637706 - DNA, 15 bp, Homo sapiens
tttccatttccttct

SEQ ID NO: 1637707 - DNA, 15 bp, Homo sapiens
ttccatttccttctt

SEQ ID NO: 1637708 - DNA, 15 bp, Homo sapiens
tccatttccttcttt

SEQ ID NO: 1637709 - DNA, 15 bp, Homo sapiens
ccatttccttctttc

SEQ ID NO: 1637710 - DNA, 15 bp, Homo sapiens
catttccttctttcc

SEQ ID NO: 1637711 - DNA, 15 bp, Homo sapiens
atttccttctttcca

SEQ ID NO: 1637712 - DNA, 15 bp, Homo sapiens
tttccttctttccag

SEQ ID NO: 1637713 - DNA, 15 bp, Homo sapiens
ttccttctttccagt

SEQ ID NO: 1637714 - DNA, 15 bp, Homo sapiens
tccttctttccagta

SEQ ID NO: 1637715 - DNA, 15 bp, Homo sapiens
ccttctttccagtat

SEQ ID NO: 1637716 - DNA, 15 bp, Homo sapiens
cttctttccagtatc

SEQ ID NO: 1637717 - DNA, 15 bp, Homo sapiens
ttctttccagtatca

SEQ ID NO: 1637718 - DNA, 15 bp, Homo sapiens
tctttccagtatcaa

SEQ ID NO: 1637719 - DNA, 15 bp, Homo sapiens
ctttccagtatcaat

SEQ ID NO: 1637720 - DNA, 15 bp, Homo sapiens
tttccagtatcaata

SEQ ID NO: 1637721 - DNA, 15 bp, Homo sapiens
ttccagtatcaatac

SEQ ID NO: 1637722 - DNA, 15 bp, Homo sapiens
tccagtatcaatacc

SEQ ID NO: 1637723 - DNA, 15 bp, Homo sapiens
ccagtatcaataccc

SEQ ID NO: 1637724 - DNA, 15 bp, Homo sapiens
cagtatcaataccca

SEQ ID NO: 1637725 - DNA, 15 bp, Homo sapiens
agtatcaatacccaa

SEQ ID NO: 1637726 - DNA, 15 bp, Homo sapiens
gtatcaatacccaag

SEQ ID NO: 1637727 - DNA, 15 bp, Homo sapiens
tatcaatacccaagc

SEQ ID NO: 1637728 - DNA, 15 bp, Homo sapiens
atcaatacccaagcc

SEQ ID NO: 1637729 - DNA, 15 bp, Homo sapiens
tcaatacccaagcct

SEQ ID NO: 1637730 - DNA, 15 bp, Homo sapiens
caatacccaagcctc

SEQ ID NO: 1637731 - DNA, 15 bp, Homo sapiens
aatacccaagcctct

SEQ ID NO: 1637732 - DNA, 15 bp, Homo sapiens
atacccaagcctcta

SEQ ID NO: 1637733 - DNA, 15 bp, Homo sapiens
tacccaagcctctag

SEQ ID NO: 1637734 - DNA, 15 bp, Homo sapiens
acccaagcctctagt

SEQ ID NO: 1637735 - DNA, 15 bp, Homo sapiens
cccaagcctctagtg

SEQ ID NO: 1637736 - DNA, 15 bp, Homo sapiens
ccaagcctctagtga

SEQ ID NO: 1637737 - DNA, 15 bp, Homo sapiens
caagcctctagtgat

SEQ ID NO: 1637738 - DNA, 15 bp, Homo sapiens
aagcctctagtgata

SEQ ID NO: 1637739 - DNA, 15 bp, Homo sapiens
agcctctagtgatac

SEQ ID NO: 1637740 - DNA, 15 bp, Homo sapiens
gcctctagtgataca

SEQ ID NO: 1637741 - DNA, 15 bp, Homo sapiens
cctctagtgatacat

SEQ ID NO: 1637742 - DNA, 15 bp, Homo sapiens
ctctagtgatacatg

SEQ ID NO: 1637743 - DNA, 15 bp, Homo sapiens
tctagtgatacatgg

SEQ ID NO: 1637744 - DNA, 15 bp, Homo sapiens
ctagtgatacatggc

SEQ ID NO: 1637745 - DNA, 15 bp, Homo sapiens
tagtgatacatggca

SEQ ID NO: 1637746 - DNA, 15 bp, Homo sapiens
agtgatacatggcat

SEQ ID NO: 1637747 - DNA, 15 bp, Homo sapiens
gtgatacatggcata

SEQ ID NO: 1637748 - DNA, 15 bp, Homo sapiens
tgatacatggcatat

SEQ ID NO: 1637749 - DNA, 15 bp, Homo sapiens
gatacatggcatata

SEQ ID NO: 1637750 - DNA, 15 bp, Homo sapiens
atacatggcatataa

SEQ ID NO: 1637751 - DNA, 15 bp, Homo sapiens
tacatggcatataat

SEQ ID NO: 1637752 - DNA, 15 bp, Homo sapiens
acatggcatataatg

SEQ ID NO: 1637753 - DNA, 15 bp, Homo sapiens
catggcatataatgt

SEQ ID NO: 1637754 - DNA, 15 bp, Homo sapiens
atggcatataatgtt

SEQ ID NO: 1637755 - DNA, 15 bp, Homo sapiens
tggcatataatgttg

SEQ ID NO: 1637756 - DNA, 15 bp, Homo sapiens
ggcatataatgttgg

SEQ ID NO: 1637757 - DNA, 15 bp, Homo sapiens
gcatataatgttgga

SEQ ID NO: 1637758 - DNA, 15 bp, Homo sapiens
catataatgttggat

SEQ ID NO: 1637759 - DNA, 15 bp, Homo sapiens
atataatgttggatg

SEQ ID NO: 1637760 - DNA, 15 bp, Homo sapiens
tataatgttggatgg

SEQ ID NO: 1637761 - DNA, 15 bp, Homo sapiens
ataatgttggatgga

SEQ ID NO: 1637762 - DNA, 15 bp, Homo sapiens
taatgttggatggat

SEQ ID NO: 1637763 - DNA, 15 bp, Homo sapiens
aatgttggatggatg

SEQ ID NO: 1637764 - DNA, 15 bp, Homo sapiens
atgttggatggatgg

SEQ ID NO: 1637765 - DNA, 15 bp, Homo sapiens
tgttggatggatgga

SEQ ID NO: 1637766 - DNA, 15 bp, Homo sapiens
gttggatggatggat

SEQ ID NO: 1637767 - DNA, 15 bp, Homo sapiens
ttggatggatggatg

SEQ ID NO: 1637768 - DNA, 15 bp, Homo sapiens
tggatggatggatgg

SEQ ID NO: 1637769 - DNA, 15 bp, Homo sapiens
ggatggatggatgga

SEQ ID NO: 1637770 - DNA, 15 bp, Homo sapiens
gatggatggatggat

SEQ ID NO: 1637771 - DNA, 15 bp, Homo sapiens
atggatggatggatg

SEQ ID NO: 1637772 - DNA, 15 bp, Homo sapiens
tggatggatggatga

SEQ ID NO: 1637773 - DNA, 15 bp, Homo sapiens
ggatggatggatgaa

SEQ ID NO: 1637774 - DNA, 15 bp, Homo sapiens
gatggatggatgaat

SEQ ID NO: 1637775 - DNA, 15 bp, Homo sapiens
atggatggatgaatg

SEQ ID NO: 1637776 - DNA, 15 bp, Homo sapiens
tggatggatgaatgg

SEQ ID NO: 1637777 - DNA, 15 bp, Homo sapiens
ggatggatgaatgga

SEQ ID NO: 1637778 - DNA, 15 bp, Homo sapiens
gatggatgaatggat

SEQ ID NO: 1637779 - DNA, 15 bp, Homo sapiens
atggatgaatggatg

SEQ ID NO: 1637780 - DNA, 15 bp, Homo sapiens
tggatgaatggatgg

SEQ ID NO: 1637781 - DNA, 15 bp, Homo sapiens
ggatgaatggatggt

SEQ ID NO: 1637782 - DNA, 15 bp, Homo sapiens
gatgaatggatggtt

SEQ ID NO: 1637783 - DNA, 15 bp, Homo sapiens
atgaatggatggttg

SEQ ID NO: 1637784 - DNA, 15 bp, Homo sapiens
tgaatggatggttgg

SEQ ID NO: 1637785 - DNA, 15 bp, Homo sapiens
gaatggatggttgga

SEQ ID NO: 1637786 - DNA, 15 bp, Homo sapiens
aatggatggttggat

SEQ ID NO: 1637787 - DNA, 15 bp, Homo sapiens
atggatggttggatg

SEQ ID NO: 1637788 - DNA, 15 bp, Homo sapiens
tggatggttggatgg

SEQ ID NO: 1637789 - DNA, 15 bp, Homo sapiens
ggatggttggatgga

SEQ ID NO: 1637790 - DNA, 15 bp, Homo sapiens
gatggttggatggac

SEQ ID NO: 1637791 - DNA, 15 bp, Homo sapiens
atggttggatggaca

SEQ ID NO: 1637792 - DNA, 15 bp, Homo sapiens
tggttggatggacaa

SEQ ID NO: 1637793 - DNA, 15 bp, Homo sapiens
ggttggatggacaaa

SEQ ID NO: 1637794 - DNA, 15 bp, Homo sapiens
gttggatggacaaat

SEQ ID NO: 1637795 - DNA, 15 bp, Homo sapiens
ttggatggacaaatg

SEQ ID NO: 1637796 - DNA, 15 bp, Homo sapiens
tggatggacaaatga

SEQ ID NO: 1637797 - DNA, 15 bp, Homo sapiens
ggatggacaaatgag

SEQ ID NO: 1637798 - DNA, 15 bp, Homo sapiens
gatggacaaatgagt

SEQ ID NO: 1637799 - DNA, 15 bp, Homo sapiens
atggacaaatgagta

SEQ ID NO: 1637800 - DNA, 15 bp, Homo sapiens
tggacaaatgagtaa

SEQ ID NO: 1637801 - DNA, 15 bp, Homo sapiens
ggacaaatgagtaac

SEQ ID NO: 1637802 - DNA, 15 bp, Homo sapiens
gacaaatgagtaaca

SEQ ID NO: 1637803 - DNA, 15 bp, Homo sapiens
acaaatgagtaacat

SEQ ID NO: 1637804 - DNA, 15 bp, Homo sapiens
caaatgagtaacata

SEQ ID NO: 1637805 - DNA, 15 bp, Homo sapiens
aaatgagtaacatag

SEQ ID NO: 1637806 - DNA, 15 bp, Homo sapiens
aatgagtaacatagg

SEQ ID NO: 1637807 - DNA, 15 bp, Homo sapiens
atgagtaacataggc

SEQ ID NO: 1637808 - DNA, 15 bp, Homo sapiens
tgagtaacataggct

SEQ ID NO: 1637809 - DNA, 15 bp, Homo sapiens
gagtaacataggctg

SEQ ID NO: 1637810 - DNA, 15 bp, Homo sapiens
agtaacataggctga

SEQ ID NO: 1637811 - DNA, 15 bp, Homo sapiens
gtaacataggctgat

SEQ ID NO: 1637812 - DNA, 15 bp, Homo sapiens
taacataggctgatg

SEQ ID NO: 1637813 - DNA, 15 bp, Homo sapiens
aacataggctgatga

SEQ ID NO: 1637814 - DNA, 15 bp, Homo sapiens
acataggctgatgaa

SEQ ID NO: 1637815 - DNA, 15 bp, Homo sapiens
cataggctgatgaat

SEQ ID NO: 1637816 - DNA, 15 bp, Homo sapiens
ataggctgatgaata

SEQ ID NO: 1637817 - DNA, 15 bp, Homo sapiens
taggctgatgaatag

SEQ ID NO: 1637818 - DNA, 15 bp, Homo sapiens
aggctgatgaatagt

SEQ ID NO: 1637819 - DNA, 15 bp, Homo sapiens
ggctgatgaatagtg

SEQ ID NO: 1637820 - DNA, 15 bp, Homo sapiens
gctgatgaatagtgg

SEQ ID NO: 1637821 - DNA, 15 bp, Homo sapiens
ctgatgaatagtggt

SEQ ID NO: 1637822 - DNA, 15 bp, Homo sapiens
tgatgaatagtggta

SEQ ID NO: 1637823 - DNA, 15 bp, Homo sapiens
gatgaatagtggtag

SEQ ID NO: 1637824 - DNA, 15 bp, Homo sapiens
atgaatagtggtaga

SEQ ID NO: 1637825 - DNA, 15 bp, Homo sapiens
tgaatagtggtagaa

SEQ ID NO: 1637826 - DNA, 15 bp, Homo sapiens
gaatagtggtagaaa

SEQ ID NO: 1637827 - DNA, 15 bp, Homo sapiens
aatagtggtagaaag

SEQ ID NO: 1637828 - DNA, 15 bp, Homo sapiens
atagtggtagaaaga

SEQ ID NO: 1637829 - DNA, 15 bp, Homo sapiens
tagtggtagaaagac

SEQ ID NO: 1637830 - DNA, 15 bp, Homo sapiens
agtggtagaaagaca

SEQ ID NO: 1637831 - DNA, 15 bp, Homo sapiens
gtggtagaaagacac

SEQ ID NO: 1637832 - DNA, 15 bp, Homo sapiens
tggtagaaagacaca

SEQ ID NO: 1637833 - DNA, 15 bp, Homo sapiens
ggtagaaagacacac

SEQ ID NO: 1637834 - DNA, 15 bp, Homo sapiens
gtagaaagacacacc

SEQ ID NO: 1637835 - DNA, 15 bp, Homo sapiens
tagaaagacacacca

SEQ ID NO: 1637836 - DNA, 15 bp, Homo sapiens
agaaagacacaccat

SEQ ID NO: 1637837 - DNA, 15 bp, Homo sapiens
gaaagacacaccata

SEQ ID NO: 1637838 - DNA, 15 bp, Homo sapiens
aaagacacaccataa

SEQ ID NO: 1637839 - DNA, 15 bp, Homo sapiens
aagacacaccataaa

SEQ ID NO: 1637840 - DNA, 15 bp, Homo sapiens
agacacaccataaaa

SEQ ID NO: 1637841 - DNA, 15 bp, Homo sapiens
gacacaccataaaaa

SEQ ID NO: 1637842 - DNA, 15 bp, Homo sapiens
acacaccataaaaac

SEQ ID NO: 1637843 - DNA, 15 bp, Homo sapiens
cacaccataaaaaca

SEQ ID NO: 1637844 - DNA, 15 bp, Homo sapiens
acaccataaaaacaa

SEQ ID NO: 1637845 - DNA, 15 bp, Homo sapiens
caccataaaaacaag

SEQ ID NO: 1637846 - DNA, 15 bp, Homo sapiens
accataaaaacaagt

SEQ ID NO: 1637847 - DNA, 15 bp, Homo sapiens
ccataaaaacaagtg

SEQ ID NO: 1637848 - DNA, 15 bp, Homo sapiens
cataaaaacaagtgg

SEQ ID NO: 1637849 - DNA, 15 bp, Homo sapiens
ataaaaacaagtggc

SEQ ID NO: 1637850 - DNA, 15 bp, Homo sapiens
taaaaacaagtggca

SEQ ID NO: 1637851 - DNA, 15 bp, Homo sapiens
aaaaacaagtggcac

SEQ ID NO: 1637852 - DNA, 15 bp, Homo sapiens
aaaacaagtggcact

SEQ ID NO: 1637853 - DNA, 15 bp, Homo sapiens
aaacaagtggcactt

SEQ ID NO: 1637854 - DNA, 15 bp, Homo sapiens
aacaagtggcacttc

SEQ ID NO: 1637855 - DNA, 15 bp, Homo sapiens
acaagtggcacttct

SEQ ID NO: 1637856 - DNA, 15 bp, Homo sapiens
caagtggcacttctg

SEQ ID NO: 1637857 - DNA, 15 bp, Homo sapiens
aagtggcacttctga

SEQ ID NO: 1637858 - DNA, 15 bp, Homo sapiens
agtggcacttctgag

SEQ ID NO: 1637859 - DNA, 15 bp, Homo sapiens
gtggcacttctgaga

SEQ ID NO: 1637860 - DNA, 15 bp, Homo sapiens
tggcacttctgagat

SEQ ID NO: 1637861 - DNA, 15 bp, Homo sapiens
ggcacttctgagatg

SEQ ID NO: 1637862 - DNA, 15 bp, Homo sapiens
gcacttctgagatga

SEQ ID NO: 1637863 - DNA, 15 bp, Homo sapiens
acttctgagatgaaa

SEQ ID NO: 1637864 - DNA, 15 bp, Homo sapiens
cttctgagatgaaat

SEQ ID NO: 1637865 - DNA, 15 bp, Homo sapiens
ttctgagatgaaatg

SEQ ID NO: 1637866 - DNA, 15 bp, Homo sapiens
tctgagatgaaatga

SEQ ID NO: 1637867 - DNA, 15 bp, Homo sapiens
ctgagatgaaatgat

SEQ ID NO: 1637868 - DNA, 15 bp, Homo sapiens
tgagatgaaatgatt

SEQ ID NO: 1637869 - DNA, 15 bp, Homo sapiens
gagatgaaatgattc

SEQ ID NO: 1637870 - DNA, 15 bp, Homo sapiens
agatgaaatgattcc

SEQ ID NO: 1637871 - DNA, 15 bp, Homo sapiens
gatgaaatgattcct

SEQ ID NO: 1637872 - DNA, 15 bp, Homo sapiens
atgaaatgattccta

SEQ ID NO: 1637873 - DNA, 15 bp, Homo sapiens
tgaaatgattcctat

SEQ ID NO: 1637874 - DNA, 15 bp, Homo sapiens
gaaatgattcctatt

SEQ ID NO: 1637875 - DNA, 15 bp, Homo sapiens
aaatgattcctattc

SEQ ID NO: 1637876 - DNA, 15 bp, Homo sapiens
aatgattcctattct

SEQ ID NO: 1637877 - DNA, 15 bp, Homo sapiens
atgattcctattctc

SEQ ID NO: 1637878 - DNA, 15 bp, Homo sapiens
tgattcctattctcc

SEQ ID NO: 1637879 - DNA, 15 bp, Homo sapiens
gattcctattctcct

SEQ ID NO: 1637880 - DNA, 15 bp, Homo sapiens
attcctattctccta

SEQ ID NO: 1637881 - DNA, 15 bp, Homo sapiens
ttcctattctcctac

SEQ ID NO: 1637882 - DNA, 15 bp, Homo sapiens
tcctattctcctaca

SEQ ID NO: 1637883 - DNA, 15 bp, Homo sapiens
cctattctcctacac

SEQ ID NO: 1637884 - DNA, 15 bp, Homo sapiens
ctattctcctacaca

SEQ ID NO: 1637885 - DNA, 15 bp, Homo sapiens
tattctcctacacaa

SEQ ID NO: 1637886 - DNA, 15 bp, Homo sapiens
attctcctacacaag

SEQ ID NO: 1637887 - DNA, 15 bp, Homo sapiens
ttctcctacacaaga

SEQ ID NO: 1637888 - DNA, 15 bp, Homo sapiens
tctcctacacaagac

SEQ ID NO: 1637889 - DNA, 15 bp, Homo sapiens
ctcctacacaagaca

SEQ ID NO: 1637890 - DNA, 15 bp, Homo sapiens
tcctacacaagacag

SEQ ID NO: 1637891 - DNA, 15 bp, Homo sapiens
cctacacaagacagt

SEQ ID NO: 1637892 - DNA, 15 bp, Homo sapiens
ctacacaagacagtg

SEQ ID NO: 1637893 - DNA, 15 bp, Homo sapiens
tacacaagacagtga

SEQ ID NO: 1637894 - DNA, 15 bp, Homo sapiens
acacaagacagtgag

SEQ ID NO: 1637895 - DNA, 15 bp, Homo sapiens
cacaagacagtgagg

SEQ ID NO: 1637896 - DNA, 15 bp, Homo sapiens
acaagacagtgaggc

SEQ ID NO: 1637897 - DNA, 15 bp, Homo sapiens
caagacagtgaggca

SEQ ID NO: 1637898 - DNA, 15 bp, Homo sapiens
aagacagtgaggcaa

SEQ ID NO: 1637899 - DNA, 15 bp, Homo sapiens
agacagtgaggcaag

SEQ ID NO: 1637900 - DNA, 15 bp, Homo sapiens
gacagtgaggcaagt

SEQ ID NO: 1637901 - DNA, 15 bp, Homo sapiens
acagtgaggcaagta

SEQ ID NO: 1637902 - DNA, 15 bp, Homo sapiens
cagtgaggcaagtac

SEQ ID NO: 1637903 - DNA, 15 bp, Homo sapiens
agtgaggcaagtaca

SEQ ID NO: 1637904 - DNA, 15 bp, Homo sapiens
gtgaggcaagtacag

SEQ ID NO: 1637905 - DNA, 15 bp, Homo sapiens
tgaggcaagtacaga

SEQ ID NO: 1637906 - DNA, 15 bp, Homo sapiens
gaggcaagtacagag

SEQ ID NO: 1637907 - DNA, 15 bp, Homo sapiens
aggcaagtacagagt

SEQ ID NO: 1637908 - DNA, 15 bp, Homo sapiens
ggcaagtacagagta

SEQ ID NO: 1637909 - DNA, 15 bp, Homo sapiens
gcaagtacagagtaa

SEQ ID NO: 1637910 - DNA, 15 bp, Homo sapiens
caagtacagagtaaa

SEQ ID NO: 1637911 - DNA, 15 bp, Homo sapiens
aagtacagagtaaaa

SEQ ID NO: 1637912 - DNA, 15 bp, Homo sapiens
agtacagagtaaaaa

SEQ ID NO: 1637913 - DNA, 15 bp, Homo sapiens
gtacagagtaaaaaa

SEQ ID NO: 1637914 - DNA, 15 bp, Homo sapiens
tacagagtaaaaaag

SEQ ID NO: 1637915 - DNA, 15 bp, Homo sapiens
acagagtaaaaaagg

SEQ ID NO: 1637916 - DNA, 15 bp, Homo sapiens
cagagtaaaaaagga

SEQ ID NO: 1637917 - DNA, 15 bp, Homo sapiens
agagtaaaaaaggaa

SEQ ID NO: 1637918 - DNA, 15 bp, Homo sapiens
gagtaaaaaaggaaa

SEQ ID NO: 1637919 - DNA, 15 bp, Homo sapiens
agtaaaaaaggaaag

SEQ ID NO: 1637920 - DNA, 15 bp, Homo sapiens
gtaaaaaaggaaagg

SEQ ID NO: 1637921 - DNA, 15 bp, Homo sapiens
taaaaaaggaaaggc

SEQ ID NO: 1637922 - DNA, 15 bp, Homo sapiens
aaaaaaggaaaggca

SEQ ID NO: 1637923 - DNA, 15 bp, Homo sapiens
aaaaaggaaaggcat

SEQ ID NO: 1637924 - DNA, 15 bp, Homo sapiens
aaaaggaaaggcata

SEQ ID NO: 1637925 - DNA, 15 bp, Homo sapiens
aaaggaaaggcatag

SEQ ID NO: 1637926 - DNA, 15 bp, Homo sapiens
aaggaaaggcatagg

SEQ ID NO: 1637927 - DNA, 15 bp, Homo sapiens
aggaaaggcatagga

SEQ ID NO: 1637928 - DNA, 15 bp, Homo sapiens
ggaaaggcataggag

SEQ ID NO: 1637929 - DNA, 15 bp, Homo sapiens
gaaaggcataggagc

SEQ ID NO: 1637930 - DNA, 15 bp, Homo sapiens
aaaggcataggagct

SEQ ID NO: 1637931 - DNA, 15 bp, Homo sapiens
aaggcataggagcta

SEQ ID NO: 1637932 - DNA, 15 bp, Homo sapiens
aggcataggagctat

SEQ ID NO: 1637933 - DNA, 15 bp, Homo sapiens
ggcataggagctatg

SEQ ID NO: 1637934 - DNA, 15 bp, Homo sapiens
gcataggagctatgc

SEQ ID NO: 1637935 - DNA, 15 bp, Homo sapiens
cataggagctatgct

SEQ ID NO: 1637936 - DNA, 15 bp, Homo sapiens
ataggagctatgctt

SEQ ID NO: 1637937 - DNA, 15 bp, Homo sapiens
taggagctatgctta

SEQ ID NO: 1637938 - DNA, 15 bp, Homo sapiens
aggagctatgcttat

SEQ ID NO: 1637939 - DNA, 15 bp, Homo sapiens
ggagctatgcttata

SEQ ID NO: 1637940 - DNA, 15 bp, Homo sapiens
gagctatgcttatac

SEQ ID NO: 1637941 - DNA, 15 bp, Homo sapiens
agctatgcttataca

SEQ ID NO: 1637942 - DNA, 15 bp, Homo sapiens
gctatgcttatacaa

SEQ ID NO: 1637943 - DNA, 15 bp, Homo sapiens
ctatgcttatacaag

SEQ ID NO: 1637944 - DNA, 15 bp, Homo sapiens
tatgcttatacaagt

SEQ ID NO: 1637945 - DNA, 15 bp, Homo sapiens
atgcttatacaagta

SEQ ID NO: 1637946 - DNA, 15 bp, Homo sapiens
tgcttatacaagtat

SEQ ID NO: 1637947 - DNA, 15 bp, Homo sapiens
gcttatacaagtatt

SEQ ID NO: 1637948 - DNA, 15 bp, Homo sapiens
cttatacaagtattg

SEQ ID NO: 1637949 - DNA, 15 bp, Homo sapiens
ttatacaagtattgt

SEQ ID NO: 1637950 - DNA, 15 bp, Homo sapiens
tatacaagtattgta

SEQ ID NO: 1637951 - DNA, 15 bp, Homo sapiens
atacaagtattgtat

SEQ ID NO: 1637952 - DNA, 15 bp, Homo sapiens
tacaagtattgtatg

SEQ ID NO: 1637953 - DNA, 15 bp, Homo sapiens
acaagtattgtatgt

SEQ ID NO: 1637954 - DNA, 15 bp, Homo sapiens
caagtattgtatgtt

SEQ ID NO: 1637955 - DNA, 15 bp, Homo sapiens
aagtattgtatgttt

SEQ ID NO: 1637956 - DNA, 15 bp, Homo sapiens
agtattgtatgtttg

SEQ ID NO: 1637957 - DNA, 15 bp, Homo sapiens
gtattgtatgtttgg

SEQ ID NO: 1637958 - DNA, 15 bp, Homo sapiens
tattgtatgtttgga

SEQ ID NO: 1637959 - DNA, 15 bp, Homo sapiens
attgtatgtttggaa

SEQ ID NO: 1637960 - DNA, 15 bp, Homo sapiens
ttgtatgtttggaat

SEQ ID NO: 1637961 - DNA, 15 bp, Homo sapiens
tgtatgtttggaatt

SEQ ID NO: 1637962 - DNA, 15 bp, Homo sapiens
gtatgtttggaattt

SEQ ID NO: 1637963 - DNA, 15 bp, Homo sapiens
tatgtttggaatttc

SEQ ID NO: 1637964 - DNA, 15 bp, Homo sapiens
atgtttggaatttcc

SEQ ID NO: 1637965 - DNA, 15 bp, Homo sapiens
tgtttggaatttcct

SEQ ID NO: 1637966 - DNA, 15 bp, Homo sapiens
gtttggaatttcctt

SEQ ID NO: 1637967 - DNA, 15 bp, Homo sapiens
tttggaatttccttc

SEQ ID NO: 1637968 - DNA, 15 bp, Homo sapiens
ttggaatttccttcg

SEQ ID NO: 1637969 - DNA, 15 bp, Homo sapiens
tggaatttccttcgc

SEQ ID NO: 1637970 - DNA, 15 bp, Homo sapiens
ggaatttccttcgct

SEQ ID NO: 1637971 - DNA, 15 bp, Homo sapiens
gaatttccttcgctg

SEQ ID NO: 1637972 - DNA, 15 bp, Homo sapiens
aatttccttcgctgg

SEQ ID NO: 1637973 - DNA, 15 bp, Homo sapiens
atttccttcgctggc

SEQ ID NO: 1637974 - DNA, 15 bp, Homo sapiens
tttccttcgctggcc

SEQ ID NO: 1637975 - DNA, 15 bp, Homo sapiens
ttccttcgctggcca

SEQ ID NO: 1637976 - DNA, 15 bp, Homo sapiens
tccttcgctggccaa

SEQ ID NO: 1637977 - DNA, 15 bp, Homo sapiens
ccttcgctggccaaa

SEQ ID NO: 1637978 - DNA, 15 bp, Homo sapiens
cttcgctggccaaat

SEQ ID NO: 1637979 - DNA, 15 bp, Homo sapiens
ttcgctggccaaatt

SEQ ID NO: 1637980 - DNA, 15 bp, Homo sapiens
tcgctggccaaattg

SEQ ID NO: 1637981 - DNA, 15 bp, Homo sapiens
cgctggccaaattga

SEQ ID NO: 1637982 - DNA, 15 bp, Homo sapiens
gctggccaaattgaa

SEQ ID NO: 1637983 - DNA, 15 bp, Homo sapiens
ctggccaaattgaaa

SEQ ID NO: 1637984 - DNA, 15 bp, Homo sapiens
tggccaaattgaaat

SEQ ID NO: 1637985 - DNA, 15 bp, Homo sapiens
ggccaaattgaaatt

SEQ ID NO: 1637986 - DNA, 15 bp, Homo sapiens
gccaaattgaaattg

SEQ ID NO: 1637987 - DNA, 15 bp, Homo sapiens
ccaaattgaaattgt

SEQ ID NO: 1637988 - DNA, 15 bp, Homo sapiens
caaattgaaattgtt

SEQ ID NO: 1637989 - DNA, 15 bp, Homo sapiens
aaattgaaattgttc

SEQ ID NO: 1637990 - DNA, 15 bp, Homo sapiens
aattgaaattgttca

SEQ ID NO: 1637991 - DNA, 15 bp, Homo sapiens
attgaaattgttcaa

SEQ ID NO: 1637992 - DNA, 15 bp, Homo sapiens
ttgaaattgttcaag

SEQ ID NO: 1637993 - DNA, 15 bp, Homo sapiens
tgaaattgttcaagg

SEQ ID NO: 1637994 - DNA, 15 bp, Homo sapiens
gaaattgttcaagga

SEQ ID NO: 1637995 - DNA, 15 bp, Homo sapiens
aaattgttcaaggac

SEQ ID NO: 1637996 - DNA, 15 bp, Homo sapiens
aattgttcaaggacc

SEQ ID NO: 1637997 - DNA, 15 bp, Homo sapiens
attgttcaaggacct

SEQ ID NO: 1637998 - DNA, 15 bp, Homo sapiens
ttgttcaaggaccta

SEQ ID NO: 1637999 - DNA, 15 bp, Homo sapiens
tgttcaaggacctat

SEQ ID NO: 1638000 - DNA, 15 bp, Homo sapiens
gttcaaggacctatt

SEQ ID NO: 1638001 - DNA, 15 bp, Homo sapiens
ttcaaggacctattg

SEQ ID NO: 1638002 - DNA, 15 bp, Homo sapiens
tcaaggacctattgc

SEQ ID NO: 1638003 - DNA, 15 bp, Homo sapiens
caaggacctattgct

SEQ ID NO: 1638004 - DNA, 15 bp, Homo sapiens
aaggacctattgcta

SEQ ID NO: 1638005 - DNA, 15 bp, Homo sapiens
aggacctattgctac

SEQ ID NO: 1638006 - DNA, 15 bp, Homo sapiens
ggacctattgctaca

SEQ ID NO: 1638007 - DNA, 15 bp, Homo sapiens
gacctattgctacag

SEQ ID NO: 1638008 - DNA, 15 bp, Homo sapiens
acctattgctacagg

SEQ ID NO: 1638009 - DNA, 15 bp, Homo sapiens
cctattgctacaggt

SEQ ID NO: 1638010 - DNA, 15 bp, Homo sapiens
ctattgctacaggtg

SEQ ID NO: 1638011 - DNA, 15 bp, Homo sapiens
tattgctacaggtgg

SEQ ID NO: 1638012 - DNA, 15 bp, Homo sapiens
attgctacaggtggc

SEQ ID NO: 1638013 - DNA, 15 bp, Homo sapiens
ttgctacaggtggca

SEQ ID NO: 1638014 - DNA, 15 bp, Homo sapiens
tgctacaggtggcaa

SEQ ID NO: 1638015 - DNA, 15 bp, Homo sapiens
gctacaggtggcaac

SEQ ID NO: 1638016 - DNA, 15 bp, Homo sapiens
ctacaggtggcaact

SEQ ID NO: 1638017 - DNA, 15 bp, Homo sapiens
tacaggtggcaactg

SEQ ID NO: 1638018 - DNA, 15 bp, Homo sapiens
acaggtggcaactgg

SEQ ID NO: 1638019 - DNA, 15 bp, Homo sapiens
caggtggcaactggc

SEQ ID NO: 1638020 - DNA, 15 bp, Homo sapiens
aggtggcaactggct

SEQ ID NO: 1638021 - DNA, 15 bp, Homo sapiens
ggtggcaactggcta

SEQ ID NO: 1638022 - DNA, 15 bp, Homo sapiens
gtggcaactggctaa

SEQ ID NO: 1638023 - DNA, 15 bp, Homo sapiens
tggcaactggctaag

SEQ ID NO: 1638024 - DNA, 15 bp, Homo sapiens
ggcaactggctaaga

SEQ ID NO: 1638025 - DNA, 15 bp, Homo sapiens
gcaactggctaagaa

SEQ ID NO: 1638026 - DNA, 15 bp, Homo sapiens
caactggctaagaat

SEQ ID NO: 1638027 - DNA, 15 bp, Homo sapiens
aactggctaagaatt

SEQ ID NO: 1638028 - DNA, 15 bp, Homo sapiens
actggctaagaattt

SEQ ID NO: 1638029 - DNA, 15 bp, Homo sapiens
ctggctaagaatttc

SEQ ID NO: 1638030 - DNA, 15 bp, Homo sapiens
tggctaagaatttca

SEQ ID NO: 1638031 - DNA, 15 bp, Homo sapiens
ggctaagaatttcat

SEQ ID NO: 1638032 - DNA, 15 bp, Homo sapiens
gctaagaatttcata

SEQ ID NO: 1638033 - DNA, 15 bp, Homo sapiens
ctaagaatttcatag

SEQ ID NO: 1638034 - DNA, 15 bp, Homo sapiens
taagaatttcatagt

SEQ ID NO: 1638035 - DNA, 15 bp, Homo sapiens
aagaatttcatagtg

SEQ ID NO: 1638036 - DNA, 15 bp, Homo sapiens
agaatttcatagtga

SEQ ID NO: 1638037 - DNA, 15 bp, Homo sapiens
gaatttcatagtgaa

SEQ ID NO: 1638038 - DNA, 15 bp, Homo sapiens
aatttcatagtgaat

SEQ ID NO: 1638039 - DNA, 15 bp, Homo sapiens
atttcatagtgaata

SEQ ID NO: 1638040 - DNA, 15 bp, Homo sapiens
tttcatagtgaatat

SEQ ID NO: 1638041 - DNA, 15 bp, Homo sapiens
ttcatagtgaatatt

SEQ ID NO: 1638042 - DNA, 15 bp, Homo sapiens
tcatagtgaatatta

SEQ ID NO: 1638043 - DNA, 15 bp, Homo sapiens
catagtgaatattat

SEQ ID NO: 1638044 - DNA, 15 bp, Homo sapiens
atagtgaatattata

SEQ ID NO: 1638045 - DNA, 15 bp, Homo sapiens
tagtgaatattatac

SEQ ID NO: 1638046 - DNA, 15 bp, Homo sapiens
agtgaatattataca

SEQ ID NO: 1638047 - DNA, 15 bp, Homo sapiens
gtgaatattatacac

SEQ ID NO: 1638048 - DNA, 15 bp, Homo sapiens
tgaatattatacacc

SEQ ID NO: 1638049 - DNA, 15 bp, Homo sapiens
gaatattatacacct

SEQ ID NO: 1638050 - DNA, 15 bp, Homo sapiens
aatattatacaccta

SEQ ID NO: 1638051 - DNA, 15 bp, Homo sapiens
atattatacacctat

SEQ ID NO: 1638052 - DNA, 15 bp, Homo sapiens
tattatacacctatt

SEQ ID NO: 1638053 - DNA, 15 bp, Homo sapiens
attatacacctatta

SEQ ID NO: 1638054 - DNA, 15 bp, Homo sapiens
ttatacacctattac

SEQ ID NO: 1638055 - DNA, 15 bp, Homo sapiens
tatacacctattact

SEQ ID NO: 1638056 - DNA, 15 bp, Homo sapiens
atacacctattactc

SEQ ID NO: 1638057 - DNA, 15 bp, Homo sapiens
tacacctattactcc

SEQ ID NO: 1638058 - DNA, 15 bp, Homo sapiens
acacctattactccc

SEQ ID NO: 1638059 - DNA, 15 bp, Homo sapiens
cacctattactcccc

SEQ ID NO: 1638060 - DNA, 15 bp, Homo sapiens
acctattactcccct

SEQ ID NO: 1638061 - DNA, 15 bp, Homo sapiens
cctattactcccctt

SEQ ID NO: 1638062 - DNA, 15 bp, Homo sapiens
ctattactcccctta

SEQ ID NO: 1638063 - DNA, 15 bp, Homo sapiens
tattactccccttaa

SEQ ID NO: 1638064 - DNA, 15 bp, Homo sapiens
attactccccttaat

SEQ ID NO: 1638065 - DNA, 15 bp, Homo sapiens
ttactccccttaatg

SEQ ID NO: 1638066 - DNA, 15 bp, Homo sapiens
tactccccttaatgt

SEQ ID NO: 1638067 - DNA, 15 bp, Homo sapiens
actccccttaatgtt

SEQ ID NO: 1638068 - DNA, 15 bp, Homo sapiens
ctccccttaatgttt

SEQ ID NO: 1638069 - DNA, 15 bp, Homo sapiens
tccccttaatgtttc

SEQ ID NO: 1638070 - DNA, 15 bp, Homo sapiens
ccccttaatgtttct

SEQ ID NO: 1638071 - DNA, 15 bp, Homo sapiens
cccttaatgtttctt

SEQ ID NO: 1638072 - DNA, 15 bp, Homo sapiens
ccttaatgtttcttt

SEQ ID NO: 1638073 - DNA, 15 bp, Homo sapiens
cttaatgtttctttg

SEQ ID NO: 1638074 - DNA, 15 bp, Homo sapiens
ttaatgtttctttga

SEQ ID NO: 1638075 - DNA, 15 bp, Homo sapiens
taatgtttctttgaa

SEQ ID NO: 1638076 - DNA, 15 bp, Homo sapiens
aatgtttctttgaag

SEQ ID NO: 1638077 - DNA, 15 bp, Homo sapiens
atgtttctttgaagt

SEQ ID NO: 1638078 - DNA, 15 bp, Homo sapiens
tgtttctttgaagta

SEQ ID NO: 1638079 - DNA, 15 bp, Homo sapiens
gtttctttgaagtaa

SEQ ID NO: 1638080 - DNA, 15 bp, Homo sapiens
tttctttgaagtaag

SEQ ID NO: 1638081 - DNA, 15 bp, Homo sapiens
ttctttgaagtaagc

SEQ ID NO: 1638082 - DNA, 15 bp, Homo sapiens
tctttgaagtaagca

SEQ ID NO: 1638083 - DNA, 15 bp, Homo sapiens
ctttgaagtaagcag

SEQ ID NO: 1638084 - DNA, 15 bp, Homo sapiens
tttgaagtaagcaga

SEQ ID NO: 1638085 - DNA, 15 bp, Homo sapiens
ttgaagtaagcagaa

SEQ ID NO: 1638086 - DNA, 15 bp, Homo sapiens
tgaagtaagcagaat

SEQ ID NO: 1638087 - DNA, 15 bp, Homo sapiens
gaagtaagcagaata

SEQ ID NO: 1638088 - DNA, 15 bp, Homo sapiens
aagtaagcagaatat

SEQ ID NO: 1638089 - DNA, 15 bp, Homo sapiens
agtaagcagaatatt

SEQ ID NO: 1638090 - DNA, 15 bp, Homo sapiens
gtaagcagaatatta

SEQ ID NO: 1638091 - DNA, 15 bp, Homo sapiens
taagcagaatattaa

SEQ ID NO: 1638092 - DNA, 15 bp, Homo sapiens
aagcagaatattaat

SEQ ID NO: 1638093 - DNA, 15 bp, Homo sapiens
agcagaatattaata

SEQ ID NO: 1638094 - DNA, 15 bp, Homo sapiens
gcagaatattaataa

SEQ ID NO: 1638095 - DNA, 15 bp, Homo sapiens
cagaatattaataat

SEQ ID NO: 1638096 - DNA, 15 bp, Homo sapiens
agaatattaataatc

SEQ ID NO: 1638097 - DNA, 15 bp, Homo sapiens
gaatattaataatca

SEQ ID NO: 1638098 - DNA, 15 bp, Homo sapiens
aatattaataatcat

SEQ ID NO: 1638099 - DNA, 15 bp, Homo sapiens
atattaataatcatt

SEQ ID NO: 1638100 - DNA, 15 bp, Homo sapiens
tattaataatcattt

SEQ ID NO: 1638101 - DNA, 15 bp, Homo sapiens
attaataatcattta

SEQ ID NO: 1638102 - DNA, 15 bp, Homo sapiens
ttaataatcatttaa

SEQ ID NO: 1638103 - DNA, 15 bp, Homo sapiens
taataatcatttaaa

SEQ ID NO: 1638104 - DNA, 15 bp, Homo sapiens
aataatcatttaaaa

SEQ ID NO: 1638105 - DNA, 15 bp, Homo sapiens
ataatcatttaaaat

SEQ ID NO: 1638106 - DNA, 15 bp, Homo sapiens
taatcatttaaaatt

SEQ ID NO: 1638107 - DNA, 15 bp, Homo sapiens
aatcatttaaaattc

SEQ ID NO: 1638108 - DNA, 15 bp, Homo sapiens
atcatttaaaattcc

SEQ ID NO: 1638109 - DNA, 15 bp, Homo sapiens
tcatttaaaattcca

SEQ ID NO: 1638110 - DNA, 15 bp, Homo sapiens
catttaaaattccag

SEQ ID NO: 1638111 - DNA, 15 bp, Homo sapiens
atttaaaattccagt

SEQ ID NO: 1638112 - DNA, 15 bp, Homo sapiens
tttaaaattccagtg

SEQ ID NO: 1638113 - DNA, 15 bp, Homo sapiens
ttaaaattccagtgt

SEQ ID NO: 1638114 - DNA, 15 bp, Homo sapiens
taaaattccagtgtt

SEQ ID NO: 1638115 - DNA, 15 bp, Homo sapiens
aaaattccagtgttt

SEQ ID NO: 1638116 - DNA, 15 bp, Homo sapiens
aaattccagtgtttc

SEQ ID NO: 1638117 - DNA, 15 bp, Homo sapiens
aattccagtgtttca

SEQ ID NO: 1638118 - DNA, 15 bp, Homo sapiens
attccagtgtttcaa

SEQ ID NO: 1638119 - DNA, 15 bp, Homo sapiens
ttccagtgtttcaac

SEQ ID NO: 1638120 - DNA, 15 bp, Homo sapiens
tccagtgtttcaact

SEQ ID NO: 1638121 - DNA, 15 bp, Homo sapiens
ccagtgtttcaactt

SEQ ID NO: 1638122 - DNA, 15 bp, Homo sapiens
cagtgtttcaacttc

SEQ ID NO: 1638123 - DNA, 15 bp, Homo sapiens
agtgtttcaacttca

SEQ ID NO: 1638124 - DNA, 15 bp, Homo sapiens
gtgtttcaacttcaa

SEQ ID NO: 1638125 - DNA, 15 bp, Homo sapiens
tgtttcaacttcaat

SEQ ID NO: 1638126 - DNA, 15 bp, Homo sapiens
gtttcaacttcaatt

SEQ ID NO: 1638127 - DNA, 15 bp, Homo sapiens
tttcaacttcaattg

SEQ ID NO: 1638128 - DNA, 15 bp, Homo sapiens
ttcaacttcaattgt

SEQ ID NO: 1638129 - DNA, 15 bp, Homo sapiens
tcaacttcaattgtt

SEQ ID NO: 1638130 - DNA, 15 bp, Homo sapiens
caacttcaattgttt

SEQ ID NO: 1638131 - DNA, 15 bp, Homo sapiens
aacttcaattgtttc

SEQ ID NO: 1638132 - DNA, 15 bp, Homo sapiens
acttcaattgtttcc

SEQ ID NO: 1638133 - DNA, 15 bp, Homo sapiens
cttcaattgtttcct

SEQ ID NO: 1638134 - DNA, 15 bp, Homo sapiens
ttcaattgtttccta

SEQ ID NO: 1638135 - DNA, 15 bp, Homo sapiens
tcaattgtttcctag

SEQ ID NO: 1638136 - DNA, 15 bp, Homo sapiens
caattgtttcctagg

SEQ ID NO: 1638137 - DNA, 15 bp, Homo sapiens
aattgtttcctaggg

SEQ ID NO: 1638138 - DNA, 15 bp, Homo sapiens
attgtttcctagggc

SEQ ID NO: 1638139 - DNA, 15 bp, Homo sapiens
ttgtttcctagggca

SEQ ID NO: 1638140 - DNA, 15 bp, Homo sapiens
tgtttcctagggcaa

SEQ ID NO: 1638141 - DNA, 15 bp, Homo sapiens
gtttcctagggcaaa

SEQ ID NO: 1638142 - DNA, 15 bp, Homo sapiens
tttcctagggcaaat

SEQ ID NO: 1638143 - DNA, 15 bp, Homo sapiens
ttcctagggcaaatt

SEQ ID NO: 1638144 - DNA, 15 bp, Homo sapiens
tcctagggcaaattg

SEQ ID NO: 1638145 - DNA, 15 bp, Homo sapiens
cctagggcaaattga

SEQ ID NO: 1638146 - DNA, 15 bp, Homo sapiens
ctagggcaaattgat

SEQ ID NO: 1638147 - DNA, 15 bp, Homo sapiens
tagggcaaattgata

SEQ ID NO: 1638148 - DNA, 15 bp, Homo sapiens
agggcaaattgataa

SEQ ID NO: 1638149 - DNA, 15 bp, Homo sapiens
gggcaaattgataat

SEQ ID NO: 1638150 - DNA, 15 bp, Homo sapiens
ggcaaattgataatt

SEQ ID NO: 1638151 - DNA, 15 bp, Homo sapiens
gcaaattgataattg

SEQ ID NO: 1638152 - DNA, 15 bp, Homo sapiens
caaattgataattgt

SEQ ID NO: 1638153 - DNA, 15 bp, Homo sapiens
aaattgataattgtg

SEQ ID NO: 1638154 - DNA, 15 bp, Homo sapiens
aattgataattgtgt

SEQ ID NO: 1638155 - DNA, 15 bp, Homo sapiens
attgataattgtgtg

SEQ ID NO: 1638156 - DNA, 15 bp, Homo sapiens
ttgataattgtgtgt

SEQ ID NO: 1638157 - DNA, 15 bp, Homo sapiens
tgataattgtgtgta

SEQ ID NO: 1638158 - DNA, 15 bp, Homo sapiens
gataattgtgtgtaa

SEQ ID NO: 1638159 - DNA, 15 bp, Homo sapiens
ataattgtgtgtaaa

SEQ ID NO: 1638160 - DNA, 15 bp, Homo sapiens
taattgtgtgtaaaa

SEQ ID NO: 1638161 - DNA, 15 bp, Homo sapiens
aattgtgtgtaaaac

SEQ ID NO: 1638162 - DNA, 15 bp, Homo sapiens
attgtgtgtaaaact

SEQ ID NO: 1638163 - DNA, 15 bp, Homo sapiens
ttgtgtgtaaaacta

SEQ ID NO: 1638164 - DNA, 15 bp, Homo sapiens
tgtgtgtaaaactaa

SEQ ID NO: 1638165 - DNA, 15 bp, Homo sapiens
gtgtgtaaaactaat

SEQ ID NO: 1638166 - DNA, 15 bp, Homo sapiens
tgtgtaaaactaatt

SEQ ID NO: 1638167 - DNA, 15 bp, Homo sapiens
gtgtaaaactaattg

SEQ ID NO: 1638168 - DNA, 15 bp, Homo sapiens
tgtaaaactaattgg

SEQ ID NO: 1638169 - DNA, 15 bp, Homo sapiens
gtaaaactaattgga

SEQ ID NO: 1638170 - DNA, 15 bp, Homo sapiens
taaaactaattggaa

SEQ ID NO: 1638171 - DNA, 15 bp, Homo sapiens
aaaactaattggaat

SEQ ID NO: 1638172 - DNA, 15 bp, Homo sapiens
aaactaattggaata

SEQ ID NO: 1638173 - DNA, 15 bp, Homo sapiens
aactaattggaatat

SEQ ID NO: 1638174 - DNA, 15 bp, Homo sapiens
actaattggaatatg

SEQ ID NO: 1638175 - DNA, 15 bp, Homo sapiens
ctaattggaatatgt

SEQ ID NO: 1638176 - DNA, 15 bp, Homo sapiens
taattggaatatgta

SEQ ID NO: 1638177 - DNA, 15 bp, Homo sapiens
aattggaatatgtat

SEQ ID NO: 1638178 - DNA, 15 bp, Homo sapiens
attggaatatgtatg

SEQ ID NO: 1638179 - DNA, 15 bp, Homo sapiens
ttggaatatgtatgg

SEQ ID NO: 1638180 - DNA, 15 bp, Homo sapiens
tggaatatgtatgga

SEQ ID NO: 1638181 - DNA, 15 bp, Homo sapiens
ggaatatgtatggaa

SEQ ID NO: 1638182 - DNA, 15 bp, Homo sapiens
gaatatgtatggaat

SEQ ID NO: 1638183 - DNA, 15 bp, Homo sapiens
aatatgtatggaata

SEQ ID NO: 1638184 - DNA, 15 bp, Homo sapiens
atatgtatggaataa

SEQ ID NO: 1638185 - DNA, 15 bp, Homo sapiens
tatgtatggaataat

SEQ ID NO: 1638186 - DNA, 15 bp, Homo sapiens
atgtatggaataatc

SEQ ID NO: 1638187 - DNA, 15 bp, Homo sapiens
tgtatggaataatca

SEQ ID NO: 1638188 - DNA, 15 bp, Homo sapiens
gtatggaataatcat

SEQ ID NO: 1638189 - DNA, 15 bp, Homo sapiens
tatggaataatcatc

SEQ ID NO: 1638190 - DNA, 15 bp, Homo sapiens
atggaataatcatcc

SEQ ID NO: 1638191 - DNA, 15 bp, Homo sapiens
tggaataatcatcct

SEQ ID NO: 1638192 - DNA, 15 bp, Homo sapiens
ggaataatcatcctg

SEQ ID NO: 1638193 - DNA, 15 bp, Homo sapiens
gaataatcatcctga

SEQ ID NO: 1638194 - DNA, 15 bp, Homo sapiens
aataatcatcctgaa

SEQ ID NO: 1638195 - DNA, 15 bp, Homo sapiens
ataatcatcctgaaa

SEQ ID NO: 1638196 - DNA, 15 bp, Homo sapiens
taatcatcctgaaat

SEQ ID NO: 1638197 - DNA, 15 bp, Homo sapiens
aatcatcctgaaata

SEQ ID NO: 1638198 - DNA, 15 bp, Homo sapiens
atcatcctgaaataa

SEQ ID NO: 1638199 - DNA, 15 bp, Homo sapiens
tcatcctgaaataaa

SEQ ID NO: 1638200 - DNA, 15 bp, Homo sapiens
catcctgaaataaaa

SEQ ID NO: 1638201 - DNA, 15 bp, Homo sapiens
atcctgaaataaaat

SEQ ID NO: 1638202 - DNA, 15 bp, Homo sapiens
tcctgaaataaaatt

SEQ ID NO: 1638203 - DNA, 15 bp, Homo sapiens
cctgaaataaaattg

SEQ ID NO: 1638204 - DNA, 15 bp, Homo sapiens
ctgaaataaaattgg

SEQ ID NO: 1638205 - DNA, 15 bp, Homo sapiens
tgaaataaaattggt

SEQ ID NO: 1638206 - DNA, 15 bp, Homo sapiens
gaaataaaattggtg

SEQ ID NO: 1638207 - DNA, 15 bp, Homo sapiens
aaataaaattggtga

SEQ ID NO: 1638208 - DNA, 15 bp, Homo sapiens
aataaaattggtgaa

SEQ ID NO: 1638209 - DNA, 15 bp, Homo sapiens
ataaaattggtgaaa

SEQ ID NO: 1638210 - DNA, 15 bp, Homo sapiens
taaaattggtgaaaa

SEQ ID NO: 1638211 - DNA, 15 bp, Homo sapiens
aaaattggtgaaaag

SEQ ID NO: 1638212 - DNA, 15 bp, Homo sapiens
aaattggtgaaaagt

SEQ ID NO: 1638213 - DNA, 15 bp, Homo sapiens
aattggtgaaaagta

SEQ ID NO: 1638214 - DNA, 15 bp, Homo sapiens
attggtgaaaagtat

SEQ ID NO: 1638215 - DNA, 15 bp, Homo sapiens
ttggtgaaaagtatt

SEQ ID NO: 1638216 - DNA, 15 bp, Homo sapiens
tggtgaaaagtattt

SEQ ID NO: 1638217 - DNA, 15 bp, Homo sapiens
ggtgaaaagtatttg

SEQ ID NO: 1638218 - DNA, 15 bp, Homo sapiens
gtgaaaagtatttgt

SEQ ID NO: 1638219 - DNA, 15 bp, Homo sapiens
tgaaaagtatttgtt

SEQ ID NO: 1638220 - DNA, 15 bp, Homo sapiens
gaaaagtatttgtta

SEQ ID NO: 1638221 - DNA, 15 bp, Homo sapiens
aaaagtatttgttat

SEQ ID NO: 1638222 - DNA, 15 bp, Homo sapiens
aaagtatttgttatt

SEQ ID NO: 1638223 - DNA, 15 bp, Homo sapiens
aagtatttgttattg

SEQ ID NO: 1638224 - DNA, 15 bp, Homo sapiens
agtatttgttattgg

SEQ ID NO: 1638225 - DNA, 15 bp, Homo sapiens
gtatttgttattggg

SEQ ID NO: 1638226 - DNA, 15 bp, Homo sapiens
tatttgttattgggc

SEQ ID NO: 1638227 - DNA, 15 bp, Homo sapiens
atttgttattgggca

SEQ ID NO: 1638228 - DNA, 15 bp, Homo sapiens
tttgttattgggcat

SEQ ID NO: 1638229 - DNA, 15 bp, Homo sapiens
ttgttattgggcatc

SEQ ID NO: 1638230 - DNA, 15 bp, Homo sapiens
tgttattgggcatct

SEQ ID NO: 1638231 - DNA, 15 bp, Homo sapiens
gttattgggcatcta

SEQ ID NO: 1638232 - DNA, 15 bp, Homo sapiens
ttattgggcatctac

SEQ ID NO: 1638233 - DNA, 15 bp, Homo sapiens
tattgggcatctaca

SEQ ID NO: 1638234 - DNA, 15 bp, Homo sapiens
attgggcatctacaa

SEQ ID NO: 1638235 - DNA, 15 bp, Homo sapiens
ttgggcatctacaat

SEQ ID NO: 1638236 - DNA, 15 bp, Homo sapiens
tgggcatctacaatg

SEQ ID NO: 1638237 - DNA, 15 bp, Homo sapiens
gggcatctacaatgt

SEQ ID NO: 1638238 - DNA, 15 bp, Homo sapiens
ggcatctacaatgtg

SEQ ID NO: 1638239 - DNA, 15 bp, Homo sapiens
gcatctacaatgtgc

SEQ ID NO: 1638240 - DNA, 15 bp, Homo sapiens
catctacaatgtgca

SEQ ID NO: 1638241 - DNA, 15 bp, Homo sapiens
atctacaatgtgcaa

SEQ ID NO: 1638242 - DNA, 15 bp, Homo sapiens
tctacaatgtgcaaa

SEQ ID NO: 1638243 - DNA, 15 bp, Homo sapiens
ctacaatgtgcaaac

SEQ ID NO: 1638244 - DNA, 15 bp, Homo sapiens
tacaatgtgcaaacc

SEQ ID NO: 1638245 - DNA, 15 bp, Homo sapiens
acaatgtgcaaacct

SEQ ID NO: 1638246 - DNA, 15 bp, Homo sapiens
caatgtgcaaacctc

SEQ ID NO: 1638247 - DNA, 15 bp, Homo sapiens
aatgtgcaaacctct

SEQ ID NO: 1638248 - DNA, 15 bp, Homo sapiens
atgtgcaaacctctg

SEQ ID NO: 1638249 - DNA, 15 bp, Homo sapiens
tgtgcaaacctctgt

SEQ ID NO: 1638250 - DNA, 15 bp, Homo sapiens
gtgcaaacctctgta

SEQ ID NO: 1638251 - DNA, 15 bp, Homo sapiens
tgcaaacctctgtac

SEQ ID NO: 1638252 - DNA, 15 bp, Homo sapiens
gcaaacctctgtact

SEQ ID NO: 1638253 - DNA, 15 bp, Homo sapiens
caaacctctgtacta

SEQ ID NO: 1638254 - DNA, 15 bp, Homo sapiens
aaacctctgtactag

SEQ ID NO: 1638255 - DNA, 15 bp, Homo sapiens
aacctctgtactagg

SEQ ID NO: 1638256 - DNA, 15 bp, Homo sapiens
acctctgtactaggc

SEQ ID NO: 1638257 - DNA, 15 bp, Homo sapiens
cctctgtactaggca

SEQ ID NO: 1638258 - DNA, 15 bp, Homo sapiens
ctctgtactaggcat

SEQ ID NO: 1638259 - DNA, 15 bp, Homo sapiens
tctgtactaggcatg

SEQ ID NO: 1638260 - DNA, 15 bp, Homo sapiens
ctgtactaggcatga

SEQ ID NO: 1638261 - DNA, 15 bp, Homo sapiens
tgtactaggcatgaa

SEQ ID NO: 1638262 - DNA, 15 bp, Homo sapiens
gtactaggcatgaac

SEQ ID NO: 1638263 - DNA, 15 bp, Homo sapiens
tactaggcatgaaca

SEQ ID NO: 1638264 - DNA, 15 bp, Homo sapiens
actaggcatgaacaa

SEQ ID NO: 1638265 - DNA, 15 bp, Homo sapiens
ctaggcatgaacaag

SEQ ID NO: 1638266 - DNA, 15 bp, Homo sapiens
taggcatgaacaaga

SEQ ID NO: 1638267 - DNA, 15 bp, Homo sapiens
aggcatgaacaagag

SEQ ID NO: 1638268 - DNA, 15 bp, Homo sapiens
ggcatgaacaagagt

SEQ ID NO: 1638269 - DNA, 15 bp, Homo sapiens
gcatgaacaagagtt

SEQ ID NO: 1638270 - DNA, 15 bp, Homo sapiens
catgaacaagagtta

SEQ ID NO: 1638271 - DNA, 15 bp, Homo sapiens
atgaacaagagttat

SEQ ID NO: 1638272 - DNA, 15 bp, Homo sapiens
tgaacaagagttata

SEQ ID NO: 1638273 - DNA, 15 bp, Homo sapiens
gaacaagagttataa

SEQ ID NO: 1638274 - DNA, 15 bp, Homo sapiens
aacaagagttataag

SEQ ID NO: 1638275 - DNA, 15 bp, Homo sapiens
acaagagttataagc

SEQ ID NO: 1638276 - DNA, 15 bp, Homo sapiens
caagagttataagca

SEQ ID NO: 1638277 - DNA, 15 bp, Homo sapiens
aagagttataagcat

SEQ ID NO: 1638278 - DNA, 15 bp, Homo sapiens
agagttataagcatt

SEQ ID NO: 1638279 - DNA, 15 bp, Homo sapiens
gagttataagcattg

SEQ ID NO: 1638280 - DNA, 15 bp, Homo sapiens
agttataagcattgg

SEQ ID NO: 1638281 - DNA, 15 bp, Homo sapiens
gttataagcattgga

SEQ ID NO: 1638282 - DNA, 15 bp, Homo sapiens
ttataagcattggag

SEQ ID NO: 1638283 - DNA, 15 bp, Homo sapiens
tataagcattggaga

SEQ ID NO: 1638284 - DNA, 15 bp, Homo sapiens
ataagcattggagag

SEQ ID NO: 1638285 - DNA, 15 bp, Homo sapiens
taagcattggagagg

SEQ ID NO: 1638286 - DNA, 15 bp, Homo sapiens
aagcattggagaggc

SEQ ID NO: 1638287 - DNA, 15 bp, Homo sapiens
agcattggagaggct

SEQ ID NO: 1638288 - DNA, 15 bp, Homo sapiens
gcattggagaggcta

SEQ ID NO: 1638289 - DNA, 15 bp, Homo sapiens
cattggagaggctaa

SEQ ID NO: 1638290 - DNA, 15 bp, Homo sapiens
attggagaggctaaa

SEQ ID NO: 1638291 - DNA, 15 bp, Homo sapiens
ttggagaggctaaaa

SEQ ID NO: 1638292 - DNA, 15 bp, Homo sapiens
tggagaggctaaaat

SEQ ID NO: 1638293 - DNA, 15 bp, Homo sapiens
ggagaggctaaaata

SEQ ID NO: 1638294 - DNA, 15 bp, Homo sapiens
gagaggctaaaatat

SEQ ID NO: 1638295 - DNA, 15 bp, Homo sapiens
agaggctaaaatata

SEQ ID NO: 1638296 - DNA, 15 bp, Homo sapiens
gaggctaaaatatag

SEQ ID NO: 1638297 - DNA, 15 bp, Homo sapiens
aggctaaaatatagt

SEQ ID NO: 1638298 - DNA, 15 bp, Homo sapiens
ggctaaaatatagtc

SEQ ID NO: 1638299 - DNA, 15 bp, Homo sapiens
gctaaaatatagtcc

SEQ ID NO: 1638300 - DNA, 15 bp, Homo sapiens
ctaaaatatagtcct

SEQ ID NO: 1638301 - DNA, 15 bp, Homo sapiens
taaaatatagtcctt

SEQ ID NO: 1638302 - DNA, 15 bp, Homo sapiens
aaaatatagtcctta

SEQ ID NO: 1638303 - DNA, 15 bp, Homo sapiens
aaatatagtccttaa

SEQ ID NO: 1638304 - DNA, 15 bp, Homo sapiens
aatatagtccttaag

SEQ ID NO: 1638305 - DNA, 15 bp, Homo sapiens
atatagtccttaagg

SEQ ID NO: 1638306 - DNA, 15 bp, Homo sapiens
tatagtccttaaggc

SEQ ID NO: 1638307 - DNA, 15 bp, Homo sapiens
atagtccttaaggct

SEQ ID NO: 1638308 - DNA, 15 bp, Homo sapiens
tagtccttaaggctg

SEQ ID NO: 1638309 - DNA, 15 bp, Homo sapiens
agtccttaaggctgg

SEQ ID NO: 1638310 - DNA, 15 bp, Homo sapiens
gtccttaaggctggg

SEQ ID NO: 1638311 - DNA, 15 bp, Homo sapiens
tccttaaggctgggc

SEQ ID NO: 1638312 - DNA, 15 bp, Homo sapiens
ccttaaggctgggca

SEQ ID NO: 1638313 - DNA, 15 bp, Homo sapiens
cttaaggctgggcac

SEQ ID NO: 1638314 - DNA, 15 bp, Homo sapiens
ttaaggctgggcaca

SEQ ID NO: 1638315 - DNA, 15 bp, Homo sapiens
taaggctgggcacag

SEQ ID NO: 1638316 - DNA, 15 bp, Homo sapiens
aaggctgggcacagt

SEQ ID NO: 1638317 - DNA, 15 bp, Homo sapiens
catgcctgtaatcct

SEQ ID NO: 1638318 - DNA, 15 bp, Homo sapiens
atgcctgtaatccta

SEQ ID NO: 1638319 - DNA, 15 bp, Homo sapiens
ggcgggcagattgcc

SEQ ID NO: 1638320 - DNA, 15 bp, Homo sapiens
gcgggcagattgcct

SEQ ID NO: 1638321 - DNA, 15 bp, Homo sapiens
cagattgcctgagct

SEQ ID NO: 1638322 - DNA, 15 bp, Homo sapiens
agattgcctgagctc

SEQ ID NO: 1638323 - DNA, 15 bp, Homo sapiens
gattgcctgagctca

SEQ ID NO: 1638324 - DNA, 15 bp, Homo sapiens
attgcctgagctcag

SEQ ID NO: 1638325 - DNA, 15 bp, Homo sapiens
ttgcctgagctcagg

SEQ ID NO: 1638326 - DNA, 15 bp, Homo sapiens
tgcctgagctcagga

SEQ ID NO: 1638327 - DNA, 15 bp, Homo sapiens
gagctcaggagttca

SEQ ID NO: 1638328 - DNA, 15 bp, Homo sapiens
ctcaggagttcaaga

SEQ ID NO: 1638329 - DNA, 15 bp, Homo sapiens
ctgggcaacatagcg

SEQ ID NO: 1638330 - DNA, 15 bp, Homo sapiens
tgggcaacatagcga

SEQ ID NO: 1638331 - DNA, 15 bp, Homo sapiens
gggcaacatagcgaa

SEQ ID NO: 1638332 - DNA, 15 bp, Homo sapiens
ggcaacatagcgaaa

SEQ ID NO: 1638333 - DNA, 15 bp, Homo sapiens
gcaacatagcgaaac

SEQ ID NO: 1638334 - DNA, 15 bp, Homo sapiens
caacatagcgaaacc

SEQ ID NO: 1638335 - DNA, 15 bp, Homo sapiens
aacatagcgaaaccc

SEQ ID NO: 1638336 - DNA, 15 bp, Homo sapiens
acatagcgaaacccc

SEQ ID NO: 1638337 - DNA, 15 bp, Homo sapiens
catagcgaaacccca

SEQ ID NO: 1638338 - DNA, 15 bp, Homo sapiens
atagcgaaaccccat

SEQ ID NO: 1638339 - DNA, 15 bp, Homo sapiens
tagcgaaaccccatc

SEQ ID NO: 1638340 - DNA, 15 bp, Homo sapiens
agcgaaaccccatct

SEQ ID NO: 1638341 - DNA, 15 bp, Homo sapiens
atacaaaaaaattac

SEQ ID NO: 1638342 - DNA, 15 bp, Homo sapiens
tacaaaaaaattacc

SEQ ID NO: 1638343 - DNA, 15 bp, Homo sapiens
acaaaaaaattacct

SEQ ID NO: 1638344 - DNA, 15 bp, Homo sapiens
caaaaaaattacctg

SEQ ID NO: 1638345 - DNA, 15 bp, Homo sapiens
aaaaaaattacctgg

SEQ ID NO: 1638346 - DNA, 15 bp, Homo sapiens
aaaaaattacctggg

SEQ ID NO: 1638347 - DNA, 15 bp, Homo sapiens
aaaaattacctgggc

SEQ ID NO: 1638348 - DNA, 15 bp, Homo sapiens
aaaattacctgggca

SEQ ID NO: 1638349 - DNA, 15 bp, Homo sapiens
aaattacctgggcat

SEQ ID NO: 1638350 - DNA, 15 bp, Homo sapiens
aattacctgggcatg

SEQ ID NO: 1638351 - DNA, 15 bp, Homo sapiens
attacctgggcatgg

SEQ ID NO: 1638352 - DNA, 15 bp, Homo sapiens
ttacctgggcatggt

SEQ ID NO: 1638353 - DNA, 15 bp, Homo sapiens
tacctgggcatggtg

SEQ ID NO: 1638354 - DNA, 15 bp, Homo sapiens
acctgggcatggtgg

SEQ ID NO: 1638355 - DNA, 15 bp, Homo sapiens
cctgggcatggtggc

SEQ ID NO: 1638356 - DNA, 15 bp, Homo sapiens
gggcatggtggcacg

SEQ ID NO: 1638357 - DNA, 15 bp, Homo sapiens
ggcatggtggcacgc

SEQ ID NO: 1638358 - DNA, 15 bp, Homo sapiens
gcatggtggcacgca

SEQ ID NO: 1638359 - DNA, 15 bp, Homo sapiens
catggtggcacgcac

SEQ ID NO: 1638360 - DNA, 15 bp, Homo sapiens
atggtggcacgcacc

SEQ ID NO: 1638361 - DNA, 15 bp, Homo sapiens
ggtggcacgcacctg

SEQ ID NO: 1638362 - DNA, 15 bp, Homo sapiens
gtggcacgcacctgt

SEQ ID NO: 1638363 - DNA, 15 bp, Homo sapiens
tggcacgcacctgta

SEQ ID NO: 1638364 - DNA, 15 bp, Homo sapiens
ggcacgcacctgtaa

SEQ ID NO: 1638365 - DNA, 15 bp, Homo sapiens
gcacgcacctgtaat

SEQ ID NO: 1638366 - DNA, 15 bp, Homo sapiens
cacgcacctgtaatc

SEQ ID NO: 1638367 - DNA, 15 bp, Homo sapiens
acgcacctgtaatcc

SEQ ID NO: 1638368 - DNA, 15 bp, Homo sapiens
cgcacctgtaatccc

SEQ ID NO: 1638369 - DNA, 15 bp, Homo sapiens
gcacctgtaatccca

SEQ ID NO: 1638370 - DNA, 15 bp, Homo sapiens
aggaggctgaggcat

SEQ ID NO: 1638371 - DNA, 15 bp, Homo sapiens
gaggctgaggcatga

SEQ ID NO: 1638372 - DNA, 15 bp, Homo sapiens
aggctgaggcatgag

SEQ ID NO: 1638373 - DNA, 15 bp, Homo sapiens
ggctgaggcatgaga

SEQ ID NO: 1638374 - DNA, 15 bp, Homo sapiens
gctgaggcatgagaa

SEQ ID NO: 1638375 - DNA, 15 bp, Homo sapiens
ctgaggcatgagaat

SEQ ID NO: 1638376 - DNA, 15 bp, Homo sapiens
gaggcatgagaattc

SEQ ID NO: 1638377 - DNA, 15 bp, Homo sapiens
aggcatgagaattcc

SEQ ID NO: 1638378 - DNA, 15 bp, Homo sapiens
ggcatgagaattcct

SEQ ID NO: 1638379 - DNA, 15 bp, Homo sapiens
gcatgagaattcctt

SEQ ID NO: 1638380 - DNA, 15 bp, Homo sapiens
catgagaattccttg

SEQ ID NO: 1638381 - DNA, 15 bp, Homo sapiens
atgagaattccttga

SEQ ID NO: 1638382 - DNA, 15 bp, Homo sapiens
tgagaattccttgaa

SEQ ID NO: 1638383 - DNA, 15 bp, Homo sapiens
gaattccttgaacct

SEQ ID NO: 1638384 - DNA, 15 bp, Homo sapiens
aattccttgaacctg

SEQ ID NO: 1638385 - DNA, 15 bp, Homo sapiens
attccttgaacctgg

SEQ ID NO: 1638386 - DNA, 15 bp, Homo sapiens
ttccttgaacctggg

SEQ ID NO: 1638387 - DNA, 15 bp, Homo sapiens
tccttgaacctggga

SEQ ID NO: 1638388 - DNA, 15 bp, Homo sapiens
ggcagaggttgcagc

SEQ ID NO: 1638389 - DNA, 15 bp, Homo sapiens
gcagaggttgcagcg

SEQ ID NO: 1638390 - DNA, 15 bp, Homo sapiens
cagaggttgcagcga

SEQ ID NO: 1638391 - DNA, 15 bp, Homo sapiens
agaggttgcagcgag

SEQ ID NO: 1638392 - DNA, 15 bp, Homo sapiens
gaggttgcagcgagc

SEQ ID NO: 1638393 - DNA, 15 bp, Homo sapiens
aggttgcagcgagcc

SEQ ID NO: 1638394 - DNA, 15 bp, Homo sapiens
ggttgcagcgagccg

SEQ ID NO: 1638395 - DNA, 15 bp, Homo sapiens
gttgcagcgagccga

SEQ ID NO: 1638396 - DNA, 15 bp, Homo sapiens
ttgcagcgagccgag

SEQ ID NO: 1638397 - DNA, 15 bp, Homo sapiens
tgcagcgagccgaga

SEQ ID NO: 1638398 - DNA, 15 bp, Homo sapiens
gcagcgagccgagat

SEQ ID NO: 1638399 - DNA, 15 bp, Homo sapiens
cagcgagccgagatc

SEQ ID NO: 1638400 - DNA, 15 bp, Homo sapiens
agcgagccgagatcc

SEQ ID NO: 1638401 - DNA, 15 bp, Homo sapiens
gcgagccgagatcct

SEQ ID NO: 1638402 - DNA, 15 bp, Homo sapiens
cgagccgagatcctg

SEQ ID NO: 1638403 - DNA, 15 bp, Homo sapiens
gccgagatcctgccg

SEQ ID NO: 1638404 - DNA, 15 bp, Homo sapiens
ccgagatcctgccgc

SEQ ID NO: 1638405 - DNA, 15 bp, Homo sapiens
cgagatcctgccgct

SEQ ID NO: 1638406 - DNA, 15 bp, Homo sapiens
gagatcctgccgctg

SEQ ID NO: 1638407 - DNA, 15 bp, Homo sapiens
agatcctgccgctgc

SEQ ID NO: 1638408 - DNA, 15 bp, Homo sapiens
gatcctgccgctgca

SEQ ID NO: 1638409 - DNA, 15 bp, Homo sapiens
atcctgccgctgcat

SEQ ID NO: 1638410 - DNA, 15 bp, Homo sapiens
tcctgccgctgcatc

SEQ ID NO: 1638411 - DNA, 15 bp, Homo sapiens
cctgccgctgcatcc

SEQ ID NO: 1638412 - DNA, 15 bp, Homo sapiens
ctgccgctgcatccc

SEQ ID NO: 1638413 - DNA, 15 bp, Homo sapiens
tgccgctgcatccca

SEQ ID NO: 1638414 - DNA, 15 bp, Homo sapiens
gccgctgcatcccag

SEQ ID NO: 1638415 - DNA, 15 bp, Homo sapiens
ccgctgcatcccagc

SEQ ID NO: 1638416 - DNA, 15 bp, Homo sapiens
cgctgcatcccagct

SEQ ID NO: 1638417 - DNA, 15 bp, Homo sapiens
gctgcatcccagctt

SEQ ID NO: 1638418 - DNA, 15 bp, Homo sapiens
ctgcatcccagcttg

SEQ ID NO: 1638419 - DNA, 15 bp, Homo sapiens
tgcatcccagcttgg

SEQ ID NO: 1638420 - DNA, 15 bp, Homo sapiens
gcatcccagcttggg

SEQ ID NO: 1638421 - DNA, 15 bp, Homo sapiens
catcccagcttgggt

SEQ ID NO: 1638422 - DNA, 15 bp, Homo sapiens
atcccagcttgggtg

SEQ ID NO: 1638423 - DNA, 15 bp, Homo sapiens
tcccagcttgggtga

SEQ ID NO: 1638424 - DNA, 15 bp, Homo sapiens
cccagcttgggtgac

SEQ ID NO: 1638425 - DNA, 15 bp, Homo sapiens
cagcttgggtgacag

SEQ ID NO: 1638426 - DNA, 15 bp, Homo sapiens
agcttgggtgacaga

SEQ ID NO: 1638427 - DNA, 15 bp, Homo sapiens
gcttgggtgacagag

SEQ ID NO: 1638428 - DNA, 15 bp, Homo sapiens
cttgggtgacagagt

SEQ ID NO: 1638429 - DNA, 15 bp, Homo sapiens
ttgggtgacagagtg

SEQ ID NO: 1638430 - DNA, 15 bp, Homo sapiens
tcaaaaaaaaattaa

SEQ ID NO: 1638431 - DNA, 15 bp, Homo sapiens
caaaaaaaaattaaa

SEQ ID NO: 1638432 - DNA, 15 bp, Homo sapiens
aaaaaaaattaaata

SEQ ID NO: 1638433 - DNA, 15 bp, Homo sapiens
aaaaaaattaaataa

SEQ ID NO: 1638434 - DNA, 15 bp, Homo sapiens
aaaaaattaaataat

SEQ ID NO: 1638435 - DNA, 15 bp, Homo sapiens
aaaaattaaataata

SEQ ID NO: 1638436 - DNA, 15 bp, Homo sapiens
aaaattaaataataa

SEQ ID NO: 1638437 - DNA, 15 bp, Homo sapiens
aaattaaataataaa

SEQ ID NO: 1638438 - DNA, 15 bp, Homo sapiens
aattaaataataaat

SEQ ID NO: 1638439 - DNA, 15 bp, Homo sapiens
attaaataataaata

SEQ ID NO: 1638440 - DNA, 15 bp, Homo sapiens
ttaaataataaataa

SEQ ID NO: 1638441 - DNA, 15 bp, Homo sapiens
taaataataaataaa

SEQ ID NO: 1638442 - DNA, 15 bp, Homo sapiens
aaataataaataaat

SEQ ID NO: 1638443 - DNA, 15 bp, Homo sapiens
aataataaataaata

SEQ ID NO: 1638444 - DNA, 15 bp, Homo sapiens
ataataaataaatag

SEQ ID NO: 1638445 - DNA, 15 bp, Homo sapiens
taataaataaatagt

SEQ ID NO: 1638446 - DNA, 15 bp, Homo sapiens
aataaataaatagta

SEQ ID NO: 1638447 - DNA, 15 bp, Homo sapiens
ataaataaatagtaa

SEQ ID NO: 1638448 - DNA, 15 bp, Homo sapiens
taaataaatagtaaa

SEQ ID NO: 1638449 - DNA, 15 bp, Homo sapiens
aaataaatagtaaaa

SEQ ID NO: 1638450 - DNA, 15 bp, Homo sapiens
aataaatagtaaaat

SEQ ID NO: 1638451 - DNA, 15 bp, Homo sapiens
ataaatagtaaaata

SEQ ID NO: 1638452 - DNA, 15 bp, Homo sapiens
taaatagtaaaatac

SEQ ID NO: 1638453 - DNA, 15 bp, Homo sapiens
aaatagtaaaataca

SEQ ID NO: 1638454 - DNA, 15 bp, Homo sapiens
aatagtaaaatacag

SEQ ID NO: 1638455 - DNA, 15 bp, Homo sapiens
atagtaaaatacagt

SEQ ID NO: 1638456 - DNA, 15 bp, Homo sapiens
tagtaaaatacagtc

SEQ ID NO: 1638457 - DNA, 15 bp, Homo sapiens
agtaaaatacagtca

SEQ ID NO: 1638458 - DNA, 15 bp, Homo sapiens
gtaaaatacagtcat

SEQ ID NO: 1638459 - DNA, 15 bp, Homo sapiens
taaaatacagtcatt

SEQ ID NO: 1638460 - DNA, 15 bp, Homo sapiens
aaaatacagtcatta

SEQ ID NO: 1638461 - DNA, 15 bp, Homo sapiens
aaatacagtcattaa

SEQ ID NO: 1638462 - DNA, 15 bp, Homo sapiens
aatacagtcattaag

SEQ ID NO: 1638463 - DNA, 15 bp, Homo sapiens
atacagtcattaaga

SEQ ID NO: 1638464 - DNA, 15 bp, Homo sapiens
tacagtcattaagag

SEQ ID NO: 1638465 - DNA, 15 bp, Homo sapiens
acagtcattaagagt

SEQ ID NO: 1638466 - DNA, 15 bp, Homo sapiens
cagtcattaagagta

SEQ ID NO: 1638467 - DNA, 15 bp, Homo sapiens
agtcattaagagtac

SEQ ID NO: 1638468 - DNA, 15 bp, Homo sapiens
gtcattaagagtaca

SEQ ID NO: 1638469 - DNA, 15 bp, Homo sapiens
tcattaagagtacaa

SEQ ID NO: 1638470 - DNA, 15 bp, Homo sapiens
cattaagagtacaaa

SEQ ID NO: 1638471 - DNA, 15 bp, Homo sapiens
attaagagtacaaaa

SEQ ID NO: 1638472 - DNA, 15 bp, Homo sapiens
ttaagagtacaaaat

SEQ ID NO: 1638473 - DNA, 15 bp, Homo sapiens
taagagtacaaaatg

SEQ ID NO: 1638474 - DNA, 15 bp, Homo sapiens
aagagtacaaaatgt

SEQ ID NO: 1638475 - DNA, 15 bp, Homo sapiens
agagtacaaaatgta

SEQ ID NO: 1638476 - DNA, 15 bp, Homo sapiens
gagtacaaaatgtag

SEQ ID NO: 1638477 - DNA, 15 bp, Homo sapiens
agtacaaaatgtaga

SEQ ID NO: 1638478 - DNA, 15 bp, Homo sapiens
gtacaaaatgtagat

SEQ ID NO: 1638479 - DNA, 15 bp, Homo sapiens
tacaaaatgtagatt

SEQ ID NO: 1638480 - DNA, 15 bp, Homo sapiens
acaaaatgtagattc

SEQ ID NO: 1638481 - DNA, 15 bp, Homo sapiens
caaaatgtagattca

SEQ ID NO: 1638482 - DNA, 15 bp, Homo sapiens
aaaatgtagattcag

SEQ ID NO: 1638483 - DNA, 15 bp, Homo sapiens
aaatgtagattcaga

SEQ ID NO: 1638484 - DNA, 15 bp, Homo sapiens
aatgtagattcagac

SEQ ID NO: 1638485 - DNA, 15 bp, Homo sapiens
atgtagattcagact

SEQ ID NO: 1638486 - DNA, 15 bp, Homo sapiens
tgtagattcagacta

SEQ ID NO: 1638487 - DNA, 15 bp, Homo sapiens
gtagattcagactac

SEQ ID NO: 1638488 - DNA, 15 bp, Homo sapiens
tagattcagactacc

SEQ ID NO: 1638489 - DNA, 15 bp, Homo sapiens
agattcagactacct

SEQ ID NO: 1638490 - DNA, 15 bp, Homo sapiens
gattcagactacctg

SEQ ID NO: 1638491 - DNA, 15 bp, Homo sapiens
attcagactacctgg

SEQ ID NO: 1638492 - DNA, 15 bp, Homo sapiens
ttcagactacctggg

SEQ ID NO: 1638493 - DNA, 15 bp, Homo sapiens
tcagactacctgggt

SEQ ID NO: 1638494 - DNA, 15 bp, Homo sapiens
cagactacctgggtt

SEQ ID NO: 1638495 - DNA, 15 bp, Homo sapiens
agactacctgggttc

SEQ ID NO: 1638496 - DNA, 15 bp, Homo sapiens
gactacctgggttca

SEQ ID NO: 1638497 - DNA, 15 bp, Homo sapiens
actacctgggttcaa

SEQ ID NO: 1638498 - DNA, 15 bp, Homo sapiens
ctacctgggttcaaa

SEQ ID NO: 1638499 - DNA, 15 bp, Homo sapiens
tacctgggttcaaat

SEQ ID NO: 1638500 - DNA, 15 bp, Homo sapiens
acctgggttcaaatc

SEQ ID NO: 1638501 - DNA, 15 bp, Homo sapiens
tgggttcaaatcttg

SEQ ID NO: 1638502 - DNA, 15 bp, Homo sapiens
gggttcaaatcttgg

SEQ ID NO: 1638503 - DNA, 15 bp, Homo sapiens
ggttcaaatcttggc

SEQ ID NO: 1638504 - DNA, 15 bp, Homo sapiens
gttcaaatcttggct

SEQ ID NO: 1638505 - DNA, 15 bp, Homo sapiens
ttcaaatcttggctc

SEQ ID NO: 1638506 - DNA, 15 bp, Homo sapiens
tcaaatcttggctct

SEQ ID NO: 1638507 - DNA, 15 bp, Homo sapiens
caaatcttggctctt

SEQ ID NO: 1638508 - DNA, 15 bp, Homo sapiens
aaatcttggctctta

SEQ ID NO: 1638509 - DNA, 15 bp, Homo sapiens
aatcttggctcttac

SEQ ID NO: 1638510 - DNA, 15 bp, Homo sapiens
atcttggctcttact

SEQ ID NO: 1638511 - DNA, 15 bp, Homo sapiens
tcttggctcttactt

SEQ ID NO: 1638512 - DNA, 15 bp, Homo sapiens
cttggctcttacttg

SEQ ID NO: 1638513 - DNA, 15 bp, Homo sapiens
ttggctcttacttgc

SEQ ID NO: 1638514 - DNA, 15 bp, Homo sapiens
tggctcttacttgca

SEQ ID NO: 1638515 - DNA, 15 bp, Homo sapiens
ggctcttacttgcat

SEQ ID NO: 1638516 - DNA, 15 bp, Homo sapiens
gctcttacttgcatt

SEQ ID NO: 1638517 - DNA, 15 bp, Homo sapiens
ctcttacttgcattg

SEQ ID NO: 1638518 - DNA, 15 bp, Homo sapiens
tcttacttgcattgt

SEQ ID NO: 1638519 - DNA, 15 bp, Homo sapiens
cttacttgcattgtg

SEQ ID NO: 1638520 - DNA, 15 bp, Homo sapiens
ttacttgcattgtgg

SEQ ID NO: 1638521 - DNA, 15 bp, Homo sapiens
tacttgcattgtggc

SEQ ID NO: 1638522 - DNA, 15 bp, Homo sapiens
acttgcattgtggct

SEQ ID NO: 1638523 - DNA, 15 bp, Homo sapiens
cttgcattgtggctt

SEQ ID NO: 1638524 - DNA, 15 bp, Homo sapiens
ttgcattgtggcttt

SEQ ID NO: 1638525 - DNA, 15 bp, Homo sapiens
tgcattgtggctttg

SEQ ID NO: 1638526 - DNA, 15 bp, Homo sapiens
gcattgtggctttgg

SEQ ID NO: 1638527 - DNA, 15 bp, Homo sapiens
cattgtggctttggg

SEQ ID NO: 1638528 - DNA, 15 bp, Homo sapiens
attgtggctttgggc

SEQ ID NO: 1638529 - DNA, 15 bp, Homo sapiens
ttgtggctttgggca

SEQ ID NO: 1638530 - DNA, 15 bp, Homo sapiens
tgtggctttgggcag

SEQ ID NO: 1638531 - DNA, 15 bp, Homo sapiens
gtggctttgggcaga

SEQ ID NO: 1638532 - DNA, 15 bp, Homo sapiens
tggctttgggcagat

SEQ ID NO: 1638533 - DNA, 15 bp, Homo sapiens
ggctttgggcagatc

SEQ ID NO: 1638534 - DNA, 15 bp, Homo sapiens
gctttgggcagatca

SEQ ID NO: 1638535 - DNA, 15 bp, Homo sapiens
ctttgggcagatcat

SEQ ID NO: 1638536 - DNA, 15 bp, Homo sapiens
tttgggcagatcatg

SEQ ID NO: 1638537 - DNA, 15 bp, Homo sapiens
ttgggcagatcatgt

SEQ ID NO: 1638538 - DNA, 15 bp, Homo sapiens
tgggcagatcatgta

SEQ ID NO: 1638539 - DNA, 15 bp, Homo sapiens
gggcagatcatgtaa

SEQ ID NO: 1638540 - DNA, 15 bp, Homo sapiens
ggcagatcatgtaac

SEQ ID NO: 1638541 - DNA, 15 bp, Homo sapiens
gcagatcatgtaact

SEQ ID NO: 1638542 - DNA, 15 bp, Homo sapiens
cagatcatgtaactt

SEQ ID NO: 1638543 - DNA, 15 bp, Homo sapiens
agatcatgtaactta

SEQ ID NO: 1638544 - DNA, 15 bp, Homo sapiens
gatcatgtaacttat

SEQ ID NO: 1638545 - DNA, 15 bp, Homo sapiens
atcatgtaacttatg

SEQ ID NO: 1638546 - DNA, 15 bp, Homo sapiens
tcatgtaacttatgt

SEQ ID NO: 1638547 - DNA, 15 bp, Homo sapiens
catgtaacttatgtg

SEQ ID NO: 1638548 - DNA, 15 bp, Homo sapiens
atgtaacttatgtgt

SEQ ID NO: 1638549 - DNA, 15 bp, Homo sapiens
tgtaacttatgtgtg

SEQ ID NO: 1638550 - DNA, 15 bp, Homo sapiens
gtaacttatgtgtgc

SEQ ID NO: 1638551 - DNA, 15 bp, Homo sapiens
taacttatgtgtgcc

SEQ ID NO: 1638552 - DNA, 15 bp, Homo sapiens
aacttatgtgtgcct

SEQ ID NO: 1638553 - DNA, 15 bp, Homo sapiens
acttatgtgtgcctc

SEQ ID NO: 1638554 - DNA, 15 bp, Homo sapiens
cttatgtgtgcctca

SEQ ID NO: 1638555 - DNA, 15 bp, Homo sapiens
ttatgtgtgcctcag

SEQ ID NO: 1638556 - DNA, 15 bp, Homo sapiens
tatgtgtgcctcagt

SEQ ID NO: 1638557 - DNA, 15 bp, Homo sapiens
atgtgtgcctcagtt

SEQ ID NO: 1638558 - DNA, 15 bp, Homo sapiens
tgtgtgcctcagttt

SEQ ID NO: 1638559 - DNA, 15 bp, Homo sapiens
gtgtgcctcagtttc

SEQ ID NO: 1638560 - DNA, 15 bp, Homo sapiens
gtgcctcagtttcct

SEQ ID NO: 1638561 - DNA, 15 bp, Homo sapiens
tgcctcagtttcctc

SEQ ID NO: 1638562 - DNA, 15 bp, Homo sapiens
gtttcctcatctgtt

SEQ ID NO: 1638563 - DNA, 15 bp, Homo sapiens
tttcctcatctgtta

SEQ ID NO: 1638564 - DNA, 15 bp, Homo sapiens
ttcctcatctgttaa

SEQ ID NO: 1638565 - DNA, 15 bp, Homo sapiens
tcctcatctgttaaa

SEQ ID NO: 1638566 - DNA, 15 bp, Homo sapiens
cctcatctgttaaat

SEQ ID NO: 1638567 - DNA, 15 bp, Homo sapiens
ctcatctgttaaata

SEQ ID NO: 1638568 - DNA, 15 bp, Homo sapiens
tcatctgttaaatag

SEQ ID NO: 1638569 - DNA, 15 bp, Homo sapiens
catctgttaaatagg

SEQ ID NO: 1638570 - DNA, 15 bp, Homo sapiens
atctgttaaataggg

SEQ ID NO: 1638571 - DNA, 15 bp, Homo sapiens
tctgttaaatagggg

SEQ ID NO: 1638572 - DNA, 15 bp, Homo sapiens
ctgttaaataggggc

SEQ ID NO: 1638573 - DNA, 15 bp, Homo sapiens
tgttaaataggggca

SEQ ID NO: 1638574 - DNA, 15 bp, Homo sapiens
gttaaataggggcaa

SEQ ID NO: 1638575 - DNA, 15 bp, Homo sapiens
ttaaataggggcaac

SEQ ID NO: 1638576 - DNA, 15 bp, Homo sapiens
taaataggggcaaca

SEQ ID NO: 1638577 - DNA, 15 bp, Homo sapiens
aaataggggcaacaa

SEQ ID NO: 1638578 - DNA, 15 bp, Homo sapiens
aataggggcaacaac

SEQ ID NO: 1638579 - DNA, 15 bp, Homo sapiens
ataggggcaacaact

SEQ ID NO: 1638580 - DNA, 15 bp, Homo sapiens
taggggcaacaactg

SEQ ID NO: 1638581 - DNA, 15 bp, Homo sapiens
aggggcaacaactga

SEQ ID NO: 1638582 - DNA, 15 bp, Homo sapiens
ggggcaacaactgaa

SEQ ID NO: 1638583 - DNA, 15 bp, Homo sapiens
gggcaacaactgaat

SEQ ID NO: 1638584 - DNA, 15 bp, Homo sapiens
ggcaacaactgaatc

SEQ ID NO: 1638585 - DNA, 15 bp, Homo sapiens
gcaacaactgaatct

SEQ ID NO: 1638586 - DNA, 15 bp, Homo sapiens
caacaactgaatcta

SEQ ID NO: 1638587 - DNA, 15 bp, Homo sapiens
aacaactgaatctac

SEQ ID NO: 1638588 - DNA, 15 bp, Homo sapiens
acaactgaatctacc

SEQ ID NO: 1638589 - DNA, 15 bp, Homo sapiens
caactgaatctacct

SEQ ID NO: 1638590 - DNA, 15 bp, Homo sapiens
aactgaatctacctt

SEQ ID NO: 1638591 - DNA, 15 bp, Homo sapiens
actgaatctacctta

SEQ ID NO: 1638592 - DNA, 15 bp, Homo sapiens
ctgaatctaccttat

SEQ ID NO: 1638593 - DNA, 15 bp, Homo sapiens
tgaatctaccttatt

SEQ ID NO: 1638594 - DNA, 15 bp, Homo sapiens
gaatctaccttattc

SEQ ID NO: 1638595 - DNA, 15 bp, Homo sapiens
aatctaccttattca

SEQ ID NO: 1638596 - DNA, 15 bp, Homo sapiens
atctaccttattcag

SEQ ID NO: 1638597 - DNA, 15 bp, Homo sapiens
tctaccttattcagt

SEQ ID NO: 1638598 - DNA, 15 bp, Homo sapiens
ctaccttattcagtt

SEQ ID NO: 1638599 - DNA, 15 bp, Homo sapiens
taccttattcagttg

SEQ ID NO: 1638600 - DNA, 15 bp, Homo sapiens
accttattcagttgt

SEQ ID NO: 1638601 - DNA, 15 bp, Homo sapiens
ccttattcagttgtt

SEQ ID NO: 1638602 - DNA, 15 bp, Homo sapiens
cttattcagttgttg

SEQ ID NO: 1638603 - DNA, 15 bp, Homo sapiens
ttattcagttgttgt

SEQ ID NO: 1638604 - DNA, 15 bp, Homo sapiens
tattcagttgttgtg

SEQ ID NO: 1638605 - DNA, 15 bp, Homo sapiens
attcagttgttgtga

SEQ ID NO: 1638606 - DNA, 15 bp, Homo sapiens
ttcagttgttgtgag

SEQ ID NO: 1638607 - DNA, 15 bp, Homo sapiens
tcagttgttgtgagg

SEQ ID NO: 1638608 - DNA, 15 bp, Homo sapiens
cagttgttgtgaggg

SEQ ID NO: 1638609 - DNA, 15 bp, Homo sapiens
agttgttgtgagggt

SEQ ID NO: 1638610 - DNA, 15 bp, Homo sapiens
gttgttgtgagggtt

SEQ ID NO: 1638611 - DNA, 15 bp, Homo sapiens
ttgttgtgagggttt

SEQ ID NO: 1638612 - DNA, 15 bp, Homo sapiens
tgttgtgagggttta

SEQ ID NO: 1638613 - DNA, 15 bp, Homo sapiens
gttgtgagggtttat

SEQ ID NO: 1638614 - DNA, 15 bp, Homo sapiens
ttgtgagggtttatt

SEQ ID NO: 1638615 - DNA, 15 bp, Homo sapiens
tgtgagggtttattg

SEQ ID NO: 1638616 - DNA, 15 bp, Homo sapiens
gtgagggtttattga

SEQ ID NO: 1638617 - DNA, 15 bp, Homo sapiens
tgagggtttattgag

SEQ ID NO: 1638618 - DNA, 15 bp, Homo sapiens
gagggtttattgaga

SEQ ID NO: 1638619 - DNA, 15 bp, Homo sapiens
agggtttattgagat

SEQ ID NO: 1638620 - DNA, 15 bp, Homo sapiens
gggtttattgagatt

SEQ ID NO: 1638621 - DNA, 15 bp, Homo sapiens
ggtttattgagattg

SEQ ID NO: 1638622 - DNA, 15 bp, Homo sapiens
gtttattgagattgt

SEQ ID NO: 1638623 - DNA, 15 bp, Homo sapiens
tttattgagattgtg

SEQ ID NO: 1638624 - DNA, 15 bp, Homo sapiens
ttattgagattgtgt

SEQ ID NO: 1638625 - DNA, 15 bp, Homo sapiens
tattgagattgtgtg

SEQ ID NO: 1638626 - DNA, 15 bp, Homo sapiens
attgagattgtgtgt

SEQ ID NO: 1638627 - DNA, 15 bp, Homo sapiens
ttgagattgtgtgtg

SEQ ID NO: 1638628 - DNA, 15 bp, Homo sapiens
tgagattgtgtgtgt

SEQ ID NO: 1638629 - DNA, 15 bp, Homo sapiens
gagattgtgtgtgtg

SEQ ID NO: 1638630 - DNA, 15 bp, Homo sapiens
agattgtgtgtgtgt

SEQ ID NO: 1638631 - DNA, 15 bp, Homo sapiens
gattgtgtgtgtgta

SEQ ID NO: 1638632 - DNA, 15 bp, Homo sapiens
attgtgtgtgtgtat

SEQ ID NO: 1638633 - DNA, 15 bp, Homo sapiens
ttgtgtgtgtgtatg

SEQ ID NO: 1638634 - DNA, 15 bp, Homo sapiens
gtgtgtgtgtatgtg

SEQ ID NO: 1638635 - DNA, 15 bp, Homo sapiens
tgtgtgtgtatgtgt

SEQ ID NO: 1638636 - DNA, 15 bp, Homo sapiens
gtgtgtgtatgtgtg

SEQ ID NO: 1638637 - DNA, 15 bp, Homo sapiens
tgtgtgtatgtgtgt

SEQ ID NO: 1638638 - DNA, 15 bp, Homo sapiens
gtgtgtatgtgtgtg

SEQ ID NO: 1638639 - DNA, 15 bp, Homo sapiens
tgtgtatgtgtgtga

SEQ ID NO: 1638640 - DNA, 15 bp, Homo sapiens
gtgtatgtgtgtgag

SEQ ID NO: 1638641 - DNA, 15 bp, Homo sapiens
tgtatgtgtgtgagt

SEQ ID NO: 1638642 - DNA, 15 bp, Homo sapiens
gtatgtgtgtgagtg

SEQ ID NO: 1638643 - DNA, 15 bp, Homo sapiens
tatgtgtgtgagtgt

SEQ ID NO: 1638644 - DNA, 15 bp, Homo sapiens
atgtgtgtgagtgta

SEQ ID NO: 1638645 - DNA, 15 bp, Homo sapiens
tgtgtgtgagtgtag

SEQ ID NO: 1638646 - DNA, 15 bp, Homo sapiens
gtgtgtgagtgtagt

SEQ ID NO: 1638647 - DNA, 15 bp, Homo sapiens
tgtgtgagtgtagtg

SEQ ID NO: 1638648 - DNA, 15 bp, Homo sapiens
gtgtgagtgtagtgt

SEQ ID NO: 1638649 - DNA, 15 bp, Homo sapiens
tgtgagtgtagtgtg

SEQ ID NO: 1638650 - DNA, 15 bp, Homo sapiens
gtgagtgtagtgtgt

SEQ ID NO: 1638651 - DNA, 15 bp, Homo sapiens
tgagtgtagtgtgtg

SEQ ID NO: 1638652 - DNA, 15 bp, Homo sapiens
gagtgtagtgtgtgc

SEQ ID NO: 1638653 - DNA, 15 bp, Homo sapiens
agtgtagtgtgtgca

SEQ ID NO: 1638654 - DNA, 15 bp, Homo sapiens
gtgtagtgtgtgcat

SEQ ID NO: 1638655 - DNA, 15 bp, Homo sapiens
tgtagtgtgtgcatg

SEQ ID NO: 1638656 - DNA, 15 bp, Homo sapiens
gtagtgtgtgcatgt

SEQ ID NO: 1638657 - DNA, 15 bp, Homo sapiens
tagtgtgtgcatgtg

SEQ ID NO: 1638658 - DNA, 15 bp, Homo sapiens
agtgtgtgcatgtgt

SEQ ID NO: 1638659 - DNA, 15 bp, Homo sapiens
gtgtgtgcatgtgtg

SEQ ID NO: 1638660 - DNA, 15 bp, Homo sapiens
tgtgtgcatgtgtgt

SEQ ID NO: 1638661 - DNA, 15 bp, Homo sapiens
gtgtgcatgtgtgtg

SEQ ID NO: 1638662 - DNA, 15 bp, Homo sapiens
gtgcatgtgtgtgtc

SEQ ID NO: 1638663 - DNA, 15 bp, Homo sapiens
gcatgtgtgtgtctg

SEQ ID NO: 1638664 - DNA, 15 bp, Homo sapiens
catgtgtgtgtctgt

SEQ ID NO: 1638665 - DNA, 15 bp, Homo sapiens
atgtgtgtgtctgtg

SEQ ID NO: 1638666 - DNA, 15 bp, Homo sapiens
tgtgtgtgtctgtgc

SEQ ID NO: 1638667 - DNA, 15 bp, Homo sapiens
gtgtgtgtctgtgca

SEQ ID NO: 1638668 - DNA, 15 bp, Homo sapiens
tgtgtgtctgtgcaa

SEQ ID NO: 1638669 - DNA, 15 bp, Homo sapiens
gtgtgtctgtgcaag

SEQ ID NO: 1638670 - DNA, 15 bp, Homo sapiens
tgtgtctgtgcaagg

SEQ ID NO: 1638671 - DNA, 15 bp, Homo sapiens
gtgtctgtgcaagga

SEQ ID NO: 1638672 - DNA, 15 bp, Homo sapiens
tgtctgtgcaaggag

SEQ ID NO: 1638673 - DNA, 15 bp, Homo sapiens
gtctgtgcaaggagt

SEQ ID NO: 1638674 - DNA, 15 bp, Homo sapiens
tctgtgcaaggagtg

SEQ ID NO: 1638675 - DNA, 15 bp, Homo sapiens
ctgtgcaaggagtgg

SEQ ID NO: 1638676 - DNA, 15 bp, Homo sapiens
tgtgcaaggagtggg

SEQ ID NO: 1638677 - DNA, 15 bp, Homo sapiens
gtgcaaggagtggga

SEQ ID NO: 1638678 - DNA, 15 bp, Homo sapiens
tgcaaggagtgggag

SEQ ID NO: 1638679 - DNA, 15 bp, Homo sapiens
gcaaggagtgggagg

SEQ ID NO: 1638680 - DNA, 15 bp, Homo sapiens
caaggagtgggaggt

SEQ ID NO: 1638681 - DNA, 15 bp, Homo sapiens
aaggagtgggaggtg

SEQ ID NO: 1638682 - DNA, 15 bp, Homo sapiens
aggagtgggaggtgt

SEQ ID NO: 1638683 - DNA, 15 bp, Homo sapiens
ggagtgggaggtgta

SEQ ID NO: 1638684 - DNA, 15 bp, Homo sapiens
gagtgggaggtgtat

SEQ ID NO: 1638685 - DNA, 15 bp, Homo sapiens
agtgggaggtgtata

SEQ ID NO: 1638686 - DNA, 15 bp, Homo sapiens
gtgggaggtgtatat

SEQ ID NO: 1638687 - DNA, 15 bp, Homo sapiens
tgggaggtgtatatt

SEQ ID NO: 1638688 - DNA, 15 bp, Homo sapiens
gggaggtgtatattc

SEQ ID NO: 1638689 - DNA, 15 bp, Homo sapiens
ggaggtgtatattca

SEQ ID NO: 1638690 - DNA, 15 bp, Homo sapiens
gaggtgtatattcag

SEQ ID NO: 1638691 - DNA, 15 bp, Homo sapiens
aggtgtatattcaga

SEQ ID NO: 1638692 - DNA, 15 bp, Homo sapiens
ggtgtatattcagag

SEQ ID NO: 1638693 - DNA, 15 bp, Homo sapiens
gtgtatattcagaga

SEQ ID NO: 1638694 - DNA, 15 bp, Homo sapiens
tgtatattcagagac

SEQ ID NO: 1638695 - DNA, 15 bp, Homo sapiens
gtatattcagagaca

SEQ ID NO: 1638696 - DNA, 15 bp, Homo sapiens
tatattcagagacac

SEQ ID NO: 1638697 - DNA, 15 bp, Homo sapiens
atattcagagacaca

SEQ ID NO: 1638698 - DNA, 15 bp, Homo sapiens
tattcagagacacat

SEQ ID NO: 1638699 - DNA, 15 bp, Homo sapiens
attcagagacacata

SEQ ID NO: 1638700 - DNA, 15 bp, Homo sapiens
ttcagagacacatat

SEQ ID NO: 1638701 - DNA, 15 bp, Homo sapiens
tcagagacacatatt

SEQ ID NO: 1638702 - DNA, 15 bp, Homo sapiens
cagagacacatatta

SEQ ID NO: 1638703 - DNA, 15 bp, Homo sapiens
agagacacatattac

SEQ ID NO: 1638704 - DNA, 15 bp, Homo sapiens
gagacacatattaca

SEQ ID NO: 1638705 - DNA, 15 bp, Homo sapiens
agacacatattacag

SEQ ID NO: 1638706 - DNA, 15 bp, Homo sapiens
gacacatattacagc

SEQ ID NO: 1638707 - DNA, 15 bp, Homo sapiens
acacatattacagca

SEQ ID NO: 1638708 - DNA, 15 bp, Homo sapiens
cacatattacagcac

SEQ ID NO: 1638709 - DNA, 15 bp, Homo sapiens
acatattacagcact

SEQ ID NO: 1638710 - DNA, 15 bp, Homo sapiens
catattacagcactt

SEQ ID NO: 1638711 - DNA, 15 bp, Homo sapiens
atattacagcactta

SEQ ID NO: 1638712 - DNA, 15 bp, Homo sapiens
tattacagcacttaa

SEQ ID NO: 1638713 - DNA, 15 bp, Homo sapiens
attacagcacttaaa

SEQ ID NO: 1638714 - DNA, 15 bp, Homo sapiens
ttacagcacttaaaa

SEQ ID NO: 1638715 - DNA, 15 bp, Homo sapiens
tacagcacttaaaat

SEQ ID NO: 1638716 - DNA, 15 bp, Homo sapiens
acagcacttaaaatg

SEQ ID NO: 1638717 - DNA, 15 bp, Homo sapiens
cagcacttaaaatgg

SEQ ID NO: 1638718 - DNA, 15 bp, Homo sapiens
agcacttaaaatggt

SEQ ID NO: 1638719 - DNA, 15 bp, Homo sapiens
gcacttaaaatggta

SEQ ID NO: 1638720 - DNA, 15 bp, Homo sapiens
cacttaaaatggtat

SEQ ID NO: 1638721 - DNA, 15 bp, Homo sapiens
acttaaaatggtatc

SEQ ID NO: 1638722 - DNA, 15 bp, Homo sapiens
cttaaaatggtatct

SEQ ID NO: 1638723 - DNA, 15 bp, Homo sapiens
ttaaaatggtatcta

SEQ ID NO: 1638724 - DNA, 15 bp, Homo sapiens
taaaatggtatctag

SEQ ID NO: 1638725 - DNA, 15 bp, Homo sapiens
aaaatggtatctagc

SEQ ID NO: 1638726 - DNA, 15 bp, Homo sapiens
aaatggtatctagca

SEQ ID NO: 1638727 - DNA, 15 bp, Homo sapiens
aatggtatctagcac

SEQ ID NO: 1638728 - DNA, 15 bp, Homo sapiens
atggtatctagcact

SEQ ID NO: 1638729 - DNA, 15 bp, Homo sapiens
tggtatctagcactt

SEQ ID NO: 1638730 - DNA, 15 bp, Homo sapiens
ggtatctagcactta

SEQ ID NO: 1638731 - DNA, 15 bp, Homo sapiens
gtatctagcacttag

SEQ ID NO: 1638732 - DNA, 15 bp, Homo sapiens
tatctagcacttagt

SEQ ID NO: 1638733 - DNA, 15 bp, Homo sapiens
atctagcacttagta

SEQ ID NO: 1638734 - DNA, 15 bp, Homo sapiens
tctagcacttagtaa

SEQ ID NO: 1638735 - DNA, 15 bp, Homo sapiens
ctagcacttagtaag

SEQ ID NO: 1638736 - DNA, 15 bp, Homo sapiens
tagcacttagtaagc

SEQ ID NO: 1638737 - DNA, 15 bp, Homo sapiens
agcacttagtaagca

SEQ ID NO: 1638738 - DNA, 15 bp, Homo sapiens
gcacttagtaagcat

SEQ ID NO: 1638739 - DNA, 15 bp, Homo sapiens
cacttagtaagcatt

SEQ ID NO: 1638740 - DNA, 15 bp, Homo sapiens
acttagtaagcatta

SEQ ID NO: 1638741 - DNA, 15 bp, Homo sapiens
cttagtaagcattat

SEQ ID NO: 1638742 - DNA, 15 bp, Homo sapiens
ttagtaagcattatt

SEQ ID NO: 1638743 - DNA, 15 bp, Homo sapiens
tagtaagcattattc

SEQ ID NO: 1638744 - DNA, 15 bp, Homo sapiens
agtaagcattattca

SEQ ID NO: 1638745 - DNA, 15 bp, Homo sapiens
gtaagcattattcaa

SEQ ID NO: 1638746 - DNA, 15 bp, Homo sapiens
taagcattattcaag

SEQ ID NO: 1638747 - DNA, 15 bp, Homo sapiens
aagcattattcaagt

SEQ ID NO: 1638748 - DNA, 15 bp, Homo sapiens
agcattattcaagtt

SEQ ID NO: 1638749 - DNA, 15 bp, Homo sapiens
gcattattcaagttt

SEQ ID NO: 1638750 - DNA, 15 bp, Homo sapiens
cattattcaagtttt

SEQ ID NO: 1638751 - DNA, 15 bp, Homo sapiens
attattcaagtttta

SEQ ID NO: 1638752 - DNA, 15 bp, Homo sapiens
ttattcaagttttag

SEQ ID NO: 1638753 - DNA, 15 bp, Homo sapiens
tattcaagttttagt

SEQ ID NO: 1638754 - DNA, 15 bp, Homo sapiens
attcaagttttagtt

SEQ ID NO: 1638755 - DNA, 15 bp, Homo sapiens
ttcaagttttagtta

SEQ ID NO: 1638756 - DNA, 15 bp, Homo sapiens
tcaagttttagttaa

SEQ ID NO: 1638757 - DNA, 15 bp, Homo sapiens
caagttttagttaac

SEQ ID NO: 1638758 - DNA, 15 bp, Homo sapiens
aagttttagttaaca

SEQ ID NO: 1638759 - DNA, 15 bp, Homo sapiens
agttttagttaacat

SEQ ID NO: 1638760 - DNA, 15 bp, Homo sapiens
gttttagttaacatt

SEQ ID NO: 1638761 - DNA, 15 bp, Homo sapiens
ttttagttaacatta

SEQ ID NO: 1638762 - DNA, 15 bp, Homo sapiens
tttagttaacattat

SEQ ID NO: 1638763 - DNA, 15 bp, Homo sapiens
ttagttaacattatt

SEQ ID NO: 1638764 - DNA, 15 bp, Homo sapiens
tagttaacattattt

SEQ ID NO: 1638765 - DNA, 15 bp, Homo sapiens
agttaacattatttt

SEQ ID NO: 1638766 - DNA, 15 bp, Homo sapiens
gttaacattatttta

SEQ ID NO: 1638767 - DNA, 15 bp, Homo sapiens
ttaacattattttac

SEQ ID NO: 1638768 - DNA, 15 bp, Homo sapiens
taacattattttact

SEQ ID NO: 1638769 - DNA, 15 bp, Homo sapiens
aacattattttactt

SEQ ID NO: 1638770 - DNA, 15 bp, Homo sapiens
acattattttactta

SEQ ID NO: 1638771 - DNA, 15 bp, Homo sapiens
cattattttacttac

SEQ ID NO: 1638772 - DNA, 15 bp, Homo sapiens
attattttacttacc

SEQ ID NO: 1638773 - DNA, 15 bp, Homo sapiens
ttattttacttacct

SEQ ID NO: 1638774 - DNA, 15 bp, Homo sapiens
tattttacttacctc

SEQ ID NO: 1638775 - DNA, 15 bp, Homo sapiens
attttacttacctct

SEQ ID NO: 1638776 - DNA, 15 bp, Homo sapiens
ttttacttacctctg

SEQ ID NO: 1638777 - DNA, 15 bp, Homo sapiens
tttacttacctctga

SEQ ID NO: 1638778 - DNA, 15 bp, Homo sapiens
ttacttacctctgaa

SEQ ID NO: 1638779 - DNA, 15 bp, Homo sapiens
tacttacctctgaaa

SEQ ID NO: 1638780 - DNA, 15 bp, Homo sapiens
acttacctctgaaaa

SEQ ID NO: 1638781 - DNA, 15 bp, Homo sapiens
cttacctctgaaaat

SEQ ID NO: 1638782 - DNA, 15 bp, Homo sapiens
ttacctctgaaaatt

SEQ ID NO: 1638783 - DNA, 15 bp, Homo sapiens
tacctctgaaaattg

SEQ ID NO: 1638784 - DNA, 15 bp, Homo sapiens
acctctgaaaattgg

SEQ ID NO: 1638785 - DNA, 15 bp, Homo sapiens
cctctgaaaattgga

SEQ ID NO: 1638786 - DNA, 15 bp, Homo sapiens
ctctgaaaattggag

SEQ ID NO: 1638787 - DNA, 15 bp, Homo sapiens
tctgaaaattggagc

SEQ ID NO: 1638788 - DNA, 15 bp, Homo sapiens
ctgaaaattggagct

SEQ ID NO: 1638789 - DNA, 15 bp, Homo sapiens
tgaaaattggagcta

SEQ ID NO: 1638790 - DNA, 15 bp, Homo sapiens
gaaaattggagctat

SEQ ID NO: 1638791 - DNA, 15 bp, Homo sapiens
aaaattggagctatg

SEQ ID NO: 1638792 - DNA, 15 bp, Homo sapiens
aaattggagctatgt

SEQ ID NO: 1638793 - DNA, 15 bp, Homo sapiens
aattggagctatgtg

SEQ ID NO: 1638794 - DNA, 15 bp, Homo sapiens
attggagctatgtga

SEQ ID NO: 1638795 - DNA, 15 bp, Homo sapiens
ttggagctatgtgaa

SEQ ID NO: 1638796 - DNA, 15 bp, Homo sapiens
tggagctatgtgaaa

SEQ ID NO: 1638797 - DNA, 15 bp, Homo sapiens
ggagctatgtgaaaa

SEQ ID NO: 1638798 - DNA, 15 bp, Homo sapiens
gagctatgtgaaaaa

SEQ ID NO: 1638799 - DNA, 15 bp, Homo sapiens
agctatgtgaaaaag

SEQ ID NO: 1638800 - DNA, 15 bp, Homo sapiens
gctatgtgaaaaaga

SEQ ID NO: 1638801 - DNA, 15 bp, Homo sapiens
ctatgtgaaaaagaa

SEQ ID NO: 1638802 - DNA, 15 bp, Homo sapiens
tatgtgaaaaagaag

SEQ ID NO: 1638803 - DNA, 15 bp, Homo sapiens
atgtgaaaaagaagt

SEQ ID NO: 1638804 - DNA, 15 bp, Homo sapiens
tgtgaaaaagaagtt

SEQ ID NO: 1638805 - DNA, 15 bp, Homo sapiens
gtgaaaaagaagttg

SEQ ID NO: 1638806 - DNA, 15 bp, Homo sapiens
tgaaaaagaagttgg

SEQ ID NO: 1638807 - DNA, 15 bp, Homo sapiens
gaaaaagaagttggt

SEQ ID NO: 1638808 - DNA, 15 bp, Homo sapiens
aaaaagaagttggtc

SEQ ID NO: 1638809 - DNA, 15 bp, Homo sapiens
aaaagaagttggtct

SEQ ID NO: 1638810 - DNA, 15 bp, Homo sapiens
aaagaagttggtctc

SEQ ID NO: 1638811 - DNA, 15 bp, Homo sapiens
aagaagttggtctcc

SEQ ID NO: 1638812 - DNA, 15 bp, Homo sapiens
agaagttggtctcct

SEQ ID NO: 1638813 - DNA, 15 bp, Homo sapiens
gaagttggtctcctg

SEQ ID NO: 1638814 - DNA, 15 bp, Homo sapiens
aagttggtctcctga

SEQ ID NO: 1638815 - DNA, 15 bp, Homo sapiens
agttggtctcctgaa

SEQ ID NO: 1638816 - DNA, 15 bp, Homo sapiens
gttggtctcctgaag

SEQ ID NO: 1638817 - DNA, 15 bp, Homo sapiens
ttggtctcctgaagt

SEQ ID NO: 1638818 - DNA, 15 bp, Homo sapiens
tggtctcctgaagta

SEQ ID NO: 1638819 - DNA, 15 bp, Homo sapiens
ggtctcctgaagtag

SEQ ID NO: 1638820 - DNA, 15 bp, Homo sapiens
gtctcctgaagtaga

SEQ ID NO: 1638821 - DNA, 15 bp, Homo sapiens
tctcctgaagtagaa

SEQ ID NO: 1638822 - DNA, 15 bp, Homo sapiens
ctcctgaagtagaag

SEQ ID NO: 1638823 - DNA, 15 bp, Homo sapiens
tcctgaagtagaagc

SEQ ID NO: 1638824 - DNA, 15 bp, Homo sapiens
cctgaagtagaagcc

SEQ ID NO: 1638825 - DNA, 15 bp, Homo sapiens
ctgaagtagaagcca

SEQ ID NO: 1638826 - DNA, 15 bp, Homo sapiens
tgaagtagaagccag

SEQ ID NO: 1638827 - DNA, 15 bp, Homo sapiens
gaagtagaagccagt

SEQ ID NO: 1638828 - DNA, 15 bp, Homo sapiens
aagtagaagccagtc

SEQ ID NO: 1638829 - DNA, 15 bp, Homo sapiens
agtagaagccagtct

SEQ ID NO: 1638830 - DNA, 15 bp, Homo sapiens
gtagaagccagtctt

SEQ ID NO: 1638831 - DNA, 15 bp, Homo sapiens
tagaagccagtcttg

SEQ ID NO: 1638832 - DNA, 15 bp, Homo sapiens
agaagccagtcttgt

SEQ ID NO: 1638833 - DNA, 15 bp, Homo sapiens
gaagccagtcttgtg

SEQ ID NO: 1638834 - DNA, 15 bp, Homo sapiens
aagccagtcttgtgt

SEQ ID NO: 1638835 - DNA, 15 bp, Homo sapiens
agccagtcttgtgtc

SEQ ID NO: 1638836 - DNA, 15 bp, Homo sapiens
gccagtcttgtgtca

SEQ ID NO: 1638837 - DNA, 15 bp, Homo sapiens
ccagtcttgtgtcac

SEQ ID NO: 1638838 - DNA, 15 bp, Homo sapiens
cagtcttgtgtcacc

SEQ ID NO: 1638839 - DNA, 15 bp, Homo sapiens
agtcttgtgtcacca

SEQ ID NO: 1638840 - DNA, 15 bp, Homo sapiens
gtcttgtgtcaccaa

SEQ ID NO: 1638841 - DNA, 15 bp, Homo sapiens
tcttgtgtcaccaaa

SEQ ID NO: 1638842 - DNA, 15 bp, Homo sapiens
cttgtgtcaccaaaa

SEQ ID NO: 1638843 - DNA, 15 bp, Homo sapiens
ttgtgtcaccaaaaa

SEQ ID NO: 1638844 - DNA, 15 bp, Homo sapiens
tgtgtcaccaaaaac

SEQ ID NO: 1638845 - DNA, 15 bp, Homo sapiens
gtgtcaccaaaaact

SEQ ID NO: 1638846 - DNA, 15 bp, Homo sapiens
tgtcaccaaaaactt

SEQ ID NO: 1638847 - DNA, 15 bp, Homo sapiens
gtcaccaaaaacttc

SEQ ID NO: 1638848 - DNA, 15 bp, Homo sapiens
tcaccaaaaacttca

SEQ ID NO: 1638849 - DNA, 15 bp, Homo sapiens
caccaaaaacttcaa

SEQ ID NO: 1638850 - DNA, 15 bp, Homo sapiens
accaaaaacttcaag

SEQ ID NO: 1638851 - DNA, 15 bp, Homo sapiens
ccaaaaacttcaagc

SEQ ID NO: 1638852 - DNA, 15 bp, Homo sapiens
caaaaacttcaagcc

SEQ ID NO: 1638853 - DNA, 15 bp, Homo sapiens
aaaaacttcaagccc

SEQ ID NO: 1638854 - DNA, 15 bp, Homo sapiens
aaaacttcaagccca

SEQ ID NO: 1638855 - DNA, 15 bp, Homo sapiens
aaacttcaagcccaa

SEQ ID NO: 1638856 - DNA, 15 bp, Homo sapiens
aacttcaagcccaag

SEQ ID NO: 1638857 - DNA, 15 bp, Homo sapiens
acttcaagcccaagc

SEQ ID NO: 1638858 - DNA, 15 bp, Homo sapiens
cttcaagcccaagct

SEQ ID NO: 1638859 - DNA, 15 bp, Homo sapiens
ttcaagcccaagctt

SEQ ID NO: 1638860 - DNA, 15 bp, Homo sapiens
tcaagcccaagcttg

SEQ ID NO: 1638861 - DNA, 15 bp, Homo sapiens
caagcccaagcttgc

SEQ ID NO: 1638862 - DNA, 15 bp, Homo sapiens
aagcccaagcttgcc

SEQ ID NO: 1638863 - DNA, 15 bp, Homo sapiens
agcccaagcttgcca

SEQ ID NO: 1638864 - DNA, 15 bp, Homo sapiens
gcccaagcttgccaa

SEQ ID NO: 1638865 - DNA, 15 bp, Homo sapiens
cccaagcttgccaac

SEQ ID NO: 1638866 - DNA, 15 bp, Homo sapiens
ccaagcttgccaacg

SEQ ID NO: 1638867 - DNA, 15 bp, Homo sapiens
caagcttgccaacgc

SEQ ID NO: 1638868 - DNA, 15 bp, Homo sapiens
aagcttgccaacgct

SEQ ID NO: 1638869 - DNA, 15 bp, Homo sapiens
agcttgccaacgctt

SEQ ID NO: 1638870 - DNA, 15 bp, Homo sapiens
gcttgccaacgcttt

SEQ ID NO: 1638871 - DNA, 15 bp, Homo sapiens
cttgccaacgctttt

SEQ ID NO: 1638872 - DNA, 15 bp, Homo sapiens
ttgccaacgcttttc

SEQ ID NO: 1638873 - DNA, 15 bp, Homo sapiens
tgccaacgcttttcc

SEQ ID NO: 1638874 - DNA, 15 bp, Homo sapiens
gccaacgcttttcca

SEQ ID NO: 1638875 - DNA, 15 bp, Homo sapiens
ccaacgcttttccat

SEQ ID NO: 1638876 - DNA, 15 bp, Homo sapiens
caacgcttttccatg

SEQ ID NO: 1638877 - DNA, 15 bp, Homo sapiens
aacgcttttccatga

SEQ ID NO: 1638878 - DNA, 15 bp, Homo sapiens
acgcttttccatgat

SEQ ID NO: 1638879 - DNA, 15 bp, Homo sapiens
cgcttttccatgatg

SEQ ID NO: 1638880 - DNA, 15 bp, Homo sapiens
gcttttccatgatgt

SEQ ID NO: 1638881 - DNA, 15 bp, Homo sapiens
cttttccatgatgtg

SEQ ID NO: 1638882 - DNA, 15 bp, Homo sapiens
ttttccatgatgtgg

SEQ ID NO: 1638883 - DNA, 15 bp, Homo sapiens
tttccatgatgtggt

SEQ ID NO: 1638884 - DNA, 15 bp, Homo sapiens
ttccatgatgtggta

SEQ ID NO: 1638885 - DNA, 15 bp, Homo sapiens
tccatgatgtggtag

SEQ ID NO: 1638886 - DNA, 15 bp, Homo sapiens
ccatgatgtggtagt

SEQ ID NO: 1638887 - DNA, 15 bp, Homo sapiens
catgatgtggtagta

SEQ ID NO: 1638888 - DNA, 15 bp, Homo sapiens
atgatgtggtagtag

SEQ ID NO: 1638889 - DNA, 15 bp, Homo sapiens
tgatgtggtagtaga

SEQ ID NO: 1638890 - DNA, 15 bp, Homo sapiens
gatgtggtagtagag

SEQ ID NO: 1638891 - DNA, 15 bp, Homo sapiens
atgtggtagtagagt

SEQ ID NO: 1638892 - DNA, 15 bp, Homo sapiens
tgtggtagtagagtt

SEQ ID NO: 1638893 - DNA, 15 bp, Homo sapiens
gtggtagtagagttt

SEQ ID NO: 1638894 - DNA, 15 bp, Homo sapiens
tggtagtagagtttc

SEQ ID NO: 1638895 - DNA, 15 bp, Homo sapiens
ggtagtagagtttca

SEQ ID NO: 1638896 - DNA, 15 bp, Homo sapiens
gtagtagagtttcaa

SEQ ID NO: 1638897 - DNA, 15 bp, Homo sapiens
tagtagagtttcaag

SEQ ID NO: 1638898 - DNA, 15 bp, Homo sapiens
agtagagtttcaagc

SEQ ID NO: 1638899 - DNA, 15 bp, Homo sapiens
gtagagtttcaagca

SEQ ID NO: 1638900 - DNA, 15 bp, Homo sapiens
tagagtttcaagcat

SEQ ID NO: 1638901 - DNA, 15 bp, Homo sapiens
agagtttcaagcatg

SEQ ID NO: 1638902 - DNA, 15 bp, Homo sapiens
gagtttcaagcatgt

SEQ ID NO: 1638903 - DNA, 15 bp, Homo sapiens
agtttcaagcatgtg

SEQ ID NO: 1638904 - DNA, 15 bp, Homo sapiens
gtttcaagcatgtgg

SEQ ID NO: 1638905 - DNA, 15 bp, Homo sapiens
tttcaagcatgtggt

SEQ ID NO: 1638906 - DNA, 15 bp, Homo sapiens
ttcaagcatgtggta

SEQ ID NO: 1638907 - DNA, 15 bp, Homo sapiens
tcaagcatgtggtag

SEQ ID NO: 1638908 - DNA, 15 bp, Homo sapiens
caagcatgtggtagg

SEQ ID NO: 1638909 - DNA, 15 bp, Homo sapiens
aagcatgtggtagga

SEQ ID NO: 1638910 - DNA, 15 bp, Homo sapiens
agcatgtggtaggat

SEQ ID NO: 1638911 - DNA, 15 bp, Homo sapiens
gcatgtggtaggata

SEQ ID NO: 1638912 - DNA, 15 bp, Homo sapiens
catgtggtaggataa

SEQ ID NO: 1638913 - DNA, 15 bp, Homo sapiens
atgtggtaggataag

SEQ ID NO: 1638914 - DNA, 15 bp, Homo sapiens
tgtggtaggataaga

SEQ ID NO: 1638915 - DNA, 15 bp, Homo sapiens
gtggtaggataagag

SEQ ID NO: 1638916 - DNA, 15 bp, Homo sapiens
tggtaggataagaga

SEQ ID NO: 1638917 - DNA, 15 bp, Homo sapiens
ggtaggataagagaa

SEQ ID NO: 1638918 - DNA, 15 bp, Homo sapiens
gtaggataagagaac

SEQ ID NO: 1638919 - DNA, 15 bp, Homo sapiens
taggataagagaact

SEQ ID NO: 1638920 - DNA, 15 bp, Homo sapiens
aggataagagaactc

SEQ ID NO: 1638921 - DNA, 15 bp, Homo sapiens
ggataagagaactca

SEQ ID NO: 1638922 - DNA, 15 bp, Homo sapiens
gataagagaactcaa

SEQ ID NO: 1638923 - DNA, 15 bp, Homo sapiens
ataagagaactcaat

SEQ ID NO: 1638924 - DNA, 15 bp, Homo sapiens
taagagaactcaatg

SEQ ID NO: 1638925 - DNA, 15 bp, Homo sapiens
aagagaactcaatga

SEQ ID NO: 1638926 - DNA, 15 bp, Homo sapiens
agagaactcaatgac

SEQ ID NO: 1638927 - DNA, 15 bp, Homo sapiens
gagaactcaatgacc

SEQ ID NO: 1638928 - DNA, 15 bp, Homo sapiens
agaactcaatgacct

SEQ ID NO: 1638929 - DNA, 15 bp, Homo sapiens
gaactcaatgaccta

SEQ ID NO: 1638930 - DNA, 15 bp, Homo sapiens
aactcaatgacctaa

SEQ ID NO: 1638931 - DNA, 15 bp, Homo sapiens
actcaatgacctaag

SEQ ID NO: 1638932 - DNA, 15 bp, Homo sapiens
ctcaatgacctaaga

SEQ ID NO: 1638933 - DNA, 15 bp, Homo sapiens
tcaatgacctaagaa

SEQ ID NO: 1638934 - DNA, 15 bp, Homo sapiens
caatgacctaagaac

SEQ ID NO: 1638935 - DNA, 15 bp, Homo sapiens
aatgacctaagaacc

SEQ ID NO: 1638936 - DNA, 15 bp, Homo sapiens
atgacctaagaacca

SEQ ID NO: 1638937 - DNA, 15 bp, Homo sapiens
tgacctaagaaccat

SEQ ID NO: 1638938 - DNA, 15 bp, Homo sapiens
gacctaagaaccatt

SEQ ID NO: 1638939 - DNA, 15 bp, Homo sapiens
acctaagaaccattc

SEQ ID NO: 1638940 - DNA, 15 bp, Homo sapiens
cctaagaaccattcc

SEQ ID NO: 1638941 - DNA, 15 bp, Homo sapiens
ctaagaaccattcca

SEQ ID NO: 1638942 - DNA, 15 bp, Homo sapiens
taagaaccattccaa

SEQ ID NO: 1638943 - DNA, 15 bp, Homo sapiens
aagaaccattccaac

SEQ ID NO: 1638944 - DNA, 15 bp, Homo sapiens
agaaccattccaacc

SEQ ID NO: 1638945 - DNA, 15 bp, Homo sapiens
gaaccattccaaccc

SEQ ID NO: 1638946 - DNA, 15 bp, Homo sapiens
aaccattccaaccca

SEQ ID NO: 1638947 - DNA, 15 bp, Homo sapiens
accattccaacccag

SEQ ID NO: 1638948 - DNA, 15 bp, Homo sapiens
ccattccaacccaga

SEQ ID NO: 1638949 - DNA, 15 bp, Homo sapiens
cattccaacccagag

SEQ ID NO: 1638950 - DNA, 15 bp, Homo sapiens
attccaacccagaga

SEQ ID NO: 1638951 - DNA, 15 bp, Homo sapiens
ttccaacccagagaa

SEQ ID NO: 1638952 - DNA, 15 bp, Homo sapiens
tccaacccagagaac

SEQ ID NO: 1638953 - DNA, 15 bp, Homo sapiens
ccaacccagagaacc

SEQ ID NO: 1638954 - DNA, 15 bp, Homo sapiens
caacccagagaaccc

SEQ ID NO: 1638955 - DNA, 15 bp, Homo sapiens
aacccagagaacccc

SEQ ID NO: 1638956 - DNA, 15 bp, Homo sapiens
acccagagaacccct

SEQ ID NO: 1638957 - DNA, 15 bp, Homo sapiens
cccagagaacccctg

SEQ ID NO: 1638958 - DNA, 15 bp, Homo sapiens
ccagagaacccctgg

SEQ ID NO: 1638959 - DNA, 15 bp, Homo sapiens
cagagaacccctggt

SEQ ID NO: 1638960 - DNA, 15 bp, Homo sapiens
agagaacccctggtt

SEQ ID NO: 1638961 - DNA, 15 bp, Homo sapiens
gagaacccctggttc

SEQ ID NO: 1638962 - DNA, 15 bp, Homo sapiens
agaacccctggttct

SEQ ID NO: 1638963 - DNA, 15 bp, Homo sapiens
gaacccctggttcta

SEQ ID NO: 1638964 - DNA, 15 bp, Homo sapiens
aacccctggttctat

SEQ ID NO: 1638965 - DNA, 15 bp, Homo sapiens
acccctggttctatg

SEQ ID NO: 1638966 - DNA, 15 bp, Homo sapiens
cccctggttctatga

SEQ ID NO: 1638967 - DNA, 15 bp, Homo sapiens
ccctggttctatgaa

SEQ ID NO: 1638968 - DNA, 15 bp, Homo sapiens
cctggttctatgaat

SEQ ID NO: 1638969 - DNA, 15 bp, Homo sapiens
ctggttctatgaata

SEQ ID NO: 1638970 - DNA, 15 bp, Homo sapiens
tggttctatgaataa

SEQ ID NO: 1638971 - DNA, 15 bp, Homo sapiens
ggttctatgaataat

SEQ ID NO: 1638972 - DNA, 15 bp, Homo sapiens
gttctatgaataatt

SEQ ID NO: 1638973 - DNA, 15 bp, Homo sapiens
ttctatgaataattc

SEQ ID NO: 1638974 - DNA, 15 bp, Homo sapiens
tctatgaataattcc

SEQ ID NO: 1638975 - DNA, 15 bp, Homo sapiens
ctatgaataattcca

SEQ ID NO: 1638976 - DNA, 15 bp, Homo sapiens
tatgaataattccaa

SEQ ID NO: 1638977 - DNA, 15 bp, Homo sapiens
atgaataattccaac

SEQ ID NO: 1638978 - DNA, 15 bp, Homo sapiens
tgaataattccaact

SEQ ID NO: 1638979 - DNA, 15 bp, Homo sapiens
gaataattccaactt

SEQ ID NO: 1638980 - DNA, 15 bp, Homo sapiens
aataattccaactta

SEQ ID NO: 1638981 - DNA, 15 bp, Homo sapiens
ataattccaacttaa

SEQ ID NO: 1638982 - DNA, 15 bp, Homo sapiens
taattccaacttaaa

SEQ ID NO: 1638983 - DNA, 15 bp, Homo sapiens
aattccaacttaaat

SEQ ID NO: 1638984 - DNA, 15 bp, Homo sapiens
attccaacttaaata

SEQ ID NO: 1638985 - DNA, 15 bp, Homo sapiens
ttccaacttaaatag

SEQ ID NO: 1638986 - DNA, 15 bp, Homo sapiens
tccaacttaaatagg

SEQ ID NO: 1638987 - DNA, 15 bp, Homo sapiens
ccaacttaaataggt

SEQ ID NO: 1638988 - DNA, 15 bp, Homo sapiens
caacttaaataggta

SEQ ID NO: 1638989 - DNA, 15 bp, Homo sapiens
aacttaaataggtag

SEQ ID NO: 1638990 - DNA, 15 bp, Homo sapiens
acttaaataggtagc

SEQ ID NO: 1638991 - DNA, 15 bp, Homo sapiens
cttaaataggtagct

SEQ ID NO: 1638992 - DNA, 15 bp, Homo sapiens
ttaaataggtagctt

SEQ ID NO: 1638993 - DNA, 15 bp, Homo sapiens
taaataggtagcttg

SEQ ID NO: 1638994 - DNA, 15 bp, Homo sapiens
aaataggtagcttgg

SEQ ID NO: 1638995 - DNA, 15 bp, Homo sapiens
aataggtagcttggc

SEQ ID NO: 1638996 - DNA, 15 bp, Homo sapiens
ataggtagcttggct

SEQ ID NO: 1638997 - DNA, 15 bp, Homo sapiens
taggtagcttggctc

SEQ ID NO: 1638998 - DNA, 15 bp, Homo sapiens
aggtagcttggctct

SEQ ID NO: 1638999 - DNA, 15 bp, Homo sapiens
ggtagcttggctctc

SEQ ID NO: 1639000 - DNA, 15 bp, Homo sapiens
gtagcttggctctcc

SEQ ID NO: 1639001 - DNA, 15 bp, Homo sapiens
tagcttggctctccc

SEQ ID NO: 1639002 - DNA, 15 bp, Homo sapiens
agcttggctctccca

SEQ ID NO: 1639003 - DNA, 15 bp, Homo sapiens
gcttggctctcccaa

SEQ ID NO: 1639004 - DNA, 15 bp, Homo sapiens
cttggctctcccaag

SEQ ID NO: 1639005 - DNA, 15 bp, Homo sapiens
ttggctctcccaagt

SEQ ID NO: 1639006 - DNA, 15 bp, Homo sapiens
tggctctcccaagtg

SEQ ID NO: 1639007 - DNA, 15 bp, Homo sapiens
ggctctcccaagtga

SEQ ID NO: 1639008 - DNA, 15 bp, Homo sapiens
gctctcccaagtgag

SEQ ID NO: 1639009 - DNA, 15 bp, Homo sapiens
ctctcccaagtgaga

SEQ ID NO: 1639010 - DNA, 15 bp, Homo sapiens
tctcccaagtgagag

SEQ ID NO: 1639011 - DNA, 15 bp, Homo sapiens
ctcccaagtgagagc

SEQ ID NO: 1639012 - DNA, 15 bp, Homo sapiens
tcccaagtgagagcc

SEQ ID NO: 1639013 - DNA, 15 bp, Homo sapiens
cccaagtgagagcca

SEQ ID NO: 1639014 - DNA, 15 bp, Homo sapiens
ccaagtgagagccat

SEQ ID NO: 1639015 - DNA, 15 bp, Homo sapiens
caagtgagagccatt

SEQ ID NO: 1639016 - DNA, 15 bp, Homo sapiens
aagtgagagccattg

SEQ ID NO: 1639017 - DNA, 15 bp, Homo sapiens
agtgagagccattgc

SEQ ID NO: 1639018 - DNA, 15 bp, Homo sapiens
gtgagagccattgct

SEQ ID NO: 1639019 - DNA, 15 bp, Homo sapiens
tgagagccattgctt

SEQ ID NO: 1639020 - DNA, 15 bp, Homo sapiens
gagagccattgcttc

SEQ ID NO: 1639021 - DNA, 15 bp, Homo sapiens
agagccattgcttct

SEQ ID NO: 1639022 - DNA, 15 bp, Homo sapiens
gagccattgcttctg

SEQ ID NO: 1639023 - DNA, 15 bp, Homo sapiens
agccattgcttctgt

SEQ ID NO: 1639024 - DNA, 15 bp, Homo sapiens
gccattgcttctgtt

SEQ ID NO: 1639025 - DNA, 15 bp, Homo sapiens
ccattgcttctgttt

SEQ ID NO: 1639026 - DNA, 15 bp, Homo sapiens
cattgcttctgtttc

SEQ ID NO: 1639027 - DNA, 15 bp, Homo sapiens
attgcttctgtttcc

SEQ ID NO: 1639028 - DNA, 15 bp, Homo sapiens
ttgcttctgtttccg

SEQ ID NO: 1639029 - DNA, 15 bp, Homo sapiens
tgcttctgtttccgg

SEQ ID NO: 1639030 - DNA, 15 bp, Homo sapiens
gcttctgtttccggg

SEQ ID NO: 1639031 - DNA, 15 bp, Homo sapiens
cttctgtttccgggt

SEQ ID NO: 1639032 - DNA, 15 bp, Homo sapiens
ttctgtttccgggtc

SEQ ID NO: 1639033 - DNA, 15 bp, Homo sapiens
tctgtttccgggtca

SEQ ID NO: 1639034 - DNA, 15 bp, Homo sapiens
ctgtttccgggtcat

SEQ ID NO: 1639035 - DNA, 15 bp, Homo sapiens
tgtttccgggtcata

SEQ ID NO: 1639036 - DNA, 15 bp, Homo sapiens
gtttccgggtcatat

SEQ ID NO: 1639037 - DNA, 15 bp, Homo sapiens
tttccgggtcatata

SEQ ID NO: 1639038 - DNA, 15 bp, Homo sapiens
ttccgggtcatataa

SEQ ID NO: 1639039 - DNA, 15 bp, Homo sapiens
tccgggtcatataat

SEQ ID NO: 1639040 - DNA, 15 bp, Homo sapiens
ccgggtcatataatg

SEQ ID NO: 1639041 - DNA, 15 bp, Homo sapiens
cgggtcatataatga

SEQ ID NO: 1639042 - DNA, 15 bp, Homo sapiens
gggtcatataatgaa

SEQ ID NO: 1639043 - DNA, 15 bp, Homo sapiens
ggtcatataatgaac

SEQ ID NO: 1639044 - DNA, 15 bp, Homo sapiens
gtcatataatgaact

SEQ ID NO: 1639045 - DNA, 15 bp, Homo sapiens
tcatataatgaactt

SEQ ID NO: 1639046 - DNA, 15 bp, Homo sapiens
catataatgaacttt

SEQ ID NO: 1639047 - DNA, 15 bp, Homo sapiens
atataatgaactttc

SEQ ID NO: 1639048 - DNA, 15 bp, Homo sapiens
tataatgaactttca

SEQ ID NO: 1639049 - DNA, 15 bp, Homo sapiens
ataatgaactttcag

SEQ ID NO: 1639050 - DNA, 15 bp, Homo sapiens
taatgaactttcaga

SEQ ID NO: 1639051 - DNA, 15 bp, Homo sapiens
aatgaactttcagaa

SEQ ID NO: 1639052 - DNA, 15 bp, Homo sapiens
atgaactttcagaaa

SEQ ID NO: 1639053 - DNA, 15 bp, Homo sapiens
tgaactttcagaaaa

SEQ ID NO: 1639054 - DNA, 15 bp, Homo sapiens
gaactttcagaaaac

SEQ ID NO: 1639055 - DNA, 15 bp, Homo sapiens
aactttcagaaaacc

SEQ ID NO: 1639056 - DNA, 15 bp, Homo sapiens
actttcagaaaacca

SEQ ID NO: 1639057 - DNA, 15 bp, Homo sapiens
ctttcagaaaaccac

SEQ ID NO: 1639058 - DNA, 15 bp, Homo sapiens
tttcagaaaaccacc

SEQ ID NO: 1639059 - DNA, 15 bp, Homo sapiens
ttcagaaaaccacca

SEQ ID NO: 1639060 - DNA, 15 bp, Homo sapiens
tcagaaaaccaccat

SEQ ID NO: 1639061 - DNA, 15 bp, Homo sapiens
cagaaaaccaccatt

SEQ ID NO: 1639062 - DNA, 15 bp, Homo sapiens
agaaaaccaccattt

SEQ ID NO: 1639063 - DNA, 15 bp, Homo sapiens
gaaaaccaccatttt

SEQ ID NO: 1639064 - DNA, 15 bp, Homo sapiens
aaaaccaccattttt

SEQ ID NO: 1639065 - DNA, 15 bp, Homo sapiens
aaaccaccatttttc

SEQ ID NO: 1639066 - DNA, 15 bp, Homo sapiens
aaccaccatttttct

SEQ ID NO: 1639067 - DNA, 15 bp, Homo sapiens
accaccatttttctc

SEQ ID NO: 1639068 - DNA, 15 bp, Homo sapiens
ccaccatttttctca

SEQ ID NO: 1639069 - DNA, 15 bp, Homo sapiens
caccatttttctcaa

SEQ ID NO: 1639070 - DNA, 15 bp, Homo sapiens
accatttttctcaac

SEQ ID NO: 1639071 - DNA, 15 bp, Homo sapiens
ccatttttctcaacc

SEQ ID NO: 1639072 - DNA, 15 bp, Homo sapiens
catttttctcaacca

SEQ ID NO: 1639073 - DNA, 15 bp, Homo sapiens
atttttctcaaccag

SEQ ID NO: 1639074 - DNA, 15 bp, Homo sapiens
tttttctcaaccagt

SEQ ID NO: 1639075 - DNA, 15 bp, Homo sapiens
ttttctcaaccagtt

SEQ ID NO: 1639076 - DNA, 15 bp, Homo sapiens
tttctcaaccagtta

SEQ ID NO: 1639077 - DNA, 15 bp, Homo sapiens
ttctcaaccagttaa

SEQ ID NO: 1639078 - DNA, 15 bp, Homo sapiens
tctcaaccagttaaa

SEQ ID NO: 1639079 - DNA, 15 bp, Homo sapiens
ctcaaccagttaaaa

SEQ ID NO: 1639080 - DNA, 15 bp, Homo sapiens
tcaaccagttaaaat

SEQ ID NO: 1639081 - DNA, 15 bp, Homo sapiens
caaccagttaaaatt

SEQ ID NO: 1639082 - DNA, 15 bp, Homo sapiens
aaccagttaaaatta

SEQ ID NO: 1639083 - DNA, 15 bp, Homo sapiens
accagttaaaattaa

SEQ ID NO: 1639084 - DNA, 15 bp, Homo sapiens
ccagttaaaattaag

SEQ ID NO: 1639085 - DNA, 15 bp, Homo sapiens
cagttaaaattaagt

SEQ ID NO: 1639086 - DNA, 15 bp, Homo sapiens
agttaaaattaagtg

SEQ ID NO: 1639087 - DNA, 15 bp, Homo sapiens
gttaaaattaagtgt

SEQ ID NO: 1639088 - DNA, 15 bp, Homo sapiens
ttaaaattaagtgta

SEQ ID NO: 1639089 - DNA, 15 bp, Homo sapiens
taaaattaagtgtaa

SEQ ID NO: 1639090 - DNA, 15 bp, Homo sapiens
aaaattaagtgtaat

SEQ ID NO: 1639091 - DNA, 15 bp, Homo sapiens
aaattaagtgtaata

SEQ ID NO: 1639092 - DNA, 15 bp, Homo sapiens
aattaagtgtaatac

SEQ ID NO: 1639093 - DNA, 15 bp, Homo sapiens
attaagtgtaatacg

SEQ ID NO: 1639094 - DNA, 15 bp, Homo sapiens
ttaagtgtaatacgt

SEQ ID NO: 1639095 - DNA, 15 bp, Homo sapiens
taagtgtaatacgtg

SEQ ID NO: 1639096 - DNA, 15 bp, Homo sapiens
aagtgtaatacgtgc

SEQ ID NO: 1639097 - DNA, 15 bp, Homo sapiens
agtgtaatacgtgct

SEQ ID NO: 1639098 - DNA, 15 bp, Homo sapiens
gtgtaatacgtgctt

SEQ ID NO: 1639099 - DNA, 15 bp, Homo sapiens
tgtaatacgtgcttt

SEQ ID NO: 1639100 - DNA, 15 bp, Homo sapiens
gtaatacgtgctttc

SEQ ID NO: 1639101 - DNA, 15 bp, Homo sapiens
taatacgtgctttca

SEQ ID NO: 1639102 - DNA, 15 bp, Homo sapiens
aatacgtgctttcat

SEQ ID NO: 1639103 - DNA, 15 bp, Homo sapiens
atacgtgctttcatt

SEQ ID NO: 1639104 - DNA, 15 bp, Homo sapiens
tacgtgctttcattt

SEQ ID NO: 1639105 - DNA, 15 bp, Homo sapiens
acgtgctttcatttc

SEQ ID NO: 1639106 - DNA, 15 bp, Homo sapiens
cgtgctttcatttca

SEQ ID NO: 1639107 - DNA, 15 bp, Homo sapiens
gtgctttcatttcat

SEQ ID NO: 1639108 - DNA, 15 bp, Homo sapiens
tgctttcatttcatg

SEQ ID NO: 1639109 - DNA, 15 bp, Homo sapiens
gctttcatttcatgg

SEQ ID NO: 1639110 - DNA, 15 bp, Homo sapiens
ctttcatttcatggt

SEQ ID NO: 1639111 - DNA, 15 bp, Homo sapiens
tttcatttcatggtg

SEQ ID NO: 1639112 - DNA, 15 bp, Homo sapiens
ttcatttcatggtgc

SEQ ID NO: 1639113 - DNA, 15 bp, Homo sapiens
tcatttcatggtgcc

SEQ ID NO: 1639114 - DNA, 15 bp, Homo sapiens
catttcatggtgcct

SEQ ID NO: 1639115 - DNA, 15 bp, Homo sapiens
atttcatggtgcctg

SEQ ID NO: 1639116 - DNA, 15 bp, Homo sapiens
tttcatggtgcctgg

SEQ ID NO: 1639117 - DNA, 15 bp, Homo sapiens
ttcatggtgcctggg

SEQ ID NO: 1639118 - DNA, 15 bp, Homo sapiens
tcatggtgcctgggg

SEQ ID NO: 1639119 - DNA, 15 bp, Homo sapiens
catggtgcctgggga

SEQ ID NO: 1639120 - DNA, 15 bp, Homo sapiens
atggtgcctggggaa

SEQ ID NO: 1639121 - DNA, 15 bp, Homo sapiens
tggtgcctggggaaa

SEQ ID NO: 1639122 - DNA, 15 bp, Homo sapiens
ggtgcctggggaaaa

SEQ ID NO: 1639123 - DNA, 15 bp, Homo sapiens
gtgcctggggaaaat

SEQ ID NO: 1639124 - DNA, 15 bp, Homo sapiens
tgcctggggaaaatt

SEQ ID NO: 1639125 - DNA, 15 bp, Homo sapiens
gcctggggaaaattt

SEQ ID NO: 1639126 - DNA, 15 bp, Homo sapiens
cctggggaaaattta

SEQ ID NO: 1639127 - DNA, 15 bp, Homo sapiens
ctggggaaaatttaa

SEQ ID NO: 1639128 - DNA, 15 bp, Homo sapiens
tggggaaaatttaat

SEQ ID NO: 1639129 - DNA, 15 bp, Homo sapiens
ggggaaaatttaatt

SEQ ID NO: 1639130 - DNA, 15 bp, Homo sapiens
gggaaaatttaattg

SEQ ID NO: 1639131 - DNA, 15 bp, Homo sapiens
ggaaaatttaattgt

SEQ ID NO: 1639132 - DNA, 15 bp, Homo sapiens
gaaaatttaattgta

SEQ ID NO: 1639133 - DNA, 15 bp, Homo sapiens
aaaatttaattgtag

SEQ ID NO: 1639134 - DNA, 15 bp, Homo sapiens
aaatttaattgtagt

SEQ ID NO: 1639135 - DNA, 15 bp, Homo sapiens
aatttaattgtagta

SEQ ID NO: 1639136 - DNA, 15 bp, Homo sapiens
atttaattgtagtat

SEQ ID NO: 1639137 - DNA, 15 bp, Homo sapiens
tttaattgtagtatg

SEQ ID NO: 1639138 - DNA, 15 bp, Homo sapiens
ttaattgtagtatga

SEQ ID NO: 1639139 - DNA, 15 bp, Homo sapiens
taattgtagtatgaa

SEQ ID NO: 1639140 - DNA, 15 bp, Homo sapiens
aattgtagtatgaac

SEQ ID NO: 1639141 - DNA, 15 bp, Homo sapiens
attgtagtatgaact

SEQ ID NO: 1639142 - DNA, 15 bp, Homo sapiens
ttgtagtatgaactc

SEQ ID NO: 1639143 - DNA, 15 bp, Homo sapiens
tgtagtatgaactcc

SEQ ID NO: 1639144 - DNA, 15 bp, Homo sapiens
gtagtatgaactcca

SEQ ID NO: 1639145 - DNA, 15 bp, Homo sapiens
tagtatgaactccag

SEQ ID NO: 1639146 - DNA, 15 bp, Homo sapiens
agtatgaactccagt

SEQ ID NO: 1639147 - DNA, 15 bp, Homo sapiens
gtatgaactccagtt

SEQ ID NO: 1639148 - DNA, 15 bp, Homo sapiens
tatgaactccagtta

SEQ ID NO: 1639149 - DNA, 15 bp, Homo sapiens
atgaactccagttat

SEQ ID NO: 1639150 - DNA, 15 bp, Homo sapiens
tgaactccagttatt

SEQ ID NO: 1639151 - DNA, 15 bp, Homo sapiens
gaactccagttattg

SEQ ID NO: 1639152 - DNA, 15 bp, Homo sapiens
aactccagttattgg

SEQ ID NO: 1639153 - DNA, 15 bp, Homo sapiens
actccagttattggt

SEQ ID NO: 1639154 - DNA, 15 bp, Homo sapiens
ctccagttattggta

SEQ ID NO: 1639155 - DNA, 15 bp, Homo sapiens
tccagttattggtag

SEQ ID NO: 1639156 - DNA, 15 bp, Homo sapiens
ccagttattggtagt

SEQ ID NO: 1639157 - DNA, 15 bp, Homo sapiens
cagttattggtagtc

SEQ ID NO: 1639158 - DNA, 15 bp, Homo sapiens
agttattggtagtct

SEQ ID NO: 1639159 - DNA, 15 bp, Homo sapiens
gttattggtagtctt

SEQ ID NO: 1639160 - DNA, 15 bp, Homo sapiens
ttattggtagtctta

SEQ ID NO: 1639161 - DNA, 15 bp, Homo sapiens
tattggtagtcttaa

SEQ ID NO: 1639162 - DNA, 15 bp, Homo sapiens
attggtagtcttaag

SEQ ID NO: 1639163 - DNA, 15 bp, Homo sapiens
ttggtagtcttaagt

SEQ ID NO: 1639164 - DNA, 15 bp, Homo sapiens
tggtagtcttaagta

SEQ ID NO: 1639165 - DNA, 15 bp, Homo sapiens
ggtagtcttaagtaa

SEQ ID NO: 1639166 - DNA, 15 bp, Homo sapiens
gtagtcttaagtaaa

SEQ ID NO: 1639167 - DNA, 15 bp, Homo sapiens
tagtcttaagtaaaa

SEQ ID NO: 1639168 - DNA, 15 bp, Homo sapiens
agtcttaagtaaaat

SEQ ID NO: 1639169 - DNA, 15 bp, Homo sapiens
gtcttaagtaaaatt

SEQ ID NO: 1639170 - DNA, 15 bp, Homo sapiens
tcttaagtaaaattg

SEQ ID NO: 1639171 - DNA, 15 bp, Homo sapiens
cttaagtaaaattgc

SEQ ID NO: 1639172 - DNA, 15 bp, Homo sapiens
ttaagtaaaattgcc

SEQ ID NO: 1639173 - DNA, 15 bp, Homo sapiens
taagtaaaattgcca

SEQ ID NO: 1639174 - DNA, 15 bp, Homo sapiens
aagtaaaattgccaa

SEQ ID NO: 1639175 - DNA, 15 bp, Homo sapiens
agtaaaattgccaaa

SEQ ID NO: 1639176 - DNA, 15 bp, Homo sapiens
gtaaaattgccaaaa

SEQ ID NO: 1639177 - DNA, 15 bp, Homo sapiens
taaaattgccaaaat

SEQ ID NO: 1639178 - DNA, 15 bp, Homo sapiens
aaaattgccaaaata

SEQ ID NO: 1639179 - DNA, 15 bp, Homo sapiens
aaattgccaaaataa

SEQ ID NO: 1639180 - DNA, 15 bp, Homo sapiens
aattgccaaaataaa

SEQ ID NO: 1639181 - DNA, 15 bp, Homo sapiens
attgccaaaataaat

SEQ ID NO: 1639182 - DNA, 15 bp, Homo sapiens
ttgccaaaataaata

SEQ ID NO: 1639183 - DNA, 15 bp, Homo sapiens
tgccaaaataaatag

SEQ ID NO: 1639184 - DNA, 15 bp, Homo sapiens
gccaaaataaataga

SEQ ID NO: 1639185 - DNA, 15 bp, Homo sapiens
ccaaaataaatagaa

SEQ ID NO: 1639186 - DNA, 15 bp, Homo sapiens
caaaataaatagaaa

SEQ ID NO: 1639187 - DNA, 15 bp, Homo sapiens
aaaataaatagaaat

SEQ ID NO: 1639188 - DNA, 15 bp, Homo sapiens
aaataaatagaaatg

SEQ ID NO: 1639189 - DNA, 15 bp, Homo sapiens
aataaatagaaatgc

SEQ ID NO: 1639190 - DNA, 15 bp, Homo sapiens
ataaatagaaatgca

SEQ ID NO: 1639191 - DNA, 15 bp, Homo sapiens
taaatagaaatgcag

SEQ ID NO: 1639192 - DNA, 15 bp, Homo sapiens
aaatagaaatgcagg

SEQ ID NO: 1639193 - DNA, 15 bp, Homo sapiens
aatagaaatgcagga

SEQ ID NO: 1639194 - DNA, 15 bp, Homo sapiens
atagaaatgcaggat

SEQ ID NO: 1639195 - DNA, 15 bp, Homo sapiens
tagaaatgcaggata

SEQ ID NO: 1639196 - DNA, 15 bp, Homo sapiens
agaaatgcaggatat

SEQ ID NO: 1639197 - DNA, 15 bp, Homo sapiens
gaaatgcaggatatt

SEQ ID NO: 1639198 - DNA, 15 bp, Homo sapiens
aaatgcaggatattt

SEQ ID NO: 1639199 - DNA, 15 bp, Homo sapiens
aatgcaggatatttc

SEQ ID NO: 1639200 - DNA, 15 bp, Homo sapiens
atgcaggatatttct

SEQ ID NO: 1639201 - DNA, 15 bp, Homo sapiens
tgcaggatatttctg

SEQ ID NO: 1639202 - DNA, 15 bp, Homo sapiens
gcaggatatttctgg

SEQ ID NO: 1639203 - DNA, 15 bp, Homo sapiens
caggatatttctggg

SEQ ID NO: 1639204 - DNA, 15 bp, Homo sapiens
aggatatttctgggc

SEQ ID NO: 1639205 - DNA, 15 bp, Homo sapiens
ggatatttctgggct

SEQ ID NO: 1639206 - DNA, 15 bp, Homo sapiens
gatatttctgggctc

SEQ ID NO: 1639207 - DNA, 15 bp, Homo sapiens
atatttctgggctca

SEQ ID NO: 1639208 - DNA, 15 bp, Homo sapiens
tatttctgggctcac

SEQ ID NO: 1639209 - DNA, 15 bp, Homo sapiens
atttctgggctcaca

SEQ ID NO: 1639210 - DNA, 15 bp, Homo sapiens
tttctgggctcacac

SEQ ID NO: 1639211 - DNA, 15 bp, Homo sapiens
ttctgggctcacaca

SEQ ID NO: 1639212 - DNA, 15 bp, Homo sapiens
tctgggctcacacag

SEQ ID NO: 1639213 - DNA, 15 bp, Homo sapiens
ctgggctcacacagc

SEQ ID NO: 1639214 - DNA, 15 bp, Homo sapiens
tgggctcacacagct

SEQ ID NO: 1639215 - DNA, 15 bp, Homo sapiens
gggctcacacagctt

SEQ ID NO: 1639216 - DNA, 15 bp, Homo sapiens
ggctcacacagcttc

SEQ ID NO: 1639217 - DNA, 15 bp, Homo sapiens
gctcacacagcttcc

SEQ ID NO: 1639218 - DNA, 15 bp, Homo sapiens
ctcacacagcttccg

SEQ ID NO: 1639219 - DNA, 15 bp, Homo sapiens
tcacacagcttccgg

SEQ ID NO: 1639220 - DNA, 15 bp, Homo sapiens
cacacagcttccggg

SEQ ID NO: 1639221 - DNA, 15 bp, Homo sapiens
acacagcttccggga

SEQ ID NO: 1639222 - DNA, 15 bp, Homo sapiens
cacagcttccgggac

SEQ ID NO: 1639223 - DNA, 15 bp, Homo sapiens
acagcttccgggaca

SEQ ID NO: 1639224 - DNA, 15 bp, Homo sapiens
cagcttccgggacac

SEQ ID NO: 1639225 - DNA, 15 bp, Homo sapiens
agcttccgggacact

SEQ ID NO: 1639226 - DNA, 15 bp, Homo sapiens
gcttccgggacactt

SEQ ID NO: 1639227 - DNA, 15 bp, Homo sapiens
cttccgggacacttt

SEQ ID NO: 1639228 - DNA, 15 bp, Homo sapiens
ttccgggacacttta

SEQ ID NO: 1639229 - DNA, 15 bp, Homo sapiens
tccgggacactttag

SEQ ID NO: 1639230 - DNA, 15 bp, Homo sapiens
ccgggacactttagt

SEQ ID NO: 1639231 - DNA, 15 bp, Homo sapiens
cgggacactttagtt

SEQ ID NO: 1639232 - DNA, 15 bp, Homo sapiens
gggacactttagttt

SEQ ID NO: 1639233 - DNA, 15 bp, Homo sapiens
ggacactttagtttc

SEQ ID NO: 1639234 - DNA, 15 bp, Homo sapiens
gacactttagtttct

SEQ ID NO: 1639235 - DNA, 15 bp, Homo sapiens
acactttagtttctt

SEQ ID NO: 1639236 - DNA, 15 bp, Homo sapiens
cactttagtttcttg

SEQ ID NO: 1639237 - DNA, 15 bp, Homo sapiens
actttagtttcttgg

SEQ ID NO: 1639238 - DNA, 15 bp, Homo sapiens
ctttagtttcttggg

SEQ ID NO: 1639239 - DNA, 15 bp, Homo sapiens
tttagtttcttgggc

SEQ ID NO: 1639240 - DNA, 15 bp, Homo sapiens
ttagtttcttgggct

SEQ ID NO: 1639241 - DNA, 15 bp, Homo sapiens
tagtttcttgggctg

SEQ ID NO: 1639242 - DNA, 15 bp, Homo sapiens
agtttcttgggctgc

SEQ ID NO: 1639243 - DNA, 15 bp, Homo sapiens
gtttcttgggctgcc

SEQ ID NO: 1639244 - DNA, 15 bp, Homo sapiens
tttcttgggctgcca

SEQ ID NO: 1639245 - DNA, 15 bp, Homo sapiens
ttcttgggctgccaa

SEQ ID NO: 1639246 - DNA, 15 bp, Homo sapiens
tcttgggctgccaat

SEQ ID NO: 1639247 - DNA, 15 bp, Homo sapiens
cttgggctgccaatc

SEQ ID NO: 1639248 - DNA, 15 bp, Homo sapiens
ttgggctgccaatcc

SEQ ID NO: 1639249 - DNA, 15 bp, Homo sapiens
tgggctgccaatcca

SEQ ID NO: 1639250 - DNA, 15 bp, Homo sapiens
gggctgccaatccag

SEQ ID NO: 1639251 - DNA, 15 bp, Homo sapiens
ggctgccaatccagt

SEQ ID NO: 1639252 - DNA, 15 bp, Homo sapiens
gctgccaatccagtg

SEQ ID NO: 1639253 - DNA, 15 bp, Homo sapiens
ctgccaatccagtgc

SEQ ID NO: 1639254 - DNA, 15 bp, Homo sapiens
tgccaatccagtgcc

SEQ ID NO: 1639255 - DNA, 15 bp, Homo sapiens
gccaatccagtgcct

SEQ ID NO: 1639256 - DNA, 15 bp, Homo sapiens
ccaatccagtgcctt

SEQ ID NO: 1639257 - DNA, 15 bp, Homo sapiens
caatccagtgccttt

SEQ ID NO: 1639258 - DNA, 15 bp, Homo sapiens
aatccagtgcctttc

SEQ ID NO: 1639259 - DNA, 15 bp, Homo sapiens
atccagtgcctttca

SEQ ID NO: 1639260 - DNA, 15 bp, Homo sapiens
tccagtgcctttcac

SEQ ID NO: 1639261 - DNA, 15 bp, Homo sapiens
ccagtgcctttcaca

SEQ ID NO: 1639262 - DNA, 15 bp, Homo sapiens
cagtgcctttcacaa

SEQ ID NO: 1639263 - DNA, 15 bp, Homo sapiens
agtgcctttcacaag

SEQ ID NO: 1639264 - DNA, 15 bp, Homo sapiens
gtgcctttcacaagc

SEQ ID NO: 1639265 - DNA, 15 bp, Homo sapiens
tgcctttcacaagca

SEQ ID NO: 1639266 - DNA, 15 bp, Homo sapiens
gcctttcacaagcat

SEQ ID NO: 1639267 - DNA, 15 bp, Homo sapiens
cctttcacaagcatt

SEQ ID NO: 1639268 - DNA, 15 bp, Homo sapiens
ctttcacaagcattt

SEQ ID NO: 1639269 - DNA, 15 bp, Homo sapiens
tttcacaagcatttg

SEQ ID NO: 1639270 - DNA, 15 bp, Homo sapiens
ttcacaagcatttga

SEQ ID NO: 1639271 - DNA, 15 bp, Homo sapiens
tcacaagcatttgat

SEQ ID NO: 1639272 - DNA, 15 bp, Homo sapiens
cacaagcatttgatc

SEQ ID NO: 1639273 - DNA, 15 bp, Homo sapiens
acaagcatttgatct

SEQ ID NO: 1639274 - DNA, 15 bp, Homo sapiens
caagcatttgatctt

SEQ ID NO: 1639275 - DNA, 15 bp, Homo sapiens
aagcatttgatcttt

SEQ ID NO: 1639276 - DNA, 15 bp, Homo sapiens
agcatttgatctttt

SEQ ID NO: 1639277 - DNA, 15 bp, Homo sapiens
gcatttgatcttttt

SEQ ID NO: 1639278 - DNA, 15 bp, Homo sapiens
catttgatctttttt

SEQ ID NO: 1639279 - DNA, 15 bp, Homo sapiens
atttgatcttttttc

SEQ ID NO: 1639280 - DNA, 15 bp, Homo sapiens
tttgatcttttttca

SEQ ID NO: 1639281 - DNA, 15 bp, Homo sapiens
ttgatcttttttcaa

SEQ ID NO: 1639282 - DNA, 15 bp, Homo sapiens
tgatcttttttcaaa

SEQ ID NO: 1639283 - DNA, 15 bp, Homo sapiens
gatcttttttcaaac

SEQ ID NO: 1639284 - DNA, 15 bp, Homo sapiens
atcttttttcaaaca

SEQ ID NO: 1639285 - DNA, 15 bp, Homo sapiens
tcttttttcaaacat

SEQ ID NO: 1639286 - DNA, 15 bp, Homo sapiens
cttttttcaaacatc

SEQ ID NO: 1639287 - DNA, 15 bp, Homo sapiens
ttttttcaaacatct

SEQ ID NO: 1639288 - DNA, 15 bp, Homo sapiens
tttttcaaacatctc

SEQ ID NO: 1639289 - DNA, 15 bp, Homo sapiens
ttttcaaacatctct

SEQ ID NO: 1639290 - DNA, 15 bp, Homo sapiens
tttcaaacatctctt

SEQ ID NO: 1639291 - DNA, 15 bp, Homo sapiens
ttcaaacatctcttg

SEQ ID NO: 1639292 - DNA, 15 bp, Homo sapiens
tcaaacatctcttga

SEQ ID NO: 1639293 - DNA, 15 bp, Homo sapiens
caaacatctcttgaa

SEQ ID NO: 1639294 - DNA, 15 bp, Homo sapiens
aaacatctcttgaaa

SEQ ID NO: 1639295 - DNA, 15 bp, Homo sapiens
aacatctcttgaaaa

SEQ ID NO: 1639296 - DNA, 15 bp, Homo sapiens
acatctcttgaaaac

SEQ ID NO: 1639297 - DNA, 15 bp, Homo sapiens
catctcttgaaaaca

SEQ ID NO: 1639298 - DNA, 15 bp, Homo sapiens
atctcttgaaaacaa

SEQ ID NO: 1639299 - DNA, 15 bp, Homo sapiens
tctcttgaaaacaaa

SEQ ID NO: 1639300 - DNA, 15 bp, Homo sapiens
ctcttgaaaacaaac

SEQ ID NO: 1639301 - DNA, 15 bp, Homo sapiens
tcttgaaaacaaaca

SEQ ID NO: 1639302 - DNA, 15 bp, Homo sapiens
cttgaaaacaaacaa

SEQ ID NO: 1639303 - DNA, 15 bp, Homo sapiens
ttgaaaacaaacaaa

SEQ ID NO: 1639304 - DNA, 15 bp, Homo sapiens
tgaaaacaaacaaaa

SEQ ID NO: 1639305 - DNA, 15 bp, Homo sapiens
gaaaacaaacaaaac

SEQ ID NO: 1639306 - DNA, 15 bp, Homo sapiens
aacaaacaaaacctc

SEQ ID NO: 1639307 - DNA, 15 bp, Homo sapiens
acaaacaaaacctca

SEQ ID NO: 1639308 - DNA, 15 bp, Homo sapiens
caaacaaaacctcac

SEQ ID NO: 1639309 - DNA, 15 bp, Homo sapiens
aaacaaaacctcaca

SEQ ID NO: 1639310 - DNA, 15 bp, Homo sapiens
aacaaaacctcacac

SEQ ID NO: 1639311 - DNA, 15 bp, Homo sapiens
acaaaacctcacaca

SEQ ID NO: 1639312 - DNA, 15 bp, Homo sapiens
caaaacctcacacag

SEQ ID NO: 1639313 - DNA, 15 bp, Homo sapiens
aaaacctcacacagc

SEQ ID NO: 1639314 - DNA, 15 bp, Homo sapiens
aaacctcacacagct

SEQ ID NO: 1639315 - DNA, 15 bp, Homo sapiens
aacctcacacagctt

SEQ ID NO: 1639316 - DNA, 15 bp, Homo sapiens
acctcacacagcttc

SEQ ID NO: 1639317 - DNA, 15 bp, Homo sapiens
cctcacacagcttct

SEQ ID NO: 1639318 - DNA, 15 bp, Homo sapiens
ctcacacagcttcta

SEQ ID NO: 1639319 - DNA, 15 bp, Homo sapiens
tcacacagcttctaa

SEQ ID NO: 1639320 - DNA, 15 bp, Homo sapiens
cacacagcttctaat

SEQ ID NO: 1639321 - DNA, 15 bp, Homo sapiens
acacagcttctaatg

SEQ ID NO: 1639322 - DNA, 15 bp, Homo sapiens
cacagcttctaatgt

SEQ ID NO: 1639323 - DNA, 15 bp, Homo sapiens
acagcttctaatgtg

SEQ ID NO: 1639324 - DNA, 15 bp, Homo sapiens
cagcttctaatgtgt

SEQ ID NO: 1639325 - DNA, 15 bp, Homo sapiens
agcttctaatgtgtg

SEQ ID NO: 1639326 - DNA, 15 bp, Homo sapiens
gcttctaatgtgtgc

SEQ ID NO: 1639327 - DNA, 15 bp, Homo sapiens
cttctaatgtgtgca

SEQ ID NO: 1639328 - DNA, 15 bp, Homo sapiens
ttctaatgtgtgcac

SEQ ID NO: 1639329 - DNA, 15 bp, Homo sapiens
tctaatgtgtgcact

SEQ ID NO: 1639330 - DNA, 15 bp, Homo sapiens
ctaatgtgtgcactg

SEQ ID NO: 1639331 - DNA, 15 bp, Homo sapiens
taatgtgtgcactgt

SEQ ID NO: 1639332 - DNA, 15 bp, Homo sapiens
aatgtgtgcactgtt

SEQ ID NO: 1639333 - DNA, 15 bp, Homo sapiens
atgtgtgcactgttc

SEQ ID NO: 1639334 - DNA, 15 bp, Homo sapiens
tgtgtgcactgttcg

SEQ ID NO: 1639335 - DNA, 15 bp, Homo sapiens
gtgtgcactgttcga

SEQ ID NO: 1639336 - DNA, 15 bp, Homo sapiens
tgtgcactgttcgaa

SEQ ID NO: 1639337 - DNA, 15 bp, Homo sapiens
gtgcactgttcgaat

SEQ ID NO: 1639338 - DNA, 15 bp, Homo sapiens
tgcactgttcgaatg

SEQ ID NO: 1639339 - DNA, 15 bp, Homo sapiens
gcactgttcgaatgt

SEQ ID NO: 1639340 - DNA, 15 bp, Homo sapiens
cactgttcgaatgta

SEQ ID NO: 1639341 - DNA, 15 bp, Homo sapiens
actgttcgaatgtaa

SEQ ID NO: 1639342 - DNA, 15 bp, Homo sapiens
ctgttcgaatgtaag

SEQ ID NO: 1639343 - DNA, 15 bp, Homo sapiens
tgttcgaatgtaagg

SEQ ID NO: 1639344 - DNA, 15 bp, Homo sapiens
gttcgaatgtaaggg

SEQ ID NO: 1639345 - DNA, 15 bp, Homo sapiens
ttcgaatgtaagggt

SEQ ID NO: 1639346 - DNA, 15 bp, Homo sapiens
tcgaatgtaagggtg

SEQ ID NO: 1639347 - DNA, 15 bp, Homo sapiens
cgaatgtaagggtgg

SEQ ID NO: 1639348 - DNA, 15 bp, Homo sapiens
gaatgtaagggtgga

SEQ ID NO: 1639349 - DNA, 15 bp, Homo sapiens
aatgtaagggtggaa

SEQ ID NO: 1639350 - DNA, 15 bp, Homo sapiens
atgtaagggtggaaa

SEQ ID NO: 1639351 - DNA, 15 bp, Homo sapiens
tgtaagggtggaaaa

SEQ ID NO: 1639352 - DNA, 15 bp, Homo sapiens
gtaagggtggaaaag

SEQ ID NO: 1639353 - DNA, 15 bp, Homo sapiens
taagggtggaaaagg

SEQ ID NO: 1639354 - DNA, 15 bp, Homo sapiens
aagggtggaaaagga

SEQ ID NO: 1639355 - DNA, 15 bp, Homo sapiens
agggtggaaaaggag

SEQ ID NO: 1639356 - DNA, 15 bp, Homo sapiens
gggtggaaaaggagg

SEQ ID NO: 1639357 - DNA, 15 bp, Homo sapiens
ggtggaaaaggaggc

SEQ ID NO: 1639358 - DNA, 15 bp, Homo sapiens
gtggaaaaggaggca

SEQ ID NO: 1639359 - DNA, 15 bp, Homo sapiens
tggaaaaggaggcaa

SEQ ID NO: 1639360 - DNA, 15 bp, Homo sapiens
ggaaaaggaggcaaa

SEQ ID NO: 1639361 - DNA, 15 bp, Homo sapiens
gaaaaggaggcaaag

SEQ ID NO: 1639362 - DNA, 15 bp, Homo sapiens
aaaaggaggcaaaga

SEQ ID NO: 1639363 - DNA, 15 bp, Homo sapiens
aaaggaggcaaagaa

SEQ ID NO: 1639364 - DNA, 15 bp, Homo sapiens
aaggaggcaaagaaa

SEQ ID NO: 1639365 - DNA, 15 bp, Homo sapiens
aggaggcaaagaaat

SEQ ID NO: 1639366 - DNA, 15 bp, Homo sapiens
ggaggcaaagaaatg

SEQ ID NO: 1639367 - DNA, 15 bp, Homo sapiens
gaggcaaagaaatga

SEQ ID NO: 1639368 - DNA, 15 bp, Homo sapiens
aggcaaagaaatgag

SEQ ID NO: 1639369 - DNA, 15 bp, Homo sapiens
ggcaaagaaatgagc

SEQ ID NO: 1639370 - DNA, 15 bp, Homo sapiens
gcaaagaaatgagct

SEQ ID NO: 1639371 - DNA, 15 bp, Homo sapiens
caaagaaatgagctc

SEQ ID NO: 1639372 - DNA, 15 bp, Homo sapiens
aaagaaatgagctcc

SEQ ID NO: 1639373 - DNA, 15 bp, Homo sapiens
aagaaatgagctccc

SEQ ID NO: 1639374 - DNA, 15 bp, Homo sapiens
agaaatgagctccca

SEQ ID NO: 1639375 - DNA, 15 bp, Homo sapiens
gaaatgagctcccaa

SEQ ID NO: 1639376 - DNA, 15 bp, Homo sapiens
aaatgagctcccaaa

SEQ ID NO: 1639377 - DNA, 15 bp, Homo sapiens
aatgagctcccaaag

SEQ ID NO: 1639378 - DNA, 15 bp, Homo sapiens
atgagctcccaaaga

SEQ ID NO: 1639379 - DNA, 15 bp, Homo sapiens
tgagctcccaaagag

SEQ ID NO: 1639380 - DNA, 15 bp, Homo sapiens
gagctcccaaagagc

SEQ ID NO: 1639381 - DNA, 15 bp, Homo sapiens
agctcccaaagagca

SEQ ID NO: 1639382 - DNA, 15 bp, Homo sapiens
gctcccaaagagcaa

SEQ ID NO: 1639383 - DNA, 15 bp, Homo sapiens
ctcccaaagagcaat

SEQ ID NO: 1639384 - DNA, 15 bp, Homo sapiens
cccaaagagcaattc

SEQ ID NO: 1639385 - DNA, 15 bp, Homo sapiens
ccaaagagcaattcc

SEQ ID NO: 1639386 - DNA, 15 bp, Homo sapiens
caaagagcaattccc

SEQ ID NO: 1639387 - DNA, 15 bp, Homo sapiens
aaagagcaattcccc

SEQ ID NO: 1639388 - DNA, 15 bp, Homo sapiens
aagagcaattcccct

SEQ ID NO: 1639389 - DNA, 15 bp, Homo sapiens
agagcaattcccctt

SEQ ID NO: 1639390 - DNA, 15 bp, Homo sapiens
gagcaattccccttc

SEQ ID NO: 1639391 - DNA, 15 bp, Homo sapiens
agcaattccccttct

SEQ ID NO: 1639392 - DNA, 15 bp, Homo sapiens
gcaattccccttctc

SEQ ID NO: 1639393 - DNA, 15 bp, Homo sapiens
caattccccttctct

SEQ ID NO: 1639394 - DNA, 15 bp, Homo sapiens
aattccccttctctc

SEQ ID NO: 1639395 - DNA, 15 bp, Homo sapiens
attccccttctctcg

SEQ ID NO: 1639396 - DNA, 15 bp, Homo sapiens
ttccccttctctcgc

SEQ ID NO: 1639397 - DNA, 15 bp, Homo sapiens
tccccttctctcgcc

SEQ ID NO: 1639398 - DNA, 15 bp, Homo sapiens
ccccttctctcgcct

SEQ ID NO: 1639399 - DNA, 15 bp, Homo sapiens
cccttctctcgcctc

SEQ ID NO: 1639400 - DNA, 15 bp, Homo sapiens
ccttctctcgcctcc

SEQ ID NO: 1639401 - DNA, 15 bp, Homo sapiens
cttctctcgcctcca

SEQ ID NO: 1639402 - DNA, 15 bp, Homo sapiens
ttctctcgcctccat

SEQ ID NO: 1639403 - DNA, 15 bp, Homo sapiens
tctctcgcctccatc

SEQ ID NO: 1639404 - DNA, 15 bp, Homo sapiens
ctctcgcctccatcc

SEQ ID NO: 1639405 - DNA, 15 bp, Homo sapiens
tctcgcctccatccc

SEQ ID NO: 1639406 - DNA, 15 bp, Homo sapiens
ctcgcctccatccct

SEQ ID NO: 1639407 - DNA, 15 bp, Homo sapiens
tcgcctccatccctt

SEQ ID NO: 1639408 - DNA, 15 bp, Homo sapiens
cgcctccatcccttg

SEQ ID NO: 1639409 - DNA, 15 bp, Homo sapiens
gcctccatcccttga

SEQ ID NO: 1639410 - DNA, 15 bp, Homo sapiens
cctccatcccttgac

SEQ ID NO: 1639411 - DNA, 15 bp, Homo sapiens
ctccatcccttgacg

SEQ ID NO: 1639412 - DNA, 15 bp, Homo sapiens
tccatcccttgacga

SEQ ID NO: 1639413 - DNA, 15 bp, Homo sapiens
ccatcccttgacgac

SEQ ID NO: 1639414 - DNA, 15 bp, Homo sapiens
catcccttgacgacc

SEQ ID NO: 1639415 - DNA, 15 bp, Homo sapiens
atcccttgacgacct

SEQ ID NO: 1639416 - DNA, 15 bp, Homo sapiens
tcccttgacgacctc

SEQ ID NO: 1639417 - DNA, 15 bp, Homo sapiens
cccttgacgacctcc

SEQ ID NO: 1639418 - DNA, 15 bp, Homo sapiens
ccttgacgacctccc

SEQ ID NO: 1639419 - DNA, 15 bp, Homo sapiens
cttgacgacctccct

SEQ ID NO: 1639420 - DNA, 15 bp, Homo sapiens
ttgacgacctccctc

SEQ ID NO: 1639421 - DNA, 15 bp, Homo sapiens
tgacgacctccctcc

SEQ ID NO: 1639422 - DNA, 15 bp, Homo sapiens
gacgacctccctccc

SEQ ID NO: 1639423 - DNA, 15 bp, Homo sapiens
acgacctccctccca

SEQ ID NO: 1639424 - DNA, 15 bp, Homo sapiens
cgacctccctcccac

SEQ ID NO: 1639425 - DNA, 15 bp, Homo sapiens
gacctccctcccact

SEQ ID NO: 1639426 - DNA, 15 bp, Homo sapiens
acctccctcccacta

SEQ ID NO: 1639427 - DNA, 15 bp, Homo sapiens
cctccctcccactaa

SEQ ID NO: 1639428 - DNA, 15 bp, Homo sapiens
ctccctcccactaaa

SEQ ID NO: 1639429 - DNA, 15 bp, Homo sapiens
tccctcccactaaag

SEQ ID NO: 1639430 - DNA, 15 bp, Homo sapiens
ccctcccactaaagg

SEQ ID NO: 1639431 - DNA, 15 bp, Homo sapiens
cctcccactaaaggg

SEQ ID NO: 1639432 - DNA, 15 bp, Homo sapiens
ctcccactaaaggga

SEQ ID NO: 1639433 - DNA, 15 bp, Homo sapiens
tcccactaaagggaa

SEQ ID NO: 1639434 - DNA, 15 bp, Homo sapiens
cccactaaagggaaa

SEQ ID NO: 1639435 - DNA, 15 bp, Homo sapiens
ccactaaagggaaac

SEQ ID NO: 1639436 - DNA, 15 bp, Homo sapiens
cactaaagggaaaca

SEQ ID NO: 1639437 - DNA, 15 bp, Homo sapiens
actaaagggaaacat

SEQ ID NO: 1639438 - DNA, 15 bp, Homo sapiens
ctaaagggaaacatt

SEQ ID NO: 1639439 - DNA, 15 bp, Homo sapiens
taaagggaaacattg

SEQ ID NO: 1639440 - DNA, 15 bp, Homo sapiens
aaagggaaacattgt

SEQ ID NO: 1639441 - DNA, 15 bp, Homo sapiens
aagggaaacattgtt

SEQ ID NO: 1639442 - DNA, 15 bp, Homo sapiens
agggaaacattgttt

SEQ ID NO: 1639443 - DNA, 15 bp, Homo sapiens
gggaaacattgtttt

SEQ ID NO: 1639444 - DNA, 15 bp, Homo sapiens
ggaaacattgttttc

SEQ ID NO: 1639445 - DNA, 15 bp, Homo sapiens
gaaacattgttttct

SEQ ID NO: 1639446 - DNA, 15 bp, Homo sapiens
aaacattgttttctt

SEQ ID NO: 1639447 - DNA, 15 bp, Homo sapiens
aacattgttttctta

SEQ ID NO: 1639448 - DNA, 15 bp, Homo sapiens
acattgttttcttag

SEQ ID NO: 1639449 - DNA, 15 bp, Homo sapiens
cattgttttcttagg

SEQ ID NO: 1639450 - DNA, 15 bp, Homo sapiens
attgttttcttaggt

SEQ ID NO: 1639451 - DNA, 15 bp, Homo sapiens
ttgttttcttaggta

SEQ ID NO: 1639452 - DNA, 15 bp, Homo sapiens
tgttttcttaggtaa

SEQ ID NO: 1639453 - DNA, 15 bp, Homo sapiens
gttttcttaggtaat

SEQ ID NO: 1639454 - DNA, 15 bp, Homo sapiens
ttttcttaggtaata

SEQ ID NO: 1639455 - DNA, 15 bp, Homo sapiens
tttcttaggtaataa

SEQ ID NO: 1639456 - DNA, 15 bp, Homo sapiens
ttcttaggtaataaa

SEQ ID NO: 1639457 - DNA, 15 bp, Homo sapiens
tcttaggtaataaat

SEQ ID NO: 1639458 - DNA, 15 bp, Homo sapiens
cttaggtaataaatt

SEQ ID NO: 1639459 - DNA, 15 bp, Homo sapiens
ttaggtaataaattc

SEQ ID NO: 1639460 - DNA, 15 bp, Homo sapiens
taggtaataaattct

SEQ ID NO: 1639461 - DNA, 15 bp, Homo sapiens
aggtaataaattctg

SEQ ID NO: 1639462 - DNA, 15 bp, Homo sapiens
ggtaataaattctgc

SEQ ID NO: 1639463 - DNA, 15 bp, Homo sapiens
gtaataaattctgca

SEQ ID NO: 1639464 - DNA, 15 bp, Homo sapiens
taataaattctgcaa

SEQ ID NO: 1639465 - DNA, 15 bp, Homo sapiens
aataaattctgcaat

SEQ ID NO: 1639466 - DNA, 15 bp, Homo sapiens
ataaattctgcaatt

SEQ ID NO: 1639467 - DNA, 15 bp, Homo sapiens
taaattctgcaattt

SEQ ID NO: 1639468 - DNA, 15 bp, Homo sapiens
aaattctgcaatttc

SEQ ID NO: 1639469 - DNA, 15 bp, Homo sapiens
aattctgcaatttct

SEQ ID NO: 1639470 - DNA, 15 bp, Homo sapiens
attctgcaatttctc

SEQ ID NO: 1639471 - DNA, 15 bp, Homo sapiens
ttctgcaatttctca

SEQ ID NO: 1639472 - DNA, 15 bp, Homo sapiens
tctgcaatttctcaa

SEQ ID NO: 1639473 - DNA, 15 bp, Homo sapiens
ctgcaatttctcaag

SEQ ID NO: 1639474 - DNA, 15 bp, Homo sapiens
tgcaatttctcaagt

SEQ ID NO: 1639475 - DNA, 15 bp, Homo sapiens
gcaatttctcaagtc

SEQ ID NO: 1639476 - DNA, 15 bp, Homo sapiens
caatttctcaagtcc

SEQ ID NO: 1639477 - DNA, 15 bp, Homo sapiens
aatttctcaagtcca

SEQ ID NO: 1639478 - DNA, 15 bp, Homo sapiens
atttctcaagtccat

SEQ ID NO: 1639479 - DNA, 15 bp, Homo sapiens
tttctcaagtccatt

SEQ ID NO: 1639480 - DNA, 15 bp, Homo sapiens
ttctcaagtccatta

SEQ ID NO: 1639481 - DNA, 15 bp, Homo sapiens
tctcaagtccattaa

SEQ ID NO: 1639482 - DNA, 15 bp, Homo sapiens
ctcaagtccattaac

SEQ ID NO: 1639483 - DNA, 15 bp, Homo sapiens
tcaagtccattaaca

SEQ ID NO: 1639484 - DNA, 15 bp, Homo sapiens
caagtccattaacat

SEQ ID NO: 1639485 - DNA, 15 bp, Homo sapiens
aagtccattaacatc

SEQ ID NO: 1639486 - DNA, 15 bp, Homo sapiens
agtccattaacatcc

SEQ ID NO: 1639487 - DNA, 15 bp, Homo sapiens
gtccattaacatcca

SEQ ID NO: 1639488 - DNA, 15 bp, Homo sapiens
tccattaacatccac

SEQ ID NO: 1639489 - DNA, 15 bp, Homo sapiens
ccattaacatccact

SEQ ID NO: 1639490 - DNA, 15 bp, Homo sapiens
cattaacatccactg

SEQ ID NO: 1639491 - DNA, 15 bp, Homo sapiens
attaacatccactgg

SEQ ID NO: 1639492 - DNA, 15 bp, Homo sapiens
ttaacatccactggg

SEQ ID NO: 1639493 - DNA, 15 bp, Homo sapiens
taacatccactgggc

SEQ ID NO: 1639494 - DNA, 15 bp, Homo sapiens
aacatccactgggca

SEQ ID NO: 1639495 - DNA, 15 bp, Homo sapiens
acatccactgggcaa

SEQ ID NO: 1639496 - DNA, 15 bp, Homo sapiens
catccactgggcaag

SEQ ID NO: 1639497 - DNA, 15 bp, Homo sapiens
atccactgggcaaga

SEQ ID NO: 1639498 - DNA, 15 bp, Homo sapiens
tccactgggcaagat

SEQ ID NO: 1639499 - DNA, 15 bp, Homo sapiens
ccactgggcaagatg

SEQ ID NO: 1639500 - DNA, 15 bp, Homo sapiens
cactgggcaagatga

SEQ ID NO: 1639501 - DNA, 15 bp, Homo sapiens
actgggcaagatgag

SEQ ID NO: 1639502 - DNA, 15 bp, Homo sapiens
ctgggcaagatgaga

SEQ ID NO: 1639503 - DNA, 15 bp, Homo sapiens
tgggcaagatgagat

SEQ ID NO: 1639504 - DNA, 15 bp, Homo sapiens
gggcaagatgagatc

SEQ ID NO: 1639505 - DNA, 15 bp, Homo sapiens
ggcaagatgagatct

SEQ ID NO: 1639506 - DNA, 15 bp, Homo sapiens
gcaagatgagatcta

SEQ ID NO: 1639507 - DNA, 15 bp, Homo sapiens
caagatgagatctat

SEQ ID NO: 1639508 - DNA, 15 bp, Homo sapiens
aagatgagatctatt

SEQ ID NO: 1639509 - DNA, 15 bp, Homo sapiens
agatgagatctattc

SEQ ID NO: 1639510 - DNA, 15 bp, Homo sapiens
gatgagatctattct

SEQ ID NO: 1639511 - DNA, 15 bp, Homo sapiens
atgagatctattctt

SEQ ID NO: 1639512 - DNA, 15 bp, Homo sapiens
tgagatctattcttt

SEQ ID NO: 1639513 - DNA, 15 bp, Homo sapiens
gagatctattctttt

SEQ ID NO: 1639514 - DNA, 15 bp, Homo sapiens
agatctattcttttt

SEQ ID NO: 1639515 - DNA, 15 bp, Homo sapiens
gatctattcttttta

SEQ ID NO: 1639516 - DNA, 15 bp, Homo sapiens
atctattctttttat

SEQ ID NO: 1639517 - DNA, 15 bp, Homo sapiens
tctattctttttatt

SEQ ID NO: 1639518 - DNA, 15 bp, Homo sapiens
ctattctttttattt

SEQ ID NO: 1639519 - DNA, 15 bp, Homo sapiens
tattctttttatttg

SEQ ID NO: 1639520 - DNA, 15 bp, Homo sapiens
attctttttatttgc

SEQ ID NO: 1639521 - DNA, 15 bp, Homo sapiens
ttctttttatttgcc

SEQ ID NO: 1639522 - DNA, 15 bp, Homo sapiens
tctttttatttgccc

SEQ ID NO: 1639523 - DNA, 15 bp, Homo sapiens
ctttttatttgccca

SEQ ID NO: 1639524 - DNA, 15 bp, Homo sapiens
tttttatttgcccat

SEQ ID NO: 1639525 - DNA, 15 bp, Homo sapiens
ttttatttgcccata

SEQ ID NO: 1639526 - DNA, 15 bp, Homo sapiens
tttatttgcccatag

SEQ ID NO: 1639527 - DNA, 15 bp, Homo sapiens
ttatttgcccatagg

SEQ ID NO: 1639528 - DNA, 15 bp, Homo sapiens
tatttgcccatagga

SEQ ID NO: 1639529 - DNA, 15 bp, Homo sapiens
atttgcccataggaa

SEQ ID NO: 1639530 - DNA, 15 bp, Homo sapiens
tttgcccataggaaa

SEQ ID NO: 1639531 - DNA, 15 bp, Homo sapiens
ttgcccataggaaaa

SEQ ID NO: 1639532 - DNA, 15 bp, Homo sapiens
tgcccataggaaaag

SEQ ID NO: 1639533 - DNA, 15 bp, Homo sapiens
gcccataggaaaaga

SEQ ID NO: 1639534 - DNA, 15 bp, Homo sapiens
cccataggaaaagaa

SEQ ID NO: 1639535 - DNA, 15 bp, Homo sapiens
ccataggaaaagaat

SEQ ID NO: 1639536 - DNA, 15 bp, Homo sapiens
cataggaaaagaata

SEQ ID NO: 1639537 - DNA, 15 bp, Homo sapiens
ataggaaaagaatag

SEQ ID NO: 1639538 - DNA, 15 bp, Homo sapiens
taggaaaagaatagt

SEQ ID NO: 1639539 - DNA, 15 bp, Homo sapiens
aggaaaagaatagtg

SEQ ID NO: 1639540 - DNA, 15 bp, Homo sapiens
ggaaaagaatagtgc

SEQ ID NO: 1639541 - DNA, 15 bp, Homo sapiens
gaaaagaatagtgct

SEQ ID NO: 1639542 - DNA, 15 bp, Homo sapiens
aaaagaatagtgctt

SEQ ID NO: 1639543 - DNA, 15 bp, Homo sapiens
aaagaatagtgcttt

SEQ ID NO: 1639544 - DNA, 15 bp, Homo sapiens
aagaatagtgctttt

SEQ ID NO: 1639545 - DNA, 15 bp, Homo sapiens
agaatagtgcttttt

SEQ ID NO: 1639546 - DNA, 15 bp, Homo sapiens
gaatagtgctttttt

SEQ ID NO: 1639547 - DNA, 15 bp, Homo sapiens
aatagtgcttttttg

SEQ ID NO: 1639548 - DNA, 15 bp, Homo sapiens
atagtgcttttttgc

SEQ ID NO: 1639549 - DNA, 15 bp, Homo sapiens
tagtgcttttttgca

SEQ ID NO: 1639550 - DNA, 15 bp, Homo sapiens
agtgcttttttgcaa

SEQ ID NO: 1639551 - DNA, 15 bp, Homo sapiens
gtgcttttttgcaat

SEQ ID NO: 1639552 - DNA, 15 bp, Homo sapiens
tgcttttttgcaata

SEQ ID NO: 1639553 - DNA, 15 bp, Homo sapiens
gcttttttgcaatat

SEQ ID NO: 1639554 - DNA, 15 bp, Homo sapiens
cttttttgcaatatt

SEQ ID NO: 1639555 - DNA, 15 bp, Homo sapiens
ttttttgcaatattc

SEQ ID NO: 1639556 - DNA, 15 bp, Homo sapiens
tttttgcaatattca

SEQ ID NO: 1639557 - DNA, 15 bp, Homo sapiens
ttttgcaatattcac

SEQ ID NO: 1639558 - DNA, 15 bp, Homo sapiens
tttgcaatattcact

SEQ ID NO: 1639559 - DNA, 15 bp, Homo sapiens
ttgcaatattcacta

SEQ ID NO: 1639560 - DNA, 15 bp, Homo sapiens
tgcaatattcactag

SEQ ID NO: 1639561 - DNA, 15 bp, Homo sapiens
gcaatattcactaga

SEQ ID NO: 1639562 - DNA, 15 bp, Homo sapiens
caatattcactagat

SEQ ID NO: 1639563 - DNA, 15 bp, Homo sapiens
aatattcactagata

SEQ ID NO: 1639564 - DNA, 15 bp, Homo sapiens
atattcactagataa

SEQ ID NO: 1639565 - DNA, 15 bp, Homo sapiens
tattcactagataac

SEQ ID NO: 1639566 - DNA, 15 bp, Homo sapiens
attcactagataaca

SEQ ID NO: 1639567 - DNA, 15 bp, Homo sapiens
ttcactagataacac

SEQ ID NO: 1639568 - DNA, 15 bp, Homo sapiens
tcactagataacaca

SEQ ID NO: 1639569 - DNA, 15 bp, Homo sapiens
cactagataacacag

SEQ ID NO: 1639570 - DNA, 15 bp, Homo sapiens
actagataacacaga

SEQ ID NO: 1639571 - DNA, 15 bp, Homo sapiens
ctagataacacagag

SEQ ID NO: 1639572 - DNA, 15 bp, Homo sapiens
tagataacacagagt

SEQ ID NO: 1639573 - DNA, 15 bp, Homo sapiens
agataacacagagtt

SEQ ID NO: 1639574 - DNA, 15 bp, Homo sapiens
gataacacagagttg

SEQ ID NO: 1639575 - DNA, 15 bp, Homo sapiens
ataacacagagttga

SEQ ID NO: 1639576 - DNA, 15 bp, Homo sapiens
taacacagagttgac

SEQ ID NO: 1639577 - DNA, 15 bp, Homo sapiens
aacacagagttgact

SEQ ID NO: 1639578 - DNA, 15 bp, Homo sapiens
acacagagttgactt

SEQ ID NO: 1639579 - DNA, 15 bp, Homo sapiens
cacagagttgacttt

SEQ ID NO: 1639580 - DNA, 15 bp, Homo sapiens
acagagttgactttt

SEQ ID NO: 1639581 - DNA, 15 bp, Homo sapiens
cagagttgactttta

SEQ ID NO: 1639582 - DNA, 15 bp, Homo sapiens
agagttgacttttaa

SEQ ID NO: 1639583 - DNA, 15 bp, Homo sapiens
gagttgacttttaat

SEQ ID NO: 1639584 - DNA, 15 bp, Homo sapiens
agttgacttttaatc

SEQ ID NO: 1639585 - DNA, 15 bp, Homo sapiens
gttgacttttaatcc

SEQ ID NO: 1639586 - DNA, 15 bp, Homo sapiens
ttgacttttaatcca

SEQ ID NO: 1639587 - DNA, 15 bp, Homo sapiens
tgacttttaatccaa

SEQ ID NO: 1639588 - DNA, 15 bp, Homo sapiens
gacttttaatccaag

SEQ ID NO: 1639589 - DNA, 15 bp, Homo sapiens
acttttaatccaagg

SEQ ID NO: 1639590 - DNA, 15 bp, Homo sapiens
cttttaatccaaggg

SEQ ID NO: 1639591 - DNA, 15 bp, Homo sapiens
ttttaatccaagggc

SEQ ID NO: 1639592 - DNA, 15 bp, Homo sapiens
tttaatccaagggca

SEQ ID NO: 1639593 - DNA, 15 bp, Homo sapiens
ttaatccaagggcaa

SEQ ID NO: 1639594 - DNA, 15 bp, Homo sapiens
taatccaagggcaac

SEQ ID NO: 1639595 - DNA, 15 bp, Homo sapiens
aatccaagggcaaca

SEQ ID NO: 1639596 - DNA, 15 bp, Homo sapiens
atccaagggcaacat

SEQ ID NO: 1639597 - DNA, 15 bp, Homo sapiens
tccaagggcaacatt

SEQ ID NO: 1639598 - DNA, 15 bp, Homo sapiens
ccaagggcaacattg

SEQ ID NO: 1639599 - DNA, 15 bp, Homo sapiens
caagggcaacattga

SEQ ID NO: 1639600 - DNA, 15 bp, Homo sapiens
aagggcaacattgat

SEQ ID NO: 1639601 - DNA, 15 bp, Homo sapiens
agggcaacattgata

SEQ ID NO: 1639602 - DNA, 15 bp, Homo sapiens
gggcaacattgatag

SEQ ID NO: 1639603 - DNA, 15 bp, Homo sapiens
ggcaacattgatagt

SEQ ID NO: 1639604 - DNA, 15 bp, Homo sapiens
gcaacattgatagtc

SEQ ID NO: 1639605 - DNA, 15 bp, Homo sapiens
caacattgatagtct

SEQ ID NO: 1639606 - DNA, 15 bp, Homo sapiens
aacattgatagtctc

SEQ ID NO: 1639607 - DNA, 15 bp, Homo sapiens
acattgatagtctct

SEQ ID NO: 1639608 - DNA, 15 bp, Homo sapiens
cattgatagtctcta

SEQ ID NO: 1639609 - DNA, 15 bp, Homo sapiens
attgatagtctctag

SEQ ID NO: 1639610 - DNA, 15 bp, Homo sapiens
ttgatagtctctagt

SEQ ID NO: 1639611 - DNA, 15 bp, Homo sapiens
tgatagtctctagtt

SEQ ID NO: 1639612 - DNA, 15 bp, Homo sapiens
gatagtctctagtta

SEQ ID NO: 1639613 - DNA, 15 bp, Homo sapiens
atagtctctagttaa

SEQ ID NO: 1639614 - DNA, 15 bp, Homo sapiens
tagtctctagttaaa

SEQ ID NO: 1639615 - DNA, 15 bp, Homo sapiens
agtctctagttaaag

SEQ ID NO: 1639616 - DNA, 15 bp, Homo sapiens
gtctctagttaaagg

SEQ ID NO: 1639617 - DNA, 15 bp, Homo sapiens
tctctagttaaaggg

SEQ ID NO: 1639618 - DNA, 15 bp, Homo sapiens
ctctagttaaagggg

SEQ ID NO: 1639619 - DNA, 15 bp, Homo sapiens
tctagttaaagggga

SEQ ID NO: 1639620 - DNA, 15 bp, Homo sapiens
ctagttaaaggggaa

SEQ ID NO: 1639621 - DNA, 15 bp, Homo sapiens
tagttaaaggggaag

SEQ ID NO: 1639622 - DNA, 15 bp, Homo sapiens
agttaaaggggaagc

SEQ ID NO: 1639623 - DNA, 15 bp, Homo sapiens
gttaaaggggaagcc

SEQ ID NO: 1639624 - DNA, 15 bp, Homo sapiens
ttaaaggggaagcct

SEQ ID NO: 1639625 - DNA, 15 bp, Homo sapiens
taaaggggaagcctt

SEQ ID NO: 1639626 - DNA, 15 bp, Homo sapiens
aaaggggaagccttc

SEQ ID NO: 1639627 - DNA, 15 bp, Homo sapiens
aaggggaagccttca

SEQ ID NO: 1639628 - DNA, 15 bp, Homo sapiens
aggggaagccttcag

SEQ ID NO: 1639629 - DNA, 15 bp, Homo sapiens
ggggaagccttcagg

SEQ ID NO: 1639630 - DNA, 15 bp, Homo sapiens
gggaagccttcagga

SEQ ID NO: 1639631 - DNA, 15 bp, Homo sapiens
ggaagccttcaggag

SEQ ID NO: 1639632 - DNA, 15 bp, Homo sapiens
gaagccttcaggagc

SEQ ID NO: 1639633 - DNA, 15 bp, Homo sapiens
aagccttcaggagca

SEQ ID NO: 1639634 - DNA, 15 bp, Homo sapiens
agccttcaggagcaa

SEQ ID NO: 1639635 - DNA, 15 bp, Homo sapiens
gccttcaggagcaat

SEQ ID NO: 1639636 - DNA, 15 bp, Homo sapiens
ccttcaggagcaatg

SEQ ID NO: 1639637 - DNA, 15 bp, Homo sapiens
cttcaggagcaatga

SEQ ID NO: 1639638 - DNA, 15 bp, Homo sapiens
ttcaggagcaatgaa

SEQ ID NO: 1639639 - DNA, 15 bp, Homo sapiens
tcaggagcaatgaaa

SEQ ID NO: 1639640 - DNA, 15 bp, Homo sapiens
caggagcaatgaaaa

SEQ ID NO: 1639641 - DNA, 15 bp, Homo sapiens
aggagcaatgaaaag

SEQ ID NO: 1639642 - DNA, 15 bp, Homo sapiens
ggagcaatgaaaaga

SEQ ID NO: 1639643 - DNA, 15 bp, Homo sapiens
gagcaatgaaaagat

SEQ ID NO: 1639644 - DNA, 15 bp, Homo sapiens
agcaatgaaaagatt

SEQ ID NO: 1639645 - DNA, 15 bp, Homo sapiens
gcaatgaaaagatta

SEQ ID NO: 1639646 - DNA, 15 bp, Homo sapiens
caatgaaaagattaa

SEQ ID NO: 1639647 - DNA, 15 bp, Homo sapiens
aatgaaaagattaat

SEQ ID NO: 1639648 - DNA, 15 bp, Homo sapiens
atgaaaagattaata

SEQ ID NO: 1639649 - DNA, 15 bp, Homo sapiens
tgaaaagattaatag

SEQ ID NO: 1639650 - DNA, 15 bp, Homo sapiens
gaaaagattaatagt

SEQ ID NO: 1639651 - DNA, 15 bp, Homo sapiens
aaaagattaatagtt

SEQ ID NO: 1639652 - DNA, 15 bp, Homo sapiens
aaagattaatagttt

SEQ ID NO: 1639653 - DNA, 15 bp, Homo sapiens
aagattaatagtttt

SEQ ID NO: 1639654 - DNA, 15 bp, Homo sapiens
agattaatagtttta

SEQ ID NO: 1639655 - DNA, 15 bp, Homo sapiens
gattaatagttttag

SEQ ID NO: 1639656 - DNA, 15 bp, Homo sapiens
attaatagttttaga

SEQ ID NO: 1639657 - DNA, 15 bp, Homo sapiens
ttaatagttttagat

SEQ ID NO: 1639658 - DNA, 15 bp, Homo sapiens
taatagttttagatg

SEQ ID NO: 1639659 - DNA, 15 bp, Homo sapiens
aatagttttagatga

SEQ ID NO: 1639660 - DNA, 15 bp, Homo sapiens
atagttttagatgaa

SEQ ID NO: 1639661 - DNA, 15 bp, Homo sapiens
tagttttagatgaag

SEQ ID NO: 1639662 - DNA, 15 bp, Homo sapiens
agttttagatgaagc

SEQ ID NO: 1639663 - DNA, 15 bp, Homo sapiens
gttttagatgaagca

SEQ ID NO: 1639664 - DNA, 15 bp, Homo sapiens
ttttagatgaagcag

SEQ ID NO: 1639665 - DNA, 15 bp, Homo sapiens
tttagatgaagcaga

SEQ ID NO: 1639666 - DNA, 15 bp, Homo sapiens
ttagatgaagcagaa

SEQ ID NO: 1639667 - DNA, 15 bp, Homo sapiens
tagatgaagcagaat

SEQ ID NO: 1639668 - DNA, 15 bp, Homo sapiens
agatgaagcagaatc

SEQ ID NO: 1639669 - DNA, 15 bp, Homo sapiens
gatgaagcagaatcc

SEQ ID NO: 1639670 - DNA, 15 bp, Homo sapiens
atgaagcagaatcca

SEQ ID NO: 1639671 - DNA, 15 bp, Homo sapiens
tgaagcagaatccaa

SEQ ID NO: 1639672 - DNA, 15 bp, Homo sapiens
gaagcagaatccaaa

SEQ ID NO: 1639673 - DNA, 15 bp, Homo sapiens
aagcagaatccaaat

SEQ ID NO: 1639674 - DNA, 15 bp, Homo sapiens
agcagaatccaaatc

SEQ ID NO: 1639675 - DNA, 15 bp, Homo sapiens
gcagaatccaaatcc

SEQ ID NO: 1639676 - DNA, 15 bp, Homo sapiens
cagaatccaaatccc

SEQ ID NO: 1639677 - DNA, 15 bp, Homo sapiens
agaatccaaatccct

SEQ ID NO: 1639678 - DNA, 15 bp, Homo sapiens
gaatccaaatccctt

SEQ ID NO: 1639679 - DNA, 15 bp, Homo sapiens
aatccaaatcccttt

SEQ ID NO: 1639680 - DNA, 15 bp, Homo sapiens
atccaaatccctttt

SEQ ID NO: 1639681 - DNA, 15 bp, Homo sapiens
tccaaatcccttttt

SEQ ID NO: 1639682 - DNA, 15 bp, Homo sapiens
ccaaatcccttttta

SEQ ID NO: 1639683 - DNA, 15 bp, Homo sapiens
caaatccctttttat

SEQ ID NO: 1639684 - DNA, 15 bp, Homo sapiens
aaatccctttttatg

SEQ ID NO: 1639685 - DNA, 15 bp, Homo sapiens
aatccctttttatga

SEQ ID NO: 1639686 - DNA, 15 bp, Homo sapiens
atccctttttatgag

SEQ ID NO: 1639687 - DNA, 15 bp, Homo sapiens
tccctttttatgagt

SEQ ID NO: 1639688 - DNA, 15 bp, Homo sapiens
ccctttttatgagtt

SEQ ID NO: 1639689 - DNA, 15 bp, Homo sapiens
cctttttatgagttt

SEQ ID NO: 1639690 - DNA, 15 bp, Homo sapiens
ctttttatgagtttt

SEQ ID NO: 1639691 - DNA, 15 bp, Homo sapiens
tttttatgagttttg

SEQ ID NO: 1639692 - DNA, 15 bp, Homo sapiens
ttttatgagttttga

SEQ ID NO: 1639693 - DNA, 15 bp, Homo sapiens
tttatgagttttgaa

SEQ ID NO: 1639694 - DNA, 15 bp, Homo sapiens
ttatgagttttgaaa

SEQ ID NO: 1639695 - DNA, 15 bp, Homo sapiens
tatgagttttgaaat

SEQ ID NO: 1639696 - DNA, 15 bp, Homo sapiens
atgagttttgaaata

SEQ ID NO: 1639697 - DNA, 15 bp, Homo sapiens
tgagttttgaaatat

SEQ ID NO: 1639698 - DNA, 15 bp, Homo sapiens
gagttttgaaatatc

SEQ ID NO: 1639699 - DNA, 15 bp, Homo sapiens
agttttgaaatatcc

SEQ ID NO: 1639700 - DNA, 15 bp, Homo sapiens
gttttgaaatatcca

SEQ ID NO: 1639701 - DNA, 15 bp, Homo sapiens
ttttgaaatatccag

SEQ ID NO: 1639702 - DNA, 15 bp, Homo sapiens
tttgaaatatccagt

SEQ ID NO: 1639703 - DNA, 15 bp, Homo sapiens
ttgaaatatccagtt

SEQ ID NO: 1639704 - DNA, 15 bp, Homo sapiens
tgaaatatccagttt

SEQ ID NO: 1639705 - DNA, 15 bp, Homo sapiens
gaaatatccagtttg

SEQ ID NO: 1639706 - DNA, 15 bp, Homo sapiens
aaatatccagtttgt

SEQ ID NO: 1639707 - DNA, 15 bp, Homo sapiens
aatatccagtttgta

SEQ ID NO: 1639708 - DNA, 15 bp, Homo sapiens
atatccagtttgtat

SEQ ID NO: 1639709 - DNA, 15 bp, Homo sapiens
tatccagtttgtatg

SEQ ID NO: 1639710 - DNA, 15 bp, Homo sapiens
atccagtttgtatgc

SEQ ID NO: 1639711 - DNA, 15 bp, Homo sapiens
tccagtttgtatgct

SEQ ID NO: 1639712 - DNA, 15 bp, Homo sapiens
ccagtttgtatgctc

SEQ ID NO: 1639713 - DNA, 15 bp, Homo sapiens
cagtttgtatgctca

SEQ ID NO: 1639714 - DNA, 15 bp, Homo sapiens
agtttgtatgctcac

SEQ ID NO: 1639715 - DNA, 15 bp, Homo sapiens
gtttgtatgctcacc

SEQ ID NO: 1639716 - DNA, 15 bp, Homo sapiens
tttgtatgctcacct

SEQ ID NO: 1639717 - DNA, 15 bp, Homo sapiens
ttgtatgctcacctc

SEQ ID NO: 1639718 - DNA, 15 bp, Homo sapiens
tgtatgctcacctca

SEQ ID NO: 1639719 - DNA, 15 bp, Homo sapiens
gtatgctcacctcaa

SEQ ID NO: 1639720 - DNA, 15 bp, Homo sapiens
tatgctcacctcaat

SEQ ID NO: 1639721 - DNA, 15 bp, Homo sapiens
atgctcacctcaata

SEQ ID NO: 1639722 - DNA, 15 bp, Homo sapiens
tgctcacctcaatac

SEQ ID NO: 1639723 - DNA, 15 bp, Homo sapiens
gctcacctcaatact

SEQ ID NO: 1639724 - DNA, 15 bp, Homo sapiens
ctcacctcaatactt

SEQ ID NO: 1639725 - DNA, 15 bp, Homo sapiens
tcacctcaatactta

SEQ ID NO: 1639726 - DNA, 15 bp, Homo sapiens
cacctcaatacttaa

SEQ ID NO: 1639727 - DNA, 15 bp, Homo sapiens
acctcaatacttaaa

SEQ ID NO: 1639728 - DNA, 15 bp, Homo sapiens
cctcaatacttaaag

SEQ ID NO: 1639729 - DNA, 15 bp, Homo sapiens
ctcaatacttaaagc

SEQ ID NO: 1639730 - DNA, 15 bp, Homo sapiens
tcaatacttaaagcc

SEQ ID NO: 1639731 - DNA, 15 bp, Homo sapiens
caatacttaaagccc

SEQ ID NO: 1639732 - DNA, 15 bp, Homo sapiens
aatacttaaagccca

SEQ ID NO: 1639733 - DNA, 15 bp, Homo sapiens
atacttaaagcccag

SEQ ID NO: 1639734 - DNA, 15 bp, Homo sapiens
tacttaaagcccagt

SEQ ID NO: 1639735 - DNA, 15 bp, Homo sapiens
acttaaagcccagtt

SEQ ID NO: 1639736 - DNA, 15 bp, Homo sapiens
cttaaagcccagtta

SEQ ID NO: 1639737 - DNA, 15 bp, Homo sapiens
ttaaagcccagttac

SEQ ID NO: 1639738 - DNA, 15 bp, Homo sapiens
taaagcccagttact

SEQ ID NO: 1639739 - DNA, 15 bp, Homo sapiens
aaagcccagttactg

SEQ ID NO: 1639740 - DNA, 15 bp, Homo sapiens
aagcccagttactga

SEQ ID NO: 1639741 - DNA, 15 bp, Homo sapiens
agcccagttactgat

SEQ ID NO: 1639742 - DNA, 15 bp, Homo sapiens
gcccagttactgatt

SEQ ID NO: 1639743 - DNA, 15 bp, Homo sapiens
cccagttactgattc

SEQ ID NO: 1639744 - DNA, 15 bp, Homo sapiens
ccagttactgattcc

SEQ ID NO: 1639745 - DNA, 15 bp, Homo sapiens
cagttactgattcct

SEQ ID NO: 1639746 - DNA, 15 bp, Homo sapiens
agttactgattcctt

SEQ ID NO: 1639747 - DNA, 15 bp, Homo sapiens
gttactgattccttt

SEQ ID NO: 1639748 - DNA, 15 bp, Homo sapiens
ttactgattcctttg

SEQ ID NO: 1639749 - DNA, 15 bp, Homo sapiens
tactgattcctttgg

SEQ ID NO: 1639750 - DNA, 15 bp, Homo sapiens
actgattcctttggc

SEQ ID NO: 1639751 - DNA, 15 bp, Homo sapiens
ctgattcctttggcc

SEQ ID NO: 1639752 - DNA, 15 bp, Homo sapiens
tgattcctttggcct

SEQ ID NO: 1639753 - DNA, 15 bp, Homo sapiens
gattcctttggccta

SEQ ID NO: 1639754 - DNA, 15 bp, Homo sapiens
attcctttggcctaa

SEQ ID NO: 1639755 - DNA, 15 bp, Homo sapiens
ttcctttggcctaag

SEQ ID NO: 1639756 - DNA, 15 bp, Homo sapiens
tcctttggcctaagc

SEQ ID NO: 1639757 - DNA, 15 bp, Homo sapiens
cctttggcctaagca

SEQ ID NO: 1639758 - DNA, 15 bp, Homo sapiens
ctttggcctaagcaa

SEQ ID NO: 1639759 - DNA, 15 bp, Homo sapiens
tttggcctaagcaag

SEQ ID NO: 1639760 - DNA, 15 bp, Homo sapiens
ttggcctaagcaaga

SEQ ID NO: 1639761 - DNA, 15 bp, Homo sapiens
tggcctaagcaagac

SEQ ID NO: 1639762 - DNA, 15 bp, Homo sapiens
ggcctaagcaagaca

SEQ ID NO: 1639763 - DNA, 15 bp, Homo sapiens
gcctaagcaagacag

SEQ ID NO: 1639764 - DNA, 15 bp, Homo sapiens
cctaagcaagacagg

SEQ ID NO: 1639765 - DNA, 15 bp, Homo sapiens
ctaagcaagacaggt

SEQ ID NO: 1639766 - DNA, 15 bp, Homo sapiens
taagcaagacaggtc

SEQ ID NO: 1639767 - DNA, 15 bp, Homo sapiens
aagcaagacaggtca

SEQ ID NO: 1639768 - DNA, 15 bp, Homo sapiens
agcaagacaggtcaa

SEQ ID NO: 1639769 - DNA, 15 bp, Homo sapiens
gcaagacaggtcaat

SEQ ID NO: 1639770 - DNA, 15 bp, Homo sapiens
caagacaggtcaatt

SEQ ID NO: 1639771 - DNA, 15 bp, Homo sapiens
aagacaggtcaattt

SEQ ID NO: 1639772 - DNA, 15 bp, Homo sapiens
agacaggtcaatttt

SEQ ID NO: 1639773 - DNA, 15 bp, Homo sapiens
gacaggtcaattttt

SEQ ID NO: 1639774 - DNA, 15 bp, Homo sapiens
acaggtcaattttta

SEQ ID NO: 1639775 - DNA, 15 bp, Homo sapiens
caggtcaatttttaa

SEQ ID NO: 1639776 - DNA, 15 bp, Homo sapiens
aggtcaatttttaaa

SEQ ID NO: 1639777 - DNA, 15 bp, Homo sapiens
ggtcaatttttaaag

SEQ ID NO: 1639778 - DNA, 15 bp, Homo sapiens
tcaatttttaaagag

SEQ ID NO: 1639779 - DNA, 15 bp, Homo sapiens
caatttttaaagagg

SEQ ID NO: 1639780 - DNA, 15 bp, Homo sapiens
aatttttaaagaggg

SEQ ID NO: 1639781 - DNA, 15 bp, Homo sapiens
atttttaaagaggga

SEQ ID NO: 1639782 - DNA, 15 bp, Homo sapiens
tttttaaagagggag

SEQ ID NO: 1639783 - DNA, 15 bp, Homo sapiens
ttttaaagagggagt

SEQ ID NO: 1639784 - DNA, 15 bp, Homo sapiens
tttaaagagggagta

SEQ ID NO: 1639785 - DNA, 15 bp, Homo sapiens
ttaaagagggagtag

SEQ ID NO: 1639786 - DNA, 15 bp, Homo sapiens
taaagagggagtagc

SEQ ID NO: 1639787 - DNA, 15 bp, Homo sapiens
aaagagggagtagct

SEQ ID NO: 1639788 - DNA, 15 bp, Homo sapiens
aagagggagtagctg

SEQ ID NO: 1639789 - DNA, 15 bp, Homo sapiens
agagggagtagctga

SEQ ID NO: 1639790 - DNA, 15 bp, Homo sapiens
gagggagtagctgag

SEQ ID NO: 1639791 - DNA, 15 bp, Homo sapiens
agggagtagctgagg

SEQ ID NO: 1639792 - DNA, 15 bp, Homo sapiens
gggagtagctgaggt

SEQ ID NO: 1639793 - DNA, 15 bp, Homo sapiens
ggagtagctgaggtt

SEQ ID NO: 1639794 - DNA, 15 bp, Homo sapiens
gagtagctgaggtta

SEQ ID NO: 1639795 - DNA, 15 bp, Homo sapiens
agtagctgaggttag

SEQ ID NO: 1639796 - DNA, 15 bp, Homo sapiens
gtagctgaggttagc

SEQ ID NO: 1639797 - DNA, 15 bp, Homo sapiens
tagctgaggttagca

SEQ ID NO: 1639798 - DNA, 15 bp, Homo sapiens
agctgaggttagcaa

SEQ ID NO: 1639799 - DNA, 15 bp, Homo sapiens
gctgaggttagcaaa

SEQ ID NO: 1639800 - DNA, 15 bp, Homo sapiens
ctgaggttagcaaaa

SEQ ID NO: 1639801 - DNA, 15 bp, Homo sapiens
tgaggttagcaaaaa

SEQ ID NO: 1639802 - DNA, 15 bp, Homo sapiens
gaggttagcaaaaat

SEQ ID NO: 1639803 - DNA, 15 bp, Homo sapiens
aggttagcaaaaatt

SEQ ID NO: 1639804 - DNA, 15 bp, Homo sapiens
ggttagcaaaaattc

SEQ ID NO: 1639805 - DNA, 15 bp, Homo sapiens
gttagcaaaaattct

SEQ ID NO: 1639806 - DNA, 15 bp, Homo sapiens
ttagcaaaaattctc

SEQ ID NO: 1639807 - DNA, 15 bp, Homo sapiens
tagcaaaaattctcc

SEQ ID NO: 1639808 - DNA, 15 bp, Homo sapiens
agcaaaaattctcca

SEQ ID NO: 1639809 - DNA, 15 bp, Homo sapiens
gcaaaaattctccag

SEQ ID NO: 1639810 - DNA, 15 bp, Homo sapiens
caaaaattctccagg

SEQ ID NO: 1639811 - DNA, 15 bp, Homo sapiens
aaaaattctccaggt

SEQ ID NO: 1639812 - DNA, 15 bp, Homo sapiens
aaaattctccaggtc

SEQ ID NO: 1639813 - DNA, 15 bp, Homo sapiens
aaattctccaggtcc

SEQ ID NO: 1639814 - DNA, 15 bp, Homo sapiens
aattctccaggtcca

SEQ ID NO: 1639815 - DNA, 15 bp, Homo sapiens
attctccaggtccac

SEQ ID NO: 1639816 - DNA, 15 bp, Homo sapiens
ttctccaggtccaca

SEQ ID NO: 1639817 - DNA, 15 bp, Homo sapiens
tctccaggtccacaa

SEQ ID NO: 1639818 - DNA, 15 bp, Homo sapiens
ctccaggtccacaaa

SEQ ID NO: 1639819 - DNA, 15 bp, Homo sapiens
tccaggtccacaaaa

SEQ ID NO: 1639820 - DNA, 15 bp, Homo sapiens
ccaggtccacaaaac

SEQ ID NO: 1639821 - DNA, 15 bp, Homo sapiens
caggtccacaaaact

SEQ ID NO: 1639822 - DNA, 15 bp, Homo sapiens
aggtccacaaaactt

SEQ ID NO: 1639823 - DNA, 15 bp, Homo sapiens
ggtccacaaaacttc

SEQ ID NO: 1639824 - DNA, 15 bp, Homo sapiens
gtccacaaaacttcc

SEQ ID NO: 1639825 - DNA, 15 bp, Homo sapiens
tccacaaaacttcca

SEQ ID NO: 1639826 - DNA, 15 bp, Homo sapiens
ccacaaaacttccag

SEQ ID NO: 1639827 - DNA, 15 bp, Homo sapiens
cacaaaacttccaga

SEQ ID NO: 1639828 - DNA, 15 bp, Homo sapiens
acaaaacttccagac

SEQ ID NO: 1639829 - DNA, 15 bp, Homo sapiens
caaaacttccagacc

SEQ ID NO: 1639830 - DNA, 15 bp, Homo sapiens
aaaacttccagacct

SEQ ID NO: 1639831 - DNA, 15 bp, Homo sapiens
aaacttccagacctg

SEQ ID NO: 1639832 - DNA, 15 bp, Homo sapiens
aacttccagacctgc

SEQ ID NO: 1639833 - DNA, 15 bp, Homo sapiens
acttccagacctgca

SEQ ID NO: 1639834 - DNA, 15 bp, Homo sapiens
cttccagacctgcaa

SEQ ID NO: 1639835 - DNA, 15 bp, Homo sapiens
ttccagacctgcaag

SEQ ID NO: 1639836 - DNA, 15 bp, Homo sapiens
tccagacctgcaagg

SEQ ID NO: 1639837 - DNA, 15 bp, Homo sapiens
ccagacctgcaaggt

SEQ ID NO: 1639838 - DNA, 15 bp, Homo sapiens
cagacctgcaaggtg

SEQ ID NO: 1639839 - DNA, 15 bp, Homo sapiens
agacctgcaaggtga

SEQ ID NO: 1639840 - DNA, 15 bp, Homo sapiens
gacctgcaaggtgaa

SEQ ID NO: 1639841 - DNA, 15 bp, Homo sapiens
acctgcaaggtgaaa

SEQ ID NO: 1639842 - DNA, 15 bp, Homo sapiens
cctgcaaggtgaaaa

SEQ ID NO: 1639843 - DNA, 15 bp, Homo sapiens
ctgcaaggtgaaaat

SEQ ID NO: 1639844 - DNA, 15 bp, Homo sapiens
tgcaaggtgaaaatc

SEQ ID NO: 1639845 - DNA, 15 bp, Homo sapiens
gcaaggtgaaaatca

SEQ ID NO: 1639846 - DNA, 15 bp, Homo sapiens
caaggtgaaaatcag

SEQ ID NO: 1639847 - DNA, 15 bp, Homo sapiens
aaggtgaaaatcagc

SEQ ID NO: 1639848 - DNA, 15 bp, Homo sapiens
aggtgaaaatcagct

SEQ ID NO: 1639849 - DNA, 15 bp, Homo sapiens
ggtgaaaatcagctt

SEQ ID NO: 1639850 - DNA, 15 bp, Homo sapiens
gtgaaaatcagcttt

SEQ ID NO: 1639851 - DNA, 15 bp, Homo sapiens
tgaaaatcagctttt

SEQ ID NO: 1639852 - DNA, 15 bp, Homo sapiens
gaaaatcagcttttc

SEQ ID NO: 1639853 - DNA, 15 bp, Homo sapiens
aaaatcagcttttct

SEQ ID NO: 1639854 - DNA, 15 bp, Homo sapiens
aaatcagcttttctg

SEQ ID NO: 1639855 - DNA, 15 bp, Homo sapiens
aatcagcttttctgt

SEQ ID NO: 1639856 - DNA, 15 bp, Homo sapiens
atcagcttttctgtc

SEQ ID NO: 1639857 - DNA, 15 bp, Homo sapiens
tcagcttttctgtca

SEQ ID NO: 1639858 - DNA, 15 bp, Homo sapiens
cagcttttctgtcat

SEQ ID NO: 1639859 - DNA, 15 bp, Homo sapiens
agcttttctgtcatc

SEQ ID NO: 1639860 - DNA, 15 bp, Homo sapiens
gcttttctgtcatcc

SEQ ID NO: 1639861 - DNA, 15 bp, Homo sapiens
cttttctgtcatccc

SEQ ID NO: 1639862 - DNA, 15 bp, Homo sapiens
ttttctgtcatccct

SEQ ID NO: 1639863 - DNA, 15 bp, Homo sapiens
tttctgtcatcccta

SEQ ID NO: 1639864 - DNA, 15 bp, Homo sapiens
ttctgtcatccctaa

SEQ ID NO: 1639865 - DNA, 15 bp, Homo sapiens
tctgtcatccctaaa

SEQ ID NO: 1639866 - DNA, 15 bp, Homo sapiens
ctgtcatccctaaag

SEQ ID NO: 1639867 - DNA, 15 bp, Homo sapiens
tgtcatccctaaagg

SEQ ID NO: 1639868 - DNA, 15 bp, Homo sapiens
gtcatccctaaaggc

SEQ ID NO: 1639869 - DNA, 15 bp, Homo sapiens
tcatccctaaaggcc

SEQ ID NO: 1639870 - DNA, 15 bp, Homo sapiens
catccctaaaggcct

SEQ ID NO: 1639871 - DNA, 15 bp, Homo sapiens
atccctaaaggccta

SEQ ID NO: 1639872 - DNA, 15 bp, Homo sapiens
tccctaaaggcctaa

SEQ ID NO: 1639873 - DNA, 15 bp, Homo sapiens
ccctaaaggcctaac

SEQ ID NO: 1639874 - DNA, 15 bp, Homo sapiens
cctaaaggcctaact

SEQ ID NO: 1639875 - DNA, 15 bp, Homo sapiens
ctaaaggcctaactg

SEQ ID NO: 1639876 - DNA, 15 bp, Homo sapiens
taaaggcctaactgg

SEQ ID NO: 1639877 - DNA, 15 bp, Homo sapiens
aaaggcctaactgga

SEQ ID NO: 1639878 - DNA, 15 bp, Homo sapiens
aaggcctaactggaa

SEQ ID NO: 1639879 - DNA, 15 bp, Homo sapiens
aggcctaactggaat

SEQ ID NO: 1639880 - DNA, 15 bp, Homo sapiens
ggcctaactggaatc

SEQ ID NO: 1639881 - DNA, 15 bp, Homo sapiens
gcctaactggaatca

SEQ ID NO: 1639882 - DNA, 15 bp, Homo sapiens
cctaactggaatcag

SEQ ID NO: 1639883 - DNA, 15 bp, Homo sapiens
ctaactggaatcaga

SEQ ID NO: 1639884 - DNA, 15 bp, Homo sapiens
taactggaatcagaa

SEQ ID NO: 1639885 - DNA, 15 bp, Homo sapiens
aactggaatcagaac

SEQ ID NO: 1639886 - DNA, 15 bp, Homo sapiens
actggaatcagaact

SEQ ID NO: 1639887 - DNA, 15 bp, Homo sapiens
ctggaatcagaactt

SEQ ID NO: 1639888 - DNA, 15 bp, Homo sapiens
tggaatcagaacttt

SEQ ID NO: 1639889 - DNA, 15 bp, Homo sapiens
ggaatcagaactttt

SEQ ID NO: 1639890 - DNA, 15 bp, Homo sapiens
gaatcagaacttttc

SEQ ID NO: 1639891 - DNA, 15 bp, Homo sapiens
aatcagaacttttcc

SEQ ID NO: 1639892 - DNA, 15 bp, Homo sapiens
atcagaacttttccc

SEQ ID NO: 1639893 - DNA, 15 bp, Homo sapiens
tcagaacttttccct

SEQ ID NO: 1639894 - DNA, 15 bp, Homo sapiens
cagaacttttccctg

SEQ ID NO: 1639895 - DNA, 15 bp, Homo sapiens
agaacttttccctga

SEQ ID NO: 1639896 - DNA, 15 bp, Homo sapiens
gaacttttccctgat

SEQ ID NO: 1639897 - DNA, 15 bp, Homo sapiens
aacttttccctgatg

SEQ ID NO: 1639898 - DNA, 15 bp, Homo sapiens
acttttccctgatgc

SEQ ID NO: 1639899 - DNA, 15 bp, Homo sapiens
cttttccctgatgcc

SEQ ID NO: 1639900 - DNA, 15 bp, Homo sapiens
ttttccctgatgccc

SEQ ID NO: 1639901 - DNA, 15 bp, Homo sapiens
tttccctgatgccca

SEQ ID NO: 1639902 - DNA, 15 bp, Homo sapiens
ttccctgatgcccac

SEQ ID NO: 1639903 - DNA, 15 bp, Homo sapiens
tccctgatgcccaca

SEQ ID NO: 1639904 - DNA, 15 bp, Homo sapiens
ccctgatgcccacat

SEQ ID NO: 1639905 - DNA, 15 bp, Homo sapiens
cctgatgcccacata

SEQ ID NO: 1639906 - DNA, 15 bp, Homo sapiens
ctgatgcccacatat

SEQ ID NO: 1639907 - DNA, 15 bp, Homo sapiens
tgatgcccacatatt

SEQ ID NO: 1639908 - DNA, 15 bp, Homo sapiens
gatgcccacatattt

SEQ ID NO: 1639909 - DNA, 15 bp, Homo sapiens
atgcccacatatttg

SEQ ID NO: 1639910 - DNA, 15 bp, Homo sapiens
tgcccacatatttgg

SEQ ID NO: 1639911 - DNA, 15 bp, Homo sapiens
gcccacatatttgga

SEQ ID NO: 1639912 - DNA, 15 bp, Homo sapiens
cccacatatttggag

SEQ ID NO: 1639913 - DNA, 15 bp, Homo sapiens
ccacatatttggagg

SEQ ID NO: 1639914 - DNA, 15 bp, Homo sapiens
cacatatttggaggt

SEQ ID NO: 1639915 - DNA, 15 bp, Homo sapiens
acatatttggaggtc

SEQ ID NO: 1639916 - DNA, 15 bp, Homo sapiens
catatttggaggtcc

SEQ ID NO: 1639917 - DNA, 15 bp, Homo sapiens
atatttggaggtcct

SEQ ID NO: 1639918 - DNA, 15 bp, Homo sapiens
tatttggaggtcctt

SEQ ID NO: 1639919 - DNA, 15 bp, Homo sapiens
atttggaggtccttt

SEQ ID NO: 1639920 - DNA, 15 bp, Homo sapiens
tttggaggtcctttt

SEQ ID NO: 1639921 - DNA, 15 bp, Homo sapiens
ttggaggtccttttt

SEQ ID NO: 1639922 - DNA, 15 bp, Homo sapiens
tggaggtcctttttt

SEQ ID NO: 1639923 - DNA, 15 bp, Homo sapiens
ggaggtcctttttta

SEQ ID NO: 1639924 - DNA, 15 bp, Homo sapiens
gaggtccttttttaa

SEQ ID NO: 1639925 - DNA, 15 bp, Homo sapiens
aggtccttttttaat

SEQ ID NO: 1639926 - DNA, 15 bp, Homo sapiens
ggtccttttttaatg

SEQ ID NO: 1639927 - DNA, 15 bp, Homo sapiens
gtccttttttaatgg

SEQ ID NO: 1639928 - DNA, 15 bp, Homo sapiens
tccttttttaatggg

SEQ ID NO: 1639929 - DNA, 15 bp, Homo sapiens
ccttttttaatggga

SEQ ID NO: 1639930 - DNA, 15 bp, Homo sapiens
cttttttaatgggac

SEQ ID NO: 1639931 - DNA, 15 bp, Homo sapiens
ttttttaatgggact

SEQ ID NO: 1639932 - DNA, 15 bp, Homo sapiens
tttttaatgggactc

SEQ ID NO: 1639933 - DNA, 15 bp, Homo sapiens
ttttaatgggactcc

SEQ ID NO: 1639934 - DNA, 15 bp, Homo sapiens
tttaatgggactcct

SEQ ID NO: 1639935 - DNA, 15 bp, Homo sapiens
ttaatgggactcctt

SEQ ID NO: 1639936 - DNA, 15 bp, Homo sapiens
taatgggactcctta

SEQ ID NO: 1639937 - DNA, 15 bp, Homo sapiens
aatgggactccttaa

SEQ ID NO: 1639938 - DNA, 15 bp, Homo sapiens
atgggactccttaat

SEQ ID NO: 1639939 - DNA, 15 bp, Homo sapiens
tgggactccttaatg

SEQ ID NO: 1639940 - DNA, 15 bp, Homo sapiens
gggactccttaatgc

SEQ ID NO: 1639941 - DNA, 15 bp, Homo sapiens
ggactccttaatgcc

SEQ ID NO: 1639942 - DNA, 15 bp, Homo sapiens
gactccttaatgcct

SEQ ID NO: 1639943 - DNA, 15 bp, Homo sapiens
actccttaatgcctt

SEQ ID NO: 1639944 - DNA, 15 bp, Homo sapiens
ctccttaatgccttt

SEQ ID NO: 1639945 - DNA, 15 bp, Homo sapiens
tccttaatgccttta

SEQ ID NO: 1639946 - DNA, 15 bp, Homo sapiens
ccttaatgcctttag

SEQ ID NO: 1639947 - DNA, 15 bp, Homo sapiens
cttaatgcctttagt

SEQ ID NO: 1639948 - DNA, 15 bp, Homo sapiens
ttaatgcctttagtg

SEQ ID NO: 1639949 - DNA, 15 bp, Homo sapiens
taatgcctttagtgc

SEQ ID NO: 1639950 - DNA, 15 bp, Homo sapiens
aatgcctttagtgcc

SEQ ID NO: 1639951 - DNA, 15 bp, Homo sapiens
atgcctttagtgcca

SEQ ID NO: 1639952 - DNA, 15 bp, Homo sapiens
tgcctttagtgccat

SEQ ID NO: 1639953 - DNA, 15 bp, Homo sapiens
gcctttagtgccatc

SEQ ID NO: 1639954 - DNA, 15 bp, Homo sapiens
cctttagtgccatcc

SEQ ID NO: 1639955 - DNA, 15 bp, Homo sapiens
ctttagtgccatccc

SEQ ID NO: 1639956 - DNA, 15 bp, Homo sapiens
tttagtgccatccca

SEQ ID NO: 1639957 - DNA, 15 bp, Homo sapiens
ttagtgccatcccat

SEQ ID NO: 1639958 - DNA, 15 bp, Homo sapiens
tagtgccatcccatt

SEQ ID NO: 1639959 - DNA, 15 bp, Homo sapiens
agtgccatcccattt

SEQ ID NO: 1639960 - DNA, 15 bp, Homo sapiens
gtgccatcccatttt

SEQ ID NO: 1639961 - DNA, 15 bp, Homo sapiens
tgccatcccattttc

SEQ ID NO: 1639962 - DNA, 15 bp, Homo sapiens
gccatcccattttca

SEQ ID NO: 1639963 - DNA, 15 bp, Homo sapiens
ccatcccattttcat

SEQ ID NO: 1639964 - DNA, 15 bp, Homo sapiens
catcccattttcatc

SEQ ID NO: 1639965 - DNA, 15 bp, Homo sapiens
atcccattttcatcc

SEQ ID NO: 1639966 - DNA, 15 bp, Homo sapiens
tcccattttcatcca

SEQ ID NO: 1639967 - DNA, 15 bp, Homo sapiens
cccattttcatccag

SEQ ID NO: 1639968 - DNA, 15 bp, Homo sapiens
ccattttcatccagt

SEQ ID NO: 1639969 - DNA, 15 bp, Homo sapiens
cattttcatccagtg

SEQ ID NO: 1639970 - DNA, 15 bp, Homo sapiens
attttcatccagtgt

SEQ ID NO: 1639971 - DNA, 15 bp, Homo sapiens
ttttcatccagtgtc

SEQ ID NO: 1639972 - DNA, 15 bp, Homo sapiens
tttcatccagtgtcc

SEQ ID NO: 1639973 - DNA, 15 bp, Homo sapiens
ttcatccagtgtcca

SEQ ID NO: 1639974 - DNA, 15 bp, Homo sapiens
tcatccagtgtccaa

SEQ ID NO: 1639975 - DNA, 15 bp, Homo sapiens
catccagtgtccaaa

SEQ ID NO: 1639976 - DNA, 15 bp, Homo sapiens
atccagtgtccaaaa

SEQ ID NO: 1639977 - DNA, 15 bp, Homo sapiens
tccagtgtccaaaag

SEQ ID NO: 1639978 - DNA, 15 bp, Homo sapiens
ccagtgtccaaaaga

SEQ ID NO: 1639979 - DNA, 15 bp, Homo sapiens
cagtgtccaaaagaa

SEQ ID NO: 1639980 - DNA, 15 bp, Homo sapiens
agtgtccaaaagaaa

SEQ ID NO: 1639981 - DNA, 15 bp, Homo sapiens
gtgtccaaaagaaat

SEQ ID NO: 1639982 - DNA, 15 bp, Homo sapiens
tgtccaaaagaaatg

SEQ ID NO: 1639983 - DNA, 15 bp, Homo sapiens
gtccaaaagaaatga

SEQ ID NO: 1639984 - DNA, 15 bp, Homo sapiens
tccaaaagaaatgat

SEQ ID NO: 1639985 - DNA, 15 bp, Homo sapiens
ccaaaagaaatgatt

SEQ ID NO: 1639986 - DNA, 15 bp, Homo sapiens
caaaagaaatgattt

SEQ ID NO: 1639987 - DNA, 15 bp, Homo sapiens
aaaagaaatgattta

SEQ ID NO: 1639988 - DNA, 15 bp, Homo sapiens
aaagaaatgatttaa

SEQ ID NO: 1639989 - DNA, 15 bp, Homo sapiens
aagaaatgatttaaa

SEQ ID NO: 1639990 - DNA, 15 bp, Homo sapiens
agaaatgatttaaaa

SEQ ID NO: 1639991 - DNA, 15 bp, Homo sapiens
gaaatgatttaaaaa

SEQ ID NO: 1639992 - DNA, 15 bp, Homo sapiens
aaatgatttaaaaat

SEQ ID NO: 1639993 - DNA, 15 bp, Homo sapiens
aatgatttaaaaata

SEQ ID NO: 1639994 - DNA, 15 bp, Homo sapiens
atgatttaaaaatat

SEQ ID NO: 1639995 - DNA, 15 bp, Homo sapiens
tgatttaaaaatata

SEQ ID NO: 1639996 - DNA, 15 bp, Homo sapiens
gatttaaaaatataa

SEQ ID NO: 1639997 - DNA, 15 bp, Homo sapiens
atttaaaaatataaa

SEQ ID NO: 1639998 - DNA, 15 bp, Homo sapiens
tttaaaaatataaac

SEQ ID NO: 1639999 - DNA, 15 bp, Homo sapiens
ttaaaaatataaacg

SEQ ID NO: 1640000 - DNA, 15 bp, Homo sapiens
taaaaatataaacgt

SEQ ID NO: 1640001 - DNA, 15 bp, Homo sapiens
aaaatataaacgtat

SEQ ID NO: 1640002 - DNA, 15 bp, Homo sapiens
aaatataaacgtatg

SEQ ID NO: 1640003 - DNA, 15 bp, Homo sapiens
aatataaacgtatgt

SEQ ID NO: 1640004 - DNA, 15 bp, Homo sapiens
atataaacgtatgtt

SEQ ID NO: 1640005 - DNA, 15 bp, Homo sapiens
tataaacgtatgttt

SEQ ID NO: 1640006 - DNA, 15 bp, Homo sapiens
ataaacgtatgttta

SEQ ID NO: 1640007 - DNA, 15 bp, Homo sapiens
taaacgtatgtttaa

SEQ ID NO: 1640008 - DNA, 15 bp, Homo sapiens
aaacgtatgtttaaa

SEQ ID NO: 1640009 - DNA, 15 bp, Homo sapiens
aacgtatgtttaaat

SEQ ID NO: 1640010 - DNA, 15 bp, Homo sapiens
acgtatgtttaaatt

SEQ ID NO: 1640011 - DNA, 15 bp, Homo sapiens
cgtatgtttaaattc

SEQ ID NO: 1640012 - DNA, 15 bp, Homo sapiens
gtatgtttaaattcc

SEQ ID NO: 1640013 - DNA, 15 bp, Homo sapiens
tatgtttaaattcca

SEQ ID NO: 1640014 - DNA, 15 bp, Homo sapiens
atgtttaaattccag

SEQ ID NO: 1640015 - DNA, 15 bp, Homo sapiens
tgtttaaattccaga

SEQ ID NO: 1640016 - DNA, 15 bp, Homo sapiens
gtttaaattccagaa

SEQ ID NO: 1640017 - DNA, 15 bp, Homo sapiens
tttaaattccagaag

SEQ ID NO: 1640018 - DNA, 15 bp, Homo sapiens
ttaaattccagaaga

SEQ ID NO: 1640019 - DNA, 15 bp, Homo sapiens
taaattccagaagag

SEQ ID NO: 1640020 - DNA, 15 bp, Homo sapiens
aaattccagaagaga

SEQ ID NO: 1640021 - DNA, 15 bp, Homo sapiens
aattccagaagagag

SEQ ID NO: 1640022 - DNA, 15 bp, Homo sapiens
attccagaagagaga

SEQ ID NO: 1640023 - DNA, 15 bp, Homo sapiens
ttccagaagagagaa

SEQ ID NO: 1640024 - DNA, 15 bp, Homo sapiens
tccagaagagagaaa

SEQ ID NO: 1640025 - DNA, 15 bp, Homo sapiens
ccagaagagagaaat

SEQ ID NO: 1640026 - DNA, 15 bp, Homo sapiens
cagaagagagaaatg

SEQ ID NO: 1640027 - DNA, 15 bp, Homo sapiens
agaagagagaaatgg

SEQ ID NO: 1640028 - DNA, 15 bp, Homo sapiens
gaagagagaaatgga

SEQ ID NO: 1640029 - DNA, 15 bp, Homo sapiens
aagagagaaatggag

SEQ ID NO: 1640030 - DNA, 15 bp, Homo sapiens
agagagaaatggaga

SEQ ID NO: 1640031 - DNA, 15 bp, Homo sapiens
gagagaaatggagat

SEQ ID NO: 1640032 - DNA, 15 bp, Homo sapiens
agagaaatggagatt

SEQ ID NO: 1640033 - DNA, 15 bp, Homo sapiens
gagaaatggagattg

SEQ ID NO: 1640034 - DNA, 15 bp, Homo sapiens
agaaatggagattga

SEQ ID NO: 1640035 - DNA, 15 bp, Homo sapiens
gaaatggagattgag

SEQ ID NO: 1640036 - DNA, 15 bp, Homo sapiens
aaatggagattgaga

SEQ ID NO: 1640037 - DNA, 15 bp, Homo sapiens
aatggagattgagaa

SEQ ID NO: 1640038 - DNA, 15 bp, Homo sapiens
atggagattgagaac

SEQ ID NO: 1640039 - DNA, 15 bp, Homo sapiens
tggagattgagaaca

SEQ ID NO: 1640040 - DNA, 15 bp, Homo sapiens
ggagattgagaacaa

SEQ ID NO: 1640041 - DNA, 15 bp, Homo sapiens
gagattgagaacaat

SEQ ID NO: 1640042 - DNA, 15 bp, Homo sapiens
agattgagaacaata

SEQ ID NO: 1640043 - DNA, 15 bp, Homo sapiens
gattgagaacaatag

SEQ ID NO: 1640044 - DNA, 15 bp, Homo sapiens
attgagaacaatagg

SEQ ID NO: 1640045 - DNA, 15 bp, Homo sapiens
ttgagaacaataggg

SEQ ID NO: 1640046 - DNA, 15 bp, Homo sapiens
tgagaacaataggga

SEQ ID NO: 1640047 - DNA, 15 bp, Homo sapiens
gagaacaatagggaa

SEQ ID NO: 1640048 - DNA, 15 bp, Homo sapiens
agaacaatagggaaa

SEQ ID NO: 1640049 - DNA, 15 bp, Homo sapiens
gaacaatagggaaat

SEQ ID NO: 1640050 - DNA, 15 bp, Homo sapiens
aacaatagggaaatg

SEQ ID NO: 1640051 - DNA, 15 bp, Homo sapiens
acaatagggaaatga

SEQ ID NO: 1640052 - DNA, 15 bp, Homo sapiens
caatagggaaatgat

SEQ ID NO: 1640053 - DNA, 15 bp, Homo sapiens
aatagggaaatgatg

SEQ ID NO: 1640054 - DNA, 15 bp, Homo sapiens
atagggaaatgatga

SEQ ID NO: 1640055 - DNA, 15 bp, Homo sapiens
tagggaaatgatgag

SEQ ID NO: 1640056 - DNA, 15 bp, Homo sapiens
agggaaatgatgaga

SEQ ID NO: 1640057 - DNA, 15 bp, Homo sapiens
gggaaatgatgagag

SEQ ID NO: 1640058 - DNA, 15 bp, Homo sapiens
ggaaatgatgagagc

SEQ ID NO: 1640059 - DNA, 15 bp, Homo sapiens
gaaatgatgagagct

SEQ ID NO: 1640060 - DNA, 15 bp, Homo sapiens
aaatgatgagagcta

SEQ ID NO: 1640061 - DNA, 15 bp, Homo sapiens
aatgatgagagctat

SEQ ID NO: 1640062 - DNA, 15 bp, Homo sapiens
atgatgagagctatg

SEQ ID NO: 1640063 - DNA, 15 bp, Homo sapiens
tgatgagagctatgg

SEQ ID NO: 1640064 - DNA, 15 bp, Homo sapiens
gatgagagctatggg

SEQ ID NO: 1640065 - DNA, 15 bp, Homo sapiens
atgagagctatggga

SEQ ID NO: 1640066 - DNA, 15 bp, Homo sapiens
tgagagctatgggaa

SEQ ID NO: 1640067 - DNA, 15 bp, Homo sapiens
gagagctatgggaaa

SEQ ID NO: 1640068 - DNA, 15 bp, Homo sapiens
agagctatgggaaaa

SEQ ID NO: 1640069 - DNA, 15 bp, Homo sapiens
gagctatgggaaaag

SEQ ID NO: 1640070 - DNA, 15 bp, Homo sapiens
agctatgggaaaaga

SEQ ID NO: 1640071 - DNA, 15 bp, Homo sapiens
gctatgggaaaagag

SEQ ID NO: 1640072 - DNA, 15 bp, Homo sapiens
ctatgggaaaagagg

SEQ ID NO: 1640073 - DNA, 15 bp, Homo sapiens
tatgggaaaagaggt

SEQ ID NO: 1640074 - DNA, 15 bp, Homo sapiens
atgggaaaagaggtt

SEQ ID NO: 1640075 - DNA, 15 bp, Homo sapiens
tgggaaaagaggttt

SEQ ID NO: 1640076 - DNA, 15 bp, Homo sapiens
gggaaaagaggttta

SEQ ID NO: 1640077 - DNA, 15 bp, Homo sapiens
ggaaaagaggtttat

SEQ ID NO: 1640078 - DNA, 15 bp, Homo sapiens
gaaaagaggtttatg

SEQ ID NO: 1640079 - DNA, 15 bp, Homo sapiens
aaaagaggtttatga

SEQ ID NO: 1640080 - DNA, 15 bp, Homo sapiens
aaagaggtttatgag

SEQ ID NO: 1640081 - DNA, 15 bp, Homo sapiens
aagaggtttatgagt

SEQ ID NO: 1640082 - DNA, 15 bp, Homo sapiens
agaggtttatgagtc

SEQ ID NO: 1640083 - DNA, 15 bp, Homo sapiens
gaggtttatgagtcc

SEQ ID NO: 1640084 - DNA, 15 bp, Homo sapiens
aggtttatgagtcca

SEQ ID NO: 1640085 - DNA, 15 bp, Homo sapiens
ggtttatgagtccat

SEQ ID NO: 1640086 - DNA, 15 bp, Homo sapiens
gtttatgagtccatg

SEQ ID NO: 1640087 - DNA, 15 bp, Homo sapiens
tttatgagtccatgt

SEQ ID NO: 1640088 - DNA, 15 bp, Homo sapiens
ttatgagtccatgtc

SEQ ID NO: 1640089 - DNA, 15 bp, Homo sapiens
tatgagtccatgtct

SEQ ID NO: 1640090 - DNA, 15 bp, Homo sapiens
atgagtccatgtctg

SEQ ID NO: 1640091 - DNA, 15 bp, Homo sapiens
tgagtccatgtctga

SEQ ID NO: 1640092 - DNA, 15 bp, Homo sapiens
gagtccatgtctgat

SEQ ID NO: 1640093 - DNA, 15 bp, Homo sapiens
gtccatgtctgattc

SEQ ID NO: 1640094 - DNA, 15 bp, Homo sapiens
tccatgtctgattct

SEQ ID NO: 1640095 - DNA, 15 bp, Homo sapiens
ccatgtctgattctt

SEQ ID NO: 1640096 - DNA, 15 bp, Homo sapiens
catgtctgattcttc

SEQ ID NO: 1640097 - DNA, 15 bp, Homo sapiens
atgtctgattcttcc

SEQ ID NO: 1640098 - DNA, 15 bp, Homo sapiens
tgtctgattcttcca

SEQ ID NO: 1640099 - DNA, 15 bp, Homo sapiens
gtctgattcttccag

SEQ ID NO: 1640100 - DNA, 15 bp, Homo sapiens
tctgattcttccaga

SEQ ID NO: 1640101 - DNA, 15 bp, Homo sapiens
ctgattcttccagag

SEQ ID NO: 1640102 - DNA, 15 bp, Homo sapiens
tgattcttccagaga

SEQ ID NO: 1640103 - DNA, 15 bp, Homo sapiens
gattcttccagagag

SEQ ID NO: 1640104 - DNA, 15 bp, Homo sapiens
attcttccagagagc

SEQ ID NO: 1640105 - DNA, 15 bp, Homo sapiens
ttcttccagagagcc

SEQ ID NO: 1640106 - DNA, 15 bp, Homo sapiens
tcttccagagagccc

SEQ ID NO: 1640107 - DNA, 15 bp, Homo sapiens
cttccagagagcccc

SEQ ID NO: 1640108 - DNA, 15 bp, Homo sapiens
ttccagagagcccct

SEQ ID NO: 1640109 - DNA, 15 bp, Homo sapiens
tccagagagccccta

SEQ ID NO: 1640110 - DNA, 15 bp, Homo sapiens
ccagagagcccctaa

SEQ ID NO: 1640111 - DNA, 15 bp, Homo sapiens
cagagagcccctaag

SEQ ID NO: 1640112 - DNA, 15 bp, Homo sapiens
agagagcccctaaga

SEQ ID NO: 1640113 - DNA, 15 bp, Homo sapiens
gagagcccctaagaa

SEQ ID NO: 1640114 - DNA, 15 bp, Homo sapiens
agagcccctaagaaa

SEQ ID NO: 1640115 - DNA, 15 bp, Homo sapiens
gagcccctaagaaag

SEQ ID NO: 1640116 - DNA, 15 bp, Homo sapiens
agcccctaagaaagt

SEQ ID NO: 1640117 - DNA, 15 bp, Homo sapiens
gcccctaagaaagtt

SEQ ID NO: 1640118 - DNA, 15 bp, Homo sapiens
cccctaagaaagttc

SEQ ID NO: 1640119 - DNA, 15 bp, Homo sapiens
ccctaagaaagttct

SEQ ID NO: 1640120 - DNA, 15 bp, Homo sapiens
cctaagaaagttctt

SEQ ID NO: 1640121 - DNA, 15 bp, Homo sapiens
ctaagaaagttctta

SEQ ID NO: 1640122 - DNA, 15 bp, Homo sapiens
taagaaagttcttat

SEQ ID NO: 1640123 - DNA, 15 bp, Homo sapiens
aagaaagttcttatc

SEQ ID NO: 1640124 - DNA, 15 bp, Homo sapiens
agaaagttcttatca

SEQ ID NO: 1640125 - DNA, 15 bp, Homo sapiens
gaaagttcttatcat

SEQ ID NO: 1640126 - DNA, 15 bp, Homo sapiens
aaagttcttatcata

SEQ ID NO: 1640127 - DNA, 15 bp, Homo sapiens
aagttcttatcatac

SEQ ID NO: 1640128 - DNA, 15 bp, Homo sapiens
agttcttatcatacc

SEQ ID NO: 1640129 - DNA, 15 bp, Homo sapiens
gttcttatcatacca

SEQ ID NO: 1640130 - DNA, 15 bp, Homo sapiens
ttcttatcataccag

SEQ ID NO: 1640131 - DNA, 15 bp, Homo sapiens
tcttatcataccagg

SEQ ID NO: 1640132 - DNA, 15 bp, Homo sapiens
cttatcataccagga

SEQ ID NO: 1640133 - DNA, 15 bp, Homo sapiens
ttatcataccaggaa

SEQ ID NO: 1640134 - DNA, 15 bp, Homo sapiens
tatcataccaggaac

SEQ ID NO: 1640135 - DNA, 15 bp, Homo sapiens
atcataccaggaact

SEQ ID NO: 1640136 - DNA, 15 bp, Homo sapiens
tcataccaggaactc

SEQ ID NO: 1640137 - DNA, 15 bp, Homo sapiens
cataccaggaactca

SEQ ID NO: 1640138 - DNA, 15 bp, Homo sapiens
ataccaggaactcaa

SEQ ID NO: 1640139 - DNA, 15 bp, Homo sapiens
taccaggaactcaat

SEQ ID NO: 1640140 - DNA, 15 bp, Homo sapiens
accaggaactcaatt

SEQ ID NO: 1640141 - DNA, 15 bp, Homo sapiens
ccaggaactcaatta

SEQ ID NO: 1640142 - DNA, 15 bp, Homo sapiens
caggaactcaattat

SEQ ID NO: 1640143 - DNA, 15 bp, Homo sapiens
aggaactcaattata

SEQ ID NO: 1640144 - DNA, 15 bp, Homo sapiens
ggaactcaattataa

SEQ ID NO: 1640145 - DNA, 15 bp, Homo sapiens
gaactcaattataac

SEQ ID NO: 1640146 - DNA, 15 bp, Homo sapiens
aactcaattataact

SEQ ID NO: 1640147 - DNA, 15 bp, Homo sapiens
actcaattataactt

SEQ ID NO: 1640148 - DNA, 15 bp, Homo sapiens
ctcaattataacttt

SEQ ID NO: 1640149 - DNA, 15 bp, Homo sapiens
tcaattataactttc

SEQ ID NO: 1640150 - DNA, 15 bp, Homo sapiens
caattataactttca

SEQ ID NO: 1640151 - DNA, 15 bp, Homo sapiens
aattataactttcat

SEQ ID NO: 1640152 - DNA, 15 bp, Homo sapiens
attataactttcatt

SEQ ID NO: 1640153 - DNA, 15 bp, Homo sapiens
ttataactttcattg

SEQ ID NO: 1640154 - DNA, 15 bp, Homo sapiens
tataactttcattgc

SEQ ID NO: 1640155 - DNA, 15 bp, Homo sapiens
ataactttcattgcc

SEQ ID NO: 1640156 - DNA, 15 bp, Homo sapiens
taactttcattgcct

SEQ ID NO: 1640157 - DNA, 15 bp, Homo sapiens
aactttcattgccta

SEQ ID NO: 1640158 - DNA, 15 bp, Homo sapiens
actttcattgcctat

SEQ ID NO: 1640159 - DNA, 15 bp, Homo sapiens
ctttcattgcctatt

SEQ ID NO: 1640160 - DNA, 15 bp, Homo sapiens
tttcattgcctattg

SEQ ID NO: 1640161 - DNA, 15 bp, Homo sapiens
ttcattgcctattgt

SEQ ID NO: 1640162 - DNA, 15 bp, Homo sapiens
tcattgcctattgtt

SEQ ID NO: 1640163 - DNA, 15 bp, Homo sapiens
cattgcctattgtta

SEQ ID NO: 1640164 - DNA, 15 bp, Homo sapiens
attgcctattgttag

SEQ ID NO: 1640165 - DNA, 15 bp, Homo sapiens
ttgcctattgttaga

SEQ ID NO: 1640166 - DNA, 15 bp, Homo sapiens
tgcctattgttagat

SEQ ID NO: 1640167 - DNA, 15 bp, Homo sapiens
gcctattgttagatg

SEQ ID NO: 1640168 - DNA, 15 bp, Homo sapiens
cctattgttagatga

SEQ ID NO: 1640169 - DNA, 15 bp, Homo sapiens
ctattgttagatgag

SEQ ID NO: 1640170 - DNA, 15 bp, Homo sapiens
tattgttagatgagt

SEQ ID NO: 1640171 - DNA, 15 bp, Homo sapiens
attgttagatgagta

SEQ ID NO: 1640172 - DNA, 15 bp, Homo sapiens
ttgttagatgagtaa

SEQ ID NO: 1640173 - DNA, 15 bp, Homo sapiens
tgttagatgagtaac

SEQ ID NO: 1640174 - DNA, 15 bp, Homo sapiens
gttagatgagtaaca

SEQ ID NO: 1640175 - DNA, 15 bp, Homo sapiens
ttagatgagtaacag

SEQ ID NO: 1640176 - DNA, 15 bp, Homo sapiens
tagatgagtaacagg

SEQ ID NO: 1640177 - DNA, 15 bp, Homo sapiens
atgagtaacaggagc

SEQ ID NO: 1640178 - DNA, 15 bp, Homo sapiens
tgagtaacaggagct

SEQ ID NO: 1640179 - DNA, 15 bp, Homo sapiens
gagtaacaggagcta

SEQ ID NO: 1640180 - DNA, 15 bp, Homo sapiens
agtaacaggagctag

SEQ ID NO: 1640181 - DNA, 15 bp, Homo sapiens
gtaacaggagctaga

SEQ ID NO: 1640182 - DNA, 15 bp, Homo sapiens
taacaggagctagaa

SEQ ID NO: 1640183 - DNA, 15 bp, Homo sapiens
aacaggagctagaaa

SEQ ID NO: 1640184 - DNA, 15 bp, Homo sapiens
acaggagctagaaaa

SEQ ID NO: 1640185 - DNA, 15 bp, Homo sapiens
caggagctagaaaac

SEQ ID NO: 1640186 - DNA, 15 bp, Homo sapiens
aggagctagaaaaca

SEQ ID NO: 1640187 - DNA, 15 bp, Homo sapiens
ggagctagaaaacat

SEQ ID NO: 1640188 - DNA, 15 bp, Homo sapiens
gagctagaaaacatt

SEQ ID NO: 1640189 - DNA, 15 bp, Homo sapiens
agctagaaaacattt

SEQ ID NO: 1640190 - DNA, 15 bp, Homo sapiens
gctagaaaacatttt

SEQ ID NO: 1640191 - DNA, 15 bp, Homo sapiens
ctagaaaacattttg

SEQ ID NO: 1640192 - DNA, 15 bp, Homo sapiens
tagaaaacattttgg

SEQ ID NO: 1640193 - DNA, 15 bp, Homo sapiens
agaaaacattttgga

SEQ ID NO: 1640194 - DNA, 15 bp, Homo sapiens
gaaaacattttggaa

SEQ ID NO: 1640195 - DNA, 15 bp, Homo sapiens
aaaacattttggaaa

SEQ ID NO: 1640196 - DNA, 15 bp, Homo sapiens
aaacattttggaaat

SEQ ID NO: 1640197 - DNA, 15 bp, Homo sapiens
aacattttggaaatt

SEQ ID NO: 1640198 - DNA, 15 bp, Homo sapiens
acattttggaaattc

SEQ ID NO: 1640199 - DNA, 15 bp, Homo sapiens
cattttggaaattcc

SEQ ID NO: 1640200 - DNA, 15 bp, Homo sapiens
attttggaaattccc

SEQ ID NO: 1640201 - DNA, 15 bp, Homo sapiens
ttttggaaattccca

SEQ ID NO: 1640202 - DNA, 15 bp, Homo sapiens
tttggaaattcccat

SEQ ID NO: 1640203 - DNA, 15 bp, Homo sapiens
ttggaaattcccatc

SEQ ID NO: 1640204 - DNA, 15 bp, Homo sapiens
tggaaattcccatct

SEQ ID NO: 1640205 - DNA, 15 bp, Homo sapiens
ggaaattcccatctt

SEQ ID NO: 1640206 - DNA, 15 bp, Homo sapiens
gaaattcccatcttt

SEQ ID NO: 1640207 - DNA, 15 bp, Homo sapiens
aaattcccatcttta

SEQ ID NO: 1640208 - DNA, 15 bp, Homo sapiens
aattcccatctttat

SEQ ID NO: 1640209 - DNA, 15 bp, Homo sapiens
attcccatctttatt

SEQ ID NO: 1640210 - DNA, 15 bp, Homo sapiens
ttcccatctttattt

SEQ ID NO: 1640211 - DNA, 15 bp, Homo sapiens
tcccatctttatttt

SEQ ID NO: 1640212 - DNA, 15 bp, Homo sapiens
cccatctttattttt

SEQ ID NO: 1640213 - DNA, 15 bp, Homo sapiens
ccatctttatttttt

SEQ ID NO: 1640214 - DNA, 15 bp, Homo sapiens
catctttattttttt

SEQ ID NO: 1640215 - DNA, 15 bp, Homo sapiens
atctttattttttta

SEQ ID NO: 1640216 - DNA, 15 bp, Homo sapiens
tctttatttttttaa

SEQ ID NO: 1640217 - DNA, 15 bp, Homo sapiens
ctttatttttttaac

SEQ ID NO: 1640218 - DNA, 15 bp, Homo sapiens
tatttttttaactaa

SEQ ID NO: 1640219 - DNA, 15 bp, Homo sapiens
atttttttaactaat

SEQ ID NO: 1640220 - DNA, 15 bp, Homo sapiens
tttttttaactaata

SEQ ID NO: 1640221 - DNA, 15 bp, Homo sapiens
ttttttaactaatat

SEQ ID NO: 1640222 - DNA, 15 bp, Homo sapiens
tttttaactaatatg

SEQ ID NO: 1640223 - DNA, 15 bp, Homo sapiens
ttttaactaatatga

SEQ ID NO: 1640224 - DNA, 15 bp, Homo sapiens
tttaactaatatgat

SEQ ID NO: 1640225 - DNA, 15 bp, Homo sapiens
ttaactaatatgatt

SEQ ID NO: 1640226 - DNA, 15 bp, Homo sapiens
taactaatatgatta

SEQ ID NO: 1640227 - DNA, 15 bp, Homo sapiens
aactaatatgattat

SEQ ID NO: 1640228 - DNA, 15 bp, Homo sapiens
actaatatgattata

SEQ ID NO: 1640229 - DNA, 15 bp, Homo sapiens
ctaatatgattatag

SEQ ID NO: 1640230 - DNA, 15 bp, Homo sapiens
taatatgattatagt

SEQ ID NO: 1640231 - DNA, 15 bp, Homo sapiens
aatatgattatagtt

SEQ ID NO: 1640232 - DNA, 15 bp, Homo sapiens
atatgattatagttt

SEQ ID NO: 1640233 - DNA, 15 bp, Homo sapiens
tatgattatagtttt

SEQ ID NO: 1640234 - DNA, 15 bp, Homo sapiens
atgattatagtttta

SEQ ID NO: 1640235 - DNA, 15 bp, Homo sapiens
tgattatagttttaa

SEQ ID NO: 1640236 - DNA, 15 bp, Homo sapiens
gattatagttttaag

SEQ ID NO: 1640237 - DNA, 15 bp, Homo sapiens
attatagttttaaga

SEQ ID NO: 1640238 - DNA, 15 bp, Homo sapiens
ttatagttttaagaa

SEQ ID NO: 1640239 - DNA, 15 bp, Homo sapiens
tatagttttaagaac

SEQ ID NO: 1640240 - DNA, 15 bp, Homo sapiens
atagttttaagaacc

SEQ ID NO: 1640241 - DNA, 15 bp, Homo sapiens
tagttttaagaacca

SEQ ID NO: 1640242 - DNA, 15 bp, Homo sapiens
agttttaagaaccat

SEQ ID NO: 1640243 - DNA, 15 bp, Homo sapiens
gttttaagaaccatt

SEQ ID NO: 1640244 - DNA, 15 bp, Homo sapiens
ttttaagaaccattg

SEQ ID NO: 1640245 - DNA, 15 bp, Homo sapiens
tttaagaaccattgg

SEQ ID NO: 1640246 - DNA, 15 bp, Homo sapiens
ttaagaaccattggt

SEQ ID NO: 1640247 - DNA, 15 bp, Homo sapiens
taagaaccattggtc

SEQ ID NO: 1640248 - DNA, 15 bp, Homo sapiens
aagaaccattggtca

SEQ ID NO: 1640249 - DNA, 15 bp, Homo sapiens
agaaccattggtcaa

SEQ ID NO: 1640250 - DNA, 15 bp, Homo sapiens
gaaccattggtcaag

SEQ ID NO: 1640251 - DNA, 15 bp, Homo sapiens
aaccattggtcaaga

SEQ ID NO: 1640252 - DNA, 15 bp, Homo sapiens
accattggtcaagaa

SEQ ID NO: 1640253 - DNA, 15 bp, Homo sapiens
ccattggtcaagaag

SEQ ID NO: 1640254 - DNA, 15 bp, Homo sapiens
cattggtcaagaagc

SEQ ID NO: 1640255 - DNA, 15 bp, Homo sapiens
attggtcaagaagct

SEQ ID NO: 1640256 - DNA, 15 bp, Homo sapiens
ttggtcaagaagcta

SEQ ID NO: 1640257 - DNA, 15 bp, Homo sapiens
tggtcaagaagctaa

SEQ ID NO: 1640258 - DNA, 15 bp, Homo sapiens
ggtcaagaagctaac

SEQ ID NO: 1640259 - DNA, 15 bp, Homo sapiens
gtcaagaagctaact

SEQ ID NO: 1640260 - DNA, 15 bp, Homo sapiens
tcaagaagctaactt

SEQ ID NO: 1640261 - DNA, 15 bp, Homo sapiens
caagaagctaacttt

SEQ ID NO: 1640262 - DNA, 15 bp, Homo sapiens
aagaagctaactttt

SEQ ID NO: 1640263 - DNA, 15 bp, Homo sapiens
agaagctaacttttt

SEQ ID NO: 1640264 - DNA, 15 bp, Homo sapiens
gaagctaacttttta

SEQ ID NO: 1640265 - DNA, 15 bp, Homo sapiens
aagctaactttttaa

SEQ ID NO: 1640266 - DNA, 15 bp, Homo sapiens
agctaactttttaaa

SEQ ID NO: 1640267 - DNA, 15 bp, Homo sapiens
gctaactttttaaaa

SEQ ID NO: 1640268 - DNA, 15 bp, Homo sapiens
ctaactttttaaaaa

SEQ ID NO: 1640269 - DNA, 15 bp, Homo sapiens
taactttttaaaaag

SEQ ID NO: 1640270 - DNA, 15 bp, Homo sapiens
aactttttaaaaagt

SEQ ID NO: 1640271 - DNA, 15 bp, Homo sapiens
actttttaaaaagtg

SEQ ID NO: 1640272 - DNA, 15 bp, Homo sapiens
ctttttaaaaagtgg

SEQ ID NO: 1640273 - DNA, 15 bp, Homo sapiens
tttttaaaaagtgga

SEQ ID NO: 1640274 - DNA, 15 bp, Homo sapiens
ttttaaaaagtggaa

SEQ ID NO: 1640275 - DNA, 15 bp, Homo sapiens
tttaaaaagtggaag

SEQ ID NO: 1640276 - DNA, 15 bp, Homo sapiens
ttaaaaagtggaagt

SEQ ID NO: 1640277 - DNA, 15 bp, Homo sapiens
taaaaagtggaagta

SEQ ID NO: 1640278 - DNA, 15 bp, Homo sapiens
aaaaagtggaagtat

SEQ ID NO: 1640279 - DNA, 15 bp, Homo sapiens
aaaagtggaagtatg

SEQ ID NO: 1640280 - DNA, 15 bp, Homo sapiens
aaagtggaagtatga

SEQ ID NO: 1640281 - DNA, 15 bp, Homo sapiens
aagtggaagtatgat

SEQ ID NO: 1640282 - DNA, 15 bp, Homo sapiens
agtggaagtatgatg

SEQ ID NO: 1640283 - DNA, 15 bp, Homo sapiens
gtggaagtatgatgg

SEQ ID NO: 1640284 - DNA, 15 bp, Homo sapiens
tggaagtatgatggt

SEQ ID NO: 1640285 - DNA, 15 bp, Homo sapiens
ggaagtatgatggtt

SEQ ID NO: 1640286 - DNA, 15 bp, Homo sapiens
gaagtatgatggtta

SEQ ID NO: 1640287 - DNA, 15 bp, Homo sapiens
aagtatgatggttag

SEQ ID NO: 1640288 - DNA, 15 bp, Homo sapiens
agtatgatggttaga

SEQ ID NO: 1640289 - DNA, 15 bp, Homo sapiens
gtatgatggttagaa

SEQ ID NO: 1640290 - DNA, 15 bp, Homo sapiens
tatgatggttagaaa

SEQ ID NO: 1640291 - DNA, 15 bp, Homo sapiens
atgatggttagaaat

SEQ ID NO: 1640292 - DNA, 15 bp, Homo sapiens
tgatggttagaaata

SEQ ID NO: 1640293 - DNA, 15 bp, Homo sapiens
gatggttagaaataa

SEQ ID NO: 1640294 - DNA, 15 bp, Homo sapiens
atggttagaaataag

SEQ ID NO: 1640295 - DNA, 15 bp, Homo sapiens
tggttagaaataaga

SEQ ID NO: 1640296 - DNA, 15 bp, Homo sapiens
ggttagaaataagaa

SEQ ID NO: 1640297 - DNA, 15 bp, Homo sapiens
gttagaaataagaat

SEQ ID NO: 1640298 - DNA, 15 bp, Homo sapiens
ttagaaataagaatg

SEQ ID NO: 1640299 - DNA, 15 bp, Homo sapiens
tagaaataagaatgc

SEQ ID NO: 1640300 - DNA, 15 bp, Homo sapiens
agaaataagaatgct

SEQ ID NO: 1640301 - DNA, 15 bp, Homo sapiens
gaaataagaatgcta

SEQ ID NO: 1640302 - DNA, 15 bp, Homo sapiens
aaataagaatgctaa

SEQ ID NO: 1640303 - DNA, 15 bp, Homo sapiens
aataagaatgctaaa

SEQ ID NO: 1640304 - DNA, 15 bp, Homo sapiens
ataagaatgctaaag

SEQ ID NO: 1640305 - DNA, 15 bp, Homo sapiens
taagaatgctaaagg

SEQ ID NO: 1640306 - DNA, 15 bp, Homo sapiens
aagaatgctaaaggt

SEQ ID NO: 1640307 - DNA, 15 bp, Homo sapiens
agaatgctaaaggtg

SEQ ID NO: 1640308 - DNA, 15 bp, Homo sapiens
gaatgctaaaggtgc

SEQ ID NO: 1640309 - DNA, 15 bp, Homo sapiens
aatgctaaaggtgca

SEQ ID NO: 1640310 - DNA, 15 bp, Homo sapiens
atgctaaaggtgcat

SEQ ID NO: 1640311 - DNA, 15 bp, Homo sapiens
tgctaaaggtgcatc

SEQ ID NO: 1640312 - DNA, 15 bp, Homo sapiens
gctaaaggtgcatca

SEQ ID NO: 1640313 - DNA, 15 bp, Homo sapiens
ctaaaggtgcatcaa

SEQ ID NO: 1640314 - DNA, 15 bp, Homo sapiens
taaaggtgcatcaag

SEQ ID NO: 1640315 - DNA, 15 bp, Homo sapiens
aaaggtgcatcaagc

SEQ ID NO: 1640316 - DNA, 15 bp, Homo sapiens
aaggtgcatcaagct

SEQ ID NO: 1640317 - DNA, 15 bp, Homo sapiens
aggtgcatcaagctg

SEQ ID NO: 1640318 - DNA, 15 bp, Homo sapiens
ggtgcatcaagctga

SEQ ID NO: 1640319 - DNA, 15 bp, Homo sapiens
gtgcatcaagctgat

SEQ ID NO: 1640320 - DNA, 15 bp, Homo sapiens
tgcatcaagctgatt

SEQ ID NO: 1640321 - DNA, 15 bp, Homo sapiens
gcatcaagctgattt

SEQ ID NO: 1640322 - DNA, 15 bp, Homo sapiens
catcaagctgatttt

SEQ ID NO: 1640323 - DNA, 15 bp, Homo sapiens
atcaagctgatttta

SEQ ID NO: 1640324 - DNA, 15 bp, Homo sapiens
tcaagctgattttaa

SEQ ID NO: 1640325 - DNA, 15 bp, Homo sapiens
caagctgattttaat

SEQ ID NO: 1640326 - DNA, 15 bp, Homo sapiens
agctgattttaattc

SEQ ID NO: 1640327 - DNA, 15 bp, Homo sapiens
gctgattttaattct

SEQ ID NO: 1640328 - DNA, 15 bp, Homo sapiens
ctgattttaattcta

SEQ ID NO: 1640329 - DNA, 15 bp, Homo sapiens
tgattttaattctaa

SEQ ID NO: 1640330 - DNA, 15 bp, Homo sapiens
gattttaattctaaa

SEQ ID NO: 1640331 - DNA, 15 bp, Homo sapiens
attttaattctaaat

SEQ ID NO: 1640332 - DNA, 15 bp, Homo sapiens
ttttaattctaaatg

SEQ ID NO: 1640333 - DNA, 15 bp, Homo sapiens
tttaattctaaatgt

SEQ ID NO: 1640334 - DNA, 15 bp, Homo sapiens
ttaattctaaatgtc

SEQ ID NO: 1640335 - DNA, 15 bp, Homo sapiens
taattctaaatgtcc

SEQ ID NO: 1640336 - DNA, 15 bp, Homo sapiens
aattctaaatgtcct

SEQ ID NO: 1640337 - DNA, 15 bp, Homo sapiens
attctaaatgtcctt

SEQ ID NO: 1640338 - DNA, 15 bp, Homo sapiens
ttctaaatgtccttg

SEQ ID NO: 1640339 - DNA, 15 bp, Homo sapiens
tctaaatgtccttgg

SEQ ID NO: 1640340 - DNA, 15 bp, Homo sapiens
ctaaatgtccttggc

SEQ ID NO: 1640341 - DNA, 15 bp, Homo sapiens
taaatgtccttggca

SEQ ID NO: 1640342 - DNA, 15 bp, Homo sapiens
aaatgtccttggcag

SEQ ID NO: 1640343 - DNA, 15 bp, Homo sapiens
aatgtccttggcagc

SEQ ID NO: 1640344 - DNA, 15 bp, Homo sapiens
atgtccttggcagca

SEQ ID NO: 1640345 - DNA, 15 bp, Homo sapiens
tgtccttggcagcaa

SEQ ID NO: 1640346 - DNA, 15 bp, Homo sapiens
gtccttggcagcaat

SEQ ID NO: 1640347 - DNA, 15 bp, Homo sapiens
tccttggcagcaatt

SEQ ID NO: 1640348 - DNA, 15 bp, Homo sapiens
ccttggcagcaattt

SEQ ID NO: 1640349 - DNA, 15 bp, Homo sapiens
cttggcagcaattta

SEQ ID NO: 1640350 - DNA, 15 bp, Homo sapiens
ttggcagcaatttag

SEQ ID NO: 1640351 - DNA, 15 bp, Homo sapiens
tggcagcaatttaga

SEQ ID NO: 1640352 - DNA, 15 bp, Homo sapiens
ggcagcaatttagaa

SEQ ID NO: 1640353 - DNA, 15 bp, Homo sapiens
gcagcaatttagaat

SEQ ID NO: 1640354 - DNA, 15 bp, Homo sapiens
cagcaatttagaatc

SEQ ID NO: 1640355 - DNA, 15 bp, Homo sapiens
agcaatttagaatct

SEQ ID NO: 1640356 - DNA, 15 bp, Homo sapiens
gcaatttagaatctg

SEQ ID NO: 1640357 - DNA, 15 bp, Homo sapiens
caatttagaatctgt

SEQ ID NO: 1640358 - DNA, 15 bp, Homo sapiens
aatttagaatctgta

SEQ ID NO: 1640359 - DNA, 15 bp, Homo sapiens
atttagaatctgtaa

SEQ ID NO: 1640360 - DNA, 15 bp, Homo sapiens
tttagaatctgtaat

SEQ ID NO: 1640361 - DNA, 15 bp, Homo sapiens
ttagaatctgtaata

SEQ ID NO: 1640362 - DNA, 15 bp, Homo sapiens
tagaatctgtaataa

SEQ ID NO: 1640363 - DNA, 15 bp, Homo sapiens
agaatctgtaataaa

SEQ ID NO: 1640364 - DNA, 15 bp, Homo sapiens
gaatctgtaataaac

SEQ ID NO: 1640365 - DNA, 15 bp, Homo sapiens
aatctgtaataaact

SEQ ID NO: 1640366 - DNA, 15 bp, Homo sapiens
atctgtaataaacta

SEQ ID NO: 1640367 - DNA, 15 bp, Homo sapiens
tctgtaataaactac

SEQ ID NO: 1640368 - DNA, 15 bp, Homo sapiens
ctgtaataaactaca

SEQ ID NO: 1640369 - DNA, 15 bp, Homo sapiens
tgtaataaactacac

SEQ ID NO: 1640370 - DNA, 15 bp, Homo sapiens
gtaataaactacacc

SEQ ID NO: 1640371 - DNA, 15 bp, Homo sapiens
taataaactacacca

SEQ ID NO: 1640372 - DNA, 15 bp, Homo sapiens
aataaactacaccaa

SEQ ID NO: 1640373 - DNA, 15 bp, Homo sapiens
ataaactacaccaaa

SEQ ID NO: 1640374 - DNA, 15 bp, Homo sapiens
taaactacaccaaac

SEQ ID NO: 1640375 - DNA, 15 bp, Homo sapiens
aaactacaccaaaca

SEQ ID NO: 1640376 - DNA, 15 bp, Homo sapiens
aactacaccaaacag

SEQ ID NO: 1640377 - DNA, 15 bp, Homo sapiens
actacaccaaacagt

SEQ ID NO: 1640378 - DNA, 15 bp, Homo sapiens
ctacaccaaacagtt

SEQ ID NO: 1640379 - DNA, 15 bp, Homo sapiens
tacaccaaacagttt

SEQ ID NO: 1640380 - DNA, 15 bp, Homo sapiens
acaccaaacagtttt

SEQ ID NO: 1640381 - DNA, 15 bp, Homo sapiens
caccaaacagttttg

SEQ ID NO: 1640382 - DNA, 15 bp, Homo sapiens
accaaacagttttga

SEQ ID NO: 1640383 - DNA, 15 bp, Homo sapiens
ccaaacagttttgag

SEQ ID NO: 1640384 - DNA, 15 bp, Homo sapiens
caaacagttttgagg

SEQ ID NO: 1640385 - DNA, 15 bp, Homo sapiens
aaacagttttgaggg

SEQ ID NO: 1640386 - DNA, 15 bp, Homo sapiens
aacagttttgagggg

SEQ ID NO: 1640387 - DNA, 15 bp, Homo sapiens
acagttttgagggga

SEQ ID NO: 1640388 - DNA, 15 bp, Homo sapiens
cagttttgaggggaa

SEQ ID NO: 1640389 - DNA, 15 bp, Homo sapiens
agttttgaggggaag

SEQ ID NO: 1640390 - DNA, 15 bp, Homo sapiens
gttttgaggggaagg

SEQ ID NO: 1640391 - DNA, 15 bp, Homo sapiens
ttttgaggggaaggg

SEQ ID NO: 1640392 - DNA, 15 bp, Homo sapiens
tttgaggggaagggg

SEQ ID NO: 1640393 - DNA, 15 bp, Homo sapiens
ttgaggggaagggga

SEQ ID NO: 1640394 - DNA, 15 bp, Homo sapiens
tgaggggaaggggat

SEQ ID NO: 1640395 - DNA, 15 bp, Homo sapiens
gaggggaaggggatt

SEQ ID NO: 1640396 - DNA, 15 bp, Homo sapiens
aggggaaggggatta

SEQ ID NO: 1640397 - DNA, 15 bp, Homo sapiens
ggggaaggggattag

SEQ ID NO: 1640398 - DNA, 15 bp, Homo sapiens
gggaaggggattagt

SEQ ID NO: 1640399 - DNA, 15 bp, Homo sapiens
ggaaggggattagtt

SEQ ID NO: 1640400 - DNA, 15 bp, Homo sapiens
gaaggggattagttt

SEQ ID NO: 1640401 - DNA, 15 bp, Homo sapiens
aaggggattagtttc

SEQ ID NO: 1640402 - DNA, 15 bp, Homo sapiens
aggggattagtttct

SEQ ID NO: 1640403 - DNA, 15 bp, Homo sapiens
ggggattagtttctc

SEQ ID NO: 1640404 - DNA, 15 bp, Homo sapiens
gggattagtttctcc

SEQ ID NO: 1640405 - DNA, 15 bp, Homo sapiens
ggattagtttctccc

SEQ ID NO: 1640406 - DNA, 15 bp, Homo sapiens
gattagtttctcccc

SEQ ID NO: 1640407 - DNA, 15 bp, Homo sapiens
attagtttctcccct

SEQ ID NO: 1640408 - DNA, 15 bp, Homo sapiens
ttagtttctcccctt

SEQ ID NO: 1640409 - DNA, 15 bp, Homo sapiens
tagtttctccccttc

SEQ ID NO: 1640410 - DNA, 15 bp, Homo sapiens
agtttctccccttcc

SEQ ID NO: 1640411 - DNA, 15 bp, Homo sapiens
gtttctccccttcct

SEQ ID NO: 1640412 - DNA, 15 bp, Homo sapiens
tttctccccttcctt

SEQ ID NO: 1640413 - DNA, 15 bp, Homo sapiens
ttctccccttccttc

SEQ ID NO: 1640414 - DNA, 15 bp, Homo sapiens
tctccccttccttcg

SEQ ID NO: 1640415 - DNA, 15 bp, Homo sapiens
ctccccttccttcgt

SEQ ID NO: 1640416 - DNA, 15 bp, Homo sapiens
tccccttccttcgtg

SEQ ID NO: 1640417 - DNA, 15 bp, Homo sapiens
ccccttccttcgtgt

SEQ ID NO: 1640418 - DNA, 15 bp, Homo sapiens
cccttccttcgtgtg

SEQ ID NO: 1640419 - DNA, 15 bp, Homo sapiens
ccttccttcgtgtgt

SEQ ID NO: 1640420 - DNA, 15 bp, Homo sapiens
cttccttcgtgtgtg

SEQ ID NO: 1640421 - DNA, 15 bp, Homo sapiens
ttccttcgtgtgtgt

SEQ ID NO: 1640422 - DNA, 15 bp, Homo sapiens
tccttcgtgtgtgtg

SEQ ID NO: 1640423 - DNA, 15 bp, Homo sapiens
ccttcgtgtgtgtgt

SEQ ID NO: 1640424 - DNA, 15 bp, Homo sapiens
cttcgtgtgtgtgtg

SEQ ID NO: 1640425 - DNA, 15 bp, Homo sapiens
ttcgtgtgtgtgtgt

SEQ ID NO: 1640426 - DNA, 15 bp, Homo sapiens
tcgtgtgtgtgtgtg

SEQ ID NO: 1640427 - DNA, 15 bp, Homo sapiens
cgtgtgtgtgtgtgc

SEQ ID NO: 1640428 - DNA, 15 bp, Homo sapiens
tgtgtgtgtgtgcgc

SEQ ID NO: 1640429 - DNA, 15 bp, Homo sapiens
gtgtgtgtgtgcgcg

SEQ ID NO: 1640430 - DNA, 15 bp, Homo sapiens
tgtgtgtgtgcgcgt

SEQ ID NO: 1640431 - DNA, 15 bp, Homo sapiens
gtgtgtgtgcgcgtg

SEQ ID NO: 1640432 - DNA, 15 bp, Homo sapiens
tgtgtgcgcgtgtgt

SEQ ID NO: 1640433 - DNA, 15 bp, Homo sapiens
gtgtgcgcgtgtgtg

SEQ ID NO: 1640434 - DNA, 15 bp, Homo sapiens
tgtgcgcgtgtgtgt

SEQ ID NO: 1640435 - DNA, 15 bp, Homo sapiens
gtgcgcgtgtgtgtg

SEQ ID NO: 1640436 - DNA, 15 bp, Homo sapiens
tgcgcgtgtgtgtgt

SEQ ID NO: 1640437 - DNA, 15 bp, Homo sapiens
gcgcgtgtgtgtgtg

SEQ ID NO: 1640438 - DNA, 15 bp, Homo sapiens
cgcgtgtgtgtgtgt

SEQ ID NO: 1640439 - DNA, 15 bp, Homo sapiens
gcgtgtgtgtgtgtg

SEQ ID NO: 1640440 - DNA, 15 bp, Homo sapiens
tgtgtgtgtgtgcac

SEQ ID NO: 1640441 - DNA, 15 bp, Homo sapiens
gtgtgtgtgtgcacc

SEQ ID NO: 1640442 - DNA, 15 bp, Homo sapiens
tgtgtgtgtgcacct

SEQ ID NO: 1640443 - DNA, 15 bp, Homo sapiens
gtgtgtgtgcacctt

SEQ ID NO: 1640444 - DNA, 15 bp, Homo sapiens
tgtgtgtgcaccttt

SEQ ID NO: 1640445 - DNA, 15 bp, Homo sapiens
gtgtgtgcacctttg

SEQ ID NO: 1640446 - DNA, 15 bp, Homo sapiens
tgtgtgcacctttgt

SEQ ID NO: 1640447 - DNA, 15 bp, Homo sapiens
gtgtgcacctttgtg

SEQ ID NO: 1640448 - DNA, 15 bp, Homo sapiens
tgtgcacctttgtgt

SEQ ID NO: 1640449 - DNA, 15 bp, Homo sapiens
gtgcacctttgtgtt

SEQ ID NO: 1640450 - DNA, 15 bp, Homo sapiens
tgcacctttgtgttc

SEQ ID NO: 1640451 - DNA, 15 bp, Homo sapiens
gcacctttgtgttct

SEQ ID NO: 1640452 - DNA, 15 bp, Homo sapiens
cacctttgtgttcta

SEQ ID NO: 1640453 - DNA, 15 bp, Homo sapiens
acctttgtgttctag

SEQ ID NO: 1640454 - DNA, 15 bp, Homo sapiens
cctttgtgttctagc

SEQ ID NO: 1640455 - DNA, 15 bp, Homo sapiens
ctttgtgttctagca

SEQ ID NO: 1640456 - DNA, 15 bp, Homo sapiens
tttgtgttctagcat

SEQ ID NO: 1640457 - DNA, 15 bp, Homo sapiens
ttgtgttctagcatt

SEQ ID NO: 1640458 - DNA, 15 bp, Homo sapiens
tgtgttctagcattg

SEQ ID NO: 1640459 - DNA, 15 bp, Homo sapiens
gtgttctagcattgt

SEQ ID NO: 1640460 - DNA, 15 bp, Homo sapiens
tgttctagcattgtt

SEQ ID NO: 1640461 - DNA, 15 bp, Homo sapiens
gttctagcattgttg

SEQ ID NO: 1640462 - DNA, 15 bp, Homo sapiens
ttctagcattgttgc

SEQ ID NO: 1640463 - DNA, 15 bp, Homo sapiens
tctagcattgttgca

SEQ ID NO: 1640464 - DNA, 15 bp, Homo sapiens
ctagcattgttgcac

SEQ ID NO: 1640465 - DNA, 15 bp, Homo sapiens
tagcattgttgcacc

SEQ ID NO: 1640466 - DNA, 15 bp, Homo sapiens
agcattgttgcaccc

SEQ ID NO: 1640467 - DNA, 15 bp, Homo sapiens
gcattgttgcaccca

SEQ ID NO: 1640468 - DNA, 15 bp, Homo sapiens
cattgttgcacccat

SEQ ID NO: 1640469 - DNA, 15 bp, Homo sapiens
attgttgcacccatt

SEQ ID NO: 1640470 - DNA, 15 bp, Homo sapiens
ttgttgcacccatta

SEQ ID NO: 1640471 - DNA, 15 bp, Homo sapiens
tgttgcacccattac

SEQ ID NO: 1640472 - DNA, 15 bp, Homo sapiens
gttgcacccattaca

SEQ ID NO: 1640473 - DNA, 15 bp, Homo sapiens
ttgcacccattacag

SEQ ID NO: 1640474 - DNA, 15 bp, Homo sapiens
tgcacccattacaga

SEQ ID NO: 1640475 - DNA, 15 bp, Homo sapiens
gcacccattacagag

SEQ ID NO: 1640476 - DNA, 15 bp, Homo sapiens
cacccattacagagc

SEQ ID NO: 1640477 - DNA, 15 bp, Homo sapiens
acccattacagagct

SEQ ID NO: 1640478 - DNA, 15 bp, Homo sapiens
cccattacagagctg

SEQ ID NO: 1640479 - DNA, 15 bp, Homo sapiens
ccattacagagctgg

SEQ ID NO: 1640480 - DNA, 15 bp, Homo sapiens
cattacagagctggg

SEQ ID NO: 1640481 - DNA, 15 bp, Homo sapiens
attacagagctgggg

SEQ ID NO: 1640482 - DNA, 15 bp, Homo sapiens
ttacagagctggggg

SEQ ID NO: 1640483 - DNA, 15 bp, Homo sapiens
tacagagctgggggg

SEQ ID NO: 1640484 - DNA, 15 bp, Homo sapiens
acagagctgggggga

SEQ ID NO: 1640485 - DNA, 15 bp, Homo sapiens
cagagctggggggaa

SEQ ID NO: 1640486 - DNA, 15 bp, Homo sapiens
agagctggggggaac

SEQ ID NO: 1640487 - DNA, 15 bp, Homo sapiens
gagctggggggaact

SEQ ID NO: 1640488 - DNA, 15 bp, Homo sapiens
agctggggggaacta

SEQ ID NO: 1640489 - DNA, 15 bp, Homo sapiens
gctggggggaactat

SEQ ID NO: 1640490 - DNA, 15 bp, Homo sapiens
ctggggggaactatt

SEQ ID NO: 1640491 - DNA, 15 bp, Homo sapiens
tggggggaactattt

SEQ ID NO: 1640492 - DNA, 15 bp, Homo sapiens
ggggggaactatttt

SEQ ID NO: 1640493 - DNA, 15 bp, Homo sapiens
gggggaactattttc

SEQ ID NO: 1640494 - DNA, 15 bp, Homo sapiens
ggggaactattttcc

SEQ ID NO: 1640495 - DNA, 15 bp, Homo sapiens
gggaactattttcca

SEQ ID NO: 1640496 - DNA, 15 bp, Homo sapiens
ggaactattttccaa

SEQ ID NO: 1640497 - DNA, 15 bp, Homo sapiens
gaactattttccaaa

SEQ ID NO: 1640498 - DNA, 15 bp, Homo sapiens
aactattttccaaaa

SEQ ID NO: 1640499 - DNA, 15 bp, Homo sapiens
actattttccaaaat

SEQ ID NO: 1640500 - DNA, 15 bp, Homo sapiens
ctattttccaaaatt

SEQ ID NO: 1640501 - DNA, 15 bp, Homo sapiens
tattttccaaaatta

SEQ ID NO: 1640502 - DNA, 15 bp, Homo sapiens
attttccaaaattat

SEQ ID NO: 1640503 - DNA, 15 bp, Homo sapiens
ttttccaaaattata

SEQ ID NO: 1640504 - DNA, 15 bp, Homo sapiens
tttccaaaattatag

SEQ ID NO: 1640505 - DNA, 15 bp, Homo sapiens
ttccaaaattatagg

SEQ ID NO: 1640506 - DNA, 15 bp, Homo sapiens
tccaaaattataggt

SEQ ID NO: 1640507 - DNA, 15 bp, Homo sapiens
ccaaaattataggtg

SEQ ID NO: 1640508 - DNA, 15 bp, Homo sapiens
caaaattataggtga

SEQ ID NO: 1640509 - DNA, 15 bp, Homo sapiens
aaaattataggtgag

SEQ ID NO: 1640510 - DNA, 15 bp, Homo sapiens
aaattataggtgaga

SEQ ID NO: 1640511 - DNA, 15 bp, Homo sapiens
aattataggtgagaa

SEQ ID NO: 1640512 - DNA, 15 bp, Homo sapiens
attataggtgagaac

SEQ ID NO: 1640513 - DNA, 15 bp, Homo sapiens
ttataggtgagaaca

SEQ ID NO: 1640514 - DNA, 15 bp, Homo sapiens
tataggtgagaacag

SEQ ID NO: 1640515 - DNA, 15 bp, Homo sapiens
ataggtgagaacagt

SEQ ID NO: 1640516 - DNA, 15 bp, Homo sapiens
taggtgagaacagtt

SEQ ID NO: 1640517 - DNA, 15 bp, Homo sapiens
aggtgagaacagttt

SEQ ID NO: 1640518 - DNA, 15 bp, Homo sapiens
ggtgagaacagtttc

SEQ ID NO: 1640519 - DNA, 15 bp, Homo sapiens
gtgagaacagtttct

SEQ ID NO: 1640520 - DNA, 15 bp, Homo sapiens
tgagaacagtttctt

SEQ ID NO: 1640521 - DNA, 15 bp, Homo sapiens
gagaacagtttcttg

SEQ ID NO: 1640522 - DNA, 15 bp, Homo sapiens
agaacagtttcttgg

SEQ ID NO: 1640523 - DNA, 15 bp, Homo sapiens
gaacagtttcttgga

SEQ ID NO: 1640524 - DNA, 15 bp, Homo sapiens
aacagtttcttggat

SEQ ID NO: 1640525 - DNA, 15 bp, Homo sapiens
acagtttcttggatt

SEQ ID NO: 1640526 - DNA, 15 bp, Homo sapiens
cagtttcttggattg

SEQ ID NO: 1640527 - DNA, 15 bp, Homo sapiens
agtttcttggattgt

SEQ ID NO: 1640528 - DNA, 15 bp, Homo sapiens
gtttcttggattgtc

SEQ ID NO: 1640529 - DNA, 15 bp, Homo sapiens
tttcttggattgtct

SEQ ID NO: 1640530 - DNA, 15 bp, Homo sapiens
ttcttggattgtctt

SEQ ID NO: 1640531 - DNA, 15 bp, Homo sapiens
tcttggattgtcttt

SEQ ID NO: 1640532 - DNA, 15 bp, Homo sapiens
cttggattgtctttc

SEQ ID NO: 1640533 - DNA, 15 bp, Homo sapiens
ttggattgtctttca

SEQ ID NO: 1640534 - DNA, 15 bp, Homo sapiens
tggattgtctttcag

SEQ ID NO: 1640535 - DNA, 15 bp, Homo sapiens
ggattgtctttcagt

SEQ ID NO: 1640536 - DNA, 15 bp, Homo sapiens
gattgtctttcagtg

SEQ ID NO: 1640537 - DNA, 15 bp, Homo sapiens
attgtctttcagtga

SEQ ID NO: 1640538 - DNA, 15 bp, Homo sapiens
ttgtctttcagtgaa

SEQ ID NO: 1640539 - DNA, 15 bp, Homo sapiens
tgtctttcagtgaag

SEQ ID NO: 1640540 - DNA, 15 bp, Homo sapiens
gtctttcagtgaagg

SEQ ID NO: 1640541 - DNA, 15 bp, Homo sapiens
tctttcagtgaaggt

SEQ ID NO: 1640542 - DNA, 15 bp, Homo sapiens
ctttcagtgaaggta

SEQ ID NO: 1640543 - DNA, 15 bp, Homo sapiens
tttcagtgaaggtaa

SEQ ID NO: 1640544 - DNA, 15 bp, Homo sapiens
ttcagtgaaggtaaa

SEQ ID NO: 1640545 - DNA, 15 bp, Homo sapiens
tcagtgaaggtaaat

SEQ ID NO: 1640546 - DNA, 15 bp, Homo sapiens
cagtgaaggtaaatt

SEQ ID NO: 1640547 - DNA, 15 bp, Homo sapiens
agtgaaggtaaattc

SEQ ID NO: 1640548 - DNA, 15 bp, Homo sapiens
gtgaaggtaaattcc

SEQ ID NO: 1640549 - DNA, 15 bp, Homo sapiens
tgaaggtaaattcct

SEQ ID NO: 1640550 - DNA, 15 bp, Homo sapiens
gaaggtaaattcctc

SEQ ID NO: 1640551 - DNA, 15 bp, Homo sapiens
aaggtaaattcctct

SEQ ID NO: 1640552 - DNA, 15 bp, Homo sapiens
aggtaaattcctctg

SEQ ID NO: 1640553 - DNA, 15 bp, Homo sapiens
ggtaaattcctctgt

SEQ ID NO: 1640554 - DNA, 15 bp, Homo sapiens
gtaaattcctctgta

SEQ ID NO: 1640555 - DNA, 15 bp, Homo sapiens
taaattcctctgtaa

SEQ ID NO: 1640556 - DNA, 15 bp, Homo sapiens
aaattcctctgtaaa

SEQ ID NO: 1640557 - DNA, 15 bp, Homo sapiens
aattcctctgtaaaa

SEQ ID NO: 1640558 - DNA, 15 bp, Homo sapiens
attcctctgtaaaaa

SEQ ID NO: 1640559 - DNA, 15 bp, Homo sapiens
ttcctctgtaaaaac

SEQ ID NO: 1640560 - DNA, 15 bp, Homo sapiens
tcctctgtaaaaact

SEQ ID NO: 1640561 - DNA, 15 bp, Homo sapiens
cctctgtaaaaacta

SEQ ID NO: 1640562 - DNA, 15 bp, Homo sapiens
ctctgtaaaaactaa

SEQ ID NO: 1640563 - DNA, 15 bp, Homo sapiens
tctgtaaaaactaac

SEQ ID NO: 1640564 - DNA, 15 bp, Homo sapiens
ctgtaaaaactaacc

SEQ ID NO: 1640565 - DNA, 15 bp, Homo sapiens
tgtaaaaactaacca

SEQ ID NO: 1640566 - DNA, 15 bp, Homo sapiens
gtaaaaactaaccat

SEQ ID NO: 1640567 - DNA, 15 bp, Homo sapiens
taaaaactaaccatc

SEQ ID NO: 1640568 - DNA, 15 bp, Homo sapiens
aaaaactaaccatca

SEQ ID NO: 1640569 - DNA, 15 bp, Homo sapiens
aaaactaaccatcat

SEQ ID NO: 1640570 - DNA, 15 bp, Homo sapiens
aaactaaccatcatt

SEQ ID NO: 1640571 - DNA, 15 bp, Homo sapiens
aactaaccatcattc

SEQ ID NO: 1640572 - DNA, 15 bp, Homo sapiens
actaaccatcattca

SEQ ID NO: 1640573 - DNA, 15 bp, Homo sapiens
ctaaccatcattcag

SEQ ID NO: 1640574 - DNA, 15 bp, Homo sapiens
taaccatcattcagt

SEQ ID NO: 1640575 - DNA, 15 bp, Homo sapiens
aaccatcattcagta

SEQ ID NO: 1640576 - DNA, 15 bp, Homo sapiens
accatcattcagtaa

SEQ ID NO: 1640577 - DNA, 15 bp, Homo sapiens
ccatcattcagtaaa

SEQ ID NO: 1640578 - DNA, 15 bp, Homo sapiens
catcattcagtaaaa

SEQ ID NO: 1640579 - DNA, 15 bp, Homo sapiens
atcattcagtaaaaa

SEQ ID NO: 1640580 - DNA, 15 bp, Homo sapiens
tcattcagtaaaaac

SEQ ID NO: 1640581 - DNA, 15 bp, Homo sapiens
cattcagtaaaaact

SEQ ID NO: 1640582 - DNA, 15 bp, Homo sapiens
attcagtaaaaactg

SEQ ID NO: 1640583 - DNA, 15 bp, Homo sapiens
ttcagtaaaaactgc

SEQ ID NO: 1640584 - DNA, 15 bp, Homo sapiens
tcagtaaaaactgca

SEQ ID NO: 1640585 - DNA, 15 bp, Homo sapiens
cagtaaaaactgcag

SEQ ID NO: 1640586 - DNA, 15 bp, Homo sapiens
agtaaaaactgcagg

SEQ ID NO: 1640587 - DNA, 15 bp, Homo sapiens
gtaaaaactgcagga

SEQ ID NO: 1640588 - DNA, 15 bp, Homo sapiens
taaaaactgcaggat

SEQ ID NO: 1640589 - DNA, 15 bp, Homo sapiens
aaaaactgcaggatt

SEQ ID NO: 1640590 - DNA, 15 bp, Homo sapiens
aaaactgcaggattc

SEQ ID NO: 1640591 - DNA, 15 bp, Homo sapiens
aaactgcaggattcc

SEQ ID NO: 1640592 - DNA, 15 bp, Homo sapiens
aactgcaggattcct

SEQ ID NO: 1640593 - DNA, 15 bp, Homo sapiens
actgcaggattcctt

SEQ ID NO: 1640594 - DNA, 15 bp, Homo sapiens
ctgcaggattccttt

SEQ ID NO: 1640595 - DNA, 15 bp, Homo sapiens
tgcaggattcctttg

SEQ ID NO: 1640596 - DNA, 15 bp, Homo sapiens
gcaggattcctttgt

SEQ ID NO: 1640597 - DNA, 15 bp, Homo sapiens
caggattcctttgtc

SEQ ID NO: 1640598 - DNA, 15 bp, Homo sapiens
aggattcctttgtct

SEQ ID NO: 1640599 - DNA, 15 bp, Homo sapiens
ggattcctttgtctt

SEQ ID NO: 1640600 - DNA, 15 bp, Homo sapiens
gattcctttgtcttc

SEQ ID NO: 1640601 - DNA, 15 bp, Homo sapiens
attcctttgtcttct

SEQ ID NO: 1640602 - DNA, 15 bp, Homo sapiens
ttcctttgtcttctc

SEQ ID NO: 1640603 - DNA, 15 bp, Homo sapiens
tcctttgtcttctca

SEQ ID NO: 1640604 - DNA, 15 bp, Homo sapiens
cctttgtcttctcaa

SEQ ID NO: 1640605 - DNA, 15 bp, Homo sapiens
ctttgtcttctcaaa

SEQ ID NO: 1640606 - DNA, 15 bp, Homo sapiens
tttgtcttctcaaaa

SEQ ID NO: 1640607 - DNA, 15 bp, Homo sapiens
ttgtcttctcaaaag

SEQ ID NO: 1640608 - DNA, 15 bp, Homo sapiens
tgtcttctcaaaagc

SEQ ID NO: 1640609 - DNA, 15 bp, Homo sapiens
gtcttctcaaaagcc

SEQ ID NO: 1640610 - DNA, 15 bp, Homo sapiens
tcttctcaaaagcct

SEQ ID NO: 1640611 - DNA, 15 bp, Homo sapiens
cttctcaaaagcctg

SEQ ID NO: 1640612 - DNA, 15 bp, Homo sapiens
ttctcaaaagcctgt

SEQ ID NO: 1640613 - DNA, 15 bp, Homo sapiens
tctcaaaagcctgtt

SEQ ID NO: 1640614 - DNA, 15 bp, Homo sapiens
ctcaaaagcctgttt

SEQ ID NO: 1640615 - DNA, 15 bp, Homo sapiens
tcaaaagcctgtttc

SEQ ID NO: 1640616 - DNA, 15 bp, Homo sapiens
caaaagcctgtttct

SEQ ID NO: 1640617 - DNA, 15 bp, Homo sapiens
aaaagcctgtttctc

SEQ ID NO: 1640618 - DNA, 15 bp, Homo sapiens
aaagcctgtttctca

SEQ ID NO: 1640619 - DNA, 15 bp, Homo sapiens
aagcctgtttctcat

SEQ ID NO: 1640620 - DNA, 15 bp, Homo sapiens
agcctgtttctcatc

SEQ ID NO: 1640621 - DNA, 15 bp, Homo sapiens
gcctgtttctcatcc

SEQ ID NO: 1640622 - DNA, 15 bp, Homo sapiens
cctgtttctcatcct

SEQ ID NO: 1640623 - DNA, 15 bp, Homo sapiens
ctgtttctcatccta

SEQ ID NO: 1640624 - DNA, 15 bp, Homo sapiens
tgtttctcatcctaa

SEQ ID NO: 1640625 - DNA, 15 bp, Homo sapiens
gtttctcatcctaaa

SEQ ID NO: 1640626 - DNA, 15 bp, Homo sapiens
tttctcatcctaaat

SEQ ID NO: 1640627 - DNA, 15 bp, Homo sapiens
ttctcatcctaaatt

SEQ ID NO: 1640628 - DNA, 15 bp, Homo sapiens
tctcatcctaaatta

SEQ ID NO: 1640629 - DNA, 15 bp, Homo sapiens
ctcatcctaaattaa

SEQ ID NO: 1640630 - DNA, 15 bp, Homo sapiens
tcatcctaaattaaa

SEQ ID NO: 1640631 - DNA, 15 bp, Homo sapiens
catcctaaattaaaa

SEQ ID NO: 1640632 - DNA, 15 bp, Homo sapiens
atcctaaattaaaaa

SEQ ID NO: 1640633 - DNA, 15 bp, Homo sapiens
tcctaaattaaaaat

SEQ ID NO: 1640634 - DNA, 15 bp, Homo sapiens
cctaaattaaaaatt

SEQ ID NO: 1640635 - DNA, 15 bp, Homo sapiens
ctaaattaaaaatta

SEQ ID NO: 1640636 - DNA, 15 bp, Homo sapiens
taaattaaaaattat

SEQ ID NO: 1640637 - DNA, 15 bp, Homo sapiens
aaattaaaaattatt

SEQ ID NO: 1640638 - DNA, 15 bp, Homo sapiens
aattaaaaattattc

SEQ ID NO: 1640639 - DNA, 15 bp, Homo sapiens
attaaaaattattca

SEQ ID NO: 1640640 - DNA, 15 bp, Homo sapiens
ttaaaaattattcag

SEQ ID NO: 1640641 - DNA, 15 bp, Homo sapiens
taaaaattattcagg

SEQ ID NO: 1640642 - DNA, 15 bp, Homo sapiens
aaaaattattcagga

SEQ ID NO: 1640643 - DNA, 15 bp, Homo sapiens
aaaattattcaggaa

SEQ ID NO: 1640644 - DNA, 15 bp, Homo sapiens
aaattattcaggaaa

SEQ ID NO: 1640645 - DNA, 15 bp, Homo sapiens
aattattcaggaaat

SEQ ID NO: 1640646 - DNA, 15 bp, Homo sapiens
attattcaggaaata

SEQ ID NO: 1640647 - DNA, 15 bp, Homo sapiens
ttattcaggaaatag

SEQ ID NO: 1640648 - DNA, 15 bp, Homo sapiens
tattcaggaaataga

SEQ ID NO: 1640649 - DNA, 15 bp, Homo sapiens
attcaggaaatagag

SEQ ID NO: 1640650 - DNA, 15 bp, Homo sapiens
ttcaggaaatagaga

SEQ ID NO: 1640651 - DNA, 15 bp, Homo sapiens
tcaggaaatagagag

SEQ ID NO: 1640652 - DNA, 15 bp, Homo sapiens
ggaaatagagaggac

SEQ ID NO: 1640653 - DNA, 15 bp, Homo sapiens
gaaatagagaggaca

SEQ ID NO: 1640654 - DNA, 15 bp, Homo sapiens
aaatagagaggacat

SEQ ID NO: 1640655 - DNA, 15 bp, Homo sapiens
aatagagaggacatt

SEQ ID NO: 1640656 - DNA, 15 bp, Homo sapiens
atagagaggacatta

SEQ ID NO: 1640657 - DNA, 15 bp, Homo sapiens
tagagaggacattat

SEQ ID NO: 1640658 - DNA, 15 bp, Homo sapiens
agagaggacattatt

SEQ ID NO: 1640659 - DNA, 15 bp, Homo sapiens
gagaggacattattg

SEQ ID NO: 1640660 - DNA, 15 bp, Homo sapiens
agaggacattattgg

SEQ ID NO: 1640661 - DNA, 15 bp, Homo sapiens
gaggacattattgga

SEQ ID NO: 1640662 - DNA, 15 bp, Homo sapiens
aggacattattggag

SEQ ID NO: 1640663 - DNA, 15 bp, Homo sapiens
ggacattattggagg

SEQ ID NO: 1640664 - DNA, 15 bp, Homo sapiens
gacattattggaggg

SEQ ID NO: 1640665 - DNA, 15 bp, Homo sapiens
acattattggagggg

SEQ ID NO: 1640666 - DNA, 15 bp, Homo sapiens
cattattggaggggt

SEQ ID NO: 1640667 - DNA, 15 bp, Homo sapiens
attattggaggggtg

SEQ ID NO: 1640668 - DNA, 15 bp, Homo sapiens
ttattggaggggtgg

SEQ ID NO: 1640669 - DNA, 15 bp, Homo sapiens
tattggaggggtgga

SEQ ID NO: 1640670 - DNA, 15 bp, Homo sapiens
attggaggggtggaa

SEQ ID NO: 1640671 - DNA, 15 bp, Homo sapiens
ttggaggggtggaaa

SEQ ID NO: 1640672 - DNA, 15 bp, Homo sapiens
tggaggggtggaaat

SEQ ID NO: 1640673 - DNA, 15 bp, Homo sapiens
ggaggggtggaaata

SEQ ID NO: 1640674 - DNA, 15 bp, Homo sapiens
gaggggtggaaataa

SEQ ID NO: 1640675 - DNA, 15 bp, Homo sapiens
aggggtggaaataag

SEQ ID NO: 1640676 - DNA, 15 bp, Homo sapiens
ggggtggaaataagt

SEQ ID NO: 1640677 - DNA, 15 bp, Homo sapiens
gggtggaaataagtt

SEQ ID NO: 1640678 - DNA, 15 bp, Homo sapiens
ggtggaaataagttg

SEQ ID NO: 1640679 - DNA, 15 bp, Homo sapiens
gtggaaataagttgg

SEQ ID NO: 1640680 - DNA, 15 bp, Homo sapiens
tggaaataagttggt

SEQ ID NO: 1640681 - DNA, 15 bp, Homo sapiens
ggaaataagttggtt

SEQ ID NO: 1640682 - DNA, 15 bp, Homo sapiens
gaaataagttggttt

SEQ ID NO: 1640683 - DNA, 15 bp, Homo sapiens
aaataagttggtttt

SEQ ID NO: 1640684 - DNA, 15 bp, Homo sapiens
aataagttggttttc

SEQ ID NO: 1640685 - DNA, 15 bp, Homo sapiens
ataagttggttttct

SEQ ID NO: 1640686 - DNA, 15 bp, Homo sapiens
taagttggttttctt

SEQ ID NO: 1640687 - DNA, 15 bp, Homo sapiens
aagttggttttcttt

SEQ ID NO: 1640688 - DNA, 15 bp, Homo sapiens
agttggttttctttt

SEQ ID NO: 1640689 - DNA, 15 bp, Homo sapiens
gttggttttcttttt

SEQ ID NO: 1640690 - DNA, 15 bp, Homo sapiens
ttggttttcttttta

SEQ ID NO: 1640691 - DNA, 15 bp, Homo sapiens
tggttttctttttat

SEQ ID NO: 1640692 - DNA, 15 bp, Homo sapiens
ggttttctttttatt

SEQ ID NO: 1640693 - DNA, 15 bp, Homo sapiens
gttttctttttattg

SEQ ID NO: 1640694 - DNA, 15 bp, Homo sapiens
ttttctttttattgt

SEQ ID NO: 1640695 - DNA, 15 bp, Homo sapiens
tttctttttattgta

SEQ ID NO: 1640696 - DNA, 15 bp, Homo sapiens
ttctttttattgtat

SEQ ID NO: 1640697 - DNA, 15 bp, Homo sapiens
tctttttattgtatc

SEQ ID NO: 1640698 - DNA, 15 bp, Homo sapiens
ctttttattgtatct

SEQ ID NO: 1640699 - DNA, 15 bp, Homo sapiens
tttttattgtatctt

SEQ ID NO: 1640700 - DNA, 15 bp, Homo sapiens
ttttattgtatcttt

SEQ ID NO: 1640701 - DNA, 15 bp, Homo sapiens
tttattgtatctttt

SEQ ID NO: 1640702 - DNA, 15 bp, Homo sapiens
ttattgtatcttttg

SEQ ID NO: 1640703 - DNA, 15 bp, Homo sapiens
tattgtatcttttga

SEQ ID NO: 1640704 - DNA, 15 bp, Homo sapiens
attgtatcttttgag

SEQ ID NO: 1640705 - DNA, 15 bp, Homo sapiens
ttgtatcttttgagg

SEQ ID NO: 1640706 - DNA, 15 bp, Homo sapiens
tgtatcttttgagga

SEQ ID NO: 1640707 - DNA, 15 bp, Homo sapiens
gtatcttttgaggat

SEQ ID NO: 1640708 - DNA, 15 bp, Homo sapiens
tatcttttgaggatc

SEQ ID NO: 1640709 - DNA, 15 bp, Homo sapiens
atcttttgaggatcc

SEQ ID NO: 1640710 - DNA, 15 bp, Homo sapiens
tcttttgaggatcca

SEQ ID NO: 1640711 - DNA, 15 bp, Homo sapiens
cttttgaggatccag

SEQ ID NO: 1640712 - DNA, 15 bp, Homo sapiens
ttttgaggatccagg

SEQ ID NO: 1640713 - DNA, 15 bp, Homo sapiens
tttgaggatccaggg

SEQ ID NO: 1640714 - DNA, 15 bp, Homo sapiens
ttgaggatccaggga

SEQ ID NO: 1640715 - DNA, 15 bp, Homo sapiens
tgaggatccagggac

SEQ ID NO: 1640716 - DNA, 15 bp, Homo sapiens
gaggatccagggact

SEQ ID NO: 1640717 - DNA, 15 bp, Homo sapiens
aggatccagggactt

SEQ ID NO: 1640718 - DNA, 15 bp, Homo sapiens
ggatccagggacttc

SEQ ID NO: 1640719 - DNA, 15 bp, Homo sapiens
gatccagggacttct

SEQ ID NO: 1640720 - DNA, 15 bp, Homo sapiens
atccagggacttcta

SEQ ID NO: 1640721 - DNA, 15 bp, Homo sapiens
tccagggacttctac

SEQ ID NO: 1640722 - DNA, 15 bp, Homo sapiens
ccagggacttctacc

SEQ ID NO: 1640723 - DNA, 15 bp, Homo sapiens
cagggacttctacca

SEQ ID NO: 1640724 - DNA, 15 bp, Homo sapiens
agggacttctaccat

SEQ ID NO: 1640725 - DNA, 15 bp, Homo sapiens
gggacttctaccatt

SEQ ID NO: 1640726 - DNA, 15 bp, Homo sapiens
ggacttctaccattt

SEQ ID NO: 1640727 - DNA, 15 bp, Homo sapiens
gacttctaccatttc

SEQ ID NO: 1640728 - DNA, 15 bp, Homo sapiens
acttctaccatttcc

SEQ ID NO: 1640729 - DNA, 15 bp, Homo sapiens
cttctaccatttccc

SEQ ID NO: 1640730 - DNA, 15 bp, Homo sapiens
ttctaccatttccca

SEQ ID NO: 1640731 - DNA, 15 bp, Homo sapiens
tctaccatttcccat

SEQ ID NO: 1640732 - DNA, 15 bp, Homo sapiens
ctaccatttcccatc

SEQ ID NO: 1640733 - DNA, 15 bp, Homo sapiens
taccatttcccatct

SEQ ID NO: 1640734 - DNA, 15 bp, Homo sapiens
accatttcccatcta

SEQ ID NO: 1640735 - DNA, 15 bp, Homo sapiens
ccatttcccatctaa

SEQ ID NO: 1640736 - DNA, 15 bp, Homo sapiens
catttcccatctaac

SEQ ID NO: 1640737 - DNA, 15 bp, Homo sapiens
atttcccatctaaca

SEQ ID NO: 1640738 - DNA, 15 bp, Homo sapiens
tttcccatctaacat

SEQ ID NO: 1640739 - DNA, 15 bp, Homo sapiens
ttcccatctaacata

SEQ ID NO: 1640740 - DNA, 15 bp, Homo sapiens
tcccatctaacatac

SEQ ID NO: 1640741 - DNA, 15 bp, Homo sapiens
cccatctaacataca

SEQ ID NO: 1640742 - DNA, 15 bp, Homo sapiens
ccatctaacatacag

SEQ ID NO: 1640743 - DNA, 15 bp, Homo sapiens
catctaacatacaga

SEQ ID NO: 1640744 - DNA, 15 bp, Homo sapiens
atctaacatacagag

SEQ ID NO: 1640745 - DNA, 15 bp, Homo sapiens
tctaacatacagaga

SEQ ID NO: 1640746 - DNA, 15 bp, Homo sapiens
ctaacatacagagaa

SEQ ID NO: 1640747 - DNA, 15 bp, Homo sapiens
taacatacagagaag

SEQ ID NO: 1640748 - DNA, 15 bp, Homo sapiens
aacatacagagaagg

SEQ ID NO: 1640749 - DNA, 15 bp, Homo sapiens
acatacagagaagga

SEQ ID NO: 1640750 - DNA, 15 bp, Homo sapiens
catacagagaaggat

SEQ ID NO: 1640751 - DNA, 15 bp, Homo sapiens
atacagagaaggatt

SEQ ID NO: 1640752 - DNA, 15 bp, Homo sapiens
tacagagaaggattc

SEQ ID NO: 1640753 - DNA, 15 bp, Homo sapiens
acagagaaggattct

SEQ ID NO: 1640754 - DNA, 15 bp, Homo sapiens
cagagaaggattctc

SEQ ID NO: 1640755 - DNA, 15 bp, Homo sapiens
agagaaggattctct

SEQ ID NO: 1640756 - DNA, 15 bp, Homo sapiens
gagaaggattctcta

SEQ ID NO: 1640757 - DNA, 15 bp, Homo sapiens
agaaggattctctag

SEQ ID NO: 1640758 - DNA, 15 bp, Homo sapiens
gaaggattctctagg

SEQ ID NO: 1640759 - DNA, 15 bp, Homo sapiens
aaggattctctaggt

SEQ ID NO: 1640760 - DNA, 15 bp, Homo sapiens
aggattctctaggtc

SEQ ID NO: 1640761 - DNA, 15 bp, Homo sapiens
ggattctctaggtcc

SEQ ID NO: 1640762 - DNA, 15 bp, Homo sapiens
gattctctaggtccc

SEQ ID NO: 1640763 - DNA, 15 bp, Homo sapiens
attctctaggtccct

SEQ ID NO: 1640764 - DNA, 15 bp, Homo sapiens
ttctctaggtccctg

SEQ ID NO: 1640765 - DNA, 15 bp, Homo sapiens
tctctaggtccctgt

SEQ ID NO: 1640766 - DNA, 15 bp, Homo sapiens
ctctaggtccctgtc

SEQ ID NO: 1640767 - DNA, 15 bp, Homo sapiens
tctaggtccctgtct

SEQ ID NO: 1640768 - DNA, 15 bp, Homo sapiens
ctaggtccctgtcta

SEQ ID NO: 1640769 - DNA, 15 bp, Homo sapiens
taggtccctgtctat

SEQ ID NO: 1640770 - DNA, 15 bp, Homo sapiens
aggtccctgtctata

SEQ ID NO: 1640771 - DNA, 15 bp, Homo sapiens
ggtccctgtctatag

SEQ ID NO: 1640772 - DNA, 15 bp, Homo sapiens
gtccctgtctataga

SEQ ID NO: 1640773 - DNA, 15 bp, Homo sapiens
tccctgtctatagac

SEQ ID NO: 1640774 - DNA, 15 bp, Homo sapiens
ccctgtctatagact

SEQ ID NO: 1640775 - DNA, 15 bp, Homo sapiens
cctgtctatagactg

SEQ ID NO: 1640776 - DNA, 15 bp, Homo sapiens
ctgtctatagactgc

SEQ ID NO: 1640777 - DNA, 15 bp, Homo sapiens
tgtctatagactgca

SEQ ID NO: 1640778 - DNA, 15 bp, Homo sapiens
gtctatagactgcag

SEQ ID NO: 1640779 - DNA, 15 bp, Homo sapiens
tctatagactgcagt

SEQ ID NO: 1640780 - DNA, 15 bp, Homo sapiens
ctatagactgcagta

SEQ ID NO: 1640781 - DNA, 15 bp, Homo sapiens
tatagactgcagtaa

SEQ ID NO: 1640782 - DNA, 15 bp, Homo sapiens
atagactgcagtaac

SEQ ID NO: 1640783 - DNA, 15 bp, Homo sapiens
tagactgcagtaact

SEQ ID NO: 1640784 - DNA, 15 bp, Homo sapiens
agactgcagtaactt

SEQ ID NO: 1640785 - DNA, 15 bp, Homo sapiens
gactgcagtaacttt

SEQ ID NO: 1640786 - DNA, 15 bp, Homo sapiens
actgcagtaactttc

SEQ ID NO: 1640787 - DNA, 15 bp, Homo sapiens
ctgcagtaactttcc

SEQ ID NO: 1640788 - DNA, 15 bp, Homo sapiens
tgcagtaactttcct

SEQ ID NO: 1640789 - DNA, 15 bp, Homo sapiens
gcagtaactttccta

SEQ ID NO: 1640790 - DNA, 15 bp, Homo sapiens
cagtaactttcctat

SEQ ID NO: 1640791 - DNA, 15 bp, Homo sapiens
agtaactttcctata

SEQ ID NO: 1640792 - DNA, 15 bp, Homo sapiens
gtaactttcctatag

SEQ ID NO: 1640793 - DNA, 15 bp, Homo sapiens
taactttcctataga

SEQ ID NO: 1640794 - DNA, 15 bp, Homo sapiens
aactttcctatagaa

SEQ ID NO: 1640795 - DNA, 15 bp, Homo sapiens
actttcctatagaac

SEQ ID NO: 1640796 - DNA, 15 bp, Homo sapiens
ctttcctatagaacc

SEQ ID NO: 1640797 - DNA, 15 bp, Homo sapiens
tttcctatagaacca

SEQ ID NO: 1640798 - DNA, 15 bp, Homo sapiens
ttcctatagaaccaa

SEQ ID NO: 1640799 - DNA, 15 bp, Homo sapiens
tcctatagaaccaat

SEQ ID NO: 1640800 - DNA, 15 bp, Homo sapiens
cctatagaaccaatt

SEQ ID NO: 1640801 - DNA, 15 bp, Homo sapiens
ctatagaaccaattt

SEQ ID NO: 1640802 - DNA, 15 bp, Homo sapiens
tatagaaccaatttg

SEQ ID NO: 1640803 - DNA, 15 bp, Homo sapiens
atagaaccaatttgc

SEQ ID NO: 1640804 - DNA, 15 bp, Homo sapiens
tagaaccaatttgca

SEQ ID NO: 1640805 - DNA, 15 bp, Homo sapiens
agaaccaatttgcaa

SEQ ID NO: 1640806 - DNA, 15 bp, Homo sapiens
gaaccaatttgcaat

SEQ ID NO: 1640807 - DNA, 15 bp, Homo sapiens
aaccaatttgcaatt

SEQ ID NO: 1640808 - DNA, 15 bp, Homo sapiens
accaatttgcaattt

SEQ ID NO: 1640809 - DNA, 15 bp, Homo sapiens
ccaatttgcaatttt

SEQ ID NO: 1640810 - DNA, 15 bp, Homo sapiens
caatttgcaatttta

SEQ ID NO: 1640811 - DNA, 15 bp, Homo sapiens
aatttgcaattttag

SEQ ID NO: 1640812 - DNA, 15 bp, Homo sapiens
atttgcaattttaga

SEQ ID NO: 1640813 - DNA, 15 bp, Homo sapiens
tttgcaattttagaa

SEQ ID NO: 1640814 - DNA, 15 bp, Homo sapiens
ttgcaattttagaaa

SEQ ID NO: 1640815 - DNA, 15 bp, Homo sapiens
tgcaattttagaaat

SEQ ID NO: 1640816 - DNA, 15 bp, Homo sapiens
gcaattttagaaatt

SEQ ID NO: 1640817 - DNA, 15 bp, Homo sapiens
caattttagaaattt

SEQ ID NO: 1640818 - DNA, 15 bp, Homo sapiens
aattttagaaatttc

SEQ ID NO: 1640819 - DNA, 15 bp, Homo sapiens
attttagaaatttct

SEQ ID NO: 1640820 - DNA, 15 bp, Homo sapiens
ttttagaaatttcta

SEQ ID NO: 1640821 - DNA, 15 bp, Homo sapiens
tttagaaatttctag

SEQ ID NO: 1640822 - DNA, 15 bp, Homo sapiens
ttagaaatttctagg

SEQ ID NO: 1640823 - DNA, 15 bp, Homo sapiens
tagaaatttctaggt

SEQ ID NO: 1640824 - DNA, 15 bp, Homo sapiens
agaaatttctaggtc

SEQ ID NO: 1640825 - DNA, 15 bp, Homo sapiens
gaaatttctaggtct

SEQ ID NO: 1640826 - DNA, 15 bp, Homo sapiens
aaatttctaggtcta

SEQ ID NO: 1640827 - DNA, 15 bp, Homo sapiens
aatttctaggtctaa

SEQ ID NO: 1640828 - DNA, 15 bp, Homo sapiens
atttctaggtctaat

SEQ ID NO: 1640829 - DNA, 15 bp, Homo sapiens
tttctaggtctaatt

SEQ ID NO: 1640830 - DNA, 15 bp, Homo sapiens
ttctaggtctaatta

SEQ ID NO: 1640831 - DNA, 15 bp, Homo sapiens
tctaggtctaattat

SEQ ID NO: 1640832 - DNA, 15 bp, Homo sapiens
ctaggtctaattatt

SEQ ID NO: 1640833 - DNA, 15 bp, Homo sapiens
taggtctaattattg

SEQ ID NO: 1640834 - DNA, 15 bp, Homo sapiens
aggtctaattattga

SEQ ID NO: 1640835 - DNA, 15 bp, Homo sapiens
ggtctaattattgac

SEQ ID NO: 1640836 - DNA, 15 bp, Homo sapiens
gtctaattattgacc

SEQ ID NO: 1640837 - DNA, 15 bp, Homo sapiens
tctaattattgaccc

SEQ ID NO: 1640838 - DNA, 15 bp, Homo sapiens
ctaattattgaccca

SEQ ID NO: 1640839 - DNA, 15 bp, Homo sapiens
taattattgacccat

SEQ ID NO: 1640840 - DNA, 15 bp, Homo sapiens
aattattgacccatt

SEQ ID NO: 1640841 - DNA, 15 bp, Homo sapiens
attattgacccatta

SEQ ID NO: 1640842 - DNA, 15 bp, Homo sapiens
ttattgacccattac

SEQ ID NO: 1640843 - DNA, 15 bp, Homo sapiens
tattgacccattaca

SEQ ID NO: 1640844 - DNA, 15 bp, Homo sapiens
attgacccattacaa

SEQ ID NO: 1640845 - DNA, 15 bp, Homo sapiens
ttgacccattacaac

SEQ ID NO: 1640846 - DNA, 15 bp, Homo sapiens
tgacccattacaacc

SEQ ID NO: 1640847 - DNA, 15 bp, Homo sapiens
gacccattacaacca

SEQ ID NO: 1640848 - DNA, 15 bp, Homo sapiens
acccattacaaccaa

SEQ ID NO: 1640849 - DNA, 15 bp, Homo sapiens
cccattacaaccaaa

SEQ ID NO: 1640850 - DNA, 15 bp, Homo sapiens
ccattacaaccaaag

SEQ ID NO: 1640851 - DNA, 15 bp, Homo sapiens
cattacaaccaaagg

SEQ ID NO: 1640852 - DNA, 15 bp, Homo sapiens
attacaaccaaaggt

SEQ ID NO: 1640853 - DNA, 15 bp, Homo sapiens
ttacaaccaaaggtc

SEQ ID NO: 1640854 - DNA, 15 bp, Homo sapiens
tacaaccaaaggtca

SEQ ID NO: 1640855 - DNA, 15 bp, Homo sapiens
acaaccaaaggtcaa

SEQ ID NO: 1640856 - DNA, 15 bp, Homo sapiens
caaccaaaggtcaat

SEQ ID NO: 1640857 - DNA, 15 bp, Homo sapiens
aaccaaaggtcaatg

SEQ ID NO: 1640858 - DNA, 15 bp, Homo sapiens
accaaaggtcaatgc

SEQ ID NO: 1640859 - DNA, 15 bp, Homo sapiens
ccaaaggtcaatgca

SEQ ID NO: 1640860 - DNA, 15 bp, Homo sapiens
caaaggtcaatgcat

SEQ ID NO: 1640861 - DNA, 15 bp, Homo sapiens
aaaggtcaatgcatc

SEQ ID NO: 1640862 - DNA, 15 bp, Homo sapiens
aaggtcaatgcatcc

SEQ ID NO: 1640863 - DNA, 15 bp, Homo sapiens
aggtcaatgcatcca

SEQ ID NO: 1640864 - DNA, 15 bp, Homo sapiens
ggtcaatgcatccag

SEQ ID NO: 1640865 - DNA, 15 bp, Homo sapiens
gtcaatgcatccagc

SEQ ID NO: 1640866 - DNA, 15 bp, Homo sapiens
tcaatgcatccagcc

SEQ ID NO: 1640867 - DNA, 15 bp, Homo sapiens
caatgcatccagcca

SEQ ID NO: 1640868 - DNA, 15 bp, Homo sapiens
aatgcatccagccaa

SEQ ID NO: 1640869 - DNA, 15 bp, Homo sapiens
atgcatccagccaat

SEQ ID NO: 1640870 - DNA, 15 bp, Homo sapiens
tgcatccagccaatc

SEQ ID NO: 1640871 - DNA, 15 bp, Homo sapiens
gcatccagccaatct

SEQ ID NO: 1640872 - DNA, 15 bp, Homo sapiens
catccagccaatctt

SEQ ID NO: 1640873 - DNA, 15 bp, Homo sapiens
atccagccaatcttc

SEQ ID NO: 1640874 - DNA, 15 bp, Homo sapiens
tccagccaatcttcc

SEQ ID NO: 1640875 - DNA, 15 bp, Homo sapiens
ccagccaatcttcct

SEQ ID NO: 1640876 - DNA, 15 bp, Homo sapiens
cagccaatcttcctt

SEQ ID NO: 1640877 - DNA, 15 bp, Homo sapiens
agccaatcttccttc

SEQ ID NO: 1640878 - DNA, 15 bp, Homo sapiens
gccaatcttccttct

SEQ ID NO: 1640879 - DNA, 15 bp, Homo sapiens
ccaatcttccttcta

SEQ ID NO: 1640880 - DNA, 15 bp, Homo sapiens
caatcttccttctat

SEQ ID NO: 1640881 - DNA, 15 bp, Homo sapiens
aatcttccttctatc

SEQ ID NO: 1640882 - DNA, 15 bp, Homo sapiens
atcttccttctatca

SEQ ID NO: 1640883 - DNA, 15 bp, Homo sapiens
tcttccttctatcat

SEQ ID NO: 1640884 - DNA, 15 bp, Homo sapiens
cttccttctatcatc

SEQ ID NO: 1640885 - DNA, 15 bp, Homo sapiens
ttccttctatcatcc

SEQ ID NO: 1640886 - DNA, 15 bp, Homo sapiens
tccttctatcatccc

SEQ ID NO: 1640887 - DNA, 15 bp, Homo sapiens
ccttctatcatcccc

SEQ ID NO: 1640888 - DNA, 15 bp, Homo sapiens
cttctatcatcccct

SEQ ID NO: 1640889 - DNA, 15 bp, Homo sapiens
ttctatcatcccctg

SEQ ID NO: 1640890 - DNA, 15 bp, Homo sapiens
tctatcatcccctgc

SEQ ID NO: 1640891 - DNA, 15 bp, Homo sapiens
ctatcatcccctgcc

SEQ ID NO: 1640892 - DNA, 15 bp, Homo sapiens
tatcatcccctgccc

SEQ ID NO: 1640893 - DNA, 15 bp, Homo sapiens
atcatcccctgccct

SEQ ID NO: 1640894 - DNA, 15 bp, Homo sapiens
tcatcccctgccctt

SEQ ID NO: 1640895 - DNA, 15 bp, Homo sapiens
catcccctgccctta

SEQ ID NO: 1640896 - DNA, 15 bp, Homo sapiens
atcccctgcccttac

SEQ ID NO: 1640897 - DNA, 15 bp, Homo sapiens
tcccctgcccttact

SEQ ID NO: 1640898 - DNA, 15 bp, Homo sapiens
cccctgcccttactt

SEQ ID NO: 1640899 - DNA, 15 bp, Homo sapiens
ccctgcccttacttc

SEQ ID NO: 1640900 - DNA, 15 bp, Homo sapiens
cctgcccttacttct

SEQ ID NO: 1640901 - DNA, 15 bp, Homo sapiens
ctgcccttacttcta

SEQ ID NO: 1640902 - DNA, 15 bp, Homo sapiens
tgcccttacttctat

SEQ ID NO: 1640903 - DNA, 15 bp, Homo sapiens
gcccttacttctatt

SEQ ID NO: 1640904 - DNA, 15 bp, Homo sapiens
cccttacttctatta

SEQ ID NO: 1640905 - DNA, 15 bp, Homo sapiens
ccttacttctattag

SEQ ID NO: 1640906 - DNA, 15 bp, Homo sapiens
cttacttctattagg

SEQ ID NO: 1640907 - DNA, 15 bp, Homo sapiens
ttacttctattaggg

SEQ ID NO: 1640908 - DNA, 15 bp, Homo sapiens
tacttctattaggga

SEQ ID NO: 1640909 - DNA, 15 bp, Homo sapiens
acttctattagggac

SEQ ID NO: 1640910 - DNA, 15 bp, Homo sapiens
cttctattagggact

SEQ ID NO: 1640911 - DNA, 15 bp, Homo sapiens
ttctattagggactg

SEQ ID NO: 1640912 - DNA, 15 bp, Homo sapiens
tctattagggactgg

SEQ ID NO: 1640913 - DNA, 15 bp, Homo sapiens
ctattagggactggg

SEQ ID NO: 1640914 - DNA, 15 bp, Homo sapiens
tattagggactggga

SEQ ID NO: 1640915 - DNA, 15 bp, Homo sapiens
attagggactgggat

SEQ ID NO: 1640916 - DNA, 15 bp, Homo sapiens
ttagggactgggatt

SEQ ID NO: 1640917 - DNA, 15 bp, Homo sapiens
tagggactgggatta

SEQ ID NO: 1640918 - DNA, 15 bp, Homo sapiens
agggactgggattac

SEQ ID NO: 1640919 - DNA, 15 bp, Homo sapiens
gggactgggattaca

SEQ ID NO: 1640920 - DNA, 15 bp, Homo sapiens
ggactgggattacag

SEQ ID NO: 1640921 - DNA, 15 bp, Homo sapiens
gactgggattacagg

SEQ ID NO: 1640922 - DNA, 15 bp, Homo sapiens
gggattacaggcaaa

SEQ ID NO: 1640923 - DNA, 15 bp, Homo sapiens
ggattacaggcaaaa

SEQ ID NO: 1640924 - DNA, 15 bp, Homo sapiens
gattacaggcaaaac

SEQ ID NO: 1640925 - DNA, 15 bp, Homo sapiens
attacaggcaaaacc

SEQ ID NO: 1640926 - DNA, 15 bp, Homo sapiens
ttacaggcaaaaccc

SEQ ID NO: 1640927 - DNA, 15 bp, Homo sapiens
tacaggcaaaaccca

SEQ ID NO: 1640928 - DNA, 15 bp, Homo sapiens
acaggcaaaacccat

SEQ ID NO: 1640929 - DNA, 15 bp, Homo sapiens
caggcaaaacccatc

SEQ ID NO: 1640930 - DNA, 15 bp, Homo sapiens
aggcaaaacccatca

SEQ ID NO: 1640931 - DNA, 15 bp, Homo sapiens
ggcaaaacccatcaa

SEQ ID NO: 1640932 - DNA, 15 bp, Homo sapiens
gcaaaacccatcaaa

SEQ ID NO: 1640933 - DNA, 15 bp, Homo sapiens
caaaacccatcaaat

SEQ ID NO: 1640934 - DNA, 15 bp, Homo sapiens
aaaacccatcaaatg

SEQ ID NO: 1640935 - DNA, 15 bp, Homo sapiens
aaacccatcaaatgc

SEQ ID NO: 1640936 - DNA, 15 bp, Homo sapiens
aacccatcaaatgcc

SEQ ID NO: 1640937 - DNA, 15 bp, Homo sapiens
acccatcaaatgcct

SEQ ID NO: 1640938 - DNA, 15 bp, Homo sapiens
cccatcaaatgcctc

SEQ ID NO: 1640939 - DNA, 15 bp, Homo sapiens
ccatcaaatgcctct

SEQ ID NO: 1640940 - DNA, 15 bp, Homo sapiens
catcaaatgcctctt

SEQ ID NO: 1640941 - DNA, 15 bp, Homo sapiens
atcaaatgcctcttc

SEQ ID NO: 1640942 - DNA, 15 bp, Homo sapiens
tcaaatgcctcttct

SEQ ID NO: 1640943 - DNA, 15 bp, Homo sapiens
caaatgcctcttcta

SEQ ID NO: 1640944 - DNA, 15 bp, Homo sapiens
aaatgcctcttctac

SEQ ID NO: 1640945 - DNA, 15 bp, Homo sapiens
aatgcctcttctacc

SEQ ID NO: 1640946 - DNA, 15 bp, Homo sapiens
atgcctcttctacca

SEQ ID NO: 1640947 - DNA, 15 bp, Homo sapiens
tgcctcttctaccac

SEQ ID NO: 1640948 - DNA, 15 bp, Homo sapiens
gcctcttctaccact

SEQ ID NO: 1640949 - DNA, 15 bp, Homo sapiens
cctcttctaccactt

SEQ ID NO: 1640950 - DNA, 15 bp, Homo sapiens
ctcttctaccacttt

SEQ ID NO: 1640951 - DNA, 15 bp, Homo sapiens
tcttctaccactttc

SEQ ID NO: 1640952 - DNA, 15 bp, Homo sapiens
cttctaccactttcc

SEQ ID NO: 1640953 - DNA, 15 bp, Homo sapiens
ttctaccactttccc

SEQ ID NO: 1640954 - DNA, 15 bp, Homo sapiens
tctaccactttccca

SEQ ID NO: 1640955 - DNA, 15 bp, Homo sapiens
ctaccactttcccat

SEQ ID NO: 1640956 - DNA, 15 bp, Homo sapiens
taccactttcccatt

SEQ ID NO: 1640957 - DNA, 15 bp, Homo sapiens
accactttcccattt

SEQ ID NO: 1640958 - DNA, 15 bp, Homo sapiens
ccactttcccatttc

SEQ ID NO: 1640959 - DNA, 15 bp, Homo sapiens
cactttcccatttct

SEQ ID NO: 1640960 - DNA, 15 bp, Homo sapiens
actttcccatttctt

SEQ ID NO: 1640961 - DNA, 15 bp, Homo sapiens
ctttcccatttctta

SEQ ID NO: 1640962 - DNA, 15 bp, Homo sapiens
tttcccatttcttaa

SEQ ID NO: 1640963 - DNA, 15 bp, Homo sapiens
ttcccatttcttaac

SEQ ID NO: 1640964 - DNA, 15 bp, Homo sapiens
tcccatttcttaacc

SEQ ID NO: 1640965 - DNA, 15 bp, Homo sapiens
cccatttcttaacca

SEQ ID NO: 1640966 - DNA, 15 bp, Homo sapiens
ccatttcttaaccat

SEQ ID NO: 1640967 - DNA, 15 bp, Homo sapiens
catttcttaaccatt

SEQ ID NO: 1640968 - DNA, 15 bp, Homo sapiens
atttcttaaccatta

SEQ ID NO: 1640969 - DNA, 15 bp, Homo sapiens
tttcttaaccattag

SEQ ID NO: 1640970 - DNA, 15 bp, Homo sapiens
ttcttaaccattagc

SEQ ID NO: 1640971 - DNA, 15 bp, Homo sapiens
tcttaaccattagcc

SEQ ID NO: 1640972 - DNA, 15 bp, Homo sapiens
cttaaccattagcct

SEQ ID NO: 1640973 - DNA, 15 bp, Homo sapiens
ttaaccattagcctc

SEQ ID NO: 1640974 - DNA, 15 bp, Homo sapiens
taaccattagcctct

SEQ ID NO: 1640975 - DNA, 15 bp, Homo sapiens
aaccattagcctcta

SEQ ID NO: 1640976 - DNA, 15 bp, Homo sapiens
accattagcctctaa

SEQ ID NO: 1640977 - DNA, 15 bp, Homo sapiens
ccattagcctctaac

SEQ ID NO: 1640978 - DNA, 15 bp, Homo sapiens
cattagcctctaact

SEQ ID NO: 1640979 - DNA, 15 bp, Homo sapiens
attagcctctaactt

SEQ ID NO: 1640980 - DNA, 15 bp, Homo sapiens
ttagcctctaacttc

SEQ ID NO: 1640981 - DNA, 15 bp, Homo sapiens
tagcctctaacttcc

SEQ ID NO: 1640982 - DNA, 15 bp, Homo sapiens
agcctctaacttcct

SEQ ID NO: 1640983 - DNA, 15 bp, Homo sapiens
gcctctaacttcctc

SEQ ID NO: 1640984 - DNA, 15 bp, Homo sapiens
cctctaacttcctct

SEQ ID NO: 1640985 - DNA, 15 bp, Homo sapiens
ctctaacttcctcta

SEQ ID NO: 1640986 - DNA, 15 bp, Homo sapiens
tctaacttcctctat

SEQ ID NO: 1640987 - DNA, 15 bp, Homo sapiens
ctaacttcctctatt

SEQ ID NO: 1640988 - DNA, 15 bp, Homo sapiens
taacttcctctattc

SEQ ID NO: 1640989 - DNA, 15 bp, Homo sapiens
aacttcctctattca

SEQ ID NO: 1640990 - DNA, 15 bp, Homo sapiens
acttcctctattcag

SEQ ID NO: 1640991 - DNA, 15 bp, Homo sapiens
cttcctctattcagt

SEQ ID NO: 1640992 - DNA, 15 bp, Homo sapiens
ttcctctattcagtt

SEQ ID NO: 1640993 - DNA, 15 bp, Homo sapiens
tcctctattcagttt

SEQ ID NO: 1640994 - DNA, 15 bp, Homo sapiens
cctctattcagtttc

SEQ ID NO: 1640995 - DNA, 15 bp, Homo sapiens
ctctattcagtttct

SEQ ID NO: 1640996 - DNA, 15 bp, Homo sapiens
tctattcagtttctc

SEQ ID NO: 1640997 - DNA, 15 bp, Homo sapiens
ctattcagtttctca

SEQ ID NO: 1640998 - DNA, 15 bp, Homo sapiens
tattcagtttctcat

SEQ ID NO: 1640999 - DNA, 15 bp, Homo sapiens
attcagtttctcata

SEQ ID NO: 1641000 - DNA, 15 bp, Homo sapiens
ttcagtttctcatat

SEQ ID NO: 1641001 - DNA, 15 bp, Homo sapiens
tcagtttctcatatg

SEQ ID NO: 1641002 - DNA, 15 bp, Homo sapiens
cagtttctcatatgc

SEQ ID NO: 1641003 - DNA, 15 bp, Homo sapiens
agtttctcatatgct

SEQ ID NO: 1641004 - DNA, 15 bp, Homo sapiens
gtttctcatatgctt

SEQ ID NO: 1641005 - DNA, 15 bp, Homo sapiens
tttctcatatgcttt

SEQ ID NO: 1641006 - DNA, 15 bp, Homo sapiens
ttctcatatgctttc

SEQ ID NO: 1641007 - DNA, 15 bp, Homo sapiens
tctcatatgctttca

SEQ ID NO: 1641008 - DNA, 15 bp, Homo sapiens
ctcatatgctttcat

SEQ ID NO: 1641009 - DNA, 15 bp, Homo sapiens
tcatatgctttcatg

SEQ ID NO: 1641010 - DNA, 15 bp, Homo sapiens
catatgctttcatgc

SEQ ID NO: 1641011 - DNA, 15 bp, Homo sapiens
atatgctttcatgcc

SEQ ID NO: 1641012 - DNA, 15 bp, Homo sapiens
tatgctttcatgccc

SEQ ID NO: 1641013 - DNA, 15 bp, Homo sapiens
atgctttcatgccca

SEQ ID NO: 1641014 - DNA, 15 bp, Homo sapiens
tgctttcatgcccat

SEQ ID NO: 1641015 - DNA, 15 bp, Homo sapiens
gctttcatgcccatt

SEQ ID NO: 1641016 - DNA, 15 bp, Homo sapiens
ctttcatgcccattg

SEQ ID NO: 1641017 - DNA, 15 bp, Homo sapiens
tttcatgcccattgg

SEQ ID NO: 1641018 - DNA, 15 bp, Homo sapiens
ttcatgcccattggg

SEQ ID NO: 1641019 - DNA, 15 bp, Homo sapiens
tcatgcccattgggt

SEQ ID NO: 1641020 - DNA, 15 bp, Homo sapiens
catgcccattgggtc

SEQ ID NO: 1641021 - DNA, 15 bp, Homo sapiens
atgcccattgggtca

SEQ ID NO: 1641022 - DNA, 15 bp, Homo sapiens
tgcccattgggtcag

SEQ ID NO: 1641023 - DNA, 15 bp, Homo sapiens
gcccattgggtcaga

SEQ ID NO: 1641024 - DNA, 15 bp, Homo sapiens
cccattgggtcagat

SEQ ID NO: 1641025 - DNA, 15 bp, Homo sapiens
ccattgggtcagata

SEQ ID NO: 1641026 - DNA, 15 bp, Homo sapiens
cattgggtcagataa

SEQ ID NO: 1641027 - DNA, 15 bp, Homo sapiens
attgggtcagataaa

SEQ ID NO: 1641028 - DNA, 15 bp, Homo sapiens
ttgggtcagataaag

SEQ ID NO: 1641029 - DNA, 15 bp, Homo sapiens
tgggtcagataaagg

SEQ ID NO: 1641030 - DNA, 15 bp, Homo sapiens
gggtcagataaagga

SEQ ID NO: 1641031 - DNA, 15 bp, Homo sapiens
ggtcagataaaggaa

SEQ ID NO: 1641032 - DNA, 15 bp, Homo sapiens
gtcagataaaggaac

SEQ ID NO: 1641033 - DNA, 15 bp, Homo sapiens
tcagataaaggaaca

SEQ ID NO: 1641034 - DNA, 15 bp, Homo sapiens
cagataaaggaacat

SEQ ID NO: 1641035 - DNA, 15 bp, Homo sapiens
agataaaggaacatt

SEQ ID NO: 1641036 - DNA, 15 bp, Homo sapiens
gataaaggaacattc

SEQ ID NO: 1641037 - DNA, 15 bp, Homo sapiens
ataaaggaacattca

SEQ ID NO: 1641038 - DNA, 15 bp, Homo sapiens
taaaggaacattcat

SEQ ID NO: 1641039 - DNA, 15 bp, Homo sapiens
aaaggaacattcatt

SEQ ID NO: 1641040 - DNA, 15 bp, Homo sapiens
aaggaacattcattt

SEQ ID NO: 1641041 - DNA, 15 bp, Homo sapiens
aggaacattcattta

SEQ ID NO: 1641042 - DNA, 15 bp, Homo sapiens
ggaacattcatttat

SEQ ID NO: 1641043 - DNA, 15 bp, Homo sapiens
gaacattcatttatt

SEQ ID NO: 1641044 - DNA, 15 bp, Homo sapiens
aacattcatttattt

SEQ ID NO: 1641045 - DNA, 15 bp, Homo sapiens
acattcatttatttg

SEQ ID NO: 1641046 - DNA, 15 bp, Homo sapiens
cattcatttatttga

SEQ ID NO: 1641047 - DNA, 15 bp, Homo sapiens
attcatttatttgag

SEQ ID NO: 1641048 - DNA, 15 bp, Homo sapiens
ttcatttatttgagt

SEQ ID NO: 1641049 - DNA, 15 bp, Homo sapiens
tcatttatttgagta

SEQ ID NO: 1641050 - DNA, 15 bp, Homo sapiens
catttatttgagtag

SEQ ID NO: 1641051 - DNA, 15 bp, Homo sapiens
atttatttgagtagg

SEQ ID NO: 1641052 - DNA, 15 bp, Homo sapiens
tttatttgagtaggc

SEQ ID NO: 1641053 - DNA, 15 bp, Homo sapiens
ttatttgagtaggca

SEQ ID NO: 1641054 - DNA, 15 bp, Homo sapiens
tatttgagtaggcat

SEQ ID NO: 1641055 - DNA, 15 bp, Homo sapiens
atttgagtaggcatc

SEQ ID NO: 1641056 - DNA, 15 bp, Homo sapiens
tttgagtaggcatct

SEQ ID NO: 1641057 - DNA, 15 bp, Homo sapiens
ttgagtaggcatctg

SEQ ID NO: 1641058 - DNA, 15 bp, Homo sapiens
tgagtaggcatctgt

SEQ ID NO: 1641059 - DNA, 15 bp, Homo sapiens
gagtaggcatctgtt

SEQ ID NO: 1641060 - DNA, 15 bp, Homo sapiens
agtaggcatctgtta

SEQ ID NO: 1641061 - DNA, 15 bp, Homo sapiens
gtaggcatctgttat

SEQ ID NO: 1641062 - DNA, 15 bp, Homo sapiens
taggcatctgttatg

SEQ ID NO: 1641063 - DNA, 15 bp, Homo sapiens
aggcatctgttatga

SEQ ID NO: 1641064 - DNA, 15 bp, Homo sapiens
ggcatctgttatgat

SEQ ID NO: 1641065 - DNA, 15 bp, Homo sapiens
gcatctgttatgatc

SEQ ID NO: 1641066 - DNA, 15 bp, Homo sapiens
catctgttatgatca

SEQ ID NO: 1641067 - DNA, 15 bp, Homo sapiens
atctgttatgatcac

SEQ ID NO: 1641068 - DNA, 15 bp, Homo sapiens
tctgttatgatcact

SEQ ID NO: 1641069 - DNA, 15 bp, Homo sapiens
ctgttatgatcactc

SEQ ID NO: 1641070 - DNA, 15 bp, Homo sapiens
tgttatgatcactcc

SEQ ID NO: 1641071 - DNA, 15 bp, Homo sapiens
gttatgatcactccg

SEQ ID NO: 1641072 - DNA, 15 bp, Homo sapiens
ttatgatcactccgg

SEQ ID NO: 1641073 - DNA, 15 bp, Homo sapiens
tatgatcactccgga

SEQ ID NO: 1641074 - DNA, 15 bp, Homo sapiens
atgatcactccggaa

SEQ ID NO: 1641075 - DNA, 15 bp, Homo sapiens
tgatcactccggaaa

SEQ ID NO: 1641076 - DNA, 15 bp, Homo sapiens
gatcactccggaaaa

SEQ ID NO: 1641077 - DNA, 15 bp, Homo sapiens
atcactccggaaaaa

SEQ ID NO: 1641078 - DNA, 15 bp, Homo sapiens
tcactccggaaaaaa

SEQ ID NO: 1641079 - DNA, 15 bp, Homo sapiens
cactccggaaaaaag

SEQ ID NO: 1641080 - DNA, 15 bp, Homo sapiens
actccggaaaaaaga

SEQ ID NO: 1641081 - DNA, 15 bp, Homo sapiens
ctccggaaaaaagat

SEQ ID NO: 1641082 - DNA, 15 bp, Homo sapiens
tccggaaaaaagatg

SEQ ID NO: 1641083 - DNA, 15 bp, Homo sapiens
ccggaaaaaagatga

SEQ ID NO: 1641084 - DNA, 15 bp, Homo sapiens
cggaaaaaagatgac

SEQ ID NO: 1641085 - DNA, 15 bp, Homo sapiens
ggaaaaaagatgaca

SEQ ID NO: 1641086 - DNA, 15 bp, Homo sapiens
gaaaaaagatgacaa

SEQ ID NO: 1641087 - DNA, 15 bp, Homo sapiens
aaaaaagatgacaat

SEQ ID NO: 1641088 - DNA, 15 bp, Homo sapiens
aaaaagatgacaatg

SEQ ID NO: 1641089 - DNA, 15 bp, Homo sapiens
aaaagatgacaatgg

SEQ ID NO: 1641090 - DNA, 15 bp, Homo sapiens
aaagatgacaatggg

SEQ ID NO: 1641091 - DNA, 15 bp, Homo sapiens
aagatgacaatgggt

SEQ ID NO: 1641092 - DNA, 15 bp, Homo sapiens
agatgacaatgggtt

SEQ ID NO: 1641093 - DNA, 15 bp, Homo sapiens
gatgacaatgggtta

SEQ ID NO: 1641094 - DNA, 15 bp, Homo sapiens
atgacaatgggttac

SEQ ID NO: 1641095 - DNA, 15 bp, Homo sapiens
tgacaatgggttacc

SEQ ID NO: 1641096 - DNA, 15 bp, Homo sapiens
gacaatgggttacct

SEQ ID NO: 1641097 - DNA, 15 bp, Homo sapiens
acaatgggttacctt

SEQ ID NO: 1641098 - DNA, 15 bp, Homo sapiens
caatgggttaccttg

SEQ ID NO: 1641099 - DNA, 15 bp, Homo sapiens
aatgggttaccttgt

SEQ ID NO: 1641100 - DNA, 15 bp, Homo sapiens
atgggttaccttgtc

SEQ ID NO: 1641101 - DNA, 15 bp, Homo sapiens
tgggttaccttgtcc

SEQ ID NO: 1641102 - DNA, 15 bp, Homo sapiens
gggttaccttgtcct

SEQ ID NO: 1641103 - DNA, 15 bp, Homo sapiens
ggttaccttgtcctc

SEQ ID NO: 1641104 - DNA, 15 bp, Homo sapiens
gttaccttgtcctcc

SEQ ID NO: 1641105 - DNA, 15 bp, Homo sapiens
ttaccttgtcctcct

SEQ ID NO: 1641106 - DNA, 15 bp, Homo sapiens
taccttgtcctcctg

SEQ ID NO: 1641107 - DNA, 15 bp, Homo sapiens
accttgtcctcctgg

SEQ ID NO: 1641108 - DNA, 15 bp, Homo sapiens
ccttgtcctcctggg

SEQ ID NO: 1641109 - DNA, 15 bp, Homo sapiens
cttgtcctcctgggc

SEQ ID NO: 1641110 - DNA, 15 bp, Homo sapiens
ttgtcctcctgggct

SEQ ID NO: 1641111 - DNA, 15 bp, Homo sapiens
tgtcctcctgggctt

SEQ ID NO: 1641112 - DNA, 15 bp, Homo sapiens
gtcctcctgggcttc

SEQ ID NO: 1641113 - DNA, 15 bp, Homo sapiens
tcctcctgggcttct

SEQ ID NO: 1641114 - DNA, 15 bp, Homo sapiens
cctcctgggcttctc

SEQ ID NO: 1641115 - DNA, 15 bp, Homo sapiens
ctcctgggcttctct

SEQ ID NO: 1641116 - DNA, 15 bp, Homo sapiens
tcctgggcttctcta

SEQ ID NO: 1641117 - DNA, 15 bp, Homo sapiens
cctgggcttctctaa

SEQ ID NO: 1641118 - DNA, 15 bp, Homo sapiens
ctgggcttctctaac

SEQ ID NO: 1641119 - DNA, 15 bp, Homo sapiens
tgggcttctctaact

SEQ ID NO: 1641120 - DNA, 15 bp, Homo sapiens
gggcttctctaactg

SEQ ID NO: 1641121 - DNA, 15 bp, Homo sapiens
ggcttctctaactga

SEQ ID NO: 1641122 - DNA, 15 bp, Homo sapiens
gcttctctaactgac

SEQ ID NO: 1641123 - DNA, 15 bp, Homo sapiens
cttctctaactgaca

SEQ ID NO: 1641124 - DNA, 15 bp, Homo sapiens
ttctctaactgacat

SEQ ID NO: 1641125 - DNA, 15 bp, Homo sapiens
tctctaactgacatg

SEQ ID NO: 1641126 - DNA, 15 bp, Homo sapiens
ctctaactgacatgg

SEQ ID NO: 1641127 - DNA, 15 bp, Homo sapiens
tctaactgacatggt

SEQ ID NO: 1641128 - DNA, 15 bp, Homo sapiens
ctaactgacatggtc

SEQ ID NO: 1641129 - DNA, 15 bp, Homo sapiens
taactgacatggtca

SEQ ID NO: 1641130 - DNA, 15 bp, Homo sapiens
aactgacatggtcaa

SEQ ID NO: 1641131 - DNA, 15 bp, Homo sapiens
actgacatggtcaaa

SEQ ID NO: 1641132 - DNA, 15 bp, Homo sapiens
ctgacatggtcaaaa

SEQ ID NO: 1641133 - DNA, 15 bp, Homo sapiens
tgacatggtcaaaat

SEQ ID NO: 1641134 - DNA, 15 bp, Homo sapiens
gacatggtcaaaatg

SEQ ID NO: 1641135 - DNA, 15 bp, Homo sapiens
acatggtcaaaatgc

SEQ ID NO: 1641136 - DNA, 15 bp, Homo sapiens
catggtcaaaatgcc

SEQ ID NO: 1641137 - DNA, 15 bp, Homo sapiens
atggtcaaaatgccc

SEQ ID NO: 1641138 - DNA, 15 bp, Homo sapiens
tggtcaaaatgccca

SEQ ID NO: 1641139 - DNA, 15 bp, Homo sapiens
ggtcaaaatgcccat

SEQ ID NO: 1641140 - DNA, 15 bp, Homo sapiens
gtcaaaatgcccata

SEQ ID NO: 1641141 - DNA, 15 bp, Homo sapiens
tcaaaatgcccatat

SEQ ID NO: 1641142 - DNA, 15 bp, Homo sapiens
caaaatgcccatatg

SEQ ID NO: 1641143 - DNA, 15 bp, Homo sapiens
aaaatgcccatatga

SEQ ID NO: 1641144 - DNA, 15 bp, Homo sapiens
aaatgcccatatgaa

SEQ ID NO: 1641145 - DNA, 15 bp, Homo sapiens
aatgcccatatgaag

SEQ ID NO: 1641146 - DNA, 15 bp, Homo sapiens
atgcccatatgaaga

SEQ ID NO: 1641147 - DNA, 15 bp, Homo sapiens
tgcccatatgaagat

SEQ ID NO: 1641148 - DNA, 15 bp, Homo sapiens
gcccatatgaagata

SEQ ID NO: 1641149 - DNA, 15 bp, Homo sapiens
cccatatgaagataa

SEQ ID NO: 1641150 - DNA, 15 bp, Homo sapiens
ccatatgaagataag

SEQ ID NO: 1641151 - DNA, 15 bp, Homo sapiens
catatgaagataaga

SEQ ID NO: 1641152 - DNA, 15 bp, Homo sapiens
atatgaagataagat

SEQ ID NO: 1641153 - DNA, 15 bp, Homo sapiens
tatgaagataagatg

SEQ ID NO: 1641154 - DNA, 15 bp, Homo sapiens
atgaagataagatgt

SEQ ID NO: 1641155 - DNA, 15 bp, Homo sapiens
tgaagataagatgtt

SEQ ID NO: 1641156 - DNA, 15 bp, Homo sapiens
gaagataagatgtta

SEQ ID NO: 1641157 - DNA, 15 bp, Homo sapiens
aagataagatgttaa

SEQ ID NO: 1641158 - DNA, 15 bp, Homo sapiens
agataagatgttaag

SEQ ID NO: 1641159 - DNA, 15 bp, Homo sapiens
gataagatgttaaga

SEQ ID NO: 1641160 - DNA, 15 bp, Homo sapiens
ataagatgttaagag

SEQ ID NO: 1641161 - DNA, 15 bp, Homo sapiens
taagatgttaagagc

SEQ ID NO: 1641162 - DNA, 15 bp, Homo sapiens
aagatgttaagagca

SEQ ID NO: 1641163 - DNA, 15 bp, Homo sapiens
agatgttaagagcaa

SEQ ID NO: 1641164 - DNA, 15 bp, Homo sapiens
gatgttaagagcaag

SEQ ID NO: 1641165 - DNA, 15 bp, Homo sapiens
atgttaagagcaaga

SEQ ID NO: 1641166 - DNA, 15 bp, Homo sapiens
tgttaagagcaagat

SEQ ID NO: 1641167 - DNA, 15 bp, Homo sapiens
gttaagagcaagatt

SEQ ID NO: 1641168 - DNA, 15 bp, Homo sapiens
ttaagagcaagattt

SEQ ID NO: 1641169 - DNA, 15 bp, Homo sapiens
taagagcaagattta

SEQ ID NO: 1641170 - DNA, 15 bp, Homo sapiens
aagagcaagatttat

SEQ ID NO: 1641171 - DNA, 15 bp, Homo sapiens
agagcaagatttatg

SEQ ID NO: 1641172 - DNA, 15 bp, Homo sapiens
gagcaagatttatga

SEQ ID NO: 1641173 - DNA, 15 bp, Homo sapiens
agcaagatttatgaa

SEQ ID NO: 1641174 - DNA, 15 bp, Homo sapiens
gcaagatttatgaaa

SEQ ID NO: 1641175 - DNA, 15 bp, Homo sapiens
caagatttatgaaaa

SEQ ID NO: 1641176 - DNA, 15 bp, Homo sapiens
aagatttatgaaaag

SEQ ID NO: 1641177 - DNA, 15 bp, Homo sapiens
agatttatgaaaagc

SEQ ID NO: 1641178 - DNA, 15 bp, Homo sapiens
gatttatgaaaagct

SEQ ID NO: 1641179 - DNA, 15 bp, Homo sapiens
atttatgaaaagctg

SEQ ID NO: 1641180 - DNA, 15 bp, Homo sapiens
tttatgaaaagctga

SEQ ID NO: 1641181 - DNA, 15 bp, Homo sapiens
ttatgaaaagctgag

SEQ ID NO: 1641182 - DNA, 15 bp, Homo sapiens
tatgaaaagctgagt

SEQ ID NO: 1641183 - DNA, 15 bp, Homo sapiens
atgaaaagctgagta

SEQ ID NO: 1641184 - DNA, 15 bp, Homo sapiens
tgaaaagctgagtat

SEQ ID NO: 1641185 - DNA, 15 bp, Homo sapiens
gaaaagctgagtatg

SEQ ID NO: 1641186 - DNA, 15 bp, Homo sapiens
aaaagctgagtatga

SEQ ID NO: 1641187 - DNA, 15 bp, Homo sapiens
aaagctgagtatgat

SEQ ID NO: 1641188 - DNA, 15 bp, Homo sapiens
aagctgagtatgatg

SEQ ID NO: 1641189 - DNA, 15 bp, Homo sapiens
agctgagtatgatgg

SEQ ID NO: 1641190 - DNA, 15 bp, Homo sapiens
gctgagtatgatggc

SEQ ID NO: 1641191 - DNA, 15 bp, Homo sapiens
ctgagtatgatggca

SEQ ID NO: 1641192 - DNA, 15 bp, Homo sapiens
tgagtatgatggcag

SEQ ID NO: 1641193 - DNA, 15 bp, Homo sapiens
gagtatgatggcagc

SEQ ID NO: 1641194 - DNA, 15 bp, Homo sapiens
agtatgatggcagct

SEQ ID NO: 1641195 - DNA, 15 bp, Homo sapiens
gtatgatggcagctc

SEQ ID NO: 1641196 - DNA, 15 bp, Homo sapiens
tatgatggcagctct

SEQ ID NO: 1641197 - DNA, 15 bp, Homo sapiens
atgatggcagctctt

SEQ ID NO: 1641198 - DNA, 15 bp, Homo sapiens
tgatggcagctcttg

SEQ ID NO: 1641199 - DNA, 15 bp, Homo sapiens
gatggcagctcttgt

SEQ ID NO: 1641200 - DNA, 15 bp, Homo sapiens
atggcagctcttgtc

SEQ ID NO: 1641201 - DNA, 15 bp, Homo sapiens
tggcagctcttgtct

SEQ ID NO: 1641202 - DNA, 15 bp, Homo sapiens
ggcagctcttgtctc

SEQ ID NO: 1641203 - DNA, 15 bp, Homo sapiens
gcagctcttgtctca

SEQ ID NO: 1641204 - DNA, 15 bp, Homo sapiens
cagctcttgtctcat

SEQ ID NO: 1641205 - DNA, 15 bp, Homo sapiens
agctcttgtctcata

SEQ ID NO: 1641206 - DNA, 15 bp, Homo sapiens
gctcttgtctcataa

SEQ ID NO: 1641207 - DNA, 15 bp, Homo sapiens
ctcttgtctcataaa

SEQ ID NO: 1641208 - DNA, 15 bp, Homo sapiens
tcttgtctcataaaa

SEQ ID NO: 1641209 - DNA, 15 bp, Homo sapiens
cttgtctcataaaat

SEQ ID NO: 1641210 - DNA, 15 bp, Homo sapiens
ttgtctcataaaata

SEQ ID NO: 1641211 - DNA, 15 bp, Homo sapiens
tgtctcataaaataa

SEQ ID NO: 1641212 - DNA, 15 bp, Homo sapiens
gtctcataaaataac

SEQ ID NO: 1641213 - DNA, 15 bp, Homo sapiens
tctcataaaataact

SEQ ID NO: 1641214 - DNA, 15 bp, Homo sapiens
ctcataaaataactc

SEQ ID NO: 1641215 - DNA, 15 bp, Homo sapiens
tcataaaataactcg

SEQ ID NO: 1641216 - DNA, 15 bp, Homo sapiens
cataaaataactcga

SEQ ID NO: 1641217 - DNA, 15 bp, Homo sapiens
ataaaataactcgaa

SEQ ID NO: 1641218 - DNA, 15 bp, Homo sapiens
taaaataactcgaaa

SEQ ID NO: 1641219 - DNA, 15 bp, Homo sapiens
aaaataactcgaaag

SEQ ID NO: 1641220 - DNA, 15 bp, Homo sapiens
aaataactcgaaagt

SEQ ID NO: 1641221 - DNA, 15 bp, Homo sapiens
aataactcgaaagtt

SEQ ID NO: 1641222 - DNA, 15 bp, Homo sapiens
ataactcgaaagttc

SEQ ID NO: 1641223 - DNA, 15 bp, Homo sapiens
taactcgaaagttcc

SEQ ID NO: 1641224 - DNA, 15 bp, Homo sapiens
aactcgaaagttccc

SEQ ID NO: 1641225 - DNA, 15 bp, Homo sapiens
actcgaaagttccca

SEQ ID NO: 1641226 - DNA, 15 bp, Homo sapiens
ctcgaaagttcccag

SEQ ID NO: 1641227 - DNA, 15 bp, Homo sapiens
tcgaaagttcccagt

SEQ ID NO: 1641228 - DNA, 15 bp, Homo sapiens
cgaaagttcccagtg

SEQ ID NO: 1641229 - DNA, 15 bp, Homo sapiens
gaaagttcccagtga

SEQ ID NO: 1641230 - DNA, 15 bp, Homo sapiens
aaagttcccagtgaa

SEQ ID NO: 1641231 - DNA, 15 bp, Homo sapiens
aagttcccagtgaaa

SEQ ID NO: 1641232 - DNA, 15 bp, Homo sapiens
agttcccagtgaaag

SEQ ID NO: 1641233 - DNA, 15 bp, Homo sapiens
gttcccagtgaaaga

SEQ ID NO: 1641234 - DNA, 15 bp, Homo sapiens
ttcccagtgaaagac

SEQ ID NO: 1641235 - DNA, 15 bp, Homo sapiens
tcccagtgaaagacc

SEQ ID NO: 1641236 - DNA, 15 bp, Homo sapiens
cccagtgaaagacca

SEQ ID NO: 1641237 - DNA, 15 bp, Homo sapiens
ccagtgaaagaccaa

SEQ ID NO: 1641238 - DNA, 15 bp, Homo sapiens
cagtgaaagaccaag

SEQ ID NO: 1641239 - DNA, 15 bp, Homo sapiens
agtgaaagaccaaga

SEQ ID NO: 1641240 - DNA, 15 bp, Homo sapiens
gtgaaagaccaagaa

SEQ ID NO: 1641241 - DNA, 15 bp, Homo sapiens
tgaaagaccaagaaa

SEQ ID NO: 1641242 - DNA, 15 bp, Homo sapiens
gaaagaccaagaaat

SEQ ID NO: 1641243 - DNA, 15 bp, Homo sapiens
aaagaccaagaaatt

SEQ ID NO: 1641244 - DNA, 15 bp, Homo sapiens
aagaccaagaaattt

SEQ ID NO: 1641245 - DNA, 15 bp, Homo sapiens
agaccaagaaatttt

SEQ ID NO: 1641246 - DNA, 15 bp, Homo sapiens
gaccaagaaatttta

SEQ ID NO: 1641247 - DNA, 15 bp, Homo sapiens
accaagaaattttac

SEQ ID NO: 1641248 - DNA, 15 bp, Homo sapiens
ccaagaaattttaca

SEQ ID NO: 1641249 - DNA, 15 bp, Homo sapiens
caagaaattttacat

SEQ ID NO: 1641250 - DNA, 15 bp, Homo sapiens
aagaaattttacatc

SEQ ID NO: 1641251 - DNA, 15 bp, Homo sapiens
agaaattttacatca

SEQ ID NO: 1641252 - DNA, 15 bp, Homo sapiens
gaaattttacatcaa

SEQ ID NO: 1641253 - DNA, 15 bp, Homo sapiens
aaattttacatcaaa

SEQ ID NO: 1641254 - DNA, 15 bp, Homo sapiens
aattttacatcaaac

SEQ ID NO: 1641255 - DNA, 15 bp, Homo sapiens
attttacatcaaacc

SEQ ID NO: 1641256 - DNA, 15 bp, Homo sapiens
ttttacatcaaaccc

SEQ ID NO: 1641257 - DNA, 15 bp, Homo sapiens
tttacatcaaaccca

SEQ ID NO: 1641258 - DNA, 15 bp, Homo sapiens
ttacatcaaacccaa

SEQ ID NO: 1641259 - DNA, 15 bp, Homo sapiens
tacatcaaacccaaa

SEQ ID NO: 1641260 - DNA, 15 bp, Homo sapiens
acatcaaacccaaac

SEQ ID NO: 1641261 - DNA, 15 bp, Homo sapiens
catcaaacccaaacc

SEQ ID NO: 1641262 - DNA, 15 bp, Homo sapiens
atcaaacccaaaccg

SEQ ID NO: 1641263 - DNA, 15 bp, Homo sapiens
tcaaacccaaaccgg

SEQ ID NO: 1641264 - DNA, 15 bp, Homo sapiens
caaacccaaaccggc

SEQ ID NO: 1641265 - DNA, 15 bp, Homo sapiens
aaacccaaaccggcc

SEQ ID NO: 1641266 - DNA, 15 bp, Homo sapiens
aacccaaaccggcca

SEQ ID NO: 1641267 - DNA, 15 bp, Homo sapiens
acccaaaccggccaa

SEQ ID NO: 1641268 - DNA, 15 bp, Homo sapiens
cccaaaccggccaaa

SEQ ID NO: 1641269 - DNA, 15 bp, Homo sapiens
ccaaaccggccaaat

SEQ ID NO: 1641270 - DNA, 15 bp, Homo sapiens
caaaccggccaaatg

SEQ ID NO: 1641271 - DNA, 15 bp, Homo sapiens
aaaccggccaaatgg

SEQ ID NO: 1641272 - DNA, 15 bp, Homo sapiens
aaccggccaaatggt

SEQ ID NO: 1641273 - DNA, 15 bp, Homo sapiens
accggccaaatggtc

SEQ ID NO: 1641274 - DNA, 15 bp, Homo sapiens
ccggccaaatggtcc

SEQ ID NO: 1641275 - DNA, 15 bp, Homo sapiens
cggccaaatggtcca

SEQ ID NO: 1641276 - DNA, 15 bp, Homo sapiens
ggccaaatggtccaa

SEQ ID NO: 1641277 - DNA, 15 bp, Homo sapiens
gccaaatggtccaag

SEQ ID NO: 1641278 - DNA, 15 bp, Homo sapiens
ccaaatggtccaagc

SEQ ID NO: 1641279 - DNA, 15 bp, Homo sapiens
caaatggtccaagct

SEQ ID NO: 1641280 - DNA, 15 bp, Homo sapiens
aaatggtccaagctt

SEQ ID NO: 1641281 - DNA, 15 bp, Homo sapiens
aatggtccaagcttc

SEQ ID NO: 1641282 - DNA, 15 bp, Homo sapiens
atggtccaagcttcc

SEQ ID NO: 1641283 - DNA, 15 bp, Homo sapiens
tggtccaagcttcca

SEQ ID NO: 1641284 - DNA, 15 bp, Homo sapiens
ggtccaagcttccaa

SEQ ID NO: 1641285 - DNA, 15 bp, Homo sapiens
gtccaagcttccaag

SEQ ID NO: 1641286 - DNA, 15 bp, Homo sapiens
tccaagcttccaagc

SEQ ID NO: 1641287 - DNA, 15 bp, Homo sapiens
ccaagcttccaagct

SEQ ID NO: 1641288 - DNA, 15 bp, Homo sapiens
caagcttccaagctg

SEQ ID NO: 1641289 - DNA, 15 bp, Homo sapiens
aagcttccaagctgg

SEQ ID NO: 1641290 - DNA, 15 bp, Homo sapiens
agcttccaagctggg

SEQ ID NO: 1641291 - DNA, 15 bp, Homo sapiens
gcttccaagctggga

SEQ ID NO: 1641292 - DNA, 15 bp, Homo sapiens
cttccaagctgggat

SEQ ID NO: 1641293 - DNA, 15 bp, Homo sapiens
ttccaagctgggatc

SEQ ID NO: 1641294 - DNA, 15 bp, Homo sapiens
tccaagctgggatcc

SEQ ID NO: 1641295 - DNA, 15 bp, Homo sapiens
ccaagctgggatcca

SEQ ID NO: 1641296 - DNA, 15 bp, Homo sapiens
caagctgggatccat

SEQ ID NO: 1641297 - DNA, 15 bp, Homo sapiens
aagctgggatccatg

SEQ ID NO: 1641298 - DNA, 15 bp, Homo sapiens
agctgggatccatgg

SEQ ID NO: 1641299 - DNA, 15 bp, Homo sapiens
gctgggatccatggc

SEQ ID NO: 1641300 - DNA, 15 bp, Homo sapiens
ctgggatccatggct

SEQ ID NO: 1641301 - DNA, 15 bp, Homo sapiens
tgggatccatggcta

SEQ ID NO: 1641302 - DNA, 15 bp, Homo sapiens
gggatccatggctaa

SEQ ID NO: 1641303 - DNA, 15 bp, Homo sapiens
ggatccatggctaaa

SEQ ID NO: 1641304 - DNA, 15 bp, Homo sapiens
gatccatggctaaag

SEQ ID NO: 1641305 - DNA, 15 bp, Homo sapiens
atccatggctaaagt

SEQ ID NO: 1641306 - DNA, 15 bp, Homo sapiens
tccatggctaaagtt

SEQ ID NO: 1641307 - DNA, 15 bp, Homo sapiens
ccatggctaaagttt

SEQ ID NO: 1641308 - DNA, 15 bp, Homo sapiens
catggctaaagtttc

SEQ ID NO: 1641309 - DNA, 15 bp, Homo sapiens
atggctaaagtttct

SEQ ID NO: 1641310 - DNA, 15 bp, Homo sapiens
tggctaaagtttcta

SEQ ID NO: 1641311 - DNA, 15 bp, Homo sapiens
ggctaaagtttctac

SEQ ID NO: 1641312 - DNA, 15 bp, Homo sapiens
gctaaagtttctaca

SEQ ID NO: 1641313 - DNA, 15 bp, Homo sapiens
ctaaagtttctacaa

SEQ ID NO: 1641314 - DNA, 15 bp, Homo sapiens
taaagtttctacaaa

SEQ ID NO: 1641315 - DNA, 15 bp, Homo sapiens
aaagtttctacaaaa

SEQ ID NO: 1641316 - DNA, 15 bp, Homo sapiens
aagtttctacaaaat

SEQ ID NO: 1641317 - DNA, 15 bp, Homo sapiens
agtttctacaaaatt

SEQ ID NO: 1641318 - DNA, 15 bp, Homo sapiens
gtttctacaaaattc

SEQ ID NO: 1641319 - DNA, 15 bp, Homo sapiens
tttctacaaaattct

SEQ ID NO: 1641320 - DNA, 15 bp, Homo sapiens
ttctacaaaattctg

SEQ ID NO: 1641321 - DNA, 15 bp, Homo sapiens
tctacaaaattctgg

SEQ ID NO: 1641322 - DNA, 15 bp, Homo sapiens
ctacaaaattctggg

SEQ ID NO: 1641323 - DNA, 15 bp, Homo sapiens
tacaaaattctgggt

SEQ ID NO: 1641324 - DNA, 15 bp, Homo sapiens
acaaaattctgggta

SEQ ID NO: 1641325 - DNA, 15 bp, Homo sapiens
caaaattctgggtac

SEQ ID NO: 1641326 - DNA, 15 bp, Homo sapiens
aaaattctgggtaca

SEQ ID NO: 1641327 - DNA, 15 bp, Homo sapiens
aaattctgggtacaa

SEQ ID NO: 1641328 - DNA, 15 bp, Homo sapiens
aattctgggtacaat

SEQ ID NO: 1641329 - DNA, 15 bp, Homo sapiens
attctgggtacaatg

SEQ ID NO: 1641330 - DNA, 15 bp, Homo sapiens
ttctgggtacaatgt

SEQ ID NO: 1641331 - DNA, 15 bp, Homo sapiens
tctgggtacaatgta

SEQ ID NO: 1641332 - DNA, 15 bp, Homo sapiens
ctgggtacaatgtat

SEQ ID NO: 1641333 - DNA, 15 bp, Homo sapiens
tgggtacaatgtata

SEQ ID NO: 1641334 - DNA, 15 bp, Homo sapiens
gggtacaatgtataa

SEQ ID NO: 1641335 - DNA, 15 bp, Homo sapiens
ggtacaatgtataaa

SEQ ID NO: 1641336 - DNA, 15 bp, Homo sapiens
gtacaatgtataaac

SEQ ID NO: 1641337 - DNA, 15 bp, Homo sapiens
tacaatgtataaaca

SEQ ID NO: 1641338 - DNA, 15 bp, Homo sapiens
acaatgtataaacat

SEQ ID NO: 1641339 - DNA, 15 bp, Homo sapiens
caatgtataaacatt

SEQ ID NO: 1641340 - DNA, 15 bp, Homo sapiens
aatgtataaacattc

SEQ ID NO: 1641341 - DNA, 15 bp, Homo sapiens
atgtataaacattca

SEQ ID NO: 1641342 - DNA, 15 bp, Homo sapiens
tgtataaacattcac

SEQ ID NO: 1641343 - DNA, 15 bp, Homo sapiens
gtataaacattcact

SEQ ID NO: 1641344 - DNA, 15 bp, Homo sapiens
tataaacattcactt

SEQ ID NO: 1641345 - DNA, 15 bp, Homo sapiens
ataaacattcacttg

SEQ ID NO: 1641346 - DNA, 15 bp, Homo sapiens
taaacattcacttgg

SEQ ID NO: 1641347 - DNA, 15 bp, Homo sapiens
aaacattcacttggg

SEQ ID NO: 1641348 - DNA, 15 bp, Homo sapiens
aacattcacttgggg

SEQ ID NO: 1641349 - DNA, 15 bp, Homo sapiens
acattcacttggggc

SEQ ID NO: 1641350 - DNA, 15 bp, Homo sapiens
cattcacttggggct

SEQ ID NO: 1641351 - DNA, 15 bp, Homo sapiens
attcacttggggctt

SEQ ID NO: 1641352 - DNA, 15 bp, Homo sapiens
ttcacttggggcttt

SEQ ID NO: 1641353 - DNA, 15 bp, Homo sapiens
tcacttggggctttc

SEQ ID NO: 1641354 - DNA, 15 bp, Homo sapiens
cacttggggctttct

SEQ ID NO: 1641355 - DNA, 15 bp, Homo sapiens
acttggggctttctg

SEQ ID NO: 1641356 - DNA, 15 bp, Homo sapiens
cttggggctttctgt

SEQ ID NO: 1641357 - DNA, 15 bp, Homo sapiens
ttggggctttctgtc

SEQ ID NO: 1641358 - DNA, 15 bp, Homo sapiens
tggggctttctgtct

SEQ ID NO: 1641359 - DNA, 15 bp, Homo sapiens
ggggctttctgtcta

SEQ ID NO: 1641360 - DNA, 15 bp, Homo sapiens
gggctttctgtctag

SEQ ID NO: 1641361 - DNA, 15 bp, Homo sapiens
ggctttctgtctagc

SEQ ID NO: 1641362 - DNA, 15 bp, Homo sapiens
gctttctgtctagcc

SEQ ID NO: 1641363 - DNA, 15 bp, Homo sapiens
ctttctgtctagcca

SEQ ID NO: 1641364 - DNA, 15 bp, Homo sapiens
tttctgtctagccag

SEQ ID NO: 1641365 - DNA, 15 bp, Homo sapiens
ttctgtctagccagc

SEQ ID NO: 1641366 - DNA, 15 bp, Homo sapiens
tctgtctagccagca

SEQ ID NO: 1641367 - DNA, 15 bp, Homo sapiens
ctgtctagccagcac

SEQ ID NO: 1641368 - DNA, 15 bp, Homo sapiens
tgtctagccagcacc

SEQ ID NO: 1641369 - DNA, 15 bp, Homo sapiens
gtctagccagcacca

SEQ ID NO: 1641370 - DNA, 15 bp, Homo sapiens
tctagccagcaccaa

SEQ ID NO: 1641371 - DNA, 15 bp, Homo sapiens
ctagccagcaccaag

SEQ ID NO: 1641372 - DNA, 15 bp, Homo sapiens
tagccagcaccaaga

SEQ ID NO: 1641373 - DNA, 15 bp, Homo sapiens
agccagcaccaagag

SEQ ID NO: 1641374 - DNA, 15 bp, Homo sapiens
gccagcaccaagagg

SEQ ID NO: 1641375 - DNA, 15 bp, Homo sapiens
ccagcaccaagaggt

SEQ ID NO: 1641376 - DNA, 15 bp, Homo sapiens
cagcaccaagaggtc

SEQ ID NO: 1641377 - DNA, 15 bp, Homo sapiens
agcaccaagaggtca

SEQ ID NO: 1641378 - DNA, 15 bp, Homo sapiens
gcaccaagaggtcaa

SEQ ID NO: 1641379 - DNA, 15 bp, Homo sapiens
accaagaggtcaagt

SEQ ID NO: 1641380 - DNA, 15 bp, Homo sapiens
ccaagaggtcaagta

SEQ ID NO: 1641381 - DNA, 15 bp, Homo sapiens
caagaggtcaagtaa

SEQ ID NO: 1641382 - DNA, 15 bp, Homo sapiens
aagaggtcaagtaat

SEQ ID NO: 1641383 - DNA, 15 bp, Homo sapiens
agaggtcaagtaatc

SEQ ID NO: 1641384 - DNA, 15 bp, Homo sapiens
gaggtcaagtaatca

SEQ ID NO: 1641385 - DNA, 15 bp, Homo sapiens
aggtcaagtaatcaa

SEQ ID NO: 1641386 - DNA, 15 bp, Homo sapiens
ggtcaagtaatcaag

SEQ ID NO: 1641387 - DNA, 15 bp, Homo sapiens
gtcaagtaatcaagg

SEQ ID NO: 1641388 - DNA, 15 bp, Homo sapiens
tcaagtaatcaagga

SEQ ID NO: 1641389 - DNA, 15 bp, Homo sapiens
caagtaatcaaggac

SEQ ID NO: 1641390 - DNA, 15 bp, Homo sapiens
aagtaatcaaggacc

SEQ ID NO: 1641391 - DNA, 15 bp, Homo sapiens
agtaatcaaggacca

SEQ ID NO: 1641392 - DNA, 15 bp, Homo sapiens
gtaatcaaggaccaa

SEQ ID NO: 1641393 - DNA, 15 bp, Homo sapiens
taatcaaggaccaac

SEQ ID NO: 1641394 - DNA, 15 bp, Homo sapiens
aatcaaggaccaact

SEQ ID NO: 1641395 - DNA, 15 bp, Homo sapiens
atcaaggaccaacta

SEQ ID NO: 1641396 - DNA, 15 bp, Homo sapiens
tcaaggaccaactag

SEQ ID NO: 1641397 - DNA, 15 bp, Homo sapiens
caaggaccaactagc

SEQ ID NO: 1641398 - DNA, 15 bp, Homo sapiens
aaggaccaactagcc

SEQ ID NO: 1641399 - DNA, 15 bp, Homo sapiens
aggaccaactagccc

SEQ ID NO: 1641400 - DNA, 15 bp, Homo sapiens
ggaccaactagccct

SEQ ID NO: 1641401 - DNA, 15 bp, Homo sapiens
gaccaactagccctg

SEQ ID NO: 1641402 - DNA, 15 bp, Homo sapiens
accaactagccctgc

SEQ ID NO: 1641403 - DNA, 15 bp, Homo sapiens
ccaactagccctgcc

SEQ ID NO: 1641404 - DNA, 15 bp, Homo sapiens
caactagccctgcca

SEQ ID NO: 1641405 - DNA, 15 bp, Homo sapiens
aactagccctgccat

SEQ ID NO: 1641406 - DNA, 15 bp, Homo sapiens
actagccctgccatc

SEQ ID NO: 1641407 - DNA, 15 bp, Homo sapiens
ctagccctgccatct

SEQ ID NO: 1641408 - DNA, 15 bp, Homo sapiens
tagccctgccatctg

SEQ ID NO: 1641409 - DNA, 15 bp, Homo sapiens
agccctgccatctgt

SEQ ID NO: 1641410 - DNA, 15 bp, Homo sapiens
gccctgccatctgtg

SEQ ID NO: 1641411 - DNA, 15 bp, Homo sapiens
ccctgccatctgtga

SEQ ID NO: 1641412 - DNA, 15 bp, Homo sapiens
cctgccatctgtgaa

SEQ ID NO: 1641413 - DNA, 15 bp, Homo sapiens
ctgccatctgtgaaa

SEQ ID NO: 1641414 - DNA, 15 bp, Homo sapiens
tgccatctgtgaaaa

SEQ ID NO: 1641415 - DNA, 15 bp, Homo sapiens
gccatctgtgaaaat

SEQ ID NO: 1641416 - DNA, 15 bp, Homo sapiens
ccatctgtgaaaata

SEQ ID NO: 1641417 - DNA, 15 bp, Homo sapiens
catctgtgaaaatat

SEQ ID NO: 1641418 - DNA, 15 bp, Homo sapiens
atctgtgaaaatatg

SEQ ID NO: 1641419 - DNA, 15 bp, Homo sapiens
tctgtgaaaatatgt

SEQ ID NO: 1641420 - DNA, 15 bp, Homo sapiens
ctgtgaaaatatgtg

SEQ ID NO: 1641421 - DNA, 15 bp, Homo sapiens
tgtgaaaatatgtgc

SEQ ID NO: 1641422 - DNA, 15 bp, Homo sapiens
gtgaaaatatgtgct

SEQ ID NO: 1641423 - DNA, 15 bp, Homo sapiens
tgaaaatatgtgcta

SEQ ID NO: 1641424 - DNA, 15 bp, Homo sapiens
gaaaatatgtgctat

SEQ ID NO: 1641425 - DNA, 15 bp, Homo sapiens
aaaatatgtgctatt

SEQ ID NO: 1641426 - DNA, 15 bp, Homo sapiens
aaatatgtgctattt

SEQ ID NO: 1641427 - DNA, 15 bp, Homo sapiens
aatatgtgctatttt

SEQ ID NO: 1641428 - DNA, 15 bp, Homo sapiens
atatgtgctattttc

SEQ ID NO: 1641429 - DNA, 15 bp, Homo sapiens
tatgtgctattttca

SEQ ID NO: 1641430 - DNA, 15 bp, Homo sapiens
atgtgctattttcac

SEQ ID NO: 1641431 - DNA, 15 bp, Homo sapiens
tgtgctattttcacg

SEQ ID NO: 1641432 - DNA, 15 bp, Homo sapiens
gtgctattttcacgg

SEQ ID NO: 1641433 - DNA, 15 bp, Homo sapiens
tgctattttcacggc

SEQ ID NO: 1641434 - DNA, 15 bp, Homo sapiens
gctattttcacggct

SEQ ID NO: 1641435 - DNA, 15 bp, Homo sapiens
ctattttcacggctt

SEQ ID NO: 1641436 - DNA, 15 bp, Homo sapiens
tattttcacggcttt

SEQ ID NO: 1641437 - DNA, 15 bp, Homo sapiens
attttcacggcttta

SEQ ID NO: 1641438 - DNA, 15 bp, Homo sapiens
ttttcacggctttag

SEQ ID NO: 1641439 - DNA, 15 bp, Homo sapiens
tttcacggctttagt

SEQ ID NO: 1641440 - DNA, 15 bp, Homo sapiens
ttcacggctttagtt

SEQ ID NO: 1641441 - DNA, 15 bp, Homo sapiens
tcacggctttagttc

SEQ ID NO: 1641442 - DNA, 15 bp, Homo sapiens
cacggctttagttca

SEQ ID NO: 1641443 - DNA, 15 bp, Homo sapiens
acggctttagttcac

SEQ ID NO: 1641444 - DNA, 15 bp, Homo sapiens
cggctttagttcaca

SEQ ID NO: 1641445 - DNA, 15 bp, Homo sapiens
ggctttagttcacaa

SEQ ID NO: 1641446 - DNA, 15 bp, Homo sapiens
gctttagttcacaat

SEQ ID NO: 1641447 - DNA, 15 bp, Homo sapiens
ctttagttcacaatt

SEQ ID NO: 1641448 - DNA, 15 bp, Homo sapiens
tttagttcacaatta

SEQ ID NO: 1641449 - DNA, 15 bp, Homo sapiens
ttagttcacaattat

SEQ ID NO: 1641450 - DNA, 15 bp, Homo sapiens
tagttcacaattatg

SEQ ID NO: 1641451 - DNA, 15 bp, Homo sapiens
agttcacaattatgg

SEQ ID NO: 1641452 - DNA, 15 bp, Homo sapiens
gttcacaattatggc

SEQ ID NO: 1641453 - DNA, 15 bp, Homo sapiens
ttcacaattatggca

SEQ ID NO: 1641454 - DNA, 15 bp, Homo sapiens
tcacaattatggcaa

SEQ ID NO: 1641455 - DNA, 15 bp, Homo sapiens
cacaattatggcaag

SEQ ID NO: 1641456 - DNA, 15 bp, Homo sapiens
acaattatggcaaga

SEQ ID NO: 1641457 - DNA, 15 bp, Homo sapiens
caattatggcaagac

SEQ ID NO: 1641458 - DNA, 15 bp, Homo sapiens
aattatggcaagaca

SEQ ID NO: 1641459 - DNA, 15 bp, Homo sapiens
attatggcaagacaa

SEQ ID NO: 1641460 - DNA, 15 bp, Homo sapiens
ttatggcaagacaaa

SEQ ID NO: 1641461 - DNA, 15 bp, Homo sapiens
tatggcaagacaaaa

SEQ ID NO: 1641462 - DNA, 15 bp, Homo sapiens
atggcaagacaaaag

SEQ ID NO: 1641463 - DNA, 15 bp, Homo sapiens
tggcaagacaaaagt

SEQ ID NO: 1641464 - DNA, 15 bp, Homo sapiens
ggcaagacaaaagtt

SEQ ID NO: 1641465 - DNA, 15 bp, Homo sapiens
gcaagacaaaagttc

SEQ ID NO: 1641466 - DNA, 15 bp, Homo sapiens
caagacaaaagttcc

SEQ ID NO: 1641467 - DNA, 15 bp, Homo sapiens
aagacaaaagttcca

SEQ ID NO: 1641468 - DNA, 15 bp, Homo sapiens
agacaaaagttccaa

SEQ ID NO: 1641469 - DNA, 15 bp, Homo sapiens
gacaaaagttccaaa

SEQ ID NO: 1641470 - DNA, 15 bp, Homo sapiens
acaaaagttccaaat

SEQ ID NO: 1641471 - DNA, 15 bp, Homo sapiens
caaaagttccaaata

SEQ ID NO: 1641472 - DNA, 15 bp, Homo sapiens
aaaagttccaaataa

SEQ ID NO: 1641473 - DNA, 15 bp, Homo sapiens
aaagttccaaataat

SEQ ID NO: 1641474 - DNA, 15 bp, Homo sapiens
aagttccaaataatt

SEQ ID NO: 1641475 - DNA, 15 bp, Homo sapiens
agttccaaataatta

SEQ ID NO: 1641476 - DNA, 15 bp, Homo sapiens
gttccaaataattag

SEQ ID NO: 1641477 - DNA, 15 bp, Homo sapiens
ttccaaataattagg

SEQ ID NO: 1641478 - DNA, 15 bp, Homo sapiens
tccaaataattagga

SEQ ID NO: 1641479 - DNA, 15 bp, Homo sapiens
ccaaataattaggag

SEQ ID NO: 1641480 - DNA, 15 bp, Homo sapiens
caaataattaggagc

SEQ ID NO: 1641481 - DNA, 15 bp, Homo sapiens
aaataattaggagca

SEQ ID NO: 1641482 - DNA, 15 bp, Homo sapiens
aataattaggagcaa

SEQ ID NO: 1641483 - DNA, 15 bp, Homo sapiens
ataattaggagcaag

SEQ ID NO: 1641484 - DNA, 15 bp, Homo sapiens
taattaggagcaaga

SEQ ID NO: 1641485 - DNA, 15 bp, Homo sapiens
aattaggagcaagac

SEQ ID NO: 1641486 - DNA, 15 bp, Homo sapiens
attaggagcaagacc

SEQ ID NO: 1641487 - DNA, 15 bp, Homo sapiens
ttaggagcaagacca

SEQ ID NO: 1641488 - DNA, 15 bp, Homo sapiens
taggagcaagaccat

SEQ ID NO: 1641489 - DNA, 15 bp, Homo sapiens
aggagcaagaccatg

SEQ ID NO: 1641490 - DNA, 15 bp, Homo sapiens
ggagcaagaccatgg

SEQ ID NO: 1641491 - DNA, 15 bp, Homo sapiens
gagcaagaccatggc

SEQ ID NO: 1641492 - DNA, 15 bp, Homo sapiens
agcaagaccatggca

SEQ ID NO: 1641493 - DNA, 15 bp, Homo sapiens
gcaagaccatggcag

SEQ ID NO: 1641494 - DNA, 15 bp, Homo sapiens
caagaccatggcagg

SEQ ID NO: 1641495 - DNA, 15 bp, Homo sapiens
aagaccatggcaggt

SEQ ID NO: 1641496 - DNA, 15 bp, Homo sapiens
agaccatggcaggtt

SEQ ID NO: 1641497 - DNA, 15 bp, Homo sapiens
gaccatggcaggttg

SEQ ID NO: 1641498 - DNA, 15 bp, Homo sapiens
accatggcaggttga

SEQ ID NO: 1641499 - DNA, 15 bp, Homo sapiens
ccatggcaggttgac

SEQ ID NO: 1641500 - DNA, 15 bp, Homo sapiens
catggcaggttgacg

SEQ ID NO: 1641501 - DNA, 15 bp, Homo sapiens
atggcaggttgacgg

SEQ ID NO: 1641502 - DNA, 15 bp, Homo sapiens
tggcaggttgacggt

SEQ ID NO: 1641503 - DNA, 15 bp, Homo sapiens
ggcaggttgacggtt

SEQ ID NO: 1641504 - DNA, 15 bp, Homo sapiens
gcaggttgacggttg

SEQ ID NO: 1641505 - DNA, 15 bp, Homo sapiens
caggttgacggttga

SEQ ID NO: 1641506 - DNA, 15 bp, Homo sapiens
aggttgacggttgag

SEQ ID NO: 1641507 - DNA, 15 bp, Homo sapiens
ggttgacggttgagt

SEQ ID NO: 1641508 - DNA, 15 bp, Homo sapiens
gttgacggttgagta

SEQ ID NO: 1641509 - DNA, 15 bp, Homo sapiens
ttgacggttgagtaa

SEQ ID NO: 1641510 - DNA, 15 bp, Homo sapiens
tgacggttgagtaag

SEQ ID NO: 1641511 - DNA, 15 bp, Homo sapiens
gacggttgagtaagg

SEQ ID NO: 1641512 - DNA, 15 bp, Homo sapiens
acggttgagtaaggt

SEQ ID NO: 1641513 - DNA, 15 bp, Homo sapiens
cggttgagtaaggtt

SEQ ID NO: 1641514 - DNA, 15 bp, Homo sapiens
ggttgagtaaggttc

SEQ ID NO: 1641515 - DNA, 15 bp, Homo sapiens
gttgagtaaggttct

SEQ ID NO: 1641516 - DNA, 15 bp, Homo sapiens
ttgagtaaggttctc

SEQ ID NO: 1641517 - DNA, 15 bp, Homo sapiens
tgagtaaggttctca

SEQ ID NO: 1641518 - DNA, 15 bp, Homo sapiens
gagtaaggttctcaa

SEQ ID NO: 1641519 - DNA, 15 bp, Homo sapiens
agtaaggttctcaat

SEQ ID NO: 1641520 - DNA, 15 bp, Homo sapiens
gtaaggttctcaatc

SEQ ID NO: 1641521 - DNA, 15 bp, Homo sapiens
taaggttctcaatca

SEQ ID NO: 1641522 - DNA, 15 bp, Homo sapiens
aaggttctcaatcag

SEQ ID NO: 1641523 - DNA, 15 bp, Homo sapiens
aggttctcaatcagc

SEQ ID NO: 1641524 - DNA, 15 bp, Homo sapiens
ggttctcaatcagcc

SEQ ID NO: 1641525 - DNA, 15 bp, Homo sapiens
gttctcaatcagccg

SEQ ID NO: 1641526 - DNA, 15 bp, Homo sapiens
ttctcaatcagccga

SEQ ID NO: 1641527 - DNA, 15 bp, Homo sapiens
tctcaatcagccgac

SEQ ID NO: 1641528 - DNA, 15 bp, Homo sapiens
ctcaatcagccgaca

SEQ ID NO: 1641529 - DNA, 15 bp, Homo sapiens
tcaatcagccgacaa

SEQ ID NO: 1641530 - DNA, 15 bp, Homo sapiens
caatcagccgacaat

SEQ ID NO: 1641531 - DNA, 15 bp, Homo sapiens
aatcagccgacaatt

SEQ ID NO: 1641532 - DNA, 15 bp, Homo sapiens
atcagccgacaattg

SEQ ID NO: 1641533 - DNA, 15 bp, Homo sapiens
tcagccgacaattgt

SEQ ID NO: 1641534 - DNA, 15 bp, Homo sapiens
cagccgacaattgta

SEQ ID NO: 1641535 - DNA, 15 bp, Homo sapiens
agccgacaattgtag

SEQ ID NO: 1641536 - DNA, 15 bp, Homo sapiens
gccgacaattgtaga

SEQ ID NO: 1641537 - DNA, 15 bp, Homo sapiens
ccgacaattgtagag

SEQ ID NO: 1641538 - DNA, 15 bp, Homo sapiens
cgacaattgtagagt

SEQ ID NO: 1641539 - DNA, 15 bp, Homo sapiens
gacaattgtagagtt

SEQ ID NO: 1641540 - DNA, 15 bp, Homo sapiens
acaattgtagagttg

SEQ ID NO: 1641541 - DNA, 15 bp, Homo sapiens
caattgtagagttgg

SEQ ID NO: 1641542 - DNA, 15 bp, Homo sapiens
aattgtagagttggg

SEQ ID NO: 1641543 - DNA, 15 bp, Homo sapiens
attgtagagttgggg

SEQ ID NO: 1641544 - DNA, 15 bp, Homo sapiens
ttgtagagttgggga

SEQ ID NO: 1641545 - DNA, 15 bp, Homo sapiens
tgtagagttggggat

SEQ ID NO: 1641546 - DNA, 15 bp, Homo sapiens
gtagagttggggatg

SEQ ID NO: 1641547 - DNA, 15 bp, Homo sapiens
tagagttggggatgt

SEQ ID NO: 1641548 - DNA, 15 bp, Homo sapiens
agagttggggatgtg

SEQ ID NO: 1641549 - DNA, 15 bp, Homo sapiens
gagttggggatgtgc

SEQ ID NO: 1641550 - DNA, 15 bp, Homo sapiens
agttggggatgtgca

SEQ ID NO: 1641551 - DNA, 15 bp, Homo sapiens
gttggggatgtgcaa

SEQ ID NO: 1641552 - DNA, 15 bp, Homo sapiens
ttggggatgtgcaat

SEQ ID NO: 1641553 - DNA, 15 bp, Homo sapiens
tggggatgtgcaatg

SEQ ID NO: 1641554 - DNA, 15 bp, Homo sapiens
ggggatgtgcaatgt

SEQ ID NO: 1641555 - DNA, 15 bp, Homo sapiens
gggatgtgcaatgtt

SEQ ID NO: 1641556 - DNA, 15 bp, Homo sapiens
ggatgtgcaatgttt

SEQ ID NO: 1641557 - DNA, 15 bp, Homo sapiens
gatgtgcaatgttta

SEQ ID NO: 1641558 - DNA, 15 bp, Homo sapiens
atgtgcaatgtttat

SEQ ID NO: 1641559 - DNA, 15 bp, Homo sapiens
tgtgcaatgtttatg

SEQ ID NO: 1641560 - DNA, 15 bp, Homo sapiens
gtgcaatgtttatgt

SEQ ID NO: 1641561 - DNA, 15 bp, Homo sapiens
tgcaatgtttatgtc

SEQ ID NO: 1641562 - DNA, 15 bp, Homo sapiens
gcaatgtttatgtca

SEQ ID NO: 1641563 - DNA, 15 bp, Homo sapiens
caatgtttatgtcat

SEQ ID NO: 1641564 - DNA, 15 bp, Homo sapiens
aatgtttatgtcatg

SEQ ID NO: 1641565 - DNA, 15 bp, Homo sapiens
atgtttatgtcatgg

SEQ ID NO: 1641566 - DNA, 15 bp, Homo sapiens
tgtttatgtcatggt

SEQ ID NO: 1641567 - DNA, 15 bp, Homo sapiens
gtttatgtcatggtg

SEQ ID NO: 1641568 - DNA, 15 bp, Homo sapiens
tttatgtcatggtgt

SEQ ID NO: 1641569 - DNA, 15 bp, Homo sapiens
ttatgtcatggtgta

SEQ ID NO: 1641570 - DNA, 15 bp, Homo sapiens
tatgtcatggtgtaa

SEQ ID NO: 1641571 - DNA, 15 bp, Homo sapiens
atgtcatggtgtaag

SEQ ID NO: 1641572 - DNA, 15 bp, Homo sapiens
tgtcatggtgtaagt

SEQ ID NO: 1641573 - DNA, 15 bp, Homo sapiens
gtcatggtgtaagta

SEQ ID NO: 1641574 - DNA, 15 bp, Homo sapiens
tcatggtgtaagtat

SEQ ID NO: 1641575 - DNA, 15 bp, Homo sapiens
catggtgtaagtatg

SEQ ID NO: 1641576 - DNA, 15 bp, Homo sapiens
atggtgtaagtatgt

SEQ ID NO: 1641577 - DNA, 15 bp, Homo sapiens
tggtgtaagtatgtg

SEQ ID NO: 1641578 - DNA, 15 bp, Homo sapiens
ggtgtaagtatgtgg

SEQ ID NO: 1641579 - DNA, 15 bp, Homo sapiens
gtgtaagtatgtggc

SEQ ID NO: 1641580 - DNA, 15 bp, Homo sapiens
tgtaagtatgtggca

SEQ ID NO: 1641581 - DNA, 15 bp, Homo sapiens
gtaagtatgtggcat

SEQ ID NO: 1641582 - DNA, 15 bp, Homo sapiens
taagtatgtggcatg

SEQ ID NO: 1641583 - DNA, 15 bp, Homo sapiens
aagtatgtggcatgc

SEQ ID NO: 1641584 - DNA, 15 bp, Homo sapiens
agtatgtggcatgct

SEQ ID NO: 1641585 - DNA, 15 bp, Homo sapiens
gtatgtggcatgctt

SEQ ID NO: 1641586 - DNA, 15 bp, Homo sapiens
tatgtggcatgcttg

SEQ ID NO: 1641587 - DNA, 15 bp, Homo sapiens
atgtggcatgcttga

SEQ ID NO: 1641588 - DNA, 15 bp, Homo sapiens
tgtggcatgcttgac

SEQ ID NO: 1641589 - DNA, 15 bp, Homo sapiens
gtggcatgcttgact

SEQ ID NO: 1641590 - DNA, 15 bp, Homo sapiens
tggcatgcttgacta

SEQ ID NO: 1641591 - DNA, 15 bp, Homo sapiens
ggcatgcttgactag

SEQ ID NO: 1641592 - DNA, 15 bp, Homo sapiens
gcatgcttgactagc

SEQ ID NO: 1641593 - DNA, 15 bp, Homo sapiens
catgcttgactagct

SEQ ID NO: 1641594 - DNA, 15 bp, Homo sapiens
atgcttgactagctt

SEQ ID NO: 1641595 - DNA, 15 bp, Homo sapiens
tgcttgactagcttg

SEQ ID NO: 1641596 - DNA, 15 bp, Homo sapiens
gcttgactagcttgt

SEQ ID NO: 1641597 - DNA, 15 bp, Homo sapiens
cttgactagcttgtg

SEQ ID NO: 1641598 - DNA, 15 bp, Homo sapiens
ttgactagcttgtga

SEQ ID NO: 1641599 - DNA, 15 bp, Homo sapiens
tgactagcttgtgag

SEQ ID NO: 1641600 - DNA, 15 bp, Homo sapiens
gactagcttgtgagg

SEQ ID NO: 1641601 - DNA, 15 bp, Homo sapiens
actagcttgtgaggc

SEQ ID NO: 1641602 - DNA, 15 bp, Homo sapiens
ctagcttgtgaggca

SEQ ID NO: 1641603 - DNA, 15 bp, Homo sapiens
tagcttgtgaggcac

SEQ ID NO: 1641604 - DNA, 15 bp, Homo sapiens
agcttgtgaggcact

SEQ ID NO: 1641605 - DNA, 15 bp, Homo sapiens
gcttgtgaggcactg

SEQ ID NO: 1641606 - DNA, 15 bp, Homo sapiens
cttgtgaggcactgg

SEQ ID NO: 1641607 - DNA, 15 bp, Homo sapiens
ttgtgaggcactgga

SEQ ID NO: 1641608 - DNA, 15 bp, Homo sapiens
tgtgaggcactggaa

SEQ ID NO: 1641609 - DNA, 15 bp, Homo sapiens
gtgaggcactggaag

SEQ ID NO: 1641610 - DNA, 15 bp, Homo sapiens
tgaggcactggaaga

SEQ ID NO: 1641611 - DNA, 15 bp, Homo sapiens
gaggcactggaagac

SEQ ID NO: 1641612 - DNA, 15 bp, Homo sapiens
aggcactggaagact

SEQ ID NO: 1641613 - DNA, 15 bp, Homo sapiens
ggcactggaagacta

SEQ ID NO: 1641614 - DNA, 15 bp, Homo sapiens
gcactggaagactag

SEQ ID NO: 1641615 - DNA, 15 bp, Homo sapiens
cactggaagactaga

SEQ ID NO: 1641616 - DNA, 15 bp, Homo sapiens
actggaagactagaa

SEQ ID NO: 1641617 - DNA, 15 bp, Homo sapiens
ctggaagactagaag

SEQ ID NO: 1641618 - DNA, 15 bp, Homo sapiens
tggaagactagaagg

SEQ ID NO: 1641619 - DNA, 15 bp, Homo sapiens
ggaagactagaagga

SEQ ID NO: 1641620 - DNA, 15 bp, Homo sapiens
gaagactagaaggaa

SEQ ID NO: 1641621 - DNA, 15 bp, Homo sapiens
aagactagaaggaat

SEQ ID NO: 1641622 - DNA, 15 bp, Homo sapiens
agactagaaggaatg

SEQ ID NO: 1641623 - DNA, 15 bp, Homo sapiens
gactagaaggaatga

SEQ ID NO: 1641624 - DNA, 15 bp, Homo sapiens
actagaaggaatgaa

SEQ ID NO: 1641625 - DNA, 15 bp, Homo sapiens
ctagaaggaatgaaa

SEQ ID NO: 1641626 - DNA, 15 bp, Homo sapiens
tagaaggaatgaaaa

SEQ ID NO: 1641627 - DNA, 15 bp, Homo sapiens
agaaggaatgaaaaa

SEQ ID NO: 1641628 - DNA, 15 bp, Homo sapiens
gaaggaatgaaaaat

SEQ ID NO: 1641629 - DNA, 15 bp, Homo sapiens
aaggaatgaaaaata

SEQ ID NO: 1641630 - DNA, 15 bp, Homo sapiens
aggaatgaaaaatat

SEQ ID NO: 1641631 - DNA, 15 bp, Homo sapiens
ggaatgaaaaatatg

SEQ ID NO: 1641632 - DNA, 15 bp, Homo sapiens
gaatgaaaaatatga

SEQ ID NO: 1641633 - DNA, 15 bp, Homo sapiens
atgaaaaatatgaat

SEQ ID NO: 1641634 - DNA, 15 bp, Homo sapiens
tgaaaaatatgaatg

SEQ ID NO: 1641635 - DNA, 15 bp, Homo sapiens
gaaaaatatgaatga

SEQ ID NO: 1641636 - DNA, 15 bp, Homo sapiens
aaaaatatgaatgaa

SEQ ID NO: 1641637 - DNA, 15 bp, Homo sapiens
aaaatatgaatgaat

SEQ ID NO: 1641638 - DNA, 15 bp, Homo sapiens
aaatatgaatgaatc

SEQ ID NO: 1641639 - DNA, 15 bp, Homo sapiens
aatatgaatgaatca

SEQ ID NO: 1641640 - DNA, 15 bp, Homo sapiens
atatgaatgaatcaa

SEQ ID NO: 1641641 - DNA, 15 bp, Homo sapiens
tatgaatgaatcaat

SEQ ID NO: 1641642 - DNA, 15 bp, Homo sapiens
atgaatgaatcaata

SEQ ID NO: 1641643 - DNA, 15 bp, Homo sapiens
tgaatgaatcaataa

SEQ ID NO: 1641644 - DNA, 15 bp, Homo sapiens
gaatgaatcaataaa

SEQ ID NO: 1641645 - DNA, 15 bp, Homo sapiens
aatgaatcaataaat

SEQ ID NO: 1641646 - DNA, 15 bp, Homo sapiens
atgaatcaataaatg

SEQ ID NO: 1641647 - DNA, 15 bp, Homo sapiens
tgaatcaataaatgc

SEQ ID NO: 1641648 - DNA, 15 bp, Homo sapiens
gaatcaataaatgca

SEQ ID NO: 1641649 - DNA, 15 bp, Homo sapiens
aatcaataaatgcat

SEQ ID NO: 1641650 - DNA, 15 bp, Homo sapiens
atcaataaatgcata

SEQ ID NO: 1641651 - DNA, 15 bp, Homo sapiens
tcaataaatgcatag

SEQ ID NO: 1641652 - DNA, 15 bp, Homo sapiens
caataaatgcatagt

SEQ ID NO: 1641653 - DNA, 15 bp, Homo sapiens
aataaatgcatagta

SEQ ID NO: 1641654 - DNA, 15 bp, Homo sapiens
ataaatgcatagtat

SEQ ID NO: 1641655 - DNA, 15 bp, Homo sapiens
taaatgcatagtata

SEQ ID NO: 1641656 - DNA, 15 bp, Homo sapiens
aaatgcatagtataa

SEQ ID NO: 1641657 - DNA, 15 bp, Homo sapiens
aatgcatagtataat

SEQ ID NO: 1641658 - DNA, 15 bp, Homo sapiens
atgcatagtataatt

SEQ ID NO: 1641659 - DNA, 15 bp, Homo sapiens
tgcatagtataatta

SEQ ID NO: 1641660 - DNA, 15 bp, Homo sapiens
gcatagtataattac

SEQ ID NO: 1641661 - DNA, 15 bp, Homo sapiens
catagtataattact

SEQ ID NO: 1641662 - DNA, 15 bp, Homo sapiens
atagtataattactg

SEQ ID NO: 1641663 - DNA, 15 bp, Homo sapiens
tagtataattactgt

SEQ ID NO: 1641664 - DNA, 15 bp, Homo sapiens
agtataattactgtt

SEQ ID NO: 1641665 - DNA, 15 bp, Homo sapiens
gtataattactgtta

SEQ ID NO: 1641666 - DNA, 15 bp, Homo sapiens
tataattactgttat

SEQ ID NO: 1641667 - DNA, 15 bp, Homo sapiens
ataattactgttatt

SEQ ID NO: 1641668 - DNA, 15 bp, Homo sapiens
taattactgttattt

SEQ ID NO: 1641669 - DNA, 15 bp, Homo sapiens
aattactgttatttt

SEQ ID NO: 1641670 - DNA, 15 bp, Homo sapiens
attactgttattttg

SEQ ID NO: 1641671 - DNA, 15 bp, Homo sapiens
ttactgttattttgt

SEQ ID NO: 1641672 - DNA, 15 bp, Homo sapiens
tactgttattttgtc

SEQ ID NO: 1641673 - DNA, 15 bp, Homo sapiens
actgttattttgtca

SEQ ID NO: 1641674 - DNA, 15 bp, Homo sapiens
ctgttattttgtcag

SEQ ID NO: 1641675 - DNA, 15 bp, Homo sapiens
tgttattttgtcagt

SEQ ID NO: 1641676 - DNA, 15 bp, Homo sapiens
gttattttgtcagta

SEQ ID NO: 1641677 - DNA, 15 bp, Homo sapiens
ttattttgtcagtat

SEQ ID NO: 1641678 - DNA, 15 bp, Homo sapiens
tattttgtcagtatt

SEQ ID NO: 1641679 - DNA, 15 bp, Homo sapiens
attttgtcagtattg

SEQ ID NO: 1641680 - DNA, 15 bp, Homo sapiens
ttttgtcagtattgt

SEQ ID NO: 1641681 - DNA, 15 bp, Homo sapiens
tttgtcagtattgtt

SEQ ID NO: 1641682 - DNA, 15 bp, Homo sapiens
ttgtcagtattgttt

SEQ ID NO: 1641683 - DNA, 15 bp, Homo sapiens
tgtcagtattgtttt

SEQ ID NO: 1641684 - DNA, 15 bp, Homo sapiens
gtcagtattgtttta

SEQ ID NO: 1641685 - DNA, 15 bp, Homo sapiens
tcagtattgttttac

SEQ ID NO: 1641686 - DNA, 15 bp, Homo sapiens
cagtattgttttacc

SEQ ID NO: 1641687 - DNA, 15 bp, Homo sapiens
agtattgttttacct

SEQ ID NO: 1641688 - DNA, 15 bp, Homo sapiens
gtattgttttaccta

SEQ ID NO: 1641689 - DNA, 15 bp, Homo sapiens
tattgttttacctag

SEQ ID NO: 1641690 - DNA, 15 bp, Homo sapiens
attgttttacctagg

SEQ ID NO: 1641691 - DNA, 15 bp, Homo sapiens
ttgttttacctaggt

SEQ ID NO: 1641692 - DNA, 15 bp, Homo sapiens
tgttttacctaggtc

SEQ ID NO: 1641693 - DNA, 15 bp, Homo sapiens
gttttacctaggtca

SEQ ID NO: 1641694 - DNA, 15 bp, Homo sapiens
ttttacctaggtcac

SEQ ID NO: 1641695 - DNA, 15 bp, Homo sapiens
tttacctaggtcact

SEQ ID NO: 1641696 - DNA, 15 bp, Homo sapiens
ttacctaggtcacta

SEQ ID NO: 1641697 - DNA, 15 bp, Homo sapiens
tacctaggtcactat

SEQ ID NO: 1641698 - DNA, 15 bp, Homo sapiens
acctaggtcactatt

SEQ ID NO: 1641699 - DNA, 15 bp, Homo sapiens
cctaggtcactattg

SEQ ID NO: 1641700 - DNA, 15 bp, Homo sapiens
ctaggtcactattga

SEQ ID NO: 1641701 - DNA, 15 bp, Homo sapiens
taggtcactattgaa

SEQ ID NO: 1641702 - DNA, 15 bp, Homo sapiens
aggtcactattgaat

SEQ ID NO: 1641703 - DNA, 15 bp, Homo sapiens
ggtcactattgaatg

SEQ ID NO: 1641704 - DNA, 15 bp, Homo sapiens
gtcactattgaatgc

SEQ ID NO: 1641705 - DNA, 15 bp, Homo sapiens
tcactattgaatgct

SEQ ID NO: 1641706 - DNA, 15 bp, Homo sapiens
cactattgaatgctc

SEQ ID NO: 1641707 - DNA, 15 bp, Homo sapiens
actattgaatgctct

SEQ ID NO: 1641708 - DNA, 15 bp, Homo sapiens
ctattgaatgctctg

SEQ ID NO: 1641709 - DNA, 15 bp, Homo sapiens
tattgaatgctctga

SEQ ID NO: 1641710 - DNA, 15 bp, Homo sapiens
attgaatgctctgat

SEQ ID NO: 1641711 - DNA, 15 bp, Homo sapiens
ttgaatgctctgatt

SEQ ID NO: 1641712 - DNA, 15 bp, Homo sapiens
tgaatgctctgattt

SEQ ID NO: 1641713 - DNA, 15 bp, Homo sapiens
gaatgctctgatttg

SEQ ID NO: 1641714 - DNA, 15 bp, Homo sapiens
aatgctctgatttgt

SEQ ID NO: 1641715 - DNA, 15 bp, Homo sapiens
atgctctgatttgtc

SEQ ID NO: 1641716 - DNA, 15 bp, Homo sapiens
tgctctgatttgtct

SEQ ID NO: 1641717 - DNA, 15 bp, Homo sapiens
gctctgatttgtctc

SEQ ID NO: 1641718 - DNA, 15 bp, Homo sapiens
ctctgatttgtctct

SEQ ID NO: 1641719 - DNA, 15 bp, Homo sapiens
tctgatttgtctctt

SEQ ID NO: 1641720 - DNA, 15 bp, Homo sapiens
ctgatttgtctcttt

SEQ ID NO: 1641721 - DNA, 15 bp, Homo sapiens
tgatttgtctcttta

SEQ ID NO: 1641722 - DNA, 15 bp, Homo sapiens
gatttgtctctttat

SEQ ID NO: 1641723 - DNA, 15 bp, Homo sapiens
atttgtctctttata

SEQ ID NO: 1641724 - DNA, 15 bp, Homo sapiens
tttgtctctttataa

SEQ ID NO: 1641725 - DNA, 15 bp, Homo sapiens
ttgtctctttataaa

SEQ ID NO: 1641726 - DNA, 15 bp, Homo sapiens
tgtctctttataaat

SEQ ID NO: 1641727 - DNA, 15 bp, Homo sapiens
gtctctttataaata

SEQ ID NO: 1641728 - DNA, 15 bp, Homo sapiens
tctctttataaataa

SEQ ID NO: 1641729 - DNA, 15 bp, Homo sapiens
ctctttataaataat

SEQ ID NO: 1641730 - DNA, 15 bp, Homo sapiens
tctttataaataata

SEQ ID NO: 1641731 - DNA, 15 bp, Homo sapiens
ctttataaataataa

SEQ ID NO: 1641732 - DNA, 15 bp, Homo sapiens
tttataaataataat

SEQ ID NO: 1641733 - DNA, 15 bp, Homo sapiens
ttataaataataata

SEQ ID NO: 1641734 - DNA, 15 bp, Homo sapiens
tataaataataatat

SEQ ID NO: 1641735 - DNA, 15 bp, Homo sapiens
ataaataataatatg

SEQ ID NO: 1641736 - DNA, 15 bp, Homo sapiens
taaataataatatgt

SEQ ID NO: 1641737 - DNA, 15 bp, Homo sapiens
aaataataatatgtt

SEQ ID NO: 1641738 - DNA, 15 bp, Homo sapiens
aataataatatgttt

SEQ ID NO: 1641739 - DNA, 15 bp, Homo sapiens
ataataatatgtttt

SEQ ID NO: 1641740 - DNA, 15 bp, Homo sapiens
taataatatgttttc

SEQ ID NO: 1641741 - DNA, 15 bp, Homo sapiens
aataatatgttttct

SEQ ID NO: 1641742 - DNA, 15 bp, Homo sapiens
ataatatgttttctt

SEQ ID NO: 1641743 - DNA, 15 bp, Homo sapiens
taatatgttttcttc

SEQ ID NO: 1641744 - DNA, 15 bp, Homo sapiens
aatatgttttcttct

SEQ ID NO: 1641745 - DNA, 15 bp, Homo sapiens
atatgttttcttctt

SEQ ID NO: 1641746 - DNA, 15 bp, Homo sapiens
tatgttttcttcttc

SEQ ID NO: 1641747 - DNA, 15 bp, Homo sapiens
atgttttcttcttca

SEQ ID NO: 1641748 - DNA, 15 bp, Homo sapiens
tgttttcttcttcaa

SEQ ID NO: 1641749 - DNA, 15 bp, Homo sapiens
gttttcttcttcaaa

SEQ ID NO: 1641750 - DNA, 15 bp, Homo sapiens
ttttcttcttcaaaa

SEQ ID NO: 1641751 - DNA, 15 bp, Homo sapiens
tcttcttcaaaagaa

SEQ ID NO: 1641752 - DNA, 15 bp, Homo sapiens
cttcttcaaaagaac

SEQ ID NO: 1641753 - DNA, 15 bp, Homo sapiens
ttcttcaaaagaaca

SEQ ID NO: 1641754 - DNA, 15 bp, Homo sapiens
tcttcaaaagaacac

SEQ ID NO: 1641755 - DNA, 15 bp, Homo sapiens
cttcaaaagaacact

SEQ ID NO: 1641756 - DNA, 15 bp, Homo sapiens
ttcaaaagaacacta

SEQ ID NO: 1641757 - DNA, 15 bp, Homo sapiens
tcaaaagaacactag

SEQ ID NO: 1641758 - DNA, 15 bp, Homo sapiens
caaaagaacactagg

SEQ ID NO: 1641759 - DNA, 15 bp, Homo sapiens
aaaagaacactagga

SEQ ID NO: 1641760 - DNA, 15 bp, Homo sapiens
aaagaacactaggat

SEQ ID NO: 1641761 - DNA, 15 bp, Homo sapiens
aagaacactaggatg

SEQ ID NO: 1641762 - DNA, 15 bp, Homo sapiens
agaacactaggatga

SEQ ID NO: 1641763 - DNA, 15 bp, Homo sapiens
gaacactaggatgaa

SEQ ID NO: 1641764 - DNA, 15 bp, Homo sapiens
aacactaggatgaag

SEQ ID NO: 1641765 - DNA, 15 bp, Homo sapiens
acactaggatgaagg

SEQ ID NO: 1641766 - DNA, 15 bp, Homo sapiens
cactaggatgaaggt

SEQ ID NO: 1641767 - DNA, 15 bp, Homo sapiens
actaggatgaaggta

SEQ ID NO: 1641768 - DNA, 15 bp, Homo sapiens
ctaggatgaaggtag

SEQ ID NO: 1641769 - DNA, 15 bp, Homo sapiens
taggatgaaggtaga

SEQ ID NO: 1641770 - DNA, 15 bp, Homo sapiens
aggatgaaggtagag

SEQ ID NO: 1641771 - DNA, 15 bp, Homo sapiens
ggatgaaggtagagg

SEQ ID NO: 1641772 - DNA, 15 bp, Homo sapiens
gatgaaggtagaggt

SEQ ID NO: 1641773 - DNA, 15 bp, Homo sapiens
atgaaggtagaggtg

SEQ ID NO: 1641774 - DNA, 15 bp, Homo sapiens
tgaaggtagaggtgc

SEQ ID NO: 1641775 - DNA, 15 bp, Homo sapiens
gaaggtagaggtgct

SEQ ID NO: 1641776 - DNA, 15 bp, Homo sapiens
aaggtagaggtgctt

SEQ ID NO: 1641777 - DNA, 15 bp, Homo sapiens
aggtagaggtgcttt

SEQ ID NO: 1641778 - DNA, 15 bp, Homo sapiens
ggtagaggtgctttt

SEQ ID NO: 1641779 - DNA, 15 bp, Homo sapiens
gtagaggtgcttttg

SEQ ID NO: 1641780 - DNA, 15 bp, Homo sapiens
tagaggtgcttttgg

SEQ ID NO: 1641781 - DNA, 15 bp, Homo sapiens
agaggtgcttttggc

SEQ ID NO: 1641782 - DNA, 15 bp, Homo sapiens
gaggtgcttttggca

SEQ ID NO: 1641783 - DNA, 15 bp, Homo sapiens
aggtgcttttggcac

SEQ ID NO: 1641784 - DNA, 15 bp, Homo sapiens
ggtgcttttggcaca

SEQ ID NO: 1641785 - DNA, 15 bp, Homo sapiens
gtgcttttggcacaa

SEQ ID NO: 1641786 - DNA, 15 bp, Homo sapiens
tgcttttggcacaat

SEQ ID NO: 1641787 - DNA, 15 bp, Homo sapiens
gcttttggcacaatg

SEQ ID NO: 1641788 - DNA, 15 bp, Homo sapiens
cttttggcacaatgc

SEQ ID NO: 1641789 - DNA, 15 bp, Homo sapiens
ttttggcacaatgcc

SEQ ID NO: 1641790 - DNA, 15 bp, Homo sapiens
tttggcacaatgcca

SEQ ID NO: 1641791 - DNA, 15 bp, Homo sapiens
ttggcacaatgccac

SEQ ID NO: 1641792 - DNA, 15 bp, Homo sapiens
tggcacaatgccaca

SEQ ID NO: 1641793 - DNA, 15 bp, Homo sapiens
ggcacaatgccacaa

SEQ ID NO: 1641794 - DNA, 15 bp, Homo sapiens
gcacaatgccacaat

SEQ ID NO: 1641795 - DNA, 15 bp, Homo sapiens
cacaatgccacaatt

SEQ ID NO: 1641796 - DNA, 15 bp, Homo sapiens
acaatgccacaattc

SEQ ID NO: 1641797 - DNA, 15 bp, Homo sapiens
caatgccacaattct

SEQ ID NO: 1641798 - DNA, 15 bp, Homo sapiens
aatgccacaattctg

SEQ ID NO: 1641799 - DNA, 15 bp, Homo sapiens
atgccacaattctga

SEQ ID NO: 1641800 - DNA, 15 bp, Homo sapiens
tgccacaattctgat

SEQ ID NO: 1641801 - DNA, 15 bp, Homo sapiens
gccacaattctgatt

SEQ ID NO: 1641802 - DNA, 15 bp, Homo sapiens
ccacaattctgattt

SEQ ID NO: 1641803 - DNA, 15 bp, Homo sapiens
cacaattctgatttt

SEQ ID NO: 1641804 - DNA, 15 bp, Homo sapiens
acaattctgattttt

SEQ ID NO: 1641805 - DNA, 15 bp, Homo sapiens
caattctgatttttt

SEQ ID NO: 1641806 - DNA, 15 bp, Homo sapiens
aattctgattttttt

SEQ ID NO: 1641807 - DNA, 15 bp, Homo sapiens
attctgattttttta

SEQ ID NO: 1641808 - DNA, 15 bp, Homo sapiens
ttctgatttttttaa

SEQ ID NO: 1641809 - DNA, 15 bp, Homo sapiens
tctgatttttttaaa

SEQ ID NO: 1641810 - DNA, 15 bp, Homo sapiens
ctgatttttttaaaa

SEQ ID NO: 1641811 - DNA, 15 bp, Homo sapiens
tgatttttttaaaac

SEQ ID NO: 1641812 - DNA, 15 bp, Homo sapiens
gatttttttaaaact

SEQ ID NO: 1641813 - DNA, 15 bp, Homo sapiens
atttttttaaaactg

SEQ ID NO: 1641814 - DNA, 15 bp, Homo sapiens
tttttttaaaactgt

SEQ ID NO: 1641815 - DNA, 15 bp, Homo sapiens
ttttttaaaactgta

SEQ ID NO: 1641816 - DNA, 15 bp, Homo sapiens
tttttaaaactgtat

SEQ ID NO: 1641817 - DNA, 15 bp, Homo sapiens
ttttaaaactgtatg

SEQ ID NO: 1641818 - DNA, 15 bp, Homo sapiens
tttaaaactgtatgc

SEQ ID NO: 1641819 - DNA, 15 bp, Homo sapiens
ttaaaactgtatgca

SEQ ID NO: 1641820 - DNA, 15 bp, Homo sapiens
taaaactgtatgcat

SEQ ID NO: 1641821 - DNA, 15 bp, Homo sapiens
aaaactgtatgcatg

SEQ ID NO: 1641822 - DNA, 15 bp, Homo sapiens
aaactgtatgcatgc

SEQ ID NO: 1641823 - DNA, 15 bp, Homo sapiens
aactgtatgcatgca

SEQ ID NO: 1641824 - DNA, 15 bp, Homo sapiens
actgtatgcatgcat

SEQ ID NO: 1641825 - DNA, 15 bp, Homo sapiens
ctgtatgcatgcata

SEQ ID NO: 1641826 - DNA, 15 bp, Homo sapiens
tgtatgcatgcataa

SEQ ID NO: 1641827 - DNA, 15 bp, Homo sapiens
gtatgcatgcataaa

SEQ ID NO: 1641828 - DNA, 15 bp, Homo sapiens
tatgcatgcataaaa

SEQ ID NO: 1641829 - DNA, 15 bp, Homo sapiens
atgcatgcataaaat

SEQ ID NO: 1641830 - DNA, 15 bp, Homo sapiens
tgcatgcataaaatg

SEQ ID NO: 1641831 - DNA, 15 bp, Homo sapiens
gcatgcataaaatgt

SEQ ID NO: 1641832 - DNA, 15 bp, Homo sapiens
catgcataaaatgtt

SEQ ID NO: 1641833 - DNA, 15 bp, Homo sapiens
atgcataaaatgttc

SEQ ID NO: 1641834 - DNA, 15 bp, Homo sapiens
tgcataaaatgttct

SEQ ID NO: 1641835 - DNA, 15 bp, Homo sapiens
gcataaaatgttctt

SEQ ID NO: 1641836 - DNA, 15 bp, Homo sapiens
cataaaatgttcttg

SEQ ID NO: 1641837 - DNA, 15 bp, Homo sapiens
ataaaatgttcttga

SEQ ID NO: 1641838 - DNA, 15 bp, Homo sapiens
taaaatgttcttgag

SEQ ID NO: 1641839 - DNA, 15 bp, Homo sapiens
aaaatgttcttgagc

SEQ ID NO: 1641840 - DNA, 15 bp, Homo sapiens
aaatgttcttgagcc

SEQ ID NO: 1641841 - DNA, 15 bp, Homo sapiens
aatgttcttgagcca

SEQ ID NO: 1641842 - DNA, 15 bp, Homo sapiens
atgttcttgagccat

SEQ ID NO: 1641843 - DNA, 15 bp, Homo sapiens
tgttcttgagccatt

SEQ ID NO: 1641844 - DNA, 15 bp, Homo sapiens
gttcttgagccattc

SEQ ID NO: 1641845 - DNA, 15 bp, Homo sapiens
ttcttgagccattct

SEQ ID NO: 1641846 - DNA, 15 bp, Homo sapiens
tcttgagccattctc

SEQ ID NO: 1641847 - DNA, 15 bp, Homo sapiens
cttgagccattctct

SEQ ID NO: 1641848 - DNA, 15 bp, Homo sapiens
ttgagccattctctg

SEQ ID NO: 1641849 - DNA, 15 bp, Homo sapiens
tgagccattctctgc

SEQ ID NO: 1641850 - DNA, 15 bp, Homo sapiens
gagccattctctgcc

SEQ ID NO: 1641851 - DNA, 15 bp, Homo sapiens
agccattctctgcct

SEQ ID NO: 1641852 - DNA, 15 bp, Homo sapiens
gccattctctgcctt

SEQ ID NO: 1641853 - DNA, 15 bp, Homo sapiens
ccattctctgccttg

SEQ ID NO: 1641854 - DNA, 15 bp, Homo sapiens
cattctctgccttgg

SEQ ID NO: 1641855 - DNA, 15 bp, Homo sapiens
attctctgccttgga

SEQ ID NO: 1641856 - DNA, 15 bp, Homo sapiens
ttctctgccttggaa

SEQ ID NO: 1641857 - DNA, 15 bp, Homo sapiens
tctctgccttggaat

SEQ ID NO: 1641858 - DNA, 15 bp, Homo sapiens
ctctgccttggaata

SEQ ID NO: 1641859 - DNA, 15 bp, Homo sapiens
tctgccttggaatag

SEQ ID NO: 1641860 - DNA, 15 bp, Homo sapiens
ctgccttggaatagc

SEQ ID NO: 1641861 - DNA, 15 bp, Homo sapiens
tgccttggaatagca

SEQ ID NO: 1641862 - DNA, 15 bp, Homo sapiens
gccttggaatagcac

SEQ ID NO: 1641863 - DNA, 15 bp, Homo sapiens
ccttggaatagcact

SEQ ID NO: 1641864 - DNA, 15 bp, Homo sapiens
cttggaatagcactg

SEQ ID NO: 1641865 - DNA, 15 bp, Homo sapiens
ttggaatagcactgg

SEQ ID NO: 1641866 - DNA, 15 bp, Homo sapiens
tggaatagcactggc

SEQ ID NO: 1641867 - DNA, 15 bp, Homo sapiens
ggaatagcactggct

SEQ ID NO: 1641868 - DNA, 15 bp, Homo sapiens
gaatagcactggctg

SEQ ID NO: 1641869 - DNA, 15 bp, Homo sapiens
aatagcactggctgg

SEQ ID NO: 1641870 - DNA, 15 bp, Homo sapiens
atagcactggctggc

SEQ ID NO: 1641871 - DNA, 15 bp, Homo sapiens
tagcactggctggca

SEQ ID NO: 1641872 - DNA, 15 bp, Homo sapiens
agcactggctggcat

SEQ ID NO: 1641873 - DNA, 15 bp, Homo sapiens
gcactggctggcatt

SEQ ID NO: 1641874 - DNA, 15 bp, Homo sapiens
cactggctggcattc

SEQ ID NO: 1641875 - DNA, 15 bp, Homo sapiens
actggctggcattct

SEQ ID NO: 1641876 - DNA, 15 bp, Homo sapiens
ctggctggcattctg

SEQ ID NO: 1641877 - DNA, 15 bp, Homo sapiens
tggctggcattctgc

SEQ ID NO: 1641878 - DNA, 15 bp, Homo sapiens
ggctggcattctgca

SEQ ID NO: 1641879 - DNA, 15 bp, Homo sapiens
gctggcattctgcat

SEQ ID NO: 1641880 - DNA, 15 bp, Homo sapiens
ctggcattctgcatg

SEQ ID NO: 1641881 - DNA, 15 bp, Homo sapiens
tggcattctgcatgt

SEQ ID NO: 1641882 - DNA, 15 bp, Homo sapiens
ggcattctgcatgtt

SEQ ID NO: 1641883 - DNA, 15 bp, Homo sapiens
gcattctgcatgttt

SEQ ID NO: 1641884 - DNA, 15 bp, Homo sapiens
cattctgcatgttta

SEQ ID NO: 1641885 - DNA, 15 bp, Homo sapiens
attctgcatgtttac

SEQ ID NO: 1641886 - DNA, 15 bp, Homo sapiens
ttctgcatgtttact

SEQ ID NO: 1641887 - DNA, 15 bp, Homo sapiens
tctgcatgtttactt

SEQ ID NO: 1641888 - DNA, 15 bp, Homo sapiens
ctgcatgtttacttt

SEQ ID NO: 1641889 - DNA, 15 bp, Homo sapiens
tgcatgtttactttt

SEQ ID NO: 1641890 - DNA, 15 bp, Homo sapiens
gcatgtttactttta

SEQ ID NO: 1641891 - DNA, 15 bp, Homo sapiens
catgtttacttttat

SEQ ID NO: 1641892 - DNA, 15 bp, Homo sapiens
atgtttacttttata

SEQ ID NO: 1641893 - DNA, 15 bp, Homo sapiens
tgtttacttttatat

SEQ ID NO: 1641894 - DNA, 15 bp, Homo sapiens
gtttacttttatatg

SEQ ID NO: 1641895 - DNA, 15 bp, Homo sapiens
tttacttttatatgc

SEQ ID NO: 1641896 - DNA, 15 bp, Homo sapiens
ttacttttatatgct

SEQ ID NO: 1641897 - DNA, 15 bp, Homo sapiens
tacttttatatgctg

SEQ ID NO: 1641898 - DNA, 15 bp, Homo sapiens
acttttatatgctga

SEQ ID NO: 1641899 - DNA, 15 bp, Homo sapiens
cttttatatgctgaa

SEQ ID NO: 1641900 - DNA, 15 bp, Homo sapiens
ttttatatgctgaag

SEQ ID NO: 1641901 - DNA, 15 bp, Homo sapiens
tttatatgctgaagg

SEQ ID NO: 1641902 - DNA, 15 bp, Homo sapiens
ttatatgctgaaggc

SEQ ID NO: 1641903 - DNA, 15 bp, Homo sapiens
tatatgctgaaggcc

SEQ ID NO: 1641904 - DNA, 15 bp, Homo sapiens
atatgctgaaggccc

SEQ ID NO: 1641905 - DNA, 15 bp, Homo sapiens
tatgctgaaggcccc

SEQ ID NO: 1641906 - DNA, 15 bp, Homo sapiens
atgctgaaggccccc

SEQ ID NO: 1641907 - DNA, 15 bp, Homo sapiens
tgctgaaggccccca

SEQ ID NO: 1641908 - DNA, 15 bp, Homo sapiens
gctgaaggcccccat

SEQ ID NO: 1641909 - DNA, 15 bp, Homo sapiens
ctgaaggcccccatc

SEQ ID NO: 1641910 - DNA, 15 bp, Homo sapiens
tgaaggcccccatca

SEQ ID NO: 1641911 - DNA, 15 bp, Homo sapiens
gaaggcccccatcaa

SEQ ID NO: 1641912 - DNA, 15 bp, Homo sapiens
aaggcccccatcaac

SEQ ID NO: 1641913 - DNA, 15 bp, Homo sapiens
aggcccccatcaacc

SEQ ID NO: 1641914 - DNA, 15 bp, Homo sapiens
ggcccccatcaacct

SEQ ID NO: 1641915 - DNA, 15 bp, Homo sapiens
gcccccatcaacctc

SEQ ID NO: 1641916 - DNA, 15 bp, Homo sapiens
cccccatcaacctca

SEQ ID NO: 1641917 - DNA, 15 bp, Homo sapiens
ccccatcaacctcaa

SEQ ID NO: 1641918 - DNA, 15 bp, Homo sapiens
cccatcaacctcaaa

SEQ ID NO: 1641919 - DNA, 15 bp, Homo sapiens
ccatcaacctcaaac

SEQ ID NO: 1641920 - DNA, 15 bp, Homo sapiens
catcaacctcaaaca

SEQ ID NO: 1641921 - DNA, 15 bp, Homo sapiens
atcaacctcaaacag

SEQ ID NO: 1641922 - DNA, 15 bp, Homo sapiens
tcaacctcaaacaga

SEQ ID NO: 1641923 - DNA, 15 bp, Homo sapiens
caacctcaaacagag

SEQ ID NO: 1641924 - DNA, 15 bp, Homo sapiens
aacctcaaacagagg

SEQ ID NO: 1641925 - DNA, 15 bp, Homo sapiens
acctcaaacagaggc

SEQ ID NO: 1641926 - DNA, 15 bp, Homo sapiens
cctcaaacagaggca

SEQ ID NO: 1641927 - DNA, 15 bp, Homo sapiens
ctcaaacagaggcaa

SEQ ID NO: 1641928 - DNA, 15 bp, Homo sapiens
tcaaacagaggcaaa

SEQ ID NO: 1641929 - DNA, 15 bp, Homo sapiens
caaacagaggcaaat

SEQ ID NO: 1641930 - DNA, 15 bp, Homo sapiens
aaacagaggcaaatc

SEQ ID NO: 1641931 - DNA, 15 bp, Homo sapiens
aacagaggcaaatca

SEQ ID NO: 1641932 - DNA, 15 bp, Homo sapiens
acagaggcaaatcaa

SEQ ID NO: 1641933 - DNA, 15 bp, Homo sapiens
cagaggcaaatcaat

SEQ ID NO: 1641934 - DNA, 15 bp, Homo sapiens
agaggcaaatcaatt

SEQ ID NO: 1641935 - DNA, 15 bp, Homo sapiens
gaggcaaatcaattt

SEQ ID NO: 1641936 - DNA, 15 bp, Homo sapiens
aggcaaatcaattta

SEQ ID NO: 1641937 - DNA, 15 bp, Homo sapiens
ggcaaatcaatttaa

SEQ ID NO: 1641938 - DNA, 15 bp, Homo sapiens
gcaaatcaatttaac

SEQ ID NO: 1641939 - DNA, 15 bp, Homo sapiens
caaatcaatttaact

SEQ ID NO: 1641940 - DNA, 15 bp, Homo sapiens
aaatcaatttaactt

SEQ ID NO: 1641941 - DNA, 15 bp, Homo sapiens
aatcaatttaacttc

SEQ ID NO: 1641942 - DNA, 15 bp, Homo sapiens
atcaatttaacttct

SEQ ID NO: 1641943 - DNA, 15 bp, Homo sapiens
tcaatttaacttctc

SEQ ID NO: 1641944 - DNA, 15 bp, Homo sapiens
caatttaacttctca

SEQ ID NO: 1641945 - DNA, 15 bp, Homo sapiens
aatttaacttctcat

SEQ ID NO: 1641946 - DNA, 15 bp, Homo sapiens
atttaacttctcata

SEQ ID NO: 1641947 - DNA, 15 bp, Homo sapiens
tttaacttctcatag

SEQ ID NO: 1641948 - DNA, 15 bp, Homo sapiens
ttaacttctcatagt

SEQ ID NO: 1641949 - DNA, 15 bp, Homo sapiens
taacttctcatagtg

SEQ ID NO: 1641950 - DNA, 15 bp, Homo sapiens
aacttctcatagtgt

SEQ ID NO: 1641951 - DNA, 15 bp, Homo sapiens
acttctcatagtgtt

SEQ ID NO: 1641952 - DNA, 15 bp, Homo sapiens
cttctcatagtgtta

SEQ ID NO: 1641953 - DNA, 15 bp, Homo sapiens
ttctcatagtgttat

SEQ ID NO: 1641954 - DNA, 15 bp, Homo sapiens
tctcatagtgttatt

SEQ ID NO: 1641955 - DNA, 15 bp, Homo sapiens
ctcatagtgttattt

SEQ ID NO: 1641956 - DNA, 15 bp, Homo sapiens
tcatagtgttatttt

SEQ ID NO: 1641957 - DNA, 15 bp, Homo sapiens
catagtgttattttg

SEQ ID NO: 1641958 - DNA, 15 bp, Homo sapiens
atagtgttattttgt

SEQ ID NO: 1641959 - DNA, 15 bp, Homo sapiens
tagtgttattttgtt

SEQ ID NO: 1641960 - DNA, 15 bp, Homo sapiens
agtgttattttgttc

SEQ ID NO: 1641961 - DNA, 15 bp, Homo sapiens
gtgttattttgttca

SEQ ID NO: 1641962 - DNA, 15 bp, Homo sapiens
tgttattttgttcat

SEQ ID NO: 1641963 - DNA, 15 bp, Homo sapiens
gttattttgttcatc

SEQ ID NO: 1641964 - DNA, 15 bp, Homo sapiens
ttattttgttcatcc

SEQ ID NO: 1641965 - DNA, 15 bp, Homo sapiens
tattttgttcatcct

SEQ ID NO: 1641966 - DNA, 15 bp, Homo sapiens
attttgttcatccta

SEQ ID NO: 1641967 - DNA, 15 bp, Homo sapiens
ttttgttcatcctaa

SEQ ID NO: 1641968 - DNA, 15 bp, Homo sapiens
tttgttcatcctaaa

SEQ ID NO: 1641969 - DNA, 15 bp, Homo sapiens
ttgttcatcctaaaa

SEQ ID NO: 1641970 - DNA, 15 bp, Homo sapiens
tgttcatcctaaaag

SEQ ID NO: 1641971 - DNA, 15 bp, Homo sapiens
gttcatcctaaaagt

SEQ ID NO: 1641972 - DNA, 15 bp, Homo sapiens
ttcatcctaaaagtt

SEQ ID NO: 1641973 - DNA, 15 bp, Homo sapiens
tcatcctaaaagttc

SEQ ID NO: 1641974 - DNA, 15 bp, Homo sapiens
catcctaaaagttca

SEQ ID NO: 1641975 - DNA, 15 bp, Homo sapiens
atcctaaaagttcaa

SEQ ID NO: 1641976 - DNA, 15 bp, Homo sapiens
tcctaaaagttcaag

SEQ ID NO: 1641977 - DNA, 15 bp, Homo sapiens
cctaaaagttcaaga

SEQ ID NO: 1641978 - DNA, 15 bp, Homo sapiens
ctaaaagttcaagag

SEQ ID NO: 1641979 - DNA, 15 bp, Homo sapiens
taaaagttcaagaga

SEQ ID NO: 1641980 - DNA, 15 bp, Homo sapiens
aaaagttcaagagag

SEQ ID NO: 1641981 - DNA, 15 bp, Homo sapiens
aaagttcaagagagc

SEQ ID NO: 1641982 - DNA, 15 bp, Homo sapiens
aagttcaagagagcc

SEQ ID NO: 1641983 - DNA, 15 bp, Homo sapiens
agttcaagagagcct

SEQ ID NO: 1641984 - DNA, 15 bp, Homo sapiens
gttcaagagagcctt

SEQ ID NO: 1641985 - DNA, 15 bp, Homo sapiens
ttcaagagagccttc

SEQ ID NO: 1641986 - DNA, 15 bp, Homo sapiens
tcaagagagccttcc

SEQ ID NO: 1641987 - DNA, 15 bp, Homo sapiens
caagagagccttcca

SEQ ID NO: 1641988 - DNA, 15 bp, Homo sapiens
aagagagccttccaa

SEQ ID NO: 1641989 - DNA, 15 bp, Homo sapiens
agagagccttccaaa

SEQ ID NO: 1641990 - DNA, 15 bp, Homo sapiens
gagagccttccaaac

SEQ ID NO: 1641991 - DNA, 15 bp, Homo sapiens
agagccttccaaact

SEQ ID NO: 1641992 - DNA, 15 bp, Homo sapiens
gagccttccaaactt

SEQ ID NO: 1641993 - DNA, 15 bp, Homo sapiens
agccttccaaacttc

SEQ ID NO: 1641994 - DNA, 15 bp, Homo sapiens
gccttccaaacttcc

SEQ ID NO: 1641995 - DNA, 15 bp, Homo sapiens
ccttccaaacttcca

SEQ ID NO: 1641996 - DNA, 15 bp, Homo sapiens
cttccaaacttccaa

SEQ ID NO: 1641997 - DNA, 15 bp, Homo sapiens
ttccaaacttccaaa

SEQ ID NO: 1641998 - DNA, 15 bp, Homo sapiens
tccaaacttccaaaa

SEQ ID NO: 1641999 - DNA, 15 bp, Homo sapiens
ccaaacttccaaaat

SEQ ID NO: 1642000 - DNA, 15 bp, Homo sapiens
caaacttccaaaatt

SEQ ID NO: 1642001 - DNA, 15 bp, Homo sapiens
aaacttccaaaattt

SEQ ID NO: 1642002 - DNA, 15 bp, Homo sapiens
aacttccaaaatttc

SEQ ID NO: 1642003 - DNA, 15 bp, Homo sapiens
acttccaaaatttct

SEQ ID NO: 1642004 - DNA, 15 bp, Homo sapiens
cttccaaaatttctc

SEQ ID NO: 1642005 - DNA, 15 bp, Homo sapiens
ttccaaaatttctct

SEQ ID NO: 1642006 - DNA, 15 bp, Homo sapiens
tccaaaatttctctc

SEQ ID NO: 1642007 - DNA, 15 bp, Homo sapiens
ccaaaatttctctca

SEQ ID NO: 1642008 - DNA, 15 bp, Homo sapiens
caaaatttctctcaa

SEQ ID NO: 1642009 - DNA, 15 bp, Homo sapiens
aaaatttctctcaat

SEQ ID NO: 1642010 - DNA, 15 bp, Homo sapiens
aaatttctctcaatt

SEQ ID NO: 1642011 - DNA, 15 bp, Homo sapiens
aatttctctcaattc

SEQ ID NO: 1642012 - DNA, 15 bp, Homo sapiens
atttctctcaattca

SEQ ID NO: 1642013 - DNA, 15 bp, Homo sapiens
tttctctcaattcag

SEQ ID NO: 1642014 - DNA, 15 bp, Homo sapiens
ttctctcaattcagt

SEQ ID NO: 1642015 - DNA, 15 bp, Homo sapiens
tctctcaattcagtg

SEQ ID NO: 1642016 - DNA, 15 bp, Homo sapiens
ctctcaattcagtga

SEQ ID NO: 1642017 - DNA, 15 bp, Homo sapiens
tctcaattcagtgag

SEQ ID NO: 1642018 - DNA, 15 bp, Homo sapiens
ctcaattcagtgagg

SEQ ID NO: 1642019 - DNA, 15 bp, Homo sapiens
tcaattcagtgagga

SEQ ID NO: 1642020 - DNA, 15 bp, Homo sapiens
caattcagtgaggag

SEQ ID NO: 1642021 - DNA, 15 bp, Homo sapiens
aattcagtgaggagg

SEQ ID NO: 1642022 - DNA, 15 bp, Homo sapiens
attcagtgaggagga

SEQ ID NO: 1642023 - DNA, 15 bp, Homo sapiens
ttcagtgaggaggaa

SEQ ID NO: 1642024 - DNA, 15 bp, Homo sapiens
tcagtgaggaggaaa

SEQ ID NO: 1642025 - DNA, 15 bp, Homo sapiens
cagtgaggaggaaaa

SEQ ID NO: 1642026 - DNA, 15 bp, Homo sapiens
agtgaggaggaaaat

SEQ ID NO: 1642027 - DNA, 15 bp, Homo sapiens
gtgaggaggaaaatt

SEQ ID NO: 1642028 - DNA, 15 bp, Homo sapiens
tgaggaggaaaattc

SEQ ID NO: 1642029 - DNA, 15 bp, Homo sapiens
gaggaggaaaattca

SEQ ID NO: 1642030 - DNA, 15 bp, Homo sapiens
aggaggaaaattcag

SEQ ID NO: 1642031 - DNA, 15 bp, Homo sapiens
ggaggaaaattcaga

SEQ ID NO: 1642032 - DNA, 15 bp, Homo sapiens
gaggaaaattcagaa

SEQ ID NO: 1642033 - DNA, 15 bp, Homo sapiens
aggaaaattcagaac

SEQ ID NO: 1642034 - DNA, 15 bp, Homo sapiens
ggaaaattcagaaca

SEQ ID NO: 1642035 - DNA, 15 bp, Homo sapiens
gaaaattcagaacac

SEQ ID NO: 1642036 - DNA, 15 bp, Homo sapiens
aaaattcagaacaca

SEQ ID NO: 1642037 - DNA, 15 bp, Homo sapiens
aaattcagaacacag

SEQ ID NO: 1642038 - DNA, 15 bp, Homo sapiens
aattcagaacacagc

SEQ ID NO: 1642039 - DNA, 15 bp, Homo sapiens
attcagaacacagca

SEQ ID NO: 1642040 - DNA, 15 bp, Homo sapiens
ttcagaacacagcat

SEQ ID NO: 1642041 - DNA, 15 bp, Homo sapiens
tcagaacacagcatt

SEQ ID NO: 1642042 - DNA, 15 bp, Homo sapiens
cagaacacagcattt

SEQ ID NO: 1642043 - DNA, 15 bp, Homo sapiens
agaacacagcatttg

SEQ ID NO: 1642044 - DNA, 15 bp, Homo sapiens
gaacacagcatttga

SEQ ID NO: 1642045 - DNA, 15 bp, Homo sapiens
aacacagcatttgaa

SEQ ID NO: 1642046 - DNA, 15 bp, Homo sapiens
acacagcatttgaat

SEQ ID NO: 1642047 - DNA, 15 bp, Homo sapiens
cacagcatttgaatg

SEQ ID NO: 1642048 - DNA, 15 bp, Homo sapiens
acagcatttgaatgt

SEQ ID NO: 1642049 - DNA, 15 bp, Homo sapiens
cagcatttgaatgtt

SEQ ID NO: 1642050 - DNA, 15 bp, Homo sapiens
agcatttgaatgttc

SEQ ID NO: 1642051 - DNA, 15 bp, Homo sapiens
gcatttgaatgttct

SEQ ID NO: 1642052 - DNA, 15 bp, Homo sapiens
catttgaatgttctg

SEQ ID NO: 1642053 - DNA, 15 bp, Homo sapiens
atttgaatgttctgc

SEQ ID NO: 1642054 - DNA, 15 bp, Homo sapiens
tttgaatgttctgcc

SEQ ID NO: 1642055 - DNA, 15 bp, Homo sapiens
ttgaatgttctgccc

SEQ ID NO: 1642056 - DNA, 15 bp, Homo sapiens
tgaatgttctgccca

SEQ ID NO: 1642057 - DNA, 15 bp, Homo sapiens
gaatgttctgcccag

SEQ ID NO: 1642058 - DNA, 15 bp, Homo sapiens
aatgttctgcccaga

SEQ ID NO: 1642059 - DNA, 15 bp, Homo sapiens
atgttctgcccagat

SEQ ID NO: 1642060 - DNA, 15 bp, Homo sapiens
tgttctgcccagatt

SEQ ID NO: 1642061 - DNA, 15 bp, Homo sapiens
gttctgcccagattt

SEQ ID NO: 1642062 - DNA, 15 bp, Homo sapiens
ttctgcccagatttg

SEQ ID NO: 1642063 - DNA, 15 bp, Homo sapiens
tctgcccagatttgt

SEQ ID NO: 1642064 - DNA, 15 bp, Homo sapiens
ctgcccagatttgtc

SEQ ID NO: 1642065 - DNA, 15 bp, Homo sapiens
tgcccagatttgtca

SEQ ID NO: 1642066 - DNA, 15 bp, Homo sapiens
gcccagatttgtcac

SEQ ID NO: 1642067 - DNA, 15 bp, Homo sapiens
cccagatttgtcaca

SEQ ID NO: 1642068 - DNA, 15 bp, Homo sapiens
ccagatttgtcacac

SEQ ID NO: 1642069 - DNA, 15 bp, Homo sapiens
cagatttgtcacaca

SEQ ID NO: 1642070 - DNA, 15 bp, Homo sapiens
agatttgtcacacac

SEQ ID NO: 1642071 - DNA, 15 bp, Homo sapiens
gatttgtcacacaca

SEQ ID NO: 1642072 - DNA, 15 bp, Homo sapiens
atttgtcacacacac

SEQ ID NO: 1642073 - DNA, 15 bp, Homo sapiens
tttgtcacacacaca

SEQ ID NO: 1642074 - DNA, 15 bp, Homo sapiens
ttgtcacacacacaa

SEQ ID NO: 1642075 - DNA, 15 bp, Homo sapiens
tgtcacacacacaag

SEQ ID NO: 1642076 - DNA, 15 bp, Homo sapiens
gtcacacacacaagg

SEQ ID NO: 1642077 - DNA, 15 bp, Homo sapiens
tcacacacacaagga

SEQ ID NO: 1642078 - DNA, 15 bp, Homo sapiens
cacacacacaaggaa

SEQ ID NO: 1642079 - DNA, 15 bp, Homo sapiens
acacacacaaggaat

SEQ ID NO: 1642080 - DNA, 15 bp, Homo sapiens
cacacacaaggaatg

SEQ ID NO: 1642081 - DNA, 15 bp, Homo sapiens
acacacaaggaatga

SEQ ID NO: 1642082 - DNA, 15 bp, Homo sapiens
cacacaaggaatgag

SEQ ID NO: 1642083 - DNA, 15 bp, Homo sapiens
acacaaggaatgagt

SEQ ID NO: 1642084 - DNA, 15 bp, Homo sapiens
cacaaggaatgagtg

SEQ ID NO: 1642085 - DNA, 15 bp, Homo sapiens
acaaggaatgagtga

SEQ ID NO: 1642086 - DNA, 15 bp, Homo sapiens
caaggaatgagtgaa

SEQ ID NO: 1642087 - DNA, 15 bp, Homo sapiens
aaggaatgagtgaaa

SEQ ID NO: 1642088 - DNA, 15 bp, Homo sapiens
gaatgagtgaaagag

SEQ ID NO: 1642089 - DNA, 15 bp, Homo sapiens
aatgagtgaaagagg

SEQ ID NO: 1642090 - DNA, 15 bp, Homo sapiens
atgagtgaaagaggg

SEQ ID NO: 1642091 - DNA, 15 bp, Homo sapiens
tgagtgaaagagggc

SEQ ID NO: 1642092 - DNA, 15 bp, Homo sapiens
gagtgaaagagggca

SEQ ID NO: 1642093 - DNA, 15 bp, Homo sapiens
agtgaaagagggcaa

SEQ ID NO: 1642094 - DNA, 15 bp, Homo sapiens
gtgaaagagggcaac

SEQ ID NO: 1642095 - DNA, 15 bp, Homo sapiens
tgaaagagggcaaca

SEQ ID NO: 1642096 - DNA, 15 bp, Homo sapiens
gaaagagggcaacac

SEQ ID NO: 1642097 - DNA, 15 bp, Homo sapiens
aaagagggcaacacc

SEQ ID NO: 1642098 - DNA, 15 bp, Homo sapiens
aagagggcaacaccc

SEQ ID NO: 1642099 - DNA, 15 bp, Homo sapiens
agagggcaacaccct

SEQ ID NO: 1642100 - DNA, 15 bp, Homo sapiens
gagggcaacaccctt

SEQ ID NO: 1642101 - DNA, 15 bp, Homo sapiens
agggcaacacccttt

SEQ ID NO: 1642102 - DNA, 15 bp, Homo sapiens
gggcaacaccctttc

SEQ ID NO: 1642103 - DNA, 15 bp, Homo sapiens
ggcaacaccctttcc

SEQ ID NO: 1642104 - DNA, 15 bp, Homo sapiens
gcaacaccctttcct

SEQ ID NO: 1642105 - DNA, 15 bp, Homo sapiens
caacaccctttcctc

SEQ ID NO: 1642106 - DNA, 15 bp, Homo sapiens
aacaccctttcctcc

SEQ ID NO: 1642107 - DNA, 15 bp, Homo sapiens
acaccctttcctcct

SEQ ID NO: 1642108 - DNA, 15 bp, Homo sapiens
caccctttcctccta

SEQ ID NO: 1642109 - DNA, 15 bp, Homo sapiens
accctttcctcctaa

SEQ ID NO: 1642110 - DNA, 15 bp, Homo sapiens
ccctttcctcctaac

SEQ ID NO: 1642111 - DNA, 15 bp, Homo sapiens
cctttcctcctaacc

SEQ ID NO: 1642112 - DNA, 15 bp, Homo sapiens
ctttcctcctaaccc

SEQ ID NO: 1642113 - DNA, 15 bp, Homo sapiens
tttcctcctaaccct

SEQ ID NO: 1642114 - DNA, 15 bp, Homo sapiens
ttcctcctaaccctg

SEQ ID NO: 1642115 - DNA, 15 bp, Homo sapiens
tcctcctaaccctgt

SEQ ID NO: 1642116 - DNA, 15 bp, Homo sapiens
cctcctaaccctgtg

SEQ ID NO: 1642117 - DNA, 15 bp, Homo sapiens
ctcctaaccctgtga

SEQ ID NO: 1642118 - DNA, 15 bp, Homo sapiens
tcctaaccctgtgaa

SEQ ID NO: 1642119 - DNA, 15 bp, Homo sapiens
cctaaccctgtgaac

SEQ ID NO: 1642120 - DNA, 15 bp, Homo sapiens
ctaaccctgtgaact

SEQ ID NO: 1642121 - DNA, 15 bp, Homo sapiens
taaccctgtgaactc

SEQ ID NO: 1642122 - DNA, 15 bp, Homo sapiens
aaccctgtgaactca

SEQ ID NO: 1642123 - DNA, 15 bp, Homo sapiens
accctgtgaactcat

SEQ ID NO: 1642124 - DNA, 15 bp, Homo sapiens
ccctgtgaactcatc

SEQ ID NO: 1642125 - DNA, 15 bp, Homo sapiens
cctgtgaactcatca

SEQ ID NO: 1642126 - DNA, 15 bp, Homo sapiens
ctgtgaactcatcac

SEQ ID NO: 1642127 - DNA, 15 bp, Homo sapiens
tgtgaactcatcact

SEQ ID NO: 1642128 - DNA, 15 bp, Homo sapiens
gtgaactcatcacta

SEQ ID NO: 1642129 - DNA, 15 bp, Homo sapiens
tgaactcatcactat

SEQ ID NO: 1642130 - DNA, 15 bp, Homo sapiens
gaactcatcactatt

SEQ ID NO: 1642131 - DNA, 15 bp, Homo sapiens
aactcatcactattg

SEQ ID NO: 1642132 - DNA, 15 bp, Homo sapiens
actcatcactattgc

SEQ ID NO: 1642133 - DNA, 15 bp, Homo sapiens
ctcatcactattgca

SEQ ID NO: 1642134 - DNA, 15 bp, Homo sapiens
tcatcactattgcat

SEQ ID NO: 1642135 - DNA, 15 bp, Homo sapiens
catcactattgcatt

SEQ ID NO: 1642136 - DNA, 15 bp, Homo sapiens
atcactattgcattg

SEQ ID NO: 1642137 - DNA, 15 bp, Homo sapiens
tcactattgcattga

SEQ ID NO: 1642138 - DNA, 15 bp, Homo sapiens
cactattgcattgaa

SEQ ID NO: 1642139 - DNA, 15 bp, Homo sapiens
actattgcattgaaa

SEQ ID NO: 1642140 - DNA, 15 bp, Homo sapiens
ctattgcattgaaat

SEQ ID NO: 1642141 - DNA, 15 bp, Homo sapiens
tattgcattgaaatg

SEQ ID NO: 1642142 - DNA, 15 bp, Homo sapiens
attgcattgaaatga

SEQ ID NO: 1642143 - DNA, 15 bp, Homo sapiens
ttgcattgaaatgac

SEQ ID NO: 1642144 - DNA, 15 bp, Homo sapiens
tgcattgaaatgaca

SEQ ID NO: 1642145 - DNA, 15 bp, Homo sapiens
gcattgaaatgacac

SEQ ID NO: 1642146 - DNA, 15 bp, Homo sapiens
cattgaaatgacacc

SEQ ID NO: 1642147 - DNA, 15 bp, Homo sapiens
attgaaatgacacca

SEQ ID NO: 1642148 - DNA, 15 bp, Homo sapiens
ttgaaatgacaccaa

SEQ ID NO: 1642149 - DNA, 15 bp, Homo sapiens
tgaaatgacaccaaa

SEQ ID NO: 1642150 - DNA, 15 bp, Homo sapiens
gaaatgacaccaaaa

SEQ ID NO: 1642151 - DNA, 15 bp, Homo sapiens
aaatgacaccaaaag

SEQ ID NO: 1642152 - DNA, 15 bp, Homo sapiens
aatgacaccaaaagg

SEQ ID NO: 1642153 - DNA, 15 bp, Homo sapiens
atgacaccaaaaggt

SEQ ID NO: 1642154 - DNA, 15 bp, Homo sapiens
tgacaccaaaaggta

SEQ ID NO: 1642155 - DNA, 15 bp, Homo sapiens
gacaccaaaaggtaa

SEQ ID NO: 1642156 - DNA, 15 bp, Homo sapiens
acaccaaaaggtaaa

SEQ ID NO: 1642157 - DNA, 15 bp, Homo sapiens
caccaaaaggtaaaa

SEQ ID NO: 1642158 - DNA, 15 bp, Homo sapiens
accaaaaggtaaaaa

SEQ ID NO: 1642159 - DNA, 15 bp, Homo sapiens
ccaaaaggtaaaaac

SEQ ID NO: 1642160 - DNA, 15 bp, Homo sapiens
caaaaggtaaaaacc

SEQ ID NO: 1642161 - DNA, 15 bp, Homo sapiens
aaaaggtaaaaaccc

SEQ ID NO: 1642162 - DNA, 15 bp, Homo sapiens
aaaggtaaaaaccct

SEQ ID NO: 1642163 - DNA, 15 bp, Homo sapiens
aaggtaaaaacccta

SEQ ID NO: 1642164 - DNA, 15 bp, Homo sapiens
aggtaaaaaccctag

SEQ ID NO: 1642165 - DNA, 15 bp, Homo sapiens
ggtaaaaaccctagg

SEQ ID NO: 1642166 - DNA, 15 bp, Homo sapiens
gtaaaaaccctaggc

SEQ ID NO: 1642167 - DNA, 15 bp, Homo sapiens
taaaaaccctaggcc

SEQ ID NO: 1642168 - DNA, 15 bp, Homo sapiens
aaaaaccctaggcct

SEQ ID NO: 1642169 - DNA, 15 bp, Homo sapiens
aaaaccctaggcctc

SEQ ID NO: 1642170 - DNA, 15 bp, Homo sapiens
aaaccctaggcctca

SEQ ID NO: 1642171 - DNA, 15 bp, Homo sapiens
aaccctaggcctcac

SEQ ID NO: 1642172 - DNA, 15 bp, Homo sapiens
accctaggcctcaca

SEQ ID NO: 1642173 - DNA, 15 bp, Homo sapiens
ccctaggcctcacat

SEQ ID NO: 1642174 - DNA, 15 bp, Homo sapiens
cctaggcctcacatc

SEQ ID NO: 1642175 - DNA, 15 bp, Homo sapiens
ctaggcctcacatct

SEQ ID NO: 1642176 - DNA, 15 bp, Homo sapiens
taggcctcacatctc

SEQ ID NO: 1642177 - DNA, 15 bp, Homo sapiens
aggcctcacatctcc

SEQ ID NO: 1642178 - DNA, 15 bp, Homo sapiens
ggcctcacatctccc

SEQ ID NO: 1642179 - DNA, 15 bp, Homo sapiens
gcctcacatctccca

SEQ ID NO: 1642180 - DNA, 15 bp, Homo sapiens
cctcacatctcccaa

SEQ ID NO: 1642181 - DNA, 15 bp, Homo sapiens
ctcacatctcccaag

SEQ ID NO: 1642182 - DNA, 15 bp, Homo sapiens
tcacatctcccaaga

SEQ ID NO: 1642183 - DNA, 15 bp, Homo sapiens
cacatctcccaagaa

SEQ ID NO: 1642184 - DNA, 15 bp, Homo sapiens
acatctcccaagaac

SEQ ID NO: 1642185 - DNA, 15 bp, Homo sapiens
catctcccaagaaca

SEQ ID NO: 1642186 - DNA, 15 bp, Homo sapiens
atctcccaagaacac

SEQ ID NO: 1642187 - DNA, 15 bp, Homo sapiens
tctcccaagaacact

SEQ ID NO: 1642188 - DNA, 15 bp, Homo sapiens
ctcccaagaacactg

SEQ ID NO: 1642189 - DNA, 15 bp, Homo sapiens
tcccaagaacactgc

SEQ ID NO: 1642190 - DNA, 15 bp, Homo sapiens
cccaagaacactgca

SEQ ID NO: 1642191 - DNA, 15 bp, Homo sapiens
ccaagaacactgcaa

SEQ ID NO: 1642192 - DNA, 15 bp, Homo sapiens
caagaacactgcaat

SEQ ID NO: 1642193 - DNA, 15 bp, Homo sapiens
aagaacactgcaata

SEQ ID NO: 1642194 - DNA, 15 bp, Homo sapiens
agaacactgcaatag

SEQ ID NO: 1642195 - DNA, 15 bp, Homo sapiens
gaacactgcaatagg

SEQ ID NO: 1642196 - DNA, 15 bp, Homo sapiens
aacactgcaatagga

SEQ ID NO: 1642197 - DNA, 15 bp, Homo sapiens
acactgcaataggag

SEQ ID NO: 1642198 - DNA, 15 bp, Homo sapiens
cactgcaataggagt

SEQ ID NO: 1642199 - DNA, 15 bp, Homo sapiens
actgcaataggagtt

SEQ ID NO: 1642200 - DNA, 15 bp, Homo sapiens
ctgcaataggagtta

SEQ ID NO: 1642201 - DNA, 15 bp, Homo sapiens
tgcaataggagttac

SEQ ID NO: 1642202 - DNA, 15 bp, Homo sapiens
gcaataggagttact

SEQ ID NO: 1642203 - DNA, 15 bp, Homo sapiens
caataggagttactg

SEQ ID NO: 1642204 - DNA, 15 bp, Homo sapiens
aataggagttactgc

SEQ ID NO: 1642205 - DNA, 15 bp, Homo sapiens
ataggagttactgca

SEQ ID NO: 1642206 - DNA, 15 bp, Homo sapiens
taggagttactgcat

SEQ ID NO: 1642207 - DNA, 15 bp, Homo sapiens
aggagttactgcata

SEQ ID NO: 1642208 - DNA, 15 bp, Homo sapiens
ggagttactgcatac

SEQ ID NO: 1642209 - DNA, 15 bp, Homo sapiens
gagttactgcataca

SEQ ID NO: 1642210 - DNA, 15 bp, Homo sapiens
agttactgcatacac

SEQ ID NO: 1642211 - DNA, 15 bp, Homo sapiens
gttactgcatacacc

SEQ ID NO: 1642212 - DNA, 15 bp, Homo sapiens
ttactgcatacacca

SEQ ID NO: 1642213 - DNA, 15 bp, Homo sapiens
tactgcatacaccag

SEQ ID NO: 1642214 - DNA, 15 bp, Homo sapiens
actgcatacaccagt

SEQ ID NO: 1642215 - DNA, 15 bp, Homo sapiens
ctgcatacaccagtt

SEQ ID NO: 1642216 - DNA, 15 bp, Homo sapiens
tgcatacaccagttt

SEQ ID NO: 1642217 - DNA, 15 bp, Homo sapiens
gcatacaccagttta

SEQ ID NO: 1642218 - DNA, 15 bp, Homo sapiens
catacaccagtttaa

SEQ ID NO: 1642219 - DNA, 15 bp, Homo sapiens
atacaccagtttaag

SEQ ID NO: 1642220 - DNA, 15 bp, Homo sapiens
tacaccagtttaagt

SEQ ID NO: 1642221 - DNA, 15 bp, Homo sapiens
acaccagtttaagta

SEQ ID NO: 1642222 - DNA, 15 bp, Homo sapiens
caccagtttaagtaa

SEQ ID NO: 1642223 - DNA, 15 bp, Homo sapiens
accagtttaagtaac

SEQ ID NO: 1642224 - DNA, 15 bp, Homo sapiens
ccagtttaagtaact

SEQ ID NO: 1642225 - DNA, 15 bp, Homo sapiens
cagtttaagtaactc

SEQ ID NO: 1642226 - DNA, 15 bp, Homo sapiens
agtttaagtaactct

SEQ ID NO: 1642227 - DNA, 15 bp, Homo sapiens
gtttaagtaactcta

SEQ ID NO: 1642228 - DNA, 15 bp, Homo sapiens
tttaagtaactctag

SEQ ID NO: 1642229 - DNA, 15 bp, Homo sapiens
ttaagtaactctagc

SEQ ID NO: 1642230 - DNA, 15 bp, Homo sapiens
taagtaactctagca

SEQ ID NO: 1642231 - DNA, 15 bp, Homo sapiens
aagtaactctagcat

SEQ ID NO: 1642232 - DNA, 15 bp, Homo sapiens
agtaactctagcata

SEQ ID NO: 1642233 - DNA, 15 bp, Homo sapiens
gtaactctagcataa

SEQ ID NO: 1642234 - DNA, 15 bp, Homo sapiens
taactctagcataaa

SEQ ID NO: 1642235 - DNA, 15 bp, Homo sapiens
aactctagcataaat

SEQ ID NO: 1642236 - DNA, 15 bp, Homo sapiens
actctagcataaatt

SEQ ID NO: 1642237 - DNA, 15 bp, Homo sapiens
ctctagcataaattg

SEQ ID NO: 1642238 - DNA, 15 bp, Homo sapiens
tctagcataaattgt

SEQ ID NO: 1642239 - DNA, 15 bp, Homo sapiens
ctagcataaattgta

SEQ ID NO: 1642240 - DNA, 15 bp, Homo sapiens
tagcataaattgtat

SEQ ID NO: 1642241 - DNA, 15 bp, Homo sapiens
agcataaattgtatg

SEQ ID NO: 1642242 - DNA, 15 bp, Homo sapiens
gcataaattgtatgt

SEQ ID NO: 1642243 - DNA, 15 bp, Homo sapiens
cataaattgtatgtc

SEQ ID NO: 1642244 - DNA, 15 bp, Homo sapiens
ataaattgtatgtca

SEQ ID NO: 1642245 - DNA, 15 bp, Homo sapiens
taaattgtatgtcag

SEQ ID NO: 1642246 - DNA, 15 bp, Homo sapiens
aaattgtatgtcaga

SEQ ID NO: 1642247 - DNA, 15 bp, Homo sapiens
aattgtatgtcagat

SEQ ID NO: 1642248 - DNA, 15 bp, Homo sapiens
attgtatgtcagatg

SEQ ID NO: 1642249 - DNA, 15 bp, Homo sapiens
ttgtatgtcagatga

SEQ ID NO: 1642250 - DNA, 15 bp, Homo sapiens
tgtatgtcagatgaa

SEQ ID NO: 1642251 - DNA, 15 bp, Homo sapiens
gtatgtcagatgaaa

SEQ ID NO: 1642252 - DNA, 15 bp, Homo sapiens
tatgtcagatgaaac

SEQ ID NO: 1642253 - DNA, 15 bp, Homo sapiens
atgtcagatgaaaca

SEQ ID NO: 1642254 - DNA, 15 bp, Homo sapiens
tgtcagatgaaacaa

SEQ ID NO: 1642255 - DNA, 15 bp, Homo sapiens
gtcagatgaaacaat

SEQ ID NO: 1642256 - DNA, 15 bp, Homo sapiens
tcagatgaaacaatg

SEQ ID NO: 1642257 - DNA, 15 bp, Homo sapiens
cagatgaaacaatgg

SEQ ID NO: 1642258 - DNA, 15 bp, Homo sapiens
agatgaaacaatggc

SEQ ID NO: 1642259 - DNA, 15 bp, Homo sapiens
gatgaaacaatggca

SEQ ID NO: 1642260 - DNA, 15 bp, Homo sapiens
atgaaacaatggcat

SEQ ID NO: 1642261 - DNA, 15 bp, Homo sapiens
tgaaacaatggcatt

SEQ ID NO: 1642262 - DNA, 15 bp, Homo sapiens
gaaacaatggcattt

SEQ ID NO: 1642263 - DNA, 15 bp, Homo sapiens
aaacaatggcatttt

SEQ ID NO: 1642264 - DNA, 15 bp, Homo sapiens
aacaatggcattttg

SEQ ID NO: 1642265 - DNA, 15 bp, Homo sapiens
acaatggcattttgg

SEQ ID NO: 1642266 - DNA, 15 bp, Homo sapiens
caatggcattttgga

SEQ ID NO: 1642267 - DNA, 15 bp, Homo sapiens
aatggcattttggag

SEQ ID NO: 1642268 - DNA, 15 bp, Homo sapiens
atggcattttggagg

SEQ ID NO: 1642269 - DNA, 15 bp, Homo sapiens
tggcattttggaggc

SEQ ID NO: 1642270 - DNA, 15 bp, Homo sapiens
ggcattttggaggct

SEQ ID NO: 1642271 - DNA, 15 bp, Homo sapiens
gcattttggaggctt

SEQ ID NO: 1642272 - DNA, 15 bp, Homo sapiens
cattttggaggctta

SEQ ID NO: 1642273 - DNA, 15 bp, Homo sapiens
attttggaggcttaa

SEQ ID NO: 1642274 - DNA, 15 bp, Homo sapiens
ttttggaggcttaag

SEQ ID NO: 1642275 - DNA, 15 bp, Homo sapiens
tttggaggcttaaga

SEQ ID NO: 1642276 - DNA, 15 bp, Homo sapiens
ttggaggcttaagag

SEQ ID NO: 1642277 - DNA, 15 bp, Homo sapiens
tggaggcttaagaga

SEQ ID NO: 1642278 - DNA, 15 bp, Homo sapiens
ggaggcttaagagaa

SEQ ID NO: 1642279 - DNA, 15 bp, Homo sapiens
gaggcttaagagaaa

SEQ ID NO: 1642280 - DNA, 15 bp, Homo sapiens
aggcttaagagaaaa

SEQ ID NO: 1642281 - DNA, 15 bp, Homo sapiens
ggcttaagagaaaaa

SEQ ID NO: 1642282 - DNA, 15 bp, Homo sapiens
gcttaagagaaaaag

SEQ ID NO: 1642283 - DNA, 15 bp, Homo sapiens
cttaagagaaaaaga

SEQ ID NO: 1642284 - DNA, 15 bp, Homo sapiens
ttaagagaaaaagaa

SEQ ID NO: 1642285 - DNA, 15 bp, Homo sapiens
taagagaaaaagaat

SEQ ID NO: 1642286 - DNA, 15 bp, Homo sapiens
aagagaaaaagaata

SEQ ID NO: 1642287 - DNA, 15 bp, Homo sapiens
agagaaaaagaataa

SEQ ID NO: 1642288 - DNA, 15 bp, Homo sapiens
gagaaaaagaataat

SEQ ID NO: 1642289 - DNA, 15 bp, Homo sapiens
agaaaaagaataatc

SEQ ID NO: 1642290 - DNA, 15 bp, Homo sapiens
gaaaaagaataatca

SEQ ID NO: 1642291 - DNA, 15 bp, Homo sapiens
aaaaagaataatcaa

SEQ ID NO: 1642292 - DNA, 15 bp, Homo sapiens
aaaagaataatcaaa

SEQ ID NO: 1642293 - DNA, 15 bp, Homo sapiens
aaagaataatcaaat

SEQ ID NO: 1642294 - DNA, 15 bp, Homo sapiens
aagaataatcaaatc

SEQ ID NO: 1642295 - DNA, 15 bp, Homo sapiens
agaataatcaaatcc

SEQ ID NO: 1642296 - DNA, 15 bp, Homo sapiens
gaataatcaaatcca

SEQ ID NO: 1642297 - DNA, 15 bp, Homo sapiens
aataatcaaatccag

SEQ ID NO: 1642298 - DNA, 15 bp, Homo sapiens
ataatcaaatccagt

SEQ ID NO: 1642299 - DNA, 15 bp, Homo sapiens
taatcaaatccagtt

SEQ ID NO: 1642300 - DNA, 15 bp, Homo sapiens
aatcaaatccagttt

SEQ ID NO: 1642301 - DNA, 15 bp, Homo sapiens
atcaaatccagtttt

SEQ ID NO: 1642302 - DNA, 15 bp, Homo sapiens
tcaaatccagttttt

SEQ ID NO: 1642303 - DNA, 15 bp, Homo sapiens
caaatccagttttta

SEQ ID NO: 1642304 - DNA, 15 bp, Homo sapiens
aaatccagtttttag

SEQ ID NO: 1642305 - DNA, 15 bp, Homo sapiens
aatccagtttttagg

SEQ ID NO: 1642306 - DNA, 15 bp, Homo sapiens
atccagtttttaggt

SEQ ID NO: 1642307 - DNA, 15 bp, Homo sapiens
tccagtttttaggta

SEQ ID NO: 1642308 - DNA, 15 bp, Homo sapiens
ccagtttttaggtac

SEQ ID NO: 1642309 - DNA, 15 bp, Homo sapiens
cagtttttaggtact

SEQ ID NO: 1642310 - DNA, 15 bp, Homo sapiens
agtttttaggtacta

SEQ ID NO: 1642311 - DNA, 15 bp, Homo sapiens
gtttttaggtactaa

SEQ ID NO: 1642312 - DNA, 15 bp, Homo sapiens
tttttaggtactaat

SEQ ID NO: 1642313 - DNA, 15 bp, Homo sapiens
ttttaggtactaatg

SEQ ID NO: 1642314 - DNA, 15 bp, Homo sapiens
tttaggtactaatgt

SEQ ID NO: 1642315 - DNA, 15 bp, Homo sapiens
ttaggtactaatgtg

SEQ ID NO: 1642316 - DNA, 15 bp, Homo sapiens
taggtactaatgtgc

SEQ ID NO: 1642317 - DNA, 15 bp, Homo sapiens
aggtactaatgtgct

SEQ ID NO: 1642318 - DNA, 15 bp, Homo sapiens
ggtactaatgtgctg

SEQ ID NO: 1642319 - DNA, 15 bp, Homo sapiens
gtactaatgtgctga

SEQ ID NO: 1642320 - DNA, 15 bp, Homo sapiens
tactaatgtgctgaa

SEQ ID NO: 1642321 - DNA, 15 bp, Homo sapiens
actaatgtgctgaat

SEQ ID NO: 1642322 - DNA, 15 bp, Homo sapiens
ctaatgtgctgaatc

SEQ ID NO: 1642323 - DNA, 15 bp, Homo sapiens
taatgtgctgaatct

SEQ ID NO: 1642324 - DNA, 15 bp, Homo sapiens
aatgtgctgaatctt

SEQ ID NO: 1642325 - DNA, 15 bp, Homo sapiens
atgtgctgaatcttt

SEQ ID NO: 1642326 - DNA, 15 bp, Homo sapiens
tgtgctgaatcttta

SEQ ID NO: 1642327 - DNA, 15 bp, Homo sapiens
gtgctgaatctttag

SEQ ID NO: 1642328 - DNA, 15 bp, Homo sapiens
tgctgaatctttagc

SEQ ID NO: 1642329 - DNA, 15 bp, Homo sapiens
gctgaatctttagca

SEQ ID NO: 1642330 - DNA, 15 bp, Homo sapiens
ctgaatctttagcac

SEQ ID NO: 1642331 - DNA, 15 bp, Homo sapiens
tgaatctttagcaca

SEQ ID NO: 1642332 - DNA, 15 bp, Homo sapiens
gaatctttagcacat

SEQ ID NO: 1642333 - DNA, 15 bp, Homo sapiens
aatctttagcacata

SEQ ID NO: 1642334 - DNA, 15 bp, Homo sapiens
atctttagcacatag

SEQ ID NO: 1642335 - DNA, 15 bp, Homo sapiens
tctttagcacatagc

SEQ ID NO: 1642336 - DNA, 15 bp, Homo sapiens
ctttagcacatagca

SEQ ID NO: 1642337 - DNA, 15 bp, Homo sapiens
tttagcacatagcag

SEQ ID NO: 1642338 - DNA, 15 bp, Homo sapiens
ttagcacatagcagc

SEQ ID NO: 1642339 - DNA, 15 bp, Homo sapiens
tagcacatagcagca

SEQ ID NO: 1642340 - DNA, 15 bp, Homo sapiens
agcacatagcagcaa

SEQ ID NO: 1642341 - DNA, 15 bp, Homo sapiens
gcacatagcagcaaa

SEQ ID NO: 1642342 - DNA, 15 bp, Homo sapiens
cacatagcagcaaaa

SEQ ID NO: 1642343 - DNA, 15 bp, Homo sapiens
acatagcagcaaaat

SEQ ID NO: 1642344 - DNA, 15 bp, Homo sapiens
catagcagcaaaatt

SEQ ID NO: 1642345 - DNA, 15 bp, Homo sapiens
atagcagcaaaattg

SEQ ID NO: 1642346 - DNA, 15 bp, Homo sapiens
tagcagcaaaattgc

SEQ ID NO: 1642347 - DNA, 15 bp, Homo sapiens
agcagcaaaattgct

SEQ ID NO: 1642348 - DNA, 15 bp, Homo sapiens
gcagcaaaattgcta

SEQ ID NO: 1642349 - DNA, 15 bp, Homo sapiens
cagcaaaattgctag

SEQ ID NO: 1642350 - DNA, 15 bp, Homo sapiens
agcaaaattgctaga

SEQ ID NO: 1642351 - DNA, 15 bp, Homo sapiens
gcaaaattgctagaa

SEQ ID NO: 1642352 - DNA, 15 bp, Homo sapiens
caaaattgctagaat

SEQ ID NO: 1642353 - DNA, 15 bp, Homo sapiens
aaaattgctagaatc

SEQ ID NO: 1642354 - DNA, 15 bp, Homo sapiens
aaattgctagaatct

SEQ ID NO: 1642355 - DNA, 15 bp, Homo sapiens
aattgctagaatctg

SEQ ID NO: 1642356 - DNA, 15 bp, Homo sapiens
attgctagaatctgg

SEQ ID NO: 1642357 - DNA, 15 bp, Homo sapiens
ttgctagaatctggt

SEQ ID NO: 1642358 - DNA, 15 bp, Homo sapiens
tgctagaatctggtg

SEQ ID NO: 1642359 - DNA, 15 bp, Homo sapiens
gctagaatctggtgt

SEQ ID NO: 1642360 - DNA, 15 bp, Homo sapiens
ctagaatctggtgtt

SEQ ID NO: 1642361 - DNA, 15 bp, Homo sapiens
tagaatctggtgttt

SEQ ID NO: 1642362 - DNA, 15 bp, Homo sapiens
agaatctggtgtttc

SEQ ID NO: 1642363 - DNA, 15 bp, Homo sapiens
gaatctggtgtttca

SEQ ID NO: 1642364 - DNA, 15 bp, Homo sapiens
aatctggtgtttcac

SEQ ID NO: 1642365 - DNA, 15 bp, Homo sapiens
atctggtgtttcact

SEQ ID NO: 1642366 - DNA, 15 bp, Homo sapiens
tctggtgtttcactt

SEQ ID NO: 1642367 - DNA, 15 bp, Homo sapiens
ctggtgtttcacttt

SEQ ID NO: 1642368 - DNA, 15 bp, Homo sapiens
tggtgtttcactttt

SEQ ID NO: 1642369 - DNA, 15 bp, Homo sapiens
ggtgtttcacttttt

SEQ ID NO: 1642370 - DNA, 15 bp, Homo sapiens
gtgtttcacttttta

SEQ ID NO: 1642371 - DNA, 15 bp, Homo sapiens
tgtttcactttttaa

SEQ ID NO: 1642372 - DNA, 15 bp, Homo sapiens
gtttcactttttaaa

SEQ ID NO: 1642373 - DNA, 15 bp, Homo sapiens
tttcactttttaaaa

SEQ ID NO: 1642374 - DNA, 15 bp, Homo sapiens
ttcactttttaaaat

SEQ ID NO: 1642375 - DNA, 15 bp, Homo sapiens
tcactttttaaaata

SEQ ID NO: 1642376 - DNA, 15 bp, Homo sapiens
cactttttaaaatac

SEQ ID NO: 1642377 - DNA, 15 bp, Homo sapiens
actttttaaaatacc

SEQ ID NO: 1642378 - DNA, 15 bp, Homo sapiens
ctttttaaaatacca

SEQ ID NO: 1642379 - DNA, 15 bp, Homo sapiens
tttttaaaataccac

SEQ ID NO: 1642380 - DNA, 15 bp, Homo sapiens
ttttaaaataccaca

SEQ ID NO: 1642381 - DNA, 15 bp, Homo sapiens
tttaaaataccacat

SEQ ID NO: 1642382 - DNA, 15 bp, Homo sapiens
ttaaaataccacatt

SEQ ID NO: 1642383 - DNA, 15 bp, Homo sapiens
taaaataccacattt

SEQ ID NO: 1642384 - DNA, 15 bp, Homo sapiens
aaaataccacatttg

SEQ ID NO: 1642385 - DNA, 15 bp, Homo sapiens
aaataccacatttga

SEQ ID NO: 1642386 - DNA, 15 bp, Homo sapiens
aataccacatttgaa

SEQ ID NO: 1642387 - DNA, 15 bp, Homo sapiens
ataccacatttgaac

SEQ ID NO: 1642388 - DNA, 15 bp, Homo sapiens
taccacatttgaacc

SEQ ID NO: 1642389 - DNA, 15 bp, Homo sapiens
accacatttgaacct

SEQ ID NO: 1642390 - DNA, 15 bp, Homo sapiens
ccacatttgaacctt

SEQ ID NO: 1642391 - DNA, 15 bp, Homo sapiens
cacatttgaaccttt

SEQ ID NO: 1642392 - DNA, 15 bp, Homo sapiens
acatttgaacctttc

SEQ ID NO: 1642393 - DNA, 15 bp, Homo sapiens
catttgaacctttca

SEQ ID NO: 1642394 - DNA, 15 bp, Homo sapiens
atttgaacctttcag

SEQ ID NO: 1642395 - DNA, 15 bp, Homo sapiens
tttgaacctttcagc

SEQ ID NO: 1642396 - DNA, 15 bp, Homo sapiens
ttgaacctttcagca

SEQ ID NO: 1642397 - DNA, 15 bp, Homo sapiens
tgaacctttcagcaa

SEQ ID NO: 1642398 - DNA, 15 bp, Homo sapiens
gaacctttcagcaat

SEQ ID NO: 1642399 - DNA, 15 bp, Homo sapiens
aacctttcagcaatt

SEQ ID NO: 1642400 - DNA, 15 bp, Homo sapiens
acctttcagcaattc

SEQ ID NO: 1642401 - DNA, 15 bp, Homo sapiens
cctttcagcaattcc

SEQ ID NO: 1642402 - DNA, 15 bp, Homo sapiens
ctttcagcaattcca

SEQ ID NO: 1642403 - DNA, 15 bp, Homo sapiens
tttcagcaattccaa

SEQ ID NO: 1642404 - DNA, 15 bp, Homo sapiens
ttcagcaattccaaa

SEQ ID NO: 1642405 - DNA, 15 bp, Homo sapiens
tcagcaattccaaaa

SEQ ID NO: 1642406 - DNA, 15 bp, Homo sapiens
cagcaattccaaaat

SEQ ID NO: 1642407 - DNA, 15 bp, Homo sapiens
agcaattccaaaatc

SEQ ID NO: 1642408 - DNA, 15 bp, Homo sapiens
gcaattccaaaatca

SEQ ID NO: 1642409 - DNA, 15 bp, Homo sapiens
caattccaaaatcaa

SEQ ID NO: 1642410 - DNA, 15 bp, Homo sapiens
aattccaaaatcaac

SEQ ID NO: 1642411 - DNA, 15 bp, Homo sapiens
attccaaaatcaact

SEQ ID NO: 1642412 - DNA, 15 bp, Homo sapiens
ttccaaaatcaactc

SEQ ID NO: 1642413 - DNA, 15 bp, Homo sapiens
tccaaaatcaactcc

SEQ ID NO: 1642414 - DNA, 15 bp, Homo sapiens
ccaaaatcaactccc

SEQ ID NO: 1642415 - DNA, 15 bp, Homo sapiens
caaaatcaactccct

SEQ ID NO: 1642416 - DNA, 15 bp, Homo sapiens
aaaatcaactccctc

SEQ ID NO: 1642417 - DNA, 15 bp, Homo sapiens
aaatcaactccctct

SEQ ID NO: 1642418 - DNA, 15 bp, Homo sapiens
aatcaactccctctg

SEQ ID NO: 1642419 - DNA, 15 bp, Homo sapiens
atcaactccctctgc

SEQ ID NO: 1642420 - DNA, 15 bp, Homo sapiens
tcaactccctctgcg

SEQ ID NO: 1642421 - DNA, 15 bp, Homo sapiens
caactccctctgcga

SEQ ID NO: 1642422 - DNA, 15 bp, Homo sapiens
aactccctctgcgaa

SEQ ID NO: 1642423 - DNA, 15 bp, Homo sapiens
actccctctgcgaaa

SEQ ID NO: 1642424 - DNA, 15 bp, Homo sapiens
ctccctctgcgaaag

SEQ ID NO: 1642425 - DNA, 15 bp, Homo sapiens
tccctctgcgaaaga

SEQ ID NO: 1642426 - DNA, 15 bp, Homo sapiens
ccctctgcgaaagat

SEQ ID NO: 1642427 - DNA, 15 bp, Homo sapiens
cctctgcgaaagata

SEQ ID NO: 1642428 - DNA, 15 bp, Homo sapiens
ctctgcgaaagataa

SEQ ID NO: 1642429 - DNA, 15 bp, Homo sapiens
tctgcgaaagataat

SEQ ID NO: 1642430 - DNA, 15 bp, Homo sapiens
ctgcgaaagataata

SEQ ID NO: 1642431 - DNA, 15 bp, Homo sapiens
tgcgaaagataataa

SEQ ID NO: 1642432 - DNA, 15 bp, Homo sapiens
gcgaaagataataag

SEQ ID NO: 1642433 - DNA, 15 bp, Homo sapiens
cgaaagataataagc

SEQ ID NO: 1642434 - DNA, 15 bp, Homo sapiens
gaaagataataagct

SEQ ID NO: 1642435 - DNA, 15 bp, Homo sapiens
aaagataataagctt

SEQ ID NO: 1642436 - DNA, 15 bp, Homo sapiens
aagataataagctta

SEQ ID NO: 1642437 - DNA, 15 bp, Homo sapiens
agataataagcttaa

SEQ ID NO: 1642438 - DNA, 15 bp, Homo sapiens
gataataagcttaaa

SEQ ID NO: 1642439 - DNA, 15 bp, Homo sapiens
ataataagcttaaac

SEQ ID NO: 1642440 - DNA, 15 bp, Homo sapiens
taataagcttaaaca

SEQ ID NO: 1642441 - DNA, 15 bp, Homo sapiens
aataagcttaaacat

SEQ ID NO: 1642442 - DNA, 15 bp, Homo sapiens
ataagcttaaacatt

SEQ ID NO: 1642443 - DNA, 15 bp, Homo sapiens
taagcttaaacattt

SEQ ID NO: 1642444 - DNA, 15 bp, Homo sapiens
aagcttaaacatttt

SEQ ID NO: 1642445 - DNA, 15 bp, Homo sapiens
agcttaaacattttt

SEQ ID NO: 1642446 - DNA, 15 bp, Homo sapiens
gcttaaacatttttt

SEQ ID NO: 1642447 - DNA, 15 bp, Homo sapiens
cttaaacatttttta

SEQ ID NO: 1642448 - DNA, 15 bp, Homo sapiens
ttaaacattttttaa

SEQ ID NO: 1642449 - DNA, 15 bp, Homo sapiens
taaacattttttaaa

SEQ ID NO: 1642450 - DNA, 15 bp, Homo sapiens
aaacattttttaaat

SEQ ID NO: 1642451 - DNA, 15 bp, Homo sapiens
aacattttttaaatt

SEQ ID NO: 1642452 - DNA, 15 bp, Homo sapiens
acattttttaaattt

SEQ ID NO: 1642453 - DNA, 15 bp, Homo sapiens
cattttttaaattta

SEQ ID NO: 1642454 - DNA, 15 bp, Homo sapiens
ttttttaaatttaaa

SEQ ID NO: 1642455 - DNA, 15 bp, Homo sapiens
ttttaaatttaaaaa

SEQ ID NO: 1642456 - DNA, 15 bp, Homo sapiens
tttaaatttaaaaat

SEQ ID NO: 1642457 - DNA, 15 bp, Homo sapiens
ttaaatttaaaaatg

SEQ ID NO: 1642458 - DNA, 15 bp, Homo sapiens
taaatttaaaaatgt

SEQ ID NO: 1642459 - DNA, 15 bp, Homo sapiens
aaatttaaaaatgta

SEQ ID NO: 1642460 - DNA, 15 bp, Homo sapiens
aatttaaaaatgtaa

SEQ ID NO: 1642461 - DNA, 15 bp, Homo sapiens
atttaaaaatgtaac

SEQ ID NO: 1642462 - DNA, 15 bp, Homo sapiens
tttaaaaatgtaaca

SEQ ID NO: 1642463 - DNA, 15 bp, Homo sapiens
ttaaaaatgtaacac

SEQ ID NO: 1642464 - DNA, 15 bp, Homo sapiens
taaaaatgtaacaca

SEQ ID NO: 1642465 - DNA, 15 bp, Homo sapiens
aaaaatgtaacacaa

SEQ ID NO: 1642466 - DNA, 15 bp, Homo sapiens
aaaatgtaacacaaa

SEQ ID NO: 1642467 - DNA, 15 bp, Homo sapiens
aaatgtaacacaaac

SEQ ID NO: 1642468 - DNA, 15 bp, Homo sapiens
aatgtaacacaaaca

SEQ ID NO: 1642469 - DNA, 15 bp, Homo sapiens
atgtaacacaaacaa

SEQ ID NO: 1642470 - DNA, 15 bp, Homo sapiens
tgtaacacaaacaaa

SEQ ID NO: 1642471 - DNA, 15 bp, Homo sapiens
gtaacacaaacaaac

SEQ ID NO: 1642472 - DNA, 15 bp, Homo sapiens
taacacaaacaaaca

SEQ ID NO: 1642473 - DNA, 15 bp, Homo sapiens
aacacaaacaaacag

SEQ ID NO: 1642474 - DNA, 15 bp, Homo sapiens
acacaaacaaacagc

SEQ ID NO: 1642475 - DNA, 15 bp, Homo sapiens
cacaaacaaacagct

SEQ ID NO: 1642476 - DNA, 15 bp, Homo sapiens
acaaacaaacagcta

SEQ ID NO: 1642477 - DNA, 15 bp, Homo sapiens
caaacaaacagctaa

SEQ ID NO: 1642478 - DNA, 15 bp, Homo sapiens
aaacaaacagctaag

SEQ ID NO: 1642479 - DNA, 15 bp, Homo sapiens
aacaaacagctaagc

SEQ ID NO: 1642480 - DNA, 15 bp, Homo sapiens
acaaacagctaagca

SEQ ID NO: 1642481 - DNA, 15 bp, Homo sapiens
caaacagctaagcaa

SEQ ID NO: 1642482 - DNA, 15 bp, Homo sapiens
aaacagctaagcaaa

SEQ ID NO: 1642483 - DNA, 15 bp, Homo sapiens
aacagctaagcaaac

SEQ ID NO: 1642484 - DNA, 15 bp, Homo sapiens
acagctaagcaaaca

SEQ ID NO: 1642485 - DNA, 15 bp, Homo sapiens
cagctaagcaaacaa

SEQ ID NO: 1642486 - DNA, 15 bp, Homo sapiens
agctaagcaaacaag

SEQ ID NO: 1642487 - DNA, 15 bp, Homo sapiens
gctaagcaaacaagc

SEQ ID NO: 1642488 - DNA, 15 bp, Homo sapiens
ctaagcaaacaagct

SEQ ID NO: 1642489 - DNA, 15 bp, Homo sapiens
taagcaaacaagctg

SEQ ID NO: 1642490 - DNA, 15 bp, Homo sapiens
aagcaaacaagctgc

SEQ ID NO: 1642491 - DNA, 15 bp, Homo sapiens
agcaaacaagctgcc

SEQ ID NO: 1642492 - DNA, 15 bp, Homo sapiens
gcaaacaagctgccc

SEQ ID NO: 1642493 - DNA, 15 bp, Homo sapiens
caaacaagctgccca

SEQ ID NO: 1642494 - DNA, 15 bp, Homo sapiens
aaacaagctgcccat

SEQ ID NO: 1642495 - DNA, 15 bp, Homo sapiens
aacaagctgcccata

SEQ ID NO: 1642496 - DNA, 15 bp, Homo sapiens
acaagctgcccataa

SEQ ID NO: 1642497 - DNA, 15 bp, Homo sapiens
caagctgcccataaa

SEQ ID NO: 1642498 - DNA, 15 bp, Homo sapiens
aagctgcccataaaa

SEQ ID NO: 1642499 - DNA, 15 bp, Homo sapiens
agctgcccataaaat

SEQ ID NO: 1642500 - DNA, 15 bp, Homo sapiens
gctgcccataaaatc

SEQ ID NO: 1642501 - DNA, 15 bp, Homo sapiens
ctgcccataaaatca

SEQ ID NO: 1642502 - DNA, 15 bp, Homo sapiens
tgcccataaaatcaa

SEQ ID NO: 1642503 - DNA, 15 bp, Homo sapiens
gcccataaaatcaac

SEQ ID NO: 1642504 - DNA, 15 bp, Homo sapiens
cccataaaatcaaca

SEQ ID NO: 1642505 - DNA, 15 bp, Homo sapiens
ccataaaatcaacag

SEQ ID NO: 1642506 - DNA, 15 bp, Homo sapiens
cataaaatcaacagt

SEQ ID NO: 1642507 - DNA, 15 bp, Homo sapiens
ataaaatcaacagtc

SEQ ID NO: 1642508 - DNA, 15 bp, Homo sapiens
taaaatcaacagtct

SEQ ID NO: 1642509 - DNA, 15 bp, Homo sapiens
aaaatcaacagtctg

SEQ ID NO: 1642510 - DNA, 15 bp, Homo sapiens
aaatcaacagtctgg

SEQ ID NO: 1642511 - DNA, 15 bp, Homo sapiens
aatcaacagtctggg

SEQ ID NO: 1642512 - DNA, 15 bp, Homo sapiens
atcaacagtctgggg

SEQ ID NO: 1642513 - DNA, 15 bp, Homo sapiens
tcaacagtctgggga

SEQ ID NO: 1642514 - DNA, 15 bp, Homo sapiens
caacagtctggggag

SEQ ID NO: 1642515 - DNA, 15 bp, Homo sapiens
aacagtctggggagc

SEQ ID NO: 1642516 - DNA, 15 bp, Homo sapiens
acagtctggggagcc

SEQ ID NO: 1642517 - DNA, 15 bp, Homo sapiens
cagtctggggagccc

SEQ ID NO: 1642518 - DNA, 15 bp, Homo sapiens
agtctggggagccct

SEQ ID NO: 1642519 - DNA, 15 bp, Homo sapiens
gtctggggagccctg

SEQ ID NO: 1642520 - DNA, 15 bp, Homo sapiens
tctggggagccctga

SEQ ID NO: 1642521 - DNA, 15 bp, Homo sapiens
ctggggagccctgat

SEQ ID NO: 1642522 - DNA, 15 bp, Homo sapiens
tggggagccctgatc

SEQ ID NO: 1642523 - DNA, 15 bp, Homo sapiens
ggggagccctgatcc

SEQ ID NO: 1642524 - DNA, 15 bp, Homo sapiens
gggagccctgatcct

SEQ ID NO: 1642525 - DNA, 15 bp, Homo sapiens
ggagccctgatcctg

SEQ ID NO: 1642526 - DNA, 15 bp, Homo sapiens
gagccctgatcctga

SEQ ID NO: 1642527 - DNA, 15 bp, Homo sapiens
agccctgatcctgaa

SEQ ID NO: 1642528 - DNA, 15 bp, Homo sapiens
gccctgatcctgaag

SEQ ID NO: 1642529 - DNA, 15 bp, Homo sapiens
ccctgatcctgaagt

SEQ ID NO: 1642530 - DNA, 15 bp, Homo sapiens
cctgatcctgaagta

SEQ ID NO: 1642531 - DNA, 15 bp, Homo sapiens
ctgatcctgaagtat

SEQ ID NO: 1642532 - DNA, 15 bp, Homo sapiens
tgatcctgaagtatt

SEQ ID NO: 1642533 - DNA, 15 bp, Homo sapiens
gatcctgaagtattt

SEQ ID NO: 1642534 - DNA, 15 bp, Homo sapiens
atcctgaagtatttt

SEQ ID NO: 1642535 - DNA, 15 bp, Homo sapiens
tcctgaagtatttta

SEQ ID NO: 1642536 - DNA, 15 bp, Homo sapiens
cctgaagtattttac

SEQ ID NO: 1642537 - DNA, 15 bp, Homo sapiens
ctgaagtattttaca

SEQ ID NO: 1642538 - DNA, 15 bp, Homo sapiens
tgaagtattttacaa

SEQ ID NO: 1642539 - DNA, 15 bp, Homo sapiens
gaagtattttacaac

SEQ ID NO: 1642540 - DNA, 15 bp, Homo sapiens
aagtattttacaaca

SEQ ID NO: 1642541 - DNA, 15 bp, Homo sapiens
agtattttacaacat

SEQ ID NO: 1642542 - DNA, 15 bp, Homo sapiens
gtattttacaacatc

SEQ ID NO: 1642543 - DNA, 15 bp, Homo sapiens
tattttacaacatcc

SEQ ID NO: 1642544 - DNA, 15 bp, Homo sapiens
attttacaacatcct

SEQ ID NO: 1642545 - DNA, 15 bp, Homo sapiens
ttttacaacatcctt

SEQ ID NO: 1642546 - DNA, 15 bp, Homo sapiens
tttacaacatccttc

SEQ ID NO: 1642547 - DNA, 15 bp, Homo sapiens
ttacaacatccttca

SEQ ID NO: 1642548 - DNA, 15 bp, Homo sapiens
tacaacatccttcat

SEQ ID NO: 1642549 - DNA, 15 bp, Homo sapiens
acaacatccttcatg

SEQ ID NO: 1642550 - DNA, 15 bp, Homo sapiens
caacatccttcatga

SEQ ID NO: 1642551 - DNA, 15 bp, Homo sapiens
aacatccttcatgac

SEQ ID NO: 1642552 - DNA, 15 bp, Homo sapiens
acatccttcatgact

SEQ ID NO: 1642553 - DNA, 15 bp, Homo sapiens
catccttcatgacta

SEQ ID NO: 1642554 - DNA, 15 bp, Homo sapiens
atccttcatgactat

SEQ ID NO: 1642555 - DNA, 15 bp, Homo sapiens
tccttcatgactatt

SEQ ID NO: 1642556 - DNA, 15 bp, Homo sapiens
ccttcatgactatta

SEQ ID NO: 1642557 - DNA, 15 bp, Homo sapiens
cttcatgactattaa

SEQ ID NO: 1642558 - DNA, 15 bp, Homo sapiens
ttcatgactattaaa

SEQ ID NO: 1642559 - DNA, 15 bp, Homo sapiens
tcatgactattaaag

SEQ ID NO: 1642560 - DNA, 15 bp, Homo sapiens
catgactattaaagg

SEQ ID NO: 1642561 - DNA, 15 bp, Homo sapiens
atgactattaaaggc

SEQ ID NO: 1642562 - DNA, 15 bp, Homo sapiens
tgactattaaaggca

SEQ ID NO: 1642563 - DNA, 15 bp, Homo sapiens
gactattaaaggcaa

SEQ ID NO: 1642564 - DNA, 15 bp, Homo sapiens
actattaaaggcaac

SEQ ID NO: 1642565 - DNA, 15 bp, Homo sapiens
ctattaaaggcaaca

SEQ ID NO: 1642566 - DNA, 15 bp, Homo sapiens
tattaaaggcaacat

SEQ ID NO: 1642567 - DNA, 15 bp, Homo sapiens
attaaaggcaacata

SEQ ID NO: 1642568 - DNA, 15 bp, Homo sapiens
ttaaaggcaacataa

SEQ ID NO: 1642569 - DNA, 15 bp, Homo sapiens
taaaggcaacataaa

SEQ ID NO: 1642570 - DNA, 15 bp, Homo sapiens
aaaggcaacataaac

SEQ ID NO: 1642571 - DNA, 15 bp, Homo sapiens
aaggcaacataaaca

SEQ ID NO: 1642572 - DNA, 15 bp, Homo sapiens
aggcaacataaacac

SEQ ID NO: 1642573 - DNA, 15 bp, Homo sapiens
ggcaacataaacacc

SEQ ID NO: 1642574 - DNA, 15 bp, Homo sapiens
gcaacataaacacct

SEQ ID NO: 1642575 - DNA, 15 bp, Homo sapiens
caacataaacacctc

SEQ ID NO: 1642576 - DNA, 15 bp, Homo sapiens
aacataaacacctct

SEQ ID NO: 1642577 - DNA, 15 bp, Homo sapiens
acataaacacctctt

SEQ ID NO: 1642578 - DNA, 15 bp, Homo sapiens
cataaacacctcttg

SEQ ID NO: 1642579 - DNA, 15 bp, Homo sapiens
ataaacacctcttgt

SEQ ID NO: 1642580 - DNA, 15 bp, Homo sapiens
taaacacctcttgtc

SEQ ID NO: 1642581 - DNA, 15 bp, Homo sapiens
aaacacctcttgtca

SEQ ID NO: 1642582 - DNA, 15 bp, Homo sapiens
aacacctcttgtcag

SEQ ID NO: 1642583 - DNA, 15 bp, Homo sapiens
acacctcttgtcagc

SEQ ID NO: 1642584 - DNA, 15 bp, Homo sapiens
cacctcttgtcagca

SEQ ID NO: 1642585 - DNA, 15 bp, Homo sapiens
acctcttgtcagcaa

SEQ ID NO: 1642586 - DNA, 15 bp, Homo sapiens
cctcttgtcagcaag

SEQ ID NO: 1642587 - DNA, 15 bp, Homo sapiens
ctcttgtcagcaagg

SEQ ID NO: 1642588 - DNA, 15 bp, Homo sapiens
tcttgtcagcaaggg

SEQ ID NO: 1642589 - DNA, 15 bp, Homo sapiens
cttgtcagcaaggga

SEQ ID NO: 1642590 - DNA, 15 bp, Homo sapiens
ttgtcagcaagggaa

SEQ ID NO: 1642591 - DNA, 15 bp, Homo sapiens
tgtcagcaagggaaa

SEQ ID NO: 1642592 - DNA, 15 bp, Homo sapiens
gtcagcaagggaaac

SEQ ID NO: 1642593 - DNA, 15 bp, Homo sapiens
tcagcaagggaaact

SEQ ID NO: 1642594 - DNA, 15 bp, Homo sapiens
cagcaagggaaacta

SEQ ID NO: 1642595 - DNA, 15 bp, Homo sapiens
agcaagggaaactac

SEQ ID NO: 1642596 - DNA, 15 bp, Homo sapiens
gcaagggaaactacc

SEQ ID NO: 1642597 - DNA, 15 bp, Homo sapiens
caagggaaactaccc

SEQ ID NO: 1642598 - DNA, 15 bp, Homo sapiens
aagggaaactaccct

SEQ ID NO: 1642599 - DNA, 15 bp, Homo sapiens
agggaaactaccctt

SEQ ID NO: 1642600 - DNA, 15 bp, Homo sapiens
gggaaactacccttg

SEQ ID NO: 1642601 - DNA, 15 bp, Homo sapiens
ggaaactacccttgg

SEQ ID NO: 1642602 - DNA, 15 bp, Homo sapiens
gaaactacccttggc

SEQ ID NO: 1642603 - DNA, 15 bp, Homo sapiens
aaactacccttggca

SEQ ID NO: 1642604 - DNA, 15 bp, Homo sapiens
aactacccttggcat

SEQ ID NO: 1642605 - DNA, 15 bp, Homo sapiens
actacccttggcatt

SEQ ID NO: 1642606 - DNA, 15 bp, Homo sapiens
ctacccttggcattt

SEQ ID NO: 1642607 - DNA, 15 bp, Homo sapiens
tacccttggcatttt

SEQ ID NO: 1642608 - DNA, 15 bp, Homo sapiens
acccttggcattttt

SEQ ID NO: 1642609 - DNA, 15 bp, Homo sapiens
cccttggcatttttt

SEQ ID NO: 1642610 - DNA, 15 bp, Homo sapiens
ccttggcattttttt

SEQ ID NO: 1642611 - DNA, 15 bp, Homo sapiens
cttggcatttttttt

SEQ ID NO: 1642612 - DNA, 15 bp, Homo sapiens
ttggcattttttttt

SEQ ID NO: 1642613 - DNA, 15 bp, Homo sapiens
tggcatttttttttc

SEQ ID NO: 1642614 - DNA, 15 bp, Homo sapiens
ggcatttttttttct

SEQ ID NO: 1642615 - DNA, 15 bp, Homo sapiens
gcatttttttttctt

SEQ ID NO: 1642616 - DNA, 15 bp, Homo sapiens
catttttttttcttt

SEQ ID NO: 1642617 - DNA, 15 bp, Homo sapiens
atttttttttctttg

SEQ ID NO: 1642618 - DNA, 15 bp, Homo sapiens
tttttttttctttgt

SEQ ID NO: 1642619 - DNA, 15 bp, Homo sapiens
ttttttttctttgtt

SEQ ID NO: 1642620 - DNA, 15 bp, Homo sapiens
tttttttctttgttc

SEQ ID NO: 1642621 - DNA, 15 bp, Homo sapiens
ttttttctttgttcc

SEQ ID NO: 1642622 - DNA, 15 bp, Homo sapiens
tttttctttgttccc

SEQ ID NO: 1642623 - DNA, 15 bp, Homo sapiens
ttttctttgttcccc

SEQ ID NO: 1642624 - DNA, 15 bp, Homo sapiens
tttctttgttcccca

SEQ ID NO: 1642625 - DNA, 15 bp, Homo sapiens
ttctttgttccccag

SEQ ID NO: 1642626 - DNA, 15 bp, Homo sapiens
tctttgttccccagg

SEQ ID NO: 1642627 - DNA, 15 bp, Homo sapiens
ctttgttccccaggc

SEQ ID NO: 1642628 - DNA, 15 bp, Homo sapiens
tttgttccccaggct

SEQ ID NO: 1642629 - DNA, 15 bp, Homo sapiens
ttgttccccaggctt

SEQ ID NO: 1642630 - DNA, 15 bp, Homo sapiens
tgttccccaggcttt

SEQ ID NO: 1642631 - DNA, 15 bp, Homo sapiens
gttccccaggctttt

SEQ ID NO: 1642632 - DNA, 15 bp, Homo sapiens
ttccccaggctttta

SEQ ID NO: 1642633 - DNA, 15 bp, Homo sapiens
tccccaggcttttaa

SEQ ID NO: 1642634 - DNA, 15 bp, Homo sapiens
ccccaggcttttaaa

SEQ ID NO: 1642635 - DNA, 15 bp, Homo sapiens
cccaggcttttaaac

SEQ ID NO: 1642636 - DNA, 15 bp, Homo sapiens
ccaggcttttaaacc

SEQ ID NO: 1642637 - DNA, 15 bp, Homo sapiens
caggcttttaaacca

SEQ ID NO: 1642638 - DNA, 15 bp, Homo sapiens
aggcttttaaaccat

SEQ ID NO: 1642639 - DNA, 15 bp, Homo sapiens
ggcttttaaaccatt

SEQ ID NO: 1642640 - DNA, 15 bp, Homo sapiens
gcttttaaaccattt

SEQ ID NO: 1642641 - DNA, 15 bp, Homo sapiens
cttttaaaccatttt

SEQ ID NO: 1642642 - DNA, 15 bp, Homo sapiens
ttttaaaccattttg

SEQ ID NO: 1642643 - DNA, 15 bp, Homo sapiens
tttaaaccattttga

SEQ ID NO: 1642644 - DNA, 15 bp, Homo sapiens
ttaaaccattttgat

SEQ ID NO: 1642645 - DNA, 15 bp, Homo sapiens
taaaccattttgata

SEQ ID NO: 1642646 - DNA, 15 bp, Homo sapiens
aaaccattttgatag

SEQ ID NO: 1642647 - DNA, 15 bp, Homo sapiens
aaccattttgataga

SEQ ID NO: 1642648 - DNA, 15 bp, Homo sapiens
accattttgatagag

SEQ ID NO: 1642649 - DNA, 15 bp, Homo sapiens
ccattttgatagaga

SEQ ID NO: 1642650 - DNA, 15 bp, Homo sapiens
cattttgatagagat

SEQ ID NO: 1642651 - DNA, 15 bp, Homo sapiens
attttgatagagatt

SEQ ID NO: 1642652 - DNA, 15 bp, Homo sapiens
ttttgatagagattt

SEQ ID NO: 1642653 - DNA, 15 bp, Homo sapiens
tttgatagagatttt

SEQ ID NO: 1642654 - DNA, 15 bp, Homo sapiens
ttgatagagattttt

SEQ ID NO: 1642655 - DNA, 15 bp, Homo sapiens
tgatagagatttttt

SEQ ID NO: 1642656 - DNA, 15 bp, Homo sapiens
gatagagatttttta

SEQ ID NO: 1642657 - DNA, 15 bp, Homo sapiens
atagagattttttac

SEQ ID NO: 1642658 - DNA, 15 bp, Homo sapiens
tagagattttttaca

SEQ ID NO: 1642659 - DNA, 15 bp, Homo sapiens
agagattttttacat

SEQ ID NO: 1642660 - DNA, 15 bp, Homo sapiens
gagattttttacatc

SEQ ID NO: 1642661 - DNA, 15 bp, Homo sapiens
agattttttacatca

SEQ ID NO: 1642662 - DNA, 15 bp, Homo sapiens
gattttttacatcac

SEQ ID NO: 1642663 - DNA, 15 bp, Homo sapiens
attttttacatcaca

SEQ ID NO: 1642664 - DNA, 15 bp, Homo sapiens
ttttttacatcacag

SEQ ID NO: 1642665 - DNA, 15 bp, Homo sapiens
tttttacatcacagg

SEQ ID NO: 1642666 - DNA, 15 bp, Homo sapiens
ttttacatcacaggc

SEQ ID NO: 1642667 - DNA, 15 bp, Homo sapiens
tttacatcacaggca

SEQ ID NO: 1642668 - DNA, 15 bp, Homo sapiens
ttacatcacaggcag

SEQ ID NO: 1642669 - DNA, 15 bp, Homo sapiens
tacatcacaggcaga

SEQ ID NO: 1642670 - DNA, 15 bp, Homo sapiens
acatcacaggcagaa

SEQ ID NO: 1642671 - DNA, 15 bp, Homo sapiens
catcacaggcagaaa

SEQ ID NO: 1642672 - DNA, 15 bp, Homo sapiens
atcacaggcagaaat

SEQ ID NO: 1642673 - DNA, 15 bp, Homo sapiens
tcacaggcagaaata

SEQ ID NO: 1642674 - DNA, 15 bp, Homo sapiens
cacaggcagaaatat

SEQ ID NO: 1642675 - DNA, 15 bp, Homo sapiens
acaggcagaaatatt

SEQ ID NO: 1642676 - DNA, 15 bp, Homo sapiens
caggcagaaatattt

SEQ ID NO: 1642677 - DNA, 15 bp, Homo sapiens
aggcagaaatatttg

SEQ ID NO: 1642678 - DNA, 15 bp, Homo sapiens
ggcagaaatatttga

SEQ ID NO: 1642679 - DNA, 15 bp, Homo sapiens
gcagaaatatttgaa

SEQ ID NO: 1642680 - DNA, 15 bp, Homo sapiens
cagaaatatttgaaa

SEQ ID NO: 1642681 - DNA, 15 bp, Homo sapiens
agaaatatttgaaat

SEQ ID NO: 1642682 - DNA, 15 bp, Homo sapiens
gaaatatttgaaata

SEQ ID NO: 1642683 - DNA, 15 bp, Homo sapiens
aaatatttgaaatag

SEQ ID NO: 1642684 - DNA, 15 bp, Homo sapiens
aatatttgaaataga

SEQ ID NO: 1642685 - DNA, 15 bp, Homo sapiens
atatttgaaatagag

SEQ ID NO: 1642686 - DNA, 15 bp, Homo sapiens
tatttgaaatagagt

SEQ ID NO: 1642687 - DNA, 15 bp, Homo sapiens
atttgaaatagagtc

SEQ ID NO: 1642688 - DNA, 15 bp, Homo sapiens
tttgaaatagagtca

SEQ ID NO: 1642689 - DNA, 15 bp, Homo sapiens
ttgaaatagagtcag

SEQ ID NO: 1642690 - DNA, 15 bp, Homo sapiens
tgaaatagagtcagg

SEQ ID NO: 1642691 - DNA, 15 bp, Homo sapiens
gaaatagagtcaggt

SEQ ID NO: 1642692 - DNA, 15 bp, Homo sapiens
aaatagagtcaggtg

SEQ ID NO: 1642693 - DNA, 15 bp, Homo sapiens
aatagagtcaggtgg

SEQ ID NO: 1642694 - DNA, 15 bp, Homo sapiens
atagagtcaggtggt

SEQ ID NO: 1642695 - DNA, 15 bp, Homo sapiens
tagagtcaggtggta

SEQ ID NO: 1642696 - DNA, 15 bp, Homo sapiens
agagtcaggtggtag

SEQ ID NO: 1642697 - DNA, 15 bp, Homo sapiens
gagtcaggtggtagt

SEQ ID NO: 1642698 - DNA, 15 bp, Homo sapiens
agtcaggtggtagtc

SEQ ID NO: 1642699 - DNA, 15 bp, Homo sapiens
gtcaggtggtagtct

SEQ ID NO: 1642700 - DNA, 15 bp, Homo sapiens
tcaggtggtagtctt

SEQ ID NO: 1642701 - DNA, 15 bp, Homo sapiens
caggtggtagtcttt

SEQ ID NO: 1642702 - DNA, 15 bp, Homo sapiens
aggtggtagtcttta

SEQ ID NO: 1642703 - DNA, 15 bp, Homo sapiens
ggtggtagtctttaa

SEQ ID NO: 1642704 - DNA, 15 bp, Homo sapiens
gtggtagtctttaaa

SEQ ID NO: 1642705 - DNA, 15 bp, Homo sapiens
tggtagtctttaaaa

SEQ ID NO: 1642706 - DNA, 15 bp, Homo sapiens
ggtagtctttaaaag

SEQ ID NO: 1642707 - DNA, 15 bp, Homo sapiens
gtagtctttaaaaga

SEQ ID NO: 1642708 - DNA, 15 bp, Homo sapiens
tagtctttaaaagag

SEQ ID NO: 1642709 - DNA, 15 bp, Homo sapiens
agtctttaaaagagt

SEQ ID NO: 1642710 - DNA, 15 bp, Homo sapiens
gtctttaaaagagta

SEQ ID NO: 1642711 - DNA, 15 bp, Homo sapiens
tctttaaaagagtaa

SEQ ID NO: 1642712 - DNA, 15 bp, Homo sapiens
ctttaaaagagtaag

SEQ ID NO: 1642713 - DNA, 15 bp, Homo sapiens
tttaaaagagtaaga

SEQ ID NO: 1642714 - DNA, 15 bp, Homo sapiens
ttaaaagagtaagaa

SEQ ID NO: 1642715 - DNA, 15 bp, Homo sapiens
taaaagagtaagaaa

SEQ ID NO: 1642716 - DNA, 15 bp, Homo sapiens
aaaagagtaagaaag

SEQ ID NO: 1642717 - DNA, 15 bp, Homo sapiens
aaagagtaagaaagt

SEQ ID NO: 1642718 - DNA, 15 bp, Homo sapiens
aagagtaagaaagtt

SEQ ID NO: 1642719 - DNA, 15 bp, Homo sapiens
agagtaagaaagttg

SEQ ID NO: 1642720 - DNA, 15 bp, Homo sapiens
gagtaagaaagttgc

SEQ ID NO: 1642721 - DNA, 15 bp, Homo sapiens
agtaagaaagttgct

SEQ ID NO: 1642722 - DNA, 15 bp, Homo sapiens
gtaagaaagttgcta

SEQ ID NO: 1642723 - DNA, 15 bp, Homo sapiens
taagaaagttgctaa

SEQ ID NO: 1642724 - DNA, 15 bp, Homo sapiens
aagaaagttgctaag

SEQ ID NO: 1642725 - DNA, 15 bp, Homo sapiens
agaaagttgctaagt

SEQ ID NO: 1642726 - DNA, 15 bp, Homo sapiens
gaaagttgctaagtc

SEQ ID NO: 1642727 - DNA, 15 bp, Homo sapiens
aaagttgctaagtca

SEQ ID NO: 1642728 - DNA, 15 bp, Homo sapiens
aagttgctaagtcaa

SEQ ID NO: 1642729 - DNA, 15 bp, Homo sapiens
agttgctaagtcaag

SEQ ID NO: 1642730 - DNA, 15 bp, Homo sapiens
gttgctaagtcaaga

SEQ ID NO: 1642731 - DNA, 15 bp, Homo sapiens
ttgctaagtcaagat

SEQ ID NO: 1642732 - DNA, 15 bp, Homo sapiens
tgctaagtcaagata

SEQ ID NO: 1642733 - DNA, 15 bp, Homo sapiens
gctaagtcaagataa

SEQ ID NO: 1642734 - DNA, 15 bp, Homo sapiens
ctaagtcaagataat

SEQ ID NO: 1642735 - DNA, 15 bp, Homo sapiens
taagtcaagataatc

SEQ ID NO: 1642736 - DNA, 15 bp, Homo sapiens
aagtcaagataatct

SEQ ID NO: 1642737 - DNA, 15 bp, Homo sapiens
agtcaagataatctt

SEQ ID NO: 1642738 - DNA, 15 bp, Homo sapiens
gtcaagataatcttg

SEQ ID NO: 1642739 - DNA, 15 bp, Homo sapiens
tcaagataatcttgg

SEQ ID NO: 1642740 - DNA, 15 bp, Homo sapiens
caagataatcttgga

SEQ ID NO: 1642741 - DNA, 15 bp, Homo sapiens
aagataatcttggaa

SEQ ID NO: 1642742 - DNA, 15 bp, Homo sapiens
agataatcttggaat

SEQ ID NO: 1642743 - DNA, 15 bp, Homo sapiens
gataatcttggaata

SEQ ID NO: 1642744 - DNA, 15 bp, Homo sapiens
ataatcttggaataa

SEQ ID NO: 1642745 - DNA, 15 bp, Homo sapiens
taatcttggaataaa

SEQ ID NO: 1642746 - DNA, 15 bp, Homo sapiens
aatcttggaataaag

SEQ ID NO: 1642747 - DNA, 15 bp, Homo sapiens
atcttggaataaagt

SEQ ID NO: 1642748 - DNA, 15 bp, Homo sapiens
tcttggaataaagtc

SEQ ID NO: 1642749 - DNA, 15 bp, Homo sapiens
cttggaataaagtcc

SEQ ID NO: 1642750 - DNA, 15 bp, Homo sapiens
ttggaataaagtcct

SEQ ID NO: 1642751 - DNA, 15 bp, Homo sapiens
ggaataaagtcctct

SEQ ID NO: 1642752 - DNA, 15 bp, Homo sapiens
gaataaagtcctctg

SEQ ID NO: 1642753 - DNA, 15 bp, Homo sapiens
aataaagtcctctga

SEQ ID NO: 1642754 - DNA, 15 bp, Homo sapiens
ataaagtcctctgat

SEQ ID NO: 1642755 - DNA, 15 bp, Homo sapiens
taaagtcctctgatt

SEQ ID NO: 1642756 - DNA, 15 bp, Homo sapiens
aaagtcctctgattc

SEQ ID NO: 1642757 - DNA, 15 bp, Homo sapiens
aagtcctctgattcc

SEQ ID NO: 1642758 - DNA, 15 bp, Homo sapiens
agtcctctgattcct

SEQ ID NO: 1642759 - DNA, 15 bp, Homo sapiens
gtcctctgattcctg

SEQ ID NO: 1642760 - DNA, 15 bp, Homo sapiens
tcctctgattcctgg

SEQ ID NO: 1642761 - DNA, 15 bp, Homo sapiens
cctctgattcctggg

SEQ ID NO: 1642762 - DNA, 15 bp, Homo sapiens
ctctgattcctgggg

SEQ ID NO: 1642763 - DNA, 15 bp, Homo sapiens
tctgattcctgggga

SEQ ID NO: 1642764 - DNA, 15 bp, Homo sapiens
ctgattcctggggat

SEQ ID NO: 1642765 - DNA, 15 bp, Homo sapiens
tgattcctggggatt

SEQ ID NO: 1642766 - DNA, 15 bp, Homo sapiens
gattcctggggattc

SEQ ID NO: 1642767 - DNA, 15 bp, Homo sapiens
attcctggggattcc

SEQ ID NO: 1642768 - DNA, 15 bp, Homo sapiens
ttcctggggattcct

SEQ ID NO: 1642769 - DNA, 15 bp, Homo sapiens
tcctggggattccta

SEQ ID NO: 1642770 - DNA, 15 bp, Homo sapiens
cctggggattcctag

SEQ ID NO: 1642771 - DNA, 15 bp, Homo sapiens
ctggggattcctagg

SEQ ID NO: 1642772 - DNA, 15 bp, Homo sapiens
tggggattcctaggg

SEQ ID NO: 1642773 - DNA, 15 bp, Homo sapiens
ggggattcctaggga

SEQ ID NO: 1642774 - DNA, 15 bp, Homo sapiens
gggattcctagggat

SEQ ID NO: 1642775 - DNA, 15 bp, Homo sapiens
ggattcctagggatg

SEQ ID NO: 1642776 - DNA, 15 bp, Homo sapiens
gattcctagggatgc

SEQ ID NO: 1642777 - DNA, 15 bp, Homo sapiens
attcctagggatgcc

SEQ ID NO: 1642778 - DNA, 15 bp, Homo sapiens
ttcctagggatgccc

SEQ ID NO: 1642779 - DNA, 15 bp, Homo sapiens
tcctagggatgcccc

SEQ ID NO: 1642780 - DNA, 15 bp, Homo sapiens
cctagggatgcccca

SEQ ID NO: 1642781 - DNA, 15 bp, Homo sapiens
ctagggatgccccag

SEQ ID NO: 1642782 - DNA, 15 bp, Homo sapiens
tagggatgccccagt

SEQ ID NO: 1642783 - DNA, 15 bp, Homo sapiens
agggatgccccagtc

SEQ ID NO: 1642784 - DNA, 15 bp, Homo sapiens
gggatgccccagtca

SEQ ID NO: 1642785 - DNA, 15 bp, Homo sapiens
ggatgccccagtcac

SEQ ID NO: 1642786 - DNA, 15 bp, Homo sapiens
gatgccccagtcact

SEQ ID NO: 1642787 - DNA, 15 bp, Homo sapiens
atgccccagtcacta

SEQ ID NO: 1642788 - DNA, 15 bp, Homo sapiens
tgccccagtcactag

SEQ ID NO: 1642789 - DNA, 15 bp, Homo sapiens
gccccagtcactaga

SEQ ID NO: 1642790 - DNA, 15 bp, Homo sapiens
ccccagtcactagaa

SEQ ID NO: 1642791 - DNA, 15 bp, Homo sapiens
cccagtcactagaaa

SEQ ID NO: 1642792 - DNA, 15 bp, Homo sapiens
ccagtcactagaaaa

SEQ ID NO: 1642793 - DNA, 15 bp, Homo sapiens
cagtcactagaaaac

SEQ ID NO: 1642794 - DNA, 15 bp, Homo sapiens
agtcactagaaaaca

SEQ ID NO: 1642795 - DNA, 15 bp, Homo sapiens
gtcactagaaaacag

SEQ ID NO: 1642796 - DNA, 15 bp, Homo sapiens
tcactagaaaacaga

SEQ ID NO: 1642797 - DNA, 15 bp, Homo sapiens
cactagaaaacagag

SEQ ID NO: 1642798 - DNA, 15 bp, Homo sapiens
actagaaaacagagc

SEQ ID NO: 1642799 - DNA, 15 bp, Homo sapiens
ctagaaaacagagct

SEQ ID NO: 1642800 - DNA, 15 bp, Homo sapiens
tagaaaacagagctg

SEQ ID NO: 1642801 - DNA, 15 bp, Homo sapiens
agaaaacagagctgt

SEQ ID NO: 1642802 - DNA, 15 bp, Homo sapiens
gaaaacagagctgta

SEQ ID NO: 1642803 - DNA, 15 bp, Homo sapiens
aaaacagagctgtaa

SEQ ID NO: 1642804 - DNA, 15 bp, Homo sapiens
aaacagagctgtaag

SEQ ID NO: 1642805 - DNA, 15 bp, Homo sapiens
aacagagctgtaagt

SEQ ID NO: 1642806 - DNA, 15 bp, Homo sapiens
acagagctgtaagtc

SEQ ID NO: 1642807 - DNA, 15 bp, Homo sapiens
cagagctgtaagtcc

SEQ ID NO: 1642808 - DNA, 15 bp, Homo sapiens
agagctgtaagtcca

SEQ ID NO: 1642809 - DNA, 15 bp, Homo sapiens
gagctgtaagtccac

SEQ ID NO: 1642810 - DNA, 15 bp, Homo sapiens
agctgtaagtccact

SEQ ID NO: 1642811 - DNA, 15 bp, Homo sapiens
gctgtaagtccactc

SEQ ID NO: 1642812 - DNA, 15 bp, Homo sapiens
ctgtaagtccactct

SEQ ID NO: 1642813 - DNA, 15 bp, Homo sapiens
tgtaagtccactctc

SEQ ID NO: 1642814 - DNA, 15 bp, Homo sapiens
gtaagtccactctcc

SEQ ID NO: 1642815 - DNA, 15 bp, Homo sapiens
taagtccactctccc

SEQ ID NO: 1642816 - DNA, 15 bp, Homo sapiens
aagtccactctccca

SEQ ID NO: 1642817 - DNA, 15 bp, Homo sapiens
agtccactctcccag

SEQ ID NO: 1642818 - DNA, 15 bp, Homo sapiens
gtccactctcccagc

SEQ ID NO: 1642819 - DNA, 15 bp, Homo sapiens
tccactctcccagca

SEQ ID NO: 1642820 - DNA, 15 bp, Homo sapiens
ccactctcccagcac

SEQ ID NO: 1642821 - DNA, 15 bp, Homo sapiens
cactctcccagcact

SEQ ID NO: 1642822 - DNA, 15 bp, Homo sapiens
actctcccagcactc

SEQ ID NO: 1642823 - DNA, 15 bp, Homo sapiens
ctctcccagcactca

SEQ ID NO: 1642824 - DNA, 15 bp, Homo sapiens
tctcccagcactcaa

SEQ ID NO: 1642825 - DNA, 15 bp, Homo sapiens
ctcccagcactcaac

SEQ ID NO: 1642826 - DNA, 15 bp, Homo sapiens
tcccagcactcaacg

SEQ ID NO: 1642827 - DNA, 15 bp, Homo sapiens
cccagcactcaacgg

SEQ ID NO: 1642828 - DNA, 15 bp, Homo sapiens
ccagcactcaacgga

SEQ ID NO: 1642829 - DNA, 15 bp, Homo sapiens
cagcactcaacggag

SEQ ID NO: 1642830 - DNA, 15 bp, Homo sapiens
agcactcaacggagc

SEQ ID NO: 1642831 - DNA, 15 bp, Homo sapiens
gcactcaacggagct

SEQ ID NO: 1642832 - DNA, 15 bp, Homo sapiens
cactcaacggagctc

SEQ ID NO: 1642833 - DNA, 15 bp, Homo sapiens
actcaacggagctcc

SEQ ID NO: 1642834 - DNA, 15 bp, Homo sapiens
ctcaacggagctccg

SEQ ID NO: 1642835 - DNA, 15 bp, Homo sapiens
tcaacggagctccgg

SEQ ID NO: 1642836 - DNA, 15 bp, Homo sapiens
caacggagctccgga

SEQ ID NO: 1642837 - DNA, 15 bp, Homo sapiens
aacggagctccggaa

SEQ ID NO: 1642838 - DNA, 15 bp, Homo sapiens
acggagctccggaaa

SEQ ID NO: 1642839 - DNA, 15 bp, Homo sapiens
cggagctccggaaac

SEQ ID NO: 1642840 - DNA, 15 bp, Homo sapiens
ggagctccggaaacc

SEQ ID NO: 1642841 - DNA, 15 bp, Homo sapiens
gagctccggaaacca

SEQ ID NO: 1642842 - DNA, 15 bp, Homo sapiens
agctccggaaaccaa

SEQ ID NO: 1642843 - DNA, 15 bp, Homo sapiens
gctccggaaaccaag

SEQ ID NO: 1642844 - DNA, 15 bp, Homo sapiens
ctccggaaaccaagg

SEQ ID NO: 1642845 - DNA, 15 bp, Homo sapiens
tccggaaaccaagga

SEQ ID NO: 1642846 - DNA, 15 bp, Homo sapiens
ccggaaaccaaggag

SEQ ID NO: 1642847 - DNA, 15 bp, Homo sapiens
cggaaaccaaggagc

SEQ ID NO: 1642848 - DNA, 15 bp, Homo sapiens
ggaaaccaaggagct

SEQ ID NO: 1642849 - DNA, 15 bp, Homo sapiens
gaaaccaaggagcta

SEQ ID NO: 1642850 - DNA, 15 bp, Homo sapiens
aaaccaaggagctag

SEQ ID NO: 1642851 - DNA, 15 bp, Homo sapiens
aaccaaggagctagc

SEQ ID NO: 1642852 - DNA, 15 bp, Homo sapiens
accaaggagctagct

SEQ ID NO: 1642853 - DNA, 15 bp, Homo sapiens
ccaaggagctagcta

SEQ ID NO: 1642854 - DNA, 15 bp, Homo sapiens
caaggagctagctac

SEQ ID NO: 1642855 - DNA, 15 bp, Homo sapiens
aaggagctagctact

SEQ ID NO: 1642856 - DNA, 15 bp, Homo sapiens
aggagctagctactg

SEQ ID NO: 1642857 - DNA, 15 bp, Homo sapiens
ggagctagctactgt

SEQ ID NO: 1642858 - DNA, 15 bp, Homo sapiens
gagctagctactgtt

SEQ ID NO: 1642859 - DNA, 15 bp, Homo sapiens
agctagctactgttt

SEQ ID NO: 1642860 - DNA, 15 bp, Homo sapiens
gctagctactgtttc

SEQ ID NO: 1642861 - DNA, 15 bp, Homo sapiens
ctagctactgtttcc

SEQ ID NO: 1642862 - DNA, 15 bp, Homo sapiens
tagctactgtttccc

SEQ ID NO: 1642863 - DNA, 15 bp, Homo sapiens
agctactgtttcccc

SEQ ID NO: 1642864 - DNA, 15 bp, Homo sapiens
gctactgtttcccca

SEQ ID NO: 1642865 - DNA, 15 bp, Homo sapiens
ctactgtttccccac

SEQ ID NO: 1642866 - DNA, 15 bp, Homo sapiens
tactgtttccccaca

SEQ ID NO: 1642867 - DNA, 15 bp, Homo sapiens
actgtttccccacat

SEQ ID NO: 1642868 - DNA, 15 bp, Homo sapiens
ctgtttccccacatt

SEQ ID NO: 1642869 - DNA, 15 bp, Homo sapiens
tgtttccccacattc

SEQ ID NO: 1642870 - DNA, 15 bp, Homo sapiens
gtttccccacattca

SEQ ID NO: 1642871 - DNA, 15 bp, Homo sapiens
tttccccacattcag

SEQ ID NO: 1642872 - DNA, 15 bp, Homo sapiens
ttccccacattcagc

SEQ ID NO: 1642873 - DNA, 15 bp, Homo sapiens
tccccacattcagcc

SEQ ID NO: 1642874 - DNA, 15 bp, Homo sapiens
ccccacattcagcca

SEQ ID NO: 1642875 - DNA, 15 bp, Homo sapiens
cccacattcagccag

SEQ ID NO: 1642876 - DNA, 15 bp, Homo sapiens
ccacattcagccaga

SEQ ID NO: 1642877 - DNA, 15 bp, Homo sapiens
cacattcagccagag

SEQ ID NO: 1642878 - DNA, 15 bp, Homo sapiens
acattcagccagaga

SEQ ID NO: 1642879 - DNA, 15 bp, Homo sapiens
cattcagccagagaa

SEQ ID NO: 1642880 - DNA, 15 bp, Homo sapiens
attcagccagagaaa

SEQ ID NO: 1642881 - DNA, 15 bp, Homo sapiens
ttcagccagagaaag

SEQ ID NO: 1642882 - DNA, 15 bp, Homo sapiens
tcagccagagaaagg

SEQ ID NO: 1642883 - DNA, 15 bp, Homo sapiens
cagccagagaaaggg

SEQ ID NO: 1642884 - DNA, 15 bp, Homo sapiens
agccagagaaagggc

SEQ ID NO: 1642885 - DNA, 15 bp, Homo sapiens
gccagagaaagggca

SEQ ID NO: 1642886 - DNA, 15 bp, Homo sapiens
ccagagaaagggcag

SEQ ID NO: 1642887 - DNA, 15 bp, Homo sapiens
cagagaaagggcagc

SEQ ID NO: 1642888 - DNA, 15 bp, Homo sapiens
agagaaagggcagca

SEQ ID NO: 1642889 - DNA, 15 bp, Homo sapiens
gagaaagggcagcac

SEQ ID NO: 1642890 - DNA, 15 bp, Homo sapiens
agaaagggcagcact

SEQ ID NO: 1642891 - DNA, 15 bp, Homo sapiens
gaaagggcagcactc

SEQ ID NO: 1642892 - DNA, 15 bp, Homo sapiens
aaagggcagcactct

SEQ ID NO: 1642893 - DNA, 15 bp, Homo sapiens
aagggcagcactcta

SEQ ID NO: 1642894 - DNA, 15 bp, Homo sapiens
agggcagcactctag

SEQ ID NO: 1642895 - DNA, 15 bp, Homo sapiens
gggcagcactctagc

SEQ ID NO: 1642896 - DNA, 15 bp, Homo sapiens
ggcagcactctagca

SEQ ID NO: 1642897 - DNA, 15 bp, Homo sapiens
gcagcactctagcat

SEQ ID NO: 1642898 - DNA, 15 bp, Homo sapiens
cagcactctagcatg

SEQ ID NO: 1642899 - DNA, 15 bp, Homo sapiens
agcactctagcatgc

SEQ ID NO: 1642900 - DNA, 15 bp, Homo sapiens
gcactctagcatgca

SEQ ID NO: 1642901 - DNA, 15 bp, Homo sapiens
cactctagcatgcaa

SEQ ID NO: 1642902 - DNA, 15 bp, Homo sapiens
actctagcatgcaaa

SEQ ID NO: 1642903 - DNA, 15 bp, Homo sapiens
ctctagcatgcaaac

SEQ ID NO: 1642904 - DNA, 15 bp, Homo sapiens
tctagcatgcaaact

SEQ ID NO: 1642905 - DNA, 15 bp, Homo sapiens
ctagcatgcaaactg

SEQ ID NO: 1642906 - DNA, 15 bp, Homo sapiens
tagcatgcaaactgc

SEQ ID NO: 1642907 - DNA, 15 bp, Homo sapiens
agcatgcaaactgct

SEQ ID NO: 1642908 - DNA, 15 bp, Homo sapiens
gcatgcaaactgctt

SEQ ID NO: 1642909 - DNA, 15 bp, Homo sapiens
catgcaaactgcttt

SEQ ID NO: 1642910 - DNA, 15 bp, Homo sapiens
atgcaaactgctttg

SEQ ID NO: 1642911 - DNA, 15 bp, Homo sapiens
tgcaaactgctttga

SEQ ID NO: 1642912 - DNA, 15 bp, Homo sapiens
gcaaactgctttgac

SEQ ID NO: 1642913 - DNA, 15 bp, Homo sapiens
caaactgctttgaca

SEQ ID NO: 1642914 - DNA, 15 bp, Homo sapiens
aaactgctttgacaa

SEQ ID NO: 1642915 - DNA, 15 bp, Homo sapiens
aactgctttgacaat

SEQ ID NO: 1642916 - DNA, 15 bp, Homo sapiens
actgctttgacaata

SEQ ID NO: 1642917 - DNA, 15 bp, Homo sapiens
ctgctttgacaatag

SEQ ID NO: 1642918 - DNA, 15 bp, Homo sapiens
tgctttgacaatagt

SEQ ID NO: 1642919 - DNA, 15 bp, Homo sapiens
gctttgacaatagta

SEQ ID NO: 1642920 - DNA, 15 bp, Homo sapiens
ctttgacaatagtaa

SEQ ID NO: 1642921 - DNA, 15 bp, Homo sapiens
tttgacaatagtaac

SEQ ID NO: 1642922 - DNA, 15 bp, Homo sapiens
ttgacaatagtaaca

SEQ ID NO: 1642923 - DNA, 15 bp, Homo sapiens
tgacaatagtaacaa

SEQ ID NO: 1642924 - DNA, 15 bp, Homo sapiens
gacaatagtaacaat

SEQ ID NO: 1642925 - DNA, 15 bp, Homo sapiens
acaatagtaacaatt

SEQ ID NO: 1642926 - DNA, 15 bp, Homo sapiens
caatagtaacaatta

SEQ ID NO: 1642927 - DNA, 15 bp, Homo sapiens
aatagtaacaattaa

SEQ ID NO: 1642928 - DNA, 15 bp, Homo sapiens
atagtaacaattaaa

SEQ ID NO: 1642929 - DNA, 15 bp, Homo sapiens
tagtaacaattaaaa

SEQ ID NO: 1642930 - DNA, 15 bp, Homo sapiens
agtaacaattaaaaa

SEQ ID NO: 1642931 - DNA, 15 bp, Homo sapiens
gtaacaattaaaaag

SEQ ID NO: 1642932 - DNA, 15 bp, Homo sapiens
taacaattaaaaagt

SEQ ID NO: 1642933 - DNA, 15 bp, Homo sapiens
aacaattaaaaagta

SEQ ID NO: 1642934 - DNA, 15 bp, Homo sapiens
acaattaaaaagtaa

SEQ ID NO: 1642935 - DNA, 15 bp, Homo sapiens
caattaaaaagtaaa

SEQ ID NO: 1642936 - DNA, 15 bp, Homo sapiens
aattaaaaagtaaat

SEQ ID NO: 1642937 - DNA, 15 bp, Homo sapiens
attaaaaagtaaatt

SEQ ID NO: 1642938 - DNA, 15 bp, Homo sapiens
ttaaaaagtaaatta

SEQ ID NO: 1642939 - DNA, 15 bp, Homo sapiens
taaaaagtaaattaa

SEQ ID NO: 1642940 - DNA, 15 bp, Homo sapiens
aaaagtaaattaaaa

SEQ ID NO: 1642941 - DNA, 15 bp, Homo sapiens
aaagtaaattaaaaa

SEQ ID NO: 1642942 - DNA, 15 bp, Homo sapiens
aagtaaattaaaaag

SEQ ID NO: 1642943 - DNA, 15 bp, Homo sapiens
agtaaattaaaaaga

SEQ ID NO: 1642944 - DNA, 15 bp, Homo sapiens
gtaaattaaaaagaa

SEQ ID NO: 1642945 - DNA, 15 bp, Homo sapiens
taaattaaaaagaat

SEQ ID NO: 1642946 - DNA, 15 bp, Homo sapiens
aaattaaaaagaatc

SEQ ID NO: 1642947 - DNA, 15 bp, Homo sapiens
aattaaaaagaatca

SEQ ID NO: 1642948 - DNA, 15 bp, Homo sapiens
attaaaaagaatcat

SEQ ID NO: 1642949 - DNA, 15 bp, Homo sapiens
ttaaaaagaatcata

SEQ ID NO: 1642950 - DNA, 15 bp, Homo sapiens
aaaagaatcataata

SEQ ID NO: 1642951 - DNA, 15 bp, Homo sapiens
aaagaatcataatag

SEQ ID NO: 1642952 - DNA, 15 bp, Homo sapiens
aagaatcataatagc

SEQ ID NO: 1642953 - DNA, 15 bp, Homo sapiens
agaatcataatagct

SEQ ID NO: 1642954 - DNA, 15 bp, Homo sapiens
aatcataatagctga

SEQ ID NO: 1642955 - DNA, 15 bp, Homo sapiens
atcataatagctgat

SEQ ID NO: 1642956 - DNA, 15 bp, Homo sapiens
tcataatagctgata

SEQ ID NO: 1642957 - DNA, 15 bp, Homo sapiens
cataatagctgatat

SEQ ID NO: 1642958 - DNA, 15 bp, Homo sapiens
ataatagctgatatt

SEQ ID NO: 1642959 - DNA, 15 bp, Homo sapiens
taatagctgatattg

SEQ ID NO: 1642960 - DNA, 15 bp, Homo sapiens
aatagctgatattga

SEQ ID NO: 1642961 - DNA, 15 bp, Homo sapiens
atagctgatattgat

SEQ ID NO: 1642962 - DNA, 15 bp, Homo sapiens
tagctgatattgatt

SEQ ID NO: 1642963 - DNA, 15 bp, Homo sapiens
agctgatattgatta

SEQ ID NO: 1642964 - DNA, 15 bp, Homo sapiens
gctgatattgattag

SEQ ID NO: 1642965 - DNA, 15 bp, Homo sapiens
ctgatattgattagg

SEQ ID NO: 1642966 - DNA, 15 bp, Homo sapiens
tgatattgattaggt

SEQ ID NO: 1642967 - DNA, 15 bp, Homo sapiens
gatattgattaggta

SEQ ID NO: 1642968 - DNA, 15 bp, Homo sapiens
atattgattaggtac

SEQ ID NO: 1642969 - DNA, 15 bp, Homo sapiens
tattgattaggtact

SEQ ID NO: 1642970 - DNA, 15 bp, Homo sapiens
attgattaggtactt

SEQ ID NO: 1642971 - DNA, 15 bp, Homo sapiens
ttgattaggtacttg

SEQ ID NO: 1642972 - DNA, 15 bp, Homo sapiens
tgattaggtacttgc

SEQ ID NO: 1642973 - DNA, 15 bp, Homo sapiens
gattaggtacttgcc

SEQ ID NO: 1642974 - DNA, 15 bp, Homo sapiens
attaggtacttgccc

SEQ ID NO: 1642975 - DNA, 15 bp, Homo sapiens
ttaggtacttgccct

SEQ ID NO: 1642976 - DNA, 15 bp, Homo sapiens
taggtacttgccctg

SEQ ID NO: 1642977 - DNA, 15 bp, Homo sapiens
aggtacttgccctgt

SEQ ID NO: 1642978 - DNA, 15 bp, Homo sapiens
ggtacttgccctgtg

SEQ ID NO: 1642979 - DNA, 15 bp, Homo sapiens
gtacttgccctgtgg

SEQ ID NO: 1642980 - DNA, 15 bp, Homo sapiens
tacttgccctgtggc

SEQ ID NO: 1642981 - DNA, 15 bp, Homo sapiens
acttgccctgtggca

SEQ ID NO: 1642982 - DNA, 15 bp, Homo sapiens
cttgccctgtggcaa

SEQ ID NO: 1642983 - DNA, 15 bp, Homo sapiens
ttgccctgtggcaag

SEQ ID NO: 1642984 - DNA, 15 bp, Homo sapiens
tgccctgtggcaaga

SEQ ID NO: 1642985 - DNA, 15 bp, Homo sapiens
gccctgtggcaagag

SEQ ID NO: 1642986 - DNA, 15 bp, Homo sapiens
ccctgtggcaagagc

SEQ ID NO: 1642987 - DNA, 15 bp, Homo sapiens
cctgtggcaagagct

SEQ ID NO: 1642988 - DNA, 15 bp, Homo sapiens
ctgtggcaagagcta

SEQ ID NO: 1642989 - DNA, 15 bp, Homo sapiens
tgtggcaagagctat

SEQ ID NO: 1642990 - DNA, 15 bp, Homo sapiens
gtggcaagagctata

SEQ ID NO: 1642991 - DNA, 15 bp, Homo sapiens
tggcaagagctatag

SEQ ID NO: 1642992 - DNA, 15 bp, Homo sapiens
ggcaagagctatagg

SEQ ID NO: 1642993 - DNA, 15 bp, Homo sapiens
gcaagagctataggg

SEQ ID NO: 1642994 - DNA, 15 bp, Homo sapiens
caagagctataggga

SEQ ID NO: 1642995 - DNA, 15 bp, Homo sapiens
aagagctatagggaa

SEQ ID NO: 1642996 - DNA, 15 bp, Homo sapiens
agagctatagggaat

SEQ ID NO: 1642997 - DNA, 15 bp, Homo sapiens
gagctatagggaatc

SEQ ID NO: 1642998 - DNA, 15 bp, Homo sapiens
agctatagggaatca

SEQ ID NO: 1642999 - DNA, 15 bp, Homo sapiens
gctatagggaatcac

SEQ ID NO: 1643000 - DNA, 15 bp, Homo sapiens
ctatagggaatcacc

SEQ ID NO: 1643001 - DNA, 15 bp, Homo sapiens
tatagggaatcacct

SEQ ID NO: 1643002 - DNA, 15 bp, Homo sapiens
atagggaatcacctc

SEQ ID NO: 1643003 - DNA, 15 bp, Homo sapiens
tagggaatcacctca

SEQ ID NO: 1643004 - DNA, 15 bp, Homo sapiens
agggaatcacctcat

SEQ ID NO: 1643005 - DNA, 15 bp, Homo sapiens
gggaatcacctcatt

SEQ ID NO: 1643006 - DNA, 15 bp, Homo sapiens
ggaatcacctcattt

SEQ ID NO: 1643007 - DNA, 15 bp, Homo sapiens
gaatcacctcattta

SEQ ID NO: 1643008 - DNA, 15 bp, Homo sapiens
aatcacctcatttaa

SEQ ID NO: 1643009 - DNA, 15 bp, Homo sapiens
atcacctcatttaat

SEQ ID NO: 1643010 - DNA, 15 bp, Homo sapiens
tcacctcatttaatc

SEQ ID NO: 1643011 - DNA, 15 bp, Homo sapiens
cacctcatttaatct

SEQ ID NO: 1643012 - DNA, 15 bp, Homo sapiens
acctcatttaatctt

SEQ ID NO: 1643013 - DNA, 15 bp, Homo sapiens
cctcatttaatcttc

SEQ ID NO: 1643014 - DNA, 15 bp, Homo sapiens
ctcatttaatcttca

SEQ ID NO: 1643015 - DNA, 15 bp, Homo sapiens
tcatttaatcttcac

SEQ ID NO: 1643016 - DNA, 15 bp, Homo sapiens
catttaatcttcaca

SEQ ID NO: 1643017 - DNA, 15 bp, Homo sapiens
atttaatcttcacat

SEQ ID NO: 1643018 - DNA, 15 bp, Homo sapiens
tttaatcttcacatg

SEQ ID NO: 1643019 - DNA, 15 bp, Homo sapiens
ttaatcttcacatga

SEQ ID NO: 1643020 - DNA, 15 bp, Homo sapiens
taatcttcacatgaa

SEQ ID NO: 1643021 - DNA, 15 bp, Homo sapiens
aatcttcacatgaag

SEQ ID NO: 1643022 - DNA, 15 bp, Homo sapiens
atcttcacatgaagc

SEQ ID NO: 1643023 - DNA, 15 bp, Homo sapiens
tcttcacatgaagct

SEQ ID NO: 1643024 - DNA, 15 bp, Homo sapiens
cttcacatgaagctt

SEQ ID NO: 1643025 - DNA, 15 bp, Homo sapiens
ttcacatgaagcttg

SEQ ID NO: 1643026 - DNA, 15 bp, Homo sapiens
tcacatgaagcttgc

SEQ ID NO: 1643027 - DNA, 15 bp, Homo sapiens
cacatgaagcttgca

SEQ ID NO: 1643028 - DNA, 15 bp, Homo sapiens
acatgaagcttgcag

SEQ ID NO: 1643029 - DNA, 15 bp, Homo sapiens
catgaagcttgcaga

SEQ ID NO: 1643030 - DNA, 15 bp, Homo sapiens
atgaagcttgcagag

SEQ ID NO: 1643031 - DNA, 15 bp, Homo sapiens
tgaagcttgcagagt

SEQ ID NO: 1643032 - DNA, 15 bp, Homo sapiens
gaagcttgcagagtg

SEQ ID NO: 1643033 - DNA, 15 bp, Homo sapiens
aagcttgcagagtga

SEQ ID NO: 1643034 - DNA, 15 bp, Homo sapiens
agcttgcagagtgag

SEQ ID NO: 1643035 - DNA, 15 bp, Homo sapiens
gcttgcagagtgagt

SEQ ID NO: 1643036 - DNA, 15 bp, Homo sapiens
cttgcagagtgagta

SEQ ID NO: 1643037 - DNA, 15 bp, Homo sapiens
ttgcagagtgagtac

SEQ ID NO: 1643038 - DNA, 15 bp, Homo sapiens
tgcagagtgagtacc

SEQ ID NO: 1643039 - DNA, 15 bp, Homo sapiens
gcagagtgagtacca

SEQ ID NO: 1643040 - DNA, 15 bp, Homo sapiens
cagagtgagtaccac

SEQ ID NO: 1643041 - DNA, 15 bp, Homo sapiens
agagtgagtaccaca

SEQ ID NO: 1643042 - DNA, 15 bp, Homo sapiens
gagtgagtaccacaa

SEQ ID NO: 1643043 - DNA, 15 bp, Homo sapiens
agtgagtaccacaat

SEQ ID NO: 1643044 - DNA, 15 bp, Homo sapiens
gtgagtaccacaatt

SEQ ID NO: 1643045 - DNA, 15 bp, Homo sapiens
tgagtaccacaatta

SEQ ID NO: 1643046 - DNA, 15 bp, Homo sapiens
aaagaagtacctcag

SEQ ID NO: 1643047 - DNA, 15 bp, Homo sapiens
aagaagtacctcagg

SEQ ID NO: 1643048 - DNA, 15 bp, Homo sapiens
agaagtacctcaggt

SEQ ID NO: 1643049 - DNA, 15 bp, Homo sapiens
gaagtacctcaggtt

SEQ ID NO: 1643050 - DNA, 15 bp, Homo sapiens
aagtacctcaggttt

SEQ ID NO: 1643051 - DNA, 15 bp, Homo sapiens
agtacctcaggttta

SEQ ID NO: 1643052 - DNA, 15 bp, Homo sapiens
gtacctcaggtttat

SEQ ID NO: 1643053 - DNA, 15 bp, Homo sapiens
tacctcaggtttatg

SEQ ID NO: 1643054 - DNA, 15 bp, Homo sapiens
acctcaggtttatgc

SEQ ID NO: 1643055 - DNA, 15 bp, Homo sapiens
cctcaggtttatgca

SEQ ID NO: 1643056 - DNA, 15 bp, Homo sapiens
ctcaggtttatgcat

SEQ ID NO: 1643057 - DNA, 15 bp, Homo sapiens
tcaggtttatgcata

SEQ ID NO: 1643058 - DNA, 15 bp, Homo sapiens
caggtttatgcatat

SEQ ID NO: 1643059 - DNA, 15 bp, Homo sapiens
aggtttatgcatata

SEQ ID NO: 1643060 - DNA, 15 bp, Homo sapiens
ggtttatgcatataa

SEQ ID NO: 1643061 - DNA, 15 bp, Homo sapiens
gtttatgcatataaa

SEQ ID NO: 1643062 - DNA, 15 bp, Homo sapiens
tttatgcatataaat

SEQ ID NO: 1643063 - DNA, 15 bp, Homo sapiens
ttatgcatataaatg

SEQ ID NO: 1643064 - DNA, 15 bp, Homo sapiens
tatgcatataaatgc

SEQ ID NO: 1643065 - DNA, 15 bp, Homo sapiens
atgcatataaatgcc

SEQ ID NO: 1643066 - DNA, 15 bp, Homo sapiens
tgcatataaatgcca

SEQ ID NO: 1643067 - DNA, 15 bp, Homo sapiens
gcatataaatgccag

SEQ ID NO: 1643068 - DNA, 15 bp, Homo sapiens
catataaatgccagt

SEQ ID NO: 1643069 - DNA, 15 bp, Homo sapiens
atataaatgccagtt

SEQ ID NO: 1643070 - DNA, 15 bp, Homo sapiens
tataaatgccagttc

SEQ ID NO: 1643071 - DNA, 15 bp, Homo sapiens
ataaatgccagttcc

SEQ ID NO: 1643072 - DNA, 15 bp, Homo sapiens
taaatgccagttcct

SEQ ID NO: 1643073 - DNA, 15 bp, Homo sapiens
aaatgccagttcctc

SEQ ID NO: 1643074 - DNA, 15 bp, Homo sapiens
aatgccagttcctcc

SEQ ID NO: 1643075 - DNA, 15 bp, Homo sapiens
atgccagttcctcct

SEQ ID NO: 1643076 - DNA, 15 bp, Homo sapiens
tgccagttcctcctt

SEQ ID NO: 1643077 - DNA, 15 bp, Homo sapiens
gccagttcctccttg

SEQ ID NO: 1643078 - DNA, 15 bp, Homo sapiens
ccagttcctccttga

SEQ ID NO: 1643079 - DNA, 15 bp, Homo sapiens
cagttcctccttgat

SEQ ID NO: 1643080 - DNA, 15 bp, Homo sapiens
agttcctccttgatt

SEQ ID NO: 1643081 - DNA, 15 bp, Homo sapiens
gttcctccttgattt

SEQ ID NO: 1643082 - DNA, 15 bp, Homo sapiens
ttcctccttgatttt

SEQ ID NO: 1643083 - DNA, 15 bp, Homo sapiens
tcctccttgatttta

SEQ ID NO: 1643084 - DNA, 15 bp, Homo sapiens
cctccttgattttat

SEQ ID NO: 1643085 - DNA, 15 bp, Homo sapiens
ctccttgattttatt

SEQ ID NO: 1643086 - DNA, 15 bp, Homo sapiens
tccttgattttattt

SEQ ID NO: 1643087 - DNA, 15 bp, Homo sapiens
ccttgattttatttc

SEQ ID NO: 1643088 - DNA, 15 bp, Homo sapiens
cttgattttatttca

SEQ ID NO: 1643089 - DNA, 15 bp, Homo sapiens
ttgattttatttcaa

SEQ ID NO: 1643090 - DNA, 15 bp, Homo sapiens
tgattttatttcaaa

SEQ ID NO: 1643091 - DNA, 15 bp, Homo sapiens
gattttatttcaaaa

SEQ ID NO: 1643092 - DNA, 15 bp, Homo sapiens
attttatttcaaaac

SEQ ID NO: 1643093 - DNA, 15 bp, Homo sapiens
ttttatttcaaaact

SEQ ID NO: 1643094 - DNA, 15 bp, Homo sapiens
tttatttcaaaactc

SEQ ID NO: 1643095 - DNA, 15 bp, Homo sapiens
ttatttcaaaactcc

SEQ ID NO: 1643096 - DNA, 15 bp, Homo sapiens
tatttcaaaactcct

SEQ ID NO: 1643097 - DNA, 15 bp, Homo sapiens
atttcaaaactcctg

SEQ ID NO: 1643098 - DNA, 15 bp, Homo sapiens
tttcaaaactcctgt

SEQ ID NO: 1643099 - DNA, 15 bp, Homo sapiens
ttcaaaactcctgtc

SEQ ID NO: 1643100 - DNA, 15 bp, Homo sapiens
tcaaaactcctgtct

SEQ ID NO: 1643101 - DNA, 15 bp, Homo sapiens
caaaactcctgtcta

SEQ ID NO: 1643102 - DNA, 15 bp, Homo sapiens
aaaactcctgtctac

SEQ ID NO: 1643103 - DNA, 15 bp, Homo sapiens
aaactcctgtctaca

SEQ ID NO: 1643104 - DNA, 15 bp, Homo sapiens
aactcctgtctacat

SEQ ID NO: 1643105 - DNA, 15 bp, Homo sapiens
actcctgtctacata

SEQ ID NO: 1643106 - DNA, 15 bp, Homo sapiens
ctcctgtctacatac

SEQ ID NO: 1643107 - DNA, 15 bp, Homo sapiens
tcctgtctacatact

SEQ ID NO: 1643108 - DNA, 15 bp, Homo sapiens
cctgtctacatactt

SEQ ID NO: 1643109 - DNA, 15 bp, Homo sapiens
ctgtctacatacttt

SEQ ID NO: 1643110 - DNA, 15 bp, Homo sapiens
tgtctacatactttg

SEQ ID NO: 1643111 - DNA, 15 bp, Homo sapiens
gtctacatactttgc

SEQ ID NO: 1643112 - DNA, 15 bp, Homo sapiens
tctacatactttgca

SEQ ID NO: 1643113 - DNA, 15 bp, Homo sapiens
ctacatactttgcaa

SEQ ID NO: 1643114 - DNA, 15 bp, Homo sapiens
tacatactttgcaat

SEQ ID NO: 1643115 - DNA, 15 bp, Homo sapiens
acatactttgcaatt

SEQ ID NO: 1643116 - DNA, 15 bp, Homo sapiens
catactttgcaattt

SEQ ID NO: 1643117 - DNA, 15 bp, Homo sapiens
atactttgcaattta

SEQ ID NO: 1643118 - DNA, 15 bp, Homo sapiens
tactttgcaatttaa

SEQ ID NO: 1643119 - DNA, 15 bp, Homo sapiens
actttgcaatttaaa

SEQ ID NO: 1643120 - DNA, 15 bp, Homo sapiens
ctttgcaatttaaat

SEQ ID NO: 1643121 - DNA, 15 bp, Homo sapiens
tttgcaatttaaata

SEQ ID NO: 1643122 - DNA, 15 bp, Homo sapiens
ttgcaatttaaatac

SEQ ID NO: 1643123 - DNA, 15 bp, Homo sapiens
tgcaatttaaataca

SEQ ID NO: 1643124 - DNA, 15 bp, Homo sapiens
gcaatttaaatacat

SEQ ID NO: 1643125 - DNA, 15 bp, Homo sapiens
caatttaaatacatt

SEQ ID NO: 1643126 - DNA, 15 bp, Homo sapiens
aatttaaatacattc

SEQ ID NO: 1643127 - DNA, 15 bp, Homo sapiens
atttaaatacattca

SEQ ID NO: 1643128 - DNA, 15 bp, Homo sapiens
tttaaatacattcaa

SEQ ID NO: 1643129 - DNA, 15 bp, Homo sapiens
ttaaatacattcaag

SEQ ID NO: 1643130 - DNA, 15 bp, Homo sapiens
taaatacattcaagg

SEQ ID NO: 1643131 - DNA, 15 bp, Homo sapiens
aaatacattcaagga

SEQ ID NO: 1643132 - DNA, 15 bp, Homo sapiens
aatacattcaaggat

SEQ ID NO: 1643133 - DNA, 15 bp, Homo sapiens
atacattcaaggata

SEQ ID NO: 1643134 - DNA, 15 bp, Homo sapiens
tacattcaaggataa

SEQ ID NO: 1643135 - DNA, 15 bp, Homo sapiens
acattcaaggataaa

SEQ ID NO: 1643136 - DNA, 15 bp, Homo sapiens
cattcaaggataaag

SEQ ID NO: 1643137 - DNA, 15 bp, Homo sapiens
attcaaggataaagt

SEQ ID NO: 1643138 - DNA, 15 bp, Homo sapiens
ttcaaggataaagta

SEQ ID NO: 1643139 - DNA, 15 bp, Homo sapiens
tcaaggataaagtaa

SEQ ID NO: 1643140 - DNA, 15 bp, Homo sapiens
caaggataaagtaat

SEQ ID NO: 1643141 - DNA, 15 bp, Homo sapiens
aaggataaagtaata

SEQ ID NO: 1643142 - DNA, 15 bp, Homo sapiens
aggataaagtaataa

SEQ ID NO: 1643143 - DNA, 15 bp, Homo sapiens
ggataaagtaataac

SEQ ID NO: 1643144 - DNA, 15 bp, Homo sapiens
gataaagtaataact

SEQ ID NO: 1643145 - DNA, 15 bp, Homo sapiens
ataaagtaataactg

SEQ ID NO: 1643146 - DNA, 15 bp, Homo sapiens
taaagtaataactgt

SEQ ID NO: 1643147 - DNA, 15 bp, Homo sapiens
aaagtaataactgta

SEQ ID NO: 1643148 - DNA, 15 bp, Homo sapiens
aagtaataactgtag

SEQ ID NO: 1643149 - DNA, 15 bp, Homo sapiens
agtaataactgtagg

SEQ ID NO: 1643150 - DNA, 15 bp, Homo sapiens
gtaataactgtagga

SEQ ID NO: 1643151 - DNA, 15 bp, Homo sapiens
taataactgtaggaa

SEQ ID NO: 1643152 - DNA, 15 bp, Homo sapiens
aataactgtaggaaa

SEQ ID NO: 1643153 - DNA, 15 bp, Homo sapiens
ataactgtaggaaaa

SEQ ID NO: 1643154 - DNA, 15 bp, Homo sapiens
taactgtaggaaaag

SEQ ID NO: 1643155 - DNA, 15 bp, Homo sapiens
aactgtaggaaaagt

SEQ ID NO: 1643156 - DNA, 15 bp, Homo sapiens
actgtaggaaaagta

SEQ ID NO: 1643157 - DNA, 15 bp, Homo sapiens
ctgtaggaaaagtat

SEQ ID NO: 1643158 - DNA, 15 bp, Homo sapiens
tgtaggaaaagtatt

SEQ ID NO: 1643159 - DNA, 15 bp, Homo sapiens
gtaggaaaagtatta

SEQ ID NO: 1643160 - DNA, 15 bp, Homo sapiens
taggaaaagtattat

SEQ ID NO: 1643161 - DNA, 15 bp, Homo sapiens
aggaaaagtattata

SEQ ID NO: 1643162 - DNA, 15 bp, Homo sapiens
ggaaaagtattataa

SEQ ID NO: 1643163 - DNA, 15 bp, Homo sapiens
gaaaagtattataat

SEQ ID NO: 1643164 - DNA, 15 bp, Homo sapiens
aaaagtattataata

SEQ ID NO: 1643165 - DNA, 15 bp, Homo sapiens
aaagtattataatat

SEQ ID NO: 1643166 - DNA, 15 bp, Homo sapiens
aagtattataatata

SEQ ID NO: 1643167 - DNA, 15 bp, Homo sapiens
agtattataatataa

SEQ ID NO: 1643168 - DNA, 15 bp, Homo sapiens
gtattataatataat

SEQ ID NO: 1643169 - DNA, 15 bp, Homo sapiens
tattataatataatg

SEQ ID NO: 1643170 - DNA, 15 bp, Homo sapiens
attataatataatga

SEQ ID NO: 1643171 - DNA, 15 bp, Homo sapiens
ttataatataatgac

SEQ ID NO: 1643172 - DNA, 15 bp, Homo sapiens
tataatataatgact

SEQ ID NO: 1643173 - DNA, 15 bp, Homo sapiens
ataatataatgactt

SEQ ID NO: 1643174 - DNA, 15 bp, Homo sapiens
taatataatgactta

SEQ ID NO: 1643175 - DNA, 15 bp, Homo sapiens
aatataatgacttag

SEQ ID NO: 1643176 - DNA, 15 bp, Homo sapiens
atataatgacttagt

SEQ ID NO: 1643177 - DNA, 15 bp, Homo sapiens
tataatgacttagtt

SEQ ID NO: 1643178 - DNA, 15 bp, Homo sapiens
ataatgacttagttc

SEQ ID NO: 1643179 - DNA, 15 bp, Homo sapiens
taatgacttagttct

SEQ ID NO: 1643180 - DNA, 15 bp, Homo sapiens
aatgacttagttctg

SEQ ID NO: 1643181 - DNA, 15 bp, Homo sapiens
atgacttagttctgc

SEQ ID NO: 1643182 - DNA, 15 bp, Homo sapiens
tgacttagttctgca

SEQ ID NO: 1643183 - DNA, 15 bp, Homo sapiens
gacttagttctgcac

SEQ ID NO: 1643184 - DNA, 15 bp, Homo sapiens
acttagttctgcaca

SEQ ID NO: 1643185 - DNA, 15 bp, Homo sapiens
cttagttctgcacat

SEQ ID NO: 1643186 - DNA, 15 bp, Homo sapiens
ttagttctgcacatc

SEQ ID NO: 1643187 - DNA, 15 bp, Homo sapiens
tagttctgcacatca

SEQ ID NO: 1643188 - DNA, 15 bp, Homo sapiens
agttctgcacatcac

SEQ ID NO: 1643189 - DNA, 15 bp, Homo sapiens
gttctgcacatcaca

SEQ ID NO: 1643190 - DNA, 15 bp, Homo sapiens
ttctgcacatcacaa

SEQ ID NO: 1643191 - DNA, 15 bp, Homo sapiens
tctgcacatcacaag

SEQ ID NO: 1643192 - DNA, 15 bp, Homo sapiens
ctgcacatcacaagg

SEQ ID NO: 1643193 - DNA, 15 bp, Homo sapiens
tgcacatcacaaggg

SEQ ID NO: 1643194 - DNA, 15 bp, Homo sapiens
gcacatcacaagggg

SEQ ID NO: 1643195 - DNA, 15 bp, Homo sapiens
cacatcacaaggggg

SEQ ID NO: 1643196 - DNA, 15 bp, Homo sapiens
acatcacaagggggt

SEQ ID NO: 1643197 - DNA, 15 bp, Homo sapiens
catcacaagggggtc

SEQ ID NO: 1643198 - DNA, 15 bp, Homo sapiens
atcacaagggggtcc

SEQ ID NO: 1643199 - DNA, 15 bp, Homo sapiens
tcacaagggggtccc

SEQ ID NO: 1643200 - DNA, 15 bp, Homo sapiens
cacaagggggtccct

SEQ ID NO: 1643201 - DNA, 15 bp, Homo sapiens
acaagggggtccctc

SEQ ID NO: 1643202 - DNA, 15 bp, Homo sapiens
caagggggtccctca

SEQ ID NO: 1643203 - DNA, 15 bp, Homo sapiens
aagggggtccctcat

SEQ ID NO: 1643204 - DNA, 15 bp, Homo sapiens
agggggtccctcata

SEQ ID NO: 1643205 - DNA, 15 bp, Homo sapiens
gggggtccctcatac

SEQ ID NO: 1643206 - DNA, 15 bp, Homo sapiens
ggggtccctcatact

SEQ ID NO: 1643207 - DNA, 15 bp, Homo sapiens
gggtccctcatactc

SEQ ID NO: 1643208 - DNA, 15 bp, Homo sapiens
ggtccctcatactca

SEQ ID NO: 1643209 - DNA, 15 bp, Homo sapiens
gtccctcatactcat

SEQ ID NO: 1643210 - DNA, 15 bp, Homo sapiens
tccctcatactcatt

SEQ ID NO: 1643211 - DNA, 15 bp, Homo sapiens
ccctcatactcattc

SEQ ID NO: 1643212 - DNA, 15 bp, Homo sapiens
cctcatactcattca

SEQ ID NO: 1643213 - DNA, 15 bp, Homo sapiens
ctcatactcattcat

SEQ ID NO: 1643214 - DNA, 15 bp, Homo sapiens
tcatactcattcatt

SEQ ID NO: 1643215 - DNA, 15 bp, Homo sapiens
catactcattcattc

SEQ ID NO: 1643216 - DNA, 15 bp, Homo sapiens
atactcattcattca

SEQ ID NO: 1643217 - DNA, 15 bp, Homo sapiens
tactcattcattcat

SEQ ID NO: 1643218 - DNA, 15 bp, Homo sapiens
actcattcattcatt

SEQ ID NO: 1643219 - DNA, 15 bp, Homo sapiens
ctcattcattcattt

SEQ ID NO: 1643220 - DNA, 15 bp, Homo sapiens
tcattcattcatttc

SEQ ID NO: 1643221 - DNA, 15 bp, Homo sapiens
cattcattcatttca

SEQ ID NO: 1643222 - DNA, 15 bp, Homo sapiens
attcattcatttcac

SEQ ID NO: 1643223 - DNA, 15 bp, Homo sapiens
ttcattcatttcact

SEQ ID NO: 1643224 - DNA, 15 bp, Homo sapiens
tcattcatttcactc

SEQ ID NO: 1643225 - DNA, 15 bp, Homo sapiens
cattcatttcactca

SEQ ID NO: 1643226 - DNA, 15 bp, Homo sapiens
attcatttcactcat

SEQ ID NO: 1643227 - DNA, 15 bp, Homo sapiens
ttcatttcactcatt

SEQ ID NO: 1643228 - DNA, 15 bp, Homo sapiens
tcatttcactcattt

SEQ ID NO: 1643229 - DNA, 15 bp, Homo sapiens
catttcactcatttt

SEQ ID NO: 1643230 - DNA, 15 bp, Homo sapiens
atttcactcatttta

SEQ ID NO: 1643231 - DNA, 15 bp, Homo sapiens
tttcactcattttac

SEQ ID NO: 1643232 - DNA, 15 bp, Homo sapiens
ttcactcattttaca

SEQ ID NO: 1643233 - DNA, 15 bp, Homo sapiens
tcactcattttacag

SEQ ID NO: 1643234 - DNA, 15 bp, Homo sapiens
cactcattttacaga

SEQ ID NO: 1643235 - DNA, 15 bp, Homo sapiens
actcattttacagat

SEQ ID NO: 1643236 - DNA, 15 bp, Homo sapiens
ctcattttacagata

SEQ ID NO: 1643237 - DNA, 15 bp, Homo sapiens
tcattttacagatat

SEQ ID NO: 1643238 - DNA, 15 bp, Homo sapiens
cattttacagatatt

SEQ ID NO: 1643239 - DNA, 15 bp, Homo sapiens
attttacagatattt

SEQ ID NO: 1643240 - DNA, 15 bp, Homo sapiens
ttttacagatattta

SEQ ID NO: 1643241 - DNA, 15 bp, Homo sapiens
tttacagatatttat

SEQ ID NO: 1643242 - DNA, 15 bp, Homo sapiens
ttacagatatttatt

SEQ ID NO: 1643243 - DNA, 15 bp, Homo sapiens
tacagatatttattg

SEQ ID NO: 1643244 - DNA, 15 bp, Homo sapiens
acagatatttattga

SEQ ID NO: 1643245 - DNA, 15 bp, Homo sapiens
cagatatttattgag

SEQ ID NO: 1643246 - DNA, 15 bp, Homo sapiens
agatatttattgagc

SEQ ID NO: 1643247 - DNA, 15 bp, Homo sapiens
gatatttattgagca

SEQ ID NO: 1643248 - DNA, 15 bp, Homo sapiens
atatttattgagcac

SEQ ID NO: 1643249 - DNA, 15 bp, Homo sapiens
tatttattgagcacc

SEQ ID NO: 1643250 - DNA, 15 bp, Homo sapiens
atttattgagcacct

SEQ ID NO: 1643251 - DNA, 15 bp, Homo sapiens
tttattgagcacctg

SEQ ID NO: 1643252 - DNA, 15 bp, Homo sapiens
ttattgagcacctgc

SEQ ID NO: 1643253 - DNA, 15 bp, Homo sapiens
tattgagcacctgca

SEQ ID NO: 1643254 - DNA, 15 bp, Homo sapiens
attgagcacctgcaa

SEQ ID NO: 1643255 - DNA, 15 bp, Homo sapiens
ttgagcacctgcaat

SEQ ID NO: 1643256 - DNA, 15 bp, Homo sapiens
tgagcacctgcaata

SEQ ID NO: 1643257 - DNA, 15 bp, Homo sapiens
gagcacctgcaataa

SEQ ID NO: 1643258 - DNA, 15 bp, Homo sapiens
agcacctgcaataac

SEQ ID NO: 1643259 - DNA, 15 bp, Homo sapiens
gcacctgcaataacc

SEQ ID NO: 1643260 - DNA, 15 bp, Homo sapiens
cacctgcaataacct

SEQ ID NO: 1643261 - DNA, 15 bp, Homo sapiens
acctgcaataacctg

SEQ ID NO: 1643262 - DNA, 15 bp, Homo sapiens
cctgcaataacctgc

SEQ ID NO: 1643263 - DNA, 15 bp, Homo sapiens
ctgcaataacctgca

SEQ ID NO: 1643264 - DNA, 15 bp, Homo sapiens
tgcaataacctgcac

SEQ ID NO: 1643265 - DNA, 15 bp, Homo sapiens
gcaataacctgcaca

SEQ ID NO: 1643266 - DNA, 15 bp, Homo sapiens
caataacctgcacac

SEQ ID NO: 1643267 - DNA, 15 bp, Homo sapiens
aataacctgcacact

SEQ ID NO: 1643268 - DNA, 15 bp, Homo sapiens
ataacctgcacactg

SEQ ID NO: 1643269 - DNA, 15 bp, Homo sapiens
taacctgcacactgc

SEQ ID NO: 1643270 - DNA, 15 bp, Homo sapiens
aacctgcacactgct

SEQ ID NO: 1643271 - DNA, 15 bp, Homo sapiens
acctgcacactgctc

SEQ ID NO: 1643272 - DNA, 15 bp, Homo sapiens
cctgcacactgctct

SEQ ID NO: 1643273 - DNA, 15 bp, Homo sapiens
ctgcacactgctcta

SEQ ID NO: 1643274 - DNA, 15 bp, Homo sapiens
tgcacactgctctag

SEQ ID NO: 1643275 - DNA, 15 bp, Homo sapiens
gcacactgctctaga

SEQ ID NO: 1643276 - DNA, 15 bp, Homo sapiens
cacactgctctagac

SEQ ID NO: 1643277 - DNA, 15 bp, Homo sapiens
acactgctctagaca

SEQ ID NO: 1643278 - DNA, 15 bp, Homo sapiens
cactgctctagacac

SEQ ID NO: 1643279 - DNA, 15 bp, Homo sapiens
actgctctagacact

SEQ ID NO: 1643280 - DNA, 15 bp, Homo sapiens
ctgctctagacactg

SEQ ID NO: 1643281 - DNA, 15 bp, Homo sapiens
tgctctagacactgg

SEQ ID NO: 1643282 - DNA, 15 bp, Homo sapiens
gctctagacactggg

SEQ ID NO: 1643283 - DNA, 15 bp, Homo sapiens
ctctagacactggga

SEQ ID NO: 1643284 - DNA, 15 bp, Homo sapiens
tctagacactgggac

SEQ ID NO: 1643285 - DNA, 15 bp, Homo sapiens
ctagacactgggact

SEQ ID NO: 1643286 - DNA, 15 bp, Homo sapiens
tagacactgggacta

SEQ ID NO: 1643287 - DNA, 15 bp, Homo sapiens
agacactgggactat

SEQ ID NO: 1643288 - DNA, 15 bp, Homo sapiens
gacactgggactata

SEQ ID NO: 1643289 - DNA, 15 bp, Homo sapiens
acactgggactataa

SEQ ID NO: 1643290 - DNA, 15 bp, Homo sapiens
cactgggactataac

SEQ ID NO: 1643291 - DNA, 15 bp, Homo sapiens
actgggactataaca

SEQ ID NO: 1643292 - DNA, 15 bp, Homo sapiens
ctgggactataacag

SEQ ID NO: 1643293 - DNA, 15 bp, Homo sapiens
tgggactataacagt

SEQ ID NO: 1643294 - DNA, 15 bp, Homo sapiens
gggactataacagta

SEQ ID NO: 1643295 - DNA, 15 bp, Homo sapiens
ggactataacagtaa

SEQ ID NO: 1643296 - DNA, 15 bp, Homo sapiens
gactataacagtaaa

SEQ ID NO: 1643297 - DNA, 15 bp, Homo sapiens
actataacagtaaac

SEQ ID NO: 1643298 - DNA, 15 bp, Homo sapiens
ctataacagtaaaca

SEQ ID NO: 1643299 - DNA, 15 bp, Homo sapiens
tataacagtaaacag

SEQ ID NO: 1643300 - DNA, 15 bp, Homo sapiens
ataacagtaaacaga

SEQ ID NO: 1643301 - DNA, 15 bp, Homo sapiens
taacagtaaacagac

SEQ ID NO: 1643302 - DNA, 15 bp, Homo sapiens
aacagtaaacagaca

SEQ ID NO: 1643303 - DNA, 15 bp, Homo sapiens
acagtaaacagacag

SEQ ID NO: 1643304 - DNA, 15 bp, Homo sapiens
cagtaaacagacaga

SEQ ID NO: 1643305 - DNA, 15 bp, Homo sapiens
agtaaacagacagat

SEQ ID NO: 1643306 - DNA, 15 bp, Homo sapiens
gtaaacagacagata

SEQ ID NO: 1643307 - DNA, 15 bp, Homo sapiens
taaacagacagatac

SEQ ID NO: 1643308 - DNA, 15 bp, Homo sapiens
aaacagacagataca

SEQ ID NO: 1643309 - DNA, 15 bp, Homo sapiens
aacagacagatacat

SEQ ID NO: 1643310 - DNA, 15 bp, Homo sapiens
acagacagatacatc

SEQ ID NO: 1643311 - DNA, 15 bp, Homo sapiens
cagacagatacatct

SEQ ID NO: 1643312 - DNA, 15 bp, Homo sapiens
agacagatacatctc

SEQ ID NO: 1643313 - DNA, 15 bp, Homo sapiens
gacagatacatctct

SEQ ID NO: 1643314 - DNA, 15 bp, Homo sapiens
acagatacatctctg

SEQ ID NO: 1643315 - DNA, 15 bp, Homo sapiens
cagatacatctctgg

SEQ ID NO: 1643316 - DNA, 15 bp, Homo sapiens
agatacatctctggt

SEQ ID NO: 1643317 - DNA, 15 bp, Homo sapiens
gatacatctctggtc

SEQ ID NO: 1643318 - DNA, 15 bp, Homo sapiens
atacatctctggtct

SEQ ID NO: 1643319 - DNA, 15 bp, Homo sapiens
tacatctctggtctc

SEQ ID NO: 1643320 - DNA, 15 bp, Homo sapiens
acatctctggtctca

SEQ ID NO: 1643321 - DNA, 15 bp, Homo sapiens
catctctggtctcac

SEQ ID NO: 1643322 - DNA, 15 bp, Homo sapiens
atctctggtctcaca

SEQ ID NO: 1643323 - DNA, 15 bp, Homo sapiens
tctctggtctcacag

SEQ ID NO: 1643324 - DNA, 15 bp, Homo sapiens
ctctggtctcacagg

SEQ ID NO: 1643325 - DNA, 15 bp, Homo sapiens
tctggtctcacaggg

SEQ ID NO: 1643326 - DNA, 15 bp, Homo sapiens
ctggtctcacagggc

SEQ ID NO: 1643327 - DNA, 15 bp, Homo sapiens
tggtctcacagggct

SEQ ID NO: 1643328 - DNA, 15 bp, Homo sapiens
ggtctcacagggctt

SEQ ID NO: 1643329 - DNA, 15 bp, Homo sapiens
gtctcacagggcttc

SEQ ID NO: 1643330 - DNA, 15 bp, Homo sapiens
tctcacagggcttct

SEQ ID NO: 1643331 - DNA, 15 bp, Homo sapiens
ctcacagggcttcta

SEQ ID NO: 1643332 - DNA, 15 bp, Homo sapiens
tcacagggcttctat

SEQ ID NO: 1643333 - DNA, 15 bp, Homo sapiens
cacagggcttctatt

SEQ ID NO: 1643334 - DNA, 15 bp, Homo sapiens
acagggcttctattc

SEQ ID NO: 1643335 - DNA, 15 bp, Homo sapiens
cagggcttctattct

SEQ ID NO: 1643336 - DNA, 15 bp, Homo sapiens
agggcttctattcta

SEQ ID NO: 1643337 - DNA, 15 bp, Homo sapiens
gggcttctattctaa

SEQ ID NO: 1643338 - DNA, 15 bp, Homo sapiens
ggcttctattctaag

SEQ ID NO: 1643339 - DNA, 15 bp, Homo sapiens
gcttctattctaagc

SEQ ID NO: 1643340 - DNA, 15 bp, Homo sapiens
cttctattctaagca

SEQ ID NO: 1643341 - DNA, 15 bp, Homo sapiens
ttctattctaagcaa

SEQ ID NO: 1643342 - DNA, 15 bp, Homo sapiens
tctattctaagcaaa

SEQ ID NO: 1643343 - DNA, 15 bp, Homo sapiens
ctattctaagcaaaa

SEQ ID NO: 1643344 - DNA, 15 bp, Homo sapiens
tattctaagcaaaac

SEQ ID NO: 1643345 - DNA, 15 bp, Homo sapiens
attctaagcaaaact

SEQ ID NO: 1643346 - DNA, 15 bp, Homo sapiens
ttctaagcaaaactc

SEQ ID NO: 1643347 - DNA, 15 bp, Homo sapiens
tctaagcaaaactca

SEQ ID NO: 1643348 - DNA, 15 bp, Homo sapiens
ctaagcaaaactcaa

SEQ ID NO: 1643349 - DNA, 15 bp, Homo sapiens
taagcaaaactcaat

SEQ ID NO: 1643350 - DNA, 15 bp, Homo sapiens
aagcaaaactcaata

SEQ ID NO: 1643351 - DNA, 15 bp, Homo sapiens
agcaaaactcaatat

SEQ ID NO: 1643352 - DNA, 15 bp, Homo sapiens
gcaaaactcaatatc

SEQ ID NO: 1643353 - DNA, 15 bp, Homo sapiens
caaaactcaatatcc

SEQ ID NO: 1643354 - DNA, 15 bp, Homo sapiens
aaaactcaatatcca

SEQ ID NO: 1643355 - DNA, 15 bp, Homo sapiens
aaactcaatatccag

SEQ ID NO: 1643356 - DNA, 15 bp, Homo sapiens
aactcaatatccagg

SEQ ID NO: 1643357 - DNA, 15 bp, Homo sapiens
actcaatatccaggc

SEQ ID NO: 1643358 - DNA, 15 bp, Homo sapiens
ctcaatatccaggcc

SEQ ID NO: 1643359 - DNA, 15 bp, Homo sapiens
tcaatatccaggccg

SEQ ID NO: 1643360 - DNA, 15 bp, Homo sapiens
caatatccaggccgg

SEQ ID NO: 1643361 - DNA, 15 bp, Homo sapiens
aatatccaggccggg

SEQ ID NO: 1643362 - DNA, 15 bp, Homo sapiens
atatccaggccgggt

SEQ ID NO: 1643363 - DNA, 15 bp, Homo sapiens
tatccaggccgggtg

SEQ ID NO: 1643364 - DNA, 15 bp, Homo sapiens
atccaggccgggtgc

SEQ ID NO: 1643365 - DNA, 15 bp, Homo sapiens
tccaggccgggtgca

SEQ ID NO: 1643366 - DNA, 15 bp, Homo sapiens
ccaggccgggtgcag

SEQ ID NO: 1643367 - DNA, 15 bp, Homo sapiens
caggccgggtgcagt

SEQ ID NO: 1643368 - DNA, 15 bp, Homo sapiens
aggccgggtgcagtg

SEQ ID NO: 1643369 - DNA, 15 bp, Homo sapiens
ctcatgcctggaatg

SEQ ID NO: 1643370 - DNA, 15 bp, Homo sapiens
tcatgcctggaatgc

SEQ ID NO: 1643371 - DNA, 15 bp, Homo sapiens
catgcctggaatgcc

SEQ ID NO: 1643372 - DNA, 15 bp, Homo sapiens
atgcctggaatgcca

SEQ ID NO: 1643373 - DNA, 15 bp, Homo sapiens
tgcctggaatgccag

SEQ ID NO: 1643374 - DNA, 15 bp, Homo sapiens
gcctggaatgccagc

SEQ ID NO: 1643375 - DNA, 15 bp, Homo sapiens
cctggaatgccagca

SEQ ID NO: 1643376 - DNA, 15 bp, Homo sapiens
ctggaatgccagcac

SEQ ID NO: 1643377 - DNA, 15 bp, Homo sapiens
tggaatgccagcact

SEQ ID NO: 1643378 - DNA, 15 bp, Homo sapiens
ggaatgccagcactt

SEQ ID NO: 1643379 - DNA, 15 bp, Homo sapiens
gaatgccagcacttt

SEQ ID NO: 1643380 - DNA, 15 bp, Homo sapiens
tgggagaccaaggcc

SEQ ID NO: 1643381 - DNA, 15 bp, Homo sapiens
gggagaccaaggcca

SEQ ID NO: 1643382 - DNA, 15 bp, Homo sapiens
ggagaccaaggccag

SEQ ID NO: 1643383 - DNA, 15 bp, Homo sapiens
gagaccaaggccagg

SEQ ID NO: 1643384 - DNA, 15 bp, Homo sapiens
agaccaaggccaggc

SEQ ID NO: 1643385 - DNA, 15 bp, Homo sapiens
gaccaaggccaggca

SEQ ID NO: 1643386 - DNA, 15 bp, Homo sapiens
accaaggccaggcag

SEQ ID NO: 1643387 - DNA, 15 bp, Homo sapiens
ccaaggccaggcaga

SEQ ID NO: 1643388 - DNA, 15 bp, Homo sapiens
caaggccaggcagat

SEQ ID NO: 1643389 - DNA, 15 bp, Homo sapiens
aaggccaggcagatc

SEQ ID NO: 1643390 - DNA, 15 bp, Homo sapiens
aggccaggcagatca

SEQ ID NO: 1643391 - DNA, 15 bp, Homo sapiens
ggccaggcagatcac

SEQ ID NO: 1643392 - DNA, 15 bp, Homo sapiens
gccaggcagatcacc

SEQ ID NO: 1643393 - DNA, 15 bp, Homo sapiens
ccaggcagatcacct

SEQ ID NO: 1643394 - DNA, 15 bp, Homo sapiens
gcagatcacctgagc

SEQ ID NO: 1643395 - DNA, 15 bp, Homo sapiens
cagatcacctgagcc

SEQ ID NO: 1643396 - DNA, 15 bp, Homo sapiens
agatcacctgagccc

SEQ ID NO: 1643397 - DNA, 15 bp, Homo sapiens
gatcacctgagccca

SEQ ID NO: 1643398 - DNA, 15 bp, Homo sapiens
atcacctgagcccac

SEQ ID NO: 1643399 - DNA, 15 bp, Homo sapiens
tcacctgagcccact

SEQ ID NO: 1643400 - DNA, 15 bp, Homo sapiens
cacctgagcccacta

SEQ ID NO: 1643401 - DNA, 15 bp, Homo sapiens
acctgagcccactag

SEQ ID NO: 1643402 - DNA, 15 bp, Homo sapiens
cctgagcccactagt

SEQ ID NO: 1643403 - DNA, 15 bp, Homo sapiens
ctgagcccactagtt

SEQ ID NO: 1643404 - DNA, 15 bp, Homo sapiens
tgagcccactagttg

SEQ ID NO: 1643405 - DNA, 15 bp, Homo sapiens
gagcccactagttga

SEQ ID NO: 1643406 - DNA, 15 bp, Homo sapiens
agcccactagttgaa

SEQ ID NO: 1643407 - DNA, 15 bp, Homo sapiens
gcccactagttgaag

SEQ ID NO: 1643408 - DNA, 15 bp, Homo sapiens
cccactagttgaaga

SEQ ID NO: 1643409 - DNA, 15 bp, Homo sapiens
ccactagttgaagac

SEQ ID NO: 1643410 - DNA, 15 bp, Homo sapiens
cactagttgaagacc

SEQ ID NO: 1643411 - DNA, 15 bp, Homo sapiens
actagttgaagacca

SEQ ID NO: 1643412 - DNA, 15 bp, Homo sapiens
ctagttgaagaccag

SEQ ID NO: 1643413 - DNA, 15 bp, Homo sapiens
tagttgaagaccagc

SEQ ID NO: 1643414 - DNA, 15 bp, Homo sapiens
agttgaagaccagcc

SEQ ID NO: 1643415 - DNA, 15 bp, Homo sapiens
gttgaagaccagcct

SEQ ID NO: 1643416 - DNA, 15 bp, Homo sapiens
ttgaagaccagcctg

SEQ ID NO: 1643417 - DNA, 15 bp, Homo sapiens
tgaagaccagcctgg

SEQ ID NO: 1643418 - DNA, 15 bp, Homo sapiens
gaagaccagcctggg

SEQ ID NO: 1643419 - DNA, 15 bp, Homo sapiens
agcctgggcaatata

SEQ ID NO: 1643420 - DNA, 15 bp, Homo sapiens
gcctgggcaatatag

SEQ ID NO: 1643421 - DNA, 15 bp, Homo sapiens
cctgggcaatatagc

SEQ ID NO: 1643422 - DNA, 15 bp, Homo sapiens
ctgggcaatatagca

SEQ ID NO: 1643423 - DNA, 15 bp, Homo sapiens
tgggcaatatagcaa

SEQ ID NO: 1643424 - DNA, 15 bp, Homo sapiens
gggcaatatagcaaa

SEQ ID NO: 1643425 - DNA, 15 bp, Homo sapiens
ggcaatatagcaaaa

SEQ ID NO: 1643426 - DNA, 15 bp, Homo sapiens
gcaatatagcaaaac

SEQ ID NO: 1643427 - DNA, 15 bp, Homo sapiens
caatatagcaaaacc

SEQ ID NO: 1643428 - DNA, 15 bp, Homo sapiens
aatatagcaaaaccc

SEQ ID NO: 1643429 - DNA, 15 bp, Homo sapiens
atatagcaaaacccc

SEQ ID NO: 1643430 - DNA, 15 bp, Homo sapiens
tatagcaaaaccccg

SEQ ID NO: 1643431 - DNA, 15 bp, Homo sapiens
atagcaaaaccccgt

SEQ ID NO: 1643432 - DNA, 15 bp, Homo sapiens
tagcaaaaccccgtc

SEQ ID NO: 1643433 - DNA, 15 bp, Homo sapiens
agcaaaaccccgtct

SEQ ID NO: 1643434 - DNA, 15 bp, Homo sapiens
aaccccgtctctaca

SEQ ID NO: 1643435 - DNA, 15 bp, Homo sapiens
cccgtctctacaaaa

SEQ ID NO: 1643436 - DNA, 15 bp, Homo sapiens
ccgtctctacaaaaa

SEQ ID NO: 1643437 - DNA, 15 bp, Homo sapiens
cgtctctacaaaaaa

SEQ ID NO: 1643438 - DNA, 15 bp, Homo sapiens
gtctctacaaaaaaa

SEQ ID NO: 1643439 - DNA, 15 bp, Homo sapiens
tctctacaaaaaaaa

SEQ ID NO: 1643440 - DNA, 15 bp, Homo sapiens
ctctacaaaaaaaaa

SEQ ID NO: 1643441 - DNA, 15 bp, Homo sapiens
tctacaaaaaaaaaa

SEQ ID NO: 1643442 - DNA, 15 bp, Homo sapiens
ctacaaaaaaaaaaa

SEQ ID NO: 1643443 - DNA, 15 bp, Homo sapiens
aaaaaaaaattgtca

SEQ ID NO: 1643444 - DNA, 15 bp, Homo sapiens
aaaaaaaattgtcaa

SEQ ID NO: 1643445 - DNA, 15 bp, Homo sapiens
aaaaaaattgtcaag

SEQ ID NO: 1643446 - DNA, 15 bp, Homo sapiens
aaaaaattgtcaagg

SEQ ID NO: 1643447 - DNA, 15 bp, Homo sapiens
aaaaattgtcaaggc

SEQ ID NO: 1643448 - DNA, 15 bp, Homo sapiens
aaaattgtcaaggca

SEQ ID NO: 1643449 - DNA, 15 bp, Homo sapiens
aaattgtcaaggcat

SEQ ID NO: 1643450 - DNA, 15 bp, Homo sapiens
aattgtcaaggcatg

SEQ ID NO: 1643451 - DNA, 15 bp, Homo sapiens
attgtcaaggcatgg

SEQ ID NO: 1643452 - DNA, 15 bp, Homo sapiens
ttgtcaaggcatggt

SEQ ID NO: 1643453 - DNA, 15 bp, Homo sapiens
tgtcaaggcatggtg

SEQ ID NO: 1643454 - DNA, 15 bp, Homo sapiens
gtcaaggcatggtgg

SEQ ID NO: 1643455 - DNA, 15 bp, Homo sapiens
tcaaggcatggtggc

SEQ ID NO: 1643456 - DNA, 15 bp, Homo sapiens
caaggcatggtggca

SEQ ID NO: 1643457 - DNA, 15 bp, Homo sapiens
aaggcatggtggcat

SEQ ID NO: 1643458 - DNA, 15 bp, Homo sapiens
ggcatggtggcatgc

SEQ ID NO: 1643459 - DNA, 15 bp, Homo sapiens
gcatggtggcatgcg

SEQ ID NO: 1643460 - DNA, 15 bp, Homo sapiens
catggtggcatgcgc

SEQ ID NO: 1643461 - DNA, 15 bp, Homo sapiens
atggtggcatgcgcc

SEQ ID NO: 1643462 - DNA, 15 bp, Homo sapiens
tggcatgcgcctgtg

SEQ ID NO: 1643463 - DNA, 15 bp, Homo sapiens
atgcgcctgtggtcc

SEQ ID NO: 1643464 - DNA, 15 bp, Homo sapiens
tgcgcctgtggtccc

SEQ ID NO: 1643465 - DNA, 15 bp, Homo sapiens
tggtcccagctactt

SEQ ID NO: 1643466 - DNA, 15 bp, Homo sapiens
ggtcccagctactta

SEQ ID NO: 1643467 - DNA, 15 bp, Homo sapiens
tgaggcaggaggatt

SEQ ID NO: 1643468 - DNA, 15 bp, Homo sapiens
gaggcaggaggattg

SEQ ID NO: 1643469 - DNA, 15 bp, Homo sapiens
aggcaggaggattgt

SEQ ID NO: 1643470 - DNA, 15 bp, Homo sapiens
ggcaggaggattgtg

SEQ ID NO: 1643471 - DNA, 15 bp, Homo sapiens
gcaggaggattgtgt

SEQ ID NO: 1643472 - DNA, 15 bp, Homo sapiens
caggaggattgtgta

SEQ ID NO: 1643473 - DNA, 15 bp, Homo sapiens
aggaggattgtgtaa

SEQ ID NO: 1643474 - DNA, 15 bp, Homo sapiens
ggaggattgtgtaag

SEQ ID NO: 1643475 - DNA, 15 bp, Homo sapiens
gaggattgtgtaagc

SEQ ID NO: 1643476 - DNA, 15 bp, Homo sapiens
aggattgtgtaagcc

SEQ ID NO: 1643477 - DNA, 15 bp, Homo sapiens
ggattgtgtaagcct

SEQ ID NO: 1643478 - DNA, 15 bp, Homo sapiens
gattgtgtaagcctg

SEQ ID NO: 1643479 - DNA, 15 bp, Homo sapiens
attgtgtaagcctgg

SEQ ID NO: 1643480 - DNA, 15 bp, Homo sapiens
ttgtgtaagcctggg

SEQ ID NO: 1643481 - DNA, 15 bp, Homo sapiens
tgtgtaagcctggga

SEQ ID NO: 1643482 - DNA, 15 bp, Homo sapiens
gtgtaagcctgggag

SEQ ID NO: 1643483 - DNA, 15 bp, Homo sapiens
tgtaagcctgggagg

SEQ ID NO: 1643484 - DNA, 15 bp, Homo sapiens
gtaagcctgggaggc

SEQ ID NO: 1643485 - DNA, 15 bp, Homo sapiens
taagcctgggaggca

SEQ ID NO: 1643486 - DNA, 15 bp, Homo sapiens
aagcctgggaggcag

SEQ ID NO: 1643487 - DNA, 15 bp, Homo sapiens
agcctgggaggcaga

SEQ ID NO: 1643488 - DNA, 15 bp, Homo sapiens
gcctgggaggcagag

SEQ ID NO: 1643489 - DNA, 15 bp, Homo sapiens
agaggttgcagtgac

SEQ ID NO: 1643490 - DNA, 15 bp, Homo sapiens
gaggttgcagtgacc

SEQ ID NO: 1643491 - DNA, 15 bp, Homo sapiens
gcagtgacctgagat

SEQ ID NO: 1643492 - DNA, 15 bp, Homo sapiens
cagtgacctgagatg

SEQ ID NO: 1643493 - DNA, 15 bp, Homo sapiens
agtgacctgagatgg

SEQ ID NO: 1643494 - DNA, 15 bp, Homo sapiens
gtgacctgagatggc

SEQ ID NO: 1643495 - DNA, 15 bp, Homo sapiens
tgacctgagatggca

SEQ ID NO: 1643496 - DNA, 15 bp, Homo sapiens
gacctgagatggcac

SEQ ID NO: 1643497 - DNA, 15 bp, Homo sapiens
acctgagatggcacc

SEQ ID NO: 1643498 - DNA, 15 bp, Homo sapiens
cctgagatggcacca

SEQ ID NO: 1643499 - DNA, 15 bp, Homo sapiens
ctgagatggcaccac

SEQ ID NO: 1643500 - DNA, 15 bp, Homo sapiens
tgagatggcaccacc

SEQ ID NO: 1643501 - DNA, 15 bp, Homo sapiens
gagatggcaccacca

SEQ ID NO: 1643502 - DNA, 15 bp, Homo sapiens
agatggcaccaccac

SEQ ID NO: 1643503 - DNA, 15 bp, Homo sapiens
gatggcaccaccaca

SEQ ID NO: 1643504 - DNA, 15 bp, Homo sapiens
atggcaccaccacac

SEQ ID NO: 1643505 - DNA, 15 bp, Homo sapiens
tggcaccaccacact

SEQ ID NO: 1643506 - DNA, 15 bp, Homo sapiens
ggcaccaccacactc

SEQ ID NO: 1643507 - DNA, 15 bp, Homo sapiens
gcaccaccacactcc

SEQ ID NO: 1643508 - DNA, 15 bp, Homo sapiens
caccaccacactcca

SEQ ID NO: 1643509 - DNA, 15 bp, Homo sapiens
accaccacactccag

SEQ ID NO: 1643510 - DNA, 15 bp, Homo sapiens
ccaccacactccagc

SEQ ID NO: 1643511 - DNA, 15 bp, Homo sapiens
caccacactccagcc

SEQ ID NO: 1643512 - DNA, 15 bp, Homo sapiens
accacactccagcct

SEQ ID NO: 1643513 - DNA, 15 bp, Homo sapiens
ccacactccagcctg

SEQ ID NO: 1643514 - DNA, 15 bp, Homo sapiens
cacactccagcctgg

SEQ ID NO: 1643515 - DNA, 15 bp, Homo sapiens
agtgagaccctgtcc

SEQ ID NO: 1643516 - DNA, 15 bp, Homo sapiens
gtgagaccctgtcca

SEQ ID NO: 1643517 - DNA, 15 bp, Homo sapiens
tgagaccctgtccaa

SEQ ID NO: 1643518 - DNA, 15 bp, Homo sapiens
gagaccctgtccaaa

SEQ ID NO: 1643519 - DNA, 15 bp, Homo sapiens
agaccctgtccaaaa

SEQ ID NO: 1643520 - DNA, 15 bp, Homo sapiens
gaccctgtccaaaaa

SEQ ID NO: 1643521 - DNA, 15 bp, Homo sapiens
accctgtccaaaaaa

SEQ ID NO: 1643522 - DNA, 15 bp, Homo sapiens
ccctgtccaaaaaaa

SEQ ID NO: 1643523 - DNA, 15 bp, Homo sapiens
cctgtccaaaaaaaa

SEQ ID NO: 1643524 - DNA, 15 bp, Homo sapiens
ctgtccaaaaaaaaa

SEQ ID NO: 1643525 - DNA, 15 bp, Homo sapiens
tgtccaaaaaaaaaa

SEQ ID NO: 1643526 - DNA, 15 bp, Homo sapiens
gtccaaaaaaaaaaa

SEQ ID NO: 1643527 - DNA, 15 bp, Homo sapiens
tccaaaaaaaaaaaa

SEQ ID NO: 1643528 - DNA, 15 bp, Homo sapiens
ccaaaaaaaaaaaac

SEQ ID NO: 1643529 - DNA, 15 bp, Homo sapiens
caaaaaaaaaaaacc

SEQ ID NO: 1643530 - DNA, 15 bp, Homo sapiens
aaaaaaaaaaaaccc

SEQ ID NO: 1643531 - DNA, 15 bp, Homo sapiens
aaaaaaaccctcact

SEQ ID NO: 1643532 - DNA, 15 bp, Homo sapiens
aaaaaaccctcacta

SEQ ID NO: 1643533 - DNA, 15 bp, Homo sapiens
aaaaaccctcactat

SEQ ID NO: 1643534 - DNA, 15 bp, Homo sapiens
aaaaccctcactatc

SEQ ID NO: 1643535 - DNA, 15 bp, Homo sapiens
aaaccctcactatcc

SEQ ID NO: 1643536 - DNA, 15 bp, Homo sapiens
aaccctcactatcct

SEQ ID NO: 1643537 - DNA, 15 bp, Homo sapiens
accctcactatcctt

SEQ ID NO: 1643538 - DNA, 15 bp, Homo sapiens
ccctcactatcctta

SEQ ID NO: 1643539 - DNA, 15 bp, Homo sapiens
cctcactatccttaa

SEQ ID NO: 1643540 - DNA, 15 bp, Homo sapiens
ctcactatccttaag

SEQ ID NO: 1643541 - DNA, 15 bp, Homo sapiens
tcactatccttaaga

SEQ ID NO: 1643542 - DNA, 15 bp, Homo sapiens
cactatccttaagat

SEQ ID NO: 1643543 - DNA, 15 bp, Homo sapiens
actatccttaagata

SEQ ID NO: 1643544 - DNA, 15 bp, Homo sapiens
ctatccttaagataa

SEQ ID NO: 1643545 - DNA, 15 bp, Homo sapiens
tatccttaagataac

SEQ ID NO: 1643546 - DNA, 15 bp, Homo sapiens
atccttaagataaca

SEQ ID NO: 1643547 - DNA, 15 bp, Homo sapiens
tccttaagataacat

SEQ ID NO: 1643548 - DNA, 15 bp, Homo sapiens
ccttaagataacatc

SEQ ID NO: 1643549 - DNA, 15 bp, Homo sapiens
cttaagataacatca

SEQ ID NO: 1643550 - DNA, 15 bp, Homo sapiens
ttaagataacatcat

SEQ ID NO: 1643551 - DNA, 15 bp, Homo sapiens
taagataacatcatt

SEQ ID NO: 1643552 - DNA, 15 bp, Homo sapiens
aagataacatcattg

SEQ ID NO: 1643553 - DNA, 15 bp, Homo sapiens
agataacatcattgc

SEQ ID NO: 1643554 - DNA, 15 bp, Homo sapiens
gataacatcattgct

SEQ ID NO: 1643555 - DNA, 15 bp, Homo sapiens
ataacatcattgctt

SEQ ID NO: 1643556 - DNA, 15 bp, Homo sapiens
taacatcattgcttg

SEQ ID NO: 1643557 - DNA, 15 bp, Homo sapiens
aacatcattgcttgt

SEQ ID NO: 1643558 - DNA, 15 bp, Homo sapiens
acatcattgcttgtt

SEQ ID NO: 1643559 - DNA, 15 bp, Homo sapiens
catcattgcttgttg

SEQ ID NO: 1643560 - DNA, 15 bp, Homo sapiens
atcattgcttgttga

SEQ ID NO: 1643561 - DNA, 15 bp, Homo sapiens
tcattgcttgttgat

SEQ ID NO: 1643562 - DNA, 15 bp, Homo sapiens
cattgcttgttgatg

SEQ ID NO: 1643563 - DNA, 15 bp, Homo sapiens
attgcttgttgatga

SEQ ID NO: 1643564 - DNA, 15 bp, Homo sapiens
ttgcttgttgatgag

SEQ ID NO: 1643565 - DNA, 15 bp, Homo sapiens
tgcttgttgatgagt

SEQ ID NO: 1643566 - DNA, 15 bp, Homo sapiens
gcttgttgatgagtg

SEQ ID NO: 1643567 - DNA, 15 bp, Homo sapiens
cttgttgatgagtga

SEQ ID NO: 1643568 - DNA, 15 bp, Homo sapiens
ttgttgatgagtgaa

SEQ ID NO: 1643569 - DNA, 15 bp, Homo sapiens
tgttgatgagtgaat

SEQ ID NO: 1643570 - DNA, 15 bp, Homo sapiens
gttgatgagtgaatg

SEQ ID NO: 1643571 - DNA, 15 bp, Homo sapiens
ttgatgagtgaatgt

SEQ ID NO: 1643572 - DNA, 15 bp, Homo sapiens
tgatgagtgaatgtt

SEQ ID NO: 1643573 - DNA, 15 bp, Homo sapiens
gatgagtgaatgtta

SEQ ID NO: 1643574 - DNA, 15 bp, Homo sapiens
atgagtgaatgttaa

SEQ ID NO: 1643575 - DNA, 15 bp, Homo sapiens
tgagtgaatgttaac

SEQ ID NO: 1643576 - DNA, 15 bp, Homo sapiens
gagtgaatgttaaca

SEQ ID NO: 1643577 - DNA, 15 bp, Homo sapiens
agtgaatgttaacac

SEQ ID NO: 1643578 - DNA, 15 bp, Homo sapiens
gtgaatgttaacacc

SEQ ID NO: 1643579 - DNA, 15 bp, Homo sapiens
tgaatgttaacacca

SEQ ID NO: 1643580 - DNA, 15 bp, Homo sapiens
gaatgttaacaccaa

SEQ ID NO: 1643581 - DNA, 15 bp, Homo sapiens
aatgttaacaccaaa

SEQ ID NO: 1643582 - DNA, 15 bp, Homo sapiens
atgttaacaccaaat

SEQ ID NO: 1643583 - DNA, 15 bp, Homo sapiens
tgttaacaccaaatt

SEQ ID NO: 1643584 - DNA, 15 bp, Homo sapiens
gttaacaccaaatta

SEQ ID NO: 1643585 - DNA, 15 bp, Homo sapiens
ttaacaccaaattag

SEQ ID NO: 1643586 - DNA, 15 bp, Homo sapiens
taacaccaaattagg

SEQ ID NO: 1643587 - DNA, 15 bp, Homo sapiens
aacaccaaattagga

SEQ ID NO: 1643588 - DNA, 15 bp, Homo sapiens
acaccaaattaggaa

SEQ ID NO: 1643589 - DNA, 15 bp, Homo sapiens
caccaaattaggaac

SEQ ID NO: 1643590 - DNA, 15 bp, Homo sapiens
accaaattaggaacc

SEQ ID NO: 1643591 - DNA, 15 bp, Homo sapiens
ccaaattaggaaccc

SEQ ID NO: 1643592 - DNA, 15 bp, Homo sapiens
caaattaggaaccca

SEQ ID NO: 1643593 - DNA, 15 bp, Homo sapiens
aaattaggaacccag

SEQ ID NO: 1643594 - DNA, 15 bp, Homo sapiens
aattaggaacccagg

SEQ ID NO: 1643595 - DNA, 15 bp, Homo sapiens
attaggaacccagga

SEQ ID NO: 1643596 - DNA, 15 bp, Homo sapiens
ttaggaacccaggac

SEQ ID NO: 1643597 - DNA, 15 bp, Homo sapiens
taggaacccaggact

SEQ ID NO: 1643598 - DNA, 15 bp, Homo sapiens
aggaacccaggactt

SEQ ID NO: 1643599 - DNA, 15 bp, Homo sapiens
ggaacccaggacttt

SEQ ID NO: 1643600 - DNA, 15 bp, Homo sapiens
gaacccaggactttt

SEQ ID NO: 1643601 - DNA, 15 bp, Homo sapiens
aacccaggactttta

SEQ ID NO: 1643602 - DNA, 15 bp, Homo sapiens
acccaggacttttag

SEQ ID NO: 1643603 - DNA, 15 bp, Homo sapiens
cccaggacttttagt

SEQ ID NO: 1643604 - DNA, 15 bp, Homo sapiens
ccaggacttttagtc

SEQ ID NO: 1643605 - DNA, 15 bp, Homo sapiens
caggacttttagtct

SEQ ID NO: 1643606 - DNA, 15 bp, Homo sapiens
aggacttttagtctt

SEQ ID NO: 1643607 - DNA, 15 bp, Homo sapiens
ggacttttagtcttg

SEQ ID NO: 1643608 - DNA, 15 bp, Homo sapiens
gacttttagtcttgg

SEQ ID NO: 1643609 - DNA, 15 bp, Homo sapiens
acttttagtcttggc

SEQ ID NO: 1643610 - DNA, 15 bp, Homo sapiens
cttttagtcttggca

SEQ ID NO: 1643611 - DNA, 15 bp, Homo sapiens
ttttagtcttggcat

SEQ ID NO: 1643612 - DNA, 15 bp, Homo sapiens
tttagtcttggcatg

SEQ ID NO: 1643613 - DNA, 15 bp, Homo sapiens
ttagtcttggcatgg

SEQ ID NO: 1643614 - DNA, 15 bp, Homo sapiens
tagtcttggcatggt

SEQ ID NO: 1643615 - DNA, 15 bp, Homo sapiens
agtcttggcatggtt

SEQ ID NO: 1643616 - DNA, 15 bp, Homo sapiens
gtcttggcatggtta

SEQ ID NO: 1643617 - DNA, 15 bp, Homo sapiens
tcttggcatggttac

SEQ ID NO: 1643618 - DNA, 15 bp, Homo sapiens
cttggcatggttact

SEQ ID NO: 1643619 - DNA, 15 bp, Homo sapiens
ttggcatggttactt

SEQ ID NO: 1643620 - DNA, 15 bp, Homo sapiens
tggcatggttacttt

SEQ ID NO: 1643621 - DNA, 15 bp, Homo sapiens
ggcatggttactttc

SEQ ID NO: 1643622 - DNA, 15 bp, Homo sapiens
gcatggttactttcc

SEQ ID NO: 1643623 - DNA, 15 bp, Homo sapiens
catggttactttcca

SEQ ID NO: 1643624 - DNA, 15 bp, Homo sapiens
atggttactttccaa

SEQ ID NO: 1643625 - DNA, 15 bp, Homo sapiens
tggttactttccaat

SEQ ID NO: 1643626 - DNA, 15 bp, Homo sapiens
ggttactttccaata

SEQ ID NO: 1643627 - DNA, 15 bp, Homo sapiens
gttactttccaataa

SEQ ID NO: 1643628 - DNA, 15 bp, Homo sapiens
ttactttccaataaa

SEQ ID NO: 1643629 - DNA, 15 bp, Homo sapiens
tactttccaataaag

SEQ ID NO: 1643630 - DNA, 15 bp, Homo sapiens
actttccaataaaga

SEQ ID NO: 1643631 - DNA, 15 bp, Homo sapiens
ctttccaataaagat

SEQ ID NO: 1643632 - DNA, 15 bp, Homo sapiens
tttccaataaagatg

SEQ ID NO: 1643633 - DNA, 15 bp, Homo sapiens
ttccaataaagatga

SEQ ID NO: 1643634 - DNA, 15 bp, Homo sapiens
tccaataaagatgac

SEQ ID NO: 1643635 - DNA, 15 bp, Homo sapiens
ccaataaagatgaca

SEQ ID NO: 1643636 - DNA, 15 bp, Homo sapiens
caataaagatgacaa

SEQ ID NO: 1643637 - DNA, 15 bp, Homo sapiens
aataaagatgacaat

SEQ ID NO: 1643638 - DNA, 15 bp, Homo sapiens
ataaagatgacaata

SEQ ID NO: 1643639 - DNA, 15 bp, Homo sapiens
taaagatgacaatac

SEQ ID NO: 1643640 - DNA, 15 bp, Homo sapiens
aaagatgacaatact

SEQ ID NO: 1643641 - DNA, 15 bp, Homo sapiens
aagatgacaatacta

SEQ ID NO: 1643642 - DNA, 15 bp, Homo sapiens
agatgacaatactaa

SEQ ID NO: 1643643 - DNA, 15 bp, Homo sapiens
gatgacaatactaag

SEQ ID NO: 1643644 - DNA, 15 bp, Homo sapiens
atgacaatactaaga

SEQ ID NO: 1643645 - DNA, 15 bp, Homo sapiens
tgacaatactaagaa

SEQ ID NO: 1643646 - DNA, 15 bp, Homo sapiens
gacaatactaagaag

SEQ ID NO: 1643647 - DNA, 15 bp, Homo sapiens
acaatactaagaaga

SEQ ID NO: 1643648 - DNA, 15 bp, Homo sapiens
caatactaagaagag

SEQ ID NO: 1643649 - DNA, 15 bp, Homo sapiens
aatactaagaagaga

SEQ ID NO: 1643650 - DNA, 15 bp, Homo sapiens
atactaagaagagaa

SEQ ID NO: 1643651 - DNA, 15 bp, Homo sapiens
tactaagaagagaaa

SEQ ID NO: 1643652 - DNA, 15 bp, Homo sapiens
actaagaagagaaaa

SEQ ID NO: 1643653 - DNA, 15 bp, Homo sapiens
ctaagaagagaaaaa

SEQ ID NO: 1643654 - DNA, 15 bp, Homo sapiens
taagaagagaaaaat

SEQ ID NO: 1643655 - DNA, 15 bp, Homo sapiens
aagaagagaaaaatg

SEQ ID NO: 1643656 - DNA, 15 bp, Homo sapiens
agaagagaaaaatga

SEQ ID NO: 1643657 - DNA, 15 bp, Homo sapiens
gaagagaaaaatgat

SEQ ID NO: 1643658 - DNA, 15 bp, Homo sapiens
aagagaaaaatgatt

SEQ ID NO: 1643659 - DNA, 15 bp, Homo sapiens
agagaaaaatgattt

SEQ ID NO: 1643660 - DNA, 15 bp, Homo sapiens
gagaaaaatgattta

SEQ ID NO: 1643661 - DNA, 15 bp, Homo sapiens
agaaaaatgatttaa

SEQ ID NO: 1643662 - DNA, 15 bp, Homo sapiens
gaaaaatgatttaat

SEQ ID NO: 1643663 - DNA, 15 bp, Homo sapiens
aaaaatgatttaata

SEQ ID NO: 1643664 - DNA, 15 bp, Homo sapiens
aaaatgatttaataa

SEQ ID NO: 1643665 - DNA, 15 bp, Homo sapiens
aaatgatttaataat

SEQ ID NO: 1643666 - DNA, 15 bp, Homo sapiens
aatgatttaataatg

SEQ ID NO: 1643667 - DNA, 15 bp, Homo sapiens
atgatttaataatga

SEQ ID NO: 1643668 - DNA, 15 bp, Homo sapiens
tgatttaataatgat

SEQ ID NO: 1643669 - DNA, 15 bp, Homo sapiens
gatttaataatgata

SEQ ID NO: 1643670 - DNA, 15 bp, Homo sapiens
atttaataatgataa

SEQ ID NO: 1643671 - DNA, 15 bp, Homo sapiens
tttaataatgataat

SEQ ID NO: 1643672 - DNA, 15 bp, Homo sapiens
ttaataatgataata

SEQ ID NO: 1643673 - DNA, 15 bp, Homo sapiens
taataatgataatag

SEQ ID NO: 1643674 - DNA, 15 bp, Homo sapiens
aataatgataatagt

SEQ ID NO: 1643675 - DNA, 15 bp, Homo sapiens
ataatgataatagtg

SEQ ID NO: 1643676 - DNA, 15 bp, Homo sapiens
taatgataatagtgg

SEQ ID NO: 1643677 - DNA, 15 bp, Homo sapiens
aatgataatagtggc

SEQ ID NO: 1643678 - DNA, 15 bp, Homo sapiens
atgataatagtggct

SEQ ID NO: 1643679 - DNA, 15 bp, Homo sapiens
tgataatagtggcta

SEQ ID NO: 1643680 - DNA, 15 bp, Homo sapiens
gataatagtggctaa

SEQ ID NO: 1643681 - DNA, 15 bp, Homo sapiens
ataatagtggctaat

SEQ ID NO: 1643682 - DNA, 15 bp, Homo sapiens
taatagtggctaata

SEQ ID NO: 1643683 - DNA, 15 bp, Homo sapiens
aatagtggctaatac

SEQ ID NO: 1643684 - DNA, 15 bp, Homo sapiens
atagtggctaatact

SEQ ID NO: 1643685 - DNA, 15 bp, Homo sapiens
tagtggctaatactt

SEQ ID NO: 1643686 - DNA, 15 bp, Homo sapiens
agtggctaatactta

SEQ ID NO: 1643687 - DNA, 15 bp, Homo sapiens
gtggctaatacttat

SEQ ID NO: 1643688 - DNA, 15 bp, Homo sapiens
tggctaatacttatg

SEQ ID NO: 1643689 - DNA, 15 bp, Homo sapiens
ggctaatacttatgt

SEQ ID NO: 1643690 - DNA, 15 bp, Homo sapiens
gctaatacttatgta

SEQ ID NO: 1643691 - DNA, 15 bp, Homo sapiens
ctaatacttatgtag

SEQ ID NO: 1643692 - DNA, 15 bp, Homo sapiens
taatacttatgtagt

SEQ ID NO: 1643693 - DNA, 15 bp, Homo sapiens
aatacttatgtagtg

SEQ ID NO: 1643694 - DNA, 15 bp, Homo sapiens
atacttatgtagtgc

SEQ ID NO: 1643695 - DNA, 15 bp, Homo sapiens
tacttatgtagtgct

SEQ ID NO: 1643696 - DNA, 15 bp, Homo sapiens
acttatgtagtgctt

SEQ ID NO: 1643697 - DNA, 15 bp, Homo sapiens
cttatgtagtgctta

SEQ ID NO: 1643698 - DNA, 15 bp, Homo sapiens
ttatgtagtgcttac

SEQ ID NO: 1643699 - DNA, 15 bp, Homo sapiens
tatgtagtgcttacc

SEQ ID NO: 1643700 - DNA, 15 bp, Homo sapiens
atgtagtgcttacca

SEQ ID NO: 1643701 - DNA, 15 bp, Homo sapiens
tgtagtgcttaccat

SEQ ID NO: 1643702 - DNA, 15 bp, Homo sapiens
gtagtgcttaccatg

SEQ ID NO: 1643703 - DNA, 15 bp, Homo sapiens
tagtgcttaccatgt

SEQ ID NO: 1643704 - DNA, 15 bp, Homo sapiens
agtgcttaccatgtg

SEQ ID NO: 1643705 - DNA, 15 bp, Homo sapiens
gtgcttaccatgtgc

SEQ ID NO: 1643706 - DNA, 15 bp, Homo sapiens
tgcttaccatgtgcc

SEQ ID NO: 1643707 - DNA, 15 bp, Homo sapiens
gcttaccatgtgcca

SEQ ID NO: 1643708 - DNA, 15 bp, Homo sapiens
cttaccatgtgccag

SEQ ID NO: 1643709 - DNA, 15 bp, Homo sapiens
ttaccatgtgccagg

SEQ ID NO: 1643710 - DNA, 15 bp, Homo sapiens
taccatgtgccaggt

SEQ ID NO: 1643711 - DNA, 15 bp, Homo sapiens
accatgtgccaggtc

SEQ ID NO: 1643712 - DNA, 15 bp, Homo sapiens
ccatgtgccaggtct

SEQ ID NO: 1643713 - DNA, 15 bp, Homo sapiens
catgtgccaggtcta

SEQ ID NO: 1643714 - DNA, 15 bp, Homo sapiens
atgtgccaggtctat

SEQ ID NO: 1643715 - DNA, 15 bp, Homo sapiens
tgtgccaggtctatt

SEQ ID NO: 1643716 - DNA, 15 bp, Homo sapiens
gtgccaggtctattg

SEQ ID NO: 1643717 - DNA, 15 bp, Homo sapiens
tgccaggtctattgt

SEQ ID NO: 1643718 - DNA, 15 bp, Homo sapiens
gccaggtctattgta

SEQ ID NO: 1643719 - DNA, 15 bp, Homo sapiens
ccaggtctattgtaa

SEQ ID NO: 1643720 - DNA, 15 bp, Homo sapiens
caggtctattgtaag

SEQ ID NO: 1643721 - DNA, 15 bp, Homo sapiens
aggtctattgtaagt

SEQ ID NO: 1643722 - DNA, 15 bp, Homo sapiens
ggtctattgtaagta

SEQ ID NO: 1643723 - DNA, 15 bp, Homo sapiens
gtctattgtaagtac

SEQ ID NO: 1643724 - DNA, 15 bp, Homo sapiens
tctattgtaagtact

SEQ ID NO: 1643725 - DNA, 15 bp, Homo sapiens
ctattgtaagtactt

SEQ ID NO: 1643726 - DNA, 15 bp, Homo sapiens
tattgtaagtacttt

SEQ ID NO: 1643727 - DNA, 15 bp, Homo sapiens
attgtaagtactttt

SEQ ID NO: 1643728 - DNA, 15 bp, Homo sapiens
ttgtaagtactttta

SEQ ID NO: 1643729 - DNA, 15 bp, Homo sapiens
tgtaagtacttttat

SEQ ID NO: 1643730 - DNA, 15 bp, Homo sapiens
gtaagtacttttata

SEQ ID NO: 1643731 - DNA, 15 bp, Homo sapiens
taagtacttttatat

SEQ ID NO: 1643732 - DNA, 15 bp, Homo sapiens
aagtacttttatata

SEQ ID NO: 1643733 - DNA, 15 bp, Homo sapiens
agtacttttatatat

SEQ ID NO: 1643734 - DNA, 15 bp, Homo sapiens
gtacttttatatata

SEQ ID NO: 1643735 - DNA, 15 bp, Homo sapiens
tacttttatatatat

SEQ ID NO: 1643736 - DNA, 15 bp, Homo sapiens
acttttatatatatt

SEQ ID NO: 1643737 - DNA, 15 bp, Homo sapiens
cttttatatatatta

SEQ ID NO: 1643738 - DNA, 15 bp, Homo sapiens
ttttatatatattaa

SEQ ID NO: 1643739 - DNA, 15 bp, Homo sapiens
tttatatatattaat

SEQ ID NO: 1643740 - DNA, 15 bp, Homo sapiens
ttatatatattaatt

SEQ ID NO: 1643741 - DNA, 15 bp, Homo sapiens
tatatatattaatta

SEQ ID NO: 1643742 - DNA, 15 bp, Homo sapiens
atatatattaattat

SEQ ID NO: 1643743 - DNA, 15 bp, Homo sapiens
tatatattaattatt

SEQ ID NO: 1643744 - DNA, 15 bp, Homo sapiens
atatattaattattt

SEQ ID NO: 1643745 - DNA, 15 bp, Homo sapiens
tatattaattattta

SEQ ID NO: 1643746 - DNA, 15 bp, Homo sapiens
atattaattatttaa

SEQ ID NO: 1643747 - DNA, 15 bp, Homo sapiens
tattaattatttaat

SEQ ID NO: 1643748 - DNA, 15 bp, Homo sapiens
attaattatttaatc

SEQ ID NO: 1643749 - DNA, 15 bp, Homo sapiens
ttaattatttaatct

SEQ ID NO: 1643750 - DNA, 15 bp, Homo sapiens
taattatttaatctt

SEQ ID NO: 1643751 - DNA, 15 bp, Homo sapiens
aattatttaatcttt

SEQ ID NO: 1643752 - DNA, 15 bp, Homo sapiens
attatttaatctttg

SEQ ID NO: 1643753 - DNA, 15 bp, Homo sapiens
ttatttaatctttga

SEQ ID NO: 1643754 - DNA, 15 bp, Homo sapiens
tatttaatctttgat

SEQ ID NO: 1643755 - DNA, 15 bp, Homo sapiens
atttaatctttgatc

SEQ ID NO: 1643756 - DNA, 15 bp, Homo sapiens
tttaatctttgatcc

SEQ ID NO: 1643757 - DNA, 15 bp, Homo sapiens
ttaatctttgatcct

SEQ ID NO: 1643758 - DNA, 15 bp, Homo sapiens
taatctttgatccta

SEQ ID NO: 1643759 - DNA, 15 bp, Homo sapiens
aatctttgatcctat

SEQ ID NO: 1643760 - DNA, 15 bp, Homo sapiens
atctttgatcctata

SEQ ID NO: 1643761 - DNA, 15 bp, Homo sapiens
tctttgatcctataa

SEQ ID NO: 1643762 - DNA, 15 bp, Homo sapiens
ctttgatcctataag

SEQ ID NO: 1643763 - DNA, 15 bp, Homo sapiens
tttgatcctataagg

SEQ ID NO: 1643764 - DNA, 15 bp, Homo sapiens
ttgatcctataaggt

SEQ ID NO: 1643765 - DNA, 15 bp, Homo sapiens
tgatcctataaggta

SEQ ID NO: 1643766 - DNA, 15 bp, Homo sapiens
gatcctataaggtag

SEQ ID NO: 1643767 - DNA, 15 bp, Homo sapiens
atcctataaggtaga

SEQ ID NO: 1643768 - DNA, 15 bp, Homo sapiens
tcctataaggtagat

SEQ ID NO: 1643769 - DNA, 15 bp, Homo sapiens
cctataaggtagata

SEQ ID NO: 1643770 - DNA, 15 bp, Homo sapiens
ctataaggtagatat

SEQ ID NO: 1643771 - DNA, 15 bp, Homo sapiens
tataaggtagatatt

SEQ ID NO: 1643772 - DNA, 15 bp, Homo sapiens
ataaggtagatatta

SEQ ID NO: 1643773 - DNA, 15 bp, Homo sapiens
taaggtagatattat

SEQ ID NO: 1643774 - DNA, 15 bp, Homo sapiens
aaggtagatattatt

SEQ ID NO: 1643775 - DNA, 15 bp, Homo sapiens
aggtagatattattg

SEQ ID NO: 1643776 - DNA, 15 bp, Homo sapiens
ggtagatattattgt

SEQ ID NO: 1643777 - DNA, 15 bp, Homo sapiens
gtagatattattgtt

SEQ ID NO: 1643778 - DNA, 15 bp, Homo sapiens
tagatattattgtta

SEQ ID NO: 1643779 - DNA, 15 bp, Homo sapiens
agatattattgttac

SEQ ID NO: 1643780 - DNA, 15 bp, Homo sapiens
gatattattgttacc

SEQ ID NO: 1643781 - DNA, 15 bp, Homo sapiens
atattattgttaccc

SEQ ID NO: 1643782 - DNA, 15 bp, Homo sapiens
tattattgttaccct

SEQ ID NO: 1643783 - DNA, 15 bp, Homo sapiens
attattgttacccta

SEQ ID NO: 1643784 - DNA, 15 bp, Homo sapiens
ttattgttaccctag

SEQ ID NO: 1643785 - DNA, 15 bp, Homo sapiens
tattgttaccctagt

SEQ ID NO: 1643786 - DNA, 15 bp, Homo sapiens
attgttaccctagtt

SEQ ID NO: 1643787 - DNA, 15 bp, Homo sapiens
ttgttaccctagttt

SEQ ID NO: 1643788 - DNA, 15 bp, Homo sapiens
tgttaccctagttta

SEQ ID NO: 1643789 - DNA, 15 bp, Homo sapiens
gttaccctagtttat

SEQ ID NO: 1643790 - DNA, 15 bp, Homo sapiens
ttaccctagtttata

SEQ ID NO: 1643791 - DNA, 15 bp, Homo sapiens
taccctagtttatag

SEQ ID NO: 1643792 - DNA, 15 bp, Homo sapiens
accctagtttataga

SEQ ID NO: 1643793 - DNA, 15 bp, Homo sapiens
ccctagtttatagat

SEQ ID NO: 1643794 - DNA, 15 bp, Homo sapiens
cctagtttatagatg

SEQ ID NO: 1643795 - DNA, 15 bp, Homo sapiens
ctagtttatagatga

SEQ ID NO: 1643796 - DNA, 15 bp, Homo sapiens
tagtttatagatgaa

SEQ ID NO: 1643797 - DNA, 15 bp, Homo sapiens
agtttatagatgaag

SEQ ID NO: 1643798 - DNA, 15 bp, Homo sapiens
gtttatagatgaaga

SEQ ID NO: 1643799 - DNA, 15 bp, Homo sapiens
tttatagatgaagaa

SEQ ID NO: 1643800 - DNA, 15 bp, Homo sapiens
ttatagatgaagaaa

SEQ ID NO: 1643801 - DNA, 15 bp, Homo sapiens
tatagatgaagaaac

SEQ ID NO: 1643802 - DNA, 15 bp, Homo sapiens
atagatgaagaaacg

SEQ ID NO: 1643803 - DNA, 15 bp, Homo sapiens
tagatgaagaaacgg

SEQ ID NO: 1643804 - DNA, 15 bp, Homo sapiens
agatgaagaaacgga

SEQ ID NO: 1643805 - DNA, 15 bp, Homo sapiens
gatgaagaaacggaa

SEQ ID NO: 1643806 - DNA, 15 bp, Homo sapiens
atgaagaaacggaaa

SEQ ID NO: 1643807 - DNA, 15 bp, Homo sapiens
tgaagaaacggaaac

SEQ ID NO: 1643808 - DNA, 15 bp, Homo sapiens
gaagaaacggaaaca

SEQ ID NO: 1643809 - DNA, 15 bp, Homo sapiens
aagaaacggaaacac

SEQ ID NO: 1643810 - DNA, 15 bp, Homo sapiens
agaaacggaaacaca

SEQ ID NO: 1643811 - DNA, 15 bp, Homo sapiens
gaaacggaaacacaa

SEQ ID NO: 1643812 - DNA, 15 bp, Homo sapiens
aaacggaaacacaag

SEQ ID NO: 1643813 - DNA, 15 bp, Homo sapiens
aacggaaacacaaga

SEQ ID NO: 1643814 - DNA, 15 bp, Homo sapiens
acggaaacacaagag

SEQ ID NO: 1643815 - DNA, 15 bp, Homo sapiens
cggaaacacaagaga

SEQ ID NO: 1643816 - DNA, 15 bp, Homo sapiens
ggaaacacaagagat

SEQ ID NO: 1643817 - DNA, 15 bp, Homo sapiens
gaaacacaagagatt

SEQ ID NO: 1643818 - DNA, 15 bp, Homo sapiens
aaacacaagagattg

SEQ ID NO: 1643819 - DNA, 15 bp, Homo sapiens
aacacaagagattgc

SEQ ID NO: 1643820 - DNA, 15 bp, Homo sapiens
acacaagagattgcc

SEQ ID NO: 1643821 - DNA, 15 bp, Homo sapiens
cacaagagattgcca

SEQ ID NO: 1643822 - DNA, 15 bp, Homo sapiens
acaagagattgccac

SEQ ID NO: 1643823 - DNA, 15 bp, Homo sapiens
caagagattgccact

SEQ ID NO: 1643824 - DNA, 15 bp, Homo sapiens
aagagattgccactc

SEQ ID NO: 1643825 - DNA, 15 bp, Homo sapiens
agagattgccactca

SEQ ID NO: 1643826 - DNA, 15 bp, Homo sapiens
gagattgccactcat

SEQ ID NO: 1643827 - DNA, 15 bp, Homo sapiens
agattgccactcata

SEQ ID NO: 1643828 - DNA, 15 bp, Homo sapiens
gattgccactcatac

SEQ ID NO: 1643829 - DNA, 15 bp, Homo sapiens
attgccactcataca

SEQ ID NO: 1643830 - DNA, 15 bp, Homo sapiens
ttgccactcatacaa

SEQ ID NO: 1643831 - DNA, 15 bp, Homo sapiens
tgccactcatacaag

SEQ ID NO: 1643832 - DNA, 15 bp, Homo sapiens
gccactcatacaagt

SEQ ID NO: 1643833 - DNA, 15 bp, Homo sapiens
ccactcatacaagtt

SEQ ID NO: 1643834 - DNA, 15 bp, Homo sapiens
cactcatacaagttt

SEQ ID NO: 1643835 - DNA, 15 bp, Homo sapiens
actcatacaagttta

SEQ ID NO: 1643836 - DNA, 15 bp, Homo sapiens
ctcatacaagtttac

SEQ ID NO: 1643837 - DNA, 15 bp, Homo sapiens
tcatacaagtttaca

SEQ ID NO: 1643838 - DNA, 15 bp, Homo sapiens
catacaagtttacac

SEQ ID NO: 1643839 - DNA, 15 bp, Homo sapiens
atacaagtttacaca

SEQ ID NO: 1643840 - DNA, 15 bp, Homo sapiens
tacaagtttacacag

SEQ ID NO: 1643841 - DNA, 15 bp, Homo sapiens
acaagtttacacagc

SEQ ID NO: 1643842 - DNA, 15 bp, Homo sapiens
caagtttacacagcc

SEQ ID NO: 1643843 - DNA, 15 bp, Homo sapiens
aagtttacacagcca

SEQ ID NO: 1643844 - DNA, 15 bp, Homo sapiens
agtttacacagccag

SEQ ID NO: 1643845 - DNA, 15 bp, Homo sapiens
gtttacacagccaga

SEQ ID NO: 1643846 - DNA, 15 bp, Homo sapiens
tttacacagccagaa

SEQ ID NO: 1643847 - DNA, 15 bp, Homo sapiens
ttacacagccagaaa

SEQ ID NO: 1643848 - DNA, 15 bp, Homo sapiens
tacacagccagaaaa

SEQ ID NO: 1643849 - DNA, 15 bp, Homo sapiens
acacagccagaaaat

SEQ ID NO: 1643850 - DNA, 15 bp, Homo sapiens
cacagccagaaaata

SEQ ID NO: 1643851 - DNA, 15 bp, Homo sapiens
acagccagaaaatag

SEQ ID NO: 1643852 - DNA, 15 bp, Homo sapiens
cagccagaaaataga

SEQ ID NO: 1643853 - DNA, 15 bp, Homo sapiens
agccagaaaatagaa

SEQ ID NO: 1643854 - DNA, 15 bp, Homo sapiens
gccagaaaatagaaa

SEQ ID NO: 1643855 - DNA, 15 bp, Homo sapiens
ccagaaaatagaaaa

SEQ ID NO: 1643856 - DNA, 15 bp, Homo sapiens
cagaaaatagaaaag

SEQ ID NO: 1643857 - DNA, 15 bp, Homo sapiens
agaaaatagaaaagc

SEQ ID NO: 1643858 - DNA, 15 bp, Homo sapiens
gaaaatagaaaagct

SEQ ID NO: 1643859 - DNA, 15 bp, Homo sapiens
aaaatagaaaagcta

SEQ ID NO: 1643860 - DNA, 15 bp, Homo sapiens
aaatagaaaagctac

SEQ ID NO: 1643861 - DNA, 15 bp, Homo sapiens
aatagaaaagctacg

SEQ ID NO: 1643862 - DNA, 15 bp, Homo sapiens
atagaaaagctacga

SEQ ID NO: 1643863 - DNA, 15 bp, Homo sapiens
tagaaaagctacgag

SEQ ID NO: 1643864 - DNA, 15 bp, Homo sapiens
agaaaagctacgagt

SEQ ID NO: 1643865 - DNA, 15 bp, Homo sapiens
gaaaagctacgagtt

SEQ ID NO: 1643866 - DNA, 15 bp, Homo sapiens
aaaagctacgagttg

SEQ ID NO: 1643867 - DNA, 15 bp, Homo sapiens
aaagctacgagttga

SEQ ID NO: 1643868 - DNA, 15 bp, Homo sapiens
aagctacgagttgag

SEQ ID NO: 1643869 - DNA, 15 bp, Homo sapiens
agctacgagttgagc

SEQ ID NO: 1643870 - DNA, 15 bp, Homo sapiens
gctacgagttgagct

SEQ ID NO: 1643871 - DNA, 15 bp, Homo sapiens
ctacgagttgagctc

SEQ ID NO: 1643872 - DNA, 15 bp, Homo sapiens
tacgagttgagctca

SEQ ID NO: 1643873 - DNA, 15 bp, Homo sapiens
acgagttgagctcag

SEQ ID NO: 1643874 - DNA, 15 bp, Homo sapiens
cgagttgagctcagc

SEQ ID NO: 1643875 - DNA, 15 bp, Homo sapiens
gagttgagctcagcc

SEQ ID NO: 1643876 - DNA, 15 bp, Homo sapiens
agttgagctcagccc

SEQ ID NO: 1643877 - DNA, 15 bp, Homo sapiens
gttgagctcagccca

SEQ ID NO: 1643878 - DNA, 15 bp, Homo sapiens
ttgagctcagcccag

SEQ ID NO: 1643879 - DNA, 15 bp, Homo sapiens
tgagctcagcccagt

SEQ ID NO: 1643880 - DNA, 15 bp, Homo sapiens
gagctcagcccagta

SEQ ID NO: 1643881 - DNA, 15 bp, Homo sapiens
agctcagcccagtat

SEQ ID NO: 1643882 - DNA, 15 bp, Homo sapiens
gctcagcccagtatg

SEQ ID NO: 1643883 - DNA, 15 bp, Homo sapiens
ctcagcccagtatgt

SEQ ID NO: 1643884 - DNA, 15 bp, Homo sapiens
tcagcccagtatgtc

SEQ ID NO: 1643885 - DNA, 15 bp, Homo sapiens
cagcccagtatgtct

SEQ ID NO: 1643886 - DNA, 15 bp, Homo sapiens
agcccagtatgtcta

SEQ ID NO: 1643887 - DNA, 15 bp, Homo sapiens
gcccagtatgtctat

SEQ ID NO: 1643888 - DNA, 15 bp, Homo sapiens
cccagtatgtctatg

SEQ ID NO: 1643889 - DNA, 15 bp, Homo sapiens
ccagtatgtctatga

SEQ ID NO: 1643890 - DNA, 15 bp, Homo sapiens
cagtatgtctatgat

SEQ ID NO: 1643891 - DNA, 15 bp, Homo sapiens
agtatgtctatgatt

SEQ ID NO: 1643892 - DNA, 15 bp, Homo sapiens
gtatgtctatgattt

SEQ ID NO: 1643893 - DNA, 15 bp, Homo sapiens
tatgtctatgatttt

SEQ ID NO: 1643894 - DNA, 15 bp, Homo sapiens
atgtctatgatttta

SEQ ID NO: 1643895 - DNA, 15 bp, Homo sapiens
tgtctatgattttac

SEQ ID NO: 1643896 - DNA, 15 bp, Homo sapiens
gtctatgattttaca

SEQ ID NO: 1643897 - DNA, 15 bp, Homo sapiens
tctatgattttacag

SEQ ID NO: 1643898 - DNA, 15 bp, Homo sapiens
ctatgattttacaga

SEQ ID NO: 1643899 - DNA, 15 bp, Homo sapiens
tatgattttacagac

SEQ ID NO: 1643900 - DNA, 15 bp, Homo sapiens
atgattttacagact

SEQ ID NO: 1643901 - DNA, 15 bp, Homo sapiens
tgattttacagactc

SEQ ID NO: 1643902 - DNA, 15 bp, Homo sapiens
gattttacagactca

SEQ ID NO: 1643903 - DNA, 15 bp, Homo sapiens
attttacagactcaa

SEQ ID NO: 1643904 - DNA, 15 bp, Homo sapiens
ttttacagactcaaa

SEQ ID NO: 1643905 - DNA, 15 bp, Homo sapiens
tttacagactcaaaa

SEQ ID NO: 1643906 - DNA, 15 bp, Homo sapiens
ttacagactcaaaat

SEQ ID NO: 1643907 - DNA, 15 bp, Homo sapiens
tacagactcaaaatt

SEQ ID NO: 1643908 - DNA, 15 bp, Homo sapiens
acagactcaaaatta

SEQ ID NO: 1643909 - DNA, 15 bp, Homo sapiens
cagactcaaaattaa

SEQ ID NO: 1643910 - DNA, 15 bp, Homo sapiens
agactcaaaattaat

SEQ ID NO: 1643911 - DNA, 15 bp, Homo sapiens
gactcaaaattaatt

SEQ ID NO: 1643912 - DNA, 15 bp, Homo sapiens
actcaaaattaatta

SEQ ID NO: 1643913 - DNA, 15 bp, Homo sapiens
ctcaaaattaattat

SEQ ID NO: 1643914 - DNA, 15 bp, Homo sapiens
tcaaaattaattata

SEQ ID NO: 1643915 - DNA, 15 bp, Homo sapiens
caaaattaattataa

SEQ ID NO: 1643916 - DNA, 15 bp, Homo sapiens
aaaattaattataag

SEQ ID NO: 1643917 - DNA, 15 bp, Homo sapiens
aaattaattataaga

SEQ ID NO: 1643918 - DNA, 15 bp, Homo sapiens
aattaattataagat

SEQ ID NO: 1643919 - DNA, 15 bp, Homo sapiens
attaattataagatt

SEQ ID NO: 1643920 - DNA, 15 bp, Homo sapiens
ttaattataagattt

SEQ ID NO: 1643921 - DNA, 15 bp, Homo sapiens
taattataagatttc

SEQ ID NO: 1643922 - DNA, 15 bp, Homo sapiens
aattataagatttcc

SEQ ID NO: 1643923 - DNA, 15 bp, Homo sapiens
attataagatttcct

SEQ ID NO: 1643924 - DNA, 15 bp, Homo sapiens
ttataagatttccta

SEQ ID NO: 1643925 - DNA, 15 bp, Homo sapiens
tataagatttcctaa

SEQ ID NO: 1643926 - DNA, 15 bp, Homo sapiens
ataagatttcctaat

SEQ ID NO: 1643927 - DNA, 15 bp, Homo sapiens
taagatttcctaatc

SEQ ID NO: 1643928 - DNA, 15 bp, Homo sapiens
aagatttcctaatct

SEQ ID NO: 1643929 - DNA, 15 bp, Homo sapiens
agatttcctaatctt

SEQ ID NO: 1643930 - DNA, 15 bp, Homo sapiens
gatttcctaatcttc

SEQ ID NO: 1643931 - DNA, 15 bp, Homo sapiens
atttcctaatcttcg

SEQ ID NO: 1643932 - DNA, 15 bp, Homo sapiens
tttcctaatcttcga

SEQ ID NO: 1643933 - DNA, 15 bp, Homo sapiens
ttcctaatcttcgat

SEQ ID NO: 1643934 - DNA, 15 bp, Homo sapiens
tcctaatcttcgatt

SEQ ID NO: 1643935 - DNA, 15 bp, Homo sapiens
cctaatcttcgattt

SEQ ID NO: 1643936 - DNA, 15 bp, Homo sapiens
ctaatcttcgatttc

SEQ ID NO: 1643937 - DNA, 15 bp, Homo sapiens
taatcttcgatttct

SEQ ID NO: 1643938 - DNA, 15 bp, Homo sapiens
aatcttcgatttctg

SEQ ID NO: 1643939 - DNA, 15 bp, Homo sapiens
atcttcgatttctga

SEQ ID NO: 1643940 - DNA, 15 bp, Homo sapiens
tcttcgatttctgaa

SEQ ID NO: 1643941 - DNA, 15 bp, Homo sapiens
cttcgatttctgaaa

SEQ ID NO: 1643942 - DNA, 15 bp, Homo sapiens
ttcgatttctgaaac

SEQ ID NO: 1643943 - DNA, 15 bp, Homo sapiens
tcgatttctgaaact

SEQ ID NO: 1643944 - DNA, 15 bp, Homo sapiens
cgatttctgaaactc

SEQ ID NO: 1643945 - DNA, 15 bp, Homo sapiens
gatttctgaaactct

SEQ ID NO: 1643946 - DNA, 15 bp, Homo sapiens
atttctgaaactctg

SEQ ID NO: 1643947 - DNA, 15 bp, Homo sapiens
tttctgaaactctgc

SEQ ID NO: 1643948 - DNA, 15 bp, Homo sapiens
ttctgaaactctgcc

SEQ ID NO: 1643949 - DNA, 15 bp, Homo sapiens
tctgaaactctgcct

SEQ ID NO: 1643950 - DNA, 15 bp, Homo sapiens
ctgaaactctgcctt

SEQ ID NO: 1643951 - DNA, 15 bp, Homo sapiens
tgaaactctgccttg

SEQ ID NO: 1643952 - DNA, 15 bp, Homo sapiens
gaaactctgccttgc

SEQ ID NO: 1643953 - DNA, 15 bp, Homo sapiens
aaactctgccttgct

SEQ ID NO: 1643954 - DNA, 15 bp, Homo sapiens
aactctgccttgctc

SEQ ID NO: 1643955 - DNA, 15 bp, Homo sapiens
actctgccttgctct

SEQ ID NO: 1643956 - DNA, 15 bp, Homo sapiens
ctctgccttgctcta

SEQ ID NO: 1643957 - DNA, 15 bp, Homo sapiens
tctgccttgctctag

SEQ ID NO: 1643958 - DNA, 15 bp, Homo sapiens
ctgccttgctctaga

SEQ ID NO: 1643959 - DNA, 15 bp, Homo sapiens
tgccttgctctagag

SEQ ID NO: 1643960 - DNA, 15 bp, Homo sapiens
gccttgctctagagg

SEQ ID NO: 1643961 - DNA, 15 bp, Homo sapiens
ccttgctctagagga

SEQ ID NO: 1643962 - DNA, 15 bp, Homo sapiens
cttgctctagaggaa

SEQ ID NO: 1643963 - DNA, 15 bp, Homo sapiens
ttgctctagaggaaa

SEQ ID NO: 1643964 - DNA, 15 bp, Homo sapiens
tgctctagaggaaaa

SEQ ID NO: 1643965 - DNA, 15 bp, Homo sapiens
gctctagaggaaaac

SEQ ID NO: 1643966 - DNA, 15 bp, Homo sapiens
ctctagaggaaaaca

SEQ ID NO: 1643967 - DNA, 15 bp, Homo sapiens
tctagaggaaaacaa

SEQ ID NO: 1643968 - DNA, 15 bp, Homo sapiens
ctagaggaaaacaag

SEQ ID NO: 1643969 - DNA, 15 bp, Homo sapiens
tagaggaaaacaaga

SEQ ID NO: 1643970 - DNA, 15 bp, Homo sapiens
agaggaaaacaagaa

SEQ ID NO: 1643971 - DNA, 15 bp, Homo sapiens
gaggaaaacaagaaa

SEQ ID NO: 1643972 - DNA, 15 bp, Homo sapiens
aggaaaacaagaaaa

SEQ ID NO: 1643973 - DNA, 15 bp, Homo sapiens
ggaaaacaagaaaaa

SEQ ID NO: 1643974 - DNA, 15 bp, Homo sapiens
gaaaacaagaaaaac

SEQ ID NO: 1643975 - DNA, 15 bp, Homo sapiens
aaaacaagaaaaaca

SEQ ID NO: 1643976 - DNA, 15 bp, Homo sapiens
aaacaagaaaaacaa

SEQ ID NO: 1643977 - DNA, 15 bp, Homo sapiens
aacaagaaaaacaat

SEQ ID NO: 1643978 - DNA, 15 bp, Homo sapiens
acaagaaaaacaatg

SEQ ID NO: 1643979 - DNA, 15 bp, Homo sapiens
caagaaaaacaatga

SEQ ID NO: 1643980 - DNA, 15 bp, Homo sapiens
aagaaaaacaatgaa

SEQ ID NO: 1643981 - DNA, 15 bp, Homo sapiens
agaaaaacaatgaaa

SEQ ID NO: 1643982 - DNA, 15 bp, Homo sapiens
gaaaaacaatgaaaa

SEQ ID NO: 1643983 - DNA, 15 bp, Homo sapiens
aaaaacaatgaaaaa

SEQ ID NO: 1643984 - DNA, 15 bp, Homo sapiens
aaaacaatgaaaaat

SEQ ID NO: 1643985 - DNA, 15 bp, Homo sapiens
aaacaatgaaaaata

SEQ ID NO: 1643986 - DNA, 15 bp, Homo sapiens
aacaatgaaaaataa

SEQ ID NO: 1643987 - DNA, 15 bp, Homo sapiens
acaatgaaaaataaa

SEQ ID NO: 1643988 - DNA, 15 bp, Homo sapiens
caatgaaaaataaat

SEQ ID NO: 1643989 - DNA, 15 bp, Homo sapiens
aatgaaaaataaatg

SEQ ID NO: 1643990 - DNA, 15 bp, Homo sapiens
atgaaaaataaatgt

SEQ ID NO: 1643991 - DNA, 15 bp, Homo sapiens
tgaaaaataaatgtc

SEQ ID NO: 1643992 - DNA, 15 bp, Homo sapiens
gaaaaataaatgtct

SEQ ID NO: 1643993 - DNA, 15 bp, Homo sapiens
aaaaataaatgtctc

SEQ ID NO: 1643994 - DNA, 15 bp, Homo sapiens
aaaataaatgtctct

SEQ ID NO: 1643995 - DNA, 15 bp, Homo sapiens
aaataaatgtctctt

SEQ ID NO: 1643996 - DNA, 15 bp, Homo sapiens
aataaatgtctcttt

SEQ ID NO: 1643997 - DNA, 15 bp, Homo sapiens
ataaatgtctctttt

SEQ ID NO: 1643998 - DNA, 15 bp, Homo sapiens
taaatgtctcttttt

SEQ ID NO: 1643999 - DNA, 15 bp, Homo sapiens
aaatgtctctttttt

SEQ ID NO: 1644000 - DNA, 15 bp, Homo sapiens
aatgtctctttttta

SEQ ID NO: 1644001 - DNA, 15 bp, Homo sapiens
atgtctcttttttac

SEQ ID NO: 1644002 - DNA, 15 bp, Homo sapiens
tgtctcttttttaca

SEQ ID NO: 1644003 - DNA, 15 bp, Homo sapiens
gtctcttttttacaa

SEQ ID NO: 1644004 - DNA, 15 bp, Homo sapiens
tctcttttttacaaa

SEQ ID NO: 1644005 - DNA, 15 bp, Homo sapiens
ctcttttttacaaaa

SEQ ID NO: 1644006 - DNA, 15 bp, Homo sapiens
tcttttttacaaaaa

SEQ ID NO: 1644007 - DNA, 15 bp, Homo sapiens
cttttttacaaaaat

SEQ ID NO: 1644008 - DNA, 15 bp, Homo sapiens
ttttttacaaaaatt

SEQ ID NO: 1644009 - DNA, 15 bp, Homo sapiens
tttttacaaaaatta

SEQ ID NO: 1644010 - DNA, 15 bp, Homo sapiens
ttttacaaaaattaa

SEQ ID NO: 1644011 - DNA, 15 bp, Homo sapiens
tttacaaaaattaaa

SEQ ID NO: 1644012 - DNA, 15 bp, Homo sapiens
ttacaaaaattaaaa

SEQ ID NO: 1644013 - DNA, 15 bp, Homo sapiens
tacaaaaattaaaac

SEQ ID NO: 1644014 - DNA, 15 bp, Homo sapiens
caaaaattaaaacag

SEQ ID NO: 1644015 - DNA, 15 bp, Homo sapiens
aaaaattaaaacaga

SEQ ID NO: 1644016 - DNA, 15 bp, Homo sapiens
aaaattaaaacagaa

SEQ ID NO: 1644017 - DNA, 15 bp, Homo sapiens
aaattaaaacagaac

SEQ ID NO: 1644018 - DNA, 15 bp, Homo sapiens
aattaaaacagaaca

SEQ ID NO: 1644019 - DNA, 15 bp, Homo sapiens
attaaaacagaacaa

SEQ ID NO: 1644020 - DNA, 15 bp, Homo sapiens
ttaaaacagaacaaa

SEQ ID NO: 1644021 - DNA, 15 bp, Homo sapiens
taaaacagaacaaac

SEQ ID NO: 1644022 - DNA, 15 bp, Homo sapiens
aaaacagaacaaact

SEQ ID NO: 1644023 - DNA, 15 bp, Homo sapiens
aaacagaacaaactg

SEQ ID NO: 1644024 - DNA, 15 bp, Homo sapiens
aacagaacaaactgc

SEQ ID NO: 1644025 - DNA, 15 bp, Homo sapiens
acagaacaaactgca

SEQ ID NO: 1644026 - DNA, 15 bp, Homo sapiens
cagaacaaactgcaa

SEQ ID NO: 1644027 - DNA, 15 bp, Homo sapiens
agaacaaactgcaat

SEQ ID NO: 1644028 - DNA, 15 bp, Homo sapiens
gaacaaactgcaata

SEQ ID NO: 1644029 - DNA, 15 bp, Homo sapiens
aacaaactgcaataa

SEQ ID NO: 1644030 - DNA, 15 bp, Homo sapiens
acaaactgcaataaa

SEQ ID NO: 1644031 - DNA, 15 bp, Homo sapiens
caaactgcaataaaa

SEQ ID NO: 1644032 - DNA, 15 bp, Homo sapiens
aaactgcaataaaac

SEQ ID NO: 1644033 - DNA, 15 bp, Homo sapiens
aactgcaataaaaca

SEQ ID NO: 1644034 - DNA, 15 bp, Homo sapiens
actgcaataaaacaa

SEQ ID NO: 1644035 - DNA, 15 bp, Homo sapiens
ctgcaataaaacaac

SEQ ID NO: 1644036 - DNA, 15 bp, Homo sapiens
tgcaataaaacaaca

SEQ ID NO: 1644037 - DNA, 15 bp, Homo sapiens
gcaataaaacaacag

SEQ ID NO: 1644038 - DNA, 15 bp, Homo sapiens
caataaaacaacaga

SEQ ID NO: 1644039 - DNA, 15 bp, Homo sapiens
aataaaacaacagag

SEQ ID NO: 1644040 - DNA, 15 bp, Homo sapiens
ataaaacaacagagg

SEQ ID NO: 1644041 - DNA, 15 bp, Homo sapiens
taaaacaacagagga

SEQ ID NO: 1644042 - DNA, 15 bp, Homo sapiens
aaaacaacagaggat

SEQ ID NO: 1644043 - DNA, 15 bp, Homo sapiens
aaacaacagaggatg

SEQ ID NO: 1644044 - DNA, 15 bp, Homo sapiens
aacaacagaggatga

SEQ ID NO: 1644045 - DNA, 15 bp, Homo sapiens
acaacagaggatgaa

SEQ ID NO: 1644046 - DNA, 15 bp, Homo sapiens
caacagaggatgaat

SEQ ID NO: 1644047 - DNA, 15 bp, Homo sapiens
aacagaggatgaatc

SEQ ID NO: 1644048 - DNA, 15 bp, Homo sapiens
acagaggatgaatcc

SEQ ID NO: 1644049 - DNA, 15 bp, Homo sapiens
cagaggatgaatcca

SEQ ID NO: 1644050 - DNA, 15 bp, Homo sapiens
agaggatgaatccag

SEQ ID NO: 1644051 - DNA, 15 bp, Homo sapiens
gaggatgaatccaga

SEQ ID NO: 1644052 - DNA, 15 bp, Homo sapiens
aggatgaatccagaa

SEQ ID NO: 1644053 - DNA, 15 bp, Homo sapiens
ggatgaatccagaat

SEQ ID NO: 1644054 - DNA, 15 bp, Homo sapiens
gatgaatccagaatg

SEQ ID NO: 1644055 - DNA, 15 bp, Homo sapiens
atgaatccagaatgt

SEQ ID NO: 1644056 - DNA, 15 bp, Homo sapiens
tgaatccagaatgtg

SEQ ID NO: 1644057 - DNA, 15 bp, Homo sapiens
gaatccagaatgtga

SEQ ID NO: 1644058 - DNA, 15 bp, Homo sapiens
aatccagaatgtgat

SEQ ID NO: 1644059 - DNA, 15 bp, Homo sapiens
atccagaatgtgatt

SEQ ID NO: 1644060 - DNA, 15 bp, Homo sapiens
tccagaatgtgattg

SEQ ID NO: 1644061 - DNA, 15 bp, Homo sapiens
ccagaatgtgattga

SEQ ID NO: 1644062 - DNA, 15 bp, Homo sapiens
cagaatgtgattgat

SEQ ID NO: 1644063 - DNA, 15 bp, Homo sapiens
agaatgtgattgatt

SEQ ID NO: 1644064 - DNA, 15 bp, Homo sapiens
gaatgtgattgattt

SEQ ID NO: 1644065 - DNA, 15 bp, Homo sapiens
aatgtgattgatttt

SEQ ID NO: 1644066 - DNA, 15 bp, Homo sapiens
atgtgattgattttt

SEQ ID NO: 1644067 - DNA, 15 bp, Homo sapiens
tgtgattgatttttt

SEQ ID NO: 1644068 - DNA, 15 bp, Homo sapiens
gtgattgattttttt

SEQ ID NO: 1644069 - DNA, 15 bp, Homo sapiens
tgattgatttttttt

SEQ ID NO: 1644070 - DNA, 15 bp, Homo sapiens
gattgattttttttc

SEQ ID NO: 1644071 - DNA, 15 bp, Homo sapiens
attgattttttttct

SEQ ID NO: 1644072 - DNA, 15 bp, Homo sapiens
ttgattttttttctt

SEQ ID NO: 1644073 - DNA, 15 bp, Homo sapiens
tgattttttttctta

SEQ ID NO: 1644074 - DNA, 15 bp, Homo sapiens
gattttttttcttac

SEQ ID NO: 1644075 - DNA, 15 bp, Homo sapiens
attttttttcttact

SEQ ID NO: 1644076 - DNA, 15 bp, Homo sapiens
ttttttttcttacta

SEQ ID NO: 1644077 - DNA, 15 bp, Homo sapiens
tttttttcttactag

SEQ ID NO: 1644078 - DNA, 15 bp, Homo sapiens
ttttttcttactagg

SEQ ID NO: 1644079 - DNA, 15 bp, Homo sapiens
tttttcttactagga

SEQ ID NO: 1644080 - DNA, 15 bp, Homo sapiens
ttttcttactaggaa

SEQ ID NO: 1644081 - DNA, 15 bp, Homo sapiens
tttcttactaggaaa

SEQ ID NO: 1644082 - DNA, 15 bp, Homo sapiens
ttcttactaggaaag

SEQ ID NO: 1644083 - DNA, 15 bp, Homo sapiens
tcttactaggaaagg

SEQ ID NO: 1644084 - DNA, 15 bp, Homo sapiens
cttactaggaaagga

SEQ ID NO: 1644085 - DNA, 15 bp, Homo sapiens
ttactaggaaaggat

SEQ ID NO: 1644086 - DNA, 15 bp, Homo sapiens
tactaggaaaggatc

SEQ ID NO: 1644087 - DNA, 15 bp, Homo sapiens
actaggaaaggatct

SEQ ID NO: 1644088 - DNA, 15 bp, Homo sapiens
ctaggaaaggatcta

SEQ ID NO: 1644089 - DNA, 15 bp, Homo sapiens
taggaaaggatctag

SEQ ID NO: 1644090 - DNA, 15 bp, Homo sapiens
aggaaaggatctaga

SEQ ID NO: 1644091 - DNA, 15 bp, Homo sapiens
ggaaaggatctagag

SEQ ID NO: 1644092 - DNA, 15 bp, Homo sapiens
gaaaggatctagagg

SEQ ID NO: 1644093 - DNA, 15 bp, Homo sapiens
aaaggatctagaggc

SEQ ID NO: 1644094 - DNA, 15 bp, Homo sapiens
aaggatctagaggcc

SEQ ID NO: 1644095 - DNA, 15 bp, Homo sapiens
aggatctagaggcca

SEQ ID NO: 1644096 - DNA, 15 bp, Homo sapiens
ggatctagaggccag

SEQ ID NO: 1644097 - DNA, 15 bp, Homo sapiens
gatctagaggccaga

SEQ ID NO: 1644098 - DNA, 15 bp, Homo sapiens
atctagaggccagaa

SEQ ID NO: 1644099 - DNA, 15 bp, Homo sapiens
tctagaggccagaag

SEQ ID NO: 1644100 - DNA, 15 bp, Homo sapiens
ctagaggccagaagg

SEQ ID NO: 1644101 - DNA, 15 bp, Homo sapiens
tagaggccagaaggc

SEQ ID NO: 1644102 - DNA, 15 bp, Homo sapiens
agaggccagaaggct

SEQ ID NO: 1644103 - DNA, 15 bp, Homo sapiens
gaggccagaaggctg

SEQ ID NO: 1644104 - DNA, 15 bp, Homo sapiens
aggccagaaggctgg

SEQ ID NO: 1644105 - DNA, 15 bp, Homo sapiens
ggccagaaggctgga

SEQ ID NO: 1644106 - DNA, 15 bp, Homo sapiens
gccagaaggctggat

SEQ ID NO: 1644107 - DNA, 15 bp, Homo sapiens
ccagaaggctggatt

SEQ ID NO: 1644108 - DNA, 15 bp, Homo sapiens
cagaaggctggattt

SEQ ID NO: 1644109 - DNA, 15 bp, Homo sapiens
agaaggctggatttt

SEQ ID NO: 1644110 - DNA, 15 bp, Homo sapiens
gaaggctggattttt

SEQ ID NO: 1644111 - DNA, 15 bp, Homo sapiens
aaggctggatttttc

SEQ ID NO: 1644112 - DNA, 15 bp, Homo sapiens
aggctggatttttca

SEQ ID NO: 1644113 - DNA, 15 bp, Homo sapiens
ggctggatttttcag

SEQ ID NO: 1644114 - DNA, 15 bp, Homo sapiens
gctggatttttcagg

SEQ ID NO: 1644115 - DNA, 15 bp, Homo sapiens
ctggatttttcagga

SEQ ID NO: 1644116 - DNA, 15 bp, Homo sapiens
tggatttttcaggat

SEQ ID NO: 1644117 - DNA, 15 bp, Homo sapiens
ggatttttcaggatc

SEQ ID NO: 1644118 - DNA, 15 bp, Homo sapiens
gatttttcaggatct

SEQ ID NO: 1644119 - DNA, 15 bp, Homo sapiens
atttttcaggatctc

SEQ ID NO: 1644120 - DNA, 15 bp, Homo sapiens
tttttcaggatctcc

SEQ ID NO: 1644121 - DNA, 15 bp, Homo sapiens
ttttcaggatctcct

SEQ ID NO: 1644122 - DNA, 15 bp, Homo sapiens
tttcaggatctcctt

SEQ ID NO: 1644123 - DNA, 15 bp, Homo sapiens
ttcaggatctccttt

SEQ ID NO: 1644124 - DNA, 15 bp, Homo sapiens
tcaggatctcctttc

SEQ ID NO: 1644125 - DNA, 15 bp, Homo sapiens
caggatctcctttca

SEQ ID NO: 1644126 - DNA, 15 bp, Homo sapiens
aggatctcctttcaa

SEQ ID NO: 1644127 - DNA, 15 bp, Homo sapiens
ggatctcctttcaat

SEQ ID NO: 1644128 - DNA, 15 bp, Homo sapiens
gatctcctttcaatc

SEQ ID NO: 1644129 - DNA, 15 bp, Homo sapiens
atctcctttcaatca

SEQ ID NO: 1644130 - DNA, 15 bp, Homo sapiens
tctcctttcaatcaa

SEQ ID NO: 1644131 - DNA, 15 bp, Homo sapiens
ctcctttcaatcaat

SEQ ID NO: 1644132 - DNA, 15 bp, Homo sapiens
tcctttcaatcaatg

SEQ ID NO: 1644133 - DNA, 15 bp, Homo sapiens
cctttcaatcaatga

SEQ ID NO: 1644134 - DNA, 15 bp, Homo sapiens
ctttcaatcaatgaa

SEQ ID NO: 1644135 - DNA, 15 bp, Homo sapiens
tttcaatcaatgaat

SEQ ID NO: 1644136 - DNA, 15 bp, Homo sapiens
ttcaatcaatgaatc

SEQ ID NO: 1644137 - DNA, 15 bp, Homo sapiens
tcaatcaatgaatct

SEQ ID NO: 1644138 - DNA, 15 bp, Homo sapiens
caatcaatgaatctg

SEQ ID NO: 1644139 - DNA, 15 bp, Homo sapiens
aatcaatgaatctgt

SEQ ID NO: 1644140 - DNA, 15 bp, Homo sapiens
atcaatgaatctgtg

SEQ ID NO: 1644141 - DNA, 15 bp, Homo sapiens
tcaatgaatctgtga

SEQ ID NO: 1644142 - DNA, 15 bp, Homo sapiens
caatgaatctgtgat

SEQ ID NO: 1644143 - DNA, 15 bp, Homo sapiens
aatgaatctgtgata

SEQ ID NO: 1644144 - DNA, 15 bp, Homo sapiens
atgaatctgtgatag

SEQ ID NO: 1644145 - DNA, 15 bp, Homo sapiens
tgaatctgtgataga

SEQ ID NO: 1644146 - DNA, 15 bp, Homo sapiens
gaatctgtgatagaa

SEQ ID NO: 1644147 - DNA, 15 bp, Homo sapiens
aatctgtgatagaag

SEQ ID NO: 1644148 - DNA, 15 bp, Homo sapiens
atctgtgatagaagc

SEQ ID NO: 1644149 - DNA, 15 bp, Homo sapiens
tctgtgatagaagca

SEQ ID NO: 1644150 - DNA, 15 bp, Homo sapiens
ctgtgatagaagcag

SEQ ID NO: 1644151 - DNA, 15 bp, Homo sapiens
tgtgatagaagcaga

SEQ ID NO: 1644152 - DNA, 15 bp, Homo sapiens
gtgatagaagcagat

SEQ ID NO: 1644153 - DNA, 15 bp, Homo sapiens
tgatagaagcagatg

SEQ ID NO: 1644154 - DNA, 15 bp, Homo sapiens
gatagaagcagatga

SEQ ID NO: 1644155 - DNA, 15 bp, Homo sapiens
atagaagcagatgaa

SEQ ID NO: 1644156 - DNA, 15 bp, Homo sapiens
tagaagcagatgaat

SEQ ID NO: 1644157 - DNA, 15 bp, Homo sapiens
agaagcagatgaatc

SEQ ID NO: 1644158 - DNA, 15 bp, Homo sapiens
gaagcagatgaatca

SEQ ID NO: 1644159 - DNA, 15 bp, Homo sapiens
aagcagatgaatcaa

SEQ ID NO: 1644160 - DNA, 15 bp, Homo sapiens
agcagatgaatcaaa

SEQ ID NO: 1644161 - DNA, 15 bp, Homo sapiens
gcagatgaatcaaat

SEQ ID NO: 1644162 - DNA, 15 bp, Homo sapiens
cagatgaatcaaatc

SEQ ID NO: 1644163 - DNA, 15 bp, Homo sapiens
agatgaatcaaatct

SEQ ID NO: 1644164 - DNA, 15 bp, Homo sapiens
gatgaatcaaatctc

SEQ ID NO: 1644165 - DNA, 15 bp, Homo sapiens
atgaatcaaatctca

SEQ ID NO: 1644166 - DNA, 15 bp, Homo sapiens
tgaatcaaatctcat

SEQ ID NO: 1644167 - DNA, 15 bp, Homo sapiens
gaatcaaatctcatc

SEQ ID NO: 1644168 - DNA, 15 bp, Homo sapiens
aatcaaatctcatct

SEQ ID NO: 1644169 - DNA, 15 bp, Homo sapiens
atcaaatctcatctt

SEQ ID NO: 1644170 - DNA, 15 bp, Homo sapiens
tcaaatctcatcttt

SEQ ID NO: 1644171 - DNA, 15 bp, Homo sapiens
caaatctcatctttg

SEQ ID NO: 1644172 - DNA, 15 bp, Homo sapiens
aaatctcatctttgt

SEQ ID NO: 1644173 - DNA, 15 bp, Homo sapiens
aatctcatctttgtg

SEQ ID NO: 1644174 - DNA, 15 bp, Homo sapiens
atctcatctttgtgt

SEQ ID NO: 1644175 - DNA, 15 bp, Homo sapiens
tctcatctttgtgtg

SEQ ID NO: 1644176 - DNA, 15 bp, Homo sapiens
ctcatctttgtgtga

SEQ ID NO: 1644177 - DNA, 15 bp, Homo sapiens
tcatctttgtgtgat

SEQ ID NO: 1644178 - DNA, 15 bp, Homo sapiens
catctttgtgtgatt

SEQ ID NO: 1644179 - DNA, 15 bp, Homo sapiens
atctttgtgtgatta

SEQ ID NO: 1644180 - DNA, 15 bp, Homo sapiens
tctttgtgtgattat

SEQ ID NO: 1644181 - DNA, 15 bp, Homo sapiens
ctttgtgtgattata

SEQ ID NO: 1644182 - DNA, 15 bp, Homo sapiens
tttgtgtgattataa

SEQ ID NO: 1644183 - DNA, 15 bp, Homo sapiens
ttgtgtgattataaa

SEQ ID NO: 1644184 - DNA, 15 bp, Homo sapiens
tgtgtgattataaag

SEQ ID NO: 1644185 - DNA, 15 bp, Homo sapiens
gtgtgattataaagc

SEQ ID NO: 1644186 - DNA, 15 bp, Homo sapiens
tgtgattataaagct

SEQ ID NO: 1644187 - DNA, 15 bp, Homo sapiens
gtgattataaagctg

SEQ ID NO: 1644188 - DNA, 15 bp, Homo sapiens
tgattataaagctgt

SEQ ID NO: 1644189 - DNA, 15 bp, Homo sapiens
gattataaagctgtc

SEQ ID NO: 1644190 - DNA, 15 bp, Homo sapiens
attataaagctgtct

SEQ ID NO: 1644191 - DNA, 15 bp, Homo sapiens
ttataaagctgtctg

SEQ ID NO: 1644192 - DNA, 15 bp, Homo sapiens
tataaagctgtctgt

SEQ ID NO: 1644193 - DNA, 15 bp, Homo sapiens
ataaagctgtctgtg

SEQ ID NO: 1644194 - DNA, 15 bp, Homo sapiens
taaagctgtctgtgg

SEQ ID NO: 1644195 - DNA, 15 bp, Homo sapiens
aaagctgtctgtggt

SEQ ID NO: 1644196 - DNA, 15 bp, Homo sapiens
aagctgtctgtggta

SEQ ID NO: 1644197 - DNA, 15 bp, Homo sapiens
agctgtctgtggtat

SEQ ID NO: 1644198 - DNA, 15 bp, Homo sapiens
gctgtctgtggtatt

SEQ ID NO: 1644199 - DNA, 15 bp, Homo sapiens
ctgtctgtggtattc

SEQ ID NO: 1644200 - DNA, 15 bp, Homo sapiens
tgtctgtggtattca

SEQ ID NO: 1644201 - DNA, 15 bp, Homo sapiens
gtctgtggtattcac

SEQ ID NO: 1644202 - DNA, 15 bp, Homo sapiens
tctgtggtattcacg

SEQ ID NO: 1644203 - DNA, 15 bp, Homo sapiens
ctgtggtattcacgc

SEQ ID NO: 1644204 - DNA, 15 bp, Homo sapiens
tgtggtattcacgcc

SEQ ID NO: 1644205 - DNA, 15 bp, Homo sapiens
gtggtattcacgcca

SEQ ID NO: 1644206 - DNA, 15 bp, Homo sapiens
tggtattcacgccac

SEQ ID NO: 1644207 - DNA, 15 bp, Homo sapiens
ggtattcacgccacc

SEQ ID NO: 1644208 - DNA, 15 bp, Homo sapiens
gtattcacgccacca

SEQ ID NO: 1644209 - DNA, 15 bp, Homo sapiens
tattcacgccaccag

SEQ ID NO: 1644210 - DNA, 15 bp, Homo sapiens
attcacgccaccagg

SEQ ID NO: 1644211 - DNA, 15 bp, Homo sapiens
ttcacgccaccaggg

SEQ ID NO: 1644212 - DNA, 15 bp, Homo sapiens
tcacgccaccagggg

SEQ ID NO: 1644213 - DNA, 15 bp, Homo sapiens
cacgccaccaggggt

SEQ ID NO: 1644214 - DNA, 15 bp, Homo sapiens
acgccaccaggggta

SEQ ID NO: 1644215 - DNA, 15 bp, Homo sapiens
cgccaccaggggtac

SEQ ID NO: 1644216 - DNA, 15 bp, Homo sapiens
gccaccaggggtaca

SEQ ID NO: 1644217 - DNA, 15 bp, Homo sapiens
ccaccaggggtacat

SEQ ID NO: 1644218 - DNA, 15 bp, Homo sapiens
caccaggggtacata

SEQ ID NO: 1644219 - DNA, 15 bp, Homo sapiens
accaggggtacatag

SEQ ID NO: 1644220 - DNA, 15 bp, Homo sapiens
ccaggggtacataga

SEQ ID NO: 1644221 - DNA, 15 bp, Homo sapiens
caggggtacatagaa

SEQ ID NO: 1644222 - DNA, 15 bp, Homo sapiens
aggggtacatagaag

SEQ ID NO: 1644223 - DNA, 15 bp, Homo sapiens
ggggtacatagaaga

SEQ ID NO: 1644224 - DNA, 15 bp, Homo sapiens
gggtacatagaagat

SEQ ID NO: 1644225 - DNA, 15 bp, Homo sapiens
ggtacatagaagatg

SEQ ID NO: 1644226 - DNA, 15 bp, Homo sapiens
gtacatagaagatgc

SEQ ID NO: 1644227 - DNA, 15 bp, Homo sapiens
tacatagaagatgcc

SEQ ID NO: 1644228 - DNA, 15 bp, Homo sapiens
acatagaagatgcct

SEQ ID NO: 1644229 - DNA, 15 bp, Homo sapiens
catagaagatgcctg

SEQ ID NO: 1644230 - DNA, 15 bp, Homo sapiens
atagaagatgcctga

SEQ ID NO: 1644231 - DNA, 15 bp, Homo sapiens
tagaagatgcctgag

SEQ ID NO: 1644232 - DNA, 15 bp, Homo sapiens
agaagatgcctgagt

SEQ ID NO: 1644233 - DNA, 15 bp, Homo sapiens
gaagatgcctgagtg

SEQ ID NO: 1644234 - DNA, 15 bp, Homo sapiens
aagatgcctgagtga

SEQ ID NO: 1644235 - DNA, 15 bp, Homo sapiens
agatgcctgagtgag

SEQ ID NO: 1644236 - DNA, 15 bp, Homo sapiens
gatgcctgagtgagg

SEQ ID NO: 1644237 - DNA, 15 bp, Homo sapiens
atgcctgagtgaggt

SEQ ID NO: 1644238 - DNA, 15 bp, Homo sapiens
tgcctgagtgaggtt

SEQ ID NO: 1644239 - DNA, 15 bp, Homo sapiens
gcctgagtgaggttt

SEQ ID NO: 1644240 - DNA, 15 bp, Homo sapiens
cctgagtgaggtttg

SEQ ID NO: 1644241 - DNA, 15 bp, Homo sapiens
ctgagtgaggtttgg

SEQ ID NO: 1644242 - DNA, 15 bp, Homo sapiens
tgagtgaggtttggc

SEQ ID NO: 1644243 - DNA, 15 bp, Homo sapiens
gagtgaggtttggca

SEQ ID NO: 1644244 - DNA, 15 bp, Homo sapiens
agtgaggtttggcaa

SEQ ID NO: 1644245 - DNA, 15 bp, Homo sapiens
gtgaggtttggcaaa

SEQ ID NO: 1644246 - DNA, 15 bp, Homo sapiens
tgaggtttggcaaaa

SEQ ID NO: 1644247 - DNA, 15 bp, Homo sapiens
gaggtttggcaaaag

SEQ ID NO: 1644248 - DNA, 15 bp, Homo sapiens
aggtttggcaaaagt

SEQ ID NO: 1644249 - DNA, 15 bp, Homo sapiens
ggtttggcaaaagta

SEQ ID NO: 1644250 - DNA, 15 bp, Homo sapiens
gtttggcaaaagtac

SEQ ID NO: 1644251 - DNA, 15 bp, Homo sapiens
tttggcaaaagtact

SEQ ID NO: 1644252 - DNA, 15 bp, Homo sapiens
ttggcaaaagtacta

SEQ ID NO: 1644253 - DNA, 15 bp, Homo sapiens
tggcaaaagtactaa

SEQ ID NO: 1644254 - DNA, 15 bp, Homo sapiens
ggcaaaagtactaag

SEQ ID NO: 1644255 - DNA, 15 bp, Homo sapiens
gcaaaagtactaagg

SEQ ID NO: 1644256 - DNA, 15 bp, Homo sapiens
caaaagtactaaggg

SEQ ID NO: 1644257 - DNA, 15 bp, Homo sapiens
aaaagtactaagggc

SEQ ID NO: 1644258 - DNA, 15 bp, Homo sapiens
aaagtactaagggcc

SEQ ID NO: 1644259 - DNA, 15 bp, Homo sapiens
aagtactaagggcct

SEQ ID NO: 1644260 - DNA, 15 bp, Homo sapiens
agtactaagggcctg

SEQ ID NO: 1644261 - DNA, 15 bp, Homo sapiens
gtactaagggcctgt

SEQ ID NO: 1644262 - DNA, 15 bp, Homo sapiens
tactaagggcctgtc

SEQ ID NO: 1644263 - DNA, 15 bp, Homo sapiens
actaagggcctgtcc

SEQ ID NO: 1644264 - DNA, 15 bp, Homo sapiens
ctaagggcctgtcca

SEQ ID NO: 1644265 - DNA, 15 bp, Homo sapiens
taagggcctgtccac

SEQ ID NO: 1644266 - DNA, 15 bp, Homo sapiens
aagggcctgtccacc

SEQ ID NO: 1644267 - DNA, 15 bp, Homo sapiens
agggcctgtccacct

SEQ ID NO: 1644268 - DNA, 15 bp, Homo sapiens
gggcctgtccaccta

SEQ ID NO: 1644269 - DNA, 15 bp, Homo sapiens
ggcctgtccacctat

SEQ ID NO: 1644270 - DNA, 15 bp, Homo sapiens
gcctgtccacctata

SEQ ID NO: 1644271 - DNA, 15 bp, Homo sapiens
cctgtccacctatac

SEQ ID NO: 1644272 - DNA, 15 bp, Homo sapiens
ctgtccacctataca

SEQ ID NO: 1644273 - DNA, 15 bp, Homo sapiens
tgtccacctatacat

SEQ ID NO: 1644274 - DNA, 15 bp, Homo sapiens
gtccacctatacatg

SEQ ID NO: 1644275 - DNA, 15 bp, Homo sapiens
tccacctatacatgc

SEQ ID NO: 1644276 - DNA, 15 bp, Homo sapiens
ccacctatacatgcc

SEQ ID NO: 1644277 - DNA, 15 bp, Homo sapiens
cacctatacatgccc

SEQ ID NO: 1644278 - DNA, 15 bp, Homo sapiens
acctatacatgccct

SEQ ID NO: 1644279 - DNA, 15 bp, Homo sapiens
cctatacatgccctt

SEQ ID NO: 1644280 - DNA, 15 bp, Homo sapiens
ctatacatgcccttc

SEQ ID NO: 1644281 - DNA, 15 bp, Homo sapiens
tatacatgcccttct

SEQ ID NO: 1644282 - DNA, 15 bp, Homo sapiens
atacatgcccttctc

SEQ ID NO: 1644283 - DNA, 15 bp, Homo sapiens
tacatgcccttctca

SEQ ID NO: 1644284 - DNA, 15 bp, Homo sapiens
acatgcccttctcag

SEQ ID NO: 1644285 - DNA, 15 bp, Homo sapiens
catgcccttctcagg

SEQ ID NO: 1644286 - DNA, 15 bp, Homo sapiens
atgcccttctcagga

SEQ ID NO: 1644287 - DNA, 15 bp, Homo sapiens
tgcccttctcaggaa

SEQ ID NO: 1644288 - DNA, 15 bp, Homo sapiens
gcccttctcaggaaa

SEQ ID NO: 1644289 - DNA, 15 bp, Homo sapiens
cccttctcaggaaaa

SEQ ID NO: 1644290 - DNA, 15 bp, Homo sapiens
ccttctcaggaaaac

SEQ ID NO: 1644291 - DNA, 15 bp, Homo sapiens
cttctcaggaaaacc

SEQ ID NO: 1644292 - DNA, 15 bp, Homo sapiens
ttctcaggaaaacca

SEQ ID NO: 1644293 - DNA, 15 bp, Homo sapiens
tctcaggaaaaccaa

SEQ ID NO: 1644294 - DNA, 15 bp, Homo sapiens
ctcaggaaaaccaag

SEQ ID NO: 1644295 - DNA, 15 bp, Homo sapiens
tcaggaaaaccaagg

SEQ ID NO: 1644296 - DNA, 15 bp, Homo sapiens
caggaaaaccaaggt

SEQ ID NO: 1644297 - DNA, 15 bp, Homo sapiens
aggaaaaccaaggtt

SEQ ID NO: 1644298 - DNA, 15 bp, Homo sapiens
ggaaaaccaaggttc

SEQ ID NO: 1644299 - DNA, 15 bp, Homo sapiens
gaaaaccaaggttca

SEQ ID NO: 1644300 - DNA, 15 bp, Homo sapiens
aaaaccaaggttcaa

SEQ ID NO: 1644301 - DNA, 15 bp, Homo sapiens
aaaccaaggttcaag

SEQ ID NO: 1644302 - DNA, 15 bp, Homo sapiens
aaccaaggttcaagc

SEQ ID NO: 1644303 - DNA, 15 bp, Homo sapiens
accaaggttcaagct

SEQ ID NO: 1644304 - DNA, 15 bp, Homo sapiens
ccaaggttcaagctc

SEQ ID NO: 1644305 - DNA, 15 bp, Homo sapiens
caaggttcaagctct

SEQ ID NO: 1644306 - DNA, 15 bp, Homo sapiens
aaggttcaagctctc

SEQ ID NO: 1644307 - DNA, 15 bp, Homo sapiens
aggttcaagctctct

SEQ ID NO: 1644308 - DNA, 15 bp, Homo sapiens
ggttcaagctctcta

SEQ ID NO: 1644309 - DNA, 15 bp, Homo sapiens
gttcaagctctctat

SEQ ID NO: 1644310 - DNA, 15 bp, Homo sapiens
ttcaagctctctatt

SEQ ID NO: 1644311 - DNA, 15 bp, Homo sapiens
tcaagctctctatta

SEQ ID NO: 1644312 - DNA, 15 bp, Homo sapiens
caagctctctattag

SEQ ID NO: 1644313 - DNA, 15 bp, Homo sapiens
aagctctctattagc

SEQ ID NO: 1644314 - DNA, 15 bp, Homo sapiens
agctctctattagct

SEQ ID NO: 1644315 - DNA, 15 bp, Homo sapiens
gctctctattagctc

SEQ ID NO: 1644316 - DNA, 15 bp, Homo sapiens
ctctctattagctca

SEQ ID NO: 1644317 - DNA, 15 bp, Homo sapiens
tctctattagctcaa

SEQ ID NO: 1644318 - DNA, 15 bp, Homo sapiens
ctctattagctcaac

SEQ ID NO: 1644319 - DNA, 15 bp, Homo sapiens
tctattagctcaact

SEQ ID NO: 1644320 - DNA, 15 bp, Homo sapiens
ctattagctcaactg

SEQ ID NO: 1644321 - DNA, 15 bp, Homo sapiens
tattagctcaactgg

SEQ ID NO: 1644322 - DNA, 15 bp, Homo sapiens
attagctcaactggt

SEQ ID NO: 1644323 - DNA, 15 bp, Homo sapiens
ttagctcaactggta

SEQ ID NO: 1644324 - DNA, 15 bp, Homo sapiens
tagctcaactggtaa

SEQ ID NO: 1644325 - DNA, 15 bp, Homo sapiens
agctcaactggtaag

SEQ ID NO: 1644326 - DNA, 15 bp, Homo sapiens
gctcaactggtaagg

SEQ ID NO: 1644327 - DNA, 15 bp, Homo sapiens
ctcaactggtaaggc

SEQ ID NO: 1644328 - DNA, 15 bp, Homo sapiens
tcaactggtaaggcg

SEQ ID NO: 1644329 - DNA, 15 bp, Homo sapiens
caactggtaaggcgt

SEQ ID NO: 1644330 - DNA, 15 bp, Homo sapiens
aactggtaaggcgta

SEQ ID NO: 1644331 - DNA, 15 bp, Homo sapiens
actggtaaggcgtaa

SEQ ID NO: 1644332 - DNA, 15 bp, Homo sapiens
ctggtaaggcgtaag

SEQ ID NO: 1644333 - DNA, 15 bp, Homo sapiens
tggtaaggcgtaaga

SEQ ID NO: 1644334 - DNA, 15 bp, Homo sapiens
ggtaaggcgtaagac

SEQ ID NO: 1644335 - DNA, 15 bp, Homo sapiens
gtaaggcgtaagaca

SEQ ID NO: 1644336 - DNA, 15 bp, Homo sapiens
taaggcgtaagacat

SEQ ID NO: 1644337 - DNA, 15 bp, Homo sapiens
aaggcgtaagacatg

SEQ ID NO: 1644338 - DNA, 15 bp, Homo sapiens
aggcgtaagacatgg

SEQ ID NO: 1644339 - DNA, 15 bp, Homo sapiens
ggcgtaagacatgga

SEQ ID NO: 1644340 - DNA, 15 bp, Homo sapiens
gcgtaagacatggaa

SEQ ID NO: 1644341 - DNA, 15 bp, Homo sapiens
cgtaagacatggaag

SEQ ID NO: 1644342 - DNA, 15 bp, Homo sapiens
gtaagacatggaagg

SEQ ID NO: 1644343 - DNA, 15 bp, Homo sapiens
taagacatggaaggt

SEQ ID NO: 1644344 - DNA, 15 bp, Homo sapiens
aagacatggaaggtt

SEQ ID NO: 1644345 - DNA, 15 bp, Homo sapiens
agacatggaaggttg

SEQ ID NO: 1644346 - DNA, 15 bp, Homo sapiens
gacatggaaggttga

SEQ ID NO: 1644347 - DNA, 15 bp, Homo sapiens
acatggaaggttgag

SEQ ID NO: 1644348 - DNA, 15 bp, Homo sapiens
catggaaggttgagg

SEQ ID NO: 1644349 - DNA, 15 bp, Homo sapiens
atggaaggttgaggc

SEQ ID NO: 1644350 - DNA, 15 bp, Homo sapiens
tggaaggttgaggcc

SEQ ID NO: 1644351 - DNA, 15 bp, Homo sapiens
ggaaggttgaggccc

SEQ ID NO: 1644352 - DNA, 15 bp, Homo sapiens
gaaggttgaggccca

SEQ ID NO: 1644353 - DNA, 15 bp, Homo sapiens
aaggttgaggcccaa

SEQ ID NO: 1644354 - DNA, 15 bp, Homo sapiens
aggttgaggcccaat

SEQ ID NO: 1644355 - DNA, 15 bp, Homo sapiens
ggttgaggcccaatg

SEQ ID NO: 1644356 - DNA, 15 bp, Homo sapiens
gttgaggcccaatgt

SEQ ID NO: 1644357 - DNA, 15 bp, Homo sapiens
ttgaggcccaatgtt

SEQ ID NO: 1644358 - DNA, 15 bp, Homo sapiens
tgaggcccaatgtta

SEQ ID NO: 1644359 - DNA, 15 bp, Homo sapiens
gaggcccaatgttag

SEQ ID NO: 1644360 - DNA, 15 bp, Homo sapiens
aggcccaatgttaga

SEQ ID NO: 1644361 - DNA, 15 bp, Homo sapiens
ggcccaatgttagaa

SEQ ID NO: 1644362 - DNA, 15 bp, Homo sapiens
gcccaatgttagaaa

SEQ ID NO: 1644363 - DNA, 15 bp, Homo sapiens
cccaatgttagaaat

SEQ ID NO: 1644364 - DNA, 15 bp, Homo sapiens
ccaatgttagaaata

SEQ ID NO: 1644365 - DNA, 15 bp, Homo sapiens
caatgttagaaatag

SEQ ID NO: 1644366 - DNA, 15 bp, Homo sapiens
aatgttagaaataga

SEQ ID NO: 1644367 - DNA, 15 bp, Homo sapiens
atgttagaaatagat

SEQ ID NO: 1644368 - DNA, 15 bp, Homo sapiens
tgttagaaatagatg

SEQ ID NO: 1644369 - DNA, 15 bp, Homo sapiens
gttagaaatagatgg

SEQ ID NO: 1644370 - DNA, 15 bp, Homo sapiens
ttagaaatagatgga

SEQ ID NO: 1644371 - DNA, 15 bp, Homo sapiens
tagaaatagatggat

SEQ ID NO: 1644372 - DNA, 15 bp, Homo sapiens
agaaatagatggata

SEQ ID NO: 1644373 - DNA, 15 bp, Homo sapiens
gaaatagatggatac

SEQ ID NO: 1644374 - DNA, 15 bp, Homo sapiens
aaatagatggataca

SEQ ID NO: 1644375 - DNA, 15 bp, Homo sapiens
aatagatggatacat

SEQ ID NO: 1644376 - DNA, 15 bp, Homo sapiens
atagatggatacata

SEQ ID NO: 1644377 - DNA, 15 bp, Homo sapiens
tagatggatacataa

SEQ ID NO: 1644378 - DNA, 15 bp, Homo sapiens
agatggatacataaa

SEQ ID NO: 1644379 - DNA, 15 bp, Homo sapiens
gatggatacataaaa

SEQ ID NO: 1644380 - DNA, 15 bp, Homo sapiens
atggatacataaaac

SEQ ID NO: 1644381 - DNA, 15 bp, Homo sapiens
tggatacataaaact

SEQ ID NO: 1644382 - DNA, 15 bp, Homo sapiens
ggatacataaaactt

SEQ ID NO: 1644383 - DNA, 15 bp, Homo sapiens
gatacataaaacttc

SEQ ID NO: 1644384 - DNA, 15 bp, Homo sapiens
atacataaaacttca

SEQ ID NO: 1644385 - DNA, 15 bp, Homo sapiens
tacataaaacttcat

SEQ ID NO: 1644386 - DNA, 15 bp, Homo sapiens
acataaaacttcatc

SEQ ID NO: 1644387 - DNA, 15 bp, Homo sapiens
cataaaacttcatca

SEQ ID NO: 1644388 - DNA, 15 bp, Homo sapiens
ataaaacttcatcaa

SEQ ID NO: 1644389 - DNA, 15 bp, Homo sapiens
taaaacttcatcaag

SEQ ID NO: 1644390 - DNA, 15 bp, Homo sapiens
aaaacttcatcaagt

SEQ ID NO: 1644391 - DNA, 15 bp, Homo sapiens
aaacttcatcaagtt

SEQ ID NO: 1644392 - DNA, 15 bp, Homo sapiens
aacttcatcaagtta

SEQ ID NO: 1644393 - DNA, 15 bp, Homo sapiens
acttcatcaagttaa

SEQ ID NO: 1644394 - DNA, 15 bp, Homo sapiens
cttcatcaagttaat

SEQ ID NO: 1644395 - DNA, 15 bp, Homo sapiens
ttcatcaagttaatg

SEQ ID NO: 1644396 - DNA, 15 bp, Homo sapiens
tcatcaagttaatgt

SEQ ID NO: 1644397 - DNA, 15 bp, Homo sapiens
catcaagttaatgtc

SEQ ID NO: 1644398 - DNA, 15 bp, Homo sapiens
atcaagttaatgtca

SEQ ID NO: 1644399 - DNA, 15 bp, Homo sapiens
tcaagttaatgtcac

SEQ ID NO: 1644400 - DNA, 15 bp, Homo sapiens
caagttaatgtcact

SEQ ID NO: 1644401 - DNA, 15 bp, Homo sapiens
aagttaatgtcactt

SEQ ID NO: 1644402 - DNA, 15 bp, Homo sapiens
agttaatgtcacttt

SEQ ID NO: 1644403 - DNA, 15 bp, Homo sapiens
gttaatgtcactttt

SEQ ID NO: 1644404 - DNA, 15 bp, Homo sapiens
ttaatgtcacttttt

SEQ ID NO: 1644405 - DNA, 15 bp, Homo sapiens
taatgtcactttttc

SEQ ID NO: 1644406 - DNA, 15 bp, Homo sapiens
aatgtcactttttct

SEQ ID NO: 1644407 - DNA, 15 bp, Homo sapiens
atgtcactttttctc

SEQ ID NO: 1644408 - DNA, 15 bp, Homo sapiens
tgtcactttttctcc

SEQ ID NO: 1644409 - DNA, 15 bp, Homo sapiens
gtcactttttctcct

SEQ ID NO: 1644410 - DNA, 15 bp, Homo sapiens
tcactttttctcctt

SEQ ID NO: 1644411 - DNA, 15 bp, Homo sapiens
cactttttctccttt

SEQ ID NO: 1644412 - DNA, 15 bp, Homo sapiens
actttttctccttta

SEQ ID NO: 1644413 - DNA, 15 bp, Homo sapiens
ctttttctcctttat

SEQ ID NO: 1644414 - DNA, 15 bp, Homo sapiens
tttttctcctttatt

SEQ ID NO: 1644415 - DNA, 15 bp, Homo sapiens
ttttctcctttattt

SEQ ID NO: 1644416 - DNA, 15 bp, Homo sapiens
tttctcctttattta

SEQ ID NO: 1644417 - DNA, 15 bp, Homo sapiens
ttctcctttatttat

SEQ ID NO: 1644418 - DNA, 15 bp, Homo sapiens
tctcctttatttata

SEQ ID NO: 1644419 - DNA, 15 bp, Homo sapiens
ctcctttatttatag

SEQ ID NO: 1644420 - DNA, 15 bp, Homo sapiens
tcctttatttatagg

SEQ ID NO: 1644421 - DNA, 15 bp, Homo sapiens
cctttatttatagga

SEQ ID NO: 1644422 - DNA, 15 bp, Homo sapiens
ctttatttataggaa

SEQ ID NO: 1644423 - DNA, 15 bp, Homo sapiens
tttatttataggaag

SEQ ID NO: 1644424 - DNA, 15 bp, Homo sapiens
ttatttataggaagt

SEQ ID NO: 1644425 - DNA, 15 bp, Homo sapiens
tatttataggaagta

SEQ ID NO: 1644426 - DNA, 15 bp, Homo sapiens
atttataggaagtac

SEQ ID NO: 1644427 - DNA, 15 bp, Homo sapiens
tttataggaagtaca

SEQ ID NO: 1644428 - DNA, 15 bp, Homo sapiens
ttataggaagtacat

SEQ ID NO: 1644429 - DNA, 15 bp, Homo sapiens
tataggaagtacatt

SEQ ID NO: 1644430 - DNA, 15 bp, Homo sapiens
ataggaagtacattt

SEQ ID NO: 1644431 - DNA, 15 bp, Homo sapiens
taggaagtacatttg

SEQ ID NO: 1644432 - DNA, 15 bp, Homo sapiens
aggaagtacatttga

SEQ ID NO: 1644433 - DNA, 15 bp, Homo sapiens
ggaagtacatttgaa

SEQ ID NO: 1644434 - DNA, 15 bp, Homo sapiens
gaagtacatttgaag

SEQ ID NO: 1644435 - DNA, 15 bp, Homo sapiens
aagtacatttgaaga

SEQ ID NO: 1644436 - DNA, 15 bp, Homo sapiens
agtacatttgaagaa

SEQ ID NO: 1644437 - DNA, 15 bp, Homo sapiens
gtacatttgaagaac

SEQ ID NO: 1644438 - DNA, 15 bp, Homo sapiens
tacatttgaagaacg

SEQ ID NO: 1644439 - DNA, 15 bp, Homo sapiens
acatttgaagaacgc

SEQ ID NO: 1644440 - DNA, 15 bp, Homo sapiens
catttgaagaacgca

SEQ ID NO: 1644441 - DNA, 15 bp, Homo sapiens
atttgaagaacgcaa

SEQ ID NO: 1644442 - DNA, 15 bp, Homo sapiens
tttgaagaacgcaag

SEQ ID NO: 1644443 - DNA, 15 bp, Homo sapiens
ttgaagaacgcaagt

SEQ ID NO: 1644444 - DNA, 15 bp, Homo sapiens
tgaagaacgcaagta

SEQ ID NO: 1644445 - DNA, 15 bp, Homo sapiens
gaagaacgcaagtag

SEQ ID NO: 1644446 - DNA, 15 bp, Homo sapiens
aagaacgcaagtaga

SEQ ID NO: 1644447 - DNA, 15 bp, Homo sapiens
agaacgcaagtagag

SEQ ID NO: 1644448 - DNA, 15 bp, Homo sapiens
gaacgcaagtagagg

SEQ ID NO: 1644449 - DNA, 15 bp, Homo sapiens
aacgcaagtagaggg

SEQ ID NO: 1644450 - DNA, 15 bp, Homo sapiens
acgcaagtagaggga

SEQ ID NO: 1644451 - DNA, 15 bp, Homo sapiens
cgcaagtagagggag

SEQ ID NO: 1644452 - DNA, 15 bp, Homo sapiens
gcaagtagagggagt

SEQ ID NO: 1644453 - DNA, 15 bp, Homo sapiens
caagtagagggagtg

SEQ ID NO: 1644454 - DNA, 15 bp, Homo sapiens
aagtagagggagtgc

SEQ ID NO: 1644455 - DNA, 15 bp, Homo sapiens
agtagagggagtgca

SEQ ID NO: 1644456 - DNA, 15 bp, Homo sapiens
gtagagggagtgcag

SEQ ID NO: 1644457 - DNA, 15 bp, Homo sapiens
tagagggagtgcagg

SEQ ID NO: 1644458 - DNA, 15 bp, Homo sapiens
agagggagtgcagga

SEQ ID NO: 1644459 - DNA, 15 bp, Homo sapiens
gagggagtgcaggaa

SEQ ID NO: 1644460 - DNA, 15 bp, Homo sapiens
agggagtgcaggaaa

SEQ ID NO: 1644461 - DNA, 15 bp, Homo sapiens
gggagtgcaggaaac

SEQ ID NO: 1644462 - DNA, 15 bp, Homo sapiens
ggagtgcaggaaaca

SEQ ID NO: 1644463 - DNA, 15 bp, Homo sapiens
gagtgcaggaaacaa

SEQ ID NO: 1644464 - DNA, 15 bp, Homo sapiens
agtgcaggaaacaag

SEQ ID NO: 1644465 - DNA, 15 bp, Homo sapiens
gtgcaggaaacaaga

SEQ ID NO: 1644466 - DNA, 15 bp, Homo sapiens
tgcaggaaacaagaa

SEQ ID NO: 1644467 - DNA, 15 bp, Homo sapiens
gcaggaaacaagaac

SEQ ID NO: 1644468 - DNA, 15 bp, Homo sapiens
caggaaacaagaact

SEQ ID NO: 1644469 - DNA, 15 bp, Homo sapiens
aggaaacaagaacta

SEQ ID NO: 1644470 - DNA, 15 bp, Homo sapiens
ggaaacaagaactac

SEQ ID NO: 1644471 - DNA, 15 bp, Homo sapiens
gaaacaagaactaca

SEQ ID NO: 1644472 - DNA, 15 bp, Homo sapiens
aaacaagaactacag

SEQ ID NO: 1644473 - DNA, 15 bp, Homo sapiens
aacaagaactacagg

SEQ ID NO: 1644474 - DNA, 15 bp, Homo sapiens
acaagaactacagga

SEQ ID NO: 1644475 - DNA, 15 bp, Homo sapiens
caagaactacaggat

SEQ ID NO: 1644476 - DNA, 15 bp, Homo sapiens
aagaactacaggatg

SEQ ID NO: 1644477 - DNA, 15 bp, Homo sapiens
agaactacaggatgt

SEQ ID NO: 1644478 - DNA, 15 bp, Homo sapiens
gaactacaggatgta

SEQ ID NO: 1644479 - DNA, 15 bp, Homo sapiens
aactacaggatgtag

SEQ ID NO: 1644480 - DNA, 15 bp, Homo sapiens
actacaggatgtagg

SEQ ID NO: 1644481 - DNA, 15 bp, Homo sapiens
ctacaggatgtagga

SEQ ID NO: 1644482 - DNA, 15 bp, Homo sapiens
tacaggatgtaggaa

SEQ ID NO: 1644483 - DNA, 15 bp, Homo sapiens
acaggatgtaggaag

SEQ ID NO: 1644484 - DNA, 15 bp, Homo sapiens
caggatgtaggaaga

SEQ ID NO: 1644485 - DNA, 15 bp, Homo sapiens
aggatgtaggaagac

SEQ ID NO: 1644486 - DNA, 15 bp, Homo sapiens
ggatgtaggaagacc

SEQ ID NO: 1644487 - DNA, 15 bp, Homo sapiens
gatgtaggaagaccc

SEQ ID NO: 1644488 - DNA, 15 bp, Homo sapiens
atgtaggaagaccct

SEQ ID NO: 1644489 - DNA, 15 bp, Homo sapiens
tgtaggaagaccctc

SEQ ID NO: 1644490 - DNA, 15 bp, Homo sapiens
gtaggaagaccctcc

SEQ ID NO: 1644491 - DNA, 15 bp, Homo sapiens
taggaagaccctcct

SEQ ID NO: 1644492 - DNA, 15 bp, Homo sapiens
aggaagaccctcctg

SEQ ID NO: 1644493 - DNA, 15 bp, Homo sapiens
ggaagaccctcctga

SEQ ID NO: 1644494 - DNA, 15 bp, Homo sapiens
gaagaccctcctgag

SEQ ID NO: 1644495 - DNA, 15 bp, Homo sapiens
aagaccctcctgagg

SEQ ID NO: 1644496 - DNA, 15 bp, Homo sapiens
agaccctcctgagga

SEQ ID NO: 1644497 - DNA, 15 bp, Homo sapiens
gaccctcctgaggag

SEQ ID NO: 1644498 - DNA, 15 bp, Homo sapiens
accctcctgaggagt

SEQ ID NO: 1644499 - DNA, 15 bp, Homo sapiens
ccctcctgaggagtg

SEQ ID NO: 1644500 - DNA, 15 bp, Homo sapiens
cctcctgaggagtga

SEQ ID NO: 1644501 - DNA, 15 bp, Homo sapiens
ctcctgaggagtgaa

SEQ ID NO: 1644502 - DNA, 15 bp, Homo sapiens
tcctgaggagtgaag

SEQ ID NO: 1644503 - DNA, 15 bp, Homo sapiens
cctgaggagtgaaga

SEQ ID NO: 1644504 - DNA, 15 bp, Homo sapiens
ctgaggagtgaagag

SEQ ID NO: 1644505 - DNA, 15 bp, Homo sapiens
tgaggagtgaagagt

SEQ ID NO: 1644506 - DNA, 15 bp, Homo sapiens
gaggagtgaagagtg

SEQ ID NO: 1644507 - DNA, 15 bp, Homo sapiens
aggagtgaagagtga

SEQ ID NO: 1644508 - DNA, 15 bp, Homo sapiens
ggagtgaagagtgac

SEQ ID NO: 1644509 - DNA, 15 bp, Homo sapiens
gagtgaagagtgaca

SEQ ID NO: 1644510 - DNA, 15 bp, Homo sapiens
agtgaagagtgacat

SEQ ID NO: 1644511 - DNA, 15 bp, Homo sapiens
gtgaagagtgacatg

SEQ ID NO: 1644512 - DNA, 15 bp, Homo sapiens
tgaagagtgacatgc

SEQ ID NO: 1644513 - DNA, 15 bp, Homo sapiens
gaagagtgacatgcc

SEQ ID NO: 1644514 - DNA, 15 bp, Homo sapiens
aagagtgacatgcca

SEQ ID NO: 1644515 - DNA, 15 bp, Homo sapiens
agagtgacatgccac

SEQ ID NO: 1644516 - DNA, 15 bp, Homo sapiens
gagtgacatgccacc

SEQ ID NO: 1644517 - DNA, 15 bp, Homo sapiens
agtgacatgccaccg

SEQ ID NO: 1644518 - DNA, 15 bp, Homo sapiens
gtgacatgccaccgc

SEQ ID NO: 1644519 - DNA, 15 bp, Homo sapiens
tgacatgccaccgca

SEQ ID NO: 1644520 - DNA, 15 bp, Homo sapiens
gacatgccaccgcag

SEQ ID NO: 1644521 - DNA, 15 bp, Homo sapiens
acatgccaccgcagg

SEQ ID NO: 1644522 - DNA, 15 bp, Homo sapiens
catgccaccgcagga

SEQ ID NO: 1644523 - DNA, 15 bp, Homo sapiens
atgccaccgcaggat

SEQ ID NO: 1644524 - DNA, 15 bp, Homo sapiens
tgccaccgcaggatc

SEQ ID NO: 1644525 - DNA, 15 bp, Homo sapiens
gccaccgcaggatcc

SEQ ID NO: 1644526 - DNA, 15 bp, Homo sapiens
ccaccgcaggatcct

SEQ ID NO: 1644527 - DNA, 15 bp, Homo sapiens
caccgcaggatcctt

SEQ ID NO: 1644528 - DNA, 15 bp, Homo sapiens
accgcaggatccttt

SEQ ID NO: 1644529 - DNA, 15 bp, Homo sapiens
ccgcaggatcctttg

SEQ ID NO: 1644530 - DNA, 15 bp, Homo sapiens
cgcaggatcctttgc

SEQ ID NO: 1644531 - DNA, 15 bp, Homo sapiens
gcaggatcctttgct

SEQ ID NO: 1644532 - DNA, 15 bp, Homo sapiens
caggatcctttgctc

SEQ ID NO: 1644533 - DNA, 15 bp, Homo sapiens
aggatcctttgctct

SEQ ID NO: 1644534 - DNA, 15 bp, Homo sapiens
ggatcctttgctctg

SEQ ID NO: 1644535 - DNA, 15 bp, Homo sapiens
gatcctttgctctgc

SEQ ID NO: 1644536 - DNA, 15 bp, Homo sapiens
atcctttgctctgca

SEQ ID NO: 1644537 - DNA, 15 bp, Homo sapiens
tcctttgctctgcac

SEQ ID NO: 1644538 - DNA, 15 bp, Homo sapiens
cctttgctctgcacg

SEQ ID NO: 1644539 - DNA, 15 bp, Homo sapiens
ctttgctctgcacga

SEQ ID NO: 1644540 - DNA, 15 bp, Homo sapiens
tttgctctgcacgag

SEQ ID NO: 1644541 - DNA, 15 bp, Homo sapiens
ttgctctgcacgagt

SEQ ID NO: 1644542 - DNA, 15 bp, Homo sapiens
tgctctgcacgagtt

SEQ ID NO: 1644543 - DNA, 15 bp, Homo sapiens
gctctgcacgagtta

SEQ ID NO: 1644544 - DNA, 15 bp, Homo sapiens
ctctgcacgagttac

SEQ ID NO: 1644545 - DNA, 15 bp, Homo sapiens
tctgcacgagttacc

SEQ ID NO: 1644546 - DNA, 15 bp, Homo sapiens
ctgcacgagttacct

SEQ ID NO: 1644547 - DNA, 15 bp, Homo sapiens
tgcacgagttacctg

SEQ ID NO: 1644548 - DNA, 15 bp, Homo sapiens
gcacgagttacctgt

SEQ ID NO: 1644549 - DNA, 15 bp, Homo sapiens
cacgagttacctgtt

SEQ ID NO: 1644550 - DNA, 15 bp, Homo sapiens
acgagttacctgtta

SEQ ID NO: 1644551 - DNA, 15 bp, Homo sapiens
cgagttacctgttaa

SEQ ID NO: 1644552 - DNA, 15 bp, Homo sapiens
gagttacctgttaaa

SEQ ID NO: 1644553 - DNA, 15 bp, Homo sapiens
agttacctgttaaac

SEQ ID NO: 1644554 - DNA, 15 bp, Homo sapiens
gttacctgttaaact

SEQ ID NO: 1644555 - DNA, 15 bp, Homo sapiens
ttacctgttaaactt

SEQ ID NO: 1644556 - DNA, 15 bp, Homo sapiens
tacctgttaaacttt

SEQ ID NO: 1644557 - DNA, 15 bp, Homo sapiens
acctgttaaactttg

SEQ ID NO: 1644558 - DNA, 15 bp, Homo sapiens
cctgttaaactttgg

SEQ ID NO: 1644559 - DNA, 15 bp, Homo sapiens
ctgttaaactttgga

SEQ ID NO: 1644560 - DNA, 15 bp, Homo sapiens
tgttaaactttggaa

SEQ ID NO: 1644561 - DNA, 15 bp, Homo sapiens
gttaaactttggaac

SEQ ID NO: 1644562 - DNA, 15 bp, Homo sapiens
ttaaactttggaaca

SEQ ID NO: 1644563 - DNA, 15 bp, Homo sapiens
taaactttggaacac

SEQ ID NO: 1644564 - DNA, 15 bp, Homo sapiens
aaactttggaacacc

SEQ ID NO: 1644565 - DNA, 15 bp, Homo sapiens
aactttggaacacct

SEQ ID NO: 1644566 - DNA, 15 bp, Homo sapiens
actttggaacaccta

SEQ ID NO: 1644567 - DNA, 15 bp, Homo sapiens
ctttggaacacctac

SEQ ID NO: 1644568 - DNA, 15 bp, Homo sapiens
tttggaacacctacc

SEQ ID NO: 1644569 - DNA, 15 bp, Homo sapiens
ttggaacacctacca

SEQ ID NO: 1644570 - DNA, 15 bp, Homo sapiens
tggaacacctaccaa

SEQ ID NO: 1644571 - DNA, 15 bp, Homo sapiens
ggaacacctaccaaa

SEQ ID NO: 1644572 - DNA, 15 bp, Homo sapiens
gaacacctaccaaaa

SEQ ID NO: 1644573 - DNA, 15 bp, Homo sapiens
aacacctaccaaaaa

SEQ ID NO: 1644574 - DNA, 15 bp, Homo sapiens
acacctaccaaaaaa

SEQ ID NO: 1644575 - DNA, 15 bp, Homo sapiens
cacctaccaaaaaat

SEQ ID NO: 1644576 - DNA, 15 bp, Homo sapiens
acctaccaaaaaata

SEQ ID NO: 1644577 - DNA, 15 bp, Homo sapiens
cctaccaaaaaataa

SEQ ID NO: 1644578 - DNA, 15 bp, Homo sapiens
ctaccaaaaaataag

SEQ ID NO: 1644579 - DNA, 15 bp, Homo sapiens
taccaaaaaataagt

SEQ ID NO: 1644580 - DNA, 15 bp, Homo sapiens
accaaaaaataagtt

SEQ ID NO: 1644581 - DNA, 15 bp, Homo sapiens
ccaaaaaataagttt

SEQ ID NO: 1644582 - DNA, 15 bp, Homo sapiens
caaaaaataagtttg

SEQ ID NO: 1644583 - DNA, 15 bp, Homo sapiens
aaaaaataagtttga

SEQ ID NO: 1644584 - DNA, 15 bp, Homo sapiens
aaaaataagtttgat

SEQ ID NO: 1644585 - DNA, 15 bp, Homo sapiens
aaaataagtttgata

SEQ ID NO: 1644586 - DNA, 15 bp, Homo sapiens
aaataagtttgataa

SEQ ID NO: 1644587 - DNA, 15 bp, Homo sapiens
aataagtttgataac

SEQ ID NO: 1644588 - DNA, 15 bp, Homo sapiens
ataagtttgataaca

SEQ ID NO: 1644589 - DNA, 15 bp, Homo sapiens
taagtttgataacat

SEQ ID NO: 1644590 - DNA, 15 bp, Homo sapiens
aagtttgataacatt

SEQ ID NO: 1644591 - DNA, 15 bp, Homo sapiens
agtttgataacattt

SEQ ID NO: 1644592 - DNA, 15 bp, Homo sapiens
gtttgataacattta

SEQ ID NO: 1644593 - DNA, 15 bp, Homo sapiens
tttgataacatttaa

SEQ ID NO: 1644594 - DNA, 15 bp, Homo sapiens
ttgataacatttaaa

SEQ ID NO: 1644595 - DNA, 15 bp, Homo sapiens
tgataacatttaaaa

SEQ ID NO: 1644596 - DNA, 15 bp, Homo sapiens
gataacatttaaaag

SEQ ID NO: 1644597 - DNA, 15 bp, Homo sapiens
ataacatttaaaaga

SEQ ID NO: 1644598 - DNA, 15 bp, Homo sapiens
taacatttaaaagat

SEQ ID NO: 1644599 - DNA, 15 bp, Homo sapiens
aacatttaaaagatg

SEQ ID NO: 1644600 - DNA, 15 bp, Homo sapiens
acatttaaaagatgg

SEQ ID NO: 1644601 - DNA, 15 bp, Homo sapiens
catttaaaagatggg

SEQ ID NO: 1644602 - DNA, 15 bp, Homo sapiens
atttaaaagatgggc

SEQ ID NO: 1644603 - DNA, 15 bp, Homo sapiens
tttaaaagatgggcg

SEQ ID NO: 1644604 - DNA, 15 bp, Homo sapiens
ttaaaagatgggcgt

SEQ ID NO: 1644605 - DNA, 15 bp, Homo sapiens
taaaagatgggcgtt

SEQ ID NO: 1644606 - DNA, 15 bp, Homo sapiens
aaaagatgggcgttt

SEQ ID NO: 1644607 - DNA, 15 bp, Homo sapiens
aaagatgggcgtttc

SEQ ID NO: 1644608 - DNA, 15 bp, Homo sapiens
aagatgggcgtttcc

SEQ ID NO: 1644609 - DNA, 15 bp, Homo sapiens
agatgggcgtttccc

SEQ ID NO: 1644610 - DNA, 15 bp, Homo sapiens
gatgggcgtttcccc

SEQ ID NO: 1644611 - DNA, 15 bp, Homo sapiens
atgggcgtttccccc

SEQ ID NO: 1644612 - DNA, 15 bp, Homo sapiens
tgggcgtttccccca

SEQ ID NO: 1644613 - DNA, 15 bp, Homo sapiens
gggcgtttcccccaa

SEQ ID NO: 1644614 - DNA, 15 bp, Homo sapiens
ggcgtttcccccaat

SEQ ID NO: 1644615 - DNA, 15 bp, Homo sapiens
gcgtttcccccaatg

SEQ ID NO: 1644616 - DNA, 15 bp, Homo sapiens
cgtttcccccaatga

SEQ ID NO: 1644617 - DNA, 15 bp, Homo sapiens
gtttcccccaatgaa

SEQ ID NO: 1644618 - DNA, 15 bp, Homo sapiens
tttcccccaatgaaa

SEQ ID NO: 1644619 - DNA, 15 bp, Homo sapiens
ttcccccaatgaaat

SEQ ID NO: 1644620 - DNA, 15 bp, Homo sapiens
tcccccaatgaaata

SEQ ID NO: 1644621 - DNA, 15 bp, Homo sapiens
cccccaatgaaatac

SEQ ID NO: 1644622 - DNA, 15 bp, Homo sapiens
ccccaatgaaataca

SEQ ID NO: 1644623 - DNA, 15 bp, Homo sapiens
cccaatgaaatacac

SEQ ID NO: 1644624 - DNA, 15 bp, Homo sapiens
ccaatgaaatacaca

SEQ ID NO: 1644625 - DNA, 15 bp, Homo sapiens
caatgaaatacacaa

SEQ ID NO: 1644626 - DNA, 15 bp, Homo sapiens
aatgaaatacacaag

SEQ ID NO: 1644627 - DNA, 15 bp, Homo sapiens
atgaaatacacaagt

SEQ ID NO: 1644628 - DNA, 15 bp, Homo sapiens
tgaaatacacaagta

SEQ ID NO: 1644629 - DNA, 15 bp, Homo sapiens
gaaatacacaagtaa

SEQ ID NO: 1644630 - DNA, 15 bp, Homo sapiens
aaatacacaagtaaa

SEQ ID NO: 1644631 - DNA, 15 bp, Homo sapiens
aatacacaagtaaac

SEQ ID NO: 1644632 - DNA, 15 bp, Homo sapiens
atacacaagtaaaca

SEQ ID NO: 1644633 - DNA, 15 bp, Homo sapiens
tacacaagtaaacat

SEQ ID NO: 1644634 - DNA, 15 bp, Homo sapiens
acacaagtaaacatt

SEQ ID NO: 1644635 - DNA, 15 bp, Homo sapiens
acaagtaaacattcc

SEQ ID NO: 1644636 - DNA, 15 bp, Homo sapiens
caagtaaacattcca

SEQ ID NO: 1644637 - DNA, 15 bp, Homo sapiens
aagtaaacattccaa

SEQ ID NO: 1644638 - DNA, 15 bp, Homo sapiens
agtaaacattccaac

SEQ ID NO: 1644639 - DNA, 15 bp, Homo sapiens
gtaaacattccaaca

SEQ ID NO: 1644640 - DNA, 15 bp, Homo sapiens
taaacattccaacat

SEQ ID NO: 1644641 - DNA, 15 bp, Homo sapiens
aaacattccaacatt

SEQ ID NO: 1644642 - DNA, 15 bp, Homo sapiens
aacattccaacattg

SEQ ID NO: 1644643 - DNA, 15 bp, Homo sapiens
acattccaacattgt

SEQ ID NO: 1644644 - DNA, 15 bp, Homo sapiens
cattccaacattgtc

SEQ ID NO: 1644645 - DNA, 15 bp, Homo sapiens
attccaacattgtct

SEQ ID NO: 1644646 - DNA, 15 bp, Homo sapiens
ttccaacattgtctt

SEQ ID NO: 1644647 - DNA, 15 bp, Homo sapiens
tccaacattgtcttt

SEQ ID NO: 1644648 - DNA, 15 bp, Homo sapiens
ccaacattgtcttta

SEQ ID NO: 1644649 - DNA, 15 bp, Homo sapiens
caacattgtctttag

SEQ ID NO: 1644650 - DNA, 15 bp, Homo sapiens
aacattgtctttagg

SEQ ID NO: 1644651 - DNA, 15 bp, Homo sapiens
acattgtctttagga

SEQ ID NO: 1644652 - DNA, 15 bp, Homo sapiens
cattgtctttaggag

SEQ ID NO: 1644653 - DNA, 15 bp, Homo sapiens
attgtctttaggagt

SEQ ID NO: 1644654 - DNA, 15 bp, Homo sapiens
ttgtctttaggagtg

SEQ ID NO: 1644655 - DNA, 15 bp, Homo sapiens
tgtctttaggagtga

SEQ ID NO: 1644656 - DNA, 15 bp, Homo sapiens
gtctttaggagtgat

SEQ ID NO: 1644657 - DNA, 15 bp, Homo sapiens
tctttaggagtgatt

SEQ ID NO: 1644658 - DNA, 15 bp, Homo sapiens
ctttaggagtgattt

SEQ ID NO: 1644659 - DNA, 15 bp, Homo sapiens
tttaggagtgatttg

SEQ ID NO: 1644660 - DNA, 15 bp, Homo sapiens
ttaggagtgatttgc

SEQ ID NO: 1644661 - DNA, 15 bp, Homo sapiens
taggagtgatttgca

SEQ ID NO: 1644662 - DNA, 15 bp, Homo sapiens
aggagtgatttgcac

SEQ ID NO: 1644663 - DNA, 15 bp, Homo sapiens
ggagtgatttgcacc

SEQ ID NO: 1644664 - DNA, 15 bp, Homo sapiens
gagtgatttgcacct

SEQ ID NO: 1644665 - DNA, 15 bp, Homo sapiens
agtgatttgcacctt

SEQ ID NO: 1644666 - DNA, 15 bp, Homo sapiens
gtgatttgcaccttg

SEQ ID NO: 1644667 - DNA, 15 bp, Homo sapiens
tgatttgcaccttgc

SEQ ID NO: 1644668 - DNA, 15 bp, Homo sapiens
gatttgcaccttgca

SEQ ID NO: 1644669 - DNA, 15 bp, Homo sapiens
atttgcaccttgcaa

SEQ ID NO: 1644670 - DNA, 15 bp, Homo sapiens
tttgcaccttgcaaa

SEQ ID NO: 1644671 - DNA, 15 bp, Homo sapiens
ttgcaccttgcaaaa

SEQ ID NO: 1644672 - DNA, 15 bp, Homo sapiens
tgcaccttgcaaaaa

SEQ ID NO: 1644673 - DNA, 15 bp, Homo sapiens
gcaccttgcaaaaat

SEQ ID NO: 1644674 - DNA, 15 bp, Homo sapiens
caccttgcaaaaatg

SEQ ID NO: 1644675 - DNA, 15 bp, Homo sapiens
accttgcaaaaatgg

SEQ ID NO: 1644676 - DNA, 15 bp, Homo sapiens
ccttgcaaaaatggt

SEQ ID NO: 1644677 - DNA, 15 bp, Homo sapiens
cttgcaaaaatggtc

SEQ ID NO: 1644678 - DNA, 15 bp, Homo sapiens
ttgcaaaaatggtcc

SEQ ID NO: 1644679 - DNA, 15 bp, Homo sapiens
tgcaaaaatggtcct

SEQ ID NO: 1644680 - DNA, 15 bp, Homo sapiens
gcaaaaatggtcctg

SEQ ID NO: 1644681 - DNA, 15 bp, Homo sapiens
caaaaatggtcctgg

SEQ ID NO: 1644682 - DNA, 15 bp, Homo sapiens
aaaaatggtcctgga

SEQ ID NO: 1644683 - DNA, 15 bp, Homo sapiens
aaaatggtcctggag

SEQ ID NO: 1644684 - DNA, 15 bp, Homo sapiens
aaatggtcctggagt

SEQ ID NO: 1644685 - DNA, 15 bp, Homo sapiens
aatggtcctggagtt

SEQ ID NO: 1644686 - DNA, 15 bp, Homo sapiens
atggtcctggagttg

SEQ ID NO: 1644687 - DNA, 15 bp, Homo sapiens
tggtcctggagttgg

SEQ ID NO: 1644688 - DNA, 15 bp, Homo sapiens
ggtcctggagttggt

SEQ ID NO: 1644689 - DNA, 15 bp, Homo sapiens
gtcctggagttggta

SEQ ID NO: 1644690 - DNA, 15 bp, Homo sapiens
tcctggagttggtag

SEQ ID NO: 1644691 - DNA, 15 bp, Homo sapiens
cctggagttggtaga

SEQ ID NO: 1644692 - DNA, 15 bp, Homo sapiens
ctggagttggtagat

SEQ ID NO: 1644693 - DNA, 15 bp, Homo sapiens
tggagttggtagatt

SEQ ID NO: 1644694 - DNA, 15 bp, Homo sapiens
ggagttggtagattg

SEQ ID NO: 1644695 - DNA, 15 bp, Homo sapiens
gagttggtagattgc

SEQ ID NO: 1644696 - DNA, 15 bp, Homo sapiens
agttggtagattgct

SEQ ID NO: 1644697 - DNA, 15 bp, Homo sapiens
gttggtagattgctg

SEQ ID NO: 1644698 - DNA, 15 bp, Homo sapiens
ttggtagattgctgt

SEQ ID NO: 1644699 - DNA, 15 bp, Homo sapiens
tggtagattgctgtt

SEQ ID NO: 1644700 - DNA, 15 bp, Homo sapiens
ggtagattgctgttg

SEQ ID NO: 1644701 - DNA, 15 bp, Homo sapiens
gtagattgctgttga

SEQ ID NO: 1644702 - DNA, 15 bp, Homo sapiens
tagattgctgttgat

SEQ ID NO: 1644703 - DNA, 15 bp, Homo sapiens
agattgctgttgatc

SEQ ID NO: 1644704 - DNA, 15 bp, Homo sapiens
gattgctgttgatct

SEQ ID NO: 1644705 - DNA, 15 bp, Homo sapiens
attgctgttgatctt

SEQ ID NO: 1644706 - DNA, 15 bp, Homo sapiens
ttgctgttgatcttt

SEQ ID NO: 1644707 - DNA, 15 bp, Homo sapiens
tgctgttgatctttt

SEQ ID NO: 1644708 - DNA, 15 bp, Homo sapiens
gctgttgatctttta

SEQ ID NO: 1644709 - DNA, 15 bp, Homo sapiens
ctgttgatcttttat

SEQ ID NO: 1644710 - DNA, 15 bp, Homo sapiens
tgttgatcttttatc

SEQ ID NO: 1644711 - DNA, 15 bp, Homo sapiens
gttgatcttttatca

SEQ ID NO: 1644712 - DNA, 15 bp, Homo sapiens
ttgatcttttatcaa

SEQ ID NO: 1644713 - DNA, 15 bp, Homo sapiens
tgatcttttatcaat

SEQ ID NO: 1644714 - DNA, 15 bp, Homo sapiens
gatcttttatcaata

SEQ ID NO: 1644715 - DNA, 15 bp, Homo sapiens
atcttttatcaataa

SEQ ID NO: 1644716 - DNA, 15 bp, Homo sapiens
tcttttatcaataat

SEQ ID NO: 1644717 - DNA, 15 bp, Homo sapiens
cttttatcaataatg

SEQ ID NO: 1644718 - DNA, 15 bp, Homo sapiens
ttttatcaataatgt

SEQ ID NO: 1644719 - DNA, 15 bp, Homo sapiens
tttatcaataatgtt

SEQ ID NO: 1644720 - DNA, 15 bp, Homo sapiens
ttatcaataatgttc

SEQ ID NO: 1644721 - DNA, 15 bp, Homo sapiens
tatcaataatgttct

SEQ ID NO: 1644722 - DNA, 15 bp, Homo sapiens
atcaataatgttcta

SEQ ID NO: 1644723 - DNA, 15 bp, Homo sapiens
tcaataatgttctat

SEQ ID NO: 1644724 - DNA, 15 bp, Homo sapiens
caataatgttctata

SEQ ID NO: 1644725 - DNA, 15 bp, Homo sapiens
aataatgttctatag

SEQ ID NO: 1644726 - DNA, 15 bp, Homo sapiens
ataatgttctataga

SEQ ID NO: 1644727 - DNA, 15 bp, Homo sapiens
taatgttctatagaa

SEQ ID NO: 1644728 - DNA, 15 bp, Homo sapiens
aatgttctatagaaa

SEQ ID NO: 1644729 - DNA, 15 bp, Homo sapiens
atgttctatagaaaa

SEQ ID NO: 1644730 - DNA, 15 bp, Homo sapiens
tgttctatagaaaag

SEQ ID NO: 1644731 - DNA, 15 bp, Homo sapiens
gttctatagaaaaga

SEQ ID NO: 1644732 - DNA, 15 bp, Homo sapiens
ttctatagaaaagaa

SEQ ID NO: 1644733 - DNA, 15 bp, Homo sapiens
tctatagaaaagaaa

SEQ ID NO: 1644734 - DNA, 15 bp, Homo sapiens
ctatagaaaagaaaa

SEQ ID NO: 1644735 - DNA, 15 bp, Homo sapiens
tatagaaaagaaaaa

SEQ ID NO: 1644736 - DNA, 15 bp, Homo sapiens
atagaaaagaaaaaa

SEQ ID NO: 1644737 - DNA, 15 bp, Homo sapiens
tagaaaagaaaaaaa

SEQ ID NO: 1644738 - DNA, 15 bp, Homo sapiens
agaaaaaaaaaatat

SEQ ID NO: 1644739 - DNA, 15 bp, Homo sapiens
gaaaaaaaaaatata

SEQ ID NO: 1644740 - DNA, 15 bp, Homo sapiens
atatatatatatctt

SEQ ID NO: 1644741 - DNA, 15 bp, Homo sapiens
tatatatatatctta

SEQ ID NO: 1644742 - DNA, 15 bp, Homo sapiens
atatatatatcttag

SEQ ID NO: 1644743 - DNA, 15 bp, Homo sapiens
tatatatatcttagt

SEQ ID NO: 1644744 - DNA, 15 bp, Homo sapiens
atatatatcttagtc

SEQ ID NO: 1644745 - DNA, 15 bp, Homo sapiens
tatatatcttagtcc

SEQ ID NO: 1644746 - DNA, 15 bp, Homo sapiens
atatatcttagtccc

SEQ ID NO: 1644747 - DNA, 15 bp, Homo sapiens
tatatcttagtccct

SEQ ID NO: 1644748 - DNA, 15 bp, Homo sapiens
atatcttagtccctg

SEQ ID NO: 1644749 - DNA, 15 bp, Homo sapiens
tatcttagtccctgc

SEQ ID NO: 1644750 - DNA, 15 bp, Homo sapiens
atcttagtccctgcc

SEQ ID NO: 1644751 - DNA, 15 bp, Homo sapiens
tcttagtccctgcct

SEQ ID NO: 1644752 - DNA, 15 bp, Homo sapiens
cttagtccctgcctc

SEQ ID NO: 1644753 - DNA, 15 bp, Homo sapiens
ttagtccctgcctct

SEQ ID NO: 1644754 - DNA, 15 bp, Homo sapiens
tagtccctgcctctc

SEQ ID NO: 1644755 - DNA, 15 bp, Homo sapiens
agtccctgcctctca

SEQ ID NO: 1644756 - DNA, 15 bp, Homo sapiens
gtccctgcctctcaa

SEQ ID NO: 1644757 - DNA, 15 bp, Homo sapiens
tccctgcctctcaag

SEQ ID NO: 1644758 - DNA, 15 bp, Homo sapiens
ccctgcctctcaaga

SEQ ID NO: 1644759 - DNA, 15 bp, Homo sapiens
cctgcctctcaagag

SEQ ID NO: 1644760 - DNA, 15 bp, Homo sapiens
ctgcctctcaagagc

SEQ ID NO: 1644761 - DNA, 15 bp, Homo sapiens
tgcctctcaagagcc

SEQ ID NO: 1644762 - DNA, 15 bp, Homo sapiens
gcctctcaagagcca

SEQ ID NO: 1644763 - DNA, 15 bp, Homo sapiens
cctctcaagagccac

SEQ ID NO: 1644764 - DNA, 15 bp, Homo sapiens
ctctcaagagccaca

SEQ ID NO: 1644765 - DNA, 15 bp, Homo sapiens
tctcaagagccacaa

SEQ ID NO: 1644766 - DNA, 15 bp, Homo sapiens
ctcaagagccacaaa

SEQ ID NO: 1644767 - DNA, 15 bp, Homo sapiens
tcaagagccacaaat

SEQ ID NO: 1644768 - DNA, 15 bp, Homo sapiens
caagagccacaaatg

SEQ ID NO: 1644769 - DNA, 15 bp, Homo sapiens
aagagccacaaatgc

SEQ ID NO: 1644770 - DNA, 15 bp, Homo sapiens
agagccacaaatgca

SEQ ID NO: 1644771 - DNA, 15 bp, Homo sapiens
gagccacaaatgcat

SEQ ID NO: 1644772 - DNA, 15 bp, Homo sapiens
agccacaaatgcatg

SEQ ID NO: 1644773 - DNA, 15 bp, Homo sapiens
gccacaaatgcatgg

SEQ ID NO: 1644774 - DNA, 15 bp, Homo sapiens
ccacaaatgcatggg

SEQ ID NO: 1644775 - DNA, 15 bp, Homo sapiens
cacaaatgcatgggt

SEQ ID NO: 1644776 - DNA, 15 bp, Homo sapiens
acaaatgcatgggtg

SEQ ID NO: 1644777 - DNA, 15 bp, Homo sapiens
caaatgcatgggtgt

SEQ ID NO: 1644778 - DNA, 15 bp, Homo sapiens
aaatgcatgggtgtt

SEQ ID NO: 1644779 - DNA, 15 bp, Homo sapiens
aatgcatgggtgttg

SEQ ID NO: 1644780 - DNA, 15 bp, Homo sapiens
atgcatgggtgttgt

SEQ ID NO: 1644781 - DNA, 15 bp, Homo sapiens
tgcatgggtgttgta

SEQ ID NO: 1644782 - DNA, 15 bp, Homo sapiens
gcatgggtgttgtat

SEQ ID NO: 1644783 - DNA, 15 bp, Homo sapiens
catgggtgttgtata

SEQ ID NO: 1644784 - DNA, 15 bp, Homo sapiens
atgggtgttgtatag

SEQ ID NO: 1644785 - DNA, 15 bp, Homo sapiens
tgggtgttgtataga

SEQ ID NO: 1644786 - DNA, 15 bp, Homo sapiens
gggtgttgtatagat

SEQ ID NO: 1644787 - DNA, 15 bp, Homo sapiens
ggtgttgtatagatc

SEQ ID NO: 1644788 - DNA, 15 bp, Homo sapiens
gtgttgtatagatcc

SEQ ID NO: 1644789 - DNA, 15 bp, Homo sapiens
tgttgtatagatcca

SEQ ID NO: 1644790 - DNA, 15 bp, Homo sapiens
gttgtatagatccag

SEQ ID NO: 1644791 - DNA, 15 bp, Homo sapiens
ttgtatagatccagt

SEQ ID NO: 1644792 - DNA, 15 bp, Homo sapiens
tgtatagatccagtt

SEQ ID NO: 1644793 - DNA, 15 bp, Homo sapiens
gtatagatccagttg

SEQ ID NO: 1644794 - DNA, 15 bp, Homo sapiens
tatagatccagttgc

SEQ ID NO: 1644795 - DNA, 15 bp, Homo sapiens
atagatccagttgca

SEQ ID NO: 1644796 - DNA, 15 bp, Homo sapiens
tagatccagttgcac

SEQ ID NO: 1644797 - DNA, 15 bp, Homo sapiens
agatccagttgcact

SEQ ID NO: 1644798 - DNA, 15 bp, Homo sapiens
gatccagttgcacta

SEQ ID NO: 1644799 - DNA, 15 bp, Homo sapiens
atccagttgcactaa

SEQ ID NO: 1644800 - DNA, 15 bp, Homo sapiens
tccagttgcactaaa

SEQ ID NO: 1644801 - DNA, 15 bp, Homo sapiens
ccagttgcactaaat

SEQ ID NO: 1644802 - DNA, 15 bp, Homo sapiens
cagttgcactaaatt

SEQ ID NO: 1644803 - DNA, 15 bp, Homo sapiens
agttgcactaaattc

SEQ ID NO: 1644804 - DNA, 15 bp, Homo sapiens
gttgcactaaattcc

SEQ ID NO: 1644805 - DNA, 15 bp, Homo sapiens
ttgcactaaattcct

SEQ ID NO: 1644806 - DNA, 15 bp, Homo sapiens
tgcactaaattcctc

SEQ ID NO: 1644807 - DNA, 15 bp, Homo sapiens
gcactaaattcctct

SEQ ID NO: 1644808 - DNA, 15 bp, Homo sapiens
cactaaattcctctc

SEQ ID NO: 1644809 - DNA, 15 bp, Homo sapiens
actaaattcctctct

SEQ ID NO: 1644810 - DNA, 15 bp, Homo sapiens
ctaaattcctctctg

SEQ ID NO: 1644811 - DNA, 15 bp, Homo sapiens
taaattcctctctga

SEQ ID NO: 1644812 - DNA, 15 bp, Homo sapiens
aaattcctctctgaa

SEQ ID NO: 1644813 - DNA, 15 bp, Homo sapiens
aattcctctctgaat

SEQ ID NO: 1644814 - DNA, 15 bp, Homo sapiens
attcctctctgaatc

SEQ ID NO: 1644815 - DNA, 15 bp, Homo sapiens
ttcctctctgaatct

SEQ ID NO: 1644816 - DNA, 15 bp, Homo sapiens
tcctctctgaatctt

SEQ ID NO: 1644817 - DNA, 15 bp, Homo sapiens
cctctctgaatcttg

SEQ ID NO: 1644818 - DNA, 15 bp, Homo sapiens
ctctctgaatcttgg

SEQ ID NO: 1644819 - DNA, 15 bp, Homo sapiens
tctctgaatcttggc

SEQ ID NO: 1644820 - DNA, 15 bp, Homo sapiens
ctctgaatcttggct

SEQ ID NO: 1644821 - DNA, 15 bp, Homo sapiens
tctgaatcttggctg

SEQ ID NO: 1644822 - DNA, 15 bp, Homo sapiens
ctgaatcttggctgc

SEQ ID NO: 1644823 - DNA, 15 bp, Homo sapiens
tgaatcttggctgct

SEQ ID NO: 1644824 - DNA, 15 bp, Homo sapiens
gaatcttggctgctg

SEQ ID NO: 1644825 - DNA, 15 bp, Homo sapiens
aatcttggctgctgg

SEQ ID NO: 1644826 - DNA, 15 bp, Homo sapiens
atcttggctgctgga

SEQ ID NO: 1644827 - DNA, 15 bp, Homo sapiens
tcttggctgctggag

SEQ ID NO: 1644828 - DNA, 15 bp, Homo sapiens
cttggctgctggagc

SEQ ID NO: 1644829 - DNA, 15 bp, Homo sapiens
ttggctgctggagcc

SEQ ID NO: 1644830 - DNA, 15 bp, Homo sapiens
tggctgctggagcca

SEQ ID NO: 1644831 - DNA, 15 bp, Homo sapiens
ggctgctggagccat

SEQ ID NO: 1644832 - DNA, 15 bp, Homo sapiens
gctgctggagccatt

SEQ ID NO: 1644833 - DNA, 15 bp, Homo sapiens
ctgctggagccattc

SEQ ID NO: 1644834 - DNA, 15 bp, Homo sapiens
tgctggagccattca

SEQ ID NO: 1644835 - DNA, 15 bp, Homo sapiens
gctggagccattcat

SEQ ID NO: 1644836 - DNA, 15 bp, Homo sapiens
ctggagccattcatt

SEQ ID NO: 1644837 - DNA, 15 bp, Homo sapiens
tggagccattcattc

SEQ ID NO: 1644838 - DNA, 15 bp, Homo sapiens
ggagccattcattca

SEQ ID NO: 1644839 - DNA, 15 bp, Homo sapiens
gagccattcattcag

SEQ ID NO: 1644840 - DNA, 15 bp, Homo sapiens
agccattcattcagc

SEQ ID NO: 1644841 - DNA, 15 bp, Homo sapiens
gccattcattcagca

SEQ ID NO: 1644842 - DNA, 15 bp, Homo sapiens
ccattcattcagcaa

SEQ ID NO: 1644843 - DNA, 15 bp, Homo sapiens
cattcattcagcaac

SEQ ID NO: 1644844 - DNA, 15 bp, Homo sapiens
attcattcagcaacc

SEQ ID NO: 1644845 - DNA, 15 bp, Homo sapiens
ttcattcagcaacct

SEQ ID NO: 1644846 - DNA, 15 bp, Homo sapiens
tcattcagcaacctt

SEQ ID NO: 1644847 - DNA, 15 bp, Homo sapiens
cattcagcaaccttg

SEQ ID NO: 1644848 - DNA, 15 bp, Homo sapiens
attcagcaaccttgt

SEQ ID NO: 1644849 - DNA, 15 bp, Homo sapiens
ttcagcaaccttgtc

SEQ ID NO: 1644850 - DNA, 15 bp, Homo sapiens
tcagcaaccttgtct

SEQ ID NO: 1644851 - DNA, 15 bp, Homo sapiens
cagcaaccttgtcta

SEQ ID NO: 1644852 - DNA, 15 bp, Homo sapiens
agcaaccttgtctaa

SEQ ID NO: 1644853 - DNA, 15 bp, Homo sapiens
gcaaccttgtctaag

SEQ ID NO: 1644854 - DNA, 15 bp, Homo sapiens
caaccttgtctaagt

SEQ ID NO: 1644855 - DNA, 15 bp, Homo sapiens
aaccttgtctaagtg

SEQ ID NO: 1644856 - DNA, 15 bp, Homo sapiens
accttgtctaagtgg

SEQ ID NO: 1644857 - DNA, 15 bp, Homo sapiens
ccttgtctaagtggt

SEQ ID NO: 1644858 - DNA, 15 bp, Homo sapiens
cttgtctaagtggtt

SEQ ID NO: 1644859 - DNA, 15 bp, Homo sapiens
ttgtctaagtggttt

SEQ ID NO: 1644860 - DNA, 15 bp, Homo sapiens
tgtctaagtggttta

SEQ ID NO: 1644861 - DNA, 15 bp, Homo sapiens
gtctaagtggtttat

SEQ ID NO: 1644862 - DNA, 15 bp, Homo sapiens
tctaagtggtttatg

SEQ ID NO: 1644863 - DNA, 15 bp, Homo sapiens
ctaagtggtttatga

SEQ ID NO: 1644864 - DNA, 15 bp, Homo sapiens
taagtggtttatgaa

SEQ ID NO: 1644865 - DNA, 15 bp, Homo sapiens
aagtggtttatgaat

SEQ ID NO: 1644866 - DNA, 15 bp, Homo sapiens
agtggtttatgaatt

SEQ ID NO: 1644867 - DNA, 15 bp, Homo sapiens
gtggtttatgaattg

SEQ ID NO: 1644868 - DNA, 15 bp, Homo sapiens
tggtttatgaattgt

SEQ ID NO: 1644869 - DNA, 15 bp, Homo sapiens
ggtttatgaattgtt

SEQ ID NO: 1644870 - DNA, 15 bp, Homo sapiens
gtttatgaattgttt

SEQ ID NO: 1644871 - DNA, 15 bp, Homo sapiens
tttatgaattgtttc

SEQ ID NO: 1644872 - DNA, 15 bp, Homo sapiens
ttatgaattgtttcc

SEQ ID NO: 1644873 - DNA, 15 bp, Homo sapiens
tatgaattgtttcct

SEQ ID NO: 1644874 - DNA, 15 bp, Homo sapiens
atgaattgtttcctt

SEQ ID NO: 1644875 - DNA, 15 bp, Homo sapiens
tgaattgtttcctta

SEQ ID NO: 1644876 - DNA, 15 bp, Homo sapiens
gaattgtttccttat

SEQ ID NO: 1644877 - DNA, 15 bp, Homo sapiens
aattgtttccttatt

SEQ ID NO: 1644878 - DNA, 15 bp, Homo sapiens
attgtttccttattt

SEQ ID NO: 1644879 - DNA, 15 bp, Homo sapiens
ttgtttccttatttg

SEQ ID NO: 1644880 - DNA, 15 bp, Homo sapiens
tgtttccttatttgc

SEQ ID NO: 1644881 - DNA, 15 bp, Homo sapiens
gtttccttatttgca

SEQ ID NO: 1644882 - DNA, 15 bp, Homo sapiens
tttccttatttgcac

SEQ ID NO: 1644883 - DNA, 15 bp, Homo sapiens
ttccttatttgcact

SEQ ID NO: 1644884 - DNA, 15 bp, Homo sapiens
tccttatttgcactt

SEQ ID NO: 1644885 - DNA, 15 bp, Homo sapiens
ccttatttgcacttc

SEQ ID NO: 1644886 - DNA, 15 bp, Homo sapiens
cttatttgcacttct

SEQ ID NO: 1644887 - DNA, 15 bp, Homo sapiens
ttatttgcacttctt

SEQ ID NO: 1644888 - DNA, 15 bp, Homo sapiens
tatttgcacttcttt

SEQ ID NO: 1644889 - DNA, 15 bp, Homo sapiens
atttgcacttctttc

SEQ ID NO: 1644890 - DNA, 15 bp, Homo sapiens
tttgcacttctttct

SEQ ID NO: 1644891 - DNA, 15 bp, Homo sapiens
ttgcacttctttcta

SEQ ID NO: 1644892 - DNA, 15 bp, Homo sapiens
tgcacttctttctac

SEQ ID NO: 1644893 - DNA, 15 bp, Homo sapiens
gcacttctttctaca

SEQ ID NO: 1644894 - DNA, 15 bp, Homo sapiens
cacttctttctacac

SEQ ID NO: 1644895 - DNA, 15 bp, Homo sapiens
acttctttctacaca

SEQ ID NO: 1644896 - DNA, 15 bp, Homo sapiens
cttctttctacacaa

SEQ ID NO: 1644897 - DNA, 15 bp, Homo sapiens
ttctttctacacaac

SEQ ID NO: 1644898 - DNA, 15 bp, Homo sapiens
tctttctacacaact

SEQ ID NO: 1644899 - DNA, 15 bp, Homo sapiens
ctttctacacaactc

SEQ ID NO: 1644900 - DNA, 15 bp, Homo sapiens
tttctacacaactcg

SEQ ID NO: 1644901 - DNA, 15 bp, Homo sapiens
ttctacacaactcgg

SEQ ID NO: 1644902 - DNA, 15 bp, Homo sapiens
tctacacaactcggg

SEQ ID NO: 1644903 - DNA, 15 bp, Homo sapiens
ctacacaactcgggc

SEQ ID NO: 1644904 - DNA, 15 bp, Homo sapiens
tacacaactcgggct

SEQ ID NO: 1644905 - DNA, 15 bp, Homo sapiens
acacaactcgggctg

SEQ ID NO: 1644906 - DNA, 15 bp, Homo sapiens
cacaactcgggctgt

SEQ ID NO: 1644907 - DNA, 15 bp, Homo sapiens
acaactcgggctgtt

SEQ ID NO: 1644908 - DNA, 15 bp, Homo sapiens
caactcgggctgttt

SEQ ID NO: 1644909 - DNA, 15 bp, Homo sapiens
aactcgggctgtttg

SEQ ID NO: 1644910 - DNA, 15 bp, Homo sapiens
actcgggctgtttgt

SEQ ID NO: 1644911 - DNA, 15 bp, Homo sapiens
ctcgggctgtttgtt

SEQ ID NO: 1644912 - DNA, 15 bp, Homo sapiens
tcgggctgtttgttt

SEQ ID NO: 1644913 - DNA, 15 bp, Homo sapiens
cgggctgtttgtttt

SEQ ID NO: 1644914 - DNA, 15 bp, Homo sapiens
gggctgtttgtttta

SEQ ID NO: 1644915 - DNA, 15 bp, Homo sapiens
ggctgtttgttttac

SEQ ID NO: 1644916 - DNA, 15 bp, Homo sapiens
gctgtttgttttaca

SEQ ID NO: 1644917 - DNA, 15 bp, Homo sapiens
ctgtttgttttacag

SEQ ID NO: 1644918 - DNA, 15 bp, Homo sapiens
tgtttgttttacagt

SEQ ID NO: 1644919 - DNA, 15 bp, Homo sapiens
gtttgttttacagtg

SEQ ID NO: 1644920 - DNA, 15 bp, Homo sapiens
tttgttttacagtgt

SEQ ID NO: 1644921 - DNA, 15 bp, Homo sapiens
ttgttttacagtgtc

SEQ ID NO: 1644922 - DNA, 15 bp, Homo sapiens
tgttttacagtgtct

SEQ ID NO: 1644923 - DNA, 15 bp, Homo sapiens
gttttacagtgtctg

SEQ ID NO: 1644924 - DNA, 15 bp, Homo sapiens
ttttacagtgtctga

SEQ ID NO: 1644925 - DNA, 15 bp, Homo sapiens
tttacagtgtctgat

SEQ ID NO: 1644926 - DNA, 15 bp, Homo sapiens
ttacagtgtctgata

SEQ ID NO: 1644927 - DNA, 15 bp, Homo sapiens
tacagtgtctgataa

SEQ ID NO: 1644928 - DNA, 15 bp, Homo sapiens
acagtgtctgataat

SEQ ID NO: 1644929 - DNA, 15 bp, Homo sapiens
cagtgtctgataatc

SEQ ID NO: 1644930 - DNA, 15 bp, Homo sapiens
agtgtctgataatct

SEQ ID NO: 1644931 - DNA, 15 bp, Homo sapiens
gtgtctgataatctt

SEQ ID NO: 1644932 - DNA, 15 bp, Homo sapiens
tgtctgataatcttg

SEQ ID NO: 1644933 - DNA, 15 bp, Homo sapiens
gtctgataatcttgt

SEQ ID NO: 1644934 - DNA, 15 bp, Homo sapiens
tctgataatcttgtt

SEQ ID NO: 1644935 - DNA, 15 bp, Homo sapiens
ctgataatcttgtta

SEQ ID NO: 1644936 - DNA, 15 bp, Homo sapiens
tgataatcttgttag

SEQ ID NO: 1644937 - DNA, 15 bp, Homo sapiens
gataatcttgttagt

SEQ ID NO: 1644938 - DNA, 15 bp, Homo sapiens
ataatcttgttagtc

SEQ ID NO: 1644939 - DNA, 15 bp, Homo sapiens
taatcttgttagtct

SEQ ID NO: 1644940 - DNA, 15 bp, Homo sapiens
aatcttgttagtcta

SEQ ID NO: 1644941 - DNA, 15 bp, Homo sapiens
atcttgttagtctat

SEQ ID NO: 1644942 - DNA, 15 bp, Homo sapiens
tcttgttagtctata

SEQ ID NO: 1644943 - DNA, 15 bp, Homo sapiens
cttgttagtctatac

SEQ ID NO: 1644944 - DNA, 15 bp, Homo sapiens
ttgttagtctatacc

SEQ ID NO: 1644945 - DNA, 15 bp, Homo sapiens
tgttagtctataccc

SEQ ID NO: 1644946 - DNA, 15 bp, Homo sapiens
gttagtctataccca

SEQ ID NO: 1644947 - DNA, 15 bp, Homo sapiens
ttagtctatacccac

SEQ ID NO: 1644948 - DNA, 15 bp, Homo sapiens
tagtctatacccacc

SEQ ID NO: 1644949 - DNA, 15 bp, Homo sapiens
agtctatacccacca

SEQ ID NO: 1644950 - DNA, 15 bp, Homo sapiens
gtctatacccaccac

SEQ ID NO: 1644951 - DNA, 15 bp, Homo sapiens
tctatacccaccacc

SEQ ID NO: 1644952 - DNA, 15 bp, Homo sapiens
ctatacccaccacct

SEQ ID NO: 1644953 - DNA, 15 bp, Homo sapiens
tatacccaccacctc

SEQ ID NO: 1644954 - DNA, 15 bp, Homo sapiens
atacccaccacctcc

SEQ ID NO: 1644955 - DNA, 15 bp, Homo sapiens
tacccaccacctccc

SEQ ID NO: 1644956 - DNA, 15 bp, Homo sapiens
acccaccacctccct

SEQ ID NO: 1644957 - DNA, 15 bp, Homo sapiens
cccaccacctccctt

SEQ ID NO: 1644958 - DNA, 15 bp, Homo sapiens
ccaccacctcccttc

SEQ ID NO: 1644959 - DNA, 15 bp, Homo sapiens
caccacctcccttca

SEQ ID NO: 1644960 - DNA, 15 bp, Homo sapiens
accacctcccttcat

SEQ ID NO: 1644961 - DNA, 15 bp, Homo sapiens
ccacctcccttcata

SEQ ID NO: 1644962 - DNA, 15 bp, Homo sapiens
cacctcccttcataa

SEQ ID NO: 1644963 - DNA, 15 bp, Homo sapiens
acctcccttcataac

SEQ ID NO: 1644964 - DNA, 15 bp, Homo sapiens
cctcccttcataacc

SEQ ID NO: 1644965 - DNA, 15 bp, Homo sapiens
ctcccttcataacct

SEQ ID NO: 1644966 - DNA, 15 bp, Homo sapiens
tcccttcataacctt

SEQ ID NO: 1644967 - DNA, 15 bp, Homo sapiens
cccttcataaccttt

SEQ ID NO: 1644968 - DNA, 15 bp, Homo sapiens
ccttcataaccttta

SEQ ID NO: 1644969 - DNA, 15 bp, Homo sapiens
cttcataacctttat

SEQ ID NO: 1644970 - DNA, 15 bp, Homo sapiens
ttcataacctttata

SEQ ID NO: 1644971 - DNA, 15 bp, Homo sapiens
tcataacctttatat

SEQ ID NO: 1644972 - DNA, 15 bp, Homo sapiens
cataacctttatatt

SEQ ID NO: 1644973 - DNA, 15 bp, Homo sapiens
ataacctttatattt

SEQ ID NO: 1644974 - DNA, 15 bp, Homo sapiens
taacctttatatttg

SEQ ID NO: 1644975 - DNA, 15 bp, Homo sapiens
aacctttatatttgc

SEQ ID NO: 1644976 - DNA, 15 bp, Homo sapiens
acctttatatttgcc

SEQ ID NO: 1644977 - DNA, 15 bp, Homo sapiens
cctttatatttgccg

SEQ ID NO: 1644978 - DNA, 15 bp, Homo sapiens
ctttatatttgccga

SEQ ID NO: 1644979 - DNA, 15 bp, Homo sapiens
tttatatttgccgaa

SEQ ID NO: 1644980 - DNA, 15 bp, Homo sapiens
ttatatttgccgaat

SEQ ID NO: 1644981 - DNA, 15 bp, Homo sapiens
tatatttgccgaatt

SEQ ID NO: 1644982 - DNA, 15 bp, Homo sapiens
atatttgccgaattt

SEQ ID NO: 1644983 - DNA, 15 bp, Homo sapiens
tatttgccgaatttg

SEQ ID NO: 1644984 - DNA, 15 bp, Homo sapiens
atttgccgaatttgg

SEQ ID NO: 1644985 - DNA, 15 bp, Homo sapiens
tttgccgaatttggc

SEQ ID NO: 1644986 - DNA, 15 bp, Homo sapiens
ttgccgaatttggcc

SEQ ID NO: 1644987 - DNA, 15 bp, Homo sapiens
tgccgaatttggcct

SEQ ID NO: 1644988 - DNA, 15 bp, Homo sapiens
gccgaatttggcctc

SEQ ID NO: 1644989 - DNA, 15 bp, Homo sapiens
ccgaatttggcctcc

SEQ ID NO: 1644990 - DNA, 15 bp, Homo sapiens
cgaatttggcctcct

SEQ ID NO: 1644991 - DNA, 15 bp, Homo sapiens
gaatttggcctcctc

SEQ ID NO: 1644992 - DNA, 15 bp, Homo sapiens
aatttggcctcctca

SEQ ID NO: 1644993 - DNA, 15 bp, Homo sapiens
atttggcctcctcaa

SEQ ID NO: 1644994 - DNA, 15 bp, Homo sapiens
tttggcctcctcaaa

SEQ ID NO: 1644995 - DNA, 15 bp, Homo sapiens
ttggcctcctcaaaa

SEQ ID NO: 1644996 - DNA, 15 bp, Homo sapiens
tggcctcctcaaaag

SEQ ID NO: 1644997 - DNA, 15 bp, Homo sapiens
ggcctcctcaaaagc

SEQ ID NO: 1644998 - DNA, 15 bp, Homo sapiens
gcctcctcaaaagca

SEQ ID NO: 1644999 - DNA, 15 bp, Homo sapiens
cctcctcaaaagcag

SEQ ID NO: 1645000 - DNA, 15 bp, Homo sapiens
ctcctcaaaagcagc

SEQ ID NO: 1645001 - DNA, 15 bp, Homo sapiens
tcctcaaaagcagca

SEQ ID NO: 1645002 - DNA, 15 bp, Homo sapiens
cctcaaaagcagcag

SEQ ID NO: 1645003 - DNA, 15 bp, Homo sapiens
ctcaaaagcagcagc

SEQ ID NO: 1645004 - DNA, 15 bp, Homo sapiens
tcaaaagcagcagca

SEQ ID NO: 1645005 - DNA, 15 bp, Homo sapiens
caaaagcagcagcaa

SEQ ID NO: 1645006 - DNA, 15 bp, Homo sapiens
aaaagcagcagcaag

SEQ ID NO: 1645007 - DNA, 15 bp, Homo sapiens
aaagcagcagcaagt

SEQ ID NO: 1645008 - DNA, 15 bp, Homo sapiens
aagcagcagcaagtc

SEQ ID NO: 1645009 - DNA, 15 bp, Homo sapiens
agcagcagcaagtcg

SEQ ID NO: 1645010 - DNA, 15 bp, Homo sapiens
gcagcagcaagtcgt

SEQ ID NO: 1645011 - DNA, 15 bp, Homo sapiens
cagcagcaagtcgtc

SEQ ID NO: 1645012 - DNA, 15 bp, Homo sapiens
agcagcaagtcgtca

SEQ ID NO: 1645013 - DNA, 15 bp, Homo sapiens
gcagcaagtcgtcaa

SEQ ID NO: 1645014 - DNA, 15 bp, Homo sapiens
cagcaagtcgtcaag

SEQ ID NO: 1645015 - DNA, 15 bp, Homo sapiens
agcaagtcgtcaaga

SEQ ID NO: 1645016 - DNA, 15 bp, Homo sapiens
gcaagtcgtcaagaa

SEQ ID NO: 1645017 - DNA, 15 bp, Homo sapiens
caagtcgtcaagaag

SEQ ID NO: 1645018 - DNA, 15 bp, Homo sapiens
aagtcgtcaagaagc

SEQ ID NO: 1645019 - DNA, 15 bp, Homo sapiens
agtcgtcaagaagca

SEQ ID NO: 1645020 - DNA, 15 bp, Homo sapiens
gtcgtcaagaagcac

SEQ ID NO: 1645021 - DNA, 15 bp, Homo sapiens
tcgtcaagaagcaca

SEQ ID NO: 1645022 - DNA, 15 bp, Homo sapiens
cgtcaagaagcacac

SEQ ID NO: 1645023 - DNA, 15 bp, Homo sapiens
gtcaagaagcacacc

SEQ ID NO: 1645024 - DNA, 15 bp, Homo sapiens
tcaagaagcacacca

SEQ ID NO: 1645025 - DNA, 15 bp, Homo sapiens
caagaagcacaccaa

SEQ ID NO: 1645026 - DNA, 15 bp, Homo sapiens
aagaagcacaccaat

SEQ ID NO: 1645027 - DNA, 15 bp, Homo sapiens
agaagcacaccaatt

SEQ ID NO: 1645028 - DNA, 15 bp, Homo sapiens
gaagcacaccaattc

SEQ ID NO: 1645029 - DNA, 15 bp, Homo sapiens
aagcacaccaattct

SEQ ID NO: 1645030 - DNA, 15 bp, Homo sapiens
agcacaccaattcta

SEQ ID NO: 1645031 - DNA, 15 bp, Homo sapiens
gcacaccaattctaa

SEQ ID NO: 1645032 - DNA, 15 bp, Homo sapiens
cacaccaattctaac

SEQ ID NO: 1645033 - DNA, 15 bp, Homo sapiens
acaccaattctaacc

SEQ ID NO: 1645034 - DNA, 15 bp, Homo sapiens
caccaattctaaccc

SEQ ID NO: 1645035 - DNA, 15 bp, Homo sapiens
accaattctaaccca

SEQ ID NO: 1645036 - DNA, 15 bp, Homo sapiens
ccaattctaacccac

SEQ ID NO: 1645037 - DNA, 15 bp, Homo sapiens
caattctaacccaca

SEQ ID NO: 1645038 - DNA, 15 bp, Homo sapiens
aattctaacccacaa

SEQ ID NO: 1645039 - DNA, 15 bp, Homo sapiens
attctaacccacaag

SEQ ID NO: 1645040 - DNA, 15 bp, Homo sapiens
ttctaacccacaaga

SEQ ID NO: 1645041 - DNA, 15 bp, Homo sapiens
tctaacccacaagat

SEQ ID NO: 1645042 - DNA, 15 bp, Homo sapiens
ctaacccacaagatt

SEQ ID NO: 1645043 - DNA, 15 bp, Homo sapiens
taacccacaagattc

SEQ ID NO: 1645044 - DNA, 15 bp, Homo sapiens
aacccacaagattcc

SEQ ID NO: 1645045 - DNA, 15 bp, Homo sapiens
acccacaagattcca

SEQ ID NO: 1645046 - DNA, 15 bp, Homo sapiens
cccacaagattccat

SEQ ID NO: 1645047 - DNA, 15 bp, Homo sapiens
ccacaagattccatc

SEQ ID NO: 1645048 - DNA, 15 bp, Homo sapiens
cacaagattccatct

SEQ ID NO: 1645049 - DNA, 15 bp, Homo sapiens
acaagattccatctg

SEQ ID NO: 1645050 - DNA, 15 bp, Homo sapiens
caagattccatctgt

SEQ ID NO: 1645051 - DNA, 15 bp, Homo sapiens
aagattccatctgtg

SEQ ID NO: 1645052 - DNA, 15 bp, Homo sapiens
agattccatctgtgg

SEQ ID NO: 1645053 - DNA, 15 bp, Homo sapiens
gattccatctgtggc

SEQ ID NO: 1645054 - DNA, 15 bp, Homo sapiens
attccatctgtggca

SEQ ID NO: 1645055 - DNA, 15 bp, Homo sapiens
ttccatctgtggcat

SEQ ID NO: 1645056 - DNA, 15 bp, Homo sapiens
tccatctgtggcatt

SEQ ID NO: 1645057 - DNA, 15 bp, Homo sapiens
ccatctgtggcattt

SEQ ID NO: 1645058 - DNA, 15 bp, Homo sapiens
catctgtggcatttg

SEQ ID NO: 1645059 - DNA, 15 bp, Homo sapiens
atctgtggcatttgt

SEQ ID NO: 1645060 - DNA, 15 bp, Homo sapiens
tctgtggcatttgta

SEQ ID NO: 1645061 - DNA, 15 bp, Homo sapiens
ctgtggcatttgtac

SEQ ID NO: 1645062 - DNA, 15 bp, Homo sapiens
tgtggcatttgtacc

SEQ ID NO: 1645063 - DNA, 15 bp, Homo sapiens
gtggcatttgtacca

SEQ ID NO: 1645064 - DNA, 15 bp, Homo sapiens
tggcatttgtaccaa

SEQ ID NO: 1645065 - DNA, 15 bp, Homo sapiens
ggcatttgtaccaaa

SEQ ID NO: 1645066 - DNA, 15 bp, Homo sapiens
gcatttgtaccaaat

SEQ ID NO: 1645067 - DNA, 15 bp, Homo sapiens
catttgtaccaaata

SEQ ID NO: 1645068 - DNA, 15 bp, Homo sapiens
atttgtaccaaatat

SEQ ID NO: 1645069 - DNA, 15 bp, Homo sapiens
tttgtaccaaatata

SEQ ID NO: 1645070 - DNA, 15 bp, Homo sapiens
ttgtaccaaatataa

SEQ ID NO: 1645071 - DNA, 15 bp, Homo sapiens
tgtaccaaatataag

SEQ ID NO: 1645072 - DNA, 15 bp, Homo sapiens
gtaccaaatataagt

SEQ ID NO: 1645073 - DNA, 15 bp, Homo sapiens
taccaaatataagtt

SEQ ID NO: 1645074 - DNA, 15 bp, Homo sapiens
accaaatataagttg

SEQ ID NO: 1645075 - DNA, 15 bp, Homo sapiens
ccaaatataagttgg

SEQ ID NO: 1645076 - DNA, 15 bp, Homo sapiens
caaatataagttgga

SEQ ID NO: 1645077 - DNA, 15 bp, Homo sapiens
aaatataagttggat

SEQ ID NO: 1645078 - DNA, 15 bp, Homo sapiens
aatataagttggatg

SEQ ID NO: 1645079 - DNA, 15 bp, Homo sapiens
atataagttggatgc

SEQ ID NO: 1645080 - DNA, 15 bp, Homo sapiens
tataagttggatgca

SEQ ID NO: 1645081 - DNA, 15 bp, Homo sapiens
ataagttggatgcat

SEQ ID NO: 1645082 - DNA, 15 bp, Homo sapiens
taagttggatgcatt

SEQ ID NO: 1645083 - DNA, 15 bp, Homo sapiens
aagttggatgcattt

SEQ ID NO: 1645084 - DNA, 15 bp, Homo sapiens
agttggatgcatttt

SEQ ID NO: 1645085 - DNA, 15 bp, Homo sapiens
gttggatgcatttta

SEQ ID NO: 1645086 - DNA, 15 bp, Homo sapiens
ttggatgcattttat

SEQ ID NO: 1645087 - DNA, 15 bp, Homo sapiens
tggatgcattttatt

SEQ ID NO: 1645088 - DNA, 15 bp, Homo sapiens
ggatgcattttattt

SEQ ID NO: 1645089 - DNA, 15 bp, Homo sapiens
gatgcattttatttt

SEQ ID NO: 1645090 - DNA, 15 bp, Homo sapiens
atgcattttatttta

SEQ ID NO: 1645091 - DNA, 15 bp, Homo sapiens
tgcattttattttag

SEQ ID NO: 1645092 - DNA, 15 bp, Homo sapiens
gcattttattttaga

SEQ ID NO: 1645093 - DNA, 15 bp, Homo sapiens
cattttattttagac

SEQ ID NO: 1645094 - DNA, 15 bp, Homo sapiens
attttattttagaca

SEQ ID NO: 1645095 - DNA, 15 bp, Homo sapiens
ttttattttagacac

SEQ ID NO: 1645096 - DNA, 15 bp, Homo sapiens
tttattttagacaca

SEQ ID NO: 1645097 - DNA, 15 bp, Homo sapiens
ttattttagacacaa

SEQ ID NO: 1645098 - DNA, 15 bp, Homo sapiens
tattttagacacaaa

SEQ ID NO: 1645099 - DNA, 15 bp, Homo sapiens
attttagacacaaag

SEQ ID NO: 1645100 - DNA, 15 bp, Homo sapiens
ttttagacacaaagc

SEQ ID NO: 1645101 - DNA, 15 bp, Homo sapiens
tttagacacaaagct

SEQ ID NO: 1645102 - DNA, 15 bp, Homo sapiens
ttagacacaaagctt

SEQ ID NO: 1645103 - DNA, 15 bp, Homo sapiens
tagacacaaagcttt

SEQ ID NO: 1645104 - DNA, 15 bp, Homo sapiens
agacacaaagcttta

SEQ ID NO: 1645105 - DNA, 15 bp, Homo sapiens
gacacaaagctttat

SEQ ID NO: 1645106 - DNA, 15 bp, Homo sapiens
acacaaagctttatt

SEQ ID NO: 1645107 - DNA, 15 bp, Homo sapiens
cacaaagctttattt

SEQ ID NO: 1645108 - DNA, 15 bp, Homo sapiens
acaaagctttatttt

SEQ ID NO: 1645109 - DNA, 15 bp, Homo sapiens
caaagctttattttt

SEQ ID NO: 1645110 - DNA, 15 bp, Homo sapiens
aaagctttatttttc

SEQ ID NO: 1645111 - DNA, 15 bp, Homo sapiens
aagctttatttttcc

SEQ ID NO: 1645112 - DNA, 15 bp, Homo sapiens
agctttatttttcca

SEQ ID NO: 1645113 - DNA, 15 bp, Homo sapiens
gctttatttttccac

SEQ ID NO: 1645114 - DNA, 15 bp, Homo sapiens
ctttatttttccaca

SEQ ID NO: 1645115 - DNA, 15 bp, Homo sapiens
tttatttttccacat

SEQ ID NO: 1645116 - DNA, 15 bp, Homo sapiens
ttatttttccacatc

SEQ ID NO: 1645117 - DNA, 15 bp, Homo sapiens
tatttttccacatca

SEQ ID NO: 1645118 - DNA, 15 bp, Homo sapiens
atttttccacatcat

SEQ ID NO: 1645119 - DNA, 15 bp, Homo sapiens
tttttccacatcatg

SEQ ID NO: 1645120 - DNA, 15 bp, Homo sapiens
ttttccacatcatgc

SEQ ID NO: 1645121 - DNA, 15 bp, Homo sapiens
tttccacatcatgct

SEQ ID NO: 1645122 - DNA, 15 bp, Homo sapiens
ttccacatcatgctt

SEQ ID NO: 1645123 - DNA, 15 bp, Homo sapiens
tccacatcatgctta

SEQ ID NO: 1645124 - DNA, 15 bp, Homo sapiens
ccacatcatgcttac

SEQ ID NO: 1645125 - DNA, 15 bp, Homo sapiens
cacatcatgcttaca

SEQ ID NO: 1645126 - DNA, 15 bp, Homo sapiens
acatcatgcttacaa

SEQ ID NO: 1645127 - DNA, 15 bp, Homo sapiens
catcatgcttacaaa

SEQ ID NO: 1645128 - DNA, 15 bp, Homo sapiens
atcatgcttacaaaa

SEQ ID NO: 1645129 - DNA, 15 bp, Homo sapiens
tcatgcttacaaaaa

SEQ ID NO: 1645130 - DNA, 15 bp, Homo sapiens
catgcttacaaaaaa

SEQ ID NO: 1645131 - DNA, 15 bp, Homo sapiens
atgcttacaaaaaag

SEQ ID NO: 1645132 - DNA, 15 bp, Homo sapiens
tgcttacaaaaaaga

SEQ ID NO: 1645133 - DNA, 15 bp, Homo sapiens
gcttacaaaaaagaa

SEQ ID NO: 1645134 - DNA, 15 bp, Homo sapiens
cttacaaaaaagaat

SEQ ID NO: 1645135 - DNA, 15 bp, Homo sapiens
ttacaaaaaagaata

SEQ ID NO: 1645136 - DNA, 15 bp, Homo sapiens
tacaaaaaagaataa

SEQ ID NO: 1645137 - DNA, 15 bp, Homo sapiens
acaaaaaagaataat

SEQ ID NO: 1645138 - DNA, 15 bp, Homo sapiens
caaaaaagaataatg

SEQ ID NO: 1645139 - DNA, 15 bp, Homo sapiens
aaaaaagaataatgc

SEQ ID NO: 1645140 - DNA, 15 bp, Homo sapiens
aaaaagaataatgca

SEQ ID NO: 1645141 - DNA, 15 bp, Homo sapiens
aaaagaataatgcaa

SEQ ID NO: 1645142 - DNA, 15 bp, Homo sapiens
aaagaataatgcaaa

SEQ ID NO: 1645143 - DNA, 15 bp, Homo sapiens
aagaataatgcaaat

SEQ ID NO: 1645144 - DNA, 15 bp, Homo sapiens
agaataatgcaaata

SEQ ID NO: 1645145 - DNA, 15 bp, Homo sapiens
gaataatgcaaatag

SEQ ID NO: 1645146 - DNA, 15 bp, Homo sapiens
aataatgcaaatagt

SEQ ID NO: 1645147 - DNA, 15 bp, Homo sapiens
ataatgcaaatagtt

SEQ ID NO: 1645148 - DNA, 15 bp, Homo sapiens
taatgcaaatagttg

SEQ ID NO: 1645149 - DNA, 15 bp, Homo sapiens
aatgcaaatagttgc

SEQ ID NO: 1645150 - DNA, 15 bp, Homo sapiens
atgcaaatagttgca

SEQ ID NO: 1645151 - DNA, 15 bp, Homo sapiens
tgcaaatagttgcaa

SEQ ID NO: 1645152 - DNA, 15 bp, Homo sapiens
gcaaatagttgcaac

SEQ ID NO: 1645153 - DNA, 15 bp, Homo sapiens
caaatagttgcaact

SEQ ID NO: 1645154 - DNA, 15 bp, Homo sapiens
aaatagttgcaactt

SEQ ID NO: 1645155 - DNA, 15 bp, Homo sapiens
aatagttgcaacttt

SEQ ID NO: 1645156 - DNA, 15 bp, Homo sapiens
atagttgcaactttg

SEQ ID NO: 1645157 - DNA, 15 bp, Homo sapiens
tagttgcaactttga

SEQ ID NO: 1645158 - DNA, 15 bp, Homo sapiens
agttgcaactttgag

SEQ ID NO: 1645159 - DNA, 15 bp, Homo sapiens
gttgcaactttgagg

SEQ ID NO: 1645160 - DNA, 15 bp, Homo sapiens
ttgcaactttgaggc

SEQ ID NO: 1645161 - DNA, 15 bp, Homo sapiens
tgcaactttgaggcc

SEQ ID NO: 1645162 - DNA, 15 bp, Homo sapiens
gcaactttgaggcca

SEQ ID NO: 1645163 - DNA, 15 bp, Homo sapiens
caactttgaggccaa

SEQ ID NO: 1645164 - DNA, 15 bp, Homo sapiens
aactttgaggccaat

SEQ ID NO: 1645165 - DNA, 15 bp, Homo sapiens
actttgaggccaatc

SEQ ID NO: 1645166 - DNA, 15 bp, Homo sapiens
ctttgaggccaatca

SEQ ID NO: 1645167 - DNA, 15 bp, Homo sapiens
tttgaggccaatcat

SEQ ID NO: 1645168 - DNA, 15 bp, Homo sapiens
ttgaggccaatcatt

SEQ ID NO: 1645169 - DNA, 15 bp, Homo sapiens
tgaggccaatcattt

SEQ ID NO: 1645170 - DNA, 15 bp, Homo sapiens
gaggccaatcatttt

SEQ ID NO: 1645171 - DNA, 15 bp, Homo sapiens
aggccaatcattttt

SEQ ID NO: 1645172 - DNA, 15 bp, Homo sapiens
ggccaatcattttta

SEQ ID NO: 1645173 - DNA, 15 bp, Homo sapiens
gccaatcatttttag

SEQ ID NO: 1645174 - DNA, 15 bp, Homo sapiens
ccaatcatttttagg

SEQ ID NO: 1645175 - DNA, 15 bp, Homo sapiens
caatcatttttaggc

SEQ ID NO: 1645176 - DNA, 15 bp, Homo sapiens
aatcatttttaggca

SEQ ID NO: 1645177 - DNA, 15 bp, Homo sapiens
atcatttttaggcat

SEQ ID NO: 1645178 - DNA, 15 bp, Homo sapiens
tcatttttaggcata

SEQ ID NO: 1645179 - DNA, 15 bp, Homo sapiens
catttttaggcatat

SEQ ID NO: 1645180 - DNA, 15 bp, Homo sapiens
atttttaggcatatg

SEQ ID NO: 1645181 - DNA, 15 bp, Homo sapiens
tttttaggcatatgt

SEQ ID NO: 1645182 - DNA, 15 bp, Homo sapiens
ttttaggcatatgtt

SEQ ID NO: 1645183 - DNA, 15 bp, Homo sapiens
tttaggcatatgttt

SEQ ID NO: 1645184 - DNA, 15 bp, Homo sapiens
ttaggcatatgtttt

SEQ ID NO: 1645185 - DNA, 15 bp, Homo sapiens
taggcatatgtttta

SEQ ID NO: 1645186 - DNA, 15 bp, Homo sapiens
aggcatatgttttaa

SEQ ID NO: 1645187 - DNA, 15 bp, Homo sapiens
ggcatatgttttaaa

SEQ ID NO: 1645188 - DNA, 15 bp, Homo sapiens
gcatatgttttaaac

SEQ ID NO: 1645189 - DNA, 15 bp, Homo sapiens
catatgttttaaaca

SEQ ID NO: 1645190 - DNA, 15 bp, Homo sapiens
atatgttttaaacat

SEQ ID NO: 1645191 - DNA, 15 bp, Homo sapiens
tatgttttaaacata

SEQ ID NO: 1645192 - DNA, 15 bp, Homo sapiens
atgttttaaacatag

SEQ ID NO: 1645193 - DNA, 15 bp, Homo sapiens
tgttttaaacataga

SEQ ID NO: 1645194 - DNA, 15 bp, Homo sapiens
gttttaaacatagaa

SEQ ID NO: 1645195 - DNA, 15 bp, Homo sapiens
ttttaaacatagaaa

SEQ ID NO: 1645196 - DNA, 15 bp, Homo sapiens
tttaaacatagaaag

SEQ ID NO: 1645197 - DNA, 15 bp, Homo sapiens
ttaaacatagaaagt

SEQ ID NO: 1645198 - DNA, 15 bp, Homo sapiens
taaacatagaaagtt

SEQ ID NO: 1645199 - DNA, 15 bp, Homo sapiens
aaacatagaaagttt

SEQ ID NO: 1645200 - DNA, 15 bp, Homo sapiens
aacatagaaagtttc

SEQ ID NO: 1645201 - DNA, 15 bp, Homo sapiens
acatagaaagtttct

SEQ ID NO: 1645202 - DNA, 15 bp, Homo sapiens
catagaaagtttctt

SEQ ID NO: 1645203 - DNA, 15 bp, Homo sapiens
atagaaagtttcttc

SEQ ID NO: 1645204 - DNA, 15 bp, Homo sapiens
tagaaagtttcttca

SEQ ID NO: 1645205 - DNA, 15 bp, Homo sapiens
agaaagtttcttcaa

SEQ ID NO: 1645206 - DNA, 15 bp, Homo sapiens
gaaagtttcttcaac

SEQ ID NO: 1645207 - DNA, 15 bp, Homo sapiens
aaagtttcttcaact

SEQ ID NO: 1645208 - DNA, 15 bp, Homo sapiens
aagtttcttcaactc

SEQ ID NO: 1645209 - DNA, 15 bp, Homo sapiens
agtttcttcaactca

SEQ ID NO: 1645210 - DNA, 15 bp, Homo sapiens
gtttcttcaactcaa

SEQ ID NO: 1645211 - DNA, 15 bp, Homo sapiens
tttcttcaactcaaa

SEQ ID NO: 1645212 - DNA, 15 bp, Homo sapiens
ttcttcaactcaaaa

SEQ ID NO: 1645213 - DNA, 15 bp, Homo sapiens
tcttcaactcaaaag

SEQ ID NO: 1645214 - DNA, 15 bp, Homo sapiens
cttcaactcaaaaga

SEQ ID NO: 1645215 - DNA, 15 bp, Homo sapiens
ttcaactcaaaagag

SEQ ID NO: 1645216 - DNA, 15 bp, Homo sapiens
tcaactcaaaagagt

SEQ ID NO: 1645217 - DNA, 15 bp, Homo sapiens
caactcaaaagagtt

SEQ ID NO: 1645218 - DNA, 15 bp, Homo sapiens
aactcaaaagagttc

SEQ ID NO: 1645219 - DNA, 15 bp, Homo sapiens
actcaaaagagttcc

SEQ ID NO: 1645220 - DNA, 15 bp, Homo sapiens
ctcaaaagagttcct

SEQ ID NO: 1645221 - DNA, 15 bp, Homo sapiens
tcaaaagagttcctt

SEQ ID NO: 1645222 - DNA, 15 bp, Homo sapiens
caaaagagttccttc

SEQ ID NO: 1645223 - DNA, 15 bp, Homo sapiens
aaaagagttccttca

SEQ ID NO: 1645224 - DNA, 15 bp, Homo sapiens
aaagagttccttcaa

SEQ ID NO: 1645225 - DNA, 15 bp, Homo sapiens
aagagttccttcaaa

SEQ ID NO: 1645226 - DNA, 15 bp, Homo sapiens
agagttccttcaaat

SEQ ID NO: 1645227 - DNA, 15 bp, Homo sapiens
gagttccttcaaatg

SEQ ID NO: 1645228 - DNA, 15 bp, Homo sapiens
agttccttcaaatga

SEQ ID NO: 1645229 - DNA, 15 bp, Homo sapiens
gttccttcaaatgat

SEQ ID NO: 1645230 - DNA, 15 bp, Homo sapiens
ttccttcaaatgatg

SEQ ID NO: 1645231 - DNA, 15 bp, Homo sapiens
tccttcaaatgatga

SEQ ID NO: 1645232 - DNA, 15 bp, Homo sapiens
ccttcaaatgatgag

SEQ ID NO: 1645233 - DNA, 15 bp, Homo sapiens
cttcaaatgatgagt

SEQ ID NO: 1645234 - DNA, 15 bp, Homo sapiens
ttcaaatgatgagtt

SEQ ID NO: 1645235 - DNA, 15 bp, Homo sapiens
tcaaatgatgagtta

SEQ ID NO: 1645236 - DNA, 15 bp, Homo sapiens
caaatgatgagttaa

SEQ ID NO: 1645237 - DNA, 15 bp, Homo sapiens
aaatgatgagttaat

SEQ ID NO: 1645238 - DNA, 15 bp, Homo sapiens
aatgatgagttaatg

SEQ ID NO: 1645239 - DNA, 15 bp, Homo sapiens
atgatgagttaatgt

SEQ ID NO: 1645240 - DNA, 15 bp, Homo sapiens
tgatgagttaatgtg

SEQ ID NO: 1645241 - DNA, 15 bp, Homo sapiens
gatgagttaatgtgc

SEQ ID NO: 1645242 - DNA, 15 bp, Homo sapiens
atgagttaatgtgca

SEQ ID NO: 1645243 - DNA, 15 bp, Homo sapiens
tgagttaatgtgcaa

SEQ ID NO: 1645244 - DNA, 15 bp, Homo sapiens
gagttaatgtgcaac

SEQ ID NO: 1645245 - DNA, 15 bp, Homo sapiens
agttaatgtgcaacc

SEQ ID NO: 1645246 - DNA, 15 bp, Homo sapiens
gttaatgtgcaacct

SEQ ID NO: 1645247 - DNA, 15 bp, Homo sapiens
ttaatgtgcaaccta

SEQ ID NO: 1645248 - DNA, 15 bp, Homo sapiens
taatgtgcaacctaa

SEQ ID NO: 1645249 - DNA, 15 bp, Homo sapiens
aatgtgcaacctaat

SEQ ID NO: 1645250 - DNA, 15 bp, Homo sapiens
atgtgcaacctaatt

SEQ ID NO: 1645251 - DNA, 15 bp, Homo sapiens
tgtgcaacctaatta

SEQ ID NO: 1645252 - DNA, 15 bp, Homo sapiens
gtgcaacctaattag

SEQ ID NO: 1645253 - DNA, 15 bp, Homo sapiens
tgcaacctaattagt

SEQ ID NO: 1645254 - DNA, 15 bp, Homo sapiens
gcaacctaattagta

SEQ ID NO: 1645255 - DNA, 15 bp, Homo sapiens
caacctaattagtaa

SEQ ID NO: 1645256 - DNA, 15 bp, Homo sapiens
aacctaattagtaac

SEQ ID NO: 1645257 - DNA, 15 bp, Homo sapiens
acctaattagtaact

SEQ ID NO: 1645258 - DNA, 15 bp, Homo sapiens
cctaattagtaactt

SEQ ID NO: 1645259 - DNA, 15 bp, Homo sapiens
ctaattagtaacttt

SEQ ID NO: 1645260 - DNA, 15 bp, Homo sapiens
taattagtaactttc

SEQ ID NO: 1645261 - DNA, 15 bp, Homo sapiens
aattagtaactttcc

SEQ ID NO: 1645262 - DNA, 15 bp, Homo sapiens
attagtaactttcct

SEQ ID NO: 1645263 - DNA, 15 bp, Homo sapiens
ttagtaactttcctc

SEQ ID NO: 1645264 - DNA, 15 bp, Homo sapiens
tagtaactttcctct

SEQ ID NO: 1645265 - DNA, 15 bp, Homo sapiens
agtaactttcctctt

SEQ ID NO: 1645266 - DNA, 15 bp, Homo sapiens
gtaactttcctcttt

SEQ ID NO: 1645267 - DNA, 15 bp, Homo sapiens
taactttcctctttt

SEQ ID NO: 1645268 - DNA, 15 bp, Homo sapiens
aactttcctcttttt

SEQ ID NO: 1645269 - DNA, 15 bp, Homo sapiens
actttcctcttttta

SEQ ID NO: 1645270 - DNA, 15 bp, Homo sapiens
ctttcctctttttat

SEQ ID NO: 1645271 - DNA, 15 bp, Homo sapiens
tttcctctttttatt

SEQ ID NO: 1645272 - DNA, 15 bp, Homo sapiens
ttcctctttttattt

SEQ ID NO: 1645273 - DNA, 15 bp, Homo sapiens
tcctctttttatttt

SEQ ID NO: 1645274 - DNA, 15 bp, Homo sapiens
cctctttttattttt

SEQ ID NO: 1645275 - DNA, 15 bp, Homo sapiens
ctctttttatttttt

SEQ ID NO: 1645276 - DNA, 15 bp, Homo sapiens
tctttttattttttc

SEQ ID NO: 1645277 - DNA, 15 bp, Homo sapiens
ctttttattttttcc

SEQ ID NO: 1645278 - DNA, 15 bp, Homo sapiens
tttttattttttcca

SEQ ID NO: 1645279 - DNA, 15 bp, Homo sapiens
ttttattttttccat

SEQ ID NO: 1645280 - DNA, 15 bp, Homo sapiens
tttattttttccata

SEQ ID NO: 1645281 - DNA, 15 bp, Homo sapiens
ttattttttccatat

SEQ ID NO: 1645282 - DNA, 15 bp, Homo sapiens
tattttttccatata

SEQ ID NO: 1645283 - DNA, 15 bp, Homo sapiens
attttttccatatag

SEQ ID NO: 1645284 - DNA, 15 bp, Homo sapiens
ttttttccatataga

SEQ ID NO: 1645285 - DNA, 15 bp, Homo sapiens
tttttccatatagag

SEQ ID NO: 1645286 - DNA, 15 bp, Homo sapiens
ttttccatatagagc

SEQ ID NO: 1645287 - DNA, 15 bp, Homo sapiens
tttccatatagagca

SEQ ID NO: 1645288 - DNA, 15 bp, Homo sapiens
ttccatatagagcac

SEQ ID NO: 1645289 - DNA, 15 bp, Homo sapiens
tccatatagagcact

SEQ ID NO: 1645290 - DNA, 15 bp, Homo sapiens
ccatatagagcacta

SEQ ID NO: 1645291 - DNA, 15 bp, Homo sapiens
catatagagcactat

SEQ ID NO: 1645292 - DNA, 15 bp, Homo sapiens
atatagagcactatg

SEQ ID NO: 1645293 - DNA, 15 bp, Homo sapiens
tatagagcactatgt

SEQ ID NO: 1645294 - DNA, 15 bp, Homo sapiens
atagagcactatgta

SEQ ID NO: 1645295 - DNA, 15 bp, Homo sapiens
tagagcactatgtaa

SEQ ID NO: 1645296 - DNA, 15 bp, Homo sapiens
agagcactatgtaaa

SEQ ID NO: 1645297 - DNA, 15 bp, Homo sapiens
gagcactatgtaaat

SEQ ID NO: 1645298 - DNA, 15 bp, Homo sapiens
agcactatgtaaatt

SEQ ID NO: 1645299 - DNA, 15 bp, Homo sapiens
gcactatgtaaattt

SEQ ID NO: 1645300 - DNA, 15 bp, Homo sapiens
cactatgtaaattta

SEQ ID NO: 1645301 - DNA, 15 bp, Homo sapiens
actatgtaaatttag

SEQ ID NO: 1645302 - DNA, 15 bp, Homo sapiens
ctatgtaaatttagc

SEQ ID NO: 1645303 - DNA, 15 bp, Homo sapiens
tatgtaaatttagca

SEQ ID NO: 1645304 - DNA, 15 bp, Homo sapiens
atgtaaatttagcat

SEQ ID NO: 1645305 - DNA, 15 bp, Homo sapiens
tgtaaatttagcata

SEQ ID NO: 1645306 - DNA, 15 bp, Homo sapiens
gtaaatttagcatat

SEQ ID NO: 1645307 - DNA, 15 bp, Homo sapiens
taaatttagcatatc

SEQ ID NO: 1645308 - DNA, 15 bp, Homo sapiens
aaatttagcatatca

SEQ ID NO: 1645309 - DNA, 15 bp, Homo sapiens
aatttagcatatcaa

SEQ ID NO: 1645310 - DNA, 15 bp, Homo sapiens
atttagcatatcaat

SEQ ID NO: 1645311 - DNA, 15 bp, Homo sapiens
tttagcatatcaatt

SEQ ID NO: 1645312 - DNA, 15 bp, Homo sapiens
ttagcatatcaatta

SEQ ID NO: 1645313 - DNA, 15 bp, Homo sapiens
tagcatatcaattat

SEQ ID NO: 1645314 - DNA, 15 bp, Homo sapiens
agcatatcaattata

SEQ ID NO: 1645315 - DNA, 15 bp, Homo sapiens
gcatatcaattatac

SEQ ID NO: 1645316 - DNA, 15 bp, Homo sapiens
catatcaattataca

SEQ ID NO: 1645317 - DNA, 15 bp, Homo sapiens
tatcaattatacagg

SEQ ID NO: 1645318 - DNA, 15 bp, Homo sapiens
atcaattatacagga

SEQ ID NO: 1645319 - DNA, 15 bp, Homo sapiens
tcaattatacaggat

SEQ ID NO: 1645320 - DNA, 15 bp, Homo sapiens
caattatacaggata

SEQ ID NO: 1645321 - DNA, 15 bp, Homo sapiens
aattatacaggatat

SEQ ID NO: 1645322 - DNA, 15 bp, Homo sapiens
attatacaggatata

SEQ ID NO: 1645323 - DNA, 15 bp, Homo sapiens
ttatacaggatatat

SEQ ID NO: 1645324 - DNA, 15 bp, Homo sapiens
tatacaggatatatc

SEQ ID NO: 1645325 - DNA, 15 bp, Homo sapiens
atacaggatatatca

SEQ ID NO: 1645326 - DNA, 15 bp, Homo sapiens
tacaggatatatcaa

SEQ ID NO: 1645327 - DNA, 15 bp, Homo sapiens
acaggatatatcaaa

SEQ ID NO: 1645328 - DNA, 15 bp, Homo sapiens
caggatatatcaaac

SEQ ID NO: 1645329 - DNA, 15 bp, Homo sapiens
aggatatatcaaaca

SEQ ID NO: 1645330 - DNA, 15 bp, Homo sapiens
ggatatatcaaacag

SEQ ID NO: 1645331 - DNA, 15 bp, Homo sapiens
gatatatcaaacagt

SEQ ID NO: 1645332 - DNA, 15 bp, Homo sapiens
atatatcaaacagta

SEQ ID NO: 1645333 - DNA, 15 bp, Homo sapiens
tatatcaaacagtat

SEQ ID NO: 1645334 - DNA, 15 bp, Homo sapiens
atatcaaacagtatg

SEQ ID NO: 1645335 - DNA, 15 bp, Homo sapiens
tatcaaacagtatgt

SEQ ID NO: 1645336 - DNA, 15 bp, Homo sapiens
atcaaacagtatgta

SEQ ID NO: 1645337 - DNA, 15 bp, Homo sapiens
tcaaacagtatgtaa

SEQ ID NO: 1645338 - DNA, 15 bp, Homo sapiens
caaacagtatgtaaa

SEQ ID NO: 1645339 - DNA, 15 bp, Homo sapiens
aaacagtatgtaaaa

SEQ ID NO: 1645340 - DNA, 15 bp, Homo sapiens
aacagtatgtaaaac

SEQ ID NO: 1645341 - DNA, 15 bp, Homo sapiens
acagtatgtaaaact

SEQ ID NO: 1645342 - DNA, 15 bp, Homo sapiens
cagtatgtaaaactc

SEQ ID NO: 1645343 - DNA, 15 bp, Homo sapiens
agtatgtaaaactct

SEQ ID NO: 1645344 - DNA, 15 bp, Homo sapiens
gtatgtaaaactctg

SEQ ID NO: 1645345 - DNA, 15 bp, Homo sapiens
tatgtaaaactctgt

SEQ ID NO: 1645346 - DNA, 15 bp, Homo sapiens
atgtaaaactctgtt

SEQ ID NO: 1645347 - DNA, 15 bp, Homo sapiens
tgtaaaactctgttt

SEQ ID NO: 1645348 - DNA, 15 bp, Homo sapiens
gtaaaactctgtttt

SEQ ID NO: 1645349 - DNA, 15 bp, Homo sapiens
taaaactctgttttt

SEQ ID NO: 1645350 - DNA, 15 bp, Homo sapiens
aaaactctgtttttt

SEQ ID NO: 1645351 - DNA, 15 bp, Homo sapiens
aaactctgtttttta

SEQ ID NO: 1645352 - DNA, 15 bp, Homo sapiens
aactctgttttttag

SEQ ID NO: 1645353 - DNA, 15 bp, Homo sapiens
actctgttttttagt

SEQ ID NO: 1645354 - DNA, 15 bp, Homo sapiens
ctctgttttttagta

SEQ ID NO: 1645355 - DNA, 15 bp, Homo sapiens
tctgttttttagtat

SEQ ID NO: 1645356 - DNA, 15 bp, Homo sapiens
ctgttttttagtata

SEQ ID NO: 1645357 - DNA, 15 bp, Homo sapiens
tgttttttagtataa

SEQ ID NO: 1645358 - DNA, 15 bp, Homo sapiens
gttttttagtataat

SEQ ID NO: 1645359 - DNA, 15 bp, Homo sapiens
ttttttagtataatg

SEQ ID NO: 1645360 - DNA, 15 bp, Homo sapiens
tttttagtataatgg

SEQ ID NO: 1645361 - DNA, 15 bp, Homo sapiens
ttttagtataatggt

SEQ ID NO: 1645362 - DNA, 15 bp, Homo sapiens
tttagtataatggtg

SEQ ID NO: 1645363 - DNA, 15 bp, Homo sapiens
ttagtataatggtgc

SEQ ID NO: 1645364 - DNA, 15 bp, Homo sapiens
tagtataatggtgct

SEQ ID NO: 1645365 - DNA, 15 bp, Homo sapiens
agtataatggtgcta

SEQ ID NO: 1645366 - DNA, 15 bp, Homo sapiens
gtataatggtgctat

SEQ ID NO: 1645367 - DNA, 15 bp, Homo sapiens
tataatggtgctatt

SEQ ID NO: 1645368 - DNA, 15 bp, Homo sapiens
ataatggtgctattt

SEQ ID NO: 1645369 - DNA, 15 bp, Homo sapiens
taatggtgctatttt

SEQ ID NO: 1645370 - DNA, 15 bp, Homo sapiens
aatggtgctattttg

SEQ ID NO: 1645371 - DNA, 15 bp, Homo sapiens
atggtgctattttgt

SEQ ID NO: 1645372 - DNA, 15 bp, Homo sapiens
tggtgctattttgta

SEQ ID NO: 1645373 - DNA, 15 bp, Homo sapiens
ggtgctattttgtag

SEQ ID NO: 1645374 - DNA, 15 bp, Homo sapiens
gtgctattttgtagt

SEQ ID NO: 1645375 - DNA, 15 bp, Homo sapiens
tgctattttgtagtt

SEQ ID NO: 1645376 - DNA, 15 bp, Homo sapiens
gctattttgtagttt

SEQ ID NO: 1645377 - DNA, 15 bp, Homo sapiens
ctattttgtagtttg

SEQ ID NO: 1645378 - DNA, 15 bp, Homo sapiens
tattttgtagtttgt

SEQ ID NO: 1645379 - DNA, 15 bp, Homo sapiens
attttgtagtttgtt

SEQ ID NO: 1645380 - DNA, 15 bp, Homo sapiens
ttttgtagtttgtta

SEQ ID NO: 1645381 - DNA, 15 bp, Homo sapiens
tttgtagtttgttat

SEQ ID NO: 1645382 - DNA, 15 bp, Homo sapiens
ttgtagtttgttata

SEQ ID NO: 1645383 - DNA, 15 bp, Homo sapiens
tgtagtttgttatat

SEQ ID NO: 1645384 - DNA, 15 bp, Homo sapiens
gtagtttgttatatg

SEQ ID NO: 1645385 - DNA, 15 bp, Homo sapiens
tagtttgttatatga

SEQ ID NO: 1645386 - DNA, 15 bp, Homo sapiens
agtttgttatatgaa

SEQ ID NO: 1645387 - DNA, 15 bp, Homo sapiens
gtttgttatatgaaa

SEQ ID NO: 1645388 - DNA, 15 bp, Homo sapiens
tttgttatatgaaag

SEQ ID NO: 1645389 - DNA, 15 bp, Homo sapiens
ttgttatatgaaaga

SEQ ID NO: 1645390 - DNA, 15 bp, Homo sapiens
tgttatatgaaagag

SEQ ID NO: 1645391 - DNA, 15 bp, Homo sapiens
gttatatgaaagagt

SEQ ID NO: 1645392 - DNA, 15 bp, Homo sapiens
ttatatgaaagagtc

SEQ ID NO: 1645393 - DNA, 15 bp, Homo sapiens
tatatgaaagagtct

SEQ ID NO: 1645394 - DNA, 15 bp, Homo sapiens
atatgaaagagtctg

SEQ ID NO: 1645395 - DNA, 15 bp, Homo sapiens
tatgaaagagtctgg

SEQ ID NO: 1645396 - DNA, 15 bp, Homo sapiens
atgaaagagtctggc

SEQ ID NO: 1645397 - DNA, 15 bp, Homo sapiens
tgaaagagtctggcc

SEQ ID NO: 1645398 - DNA, 15 bp, Homo sapiens
gaaagagtctggcca

SEQ ID NO: 1645399 - DNA, 15 bp, Homo sapiens
aaagagtctggccaa

SEQ ID NO: 1645400 - DNA, 15 bp, Homo sapiens
aagagtctggccaaa

SEQ ID NO: 1645401 - DNA, 15 bp, Homo sapiens
agagtctggccaaaa

SEQ ID NO: 1645402 - DNA, 15 bp, Homo sapiens
gagtctggccaaaac

SEQ ID NO: 1645403 - DNA, 15 bp, Homo sapiens
agtctggccaaaacg

SEQ ID NO: 1645404 - DNA, 15 bp, Homo sapiens
gtctggccaaaacgg

SEQ ID NO: 1645405 - DNA, 15 bp, Homo sapiens
tctggccaaaacggt

SEQ ID NO: 1645406 - DNA, 15 bp, Homo sapiens
ctggccaaaacggta

SEQ ID NO: 1645407 - DNA, 15 bp, Homo sapiens
tggccaaaacggtaa

SEQ ID NO: 1645408 - DNA, 15 bp, Homo sapiens
ggccaaaacggtaat

SEQ ID NO: 1645409 - DNA, 15 bp, Homo sapiens
gccaaaacggtaata

SEQ ID NO: 1645410 - DNA, 15 bp, Homo sapiens
ccaaaacggtaatac

SEQ ID NO: 1645411 - DNA, 15 bp, Homo sapiens
caaaacggtaatacg

SEQ ID NO: 1645412 - DNA, 15 bp, Homo sapiens
aaaacggtaatacgt

SEQ ID NO: 1645413 - DNA, 15 bp, Homo sapiens
aaacggtaatacgtg

SEQ ID NO: 1645414 - DNA, 15 bp, Homo sapiens
aacggtaatacgtga

SEQ ID NO: 1645415 - DNA, 15 bp, Homo sapiens
acggtaatacgtgaa

SEQ ID NO: 1645416 - DNA, 15 bp, Homo sapiens
cggtaatacgtgaaa

SEQ ID NO: 1645417 - DNA, 15 bp, Homo sapiens
ggtaatacgtgaaag

SEQ ID NO: 1645418 - DNA, 15 bp, Homo sapiens
gtaatacgtgaaagc

SEQ ID NO: 1645419 - DNA, 15 bp, Homo sapiens
taatacgtgaaagca

SEQ ID NO: 1645420 - DNA, 15 bp, Homo sapiens
aatacgtgaaagcaa

SEQ ID NO: 1645421 - DNA, 15 bp, Homo sapiens
atacgtgaaagcaaa

SEQ ID NO: 1645422 - DNA, 15 bp, Homo sapiens
tacgtgaaagcaaaa

SEQ ID NO: 1645423 - DNA, 15 bp, Homo sapiens
acgtgaaagcaaaac

SEQ ID NO: 1645424 - DNA, 15 bp, Homo sapiens
cgtgaaagcaaaaca

SEQ ID NO: 1645425 - DNA, 15 bp, Homo sapiens
gtgaaagcaaaacaa

SEQ ID NO: 1645426 - DNA, 15 bp, Homo sapiens
tgaaagcaaaacaat

SEQ ID NO: 1645427 - DNA, 15 bp, Homo sapiens
gaaagcaaaacaata

SEQ ID NO: 1645428 - DNA, 15 bp, Homo sapiens
aaagcaaaacaatag

SEQ ID NO: 1645429 - DNA, 15 bp, Homo sapiens
aagcaaaacaatagg

SEQ ID NO: 1645430 - DNA, 15 bp, Homo sapiens
agcaaaacaataggg

SEQ ID NO: 1645431 - DNA, 15 bp, Homo sapiens
gcaaaacaatagggg

SEQ ID NO: 1645432 - DNA, 15 bp, Homo sapiens
caaaacaatagggga

SEQ ID NO: 1645433 - DNA, 15 bp, Homo sapiens
aaaacaataggggaa

SEQ ID NO: 1645434 - DNA, 15 bp, Homo sapiens
aaacaataggggaag

SEQ ID NO: 1645435 - DNA, 15 bp, Homo sapiens
aacaataggggaagc

SEQ ID NO: 1645436 - DNA, 15 bp, Homo sapiens
acaataggggaagcc

SEQ ID NO: 1645437 - DNA, 15 bp, Homo sapiens
caataggggaagcct

SEQ ID NO: 1645438 - DNA, 15 bp, Homo sapiens
aataggggaagcctg

SEQ ID NO: 1645439 - DNA, 15 bp, Homo sapiens
ataggggaagcctgg

SEQ ID NO: 1645440 - DNA, 15 bp, Homo sapiens
taggggaagcctgga

SEQ ID NO: 1645441 - DNA, 15 bp, Homo sapiens
aggggaagcctggag

SEQ ID NO: 1645442 - DNA, 15 bp, Homo sapiens
ggggaagcctggagc

SEQ ID NO: 1645443 - DNA, 15 bp, Homo sapiens
gggaagcctggagcc

SEQ ID NO: 1645444 - DNA, 15 bp, Homo sapiens
ggaagcctggagcca

SEQ ID NO: 1645445 - DNA, 15 bp, Homo sapiens
gaagcctggagccaa

SEQ ID NO: 1645446 - DNA, 15 bp, Homo sapiens
aagcctggagccaaa

SEQ ID NO: 1645447 - DNA, 15 bp, Homo sapiens
agcctggagccaaag

SEQ ID NO: 1645448 - DNA, 15 bp, Homo sapiens
gcctggagccaaaga

SEQ ID NO: 1645449 - DNA, 15 bp, Homo sapiens
cctggagccaaagat

SEQ ID NO: 1645450 - DNA, 15 bp, Homo sapiens
ctggagccaaagatg

SEQ ID NO: 1645451 - DNA, 15 bp, Homo sapiens
tggagccaaagatga

SEQ ID NO: 1645452 - DNA, 15 bp, Homo sapiens
ggagccaaagatgac

SEQ ID NO: 1645453 - DNA, 15 bp, Homo sapiens
gagccaaagatgaca

SEQ ID NO: 1645454 - DNA, 15 bp, Homo sapiens
agccaaagatgacac

SEQ ID NO: 1645455 - DNA, 15 bp, Homo sapiens
gccaaagatgacaca

SEQ ID NO: 1645456 - DNA, 15 bp, Homo sapiens
ccaaagatgacacaa

SEQ ID NO: 1645457 - DNA, 15 bp, Homo sapiens
caaagatgacacaag

SEQ ID NO: 1645458 - DNA, 15 bp, Homo sapiens
aaagatgacacaagg

SEQ ID NO: 1645459 - DNA, 15 bp, Homo sapiens
aagatgacacaaggg

SEQ ID NO: 1645460 - DNA, 15 bp, Homo sapiens
agatgacacaagggg

SEQ ID NO: 1645461 - DNA, 15 bp, Homo sapiens
gatgacacaagggga

SEQ ID NO: 1645462 - DNA, 15 bp, Homo sapiens
atgacacaaggggaa

SEQ ID NO: 1645463 - DNA, 15 bp, Homo sapiens
tgacacaaggggaag

SEQ ID NO: 1645464 - DNA, 15 bp, Homo sapiens
gacacaaggggaagg

SEQ ID NO: 1645465 - DNA, 15 bp, Homo sapiens
acacaaggggaaggg

SEQ ID NO: 1645466 - DNA, 15 bp, Homo sapiens
cacaaggggaagggt

SEQ ID NO: 1645467 - DNA, 15 bp, Homo sapiens
acaaggggaagggta

SEQ ID NO: 1645468 - DNA, 15 bp, Homo sapiens
caaggggaagggtac

SEQ ID NO: 1645469 - DNA, 15 bp, Homo sapiens
aaggggaagggtact

SEQ ID NO: 1645470 - DNA, 15 bp, Homo sapiens
aggggaagggtactg

SEQ ID NO: 1645471 - DNA, 15 bp, Homo sapiens
ggggaagggtactga

SEQ ID NO: 1645472 - DNA, 15 bp, Homo sapiens
gggaagggtactgaa

SEQ ID NO: 1645473 - DNA, 15 bp, Homo sapiens
ggaagggtactgaaa

SEQ ID NO: 1645474 - DNA, 15 bp, Homo sapiens
gaagggtactgaaaa

SEQ ID NO: 1645475 - DNA, 15 bp, Homo sapiens
aagggtactgaaaac

SEQ ID NO: 1645476 - DNA, 15 bp, Homo sapiens
agggtactgaaaaca

SEQ ID NO: 1645477 - DNA, 15 bp, Homo sapiens
gggtactgaaaacac

SEQ ID NO: 1645478 - DNA, 15 bp, Homo sapiens
ggtactgaaaacacc

SEQ ID NO: 1645479 - DNA, 15 bp, Homo sapiens
gtactgaaaacacca

SEQ ID NO: 1645480 - DNA, 15 bp, Homo sapiens
tactgaaaacaccat

SEQ ID NO: 1645481 - DNA, 15 bp, Homo sapiens
actgaaaacaccatc

SEQ ID NO: 1645482 - DNA, 15 bp, Homo sapiens
ctgaaaacaccatcc

SEQ ID NO: 1645483 - DNA, 15 bp, Homo sapiens
tgaaaacaccatcca

SEQ ID NO: 1645484 - DNA, 15 bp, Homo sapiens
gaaaacaccatccat

SEQ ID NO: 1645485 - DNA, 15 bp, Homo sapiens
aaaacaccatccatt

SEQ ID NO: 1645486 - DNA, 15 bp, Homo sapiens
aaacaccatccattt

SEQ ID NO: 1645487 - DNA, 15 bp, Homo sapiens
aacaccatccatttg

SEQ ID NO: 1645488 - DNA, 15 bp, Homo sapiens
acaccatccatttgg

SEQ ID NO: 1645489 - DNA, 15 bp, Homo sapiens
caccatccatttggg

SEQ ID NO: 1645490 - DNA, 15 bp, Homo sapiens
accatccatttggga

SEQ ID NO: 1645491 - DNA, 15 bp, Homo sapiens
ccatccatttgggaa

SEQ ID NO: 1645492 - DNA, 15 bp, Homo sapiens
catccatttgggaaa

SEQ ID NO: 1645493 - DNA, 15 bp, Homo sapiens
atccatttgggaaag

SEQ ID NO: 1645494 - DNA, 15 bp, Homo sapiens
tccatttgggaaaga

SEQ ID NO: 1645495 - DNA, 15 bp, Homo sapiens
ccatttgggaaagaa

SEQ ID NO: 1645496 - DNA, 15 bp, Homo sapiens
catttgggaaagaag

SEQ ID NO: 1645497 - DNA, 15 bp, Homo sapiens
atttgggaaagaagg

SEQ ID NO: 1645498 - DNA, 15 bp, Homo sapiens
tttgggaaagaaggc

SEQ ID NO: 1645499 - DNA, 15 bp, Homo sapiens
ttgggaaagaaggca

SEQ ID NO: 1645500 - DNA, 15 bp, Homo sapiens
tgggaaagaaggcaa

SEQ ID NO: 1645501 - DNA, 15 bp, Homo sapiens
gggaaagaaggcaaa

SEQ ID NO: 1645502 - DNA, 15 bp, Homo sapiens
ggaaagaaggcaaag

SEQ ID NO: 1645503 - DNA, 15 bp, Homo sapiens
gaaagaaggcaaagt

SEQ ID NO: 1645504 - DNA, 15 bp, Homo sapiens
aaagaaggcaaagtc

SEQ ID NO: 1645505 - DNA, 15 bp, Homo sapiens
aagaaggcaaagtcc

SEQ ID NO: 1645506 - DNA, 15 bp, Homo sapiens
agaaggcaaagtccc

SEQ ID NO: 1645507 - DNA, 15 bp, Homo sapiens
gaaggcaaagtcccc

SEQ ID NO: 1645508 - DNA, 15 bp, Homo sapiens
aaggcaaagtccccc

SEQ ID NO: 1645509 - DNA, 15 bp, Homo sapiens
aggcaaagtcccccc

SEQ ID NO: 1645510 - DNA, 15 bp, Homo sapiens
ggcaaagtcccccca

SEQ ID NO: 1645511 - DNA, 15 bp, Homo sapiens
gcaaagtccccccag

SEQ ID NO: 1645512 - DNA, 15 bp, Homo sapiens
caaagtccccccagt

SEQ ID NO: 1645513 - DNA, 15 bp, Homo sapiens
aaagtccccccagtt

SEQ ID NO: 1645514 - DNA, 15 bp, Homo sapiens
aagtccccccagtta

SEQ ID NO: 1645515 - DNA, 15 bp, Homo sapiens
agtccccccagttat

SEQ ID NO: 1645516 - DNA, 15 bp, Homo sapiens
gtccccccagttatg

SEQ ID NO: 1645517 - DNA, 15 bp, Homo sapiens
tccccccagttatgc

SEQ ID NO: 1645518 - DNA, 15 bp, Homo sapiens
ccccccagttatgcc

SEQ ID NO: 1645519 - DNA, 15 bp, Homo sapiens
cccccagttatgcct

SEQ ID NO: 1645520 - DNA, 15 bp, Homo sapiens
ccccagttatgcctt

SEQ ID NO: 1645521 - DNA, 15 bp, Homo sapiens
cccagttatgccttc

SEQ ID NO: 1645522 - DNA, 15 bp, Homo sapiens
ccagttatgccttcc

SEQ ID NO: 1645523 - DNA, 15 bp, Homo sapiens
cagttatgccttcca

SEQ ID NO: 1645524 - DNA, 15 bp, Homo sapiens
agttatgccttccaa

SEQ ID NO: 1645525 - DNA, 15 bp, Homo sapiens
gttatgccttccaag

SEQ ID NO: 1645526 - DNA, 15 bp, Homo sapiens
ttatgccttccaaga

SEQ ID NO: 1645527 - DNA, 15 bp, Homo sapiens
tatgccttccaagag

SEQ ID NO: 1645528 - DNA, 15 bp, Homo sapiens
atgccttccaagagg

SEQ ID NO: 1645529 - DNA, 15 bp, Homo sapiens
tgccttccaagagga

SEQ ID NO: 1645530 - DNA, 15 bp, Homo sapiens
gccttccaagaggaa

SEQ ID NO: 1645531 - DNA, 15 bp, Homo sapiens
ccttccaagaggaac

SEQ ID NO: 1645532 - DNA, 15 bp, Homo sapiens
cttccaagaggaact

SEQ ID NO: 1645533 - DNA, 15 bp, Homo sapiens
ttccaagaggaactt

SEQ ID NO: 1645534 - DNA, 15 bp, Homo sapiens
tccaagaggaacttc

SEQ ID NO: 1645535 - DNA, 15 bp, Homo sapiens
ccaagaggaacttca

SEQ ID NO: 1645536 - DNA, 15 bp, Homo sapiens
caagaggaacttcag

SEQ ID NO: 1645537 - DNA, 15 bp, Homo sapiens
aagaggaacttcaga

SEQ ID NO: 1645538 - DNA, 15 bp, Homo sapiens
agaggaacttcagac

SEQ ID NO: 1645539 - DNA, 15 bp, Homo sapiens
gaggaacttcagaca

SEQ ID NO: 1645540 - DNA, 15 bp, Homo sapiens
aggaacttcagacac

SEQ ID NO: 1645541 - DNA, 15 bp, Homo sapiens
ggaacttcagacaca

SEQ ID NO: 1645542 - DNA, 15 bp, Homo sapiens
gaacttcagacacaa

SEQ ID NO: 1645543 - DNA, 15 bp, Homo sapiens
aacttcagacacaaa

SEQ ID NO: 1645544 - DNA, 15 bp, Homo sapiens
acttcagacacaaaa

SEQ ID NO: 1645545 - DNA, 15 bp, Homo sapiens
cttcagacacaaaag

SEQ ID NO: 1645546 - DNA, 15 bp, Homo sapiens
ttcagacacaaaagt

SEQ ID NO: 1645547 - DNA, 15 bp, Homo sapiens
tcagacacaaaagtc

SEQ ID NO: 1645548 - DNA, 15 bp, Homo sapiens
cagacacaaaagtcc

SEQ ID NO: 1645549 - DNA, 15 bp, Homo sapiens
agacacaaaagtcca

SEQ ID NO: 1645550 - DNA, 15 bp, Homo sapiens
gacacaaaagtccac

SEQ ID NO: 1645551 - DNA, 15 bp, Homo sapiens
acacaaaagtccact

SEQ ID NO: 1645552 - DNA, 15 bp, Homo sapiens
cacaaaagtccactg

SEQ ID NO: 1645553 - DNA, 15 bp, Homo sapiens
acaaaagtccactga

SEQ ID NO: 1645554 - DNA, 15 bp, Homo sapiens
caaaagtccactgat

SEQ ID NO: 1645555 - DNA, 15 bp, Homo sapiens
aaaagtccactgatg

SEQ ID NO: 1645556 - DNA, 15 bp, Homo sapiens
aaagtccactgatgc

SEQ ID NO: 1645557 - DNA, 15 bp, Homo sapiens
aagtccactgatgca

SEQ ID NO: 1645558 - DNA, 15 bp, Homo sapiens
agtccactgatgcaa

SEQ ID NO: 1645559 - DNA, 15 bp, Homo sapiens
gtccactgatgcaaa

SEQ ID NO: 1645560 - DNA, 15 bp, Homo sapiens
tccactgatgcaaat

SEQ ID NO: 1645561 - DNA, 15 bp, Homo sapiens
ccactgatgcaaatt

SEQ ID NO: 1645562 - DNA, 15 bp, Homo sapiens
cactgatgcaaattg

SEQ ID NO: 1645563 - DNA, 15 bp, Homo sapiens
actgatgcaaattgg

SEQ ID NO: 1645564 - DNA, 15 bp, Homo sapiens
ctgatgcaaattgga

SEQ ID NO: 1645565 - DNA, 15 bp, Homo sapiens
tgatgcaaattggac

SEQ ID NO: 1645566 - DNA, 15 bp, Homo sapiens
gatgcaaattggact

SEQ ID NO: 1645567 - DNA, 15 bp, Homo sapiens
atgcaaattggactg

SEQ ID NO: 1645568 - DNA, 15 bp, Homo sapiens
tgcaaattggactgg

SEQ ID NO: 1645569 - DNA, 15 bp, Homo sapiens
gcaaattggactggc

SEQ ID NO: 1645570 - DNA, 15 bp, Homo sapiens
caaattggactggcg

SEQ ID NO: 1645571 - DNA, 15 bp, Homo sapiens
aaattggactggcga

SEQ ID NO: 1645572 - DNA, 15 bp, Homo sapiens
aattggactggcgag

SEQ ID NO: 1645573 - DNA, 15 bp, Homo sapiens
attggactggcgagt

SEQ ID NO: 1645574 - DNA, 15 bp, Homo sapiens
ttggactggcgagtc

SEQ ID NO: 1645575 - DNA, 15 bp, Homo sapiens
tggactggcgagtcc

SEQ ID NO: 1645576 - DNA, 15 bp, Homo sapiens
ggactggcgagtcca

SEQ ID NO: 1645577 - DNA, 15 bp, Homo sapiens
gactggcgagtccag

SEQ ID NO: 1645578 - DNA, 15 bp, Homo sapiens
actggcgagtccaga

SEQ ID NO: 1645579 - DNA, 15 bp, Homo sapiens
ctggcgagtccagag

SEQ ID NO: 1645580 - DNA, 15 bp, Homo sapiens
tggcgagtccagaga

SEQ ID NO: 1645581 - DNA, 15 bp, Homo sapiens
ggcgagtccagagag

SEQ ID NO: 1645582 - DNA, 15 bp, Homo sapiens
gcgagtccagagagg

SEQ ID NO: 1645583 - DNA, 15 bp, Homo sapiens
cgagtccagagagga

SEQ ID NO: 1645584 - DNA, 15 bp, Homo sapiens
gagtccagagaggaa

SEQ ID NO: 1645585 - DNA, 15 bp, Homo sapiens
agtccagagaggaaa

SEQ ID NO: 1645586 - DNA, 15 bp, Homo sapiens
gtccagagaggaaac

SEQ ID NO: 1645587 - DNA, 15 bp, Homo sapiens
tccagagaggaaact

SEQ ID NO: 1645588 - DNA, 15 bp, Homo sapiens
ccagagaggaaactg

SEQ ID NO: 1645589 - DNA, 15 bp, Homo sapiens
cagagaggaaactgt

SEQ ID NO: 1645590 - DNA, 15 bp, Homo sapiens
agagaggaaactgtg

SEQ ID NO: 1645591 - DNA, 15 bp, Homo sapiens
gagaggaaactgtgg

SEQ ID NO: 1645592 - DNA, 15 bp, Homo sapiens
agaggaaactgtgga

SEQ ID NO: 1645593 - DNA, 15 bp, Homo sapiens
gaggaaactgtggaa

SEQ ID NO: 1645594 - DNA, 15 bp, Homo sapiens
aggaaactgtggaat

SEQ ID NO: 1645595 - DNA, 15 bp, Homo sapiens
ggaaactgtggaatg

SEQ ID NO: 1645596 - DNA, 15 bp, Homo sapiens
gaaactgtggaatgg

SEQ ID NO: 1645597 - DNA, 15 bp, Homo sapiens
aaactgtggaatgga

SEQ ID NO: 1645598 - DNA, 15 bp, Homo sapiens
aactgtggaatggaa

SEQ ID NO: 1645599 - DNA, 15 bp, Homo sapiens
actgtggaatggaaa

SEQ ID NO: 1645600 - DNA, 15 bp, Homo sapiens
ctgtggaatggaaaa

SEQ ID NO: 1645601 - DNA, 15 bp, Homo sapiens
tgtggaatggaaaaa

SEQ ID NO: 1645602 - DNA, 15 bp, Homo sapiens
gtggaatggaaaaag

SEQ ID NO: 1645603 - DNA, 15 bp, Homo sapiens
tggaatggaaaaagc

SEQ ID NO: 1645604 - DNA, 15 bp, Homo sapiens
ggaatggaaaaagca

SEQ ID NO: 1645605 - DNA, 15 bp, Homo sapiens
gaatggaaaaagcag

SEQ ID NO: 1645606 - DNA, 15 bp, Homo sapiens
aatggaaaaagcaga

SEQ ID NO: 1645607 - DNA, 15 bp, Homo sapiens
atggaaaaagcagaa

SEQ ID NO: 1645608 - DNA, 15 bp, Homo sapiens
tggaaaaagcagaag

SEQ ID NO: 1645609 - DNA, 15 bp, Homo sapiens
ggaaaaagcagaagg

SEQ ID NO: 1645610 - DNA, 15 bp, Homo sapiens
gaaaaagcagaaggc

SEQ ID NO: 1645611 - DNA, 15 bp, Homo sapiens
aaaaagcagaaggct

SEQ ID NO: 1645612 - DNA, 15 bp, Homo sapiens
aaaagcagaaggcta

SEQ ID NO: 1645613 - DNA, 15 bp, Homo sapiens
aaagcagaaggctag

SEQ ID NO: 1645614 - DNA, 15 bp, Homo sapiens
aagcagaaggctagg

SEQ ID NO: 1645615 - DNA, 15 bp, Homo sapiens
agcagaaggctagga

SEQ ID NO: 1645616 - DNA, 15 bp, Homo sapiens
gcagaaggctaggaa

SEQ ID NO: 1645617 - DNA, 15 bp, Homo sapiens
cagaaggctaggaat

SEQ ID NO: 1645618 - DNA, 15 bp, Homo sapiens
agaaggctaggaatt

SEQ ID NO: 1645619 - DNA, 15 bp, Homo sapiens
gaaggctaggaattt

SEQ ID NO: 1645620 - DNA, 15 bp, Homo sapiens
aaggctaggaatttt

SEQ ID NO: 1645621 - DNA, 15 bp, Homo sapiens
aggctaggaatttta

SEQ ID NO: 1645622 - DNA, 15 bp, Homo sapiens
ggctaggaattttag

SEQ ID NO: 1645623 - DNA, 15 bp, Homo sapiens
gctaggaattttagc

SEQ ID NO: 1645624 - DNA, 15 bp, Homo sapiens
ctaggaattttagca

SEQ ID NO: 1645625 - DNA, 15 bp, Homo sapiens
taggaattttagcag

SEQ ID NO: 1645626 - DNA, 15 bp, Homo sapiens
aggaattttagcagt

SEQ ID NO: 1645627 - DNA, 15 bp, Homo sapiens
ggaattttagcagtc

SEQ ID NO: 1645628 - DNA, 15 bp, Homo sapiens
gaattttagcagtcc

SEQ ID NO: 1645629 - DNA, 15 bp, Homo sapiens
aattttagcagtcct

SEQ ID NO: 1645630 - DNA, 15 bp, Homo sapiens
attttagcagtcctg

SEQ ID NO: 1645631 - DNA, 15 bp, Homo sapiens
ttttagcagtcctgg

SEQ ID NO: 1645632 - DNA, 15 bp, Homo sapiens
tttagcagtcctggt

SEQ ID NO: 1645633 - DNA, 15 bp, Homo sapiens
ttagcagtcctggtt

SEQ ID NO: 1645634 - DNA, 15 bp, Homo sapiens
tagcagtcctggttt

SEQ ID NO: 1645635 - DNA, 15 bp, Homo sapiens
agcagtcctggtttc

SEQ ID NO: 1645636 - DNA, 15 bp, Homo sapiens
gcagtcctggtttct

SEQ ID NO: 1645637 - DNA, 15 bp, Homo sapiens
cagtcctggtttctt

SEQ ID NO: 1645638 - DNA, 15 bp, Homo sapiens
agtcctggtttcttt

SEQ ID NO: 1645639 - DNA, 15 bp, Homo sapiens
gtcctggtttctttt

SEQ ID NO: 1645640 - DNA, 15 bp, Homo sapiens
tcctggtttcttttt

SEQ ID NO: 1645641 - DNA, 15 bp, Homo sapiens
cctggtttctttttc

SEQ ID NO: 1645642 - DNA, 15 bp, Homo sapiens
ctggtttctttttct

SEQ ID NO: 1645643 - DNA, 15 bp, Homo sapiens
tggtttctttttctc

SEQ ID NO: 1645644 - DNA, 15 bp, Homo sapiens
ggtttctttttctca

SEQ ID NO: 1645645 - DNA, 15 bp, Homo sapiens
gtttctttttctcat

SEQ ID NO: 1645646 - DNA, 15 bp, Homo sapiens
tttctttttctcatg

SEQ ID NO: 1645647 - DNA, 15 bp, Homo sapiens
ttctttttctcatgg

SEQ ID NO: 1645648 - DNA, 15 bp, Homo sapiens
tctttttctcatgga

SEQ ID NO: 1645649 - DNA, 15 bp, Homo sapiens
ctttttctcatggaa

SEQ ID NO: 1645650 - DNA, 15 bp, Homo sapiens
tttttctcatggaag

SEQ ID NO: 1645651 - DNA, 15 bp, Homo sapiens
ttttctcatggaaga

SEQ ID NO: 1645652 - DNA, 15 bp, Homo sapiens
tttctcatggaagaa

SEQ ID NO: 1645653 - DNA, 15 bp, Homo sapiens
ttctcatggaagaaa

SEQ ID NO: 1645654 - DNA, 15 bp, Homo sapiens
tctcatggaagaaat

SEQ ID NO: 1645655 - DNA, 15 bp, Homo sapiens
ctcatggaagaaatg

SEQ ID NO: 1645656 - DNA, 15 bp, Homo sapiens
atggaagaaatgaac

SEQ ID NO: 1645657 - DNA, 15 bp, Homo sapiens
tggaagaaatgaaca

SEQ ID NO: 1645658 - DNA, 15 bp, Homo sapiens
ggaagaaatgaacat

SEQ ID NO: 1645659 - DNA, 15 bp, Homo sapiens
gaagaaatgaacatc

SEQ ID NO: 1645660 - DNA, 15 bp, Homo sapiens
aagaaatgaacatct

SEQ ID NO: 1645661 - DNA, 15 bp, Homo sapiens
agaaatgaacatctg

SEQ ID NO: 1645662 - DNA, 15 bp, Homo sapiens
gaaatgaacatctgc

SEQ ID NO: 1645663 - DNA, 15 bp, Homo sapiens
aaatgaacatctgcc

SEQ ID NO: 1645664 - DNA, 15 bp, Homo sapiens
aatgaacatctgcca

SEQ ID NO: 1645665 - DNA, 15 bp, Homo sapiens
atgaacatctgccag

SEQ ID NO: 1645666 - DNA, 15 bp, Homo sapiens
tgaacatctgccagc

SEQ ID NO: 1645667 - DNA, 15 bp, Homo sapiens
gaacatctgccagct

SEQ ID NO: 1645668 - DNA, 15 bp, Homo sapiens
aacatctgccagctg

SEQ ID NO: 1645669 - DNA, 15 bp, Homo sapiens
acatctgccagctgt

SEQ ID NO: 1645670 - DNA, 15 bp, Homo sapiens
catctgccagctgtg

SEQ ID NO: 1645671 - DNA, 15 bp, Homo sapiens
atctgccagctgtgt

SEQ ID NO: 1645672 - DNA, 15 bp, Homo sapiens
tctgccagctgtgtc

SEQ ID NO: 1645673 - DNA, 15 bp, Homo sapiens
ctgccagctgtgtca

SEQ ID NO: 1645674 - DNA, 15 bp, Homo sapiens
tgccagctgtgtcat

SEQ ID NO: 1645675 - DNA, 15 bp, Homo sapiens
gccagctgtgtcatg

SEQ ID NO: 1645676 - DNA, 15 bp, Homo sapiens
ccagctgtgtcatgg

SEQ ID NO: 1645677 - DNA, 15 bp, Homo sapiens
cagctgtgtcatgga

SEQ ID NO: 1645678 - DNA, 15 bp, Homo sapiens
agctgtgtcatggac

SEQ ID NO: 1645679 - DNA, 15 bp, Homo sapiens
gctgtgtcatggact

SEQ ID NO: 1645680 - DNA, 15 bp, Homo sapiens
ctgtgtcatggactc

SEQ ID NO: 1645681 - DNA, 15 bp, Homo sapiens
tgtgtcatggactca

SEQ ID NO: 1645682 - DNA, 15 bp, Homo sapiens
gtgtcatggactcac

SEQ ID NO: 1645683 - DNA, 15 bp, Homo sapiens
tgtcatggactcacc

SEQ ID NO: 1645684 - DNA, 15 bp, Homo sapiens
gtcatggactcacca

SEQ ID NO: 1645685 - DNA, 15 bp, Homo sapiens
tcatggactcaccac

SEQ ID NO: 1645686 - DNA, 15 bp, Homo sapiens
catggactcaccact

SEQ ID NO: 1645687 - DNA, 15 bp, Homo sapiens
atggactcaccactg

SEQ ID NO: 1645688 - DNA, 15 bp, Homo sapiens
tggactcaccactgt

SEQ ID NO: 1645689 - DNA, 15 bp, Homo sapiens
ggactcaccactgtg

SEQ ID NO: 1645690 - DNA, 15 bp, Homo sapiens
gactcaccactgtgt

SEQ ID NO: 1645691 - DNA, 15 bp, Homo sapiens
actcaccactgtgtg

SEQ ID NO: 1645692 - DNA, 15 bp, Homo sapiens
ctcaccactgtgtga

SEQ ID NO: 1645693 - DNA, 15 bp, Homo sapiens
tcaccactgtgtgac

SEQ ID NO: 1645694 - DNA, 15 bp, Homo sapiens
actgtgtgaccttgg

SEQ ID NO: 1645695 - DNA, 15 bp, Homo sapiens
gaccttgggcaagtc

SEQ ID NO: 1645696 - DNA, 15 bp, Homo sapiens
accttgggcaagtca

SEQ ID NO: 1645697 - DNA, 15 bp, Homo sapiens
acttcacctctctgt

SEQ ID NO: 1645698 - DNA, 15 bp, Homo sapiens
cttcacctctctgtg

SEQ ID NO: 1645699 - DNA, 15 bp, Homo sapiens
ttcacctctctgtgc

SEQ ID NO: 1645700 - DNA, 15 bp, Homo sapiens
tcacctctctgtgcc

SEQ ID NO: 1645701 - DNA, 15 bp, Homo sapiens
cacctctctgtgcct

SEQ ID NO: 1645702 - DNA, 15 bp, Homo sapiens
acctctctgtgcctc

SEQ ID NO: 1645703 - DNA, 15 bp, Homo sapiens
cctctctgtgcctca

SEQ ID NO: 1645704 - DNA, 15 bp, Homo sapiens
ctctctgtgcctcag

SEQ ID NO: 1645705 - DNA, 15 bp, Homo sapiens
cctcatctgcaaaat

SEQ ID NO: 1645706 - DNA, 15 bp, Homo sapiens
ctcatctgcaaaatg

SEQ ID NO: 1645707 - DNA, 15 bp, Homo sapiens
tcatctgcaaaatgg

SEQ ID NO: 1645708 - DNA, 15 bp, Homo sapiens
catctgcaaaatggg

SEQ ID NO: 1645709 - DNA, 15 bp, Homo sapiens
atctgcaaaatgggg

SEQ ID NO: 1645710 - DNA, 15 bp, Homo sapiens
tctgcaaaatggggg

SEQ ID NO: 1645711 - DNA, 15 bp, Homo sapiens
ctgcaaaatgggggc

SEQ ID NO: 1645712 - DNA, 15 bp, Homo sapiens
tgcaaaatgggggca

SEQ ID NO: 1645713 - DNA, 15 bp, Homo sapiens
gcaaaatgggggcaa

SEQ ID NO: 1645714 - DNA, 15 bp, Homo sapiens
caaaatgggggcaat

SEQ ID NO: 1645715 - DNA, 15 bp, Homo sapiens
aaaatgggggcaata

SEQ ID NO: 1645716 - DNA, 15 bp, Homo sapiens
aaatgggggcaatat

SEQ ID NO: 1645717 - DNA, 15 bp, Homo sapiens
aatgggggcaatatg

SEQ ID NO: 1645718 - DNA, 15 bp, Homo sapiens
atgggggcaatatgt

SEQ ID NO: 1645719 - DNA, 15 bp, Homo sapiens
tgggggcaatatgtc

SEQ ID NO: 1645720 - DNA, 15 bp, Homo sapiens
gggggcaatatgtca

SEQ ID NO: 1645721 - DNA, 15 bp, Homo sapiens
ggggcaatatgtcat

SEQ ID NO: 1645722 - DNA, 15 bp, Homo sapiens
gggcaatatgtcatc

SEQ ID NO: 1645723 - DNA, 15 bp, Homo sapiens
ggcaatatgtcatct

SEQ ID NO: 1645724 - DNA, 15 bp, Homo sapiens
gcaatatgtcatcta

SEQ ID NO: 1645725 - DNA, 15 bp, Homo sapiens
caatatgtcatctac

SEQ ID NO: 1645726 - DNA, 15 bp, Homo sapiens
aatatgtcatctacc

SEQ ID NO: 1645727 - DNA, 15 bp, Homo sapiens
atatgtcatctacct

SEQ ID NO: 1645728 - DNA, 15 bp, Homo sapiens
tatgtcatctaccta

SEQ ID NO: 1645729 - DNA, 15 bp, Homo sapiens
atgtcatctacctac

SEQ ID NO: 1645730 - DNA, 15 bp, Homo sapiens
tgtcatctacctacc

SEQ ID NO: 1645731 - DNA, 15 bp, Homo sapiens
gtcatctacctacct

SEQ ID NO: 1645732 - DNA, 15 bp, Homo sapiens
tcatctacctacctc

SEQ ID NO: 1645733 - DNA, 15 bp, Homo sapiens
catctacctacctca

SEQ ID NO: 1645734 - DNA, 15 bp, Homo sapiens
atctacctacctcaa

SEQ ID NO: 1645735 - DNA, 15 bp, Homo sapiens
tctacctacctcaaa

SEQ ID NO: 1645736 - DNA, 15 bp, Homo sapiens
ctacctacctcaaag

SEQ ID NO: 1645737 - DNA, 15 bp, Homo sapiens
tacctacctcaaagg

SEQ ID NO: 1645738 - DNA, 15 bp, Homo sapiens
acctacctcaaaggg

SEQ ID NO: 1645739 - DNA, 15 bp, Homo sapiens
cctacctcaaagggg

SEQ ID NO: 1645740 - DNA, 15 bp, Homo sapiens
ctacctcaaaggggt

SEQ ID NO: 1645741 - DNA, 15 bp, Homo sapiens
tacctcaaaggggtg

SEQ ID NO: 1645742 - DNA, 15 bp, Homo sapiens
acctcaaaggggtgg

SEQ ID NO: 1645743 - DNA, 15 bp, Homo sapiens
cctcaaaggggtggt

SEQ ID NO: 1645744 - DNA, 15 bp, Homo sapiens
ctcaaaggggtggta

SEQ ID NO: 1645745 - DNA, 15 bp, Homo sapiens
tcaaaggggtggtat

SEQ ID NO: 1645746 - DNA, 15 bp, Homo sapiens
caaaggggtggtata

SEQ ID NO: 1645747 - DNA, 15 bp, Homo sapiens
aaaggggtggtataa

SEQ ID NO: 1645748 - DNA, 15 bp, Homo sapiens
aaggggtggtataag

SEQ ID NO: 1645749 - DNA, 15 bp, Homo sapiens
aggggtggtataagg

SEQ ID NO: 1645750 - DNA, 15 bp, Homo sapiens
ggggtggtataaggt

SEQ ID NO: 1645751 - DNA, 15 bp, Homo sapiens
gggtggtataaggtt

SEQ ID NO: 1645752 - DNA, 15 bp, Homo sapiens
ggtggtataaggttt

SEQ ID NO: 1645753 - DNA, 15 bp, Homo sapiens
gtggtataaggttta

SEQ ID NO: 1645754 - DNA, 15 bp, Homo sapiens
tggtataaggtttaa

SEQ ID NO: 1645755 - DNA, 15 bp, Homo sapiens
ggtataaggtttaaa

SEQ ID NO: 1645756 - DNA, 15 bp, Homo sapiens
gtataaggtttaaaa

SEQ ID NO: 1645757 - DNA, 15 bp, Homo sapiens
tataaggtttaaaaa

SEQ ID NO: 1645758 - DNA, 15 bp, Homo sapiens
ataaggtttaaaaag

SEQ ID NO: 1645759 - DNA, 15 bp, Homo sapiens
taaggtttaaaaaga

SEQ ID NO: 1645760 - DNA, 15 bp, Homo sapiens
aaggtttaaaaagat

SEQ ID NO: 1645761 - DNA, 15 bp, Homo sapiens
aggtttaaaaagata

SEQ ID NO: 1645762 - DNA, 15 bp, Homo sapiens
ggtttaaaaagataa

SEQ ID NO: 1645763 - DNA, 15 bp, Homo sapiens
gtttaaaaagataaa

SEQ ID NO: 1645764 - DNA, 15 bp, Homo sapiens
tttaaaaagataaag

SEQ ID NO: 1645765 - DNA, 15 bp, Homo sapiens
ttaaaaagataaaga

SEQ ID NO: 1645766 - DNA, 15 bp, Homo sapiens
taaaaagataaagat

SEQ ID NO: 1645767 - DNA, 15 bp, Homo sapiens
aaaaagataaagatt

SEQ ID NO: 1645768 - DNA, 15 bp, Homo sapiens
aaaagataaagattc

SEQ ID NO: 1645769 - DNA, 15 bp, Homo sapiens
aaagataaagattca

SEQ ID NO: 1645770 - DNA, 15 bp, Homo sapiens
aagataaagattcag

SEQ ID NO: 1645771 - DNA, 15 bp, Homo sapiens
agataaagattcaga

SEQ ID NO: 1645772 - DNA, 15 bp, Homo sapiens
gataaagattcagat

SEQ ID NO: 1645773 - DNA, 15 bp, Homo sapiens
ataaagattcagatt

SEQ ID NO: 1645774 - DNA, 15 bp, Homo sapiens
taaagattcagattt

SEQ ID NO: 1645775 - DNA, 15 bp, Homo sapiens
aaagattcagatttt

SEQ ID NO: 1645776 - DNA, 15 bp, Homo sapiens
aagattcagattttt

SEQ ID NO: 1645777 - DNA, 15 bp, Homo sapiens
agattcagatttttt

SEQ ID NO: 1645778 - DNA, 15 bp, Homo sapiens
gattcagattttttt

SEQ ID NO: 1645779 - DNA, 15 bp, Homo sapiens
attcagatttttttt

SEQ ID NO: 1645780 - DNA, 15 bp, Homo sapiens
ttcagatttttttta

SEQ ID NO: 1645781 - DNA, 15 bp, Homo sapiens
tcagattttttttac

SEQ ID NO: 1645782 - DNA, 15 bp, Homo sapiens
cagattttttttacc

SEQ ID NO: 1645783 - DNA, 15 bp, Homo sapiens
agattttttttaccc

SEQ ID NO: 1645784 - DNA, 15 bp, Homo sapiens
gattttttttaccct

SEQ ID NO: 1645785 - DNA, 15 bp, Homo sapiens
attttttttaccctg

SEQ ID NO: 1645786 - DNA, 15 bp, Homo sapiens
ttttttttaccctgg

SEQ ID NO: 1645787 - DNA, 15 bp, Homo sapiens
tttttttaccctggg

SEQ ID NO: 1645788 - DNA, 15 bp, Homo sapiens
ttttttaccctgggt

SEQ ID NO: 1645789 - DNA, 15 bp, Homo sapiens
tttttaccctgggtt

SEQ ID NO: 1645790 - DNA, 15 bp, Homo sapiens
ttttaccctgggttg

SEQ ID NO: 1645791 - DNA, 15 bp, Homo sapiens
tttaccctgggttgc

SEQ ID NO: 1645792 - DNA, 15 bp, Homo sapiens
ttaccctgggttgct

SEQ ID NO: 1645793 - DNA, 15 bp, Homo sapiens
taccctgggttgctg

SEQ ID NO: 1645794 - DNA, 15 bp, Homo sapiens
accctgggttgctgt

SEQ ID NO: 1645795 - DNA, 15 bp, Homo sapiens
ccctgggttgctgta

SEQ ID NO: 1645796 - DNA, 15 bp, Homo sapiens
cctgggttgctgtaa

SEQ ID NO: 1645797 - DNA, 15 bp, Homo sapiens
ctgggttgctgtaag

SEQ ID NO: 1645798 - DNA, 15 bp, Homo sapiens
tgggttgctgtaagg

SEQ ID NO: 1645799 - DNA, 15 bp, Homo sapiens
gggttgctgtaaggg

SEQ ID NO: 1645800 - DNA, 15 bp, Homo sapiens
ggttgctgtaagggt

SEQ ID NO: 1645801 - DNA, 15 bp, Homo sapiens
gttgctgtaagggtg

SEQ ID NO: 1645802 - DNA, 15 bp, Homo sapiens
ttgctgtaagggtgc

SEQ ID NO: 1645803 - DNA, 15 bp, Homo sapiens
tgctgtaagggtgca

SEQ ID NO: 1645804 - DNA, 15 bp, Homo sapiens
gctgtaagggtgcaa

SEQ ID NO: 1645805 - DNA, 15 bp, Homo sapiens
ctgtaagggtgcaac

SEQ ID NO: 1645806 - DNA, 15 bp, Homo sapiens
tgtaagggtgcaaca

SEQ ID NO: 1645807 - DNA, 15 bp, Homo sapiens
gtaagggtgcaacat

SEQ ID NO: 1645808 - DNA, 15 bp, Homo sapiens
taagggtgcaacatc

SEQ ID NO: 1645809 - DNA, 15 bp, Homo sapiens
aagggtgcaacatca

SEQ ID NO: 1645810 - DNA, 15 bp, Homo sapiens
agggtgcaacatcag

SEQ ID NO: 1645811 - DNA, 15 bp, Homo sapiens
gggtgcaacatcagg

SEQ ID NO: 1645812 - DNA, 15 bp, Homo sapiens
ggtgcaacatcaggg

SEQ ID NO: 1645813 - DNA, 15 bp, Homo sapiens
gtgcaacatcagggc

SEQ ID NO: 1645814 - DNA, 15 bp, Homo sapiens
tgcaacatcagggcg

SEQ ID NO: 1645815 - DNA, 15 bp, Homo sapiens
gcaacatcagggcgc

SEQ ID NO: 1645816 - DNA, 15 bp, Homo sapiens
caacatcagggcgct

SEQ ID NO: 1645817 - DNA, 15 bp, Homo sapiens
aacatcagggcgctt

SEQ ID NO: 1645818 - DNA, 15 bp, Homo sapiens
acatcagggcgcttg

SEQ ID NO: 1645819 - DNA, 15 bp, Homo sapiens
catcagggcgcttga

SEQ ID NO: 1645820 - DNA, 15 bp, Homo sapiens
atcagggcgcttgag

SEQ ID NO: 1645821 - DNA, 15 bp, Homo sapiens
tcagggcgcttgagt

SEQ ID NO: 1645822 - DNA, 15 bp, Homo sapiens
cagggcgcttgagtt

SEQ ID NO: 1645823 - DNA, 15 bp, Homo sapiens
agggcgcttgagttg

SEQ ID NO: 1645824 - DNA, 15 bp, Homo sapiens
gggcgcttgagttgc

SEQ ID NO: 1645825 - DNA, 15 bp, Homo sapiens
ggcgcttgagttgct

SEQ ID NO: 1645826 - DNA, 15 bp, Homo sapiens
gcgcttgagttgctg

SEQ ID NO: 1645827 - DNA, 15 bp, Homo sapiens
cgcttgagttgctga

SEQ ID NO: 1645828 - DNA, 15 bp, Homo sapiens
gcttgagttgctgag

SEQ ID NO: 1645829 - DNA, 15 bp, Homo sapiens
cttgagttgctgaga

SEQ ID NO: 1645830 - DNA, 15 bp, Homo sapiens
ttgagttgctgagat

SEQ ID NO: 1645831 - DNA, 15 bp, Homo sapiens
tgagttgctgagatg

SEQ ID NO: 1645832 - DNA, 15 bp, Homo sapiens
gagttgctgagatgc

SEQ ID NO: 1645833 - DNA, 15 bp, Homo sapiens
agttgctgagatgca

SEQ ID NO: 1645834 - DNA, 15 bp, Homo sapiens
gttgctgagatgcaa

SEQ ID NO: 1645835 - DNA, 15 bp, Homo sapiens
ttgctgagatgcaag

SEQ ID NO: 1645836 - DNA, 15 bp, Homo sapiens
tgctgagatgcaagg

SEQ ID NO: 1645837 - DNA, 15 bp, Homo sapiens
gctgagatgcaagga

SEQ ID NO: 1645838 - DNA, 15 bp, Homo sapiens
ctgagatgcaaggaa

SEQ ID NO: 1645839 - DNA, 15 bp, Homo sapiens
tgagatgcaaggaat

SEQ ID NO: 1645840 - DNA, 15 bp, Homo sapiens
gagatgcaaggaatt

SEQ ID NO: 1645841 - DNA, 15 bp, Homo sapiens
agatgcaaggaattc

SEQ ID NO: 1645842 - DNA, 15 bp, Homo sapiens
gatgcaaggaattct

SEQ ID NO: 1645843 - DNA, 15 bp, Homo sapiens
atgcaaggaattcta

SEQ ID NO: 1645844 - DNA, 15 bp, Homo sapiens
tgcaaggaattctat

SEQ ID NO: 1645845 - DNA, 15 bp, Homo sapiens
gcaaggaattctata

SEQ ID NO: 1645846 - DNA, 15 bp, Homo sapiens
caaggaattctataa

SEQ ID NO: 1645847 - DNA, 15 bp, Homo sapiens
aaggaattctataaa

SEQ ID NO: 1645848 - DNA, 15 bp, Homo sapiens
aggaattctataaat

SEQ ID NO: 1645849 - DNA, 15 bp, Homo sapiens
ggaattctataaata

SEQ ID NO: 1645850 - DNA, 15 bp, Homo sapiens
gaattctataaataa

SEQ ID NO: 1645851 - DNA, 15 bp, Homo sapiens
aattctataaataac

SEQ ID NO: 1645852 - DNA, 15 bp, Homo sapiens
attctataaataacc

SEQ ID NO: 1645853 - DNA, 15 bp, Homo sapiens
ttctataaataaccc

SEQ ID NO: 1645854 - DNA, 15 bp, Homo sapiens
tctataaataaccca

SEQ ID NO: 1645855 - DNA, 15 bp, Homo sapiens
ctataaataacccat

SEQ ID NO: 1645856 - DNA, 15 bp, Homo sapiens
tataaataacccatt

SEQ ID NO: 1645857 - DNA, 15 bp, Homo sapiens
ataaataacccattc

SEQ ID NO: 1645858 - DNA, 15 bp, Homo sapiens
taaataacccattca

SEQ ID NO: 1645859 - DNA, 15 bp, Homo sapiens
aaataacccattcat

SEQ ID NO: 1645860 - DNA, 15 bp, Homo sapiens
aataacccattcata

SEQ ID NO: 1645861 - DNA, 15 bp, Homo sapiens
ataacccattcatag

SEQ ID NO: 1645862 - DNA, 15 bp, Homo sapiens
taacccattcatagc

SEQ ID NO: 1645863 - DNA, 15 bp, Homo sapiens
aacccattcatagca

SEQ ID NO: 1645864 - DNA, 15 bp, Homo sapiens
acccattcatagcat

SEQ ID NO: 1645865 - DNA, 15 bp, Homo sapiens
cccattcatagcata

SEQ ID NO: 1645866 - DNA, 15 bp, Homo sapiens
ccattcatagcatag

SEQ ID NO: 1645867 - DNA, 15 bp, Homo sapiens
cattcatagcatagc

SEQ ID NO: 1645868 - DNA, 15 bp, Homo sapiens
attcatagcatagct

SEQ ID NO: 1645869 - DNA, 15 bp, Homo sapiens
ttcatagcatagcta

SEQ ID NO: 1645870 - DNA, 15 bp, Homo sapiens
tcatagcatagctag

SEQ ID NO: 1645871 - DNA, 15 bp, Homo sapiens
catagcatagctaga

SEQ ID NO: 1645872 - DNA, 15 bp, Homo sapiens
atagcatagctagag

SEQ ID NO: 1645873 - DNA, 15 bp, Homo sapiens
tagcatagctagaga

SEQ ID NO: 1645874 - DNA, 15 bp, Homo sapiens
agcatagctagagat

SEQ ID NO: 1645875 - DNA, 15 bp, Homo sapiens
gcatagctagagatt

SEQ ID NO: 1645876 - DNA, 15 bp, Homo sapiens
catagctagagattg

SEQ ID NO: 1645877 - DNA, 15 bp, Homo sapiens
atagctagagattgg

SEQ ID NO: 1645878 - DNA, 15 bp, Homo sapiens
tagctagagattggt

SEQ ID NO: 1645879 - DNA, 15 bp, Homo sapiens
agctagagattggtg

SEQ ID NO: 1645880 - DNA, 15 bp, Homo sapiens
gctagagattggtga

SEQ ID NO: 1645881 - DNA, 15 bp, Homo sapiens
ctagagattggtgaa

SEQ ID NO: 1645882 - DNA, 15 bp, Homo sapiens
tagagattggtgaat

SEQ ID NO: 1645883 - DNA, 15 bp, Homo sapiens
agagattggtgaatt

SEQ ID NO: 1645884 - DNA, 15 bp, Homo sapiens
gagattggtgaattg

SEQ ID NO: 1645885 - DNA, 15 bp, Homo sapiens
agattggtgaattga

SEQ ID NO: 1645886 - DNA, 15 bp, Homo sapiens
gattggtgaattgaa

SEQ ID NO: 1645887 - DNA, 15 bp, Homo sapiens
attggtgaattgaat

SEQ ID NO: 1645888 - DNA, 15 bp, Homo sapiens
ttggtgaattgaatg

SEQ ID NO: 1645889 - DNA, 15 bp, Homo sapiens
tggtgaattgaatgc

SEQ ID NO: 1645890 - DNA, 15 bp, Homo sapiens
ggtgaattgaatgct

SEQ ID NO: 1645891 - DNA, 15 bp, Homo sapiens
gtgaattgaatgctc

SEQ ID NO: 1645892 - DNA, 15 bp, Homo sapiens
tgaattgaatgctcc

SEQ ID NO: 1645893 - DNA, 15 bp, Homo sapiens
gaattgaatgctcct

SEQ ID NO: 1645894 - DNA, 15 bp, Homo sapiens
aattgaatgctcctg

SEQ ID NO: 1645895 - DNA, 15 bp, Homo sapiens
attgaatgctcctga

SEQ ID NO: 1645896 - DNA, 15 bp, Homo sapiens
ttgaatgctcctgac

SEQ ID NO: 1645897 - DNA, 15 bp, Homo sapiens
tgaatgctcctgaca

SEQ ID NO: 1645898 - DNA, 15 bp, Homo sapiens
gaatgctcctgacat

SEQ ID NO: 1645899 - DNA, 15 bp, Homo sapiens
aatgctcctgacatc

SEQ ID NO: 1645900 - DNA, 15 bp, Homo sapiens
atgctcctgacatct

SEQ ID NO: 1645901 - DNA, 15 bp, Homo sapiens
tgctcctgacatctc

SEQ ID NO: 1645902 - DNA, 15 bp, Homo sapiens
gctcctgacatctca

SEQ ID NO: 1645903 - DNA, 15 bp, Homo sapiens
ctcctgacatctcag

SEQ ID NO: 1645904 - DNA, 15 bp, Homo sapiens
tcctgacatctcagt

SEQ ID NO: 1645905 - DNA, 15 bp, Homo sapiens
cctgacatctcagtt

SEQ ID NO: 1645906 - DNA, 15 bp, Homo sapiens
ctgacatctcagttc

SEQ ID NO: 1645907 - DNA, 15 bp, Homo sapiens
tgacatctcagttct

SEQ ID NO: 1645908 - DNA, 15 bp, Homo sapiens
gacatctcagttctt

SEQ ID NO: 1645909 - DNA, 15 bp, Homo sapiens
acatctcagttcttg

SEQ ID NO: 1645910 - DNA, 15 bp, Homo sapiens
catctcagttcttgt

SEQ ID NO: 1645911 - DNA, 15 bp, Homo sapiens
atctcagttcttgtc

SEQ ID NO: 1645912 - DNA, 15 bp, Homo sapiens
tctcagttcttgtca

SEQ ID NO: 1645913 - DNA, 15 bp, Homo sapiens
ctcagttcttgtcag

SEQ ID NO: 1645914 - DNA, 15 bp, Homo sapiens
tcagttcttgtcagt

SEQ ID NO: 1645915 - DNA, 15 bp, Homo sapiens
cagttcttgtcagtg

SEQ ID NO: 1645916 - DNA, 15 bp, Homo sapiens
agttcttgtcagtga

SEQ ID NO: 1645917 - DNA, 15 bp, Homo sapiens
gttcttgtcagtgaa

SEQ ID NO: 1645918 - DNA, 15 bp, Homo sapiens
ttcttgtcagtgaag

SEQ ID NO: 1645919 - DNA, 15 bp, Homo sapiens
tcttgtcagtgaagc

SEQ ID NO: 1645920 - DNA, 15 bp, Homo sapiens
cttgtcagtgaagct

SEQ ID NO: 1645921 - DNA, 15 bp, Homo sapiens
ttgtcagtgaagcta

SEQ ID NO: 1645922 - DNA, 15 bp, Homo sapiens
tgtcagtgaagctat

SEQ ID NO: 1645923 - DNA, 15 bp, Homo sapiens
gtcagtgaagctatc

SEQ ID NO: 1645924 - DNA, 15 bp, Homo sapiens
tcagtgaagctatcc

SEQ ID NO: 1645925 - DNA, 15 bp, Homo sapiens
cagtgaagctatcca

SEQ ID NO: 1645926 - DNA, 15 bp, Homo sapiens
agtgaagctatccaa

SEQ ID NO: 1645927 - DNA, 15 bp, Homo sapiens
gtgaagctatccaaa

SEQ ID NO: 1645928 - DNA, 15 bp, Homo sapiens
tgaagctatccaaat

SEQ ID NO: 1645929 - DNA, 15 bp, Homo sapiens
gaagctatccaaata

SEQ ID NO: 1645930 - DNA, 15 bp, Homo sapiens
aagctatccaaataa

SEQ ID NO: 1645931 - DNA, 15 bp, Homo sapiens
agctatccaaataac

SEQ ID NO: 1645932 - DNA, 15 bp, Homo sapiens
gctatccaaataact

SEQ ID NO: 1645933 - DNA, 15 bp, Homo sapiens
ctatccaaataactg

SEQ ID NO: 1645934 - DNA, 15 bp, Homo sapiens
tatccaaataactgg

SEQ ID NO: 1645935 - DNA, 15 bp, Homo sapiens
atccaaataactggc

SEQ ID NO: 1645936 - DNA, 15 bp, Homo sapiens
tccaaataactggcc

SEQ ID NO: 1645937 - DNA, 15 bp, Homo sapiens
ccaaataactggcca

SEQ ID NO: 1645938 - DNA, 15 bp, Homo sapiens
caaataactggccaa

SEQ ID NO: 1645939 - DNA, 15 bp, Homo sapiens
aaataactggccaac

SEQ ID NO: 1645940 - DNA, 15 bp, Homo sapiens
aataactggccaact

SEQ ID NO: 1645941 - DNA, 15 bp, Homo sapiens
ataactggccaacta

SEQ ID NO: 1645942 - DNA, 15 bp, Homo sapiens
taactggccaactag

SEQ ID NO: 1645943 - DNA, 15 bp, Homo sapiens
aactggccaactagt

SEQ ID NO: 1645944 - DNA, 15 bp, Homo sapiens
actggccaactagtt

SEQ ID NO: 1645945 - DNA, 15 bp, Homo sapiens
ctggccaactagttg

SEQ ID NO: 1645946 - DNA, 15 bp, Homo sapiens
tggccaactagttgt

SEQ ID NO: 1645947 - DNA, 15 bp, Homo sapiens
ggccaactagttgtt

SEQ ID NO: 1645948 - DNA, 15 bp, Homo sapiens
gccaactagttgtta

SEQ ID NO: 1645949 - DNA, 15 bp, Homo sapiens
ccaactagttgttaa

SEQ ID NO: 1645950 - DNA, 15 bp, Homo sapiens
caactagttgttaaa

SEQ ID NO: 1645951 - DNA, 15 bp, Homo sapiens
aactagttgttaaaa

SEQ ID NO: 1645952 - DNA, 15 bp, Homo sapiens
actagttgttaaaag

SEQ ID NO: 1645953 - DNA, 15 bp, Homo sapiens
ctagttgttaaaagc

SEQ ID NO: 1645954 - DNA, 15 bp, Homo sapiens
tagttgttaaaagct

SEQ ID NO: 1645955 - DNA, 15 bp, Homo sapiens
agttgttaaaagcta

SEQ ID NO: 1645956 - DNA, 15 bp, Homo sapiens
gttgttaaaagctaa

SEQ ID NO: 1645957 - DNA, 15 bp, Homo sapiens
ttgttaaaagctaac

SEQ ID NO: 1645958 - DNA, 15 bp, Homo sapiens
tgttaaaagctaaca

SEQ ID NO: 1645959 - DNA, 15 bp, Homo sapiens
gttaaaagctaacag

SEQ ID NO: 1645960 - DNA, 15 bp, Homo sapiens
ttaaaagctaacagc

SEQ ID NO: 1645961 - DNA, 15 bp, Homo sapiens
taaaagctaacagct

SEQ ID NO: 1645962 - DNA, 15 bp, Homo sapiens
aaaagctaacagctc

SEQ ID NO: 1645963 - DNA, 15 bp, Homo sapiens
aaagctaacagctca

SEQ ID NO: 1645964 - DNA, 15 bp, Homo sapiens
aagctaacagctcaa

SEQ ID NO: 1645965 - DNA, 15 bp, Homo sapiens
agctaacagctcaat

SEQ ID NO: 1645966 - DNA, 15 bp, Homo sapiens
gctaacagctcaatc

SEQ ID NO: 1645967 - DNA, 15 bp, Homo sapiens
ctaacagctcaatct

SEQ ID NO: 1645968 - DNA, 15 bp, Homo sapiens
taacagctcaatctc

SEQ ID NO: 1645969 - DNA, 15 bp, Homo sapiens
aacagctcaatctct

SEQ ID NO: 1645970 - DNA, 15 bp, Homo sapiens
acagctcaatctctt

SEQ ID NO: 1645971 - DNA, 15 bp, Homo sapiens
cagctcaatctctta

SEQ ID NO: 1645972 - DNA, 15 bp, Homo sapiens
agctcaatctcttaa

SEQ ID NO: 1645973 - DNA, 15 bp, Homo sapiens
gctcaatctcttaaa

SEQ ID NO: 1645974 - DNA, 15 bp, Homo sapiens
ctcaatctcttaaaa

SEQ ID NO: 1645975 - DNA, 15 bp, Homo sapiens
tcaatctcttaaaac

SEQ ID NO: 1645976 - DNA, 15 bp, Homo sapiens
caatctcttaaaaca

SEQ ID NO: 1645977 - DNA, 15 bp, Homo sapiens
aatctcttaaaacac

SEQ ID NO: 1645978 - DNA, 15 bp, Homo sapiens
atctcttaaaacact

SEQ ID NO: 1645979 - DNA, 15 bp, Homo sapiens
tctcttaaaacactt

SEQ ID NO: 1645980 - DNA, 15 bp, Homo sapiens
ctcttaaaacacttt

SEQ ID NO: 1645981 - DNA, 15 bp, Homo sapiens
tcttaaaacactttt

SEQ ID NO: 1645982 - DNA, 15 bp, Homo sapiens
cttaaaacacttttc

SEQ ID NO: 1645983 - DNA, 15 bp, Homo sapiens
ttaaaacacttttca

SEQ ID NO: 1645984 - DNA, 15 bp, Homo sapiens
taaaacacttttcaa

SEQ ID NO: 1645985 - DNA, 15 bp, Homo sapiens
aaaacacttttcaaa

SEQ ID NO: 1645986 - DNA, 15 bp, Homo sapiens
aaacacttttcaaaa

SEQ ID NO: 1645987 - DNA, 15 bp, Homo sapiens
aacacttttcaaaat

SEQ ID NO: 1645988 - DNA, 15 bp, Homo sapiens
acacttttcaaaata

SEQ ID NO: 1645989 - DNA, 15 bp, Homo sapiens
cacttttcaaaatat

SEQ ID NO: 1645990 - DNA, 15 bp, Homo sapiens
acttttcaaaatatg

SEQ ID NO: 1645991 - DNA, 15 bp, Homo sapiens
cttttcaaaatatgt

SEQ ID NO: 1645992 - DNA, 15 bp, Homo sapiens
ttttcaaaatatgtg

SEQ ID NO: 1645993 - DNA, 15 bp, Homo sapiens
tttcaaaatatgtgg

SEQ ID NO: 1645994 - DNA, 15 bp, Homo sapiens
ttcaaaatatgtggg

SEQ ID NO: 1645995 - DNA, 15 bp, Homo sapiens
tcaaaatatgtggga

SEQ ID NO: 1645996 - DNA, 15 bp, Homo sapiens
caaaatatgtgggaa

SEQ ID NO: 1645997 - DNA, 15 bp, Homo sapiens
aaaatatgtgggaag

SEQ ID NO: 1645998 - DNA, 15 bp, Homo sapiens
aaatatgtgggaagc

SEQ ID NO: 1645999 - DNA, 15 bp, Homo sapiens
aatatgtgggaagca

SEQ ID NO: 1646000 - DNA, 15 bp, Homo sapiens
atatgtgggaagcat

SEQ ID NO: 1646001 - DNA, 15 bp, Homo sapiens
tatgtgggaagcatt

SEQ ID NO: 1646002 - DNA, 15 bp, Homo sapiens
atgtgggaagcattt

SEQ ID NO: 1646003 - DNA, 15 bp, Homo sapiens
tgtgggaagcatttg

SEQ ID NO: 1646004 - DNA, 15 bp, Homo sapiens
gtgggaagcatttga

SEQ ID NO: 1646005 - DNA, 15 bp, Homo sapiens
tgggaagcatttgat

SEQ ID NO: 1646006 - DNA, 15 bp, Homo sapiens
gggaagcatttgatt

SEQ ID NO: 1646007 - DNA, 15 bp, Homo sapiens
ggaagcatttgattt

SEQ ID NO: 1646008 - DNA, 15 bp, Homo sapiens
gaagcatttgatttt

SEQ ID NO: 1646009 - DNA, 15 bp, Homo sapiens
aagcatttgattttc

SEQ ID NO: 1646010 - DNA, 15 bp, Homo sapiens
agcatttgattttca

SEQ ID NO: 1646011 - DNA, 15 bp, Homo sapiens
gcatttgattttcaa

SEQ ID NO: 1646012 - DNA, 15 bp, Homo sapiens
catttgattttcaat

SEQ ID NO: 1646013 - DNA, 15 bp, Homo sapiens
atttgattttcaatt

SEQ ID NO: 1646014 - DNA, 15 bp, Homo sapiens
tttgattttcaattt

SEQ ID NO: 1646015 - DNA, 15 bp, Homo sapiens
ttgattttcaatttg

SEQ ID NO: 1646016 - DNA, 15 bp, Homo sapiens
tgattttcaatttga

SEQ ID NO: 1646017 - DNA, 15 bp, Homo sapiens
gattttcaatttgat

SEQ ID NO: 1646018 - DNA, 15 bp, Homo sapiens
attttcaatttgatt

SEQ ID NO: 1646019 - DNA, 15 bp, Homo sapiens
ttttcaatttgattt

SEQ ID NO: 1646020 - DNA, 15 bp, Homo sapiens
tttcaatttgatttt

SEQ ID NO: 1646021 - DNA, 15 bp, Homo sapiens
ttcaatttgattttg

SEQ ID NO: 1646022 - DNA, 15 bp, Homo sapiens
tcaatttgattttga

SEQ ID NO: 1646023 - DNA, 15 bp, Homo sapiens
caatttgattttgaa

SEQ ID NO: 1646024 - DNA, 15 bp, Homo sapiens
aatttgattttgaat

SEQ ID NO: 1646025 - DNA, 15 bp, Homo sapiens
atttgattttgaatt

SEQ ID NO: 1646026 - DNA, 15 bp, Homo sapiens
tttgattttgaattc

SEQ ID NO: 1646027 - DNA, 15 bp, Homo sapiens
ttgattttgaattct

SEQ ID NO: 1646028 - DNA, 15 bp, Homo sapiens
tgattttgaattctg

SEQ ID NO: 1646029 - DNA, 15 bp, Homo sapiens
gattttgaattctgc

SEQ ID NO: 1646030 - DNA, 15 bp, Homo sapiens
attttgaattctgca

SEQ ID NO: 1646031 - DNA, 15 bp, Homo sapiens
ttttgaattctgcat

SEQ ID NO: 1646032 - DNA, 15 bp, Homo sapiens
tttgaattctgcatt

SEQ ID NO: 1646033 - DNA, 15 bp, Homo sapiens
ttgaattctgcattt

SEQ ID NO: 1646034 - DNA, 15 bp, Homo sapiens
tgaattctgcatttg

SEQ ID NO: 1646035 - DNA, 15 bp, Homo sapiens
gaattctgcatttgg

SEQ ID NO: 1646036 - DNA, 15 bp, Homo sapiens
aattctgcatttggt

SEQ ID NO: 1646037 - DNA, 15 bp, Homo sapiens
attctgcatttggtt

SEQ ID NO: 1646038 - DNA, 15 bp, Homo sapiens
ttctgcatttggttt

SEQ ID NO: 1646039 - DNA, 15 bp, Homo sapiens
tctgcatttggtttt

SEQ ID NO: 1646040 - DNA, 15 bp, Homo sapiens
ctgcatttggtttta

SEQ ID NO: 1646041 - DNA, 15 bp, Homo sapiens
tgcatttggttttat

SEQ ID NO: 1646042 - DNA, 15 bp, Homo sapiens
gcatttggttttatg

SEQ ID NO: 1646043 - DNA, 15 bp, Homo sapiens
catttggttttatga

SEQ ID NO: 1646044 - DNA, 15 bp, Homo sapiens
atttggttttatgaa

SEQ ID NO: 1646045 - DNA, 15 bp, Homo sapiens
tttggttttatgaat

SEQ ID NO: 1646046 - DNA, 15 bp, Homo sapiens
ttggttttatgaata

SEQ ID NO: 1646047 - DNA, 15 bp, Homo sapiens
tggttttatgaatac

SEQ ID NO: 1646048 - DNA, 15 bp, Homo sapiens
ggttttatgaataca

SEQ ID NO: 1646049 - DNA, 15 bp, Homo sapiens
gttttatgaatacaa

SEQ ID NO: 1646050 - DNA, 15 bp, Homo sapiens
ttttatgaatacaaa

SEQ ID NO: 1646051 - DNA, 15 bp, Homo sapiens
tttatgaatacaaag

SEQ ID NO: 1646052 - DNA, 15 bp, Homo sapiens
ttatgaatacaaaga

SEQ ID NO: 1646053 - DNA, 15 bp, Homo sapiens
tatgaatacaaagat

SEQ ID NO: 1646054 - DNA, 15 bp, Homo sapiens
atgaatacaaagata

SEQ ID NO: 1646055 - DNA, 15 bp, Homo sapiens
tgaatacaaagataa

SEQ ID NO: 1646056 - DNA, 15 bp, Homo sapiens
gaatacaaagataag

SEQ ID NO: 1646057 - DNA, 15 bp, Homo sapiens
atacaaagataagtg

SEQ ID NO: 1646058 - DNA, 15 bp, Homo sapiens
tacaaagataagtga

SEQ ID NO: 1646059 - DNA, 15 bp, Homo sapiens
acaaagataagtgaa

SEQ ID NO: 1646060 - DNA, 15 bp, Homo sapiens
caaagataagtgaaa

SEQ ID NO: 1646061 - DNA, 15 bp, Homo sapiens
aaagataagtgaaaa

SEQ ID NO: 1646062 - DNA, 15 bp, Homo sapiens
aagataagtgaaaag

SEQ ID NO: 1646063 - DNA, 15 bp, Homo sapiens
agataagtgaaaaga

SEQ ID NO: 1646064 - DNA, 15 bp, Homo sapiens
gataagtgaaaagag

SEQ ID NO: 1646065 - DNA, 15 bp, Homo sapiens
ataagtgaaaagaga

SEQ ID NO: 1646066 - DNA, 15 bp, Homo sapiens
taagtgaaaagagag

SEQ ID NO: 1646067 - DNA, 15 bp, Homo sapiens
aagtgaaaagagaga

SEQ ID NO: 1646068 - DNA, 15 bp, Homo sapiens
agtgaaaagagagaa

SEQ ID NO: 1646069 - DNA, 15 bp, Homo sapiens
gtgaaaagagagaaa

SEQ ID NO: 1646070 - DNA, 15 bp, Homo sapiens
tgaaaagagagaaag

SEQ ID NO: 1646071 - DNA, 15 bp, Homo sapiens
gaaaagagagaaagg

SEQ ID NO: 1646072 - DNA, 15 bp, Homo sapiens
aaaagagagaaagga

SEQ ID NO: 1646073 - DNA, 15 bp, Homo sapiens
aaagagagaaaggaa

SEQ ID NO: 1646074 - DNA, 15 bp, Homo sapiens
agagagaaaggaaaa

SEQ ID NO: 1646075 - DNA, 15 bp, Homo sapiens
gagagaaaggaaaag

SEQ ID NO: 1646076 - DNA, 15 bp, Homo sapiens
agagaaaggaaaaga

SEQ ID NO: 1646077 - DNA, 15 bp, Homo sapiens
gagaaaggaaaagaa

SEQ ID NO: 1646078 - DNA, 15 bp, Homo sapiens
aaggaaaagaaaaag

SEQ ID NO: 1646079 - DNA, 15 bp, Homo sapiens
aggaaaagaaaaagg

SEQ ID NO: 1646080 - DNA, 15 bp, Homo sapiens
ggaaaagaaaaagga

SEQ ID NO: 1646081 - DNA, 15 bp, Homo sapiens
gaaaagaaaaaggag

SEQ ID NO: 1646082 - DNA, 15 bp, Homo sapiens
aaaagaaaaaggaga

SEQ ID NO: 1646083 - DNA, 15 bp, Homo sapiens
aaagaaaaaggagaa

SEQ ID NO: 1646084 - DNA, 15 bp, Homo sapiens
aagaaaaaggagaaa

SEQ ID NO: 1646085 - DNA, 15 bp, Homo sapiens
agaaaaaggagaaaa

SEQ ID NO: 1646086 - DNA, 15 bp, Homo sapiens
gaaaaaggagaaaaa

SEQ ID NO: 1646087 - DNA, 15 bp, Homo sapiens
aaaaaggagaaaaac

SEQ ID NO: 1646088 - DNA, 15 bp, Homo sapiens
aaaaggagaaaaaca

SEQ ID NO: 1646089 - DNA, 15 bp, Homo sapiens
aaaggagaaaaacaa

SEQ ID NO: 1646090 - DNA, 15 bp, Homo sapiens
aaggagaaaaacaaa

SEQ ID NO: 1646091 - DNA, 15 bp, Homo sapiens
aggagaaaaacaaag

SEQ ID NO: 1646092 - DNA, 15 bp, Homo sapiens
ggagaaaaacaaaga

SEQ ID NO: 1646093 - DNA, 15 bp, Homo sapiens
gagaaaaacaaagag

SEQ ID NO: 1646094 - DNA, 15 bp, Homo sapiens
agaaaaacaaagaga

SEQ ID NO: 1646095 - DNA, 15 bp, Homo sapiens
gaaaaacaaagagat

SEQ ID NO: 1646096 - DNA, 15 bp, Homo sapiens
aaaaacaaagagatt

SEQ ID NO: 1646097 - DNA, 15 bp, Homo sapiens
aaaacaaagagattt

SEQ ID NO: 1646098 - DNA, 15 bp, Homo sapiens
aaacaaagagatttc

SEQ ID NO: 1646099 - DNA, 15 bp, Homo sapiens
aacaaagagatttct

SEQ ID NO: 1646100 - DNA, 15 bp, Homo sapiens
acaaagagatttcta

SEQ ID NO: 1646101 - DNA, 15 bp, Homo sapiens
caaagagatttctac

SEQ ID NO: 1646102 - DNA, 15 bp, Homo sapiens
aaagagatttctacc

SEQ ID NO: 1646103 - DNA, 15 bp, Homo sapiens
aagagatttctacca

SEQ ID NO: 1646104 - DNA, 15 bp, Homo sapiens
agagatttctaccag

SEQ ID NO: 1646105 - DNA, 15 bp, Homo sapiens
gagatttctaccagt

SEQ ID NO: 1646106 - DNA, 15 bp, Homo sapiens
agatttctaccagtg

SEQ ID NO: 1646107 - DNA, 15 bp, Homo sapiens
gatttctaccagtga

SEQ ID NO: 1646108 - DNA, 15 bp, Homo sapiens
atttctaccagtgaa

SEQ ID NO: 1646109 - DNA, 15 bp, Homo sapiens
tttctaccagtgaaa

SEQ ID NO: 1646110 - DNA, 15 bp, Homo sapiens
ttctaccagtgaaag

SEQ ID NO: 1646111 - DNA, 15 bp, Homo sapiens
tctaccagtgaaagg

SEQ ID NO: 1646112 - DNA, 15 bp, Homo sapiens
ctaccagtgaaaggg

SEQ ID NO: 1646113 - DNA, 15 bp, Homo sapiens
taccagtgaaagggg

SEQ ID NO: 1646114 - DNA, 15 bp, Homo sapiens
accagtgaaagggga

SEQ ID NO: 1646115 - DNA, 15 bp, Homo sapiens
ccagtgaaaggggaa

SEQ ID NO: 1646116 - DNA, 15 bp, Homo sapiens
cagtgaaaggggaat

SEQ ID NO: 1646117 - DNA, 15 bp, Homo sapiens
agtgaaaggggaatt

SEQ ID NO: 1646118 - DNA, 15 bp, Homo sapiens
gtgaaaggggaatta

SEQ ID NO: 1646119 - DNA, 15 bp, Homo sapiens
tgaaaggggaattaa

SEQ ID NO: 1646120 - DNA, 15 bp, Homo sapiens
gaaaggggaattaat

SEQ ID NO: 1646121 - DNA, 15 bp, Homo sapiens
aaaggggaattaatt

SEQ ID NO: 1646122 - DNA, 15 bp, Homo sapiens
aaggggaattaatta

SEQ ID NO: 1646123 - DNA, 15 bp, Homo sapiens
aggggaattaattac

SEQ ID NO: 1646124 - DNA, 15 bp, Homo sapiens
ggggaattaattact

SEQ ID NO: 1646125 - DNA, 15 bp, Homo sapiens
gggaattaattactc

SEQ ID NO: 1646126 - DNA, 15 bp, Homo sapiens
ggaattaattactct

SEQ ID NO: 1646127 - DNA, 15 bp, Homo sapiens
gaattaattactctt

SEQ ID NO: 1646128 - DNA, 15 bp, Homo sapiens
aattaattactcttt

SEQ ID NO: 1646129 - DNA, 15 bp, Homo sapiens
attaattactctttg

SEQ ID NO: 1646130 - DNA, 15 bp, Homo sapiens
ttaattactctttgt

SEQ ID NO: 1646131 - DNA, 15 bp, Homo sapiens
taattactctttgtt

SEQ ID NO: 1646132 - DNA, 15 bp, Homo sapiens
aattactctttgtta

SEQ ID NO: 1646133 - DNA, 15 bp, Homo sapiens
attactctttgttag

SEQ ID NO: 1646134 - DNA, 15 bp, Homo sapiens
ttactctttgttagc

SEQ ID NO: 1646135 - DNA, 15 bp, Homo sapiens
tactctttgttagca

SEQ ID NO: 1646136 - DNA, 15 bp, Homo sapiens
actctttgttagcac

SEQ ID NO: 1646137 - DNA, 15 bp, Homo sapiens
ctctttgttagcact

SEQ ID NO: 1646138 - DNA, 15 bp, Homo sapiens
tctttgttagcactc

SEQ ID NO: 1646139 - DNA, 15 bp, Homo sapiens
ctttgttagcactca

SEQ ID NO: 1646140 - DNA, 15 bp, Homo sapiens
tttgttagcactcac

SEQ ID NO: 1646141 - DNA, 15 bp, Homo sapiens
ttgttagcactcact

SEQ ID NO: 1646142 - DNA, 15 bp, Homo sapiens
tgttagcactcactg

SEQ ID NO: 1646143 - DNA, 15 bp, Homo sapiens
gttagcactcactga

SEQ ID NO: 1646144 - DNA, 15 bp, Homo sapiens
ttagcactcactgac

SEQ ID NO: 1646145 - DNA, 15 bp, Homo sapiens
tagcactcactgact

SEQ ID NO: 1646146 - DNA, 15 bp, Homo sapiens
agcactcactgactc

SEQ ID NO: 1646147 - DNA, 15 bp, Homo sapiens
gcactcactgactct

SEQ ID NO: 1646148 - DNA, 15 bp, Homo sapiens
cactcactgactctt

SEQ ID NO: 1646149 - DNA, 15 bp, Homo sapiens
actcactgactcttc

SEQ ID NO: 1646150 - DNA, 15 bp, Homo sapiens
ctcactgactcttct

SEQ ID NO: 1646151 - DNA, 15 bp, Homo sapiens
tcactgactcttcta

SEQ ID NO: 1646152 - DNA, 15 bp, Homo sapiens
cactgactcttctat

SEQ ID NO: 1646153 - DNA, 15 bp, Homo sapiens
actgactcttctatg

SEQ ID NO: 1646154 - DNA, 15 bp, Homo sapiens
ctgactcttctatgc

SEQ ID NO: 1646155 - DNA, 15 bp, Homo sapiens
tgactcttctatgca

SEQ ID NO: 1646156 - DNA, 15 bp, Homo sapiens
gactcttctatgcag

SEQ ID NO: 1646157 - DNA, 15 bp, Homo sapiens
actcttctatgcagt

SEQ ID NO: 1646158 - DNA, 15 bp, Homo sapiens
ctcttctatgcagtt

SEQ ID NO: 1646159 - DNA, 15 bp, Homo sapiens
tcttctatgcagtta

SEQ ID NO: 1646160 - DNA, 15 bp, Homo sapiens
cttctatgcagttac

SEQ ID NO: 1646161 - DNA, 15 bp, Homo sapiens
ttctatgcagttact

SEQ ID NO: 1646162 - DNA, 15 bp, Homo sapiens
tctatgcagttacta

SEQ ID NO: 1646163 - DNA, 15 bp, Homo sapiens
ctatgcagttactac

SEQ ID NO: 1646164 - DNA, 15 bp, Homo sapiens
tatgcagttactaca

SEQ ID NO: 1646165 - DNA, 15 bp, Homo sapiens
atgcagttactacat

SEQ ID NO: 1646166 - DNA, 15 bp, Homo sapiens
tgcagttactacata

SEQ ID NO: 1646167 - DNA, 15 bp, Homo sapiens
gcagttactacatat

SEQ ID NO: 1646168 - DNA, 15 bp, Homo sapiens
cagttactacatatc

SEQ ID NO: 1646169 - DNA, 15 bp, Homo sapiens
agttactacatatct

SEQ ID NO: 1646170 - DNA, 15 bp, Homo sapiens
gttactacatatcta

SEQ ID NO: 1646171 - DNA, 15 bp, Homo sapiens
ttactacatatctag

SEQ ID NO: 1646172 - DNA, 15 bp, Homo sapiens
tactacatatctagt

SEQ ID NO: 1646173 - DNA, 15 bp, Homo sapiens
actacatatctagta

SEQ ID NO: 1646174 - DNA, 15 bp, Homo sapiens
ctacatatctagtaa

SEQ ID NO: 1646175 - DNA, 15 bp, Homo sapiens
tacatatctagtaaa

SEQ ID NO: 1646176 - DNA, 15 bp, Homo sapiens
acatatctagtaaaa

SEQ ID NO: 1646177 - DNA, 15 bp, Homo sapiens
catatctagtaaaac

SEQ ID NO: 1646178 - DNA, 15 bp, Homo sapiens
atatctagtaaaacc

SEQ ID NO: 1646179 - DNA, 15 bp, Homo sapiens
tatctagtaaaacct

SEQ ID NO: 1646180 - DNA, 15 bp, Homo sapiens
atctagtaaaacctc

SEQ ID NO: 1646181 - DNA, 15 bp, Homo sapiens
tctagtaaaacctcg

SEQ ID NO: 1646182 - DNA, 15 bp, Homo sapiens
ctagtaaaacctcgt

SEQ ID NO: 1646183 - DNA, 15 bp, Homo sapiens
tagtaaaacctcgtt

SEQ ID NO: 1646184 - DNA, 15 bp, Homo sapiens
agtaaaacctcgttt

SEQ ID NO: 1646185 - DNA, 15 bp, Homo sapiens
gtaaaacctcgttta

SEQ ID NO: 1646186 - DNA, 15 bp, Homo sapiens
taaaacctcgtttaa

SEQ ID NO: 1646187 - DNA, 15 bp, Homo sapiens
aaaacctcgtttaat

SEQ ID NO: 1646188 - DNA, 15 bp, Homo sapiens
aaacctcgtttaata

SEQ ID NO: 1646189 - DNA, 15 bp, Homo sapiens
aacctcgtttaatac

SEQ ID NO: 1646190 - DNA, 15 bp, Homo sapiens
acctcgtttaatact

SEQ ID NO: 1646191 - DNA, 15 bp, Homo sapiens
cctcgtttaatacta

SEQ ID NO: 1646192 - DNA, 15 bp, Homo sapiens
ctcgtttaatactat

SEQ ID NO: 1646193 - DNA, 15 bp, Homo sapiens
tcgtttaatactata

SEQ ID NO: 1646194 - DNA, 15 bp, Homo sapiens
cgtttaatactataa

SEQ ID NO: 1646195 - DNA, 15 bp, Homo sapiens
gtttaatactataaa

SEQ ID NO: 1646196 - DNA, 15 bp, Homo sapiens
tttaatactataaat

SEQ ID NO: 1646197 - DNA, 15 bp, Homo sapiens
ttaatactataaata

SEQ ID NO: 1646198 - DNA, 15 bp, Homo sapiens
taatactataaataa

SEQ ID NO: 1646199 - DNA, 15 bp, Homo sapiens
aatactataaataat

SEQ ID NO: 1646200 - DNA, 15 bp, Homo sapiens
atactataaataata

SEQ ID NO: 1646201 - DNA, 15 bp, Homo sapiens
tactataaataatat

SEQ ID NO: 1646202 - DNA, 15 bp, Homo sapiens
actataaataatatt

SEQ ID NO: 1646203 - DNA, 15 bp, Homo sapiens
ctataaataatattc

SEQ ID NO: 1646204 - DNA, 15 bp, Homo sapiens
tataaataatattct

SEQ ID NO: 1646205 - DNA, 15 bp, Homo sapiens
ataaataatattcta

SEQ ID NO: 1646206 - DNA, 15 bp, Homo sapiens
taaataatattctat

SEQ ID NO: 1646207 - DNA, 15 bp, Homo sapiens
aaataatattctatt

SEQ ID NO: 1646208 - DNA, 15 bp, Homo sapiens
aataatattctattc

SEQ ID NO: 1646209 - DNA, 15 bp, Homo sapiens
ataatattctattca

SEQ ID NO: 1646210 - DNA, 15 bp, Homo sapiens
taatattctattcat

SEQ ID NO: 1646211 - DNA, 15 bp, Homo sapiens
aatattctattcatt

SEQ ID NO: 1646212 - DNA, 15 bp, Homo sapiens
atattctattcattt

SEQ ID NO: 1646213 - DNA, 15 bp, Homo sapiens
tattctattcatttt

SEQ ID NO: 1646214 - DNA, 15 bp, Homo sapiens
attctattcattttg

SEQ ID NO: 1646215 - DNA, 15 bp, Homo sapiens
ttctattcattttga

SEQ ID NO: 1646216 - DNA, 15 bp, Homo sapiens
tctattcattttgaa

SEQ ID NO: 1646217 - DNA, 15 bp, Homo sapiens
ctattcattttgaaa

SEQ ID NO: 1646218 - DNA, 15 bp, Homo sapiens
tattcattttgaaaa

SEQ ID NO: 1646219 - DNA, 15 bp, Homo sapiens
ttcattttgaaaaac

SEQ ID NO: 1646220 - DNA, 15 bp, Homo sapiens
tcattttgaaaaaca

SEQ ID NO: 1646221 - DNA, 15 bp, Homo sapiens
cattttgaaaaacac

SEQ ID NO: 1646222 - DNA, 15 bp, Homo sapiens
attttgaaaaacaca

SEQ ID NO: 1646223 - DNA, 15 bp, Homo sapiens
ttttgaaaaacacaa

SEQ ID NO: 1646224 - DNA, 15 bp, Homo sapiens
tttgaaaaacacaat

SEQ ID NO: 1646225 - DNA, 15 bp, Homo sapiens
ttgaaaaacacaatg

SEQ ID NO: 1646226 - DNA, 15 bp, Homo sapiens
tgaaaaacacaatga

SEQ ID NO: 1646227 - DNA, 15 bp, Homo sapiens
gaaaaacacaatgat

SEQ ID NO: 1646228 - DNA, 15 bp, Homo sapiens
aaaaacacaatgatt

SEQ ID NO: 1646229 - DNA, 15 bp, Homo sapiens
aaaacacaatgattc

SEQ ID NO: 1646230 - DNA, 15 bp, Homo sapiens
aaacacaatgattcc

SEQ ID NO: 1646231 - DNA, 15 bp, Homo sapiens
aacacaatgattcct

SEQ ID NO: 1646232 - DNA, 15 bp, Homo sapiens
acacaatgattcctt

SEQ ID NO: 1646233 - DNA, 15 bp, Homo sapiens
cacaatgattccttc

SEQ ID NO: 1646234 - DNA, 15 bp, Homo sapiens
acaatgattccttct

SEQ ID NO: 1646235 - DNA, 15 bp, Homo sapiens
caatgattccttctt

SEQ ID NO: 1646236 - DNA, 15 bp, Homo sapiens
aatgattccttcttt

SEQ ID NO: 1646237 - DNA, 15 bp, Homo sapiens
atgattccttctttt

SEQ ID NO: 1646238 - DNA, 15 bp, Homo sapiens
tgattccttcttttc

SEQ ID NO: 1646239 - DNA, 15 bp, Homo sapiens
attccttcttttcta

SEQ ID NO: 1646240 - DNA, 15 bp, Homo sapiens
ttccttcttttctag

SEQ ID NO: 1646241 - DNA, 15 bp, Homo sapiens
tccttcttttctagg

SEQ ID NO: 1646242 - DNA, 15 bp, Homo sapiens
ccttcttttctaggc

SEQ ID NO: 1646243 - DNA, 15 bp, Homo sapiens
cttcttttctaggca

SEQ ID NO: 1646244 - DNA, 15 bp, Homo sapiens
ttcttttctaggcaa

SEQ ID NO: 1646245 - DNA, 15 bp, Homo sapiens
tcttttctaggcaat

SEQ ID NO: 1646246 - DNA, 15 bp, Homo sapiens
cttttctaggcaata

SEQ ID NO: 1646247 - DNA, 15 bp, Homo sapiens
ttttctaggcaatat

SEQ ID NO: 1646248 - DNA, 15 bp, Homo sapiens
tttctaggcaatata

SEQ ID NO: 1646249 - DNA, 15 bp, Homo sapiens
ttctaggcaatataa

SEQ ID NO: 1646250 - DNA, 15 bp, Homo sapiens
tctaggcaatataag

SEQ ID NO: 1646251 - DNA, 15 bp, Homo sapiens
ctaggcaatataagg

SEQ ID NO: 1646252 - DNA, 15 bp, Homo sapiens
taggcaatataagga

SEQ ID NO: 1646253 - DNA, 15 bp, Homo sapiens
aggcaatataaggaa

SEQ ID NO: 1646254 - DNA, 15 bp, Homo sapiens
ggcaatataaggaaa

SEQ ID NO: 1646255 - DNA, 15 bp, Homo sapiens
gcaatataaggaaag

SEQ ID NO: 1646256 - DNA, 15 bp, Homo sapiens
caatataaggaaagt

SEQ ID NO: 1646257 - DNA, 15 bp, Homo sapiens
aatataaggaaagtg

SEQ ID NO: 1646258 - DNA, 15 bp, Homo sapiens
atataaggaaagtga

SEQ ID NO: 1646259 - DNA, 15 bp, Homo sapiens
tataaggaaagtgat

SEQ ID NO: 1646260 - DNA, 15 bp, Homo sapiens
ataaggaaagtgatc

SEQ ID NO: 1646261 - DNA, 15 bp, Homo sapiens
taaggaaagtgatcc

SEQ ID NO: 1646262 - DNA, 15 bp, Homo sapiens
aaggaaagtgatcca

SEQ ID NO: 1646263 - DNA, 15 bp, Homo sapiens
aggaaagtgatccaa

SEQ ID NO: 1646264 - DNA, 15 bp, Homo sapiens
ggaaagtgatccaaa

SEQ ID NO: 1646265 - DNA, 15 bp, Homo sapiens
gaaagtgatccaaaa

SEQ ID NO: 1646266 - DNA, 15 bp, Homo sapiens
aaagtgatccaaaat

SEQ ID NO: 1646267 - DNA, 15 bp, Homo sapiens
aagtgatccaaaatt

SEQ ID NO: 1646268 - DNA, 15 bp, Homo sapiens
agtgatccaaaattt

SEQ ID NO: 1646269 - DNA, 15 bp, Homo sapiens
gtgatccaaaatttg

SEQ ID NO: 1646270 - DNA, 15 bp, Homo sapiens
tgatccaaaatttga

SEQ ID NO: 1646271 - DNA, 15 bp, Homo sapiens
gatccaaaatttgaa

SEQ ID NO: 1646272 - DNA, 15 bp, Homo sapiens
atccaaaatttgaaa

SEQ ID NO: 1646273 - DNA, 15 bp, Homo sapiens
tccaaaatttgaaat

SEQ ID NO: 1646274 - DNA, 15 bp, Homo sapiens
ccaaaatttgaaata

SEQ ID NO: 1646275 - DNA, 15 bp, Homo sapiens
caaaatttgaaatat

SEQ ID NO: 1646276 - DNA, 15 bp, Homo sapiens
aaaatttgaaatatt

SEQ ID NO: 1646277 - DNA, 15 bp, Homo sapiens
aaatttgaaatatta

SEQ ID NO: 1646278 - DNA, 15 bp, Homo sapiens
aatttgaaatattaa

SEQ ID NO: 1646279 - DNA, 15 bp, Homo sapiens
atttgaaatattaaa

SEQ ID NO: 1646280 - DNA, 15 bp, Homo sapiens
tttgaaatattaaaa

SEQ ID NO: 1646281 - DNA, 15 bp, Homo sapiens
ttgaaatattaaaat

SEQ ID NO: 1646282 - DNA, 15 bp, Homo sapiens
tgaaatattaaaata

SEQ ID NO: 1646283 - DNA, 15 bp, Homo sapiens
gaaatattaaaataa

SEQ ID NO: 1646284 - DNA, 15 bp, Homo sapiens
aaatattaaaataat

SEQ ID NO: 1646285 - DNA, 15 bp, Homo sapiens
aatattaaaataata

SEQ ID NO: 1646286 - DNA, 15 bp, Homo sapiens
atattaaaataatat

SEQ ID NO: 1646287 - DNA, 15 bp, Homo sapiens
tattaaaataatatc

SEQ ID NO: 1646288 - DNA, 15 bp, Homo sapiens
attaaaataatatct

SEQ ID NO: 1646289 - DNA, 15 bp, Homo sapiens
ttaaaataatatcta

SEQ ID NO: 1646290 - DNA, 15 bp, Homo sapiens
taaaataatatctaa

SEQ ID NO: 1646291 - DNA, 15 bp, Homo sapiens
aaaataatatctaat

SEQ ID NO: 1646292 - DNA, 15 bp, Homo sapiens
aaataatatctaata

SEQ ID NO: 1646293 - DNA, 15 bp, Homo sapiens
aataatatctaataa

SEQ ID NO: 1646294 - DNA, 15 bp, Homo sapiens
ataatatctaataaa

SEQ ID NO: 1646295 - DNA, 15 bp, Homo sapiens
taatatctaataaaa

SEQ ID NO: 1646296 - DNA, 15 bp, Homo sapiens
aatatctaataaaaa

SEQ ID NO: 1646297 - DNA, 15 bp, Homo sapiens
atatctaataaaaag

SEQ ID NO: 1646298 - DNA, 15 bp, Homo sapiens
tatctaataaaaagt

SEQ ID NO: 1646299 - DNA, 15 bp, Homo sapiens
atctaataaaaagtc

SEQ ID NO: 1646300 - DNA, 15 bp, Homo sapiens
tctaataaaaagtca

SEQ ID NO: 1646301 - DNA, 15 bp, Homo sapiens
ctaataaaaagtcac

SEQ ID NO: 1646302 - DNA, 15 bp, Homo sapiens
taataaaaagtcaca

SEQ ID NO: 1646303 - DNA, 15 bp, Homo sapiens
aataaaaagtcacaa

SEQ ID NO: 1646304 - DNA, 15 bp, Homo sapiens
ataaaaagtcacaaa

SEQ ID NO: 1646305 - DNA, 15 bp, Homo sapiens
taaaaagtcacaaag

SEQ ID NO: 1646306 - DNA, 15 bp, Homo sapiens
aaaaagtcacaaagt

SEQ ID NO: 1646307 - DNA, 15 bp, Homo sapiens
aaaagtcacaaagtt

SEQ ID NO: 1646308 - DNA, 15 bp, Homo sapiens
aaagtcacaaagtta

SEQ ID NO: 1646309 - DNA, 15 bp, Homo sapiens
aagtcacaaagttat

SEQ ID NO: 1646310 - DNA, 15 bp, Homo sapiens
agtcacaaagttatc

SEQ ID NO: 1646311 - DNA, 15 bp, Homo sapiens
gtcacaaagttatct

SEQ ID NO: 1646312 - DNA, 15 bp, Homo sapiens
tcacaaagttatctt

SEQ ID NO: 1646313 - DNA, 15 bp, Homo sapiens
cacaaagttatcttc

SEQ ID NO: 1646314 - DNA, 15 bp, Homo sapiens
acaaagttatcttct

SEQ ID NO: 1646315 - DNA, 15 bp, Homo sapiens
caaagttatcttctt

SEQ ID NO: 1646316 - DNA, 15 bp, Homo sapiens
aaagttatcttcttt

SEQ ID NO: 1646317 - DNA, 15 bp, Homo sapiens
aagttatcttcttta

SEQ ID NO: 1646318 - DNA, 15 bp, Homo sapiens
agttatcttctttaa

SEQ ID NO: 1646319 - DNA, 15 bp, Homo sapiens
gttatcttctttaac

SEQ ID NO: 1646320 - DNA, 15 bp, Homo sapiens
ttatcttctttaaca

SEQ ID NO: 1646321 - DNA, 15 bp, Homo sapiens
tatcttctttaacaa

SEQ ID NO: 1646322 - DNA, 15 bp, Homo sapiens
atcttctttaacaaa

SEQ ID NO: 1646323 - DNA, 15 bp, Homo sapiens
tcttctttaacaaac

SEQ ID NO: 1646324 - DNA, 15 bp, Homo sapiens
cttctttaacaaact

SEQ ID NO: 1646325 - DNA, 15 bp, Homo sapiens
ttctttaacaaactt

SEQ ID NO: 1646326 - DNA, 15 bp, Homo sapiens
tctttaacaaacttt

SEQ ID NO: 1646327 - DNA, 15 bp, Homo sapiens
ctttaacaaacttta

SEQ ID NO: 1646328 - DNA, 15 bp, Homo sapiens
tttaacaaactttac

SEQ ID NO: 1646329 - DNA, 15 bp, Homo sapiens
ttaacaaactttact

SEQ ID NO: 1646330 - DNA, 15 bp, Homo sapiens
taacaaactttactc

SEQ ID NO: 1646331 - DNA, 15 bp, Homo sapiens
aacaaactttactct

SEQ ID NO: 1646332 - DNA, 15 bp, Homo sapiens
acaaactttactctt

SEQ ID NO: 1646333 - DNA, 15 bp, Homo sapiens
caaactttactctta

SEQ ID NO: 1646334 - DNA, 15 bp, Homo sapiens
aaactttactcttat

SEQ ID NO: 1646335 - DNA, 15 bp, Homo sapiens
aactttactcttatt

SEQ ID NO: 1646336 - DNA, 15 bp, Homo sapiens
actttactcttattc

SEQ ID NO: 1646337 - DNA, 15 bp, Homo sapiens
ctttactcttattct

SEQ ID NO: 1646338 - DNA, 15 bp, Homo sapiens
tttactcttattctt

SEQ ID NO: 1646339 - DNA, 15 bp, Homo sapiens
ttactcttattctta

SEQ ID NO: 1646340 - DNA, 15 bp, Homo sapiens
tactcttattcttag

SEQ ID NO: 1646341 - DNA, 15 bp, Homo sapiens
actcttattcttagc

SEQ ID NO: 1646342 - DNA, 15 bp, Homo sapiens
ctcttattcttagct

SEQ ID NO: 1646343 - DNA, 15 bp, Homo sapiens
tcttattcttagctg

SEQ ID NO: 1646344 - DNA, 15 bp, Homo sapiens
cttattcttagctgt

SEQ ID NO: 1646345 - DNA, 15 bp, Homo sapiens
ttattcttagctgta

SEQ ID NO: 1646346 - DNA, 15 bp, Homo sapiens
tattcttagctgtat

SEQ ID NO: 1646347 - DNA, 15 bp, Homo sapiens
attcttagctgtata

SEQ ID NO: 1646348 - DNA, 15 bp, Homo sapiens
ttcttagctgtatat

SEQ ID NO: 1646349 - DNA, 15 bp, Homo sapiens
tcttagctgtatata

SEQ ID NO: 1646350 - DNA, 15 bp, Homo sapiens
cttagctgtatatac

SEQ ID NO: 1646351 - DNA, 15 bp, Homo sapiens
ttagctgtatataca

SEQ ID NO: 1646352 - DNA, 15 bp, Homo sapiens
tagctgtatatacat

SEQ ID NO: 1646353 - DNA, 15 bp, Homo sapiens
agctgtatatacatt

SEQ ID NO: 1646354 - DNA, 15 bp, Homo sapiens
gctgtatatacattt

SEQ ID NO: 1646355 - DNA, 15 bp, Homo sapiens
ctgtatatacatttt

SEQ ID NO: 1646356 - DNA, 15 bp, Homo sapiens
tgtatatacattttt

SEQ ID NO: 1646357 - DNA, 15 bp, Homo sapiens
gtatatacatttttt

SEQ ID NO: 1646358 - DNA, 15 bp, Homo sapiens
tatatacattttttt

SEQ ID NO: 1646359 - DNA, 15 bp, Homo sapiens
atatacattttttta

SEQ ID NO: 1646360 - DNA, 15 bp, Homo sapiens
tatacatttttttaa

SEQ ID NO: 1646361 - DNA, 15 bp, Homo sapiens
atacatttttttaaa

SEQ ID NO: 1646362 - DNA, 15 bp, Homo sapiens
acatttttttaaaag

SEQ ID NO: 1646363 - DNA, 15 bp, Homo sapiens
catttttttaaaagt

SEQ ID NO: 1646364 - DNA, 15 bp, Homo sapiens
tttttttaaaagttt

SEQ ID NO: 1646365 - DNA, 15 bp, Homo sapiens
ttttttaaaagtttg

SEQ ID NO: 1646366 - DNA, 15 bp, Homo sapiens
tttttaaaagtttgt

SEQ ID NO: 1646367 - DNA, 15 bp, Homo sapiens
ttttaaaagtttgtt

SEQ ID NO: 1646368 - DNA, 15 bp, Homo sapiens
tttaaaagtttgtta

SEQ ID NO: 1646369 - DNA, 15 bp, Homo sapiens
ttaaaagtttgttaa

SEQ ID NO: 1646370 - DNA, 15 bp, Homo sapiens
taaaagtttgttaaa

SEQ ID NO: 1646371 - DNA, 15 bp, Homo sapiens
aaaagtttgttaaaa

SEQ ID NO: 1646372 - DNA, 15 bp, Homo sapiens
aaagtttgttaaaat

SEQ ID NO: 1646373 - DNA, 15 bp, Homo sapiens
aagtttgttaaaata

SEQ ID NO: 1646374 - DNA, 15 bp, Homo sapiens
agtttgttaaaatat

SEQ ID NO: 1646375 - DNA, 15 bp, Homo sapiens
gtttgttaaaatatg

SEQ ID NO: 1646376 - DNA, 15 bp, Homo sapiens
tttgttaaaatatgc

SEQ ID NO: 1646377 - DNA, 15 bp, Homo sapiens
ttgttaaaatatgct

SEQ ID NO: 1646378 - DNA, 15 bp, Homo sapiens
tgttaaaatatgctt

SEQ ID NO: 1646379 - DNA, 15 bp, Homo sapiens
gttaaaatatgcttg

SEQ ID NO: 1646380 - DNA, 15 bp, Homo sapiens
ttaaaatatgcttga

SEQ ID NO: 1646381 - DNA, 15 bp, Homo sapiens
taaaatatgcttgac

SEQ ID NO: 1646382 - DNA, 15 bp, Homo sapiens
aaaatatgcttgact

SEQ ID NO: 1646383 - DNA, 15 bp, Homo sapiens
aaatatgcttgacta

SEQ ID NO: 1646384 - DNA, 15 bp, Homo sapiens
aatatgcttgactag

SEQ ID NO: 1646385 - DNA, 15 bp, Homo sapiens
atatgcttgactaga

SEQ ID NO: 1646386 - DNA, 15 bp, Homo sapiens
tatgcttgactagag

SEQ ID NO: 1646387 - DNA, 15 bp, Homo sapiens
atgcttgactagagt

SEQ ID NO: 1646388 - DNA, 15 bp, Homo sapiens
tgcttgactagagtt

SEQ ID NO: 1646389 - DNA, 15 bp, Homo sapiens
gcttgactagagttt

SEQ ID NO: 1646390 - DNA, 15 bp, Homo sapiens
cttgactagagtttc

SEQ ID NO: 1646391 - DNA, 15 bp, Homo sapiens
ttgactagagtttcc

SEQ ID NO: 1646392 - DNA, 15 bp, Homo sapiens
tgactagagtttcca

SEQ ID NO: 1646393 - DNA, 15 bp, Homo sapiens
gactagagtttccag

SEQ ID NO: 1646394 - DNA, 15 bp, Homo sapiens
actagagtttccagt

SEQ ID NO: 1646395 - DNA, 15 bp, Homo sapiens
ctagagtttccagtt

SEQ ID NO: 1646396 - DNA, 15 bp, Homo sapiens
tagagtttccagttg

SEQ ID NO: 1646397 - DNA, 15 bp, Homo sapiens
agagtttccagttga

SEQ ID NO: 1646398 - DNA, 15 bp, Homo sapiens
gagtttccagttgaa

SEQ ID NO: 1646399 - DNA, 15 bp, Homo sapiens
agtttccagttgaaa

SEQ ID NO: 1646400 - DNA, 15 bp, Homo sapiens
gtttccagttgaaag

SEQ ID NO: 1646401 - DNA, 15 bp, Homo sapiens
tttccagttgaaagg

SEQ ID NO: 1646402 - DNA, 15 bp, Homo sapiens
ttccagttgaaaggc

SEQ ID NO: 1646403 - DNA, 15 bp, Homo sapiens
tccagttgaaaggca

SEQ ID NO: 1646404 - DNA, 15 bp, Homo sapiens
ccagttgaaaggcaa

SEQ ID NO: 1646405 - DNA, 15 bp, Homo sapiens
cagttgaaaggcaaa

SEQ ID NO: 1646406 - DNA, 15 bp, Homo sapiens
agttgaaaggcaaaa

SEQ ID NO: 1646407 - DNA, 15 bp, Homo sapiens
gttgaaaggcaaaaa

SEQ ID NO: 1646408 - DNA, 15 bp, Homo sapiens
ttgaaaggcaaaaac

SEQ ID NO: 1646409 - DNA, 15 bp, Homo sapiens
tgaaaggcaaaaact

SEQ ID NO: 1646410 - DNA, 15 bp, Homo sapiens
gaaaggcaaaaactt

SEQ ID NO: 1646411 - DNA, 15 bp, Homo sapiens
aaaggcaaaaacttc

SEQ ID NO: 1646412 - DNA, 15 bp, Homo sapiens
aaggcaaaaacttcc

SEQ ID NO: 1646413 - DNA, 15 bp, Homo sapiens
aggcaaaaacttcca

SEQ ID NO: 1646414 - DNA, 15 bp, Homo sapiens
ggcaaaaacttccat

SEQ ID NO: 1646415 - DNA, 15 bp, Homo sapiens
gcaaaaacttccatc

SEQ ID NO: 1646416 - DNA, 15 bp, Homo sapiens
caaaaacttccatca

SEQ ID NO: 1646417 - DNA, 15 bp, Homo sapiens
aaaaacttccatcac

SEQ ID NO: 1646418 - DNA, 15 bp, Homo sapiens
aaaacttccatcaca

SEQ ID NO: 1646419 - DNA, 15 bp, Homo sapiens
aaacttccatcacaa

SEQ ID NO: 1646420 - DNA, 15 bp, Homo sapiens
aacttccatcacaac

SEQ ID NO: 1646421 - DNA, 15 bp, Homo sapiens
acttccatcacaaca

SEQ ID NO: 1646422 - DNA, 15 bp, Homo sapiens
cttccatcacaacaa

SEQ ID NO: 1646423 - DNA, 15 bp, Homo sapiens
ttccatcacaacaag

SEQ ID NO: 1646424 - DNA, 15 bp, Homo sapiens
tccatcacaacaaga

SEQ ID NO: 1646425 - DNA, 15 bp, Homo sapiens
ccatcacaacaagaa

SEQ ID NO: 1646426 - DNA, 15 bp, Homo sapiens
catcacaacaagaaa

SEQ ID NO: 1646427 - DNA, 15 bp, Homo sapiens
atcacaacaagaaat

SEQ ID NO: 1646428 - DNA, 15 bp, Homo sapiens
tcacaacaagaaatt

SEQ ID NO: 1646429 - DNA, 15 bp, Homo sapiens
cacaacaagaaattt

SEQ ID NO: 1646430 - DNA, 15 bp, Homo sapiens
acaacaagaaatttc

SEQ ID NO: 1646431 - DNA, 15 bp, Homo sapiens
caacaagaaatttcc

SEQ ID NO: 1646432 - DNA, 15 bp, Homo sapiens
aacaagaaatttccc

SEQ ID NO: 1646433 - DNA, 15 bp, Homo sapiens
acaagaaatttccca

SEQ ID NO: 1646434 - DNA, 15 bp, Homo sapiens
caagaaatttcccat

SEQ ID NO: 1646435 - DNA, 15 bp, Homo sapiens
aagaaatttcccatg

SEQ ID NO: 1646436 - DNA, 15 bp, Homo sapiens
agaaatttcccatgc

SEQ ID NO: 1646437 - DNA, 15 bp, Homo sapiens
gaaatttcccatgcc

SEQ ID NO: 1646438 - DNA, 15 bp, Homo sapiens
aaatttcccatgcct

SEQ ID NO: 1646439 - DNA, 15 bp, Homo sapiens
aatttcccatgcctg

SEQ ID NO: 1646440 - DNA, 15 bp, Homo sapiens
atttcccatgcctgc

SEQ ID NO: 1646441 - DNA, 15 bp, Homo sapiens
tttcccatgcctgct

SEQ ID NO: 1646442 - DNA, 15 bp, Homo sapiens
ttcccatgcctgctc

SEQ ID NO: 1646443 - DNA, 15 bp, Homo sapiens
tcccatgcctgctca

SEQ ID NO: 1646444 - DNA, 15 bp, Homo sapiens
cccatgcctgctcag

SEQ ID NO: 1646445 - DNA, 15 bp, Homo sapiens
ccatgcctgctcaga

SEQ ID NO: 1646446 - DNA, 15 bp, Homo sapiens
catgcctgctcagaa

SEQ ID NO: 1646447 - DNA, 15 bp, Homo sapiens
atgcctgctcagaag

SEQ ID NO: 1646448 - DNA, 15 bp, Homo sapiens
tgcctgctcagaagg

SEQ ID NO: 1646449 - DNA, 15 bp, Homo sapiens
gcctgctcagaaggg

SEQ ID NO: 1646450 - DNA, 15 bp, Homo sapiens
cctgctcagaagggt

SEQ ID NO: 1646451 - DNA, 15 bp, Homo sapiens
ctgctcagaagggta

SEQ ID NO: 1646452 - DNA, 15 bp, Homo sapiens
tgctcagaagggtag

SEQ ID NO: 1646453 - DNA, 15 bp, Homo sapiens
gctcagaagggtagc

SEQ ID NO: 1646454 - DNA, 15 bp, Homo sapiens
ctcagaagggtagcc

SEQ ID NO: 1646455 - DNA, 15 bp, Homo sapiens
tcagaagggtagccc

SEQ ID NO: 1646456 - DNA, 15 bp, Homo sapiens
cagaagggtagcccc

SEQ ID NO: 1646457 - DNA, 15 bp, Homo sapiens
agaagggtagcccct

SEQ ID NO: 1646458 - DNA, 15 bp, Homo sapiens
gaagggtagccccta

SEQ ID NO: 1646459 - DNA, 15 bp, Homo sapiens
aagggtagcccctag

SEQ ID NO: 1646460 - DNA, 15 bp, Homo sapiens
agggtagcccctagc

SEQ ID NO: 1646461 - DNA, 15 bp, Homo sapiens
gggtagcccctagct

SEQ ID NO: 1646462 - DNA, 15 bp, Homo sapiens
ggtagcccctagctc

SEQ ID NO: 1646463 - DNA, 15 bp, Homo sapiens
gtagcccctagctct

SEQ ID NO: 1646464 - DNA, 15 bp, Homo sapiens
tagcccctagctctc

SEQ ID NO: 1646465 - DNA, 15 bp, Homo sapiens
agcccctagctctct

SEQ ID NO: 1646466 - DNA, 15 bp, Homo sapiens
gcccctagctctctg

SEQ ID NO: 1646467 - DNA, 15 bp, Homo sapiens
cccctagctctctgt

SEQ ID NO: 1646468 - DNA, 15 bp, Homo sapiens
ccctagctctctgtg

SEQ ID NO: 1646469 - DNA, 15 bp, Homo sapiens
cctagctctctgtga

SEQ ID NO: 1646470 - DNA, 15 bp, Homo sapiens
ctagctctctgtgaa

SEQ ID NO: 1646471 - DNA, 15 bp, Homo sapiens
tagctctctgtgaat

SEQ ID NO: 1646472 - DNA, 15 bp, Homo sapiens
agctctctgtgaatg

SEQ ID NO: 1646473 - DNA, 15 bp, Homo sapiens
gctctctgtgaatgt

SEQ ID NO: 1646474 - DNA, 15 bp, Homo sapiens
ctctctgtgaatgtg

SEQ ID NO: 1646475 - DNA, 15 bp, Homo sapiens
tctctgtgaatgtgt

SEQ ID NO: 1646476 - DNA, 15 bp, Homo sapiens
ctctgtgaatgtgtt

SEQ ID NO: 1646477 - DNA, 15 bp, Homo sapiens
tctgtgaatgtgttt

SEQ ID NO: 1646478 - DNA, 15 bp, Homo sapiens
ctgtgaatgtgtttt

SEQ ID NO: 1646479 - DNA, 15 bp, Homo sapiens
tgtgaatgtgtttta

SEQ ID NO: 1646480 - DNA, 15 bp, Homo sapiens
gtgaatgtgttttat

SEQ ID NO: 1646481 - DNA, 15 bp, Homo sapiens
tgaatgtgttttatc

SEQ ID NO: 1646482 - DNA, 15 bp, Homo sapiens
gaatgtgttttatcc

SEQ ID NO: 1646483 - DNA, 15 bp, Homo sapiens
aatgtgttttatcca

SEQ ID NO: 1646484 - DNA, 15 bp, Homo sapiens
atgtgttttatccat

SEQ ID NO: 1646485 - DNA, 15 bp, Homo sapiens
tgtgttttatccatt

SEQ ID NO: 1646486 - DNA, 15 bp, Homo sapiens
gtgttttatccattc

SEQ ID NO: 1646487 - DNA, 15 bp, Homo sapiens
tgttttatccattca

SEQ ID NO: 1646488 - DNA, 15 bp, Homo sapiens
gttttatccattcaa

SEQ ID NO: 1646489 - DNA, 15 bp, Homo sapiens
ttttatccattcaac

SEQ ID NO: 1646490 - DNA, 15 bp, Homo sapiens
tttatccattcaact

SEQ ID NO: 1646491 - DNA, 15 bp, Homo sapiens
ttatccattcaactg

SEQ ID NO: 1646492 - DNA, 15 bp, Homo sapiens
tatccattcaactga

SEQ ID NO: 1646493 - DNA, 15 bp, Homo sapiens
atccattcaactgaa

SEQ ID NO: 1646494 - DNA, 15 bp, Homo sapiens
tccattcaactgaaa

SEQ ID NO: 1646495 - DNA, 15 bp, Homo sapiens
ccattcaactgaaaa

SEQ ID NO: 1646496 - DNA, 15 bp, Homo sapiens
cattcaactgaaaat

SEQ ID NO: 1646497 - DNA, 15 bp, Homo sapiens
attcaactgaaaatt

SEQ ID NO: 1646498 - DNA, 15 bp, Homo sapiens
ttcaactgaaaattg

SEQ ID NO: 1646499 - DNA, 15 bp, Homo sapiens
tcaactgaaaattgg

SEQ ID NO: 1646500 - DNA, 15 bp, Homo sapiens
caactgaaaattggt

SEQ ID NO: 1646501 - DNA, 15 bp, Homo sapiens
aactgaaaattggta

SEQ ID NO: 1646502 - DNA, 15 bp, Homo sapiens
actgaaaattggtat

SEQ ID NO: 1646503 - DNA, 15 bp, Homo sapiens
ctgaaaattggtatc

SEQ ID NO: 1646504 - DNA, 15 bp, Homo sapiens
tgaaaattggtatca

SEQ ID NO: 1646505 - DNA, 15 bp, Homo sapiens
gaaaattggtatcaa

SEQ ID NO: 1646506 - DNA, 15 bp, Homo sapiens
aaaattggtatcaag

SEQ ID NO: 1646507 - DNA, 15 bp, Homo sapiens
aaattggtatcaaga

SEQ ID NO: 1646508 - DNA, 15 bp, Homo sapiens
aattggtatcaagaa

SEQ ID NO: 1646509 - DNA, 15 bp, Homo sapiens
attggtatcaagaaa

SEQ ID NO: 1646510 - DNA, 15 bp, Homo sapiens
ttggtatcaagaaag

SEQ ID NO: 1646511 - DNA, 15 bp, Homo sapiens
tggtatcaagaaagt

SEQ ID NO: 1646512 - DNA, 15 bp, Homo sapiens
ggtatcaagaaagtc

SEQ ID NO: 1646513 - DNA, 15 bp, Homo sapiens
gtatcaagaaagtcc

SEQ ID NO: 1646514 - DNA, 15 bp, Homo sapiens
tatcaagaaagtcca

SEQ ID NO: 1646515 - DNA, 15 bp, Homo sapiens
atcaagaaagtccac

SEQ ID NO: 1646516 - DNA, 15 bp, Homo sapiens
tcaagaaagtccact

SEQ ID NO: 1646517 - DNA, 15 bp, Homo sapiens
caagaaagtccactg

SEQ ID NO: 1646518 - DNA, 15 bp, Homo sapiens
aagaaagtccactgg

SEQ ID NO: 1646519 - DNA, 15 bp, Homo sapiens
agaaagtccactggt

SEQ ID NO: 1646520 - DNA, 15 bp, Homo sapiens
gaaagtccactggtt

SEQ ID NO: 1646521 - DNA, 15 bp, Homo sapiens
aaagtccactggtta

SEQ ID NO: 1646522 - DNA, 15 bp, Homo sapiens
aagtccactggttag

SEQ ID NO: 1646523 - DNA, 15 bp, Homo sapiens
agtccactggttagt

SEQ ID NO: 1646524 - DNA, 15 bp, Homo sapiens
gtccactggttagtg

SEQ ID NO: 1646525 - DNA, 15 bp, Homo sapiens
tccactggttagtgt

SEQ ID NO: 1646526 - DNA, 15 bp, Homo sapiens
ccactggttagtgta

SEQ ID NO: 1646527 - DNA, 15 bp, Homo sapiens
cactggttagtgtac

SEQ ID NO: 1646528 - DNA, 15 bp, Homo sapiens
actggttagtgtact

SEQ ID NO: 1646529 - DNA, 15 bp, Homo sapiens
ctggttagtgtacta

SEQ ID NO: 1646530 - DNA, 15 bp, Homo sapiens
tggttagtgtactag

SEQ ID NO: 1646531 - DNA, 15 bp, Homo sapiens
ggttagtgtactagt

SEQ ID NO: 1646532 - DNA, 15 bp, Homo sapiens
gttagtgtactagtc

SEQ ID NO: 1646533 - DNA, 15 bp, Homo sapiens
ttagtgtactagtcc

SEQ ID NO: 1646534 - DNA, 15 bp, Homo sapiens
tagtgtactagtcca

SEQ ID NO: 1646535 - DNA, 15 bp, Homo sapiens
agtgtactagtccat

SEQ ID NO: 1646536 - DNA, 15 bp, Homo sapiens
gtgtactagtccatc

SEQ ID NO: 1646537 - DNA, 15 bp, Homo sapiens
tgtactagtccatca

SEQ ID NO: 1646538 - DNA, 15 bp, Homo sapiens
gtactagtccatcat

SEQ ID NO: 1646539 - DNA, 15 bp, Homo sapiens
tactagtccatcata

SEQ ID NO: 1646540 - DNA, 15 bp, Homo sapiens
actagtccatcatag

SEQ ID NO: 1646541 - DNA, 15 bp, Homo sapiens
ctagtccatcatagc

SEQ ID NO: 1646542 - DNA, 15 bp, Homo sapiens
tagtccatcatagcc

SEQ ID NO: 1646543 - DNA, 15 bp, Homo sapiens
agtccatcatagcct

SEQ ID NO: 1646544 - DNA, 15 bp, Homo sapiens
gtccatcatagccta

SEQ ID NO: 1646545 - DNA, 15 bp, Homo sapiens
tccatcatagcctag

SEQ ID NO: 1646546 - DNA, 15 bp, Homo sapiens
ccatcatagcctaga

SEQ ID NO: 1646547 - DNA, 15 bp, Homo sapiens
catcatagcctagaa

SEQ ID NO: 1646548 - DNA, 15 bp, Homo sapiens
atcatagcctagaaa

SEQ ID NO: 1646549 - DNA, 15 bp, Homo sapiens
tcatagcctagaaaa

SEQ ID NO: 1646550 - DNA, 15 bp, Homo sapiens
catagcctagaaaat

SEQ ID NO: 1646551 - DNA, 15 bp, Homo sapiens
atagcctagaaaatg

SEQ ID NO: 1646552 - DNA, 15 bp, Homo sapiens
tagcctagaaaatga

SEQ ID NO: 1646553 - DNA, 15 bp, Homo sapiens
agcctagaaaatgat

SEQ ID NO: 1646554 - DNA, 15 bp, Homo sapiens
gcctagaaaatgatc

SEQ ID NO: 1646555 - DNA, 15 bp, Homo sapiens
cctagaaaatgatcc

SEQ ID NO: 1646556 - DNA, 15 bp, Homo sapiens
ctagaaaatgatccc

SEQ ID NO: 1646557 - DNA, 15 bp, Homo sapiens
tagaaaatgatccct

SEQ ID NO: 1646558 - DNA, 15 bp, Homo sapiens
agaaaatgatcccta

SEQ ID NO: 1646559 - DNA, 15 bp, Homo sapiens
gaaaatgatccctat

SEQ ID NO: 1646560 - DNA, 15 bp, Homo sapiens
aaaatgatccctatc

SEQ ID NO: 1646561 - DNA, 15 bp, Homo sapiens
aaatgatccctatct

SEQ ID NO: 1646562 - DNA, 15 bp, Homo sapiens
aatgatccctatctg

SEQ ID NO: 1646563 - DNA, 15 bp, Homo sapiens
atgatccctatctgc

SEQ ID NO: 1646564 - DNA, 15 bp, Homo sapiens
tgatccctatctgca

SEQ ID NO: 1646565 - DNA, 15 bp, Homo sapiens
gatccctatctgcag

SEQ ID NO: 1646566 - DNA, 15 bp, Homo sapiens
atccctatctgcaga

SEQ ID NO: 1646567 - DNA, 15 bp, Homo sapiens
tccctatctgcagat

SEQ ID NO: 1646568 - DNA, 15 bp, Homo sapiens
ccctatctgcagatc

SEQ ID NO: 1646569 - DNA, 15 bp, Homo sapiens
cctatctgcagatca

SEQ ID NO: 1646570 - DNA, 15 bp, Homo sapiens
ctatctgcagatcaa

SEQ ID NO: 1646571 - DNA, 15 bp, Homo sapiens
tatctgcagatcaag

SEQ ID NO: 1646572 - DNA, 15 bp, Homo sapiens
atctgcagatcaaga

SEQ ID NO: 1646573 - DNA, 15 bp, Homo sapiens
tctgcagatcaagat

SEQ ID NO: 1646574 - DNA, 15 bp, Homo sapiens
ctgcagatcaagatt

SEQ ID NO: 1646575 - DNA, 15 bp, Homo sapiens
tgcagatcaagattt

SEQ ID NO: 1646576 - DNA, 15 bp, Homo sapiens
gcagatcaagatttt

SEQ ID NO: 1646577 - DNA, 15 bp, Homo sapiens
cagatcaagattttc

SEQ ID NO: 1646578 - DNA, 15 bp, Homo sapiens
agatcaagattttct

SEQ ID NO: 1646579 - DNA, 15 bp, Homo sapiens
gatcaagattttctc

SEQ ID NO: 1646580 - DNA, 15 bp, Homo sapiens
atcaagattttctca

SEQ ID NO: 1646581 - DNA, 15 bp, Homo sapiens
tcaagattttctcat

SEQ ID NO: 1646582 - DNA, 15 bp, Homo sapiens
caagattttctcatt

SEQ ID NO: 1646583 - DNA, 15 bp, Homo sapiens
aagattttctcatta

SEQ ID NO: 1646584 - DNA, 15 bp, Homo sapiens
agattttctcattag

SEQ ID NO: 1646585 - DNA, 15 bp, Homo sapiens
gattttctcattaga

SEQ ID NO: 1646586 - DNA, 15 bp, Homo sapiens
attttctcattagaa

SEQ ID NO: 1646587 - DNA, 15 bp, Homo sapiens
ttttctcattagaac

SEQ ID NO: 1646588 - DNA, 15 bp, Homo sapiens
tctcattagaacaat

SEQ ID NO: 1646589 - DNA, 15 bp, Homo sapiens
ctcattagaacaatg

SEQ ID NO: 1646590 - DNA, 15 bp, Homo sapiens
tcattagaacaatga

SEQ ID NO: 1646591 - DNA, 15 bp, Homo sapiens
cattagaacaatgaa

SEQ ID NO: 1646592 - DNA, 15 bp, Homo sapiens
attagaacaatgaat

SEQ ID NO: 1646593 - DNA, 15 bp, Homo sapiens
ttagaacaatgaatt

SEQ ID NO: 1646594 - DNA, 15 bp, Homo sapiens
tagaacaatgaatta

SEQ ID NO: 1646595 - DNA, 15 bp, Homo sapiens
agaacaatgaattat

SEQ ID NO: 1646596 - DNA, 15 bp, Homo sapiens
gaacaatgaattatc

SEQ ID NO: 1646597 - DNA, 15 bp, Homo sapiens
aacaatgaattatcc

SEQ ID NO: 1646598 - DNA, 15 bp, Homo sapiens
acaatgaattatcca

SEQ ID NO: 1646599 - DNA, 15 bp, Homo sapiens
caatgaattatccag

SEQ ID NO: 1646600 - DNA, 15 bp, Homo sapiens
aatgaattatccagc

SEQ ID NO: 1646601 - DNA, 15 bp, Homo sapiens
atgaattatccagca

SEQ ID NO: 1646602 - DNA, 15 bp, Homo sapiens
tgaattatccagcat

SEQ ID NO: 1646603 - DNA, 15 bp, Homo sapiens
gaattatccagcatt

SEQ ID NO: 1646604 - DNA, 15 bp, Homo sapiens
aattatccagcattc

SEQ ID NO: 1646605 - DNA, 15 bp, Homo sapiens
attatccagcattca

SEQ ID NO: 1646606 - DNA, 15 bp, Homo sapiens
ttatccagcattcag

SEQ ID NO: 1646607 - DNA, 15 bp, Homo sapiens
tatccagcattcaga

SEQ ID NO: 1646608 - DNA, 15 bp, Homo sapiens
atccagcattcagat

SEQ ID NO: 1646609 - DNA, 15 bp, Homo sapiens
tccagcattcagatc

SEQ ID NO: 1646610 - DNA, 15 bp, Homo sapiens
ccagcattcagatct

SEQ ID NO: 1646611 - DNA, 15 bp, Homo sapiens
cagcattcagatctt

SEQ ID NO: 1646612 - DNA, 15 bp, Homo sapiens
agcattcagatcttt

SEQ ID NO: 1646613 - DNA, 15 bp, Homo sapiens
gcattcagatctttc

SEQ ID NO: 1646614 - DNA, 15 bp, Homo sapiens
cattcagatctttct

SEQ ID NO: 1646615 - DNA, 15 bp, Homo sapiens
attcagatctttcta

SEQ ID NO: 1646616 - DNA, 15 bp, Homo sapiens
ttcagatctttctag

SEQ ID NO: 1646617 - DNA, 15 bp, Homo sapiens
tcagatctttctagt

SEQ ID NO: 1646618 - DNA, 15 bp, Homo sapiens
cagatctttctagtc

SEQ ID NO: 1646619 - DNA, 15 bp, Homo sapiens
agatctttctagtca

SEQ ID NO: 1646620 - DNA, 15 bp, Homo sapiens
gatctttctagtcac

SEQ ID NO: 1646621 - DNA, 15 bp, Homo sapiens
atctttctagtcacc

SEQ ID NO: 1646622 - DNA, 15 bp, Homo sapiens
tctttctagtcacct

SEQ ID NO: 1646623 - DNA, 15 bp, Homo sapiens
ctttctagtcacctt

SEQ ID NO: 1646624 - DNA, 15 bp, Homo sapiens
tttctagtcacctta

SEQ ID NO: 1646625 - DNA, 15 bp, Homo sapiens
ttctagtcaccttag

SEQ ID NO: 1646626 - DNA, 15 bp, Homo sapiens
tctagtcaccttaga

SEQ ID NO: 1646627 - DNA, 15 bp, Homo sapiens
ctagtcaccttagaa

SEQ ID NO: 1646628 - DNA, 15 bp, Homo sapiens
tagtcaccttagaac

SEQ ID NO: 1646629 - DNA, 15 bp, Homo sapiens
agtcaccttagaact

SEQ ID NO: 1646630 - DNA, 15 bp, Homo sapiens
gtcaccttagaactt

SEQ ID NO: 1646631 - DNA, 15 bp, Homo sapiens
tcaccttagaacttt

SEQ ID NO: 1646632 - DNA, 15 bp, Homo sapiens
caccttagaactttt

SEQ ID NO: 1646633 - DNA, 15 bp, Homo sapiens
accttagaacttttt

SEQ ID NO: 1646634 - DNA, 15 bp, Homo sapiens
ccttagaactttttg

SEQ ID NO: 1646635 - DNA, 15 bp, Homo sapiens
cttagaactttttgg

SEQ ID NO: 1646636 - DNA, 15 bp, Homo sapiens
ttagaactttttggt

SEQ ID NO: 1646637 - DNA, 15 bp, Homo sapiens
tagaactttttggtt

SEQ ID NO: 1646638 - DNA, 15 bp, Homo sapiens
agaactttttggtta

SEQ ID NO: 1646639 - DNA, 15 bp, Homo sapiens
gaactttttggttaa

SEQ ID NO: 1646640 - DNA, 15 bp, Homo sapiens
aactttttggttaaa

SEQ ID NO: 1646641 - DNA, 15 bp, Homo sapiens
actttttggttaaaa

SEQ ID NO: 1646642 - DNA, 15 bp, Homo sapiens
ctttttggttaaaag

SEQ ID NO: 1646643 - DNA, 15 bp, Homo sapiens
tttttggttaaaagt

SEQ ID NO: 1646644 - DNA, 15 bp, Homo sapiens
ttttggttaaaagta

SEQ ID NO: 1646645 - DNA, 15 bp, Homo sapiens
tttggttaaaagtac

SEQ ID NO: 1646646 - DNA, 15 bp, Homo sapiens
ttggttaaaagtacc

SEQ ID NO: 1646647 - DNA, 15 bp, Homo sapiens
tggttaaaagtaccc

SEQ ID NO: 1646648 - DNA, 15 bp, Homo sapiens
ggttaaaagtaccca

SEQ ID NO: 1646649 - DNA, 15 bp, Homo sapiens
gttaaaagtacccag

SEQ ID NO: 1646650 - DNA, 15 bp, Homo sapiens
ttaaaagtacccagg

SEQ ID NO: 1646651 - DNA, 15 bp, Homo sapiens
taaaagtacccaggc

SEQ ID NO: 1646652 - DNA, 15 bp, Homo sapiens
aaaagtacccaggct

SEQ ID NO: 1646653 - DNA, 15 bp, Homo sapiens
aaagtacccaggctt

SEQ ID NO: 1646654 - DNA, 15 bp, Homo sapiens
aagtacccaggcttg

SEQ ID NO: 1646655 - DNA, 15 bp, Homo sapiens
agtacccaggcttga

SEQ ID NO: 1646656 - DNA, 15 bp, Homo sapiens
gtacccaggcttgat

SEQ ID NO: 1646657 - DNA, 15 bp, Homo sapiens
tacccaggcttgatt

SEQ ID NO: 1646658 - DNA, 15 bp, Homo sapiens
acccaggcttgatta

SEQ ID NO: 1646659 - DNA, 15 bp, Homo sapiens
cccaggcttgattat

SEQ ID NO: 1646660 - DNA, 15 bp, Homo sapiens
ccaggcttgattatt

SEQ ID NO: 1646661 - DNA, 15 bp, Homo sapiens
caggcttgattattt

SEQ ID NO: 1646662 - DNA, 15 bp, Homo sapiens
aggcttgattatttc

SEQ ID NO: 1646663 - DNA, 15 bp, Homo sapiens
ggcttgattatttca

SEQ ID NO: 1646664 - DNA, 15 bp, Homo sapiens
gcttgattatttcat

SEQ ID NO: 1646665 - DNA, 15 bp, Homo sapiens
cttgattatttcatg

SEQ ID NO: 1646666 - DNA, 15 bp, Homo sapiens
ttgattatttcatgc

SEQ ID NO: 1646667 - DNA, 15 bp, Homo sapiens
tgattatttcatgca

SEQ ID NO: 1646668 - DNA, 15 bp, Homo sapiens
gattatttcatgcaa

SEQ ID NO: 1646669 - DNA, 15 bp, Homo sapiens
attatttcatgcaaa

SEQ ID NO: 1646670 - DNA, 15 bp, Homo sapiens
ttatttcatgcaaat

SEQ ID NO: 1646671 - DNA, 15 bp, Homo sapiens
tatttcatgcaaatt

SEQ ID NO: 1646672 - DNA, 15 bp, Homo sapiens
atttcatgcaaattc

SEQ ID NO: 1646673 - DNA, 15 bp, Homo sapiens
tttcatgcaaattct

SEQ ID NO: 1646674 - DNA, 15 bp, Homo sapiens
ttcatgcaaattcta

SEQ ID NO: 1646675 - DNA, 15 bp, Homo sapiens
tcatgcaaattctat

SEQ ID NO: 1646676 - DNA, 15 bp, Homo sapiens
catgcaaattctata

SEQ ID NO: 1646677 - DNA, 15 bp, Homo sapiens
atgcaaattctatat

SEQ ID NO: 1646678 - DNA, 15 bp, Homo sapiens
tgcaaattctatatt

SEQ ID NO: 1646679 - DNA, 15 bp, Homo sapiens
gcaaattctatattt

SEQ ID NO: 1646680 - DNA, 15 bp, Homo sapiens
caaattctatatttt

SEQ ID NO: 1646681 - DNA, 15 bp, Homo sapiens
aaattctatatttta

SEQ ID NO: 1646682 - DNA, 15 bp, Homo sapiens
aattctatattttac

SEQ ID NO: 1646683 - DNA, 15 bp, Homo sapiens
attctatattttaca

SEQ ID NO: 1646684 - DNA, 15 bp, Homo sapiens
ttctatattttacat

SEQ ID NO: 1646685 - DNA, 15 bp, Homo sapiens
tctatattttacatt

SEQ ID NO: 1646686 - DNA, 15 bp, Homo sapiens
ctatattttacattc

SEQ ID NO: 1646687 - DNA, 15 bp, Homo sapiens
tatattttacattct

SEQ ID NO: 1646688 - DNA, 15 bp, Homo sapiens
atattttacattctt

SEQ ID NO: 1646689 - DNA, 15 bp, Homo sapiens
tattttacattcttg

SEQ ID NO: 1646690 - DNA, 15 bp, Homo sapiens
attttacattcttgg

SEQ ID NO: 1646691 - DNA, 15 bp, Homo sapiens
ttttacattcttgga

SEQ ID NO: 1646692 - DNA, 15 bp, Homo sapiens
tacattcttggaaag

SEQ ID NO: 1646693 - DNA, 15 bp, Homo sapiens
acattcttggaaagt

SEQ ID NO: 1646694 - DNA, 15 bp, Homo sapiens
cattcttggaaagtc

SEQ ID NO: 1646695 - DNA, 15 bp, Homo sapiens
attcttggaaagtct

SEQ ID NO: 1646696 - DNA, 15 bp, Homo sapiens
ttcttggaaagtcta

SEQ ID NO: 1646697 - DNA, 15 bp, Homo sapiens
tcttggaaagtctat

SEQ ID NO: 1646698 - DNA, 15 bp, Homo sapiens
cttggaaagtctata

SEQ ID NO: 1646699 - DNA, 15 bp, Homo sapiens
ttggaaagtctatat

SEQ ID NO: 1646700 - DNA, 15 bp, Homo sapiens
tggaaagtctatatg

SEQ ID NO: 1646701 - DNA, 15 bp, Homo sapiens
ggaaagtctatatga

SEQ ID NO: 1646702 - DNA, 15 bp, Homo sapiens
gaaagtctatatgaa

SEQ ID NO: 1646703 - DNA, 15 bp, Homo sapiens
aaagtctatatgaaa

SEQ ID NO: 1646704 - DNA, 15 bp, Homo sapiens
aagtctatatgaaaa

SEQ ID NO: 1646705 - DNA, 15 bp, Homo sapiens
agtctatatgaaaaa

SEQ ID NO: 1646706 - DNA, 15 bp, Homo sapiens
gtctatatgaaaaac

SEQ ID NO: 1646707 - DNA, 15 bp, Homo sapiens
tctatatgaaaaaca

SEQ ID NO: 1646708 - DNA, 15 bp, Homo sapiens
ctatatgaaaaacaa

SEQ ID NO: 1646709 - DNA, 15 bp, Homo sapiens
tatatgaaaaacaaa

SEQ ID NO: 1646710 - DNA, 15 bp, Homo sapiens
atatgaaaaacaaaa

SEQ ID NO: 1646711 - DNA, 15 bp, Homo sapiens
tatgaaaaacaaaaa

SEQ ID NO: 1646712 - DNA, 15 bp, Homo sapiens
atgaaaaacaaaaat

SEQ ID NO: 1646713 - DNA, 15 bp, Homo sapiens
aaaaacaaaaataac

SEQ ID NO: 1646714 - DNA, 15 bp, Homo sapiens
aaaacaaaaataaca

SEQ ID NO: 1646715 - DNA, 15 bp, Homo sapiens
aaacaaaaataacat

SEQ ID NO: 1646716 - DNA, 15 bp, Homo sapiens
aacaaaaataacatc

SEQ ID NO: 1646717 - DNA, 15 bp, Homo sapiens
acaaaaataacatct

SEQ ID NO: 1646718 - DNA, 15 bp, Homo sapiens
caaaaataacatctt

SEQ ID NO: 1646719 - DNA, 15 bp, Homo sapiens
aaaaataacatcttc

SEQ ID NO: 1646720 - DNA, 15 bp, Homo sapiens
aaaataacatcttca

SEQ ID NO: 1646721 - DNA, 15 bp, Homo sapiens
aaataacatcttcag

SEQ ID NO: 1646722 - DNA, 15 bp, Homo sapiens
aataacatcttcagt

SEQ ID NO: 1646723 - DNA, 15 bp, Homo sapiens
ataacatcttcagtt

SEQ ID NO: 1646724 - DNA, 15 bp, Homo sapiens
taacatcttcagttt

SEQ ID NO: 1646725 - DNA, 15 bp, Homo sapiens
aacatcttcagtttt

SEQ ID NO: 1646726 - DNA, 15 bp, Homo sapiens
acatcttcagttttt

SEQ ID NO: 1646727 - DNA, 15 bp, Homo sapiens
catcttcagtttttc

SEQ ID NO: 1646728 - DNA, 15 bp, Homo sapiens
atcttcagtttttct

SEQ ID NO: 1646729 - DNA, 15 bp, Homo sapiens
tcttcagtttttctc

SEQ ID NO: 1646730 - DNA, 15 bp, Homo sapiens
cttcagtttttctcc

SEQ ID NO: 1646731 - DNA, 15 bp, Homo sapiens
ttcagtttttctccc

SEQ ID NO: 1646732 - DNA, 15 bp, Homo sapiens
tcagtttttctccca

SEQ ID NO: 1646733 - DNA, 15 bp, Homo sapiens
cagtttttctcccac

SEQ ID NO: 1646734 - DNA, 15 bp, Homo sapiens
agtttttctcccact

SEQ ID NO: 1646735 - DNA, 15 bp, Homo sapiens
gtttttctcccactg

SEQ ID NO: 1646736 - DNA, 15 bp, Homo sapiens
tttttctcccactgg

SEQ ID NO: 1646737 - DNA, 15 bp, Homo sapiens
ttttctcccactggg

SEQ ID NO: 1646738 - DNA, 15 bp, Homo sapiens
tttctcccactgggt

SEQ ID NO: 1646739 - DNA, 15 bp, Homo sapiens
ttctcccactgggtc

SEQ ID NO: 1646740 - DNA, 15 bp, Homo sapiens
tctcccactgggtca

SEQ ID NO: 1646741 - DNA, 15 bp, Homo sapiens
ctcccactgggtcac

SEQ ID NO: 1646742 - DNA, 15 bp, Homo sapiens
tcccactgggtcacc

SEQ ID NO: 1646743 - DNA, 15 bp, Homo sapiens
cccactgggtcacct

SEQ ID NO: 1646744 - DNA, 15 bp, Homo sapiens
ccactgggtcacctc

SEQ ID NO: 1646745 - DNA, 15 bp, Homo sapiens
cactgggtcacctca

SEQ ID NO: 1646746 - DNA, 15 bp, Homo sapiens
actgggtcacctcaa

SEQ ID NO: 1646747 - DNA, 15 bp, Homo sapiens
ctgggtcacctcaag

SEQ ID NO: 1646748 - DNA, 15 bp, Homo sapiens
tgggtcacctcaagg

SEQ ID NO: 1646749 - DNA, 15 bp, Homo sapiens
gggtcacctcaagga

SEQ ID NO: 1646750 - DNA, 15 bp, Homo sapiens
ggtcacctcaaggat

SEQ ID NO: 1646751 - DNA, 15 bp, Homo sapiens
gtcacctcaaggatc

SEQ ID NO: 1646752 - DNA, 15 bp, Homo sapiens
tcacctcaaggatca

SEQ ID NO: 1646753 - DNA, 15 bp, Homo sapiens
cacctcaaggatcag

SEQ ID NO: 1646754 - DNA, 15 bp, Homo sapiens
acctcaaggatcaga

SEQ ID NO: 1646755 - DNA, 15 bp, Homo sapiens
cctcaaggatcagag

SEQ ID NO: 1646756 - DNA, 15 bp, Homo sapiens
ctcaaggatcagagg

SEQ ID NO: 1646757 - DNA, 15 bp, Homo sapiens
tcaaggatcagaggc

SEQ ID NO: 1646758 - DNA, 15 bp, Homo sapiens
caaggatcagaggcc

SEQ ID NO: 1646759 - DNA, 15 bp, Homo sapiens
aaggatcagaggcca

SEQ ID NO: 1646760 - DNA, 15 bp, Homo sapiens
aggatcagaggccag

SEQ ID NO: 1646761 - DNA, 15 bp, Homo sapiens
ggatcagaggccagg

SEQ ID NO: 1646762 - DNA, 15 bp, Homo sapiens
gatcagaggccagga

SEQ ID NO: 1646763 - DNA, 15 bp, Homo sapiens
atcagaggccaggaa

SEQ ID NO: 1646764 - DNA, 15 bp, Homo sapiens
tcagaggccaggaaa

SEQ ID NO: 1646765 - DNA, 15 bp, Homo sapiens
cagaggccaggaaaa

SEQ ID NO: 1646766 - DNA, 15 bp, Homo sapiens
agaggccaggaaaaa

SEQ ID NO: 1646767 - DNA, 15 bp, Homo sapiens
gaggccaggaaaaaa

SEQ ID NO: 1646768 - DNA, 15 bp, Homo sapiens
aggccaggaaaaaaa

SEQ ID NO: 1646769 - DNA, 15 bp, Homo sapiens
ggccaggaaaaaaaa

SEQ ID NO: 1646770 - DNA, 15 bp, Homo sapiens
gccaggaaaaaaaaa

SEQ ID NO: 1646771 - DNA, 15 bp, Homo sapiens
ccaggaaaaaaaaaa

SEQ ID NO: 1646772 - DNA, 15 bp, Homo sapiens
aaaaaaaaagactcc

SEQ ID NO: 1646773 - DNA, 15 bp, Homo sapiens
aaaaaaaagactccc

SEQ ID NO: 1646774 - DNA, 15 bp, Homo sapiens
aaaaaaagactccct

SEQ ID NO: 1646775 - DNA, 15 bp, Homo sapiens
aaaaaagactccctg

SEQ ID NO: 1646776 - DNA, 15 bp, Homo sapiens
aaaaagactccctgg

SEQ ID NO: 1646777 - DNA, 15 bp, Homo sapiens
aaaagactccctgga

SEQ ID NO: 1646778 - DNA, 15 bp, Homo sapiens
aaagactccctggat

SEQ ID NO: 1646779 - DNA, 15 bp, Homo sapiens
aagactccctggatc

SEQ ID NO: 1646780 - DNA, 15 bp, Homo sapiens
agactccctggatct

SEQ ID NO: 1646781 - DNA, 15 bp, Homo sapiens
gactccctggatctc

SEQ ID NO: 1646782 - DNA, 15 bp, Homo sapiens
actccctggatctct

SEQ ID NO: 1646783 - DNA, 15 bp, Homo sapiens
ctccctggatctctg

SEQ ID NO: 1646784 - DNA, 15 bp, Homo sapiens
tccctggatctctga

SEQ ID NO: 1646785 - DNA, 15 bp, Homo sapiens
ccctggatctctgaa

SEQ ID NO: 1646786 - DNA, 15 bp, Homo sapiens
cctggatctctgaat

SEQ ID NO: 1646787 - DNA, 15 bp, Homo sapiens
ctggatctctgaata

SEQ ID NO: 1646788 - DNA, 15 bp, Homo sapiens
tggatctctgaatat

SEQ ID NO: 1646789 - DNA, 15 bp, Homo sapiens
ggatctctgaatata

SEQ ID NO: 1646790 - DNA, 15 bp, Homo sapiens
gatctctgaatatat

SEQ ID NO: 1646791 - DNA, 15 bp, Homo sapiens
atctctgaatatatg

SEQ ID NO: 1646792 - DNA, 15 bp, Homo sapiens
tctctgaatatatgc

SEQ ID NO: 1646793 - DNA, 15 bp, Homo sapiens
ctctgaatatatgca

SEQ ID NO: 1646794 - DNA, 15 bp, Homo sapiens
tctgaatatatgcaa

SEQ ID NO: 1646795 - DNA, 15 bp, Homo sapiens
ctgaatatatgcaaa

SEQ ID NO: 1646796 - DNA, 15 bp, Homo sapiens
tgaatatatgcaaaa

SEQ ID NO: 1646797 - DNA, 15 bp, Homo sapiens
gaatatatgcaaaaa

SEQ ID NO: 1646798 - DNA, 15 bp, Homo sapiens
aatatatgcaaaaag

SEQ ID NO: 1646799 - DNA, 15 bp, Homo sapiens
atatatgcaaaaaga

SEQ ID NO: 1646800 - DNA, 15 bp, Homo sapiens
tatatgcaaaaagaa

SEQ ID NO: 1646801 - DNA, 15 bp, Homo sapiens
atatgcaaaaagaag

SEQ ID NO: 1646802 - DNA, 15 bp, Homo sapiens
tatgcaaaaagaagg

SEQ ID NO: 1646803 - DNA, 15 bp, Homo sapiens
atgcaaaaagaaggc

SEQ ID NO: 1646804 - DNA, 15 bp, Homo sapiens
tgcaaaaagaaggcc

SEQ ID NO: 1646805 - DNA, 15 bp, Homo sapiens
gcaaaaagaaggccc

SEQ ID NO: 1646806 - DNA, 15 bp, Homo sapiens
caaaaagaaggcccc

SEQ ID NO: 1646807 - DNA, 15 bp, Homo sapiens
aaaaagaaggcccca

SEQ ID NO: 1646808 - DNA, 15 bp, Homo sapiens
aaaagaaggccccat

SEQ ID NO: 1646809 - DNA, 15 bp, Homo sapiens
aaagaaggccccatt

SEQ ID NO: 1646810 - DNA, 15 bp, Homo sapiens
aagaaggccccattt

SEQ ID NO: 1646811 - DNA, 15 bp, Homo sapiens
agaaggccccattta

SEQ ID NO: 1646812 - DNA, 15 bp, Homo sapiens
gaaggccccatttag

SEQ ID NO: 1646813 - DNA, 15 bp, Homo sapiens
aaggccccatttagt

SEQ ID NO: 1646814 - DNA, 15 bp, Homo sapiens
aggccccatttagtg

SEQ ID NO: 1646815 - DNA, 15 bp, Homo sapiens
ggccccatttagtgg

SEQ ID NO: 1646816 - DNA, 15 bp, Homo sapiens
gccccatttagtgga

SEQ ID NO: 1646817 - DNA, 15 bp, Homo sapiens
ccccatttagtggag

SEQ ID NO: 1646818 - DNA, 15 bp, Homo sapiens
cccatttagtggagc

SEQ ID NO: 1646819 - DNA, 15 bp, Homo sapiens
ccatttagtggagcc

SEQ ID NO: 1646820 - DNA, 15 bp, Homo sapiens
catttagtggagcca

SEQ ID NO: 1646821 - DNA, 15 bp, Homo sapiens
atttagtggagccag

SEQ ID NO: 1646822 - DNA, 15 bp, Homo sapiens
tttagtggagccagc

SEQ ID NO: 1646823 - DNA, 15 bp, Homo sapiens
ttagtggagccagca

SEQ ID NO: 1646824 - DNA, 15 bp, Homo sapiens
tagtggagccagcaa

SEQ ID NO: 1646825 - DNA, 15 bp, Homo sapiens
agtggagccagcaat

SEQ ID NO: 1646826 - DNA, 15 bp, Homo sapiens
gtggagccagcaatc

SEQ ID NO: 1646827 - DNA, 15 bp, Homo sapiens
tggagccagcaatcc

SEQ ID NO: 1646828 - DNA, 15 bp, Homo sapiens
ggagccagcaatcct

SEQ ID NO: 1646829 - DNA, 15 bp, Homo sapiens
gagccagcaatcctg

SEQ ID NO: 1646830 - DNA, 15 bp, Homo sapiens
agccagcaatcctgt

SEQ ID NO: 1646831 - DNA, 15 bp, Homo sapiens
gccagcaatcctgtt

SEQ ID NO: 1646832 - DNA, 15 bp, Homo sapiens
ccagcaatcctgttc

SEQ ID NO: 1646833 - DNA, 15 bp, Homo sapiens
cagcaatcctgttca

SEQ ID NO: 1646834 - DNA, 15 bp, Homo sapiens
agcaatcctgttcag

SEQ ID NO: 1646835 - DNA, 15 bp, Homo sapiens
gcaatcctgttcagt

SEQ ID NO: 1646836 - DNA, 15 bp, Homo sapiens
caatcctgttcagtc

SEQ ID NO: 1646837 - DNA, 15 bp, Homo sapiens
aatcctgttcagtca

SEQ ID NO: 1646838 - DNA, 15 bp, Homo sapiens
atcctgttcagtcaa

SEQ ID NO: 1646839 - DNA, 15 bp, Homo sapiens
tcctgttcagtcaac

SEQ ID NO: 1646840 - DNA, 15 bp, Homo sapiens
cctgttcagtcaaca

SEQ ID NO: 1646841 - DNA, 15 bp, Homo sapiens
ctgttcagtcaacaa

SEQ ID NO: 1646842 - DNA, 15 bp, Homo sapiens
tgttcagtcaacaag

SEQ ID NO: 1646843 - DNA, 15 bp, Homo sapiens
gttcagtcaacaagt

SEQ ID NO: 1646844 - DNA, 15 bp, Homo sapiens
ttcagtcaacaagta

SEQ ID NO: 1646845 - DNA, 15 bp, Homo sapiens
tcagtcaacaagtat

SEQ ID NO: 1646846 - DNA, 15 bp, Homo sapiens
cagtcaacaagtatt

SEQ ID NO: 1646847 - DNA, 15 bp, Homo sapiens
agtcaacaagtattt

SEQ ID NO: 1646848 - DNA, 15 bp, Homo sapiens
gtcaacaagtatttt

SEQ ID NO: 1646849 - DNA, 15 bp, Homo sapiens
tcaacaagtatttta

SEQ ID NO: 1646850 - DNA, 15 bp, Homo sapiens
caacaagtattttaa

SEQ ID NO: 1646851 - DNA, 15 bp, Homo sapiens
aacaagtattttaac

SEQ ID NO: 1646852 - DNA, 15 bp, Homo sapiens
acaagtattttaact

SEQ ID NO: 1646853 - DNA, 15 bp, Homo sapiens
caagtattttaactc

SEQ ID NO: 1646854 - DNA, 15 bp, Homo sapiens
aagtattttaactct

SEQ ID NO: 1646855 - DNA, 15 bp, Homo sapiens
agtattttaactctc

SEQ ID NO: 1646856 - DNA, 15 bp, Homo sapiens
gtattttaactctca

SEQ ID NO: 1646857 - DNA, 15 bp, Homo sapiens
tattttaactctcag

SEQ ID NO: 1646858 - DNA, 15 bp, Homo sapiens
attttaactctcagt

SEQ ID NO: 1646859 - DNA, 15 bp, Homo sapiens
ttttaactctcagtc

SEQ ID NO: 1646860 - DNA, 15 bp, Homo sapiens
tttaactctcagtcc

SEQ ID NO: 1646861 - DNA, 15 bp, Homo sapiens
ttaactctcagtcca

SEQ ID NO: 1646862 - DNA, 15 bp, Homo sapiens
taactctcagtccaa

SEQ ID NO: 1646863 - DNA, 15 bp, Homo sapiens
aactctcagtccaac

SEQ ID NO: 1646864 - DNA, 15 bp, Homo sapiens
actctcagtccaaca

SEQ ID NO: 1646865 - DNA, 15 bp, Homo sapiens
ctctcagtccaacat

SEQ ID NO: 1646866 - DNA, 15 bp, Homo sapiens
tctcagtccaacatt

SEQ ID NO: 1646867 - DNA, 15 bp, Homo sapiens
ctcagtccaacatta

SEQ ID NO: 1646868 - DNA, 15 bp, Homo sapiens
tcagtccaacattat

SEQ ID NO: 1646869 - DNA, 15 bp, Homo sapiens
cagtccaacattatt

SEQ ID NO: 1646870 - DNA, 15 bp, Homo sapiens
agtccaacattattt

SEQ ID NO: 1646871 - DNA, 15 bp, Homo sapiens
gtccaacattatttg

SEQ ID NO: 1646872 - DNA, 15 bp, Homo sapiens
tccaacattatttga

SEQ ID NO: 1646873 - DNA, 15 bp, Homo sapiens
ccaacattatttgaa

SEQ ID NO: 1646874 - DNA, 15 bp, Homo sapiens
caacattatttgaat

SEQ ID NO: 1646875 - DNA, 15 bp, Homo sapiens
aacattatttgaatt

SEQ ID NO: 1646876 - DNA, 15 bp, Homo sapiens
acattatttgaattg

SEQ ID NO: 1646877 - DNA, 15 bp, Homo sapiens
cattatttgaattga

SEQ ID NO: 1646878 - DNA, 15 bp, Homo sapiens
attatttgaattgag

SEQ ID NO: 1646879 - DNA, 15 bp, Homo sapiens
ttatttgaattgagc

SEQ ID NO: 1646880 - DNA, 15 bp, Homo sapiens
tatttgaattgagca

SEQ ID NO: 1646881 - DNA, 15 bp, Homo sapiens
atttgaattgagcac

SEQ ID NO: 1646882 - DNA, 15 bp, Homo sapiens
tttgaattgagcacc

SEQ ID NO: 1646883 - DNA, 15 bp, Homo sapiens
ttgaattgagcacct

SEQ ID NO: 1646884 - DNA, 15 bp, Homo sapiens
tgaattgagcacctc

SEQ ID NO: 1646885 - DNA, 15 bp, Homo sapiens
gaattgagcacctca

SEQ ID NO: 1646886 - DNA, 15 bp, Homo sapiens
aattgagcacctcaa

SEQ ID NO: 1646887 - DNA, 15 bp, Homo sapiens
attgagcacctcaag

SEQ ID NO: 1646888 - DNA, 15 bp, Homo sapiens
ttgagcacctcaagc

SEQ ID NO: 1646889 - DNA, 15 bp, Homo sapiens
tgagcacctcaagca

SEQ ID NO: 1646890 - DNA, 15 bp, Homo sapiens
gagcacctcaagcat

SEQ ID NO: 1646891 - DNA, 15 bp, Homo sapiens
agcacctcaagcatg

SEQ ID NO: 1646892 - DNA, 15 bp, Homo sapiens
gcacctcaagcatgc

SEQ ID NO: 1646893 - DNA, 15 bp, Homo sapiens
cacctcaagcatgct

SEQ ID NO: 1646894 - DNA, 15 bp, Homo sapiens
acctcaagcatgctt

SEQ ID NO: 1646895 - DNA, 15 bp, Homo sapiens
cctcaagcatgctta

SEQ ID NO: 1646896 - DNA, 15 bp, Homo sapiens
ctcaagcatgcttag

SEQ ID NO: 1646897 - DNA, 15 bp, Homo sapiens
tcaagcatgcttagc

SEQ ID NO: 1646898 - DNA, 15 bp, Homo sapiens
caagcatgcttagca

SEQ ID NO: 1646899 - DNA, 15 bp, Homo sapiens
aagcatgcttagcaa

SEQ ID NO: 1646900 - DNA, 15 bp, Homo sapiens
agcatgcttagcaat

SEQ ID NO: 1646901 - DNA, 15 bp, Homo sapiens
gcatgcttagcaatg

SEQ ID NO: 1646902 - DNA, 15 bp, Homo sapiens
catgcttagcaatgt

SEQ ID NO: 1646903 - DNA, 15 bp, Homo sapiens
atgcttagcaatgtt

SEQ ID NO: 1646904 - DNA, 15 bp, Homo sapiens
tgcttagcaatgttc

SEQ ID NO: 1646905 - DNA, 15 bp, Homo sapiens
gcttagcaatgttct

SEQ ID NO: 1646906 - DNA, 15 bp, Homo sapiens
cttagcaatgttcta

SEQ ID NO: 1646907 - DNA, 15 bp, Homo sapiens
ttagcaatgttctaa

SEQ ID NO: 1646908 - DNA, 15 bp, Homo sapiens
tagcaatgttctaat

SEQ ID NO: 1646909 - DNA, 15 bp, Homo sapiens
agcaatgttctaatc

SEQ ID NO: 1646910 - DNA, 15 bp, Homo sapiens
gcaatgttctaatca

SEQ ID NO: 1646911 - DNA, 15 bp, Homo sapiens
caatgttctaatcac

SEQ ID NO: 1646912 - DNA, 15 bp, Homo sapiens
aatgttctaatcact

SEQ ID NO: 1646913 - DNA, 15 bp, Homo sapiens
atgttctaatcacta

SEQ ID NO: 1646914 - DNA, 15 bp, Homo sapiens
tgttctaatcactat

SEQ ID NO: 1646915 - DNA, 15 bp, Homo sapiens
gttctaatcactatg

SEQ ID NO: 1646916 - DNA, 15 bp, Homo sapiens
ttctaatcactatgg

SEQ ID NO: 1646917 - DNA, 15 bp, Homo sapiens
tctaatcactatgga

SEQ ID NO: 1646918 - DNA, 15 bp, Homo sapiens
ctaatcactatggac

SEQ ID NO: 1646919 - DNA, 15 bp, Homo sapiens
taatcactatggaca

SEQ ID NO: 1646920 - DNA, 15 bp, Homo sapiens
aatcactatggacag

SEQ ID NO: 1646921 - DNA, 15 bp, Homo sapiens
atcactatggacaga

SEQ ID NO: 1646922 - DNA, 15 bp, Homo sapiens
tcactatggacagat

SEQ ID NO: 1646923 - DNA, 15 bp, Homo sapiens
cactatggacagatg

SEQ ID NO: 1646924 - DNA, 15 bp, Homo sapiens
actatggacagatgt

SEQ ID NO: 1646925 - DNA, 15 bp, Homo sapiens
ctatggacagatgta

SEQ ID NO: 1646926 - DNA, 15 bp, Homo sapiens
tatggacagatgtaa

SEQ ID NO: 1646927 - DNA, 15 bp, Homo sapiens
atggacagatgtaaa

SEQ ID NO: 1646928 - DNA, 15 bp, Homo sapiens
tggacagatgtaaaa

SEQ ID NO: 1646929 - DNA, 15 bp, Homo sapiens
ggacagatgtaaaag

SEQ ID NO: 1646930 - DNA, 15 bp, Homo sapiens
gacagatgtaaaaga

SEQ ID NO: 1646931 - DNA, 15 bp, Homo sapiens
acagatgtaaaagaa

SEQ ID NO: 1646932 - DNA, 15 bp, Homo sapiens
cagatgtaaaagaaa

SEQ ID NO: 1646933 - DNA, 15 bp, Homo sapiens
agatgtaaaagaaac

SEQ ID NO: 1646934 - DNA, 15 bp, Homo sapiens
gatgtaaaagaaact

SEQ ID NO: 1646935 - DNA, 15 bp, Homo sapiens
atgtaaaagaaacta

SEQ ID NO: 1646936 - DNA, 15 bp, Homo sapiens
tgtaaaagaaactat

SEQ ID NO: 1646937 - DNA, 15 bp, Homo sapiens
gtaaaagaaactata

SEQ ID NO: 1646938 - DNA, 15 bp, Homo sapiens
taaaagaaactatac

SEQ ID NO: 1646939 - DNA, 15 bp, Homo sapiens
aaaagaaactataca

SEQ ID NO: 1646940 - DNA, 15 bp, Homo sapiens
aaagaaactatacat

SEQ ID NO: 1646941 - DNA, 15 bp, Homo sapiens
aagaaactatacatc

SEQ ID NO: 1646942 - DNA, 15 bp, Homo sapiens
agaaactatacatca

SEQ ID NO: 1646943 - DNA, 15 bp, Homo sapiens
gaaactatacatcat

SEQ ID NO: 1646944 - DNA, 15 bp, Homo sapiens
aaactatacatcatt

SEQ ID NO: 1646945 - DNA, 15 bp, Homo sapiens
aactatacatcattt

SEQ ID NO: 1646946 - DNA, 15 bp, Homo sapiens
actatacatcatttt

SEQ ID NO: 1646947 - DNA, 15 bp, Homo sapiens
ctatacatcattttt

SEQ ID NO: 1646948 - DNA, 15 bp, Homo sapiens
tatacatcatttttg

SEQ ID NO: 1646949 - DNA, 15 bp, Homo sapiens
atacatcatttttgc

SEQ ID NO: 1646950 - DNA, 15 bp, Homo sapiens
tacatcatttttgcc

SEQ ID NO: 1646951 - DNA, 15 bp, Homo sapiens
acatcatttttgccc

SEQ ID NO: 1646952 - DNA, 15 bp, Homo sapiens
catcatttttgccct

SEQ ID NO: 1646953 - DNA, 15 bp, Homo sapiens
atcatttttgccctc

SEQ ID NO: 1646954 - DNA, 15 bp, Homo sapiens
tcatttttgccctct

SEQ ID NO: 1646955 - DNA, 15 bp, Homo sapiens
catttttgccctctg

SEQ ID NO: 1646956 - DNA, 15 bp, Homo sapiens
atttttgccctctgc

SEQ ID NO: 1646957 - DNA, 15 bp, Homo sapiens
tttttgccctctgcc

SEQ ID NO: 1646958 - DNA, 15 bp, Homo sapiens
ttttgccctctgcct

SEQ ID NO: 1646959 - DNA, 15 bp, Homo sapiens
tttgccctctgcctg

SEQ ID NO: 1646960 - DNA, 15 bp, Homo sapiens
ttgccctctgcctgt

SEQ ID NO: 1646961 - DNA, 15 bp, Homo sapiens
tgccctctgcctgtt

SEQ ID NO: 1646962 - DNA, 15 bp, Homo sapiens
gccctctgcctgttt

SEQ ID NO: 1646963 - DNA, 15 bp, Homo sapiens
ccctctgcctgtttt

SEQ ID NO: 1646964 - DNA, 15 bp, Homo sapiens
cctctgcctgttttc

SEQ ID NO: 1646965 - DNA, 15 bp, Homo sapiens
ctctgcctgttttcc

SEQ ID NO: 1646966 - DNA, 15 bp, Homo sapiens
tctgcctgttttcca

SEQ ID NO: 1646967 - DNA, 15 bp, Homo sapiens
ctgcctgttttccag

SEQ ID NO: 1646968 - DNA, 15 bp, Homo sapiens
tgcctgttttccaga

SEQ ID NO: 1646969 - DNA, 15 bp, Homo sapiens
gcctgttttccagac

SEQ ID NO: 1646970 - DNA, 15 bp, Homo sapiens
cctgttttccagaca

SEQ ID NO: 1646971 - DNA, 15 bp, Homo sapiens
ctgttttccagacat

SEQ ID NO: 1646972 - DNA, 15 bp, Homo sapiens
tgttttccagacata

SEQ ID NO: 1646973 - DNA, 15 bp, Homo sapiens
gttttccagacatac

SEQ ID NO: 1646974 - DNA, 15 bp, Homo sapiens
ttttccagacataca

SEQ ID NO: 1646975 - DNA, 15 bp, Homo sapiens
tttccagacatacag

SEQ ID NO: 1646976 - DNA, 15 bp, Homo sapiens
ttccagacatacagg

SEQ ID NO: 1646977 - DNA, 15 bp, Homo sapiens
tccagacatacaggt

SEQ ID NO: 1646978 - DNA, 15 bp, Homo sapiens
ccagacatacaggtt

SEQ ID NO: 1646979 - DNA, 15 bp, Homo sapiens
cagacatacaggttc

SEQ ID NO: 1646980 - DNA, 15 bp, Homo sapiens
agacatacaggttct

SEQ ID NO: 1646981 - DNA, 15 bp, Homo sapiens
gacatacaggttctg

SEQ ID NO: 1646982 - DNA, 15 bp, Homo sapiens
acatacaggttctgt

SEQ ID NO: 1646983 - DNA, 15 bp, Homo sapiens
catacaggttctgtg

SEQ ID NO: 1646984 - DNA, 15 bp, Homo sapiens
atacaggttctgtgg

SEQ ID NO: 1646985 - DNA, 15 bp, Homo sapiens
tacaggttctgtgga

SEQ ID NO: 1646986 - DNA, 15 bp, Homo sapiens
acaggttctgtggaa

SEQ ID NO: 1646987 - DNA, 15 bp, Homo sapiens
caggttctgtggaat

SEQ ID NO: 1646988 - DNA, 15 bp, Homo sapiens
aggttctgtggaata

SEQ ID NO: 1646989 - DNA, 15 bp, Homo sapiens
ggttctgtggaataa

SEQ ID NO: 1646990 - DNA, 15 bp, Homo sapiens
gttctgtggaataag

SEQ ID NO: 1646991 - DNA, 15 bp, Homo sapiens
ttctgtggaataaga

SEQ ID NO: 1646992 - DNA, 15 bp, Homo sapiens
tctgtggaataagat

SEQ ID NO: 1646993 - DNA, 15 bp, Homo sapiens
ctgtggaataagata

SEQ ID NO: 1646994 - DNA, 15 bp, Homo sapiens
tgtggaataagatac

SEQ ID NO: 1646995 - DNA, 15 bp, Homo sapiens
gtggaataagatact

SEQ ID NO: 1646996 - DNA, 15 bp, Homo sapiens
tggaataagatactg

SEQ ID NO: 1646997 - DNA, 15 bp, Homo sapiens
ggaataagatactgg

SEQ ID NO: 1646998 - DNA, 15 bp, Homo sapiens
gaataagatactgga

SEQ ID NO: 1646999 - DNA, 15 bp, Homo sapiens
aataagatactggac

SEQ ID NO: 1647000 - DNA, 15 bp, Homo sapiens
ataagatactggact

SEQ ID NO: 1647001 - DNA, 15 bp, Homo sapiens
taagatactggactc

SEQ ID NO: 1647002 - DNA, 15 bp, Homo sapiens
aagatactggactcc

SEQ ID NO: 1647003 - DNA, 15 bp, Homo sapiens
agatactggactcct

SEQ ID NO: 1647004 - DNA, 15 bp, Homo sapiens
gatactggactcctc

SEQ ID NO: 1647005 - DNA, 15 bp, Homo sapiens
atactggactcctct

SEQ ID NO: 1647006 - DNA, 15 bp, Homo sapiens
tactggactcctctt

SEQ ID NO: 1647007 - DNA, 15 bp, Homo sapiens
actggactcctcttc

SEQ ID NO: 1647008 - DNA, 15 bp, Homo sapiens
ctggactcctcttcc

SEQ ID NO: 1647009 - DNA, 15 bp, Homo sapiens
tggactcctcttccc

SEQ ID NO: 1647010 - DNA, 15 bp, Homo sapiens
ggactcctcttccca

SEQ ID NO: 1647011 - DNA, 15 bp, Homo sapiens
gactcctcttcccaa

SEQ ID NO: 1647012 - DNA, 15 bp, Homo sapiens
actcctcttcccaag

SEQ ID NO: 1647013 - DNA, 15 bp, Homo sapiens
ctcctcttcccaaga

SEQ ID NO: 1647014 - DNA, 15 bp, Homo sapiens
tcctcttcccaagat

SEQ ID NO: 1647015 - DNA, 15 bp, Homo sapiens
cctcttcccaagatg

SEQ ID NO: 1647016 - DNA, 15 bp, Homo sapiens
ctcttcccaagatgg

SEQ ID NO: 1647017 - DNA, 15 bp, Homo sapiens
tcttcccaagatggc

SEQ ID NO: 1647018 - DNA, 15 bp, Homo sapiens
cttcccaagatggca

SEQ ID NO: 1647019 - DNA, 15 bp, Homo sapiens
ttcccaagatggcac

SEQ ID NO: 1647020 - DNA, 15 bp, Homo sapiens
tcccaagatggcact

SEQ ID NO: 1647021 - DNA, 15 bp, Homo sapiens
cccaagatggcactt

SEQ ID NO: 1647022 - DNA, 15 bp, Homo sapiens
ccaagatggcacttc

SEQ ID NO: 1647023 - DNA, 15 bp, Homo sapiens
caagatggcacttct

SEQ ID NO: 1647024 - DNA, 15 bp, Homo sapiens
aagatggcacttctt

SEQ ID NO: 1647025 - DNA, 15 bp, Homo sapiens
agatggcacttcttt

SEQ ID NO: 1647026 - DNA, 15 bp, Homo sapiens
gatggcacttctttt

SEQ ID NO: 1647027 - DNA, 15 bp, Homo sapiens
atggcacttcttttt

SEQ ID NO: 1647028 - DNA, 15 bp, Homo sapiens
tggcacttcttttta

SEQ ID NO: 1647029 - DNA, 15 bp, Homo sapiens
ggcacttctttttat

SEQ ID NO: 1647030 - DNA, 15 bp, Homo sapiens
gcacttctttttatt

SEQ ID NO: 1647031 - DNA, 15 bp, Homo sapiens
acttctttttatttc

SEQ ID NO: 1647032 - DNA, 15 bp, Homo sapiens
cttctttttatttct

SEQ ID NO: 1647033 - DNA, 15 bp, Homo sapiens
ttctttttatttctt

SEQ ID NO: 1647034 - DNA, 15 bp, Homo sapiens
tctttttatttcttg

SEQ ID NO: 1647035 - DNA, 15 bp, Homo sapiens
ctttttatttcttgt

SEQ ID NO: 1647036 - DNA, 15 bp, Homo sapiens
tttttatttcttgtc

SEQ ID NO: 1647037 - DNA, 15 bp, Homo sapiens
ttttatttcttgtcc

SEQ ID NO: 1647038 - DNA, 15 bp, Homo sapiens
tttatttcttgtccc

SEQ ID NO: 1647039 - DNA, 15 bp, Homo sapiens
ttatttcttgtcccc

SEQ ID NO: 1647040 - DNA, 15 bp, Homo sapiens
tatttcttgtcccca

SEQ ID NO: 1647041 - DNA, 15 bp, Homo sapiens
atttcttgtccccag

SEQ ID NO: 1647042 - DNA, 15 bp, Homo sapiens
tttcttgtccccagt

SEQ ID NO: 1647043 - DNA, 15 bp, Homo sapiens
ttcttgtccccagtg

SEQ ID NO: 1647044 - DNA, 15 bp, Homo sapiens
tcttgtccccagtgt

SEQ ID NO: 1647045 - DNA, 15 bp, Homo sapiens
cttgtccccagtgtg

SEQ ID NO: 1647046 - DNA, 15 bp, Homo sapiens
ttgtccccagtgtgt

SEQ ID NO: 1647047 - DNA, 15 bp, Homo sapiens
tgtccccagtgtgta

SEQ ID NO: 1647048 - DNA, 15 bp, Homo sapiens
gtccccagtgtgtac

SEQ ID NO: 1647049 - DNA, 15 bp, Homo sapiens
tccccagtgtgtacc

SEQ ID NO: 1647050 - DNA, 15 bp, Homo sapiens
ccccagtgtgtacct

SEQ ID NO: 1647051 - DNA, 15 bp, Homo sapiens
cccagtgtgtacctt

SEQ ID NO: 1647052 - DNA, 15 bp, Homo sapiens
ccagtgtgtaccttt

SEQ ID NO: 1647053 - DNA, 15 bp, Homo sapiens
cagtgtgtacctttt

SEQ ID NO: 1647054 - DNA, 15 bp, Homo sapiens
agtgtgtacctttta

SEQ ID NO: 1647055 - DNA, 15 bp, Homo sapiens
gtgtgtaccttttaa

SEQ ID NO: 1647056 - DNA, 15 bp, Homo sapiens
tgtgtaccttttaaa

SEQ ID NO: 1647057 - DNA, 15 bp, Homo sapiens
gtgtaccttttaaaa

SEQ ID NO: 1647058 - DNA, 15 bp, Homo sapiens
tgtaccttttaaaat

SEQ ID NO: 1647059 - DNA, 15 bp, Homo sapiens
gtaccttttaaaatt

SEQ ID NO: 1647060 - DNA, 15 bp, Homo sapiens
taccttttaaaatta

SEQ ID NO: 1647061 - DNA, 15 bp, Homo sapiens
accttttaaaattat

SEQ ID NO: 1647062 - DNA, 15 bp, Homo sapiens
ccttttaaaattatt

SEQ ID NO: 1647063 - DNA, 15 bp, Homo sapiens
cttttaaaattattc

SEQ ID NO: 1647064 - DNA, 15 bp, Homo sapiens
ttttaaaattattcc

SEQ ID NO: 1647065 - DNA, 15 bp, Homo sapiens
tttaaaattattccc

SEQ ID NO: 1647066 - DNA, 15 bp, Homo sapiens
ttaaaattattccct

SEQ ID NO: 1647067 - DNA, 15 bp, Homo sapiens
taaaattattccctc

SEQ ID NO: 1647068 - DNA, 15 bp, Homo sapiens
aaaattattccctct

SEQ ID NO: 1647069 - DNA, 15 bp, Homo sapiens
aaattattccctctc

SEQ ID NO: 1647070 - DNA, 15 bp, Homo sapiens
aattattccctctca

SEQ ID NO: 1647071 - DNA, 15 bp, Homo sapiens
attattccctctcaa

SEQ ID NO: 1647072 - DNA, 15 bp, Homo sapiens
ttattccctctcaac

SEQ ID NO: 1647073 - DNA, 15 bp, Homo sapiens
tattccctctcaaca

SEQ ID NO: 1647074 - DNA, 15 bp, Homo sapiens
attccctctcaacaa

SEQ ID NO: 1647075 - DNA, 15 bp, Homo sapiens
ttccctctcaacaaa

SEQ ID NO: 1647076 - DNA, 15 bp, Homo sapiens
tccctctcaacaaaa

SEQ ID NO: 1647077 - DNA, 15 bp, Homo sapiens
ccctctcaacaaaac

SEQ ID NO: 1647078 - DNA, 15 bp, Homo sapiens
cctctcaacaaaact

SEQ ID NO: 1647079 - DNA, 15 bp, Homo sapiens
ctctcaacaaaactt

SEQ ID NO: 1647080 - DNA, 15 bp, Homo sapiens
tctcaacaaaacttt

SEQ ID NO: 1647081 - DNA, 15 bp, Homo sapiens
ctcaacaaaacttta

SEQ ID NO: 1647082 - DNA, 15 bp, Homo sapiens
tcaacaaaactttat

SEQ ID NO: 1647083 - DNA, 15 bp, Homo sapiens
caacaaaactttata

SEQ ID NO: 1647084 - DNA, 15 bp, Homo sapiens
aacaaaactttatag

SEQ ID NO: 1647085 - DNA, 15 bp, Homo sapiens
acaaaactttatagg

SEQ ID NO: 1647086 - DNA, 15 bp, Homo sapiens
caaaactttataggc

SEQ ID NO: 1647087 - DNA, 15 bp, Homo sapiens
aaaactttataggca

SEQ ID NO: 1647088 - DNA, 15 bp, Homo sapiens
aaactttataggcag

SEQ ID NO: 1647089 - DNA, 15 bp, Homo sapiens
aactttataggcagt

SEQ ID NO: 1647090 - DNA, 15 bp, Homo sapiens
actttataggcagtc

SEQ ID NO: 1647091 - DNA, 15 bp, Homo sapiens
ctttataggcagtct

SEQ ID NO: 1647092 - DNA, 15 bp, Homo sapiens
tttataggcagtctt

SEQ ID NO: 1647093 - DNA, 15 bp, Homo sapiens
ttataggcagtcttc

SEQ ID NO: 1647094 - DNA, 15 bp, Homo sapiens
tataggcagtcttct

SEQ ID NO: 1647095 - DNA, 15 bp, Homo sapiens
ataggcagtcttctg

SEQ ID NO: 1647096 - DNA, 15 bp, Homo sapiens
taggcagtcttctgc

SEQ ID NO: 1647097 - DNA, 15 bp, Homo sapiens
aggcagtcttctgca

SEQ ID NO: 1647098 - DNA, 15 bp, Homo sapiens
ggcagtcttctgcag

SEQ ID NO: 1647099 - DNA, 15 bp, Homo sapiens
gcagtcttctgcaga

SEQ ID NO: 1647100 - DNA, 15 bp, Homo sapiens
cagtcttctgcagac

SEQ ID NO: 1647101 - DNA, 15 bp, Homo sapiens
agtcttctgcagact

SEQ ID NO: 1647102 - DNA, 15 bp, Homo sapiens
gtcttctgcagactt

SEQ ID NO: 1647103 - DNA, 15 bp, Homo sapiens
tcttctgcagactta

SEQ ID NO: 1647104 - DNA, 15 bp, Homo sapiens
cttctgcagacttaa

SEQ ID NO: 1647105 - DNA, 15 bp, Homo sapiens
ttctgcagacttaac

SEQ ID NO: 1647106 - DNA, 15 bp, Homo sapiens
tctgcagacttaacg

SEQ ID NO: 1647107 - DNA, 15 bp, Homo sapiens
ctgcagacttaacgt

SEQ ID NO: 1647108 - DNA, 15 bp, Homo sapiens
tgcagacttaacgtg

SEQ ID NO: 1647109 - DNA, 15 bp, Homo sapiens
gcagacttaacgtgt

SEQ ID NO: 1647110 - DNA, 15 bp, Homo sapiens
cagacttaacgtgtt

SEQ ID NO: 1647111 - DNA, 15 bp, Homo sapiens
agacttaacgtgttt

SEQ ID NO: 1647112 - DNA, 15 bp, Homo sapiens
gacttaacgtgtttt

SEQ ID NO: 1647113 - DNA, 15 bp, Homo sapiens
acttaacgtgttttc

SEQ ID NO: 1647114 - DNA, 15 bp, Homo sapiens
cttaacgtgttttct

SEQ ID NO: 1647115 - DNA, 15 bp, Homo sapiens
ttaacgtgttttctg

SEQ ID NO: 1647116 - DNA, 15 bp, Homo sapiens
taacgtgttttctgt

SEQ ID NO: 1647117 - DNA, 15 bp, Homo sapiens
aacgtgttttctgtc

SEQ ID NO: 1647118 - DNA, 15 bp, Homo sapiens
acgtgttttctgtca

SEQ ID NO: 1647119 - DNA, 15 bp, Homo sapiens
cgtgttttctgtcat

SEQ ID NO: 1647120 - DNA, 15 bp, Homo sapiens
gtgttttctgtcata

SEQ ID NO: 1647121 - DNA, 15 bp, Homo sapiens
tgttttctgtcatag

SEQ ID NO: 1647122 - DNA, 15 bp, Homo sapiens
gttttctgtcatagt

SEQ ID NO: 1647123 - DNA, 15 bp, Homo sapiens
ttttctgtcatagtt

SEQ ID NO: 1647124 - DNA, 15 bp, Homo sapiens
tttctgtcatagtta

SEQ ID NO: 1647125 - DNA, 15 bp, Homo sapiens
ttctgtcatagttag

SEQ ID NO: 1647126 - DNA, 15 bp, Homo sapiens
tctgtcatagttaga

SEQ ID NO: 1647127 - DNA, 15 bp, Homo sapiens
ctgtcatagttagat

SEQ ID NO: 1647128 - DNA, 15 bp, Homo sapiens
tgtcatagttagatg

SEQ ID NO: 1647129 - DNA, 15 bp, Homo sapiens
gtcatagttagatgt

SEQ ID NO: 1647130 - DNA, 15 bp, Homo sapiens
tcatagttagatgtg

SEQ ID NO: 1647131 - DNA, 15 bp, Homo sapiens
catagttagatgtga

SEQ ID NO: 1647132 - DNA, 15 bp, Homo sapiens
atagttagatgtgat

SEQ ID NO: 1647133 - DNA, 15 bp, Homo sapiens
tagttagatgtgata

SEQ ID NO: 1647134 - DNA, 15 bp, Homo sapiens
agttagatgtgataa

SEQ ID NO: 1647135 - DNA, 15 bp, Homo sapiens
gttagatgtgataat

SEQ ID NO: 1647136 - DNA, 15 bp, Homo sapiens
ttagatgtgataatt

SEQ ID NO: 1647137 - DNA, 15 bp, Homo sapiens
tagatgtgataattc

SEQ ID NO: 1647138 - DNA, 15 bp, Homo sapiens
agatgtgataattct

SEQ ID NO: 1647139 - DNA, 15 bp, Homo sapiens
gatgtgataattcta

SEQ ID NO: 1647140 - DNA, 15 bp, Homo sapiens
atgtgataattctaa

SEQ ID NO: 1647141 - DNA, 15 bp, Homo sapiens
tgtgataattctaag

SEQ ID NO: 1647142 - DNA, 15 bp, Homo sapiens
gtgataattctaaga

SEQ ID NO: 1647143 - DNA, 15 bp, Homo sapiens
tgataattctaagag

SEQ ID NO: 1647144 - DNA, 15 bp, Homo sapiens
gataattctaagagt

SEQ ID NO: 1647145 - DNA, 15 bp, Homo sapiens
ataattctaagagtg

SEQ ID NO: 1647146 - DNA, 15 bp, Homo sapiens
taattctaagagtgt

SEQ ID NO: 1647147 - DNA, 15 bp, Homo sapiens
aattctaagagtgtc

SEQ ID NO: 1647148 - DNA, 15 bp, Homo sapiens
attctaagagtgtct

SEQ ID NO: 1647149 - DNA, 15 bp, Homo sapiens
ttctaagagtgtcta

SEQ ID NO: 1647150 - DNA, 15 bp, Homo sapiens
tctaagagtgtctat

SEQ ID NO: 1647151 - DNA, 15 bp, Homo sapiens
ctaagagtgtctatg

SEQ ID NO: 1647152 - DNA, 15 bp, Homo sapiens
taagagtgtctatga

SEQ ID NO: 1647153 - DNA, 15 bp, Homo sapiens
aagagtgtctatgac

SEQ ID NO: 1647154 - DNA, 15 bp, Homo sapiens
agagtgtctatgact

SEQ ID NO: 1647155 - DNA, 15 bp, Homo sapiens
gagtgtctatgactt

SEQ ID NO: 1647156 - DNA, 15 bp, Homo sapiens
agtgtctatgactta

SEQ ID NO: 1647157 - DNA, 15 bp, Homo sapiens
gtgtctatgacttat

SEQ ID NO: 1647158 - DNA, 15 bp, Homo sapiens
tgtctatgacttatt

SEQ ID NO: 1647159 - DNA, 15 bp, Homo sapiens
gtctatgacttattt

SEQ ID NO: 1647160 - DNA, 15 bp, Homo sapiens
tctatgacttatttc

SEQ ID NO: 1647161 - DNA, 15 bp, Homo sapiens
ctatgacttatttcc

SEQ ID NO: 1647162 - DNA, 15 bp, Homo sapiens
tatgacttatttcct

SEQ ID NO: 1647163 - DNA, 15 bp, Homo sapiens
atgacttatttcctt

SEQ ID NO: 1647164 - DNA, 15 bp, Homo sapiens
tgacttatttccttc

SEQ ID NO: 1647165 - DNA, 15 bp, Homo sapiens
gacttatttccttca

SEQ ID NO: 1647166 - DNA, 15 bp, Homo sapiens
acttatttccttcac

SEQ ID NO: 1647167 - DNA, 15 bp, Homo sapiens
cttatttccttcact

SEQ ID NO: 1647168 - DNA, 15 bp, Homo sapiens
ttatttccttcactt

SEQ ID NO: 1647169 - DNA, 15 bp, Homo sapiens
tatttccttcactta

SEQ ID NO: 1647170 - DNA, 15 bp, Homo sapiens
atttccttcacttaa

SEQ ID NO: 1647171 - DNA, 15 bp, Homo sapiens
tttccttcacttaat

SEQ ID NO: 1647172 - DNA, 15 bp, Homo sapiens
ttccttcacttaatt

SEQ ID NO: 1647173 - DNA, 15 bp, Homo sapiens
tccttcacttaattc

SEQ ID NO: 1647174 - DNA, 15 bp, Homo sapiens
ccttcacttaattct

SEQ ID NO: 1647175 - DNA, 15 bp, Homo sapiens
cttcacttaattcta

SEQ ID NO: 1647176 - DNA, 15 bp, Homo sapiens
ttcacttaattctat

SEQ ID NO: 1647177 - DNA, 15 bp, Homo sapiens
tcacttaattctatc

SEQ ID NO: 1647178 - DNA, 15 bp, Homo sapiens
cacttaattctatcc

SEQ ID NO: 1647179 - DNA, 15 bp, Homo sapiens
acttaattctatcca

SEQ ID NO: 1647180 - DNA, 15 bp, Homo sapiens
cttaattctatccac

SEQ ID NO: 1647181 - DNA, 15 bp, Homo sapiens
ttaattctatccaca

SEQ ID NO: 1647182 - DNA, 15 bp, Homo sapiens
taattctatccacag

SEQ ID NO: 1647183 - DNA, 15 bp, Homo sapiens
aattctatccacagt

SEQ ID NO: 1647184 - DNA, 15 bp, Homo sapiens
attctatccacagtc

SEQ ID NO: 1647185 - DNA, 15 bp, Homo sapiens
ttctatccacagtca

SEQ ID NO: 1647186 - DNA, 15 bp, Homo sapiens
tctatccacagtcaa

SEQ ID NO: 1647187 - DNA, 15 bp, Homo sapiens
ctatccacagtcaaa

SEQ ID NO: 1647188 - DNA, 15 bp, Homo sapiens
tatccacagtcaaaa

SEQ ID NO: 1647189 - DNA, 15 bp, Homo sapiens
atccacagtcaaaaa

SEQ ID NO: 1647190 - DNA, 15 bp, Homo sapiens
tccacagtcaaaaat

SEQ ID NO: 1647191 - DNA, 15 bp, Homo sapiens
ccacagtcaaaaatc

SEQ ID NO: 1647192 - DNA, 15 bp, Homo sapiens
cacagtcaaaaatcc

SEQ ID NO: 1647193 - DNA, 15 bp, Homo sapiens
acagtcaaaaatccc

SEQ ID NO: 1647194 - DNA, 15 bp, Homo sapiens
cagtcaaaaatcccc

SEQ ID NO: 1647195 - DNA, 15 bp, Homo sapiens
agtcaaaaatccccc

SEQ ID NO: 1647196 - DNA, 15 bp, Homo sapiens
gtcaaaaatccccca

SEQ ID NO: 1647197 - DNA, 15 bp, Homo sapiens
tcaaaaatcccccaa

SEQ ID NO: 1647198 - DNA, 15 bp, Homo sapiens
caaaaatcccccaag

SEQ ID NO: 1647199 - DNA, 15 bp, Homo sapiens
aaaaatcccccaagg

SEQ ID NO: 1647200 - DNA, 15 bp, Homo sapiens
aaaatcccccaagga

SEQ ID NO: 1647201 - DNA, 15 bp, Homo sapiens
aaatcccccaaggag

SEQ ID NO: 1647202 - DNA, 15 bp, Homo sapiens
aatcccccaaggagg

SEQ ID NO: 1647203 - DNA, 15 bp, Homo sapiens
atcccccaaggagga

SEQ ID NO: 1647204 - DNA, 15 bp, Homo sapiens
tcccccaaggaggaa

SEQ ID NO: 1647205 - DNA, 15 bp, Homo sapiens
cccccaaggaggaaa

SEQ ID NO: 1647206 - DNA, 15 bp, Homo sapiens
ccccaaggaggaaag

SEQ ID NO: 1647207 - DNA, 15 bp, Homo sapiens
cccaaggaggaaagc

SEQ ID NO: 1647208 - DNA, 15 bp, Homo sapiens
ccaaggaggaaagct

SEQ ID NO: 1647209 - DNA, 15 bp, Homo sapiens
caaggaggaaagctg

SEQ ID NO: 1647210 - DNA, 15 bp, Homo sapiens
aaggaggaaagctga

SEQ ID NO: 1647211 - DNA, 15 bp, Homo sapiens
aggaggaaagctgaa

SEQ ID NO: 1647212 - DNA, 15 bp, Homo sapiens
ggaggaaagctgaaa

SEQ ID NO: 1647213 - DNA, 15 bp, Homo sapiens
gaggaaagctgaaag

SEQ ID NO: 1647214 - DNA, 15 bp, Homo sapiens
aggaaagctgaaaga

SEQ ID NO: 1647215 - DNA, 15 bp, Homo sapiens
ggaaagctgaaagat

SEQ ID NO: 1647216 - DNA, 15 bp, Homo sapiens
gaaagctgaaagatg

SEQ ID NO: 1647217 - DNA, 15 bp, Homo sapiens
aaagctgaaagatgc

SEQ ID NO: 1647218 - DNA, 15 bp, Homo sapiens
aagctgaaagatgca

SEQ ID NO: 1647219 - DNA, 15 bp, Homo sapiens
agctgaaagatgcac

SEQ ID NO: 1647220 - DNA, 15 bp, Homo sapiens
gctgaaagatgcact

SEQ ID NO: 1647221 - DNA, 15 bp, Homo sapiens
ctgaaagatgcactg

SEQ ID NO: 1647222 - DNA, 15 bp, Homo sapiens
tgaaagatgcactgc

SEQ ID NO: 1647223 - DNA, 15 bp, Homo sapiens
gaaagatgcactgcc

SEQ ID NO: 1647224 - DNA, 15 bp, Homo sapiens
aaagatgcactgcca

SEQ ID NO: 1647225 - DNA, 15 bp, Homo sapiens
aagatgcactgccat

SEQ ID NO: 1647226 - DNA, 15 bp, Homo sapiens
agatgcactgccata

SEQ ID NO: 1647227 - DNA, 15 bp, Homo sapiens
gatgcactgccatat

SEQ ID NO: 1647228 - DNA, 15 bp, Homo sapiens
atgcactgccatatt

SEQ ID NO: 1647229 - DNA, 15 bp, Homo sapiens
tgcactgccatatta

SEQ ID NO: 1647230 - DNA, 15 bp, Homo sapiens
gcactgccatattat

SEQ ID NO: 1647231 - DNA, 15 bp, Homo sapiens
cactgccatattatc

SEQ ID NO: 1647232 - DNA, 15 bp, Homo sapiens
actgccatattatct

SEQ ID NO: 1647233 - DNA, 15 bp, Homo sapiens
ctgccatattatctt

SEQ ID NO: 1647234 - DNA, 15 bp, Homo sapiens
tgccatattatcttt

SEQ ID NO: 1647235 - DNA, 15 bp, Homo sapiens
gccatattatctttc

SEQ ID NO: 1647236 - DNA, 15 bp, Homo sapiens
ccatattatctttct

SEQ ID NO: 1647237 - DNA, 15 bp, Homo sapiens
catattatctttctt

SEQ ID NO: 1647238 - DNA, 15 bp, Homo sapiens
atattatctttctta

SEQ ID NO: 1647239 - DNA, 15 bp, Homo sapiens
tattatctttcttaa

SEQ ID NO: 1647240 - DNA, 15 bp, Homo sapiens
attatctttcttaac

SEQ ID NO: 1647241 - DNA, 15 bp, Homo sapiens
ttatctttcttaact

SEQ ID NO: 1647242 - DNA, 15 bp, Homo sapiens
tatctttcttaactt

SEQ ID NO: 1647243 - DNA, 15 bp, Homo sapiens
atctttcttaacttt

SEQ ID NO: 1647244 - DNA, 15 bp, Homo sapiens
tctttcttaactttt

SEQ ID NO: 1647245 - DNA, 15 bp, Homo sapiens
ctttcttaacttttt

SEQ ID NO: 1647246 - DNA, 15 bp, Homo sapiens
tttcttaactttttc

SEQ ID NO: 1647247 - DNA, 15 bp, Homo sapiens
ttcttaactttttcc

SEQ ID NO: 1647248 - DNA, 15 bp, Homo sapiens
tcttaactttttcca

SEQ ID NO: 1647249 - DNA, 15 bp, Homo sapiens
cttaactttttccaa

SEQ ID NO: 1647250 - DNA, 15 bp, Homo sapiens
ttaactttttccaac

SEQ ID NO: 1647251 - DNA, 15 bp, Homo sapiens
taactttttccaaca

SEQ ID NO: 1647252 - DNA, 15 bp, Homo sapiens
aactttttccaacac

SEQ ID NO: 1647253 - DNA, 15 bp, Homo sapiens
actttttccaacaca

SEQ ID NO: 1647254 - DNA, 15 bp, Homo sapiens
ctttttccaacacat

SEQ ID NO: 1647255 - DNA, 15 bp, Homo sapiens
tttttccaacacata

SEQ ID NO: 1647256 - DNA, 15 bp, Homo sapiens
ttttccaacacataa

SEQ ID NO: 1647257 - DNA, 15 bp, Homo sapiens
tttccaacacataat

SEQ ID NO: 1647258 - DNA, 15 bp, Homo sapiens
ttccaacacataatc

SEQ ID NO: 1647259 - DNA, 15 bp, Homo sapiens
tccaacacataatcc

SEQ ID NO: 1647260 - DNA, 15 bp, Homo sapiens
ccaacacataatcct

SEQ ID NO: 1647261 - DNA, 15 bp, Homo sapiens
caacacataatcctc

SEQ ID NO: 1647262 - DNA, 15 bp, Homo sapiens
aacacataatcctct

SEQ ID NO: 1647263 - DNA, 15 bp, Homo sapiens
acacataatcctctc

SEQ ID NO: 1647264 - DNA, 15 bp, Homo sapiens
cacataatcctctcc

SEQ ID NO: 1647265 - DNA, 15 bp, Homo sapiens
acataatcctctcca

SEQ ID NO: 1647266 - DNA, 15 bp, Homo sapiens
cataatcctctccaa

SEQ ID NO: 1647267 - DNA, 15 bp, Homo sapiens
ataatcctctccaac

SEQ ID NO: 1647268 - DNA, 15 bp, Homo sapiens
taatcctctccaact

SEQ ID NO: 1647269 - DNA, 15 bp, Homo sapiens
aatcctctccaactg

SEQ ID NO: 1647270 - DNA, 15 bp, Homo sapiens
atcctctccaactgg

SEQ ID NO: 1647271 - DNA, 15 bp, Homo sapiens
tcctctccaactgga

SEQ ID NO: 1647272 - DNA, 15 bp, Homo sapiens
cctctccaactggat

SEQ ID NO: 1647273 - DNA, 15 bp, Homo sapiens
ctctccaactggatt

SEQ ID NO: 1647274 - DNA, 15 bp, Homo sapiens
tctccaactggatta

SEQ ID NO: 1647275 - DNA, 15 bp, Homo sapiens
ctccaactggattat

SEQ ID NO: 1647276 - DNA, 15 bp, Homo sapiens
tccaactggattata

SEQ ID NO: 1647277 - DNA, 15 bp, Homo sapiens
ccaactggattataa

SEQ ID NO: 1647278 - DNA, 15 bp, Homo sapiens
caactggattataaa

SEQ ID NO: 1647279 - DNA, 15 bp, Homo sapiens
aactggattataaat

SEQ ID NO: 1647280 - DNA, 15 bp, Homo sapiens
actggattataaata

SEQ ID NO: 1647281 - DNA, 15 bp, Homo sapiens
ctggattataaataa

SEQ ID NO: 1647282 - DNA, 15 bp, Homo sapiens
tggattataaataaa

SEQ ID NO: 1647283 - DNA, 15 bp, Homo sapiens
ggattataaataaat

SEQ ID NO: 1647284 - DNA, 15 bp, Homo sapiens
gattataaataaatt

SEQ ID NO: 1647285 - DNA, 15 bp, Homo sapiens
attataaataaattg

SEQ ID NO: 1647286 - DNA, 15 bp, Homo sapiens
ttataaataaattga

SEQ ID NO: 1647287 - DNA, 15 bp, Homo sapiens
tataaataaattgaa

SEQ ID NO: 1647288 - DNA, 15 bp, Homo sapiens
ataaataaattgaaa

SEQ ID NO: 1647289 - DNA, 15 bp, Homo sapiens
taaataaattgaaaa

SEQ ID NO: 1647290 - DNA, 15 bp, Homo sapiens
aaataaattgaaaat

SEQ ID NO: 1647291 - DNA, 15 bp, Homo sapiens
aataaattgaaaata

SEQ ID NO: 1647292 - DNA, 15 bp, Homo sapiens
ataaattgaaaataa

SEQ ID NO: 1647293 - DNA, 15 bp, Homo sapiens
taaattgaaaataac

SEQ ID NO: 1647294 - DNA, 15 bp, Homo sapiens
aaattgaaaataact

SEQ ID NO: 1647295 - DNA, 15 bp, Homo sapiens
aattgaaaataactc

SEQ ID NO: 1647296 - DNA, 15 bp, Homo sapiens
attgaaaataactca

SEQ ID NO: 1647297 - DNA, 15 bp, Homo sapiens
ttgaaaataactcat

SEQ ID NO: 1647298 - DNA, 15 bp, Homo sapiens
tgaaaataactcatt

SEQ ID NO: 1647299 - DNA, 15 bp, Homo sapiens
gaaaataactcatta

SEQ ID NO: 1647300 - DNA, 15 bp, Homo sapiens
aaaataactcattat

SEQ ID NO: 1647301 - DNA, 15 bp, Homo sapiens
aaataactcattata

SEQ ID NO: 1647302 - DNA, 15 bp, Homo sapiens
aataactcattatac

SEQ ID NO: 1647303 - DNA, 15 bp, Homo sapiens
ataactcattatacc

SEQ ID NO: 1647304 - DNA, 15 bp, Homo sapiens
taactcattatacca

SEQ ID NO: 1647305 - DNA, 15 bp, Homo sapiens
aactcattataccaa

SEQ ID NO: 1647306 - DNA, 15 bp, Homo sapiens
actcattataccaat

SEQ ID NO: 1647307 - DNA, 15 bp, Homo sapiens
ctcattataccaatt

SEQ ID NO: 1647308 - DNA, 15 bp, Homo sapiens
tcattataccaattc

SEQ ID NO: 1647309 - DNA, 15 bp, Homo sapiens
cattataccaattca

SEQ ID NO: 1647310 - DNA, 15 bp, Homo sapiens
attataccaattcac

SEQ ID NO: 1647311 - DNA, 15 bp, Homo sapiens
ttataccaattcact

SEQ ID NO: 1647312 - DNA, 15 bp, Homo sapiens
tataccaattcacta

SEQ ID NO: 1647313 - DNA, 15 bp, Homo sapiens
ataccaattcactat

SEQ ID NO: 1647314 - DNA, 15 bp, Homo sapiens
taccaattcactatt

SEQ ID NO: 1647315 - DNA, 15 bp, Homo sapiens
accaattcactattt

SEQ ID NO: 1647316 - DNA, 15 bp, Homo sapiens
ccaattcactatttt

SEQ ID NO: 1647317 - DNA, 15 bp, Homo sapiens
caattcactatttta

SEQ ID NO: 1647318 - DNA, 15 bp, Homo sapiens
aattcactattttat

SEQ ID NO: 1647319 - DNA, 15 bp, Homo sapiens
attcactattttatt

SEQ ID NO: 1647320 - DNA, 15 bp, Homo sapiens
ttcactattttattt

SEQ ID NO: 1647321 - DNA, 15 bp, Homo sapiens
tcactattttatttt

SEQ ID NO: 1647322 - DNA, 15 bp, Homo sapiens
cactattttattttt

SEQ ID NO: 1647323 - DNA, 15 bp, Homo sapiens
actattttatttttt

SEQ ID NO: 1647324 - DNA, 15 bp, Homo sapiens
ctattttatttttta

SEQ ID NO: 1647325 - DNA, 15 bp, Homo sapiens
ttttattttttaatg

SEQ ID NO: 1647326 - DNA, 15 bp, Homo sapiens
tttattttttaatga

SEQ ID NO: 1647327 - DNA, 15 bp, Homo sapiens
ttattttttaatgaa

SEQ ID NO: 1647328 - DNA, 15 bp, Homo sapiens
tattttttaatgaat

SEQ ID NO: 1647329 - DNA, 15 bp, Homo sapiens
attttttaatgaatt

SEQ ID NO: 1647330 - DNA, 15 bp, Homo sapiens
ttttttaatgaatta

SEQ ID NO: 1647331 - DNA, 15 bp, Homo sapiens
tttttaatgaattaa

SEQ ID NO: 1647332 - DNA, 15 bp, Homo sapiens
ttttaatgaattaaa

SEQ ID NO: 1647333 - DNA, 15 bp, Homo sapiens
tttaatgaattaaaa

SEQ ID NO: 1647334 - DNA, 15 bp, Homo sapiens
ttaatgaattaaaac

SEQ ID NO: 1647335 - DNA, 15 bp, Homo sapiens
taatgaattaaaact

SEQ ID NO: 1647336 - DNA, 15 bp, Homo sapiens
aatgaattaaaacta

SEQ ID NO: 1647337 - DNA, 15 bp, Homo sapiens
atgaattaaaactag

SEQ ID NO: 1647338 - DNA, 15 bp, Homo sapiens
tgaattaaaactaga

SEQ ID NO: 1647339 - DNA, 15 bp, Homo sapiens
gaattaaaactagaa

SEQ ID NO: 1647340 - DNA, 15 bp, Homo sapiens
aattaaaactagaaa

SEQ ID NO: 1647341 - DNA, 15 bp, Homo sapiens
attaaaactagaaaa

SEQ ID NO: 1647342 - DNA, 15 bp, Homo sapiens
ttaaaactagaaaac

SEQ ID NO: 1647343 - DNA, 15 bp, Homo sapiens
taaaactagaaaaca

SEQ ID NO: 1647344 - DNA, 15 bp, Homo sapiens
aaaactagaaaacaa

SEQ ID NO: 1647345 - DNA, 15 bp, Homo sapiens
aaactagaaaacaaa

SEQ ID NO: 1647346 - DNA, 15 bp, Homo sapiens
aactagaaaacaaat

SEQ ID NO: 1647347 - DNA, 15 bp, Homo sapiens
actagaaaacaaatt

SEQ ID NO: 1647348 - DNA, 15 bp, Homo sapiens
ctagaaaacaaattg

SEQ ID NO: 1647349 - DNA, 15 bp, Homo sapiens
tagaaaacaaattga

SEQ ID NO: 1647350 - DNA, 15 bp, Homo sapiens
agaaaacaaattgat

SEQ ID NO: 1647351 - DNA, 15 bp, Homo sapiens
gaaaacaaattgatg

SEQ ID NO: 1647352 - DNA, 15 bp, Homo sapiens
aaaacaaattgatgc

SEQ ID NO: 1647353 - DNA, 15 bp, Homo sapiens
aaacaaattgatgca

SEQ ID NO: 1647354 - DNA, 15 bp, Homo sapiens
aacaaattgatgcaa

SEQ ID NO: 1647355 - DNA, 15 bp, Homo sapiens
acaaattgatgcaaa

SEQ ID NO: 1647356 - DNA, 15 bp, Homo sapiens
caaattgatgcaaac

SEQ ID NO: 1647357 - DNA, 15 bp, Homo sapiens
aaattgatgcaaacc

SEQ ID NO: 1647358 - DNA, 15 bp, Homo sapiens
aattgatgcaaaccc

SEQ ID NO: 1647359 - DNA, 15 bp, Homo sapiens
attgatgcaaaccct

SEQ ID NO: 1647360 - DNA, 15 bp, Homo sapiens
ttgatgcaaaccctg

SEQ ID NO: 1647361 - DNA, 15 bp, Homo sapiens
tgatgcaaaccctgg

SEQ ID NO: 1647362 - DNA, 15 bp, Homo sapiens
gatgcaaaccctgga

SEQ ID NO: 1647363 - DNA, 15 bp, Homo sapiens
atgcaaaccctggaa

SEQ ID NO: 1647364 - DNA, 15 bp, Homo sapiens
tgcaaaccctggaag

SEQ ID NO: 1647365 - DNA, 15 bp, Homo sapiens
gcaaaccctggaagt

SEQ ID NO: 1647366 - DNA, 15 bp, Homo sapiens
caaaccctggaagtc

SEQ ID NO: 1647367 - DNA, 15 bp, Homo sapiens
aaaccctggaagtca

SEQ ID NO: 1647368 - DNA, 15 bp, Homo sapiens
aaccctggaagtcag

SEQ ID NO: 1647369 - DNA, 15 bp, Homo sapiens
accctggaagtcagt

SEQ ID NO: 1647370 - DNA, 15 bp, Homo sapiens
ccctggaagtcagtt

SEQ ID NO: 1647371 - DNA, 15 bp, Homo sapiens
cctggaagtcagttg

SEQ ID NO: 1647372 - DNA, 15 bp, Homo sapiens
ctggaagtcagttga

SEQ ID NO: 1647373 - DNA, 15 bp, Homo sapiens
tggaagtcagttgat

SEQ ID NO: 1647374 - DNA, 15 bp, Homo sapiens
ggaagtcagttgatt

SEQ ID NO: 1647375 - DNA, 15 bp, Homo sapiens
gaagtcagttgatta

SEQ ID NO: 1647376 - DNA, 15 bp, Homo sapiens
aagtcagttgattac

SEQ ID NO: 1647377 - DNA, 15 bp, Homo sapiens
agtcagttgattact

SEQ ID NO: 1647378 - DNA, 15 bp, Homo sapiens
gtcagttgattacta

SEQ ID NO: 1647379 - DNA, 15 bp, Homo sapiens
tcagttgattactat

SEQ ID NO: 1647380 - DNA, 15 bp, Homo sapiens
cagttgattactata

SEQ ID NO: 1647381 - DNA, 15 bp, Homo sapiens
agttgattactatat

SEQ ID NO: 1647382 - DNA, 15 bp, Homo sapiens
gttgattactatata

SEQ ID NO: 1647383 - DNA, 15 bp, Homo sapiens
ttgattactatatac

SEQ ID NO: 1647384 - DNA, 15 bp, Homo sapiens
tgattactatatact

SEQ ID NO: 1647385 - DNA, 15 bp, Homo sapiens
gattactatatacta

SEQ ID NO: 1647386 - DNA, 15 bp, Homo sapiens
attactatatactac

SEQ ID NO: 1647387 - DNA, 15 bp, Homo sapiens
ttactatatactaca

SEQ ID NO: 1647388 - DNA, 15 bp, Homo sapiens
tactatatactacag

SEQ ID NO: 1647389 - DNA, 15 bp, Homo sapiens
actatatactacagc

SEQ ID NO: 1647390 - DNA, 15 bp, Homo sapiens
ctatatactacagca

SEQ ID NO: 1647391 - DNA, 15 bp, Homo sapiens
tatatactacagcag

SEQ ID NO: 1647392 - DNA, 15 bp, Homo sapiens
atatactacagcaga

SEQ ID NO: 1647393 - DNA, 15 bp, Homo sapiens
tatactacagcagaa

SEQ ID NO: 1647394 - DNA, 15 bp, Homo sapiens
atactacagcagaat

SEQ ID NO: 1647395 - DNA, 15 bp, Homo sapiens
tactacagcagaatg

SEQ ID NO: 1647396 - DNA, 15 bp, Homo sapiens
actacagcagaatga

SEQ ID NO: 1647397 - DNA, 15 bp, Homo sapiens
ctacagcagaatgac

SEQ ID NO: 1647398 - DNA, 15 bp, Homo sapiens
tacagcagaatgact

SEQ ID NO: 1647399 - DNA, 15 bp, Homo sapiens
acagcagaatgactc

SEQ ID NO: 1647400 - DNA, 15 bp, Homo sapiens
cagcagaatgactca

SEQ ID NO: 1647401 - DNA, 15 bp, Homo sapiens
agcagaatgactcag

SEQ ID NO: 1647402 - DNA, 15 bp, Homo sapiens
gcagaatgactcaga

SEQ ID NO: 1647403 - DNA, 15 bp, Homo sapiens
cagaatgactcagat

SEQ ID NO: 1647404 - DNA, 15 bp, Homo sapiens
agaatgactcagatt

SEQ ID NO: 1647405 - DNA, 15 bp, Homo sapiens
gaatgactcagattt

SEQ ID NO: 1647406 - DNA, 15 bp, Homo sapiens
aatgactcagatttc

SEQ ID NO: 1647407 - DNA, 15 bp, Homo sapiens
atgactcagatttca

SEQ ID NO: 1647408 - DNA, 15 bp, Homo sapiens
tgactcagatttcat

SEQ ID NO: 1647409 - DNA, 15 bp, Homo sapiens
gactcagatttcata

SEQ ID NO: 1647410 - DNA, 15 bp, Homo sapiens
actcagatttcatag

SEQ ID NO: 1647411 - DNA, 15 bp, Homo sapiens
ctcagatttcataga

SEQ ID NO: 1647412 - DNA, 15 bp, Homo sapiens
tcagatttcatagaa

SEQ ID NO: 1647413 - DNA, 15 bp, Homo sapiens
cagatttcatagaaa

SEQ ID NO: 1647414 - DNA, 15 bp, Homo sapiens
agatttcatagaaag

SEQ ID NO: 1647415 - DNA, 15 bp, Homo sapiens
gatttcatagaaagg

SEQ ID NO: 1647416 - DNA, 15 bp, Homo sapiens
atttcatagaaagga

SEQ ID NO: 1647417 - DNA, 15 bp, Homo sapiens
tttcatagaaaggag

SEQ ID NO: 1647418 - DNA, 15 bp, Homo sapiens
ttcatagaaaggagc

SEQ ID NO: 1647419 - DNA, 15 bp, Homo sapiens
tcatagaaaggagca

SEQ ID NO: 1647420 - DNA, 15 bp, Homo sapiens
catagaaaggagcaa

SEQ ID NO: 1647421 - DNA, 15 bp, Homo sapiens
atagaaaggagcaac

SEQ ID NO: 1647422 - DNA, 15 bp, Homo sapiens
tagaaaggagcaacc

SEQ ID NO: 1647423 - DNA, 15 bp, Homo sapiens
agaaaggagcaacca

SEQ ID NO: 1647424 - DNA, 15 bp, Homo sapiens
gaaaggagcaaccaa

SEQ ID NO: 1647425 - DNA, 15 bp, Homo sapiens
aaaggagcaaccaaa

SEQ ID NO: 1647426 - DNA, 15 bp, Homo sapiens
aaggagcaaccaaaa

SEQ ID NO: 1647427 - DNA, 15 bp, Homo sapiens
aggagcaaccaaaat

SEQ ID NO: 1647428 - DNA, 15 bp, Homo sapiens
ggagcaaccaaaatg

SEQ ID NO: 1647429 - DNA, 15 bp, Homo sapiens
gagcaaccaaaatgt

SEQ ID NO: 1647430 - DNA, 15 bp, Homo sapiens
agcaaccaaaatgtc

SEQ ID NO: 1647431 - DNA, 15 bp, Homo sapiens
gcaaccaaaatgtca

SEQ ID NO: 1647432 - DNA, 15 bp, Homo sapiens
caaccaaaatgtcac

SEQ ID NO: 1647433 - DNA, 15 bp, Homo sapiens
aaccaaaatgtcaca

SEQ ID NO: 1647434 - DNA, 15 bp, Homo sapiens
accaaaatgtcacaa

SEQ ID NO: 1647435 - DNA, 15 bp, Homo sapiens
ccaaaatgtcacaac

SEQ ID NO: 1647436 - DNA, 15 bp, Homo sapiens
caaaatgtcacaacc

SEQ ID NO: 1647437 - DNA, 15 bp, Homo sapiens
aaaatgtcacaaccc

SEQ ID NO: 1647438 - DNA, 15 bp, Homo sapiens
aaatgtcacaaccca

SEQ ID NO: 1647439 - DNA, 15 bp, Homo sapiens
aatgtcacaacccaa

SEQ ID NO: 1647440 - DNA, 15 bp, Homo sapiens
atgtcacaacccaaa

SEQ ID NO: 1647441 - DNA, 15 bp, Homo sapiens
tgtcacaacccaaaa

SEQ ID NO: 1647442 - DNA, 15 bp, Homo sapiens
gtcacaacccaaaac

SEQ ID NO: 1647443 - DNA, 15 bp, Homo sapiens
tcacaacccaaaact

SEQ ID NO: 1647444 - DNA, 15 bp, Homo sapiens
cacaacccaaaactt

SEQ ID NO: 1647445 - DNA, 15 bp, Homo sapiens
acaacccaaaacttt

SEQ ID NO: 1647446 - DNA, 15 bp, Homo sapiens
caacccaaaacttta

SEQ ID NO: 1647447 - DNA, 15 bp, Homo sapiens
aacccaaaactttac

SEQ ID NO: 1647448 - DNA, 15 bp, Homo sapiens
acccaaaactttaca

SEQ ID NO: 1647449 - DNA, 15 bp, Homo sapiens
cccaaaactttacaa

SEQ ID NO: 1647450 - DNA, 15 bp, Homo sapiens
ccaaaactttacaag

SEQ ID NO: 1647451 - DNA, 15 bp, Homo sapiens
caaaactttacaagc

SEQ ID NO: 1647452 - DNA, 15 bp, Homo sapiens
aaaactttacaagct

SEQ ID NO: 1647453 - DNA, 15 bp, Homo sapiens
aaactttacaagctt

SEQ ID NO: 1647454 - DNA, 15 bp, Homo sapiens
aactttacaagcttt

SEQ ID NO: 1647455 - DNA, 15 bp, Homo sapiens
actttacaagctttg

SEQ ID NO: 1647456 - DNA, 15 bp, Homo sapiens
ctttacaagctttgc

SEQ ID NO: 1647457 - DNA, 15 bp, Homo sapiens
tttacaagctttgct

SEQ ID NO: 1647458 - DNA, 15 bp, Homo sapiens
ttacaagctttgctt

SEQ ID NO: 1647459 - DNA, 15 bp, Homo sapiens
tacaagctttgcttc

SEQ ID NO: 1647460 - DNA, 15 bp, Homo sapiens
acaagctttgcttca

SEQ ID NO: 1647461 - DNA, 15 bp, Homo sapiens
caagctttgcttcag

SEQ ID NO: 1647462 - DNA, 15 bp, Homo sapiens
aagctttgcttcaga

SEQ ID NO: 1647463 - DNA, 15 bp, Homo sapiens
agctttgcttcagaa

SEQ ID NO: 1647464 - DNA, 15 bp, Homo sapiens
gctttgcttcagaat

SEQ ID NO: 1647465 - DNA, 15 bp, Homo sapiens
ctttgcttcagaatt

SEQ ID NO: 1647466 - DNA, 15 bp, Homo sapiens
tttgcttcagaatta

SEQ ID NO: 1647467 - DNA, 15 bp, Homo sapiens
ttgcttcagaattag

SEQ ID NO: 1647468 - DNA, 15 bp, Homo sapiens
tgcttcagaattaga

SEQ ID NO: 1647469 - DNA, 15 bp, Homo sapiens
gcttcagaattagat

SEQ ID NO: 1647470 - DNA, 15 bp, Homo sapiens
cttcagaattagatt

SEQ ID NO: 1647471 - DNA, 15 bp, Homo sapiens
ttcagaattagattg

SEQ ID NO: 1647472 - DNA, 15 bp, Homo sapiens
tcagaattagattgc

SEQ ID NO: 1647473 - DNA, 15 bp, Homo sapiens
cagaattagattgct

SEQ ID NO: 1647474 - DNA, 15 bp, Homo sapiens
agaattagattgctt

SEQ ID NO: 1647475 - DNA, 15 bp, Homo sapiens
gaattagattgcttt

SEQ ID NO: 1647476 - DNA, 15 bp, Homo sapiens
aattagattgcttta

SEQ ID NO: 1647477 - DNA, 15 bp, Homo sapiens
attagattgctttat

SEQ ID NO: 1647478 - DNA, 15 bp, Homo sapiens
ttagattgctttata

SEQ ID NO: 1647479 - DNA, 15 bp, Homo sapiens
tagattgctttataa

SEQ ID NO: 1647480 - DNA, 15 bp, Homo sapiens
agattgctttataat

SEQ ID NO: 1647481 - DNA, 15 bp, Homo sapiens
gattgctttataatt

SEQ ID NO: 1647482 - DNA, 15 bp, Homo sapiens
attgctttataattc

SEQ ID NO: 1647483 - DNA, 15 bp, Homo sapiens
ttgctttataattct

SEQ ID NO: 1647484 - DNA, 15 bp, Homo sapiens
tgctttataattctt

SEQ ID NO: 1647485 - DNA, 15 bp, Homo sapiens
gctttataattcttg

SEQ ID NO: 1647486 - DNA, 15 bp, Homo sapiens
ctttataattcttga

SEQ ID NO: 1647487 - DNA, 15 bp, Homo sapiens
tttataattcttgaa

SEQ ID NO: 1647488 - DNA, 15 bp, Homo sapiens
ttataattcttgaat

SEQ ID NO: 1647489 - DNA, 15 bp, Homo sapiens
tataattcttgaatg

SEQ ID NO: 1647490 - DNA, 15 bp, Homo sapiens
ataattcttgaatga

SEQ ID NO: 1647491 - DNA, 15 bp, Homo sapiens
taattcttgaatgag

SEQ ID NO: 1647492 - DNA, 15 bp, Homo sapiens
aattcttgaatgagg

SEQ ID NO: 1647493 - DNA, 15 bp, Homo sapiens
attcttgaatgaggc

SEQ ID NO: 1647494 - DNA, 15 bp, Homo sapiens
ttcttgaatgaggca

SEQ ID NO: 1647495 - DNA, 15 bp, Homo sapiens
tcttgaatgaggcaa

SEQ ID NO: 1647496 - DNA, 15 bp, Homo sapiens
cttgaatgaggcaat

SEQ ID NO: 1647497 - DNA, 15 bp, Homo sapiens
ttgaatgaggcaatt

SEQ ID NO: 1647498 - DNA, 15 bp, Homo sapiens
tgaatgaggcaattt

SEQ ID NO: 1647499 - DNA, 15 bp, Homo sapiens
gaatgaggcaatttc

SEQ ID NO: 1647500 - DNA, 15 bp, Homo sapiens
aatgaggcaatttca

SEQ ID NO: 1647501 - DNA, 15 bp, Homo sapiens
atgaggcaatttcaa

SEQ ID NO: 1647502 - DNA, 15 bp, Homo sapiens
tgaggcaatttcaag

SEQ ID NO: 1647503 - DNA, 15 bp, Homo sapiens
gaggcaatttcaaga

SEQ ID NO: 1647504 - DNA, 15 bp, Homo sapiens
aggcaatttcaagat

SEQ ID NO: 1647505 - DNA, 15 bp, Homo sapiens
ggcaatttcaagata

SEQ ID NO: 1647506 - DNA, 15 bp, Homo sapiens
gcaatttcaagatat

SEQ ID NO: 1647507 - DNA, 15 bp, Homo sapiens
caatttcaagatatt

SEQ ID NO: 1647508 - DNA, 15 bp, Homo sapiens
aatttcaagatattt

SEQ ID NO: 1647509 - DNA, 15 bp, Homo sapiens
atttcaagatatttg

SEQ ID NO: 1647510 - DNA, 15 bp, Homo sapiens
tttcaagatatttgt

SEQ ID NO: 1647511 - DNA, 15 bp, Homo sapiens
ttcaagatatttgta

SEQ ID NO: 1647512 - DNA, 15 bp, Homo sapiens
tcaagatatttgtaa

SEQ ID NO: 1647513 - DNA, 15 bp, Homo sapiens
caagatatttgtaaa

SEQ ID NO: 1647514 - DNA, 15 bp, Homo sapiens
aagatatttgtaaaa

SEQ ID NO: 1647515 - DNA, 15 bp, Homo sapiens
agatatttgtaaaag

SEQ ID NO: 1647516 - DNA, 15 bp, Homo sapiens
gatatttgtaaaaga

SEQ ID NO: 1647517 - DNA, 15 bp, Homo sapiens
atatttgtaaaagaa

SEQ ID NO: 1647518 - DNA, 15 bp, Homo sapiens
tatttgtaaaagaac

SEQ ID NO: 1647519 - DNA, 15 bp, Homo sapiens
atttgtaaaagaaca

SEQ ID NO: 1647520 - DNA, 15 bp, Homo sapiens
tttgtaaaagaacag

SEQ ID NO: 1647521 - DNA, 15 bp, Homo sapiens
ttgtaaaagaacagt

SEQ ID NO: 1647522 - DNA, 15 bp, Homo sapiens
tgtaaaagaacagta

SEQ ID NO: 1647523 - DNA, 15 bp, Homo sapiens
gtaaaagaacagtaa

SEQ ID NO: 1647524 - DNA, 15 bp, Homo sapiens
taaaagaacagtaaa

SEQ ID NO: 1647525 - DNA, 15 bp, Homo sapiens
aaaagaacagtaaac

SEQ ID NO: 1647526 - DNA, 15 bp, Homo sapiens
aaagaacagtaaaca

SEQ ID NO: 1647527 - DNA, 15 bp, Homo sapiens
aagaacagtaaacat

SEQ ID NO: 1647528 - DNA, 15 bp, Homo sapiens
agaacagtaaacatt

SEQ ID NO: 1647529 - DNA, 15 bp, Homo sapiens
gaacagtaaacattg

SEQ ID NO: 1647530 - DNA, 15 bp, Homo sapiens
aacagtaaacattgg

SEQ ID NO: 1647531 - DNA, 15 bp, Homo sapiens
acagtaaacattggt

SEQ ID NO: 1647532 - DNA, 15 bp, Homo sapiens
cagtaaacattggta

SEQ ID NO: 1647533 - DNA, 15 bp, Homo sapiens
agtaaacattggtaa

SEQ ID NO: 1647534 - DNA, 15 bp, Homo sapiens
gtaaacattggtaag

SEQ ID NO: 1647535 - DNA, 15 bp, Homo sapiens
taaacattggtaaga

SEQ ID NO: 1647536 - DNA, 15 bp, Homo sapiens
aaacattggtaagaa

SEQ ID NO: 1647537 - DNA, 15 bp, Homo sapiens
aacattggtaagaat

SEQ ID NO: 1647538 - DNA, 15 bp, Homo sapiens
acattggtaagaatg

SEQ ID NO: 1647539 - DNA, 15 bp, Homo sapiens
cattggtaagaatga

SEQ ID NO: 1647540 - DNA, 15 bp, Homo sapiens
attggtaagaatgag

SEQ ID NO: 1647541 - DNA, 15 bp, Homo sapiens
ttggtaagaatgagc

SEQ ID NO: 1647542 - DNA, 15 bp, Homo sapiens
tggtaagaatgagct

SEQ ID NO: 1647543 - DNA, 15 bp, Homo sapiens
ggtaagaatgagctt

SEQ ID NO: 1647544 - DNA, 15 bp, Homo sapiens
gtaagaatgagcttt

SEQ ID NO: 1647545 - DNA, 15 bp, Homo sapiens
taagaatgagctttc

SEQ ID NO: 1647546 - DNA, 15 bp, Homo sapiens
aagaatgagctttca

SEQ ID NO: 1647547 - DNA, 15 bp, Homo sapiens
agaatgagctttcaa

SEQ ID NO: 1647548 - DNA, 15 bp, Homo sapiens
gaatgagctttcaac

SEQ ID NO: 1647549 - DNA, 15 bp, Homo sapiens
aatgagctttcaact

SEQ ID NO: 1647550 - DNA, 15 bp, Homo sapiens
atgagctttcaactc

SEQ ID NO: 1647551 - DNA, 15 bp, Homo sapiens
tgagctttcaactca

SEQ ID NO: 1647552 - DNA, 15 bp, Homo sapiens
gagctttcaactcat

SEQ ID NO: 1647553 - DNA, 15 bp, Homo sapiens
agctttcaactcata

SEQ ID NO: 1647554 - DNA, 15 bp, Homo sapiens
gctttcaactcatag

SEQ ID NO: 1647555 - DNA, 15 bp, Homo sapiens
ctttcaactcatagg

SEQ ID NO: 1647556 - DNA, 15 bp, Homo sapiens
tttcaactcataggc

SEQ ID NO: 1647557 - DNA, 15 bp, Homo sapiens
ttcaactcataggct

SEQ ID NO: 1647558 - DNA, 15 bp, Homo sapiens
tcaactcataggctt

SEQ ID NO: 1647559 - DNA, 15 bp, Homo sapiens
caactcataggctta

SEQ ID NO: 1647560 - DNA, 15 bp, Homo sapiens
aactcataggcttat

SEQ ID NO: 1647561 - DNA, 15 bp, Homo sapiens
actcataggcttatt

SEQ ID NO: 1647562 - DNA, 15 bp, Homo sapiens
ctcataggcttattt

SEQ ID NO: 1647563 - DNA, 15 bp, Homo sapiens
tcataggcttatttc

SEQ ID NO: 1647564 - DNA, 15 bp, Homo sapiens
cataggcttatttcc

SEQ ID NO: 1647565 - DNA, 15 bp, Homo sapiens
ataggcttatttcca

SEQ ID NO: 1647566 - DNA, 15 bp, Homo sapiens
taggcttatttccaa

SEQ ID NO: 1647567 - DNA, 15 bp, Homo sapiens
aggcttatttccaat

SEQ ID NO: 1647568 - DNA, 15 bp, Homo sapiens
ggcttatttccaatt

SEQ ID NO: 1647569 - DNA, 15 bp, Homo sapiens
gcttatttccaattt

SEQ ID NO: 1647570 - DNA, 15 bp, Homo sapiens
cttatttccaattta

SEQ ID NO: 1647571 - DNA, 15 bp, Homo sapiens
ttatttccaatttaa

SEQ ID NO: 1647572 - DNA, 15 bp, Homo sapiens
tatttccaatttaat

SEQ ID NO: 1647573 - DNA, 15 bp, Homo sapiens
atttccaatttaatt

SEQ ID NO: 1647574 - DNA, 15 bp, Homo sapiens
tttccaatttaattg

SEQ ID NO: 1647575 - DNA, 15 bp, Homo sapiens
ttccaatttaattga

SEQ ID NO: 1647576 - DNA, 15 bp, Homo sapiens
tccaatttaattgac

SEQ ID NO: 1647577 - DNA, 15 bp, Homo sapiens
ccaatttaattgacc

SEQ ID NO: 1647578 - DNA, 15 bp, Homo sapiens
caatttaattgacca

SEQ ID NO: 1647579 - DNA, 15 bp, Homo sapiens
aatttaattgaccat

SEQ ID NO: 1647580 - DNA, 15 bp, Homo sapiens
atttaattgaccata

SEQ ID NO: 1647581 - DNA, 15 bp, Homo sapiens
tttaattgaccatac

SEQ ID NO: 1647582 - DNA, 15 bp, Homo sapiens
ttaattgaccatact

SEQ ID NO: 1647583 - DNA, 15 bp, Homo sapiens
taattgaccatactg

SEQ ID NO: 1647584 - DNA, 15 bp, Homo sapiens
aattgaccatactgg

SEQ ID NO: 1647585 - DNA, 15 bp, Homo sapiens
attgaccatactgga

SEQ ID NO: 1647586 - DNA, 15 bp, Homo sapiens
ttgaccatactggat

SEQ ID NO: 1647587 - DNA, 15 bp, Homo sapiens
tgaccatactggata

SEQ ID NO: 1647588 - DNA, 15 bp, Homo sapiens
gaccatactggatac

SEQ ID NO: 1647589 - DNA, 15 bp, Homo sapiens
accatactggatact

SEQ ID NO: 1647590 - DNA, 15 bp, Homo sapiens
ccatactggatactt

SEQ ID NO: 1647591 - DNA, 15 bp, Homo sapiens
catactggatactta

SEQ ID NO: 1647592 - DNA, 15 bp, Homo sapiens
atactggatacttag

SEQ ID NO: 1647593 - DNA, 15 bp, Homo sapiens
tactggatacttagg

SEQ ID NO: 1647594 - DNA, 15 bp, Homo sapiens
actggatacttaggt

SEQ ID NO: 1647595 - DNA, 15 bp, Homo sapiens
ctggatacttaggtc

SEQ ID NO: 1647596 - DNA, 15 bp, Homo sapiens
tggatacttaggtca

SEQ ID NO: 1647597 - DNA, 15 bp, Homo sapiens
ggatacttaggtcaa

SEQ ID NO: 1647598 - DNA, 15 bp, Homo sapiens
gatacttaggtcaaa

SEQ ID NO: 1647599 - DNA, 15 bp, Homo sapiens
atacttaggtcaaat

SEQ ID NO: 1647600 - DNA, 15 bp, Homo sapiens
tacttaggtcaaatt

SEQ ID NO: 1647601 - DNA, 15 bp, Homo sapiens
acttaggtcaaattt

SEQ ID NO: 1647602 - DNA, 15 bp, Homo sapiens
cttaggtcaaatttc

SEQ ID NO: 1647603 - DNA, 15 bp, Homo sapiens
ttaggtcaaatttct

SEQ ID NO: 1647604 - DNA, 15 bp, Homo sapiens
taggtcaaatttctg

SEQ ID NO: 1647605 - DNA, 15 bp, Homo sapiens
aggtcaaatttctgt

SEQ ID NO: 1647606 - DNA, 15 bp, Homo sapiens
ggtcaaatttctgtt

SEQ ID NO: 1647607 - DNA, 15 bp, Homo sapiens
gtcaaatttctgttc

SEQ ID NO: 1647608 - DNA, 15 bp, Homo sapiens
tcaaatttctgttct

SEQ ID NO: 1647609 - DNA, 15 bp, Homo sapiens
caaatttctgttctc

SEQ ID NO: 1647610 - DNA, 15 bp, Homo sapiens
aaatttctgttctct

SEQ ID NO: 1647611 - DNA, 15 bp, Homo sapiens
aatttctgttctctc

SEQ ID NO: 1647612 - DNA, 15 bp, Homo sapiens
atttctgttctctct

SEQ ID NO: 1647613 - DNA, 15 bp, Homo sapiens
tttctgttctctctt

SEQ ID NO: 1647614 - DNA, 15 bp, Homo sapiens
ttctgttctctcttc

SEQ ID NO: 1647615 - DNA, 15 bp, Homo sapiens
tctgttctctcttcc

SEQ ID NO: 1647616 - DNA, 15 bp, Homo sapiens
ctgttctctcttccc

SEQ ID NO: 1647617 - DNA, 15 bp, Homo sapiens
tgttctctcttcccc

SEQ ID NO: 1647618 - DNA, 15 bp, Homo sapiens
gttctctcttcccca

SEQ ID NO: 1647619 - DNA, 15 bp, Homo sapiens
ttctctcttccccaa

SEQ ID NO: 1647620 - DNA, 15 bp, Homo sapiens
tctctcttccccaaa

SEQ ID NO: 1647621 - DNA, 15 bp, Homo sapiens
ctctcttccccaaat

SEQ ID NO: 1647622 - DNA, 15 bp, Homo sapiens
tctcttccccaaata

SEQ ID NO: 1647623 - DNA, 15 bp, Homo sapiens
ctcttccccaaataa

SEQ ID NO: 1647624 - DNA, 15 bp, Homo sapiens
tcttccccaaataat

SEQ ID NO: 1647625 - DNA, 15 bp, Homo sapiens
cttccccaaataata

SEQ ID NO: 1647626 - DNA, 15 bp, Homo sapiens
ttccccaaataatat

SEQ ID NO: 1647627 - DNA, 15 bp, Homo sapiens
tccccaaataatatt

SEQ ID NO: 1647628 - DNA, 15 bp, Homo sapiens
ccccaaataatatta

SEQ ID NO: 1647629 - DNA, 15 bp, Homo sapiens
cccaaataatattaa

SEQ ID NO: 1647630 - DNA, 15 bp, Homo sapiens
ccaaataatattaaa

SEQ ID NO: 1647631 - DNA, 15 bp, Homo sapiens
caaataatattaaag

SEQ ID NO: 1647632 - DNA, 15 bp, Homo sapiens
aaataatattaaagt

SEQ ID NO: 1647633 - DNA, 15 bp, Homo sapiens
aataatattaaagta

SEQ ID NO: 1647634 - DNA, 15 bp, Homo sapiens
ataatattaaagtat

SEQ ID NO: 1647635 - DNA, 15 bp, Homo sapiens
taatattaaagtatt

SEQ ID NO: 1647636 - DNA, 15 bp, Homo sapiens
aatattaaagtatta

SEQ ID NO: 1647637 - DNA, 15 bp, Homo sapiens
atattaaagtattat

SEQ ID NO: 1647638 - DNA, 15 bp, Homo sapiens
tattaaagtattatt

SEQ ID NO: 1647639 - DNA, 15 bp, Homo sapiens
attaaagtattattt

SEQ ID NO: 1647640 - DNA, 15 bp, Homo sapiens
ttaaagtattatttg

SEQ ID NO: 1647641 - DNA, 15 bp, Homo sapiens
taaagtattatttga

SEQ ID NO: 1647642 - DNA, 15 bp, Homo sapiens
aaagtattatttgaa

SEQ ID NO: 1647643 - DNA, 15 bp, Homo sapiens
aagtattatttgaac

SEQ ID NO: 1647644 - DNA, 15 bp, Homo sapiens
agtattatttgaact

SEQ ID NO: 1647645 - DNA, 15 bp, Homo sapiens
gtattatttgaactt

SEQ ID NO: 1647646 - DNA, 15 bp, Homo sapiens
tattatttgaacttt

SEQ ID NO: 1647647 - DNA, 15 bp, Homo sapiens
attatttgaactttt

SEQ ID NO: 1647648 - DNA, 15 bp, Homo sapiens
ttatttgaacttttt

SEQ ID NO: 1647649 - DNA, 15 bp, Homo sapiens
tatttgaacttttta

SEQ ID NO: 1647650 - DNA, 15 bp, Homo sapiens
atttgaactttttaa

SEQ ID NO: 1647651 - DNA, 15 bp, Homo sapiens
tttgaactttttaag

SEQ ID NO: 1647652 - DNA, 15 bp, Homo sapiens
ttgaactttttaaga

SEQ ID NO: 1647653 - DNA, 15 bp, Homo sapiens
tgaactttttaagat

SEQ ID NO: 1647654 - DNA, 15 bp, Homo sapiens
gaactttttaagatg

SEQ ID NO: 1647655 - DNA, 15 bp, Homo sapiens
aactttttaagatga

SEQ ID NO: 1647656 - DNA, 15 bp, Homo sapiens
actttttaagatgag

SEQ ID NO: 1647657 - DNA, 15 bp, Homo sapiens
ctttttaagatgagg

SEQ ID NO: 1647658 - DNA, 15 bp, Homo sapiens
tttttaagatgaggc

SEQ ID NO: 1647659 - DNA, 15 bp, Homo sapiens
ttttaagatgaggca

SEQ ID NO: 1647660 - DNA, 15 bp, Homo sapiens
tttaagatgaggcag

SEQ ID NO: 1647661 - DNA, 15 bp, Homo sapiens
ttaagatgaggcagt

SEQ ID NO: 1647662 - DNA, 15 bp, Homo sapiens
taagatgaggcagtt

SEQ ID NO: 1647663 - DNA, 15 bp, Homo sapiens
aagatgaggcagttc

SEQ ID NO: 1647664 - DNA, 15 bp, Homo sapiens
agatgaggcagttcc

SEQ ID NO: 1647665 - DNA, 15 bp, Homo sapiens
gatgaggcagttccc

SEQ ID NO: 1647666 - DNA, 15 bp, Homo sapiens
atgaggcagttcccc

SEQ ID NO: 1647667 - DNA, 15 bp, Homo sapiens
tgaggcagttcccct

SEQ ID NO: 1647668 - DNA, 15 bp, Homo sapiens
gaggcagttcccctg

SEQ ID NO: 1647669 - DNA, 15 bp, Homo sapiens
aggcagttcccctga

SEQ ID NO: 1647670 - DNA, 15 bp, Homo sapiens
ggcagttcccctgaa

SEQ ID NO: 1647671 - DNA, 15 bp, Homo sapiens
gcagttcccctgaaa

SEQ ID NO: 1647672 - DNA, 15 bp, Homo sapiens
cagttcccctgaaaa

SEQ ID NO: 1647673 - DNA, 15 bp, Homo sapiens
agttcccctgaaaaa

SEQ ID NO: 1647674 - DNA, 15 bp, Homo sapiens
gttcccctgaaaaag

SEQ ID NO: 1647675 - DNA, 15 bp, Homo sapiens
ttcccctgaaaaagt

SEQ ID NO: 1647676 - DNA, 15 bp, Homo sapiens
tcccctgaaaaagtt

SEQ ID NO: 1647677 - DNA, 15 bp, Homo sapiens
cccctgaaaaagtta

SEQ ID NO: 1647678 - DNA, 15 bp, Homo sapiens
ccctgaaaaagttaa

SEQ ID NO: 1647679 - DNA, 15 bp, Homo sapiens
cctgaaaaagttaat

SEQ ID NO: 1647680 - DNA, 15 bp, Homo sapiens
ctgaaaaagttaatg

SEQ ID NO: 1647681 - DNA, 15 bp, Homo sapiens
tgaaaaagttaatgc

SEQ ID NO: 1647682 - DNA, 15 bp, Homo sapiens
gaaaaagttaatgca

SEQ ID NO: 1647683 - DNA, 15 bp, Homo sapiens
aaaaagttaatgcag

SEQ ID NO: 1647684 - DNA, 15 bp, Homo sapiens
aaaagttaatgcagc

SEQ ID NO: 1647685 - DNA, 15 bp, Homo sapiens
aaagttaatgcagct

SEQ ID NO: 1647686 - DNA, 15 bp, Homo sapiens
aagttaatgcagctc

SEQ ID NO: 1647687 - DNA, 15 bp, Homo sapiens
agttaatgcagctct

SEQ ID NO: 1647688 - DNA, 15 bp, Homo sapiens
gttaatgcagctctc

SEQ ID NO: 1647689 - DNA, 15 bp, Homo sapiens
ttaatgcagctctcc

SEQ ID NO: 1647690 - DNA, 15 bp, Homo sapiens
taatgcagctctcca

SEQ ID NO: 1647691 - DNA, 15 bp, Homo sapiens
aatgcagctctccat

SEQ ID NO: 1647692 - DNA, 15 bp, Homo sapiens
atgcagctctccatc

SEQ ID NO: 1647693 - DNA, 15 bp, Homo sapiens
tgcagctctccatca

SEQ ID NO: 1647694 - DNA, 15 bp, Homo sapiens
gcagctctccatcag

SEQ ID NO: 1647695 - DNA, 15 bp, Homo sapiens
cagctctccatcaga

SEQ ID NO: 1647696 - DNA, 15 bp, Homo sapiens
agctctccatcagaa

SEQ ID NO: 1647697 - DNA, 15 bp, Homo sapiens
gctctccatcagaat

SEQ ID NO: 1647698 - DNA, 15 bp, Homo sapiens
ctctccatcagaatc

SEQ ID NO: 1647699 - DNA, 15 bp, Homo sapiens
tctccatcagaatcc

SEQ ID NO: 1647700 - DNA, 15 bp, Homo sapiens
ctccatcagaatcca

SEQ ID NO: 1647701 - DNA, 15 bp, Homo sapiens
tccatcagaatccac

SEQ ID NO: 1647702 - DNA, 15 bp, Homo sapiens
ccatcagaatccact

SEQ ID NO: 1647703 - DNA, 15 bp, Homo sapiens
catcagaatccactc

SEQ ID NO: 1647704 - DNA, 15 bp, Homo sapiens
atcagaatccactct

SEQ ID NO: 1647705 - DNA, 15 bp, Homo sapiens
tcagaatccactctt

SEQ ID NO: 1647706 - DNA, 15 bp, Homo sapiens
cagaatccactcttc

SEQ ID NO: 1647707 - DNA, 15 bp, Homo sapiens
agaatccactcttct

SEQ ID NO: 1647708 - DNA, 15 bp, Homo sapiens
gaatccactcttcta

SEQ ID NO: 1647709 - DNA, 15 bp, Homo sapiens
aatccactcttctag

SEQ ID NO: 1647710 - DNA, 15 bp, Homo sapiens
atccactcttctagg

SEQ ID NO: 1647711 - DNA, 15 bp, Homo sapiens
tccactcttctaggg

SEQ ID NO: 1647712 - DNA, 15 bp, Homo sapiens
ccactcttctaggga

SEQ ID NO: 1647713 - DNA, 15 bp, Homo sapiens
cactcttctagggat

SEQ ID NO: 1647714 - DNA, 15 bp, Homo sapiens
actcttctagggata

SEQ ID NO: 1647715 - DNA, 15 bp, Homo sapiens
ctcttctagggatat

SEQ ID NO: 1647716 - DNA, 15 bp, Homo sapiens
tcttctagggatatg

SEQ ID NO: 1647717 - DNA, 15 bp, Homo sapiens
cttctagggatatga

SEQ ID NO: 1647718 - DNA, 15 bp, Homo sapiens
ttctagggatatgaa

SEQ ID NO: 1647719 - DNA, 15 bp, Homo sapiens
tctagggatatgaaa

SEQ ID NO: 1647720 - DNA, 15 bp, Homo sapiens
ctagggatatgaaaa

SEQ ID NO: 1647721 - DNA, 15 bp, Homo sapiens
tagggatatgaaaat

SEQ ID NO: 1647722 - DNA, 15 bp, Homo sapiens
agggatatgaaaatc

SEQ ID NO: 1647723 - DNA, 15 bp, Homo sapiens
gggatatgaaaatct

SEQ ID NO: 1647724 - DNA, 15 bp, Homo sapiens
ggatatgaaaatctc

SEQ ID NO: 1647725 - DNA, 15 bp, Homo sapiens
gatatgaaaatctct

SEQ ID NO: 1647726 - DNA, 15 bp, Homo sapiens
atatgaaaatctctt

SEQ ID NO: 1647727 - DNA, 15 bp, Homo sapiens
tatgaaaatctctta

SEQ ID NO: 1647728 - DNA, 15 bp, Homo sapiens
atgaaaatctcttaa

SEQ ID NO: 1647729 - DNA, 15 bp, Homo sapiens
tgaaaatctcttaac

SEQ ID NO: 1647730 - DNA, 15 bp, Homo sapiens
gaaaatctcttaaca

SEQ ID NO: 1647731 - DNA, 15 bp, Homo sapiens
aaaatctcttaacac

SEQ ID NO: 1647732 - DNA, 15 bp, Homo sapiens
aaatctcttaacacc

SEQ ID NO: 1647733 - DNA, 15 bp, Homo sapiens
aatctcttaacaccc

SEQ ID NO: 1647734 - DNA, 15 bp, Homo sapiens
atctcttaacaccca

SEQ ID NO: 1647735 - DNA, 15 bp, Homo sapiens
tctcttaacacccac

SEQ ID NO: 1647736 - DNA, 15 bp, Homo sapiens
ctcttaacacccacc

SEQ ID NO: 1647737 - DNA, 15 bp, Homo sapiens
tcttaacacccaccc

SEQ ID NO: 1647738 - DNA, 15 bp, Homo sapiens
cttaacacccaccct

SEQ ID NO: 1647739 - DNA, 15 bp, Homo sapiens
ttaacacccacccta

SEQ ID NO: 1647740 - DNA, 15 bp, Homo sapiens
taacacccaccctac

SEQ ID NO: 1647741 - DNA, 15 bp, Homo sapiens
aacacccaccctaca

SEQ ID NO: 1647742 - DNA, 15 bp, Homo sapiens
acacccaccctacat

SEQ ID NO: 1647743 - DNA, 15 bp, Homo sapiens
cacccaccctacata

SEQ ID NO: 1647744 - DNA, 15 bp, Homo sapiens
acccaccctacatac

SEQ ID NO: 1647745 - DNA, 15 bp, Homo sapiens
cccaccctacataca

SEQ ID NO: 1647746 - DNA, 15 bp, Homo sapiens
ccaccctacatacac

SEQ ID NO: 1647747 - DNA, 15 bp, Homo sapiens
caccctacatacaca

SEQ ID NO: 1647748 - DNA, 15 bp, Homo sapiens
accctacatacacag

SEQ ID NO: 1647749 - DNA, 15 bp, Homo sapiens
ccctacatacacaga

SEQ ID NO: 1647750 - DNA, 15 bp, Homo sapiens
cctacatacacagac

SEQ ID NO: 1647751 - DNA, 15 bp, Homo sapiens
ctacatacacagaca

SEQ ID NO: 1647752 - DNA, 15 bp, Homo sapiens
tacatacacagacac

SEQ ID NO: 1647753 - DNA, 15 bp, Homo sapiens
tacacagacacacac

SEQ ID NO: 1647754 - DNA, 15 bp, Homo sapiens
cagacacacacacac

SEQ ID NO: 1647755 - DNA, 15 bp, Homo sapiens
cacacacacacattc

SEQ ID NO: 1647756 - DNA, 15 bp, Homo sapiens
cacacacacattcac

SEQ ID NO: 1647757 - DNA, 15 bp, Homo sapiens
acacacacattcacc

SEQ ID NO: 1647758 - DNA, 15 bp, Homo sapiens
cacacacattcaccc

SEQ ID NO: 1647759 - DNA, 15 bp, Homo sapiens
acacacattcaccct

SEQ ID NO: 1647760 - DNA, 15 bp, Homo sapiens
cacacattcacccta

SEQ ID NO: 1647761 - DNA, 15 bp, Homo sapiens
acacattcaccctaa

SEQ ID NO: 1647762 - DNA, 15 bp, Homo sapiens
cacattcaccctaag

SEQ ID NO: 1647763 - DNA, 15 bp, Homo sapiens
acattcaccctaagg

SEQ ID NO: 1647764 - DNA, 15 bp, Homo sapiens
cattcaccctaagga

SEQ ID NO: 1647765 - DNA, 15 bp, Homo sapiens
attcaccctaaggat

SEQ ID NO: 1647766 - DNA, 15 bp, Homo sapiens
ttcaccctaaggatc

SEQ ID NO: 1647767 - DNA, 15 bp, Homo sapiens
tcaccctaaggatcc

SEQ ID NO: 1647768 - DNA, 15 bp, Homo sapiens
caccctaaggatcca

SEQ ID NO: 1647769 - DNA, 15 bp, Homo sapiens
accctaaggatccaa

SEQ ID NO: 1647770 - DNA, 15 bp, Homo sapiens
ccctaaggatccaat

SEQ ID NO: 1647771 - DNA, 15 bp, Homo sapiens
cctaaggatccaatg

SEQ ID NO: 1647772 - DNA, 15 bp, Homo sapiens
ctaaggatccaatgg

SEQ ID NO: 1647773 - DNA, 15 bp, Homo sapiens
taaggatccaatgga

SEQ ID NO: 1647774 - DNA, 15 bp, Homo sapiens
aaggatccaatggaa

SEQ ID NO: 1647775 - DNA, 15 bp, Homo sapiens
aggatccaatggaat

SEQ ID NO: 1647776 - DNA, 15 bp, Homo sapiens
ggatccaatggaata

SEQ ID NO: 1647777 - DNA, 15 bp, Homo sapiens
gatccaatggaatac

SEQ ID NO: 1647778 - DNA, 15 bp, Homo sapiens
atccaatggaatact

SEQ ID NO: 1647779 - DNA, 15 bp, Homo sapiens
tccaatggaatactg

SEQ ID NO: 1647780 - DNA, 15 bp, Homo sapiens
ccaatggaatactga

SEQ ID NO: 1647781 - DNA, 15 bp, Homo sapiens
caatggaatactgaa

SEQ ID NO: 1647782 - DNA, 15 bp, Homo sapiens
aatggaatactgaaa

SEQ ID NO: 1647783 - DNA, 15 bp, Homo sapiens
atggaatactgaaaa

SEQ ID NO: 1647784 - DNA, 15 bp, Homo sapiens
tggaatactgaaaag

SEQ ID NO: 1647785 - DNA, 15 bp, Homo sapiens
ggaatactgaaaaga

SEQ ID NO: 1647786 - DNA, 15 bp, Homo sapiens
gaatactgaaaagaa

SEQ ID NO: 1647787 - DNA, 15 bp, Homo sapiens
aatactgaaaagaaa

SEQ ID NO: 1647788 - DNA, 15 bp, Homo sapiens
atactgaaaagaaat

SEQ ID NO: 1647789 - DNA, 15 bp, Homo sapiens
tactgaaaagaaatc

SEQ ID NO: 1647790 - DNA, 15 bp, Homo sapiens
actgaaaagaaatca

SEQ ID NO: 1647791 - DNA, 15 bp, Homo sapiens
ctgaaaagaaatcac

SEQ ID NO: 1647792 - DNA, 15 bp, Homo sapiens
tgaaaagaaatcact

SEQ ID NO: 1647793 - DNA, 15 bp, Homo sapiens
gaaaagaaatcactt

SEQ ID NO: 1647794 - DNA, 15 bp, Homo sapiens
aaaagaaatcacttc

SEQ ID NO: 1647795 - DNA, 15 bp, Homo sapiens
aaagaaatcacttcc

SEQ ID NO: 1647796 - DNA, 15 bp, Homo sapiens
aagaaatcacttcct

SEQ ID NO: 1647797 - DNA, 15 bp, Homo sapiens
agaaatcacttcctt

SEQ ID NO: 1647798 - DNA, 15 bp, Homo sapiens
gaaatcacttccttg

SEQ ID NO: 1647799 - DNA, 15 bp, Homo sapiens
aaatcacttccttga

SEQ ID NO: 1647800 - DNA, 15 bp, Homo sapiens
aatcacttccttgaa

SEQ ID NO: 1647801 - DNA, 15 bp, Homo sapiens
atcacttccttgaaa

SEQ ID NO: 1647802 - DNA, 15 bp, Homo sapiens
tcacttccttgaaaa

SEQ ID NO: 1647803 - DNA, 15 bp, Homo sapiens
cacttccttgaaaat

SEQ ID NO: 1647804 - DNA, 15 bp, Homo sapiens
acttccttgaaaatt

SEQ ID NO: 1647805 - DNA, 15 bp, Homo sapiens
cttccttgaaaattt

SEQ ID NO: 1647806 - DNA, 15 bp, Homo sapiens
ttccttgaaaatttt

SEQ ID NO: 1647807 - DNA, 15 bp, Homo sapiens
tccttgaaaatttta

SEQ ID NO: 1647808 - DNA, 15 bp, Homo sapiens
ccttgaaaattttat

SEQ ID NO: 1647809 - DNA, 15 bp, Homo sapiens
cttgaaaattttatt

SEQ ID NO: 1647810 - DNA, 15 bp, Homo sapiens
ttgaaaattttatta

SEQ ID NO: 1647811 - DNA, 15 bp, Homo sapiens
tgaaaattttattaa

SEQ ID NO: 1647812 - DNA, 15 bp, Homo sapiens
gaaaattttattaaa

SEQ ID NO: 1647813 - DNA, 15 bp, Homo sapiens
aattttattaaaaaa

SEQ ID NO: 1647814 - DNA, 15 bp, Homo sapiens
attttattaaaaaac

SEQ ID NO: 1647815 - DNA, 15 bp, Homo sapiens
ttttattaaaaaaca

SEQ ID NO: 1647816 - DNA, 15 bp, Homo sapiens
tttattaaaaaacaa

SEQ ID NO: 1647817 - DNA, 15 bp, Homo sapiens
ttattaaaaaacaaa

SEQ ID NO: 1647818 - DNA, 15 bp, Homo sapiens
tattaaaaaacaaac

SEQ ID NO: 1647819 - DNA, 15 bp, Homo sapiens
attaaaaaacaaaca

SEQ ID NO: 1647820 - DNA, 15 bp, Homo sapiens
aaacaaacaaaaagc

SEQ ID NO: 1647821 - DNA, 15 bp, Homo sapiens
aacaaacaaaaagcc

SEQ ID NO: 1647822 - DNA, 15 bp, Homo sapiens
acaaacaaaaagcct

SEQ ID NO: 1647823 - DNA, 15 bp, Homo sapiens
aaacaaaaagcctgt

SEQ ID NO: 1647824 - DNA, 15 bp, Homo sapiens
aacaaaaagcctgtc

SEQ ID NO: 1647825 - DNA, 15 bp, Homo sapiens
acaaaaagcctgtcc

SEQ ID NO: 1647826 - DNA, 15 bp, Homo sapiens
caaaaagcctgtcca

SEQ ID NO: 1647827 - DNA, 15 bp, Homo sapiens
aaaaagcctgtccac

SEQ ID NO: 1647828 - DNA, 15 bp, Homo sapiens
aaaagcctgtccacc

SEQ ID NO: 1647829 - DNA, 15 bp, Homo sapiens
aaagcctgtccaccc

SEQ ID NO: 1647830 - DNA, 15 bp, Homo sapiens
aagcctgtccaccct

SEQ ID NO: 1647831 - DNA, 15 bp, Homo sapiens
agcctgtccaccctt

SEQ ID NO: 1647832 - DNA, 15 bp, Homo sapiens
gcctgtccacccttg

SEQ ID NO: 1647833 - DNA, 15 bp, Homo sapiens
cctgtccacccttga

SEQ ID NO: 1647834 - DNA, 15 bp, Homo sapiens
ctgtccacccttgag

SEQ ID NO: 1647835 - DNA, 15 bp, Homo sapiens
tgtccacccttgaga

SEQ ID NO: 1647836 - DNA, 15 bp, Homo sapiens
gtccacccttgagaa

SEQ ID NO: 1647837 - DNA, 15 bp, Homo sapiens
tccacccttgagaat

SEQ ID NO: 1647838 - DNA, 15 bp, Homo sapiens
ccacccttgagaatc

SEQ ID NO: 1647839 - DNA, 15 bp, Homo sapiens
cacccttgagaatcc

SEQ ID NO: 1647840 - DNA, 15 bp, Homo sapiens
acccttgagaatcct

SEQ ID NO: 1647841 - DNA, 15 bp, Homo sapiens
cccttgagaatcctt

SEQ ID NO: 1647842 - DNA, 15 bp, Homo sapiens
ccttgagaatccttc

SEQ ID NO: 1647843 - DNA, 15 bp, Homo sapiens
cttgagaatccttcc

SEQ ID NO: 1647844 - DNA, 15 bp, Homo sapiens
ttgagaatccttcct

SEQ ID NO: 1647845 - DNA, 15 bp, Homo sapiens
tgagaatccttcctc

SEQ ID NO: 1647846 - DNA, 15 bp, Homo sapiens
gagaatccttcctct

SEQ ID NO: 1647847 - DNA, 15 bp, Homo sapiens
agaatccttcctctc

SEQ ID NO: 1647848 - DNA, 15 bp, Homo sapiens
gaatccttcctctcc

SEQ ID NO: 1647849 - DNA, 15 bp, Homo sapiens
aatccttcctctcct

SEQ ID NO: 1647850 - DNA, 15 bp, Homo sapiens
atccttcctctcctt

SEQ ID NO: 1647851 - DNA, 15 bp, Homo sapiens
tccttcctctccttg

SEQ ID NO: 1647852 - DNA, 15 bp, Homo sapiens
ccttcctctccttgg

SEQ ID NO: 1647853 - DNA, 15 bp, Homo sapiens
cttcctctccttgga

SEQ ID NO: 1647854 - DNA, 15 bp, Homo sapiens
ttcctctccttggaa

SEQ ID NO: 1647855 - DNA, 15 bp, Homo sapiens
tcctctccttggaac

SEQ ID NO: 1647856 - DNA, 15 bp, Homo sapiens
cctctccttggaacg

SEQ ID NO: 1647857 - DNA, 15 bp, Homo sapiens
ctctccttggaacgt

SEQ ID NO: 1647858 - DNA, 15 bp, Homo sapiens
tctccttggaacgtc

SEQ ID NO: 1647859 - DNA, 15 bp, Homo sapiens
ctccttggaacgtca

SEQ ID NO: 1647860 - DNA, 15 bp, Homo sapiens
tccttggaacgtcaa

SEQ ID NO: 1647861 - DNA, 15 bp, Homo sapiens
ccttggaacgtcaat

SEQ ID NO: 1647862 - DNA, 15 bp, Homo sapiens
cttggaacgtcaatg

SEQ ID NO: 1647863 - DNA, 15 bp, Homo sapiens
ttggaacgtcaatgt

SEQ ID NO: 1647864 - DNA, 15 bp, Homo sapiens
tggaacgtcaatgtt

SEQ ID NO: 1647865 - DNA, 15 bp, Homo sapiens
ggaacgtcaatgttt

SEQ ID NO: 1647866 - DNA, 15 bp, Homo sapiens
gaacgtcaatgtttg

SEQ ID NO: 1647867 - DNA, 15 bp, Homo sapiens
aacgtcaatgtttgt

SEQ ID NO: 1647868 - DNA, 15 bp, Homo sapiens
acgtcaatgtttgtg

SEQ ID NO: 1647869 - DNA, 15 bp, Homo sapiens
cgtcaatgtttgtgt

SEQ ID NO: 1647870 - DNA, 15 bp, Homo sapiens
gtcaatgtttgtgta

SEQ ID NO: 1647871 - DNA, 15 bp, Homo sapiens
tcaatgtttgtgtag

SEQ ID NO: 1647872 - DNA, 15 bp, Homo sapiens
caatgtttgtgtaga

SEQ ID NO: 1647873 - DNA, 15 bp, Homo sapiens
aatgtttgtgtagat

SEQ ID NO: 1647874 - DNA, 15 bp, Homo sapiens
atgtttgtgtagatg

SEQ ID NO: 1647875 - DNA, 15 bp, Homo sapiens
tgtttgtgtagatga

SEQ ID NO: 1647876 - DNA, 15 bp, Homo sapiens
gtttgtgtagatgaa

SEQ ID NO: 1647877 - DNA, 15 bp, Homo sapiens
tttgtgtagatgaaa

SEQ ID NO: 1647878 - DNA, 15 bp, Homo sapiens
ttgtgtagatgaaac

SEQ ID NO: 1647879 - DNA, 15 bp, Homo sapiens
tgtgtagatgaaacc

SEQ ID NO: 1647880 - DNA, 15 bp, Homo sapiens
gtgtagatgaaacca

SEQ ID NO: 1647881 - DNA, 15 bp, Homo sapiens
tgtagatgaaaccat

SEQ ID NO: 1647882 - DNA, 15 bp, Homo sapiens
gtagatgaaaccatc

SEQ ID NO: 1647883 - DNA, 15 bp, Homo sapiens
tagatgaaaccatct

SEQ ID NO: 1647884 - DNA, 15 bp, Homo sapiens
agatgaaaccatctc

SEQ ID NO: 1647885 - DNA, 15 bp, Homo sapiens
gatgaaaccatctca

SEQ ID NO: 1647886 - DNA, 15 bp, Homo sapiens
atgaaaccatctcat

SEQ ID NO: 1647887 - DNA, 15 bp, Homo sapiens
tgaaaccatctcatg

SEQ ID NO: 1647888 - DNA, 15 bp, Homo sapiens
gaaaccatctcatgc

SEQ ID NO: 1647889 - DNA, 15 bp, Homo sapiens
aaaccatctcatgct

SEQ ID NO: 1647890 - DNA, 15 bp, Homo sapiens
aaccatctcatgctc

SEQ ID NO: 1647891 - DNA, 15 bp, Homo sapiens
accatctcatgctct

SEQ ID NO: 1647892 - DNA, 15 bp, Homo sapiens
ccatctcatgctctg

SEQ ID NO: 1647893 - DNA, 15 bp, Homo sapiens
catctcatgctctgt

SEQ ID NO: 1647894 - DNA, 15 bp, Homo sapiens
atctcatgctctgtg

SEQ ID NO: 1647895 - DNA, 15 bp, Homo sapiens
tctcatgctctgtgg

SEQ ID NO: 1647896 - DNA, 15 bp, Homo sapiens
ctcatgctctgtggc

SEQ ID NO: 1647897 - DNA, 15 bp, Homo sapiens
tcatgctctgtggct

SEQ ID NO: 1647898 - DNA, 15 bp, Homo sapiens
catgctctgtggctc

SEQ ID NO: 1647899 - DNA, 15 bp, Homo sapiens
atgctctgtggctcc

SEQ ID NO: 1647900 - DNA, 15 bp, Homo sapiens
tgctctgtggctcca

SEQ ID NO: 1647901 - DNA, 15 bp, Homo sapiens
gctctgtggctccag

SEQ ID NO: 1647902 - DNA, 15 bp, Homo sapiens
ctctgtggctccagg

SEQ ID NO: 1647903 - DNA, 15 bp, Homo sapiens
tctgtggctccaggg

SEQ ID NO: 1647904 - DNA, 15 bp, Homo sapiens
ctgtggctccagggt

SEQ ID NO: 1647905 - DNA, 15 bp, Homo sapiens
tgtggctccagggtt

SEQ ID NO: 1647906 - DNA, 15 bp, Homo sapiens
gtggctccagggttt

SEQ ID NO: 1647907 - DNA, 15 bp, Homo sapiens
tggctccagggtttc

SEQ ID NO: 1647908 - DNA, 15 bp, Homo sapiens
ggctccagggtttct

SEQ ID NO: 1647909 - DNA, 15 bp, Homo sapiens
gctccagggtttctg

SEQ ID NO: 1647910 - DNA, 15 bp, Homo sapiens
ctccagggtttctgt

SEQ ID NO: 1647911 - DNA, 15 bp, Homo sapiens
tccagggtttctgtt

SEQ ID NO: 1647912 - DNA, 15 bp, Homo sapiens
ccagggtttctgtta

SEQ ID NO: 1647913 - DNA, 15 bp, Homo sapiens
cagggtttctgttac

SEQ ID NO: 1647914 - DNA, 15 bp, Homo sapiens
agggtttctgttact

SEQ ID NO: 1647915 - DNA, 15 bp, Homo sapiens
gggtttctgttacta

SEQ ID NO: 1647916 - DNA, 15 bp, Homo sapiens
ggtttctgttactat

SEQ ID NO: 1647917 - DNA, 15 bp, Homo sapiens
gtttctgttactatt

SEQ ID NO: 1647918 - DNA, 15 bp, Homo sapiens
tttctgttactattt

SEQ ID NO: 1647919 - DNA, 15 bp, Homo sapiens
ttctgttactatttt

SEQ ID NO: 1647920 - DNA, 15 bp, Homo sapiens
tctgttactatttta

SEQ ID NO: 1647921 - DNA, 15 bp, Homo sapiens
ctgttactattttat

SEQ ID NO: 1647922 - DNA, 15 bp, Homo sapiens
tgttactattttatg

SEQ ID NO: 1647923 - DNA, 15 bp, Homo sapiens
gttactattttatgc

SEQ ID NO: 1647924 - DNA, 15 bp, Homo sapiens
ttactattttatgca

SEQ ID NO: 1647925 - DNA, 15 bp, Homo sapiens
tactattttatgcac

SEQ ID NO: 1647926 - DNA, 15 bp, Homo sapiens
actattttatgcact

SEQ ID NO: 1647927 - DNA, 15 bp, Homo sapiens
ctattttatgcactt

SEQ ID NO: 1647928 - DNA, 15 bp, Homo sapiens
tattttatgcacttg

SEQ ID NO: 1647929 - DNA, 15 bp, Homo sapiens
attttatgcacttgg

SEQ ID NO: 1647930 - DNA, 15 bp, Homo sapiens
ttttatgcacttggg

SEQ ID NO: 1647931 - DNA, 15 bp, Homo sapiens
tttatgcacttggga

SEQ ID NO: 1647932 - DNA, 15 bp, Homo sapiens
ttatgcacttgggag

SEQ ID NO: 1647933 - DNA, 15 bp, Homo sapiens
tatgcacttgggaga

SEQ ID NO: 1647934 - DNA, 15 bp, Homo sapiens
atgcacttgggagaa

SEQ ID NO: 1647935 - DNA, 15 bp, Homo sapiens
tgcacttgggagaag

SEQ ID NO: 1647936 - DNA, 15 bp, Homo sapiens
gcacttgggagaagg

SEQ ID NO: 1647937 - DNA, 15 bp, Homo sapiens
cacttgggagaaggc

SEQ ID NO: 1647938 - DNA, 15 bp, Homo sapiens
acttgggagaaggct

SEQ ID NO: 1647939 - DNA, 15 bp, Homo sapiens
cttgggagaaggctt

SEQ ID NO: 1647940 - DNA, 15 bp, Homo sapiens
ttgggagaaggctta

SEQ ID NO: 1647941 - DNA, 15 bp, Homo sapiens
tgggagaaggcttag

SEQ ID NO: 1647942 - DNA, 15 bp, Homo sapiens
gggagaaggcttaga

SEQ ID NO: 1647943 - DNA, 15 bp, Homo sapiens
ggagaaggcttagaa

SEQ ID NO: 1647944 - DNA, 15 bp, Homo sapiens
gagaaggcttagaat

SEQ ID NO: 1647945 - DNA, 15 bp, Homo sapiens
agaaggcttagaata

SEQ ID NO: 1647946 - DNA, 15 bp, Homo sapiens
gaaggcttagaataa

SEQ ID NO: 1647947 - DNA, 15 bp, Homo sapiens
aaggcttagaataaa

SEQ ID NO: 1647948 - DNA, 15 bp, Homo sapiens
aggcttagaataaaa

SEQ ID NO: 1647949 - DNA, 15 bp, Homo sapiens
ggcttagaataaaag

SEQ ID NO: 1647950 - DNA, 15 bp, Homo sapiens
gcttagaataaaaga

SEQ ID NO: 1647951 - DNA, 15 bp, Homo sapiens
cttagaataaaagat

SEQ ID NO: 1647952 - DNA, 15 bp, Homo sapiens
ttagaataaaagatg

SEQ ID NO: 1647953 - DNA, 15 bp, Homo sapiens
tagaataaaagatgt

SEQ ID NO: 1647954 - DNA, 15 bp, Homo sapiens
agaataaaagatgta

SEQ ID NO: 1647955 - DNA, 15 bp, Homo sapiens
gaataaaagatgtag

SEQ ID NO: 1647956 - DNA, 15 bp, Homo sapiens
aataaaagatgtagc

SEQ ID NO: 1647957 - DNA, 15 bp, Homo sapiens
ataaaagatgtagca

SEQ ID NO: 1647958 - DNA, 15 bp, Homo sapiens
taaaagatgtagcac

SEQ ID NO: 1647959 - DNA, 15 bp, Homo sapiens
aaaagatgtagcaca

SEQ ID NO: 1647960 - DNA, 15 bp, Homo sapiens
aaagatgtagcacat

SEQ ID NO: 1647961 - DNA, 15 bp, Homo sapiens
aagatgtagcacatt

SEQ ID NO: 1647962 - DNA, 15 bp, Homo sapiens
agatgtagcacattt

SEQ ID NO: 1647963 - DNA, 15 bp, Homo sapiens
gatgtagcacatttt

SEQ ID NO: 1647964 - DNA, 15 bp, Homo sapiens
atgtagcacattttg

SEQ ID NO: 1647965 - DNA, 15 bp, Homo sapiens
tgtagcacattttgc

SEQ ID NO: 1647966 - DNA, 15 bp, Homo sapiens
gtagcacattttgct

SEQ ID NO: 1647967 - DNA, 15 bp, Homo sapiens
tagcacattttgctt

SEQ ID NO: 1647968 - DNA, 15 bp, Homo sapiens
agcacattttgcttt

SEQ ID NO: 1647969 - DNA, 15 bp, Homo sapiens
gcacattttgctttc

SEQ ID NO: 1647970 - DNA, 15 bp, Homo sapiens
cacattttgctttcc

SEQ ID NO: 1647971 - DNA, 15 bp, Homo sapiens
acattttgctttccc

SEQ ID NO: 1647972 - DNA, 15 bp, Homo sapiens
cattttgctttccca

SEQ ID NO: 1647973 - DNA, 15 bp, Homo sapiens
attttgctttcccat

SEQ ID NO: 1647974 - DNA, 15 bp, Homo sapiens
ttttgctttcccatt

SEQ ID NO: 1647975 - DNA, 15 bp, Homo sapiens
tttgctttcccattt

SEQ ID NO: 1647976 - DNA, 15 bp, Homo sapiens
ttgctttcccattta

SEQ ID NO: 1647977 - DNA, 15 bp, Homo sapiens
tgctttcccatttat

SEQ ID NO: 1647978 - DNA, 15 bp, Homo sapiens
gctttcccatttatt

SEQ ID NO: 1647979 - DNA, 15 bp, Homo sapiens
ctttcccatttattg

SEQ ID NO: 1647980 - DNA, 15 bp, Homo sapiens
tttcccatttattgt

SEQ ID NO: 1647981 - DNA, 15 bp, Homo sapiens
ttcccatttattgtt

SEQ ID NO: 1647982 - DNA, 15 bp, Homo sapiens
tcccatttattgttt

SEQ ID NO: 1647983 - DNA, 15 bp, Homo sapiens
cccatttattgtttg

SEQ ID NO: 1647984 - DNA, 15 bp, Homo sapiens
ccatttattgtttgg

SEQ ID NO: 1647985 - DNA, 15 bp, Homo sapiens
catttattgtttggc

SEQ ID NO: 1647986 - DNA, 15 bp, Homo sapiens
atttattgtttggcc

SEQ ID NO: 1647987 - DNA, 15 bp, Homo sapiens
tttattgtttggcca

SEQ ID NO: 1647988 - DNA, 15 bp, Homo sapiens
ttattgtttggccag

SEQ ID NO: 1647989 - DNA, 15 bp, Homo sapiens
tattgtttggccagc

SEQ ID NO: 1647990 - DNA, 15 bp, Homo sapiens
attgtttggccagct

SEQ ID NO: 1647991 - DNA, 15 bp, Homo sapiens
ttgtttggccagcta

SEQ ID NO: 1647992 - DNA, 15 bp, Homo sapiens
tgtttggccagctat

SEQ ID NO: 1647993 - DNA, 15 bp, Homo sapiens
gtttggccagctatg

SEQ ID NO: 1647994 - DNA, 15 bp, Homo sapiens
tttggccagctatgc

SEQ ID NO: 1647995 - DNA, 15 bp, Homo sapiens
ttggccagctatgcc

SEQ ID NO: 1647996 - DNA, 15 bp, Homo sapiens
tggccagctatgcca

SEQ ID NO: 1647997 - DNA, 15 bp, Homo sapiens
ggccagctatgccaa

SEQ ID NO: 1647998 - DNA, 15 bp, Homo sapiens
gccagctatgccaat

SEQ ID NO: 1647999 - DNA, 15 bp, Homo sapiens
ccagctatgccaatg

SEQ ID NO: 1648000 - DNA, 15 bp, Homo sapiens
cagctatgccaatgt

SEQ ID NO: 1648001 - DNA, 15 bp, Homo sapiens
agctatgccaatgtg

SEQ ID NO: 1648002 - DNA, 15 bp, Homo sapiens
gctatgccaatgtgg

SEQ ID NO: 1648003 - DNA, 15 bp, Homo sapiens
ctatgccaatgtggt

SEQ ID NO: 1648004 - DNA, 15 bp, Homo sapiens
tatgccaatgtggtg

SEQ ID NO: 1648005 - DNA, 15 bp, Homo sapiens
atgccaatgtggtgc

SEQ ID NO: 1648006 - DNA, 15 bp, Homo sapiens
tgccaatgtggtgct

SEQ ID NO: 1648007 - DNA, 15 bp, Homo sapiens
gccaatgtggtgcta

SEQ ID NO: 1648008 - DNA, 15 bp, Homo sapiens
ccaatgtggtgctat

SEQ ID NO: 1648009 - DNA, 15 bp, Homo sapiens
caatgtggtgctatt

SEQ ID NO: 1648010 - DNA, 15 bp, Homo sapiens
aatgtggtgctattg

SEQ ID NO: 1648011 - DNA, 15 bp, Homo sapiens
atgtggtgctattgt

SEQ ID NO: 1648012 - DNA, 15 bp, Homo sapiens
tgtggtgctattgtt

SEQ ID NO: 1648013 - DNA, 15 bp, Homo sapiens
gtggtgctattgttt

SEQ ID NO: 1648014 - DNA, 15 bp, Homo sapiens
tggtgctattgtttc

SEQ ID NO: 1648015 - DNA, 15 bp, Homo sapiens
ggtgctattgtttct

SEQ ID NO: 1648016 - DNA, 15 bp, Homo sapiens
gtgctattgtttctt

SEQ ID NO: 1648017 - DNA, 15 bp, Homo sapiens
tgctattgtttcttt

SEQ ID NO: 1648018 - DNA, 15 bp, Homo sapiens
gctattgtttcttta

SEQ ID NO: 1648019 - DNA, 15 bp, Homo sapiens
ctattgtttctttaa

SEQ ID NO: 1648020 - DNA, 15 bp, Homo sapiens
tattgtttctttaag

SEQ ID NO: 1648021 - DNA, 15 bp, Homo sapiens
attgtttctttaaga

SEQ ID NO: 1648022 - DNA, 15 bp, Homo sapiens
ttgtttctttaagaa

SEQ ID NO: 1648023 - DNA, 15 bp, Homo sapiens
tgtttctttaagaaa

SEQ ID NO: 1648024 - DNA, 15 bp, Homo sapiens
gtttctttaagaaag

SEQ ID NO: 1648025 - DNA, 15 bp, Homo sapiens
tttctttaagaaagt

SEQ ID NO: 1648026 - DNA, 15 bp, Homo sapiens
ttctttaagaaagta

SEQ ID NO: 1648027 - DNA, 15 bp, Homo sapiens
tctttaagaaagtac

SEQ ID NO: 1648028 - DNA, 15 bp, Homo sapiens
ctttaagaaagtact

SEQ ID NO: 1648029 - DNA, 15 bp, Homo sapiens
tttaagaaagtactt

SEQ ID NO: 1648030 - DNA, 15 bp, Homo sapiens
ttaagaaagtacttg

SEQ ID NO: 1648031 - DNA, 15 bp, Homo sapiens
taagaaagtacttga

SEQ ID NO: 1648032 - DNA, 15 bp, Homo sapiens
aagaaagtacttgac

SEQ ID NO: 1648033 - DNA, 15 bp, Homo sapiens
agaaagtacttgact

SEQ ID NO: 1648034 - DNA, 15 bp, Homo sapiens
gaaagtacttgacta

SEQ ID NO: 1648035 - DNA, 15 bp, Homo sapiens
aaagtacttgactaa

SEQ ID NO: 1648036 - DNA, 15 bp, Homo sapiens
aagtacttgactaaa

SEQ ID NO: 1648037 - DNA, 15 bp, Homo sapiens
agtacttgactaaaa

SEQ ID NO: 1648038 - DNA, 15 bp, Homo sapiens
gtacttgactaaaaa

SEQ ID NO: 1648039 - DNA, 15 bp, Homo sapiens
tacttgactaaaaaa

SEQ ID NO: 1648040 - DNA, 15 bp, Homo sapiens
acttgactaaaaaaa

SEQ ID NO: 1648041 - DNA, 15 bp, Homo sapiens
cttgactaaaaaaaa

SEQ ID NO: 1648042 - DNA, 15 bp, Homo sapiens
ttgactaaaaaaaaa

SEQ ID NO: 1648043 - DNA, 15 bp, Homo sapiens
tgactaaaaaaaaaa

SEQ ID NO: 1648044 - DNA, 15 bp, Homo sapiens
gactaaaaaaaaaag

SEQ ID NO: 1648045 - DNA, 15 bp, Homo sapiens
actaaaaaaaaaaga

SEQ ID NO: 1648046 - DNA, 15 bp, Homo sapiens
ctaaaaaaaaaagaa

SEQ ID NO: 1648047 - DNA, 15 bp, Homo sapiens
taaaaaaaaaagaaa

SEQ ID NO: 1648048 - DNA, 15 bp, Homo sapiens
agaaaaaaaagaaag

SEQ ID NO: 1648049 - DNA, 15 bp, Homo sapiens
gaaaaaaaagaaagc

SEQ ID NO: 1648050 - DNA, 15 bp, Homo sapiens
aaaaaaaagaaagca

SEQ ID NO: 1648051 - DNA, 15 bp, Homo sapiens
aaaaaaagaaagcat

SEQ ID NO: 1648052 - DNA, 15 bp, Homo sapiens
aaaaaagaaagcata

SEQ ID NO: 1648053 - DNA, 15 bp, Homo sapiens
aaaaagaaagcatag

SEQ ID NO: 1648054 - DNA, 15 bp, Homo sapiens
aaaagaaagcataga

SEQ ID NO: 1648055 - DNA, 15 bp, Homo sapiens
aaagaaagcatagac

SEQ ID NO: 1648056 - DNA, 15 bp, Homo sapiens
aagaaagcatagaca

SEQ ID NO: 1648057 - DNA, 15 bp, Homo sapiens
agaaagcatagacat

SEQ ID NO: 1648058 - DNA, 15 bp, Homo sapiens
gaaagcatagacata

SEQ ID NO: 1648059 - DNA, 15 bp, Homo sapiens
aaagcatagacatat

SEQ ID NO: 1648060 - DNA, 15 bp, Homo sapiens
aagcatagacatatt

SEQ ID NO: 1648061 - DNA, 15 bp, Homo sapiens
agcatagacatattt

SEQ ID NO: 1648062 - DNA, 15 bp, Homo sapiens
gcatagacatatttt

SEQ ID NO: 1648063 - DNA, 15 bp, Homo sapiens
catagacatattttt

SEQ ID NO: 1648064 - DNA, 15 bp, Homo sapiens
atagacatatttttt

SEQ ID NO: 1648065 - DNA, 15 bp, Homo sapiens
tagacatattttttt

SEQ ID NO: 1648066 - DNA, 15 bp, Homo sapiens
agacatattttttta

SEQ ID NO: 1648067 - DNA, 15 bp, Homo sapiens
gacatatttttttaa

SEQ ID NO: 1648068 - DNA, 15 bp, Homo sapiens
acatatttttttaaa

SEQ ID NO: 1648069 - DNA, 15 bp, Homo sapiens
catatttttttaaag

SEQ ID NO: 1648070 - DNA, 15 bp, Homo sapiens
atatttttttaaagt

SEQ ID NO: 1648071 - DNA, 15 bp, Homo sapiens
tatttttttaaagta

SEQ ID NO: 1648072 - DNA, 15 bp, Homo sapiens
atttttttaaagtat

SEQ ID NO: 1648073 - DNA, 15 bp, Homo sapiens
tttttttaaagtata

SEQ ID NO: 1648074 - DNA, 15 bp, Homo sapiens
ttttttaaagtataa

SEQ ID NO: 1648075 - DNA, 15 bp, Homo sapiens
tttttaaagtataaa

SEQ ID NO: 1648076 - DNA, 15 bp, Homo sapiens
ttttaaagtataaaa

SEQ ID NO: 1648077 - DNA, 15 bp, Homo sapiens
tttaaagtataaaaa

SEQ ID NO: 1648078 - DNA, 15 bp, Homo sapiens
ttaaagtataaaaac

SEQ ID NO: 1648079 - DNA, 15 bp, Homo sapiens
taaagtataaaaaca

SEQ ID NO: 1648080 - DNA, 15 bp, Homo sapiens
aaagtataaaaacaa

SEQ ID NO: 1648081 - DNA, 15 bp, Homo sapiens
aagtataaaaacaac

SEQ ID NO: 1648082 - DNA, 15 bp, Homo sapiens
agtataaaaacaaca

SEQ ID NO: 1648083 - DNA, 15 bp, Homo sapiens
gtataaaaacaacaa

SEQ ID NO: 1648084 - DNA, 15 bp, Homo sapiens
tataaaaacaacaat

SEQ ID NO: 1648085 - DNA, 15 bp, Homo sapiens
ataaaaacaacaatt

SEQ ID NO: 1648086 - DNA, 15 bp, Homo sapiens
taaaaacaacaattc

SEQ ID NO: 1648087 - DNA, 15 bp, Homo sapiens
aaaaacaacaattct

SEQ ID NO: 1648088 - DNA, 15 bp, Homo sapiens
aaaacaacaattcta

SEQ ID NO: 1648089 - DNA, 15 bp, Homo sapiens
aaacaacaattctat

SEQ ID NO: 1648090 - DNA, 15 bp, Homo sapiens
aacaacaattctata

SEQ ID NO: 1648091 - DNA, 15 bp, Homo sapiens
acaacaattctatag

SEQ ID NO: 1648092 - DNA, 15 bp, Homo sapiens
caacaattctataga

SEQ ID NO: 1648093 - DNA, 15 bp, Homo sapiens
aacaattctatagat

SEQ ID NO: 1648094 - DNA, 15 bp, Homo sapiens
acaattctatagata

SEQ ID NO: 1648095 - DNA, 15 bp, Homo sapiens
caattctatagatag

SEQ ID NO: 1648096 - DNA, 15 bp, Homo sapiens
aattctatagataga

SEQ ID NO: 1648097 - DNA, 15 bp, Homo sapiens
attctatagatagat

SEQ ID NO: 1648098 - DNA, 15 bp, Homo sapiens
ttctatagatagatg

SEQ ID NO: 1648099 - DNA, 15 bp, Homo sapiens
tctatagatagatgg

SEQ ID NO: 1648100 - DNA, 15 bp, Homo sapiens
ctatagatagatggc

SEQ ID NO: 1648101 - DNA, 15 bp, Homo sapiens
tatagatagatggct

SEQ ID NO: 1648102 - DNA, 15 bp, Homo sapiens
atagatagatggctt

SEQ ID NO: 1648103 - DNA, 15 bp, Homo sapiens
tagatagatggctta

SEQ ID NO: 1648104 - DNA, 15 bp, Homo sapiens
agatagatggcttaa

SEQ ID NO: 1648105 - DNA, 15 bp, Homo sapiens
gatagatggcttaat

SEQ ID NO: 1648106 - DNA, 15 bp, Homo sapiens
atagatggcttaata

SEQ ID NO: 1648107 - DNA, 15 bp, Homo sapiens
tagatggcttaataa

SEQ ID NO: 1648108 - DNA, 15 bp, Homo sapiens
agatggcttaataaa

SEQ ID NO: 1648109 - DNA, 15 bp, Homo sapiens
gatggcttaataaaa

SEQ ID NO: 1648110 - DNA, 15 bp, Homo sapiens
atggcttaataaaat

SEQ ID NO: 1648111 - DNA, 15 bp, Homo sapiens
tggcttaataaaata

SEQ ID NO: 1648112 - DNA, 15 bp, Homo sapiens
ggcttaataaaatag

SEQ ID NO: 1648113 - DNA, 15 bp, Homo sapiens
gcttaataaaatagc

SEQ ID NO: 1648114 - DNA, 15 bp, Homo sapiens
cttaataaaatagca

SEQ ID NO: 1648115 - DNA, 15 bp, Homo sapiens
ttaataaaatagcat

SEQ ID NO: 1648116 - DNA, 15 bp, Homo sapiens
taataaaatagcatt

SEQ ID NO: 1648117 - DNA, 15 bp, Homo sapiens
aataaaatagcatta

SEQ ID NO: 1648118 - DNA, 15 bp, Homo sapiens
ataaaatagcattag

SEQ ID NO: 1648119 - DNA, 15 bp, Homo sapiens
taaaatagcattagg

SEQ ID NO: 1648120 - DNA, 15 bp, Homo sapiens
aaaatagcattaggt

SEQ ID NO: 1648121 - DNA, 15 bp, Homo sapiens
aaatagcattaggtc

SEQ ID NO: 1648122 - DNA, 15 bp, Homo sapiens
aatagcattaggtct

SEQ ID NO: 1648123 - DNA, 15 bp, Homo sapiens
atagcattaggtcta

SEQ ID NO: 1648124 - DNA, 15 bp, Homo sapiens
tagcattaggtctat

SEQ ID NO: 1648125 - DNA, 15 bp, Homo sapiens
agcattaggtctatc

SEQ ID NO: 1648126 - DNA, 15 bp, Homo sapiens
gcattaggtctatct

SEQ ID NO: 1648127 - DNA, 15 bp, Homo sapiens
cattaggtctatcta

SEQ ID NO: 1648128 - DNA, 15 bp, Homo sapiens
attaggtctatctag

SEQ ID NO: 1648129 - DNA, 15 bp, Homo sapiens
ttaggtctatctagc

SEQ ID NO: 1648130 - DNA, 15 bp, Homo sapiens
taggtctatctagcc

SEQ ID NO: 1648131 - DNA, 15 bp, Homo sapiens
aggtctatctagcca

SEQ ID NO: 1648132 - DNA, 15 bp, Homo sapiens
ggtctatctagccac

SEQ ID NO: 1648133 - DNA, 15 bp, Homo sapiens
gtctatctagccacc

SEQ ID NO: 1648134 - DNA, 15 bp, Homo sapiens
tctatctagccacca

SEQ ID NO: 1648135 - DNA, 15 bp, Homo sapiens
ctatctagccaccac

SEQ ID NO: 1648136 - DNA, 15 bp, Homo sapiens
tatctagccaccacc

SEQ ID NO: 1648137 - DNA, 15 bp, Homo sapiens
atctagccaccacca

SEQ ID NO: 1648138 - DNA, 15 bp, Homo sapiens
tctagccaccaccac

SEQ ID NO: 1648139 - DNA, 15 bp, Homo sapiens
ctagccaccaccacc

SEQ ID NO: 1648140 - DNA, 15 bp, Homo sapiens
tagccaccaccacct

SEQ ID NO: 1648141 - DNA, 15 bp, Homo sapiens
agccaccaccacctt

SEQ ID NO: 1648142 - DNA, 15 bp, Homo sapiens
gccaccaccaccttt

SEQ ID NO: 1648143 - DNA, 15 bp, Homo sapiens
ccaccaccacctttc

SEQ ID NO: 1648144 - DNA, 15 bp, Homo sapiens
caccaccacctttca

SEQ ID NO: 1648145 - DNA, 15 bp, Homo sapiens
accaccacctttcaa

SEQ ID NO: 1648146 - DNA, 15 bp, Homo sapiens
ccaccacctttcaac

SEQ ID NO: 1648147 - DNA, 15 bp, Homo sapiens
caccacctttcaact

SEQ ID NO: 1648148 - DNA, 15 bp, Homo sapiens
accacctttcaactt

SEQ ID NO: 1648149 - DNA, 15 bp, Homo sapiens
ccacctttcaacttt

SEQ ID NO: 1648150 - DNA, 15 bp, Homo sapiens
cacctttcaactttt

SEQ ID NO: 1648151 - DNA, 15 bp, Homo sapiens
acctttcaacttttt

SEQ ID NO: 1648152 - DNA, 15 bp, Homo sapiens
cctttcaacttttta

SEQ ID NO: 1648153 - DNA, 15 bp, Homo sapiens
ctttcaactttttat

SEQ ID NO: 1648154 - DNA, 15 bp, Homo sapiens
tttcaactttttatc

SEQ ID NO: 1648155 - DNA, 15 bp, Homo sapiens
ttcaactttttatca

SEQ ID NO: 1648156 - DNA, 15 bp, Homo sapiens
tcaactttttatcac

SEQ ID NO: 1648157 - DNA, 15 bp, Homo sapiens
caactttttatcact

SEQ ID NO: 1648158 - DNA, 15 bp, Homo sapiens
aactttttatcactc

SEQ ID NO: 1648159 - DNA, 15 bp, Homo sapiens
actttttatcactca

SEQ ID NO: 1648160 - DNA, 15 bp, Homo sapiens
ctttttatcactcac

SEQ ID NO: 1648161 - DNA, 15 bp, Homo sapiens
tttttatcactcaca

SEQ ID NO: 1648162 - DNA, 15 bp, Homo sapiens
ttttatcactcacaa

SEQ ID NO: 1648163 - DNA, 15 bp, Homo sapiens
tttatcactcacaag

SEQ ID NO: 1648164 - DNA, 15 bp, Homo sapiens
ttatcactcacaagt

SEQ ID NO: 1648165 - DNA, 15 bp, Homo sapiens
tatcactcacaagta

SEQ ID NO: 1648166 - DNA, 15 bp, Homo sapiens
atcactcacaagtag

SEQ ID NO: 1648167 - DNA, 15 bp, Homo sapiens
tcactcacaagtagt

SEQ ID NO: 1648168 - DNA, 15 bp, Homo sapiens
cactcacaagtagtg

SEQ ID NO: 1648169 - DNA, 15 bp, Homo sapiens
actcacaagtagtgt

SEQ ID NO: 1648170 - DNA, 15 bp, Homo sapiens
ctcacaagtagtgta

SEQ ID NO: 1648171 - DNA, 15 bp, Homo sapiens
tcacaagtagtgtac

SEQ ID NO: 1648172 - DNA, 15 bp, Homo sapiens
cacaagtagtgtact

SEQ ID NO: 1648173 - DNA, 15 bp, Homo sapiens
acaagtagtgtactg

SEQ ID NO: 1648174 - DNA, 15 bp, Homo sapiens
caagtagtgtactgt

SEQ ID NO: 1648175 - DNA, 15 bp, Homo sapiens
aagtagtgtactgtt

SEQ ID NO: 1648176 - DNA, 15 bp, Homo sapiens
agtagtgtactgttc

SEQ ID NO: 1648177 - DNA, 15 bp, Homo sapiens
gtagtgtactgttca

SEQ ID NO: 1648178 - DNA, 15 bp, Homo sapiens
tagtgtactgttcac

SEQ ID NO: 1648179 - DNA, 15 bp, Homo sapiens
agtgtactgttcacc

SEQ ID NO: 1648180 - DNA, 15 bp, Homo sapiens
gtgtactgttcacca

SEQ ID NO: 1648181 - DNA, 15 bp, Homo sapiens
tgtactgttcaccaa

SEQ ID NO: 1648182 - DNA, 15 bp, Homo sapiens
gtactgttcaccaaa

SEQ ID NO: 1648183 - DNA, 15 bp, Homo sapiens
tactgttcaccaaat

SEQ ID NO: 1648184 - DNA, 15 bp, Homo sapiens
actgttcaccaaatt

SEQ ID NO: 1648185 - DNA, 15 bp, Homo sapiens
ctgttcaccaaattg

SEQ ID NO: 1648186 - DNA, 15 bp, Homo sapiens
tgttcaccaaattgt

SEQ ID NO: 1648187 - DNA, 15 bp, Homo sapiens
gttcaccaaattgtg

SEQ ID NO: 1648188 - DNA, 15 bp, Homo sapiens
ttcaccaaattgtga

SEQ ID NO: 1648189 - DNA, 15 bp, Homo sapiens
tcaccaaattgtgaa

SEQ ID NO: 1648190 - DNA, 15 bp, Homo sapiens
caccaaattgtgaat

SEQ ID NO: 1648191 - DNA, 15 bp, Homo sapiens
accaaattgtgaatt

SEQ ID NO: 1648192 - DNA, 15 bp, Homo sapiens
ccaaattgtgaattt

SEQ ID NO: 1648193 - DNA, 15 bp, Homo sapiens
caaattgtgaatttg

SEQ ID NO: 1648194 - DNA, 15 bp, Homo sapiens
aaattgtgaatttgg

SEQ ID NO: 1648195 - DNA, 15 bp, Homo sapiens
aattgtgaatttggg

SEQ ID NO: 1648196 - DNA, 15 bp, Homo sapiens
attgtgaatttgggg

SEQ ID NO: 1648197 - DNA, 15 bp, Homo sapiens
ttgtgaatttggggg

SEQ ID NO: 1648198 - DNA, 15 bp, Homo sapiens
tgtgaatttgggggt

SEQ ID NO: 1648199 - DNA, 15 bp, Homo sapiens
gtgaatttgggggtg

SEQ ID NO: 1648200 - DNA, 15 bp, Homo sapiens
tgaatttgggggtgc

SEQ ID NO: 1648201 - DNA, 15 bp, Homo sapiens
gaatttgggggtgca

SEQ ID NO: 1648202 - DNA, 15 bp, Homo sapiens
aatttgggggtgcag

SEQ ID NO: 1648203 - DNA, 15 bp, Homo sapiens
atttgggggtgcagg

SEQ ID NO: 1648204 - DNA, 15 bp, Homo sapiens
tttgggggtgcaggg

SEQ ID NO: 1648205 - DNA, 15 bp, Homo sapiens
ttgggggtgcagggg

SEQ ID NO: 1648206 - DNA, 15 bp, Homo sapiens
tgggggtgcaggggc

SEQ ID NO: 1648207 - DNA, 15 bp, Homo sapiens
gggggtgcaggggca

SEQ ID NO: 1648208 - DNA, 15 bp, Homo sapiens
ggggtgcaggggcag

SEQ ID NO: 1648209 - DNA, 15 bp, Homo sapiens
gggtgcaggggcagg

SEQ ID NO: 1648210 - DNA, 15 bp, Homo sapiens
ggtgcaggggcagga

SEQ ID NO: 1648211 - DNA, 15 bp, Homo sapiens
gtgcaggggcaggag

SEQ ID NO: 1648212 - DNA, 15 bp, Homo sapiens
tgcaggggcaggagt

SEQ ID NO: 1648213 - DNA, 15 bp, Homo sapiens
gcaggggcaggagtt

SEQ ID NO: 1648214 - DNA, 15 bp, Homo sapiens
caggggcaggagttg

SEQ ID NO: 1648215 - DNA, 15 bp, Homo sapiens
aggggcaggagttgg

SEQ ID NO: 1648216 - DNA, 15 bp, Homo sapiens
ggggcaggagttgga

SEQ ID NO: 1648217 - DNA, 15 bp, Homo sapiens
gggcaggagttggaa

SEQ ID NO: 1648218 - DNA, 15 bp, Homo sapiens
ggcaggagttggaaa

SEQ ID NO: 1648219 - DNA, 15 bp, Homo sapiens
gcaggagttggaaat

SEQ ID NO: 1648220 - DNA, 15 bp, Homo sapiens
caggagttggaaatt

SEQ ID NO: 1648221 - DNA, 15 bp, Homo sapiens
aggagttggaaattt

SEQ ID NO: 1648222 - DNA, 15 bp, Homo sapiens
ggagttggaaatttt

SEQ ID NO: 1648223 - DNA, 15 bp, Homo sapiens
gagttggaaattttt

SEQ ID NO: 1648224 - DNA, 15 bp, Homo sapiens
agttggaaatttttt

SEQ ID NO: 1648225 - DNA, 15 bp, Homo sapiens
gttggaaatttttta

SEQ ID NO: 1648226 - DNA, 15 bp, Homo sapiens
ttggaaattttttaa

SEQ ID NO: 1648227 - DNA, 15 bp, Homo sapiens
tggaaattttttaaa

SEQ ID NO: 1648228 - DNA, 15 bp, Homo sapiens
aaattttttaaagtt

SEQ ID NO: 1648229 - DNA, 15 bp, Homo sapiens
aattttttaaagtta

SEQ ID NO: 1648230 - DNA, 15 bp, Homo sapiens
attttttaaagttag

SEQ ID NO: 1648231 - DNA, 15 bp, Homo sapiens
ttttttaaagttaga

SEQ ID NO: 1648232 - DNA, 15 bp, Homo sapiens
tttttaaagttagaa

SEQ ID NO: 1648233 - DNA, 15 bp, Homo sapiens
ttttaaagttagaag

SEQ ID NO: 1648234 - DNA, 15 bp, Homo sapiens
tttaaagttagaagg

SEQ ID NO: 1648235 - DNA, 15 bp, Homo sapiens
ttaaagttagaaggc

SEQ ID NO: 1648236 - DNA, 15 bp, Homo sapiens
taaagttagaaggct

SEQ ID NO: 1648237 - DNA, 15 bp, Homo sapiens
aaagttagaaggctc

SEQ ID NO: 1648238 - DNA, 15 bp, Homo sapiens
aagttagaaggctcc

SEQ ID NO: 1648239 - DNA, 15 bp, Homo sapiens
agttagaaggctcca

SEQ ID NO: 1648240 - DNA, 15 bp, Homo sapiens
gttagaaggctccat

SEQ ID NO: 1648241 - DNA, 15 bp, Homo sapiens
ttagaaggctccatt

SEQ ID NO: 1648242 - DNA, 15 bp, Homo sapiens
tagaaggctccattg

SEQ ID NO: 1648243 - DNA, 15 bp, Homo sapiens
agaaggctccattgt

SEQ ID NO: 1648244 - DNA, 15 bp, Homo sapiens
gaaggctccattgtt

SEQ ID NO: 1648245 - DNA, 15 bp, Homo sapiens
aaggctccattgttt

SEQ ID NO: 1648246 - DNA, 15 bp, Homo sapiens
aggctccattgtttt

SEQ ID NO: 1648247 - DNA, 15 bp, Homo sapiens
ggctccattgttttg

SEQ ID NO: 1648248 - DNA, 15 bp, Homo sapiens
gctccattgttttgt

SEQ ID NO: 1648249 - DNA, 15 bp, Homo sapiens
ctccattgttttgtt

SEQ ID NO: 1648250 - DNA, 15 bp, Homo sapiens
tccattgttttgttg

SEQ ID NO: 1648251 - DNA, 15 bp, Homo sapiens
ccattgttttgttgg

SEQ ID NO: 1648252 - DNA, 15 bp, Homo sapiens
cattgttttgttggc

SEQ ID NO: 1648253 - DNA, 15 bp, Homo sapiens
attgttttgttggct

SEQ ID NO: 1648254 - DNA, 15 bp, Homo sapiens
ttgttttgttggctc

SEQ ID NO: 1648255 - DNA, 15 bp, Homo sapiens
tgttttgttggctct

SEQ ID NO: 1648256 - DNA, 15 bp, Homo sapiens
gttttgttggctctc

SEQ ID NO: 1648257 - DNA, 15 bp, Homo sapiens
ttttgttggctctca

SEQ ID NO: 1648258 - DNA, 15 bp, Homo sapiens
tttgttggctctcaa

SEQ ID NO: 1648259 - DNA, 15 bp, Homo sapiens
ttgttggctctcaaa

SEQ ID NO: 1648260 - DNA, 15 bp, Homo sapiens
tgttggctctcaaac

SEQ ID NO: 1648261 - DNA, 15 bp, Homo sapiens
gttggctctcaaact

SEQ ID NO: 1648262 - DNA, 15 bp, Homo sapiens
ttggctctcaaactt

SEQ ID NO: 1648263 - DNA, 15 bp, Homo sapiens
tggctctcaaactta

SEQ ID NO: 1648264 - DNA, 15 bp, Homo sapiens
ggctctcaaacttag

SEQ ID NO: 1648265 - DNA, 15 bp, Homo sapiens
gctctcaaacttagc

SEQ ID NO: 1648266 - DNA, 15 bp, Homo sapiens
ctctcaaacttagca

SEQ ID NO: 1648267 - DNA, 15 bp, Homo sapiens
tctcaaacttagcaa

SEQ ID NO: 1648268 - DNA, 15 bp, Homo sapiens
ctcaaacttagcaaa

SEQ ID NO: 1648269 - DNA, 15 bp, Homo sapiens
tcaaacttagcaaaa

SEQ ID NO: 1648270 - DNA, 15 bp, Homo sapiens
caaacttagcaaaat

SEQ ID NO: 1648271 - DNA, 15 bp, Homo sapiens
aaacttagcaaaatt

SEQ ID NO: 1648272 - DNA, 15 bp, Homo sapiens
aacttagcaaaatta

SEQ ID NO: 1648273 - DNA, 15 bp, Homo sapiens
acttagcaaaattag

SEQ ID NO: 1648274 - DNA, 15 bp, Homo sapiens
cttagcaaaattagc

SEQ ID NO: 1648275 - DNA, 15 bp, Homo sapiens
ttagcaaaattagca

SEQ ID NO: 1648276 - DNA, 15 bp, Homo sapiens
tagcaaaattagcaa

SEQ ID NO: 1648277 - DNA, 15 bp, Homo sapiens
agcaaaattagcaat

SEQ ID NO: 1648278 - DNA, 15 bp, Homo sapiens
gcaaaattagcaata

SEQ ID NO: 1648279 - DNA, 15 bp, Homo sapiens
caaaattagcaatat

SEQ ID NO: 1648280 - DNA, 15 bp, Homo sapiens
aaaattagcaatata

SEQ ID NO: 1648281 - DNA, 15 bp, Homo sapiens
aaattagcaatatat

SEQ ID NO: 1648282 - DNA, 15 bp, Homo sapiens
aattagcaatatatt

SEQ ID NO: 1648283 - DNA, 15 bp, Homo sapiens
attagcaatatatta

SEQ ID NO: 1648284 - DNA, 15 bp, Homo sapiens
ttagcaatatattat

SEQ ID NO: 1648285 - DNA, 15 bp, Homo sapiens
tagcaatatattatc

SEQ ID NO: 1648286 - DNA, 15 bp, Homo sapiens
agcaatatattatcc

SEQ ID NO: 1648287 - DNA, 15 bp, Homo sapiens
gcaatatattatcca

SEQ ID NO: 1648288 - DNA, 15 bp, Homo sapiens
caatatattatccaa

SEQ ID NO: 1648289 - DNA, 15 bp, Homo sapiens
aatatattatccaat

SEQ ID NO: 1648290 - DNA, 15 bp, Homo sapiens
atatattatccaatc

SEQ ID NO: 1648291 - DNA, 15 bp, Homo sapiens
tatattatccaatct

SEQ ID NO: 1648292 - DNA, 15 bp, Homo sapiens
atattatccaatctt

SEQ ID NO: 1648293 - DNA, 15 bp, Homo sapiens
tattatccaatcttc

SEQ ID NO: 1648294 - DNA, 15 bp, Homo sapiens
attatccaatcttct

SEQ ID NO: 1648295 - DNA, 15 bp, Homo sapiens
ttatccaatcttctg

SEQ ID NO: 1648296 - DNA, 15 bp, Homo sapiens
tatccaatcttctga

SEQ ID NO: 1648297 - DNA, 15 bp, Homo sapiens
atccaatcttctgaa

SEQ ID NO: 1648298 - DNA, 15 bp, Homo sapiens
tccaatcttctgaac

SEQ ID NO: 1648299 - DNA, 15 bp, Homo sapiens
ccaatcttctgaact

SEQ ID NO: 1648300 - DNA, 15 bp, Homo sapiens
caatcttctgaactt

SEQ ID NO: 1648301 - DNA, 15 bp, Homo sapiens
aatcttctgaacttg

SEQ ID NO: 1648302 - DNA, 15 bp, Homo sapiens
atcttctgaacttga

SEQ ID NO: 1648303 - DNA, 15 bp, Homo sapiens
tcttctgaacttgat

SEQ ID NO: 1648304 - DNA, 15 bp, Homo sapiens
cttctgaacttgatc

SEQ ID NO: 1648305 - DNA, 15 bp, Homo sapiens
ttctgaacttgatca

SEQ ID NO: 1648306 - DNA, 15 bp, Homo sapiens
tctgaacttgatcaa

SEQ ID NO: 1648307 - DNA, 15 bp, Homo sapiens
ctgaacttgatcaag

SEQ ID NO: 1648308 - DNA, 15 bp, Homo sapiens
tgaacttgatcaaga

SEQ ID NO: 1648309 - DNA, 15 bp, Homo sapiens
gaacttgatcaagag

SEQ ID NO: 1648310 - DNA, 15 bp, Homo sapiens
aacttgatcaagagc

SEQ ID NO: 1648311 - DNA, 15 bp, Homo sapiens
acttgatcaagagca

SEQ ID NO: 1648312 - DNA, 15 bp, Homo sapiens
cttgatcaagagcat

SEQ ID NO: 1648313 - DNA, 15 bp, Homo sapiens
ttgatcaagagcatg

SEQ ID NO: 1648314 - DNA, 15 bp, Homo sapiens
tgatcaagagcatgg

SEQ ID NO: 1648315 - DNA, 15 bp, Homo sapiens
gatcaagagcatgga

SEQ ID NO: 1648316 - DNA, 15 bp, Homo sapiens
atcaagagcatggag

SEQ ID NO: 1648317 - DNA, 15 bp, Homo sapiens
tcaagagcatggaga

SEQ ID NO: 1648318 - DNA, 15 bp, Homo sapiens
caagagcatggagaa

SEQ ID NO: 1648319 - DNA, 15 bp, Homo sapiens
aagagcatggagaat

SEQ ID NO: 1648320 - DNA, 15 bp, Homo sapiens
agagcatggagaata

SEQ ID NO: 1648321 - DNA, 15 bp, Homo sapiens
gagcatggagaataa

SEQ ID NO: 1648322 - DNA, 15 bp, Homo sapiens
agcatggagaataaa

SEQ ID NO: 1648323 - DNA, 15 bp, Homo sapiens
gcatggagaataaac

SEQ ID NO: 1648324 - DNA, 15 bp, Homo sapiens
catggagaataaacg

SEQ ID NO: 1648325 - DNA, 15 bp, Homo sapiens
atggagaataaacgc

SEQ ID NO: 1648326 - DNA, 15 bp, Homo sapiens
tggagaataaacgcg

SEQ ID NO: 1648327 - DNA, 15 bp, Homo sapiens
ggagaataaacgcgg

SEQ ID NO: 1648328 - DNA, 15 bp, Homo sapiens
gagaataaacgcggg

SEQ ID NO: 1648329 - DNA, 15 bp, Homo sapiens
agaataaacgcggga

SEQ ID NO: 1648330 - DNA, 15 bp, Homo sapiens
gaataaacgcgggaa

SEQ ID NO: 1648331 - DNA, 15 bp, Homo sapiens
aataaacgcgggaaa

SEQ ID NO: 1648332 - DNA, 15 bp, Homo sapiens
ataaacgcgggaaaa

SEQ ID NO: 1648333 - DNA, 15 bp, Homo sapiens
taaacgcgggaaaaa

SEQ ID NO: 1648334 - DNA, 15 bp, Homo sapiens
aaacgcgggaaaaaa

SEQ ID NO: 1648335 - DNA, 15 bp, Homo sapiens
aacgcgggaaaaaag

SEQ ID NO: 1648336 - DNA, 15 bp, Homo sapiens
acgcgggaaaaaaga

SEQ ID NO: 1648337 - DNA, 15 bp, Homo sapiens
cgcgggaaaaaagat

SEQ ID NO: 1648338 - DNA, 15 bp, Homo sapiens
gcgggaaaaaagatc

SEQ ID NO: 1648339 - DNA, 15 bp, Homo sapiens
cgggaaaaaagatct

SEQ ID NO: 1648340 - DNA, 15 bp, Homo sapiens
gggaaaaaagatctt

SEQ ID NO: 1648341 - DNA, 15 bp, Homo sapiens
ggaaaaaagatctta

SEQ ID NO: 1648342 - DNA, 15 bp, Homo sapiens
gaaaaaagatcttat

SEQ ID NO: 1648343 - DNA, 15 bp, Homo sapiens
aaaaaagatcttata

SEQ ID NO: 1648344 - DNA, 15 bp, Homo sapiens
aaaaagatcttatag

SEQ ID NO: 1648345 - DNA, 15 bp, Homo sapiens
aaaagatcttatagg

SEQ ID NO: 1648346 - DNA, 15 bp, Homo sapiens
aaagatcttataggc

SEQ ID NO: 1648347 - DNA, 15 bp, Homo sapiens
aagatcttataggca

SEQ ID NO: 1648348 - DNA, 15 bp, Homo sapiens
agatcttataggcaa

SEQ ID NO: 1648349 - DNA, 15 bp, Homo sapiens
gatcttataggcaaa

SEQ ID NO: 1648350 - DNA, 15 bp, Homo sapiens
atcttataggcaaat

SEQ ID NO: 1648351 - DNA, 15 bp, Homo sapiens
tcttataggcaaata

SEQ ID NO: 1648352 - DNA, 15 bp, Homo sapiens
cttataggcaaatag

SEQ ID NO: 1648353 - DNA, 15 bp, Homo sapiens
ttataggcaaataga

SEQ ID NO: 1648354 - DNA, 15 bp, Homo sapiens
tataggcaaatagaa

SEQ ID NO: 1648355 - DNA, 15 bp, Homo sapiens
ataggcaaatagaag

SEQ ID NO: 1648356 - DNA, 15 bp, Homo sapiens
taggcaaatagaaga

SEQ ID NO: 1648357 - DNA, 15 bp, Homo sapiens
aggcaaatagaagaa

SEQ ID NO: 1648358 - DNA, 15 bp, Homo sapiens
ggcaaatagaagaat

SEQ ID NO: 1648359 - DNA, 15 bp, Homo sapiens
gcaaatagaagaatt

SEQ ID NO: 1648360 - DNA, 15 bp, Homo sapiens
caaatagaagaattt

SEQ ID NO: 1648361 - DNA, 15 bp, Homo sapiens
aaatagaagaattta

SEQ ID NO: 1648362 - DNA, 15 bp, Homo sapiens
aatagaagaatttaa

SEQ ID NO: 1648363 - DNA, 15 bp, Homo sapiens
atagaagaatttaaa

SEQ ID NO: 1648364 - DNA, 15 bp, Homo sapiens
tagaagaatttaaaa

SEQ ID NO: 1648365 - DNA, 15 bp, Homo sapiens
agaagaatttaaaag

SEQ ID NO: 1648366 - DNA, 15 bp, Homo sapiens
gaagaatttaaaaga

SEQ ID NO: 1648367 - DNA, 15 bp, Homo sapiens
aagaatttaaaagat

SEQ ID NO: 1648368 - DNA, 15 bp, Homo sapiens
agaatttaaaagata

SEQ ID NO: 1648369 - DNA, 15 bp, Homo sapiens
gaatttaaaagataa

SEQ ID NO: 1648370 - DNA, 15 bp, Homo sapiens
aatttaaaagataag

SEQ ID NO: 1648371 - DNA, 15 bp, Homo sapiens
atttaaaagataagt

SEQ ID NO: 1648372 - DNA, 15 bp, Homo sapiens
tttaaaagataagta

SEQ ID NO: 1648373 - DNA, 15 bp, Homo sapiens
ttaaaagataagtaa

SEQ ID NO: 1648374 - DNA, 15 bp, Homo sapiens
taaaagataagtaag

SEQ ID NO: 1648375 - DNA, 15 bp, Homo sapiens
aaaagataagtaagt

SEQ ID NO: 1648376 - DNA, 15 bp, Homo sapiens
aaagataagtaagtt

SEQ ID NO: 1648377 - DNA, 15 bp, Homo sapiens
aagataagtaagttc

SEQ ID NO: 1648378 - DNA, 15 bp, Homo sapiens
agataagtaagttcc

SEQ ID NO: 1648379 - DNA, 15 bp, Homo sapiens
gataagtaagttcct

SEQ ID NO: 1648380 - DNA, 15 bp, Homo sapiens
ataagtaagttcctt

SEQ ID NO: 1648381 - DNA, 15 bp, Homo sapiens
taagtaagttcctta

SEQ ID NO: 1648382 - DNA, 15 bp, Homo sapiens
aagtaagttccttat

SEQ ID NO: 1648383 - DNA, 15 bp, Homo sapiens
agtaagttccttatt

SEQ ID NO: 1648384 - DNA, 15 bp, Homo sapiens
gtaagttccttattg

SEQ ID NO: 1648385 - DNA, 15 bp, Homo sapiens
taagttccttattga

SEQ ID NO: 1648386 - DNA, 15 bp, Homo sapiens
aagttccttattgat

SEQ ID NO: 1648387 - DNA, 15 bp, Homo sapiens
agttccttattgatt

SEQ ID NO: 1648388 - DNA, 15 bp, Homo sapiens
gttccttattgattt

SEQ ID NO: 1648389 - DNA, 15 bp, Homo sapiens
ttccttattgatttt

SEQ ID NO: 1648390 - DNA, 15 bp, Homo sapiens
tccttattgattttt

SEQ ID NO: 1648391 - DNA, 15 bp, Homo sapiens
ccttattgatttttg

SEQ ID NO: 1648392 - DNA, 15 bp, Homo sapiens
cttattgatttttgt

SEQ ID NO: 1648393 - DNA, 15 bp, Homo sapiens
ttattgatttttgtg

SEQ ID NO: 1648394 - DNA, 15 bp, Homo sapiens
tattgatttttgtgc

SEQ ID NO: 1648395 - DNA, 15 bp, Homo sapiens
attgatttttgtgca

SEQ ID NO: 1648396 - DNA, 15 bp, Homo sapiens
ttgatttttgtgcac

SEQ ID NO: 1648397 - DNA, 15 bp, Homo sapiens
tgatttttgtgcact

SEQ ID NO: 1648398 - DNA, 15 bp, Homo sapiens
gatttttgtgcactc

SEQ ID NO: 1648399 - DNA, 15 bp, Homo sapiens
atttttgtgcactct

SEQ ID NO: 1648400 - DNA, 15 bp, Homo sapiens
tttttgtgcactctg

SEQ ID NO: 1648401 - DNA, 15 bp, Homo sapiens
ttttgtgcactctgc

SEQ ID NO: 1648402 - DNA, 15 bp, Homo sapiens
tttgtgcactctgct

SEQ ID NO: 1648403 - DNA, 15 bp, Homo sapiens
ttgtgcactctgctc

SEQ ID NO: 1648404 - DNA, 15 bp, Homo sapiens
tgtgcactctgctct

SEQ ID NO: 1648405 - DNA, 15 bp, Homo sapiens
gtgcactctgctcta

SEQ ID NO: 1648406 - DNA, 15 bp, Homo sapiens
tgcactctgctctaa

SEQ ID NO: 1648407 - DNA, 15 bp, Homo sapiens
gcactctgctctaaa

SEQ ID NO: 1648408 - DNA, 15 bp, Homo sapiens
cactctgctctaaaa

SEQ ID NO: 1648409 - DNA, 15 bp, Homo sapiens
actctgctctaaaac

SEQ ID NO: 1648410 - DNA, 15 bp, Homo sapiens
ctctgctctaaaaca

SEQ ID NO: 1648411 - DNA, 15 bp, Homo sapiens
tctgctctaaaacag

SEQ ID NO: 1648412 - DNA, 15 bp, Homo sapiens
ctgctctaaaacaga

SEQ ID NO: 1648413 - DNA, 15 bp, Homo sapiens
tgctctaaaacagat

SEQ ID NO: 1648414 - DNA, 15 bp, Homo sapiens
gctctaaaacagata

SEQ ID NO: 1648415 - DNA, 15 bp, Homo sapiens
tctaaaacagatatt

SEQ ID NO: 1648416 - DNA, 15 bp, Homo sapiens
ctaaaacagatattc

SEQ ID NO: 1648417 - DNA, 15 bp, Homo sapiens
taaaacagatattca

SEQ ID NO: 1648418 - DNA, 15 bp, Homo sapiens
aaaacagatattcag

SEQ ID NO: 1648419 - DNA, 15 bp, Homo sapiens
aaacagatattcagc

SEQ ID NO: 1648420 - DNA, 15 bp, Homo sapiens
aacagatattcagca

SEQ ID NO: 1648421 - DNA, 15 bp, Homo sapiens
acagatattcagcaa

SEQ ID NO: 1648422 - DNA, 15 bp, Homo sapiens
cagatattcagcaag

SEQ ID NO: 1648423 - DNA, 15 bp, Homo sapiens
agatattcagcaagt

SEQ ID NO: 1648424 - DNA, 15 bp, Homo sapiens
gatattcagcaagtg

SEQ ID NO: 1648425 - DNA, 15 bp, Homo sapiens
atattcagcaagtgg

SEQ ID NO: 1648426 - DNA, 15 bp, Homo sapiens
tattcagcaagtgga

SEQ ID NO: 1648427 - DNA, 15 bp, Homo sapiens
attcagcaagtggag

SEQ ID NO: 1648428 - DNA, 15 bp, Homo sapiens
ttcagcaagtggaga

SEQ ID NO: 1648429 - DNA, 15 bp, Homo sapiens
tcagcaagtggagaa

SEQ ID NO: 1648430 - DNA, 15 bp, Homo sapiens
cagcaagtggagaaa

SEQ ID NO: 1648431 - DNA, 15 bp, Homo sapiens
agcaagtggagaaaa

SEQ ID NO: 1648432 - DNA, 15 bp, Homo sapiens
gcaagtggagaaaat

SEQ ID NO: 1648433 - DNA, 15 bp, Homo sapiens
caagtggagaaaata

SEQ ID NO: 1648434 - DNA, 15 bp, Homo sapiens
aagtggagaaaataa

SEQ ID NO: 1648435 - DNA, 15 bp, Homo sapiens
agtggagaaaataag

SEQ ID NO: 1648436 - DNA, 15 bp, Homo sapiens
gtggagaaaataaga

SEQ ID NO: 1648437 - DNA, 15 bp, Homo sapiens
tggagaaaataagaa

SEQ ID NO: 1648438 - DNA, 15 bp, Homo sapiens
ggagaaaataagaac

SEQ ID NO: 1648439 - DNA, 15 bp, Homo sapiens
gagaaaataagaaca

SEQ ID NO: 1648440 - DNA, 15 bp, Homo sapiens
agaaaataagaacaa

SEQ ID NO: 1648441 - DNA, 15 bp, Homo sapiens
gaaaataagaacaaa

SEQ ID NO: 1648442 - DNA, 15 bp, Homo sapiens
aaaataagaacaaag

SEQ ID NO: 1648443 - DNA, 15 bp, Homo sapiens
aaataagaacaaaga

SEQ ID NO: 1648444 - DNA, 15 bp, Homo sapiens
aataagaacaaagag

SEQ ID NO: 1648445 - DNA, 15 bp, Homo sapiens
ataagaacaaagaga

SEQ ID NO: 1648446 - DNA, 15 bp, Homo sapiens
aagaacaaagagaaa

SEQ ID NO: 1648447 - DNA, 15 bp, Homo sapiens
agaacaaagagaaaa

SEQ ID NO: 1648448 - DNA, 15 bp, Homo sapiens
gaacaaagagaaaaa

SEQ ID NO: 1648449 - DNA, 15 bp, Homo sapiens
acaaagagaaaaaat

SEQ ID NO: 1648450 - DNA, 15 bp, Homo sapiens
caaagagaaaaaata

SEQ ID NO: 1648451 - DNA, 15 bp, Homo sapiens
aaagagaaaaaatac

SEQ ID NO: 1648452 - DNA, 15 bp, Homo sapiens
aagagaaaaaataca

SEQ ID NO: 1648453 - DNA, 15 bp, Homo sapiens
agagaaaaaatacat

SEQ ID NO: 1648454 - DNA, 15 bp, Homo sapiens
gagaaaaaatacata

SEQ ID NO: 1648455 - DNA, 15 bp, Homo sapiens
agaaaaaatacatag

SEQ ID NO: 1648456 - DNA, 15 bp, Homo sapiens
gaaaaaatacataga

SEQ ID NO: 1648457 - DNA, 15 bp, Homo sapiens
aaaaaatacatagat

SEQ ID NO: 1648458 - DNA, 15 bp, Homo sapiens
aaaaatacatagatt

SEQ ID NO: 1648459 - DNA, 15 bp, Homo sapiens
aaaatacatagattt

SEQ ID NO: 1648460 - DNA, 15 bp, Homo sapiens
aaatacatagattta

SEQ ID NO: 1648461 - DNA, 15 bp, Homo sapiens
aatacatagatttac

SEQ ID NO: 1648462 - DNA, 15 bp, Homo sapiens
atacatagatttacc

SEQ ID NO: 1648463 - DNA, 15 bp, Homo sapiens
tacatagatttacct

SEQ ID NO: 1648464 - DNA, 15 bp, Homo sapiens
acatagatttacctg

SEQ ID NO: 1648465 - DNA, 15 bp, Homo sapiens
catagatttacctgc

SEQ ID NO: 1648466 - DNA, 15 bp, Homo sapiens
atagatttacctgca

SEQ ID NO: 1648467 - DNA, 15 bp, Homo sapiens
tagatttacctgcaa

SEQ ID NO: 1648468 - DNA, 15 bp, Homo sapiens
agatttacctgcaaa

SEQ ID NO: 1648469 - DNA, 15 bp, Homo sapiens
gatttacctgcaaaa

SEQ ID NO: 1648470 - DNA, 15 bp, Homo sapiens
atttacctgcaaaaa

SEQ ID NO: 1648471 - DNA, 15 bp, Homo sapiens
tttacctgcaaaaaa

SEQ ID NO: 1648472 - DNA, 15 bp, Homo sapiens
ttacctgcaaaaaat

SEQ ID NO: 1648473 - DNA, 15 bp, Homo sapiens
tacctgcaaaaaata

SEQ ID NO: 1648474 - DNA, 15 bp, Homo sapiens
acctgcaaaaaatag

SEQ ID NO: 1648475 - DNA, 15 bp, Homo sapiens
cctgcaaaaaatagc

SEQ ID NO: 1648476 - DNA, 15 bp, Homo sapiens
ctgcaaaaaatagct

SEQ ID NO: 1648477 - DNA, 15 bp, Homo sapiens
tgcaaaaaatagctt

SEQ ID NO: 1648478 - DNA, 15 bp, Homo sapiens
gcaaaaaatagcttc

SEQ ID NO: 1648479 - DNA, 15 bp, Homo sapiens
caaaaaatagcttct

SEQ ID NO: 1648480 - DNA, 15 bp, Homo sapiens
aaaatagcttctgcc

SEQ ID NO: 1648481 - DNA, 15 bp, Homo sapiens
aaatagcttctgcca

SEQ ID NO: 1648482 - DNA, 15 bp, Homo sapiens
aatagcttctgccaa

SEQ ID NO: 1648483 - DNA, 15 bp, Homo sapiens
atagcttctgccaaa

SEQ ID NO: 1648484 - DNA, 15 bp, Homo sapiens
tagcttctgccaaat

SEQ ID NO: 1648485 - DNA, 15 bp, Homo sapiens
agcttctgccaaatc

SEQ ID NO: 1648486 - DNA, 15 bp, Homo sapiens
gcttctgccaaatcc

SEQ ID NO: 1648487 - DNA, 15 bp, Homo sapiens
cttctgccaaatccc

SEQ ID NO: 1648488 - DNA, 15 bp, Homo sapiens
ttctgccaaatcccc

SEQ ID NO: 1648489 - DNA, 15 bp, Homo sapiens
tctgccaaatccccc

SEQ ID NO: 1648490 - DNA, 15 bp, Homo sapiens
ctgccaaatccccct

SEQ ID NO: 1648491 - DNA, 15 bp, Homo sapiens
tgccaaatccccctt

SEQ ID NO: 1648492 - DNA, 15 bp, Homo sapiens
gccaaatcccccttg

SEQ ID NO: 1648493 - DNA, 15 bp, Homo sapiens
ccaaatcccccttgg

SEQ ID NO: 1648494 - DNA, 15 bp, Homo sapiens
caaatcccccttggg

SEQ ID NO: 1648495 - DNA, 15 bp, Homo sapiens
aaatcccccttgggt

SEQ ID NO: 1648496 - DNA, 15 bp, Homo sapiens
aatcccccttgggta

SEQ ID NO: 1648497 - DNA, 15 bp, Homo sapiens
atcccccttgggtat

SEQ ID NO: 1648498 - DNA, 15 bp, Homo sapiens
tcccccttgggtatt

SEQ ID NO: 1648499 - DNA, 15 bp, Homo sapiens
cccccttgggtattc

SEQ ID NO: 1648500 - DNA, 15 bp, Homo sapiens
ccccttgggtattct

SEQ ID NO: 1648501 - DNA, 15 bp, Homo sapiens
cccttgggtattctt

SEQ ID NO: 1648502 - DNA, 15 bp, Homo sapiens
ccttgggtattcttt

SEQ ID NO: 1648503 - DNA, 15 bp, Homo sapiens
cttgggtattctttg

SEQ ID NO: 1648504 - DNA, 15 bp, Homo sapiens
ttgggtattctttgg

SEQ ID NO: 1648505 - DNA, 15 bp, Homo sapiens
tgggtattctttggc

SEQ ID NO: 1648506 - DNA, 15 bp, Homo sapiens
gggtattctttggca

SEQ ID NO: 1648507 - DNA, 15 bp, Homo sapiens
ggtattctttggcat

SEQ ID NO: 1648508 - DNA, 15 bp, Homo sapiens
gtattctttggcatt

SEQ ID NO: 1648509 - DNA, 15 bp, Homo sapiens
tattctttggcattt

SEQ ID NO: 1648510 - DNA, 15 bp, Homo sapiens
attctttggcattta

SEQ ID NO: 1648511 - DNA, 15 bp, Homo sapiens
ttctttggcatttac

SEQ ID NO: 1648512 - DNA, 15 bp, Homo sapiens
tctttggcatttact

SEQ ID NO: 1648513 - DNA, 15 bp, Homo sapiens
ctttggcatttactg

SEQ ID NO: 1648514 - DNA, 15 bp, Homo sapiens
tttggcatttactgg

SEQ ID NO: 1648515 - DNA, 15 bp, Homo sapiens
ttggcatttactggt

SEQ ID NO: 1648516 - DNA, 15 bp, Homo sapiens
tggcatttactggtt

SEQ ID NO: 1648517 - DNA, 15 bp, Homo sapiens
ggcatttactggttt

SEQ ID NO: 1648518 - DNA, 15 bp, Homo sapiens
gcatttactggttta

SEQ ID NO: 1648519 - DNA, 15 bp, Homo sapiens
catttactggtttat

SEQ ID NO: 1648520 - DNA, 15 bp, Homo sapiens
atttactggtttata

SEQ ID NO: 1648521 - DNA, 15 bp, Homo sapiens
tttactggtttatag

SEQ ID NO: 1648522 - DNA, 15 bp, Homo sapiens
ttactggtttataga

SEQ ID NO: 1648523 - DNA, 15 bp, Homo sapiens
tactggtttatagaa

SEQ ID NO: 1648524 - DNA, 15 bp, Homo sapiens
actggtttatagaag

SEQ ID NO: 1648525 - DNA, 15 bp, Homo sapiens
ctggtttatagaaga

SEQ ID NO: 1648526 - DNA, 15 bp, Homo sapiens
tggtttatagaagac

SEQ ID NO: 1648527 - DNA, 15 bp, Homo sapiens
ggtttatagaagaca

SEQ ID NO: 1648528 - DNA, 15 bp, Homo sapiens
gtttatagaagacat

SEQ ID NO: 1648529 - DNA, 15 bp, Homo sapiens
tttatagaagacatt

SEQ ID NO: 1648530 - DNA, 15 bp, Homo sapiens
ttatagaagacattc

SEQ ID NO: 1648531 - DNA, 15 bp, Homo sapiens
tatagaagacattct

SEQ ID NO: 1648532 - DNA, 15 bp, Homo sapiens
atagaagacattctc

SEQ ID NO: 1648533 - DNA, 15 bp, Homo sapiens
tagaagacattctcc

SEQ ID NO: 1648534 - DNA, 15 bp, Homo sapiens
agaagacattctccc

SEQ ID NO: 1648535 - DNA, 15 bp, Homo sapiens
gaagacattctccct

SEQ ID NO: 1648536 - DNA, 15 bp, Homo sapiens
aagacattctccctt

SEQ ID NO: 1648537 - DNA, 15 bp, Homo sapiens
agacattctcccttc

SEQ ID NO: 1648538 - DNA, 15 bp, Homo sapiens
gacattctcccttca

SEQ ID NO: 1648539 - DNA, 15 bp, Homo sapiens
acattctcccttcac

SEQ ID NO: 1648540 - DNA, 15 bp, Homo sapiens
cattctcccttcacc

SEQ ID NO: 1648541 - DNA, 15 bp, Homo sapiens
attctcccttcaccc

SEQ ID NO: 1648542 - DNA, 15 bp, Homo sapiens
ttctcccttcaccca

SEQ ID NO: 1648543 - DNA, 15 bp, Homo sapiens
tctcccttcacccag

SEQ ID NO: 1648544 - DNA, 15 bp, Homo sapiens
ctcccttcacccaga

SEQ ID NO: 1648545 - DNA, 15 bp, Homo sapiens
tcccttcacccagac

SEQ ID NO: 1648546 - DNA, 15 bp, Homo sapiens
cccttcacccagaca

SEQ ID NO: 1648547 - DNA, 15 bp, Homo sapiens
ccttcacccagacat

SEQ ID NO: 1648548 - DNA, 15 bp, Homo sapiens
cttcacccagacatc

SEQ ID NO: 1648549 - DNA, 15 bp, Homo sapiens
ttcacccagacatct

SEQ ID NO: 1648550 - DNA, 15 bp, Homo sapiens
tcacccagacatctc

SEQ ID NO: 1648551 - DNA, 15 bp, Homo sapiens
cacccagacatctca

SEQ ID NO: 1648552 - DNA, 15 bp, Homo sapiens
acccagacatctcaa

SEQ ID NO: 1648553 - DNA, 15 bp, Homo sapiens
cccagacatctcaaa

SEQ ID NO: 1648554 - DNA, 15 bp, Homo sapiens
ccagacatctcaaag

SEQ ID NO: 1648555 - DNA, 15 bp, Homo sapiens
cagacatctcaaaga

SEQ ID NO: 1648556 - DNA, 15 bp, Homo sapiens
agacatctcaaagag

SEQ ID NO: 1648557 - DNA, 15 bp, Homo sapiens
gacatctcaaagagc

SEQ ID NO: 1648558 - DNA, 15 bp, Homo sapiens
acatctcaaagagca

SEQ ID NO: 1648559 - DNA, 15 bp, Homo sapiens
catctcaaagagcag

SEQ ID NO: 1648560 - DNA, 15 bp, Homo sapiens
atctcaaagagcagt

SEQ ID NO: 1648561 - DNA, 15 bp, Homo sapiens
tctcaaagagcagta

SEQ ID NO: 1648562 - DNA, 15 bp, Homo sapiens
ctcaaagagcagtag

SEQ ID NO: 1648563 - DNA, 15 bp, Homo sapiens
tcaaagagcagtagc

SEQ ID NO: 1648564 - DNA, 15 bp, Homo sapiens
caaagagcagtagct

SEQ ID NO: 1648565 - DNA, 15 bp, Homo sapiens
aaagagcagtagctc

SEQ ID NO: 1648566 - DNA, 15 bp, Homo sapiens
aagagcagtagctct

SEQ ID NO: 1648567 - DNA, 15 bp, Homo sapiens
agagcagtagctctc

SEQ ID NO: 1648568 - DNA, 15 bp, Homo sapiens
gagcagtagctctca

SEQ ID NO: 1648569 - DNA, 15 bp, Homo sapiens
agcagtagctctcat

SEQ ID NO: 1648570 - DNA, 15 bp, Homo sapiens
gcagtagctctcatg

SEQ ID NO: 1648571 - DNA, 15 bp, Homo sapiens
cagtagctctcatga

SEQ ID NO: 1648572 - DNA, 15 bp, Homo sapiens
agtagctctcatgaa

SEQ ID NO: 1648573 - DNA, 15 bp, Homo sapiens
gtagctctcatgaaa

SEQ ID NO: 1648574 - DNA, 15 bp, Homo sapiens
tagctctcatgaaaa

SEQ ID NO: 1648575 - DNA, 15 bp, Homo sapiens
agctctcatgaaaag

SEQ ID NO: 1648576 - DNA, 15 bp, Homo sapiens
gctctcatgaaaagc

SEQ ID NO: 1648577 - DNA, 15 bp, Homo sapiens
ctctcatgaaaagca

SEQ ID NO: 1648578 - DNA, 15 bp, Homo sapiens
tctcatgaaaagcaa

SEQ ID NO: 1648579 - DNA, 15 bp, Homo sapiens
ctcatgaaaagcaat

SEQ ID NO: 1648580 - DNA, 15 bp, Homo sapiens
tcatgaaaagcaatc

SEQ ID NO: 1648581 - DNA, 15 bp, Homo sapiens
catgaaaagcaatca

SEQ ID NO: 1648582 - DNA, 15 bp, Homo sapiens
atgaaaagcaatcac

SEQ ID NO: 1648583 - DNA, 15 bp, Homo sapiens
tgaaaagcaatcact

SEQ ID NO: 1648584 - DNA, 15 bp, Homo sapiens
gaaaagcaatcactg

SEQ ID NO: 1648585 - DNA, 15 bp, Homo sapiens
aaaagcaatcactga

SEQ ID NO: 1648586 - DNA, 15 bp, Homo sapiens
aaagcaatcactgat

SEQ ID NO: 1648587 - DNA, 15 bp, Homo sapiens
aagcaatcactgatc

SEQ ID NO: 1648588 - DNA, 15 bp, Homo sapiens
agcaatcactgatct

SEQ ID NO: 1648589 - DNA, 15 bp, Homo sapiens
gcaatcactgatctc

SEQ ID NO: 1648590 - DNA, 15 bp, Homo sapiens
caatcactgatctca

SEQ ID NO: 1648591 - DNA, 15 bp, Homo sapiens
aatcactgatctcat

SEQ ID NO: 1648592 - DNA, 15 bp, Homo sapiens
atcactgatctcatt

SEQ ID NO: 1648593 - DNA, 15 bp, Homo sapiens
tcactgatctcattt

SEQ ID NO: 1648594 - DNA, 15 bp, Homo sapiens
cactgatctcatttg

SEQ ID NO: 1648595 - DNA, 15 bp, Homo sapiens
actgatctcatttgg

SEQ ID NO: 1648596 - DNA, 15 bp, Homo sapiens
ctgatctcatttggg

SEQ ID NO: 1648597 - DNA, 15 bp, Homo sapiens
tgatctcatttggga

SEQ ID NO: 1648598 - DNA, 15 bp, Homo sapiens
gatctcatttgggaa

SEQ ID NO: 1648599 - DNA, 15 bp, Homo sapiens
atctcatttgggaaa

SEQ ID NO: 1648600 - DNA, 15 bp, Homo sapiens
tctcatttgggaaat

SEQ ID NO: 1648601 - DNA, 15 bp, Homo sapiens
ctcatttgggaaatg

SEQ ID NO: 1648602 - DNA, 15 bp, Homo sapiens
tcatttgggaaatgt

SEQ ID NO: 1648603 - DNA, 15 bp, Homo sapiens
catttgggaaatgtt

SEQ ID NO: 1648604 - DNA, 15 bp, Homo sapiens
atttgggaaatgttg

SEQ ID NO: 1648605 - DNA, 15 bp, Homo sapiens
tttgggaaatgttgg

SEQ ID NO: 1648606 - DNA, 15 bp, Homo sapiens
ttgggaaatgttgga

SEQ ID NO: 1648607 - DNA, 15 bp, Homo sapiens
tgggaaatgttggaa

SEQ ID NO: 1648608 - DNA, 15 bp, Homo sapiens
gggaaatgttggaaa

SEQ ID NO: 1648609 - DNA, 15 bp, Homo sapiens
ggaaatgttggaaag

SEQ ID NO: 1648610 - DNA, 15 bp, Homo sapiens
gaaatgttggaaagt

SEQ ID NO: 1648611 - DNA, 15 bp, Homo sapiens
aaatgttggaaagta

SEQ ID NO: 1648612 - DNA, 15 bp, Homo sapiens
aatgttggaaagtat

SEQ ID NO: 1648613 - DNA, 15 bp, Homo sapiens
atgttggaaagtatt

SEQ ID NO: 1648614 - DNA, 15 bp, Homo sapiens
tgttggaaagtattt

SEQ ID NO: 1648615 - DNA, 15 bp, Homo sapiens
gttggaaagtatttc

SEQ ID NO: 1648616 - DNA, 15 bp, Homo sapiens
ttggaaagtatttcc

SEQ ID NO: 1648617 - DNA, 15 bp, Homo sapiens
tggaaagtatttcct

SEQ ID NO: 1648618 - DNA, 15 bp, Homo sapiens
ggaaagtatttcctt

SEQ ID NO: 1648619 - DNA, 15 bp, Homo sapiens
gaaagtatttcctta

SEQ ID NO: 1648620 - DNA, 15 bp, Homo sapiens
aaagtatttccttat

SEQ ID NO: 1648621 - DNA, 15 bp, Homo sapiens
aagtatttccttatg

SEQ ID NO: 1648622 - DNA, 15 bp, Homo sapiens
agtatttccttatga

SEQ ID NO: 1648623 - DNA, 15 bp, Homo sapiens
gtatttccttatgag

SEQ ID NO: 1648624 - DNA, 15 bp, Homo sapiens
tatttccttatgaga

SEQ ID NO: 1648625 - DNA, 15 bp, Homo sapiens
atttccttatgagat

SEQ ID NO: 1648626 - DNA, 15 bp, Homo sapiens
tttccttatgagatg

SEQ ID NO: 1648627 - DNA, 15 bp, Homo sapiens
ttccttatgagatgg

SEQ ID NO: 1648628 - DNA, 15 bp, Homo sapiens
tccttatgagatggg

SEQ ID NO: 1648629 - DNA, 15 bp, Homo sapiens
ccttatgagatgggg

SEQ ID NO: 1648630 - DNA, 15 bp, Homo sapiens
cttatgagatggggg

SEQ ID NO: 1648631 - DNA, 15 bp, Homo sapiens
ttatgagatgggggt

SEQ ID NO: 1648632 - DNA, 15 bp, Homo sapiens
tatgagatgggggtt

SEQ ID NO: 1648633 - DNA, 15 bp, Homo sapiens
atgagatgggggtta

SEQ ID NO: 1648634 - DNA, 15 bp, Homo sapiens
tgagatgggggttat

SEQ ID NO: 1648635 - DNA, 15 bp, Homo sapiens
gagatgggggttatc

SEQ ID NO: 1648636 - DNA, 15 bp, Homo sapiens
agatgggggttatct

SEQ ID NO: 1648637 - DNA, 15 bp, Homo sapiens
gatgggggttatcta

SEQ ID NO: 1648638 - DNA, 15 bp, Homo sapiens
atgggggttatctac

SEQ ID NO: 1648639 - DNA, 15 bp, Homo sapiens
tgggggttatctact

SEQ ID NO: 1648640 - DNA, 15 bp, Homo sapiens
gggggttatctactg

SEQ ID NO: 1648641 - DNA, 15 bp, Homo sapiens
ggggttatctactga

SEQ ID NO: 1648642 - DNA, 15 bp, Homo sapiens
gggttatctactgat

SEQ ID NO: 1648643 - DNA, 15 bp, Homo sapiens
ggttatctactgata

SEQ ID NO: 1648644 - DNA, 15 bp, Homo sapiens
gttatctactgataa

SEQ ID NO: 1648645 - DNA, 15 bp, Homo sapiens
ttatctactgataaa

SEQ ID NO: 1648646 - DNA, 15 bp, Homo sapiens
tatctactgataaag

SEQ ID NO: 1648647 - DNA, 15 bp, Homo sapiens
atctactgataaaga

SEQ ID NO: 1648648 - DNA, 15 bp, Homo sapiens
tctactgataaagaa

SEQ ID NO: 1648649 - DNA, 15 bp, Homo sapiens
ctactgataaagaaa

SEQ ID NO: 1648650 - DNA, 15 bp, Homo sapiens
tactgataaagaaag

SEQ ID NO: 1648651 - DNA, 15 bp, Homo sapiens
actgataaagaaaga

SEQ ID NO: 1648652 - DNA, 15 bp, Homo sapiens
ctgataaagaaagaa

SEQ ID NO: 1648653 - DNA, 15 bp, Homo sapiens
tgataaagaaagaat

SEQ ID NO: 1648654 - DNA, 15 bp, Homo sapiens
gataaagaaagaatt

SEQ ID NO: 1648655 - DNA, 15 bp, Homo sapiens
ataaagaaagaattt

SEQ ID NO: 1648656 - DNA, 15 bp, Homo sapiens
taaagaaagaattta

SEQ ID NO: 1648657 - DNA, 15 bp, Homo sapiens
aaagaaagaatttat

SEQ ID NO: 1648658 - DNA, 15 bp, Homo sapiens
aagaaagaatttatg

SEQ ID NO: 1648659 - DNA, 15 bp, Homo sapiens
agaaagaatttatga

SEQ ID NO: 1648660 - DNA, 15 bp, Homo sapiens
gaaagaatttatgag

SEQ ID NO: 1648661 - DNA, 15 bp, Homo sapiens
aaagaatttatgaga

SEQ ID NO: 1648662 - DNA, 15 bp, Homo sapiens
aagaatttatgagaa

SEQ ID NO: 1648663 - DNA, 15 bp, Homo sapiens
agaatttatgagaaa

SEQ ID NO: 1648664 - DNA, 15 bp, Homo sapiens
gaatttatgagaaat

SEQ ID NO: 1648665 - DNA, 15 bp, Homo sapiens
aatttatgagaaatt

SEQ ID NO: 1648666 - DNA, 15 bp, Homo sapiens
atttatgagaaattg

SEQ ID NO: 1648667 - DNA, 15 bp, Homo sapiens
tttatgagaaattgt

SEQ ID NO: 1648668 - DNA, 15 bp, Homo sapiens
ttatgagaaattgtt

SEQ ID NO: 1648669 - DNA, 15 bp, Homo sapiens
tatgagaaattgttg

SEQ ID NO: 1648670 - DNA, 15 bp, Homo sapiens
atgagaaattgttga

SEQ ID NO: 1648671 - DNA, 15 bp, Homo sapiens
tgagaaattgttgaa

SEQ ID NO: 1648672 - DNA, 15 bp, Homo sapiens
gagaaattgttgaaa

SEQ ID NO: 1648673 - DNA, 15 bp, Homo sapiens
agaaattgttgaaag

SEQ ID NO: 1648674 - DNA, 15 bp, Homo sapiens
gaaattgttgaaaga

SEQ ID NO: 1648675 - DNA, 15 bp, Homo sapiens
aaattgttgaaagag

SEQ ID NO: 1648676 - DNA, 15 bp, Homo sapiens
aattgttgaaagaga

SEQ ID NO: 1648677 - DNA, 15 bp, Homo sapiens
attgttgaaagagat

SEQ ID NO: 1648678 - DNA, 15 bp, Homo sapiens
ttgttgaaagagatg

SEQ ID NO: 1648679 - DNA, 15 bp, Homo sapiens
tgttgaaagagatgg

SEQ ID NO: 1648680 - DNA, 15 bp, Homo sapiens
gttgaaagagatggc

SEQ ID NO: 1648681 - DNA, 15 bp, Homo sapiens
ttgaaagagatggct

SEQ ID NO: 1648682 - DNA, 15 bp, Homo sapiens
tgaaagagatggcta

SEQ ID NO: 1648683 - DNA, 15 bp, Homo sapiens
gaaagagatggctaa

SEQ ID NO: 1648684 - DNA, 15 bp, Homo sapiens
aaagagatggctaac

SEQ ID NO: 1648685 - DNA, 15 bp, Homo sapiens
aagagatggctaaca

SEQ ID NO: 1648686 - DNA, 15 bp, Homo sapiens
agagatggctaacaa

SEQ ID NO: 1648687 - DNA, 15 bp, Homo sapiens
gagatggctaacaat

SEQ ID NO: 1648688 - DNA, 15 bp, Homo sapiens
agatggctaacaatc

SEQ ID NO: 1648689 - DNA, 15 bp, Homo sapiens
gatggctaacaatct

SEQ ID NO: 1648690 - DNA, 15 bp, Homo sapiens
atggctaacaatctg

SEQ ID NO: 1648691 - DNA, 15 bp, Homo sapiens
tggctaacaatctgt

SEQ ID NO: 1648692 - DNA, 15 bp, Homo sapiens
ggctaacaatctgtg

SEQ ID NO: 1648693 - DNA, 15 bp, Homo sapiens
gctaacaatctgtga

SEQ ID NO: 1648694 - DNA, 15 bp, Homo sapiens
ctaacaatctgtgaa

SEQ ID NO: 1648695 - DNA, 15 bp, Homo sapiens
taacaatctgtgaag

SEQ ID NO: 1648696 - DNA, 15 bp, Homo sapiens
aacaatctgtgaaga

SEQ ID NO: 1648697 - DNA, 15 bp, Homo sapiens
acaatctgtgaagat

SEQ ID NO: 1648698 - DNA, 15 bp, Homo sapiens
caatctgtgaagatt

SEQ ID NO: 1648699 - DNA, 15 bp, Homo sapiens
aatctgtgaagattt

SEQ ID NO: 1648700 - DNA, 15 bp, Homo sapiens
atctgtgaagatttt

SEQ ID NO: 1648701 - DNA, 15 bp, Homo sapiens
tctgtgaagattttt

SEQ ID NO: 1648702 - DNA, 15 bp, Homo sapiens
ctgtgaagatttttt

SEQ ID NO: 1648703 - DNA, 15 bp, Homo sapiens
tgtgaagattttttg

SEQ ID NO: 1648704 - DNA, 15 bp, Homo sapiens
gtgaagattttttgt

SEQ ID NO: 1648705 - DNA, 15 bp, Homo sapiens
tgaagattttttgtt

SEQ ID NO: 1648706 - DNA, 15 bp, Homo sapiens
gaagattttttgttt

SEQ ID NO: 1648707 - DNA, 15 bp, Homo sapiens
aagattttttgtttc

SEQ ID NO: 1648708 - DNA, 15 bp, Homo sapiens
agattttttgtttct

SEQ ID NO: 1648709 - DNA, 15 bp, Homo sapiens
gattttttgtttctt

SEQ ID NO: 1648710 - DNA, 15 bp, Homo sapiens
attttttgtttcttg

SEQ ID NO: 1648711 - DNA, 15 bp, Homo sapiens
ttttttgtttcttgt

SEQ ID NO: 1648712 - DNA, 15 bp, Homo sapiens
tttttgtttcttgtt

SEQ ID NO: 1648713 - DNA, 15 bp, Homo sapiens
ttttgtttcttgttt

SEQ ID NO: 1648714 - DNA, 15 bp, Homo sapiens
tttttttttacttta

SEQ ID NO: 1648715 - DNA, 15 bp, Homo sapiens
ttttttttactttat

SEQ ID NO: 1648716 - DNA, 15 bp, Homo sapiens
tttttttactttata

SEQ ID NO: 1648717 - DNA, 15 bp, Homo sapiens
ttttttactttatac

SEQ ID NO: 1648718 - DNA, 15 bp, Homo sapiens
tttttactttataca

SEQ ID NO: 1648719 - DNA, 15 bp, Homo sapiens
ttttactttatacag

SEQ ID NO: 1648720 - DNA, 15 bp, Homo sapiens
tttactttatacagt

SEQ ID NO: 1648721 - DNA, 15 bp, Homo sapiens
ttactttatacagtc

SEQ ID NO: 1648722 - DNA, 15 bp, Homo sapiens
tactttatacagtct

SEQ ID NO: 1648723 - DNA, 15 bp, Homo sapiens
actttatacagtctt

SEQ ID NO: 1648724 - DNA, 15 bp, Homo sapiens
ctttatacagtcttt

SEQ ID NO: 1648725 - DNA, 15 bp, Homo sapiens
tttatacagtcttta

SEQ ID NO: 1648726 - DNA, 15 bp, Homo sapiens
ttatacagtctttat

SEQ ID NO: 1648727 - DNA, 15 bp, Homo sapiens
tatacagtctttatg

SEQ ID NO: 1648728 - DNA, 15 bp, Homo sapiens
atacagtctttatga

SEQ ID NO: 1648729 - DNA, 15 bp, Homo sapiens
tacagtctttatgaa

SEQ ID NO: 1648730 - DNA, 15 bp, Homo sapiens
acagtctttatgaat

SEQ ID NO: 1648731 - DNA, 15 bp, Homo sapiens
cagtctttatgaatt

SEQ ID NO: 1648732 - DNA, 15 bp, Homo sapiens
tctttatgaatttct

SEQ ID NO: 1648733 - DNA, 15 bp, Homo sapiens
ctttatgaatttctt

SEQ ID NO: 1648734 - DNA, 15 bp, Homo sapiens
tttatgaatttctta

SEQ ID NO: 1648735 - DNA, 15 bp, Homo sapiens
ttatgaatttcttaa

SEQ ID NO: 1648736 - DNA, 15 bp, Homo sapiens
tatgaatttcttaat

SEQ ID NO: 1648737 - DNA, 15 bp, Homo sapiens
atgaatttcttaatg

SEQ ID NO: 1648738 - DNA, 15 bp, Homo sapiens
tgaatttcttaatgt

SEQ ID NO: 1648739 - DNA, 15 bp, Homo sapiens
gaatttcttaatgtt

SEQ ID NO: 1648740 - DNA, 15 bp, Homo sapiens
aatttcttaatgttc

SEQ ID NO: 1648741 - DNA, 15 bp, Homo sapiens
atttcttaatgttca

SEQ ID NO: 1648742 - DNA, 15 bp, Homo sapiens
tttcttaatgttcaa

SEQ ID NO: 1648743 - DNA, 15 bp, Homo sapiens
ttcttaatgttcaaa

SEQ ID NO: 1648744 - DNA, 15 bp, Homo sapiens
tcttaatgttcaaaa

SEQ ID NO: 1648745 - DNA, 15 bp, Homo sapiens
cttaatgttcaaaat

SEQ ID NO: 1648746 - DNA, 15 bp, Homo sapiens
ttaatgttcaaaatg

SEQ ID NO: 1648747 - DNA, 15 bp, Homo sapiens
taatgttcaaaatga

SEQ ID NO: 1648748 - DNA, 15 bp, Homo sapiens
aatgttcaaaatgac

SEQ ID NO: 1648749 - DNA, 15 bp, Homo sapiens
atgttcaaaatgact

SEQ ID NO: 1648750 - DNA, 15 bp, Homo sapiens
tgttcaaaatgactt

SEQ ID NO: 1648751 - DNA, 15 bp, Homo sapiens
gttcaaaatgacttg

SEQ ID NO: 1648752 - DNA, 15 bp, Homo sapiens
ttcaaaatgacttgg

SEQ ID NO: 1648753 - DNA, 15 bp, Homo sapiens
tcaaaatgacttggt

SEQ ID NO: 1648754 - DNA, 15 bp, Homo sapiens
caaaatgacttggtt

SEQ ID NO: 1648755 - DNA, 15 bp, Homo sapiens
aaaatgacttggttc

SEQ ID NO: 1648756 - DNA, 15 bp, Homo sapiens
aaatgacttggttct

SEQ ID NO: 1648757 - DNA, 15 bp, Homo sapiens
aatgacttggttctt

SEQ ID NO: 1648758 - DNA, 15 bp, Homo sapiens
atgacttggttcttt

SEQ ID NO: 1648759 - DNA, 15 bp, Homo sapiens
tgacttggttctttt

SEQ ID NO: 1648760 - DNA, 15 bp, Homo sapiens
gacttggttcttttc

SEQ ID NO: 1648761 - DNA, 15 bp, Homo sapiens
acttggttcttttct

SEQ ID NO: 1648762 - DNA, 15 bp, Homo sapiens
cttggttcttttctt

SEQ ID NO: 1648763 - DNA, 15 bp, Homo sapiens
ttggttcttttcttc

SEQ ID NO: 1648764 - DNA, 15 bp, Homo sapiens
tggttcttttcttct

SEQ ID NO: 1648765 - DNA, 15 bp, Homo sapiens
ggttcttttcttctt

SEQ ID NO: 1648766 - DNA, 15 bp, Homo sapiens
gttcttttcttcttt

SEQ ID NO: 1648767 - DNA, 15 bp, Homo sapiens
ttcttttcttctttt

SEQ ID NO: 1648768 - DNA, 15 bp, Homo sapiens
tcttttcttcttttt

SEQ ID NO: 1648769 - DNA, 15 bp, Homo sapiens
cttttcttctttttt

SEQ ID NO: 1648770 - DNA, 15 bp, Homo sapiens
ttttcttcttttttt

SEQ ID NO: 1648771 - DNA, 15 bp, Homo sapiens
tttcttcttttttta

SEQ ID NO: 1648772 - DNA, 15 bp, Homo sapiens
ttcttctttttttat

SEQ ID NO: 1648773 - DNA, 15 bp, Homo sapiens
tcttctttttttata

SEQ ID NO: 1648774 - DNA, 15 bp, Homo sapiens
cttctttttttatat

SEQ ID NO: 1648775 - DNA, 15 bp, Homo sapiens
ttctttttttatatc

SEQ ID NO: 1648776 - DNA, 15 bp, Homo sapiens
tctttttttatatca

SEQ ID NO: 1648777 - DNA, 15 bp, Homo sapiens
ctttttttatatcag

SEQ ID NO: 1648778 - DNA, 15 bp, Homo sapiens
tttttttatatcaga

SEQ ID NO: 1648779 - DNA, 15 bp, Homo sapiens
ttttttatatcagaa

SEQ ID NO: 1648780 - DNA, 15 bp, Homo sapiens
tttttatatcagaat

SEQ ID NO: 1648781 - DNA, 15 bp, Homo sapiens
ttttatatcagaatg

SEQ ID NO: 1648782 - DNA, 15 bp, Homo sapiens
tttatatcagaatga

SEQ ID NO: 1648783 - DNA, 15 bp, Homo sapiens
ttatatcagaatgag

SEQ ID NO: 1648784 - DNA, 15 bp, Homo sapiens
tatatcagaatgagg

SEQ ID NO: 1648785 - DNA, 15 bp, Homo sapiens
atatcagaatgagga

SEQ ID NO: 1648786 - DNA, 15 bp, Homo sapiens
tatcagaatgaggaa

SEQ ID NO: 1648787 - DNA, 15 bp, Homo sapiens
atcagaatgaggaat

SEQ ID NO: 1648788 - DNA, 15 bp, Homo sapiens
tcagaatgaggaata

SEQ ID NO: 1648789 - DNA, 15 bp, Homo sapiens
cagaatgaggaataa

SEQ ID NO: 1648790 - DNA, 15 bp, Homo sapiens
agaatgaggaataat

SEQ ID NO: 1648791 - DNA, 15 bp, Homo sapiens
gaatgaggaataata

SEQ ID NO: 1648792 - DNA, 15 bp, Homo sapiens
aatgaggaataataa

SEQ ID NO: 1648793 - DNA, 15 bp, Homo sapiens
atgaggaataataag

SEQ ID NO: 1648794 - DNA, 15 bp, Homo sapiens
tgaggaataataagt

SEQ ID NO: 1648795 - DNA, 15 bp, Homo sapiens
gaggaataataagtt

SEQ ID NO: 1648796 - DNA, 15 bp, Homo sapiens
aggaataataagtta

SEQ ID NO: 1648797 - DNA, 15 bp, Homo sapiens
ggaataataagttaa

SEQ ID NO: 1648798 - DNA, 15 bp, Homo sapiens
gaataataagttaaa

SEQ ID NO: 1648799 - DNA, 15 bp, Homo sapiens
aataataagttaaac

SEQ ID NO: 1648800 - DNA, 15 bp, Homo sapiens
ataataagttaaacc

SEQ ID NO: 1648801 - DNA, 15 bp, Homo sapiens
taataagttaaaccc

SEQ ID NO: 1648802 - DNA, 15 bp, Homo sapiens
aataagttaaaccca

SEQ ID NO: 1648803 - DNA, 15 bp, Homo sapiens
ataagttaaacccac

SEQ ID NO: 1648804 - DNA, 15 bp, Homo sapiens
taagttaaacccaca

SEQ ID NO: 1648805 - DNA, 15 bp, Homo sapiens
aagttaaacccacat

SEQ ID NO: 1648806 - DNA, 15 bp, Homo sapiens
agttaaacccacata

SEQ ID NO: 1648807 - DNA, 15 bp, Homo sapiens
gttaaacccacatag

SEQ ID NO: 1648808 - DNA, 15 bp, Homo sapiens
ttaaacccacataga

SEQ ID NO: 1648809 - DNA, 15 bp, Homo sapiens
taaacccacatagac

SEQ ID NO: 1648810 - DNA, 15 bp, Homo sapiens
aaacccacatagact

SEQ ID NO: 1648811 - DNA, 15 bp, Homo sapiens
aacccacatagactc

SEQ ID NO: 1648812 - DNA, 15 bp, Homo sapiens
acccacatagactct

SEQ ID NO: 1648813 - DNA, 15 bp, Homo sapiens
cccacatagactctt

SEQ ID NO: 1648814 - DNA, 15 bp, Homo sapiens
ccacatagactcttt

SEQ ID NO: 1648815 - DNA, 15 bp, Homo sapiens
cacatagactcttta

SEQ ID NO: 1648816 - DNA, 15 bp, Homo sapiens
acatagactctttaa

SEQ ID NO: 1648817 - DNA, 15 bp, Homo sapiens
catagactctttaaa

SEQ ID NO: 1648818 - DNA, 15 bp, Homo sapiens
atagactctttaaaa

SEQ ID NO: 1648819 - DNA, 15 bp, Homo sapiens
tagactctttaaaac

SEQ ID NO: 1648820 - DNA, 15 bp, Homo sapiens
agactctttaaaact

SEQ ID NO: 1648821 - DNA, 15 bp, Homo sapiens
gactctttaaaacta

SEQ ID NO: 1648822 - DNA, 15 bp, Homo sapiens
actctttaaaactat

SEQ ID NO: 1648823 - DNA, 15 bp, Homo sapiens
ctctttaaaactata

SEQ ID NO: 1648824 - DNA, 15 bp, Homo sapiens
tctttaaaactatag

SEQ ID NO: 1648825 - DNA, 15 bp, Homo sapiens
ctttaaaactatagg

SEQ ID NO: 1648826 - DNA, 15 bp, Homo sapiens
tttaaaactataggc

SEQ ID NO: 1648827 - DNA, 15 bp, Homo sapiens
ttaaaactataggct

SEQ ID NO: 1648828 - DNA, 15 bp, Homo sapiens
taaaactataggcta

SEQ ID NO: 1648829 - DNA, 15 bp, Homo sapiens
aaaactataggctag

SEQ ID NO: 1648830 - DNA, 15 bp, Homo sapiens
aaactataggctaga

SEQ ID NO: 1648831 - DNA, 15 bp, Homo sapiens
aactataggctagat

SEQ ID NO: 1648832 - DNA, 15 bp, Homo sapiens
actataggctagata

SEQ ID NO: 1648833 - DNA, 15 bp, Homo sapiens
ctataggctagatag

SEQ ID NO: 1648834 - DNA, 15 bp, Homo sapiens
tataggctagataga

SEQ ID NO: 1648835 - DNA, 15 bp, Homo sapiens
ataggctagatagaa

SEQ ID NO: 1648836 - DNA, 15 bp, Homo sapiens
taggctagatagaaa

SEQ ID NO: 1648837 - DNA, 15 bp, Homo sapiens
aggctagatagaaat

SEQ ID NO: 1648838 - DNA, 15 bp, Homo sapiens
ggctagatagaaatg

SEQ ID NO: 1648839 - DNA, 15 bp, Homo sapiens
gctagatagaaatgt

SEQ ID NO: 1648840 - DNA, 15 bp, Homo sapiens
ctagatagaaatgta

SEQ ID NO: 1648841 - DNA, 15 bp, Homo sapiens
tagatagaaatgtat

SEQ ID NO: 1648842 - DNA, 15 bp, Homo sapiens
agatagaaatgtatg

SEQ ID NO: 1648843 - DNA, 15 bp, Homo sapiens
gatagaaatgtatgt

SEQ ID NO: 1648844 - DNA, 15 bp, Homo sapiens
atagaaatgtatgtt

SEQ ID NO: 1648845 - DNA, 15 bp, Homo sapiens
tagaaatgtatgttt

SEQ ID NO: 1648846 - DNA, 15 bp, Homo sapiens
agaaatgtatgtttg

SEQ ID NO: 1648847 - DNA, 15 bp, Homo sapiens
gaaatgtatgtttga

SEQ ID NO: 1648848 - DNA, 15 bp, Homo sapiens
aaatgtatgtttgac

SEQ ID NO: 1648849 - DNA, 15 bp, Homo sapiens
aatgtatgtttgact

SEQ ID NO: 1648850 - DNA, 15 bp, Homo sapiens
atgtatgtttgactt

SEQ ID NO: 1648851 - DNA, 15 bp, Homo sapiens
tgtatgtttgacttg

SEQ ID NO: 1648852 - DNA, 15 bp, Homo sapiens
gtatgtttgacttgt

SEQ ID NO: 1648853 - DNA, 15 bp, Homo sapiens
tatgtttgacttgtt

SEQ ID NO: 1648854 - DNA, 15 bp, Homo sapiens
atgtttgacttgttg

SEQ ID NO: 1648855 - DNA, 15 bp, Homo sapiens
tgtttgacttgttga

SEQ ID NO: 1648856 - DNA, 15 bp, Homo sapiens
gtttgacttgttgaa

SEQ ID NO: 1648857 - DNA, 15 bp, Homo sapiens
tttgacttgttgaag

SEQ ID NO: 1648858 - DNA, 15 bp, Homo sapiens
ttgacttgttgaagc

SEQ ID NO: 1648859 - DNA, 15 bp, Homo sapiens
tgacttgttgaagct

SEQ ID NO: 1648860 - DNA, 15 bp, Homo sapiens
gacttgttgaagcta

SEQ ID NO: 1648861 - DNA, 15 bp, Homo sapiens
acttgttgaagctat

SEQ ID NO: 1648862 - DNA, 15 bp, Homo sapiens
cttgttgaagctata

SEQ ID NO: 1648863 - DNA, 15 bp, Homo sapiens
ttgttgaagctataa

SEQ ID NO: 1648864 - DNA, 15 bp, Homo sapiens
tgttgaagctataat

SEQ ID NO: 1648865 - DNA, 15 bp, Homo sapiens
gttgaagctataatc

SEQ ID NO: 1648866 - DNA, 15 bp, Homo sapiens
ttgaagctataatca

SEQ ID NO: 1648867 - DNA, 15 bp, Homo sapiens
tgaagctataatcag

SEQ ID NO: 1648868 - DNA, 15 bp, Homo sapiens
gaagctataatcaga

SEQ ID NO: 1648869 - DNA, 15 bp, Homo sapiens
aagctataatcagac

SEQ ID NO: 1648870 - DNA, 15 bp, Homo sapiens
agctataatcagact

SEQ ID NO: 1648871 - DNA, 15 bp, Homo sapiens
gctataatcagacta

SEQ ID NO: 1648872 - DNA, 15 bp, Homo sapiens
ctataatcagactat

SEQ ID NO: 1648873 - DNA, 15 bp, Homo sapiens
tataatcagactatt

SEQ ID NO: 1648874 - DNA, 15 bp, Homo sapiens
ataatcagactattt

SEQ ID NO: 1648875 - DNA, 15 bp, Homo sapiens
taatcagactattta

SEQ ID NO: 1648876 - DNA, 15 bp, Homo sapiens
aatcagactatttaa

SEQ ID NO: 1648877 - DNA, 15 bp, Homo sapiens
atcagactatttaaa

SEQ ID NO: 1648878 - DNA, 15 bp, Homo sapiens
tcagactatttaaaa

SEQ ID NO: 1648879 - DNA, 15 bp, Homo sapiens
cagactatttaaaat

SEQ ID NO: 1648880 - DNA, 15 bp, Homo sapiens
agactatttaaaatg

SEQ ID NO: 1648881 - DNA, 15 bp, Homo sapiens
gactatttaaaatgt

SEQ ID NO: 1648882 - DNA, 15 bp, Homo sapiens
actatttaaaatgtt

SEQ ID NO: 1648883 - DNA, 15 bp, Homo sapiens
ctatttaaaatgttt

SEQ ID NO: 1648884 - DNA, 15 bp, Homo sapiens
tatttaaaatgtttt

SEQ ID NO: 1648885 - DNA, 15 bp, Homo sapiens
atttaaaatgttttg

SEQ ID NO: 1648886 - DNA, 15 bp, Homo sapiens
tttaaaatgttttgc

SEQ ID NO: 1648887 - DNA, 15 bp, Homo sapiens
ttaaaatgttttgct

SEQ ID NO: 1648888 - DNA, 15 bp, Homo sapiens
taaaatgttttgcta

SEQ ID NO: 1648889 - DNA, 15 bp, Homo sapiens
aaaatgttttgctat

SEQ ID NO: 1648890 - DNA, 15 bp, Homo sapiens
aaatgttttgctatt

SEQ ID NO: 1648891 - DNA, 15 bp, Homo sapiens
aatgttttgctattt

SEQ ID NO: 1648892 - DNA, 15 bp, Homo sapiens
atgttttgctatttt

SEQ ID NO: 1648893 - DNA, 15 bp, Homo sapiens
tgttttgctattttt

SEQ ID NO: 1648894 - DNA, 15 bp, Homo sapiens
gttttgctattttta

SEQ ID NO: 1648895 - DNA, 15 bp, Homo sapiens
ttttgctatttttaa

SEQ ID NO: 1648896 - DNA, 15 bp, Homo sapiens
tttgctatttttaat

SEQ ID NO: 1648897 - DNA, 15 bp, Homo sapiens
ttgctatttttaatc

SEQ ID NO: 1648898 - DNA, 15 bp, Homo sapiens
tgctatttttaatct

SEQ ID NO: 1648899 - DNA, 15 bp, Homo sapiens
gctatttttaatctt

SEQ ID NO: 1648900 - DNA, 15 bp, Homo sapiens
ctatttttaatctta

SEQ ID NO: 1648901 - DNA, 15 bp, Homo sapiens
tatttttaatcttaa

SEQ ID NO: 1648902 - DNA, 15 bp, Homo sapiens
atttttaatcttaaa

SEQ ID NO: 1648903 - DNA, 15 bp, Homo sapiens
tttttaatcttaaaa

SEQ ID NO: 1648904 - DNA, 15 bp, Homo sapiens
ttttaatcttaaaag

SEQ ID NO: 1648905 - DNA, 15 bp, Homo sapiens
tttaatcttaaaaga

SEQ ID NO: 1648906 - DNA, 15 bp, Homo sapiens
ttaatcttaaaagat

SEQ ID NO: 1648907 - DNA, 15 bp, Homo sapiens
taatcttaaaagatt

SEQ ID NO: 1648908 - DNA, 15 bp, Homo sapiens
aatcttaaaagattg

SEQ ID NO: 1648909 - DNA, 15 bp, Homo sapiens
atcttaaaagattgt

SEQ ID NO: 1648910 - DNA, 15 bp, Homo sapiens
tcttaaaagattgtg

SEQ ID NO: 1648911 - DNA, 15 bp, Homo sapiens
cttaaaagattgtgc

SEQ ID NO: 1648912 - DNA, 15 bp, Homo sapiens
ttaaaagattgtgct

SEQ ID NO: 1648913 - DNA, 15 bp, Homo sapiens
taaaagattgtgcta

SEQ ID NO: 1648914 - DNA, 15 bp, Homo sapiens
aaaagattgtgctaa

SEQ ID NO: 1648915 - DNA, 15 bp, Homo sapiens
aaagattgtgctaat

SEQ ID NO: 1648916 - DNA, 15 bp, Homo sapiens
aagattgtgctaatt

SEQ ID NO: 1648917 - DNA, 15 bp, Homo sapiens
agattgtgctaattt

SEQ ID NO: 1648918 - DNA, 15 bp, Homo sapiens
gattgtgctaattta

SEQ ID NO: 1648919 - DNA, 15 bp, Homo sapiens
attgtgctaatttat

SEQ ID NO: 1648920 - DNA, 15 bp, Homo sapiens
ttgtgctaatttatt

SEQ ID NO: 1648921 - DNA, 15 bp, Homo sapiens
tgtgctaatttatta

SEQ ID NO: 1648922 - DNA, 15 bp, Homo sapiens
gtgctaatttattag

SEQ ID NO: 1648923 - DNA, 15 bp, Homo sapiens
tgctaatttattaga

SEQ ID NO: 1648924 - DNA, 15 bp, Homo sapiens
gctaatttattagag

SEQ ID NO: 1648925 - DNA, 15 bp, Homo sapiens
ctaatttattagagc

SEQ ID NO: 1648926 - DNA, 15 bp, Homo sapiens
taatttattagagca

SEQ ID NO: 1648927 - DNA, 15 bp, Homo sapiens
aatttattagagcag

SEQ ID NO: 1648928 - DNA, 15 bp, Homo sapiens
atttattagagcaga

SEQ ID NO: 1648929 - DNA, 15 bp, Homo sapiens
tttattagagcagaa

SEQ ID NO: 1648930 - DNA, 15 bp, Homo sapiens
ttattagagcagaac

SEQ ID NO: 1648931 - DNA, 15 bp, Homo sapiens
tattagagcagaacc

SEQ ID NO: 1648932 - DNA, 15 bp, Homo sapiens
attagagcagaacct

SEQ ID NO: 1648933 - DNA, 15 bp, Homo sapiens
ttagagcagaacctg

SEQ ID NO: 1648934 - DNA, 15 bp, Homo sapiens
tagagcagaacctgt

SEQ ID NO: 1648935 - DNA, 15 bp, Homo sapiens
agagcagaacctgtt

SEQ ID NO: 1648936 - DNA, 15 bp, Homo sapiens
gagcagaacctgttt

SEQ ID NO: 1648937 - DNA, 15 bp, Homo sapiens
agcagaacctgtttg

SEQ ID NO: 1648938 - DNA, 15 bp, Homo sapiens
gcagaacctgtttgg

SEQ ID NO: 1648939 - DNA, 15 bp, Homo sapiens
cagaacctgtttggc

SEQ ID NO: 1648940 - DNA, 15 bp, Homo sapiens
agaacctgtttggct

SEQ ID NO: 1648941 - DNA, 15 bp, Homo sapiens
gaacctgtttggctc

SEQ ID NO: 1648942 - DNA, 15 bp, Homo sapiens
aacctgtttggctct

SEQ ID NO: 1648943 - DNA, 15 bp, Homo sapiens
acctgtttggctctc

SEQ ID NO: 1648944 - DNA, 15 bp, Homo sapiens
cctgtttggctctcc

SEQ ID NO: 1648945 - DNA, 15 bp, Homo sapiens
ctgtttggctctcct

SEQ ID NO: 1648946 - DNA, 15 bp, Homo sapiens
tgtttggctctcctc

SEQ ID NO: 1648947 - DNA, 15 bp, Homo sapiens
gtttggctctcctca

SEQ ID NO: 1648948 - DNA, 15 bp, Homo sapiens
tttggctctcctcag

SEQ ID NO: 1648949 - DNA, 15 bp, Homo sapiens
ttggctctcctcaga

SEQ ID NO: 1648950 - DNA, 15 bp, Homo sapiens
tggctctcctcagaa

SEQ ID NO: 1648951 - DNA, 15 bp, Homo sapiens
ggctctcctcagaag

SEQ ID NO: 1648952 - DNA, 15 bp, Homo sapiens
gctctcctcagaaga

SEQ ID NO: 1648953 - DNA, 15 bp, Homo sapiens
ctctcctcagaagaa

SEQ ID NO: 1648954 - DNA, 15 bp, Homo sapiens
tctcctcagaagaaa

SEQ ID NO: 1648955 - DNA, 15 bp, Homo sapiens
ctcctcagaagaaag

SEQ ID NO: 1648956 - DNA, 15 bp, Homo sapiens
tcctcagaagaaaga

SEQ ID NO: 1648957 - DNA, 15 bp, Homo sapiens
cctcagaagaaagaa

SEQ ID NO: 1648958 - DNA, 15 bp, Homo sapiens
ctcagaagaaagaat

SEQ ID NO: 1648959 - DNA, 15 bp, Homo sapiens
tcagaagaaagaatc

SEQ ID NO: 1648960 - DNA, 15 bp, Homo sapiens
cagaagaaagaatct

SEQ ID NO: 1648961 - DNA, 15 bp, Homo sapiens
agaagaaagaatctt

SEQ ID NO: 1648962 - DNA, 15 bp, Homo sapiens
gaagaaagaatcttt

SEQ ID NO: 1648963 - DNA, 15 bp, Homo sapiens
aagaaagaatctttc

SEQ ID NO: 1648964 - DNA, 15 bp, Homo sapiens
agaaagaatctttcc

SEQ ID NO: 1648965 - DNA, 15 bp, Homo sapiens
gaaagaatctttcca

SEQ ID NO: 1648966 - DNA, 15 bp, Homo sapiens
aaagaatctttccat

SEQ ID NO: 1648967 - DNA, 15 bp, Homo sapiens
aagaatctttccatt

SEQ ID NO: 1648968 - DNA, 15 bp, Homo sapiens
agaatctttccattc

SEQ ID NO: 1648969 - DNA, 15 bp, Homo sapiens
gaatctttccattca

SEQ ID NO: 1648970 - DNA, 15 bp, Homo sapiens
aatctttccattcaa

SEQ ID NO: 1648971 - DNA, 15 bp, Homo sapiens
atctttccattcaaa

SEQ ID NO: 1648972 - DNA, 15 bp, Homo sapiens
tctttccattcaaat

SEQ ID NO: 1648973 - DNA, 15 bp, Homo sapiens
ctttccattcaaatc

SEQ ID NO: 1648974 - DNA, 15 bp, Homo sapiens
tttccattcaaatca

SEQ ID NO: 1648975 - DNA, 15 bp, Homo sapiens
ttccattcaaatcac

SEQ ID NO: 1648976 - DNA, 15 bp, Homo sapiens
tccattcaaatcaca

SEQ ID NO: 1648977 - DNA, 15 bp, Homo sapiens
ccattcaaatcacat

SEQ ID NO: 1648978 - DNA, 15 bp, Homo sapiens
cattcaaatcacatg

SEQ ID NO: 1648979 - DNA, 15 bp, Homo sapiens
attcaaatcacatgg

SEQ ID NO: 1648980 - DNA, 15 bp, Homo sapiens
ttcaaatcacatggc

SEQ ID NO: 1648981 - DNA, 15 bp, Homo sapiens
tcaaatcacatggct

SEQ ID NO: 1648982 - DNA, 15 bp, Homo sapiens
caaatcacatggctt

SEQ ID NO: 1648983 - DNA, 15 bp, Homo sapiens
aaatcacatggcttt

SEQ ID NO: 1648984 - DNA, 15 bp, Homo sapiens
aatcacatggctttc

SEQ ID NO: 1648985 - DNA, 15 bp, Homo sapiens
atcacatggctttcc

SEQ ID NO: 1648986 - DNA, 15 bp, Homo sapiens
tcacatggctttcca

SEQ ID NO: 1648987 - DNA, 15 bp, Homo sapiens
cacatggctttccac

SEQ ID NO: 1648988 - DNA, 15 bp, Homo sapiens
acatggctttccacc

SEQ ID NO: 1648989 - DNA, 15 bp, Homo sapiens
catggctttccacca

SEQ ID NO: 1648990 - DNA, 15 bp, Homo sapiens
atggctttccaccaa

SEQ ID NO: 1648991 - DNA, 15 bp, Homo sapiens
tggctttccaccaat

SEQ ID NO: 1648992 - DNA, 15 bp, Homo sapiens
ggctttccaccaata

SEQ ID NO: 1648993 - DNA, 15 bp, Homo sapiens
gctttccaccaatat

SEQ ID NO: 1648994 - DNA, 15 bp, Homo sapiens
ctttccaccaatatt

SEQ ID NO: 1648995 - DNA, 15 bp, Homo sapiens
tttccaccaatattt

SEQ ID NO: 1648996 - DNA, 15 bp, Homo sapiens
ttccaccaatatttt

SEQ ID NO: 1648997 - DNA, 15 bp, Homo sapiens
tccaccaatattttc

SEQ ID NO: 1648998 - DNA, 15 bp, Homo sapiens
ccaccaatattttca

SEQ ID NO: 1648999 - DNA, 15 bp, Homo sapiens
caccaatattttcaa

SEQ ID NO: 1649000 - DNA, 15 bp, Homo sapiens
accaatattttcaaa

SEQ ID NO: 1649001 - DNA, 15 bp, Homo sapiens
ccaatattttcaaaa

SEQ ID NO: 1649002 - DNA, 15 bp, Homo sapiens
caatattttcaaaag

SEQ ID NO: 1649003 - DNA, 15 bp, Homo sapiens
aatattttcaaaaga

SEQ ID NO: 1649004 - DNA, 15 bp, Homo sapiens
atattttcaaaagat

SEQ ID NO: 1649005 - DNA, 15 bp, Homo sapiens
tattttcaaaagata

SEQ ID NO: 1649006 - DNA, 15 bp, Homo sapiens
attttcaaaagataa

SEQ ID NO: 1649007 - DNA, 15 bp, Homo sapiens
ttttcaaaagataaa

SEQ ID NO: 1649008 - DNA, 15 bp, Homo sapiens
tttcaaaagataaat

SEQ ID NO: 1649009 - DNA, 15 bp, Homo sapiens
ttcaaaagataaatc

SEQ ID NO: 1649010 - DNA, 15 bp, Homo sapiens
tcaaaagataaatct

SEQ ID NO: 1649011 - DNA, 15 bp, Homo sapiens
caaaagataaatctg

SEQ ID NO: 1649012 - DNA, 15 bp, Homo sapiens
aaaagataaatctga

SEQ ID NO: 1649013 - DNA, 15 bp, Homo sapiens
aaagataaatctgat

SEQ ID NO: 1649014 - DNA, 15 bp, Homo sapiens
aagataaatctgatt

SEQ ID NO: 1649015 - DNA, 15 bp, Homo sapiens
agataaatctgattt

SEQ ID NO: 1649016 - DNA, 15 bp, Homo sapiens
gataaatctgattta

SEQ ID NO: 1649017 - DNA, 15 bp, Homo sapiens
ataaatctgatttat

SEQ ID NO: 1649018 - DNA, 15 bp, Homo sapiens
taaatctgatttatg

SEQ ID NO: 1649019 - DNA, 15 bp, Homo sapiens
aaatctgatttatgc

SEQ ID NO: 1649020 - DNA, 15 bp, Homo sapiens
aatctgatttatgca

SEQ ID NO: 1649021 - DNA, 15 bp, Homo sapiens
atctgatttatgcaa

SEQ ID NO: 1649022 - DNA, 15 bp, Homo sapiens
tctgatttatgcaat

SEQ ID NO: 1649023 - DNA, 15 bp, Homo sapiens
ctgatttatgcaatg

SEQ ID NO: 1649024 - DNA, 15 bp, Homo sapiens
tgatttatgcaatgg

SEQ ID NO: 1649025 - DNA, 15 bp, Homo sapiens
gatttatgcaatggc

SEQ ID NO: 1649026 - DNA, 15 bp, Homo sapiens
atttatgcaatggca

SEQ ID NO: 1649027 - DNA, 15 bp, Homo sapiens
tttatgcaatggcat

SEQ ID NO: 1649028 - DNA, 15 bp, Homo sapiens
ttatgcaatggcatc

SEQ ID NO: 1649029 - DNA, 15 bp, Homo sapiens
tatgcaatggcatca

SEQ ID NO: 1649030 - DNA, 15 bp, Homo sapiens
atgcaatggcatcat

SEQ ID NO: 1649031 - DNA, 15 bp, Homo sapiens
tgcaatggcatcatt

SEQ ID NO: 1649032 - DNA, 15 bp, Homo sapiens
gcaatggcatcattt

SEQ ID NO: 1649033 - DNA, 15 bp, Homo sapiens
caatggcatcattta

SEQ ID NO: 1649034 - DNA, 15 bp, Homo sapiens
aatggcatcatttat

SEQ ID NO: 1649035 - DNA, 15 bp, Homo sapiens
atggcatcatttatt

SEQ ID NO: 1649036 - DNA, 15 bp, Homo sapiens
tggcatcatttattt

SEQ ID NO: 1649037 - DNA, 15 bp, Homo sapiens
ggcatcatttatttt

SEQ ID NO: 1649038 - DNA, 15 bp, Homo sapiens
gcatcatttatttta

SEQ ID NO: 1649039 - DNA, 15 bp, Homo sapiens
catcatttattttaa

SEQ ID NO: 1649040 - DNA, 15 bp, Homo sapiens
atcatttattttaaa

SEQ ID NO: 1649041 - DNA, 15 bp, Homo sapiens
tcatttattttaaaa

SEQ ID NO: 1649042 - DNA, 15 bp, Homo sapiens
catttattttaaaac

SEQ ID NO: 1649043 - DNA, 15 bp, Homo sapiens
atttattttaaaaca

SEQ ID NO: 1649044 - DNA, 15 bp, Homo sapiens
tttattttaaaacag

SEQ ID NO: 1649045 - DNA, 15 bp, Homo sapiens
ttattttaaaacaga

SEQ ID NO: 1649046 - DNA, 15 bp, Homo sapiens
tattttaaaacagaa

SEQ ID NO: 1649047 - DNA, 15 bp, Homo sapiens
attttaaaacagaag

SEQ ID NO: 1649048 - DNA, 15 bp, Homo sapiens
ttttaaaacagaaga

SEQ ID NO: 1649049 - DNA, 15 bp, Homo sapiens
tttaaaacagaagaa

SEQ ID NO: 1649050 - DNA, 15 bp, Homo sapiens
ttaaaacagaagaat

SEQ ID NO: 1649051 - DNA, 15 bp, Homo sapiens
taaaacagaagaatt

SEQ ID NO: 1649052 - DNA, 15 bp, Homo sapiens
aaaacagaagaattg

SEQ ID NO: 1649053 - DNA, 15 bp, Homo sapiens
aaacagaagaattgt

SEQ ID NO: 1649054 - DNA, 15 bp, Homo sapiens
aacagaagaattgtg

SEQ ID NO: 1649055 - DNA, 15 bp, Homo sapiens
acagaagaattgtga

SEQ ID NO: 1649056 - DNA, 15 bp, Homo sapiens
cagaagaattgtgaa

SEQ ID NO: 1649057 - DNA, 15 bp, Homo sapiens
agaagaattgtgaaa

SEQ ID NO: 1649058 - DNA, 15 bp, Homo sapiens
gaagaattgtgaaag

SEQ ID NO: 1649059 - DNA, 15 bp, Homo sapiens
aagaattgtgaaagt

SEQ ID NO: 1649060 - DNA, 15 bp, Homo sapiens
agaattgtgaaagtt

SEQ ID NO: 1649061 - DNA, 15 bp, Homo sapiens
gaattgtgaaagttt

SEQ ID NO: 1649062 - DNA, 15 bp, Homo sapiens
aattgtgaaagttta

SEQ ID NO: 1649063 - DNA, 15 bp, Homo sapiens
attgtgaaagtttat

SEQ ID NO: 1649064 - DNA, 15 bp, Homo sapiens
ttgtgaaagtttatg

SEQ ID NO: 1649065 - DNA, 15 bp, Homo sapiens
tgtgaaagtttatgc

SEQ ID NO: 1649066 - DNA, 15 bp, Homo sapiens
gtgaaagtttatgcc

SEQ ID NO: 1649067 - DNA, 15 bp, Homo sapiens
tgaaagtttatgccc

SEQ ID NO: 1649068 - DNA, 15 bp, Homo sapiens
gaaagtttatgcccc

SEQ ID NO: 1649069 - DNA, 15 bp, Homo sapiens
aaagtttatgcccct

SEQ ID NO: 1649070 - DNA, 15 bp, Homo sapiens
aagtttatgcccctc

SEQ ID NO: 1649071 - DNA, 15 bp, Homo sapiens
agtttatgcccctcc

SEQ ID NO: 1649072 - DNA, 15 bp, Homo sapiens
gtttatgcccctccc

SEQ ID NO: 1649073 - DNA, 15 bp, Homo sapiens
tttatgcccctccct

SEQ ID NO: 1649074 - DNA, 15 bp, Homo sapiens
ttatgcccctccctt

SEQ ID NO: 1649075 - DNA, 15 bp, Homo sapiens
tatgcccctcccttg

SEQ ID NO: 1649076 - DNA, 15 bp, Homo sapiens
atgcccctcccttgc

SEQ ID NO: 1649077 - DNA, 15 bp, Homo sapiens
tgcccctcccttgca

SEQ ID NO: 1649078 - DNA, 15 bp, Homo sapiens
gcccctcccttgcaa

SEQ ID NO: 1649079 - DNA, 15 bp, Homo sapiens
cccctcccttgcaaa

SEQ ID NO: 1649080 - DNA, 15 bp, Homo sapiens
ccctcccttgcaaag

SEQ ID NO: 1649081 - DNA, 15 bp, Homo sapiens
cctcccttgcaaaga

SEQ ID NO: 1649082 - DNA, 15 bp, Homo sapiens
ctcccttgcaaagac

SEQ ID NO: 1649083 - DNA, 15 bp, Homo sapiens
tcccttgcaaagacc

SEQ ID NO: 1649084 - DNA, 15 bp, Homo sapiens
cccttgcaaagacca

SEQ ID NO: 1649085 - DNA, 15 bp, Homo sapiens
ccttgcaaagaccat

SEQ ID NO: 1649086 - DNA, 15 bp, Homo sapiens
cttgcaaagaccata

SEQ ID NO: 1649087 - DNA, 15 bp, Homo sapiens
ttgcaaagaccataa

SEQ ID NO: 1649088 - DNA, 15 bp, Homo sapiens
tgcaaagaccataaa

SEQ ID NO: 1649089 - DNA, 15 bp, Homo sapiens
gcaaagaccataaag

SEQ ID NO: 1649090 - DNA, 15 bp, Homo sapiens
caaagaccataaagt

SEQ ID NO: 1649091 - DNA, 15 bp, Homo sapiens
aaagaccataaagtc

SEQ ID NO: 1649092 - DNA, 15 bp, Homo sapiens
aagaccataaagtcc

SEQ ID NO: 1649093 - DNA, 15 bp, Homo sapiens
agaccataaagtcca

SEQ ID NO: 1649094 - DNA, 15 bp, Homo sapiens
gaccataaagtccag

SEQ ID NO: 1649095 - DNA, 15 bp, Homo sapiens
accataaagtccaga

SEQ ID NO: 1649096 - DNA, 15 bp, Homo sapiens
ccataaagtccagat

SEQ ID NO: 1649097 - DNA, 15 bp, Homo sapiens
cataaagtccagatc

SEQ ID NO: 1649098 - DNA, 15 bp, Homo sapiens
ataaagtccagatct

SEQ ID NO: 1649099 - DNA, 15 bp, Homo sapiens
taaagtccagatctg

SEQ ID NO: 1649100 - DNA, 15 bp, Homo sapiens
aaagtccagatctgg

SEQ ID NO: 1649101 - DNA, 15 bp, Homo sapiens
aagtccagatctggt

SEQ ID NO: 1649102 - DNA, 15 bp, Homo sapiens
agtccagatctggta

SEQ ID NO: 1649103 - DNA, 15 bp, Homo sapiens
gtccagatctggtag

SEQ ID NO: 1649104 - DNA, 15 bp, Homo sapiens
tccagatctggtagg

SEQ ID NO: 1649105 - DNA, 15 bp, Homo sapiens
ccagatctggtaggg

SEQ ID NO: 1649106 - DNA, 15 bp, Homo sapiens
cagatctggtagggg

SEQ ID NO: 1649107 - DNA, 15 bp, Homo sapiens
agatctggtaggggg

SEQ ID NO: 1649108 - DNA, 15 bp, Homo sapiens
gatctggtagggggg

SEQ ID NO: 1649109 - DNA, 15 bp, Homo sapiens
atctggtaggggggc

SEQ ID NO: 1649110 - DNA, 15 bp, Homo sapiens
tctggtaggggggca

SEQ ID NO: 1649111 - DNA, 15 bp, Homo sapiens
ctggtaggggggcaa

SEQ ID NO: 1649112 - DNA, 15 bp, Homo sapiens
tggtaggggggcaac

SEQ ID NO: 1649113 - DNA, 15 bp, Homo sapiens
ggtaggggggcaaca

SEQ ID NO: 1649114 - DNA, 15 bp, Homo sapiens
gtaggggggcaacaa

SEQ ID NO: 1649115 - DNA, 15 bp, Homo sapiens
taggggggcaacaac

SEQ ID NO: 1649116 - DNA, 15 bp, Homo sapiens
aggggggcaacaaca

SEQ ID NO: 1649117 - DNA, 15 bp, Homo sapiens
ggggggcaacaacaa

SEQ ID NO: 1649118 - DNA, 15 bp, Homo sapiens
gggggcaacaacaaa

SEQ ID NO: 1649119 - DNA, 15 bp, Homo sapiens
ggggcaacaacaaaa

SEQ ID NO: 1649120 - DNA, 15 bp, Homo sapiens
gggcaacaacaaaag

SEQ ID NO: 1649121 - DNA, 15 bp, Homo sapiens
ggcaacaacaaaagg

SEQ ID NO: 1649122 - DNA, 15 bp, Homo sapiens
gcaacaacaaaagga

SEQ ID NO: 1649123 - DNA, 15 bp, Homo sapiens
caacaacaaaaggaa

SEQ ID NO: 1649124 - DNA, 15 bp, Homo sapiens
acaacaaaaggaaaa

SEQ ID NO: 1649125 - DNA, 15 bp, Homo sapiens
caacaaaaggaaaat

SEQ ID NO: 1649126 - DNA, 15 bp, Homo sapiens
aacaaaaggaaaatg

SEQ ID NO: 1649127 - DNA, 15 bp, Homo sapiens
acaaaaggaaaatgt

SEQ ID NO: 1649128 - DNA, 15 bp, Homo sapiens
caaaaggaaaatgtt

SEQ ID NO: 1649129 - DNA, 15 bp, Homo sapiens
aaaaggaaaatgttg

SEQ ID NO: 1649130 - DNA, 15 bp, Homo sapiens
aaaggaaaatgttgt

SEQ ID NO: 1649131 - DNA, 15 bp, Homo sapiens
aaggaaaatgttgtt

SEQ ID NO: 1649132 - DNA, 15 bp, Homo sapiens
aggaaaatgttgttg

SEQ ID NO: 1649133 - DNA, 15 bp, Homo sapiens
ggaaaatgttgttga

SEQ ID NO: 1649134 - DNA, 15 bp, Homo sapiens
gaaaatgttgttgat

SEQ ID NO: 1649135 - DNA, 15 bp, Homo sapiens
aaaatgttgttgatt

SEQ ID NO: 1649136 - DNA, 15 bp, Homo sapiens
aaatgttgttgattc

SEQ ID NO: 1649137 - DNA, 15 bp, Homo sapiens
aatgttgttgattct

SEQ ID NO: 1649138 - DNA, 15 bp, Homo sapiens
atgttgttgattctt

SEQ ID NO: 1649139 - DNA, 15 bp, Homo sapiens
tgttgttgattcttg

SEQ ID NO: 1649140 - DNA, 15 bp, Homo sapiens
gttgttgattcttgg

SEQ ID NO: 1649141 - DNA, 15 bp, Homo sapiens
ttgttgattcttggt

SEQ ID NO: 1649142 - DNA, 15 bp, Homo sapiens
tgttgattcttggtt

SEQ ID NO: 1649143 - DNA, 15 bp, Homo sapiens
gttgattcttggttt

SEQ ID NO: 1649144 - DNA, 15 bp, Homo sapiens
ttgattcttggtttt

SEQ ID NO: 1649145 - DNA, 15 bp, Homo sapiens
tgattcttggttttg

SEQ ID NO: 1649146 - DNA, 15 bp, Homo sapiens
gattcttggttttgg

SEQ ID NO: 1649147 - DNA, 15 bp, Homo sapiens
attcttggttttgga

SEQ ID NO: 1649148 - DNA, 15 bp, Homo sapiens
ttcttggttttggat

SEQ ID NO: 1649149 - DNA, 15 bp, Homo sapiens
tcttggttttggatt

SEQ ID NO: 1649150 - DNA, 15 bp, Homo sapiens
cttggttttggattt

SEQ ID NO: 1649151 - DNA, 15 bp, Homo sapiens
ttggttttggatttt

SEQ ID NO: 1649152 - DNA, 15 bp, Homo sapiens
tggttttggattttg

SEQ ID NO: 1649153 - DNA, 15 bp, Homo sapiens
ggttttggattttgt

SEQ ID NO: 1649154 - DNA, 15 bp, Homo sapiens
gttttggattttgtt

SEQ ID NO: 1649155 - DNA, 15 bp, Homo sapiens
ttttggattttgttt

SEQ ID NO: 1649156 - DNA, 15 bp, Homo sapiens
tttggattttgtttt

SEQ ID NO: 1649157 - DNA, 15 bp, Homo sapiens
ttggattttgttttg

SEQ ID NO: 1649158 - DNA, 15 bp, Homo sapiens
tggattttgttttgt

SEQ ID NO: 1649159 - DNA, 15 bp, Homo sapiens
ggattttgttttgtt

SEQ ID NO: 1649160 - DNA, 15 bp, Homo sapiens
gattttgttttgttt

SEQ ID NO: 1649161 - DNA, 15 bp, Homo sapiens
ttttgttttgttttc

SEQ ID NO: 1649162 - DNA, 15 bp, Homo sapiens
ttgttttgttttcaa

SEQ ID NO: 1649163 - DNA, 15 bp, Homo sapiens
tgttttgttttcaat

SEQ ID NO: 1649164 - DNA, 15 bp, Homo sapiens
gttttgttttcaatg

SEQ ID NO: 1649165 - DNA, 15 bp, Homo sapiens
ttttgttttcaatgc

SEQ ID NO: 1649166 - DNA, 15 bp, Homo sapiens
tttgttttcaatgct

SEQ ID NO: 1649167 - DNA, 15 bp, Homo sapiens
ttgttttcaatgcta

SEQ ID NO: 1649168 - DNA, 15 bp, Homo sapiens
tgttttcaatgctag

SEQ ID NO: 1649169 - DNA, 15 bp, Homo sapiens
gttttcaatgctagt

SEQ ID NO: 1649170 - DNA, 15 bp, Homo sapiens
ttttcaatgctagtg

SEQ ID NO: 1649171 - DNA, 15 bp, Homo sapiens
tttcaatgctagtgt

SEQ ID NO: 1649172 - DNA, 15 bp, Homo sapiens
ttcaatgctagtgtt

SEQ ID NO: 1649173 - DNA, 15 bp, Homo sapiens
tcaatgctagtgttt

SEQ ID NO: 1649174 - DNA, 15 bp, Homo sapiens
caatgctagtgttta

SEQ ID NO: 1649175 - DNA, 15 bp, Homo sapiens
aatgctagtgtttaa

SEQ ID NO: 1649176 - DNA, 15 bp, Homo sapiens
atgctagtgtttaat

SEQ ID NO: 1649177 - DNA, 15 bp, Homo sapiens
tgctagtgtttaatc

SEQ ID NO: 1649178 - DNA, 15 bp, Homo sapiens
gctagtgtttaatcc

SEQ ID NO: 1649179 - DNA, 15 bp, Homo sapiens
ctagtgtttaatcct

SEQ ID NO: 1649180 - DNA, 15 bp, Homo sapiens
tagtgtttaatcctg

SEQ ID NO: 1649181 - DNA, 15 bp, Homo sapiens
agtgtttaatcctgt

SEQ ID NO: 1649182 - DNA, 15 bp, Homo sapiens
gtgtttaatcctgta

SEQ ID NO: 1649183 - DNA, 15 bp, Homo sapiens
tgtttaatcctgtag

SEQ ID NO: 1649184 - DNA, 15 bp, Homo sapiens
gtttaatcctgtagt

SEQ ID NO: 1649185 - DNA, 15 bp, Homo sapiens
tttaatcctgtagta

SEQ ID NO: 1649186 - DNA, 15 bp, Homo sapiens
ttaatcctgtagtac

SEQ ID NO: 1649187 - DNA, 15 bp, Homo sapiens
taatcctgtagtaca

SEQ ID NO: 1649188 - DNA, 15 bp, Homo sapiens
aatcctgtagtacat

SEQ ID NO: 1649189 - DNA, 15 bp, Homo sapiens
atcctgtagtacata

SEQ ID NO: 1649190 - DNA, 15 bp, Homo sapiens
tcctgtagtacatat

SEQ ID NO: 1649191 - DNA, 15 bp, Homo sapiens
cctgtagtacatatt

SEQ ID NO: 1649192 - DNA, 15 bp, Homo sapiens
ctgtagtacatattt

SEQ ID NO: 1649193 - DNA, 15 bp, Homo sapiens
tgtagtacatatttg

SEQ ID NO: 1649194 - DNA, 15 bp, Homo sapiens
gtagtacatatttgc

SEQ ID NO: 1649195 - DNA, 15 bp, Homo sapiens
tagtacatatttgct

SEQ ID NO: 1649196 - DNA, 15 bp, Homo sapiens
agtacatatttgctt

SEQ ID NO: 1649197 - DNA, 15 bp, Homo sapiens
gtacatatttgctta

SEQ ID NO: 1649198 - DNA, 15 bp, Homo sapiens
tacatatttgcttat

SEQ ID NO: 1649199 - DNA, 15 bp, Homo sapiens
acatatttgcttatt

SEQ ID NO: 1649200 - DNA, 15 bp, Homo sapiens
catatttgcttattg

SEQ ID NO: 1649201 - DNA, 15 bp, Homo sapiens
atatttgcttattgc

SEQ ID NO: 1649202 - DNA, 15 bp, Homo sapiens
tatttgcttattgct

SEQ ID NO: 1649203 - DNA, 15 bp, Homo sapiens
atttgcttattgcta

SEQ ID NO: 1649204 - DNA, 15 bp, Homo sapiens
tttgcttattgctat

SEQ ID NO: 1649205 - DNA, 15 bp, Homo sapiens
ttgcttattgctatt

SEQ ID NO: 1649206 - DNA, 15 bp, Homo sapiens
tgcttattgctattt

SEQ ID NO: 1649207 - DNA, 15 bp, Homo sapiens
gcttattgctatttt

SEQ ID NO: 1649208 - DNA, 15 bp, Homo sapiens
cttattgctatttta

SEQ ID NO: 1649209 - DNA, 15 bp, Homo sapiens
ttattgctattttaa

SEQ ID NO: 1649210 - DNA, 15 bp, Homo sapiens
tattgctattttaat

SEQ ID NO: 1649211 - DNA, 15 bp, Homo sapiens
attgctattttaata

SEQ ID NO: 1649212 - DNA, 15 bp, Homo sapiens
ttgctattttaatat

SEQ ID NO: 1649213 - DNA, 15 bp, Homo sapiens
tgctattttaatatt

SEQ ID NO: 1649214 - DNA, 15 bp, Homo sapiens
gctattttaatattt

SEQ ID NO: 1649215 - DNA, 15 bp, Homo sapiens
ctattttaatatttt

SEQ ID NO: 1649216 - DNA, 15 bp, Homo sapiens
tattttaatatttta

SEQ ID NO: 1649217 - DNA, 15 bp, Homo sapiens
attttaatattttat

SEQ ID NO: 1649218 - DNA, 15 bp, Homo sapiens
ttttaatattttata

SEQ ID NO: 1649219 - DNA, 15 bp, Homo sapiens
tttaatattttataa

SEQ ID NO: 1649220 - DNA, 15 bp, Homo sapiens
ttaatattttataag

SEQ ID NO: 1649221 - DNA, 15 bp, Homo sapiens
taatattttataaga

SEQ ID NO: 1649222 - DNA, 15 bp, Homo sapiens
aatattttataagac

SEQ ID NO: 1649223 - DNA, 15 bp, Homo sapiens
atattttataagacc

SEQ ID NO: 1649224 - DNA, 15 bp, Homo sapiens
tattttataagacct

SEQ ID NO: 1649225 - DNA, 15 bp, Homo sapiens
attttataagacctt

SEQ ID NO: 1649226 - DNA, 15 bp, Homo sapiens
ttttataagaccttc

SEQ ID NO: 1649227 - DNA, 15 bp, Homo sapiens
tttataagaccttcc

SEQ ID NO: 1649228 - DNA, 15 bp, Homo sapiens
ttataagaccttcct

SEQ ID NO: 1649229 - DNA, 15 bp, Homo sapiens
tataagaccttcctg

SEQ ID NO: 1649230 - DNA, 15 bp, Homo sapiens
ataagaccttcctgt

SEQ ID NO: 1649231 - DNA, 15 bp, Homo sapiens
taagaccttcctgtt

SEQ ID NO: 1649232 - DNA, 15 bp, Homo sapiens
aagaccttcctgtta

SEQ ID NO: 1649233 - DNA, 15 bp, Homo sapiens
agaccttcctgttag

SEQ ID NO: 1649234 - DNA, 15 bp, Homo sapiens
gaccttcctgttagg

SEQ ID NO: 1649235 - DNA, 15 bp, Homo sapiens
accttcctgttaggt

SEQ ID NO: 1649236 - DNA, 15 bp, Homo sapiens
ccttcctgttaggta

SEQ ID NO: 1649237 - DNA, 15 bp, Homo sapiens
cttcctgttaggtat

SEQ ID NO: 1649238 - DNA, 15 bp, Homo sapiens
ttcctgttaggtatt

SEQ ID NO: 1649239 - DNA, 15 bp, Homo sapiens
tcctgttaggtatta

SEQ ID NO: 1649240 - DNA, 15 bp, Homo sapiens
cctgttaggtattag

SEQ ID NO: 1649241 - DNA, 15 bp, Homo sapiens
ctgttaggtattaga

SEQ ID NO: 1649242 - DNA, 15 bp, Homo sapiens
tgttaggtattagaa

SEQ ID NO: 1649243 - DNA, 15 bp, Homo sapiens
gttaggtattagaaa

SEQ ID NO: 1649244 - DNA, 15 bp, Homo sapiens
ttaggtattagaaag

SEQ ID NO: 1649245 - DNA, 15 bp, Homo sapiens
taggtattagaaagt

SEQ ID NO: 1649246 - DNA, 15 bp, Homo sapiens
aggtattagaaagtg

SEQ ID NO: 1649247 - DNA, 15 bp, Homo sapiens
ggtattagaaagtga

SEQ ID NO: 1649248 - DNA, 15 bp, Homo sapiens
gtattagaaagtgat

SEQ ID NO: 1649249 - DNA, 15 bp, Homo sapiens
attagaaagtgatac

SEQ ID NO: 1649250 - DNA, 15 bp, Homo sapiens
ttagaaagtgataca

SEQ ID NO: 1649251 - DNA, 15 bp, Homo sapiens
tagaaagtgatacat

SEQ ID NO: 1649252 - DNA, 15 bp, Homo sapiens
agaaagtgatacata

SEQ ID NO: 1649253 - DNA, 15 bp, Homo sapiens
gaaagtgatacatag

SEQ ID NO: 1649254 - DNA, 15 bp, Homo sapiens
aaagtgatacataga

SEQ ID NO: 1649255 - DNA, 15 bp, Homo sapiens
aagtgatacatagat

SEQ ID NO: 1649256 - DNA, 15 bp, Homo sapiens
agtgatacatagata

SEQ ID NO: 1649257 - DNA, 15 bp, Homo sapiens
gtgatacatagatat

SEQ ID NO: 1649258 - DNA, 15 bp, Homo sapiens
tgatacatagatatc

SEQ ID NO: 1649259 - DNA, 15 bp, Homo sapiens
gatacatagatatct

SEQ ID NO: 1649260 - DNA, 15 bp, Homo sapiens
atacatagatatctt

SEQ ID NO: 1649261 - DNA, 15 bp, Homo sapiens
tacatagatatcttt

SEQ ID NO: 1649262 - DNA, 15 bp, Homo sapiens
acatagatatctttt

SEQ ID NO: 1649263 - DNA, 15 bp, Homo sapiens
catagatatcttttt

SEQ ID NO: 1649264 - DNA, 15 bp, Homo sapiens
atagatatctttttt

SEQ ID NO: 1649265 - DNA, 15 bp, Homo sapiens
tagatatcttttttg

SEQ ID NO: 1649266 - DNA, 15 bp, Homo sapiens
agatatcttttttgt

SEQ ID NO: 1649267 - DNA, 15 bp, Homo sapiens
gatatcttttttgtg

SEQ ID NO: 1649268 - DNA, 15 bp, Homo sapiens
atatcttttttgtgt

SEQ ID NO: 1649269 - DNA, 15 bp, Homo sapiens
tatcttttttgtgta

SEQ ID NO: 1649270 - DNA, 15 bp, Homo sapiens
atcttttttgtgtaa

SEQ ID NO: 1649271 - DNA, 15 bp, Homo sapiens
tcttttttgtgtaat

SEQ ID NO: 1649272 - DNA, 15 bp, Homo sapiens
cttttttgtgtaatt

SEQ ID NO: 1649273 - DNA, 15 bp, Homo sapiens
ttttttgtgtaattt

SEQ ID NO: 1649274 - DNA, 15 bp, Homo sapiens
tttttgtgtaatttc

SEQ ID NO: 1649275 - DNA, 15 bp, Homo sapiens
ttttgtgtaatttct

SEQ ID NO: 1649276 - DNA, 15 bp, Homo sapiens
tttgtgtaatttcta

SEQ ID NO: 1649277 - DNA, 15 bp, Homo sapiens
ttgtgtaatttctat

SEQ ID NO: 1649278 - DNA, 15 bp, Homo sapiens
tgtgtaatttctatt

SEQ ID NO: 1649279 - DNA, 15 bp, Homo sapiens
gtgtaatttctattt

SEQ ID NO: 1649280 - DNA, 15 bp, Homo sapiens
tgtaatttctattta

SEQ ID NO: 1649281 - DNA, 15 bp, Homo sapiens
gtaatttctatttaa

SEQ ID NO: 1649282 - DNA, 15 bp, Homo sapiens
taatttctatttaaa

SEQ ID NO: 1649283 - DNA, 15 bp, Homo sapiens
aatttctatttaaaa

SEQ ID NO: 1649284 - DNA, 15 bp, Homo sapiens
atttctatttaaaaa

SEQ ID NO: 1649285 - DNA, 15 bp, Homo sapiens
tttctatttaaaaaa

SEQ ID NO: 1649286 - DNA, 15 bp, Homo sapiens
ttctatttaaaaaag

SEQ ID NO: 1649287 - DNA, 15 bp, Homo sapiens
tctatttaaaaaaga

SEQ ID NO: 1649288 - DNA, 15 bp, Homo sapiens
ctatttaaaaaagag

SEQ ID NO: 1649289 - DNA, 15 bp, Homo sapiens
tatttaaaaaagaga

SEQ ID NO: 1649290 - DNA, 15 bp, Homo sapiens
atttaaaaaagagag

SEQ ID NO: 1649291 - DNA, 15 bp, Homo sapiens
tttaaaaaagagaga

SEQ ID NO: 1649292 - DNA, 15 bp, Homo sapiens
ttaaaaaagagagaa

SEQ ID NO: 1649293 - DNA, 15 bp, Homo sapiens
taaaaaagagagaag

SEQ ID NO: 1649294 - DNA, 15 bp, Homo sapiens
aaaaaagagagaaga

SEQ ID NO: 1649295 - DNA, 15 bp, Homo sapiens
aaaaagagagaagac

SEQ ID NO: 1649296 - DNA, 15 bp, Homo sapiens
aaaagagagaagact

SEQ ID NO: 1649297 - DNA, 15 bp, Homo sapiens
aaagagagaagactg

SEQ ID NO: 1649298 - DNA, 15 bp, Homo sapiens
aagagagaagactgt

SEQ ID NO: 1649299 - DNA, 15 bp, Homo sapiens
agagagaagactgtc

SEQ ID NO: 1649300 - DNA, 15 bp, Homo sapiens
gagagaagactgtca

SEQ ID NO: 1649301 - DNA, 15 bp, Homo sapiens
agagaagactgtcag

SEQ ID NO: 1649302 - DNA, 15 bp, Homo sapiens
gagaagactgtcaga

SEQ ID NO: 1649303 - DNA, 15 bp, Homo sapiens
agaagactgtcagaa

SEQ ID NO: 1649304 - DNA, 15 bp, Homo sapiens
gaagactgtcagaag

SEQ ID NO: 1649305 - DNA, 15 bp, Homo sapiens
aagactgtcagaagc

SEQ ID NO: 1649306 - DNA, 15 bp, Homo sapiens
agactgtcagaagct

SEQ ID NO: 1649307 - DNA, 15 bp, Homo sapiens
gactgtcagaagctt

SEQ ID NO: 1649308 - DNA, 15 bp, Homo sapiens
actgtcagaagcttt

SEQ ID NO: 1649309 - DNA, 15 bp, Homo sapiens
ctgtcagaagcttta

SEQ ID NO: 1649310 - DNA, 15 bp, Homo sapiens
tgtcagaagctttaa

SEQ ID NO: 1649311 - DNA, 15 bp, Homo sapiens
gtcagaagctttaag

SEQ ID NO: 1649312 - DNA, 15 bp, Homo sapiens
tcagaagctttaagt

SEQ ID NO: 1649313 - DNA, 15 bp, Homo sapiens
cagaagctttaagtg

SEQ ID NO: 1649314 - DNA, 15 bp, Homo sapiens
agaagctttaagtgc

SEQ ID NO: 1649315 - DNA, 15 bp, Homo sapiens
gaagctttaagtgca

SEQ ID NO: 1649316 - DNA, 15 bp, Homo sapiens
aagctttaagtgcat

SEQ ID NO: 1649317 - DNA, 15 bp, Homo sapiens
agctttaagtgcata

SEQ ID NO: 1649318 - DNA, 15 bp, Homo sapiens
gctttaagtgcatat

SEQ ID NO: 1649319 - DNA, 15 bp, Homo sapiens
ctttaagtgcatatg

SEQ ID NO: 1649320 - DNA, 15 bp, Homo sapiens
tttaagtgcatatgg

SEQ ID NO: 1649321 - DNA, 15 bp, Homo sapiens
ttaagtgcatatggt

SEQ ID NO: 1649322 - DNA, 15 bp, Homo sapiens
taagtgcatatggta

SEQ ID NO: 1649323 - DNA, 15 bp, Homo sapiens
aagtgcatatggtac

SEQ ID NO: 1649324 - DNA, 15 bp, Homo sapiens
agtgcatatggtaca

SEQ ID NO: 1649325 - DNA, 15 bp, Homo sapiens
gtgcatatggtacag

SEQ ID NO: 1649326 - DNA, 15 bp, Homo sapiens
tgcatatggtacagg

SEQ ID NO: 1649327 - DNA, 15 bp, Homo sapiens
gcatatggtacagga

SEQ ID NO: 1649328 - DNA, 15 bp, Homo sapiens
catatggtacaggat

SEQ ID NO: 1649329 - DNA, 15 bp, Homo sapiens
atatggtacaggata

SEQ ID NO: 1649330 - DNA, 15 bp, Homo sapiens
tatggtacaggataa

SEQ ID NO: 1649331 - DNA, 15 bp, Homo sapiens
atggtacaggataaa

SEQ ID NO: 1649332 - DNA, 15 bp, Homo sapiens
tggtacaggataaag

SEQ ID NO: 1649333 - DNA, 15 bp, Homo sapiens
ggtacaggataaaga

SEQ ID NO: 1649334 - DNA, 15 bp, Homo sapiens
gtacaggataaagat

SEQ ID NO: 1649335 - DNA, 15 bp, Homo sapiens
tacaggataaagata

SEQ ID NO: 1649336 - DNA, 15 bp, Homo sapiens
acaggataaagatat

SEQ ID NO: 1649337 - DNA, 15 bp, Homo sapiens
caggataaagatatc

SEQ ID NO: 1649338 - DNA, 15 bp, Homo sapiens
aggataaagatatca

SEQ ID NO: 1649339 - DNA, 15 bp, Homo sapiens
ggataaagatatcaa

SEQ ID NO: 1649340 - DNA, 15 bp, Homo sapiens
gataaagatatcaat

SEQ ID NO: 1649341 - DNA, 15 bp, Homo sapiens
ataaagatatcaatt

SEQ ID NO: 1649342 - DNA, 15 bp, Homo sapiens
taaagatatcaattt

SEQ ID NO: 1649343 - DNA, 15 bp, Homo sapiens
aaagatatcaattta

SEQ ID NO: 1649344 - DNA, 15 bp, Homo sapiens
aagatatcaatttaa

SEQ ID NO: 1649345 - DNA, 15 bp, Homo sapiens
agatatcaatttaaa

SEQ ID NO: 1649346 - DNA, 15 bp, Homo sapiens
gatatcaatttaaat

SEQ ID NO: 1649347 - DNA, 15 bp, Homo sapiens
atatcaatttaaata

SEQ ID NO: 1649348 - DNA, 15 bp, Homo sapiens
tatcaatttaaataa

SEQ ID NO: 1649349 - DNA, 15 bp, Homo sapiens
atcaatttaaataac

SEQ ID NO: 1649350 - DNA, 15 bp, Homo sapiens
tcaatttaaataacc

SEQ ID NO: 1649351 - DNA, 15 bp, Homo sapiens
caatttaaataacca

SEQ ID NO: 1649352 - DNA, 15 bp, Homo sapiens
aatttaaataaccaa

SEQ ID NO: 1649353 - DNA, 15 bp, Homo sapiens
atttaaataaccaat

SEQ ID NO: 1649354 - DNA, 15 bp, Homo sapiens
tttaaataaccaatt

SEQ ID NO: 1649355 - DNA, 15 bp, Homo sapiens
ttaaataaccaattc

SEQ ID NO: 1649356 - DNA, 15 bp, Homo sapiens
taaataaccaattcc

SEQ ID NO: 1649357 - DNA, 15 bp, Homo sapiens
aaataaccaattcct

SEQ ID NO: 1649358 - DNA, 15 bp, Homo sapiens
aataaccaattccta

SEQ ID NO: 1649359 - DNA, 15 bp, Homo sapiens
ataaccaattcctat

SEQ ID NO: 1649360 - DNA, 15 bp, Homo sapiens
taaccaattcctatc

SEQ ID NO: 1649361 - DNA, 15 bp, Homo sapiens
aaccaattcctatct

SEQ ID NO: 1649362 - DNA, 15 bp, Homo sapiens
accaattcctatctg

SEQ ID NO: 1649363 - DNA, 15 bp, Homo sapiens
ccaattcctatctgg

SEQ ID NO: 1649364 - DNA, 15 bp, Homo sapiens
caattcctatctgga

SEQ ID NO: 1649365 - DNA, 15 bp, Homo sapiens
aattcctatctggaa

SEQ ID NO: 1649366 - DNA, 15 bp, Homo sapiens
attcctatctggaac

SEQ ID NO: 1649367 - DNA, 15 bp, Homo sapiens
ttcctatctggaaca

SEQ ID NO: 1649368 - DNA, 15 bp, Homo sapiens
tcctatctggaacaa

SEQ ID NO: 1649369 - DNA, 15 bp, Homo sapiens
cctatctggaacaat

SEQ ID NO: 1649370 - DNA, 15 bp, Homo sapiens
ctatctggaacaatg

SEQ ID NO: 1649371 - DNA, 15 bp, Homo sapiens
tatctggaacaatgc

SEQ ID NO: 1649372 - DNA, 15 bp, Homo sapiens
atctggaacaatgct

SEQ ID NO: 1649373 - DNA, 15 bp, Homo sapiens
tctggaacaatgctt

SEQ ID NO: 1649374 - DNA, 15 bp, Homo sapiens
ctggaacaatgcttt

SEQ ID NO: 1649375 - DNA, 15 bp, Homo sapiens
tggaacaatgctttt

SEQ ID NO: 1649376 - DNA, 15 bp, Homo sapiens
ggaacaatgcttttg

SEQ ID NO: 1649377 - DNA, 15 bp, Homo sapiens
gaacaatgcttttgt

SEQ ID NO: 1649378 - DNA, 15 bp, Homo sapiens
aacaatgcttttgtt

SEQ ID NO: 1649379 - DNA, 15 bp, Homo sapiens
acaatgcttttgttt

SEQ ID NO: 1649380 - DNA, 15 bp, Homo sapiens
caatgcttttgtttt

SEQ ID NO: 1649381 - DNA, 15 bp, Homo sapiens
aatgcttttgttttt

SEQ ID NO: 1649382 - DNA, 15 bp, Homo sapiens
atgcttttgtttttt

SEQ ID NO: 1649383 - DNA, 15 bp, Homo sapiens
tgcttttgtttttta

SEQ ID NO: 1649384 - DNA, 15 bp, Homo sapiens
cttttgttttttaaa

SEQ ID NO: 1649385 - DNA, 15 bp, Homo sapiens
ttgttttttaaagaa

SEQ ID NO: 1649386 - DNA, 15 bp, Homo sapiens
tgttttttaaagaaa

SEQ ID NO: 1649387 - DNA, 15 bp, Homo sapiens
gttttttaaagaaac

SEQ ID NO: 1649388 - DNA, 15 bp, Homo sapiens
ttttttaaagaaacc

SEQ ID NO: 1649389 - DNA, 15 bp, Homo sapiens
tttttaaagaaacct

SEQ ID NO: 1649390 - DNA, 15 bp, Homo sapiens
ttttaaagaaacctc

SEQ ID NO: 1649391 - DNA, 15 bp, Homo sapiens
tttaaagaaacctct

SEQ ID NO: 1649392 - DNA, 15 bp, Homo sapiens
ttaaagaaacctctc

SEQ ID NO: 1649393 - DNA, 15 bp, Homo sapiens
taaagaaacctctca

SEQ ID NO: 1649394 - DNA, 15 bp, Homo sapiens
aaagaaacctctcac

SEQ ID NO: 1649395 - DNA, 15 bp, Homo sapiens
aagaaacctctcaca

SEQ ID NO: 1649396 - DNA, 15 bp, Homo sapiens
agaaacctctcacag

SEQ ID NO: 1649397 - DNA, 15 bp, Homo sapiens
gaaacctctcacaga

SEQ ID NO: 1649398 - DNA, 15 bp, Homo sapiens
aaacctctcacagat

SEQ ID NO: 1649399 - DNA, 15 bp, Homo sapiens
aacctctcacagata

SEQ ID NO: 1649400 - DNA, 15 bp, Homo sapiens
acctctcacagataa

SEQ ID NO: 1649401 - DNA, 15 bp, Homo sapiens
cctctcacagataag

SEQ ID NO: 1649402 - DNA, 15 bp, Homo sapiens
ctctcacagataaga

SEQ ID NO: 1649403 - DNA, 15 bp, Homo sapiens
tctcacagataagac

SEQ ID NO: 1649404 - DNA, 15 bp, Homo sapiens
ctcacagataagaca

SEQ ID NO: 1649405 - DNA, 15 bp, Homo sapiens
tcacagataagacag

SEQ ID NO: 1649406 - DNA, 15 bp, Homo sapiens
cacagataagacaga

SEQ ID NO: 1649407 - DNA, 15 bp, Homo sapiens
acagataagacagag

SEQ ID NO: 1649408 - DNA, 15 bp, Homo sapiens
cagataagacagagg

SEQ ID NO: 1649409 - DNA, 15 bp, Homo sapiens
agataagacagaggc

SEQ ID NO: 1649410 - DNA, 15 bp, Homo sapiens
gataagacagaggcc

SEQ ID NO: 1649411 - DNA, 15 bp, Homo sapiens
ataagacagaggccc

SEQ ID NO: 1649412 - DNA, 15 bp, Homo sapiens
taagacagaggccca

SEQ ID NO: 1649413 - DNA, 15 bp, Homo sapiens
aagacagaggcccag

SEQ ID NO: 1649414 - DNA, 15 bp, Homo sapiens
agacagaggcccagg

SEQ ID NO: 1649415 - DNA, 15 bp, Homo sapiens
gacagaggcccaggg

SEQ ID NO: 1649416 - DNA, 15 bp, Homo sapiens
acagaggcccagggg

SEQ ID NO: 1649417 - DNA, 15 bp, Homo sapiens
cagaggcccagggga

SEQ ID NO: 1649418 - DNA, 15 bp, Homo sapiens
agaggcccaggggat

SEQ ID NO: 1649419 - DNA, 15 bp, Homo sapiens
gaggcccaggggatt

SEQ ID NO: 1649420 - DNA, 15 bp, Homo sapiens
aggcccaggggattt

SEQ ID NO: 1649421 - DNA, 15 bp, Homo sapiens
ggcccaggggatttt

SEQ ID NO: 1649422 - DNA, 15 bp, Homo sapiens
gcccaggggattttt

SEQ ID NO: 1649423 - DNA, 15 bp, Homo sapiens
cccaggggatttttg

SEQ ID NO: 1649424 - DNA, 15 bp, Homo sapiens
ccaggggatttttga

SEQ ID NO: 1649425 - DNA, 15 bp, Homo sapiens
caggggatttttgaa

SEQ ID NO: 1649426 - DNA, 15 bp, Homo sapiens
aggggatttttgaag

SEQ ID NO: 1649427 - DNA, 15 bp, Homo sapiens
ggggatttttgaagc

SEQ ID NO: 1649428 - DNA, 15 bp, Homo sapiens
gggatttttgaagct

SEQ ID NO: 1649429 - DNA, 15 bp, Homo sapiens
ggatttttgaagctg

SEQ ID NO: 1649430 - DNA, 15 bp, Homo sapiens
gatttttgaagctgt

SEQ ID NO: 1649431 - DNA, 15 bp, Homo sapiens
atttttgaagctgtc

SEQ ID NO: 1649432 - DNA, 15 bp, Homo sapiens
tttttgaagctgtct

SEQ ID NO: 1649433 - DNA, 15 bp, Homo sapiens
ttttgaagctgtctt

SEQ ID NO: 1649434 - DNA, 15 bp, Homo sapiens
tttgaagctgtcttt

SEQ ID NO: 1649435 - DNA, 15 bp, Homo sapiens
ttgaagctgtcttta

SEQ ID NO: 1649436 - DNA, 15 bp, Homo sapiens
tgaagctgtctttat

SEQ ID NO: 1649437 - DNA, 15 bp, Homo sapiens
gaagctgtctttatt

SEQ ID NO: 1649438 - DNA, 15 bp, Homo sapiens
aagctgtctttattc

SEQ ID NO: 1649439 - DNA, 15 bp, Homo sapiens
agctgtctttattct

SEQ ID NO: 1649440 - DNA, 15 bp, Homo sapiens
gctgtctttattctg

SEQ ID NO: 1649441 - DNA, 15 bp, Homo sapiens
ctgtctttattctgc

SEQ ID NO: 1649442 - DNA, 15 bp, Homo sapiens
tgtctttattctgcc

SEQ ID NO: 1649443 - DNA, 15 bp, Homo sapiens
gtctttattctgccc

SEQ ID NO: 1649444 - DNA, 15 bp, Homo sapiens
tctttattctgcccc

SEQ ID NO: 1649445 - DNA, 15 bp, Homo sapiens
ctttattctgccccc

SEQ ID NO: 1649446 - DNA, 15 bp, Homo sapiens
tttattctgccccca

SEQ ID NO: 1649447 - DNA, 15 bp, Homo sapiens
ttattctgcccccat

SEQ ID NO: 1649448 - DNA, 15 bp, Homo sapiens
tattctgcccccatc

SEQ ID NO: 1649449 - DNA, 15 bp, Homo sapiens
attctgcccccatcc

SEQ ID NO: 1649450 - DNA, 15 bp, Homo sapiens
ttctgcccccatccc

SEQ ID NO: 1649451 - DNA, 15 bp, Homo sapiens
tctgcccccatccca

SEQ ID NO: 1649452 - DNA, 15 bp, Homo sapiens
ctgcccccatcccaa

SEQ ID NO: 1649453 - DNA, 15 bp, Homo sapiens
tgcccccatcccaac

SEQ ID NO: 1649454 - DNA, 15 bp, Homo sapiens
gcccccatcccaacc

SEQ ID NO: 1649455 - DNA, 15 bp, Homo sapiens
cccccatcccaaccc

SEQ ID NO: 1649456 - DNA, 15 bp, Homo sapiens
ccccatcccaaccca

SEQ ID NO: 1649457 - DNA, 15 bp, Homo sapiens
cccatcccaacccag

SEQ ID NO: 1649458 - DNA, 15 bp, Homo sapiens
ccatcccaacccagc

SEQ ID NO: 1649459 - DNA, 15 bp, Homo sapiens
catcccaacccagcc

SEQ ID NO: 1649460 - DNA, 15 bp, Homo sapiens
atcccaacccagccc

SEQ ID NO: 1649461 - DNA, 15 bp, Homo sapiens
tcccaacccagccct

SEQ ID NO: 1649462 - DNA, 15 bp, Homo sapiens
cccaacccagccctt

SEQ ID NO: 1649463 - DNA, 15 bp, Homo sapiens
ccaacccagccctta

SEQ ID NO: 1649464 - DNA, 15 bp, Homo sapiens
caacccagcccttat

SEQ ID NO: 1649465 - DNA, 15 bp, Homo sapiens
aacccagcccttatt

SEQ ID NO: 1649466 - DNA, 15 bp, Homo sapiens
acccagcccttatta

SEQ ID NO: 1649467 - DNA, 15 bp, Homo sapiens
cccagcccttattat

SEQ ID NO: 1649468 - DNA, 15 bp, Homo sapiens
ccagcccttattatt

SEQ ID NO: 1649469 - DNA, 15 bp, Homo sapiens
cagcccttattattt

SEQ ID NO: 1649470 - DNA, 15 bp, Homo sapiens
agcccttattatttt

SEQ ID NO: 1649471 - DNA, 15 bp, Homo sapiens
gcccttattatttta

SEQ ID NO: 1649472 - DNA, 15 bp, Homo sapiens
cccttattattttag

SEQ ID NO: 1649473 - DNA, 15 bp, Homo sapiens
ccttattattttagt

SEQ ID NO: 1649474 - DNA, 15 bp, Homo sapiens
cttattattttagta

SEQ ID NO: 1649475 - DNA, 15 bp, Homo sapiens
ttattattttagtat

SEQ ID NO: 1649476 - DNA, 15 bp, Homo sapiens
tattattttagtatc

SEQ ID NO: 1649477 - DNA, 15 bp, Homo sapiens
attattttagtatct

SEQ ID NO: 1649478 - DNA, 15 bp, Homo sapiens
ttattttagtatctg

SEQ ID NO: 1649479 - DNA, 15 bp, Homo sapiens
tattttagtatctgc

SEQ ID NO: 1649480 - DNA, 15 bp, Homo sapiens
attttagtatctgcc

SEQ ID NO: 1649481 - DNA, 15 bp, Homo sapiens
ttttagtatctgcct

SEQ ID NO: 1649482 - DNA, 15 bp, Homo sapiens
tttagtatctgcctc

SEQ ID NO: 1649483 - DNA, 15 bp, Homo sapiens
ttagtatctgcctca

SEQ ID NO: 1649484 - DNA, 15 bp, Homo sapiens
tagtatctgcctcag

SEQ ID NO: 1649485 - DNA, 15 bp, Homo sapiens
agtatctgcctcaga

SEQ ID NO: 1649486 - DNA, 15 bp, Homo sapiens
gtatctgcctcagaa

SEQ ID NO: 1649487 - DNA, 15 bp, Homo sapiens
tatctgcctcagaat

SEQ ID NO: 1649488 - DNA, 15 bp, Homo sapiens
atctgcctcagaatt

SEQ ID NO: 1649489 - DNA, 15 bp, Homo sapiens
tctgcctcagaattt

SEQ ID NO: 1649490 - DNA, 15 bp, Homo sapiens
ctgcctcagaatttt

SEQ ID NO: 1649491 - DNA, 15 bp, Homo sapiens
tgcctcagaatttta

SEQ ID NO: 1649492 - DNA, 15 bp, Homo sapiens
gcctcagaattttat

SEQ ID NO: 1649493 - DNA, 15 bp, Homo sapiens
cctcagaattttata

SEQ ID NO: 1649494 - DNA, 15 bp, Homo sapiens
ctcagaattttatag

SEQ ID NO: 1649495 - DNA, 15 bp, Homo sapiens
tcagaattttataga

SEQ ID NO: 1649496 - DNA, 15 bp, Homo sapiens
cagaattttatagag

SEQ ID NO: 1649497 - DNA, 15 bp, Homo sapiens
agaattttatagagg

SEQ ID NO: 1649498 - DNA, 15 bp, Homo sapiens
gaattttatagaggg

SEQ ID NO: 1649499 - DNA, 15 bp, Homo sapiens
aattttatagagggc

SEQ ID NO: 1649500 - DNA, 15 bp, Homo sapiens
attttatagagggct

SEQ ID NO: 1649501 - DNA, 15 bp, Homo sapiens
ttttatagagggctg

SEQ ID NO: 1649502 - DNA, 15 bp, Homo sapiens
tttatagagggctga

SEQ ID NO: 1649503 - DNA, 15 bp, Homo sapiens
ttatagagggctgac

SEQ ID NO: 1649504 - DNA, 15 bp, Homo sapiens
tatagagggctgacc

SEQ ID NO: 1649505 - DNA, 15 bp, Homo sapiens
atagagggctgacca

SEQ ID NO: 1649506 - DNA, 15 bp, Homo sapiens
tagagggctgaccaa

SEQ ID NO: 1649507 - DNA, 15 bp, Homo sapiens
agagggctgaccaag

SEQ ID NO: 1649508 - DNA, 15 bp, Homo sapiens
gagggctgaccaagc

SEQ ID NO: 1649509 - DNA, 15 bp, Homo sapiens
agggctgaccaagct

SEQ ID NO: 1649510 - DNA, 15 bp, Homo sapiens
gggctgaccaagctg

SEQ ID NO: 1649511 - DNA, 15 bp, Homo sapiens
ggctgaccaagctga

SEQ ID NO: 1649512 - DNA, 15 bp, Homo sapiens
gctgaccaagctgaa

SEQ ID NO: 1649513 - DNA, 15 bp, Homo sapiens
ctgaccaagctgaaa

SEQ ID NO: 1649514 - DNA, 15 bp, Homo sapiens
tgaccaagctgaaac

SEQ ID NO: 1649515 - DNA, 15 bp, Homo sapiens
gaccaagctgaaact

SEQ ID NO: 1649516 - DNA, 15 bp, Homo sapiens
accaagctgaaactc

SEQ ID NO: 1649517 - DNA, 15 bp, Homo sapiens
ccaagctgaaactct

SEQ ID NO: 1649518 - DNA, 15 bp, Homo sapiens
caagctgaaactcta

SEQ ID NO: 1649519 - DNA, 15 bp, Homo sapiens
aagctgaaactctag

SEQ ID NO: 1649520 - DNA, 15 bp, Homo sapiens
agctgaaactctaga

SEQ ID NO: 1649521 - DNA, 15 bp, Homo sapiens
gctgaaactctagaa

SEQ ID NO: 1649522 - DNA, 15 bp, Homo sapiens
ctgaaactctagaat

SEQ ID NO: 1649523 - DNA, 15 bp, Homo sapiens
tgaaactctagaatt

SEQ ID NO: 1649524 - DNA, 15 bp, Homo sapiens
gaaactctagaatta

SEQ ID NO: 1649525 - DNA, 15 bp, Homo sapiens
aaactctagaattaa

SEQ ID NO: 1649526 - DNA, 15 bp, Homo sapiens
aactctagaattaaa

SEQ ID NO: 1649527 - DNA, 15 bp, Homo sapiens
actctagaattaaag

SEQ ID NO: 1649528 - DNA, 15 bp, Homo sapiens
ctctagaattaaagg

SEQ ID NO: 1649529 - DNA, 15 bp, Homo sapiens
tctagaattaaagga

SEQ ID NO: 1649530 - DNA, 15 bp, Homo sapiens
ctagaattaaaggaa

SEQ ID NO: 1649531 - DNA, 15 bp, Homo sapiens
tagaattaaaggaac

SEQ ID NO: 1649532 - DNA, 15 bp, Homo sapiens
agaattaaaggaacc

SEQ ID NO: 1649533 - DNA, 15 bp, Homo sapiens
gaattaaaggaacct

SEQ ID NO: 1649534 - DNA, 15 bp, Homo sapiens
aattaaaggaacctc

SEQ ID NO: 1649535 - DNA, 15 bp, Homo sapiens
attaaaggaacctca

SEQ ID NO: 1649536 - DNA, 15 bp, Homo sapiens
ttaaaggaacctcac

SEQ ID NO: 1649537 - DNA, 15 bp, Homo sapiens
taaaggaacctcact

SEQ ID NO: 1649538 - DNA, 15 bp, Homo sapiens
aaaggaacctcactg

SEQ ID NO: 1649539 - DNA, 15 bp, Homo sapiens
aaggaacctcactga

SEQ ID NO: 1649540 - DNA, 15 bp, Homo sapiens
aggaacctcactgaa

SEQ ID NO: 1649541 - DNA, 15 bp, Homo sapiens
ggaacctcactgaaa

SEQ ID NO: 1649542 - DNA, 15 bp, Homo sapiens
gaacctcactgaaaa

SEQ ID NO: 1649543 - DNA, 15 bp, Homo sapiens
aacctcactgaaaac

SEQ ID NO: 1649544 - DNA, 15 bp, Homo sapiens
acctcactgaaaaca

SEQ ID NO: 1649545 - DNA, 15 bp, Homo sapiens
cctcactgaaaacat

SEQ ID NO: 1649546 - DNA, 15 bp, Homo sapiens
ctcactgaaaacata

SEQ ID NO: 1649547 - DNA, 15 bp, Homo sapiens
tcactgaaaacatat

SEQ ID NO: 1649548 - DNA, 15 bp, Homo sapiens
cactgaaaacatata

SEQ ID NO: 1649549 - DNA, 15 bp, Homo sapiens
actgaaaacatatat

SEQ ID NO: 1649550 - DNA, 15 bp, Homo sapiens
ctgaaaacatatatt

SEQ ID NO: 1649551 - DNA, 15 bp, Homo sapiens
tgaaaacatatattt

SEQ ID NO: 1649552 - DNA, 15 bp, Homo sapiens
gaaaacatatatttc

SEQ ID NO: 1649553 - DNA, 15 bp, Homo sapiens
aaaacatatatttca

SEQ ID NO: 1649554 - DNA, 15 bp, Homo sapiens
aaacatatatttcac

SEQ ID NO: 1649555 - DNA, 15 bp, Homo sapiens
aacatatatttcacg

SEQ ID NO: 1649556 - DNA, 15 bp, Homo sapiens
acatatatttcacgt

SEQ ID NO: 1649557 - DNA, 15 bp, Homo sapiens
catatatttcacgtg

SEQ ID NO: 1649558 - DNA, 15 bp, Homo sapiens
atatatttcacgtgt

SEQ ID NO: 1649559 - DNA, 15 bp, Homo sapiens
tatatttcacgtgtt

SEQ ID NO: 1649560 - DNA, 15 bp, Homo sapiens
atatttcacgtgttc

SEQ ID NO: 1649561 - DNA, 15 bp, Homo sapiens
tatttcacgtgttcc

SEQ ID NO: 1649562 - DNA, 15 bp, Homo sapiens
atttcacgtgttccc

SEQ ID NO: 1649563 - DNA, 15 bp, Homo sapiens
tttcacgtgttccct

SEQ ID NO: 1649564 - DNA, 15 bp, Homo sapiens
ttcacgtgttccctc

SEQ ID NO: 1649565 - DNA, 15 bp, Homo sapiens
tcacgtgttccctct

SEQ ID NO: 1649566 - DNA, 15 bp, Homo sapiens
cacgtgttccctctt

SEQ ID NO: 1649567 - DNA, 15 bp, Homo sapiens
acgtgttccctcttt

SEQ ID NO: 1649568 - DNA, 15 bp, Homo sapiens
cgtgttccctctttt

SEQ ID NO: 1649569 - DNA, 15 bp, Homo sapiens
gtgttccctcttttt

SEQ ID NO: 1649570 - DNA, 15 bp, Homo sapiens
tgttccctctttttt

SEQ ID NO: 1649571 - DNA, 15 bp, Homo sapiens
gttccctcttttttt

SEQ ID NO: 1649572 - DNA, 15 bp, Homo sapiens
ttccctctttttttt

SEQ ID NO: 1649573 - DNA, 15 bp, Homo sapiens
tccctcttttttttt

SEQ ID NO: 1649574 - DNA, 15 bp, Homo sapiens
ccctctttttttttt

SEQ ID NO: 1649575 - DNA, 15 bp, Homo sapiens
ctctttttttttttc

SEQ ID NO: 1649576 - DNA, 15 bp, Homo sapiens
ttttttttttccttt

SEQ ID NO: 1649577 - DNA, 15 bp, Homo sapiens
ttttttcctttttgt

SEQ ID NO: 1649578 - DNA, 15 bp, Homo sapiens
tttttcctttttgtg

SEQ ID NO: 1649579 - DNA, 15 bp, Homo sapiens
ttttcctttttgtga

SEQ ID NO: 1649580 - DNA, 15 bp, Homo sapiens
tttcctttttgtgag

SEQ ID NO: 1649581 - DNA, 15 bp, Homo sapiens
ttcctttttgtgaga

SEQ ID NO: 1649582 - DNA, 15 bp, Homo sapiens
tcctttttgtgagat

SEQ ID NO: 1649583 - DNA, 15 bp, Homo sapiens
cctttttgtgagatg

SEQ ID NO: 1649584 - DNA, 15 bp, Homo sapiens
ctttttgtgagatgg

SEQ ID NO: 1649585 - DNA, 15 bp, Homo sapiens
tttttgtgagatggg

SEQ ID NO: 1649586 - DNA, 15 bp, Homo sapiens
ttttgtgagatgggg

SEQ ID NO: 1649587 - DNA, 15 bp, Homo sapiens
tttgtgagatggggt

SEQ ID NO: 1649588 - DNA, 15 bp, Homo sapiens
ttgtgagatggggtc

SEQ ID NO: 1649589 - DNA, 15 bp, Homo sapiens
tgtgagatggggtct

SEQ ID NO: 1649590 - DNA, 15 bp, Homo sapiens
gtgagatggggtctc

SEQ ID NO: 1649591 - DNA, 15 bp, Homo sapiens
tgagatggggtctcg

SEQ ID NO: 1649592 - DNA, 15 bp, Homo sapiens
gagatggggtctcgc

SEQ ID NO: 1649593 - DNA, 15 bp, Homo sapiens
agatggggtctcgca

SEQ ID NO: 1649594 - DNA, 15 bp, Homo sapiens
gatggggtctcgcac

SEQ ID NO: 1649595 - DNA, 15 bp, Homo sapiens
atggggtctcgcact

SEQ ID NO: 1649596 - DNA, 15 bp, Homo sapiens
tggggtctcgcactg

SEQ ID NO: 1649597 - DNA, 15 bp, Homo sapiens
ggggtctcgcactgt

SEQ ID NO: 1649598 - DNA, 15 bp, Homo sapiens
gggtctcgcactgtc

SEQ ID NO: 1649599 - DNA, 15 bp, Homo sapiens
ggtctcgcactgtcc

SEQ ID NO: 1649600 - DNA, 15 bp, Homo sapiens
gtctcgcactgtccc

SEQ ID NO: 1649601 - DNA, 15 bp, Homo sapiens
tctcgcactgtcccc

SEQ ID NO: 1649602 - DNA, 15 bp, Homo sapiens
ctcgcactgtccccc

SEQ ID NO: 1649603 - DNA, 15 bp, Homo sapiens
tcgcactgtccccca

SEQ ID NO: 1649604 - DNA, 15 bp, Homo sapiens
cgcactgtcccccag

SEQ ID NO: 1649605 - DNA, 15 bp, Homo sapiens
gcactgtcccccagg

SEQ ID NO: 1649606 - DNA, 15 bp, Homo sapiens
cactgtcccccaggc

SEQ ID NO: 1649607 - DNA, 15 bp, Homo sapiens
actgtcccccaggct

SEQ ID NO: 1649608 - DNA, 15 bp, Homo sapiens
ctgtcccccaggctg

SEQ ID NO: 1649609 - DNA, 15 bp, Homo sapiens
ccacctcctgggttt

SEQ ID NO: 1649610 - DNA, 15 bp, Homo sapiens
cacctcctgggttta

SEQ ID NO: 1649611 - DNA, 15 bp, Homo sapiens
acctcctgggtttaa

SEQ ID NO: 1649612 - DNA, 15 bp, Homo sapiens
cctcctgggtttaag

SEQ ID NO: 1649613 - DNA, 15 bp, Homo sapiens
ctcctgggtttaagc

SEQ ID NO: 1649614 - DNA, 15 bp, Homo sapiens
tcctgggtttaagcg

SEQ ID NO: 1649615 - DNA, 15 bp, Homo sapiens
cctgggtttaagcga

SEQ ID NO: 1649616 - DNA, 15 bp, Homo sapiens
ctgggtttaagcgat

SEQ ID NO: 1649617 - DNA, 15 bp, Homo sapiens
tgggtttaagcgatt

SEQ ID NO: 1649618 - DNA, 15 bp, Homo sapiens
gggtttaagcgattc

SEQ ID NO: 1649619 - DNA, 15 bp, Homo sapiens
ggtttaagcgattct

SEQ ID NO: 1649620 - DNA, 15 bp, Homo sapiens
gtttaagcgattctc

SEQ ID NO: 1649621 - DNA, 15 bp, Homo sapiens
tttaagcgattctcc

SEQ ID NO: 1649622 - DNA, 15 bp, Homo sapiens
ttaagcgattctcct

SEQ ID NO: 1649623 - DNA, 15 bp, Homo sapiens
taagcgattctcctg

SEQ ID NO: 1649624 - DNA, 15 bp, Homo sapiens
caggcacccaccact

SEQ ID NO: 1649625 - DNA, 15 bp, Homo sapiens
aggcacccaccacta

SEQ ID NO: 1649626 - DNA, 15 bp, Homo sapiens
ggcacccaccactat

SEQ ID NO: 1649627 - DNA, 15 bp, Homo sapiens
gcacccaccactatg

SEQ ID NO: 1649628 - DNA, 15 bp, Homo sapiens
cacccaccactatgc

SEQ ID NO: 1649629 - DNA, 15 bp, Homo sapiens
acccaccactatgcc

SEQ ID NO: 1649630 - DNA, 15 bp, Homo sapiens
cccaccactatgccc

SEQ ID NO: 1649631 - DNA, 15 bp, Homo sapiens
ccaccactatgcccg

SEQ ID NO: 1649632 - DNA, 15 bp, Homo sapiens
caccactatgcccgg

SEQ ID NO: 1649633 - DNA, 15 bp, Homo sapiens
accactatgcccggc

SEQ ID NO: 1649634 - DNA, 15 bp, Homo sapiens
ccactatgcccggct

SEQ ID NO: 1649635 - DNA, 15 bp, Homo sapiens
cactatgcccggcta

SEQ ID NO: 1649636 - DNA, 15 bp, Homo sapiens
actatgcccggctaa

SEQ ID NO: 1649637 - DNA, 15 bp, Homo sapiens
ctatgcccggctaat

SEQ ID NO: 1649638 - DNA, 15 bp, Homo sapiens
tatgcccggctaatt

SEQ ID NO: 1649639 - DNA, 15 bp, Homo sapiens
cggctaattttttgg

SEQ ID NO: 1649640 - DNA, 15 bp, Homo sapiens
ggctaattttttgga

SEQ ID NO: 1649641 - DNA, 15 bp, Homo sapiens
gctaattttttggat

SEQ ID NO: 1649642 - DNA, 15 bp, Homo sapiens
ctaattttttggatt

SEQ ID NO: 1649643 - DNA, 15 bp, Homo sapiens
taattttttggattt

SEQ ID NO: 1649644 - DNA, 15 bp, Homo sapiens
aattttttggatttt

SEQ ID NO: 1649645 - DNA, 15 bp, Homo sapiens
attttttggattttt

SEQ ID NO: 1649646 - DNA, 15 bp, Homo sapiens
ttttttggattttta

SEQ ID NO: 1649647 - DNA, 15 bp, Homo sapiens
tttttggatttttaa

SEQ ID NO: 1649648 - DNA, 15 bp, Homo sapiens
ttttggatttttaat

SEQ ID NO: 1649649 - DNA, 15 bp, Homo sapiens
tttggatttttaata

SEQ ID NO: 1649650 - DNA, 15 bp, Homo sapiens
ttggatttttaatag

SEQ ID NO: 1649651 - DNA, 15 bp, Homo sapiens
tggatttttaataga

SEQ ID NO: 1649652 - DNA, 15 bp, Homo sapiens
ggatttttaatagag

SEQ ID NO: 1649653 - DNA, 15 bp, Homo sapiens
gatttttaatagaga

SEQ ID NO: 1649654 - DNA, 15 bp, Homo sapiens
ttttaatagagacgg

SEQ ID NO: 1649655 - DNA, 15 bp, Homo sapiens
tttaatagagacggg

SEQ ID NO: 1649656 - DNA, 15 bp, Homo sapiens
ttaatagagacgggg

SEQ ID NO: 1649657 - DNA, 15 bp, Homo sapiens
taatagagacggggt

SEQ ID NO: 1649658 - DNA, 15 bp, Homo sapiens
aatagagacggggtt

SEQ ID NO: 1649659 - DNA, 15 bp, Homo sapiens
atagagacggggttt

SEQ ID NO: 1649660 - DNA, 15 bp, Homo sapiens
caaactcctgacctt

SEQ ID NO: 1649661 - DNA, 15 bp, Homo sapiens
aaactcctgaccttg

SEQ ID NO: 1649662 - DNA, 15 bp, Homo sapiens
cttgtgatttgcccg

SEQ ID NO: 1649663 - DNA, 15 bp, Homo sapiens
ttgtgatttgcccgc

SEQ ID NO: 1649664 - DNA, 15 bp, Homo sapiens
tgtgatttgcccgcc

SEQ ID NO: 1649665 - DNA, 15 bp, Homo sapiens
gtgatttgcccgcct

SEQ ID NO: 1649666 - DNA, 15 bp, Homo sapiens
tgatttgcccgcctc

SEQ ID NO: 1649667 - DNA, 15 bp, Homo sapiens
gatttgcccgcctca

SEQ ID NO: 1649668 - DNA, 15 bp, Homo sapiens
atttgcccgcctcag

SEQ ID NO: 1649669 - DNA, 15 bp, Homo sapiens
tttgcccgcctcagc

SEQ ID NO: 1649670 - DNA, 15 bp, Homo sapiens
ttgcccgcctcagcc

SEQ ID NO: 1649671 - DNA, 15 bp, Homo sapiens
tgcccgcctcagcct

SEQ ID NO: 1649672 - DNA, 15 bp, Homo sapiens
tcagcctcccaaatt

SEQ ID NO: 1649673 - DNA, 15 bp, Homo sapiens
cagcctcccaaattg

SEQ ID NO: 1649674 - DNA, 15 bp, Homo sapiens
agcctcccaaattgc

SEQ ID NO: 1649675 - DNA, 15 bp, Homo sapiens
tcactccaccccatg

SEQ ID NO: 1649676 - DNA, 15 bp, Homo sapiens
cactccaccccatga

SEQ ID NO: 1649677 - DNA, 15 bp, Homo sapiens
actccaccccatgaa

SEQ ID NO: 1649678 - DNA, 15 bp, Homo sapiens
ctccaccccatgaat

SEQ ID NO: 1649679 - DNA, 15 bp, Homo sapiens
tccaccccatgaata

SEQ ID NO: 1649680 - DNA, 15 bp, Homo sapiens
ccaccccatgaatat

SEQ ID NO: 1649681 - DNA, 15 bp, Homo sapiens
caccccatgaatatg

SEQ ID NO: 1649682 - DNA, 15 bp, Homo sapiens
accccatgaatatgg

SEQ ID NO: 1649683 - DNA, 15 bp, Homo sapiens
ccccatgaatatgga

SEQ ID NO: 1649684 - DNA, 15 bp, Homo sapiens
cccatgaatatggaa

SEQ ID NO: 1649685 - DNA, 15 bp, Homo sapiens
ccatgaatatggaac

SEQ ID NO: 1649686 - DNA, 15 bp, Homo sapiens
catgaatatggaact

SEQ ID NO: 1649687 - DNA, 15 bp, Homo sapiens
atgaatatggaactg

SEQ ID NO: 1649688 - DNA, 15 bp, Homo sapiens
tgaatatggaactgt

SEQ ID NO: 1649689 - DNA, 15 bp, Homo sapiens
gaatatggaactgtc

SEQ ID NO: 1649690 - DNA, 15 bp, Homo sapiens
aatatggaactgtct

SEQ ID NO: 1649691 - DNA, 15 bp, Homo sapiens
atatggaactgtctt

SEQ ID NO: 1649692 - DNA, 15 bp, Homo sapiens
tatggaactgtcttt

SEQ ID NO: 1649693 - DNA, 15 bp, Homo sapiens
atggaactgtctttc

SEQ ID NO: 1649694 - DNA, 15 bp, Homo sapiens
tggaactgtctttcc

SEQ ID NO: 1649695 - DNA, 15 bp, Homo sapiens
ggaactgtctttccc

SEQ ID NO: 1649696 - DNA, 15 bp, Homo sapiens
gaactgtctttccca

SEQ ID NO: 1649697 - DNA, 15 bp, Homo sapiens
aactgtctttcccaa

SEQ ID NO: 1649698 - DNA, 15 bp, Homo sapiens
actgtctttcccaaa

SEQ ID NO: 1649699 - DNA, 15 bp, Homo sapiens
ctgtctttcccaaac

SEQ ID NO: 1649700 - DNA, 15 bp, Homo sapiens
tgtctttcccaaacc

SEQ ID NO: 1649701 - DNA, 15 bp, Homo sapiens
gtctttcccaaaccc

SEQ ID NO: 1649702 - DNA, 15 bp, Homo sapiens
tctttcccaaaccca

SEQ ID NO: 1649703 - DNA, 15 bp, Homo sapiens
ctttcccaaacccaa

SEQ ID NO: 1649704 - DNA, 15 bp, Homo sapiens
tttcccaaacccaaa

SEQ ID NO: 1649705 - DNA, 15 bp, Homo sapiens
ttcccaaacccaaat

SEQ ID NO: 1649706 - DNA, 15 bp, Homo sapiens
tcccaaacccaaatc

SEQ ID NO: 1649707 - DNA, 15 bp, Homo sapiens
cccaaacccaaatct

SEQ ID NO: 1649708 - DNA, 15 bp, Homo sapiens
ccaaacccaaatctc

SEQ ID NO: 1649709 - DNA, 15 bp, Homo sapiens
caaacccaaatctct

SEQ ID NO: 1649710 - DNA, 15 bp, Homo sapiens
aaacccaaatctcta

SEQ ID NO: 1649711 - DNA, 15 bp, Homo sapiens
aacccaaatctctaa

SEQ ID NO: 1649712 - DNA, 15 bp, Homo sapiens
acccaaatctctaaa

SEQ ID NO: 1649713 - DNA, 15 bp, Homo sapiens
cccaaatctctaaaa

SEQ ID NO: 1649714 - DNA, 15 bp, Homo sapiens
ccaaatctctaaaag

SEQ ID NO: 1649715 - DNA, 15 bp, Homo sapiens
caaatctctaaaagg

SEQ ID NO: 1649716 - DNA, 15 bp, Homo sapiens
aaatctctaaaaggg

SEQ ID NO: 1649717 - DNA, 15 bp, Homo sapiens
aatctctaaaaggga

SEQ ID NO: 1649718 - DNA, 15 bp, Homo sapiens
atctctaaaagggaa

SEQ ID NO: 1649719 - DNA, 15 bp, Homo sapiens
tctctaaaagggaaa

SEQ ID NO: 1649720 - DNA, 15 bp, Homo sapiens
ctctaaaagggaaac

SEQ ID NO: 1649721 - DNA, 15 bp, Homo sapiens
tctaaaagggaaaca

SEQ ID NO: 1649722 - DNA, 15 bp, Homo sapiens
ctaaaagggaaacag

SEQ ID NO: 1649723 - DNA, 15 bp, Homo sapiens
taaaagggaaacaga

SEQ ID NO: 1649724 - DNA, 15 bp, Homo sapiens
aaaagggaaacagag

SEQ ID NO: 1649725 - DNA, 15 bp, Homo sapiens
aaagggaaacagagg

SEQ ID NO: 1649726 - DNA, 15 bp, Homo sapiens
aagggaaacagaggt

SEQ ID NO: 1649727 - DNA, 15 bp, Homo sapiens
agggaaacagaggtg

SEQ ID NO: 1649728 - DNA, 15 bp, Homo sapiens
gggaaacagaggtgg

SEQ ID NO: 1649729 - DNA, 15 bp, Homo sapiens
ggaaacagaggtggg

SEQ ID NO: 1649730 - DNA, 15 bp, Homo sapiens
gaaacagaggtggga

SEQ ID NO: 1649731 - DNA, 15 bp, Homo sapiens
aaacagaggtgggag

SEQ ID NO: 1649732 - DNA, 15 bp, Homo sapiens
aacagaggtgggagg

SEQ ID NO: 1649733 - DNA, 15 bp, Homo sapiens
acagaggtgggaggt

SEQ ID NO: 1649734 - DNA, 15 bp, Homo sapiens
cagaggtgggaggtg

SEQ ID NO: 1649735 - DNA, 15 bp, Homo sapiens
agaggtgggaggtga

SEQ ID NO: 1649736 - DNA, 15 bp, Homo sapiens
gaggtgggaggtgat

SEQ ID NO: 1649737 - DNA, 15 bp, Homo sapiens
aggtgggaggtgatt

SEQ ID NO: 1649738 - DNA, 15 bp, Homo sapiens
ggtgggaggtgattg

SEQ ID NO: 1649739 - DNA, 15 bp, Homo sapiens
gtgggaggtgattgt

SEQ ID NO: 1649740 - DNA, 15 bp, Homo sapiens
tgggaggtgattgtt

SEQ ID NO: 1649741 - DNA, 15 bp, Homo sapiens
gggaggtgattgttc

SEQ ID NO: 1649742 - DNA, 15 bp, Homo sapiens
ggaggtgattgttcc

SEQ ID NO: 1649743 - DNA, 15 bp, Homo sapiens
gaggtgattgttcct

SEQ ID NO: 1649744 - DNA, 15 bp, Homo sapiens
aggtgattgttcctg

SEQ ID NO: 1649745 - DNA, 15 bp, Homo sapiens
ggtgattgttcctgg

SEQ ID NO: 1649746 - DNA, 15 bp, Homo sapiens
gtgattgttcctgga

SEQ ID NO: 1649747 - DNA, 15 bp, Homo sapiens
tgattgttcctggag

SEQ ID NO: 1649748 - DNA, 15 bp, Homo sapiens
gattgttcctggaga

SEQ ID NO: 1649749 - DNA, 15 bp, Homo sapiens
attgttcctggagag

SEQ ID NO: 1649750 - DNA, 15 bp, Homo sapiens
ttgttcctggagaga

SEQ ID NO: 1649751 - DNA, 15 bp, Homo sapiens
tgttcctggagagag

SEQ ID NO: 1649752 - DNA, 15 bp, Homo sapiens
gttcctggagagagg

SEQ ID NO: 1649753 - DNA, 15 bp, Homo sapiens
ttcctggagagaggg

SEQ ID NO: 1649754 - DNA, 15 bp, Homo sapiens
tcctggagagaggga

SEQ ID NO: 1649755 - DNA, 15 bp, Homo sapiens
cctggagagagggaa

SEQ ID NO: 1649756 - DNA, 15 bp, Homo sapiens
ctggagagagggaag

SEQ ID NO: 1649757 - DNA, 15 bp, Homo sapiens
tggagagagggaagg

SEQ ID NO: 1649758 - DNA, 15 bp, Homo sapiens
ggagagagggaagga

SEQ ID NO: 1649759 - DNA, 15 bp, Homo sapiens
gagagagggaaggag

SEQ ID NO: 1649760 - DNA, 15 bp, Homo sapiens
agagagggaaggaga

SEQ ID NO: 1649761 - DNA, 15 bp, Homo sapiens
gagagggaaggagaa

SEQ ID NO: 1649762 - DNA, 15 bp, Homo sapiens
agagggaaggagaaa

SEQ ID NO: 1649763 - DNA, 15 bp, Homo sapiens
gagggaaggagaaaa

SEQ ID NO: 1649764 - DNA, 15 bp, Homo sapiens
agggaaggagaaaac

SEQ ID NO: 1649765 - DNA, 15 bp, Homo sapiens
gggaaggagaaaaca

SEQ ID NO: 1649766 - DNA, 15 bp, Homo sapiens
ggaaggagaaaacag

SEQ ID NO: 1649767 - DNA, 15 bp, Homo sapiens
gaaggagaaaacagt

SEQ ID NO: 1649768 - DNA, 15 bp, Homo sapiens
aaggagaaaacagta

SEQ ID NO: 1649769 - DNA, 15 bp, Homo sapiens
aggagaaaacagtaa

SEQ ID NO: 1649770 - DNA, 15 bp, Homo sapiens
ggagaaaacagtaag

SEQ ID NO: 1649771 - DNA, 15 bp, Homo sapiens
gagaaaacagtaaga

SEQ ID NO: 1649772 - DNA, 15 bp, Homo sapiens
agaaaacagtaagaa

SEQ ID NO: 1649773 - DNA, 15 bp, Homo sapiens
gaaaacagtaagaaa

SEQ ID NO: 1649774 - DNA, 15 bp, Homo sapiens
aaaacagtaagaaag

SEQ ID NO: 1649775 - DNA, 15 bp, Homo sapiens
aaacagtaagaaaga

SEQ ID NO: 1649776 - DNA, 15 bp, Homo sapiens
aacagtaagaaagaa

SEQ ID NO: 1649777 - DNA, 15 bp, Homo sapiens
acagtaagaaagaaa

SEQ ID NO: 1649778 - DNA, 15 bp, Homo sapiens
cagtaagaaagaaac

SEQ ID NO: 1649779 - DNA, 15 bp, Homo sapiens
agtaagaaagaaaca

SEQ ID NO: 1649780 - DNA, 15 bp, Homo sapiens
gtaagaaagaaacac

SEQ ID NO: 1649781 - DNA, 15 bp, Homo sapiens
taagaaagaaacacg

SEQ ID NO: 1649782 - DNA, 15 bp, Homo sapiens
aagaaagaaacacga

SEQ ID NO: 1649783 - DNA, 15 bp, Homo sapiens
agaaagaaacacgac

SEQ ID NO: 1649784 - DNA, 15 bp, Homo sapiens
gaaagaaacacgacc

SEQ ID NO: 1649785 - DNA, 15 bp, Homo sapiens
aaagaaacacgaccc

SEQ ID NO: 1649786 - DNA, 15 bp, Homo sapiens
aagaaacacgaccca

SEQ ID NO: 1649787 - DNA, 15 bp, Homo sapiens
agaaacacgacccag

SEQ ID NO: 1649788 - DNA, 15 bp, Homo sapiens
gaaacacgacccagg

SEQ ID NO: 1649789 - DNA, 15 bp, Homo sapiens
aaacacgacccagga

SEQ ID NO: 1649790 - DNA, 15 bp, Homo sapiens
aacacgacccaggat

SEQ ID NO: 1649791 - DNA, 15 bp, Homo sapiens
acacgacccaggatt

SEQ ID NO: 1649792 - DNA, 15 bp, Homo sapiens
cacgacccaggattg

SEQ ID NO: 1649793 - DNA, 15 bp, Homo sapiens
acgacccaggattgt

SEQ ID NO: 1649794 - DNA, 15 bp, Homo sapiens
cgacccaggattgtg

SEQ ID NO: 1649795 - DNA, 15 bp, Homo sapiens
gacccaggattgtgc

SEQ ID NO: 1649796 - DNA, 15 bp, Homo sapiens
acccaggattgtgct

SEQ ID NO: 1649797 - DNA, 15 bp, Homo sapiens
cccaggattgtgctt

SEQ ID NO: 1649798 - DNA, 15 bp, Homo sapiens
ccaggattgtgcttc

SEQ ID NO: 1649799 - DNA, 15 bp, Homo sapiens
caggattgtgcttct

SEQ ID NO: 1649800 - DNA, 15 bp, Homo sapiens
aggattgtgcttctc

SEQ ID NO: 1649801 - DNA, 15 bp, Homo sapiens
ggattgtgcttctcc

SEQ ID NO: 1649802 - DNA, 15 bp, Homo sapiens
gattgtgcttctcca

SEQ ID NO: 1649803 - DNA, 15 bp, Homo sapiens
attgtgcttctccat

SEQ ID NO: 1649804 - DNA, 15 bp, Homo sapiens
ttgtgcttctccatc

SEQ ID NO: 1649805 - DNA, 15 bp, Homo sapiens
tgtgcttctccatcc

SEQ ID NO: 1649806 - DNA, 15 bp, Homo sapiens
gtgcttctccatcct

SEQ ID NO: 1649807 - DNA, 15 bp, Homo sapiens
tgcttctccatccta

SEQ ID NO: 1649808 - DNA, 15 bp, Homo sapiens
gcttctccatcctat

SEQ ID NO: 1649809 - DNA, 15 bp, Homo sapiens
cttctccatcctatt

SEQ ID NO: 1649810 - DNA, 15 bp, Homo sapiens
ttctccatcctattt

SEQ ID NO: 1649811 - DNA, 15 bp, Homo sapiens
tctccatcctattta

SEQ ID NO: 1649812 - DNA, 15 bp, Homo sapiens
ctccatcctatttag

SEQ ID NO: 1649813 - DNA, 15 bp, Homo sapiens
tccatcctatttagt

SEQ ID NO: 1649814 - DNA, 15 bp, Homo sapiens
ccatcctatttagtt

SEQ ID NO: 1649815 - DNA, 15 bp, Homo sapiens
catcctatttagttc

SEQ ID NO: 1649816 - DNA, 15 bp, Homo sapiens
atcctatttagttca

SEQ ID NO: 1649817 - DNA, 15 bp, Homo sapiens
tcctatttagttcag

SEQ ID NO: 1649818 - DNA, 15 bp, Homo sapiens
cctatttagttcaga

SEQ ID NO: 1649819 - DNA, 15 bp, Homo sapiens
ctatttagttcagag

SEQ ID NO: 1649820 - DNA, 15 bp, Homo sapiens
tatttagttcagagc

SEQ ID NO: 1649821 - DNA, 15 bp, Homo sapiens
atttagttcagagct

SEQ ID NO: 1649822 - DNA, 15 bp, Homo sapiens
tttagttcagagctt

SEQ ID NO: 1649823 - DNA, 15 bp, Homo sapiens
ttagttcagagcttc

SEQ ID NO: 1649824 - DNA, 15 bp, Homo sapiens
tagttcagagcttca

SEQ ID NO: 1649825 - DNA, 15 bp, Homo sapiens
agttcagagcttcaa

SEQ ID NO: 1649826 - DNA, 15 bp, Homo sapiens
gttcagagcttcaaa

SEQ ID NO: 1649827 - DNA, 15 bp, Homo sapiens
ttcagagcttcaaat

SEQ ID NO: 1649828 - DNA, 15 bp, Homo sapiens
tcagagcttcaaatt

SEQ ID NO: 1649829 - DNA, 15 bp, Homo sapiens
cagagcttcaaattc

SEQ ID NO: 1649830 - DNA, 15 bp, Homo sapiens
agagcttcaaattca

SEQ ID NO: 1649831 - DNA, 15 bp, Homo sapiens
gagcttcaaattcag

SEQ ID NO: 1649832 - DNA, 15 bp, Homo sapiens
agcttcaaattcagc

SEQ ID NO: 1649833 - DNA, 15 bp, Homo sapiens
gcttcaaattcagcc

SEQ ID NO: 1649834 - DNA, 15 bp, Homo sapiens
cttcaaattcagcca

SEQ ID NO: 1649835 - DNA, 15 bp, Homo sapiens
ttcaaattcagccac

SEQ ID NO: 1649836 - DNA, 15 bp, Homo sapiens
tcaaattcagccacc

SEQ ID NO: 1649837 - DNA, 15 bp, Homo sapiens
caaattcagccaccc

SEQ ID NO: 1649838 - DNA, 15 bp, Homo sapiens
aaattcagccaccct

SEQ ID NO: 1649839 - DNA, 15 bp, Homo sapiens
aattcagccaccctt

SEQ ID NO: 1649840 - DNA, 15 bp, Homo sapiens
attcagccaccctta

SEQ ID NO: 1649841 - DNA, 15 bp, Homo sapiens
ttcagccacccttat

SEQ ID NO: 1649842 - DNA, 15 bp, Homo sapiens
tcagccacccttata

SEQ ID NO: 1649843 - DNA, 15 bp, Homo sapiens
cagccacccttatat

SEQ ID NO: 1649844 - DNA, 15 bp, Homo sapiens
agccacccttatatg

SEQ ID NO: 1649845 - DNA, 15 bp, Homo sapiens
gccacccttatatga

SEQ ID NO: 1649846 - DNA, 15 bp, Homo sapiens
ccacccttatatgat

SEQ ID NO: 1649847 - DNA, 15 bp, Homo sapiens
cacccttatatgatc

SEQ ID NO: 1649848 - DNA, 15 bp, Homo sapiens
acccttatatgatct

SEQ ID NO: 1649849 - DNA, 15 bp, Homo sapiens
cccttatatgatcta

SEQ ID NO: 1649850 - DNA, 15 bp, Homo sapiens
ccttatatgatctaa

SEQ ID NO: 1649851 - DNA, 15 bp, Homo sapiens
cttatatgatctaaa

SEQ ID NO: 1649852 - DNA, 15 bp, Homo sapiens
ttatatgatctaaaa

SEQ ID NO: 1649853 - DNA, 15 bp, Homo sapiens
atatgatctaaaata

SEQ ID NO: 1649854 - DNA, 15 bp, Homo sapiens
tatgatctaaaatac

SEQ ID NO: 1649855 - DNA, 15 bp, Homo sapiens
atgatctaaaatact

SEQ ID NO: 1649856 - DNA, 15 bp, Homo sapiens
tgatctaaaatactc

SEQ ID NO: 1649857 - DNA, 15 bp, Homo sapiens
gatctaaaatactca

SEQ ID NO: 1649858 - DNA, 15 bp, Homo sapiens
atctaaaatactcaa

SEQ ID NO: 1649859 - DNA, 15 bp, Homo sapiens
tctaaaatactcaaa

SEQ ID NO: 1649860 - DNA, 15 bp, Homo sapiens
ctaaaatactcaaaa

SEQ ID NO: 1649861 - DNA, 15 bp, Homo sapiens
taaaatactcaaaaa

SEQ ID NO: 1649862 - DNA, 15 bp, Homo sapiens
aaaatactcaaaaat

SEQ ID NO: 1649863 - DNA, 15 bp, Homo sapiens
aaatactcaaaaata

SEQ ID NO: 1649864 - DNA, 15 bp, Homo sapiens
aatactcaaaaataa

SEQ ID NO: 1649865 - DNA, 15 bp, Homo sapiens
atactcaaaaataag

SEQ ID NO: 1649866 - DNA, 15 bp, Homo sapiens
tactcaaaaataagg

SEQ ID NO: 1649867 - DNA, 15 bp, Homo sapiens
actcaaaaataaggc

SEQ ID NO: 1649868 - DNA, 15 bp, Homo sapiens
ctcaaaaataaggct

SEQ ID NO: 1649869 - DNA, 15 bp, Homo sapiens
tcaaaaataaggcta

SEQ ID NO: 1649870 - DNA, 15 bp, Homo sapiens
caaaaataaggctac

SEQ ID NO: 1649871 - DNA, 15 bp, Homo sapiens
aaaaataaggctacc

SEQ ID NO: 1649872 - DNA, 15 bp, Homo sapiens
aaaataaggctaccc

SEQ ID NO: 1649873 - DNA, 15 bp, Homo sapiens
aaataaggctacccc

SEQ ID NO: 1649874 - DNA, 15 bp, Homo sapiens
aataaggctacccca

SEQ ID NO: 1649875 - DNA, 15 bp, Homo sapiens
ataaggctaccccag

SEQ ID NO: 1649876 - DNA, 15 bp, Homo sapiens
taaggctaccccaga

SEQ ID NO: 1649877 - DNA, 15 bp, Homo sapiens
aaggctaccccagag

SEQ ID NO: 1649878 - DNA, 15 bp, Homo sapiens
aggctaccccagagc

SEQ ID NO: 1649879 - DNA, 15 bp, Homo sapiens
ggctaccccagagcc

SEQ ID NO: 1649880 - DNA, 15 bp, Homo sapiens
gctaccccagagcca

SEQ ID NO: 1649881 - DNA, 15 bp, Homo sapiens
ctaccccagagccaa

SEQ ID NO: 1649882 - DNA, 15 bp, Homo sapiens
taccccagagccaaa

SEQ ID NO: 1649883 - DNA, 15 bp, Homo sapiens
accccagagccaaat

SEQ ID NO: 1649884 - DNA, 15 bp, Homo sapiens
ccccagagccaaatt

SEQ ID NO: 1649885 - DNA, 15 bp, Homo sapiens
cccagagccaaattt

SEQ ID NO: 1649886 - DNA, 15 bp, Homo sapiens
ccagagccaaatttc

SEQ ID NO: 1649887 - DNA, 15 bp, Homo sapiens
cagagccaaatttct

SEQ ID NO: 1649888 - DNA, 15 bp, Homo sapiens
agagccaaatttctt

SEQ ID NO: 1649889 - DNA, 15 bp, Homo sapiens
gagccaaatttcttt

SEQ ID NO: 1649890 - DNA, 15 bp, Homo sapiens
agccaaatttctttt

SEQ ID NO: 1649891 - DNA, 15 bp, Homo sapiens
gccaaatttcttttt

SEQ ID NO: 1649892 - DNA, 15 bp, Homo sapiens
ccaaatttcttttta

SEQ ID NO: 1649893 - DNA, 15 bp, Homo sapiens
caaatttctttttat

SEQ ID NO: 1649894 - DNA, 15 bp, Homo sapiens
aaatttctttttatt

SEQ ID NO: 1649895 - DNA, 15 bp, Homo sapiens
aatttctttttattt

SEQ ID NO: 1649896 - DNA, 15 bp, Homo sapiens
atttctttttatttc

SEQ ID NO: 1649897 - DNA, 15 bp, Homo sapiens
tttctttttatttct

SEQ ID NO: 1649898 - DNA, 15 bp, Homo sapiens
tctttttatttcttc

SEQ ID NO: 1649899 - DNA, 15 bp, Homo sapiens
ctttttatttcttct

SEQ ID NO: 1649900 - DNA, 15 bp, Homo sapiens
tttttatttcttctg

SEQ ID NO: 1649901 - DNA, 15 bp, Homo sapiens
ttttatttcttctgc

SEQ ID NO: 1649902 - DNA, 15 bp, Homo sapiens
tttatttcttctgcc

SEQ ID NO: 1649903 - DNA, 15 bp, Homo sapiens
ttatttcttctgcct

SEQ ID NO: 1649904 - DNA, 15 bp, Homo sapiens
tatttcttctgcctc

SEQ ID NO: 1649905 - DNA, 15 bp, Homo sapiens
atttcttctgcctca

SEQ ID NO: 1649906 - DNA, 15 bp, Homo sapiens
tttcttctgcctcac

SEQ ID NO: 1649907 - DNA, 15 bp, Homo sapiens
ttcttctgcctcact

SEQ ID NO: 1649908 - DNA, 15 bp, Homo sapiens
tcttctgcctcactc

SEQ ID NO: 1649909 - DNA, 15 bp, Homo sapiens
cttctgcctcactct

SEQ ID NO: 1649910 - DNA, 15 bp, Homo sapiens
ttctgcctcactctg

SEQ ID NO: 1649911 - DNA, 15 bp, Homo sapiens
tctgcctcactctgc

SEQ ID NO: 1649912 - DNA, 15 bp, Homo sapiens
ctgcctcactctgct

SEQ ID NO: 1649913 - DNA, 15 bp, Homo sapiens
tgcctcactctgctt

SEQ ID NO: 1649914 - DNA, 15 bp, Homo sapiens
gcctcactctgcttt

SEQ ID NO: 1649915 - DNA, 15 bp, Homo sapiens
cctcactctgcttta

SEQ ID NO: 1649916 - DNA, 15 bp, Homo sapiens
ctcactctgctttaa

SEQ ID NO: 1649917 - DNA, 15 bp, Homo sapiens
tcactctgctttaaa

SEQ ID NO: 1649918 - DNA, 15 bp, Homo sapiens
ctctgctttaaagat

SEQ ID NO: 1649919 - DNA, 15 bp, Homo sapiens
tctgctttaaagatg

SEQ ID NO: 1649920 - DNA, 15 bp, Homo sapiens
ctgctttaaagatga

SEQ ID NO: 1649921 - DNA, 15 bp, Homo sapiens
tgctttaaagatgaa

SEQ ID NO: 1649922 - DNA, 15 bp, Homo sapiens
gctttaaagatgaat

SEQ ID NO: 1649923 - DNA, 15 bp, Homo sapiens
ctttaaagatgaatt

SEQ ID NO: 1649924 - DNA, 15 bp, Homo sapiens
tttaaagatgaattg

SEQ ID NO: 1649925 - DNA, 15 bp, Homo sapiens
ttaaagatgaattgg

SEQ ID NO: 1649926 - DNA, 15 bp, Homo sapiens
taaagatgaattgga

SEQ ID NO: 1649927 - DNA, 15 bp, Homo sapiens
aaagatgaattggaa

SEQ ID NO: 1649928 - DNA, 15 bp, Homo sapiens
aagatgaattggaaa

SEQ ID NO: 1649929 - DNA, 15 bp, Homo sapiens
agatgaattggaaat

SEQ ID NO: 1649930 - DNA, 15 bp, Homo sapiens
gatgaattggaaata

SEQ ID NO: 1649931 - DNA, 15 bp, Homo sapiens
atgaattggaaatag

SEQ ID NO: 1649932 - DNA, 15 bp, Homo sapiens
tgaattggaaataga

SEQ ID NO: 1649933 - DNA, 15 bp, Homo sapiens
gaattggaaatagag

SEQ ID NO: 1649934 - DNA, 15 bp, Homo sapiens
aattggaaatagaga

SEQ ID NO: 1649935 - DNA, 15 bp, Homo sapiens
attggaaatagagac

SEQ ID NO: 1649936 - DNA, 15 bp, Homo sapiens
ttggaaatagagaca

SEQ ID NO: 1649937 - DNA, 15 bp, Homo sapiens
tggaaatagagacat

SEQ ID NO: 1649938 - DNA, 15 bp, Homo sapiens
ggaaatagagacatc

SEQ ID NO: 1649939 - DNA, 15 bp, Homo sapiens
gaaatagagacatcc

SEQ ID NO: 1649940 - DNA, 15 bp, Homo sapiens
aaatagagacatcct

SEQ ID NO: 1649941 - DNA, 15 bp, Homo sapiens
aatagagacatcctc

SEQ ID NO: 1649942 - DNA, 15 bp, Homo sapiens
atagagacatcctca

SEQ ID NO: 1649943 - DNA, 15 bp, Homo sapiens
tagagacatcctcat

SEQ ID NO: 1649944 - DNA, 15 bp, Homo sapiens
agagacatcctcatc

SEQ ID NO: 1649945 - DNA, 15 bp, Homo sapiens
gagacatcctcatct

SEQ ID NO: 1649946 - DNA, 15 bp, Homo sapiens
agacatcctcatctg

SEQ ID NO: 1649947 - DNA, 15 bp, Homo sapiens
gacatcctcatctgt

SEQ ID NO: 1649948 - DNA, 15 bp, Homo sapiens
acatcctcatctgtc

SEQ ID NO: 1649949 - DNA, 15 bp, Homo sapiens
catcctcatctgtca

SEQ ID NO: 1649950 - DNA, 15 bp, Homo sapiens
atcctcatctgtcaa

SEQ ID NO: 1649951 - DNA, 15 bp, Homo sapiens
tcctcatctgtcaac

SEQ ID NO: 1649952 - DNA, 15 bp, Homo sapiens
cctcatctgtcaact

SEQ ID NO: 1649953 - DNA, 15 bp, Homo sapiens
ctcatctgtcaacta

SEQ ID NO: 1649954 - DNA, 15 bp, Homo sapiens
tcatctgtcaactat

SEQ ID NO: 1649955 - DNA, 15 bp, Homo sapiens
catctgtcaactatc

SEQ ID NO: 1649956 - DNA, 15 bp, Homo sapiens
atctgtcaactatca

SEQ ID NO: 1649957 - DNA, 15 bp, Homo sapiens
tctgtcaactatcac

SEQ ID NO: 1649958 - DNA, 15 bp, Homo sapiens
ctgtcaactatcacc

SEQ ID NO: 1649959 - DNA, 15 bp, Homo sapiens
tgtcaactatcacca

SEQ ID NO: 1649960 - DNA, 15 bp, Homo sapiens
gtcaactatcaccaa

SEQ ID NO: 1649961 - DNA, 15 bp, Homo sapiens
tcaactatcaccaag

SEQ ID NO: 1649962 - DNA, 15 bp, Homo sapiens
caactatcaccaagt

SEQ ID NO: 1649963 - DNA, 15 bp, Homo sapiens
aactatcaccaagta

SEQ ID NO: 1649964 - DNA, 15 bp, Homo sapiens
actatcaccaagtag

SEQ ID NO: 1649965 - DNA, 15 bp, Homo sapiens
ctatcaccaagtaga

SEQ ID NO: 1649966 - DNA, 15 bp, Homo sapiens
tatcaccaagtagat

SEQ ID NO: 1649967 - DNA, 15 bp, Homo sapiens
atcaccaagtagatt

SEQ ID NO: 1649968 - DNA, 15 bp, Homo sapiens
tcaccaagtagattc

SEQ ID NO: 1649969 - DNA, 15 bp, Homo sapiens
caccaagtagattct

SEQ ID NO: 1649970 - DNA, 15 bp, Homo sapiens
accaagtagattctc

SEQ ID NO: 1649971 - DNA, 15 bp, Homo sapiens
ccaagtagattctct

SEQ ID NO: 1649972 - DNA, 15 bp, Homo sapiens
caagtagattctctt

SEQ ID NO: 1649973 - DNA, 15 bp, Homo sapiens
aagtagattctctta

SEQ ID NO: 1649974 - DNA, 15 bp, Homo sapiens
agtagattctcttag

SEQ ID NO: 1649975 - DNA, 15 bp, Homo sapiens
gtagattctcttaga

SEQ ID NO: 1649976 - DNA, 15 bp, Homo sapiens
tagattctcttagat

SEQ ID NO: 1649977 - DNA, 15 bp, Homo sapiens
agattctcttagata

SEQ ID NO: 1649978 - DNA, 15 bp, Homo sapiens
gattctcttagatag

SEQ ID NO: 1649979 - DNA, 15 bp, Homo sapiens
attctcttagatagt

SEQ ID NO: 1649980 - DNA, 15 bp, Homo sapiens
ttctcttagatagtt

SEQ ID NO: 1649981 - DNA, 15 bp, Homo sapiens
tctcttagatagtta

SEQ ID NO: 1649982 - DNA, 15 bp, Homo sapiens
ctcttagatagttaa

SEQ ID NO: 1649983 - DNA, 15 bp, Homo sapiens
tcttagatagttaat

SEQ ID NO: 1649984 - DNA, 15 bp, Homo sapiens
cttagatagttaata

SEQ ID NO: 1649985 - DNA, 15 bp, Homo sapiens
ttagatagttaatat

SEQ ID NO: 1649986 - DNA, 15 bp, Homo sapiens
tagatagttaatatt

SEQ ID NO: 1649987 - DNA, 15 bp, Homo sapiens
agatagttaatattg

SEQ ID NO: 1649988 - DNA, 15 bp, Homo sapiens
gatagttaatattga

SEQ ID NO: 1649989 - DNA, 15 bp, Homo sapiens
atagttaatattgaa

SEQ ID NO: 1649990 - DNA, 15 bp, Homo sapiens
tagttaatattgaaa

SEQ ID NO: 1649991 - DNA, 15 bp, Homo sapiens
agttaatattgaaaa

SEQ ID NO: 1649992 - DNA, 15 bp, Homo sapiens
gttaatattgaaaag

SEQ ID NO: 1649993 - DNA, 15 bp, Homo sapiens
ttaatattgaaaagc

SEQ ID NO: 1649994 - DNA, 15 bp, Homo sapiens
taatattgaaaagcg

SEQ ID NO: 1649995 - DNA, 15 bp, Homo sapiens
aatattgaaaagcgt

SEQ ID NO: 1649996 - DNA, 15 bp, Homo sapiens
atattgaaaagcgtc

SEQ ID NO: 1649997 - DNA, 15 bp, Homo sapiens
tattgaaaagcgtcc

SEQ ID NO: 1649998 - DNA, 15 bp, Homo sapiens
attgaaaagcgtcct

SEQ ID NO: 1649999 - DNA, 15 bp, Homo sapiens
ttgaaaagcgtcctc

SEQ ID NO: 1650000 - DNA, 15 bp, Homo sapiens
tgaaaagcgtcctct

SEQ ID NO: 1650001 - DNA, 15 bp, Homo sapiens
gaaaagcgtcctctg

SEQ ID NO: 1650002 - DNA, 15 bp, Homo sapiens
aaaagcgtcctctgg

SEQ ID NO: 1650003 - DNA, 15 bp, Homo sapiens
aaagcgtcctctggt

SEQ ID NO: 1650004 - DNA, 15 bp, Homo sapiens
aagcgtcctctggta

SEQ ID NO: 1650005 - DNA, 15 bp, Homo sapiens
agcgtcctctggtat

SEQ ID NO: 1650006 - DNA, 15 bp, Homo sapiens
gcgtcctctggtatc

SEQ ID NO: 1650007 - DNA, 15 bp, Homo sapiens
cgtcctctggtatct

SEQ ID NO: 1650008 - DNA, 15 bp, Homo sapiens
gtcctctggtatctc

SEQ ID NO: 1650009 - DNA, 15 bp, Homo sapiens
tcctctggtatctct

SEQ ID NO: 1650010 - DNA, 15 bp, Homo sapiens
cctctggtatctcta

SEQ ID NO: 1650011 - DNA, 15 bp, Homo sapiens
ctctggtatctctag

SEQ ID NO: 1650012 - DNA, 15 bp, Homo sapiens
tctggtatctctaga

SEQ ID NO: 1650013 - DNA, 15 bp, Homo sapiens
ctggtatctctagac

SEQ ID NO: 1650014 - DNA, 15 bp, Homo sapiens
tggtatctctagacc

SEQ ID NO: 1650015 - DNA, 15 bp, Homo sapiens
ggtatctctagacct

SEQ ID NO: 1650016 - DNA, 15 bp, Homo sapiens
gtatctctagacctc

SEQ ID NO: 1650017 - DNA, 15 bp, Homo sapiens
tatctctagacctca

SEQ ID NO: 1650018 - DNA, 15 bp, Homo sapiens
atctctagacctcac

SEQ ID NO: 1650019 - DNA, 15 bp, Homo sapiens
tctctagacctcact

SEQ ID NO: 1650020 - DNA, 15 bp, Homo sapiens
ctctagacctcactg

SEQ ID NO: 1650021 - DNA, 15 bp, Homo sapiens
tctagacctcactgc

SEQ ID NO: 1650022 - DNA, 15 bp, Homo sapiens
ctagacctcactgct

SEQ ID NO: 1650023 - DNA, 15 bp, Homo sapiens
tagacctcactgcta

SEQ ID NO: 1650024 - DNA, 15 bp, Homo sapiens
agacctcactgctat

SEQ ID NO: 1650025 - DNA, 15 bp, Homo sapiens
gacctcactgctata

SEQ ID NO: 1650026 - DNA, 15 bp, Homo sapiens
acctcactgctatag

SEQ ID NO: 1650027 - DNA, 15 bp, Homo sapiens
cctcactgctatagt

SEQ ID NO: 1650028 - DNA, 15 bp, Homo sapiens
ctcactgctatagta

SEQ ID NO: 1650029 - DNA, 15 bp, Homo sapiens
tcactgctatagtaa

SEQ ID NO: 1650030 - DNA, 15 bp, Homo sapiens
cactgctatagtaaa

SEQ ID NO: 1650031 - DNA, 15 bp, Homo sapiens
actgctatagtaaaa

SEQ ID NO: 1650032 - DNA, 15 bp, Homo sapiens
ctgctatagtaaaag

SEQ ID NO: 1650033 - DNA, 15 bp, Homo sapiens
tgctatagtaaaagg

SEQ ID NO: 1650034 - DNA, 15 bp, Homo sapiens
gctatagtaaaaggt

SEQ ID NO: 1650035 - DNA, 15 bp, Homo sapiens
ctatagtaaaaggta

SEQ ID NO: 1650036 - DNA, 15 bp, Homo sapiens
tatagtaaaaggtac

SEQ ID NO: 1650037 - DNA, 15 bp, Homo sapiens
atagtaaaaggtaca

SEQ ID NO: 1650038 - DNA, 15 bp, Homo sapiens
tagtaaaaggtacag

SEQ ID NO: 1650039 - DNA, 15 bp, Homo sapiens
agtaaaaggtacagt

SEQ ID NO: 1650040 - DNA, 15 bp, Homo sapiens
gtaaaaggtacagtg

SEQ ID NO: 1650041 - DNA, 15 bp, Homo sapiens
taaaaggtacagtgg

SEQ ID NO: 1650042 - DNA, 15 bp, Homo sapiens
aaaaggtacagtgga

SEQ ID NO: 1650043 - DNA, 15 bp, Homo sapiens
aaaggtacagtggaa

SEQ ID NO: 1650044 - DNA, 15 bp, Homo sapiens
aaggtacagtggaat

SEQ ID NO: 1650045 - DNA, 15 bp, Homo sapiens
aggtacagtggaata

SEQ ID NO: 1650046 - DNA, 15 bp, Homo sapiens
ggtacagtggaataa

SEQ ID NO: 1650047 - DNA, 15 bp, Homo sapiens
gtacagtggaataac

SEQ ID NO: 1650048 - DNA, 15 bp, Homo sapiens
tacagtggaataact

SEQ ID NO: 1650049 - DNA, 15 bp, Homo sapiens
acagtggaataactt

SEQ ID NO: 1650050 - DNA, 15 bp, Homo sapiens
cagtggaataactta

SEQ ID NO: 1650051 - DNA, 15 bp, Homo sapiens
agtggaataacttaa

SEQ ID NO: 1650052 - DNA, 15 bp, Homo sapiens
gtggaataacttaat

SEQ ID NO: 1650053 - DNA, 15 bp, Homo sapiens
tggaataacttaata

SEQ ID NO: 1650054 - DNA, 15 bp, Homo sapiens
ggaataacttaatac

SEQ ID NO: 1650055 - DNA, 15 bp, Homo sapiens
gaataacttaataca

SEQ ID NO: 1650056 - DNA, 15 bp, Homo sapiens
aataacttaatacag

SEQ ID NO: 1650057 - DNA, 15 bp, Homo sapiens
ataacttaatacaga

SEQ ID NO: 1650058 - DNA, 15 bp, Homo sapiens
taacttaatacagat

SEQ ID NO: 1650059 - DNA, 15 bp, Homo sapiens
aacttaatacagatt

SEQ ID NO: 1650060 - DNA, 15 bp, Homo sapiens
acttaatacagattt

SEQ ID NO: 1650061 - DNA, 15 bp, Homo sapiens
cttaatacagatttg

SEQ ID NO: 1650062 - DNA, 15 bp, Homo sapiens
ttaatacagatttgt

SEQ ID NO: 1650063 - DNA, 15 bp, Homo sapiens
taatacagatttgtg

SEQ ID NO: 1650064 - DNA, 15 bp, Homo sapiens
aatacagatttgtgc

SEQ ID NO: 1650065 - DNA, 15 bp, Homo sapiens
atacagatttgtgct

SEQ ID NO: 1650066 - DNA, 15 bp, Homo sapiens
tacagatttgtgcta

SEQ ID NO: 1650067 - DNA, 15 bp, Homo sapiens
acagatttgtgctag

SEQ ID NO: 1650068 - DNA, 15 bp, Homo sapiens
cagatttgtgctaga

SEQ ID NO: 1650069 - DNA, 15 bp, Homo sapiens
agatttgtgctagaa

SEQ ID NO: 1650070 - DNA, 15 bp, Homo sapiens
gatttgtgctagaat

SEQ ID NO: 1650071 - DNA, 15 bp, Homo sapiens
atttgtgctagaatg

SEQ ID NO: 1650072 - DNA, 15 bp, Homo sapiens
tttgtgctagaatgt

SEQ ID NO: 1650073 - DNA, 15 bp, Homo sapiens
ttgtgctagaatgtg

SEQ ID NO: 1650074 - DNA, 15 bp, Homo sapiens
tgtgctagaatgtgc

SEQ ID NO: 1650075 - DNA, 15 bp, Homo sapiens
gtgctagaatgtgct

SEQ ID NO: 1650076 - DNA, 15 bp, Homo sapiens
tgctagaatgtgctg

SEQ ID NO: 1650077 - DNA, 15 bp, Homo sapiens
gctagaatgtgctgg

SEQ ID NO: 1650078 - DNA, 15 bp, Homo sapiens
ctagaatgtgctggc

SEQ ID NO: 1650079 - DNA, 15 bp, Homo sapiens
tagaatgtgctggct

SEQ ID NO: 1650080 - DNA, 15 bp, Homo sapiens
agaatgtgctggctg

SEQ ID NO: 1650081 - DNA, 15 bp, Homo sapiens
gaatgtgctggctga

SEQ ID NO: 1650082 - DNA, 15 bp, Homo sapiens
aatgtgctggctgat

SEQ ID NO: 1650083 - DNA, 15 bp, Homo sapiens
atgtgctggctgatt

SEQ ID NO: 1650084 - DNA, 15 bp, Homo sapiens
tgtgctggctgatta

SEQ ID NO: 1650085 - DNA, 15 bp, Homo sapiens
gtgctggctgattac

SEQ ID NO: 1650086 - DNA, 15 bp, Homo sapiens
tgctggctgattact

SEQ ID NO: 1650087 - DNA, 15 bp, Homo sapiens
gctggctgattactt

SEQ ID NO: 1650088 - DNA, 15 bp, Homo sapiens
ctggctgattacttg

SEQ ID NO: 1650089 - DNA, 15 bp, Homo sapiens
tggctgattacttgt

SEQ ID NO: 1650090 - DNA, 15 bp, Homo sapiens
ggctgattacttgtc

SEQ ID NO: 1650091 - DNA, 15 bp, Homo sapiens
gctgattacttgtct

SEQ ID NO: 1650092 - DNA, 15 bp, Homo sapiens
ctgattacttgtctg

SEQ ID NO: 1650093 - DNA, 15 bp, Homo sapiens
tgattacttgtctgc

SEQ ID NO: 1650094 - DNA, 15 bp, Homo sapiens
gattacttgtctgct

SEQ ID NO: 1650095 - DNA, 15 bp, Homo sapiens
attacttgtctgctc

SEQ ID NO: 1650096 - DNA, 15 bp, Homo sapiens
ttacttgtctgctct

SEQ ID NO: 1650097 - DNA, 15 bp, Homo sapiens
tacttgtctgctctc

SEQ ID NO: 1650098 - DNA, 15 bp, Homo sapiens
acttgtctgctctca

SEQ ID NO: 1650099 - DNA, 15 bp, Homo sapiens
cttgtctgctctcat

SEQ ID NO: 1650100 - DNA, 15 bp, Homo sapiens
ttgtctgctctcata

SEQ ID NO: 1650101 - DNA, 15 bp, Homo sapiens
tgtctgctctcatat

SEQ ID NO: 1650102 - DNA, 15 bp, Homo sapiens
gtctgctctcatatc

SEQ ID NO: 1650103 - DNA, 15 bp, Homo sapiens
tctgctctcatatcc

SEQ ID NO: 1650104 - DNA, 15 bp, Homo sapiens
ctgctctcatatcca

SEQ ID NO: 1650105 - DNA, 15 bp, Homo sapiens
tgctctcatatccat

SEQ ID NO: 1650106 - DNA, 15 bp, Homo sapiens
gctctcatatccatt

SEQ ID NO: 1650107 - DNA, 15 bp, Homo sapiens
ctctcatatccattt

SEQ ID NO: 1650108 - DNA, 15 bp, Homo sapiens
tctcatatccatttc

SEQ ID NO: 1650109 - DNA, 15 bp, Homo sapiens
ctcatatccatttcc

SEQ ID NO: 1650110 - DNA, 15 bp, Homo sapiens
tcatatccatttccc

SEQ ID NO: 1650111 - DNA, 15 bp, Homo sapiens
catatccatttccca

SEQ ID NO: 1650112 - DNA, 15 bp, Homo sapiens
atatccatttcccaa

SEQ ID NO: 1650113 - DNA, 15 bp, Homo sapiens
tatccatttcccaac

SEQ ID NO: 1650114 - DNA, 15 bp, Homo sapiens
atccatttcccaaca

SEQ ID NO: 1650115 - DNA, 15 bp, Homo sapiens
tccatttcccaacat

SEQ ID NO: 1650116 - DNA, 15 bp, Homo sapiens
ccatttcccaacatt

SEQ ID NO: 1650117 - DNA, 15 bp, Homo sapiens
catttcccaacattc

SEQ ID NO: 1650118 - DNA, 15 bp, Homo sapiens
atttcccaacattcc

SEQ ID NO: 1650119 - DNA, 15 bp, Homo sapiens
tttcccaacattccc

SEQ ID NO: 1650120 - DNA, 15 bp, Homo sapiens
ttcccaacattccct

SEQ ID NO: 1650121 - DNA, 15 bp, Homo sapiens
tcccaacattccctt

SEQ ID NO: 1650122 - DNA, 15 bp, Homo sapiens
cccaacattcccttg

SEQ ID NO: 1650123 - DNA, 15 bp, Homo sapiens
ccaacattcccttga

SEQ ID NO: 1650124 - DNA, 15 bp, Homo sapiens
caacattcccttgat

SEQ ID NO: 1650125 - DNA, 15 bp, Homo sapiens
aacattcccttgatt

SEQ ID NO: 1650126 - DNA, 15 bp, Homo sapiens
acattcccttgattt

SEQ ID NO: 1650127 - DNA, 15 bp, Homo sapiens
cattcccttgatttg

SEQ ID NO: 1650128 - DNA, 15 bp, Homo sapiens
attcccttgatttgc

SEQ ID NO: 1650129 - DNA, 15 bp, Homo sapiens
ttcccttgatttgct

SEQ ID NO: 1650130 - DNA, 15 bp, Homo sapiens
tcccttgatttgctc

SEQ ID NO: 1650131 - DNA, 15 bp, Homo sapiens
cccttgatttgctcg

SEQ ID NO: 1650132 - DNA, 15 bp, Homo sapiens
ccttgatttgctcgt

SEQ ID NO: 1650133 - DNA, 15 bp, Homo sapiens
cttgatttgctcgtt

SEQ ID NO: 1650134 - DNA, 15 bp, Homo sapiens
ttgatttgctcgttt

SEQ ID NO: 1650135 - DNA, 15 bp, Homo sapiens
tgatttgctcgtttt

SEQ ID NO: 1650136 - DNA, 15 bp, Homo sapiens
gatttgctcgttttc

SEQ ID NO: 1650137 - DNA, 15 bp, Homo sapiens
atttgctcgttttca

SEQ ID NO: 1650138 - DNA, 15 bp, Homo sapiens
tttgctcgttttcac

SEQ ID NO: 1650139 - DNA, 15 bp, Homo sapiens
ttgctcgttttcaca

SEQ ID NO: 1650140 - DNA, 15 bp, Homo sapiens
tgctcgttttcacaa

SEQ ID NO: 1650141 - DNA, 15 bp, Homo sapiens
gctcgttttcacaat

SEQ ID NO: 1650142 - DNA, 15 bp, Homo sapiens
ctcgttttcacaatg

SEQ ID NO: 1650143 - DNA, 15 bp, Homo sapiens
tcgttttcacaatga

SEQ ID NO: 1650144 - DNA, 15 bp, Homo sapiens
cgttttcacaatgag

SEQ ID NO: 1650145 - DNA, 15 bp, Homo sapiens
gttttcacaatgagc

SEQ ID NO: 1650146 - DNA, 15 bp, Homo sapiens
ttttcacaatgagcc

SEQ ID NO: 1650147 - DNA, 15 bp, Homo sapiens
tttcacaatgagcca

SEQ ID NO: 1650148 - DNA, 15 bp, Homo sapiens
ttcacaatgagccac

SEQ ID NO: 1650149 - DNA, 15 bp, Homo sapiens
tcacaatgagccaca

SEQ ID NO: 1650150 - DNA, 15 bp, Homo sapiens
cacaatgagccacat

SEQ ID NO: 1650151 - DNA, 15 bp, Homo sapiens
acaatgagccacatt

SEQ ID NO: 1650152 - DNA, 15 bp, Homo sapiens
caatgagccacattt

SEQ ID NO: 1650153 - DNA, 15 bp, Homo sapiens
aatgagccacatttc

SEQ ID NO: 1650154 - DNA, 15 bp, Homo sapiens
atgagccacatttct

SEQ ID NO: 1650155 - DNA, 15 bp, Homo sapiens
tgagccacatttctc

SEQ ID NO: 1650156 - DNA, 15 bp, Homo sapiens
gagccacatttctca

SEQ ID NO: 1650157 - DNA, 15 bp, Homo sapiens
agccacatttctcag

SEQ ID NO: 1650158 - DNA, 15 bp, Homo sapiens
gccacatttctcagc

SEQ ID NO: 1650159 - DNA, 15 bp, Homo sapiens
ccacatttctcagca

SEQ ID NO: 1650160 - DNA, 15 bp, Homo sapiens
cacatttctcagcac

SEQ ID NO: 1650161 - DNA, 15 bp, Homo sapiens
acatttctcagcacc

SEQ ID NO: 1650162 - DNA, 15 bp, Homo sapiens
catttctcagcacct

SEQ ID NO: 1650163 - DNA, 15 bp, Homo sapiens
atttctcagcaccta

SEQ ID NO: 1650164 - DNA, 15 bp, Homo sapiens
tttctcagcacctat

SEQ ID NO: 1650165 - DNA, 15 bp, Homo sapiens
ttctcagcacctatg

SEQ ID NO: 1650166 - DNA, 15 bp, Homo sapiens
tctcagcacctatga

SEQ ID NO: 1650167 - DNA, 15 bp, Homo sapiens
ctcagcacctatgag

SEQ ID NO: 1650168 - DNA, 15 bp, Homo sapiens
tcagcacctatgagc

SEQ ID NO: 1650169 - DNA, 15 bp, Homo sapiens
cagcacctatgagct

SEQ ID NO: 1650170 - DNA, 15 bp, Homo sapiens
agcacctatgagctc

SEQ ID NO: 1650171 - DNA, 15 bp, Homo sapiens
gcacctatgagctct

SEQ ID NO: 1650172 - DNA, 15 bp, Homo sapiens
cacctatgagctctg

SEQ ID NO: 1650173 - DNA, 15 bp, Homo sapiens
acctatgagctctgg

SEQ ID NO: 1650174 - DNA, 15 bp, Homo sapiens
cctatgagctctggt

SEQ ID NO: 1650175 - DNA, 15 bp, Homo sapiens
ctatgagctctggtt

SEQ ID NO: 1650176 - DNA, 15 bp, Homo sapiens
tatgagctctggttt

SEQ ID NO: 1650177 - DNA, 15 bp, Homo sapiens
atgagctctggtttc

SEQ ID NO: 1650178 - DNA, 15 bp, Homo sapiens
tgagctctggtttct

SEQ ID NO: 1650179 - DNA, 15 bp, Homo sapiens
gagctctggtttctg

SEQ ID NO: 1650180 - DNA, 15 bp, Homo sapiens
agctctggtttctgg

SEQ ID NO: 1650181 - DNA, 15 bp, Homo sapiens
gctctggtttctggg

SEQ ID NO: 1650182 - DNA, 15 bp, Homo sapiens
ctctggtttctgggt

SEQ ID NO: 1650183 - DNA, 15 bp, Homo sapiens
tctggtttctgggta

SEQ ID NO: 1650184 - DNA, 15 bp, Homo sapiens
ctggtttctgggtaa

SEQ ID NO: 1650185 - DNA, 15 bp, Homo sapiens
tggtttctgggtaag

SEQ ID NO: 1650186 - DNA, 15 bp, Homo sapiens
ggtttctgggtaagt

SEQ ID NO: 1650187 - DNA, 15 bp, Homo sapiens
gtttctgggtaagtt

SEQ ID NO: 1650188 - DNA, 15 bp, Homo sapiens
tttctgggtaagttt

SEQ ID NO: 1650189 - DNA, 15 bp, Homo sapiens
ttctgggtaagtttg

SEQ ID NO: 1650190 - DNA, 15 bp, Homo sapiens
tctgggtaagtttgg

SEQ ID NO: 1650191 - DNA, 15 bp, Homo sapiens
ctgggtaagtttggc

SEQ ID NO: 1650192 - DNA, 15 bp, Homo sapiens
tgggtaagtttggcc

SEQ ID NO: 1650193 - DNA, 15 bp, Homo sapiens
gggtaagtttggcca

SEQ ID NO: 1650194 - DNA, 15 bp, Homo sapiens
ggtaagtttggccaa

SEQ ID NO: 1650195 - DNA, 15 bp, Homo sapiens
gtaagtttggccaat

SEQ ID NO: 1650196 - DNA, 15 bp, Homo sapiens
taagtttggccaata

SEQ ID NO: 1650197 - DNA, 15 bp, Homo sapiens
aagtttggccaatag

SEQ ID NO: 1650198 - DNA, 15 bp, Homo sapiens
agtttggccaatagg

SEQ ID NO: 1650199 - DNA, 15 bp, Homo sapiens
gtttggccaatagga

SEQ ID NO: 1650200 - DNA, 15 bp, Homo sapiens
tttggccaataggag

SEQ ID NO: 1650201 - DNA, 15 bp, Homo sapiens
ttggccaataggagg

SEQ ID NO: 1650202 - DNA, 15 bp, Homo sapiens
tggccaataggaggc

SEQ ID NO: 1650203 - DNA, 15 bp, Homo sapiens
ggccaataggaggca

SEQ ID NO: 1650204 - DNA, 15 bp, Homo sapiens
gccaataggaggcat

SEQ ID NO: 1650205 - DNA, 15 bp, Homo sapiens
ccaataggaggcatt

SEQ ID NO: 1650206 - DNA, 15 bp, Homo sapiens
caataggaggcatta

SEQ ID NO: 1650207 - DNA, 15 bp, Homo sapiens
aataggaggcattag

SEQ ID NO: 1650208 - DNA, 15 bp, Homo sapiens
ataggaggcattagc

SEQ ID NO: 1650209 - DNA, 15 bp, Homo sapiens
taggaggcattagca

SEQ ID NO: 1650210 - DNA, 15 bp, Homo sapiens
aggaggcattagcaa

SEQ ID NO: 1650211 - DNA, 15 bp, Homo sapiens
ggaggcattagcaaa

SEQ ID NO: 1650212 - DNA, 15 bp, Homo sapiens
gaggcattagcaaaa

SEQ ID NO: 1650213 - DNA, 15 bp, Homo sapiens
aggcattagcaaaag

SEQ ID NO: 1650214 - DNA, 15 bp, Homo sapiens
ggcattagcaaaaga

SEQ ID NO: 1650215 - DNA, 15 bp, Homo sapiens
gcattagcaaaagac

SEQ ID NO: 1650216 - DNA, 15 bp, Homo sapiens
cattagcaaaagaca

SEQ ID NO: 1650217 - DNA, 15 bp, Homo sapiens
attagcaaaagacaa

SEQ ID NO: 1650218 - DNA, 15 bp, Homo sapiens
ttagcaaaagacaaa

SEQ ID NO: 1650219 - DNA, 15 bp, Homo sapiens
tagcaaaagacaaaa

SEQ ID NO: 1650220 - DNA, 15 bp, Homo sapiens
agcaaaagacaaaag

SEQ ID NO: 1650221 - DNA, 15 bp, Homo sapiens
gcaaaagacaaaaga

SEQ ID NO: 1650222 - DNA, 15 bp, Homo sapiens
caaaagacaaaagac

SEQ ID NO: 1650223 - DNA, 15 bp, Homo sapiens
aaaagacaaaagaca

SEQ ID NO: 1650224 - DNA, 15 bp, Homo sapiens
aaagacaaaagacaa

SEQ ID NO: 1650225 - DNA, 15 bp, Homo sapiens
aagacaaaagacaag

SEQ ID NO: 1650226 - DNA, 15 bp, Homo sapiens
agacaaaagacaaga

SEQ ID NO: 1650227 - DNA, 15 bp, Homo sapiens
gacaaaagacaagaa

SEQ ID NO: 1650228 - DNA, 15 bp, Homo sapiens
acaaaagacaagaag

SEQ ID NO: 1650229 - DNA, 15 bp, Homo sapiens
caaaagacaagaaga

SEQ ID NO: 1650230 - DNA, 15 bp, Homo sapiens
aaaagacaagaagaa

SEQ ID NO: 1650231 - DNA, 15 bp, Homo sapiens
aaagacaagaagaag

SEQ ID NO: 1650232 - DNA, 15 bp, Homo sapiens
aagacaagaagaagg

SEQ ID NO: 1650233 - DNA, 15 bp, Homo sapiens
agacaagaagaaggg

SEQ ID NO: 1650234 - DNA, 15 bp, Homo sapiens
gacaagaagaaggga

SEQ ID NO: 1650235 - DNA, 15 bp, Homo sapiens
acaagaagaagggag

SEQ ID NO: 1650236 - DNA, 15 bp, Homo sapiens
caagaagaagggaga

SEQ ID NO: 1650237 - DNA, 15 bp, Homo sapiens
aagaagaagggagaa

SEQ ID NO: 1650238 - DNA, 15 bp, Homo sapiens
agaagaagggagaag

SEQ ID NO: 1650239 - DNA, 15 bp, Homo sapiens
gaagaagggagaagc

SEQ ID NO: 1650240 - DNA, 15 bp, Homo sapiens
aagaagggagaagcc

SEQ ID NO: 1650241 - DNA, 15 bp, Homo sapiens
agaagggagaagcca

SEQ ID NO: 1650242 - DNA, 15 bp, Homo sapiens
gaagggagaagccag

SEQ ID NO: 1650243 - DNA, 15 bp, Homo sapiens
aagggagaagccagg

SEQ ID NO: 1650244 - DNA, 15 bp, Homo sapiens
agggagaagccaggt

SEQ ID NO: 1650245 - DNA, 15 bp, Homo sapiens
gggagaagccaggta

SEQ ID NO: 1650246 - DNA, 15 bp, Homo sapiens
ggagaagccaggtat

SEQ ID NO: 1650247 - DNA, 15 bp, Homo sapiens
gagaagccaggtatt

SEQ ID NO: 1650248 - DNA, 15 bp, Homo sapiens
agaagccaggtatta

SEQ ID NO: 1650249 - DNA, 15 bp, Homo sapiens
gaagccaggtattat

SEQ ID NO: 1650250 - DNA, 15 bp, Homo sapiens
aagccaggtattatc

SEQ ID NO: 1650251 - DNA, 15 bp, Homo sapiens
agccaggtattatcc

SEQ ID NO: 1650252 - DNA, 15 bp, Homo sapiens
gccaggtattatccc

SEQ ID NO: 1650253 - DNA, 15 bp, Homo sapiens
ccaggtattatcccc

SEQ ID NO: 1650254 - DNA, 15 bp, Homo sapiens
caggtattatccccc

SEQ ID NO: 1650255 - DNA, 15 bp, Homo sapiens
aggtattatccccct

SEQ ID NO: 1650256 - DNA, 15 bp, Homo sapiens
ggtattatccccctt

SEQ ID NO: 1650257 - DNA, 15 bp, Homo sapiens
gtattatcccccttt

SEQ ID NO: 1650258 - DNA, 15 bp, Homo sapiens
tattatccccctttt

SEQ ID NO: 1650259 - DNA, 15 bp, Homo sapiens
attatcccccttttc

SEQ ID NO: 1650260 - DNA, 15 bp, Homo sapiens
ttatcccccttttct

SEQ ID NO: 1650261 - DNA, 15 bp, Homo sapiens
tatcccccttttctc

SEQ ID NO: 1650262 - DNA, 15 bp, Homo sapiens
atcccccttttctct

SEQ ID NO: 1650263 - DNA, 15 bp, Homo sapiens
tcccccttttctctt

SEQ ID NO: 1650264 - DNA, 15 bp, Homo sapiens
cccccttttctcttt

SEQ ID NO: 1650265 - DNA, 15 bp, Homo sapiens
ccccttttctctttg

SEQ ID NO: 1650266 - DNA, 15 bp, Homo sapiens
cccttttctctttgc

SEQ ID NO: 1650267 - DNA, 15 bp, Homo sapiens
ccttttctctttgcc

SEQ ID NO: 1650268 - DNA, 15 bp, Homo sapiens
cttttctctttgcct

SEQ ID NO: 1650269 - DNA, 15 bp, Homo sapiens
ttttctctttgcctc

SEQ ID NO: 1650270 - DNA, 15 bp, Homo sapiens
tttctctttgcctcc

SEQ ID NO: 1650271 - DNA, 15 bp, Homo sapiens
ttctctttgcctcca

SEQ ID NO: 1650272 - DNA, 15 bp, Homo sapiens
tctctttgcctccaa

SEQ ID NO: 1650273 - DNA, 15 bp, Homo sapiens
ctctttgcctccaac

SEQ ID NO: 1650274 - DNA, 15 bp, Homo sapiens
tctttgcctccaaca

SEQ ID NO: 1650275 - DNA, 15 bp, Homo sapiens
ctttgcctccaacag

SEQ ID NO: 1650276 - DNA, 15 bp, Homo sapiens
tttgcctccaacagc

SEQ ID NO: 1650277 - DNA, 15 bp, Homo sapiens
ttgcctccaacagcg

SEQ ID NO: 1650278 - DNA, 15 bp, Homo sapiens
tgcctccaacagcgt

SEQ ID NO: 1650279 - DNA, 15 bp, Homo sapiens
gcctccaacagcgtc

SEQ ID NO: 1650280 - DNA, 15 bp, Homo sapiens
cctccaacagcgtct

SEQ ID NO: 1650281 - DNA, 15 bp, Homo sapiens
ctccaacagcgtctt

SEQ ID NO: 1650282 - DNA, 15 bp, Homo sapiens
tccaacagcgtcttc

SEQ ID NO: 1650283 - DNA, 15 bp, Homo sapiens
ccaacagcgtcttca

SEQ ID NO: 1650284 - DNA, 15 bp, Homo sapiens
caacagcgtcttcag

SEQ ID NO: 1650285 - DNA, 15 bp, Homo sapiens
aacagcgtcttcagc

SEQ ID NO: 1650286 - DNA, 15 bp, Homo sapiens
acagcgtcttcagca

SEQ ID NO: 1650287 - DNA, 15 bp, Homo sapiens
cagcgtcttcagcag

SEQ ID NO: 1650288 - DNA, 15 bp, Homo sapiens
agcgtcttcagcagt

SEQ ID NO: 1650289 - DNA, 15 bp, Homo sapiens
gcgtcttcagcagta

SEQ ID NO: 1650290 - DNA, 15 bp, Homo sapiens
cgtcttcagcagtac

SEQ ID NO: 1650291 - DNA, 15 bp, Homo sapiens
gtcttcagcagtact

SEQ ID NO: 1650292 - DNA, 15 bp, Homo sapiens
tcttcagcagtactt

SEQ ID NO: 1650293 - DNA, 15 bp, Homo sapiens
cttcagcagtacttg

SEQ ID NO: 1650294 - DNA, 15 bp, Homo sapiens
ttcagcagtacttgc

SEQ ID NO: 1650295 - DNA, 15 bp, Homo sapiens
tcagcagtacttgca

SEQ ID NO: 1650296 - DNA, 15 bp, Homo sapiens
cagcagtacttgcag

SEQ ID NO: 1650297 - DNA, 15 bp, Homo sapiens
agcagtacttgcagc

SEQ ID NO: 1650298 - DNA, 15 bp, Homo sapiens
gcagtacttgcagct

SEQ ID NO: 1650299 - DNA, 15 bp, Homo sapiens
cagtacttgcagctc

SEQ ID NO: 1650300 - DNA, 15 bp, Homo sapiens
agtacttgcagctct

SEQ ID NO: 1650301 - DNA, 15 bp, Homo sapiens
gtacttgcagctctt

SEQ ID NO: 1650302 - DNA, 15 bp, Homo sapiens
tacttgcagctcttg

SEQ ID NO: 1650303 - DNA, 15 bp, Homo sapiens
acttgcagctcttgg

SEQ ID NO: 1650304 - DNA, 15 bp, Homo sapiens
cttgcagctcttggc

SEQ ID NO: 1650305 - DNA, 15 bp, Homo sapiens
ttgcagctcttggct

SEQ ID NO: 1650306 - DNA, 15 bp, Homo sapiens
tgcagctcttggctc

SEQ ID NO: 1650307 - DNA, 15 bp, Homo sapiens
gcagctcttggctcc

SEQ ID NO: 1650308 - DNA, 15 bp, Homo sapiens
cagctcttggctcca

SEQ ID NO: 1650309 - DNA, 15 bp, Homo sapiens
agctcttggctccat

SEQ ID NO: 1650310 - DNA, 15 bp, Homo sapiens
gctcttggctccata

SEQ ID NO: 1650311 - DNA, 15 bp, Homo sapiens
ctcttggctccataa

SEQ ID NO: 1650312 - DNA, 15 bp, Homo sapiens
tcttggctccataac

SEQ ID NO: 1650313 - DNA, 15 bp, Homo sapiens
cttggctccataacc

SEQ ID NO: 1650314 - DNA, 15 bp, Homo sapiens
ttggctccataaccc

SEQ ID NO: 1650315 - DNA, 15 bp, Homo sapiens
tggctccataacccc

SEQ ID NO: 1650316 - DNA, 15 bp, Homo sapiens
ggctccataacccct

SEQ ID NO: 1650317 - DNA, 15 bp, Homo sapiens
gctccataacccctt

SEQ ID NO: 1650318 - DNA, 15 bp, Homo sapiens
ctccataaccccttc

SEQ ID NO: 1650319 - DNA, 15 bp, Homo sapiens
tccataaccccttcc

SEQ ID NO: 1650320 - DNA, 15 bp, Homo sapiens
ccataaccccttcct

SEQ ID NO: 1650321 - DNA, 15 bp, Homo sapiens
cataaccccttcctc

SEQ ID NO: 1650322 - DNA, 15 bp, Homo sapiens
ataaccccttcctcc

SEQ ID NO: 1650323 - DNA, 15 bp, Homo sapiens
taaccccttcctccc

SEQ ID NO: 1650324 - DNA, 15 bp, Homo sapiens
aaccccttcctccca

SEQ ID NO: 1650325 - DNA, 15 bp, Homo sapiens
accccttcctcccag

SEQ ID NO: 1650326 - DNA, 15 bp, Homo sapiens
ccccttcctcccagt

SEQ ID NO: 1650327 - DNA, 15 bp, Homo sapiens
cccttcctcccagtg

SEQ ID NO: 1650328 - DNA, 15 bp, Homo sapiens
ccttcctcccagtgc

SEQ ID NO: 1650329 - DNA, 15 bp, Homo sapiens
cttcctcccagtgca

SEQ ID NO: 1650330 - DNA, 15 bp, Homo sapiens
ttcctcccagtgcaa

SEQ ID NO: 1650331 - DNA, 15 bp, Homo sapiens
tcctcccagtgcaag

SEQ ID NO: 1650332 - DNA, 15 bp, Homo sapiens
cctcccagtgcaagc

SEQ ID NO: 1650333 - DNA, 15 bp, Homo sapiens
ctcccagtgcaagca

SEQ ID NO: 1650334 - DNA, 15 bp, Homo sapiens
tcccagtgcaagcag

SEQ ID NO: 1650335 - DNA, 15 bp, Homo sapiens
cccagtgcaagcagc

SEQ ID NO: 1650336 - DNA, 15 bp, Homo sapiens
ccagtgcaagcagca

SEQ ID NO: 1650337 - DNA, 15 bp, Homo sapiens
cagtgcaagcagcat

SEQ ID NO: 1650338 - DNA, 15 bp, Homo sapiens
agtgcaagcagcatt

SEQ ID NO: 1650339 - DNA, 15 bp, Homo sapiens
gtgcaagcagcattc

SEQ ID NO: 1650340 - DNA, 15 bp, Homo sapiens
tgcaagcagcattct

SEQ ID NO: 1650341 - DNA, 15 bp, Homo sapiens
gcaagcagcattctg

SEQ ID NO: 1650342 - DNA, 15 bp, Homo sapiens
caagcagcattctgt

SEQ ID NO: 1650343 - DNA, 15 bp, Homo sapiens
aagcagcattctgtt

SEQ ID NO: 1650344 - DNA, 15 bp, Homo sapiens
agcagcattctgttc

SEQ ID NO: 1650345 - DNA, 15 bp, Homo sapiens
gcagcattctgttcc

SEQ ID NO: 1650346 - DNA, 15 bp, Homo sapiens
cagcattctgttccc

SEQ ID NO: 1650347 - DNA, 15 bp, Homo sapiens
agcattctgttcccc

SEQ ID NO: 1650348 - DNA, 15 bp, Homo sapiens
gcattctgttcccct

SEQ ID NO: 1650349 - DNA, 15 bp, Homo sapiens
cattctgttccccta

SEQ ID NO: 1650350 - DNA, 15 bp, Homo sapiens
attctgttcccctag

SEQ ID NO: 1650351 - DNA, 15 bp, Homo sapiens
ttctgttcccctagt

SEQ ID NO: 1650352 - DNA, 15 bp, Homo sapiens
tctgttcccctagtg

SEQ ID NO: 1650353 - DNA, 15 bp, Homo sapiens
ctgttcccctagtgg

SEQ ID NO: 1650354 - DNA, 15 bp, Homo sapiens
tgttcccctagtgga

SEQ ID NO: 1650355 - DNA, 15 bp, Homo sapiens
gttcccctagtggac

SEQ ID NO: 1650356 - DNA, 15 bp, Homo sapiens
ttcccctagtggacc

SEQ ID NO: 1650357 - DNA, 15 bp, Homo sapiens
tcccctagtggacct

SEQ ID NO: 1650358 - DNA, 15 bp, Homo sapiens
cccctagtggaccta

SEQ ID NO: 1650359 - DNA, 15 bp, Homo sapiens
ccctagtggacctag

SEQ ID NO: 1650360 - DNA, 15 bp, Homo sapiens
cctagtggacctaga

SEQ ID NO: 1650361 - DNA, 15 bp, Homo sapiens
ctagtggacctagat

SEQ ID NO: 1650362 - DNA, 15 bp, Homo sapiens
tagtggacctagatc

SEQ ID NO: 1650363 - DNA, 15 bp, Homo sapiens
agtggacctagatcc

SEQ ID NO: 1650364 - DNA, 15 bp, Homo sapiens
gtggacctagatcca

SEQ ID NO: 1650365 - DNA, 15 bp, Homo sapiens
tggacctagatccat

SEQ ID NO: 1650366 - DNA, 15 bp, Homo sapiens
ggacctagatccatg

SEQ ID NO: 1650367 - DNA, 15 bp, Homo sapiens
gacctagatccatgc

SEQ ID NO: 1650368 - DNA, 15 bp, Homo sapiens
acctagatccatgca

SEQ ID NO: 1650369 - DNA, 15 bp, Homo sapiens
cctagatccatgcag

SEQ ID NO: 1650370 - DNA, 15 bp, Homo sapiens
ctagatccatgcaga

SEQ ID NO: 1650371 - DNA, 15 bp, Homo sapiens
tagatccatgcagat

SEQ ID NO: 1650372 - DNA, 15 bp, Homo sapiens
agatccatgcagatg

SEQ ID NO: 1650373 - DNA, 15 bp, Homo sapiens
gatccatgcagatgg

SEQ ID NO: 1650374 - DNA, 15 bp, Homo sapiens
atccatgcagatggt

SEQ ID NO: 1650375 - DNA, 15 bp, Homo sapiens
tccatgcagatggtt

SEQ ID NO: 1650376 - DNA, 15 bp, Homo sapiens
ccatgcagatggttt

SEQ ID NO: 1650377 - DNA, 15 bp, Homo sapiens
catgcagatggtttt

SEQ ID NO: 1650378 - DNA, 15 bp, Homo sapiens
atgcagatggttttt

SEQ ID NO: 1650379 - DNA, 15 bp, Homo sapiens
tgcagatggtttttc

SEQ ID NO: 1650380 - DNA, 15 bp, Homo sapiens
gcagatggtttttcc

SEQ ID NO: 1650381 - DNA, 15 bp, Homo sapiens
cagatggtttttccc

SEQ ID NO: 1650382 - DNA, 15 bp, Homo sapiens
agatggtttttcccc

SEQ ID NO: 1650383 - DNA, 15 bp, Homo sapiens
gatggtttttcccct

SEQ ID NO: 1650384 - DNA, 15 bp, Homo sapiens
atggtttttcccctc

SEQ ID NO: 1650385 - DNA, 15 bp, Homo sapiens
tggtttttcccctct

SEQ ID NO: 1650386 - DNA, 15 bp, Homo sapiens
ggtttttcccctctc

SEQ ID NO: 1650387 - DNA, 15 bp, Homo sapiens
gtttttcccctctct

SEQ ID NO: 1650388 - DNA, 15 bp, Homo sapiens
tttttcccctctctg

SEQ ID NO: 1650389 - DNA, 15 bp, Homo sapiens
ttttcccctctctga

SEQ ID NO: 1650390 - DNA, 15 bp, Homo sapiens
tttcccctctctgag

SEQ ID NO: 1650391 - DNA, 15 bp, Homo sapiens
ttcccctctctgagt

SEQ ID NO: 1650392 - DNA, 15 bp, Homo sapiens
tcccctctctgagta

SEQ ID NO: 1650393 - DNA, 15 bp, Homo sapiens
cccctctctgagtat

SEQ ID NO: 1650394 - DNA, 15 bp, Homo sapiens
ccctctctgagtatc

SEQ ID NO: 1650395 - DNA, 15 bp, Homo sapiens
cctctctgagtatct

SEQ ID NO: 1650396 - DNA, 15 bp, Homo sapiens
ctctctgagtatctc

SEQ ID NO: 1650397 - DNA, 15 bp, Homo sapiens
tctctgagtatctct

SEQ ID NO: 1650398 - DNA, 15 bp, Homo sapiens
ctctgagtatctcta

SEQ ID NO: 1650399 - DNA, 15 bp, Homo sapiens
tctgagtatctctag

SEQ ID NO: 1650400 - DNA, 15 bp, Homo sapiens
ctgagtatctctagc

SEQ ID NO: 1650401 - DNA, 15 bp, Homo sapiens
tgagtatctctagcc

SEQ ID NO: 1650402 - DNA, 15 bp, Homo sapiens
gagtatctctagcca

SEQ ID NO: 1650403 - DNA, 15 bp, Homo sapiens
agtatctctagccat

SEQ ID NO: 1650404 - DNA, 15 bp, Homo sapiens
gtatctctagccata

SEQ ID NO: 1650405 - DNA, 15 bp, Homo sapiens
tatctctagccatag

SEQ ID NO: 1650406 - DNA, 15 bp, Homo sapiens
atctctagccatagg

SEQ ID NO: 1650407 - DNA, 15 bp, Homo sapiens
tctctagccataggg

SEQ ID NO: 1650408 - DNA, 15 bp, Homo sapiens
ctctagccataggga

SEQ ID NO: 1650409 - DNA, 15 bp, Homo sapiens
tctagccatagggat

SEQ ID NO: 1650410 - DNA, 15 bp, Homo sapiens
ctagccatagggatg

SEQ ID NO: 1650411 - DNA, 15 bp, Homo sapiens
tagccatagggatgg

SEQ ID NO: 1650412 - DNA, 15 bp, Homo sapiens
agccatagggatggt

SEQ ID NO: 1650413 - DNA, 15 bp, Homo sapiens
gccatagggatggta

SEQ ID NO: 1650414 - DNA, 15 bp, Homo sapiens
ccatagggatggtag

SEQ ID NO: 1650415 - DNA, 15 bp, Homo sapiens
catagggatggtagt

SEQ ID NO: 1650416 - DNA, 15 bp, Homo sapiens
atagggatggtagtg

SEQ ID NO: 1650417 - DNA, 15 bp, Homo sapiens
tagggatggtagtga

SEQ ID NO: 1650418 - DNA, 15 bp, Homo sapiens
agggatggtagtgat

SEQ ID NO: 1650419 - DNA, 15 bp, Homo sapiens
gggatggtagtgatt

SEQ ID NO: 1650420 - DNA, 15 bp, Homo sapiens
ggatggtagtgattt

SEQ ID NO: 1650421 - DNA, 15 bp, Homo sapiens
gatggtagtgatttt

SEQ ID NO: 1650422 - DNA, 15 bp, Homo sapiens
atggtagtgatttta

SEQ ID NO: 1650423 - DNA, 15 bp, Homo sapiens
tggtagtgattttag

SEQ ID NO: 1650424 - DNA, 15 bp, Homo sapiens
ggtagtgattttagg

SEQ ID NO: 1650425 - DNA, 15 bp, Homo sapiens
gtagtgattttagga

SEQ ID NO: 1650426 - DNA, 15 bp, Homo sapiens
tagtgattttaggat

SEQ ID NO: 1650427 - DNA, 15 bp, Homo sapiens
agtgattttaggatg

SEQ ID NO: 1650428 - DNA, 15 bp, Homo sapiens
gtgattttaggatgt

SEQ ID NO: 1650429 - DNA, 15 bp, Homo sapiens
tgattttaggatgtt

SEQ ID NO: 1650430 - DNA, 15 bp, Homo sapiens
gattttaggatgttg

SEQ ID NO: 1650431 - DNA, 15 bp, Homo sapiens
attttaggatgttgt

SEQ ID NO: 1650432 - DNA, 15 bp, Homo sapiens
ttttaggatgttgtt

SEQ ID NO: 1650433 - DNA, 15 bp, Homo sapiens
tttaggatgttgttt

SEQ ID NO: 1650434 - DNA, 15 bp, Homo sapiens
ttaggatgttgtttt

SEQ ID NO: 1650435 - DNA, 15 bp, Homo sapiens
taggatgttgttttt

SEQ ID NO: 1650436 - DNA, 15 bp, Homo sapiens
aggatgttgtttttt

SEQ ID NO: 1650437 - DNA, 15 bp, Homo sapiens
ggatgttgttttttc

SEQ ID NO: 1650438 - DNA, 15 bp, Homo sapiens
gatgttgttttttct

SEQ ID NO: 1650439 - DNA, 15 bp, Homo sapiens
atgttgttttttctg

SEQ ID NO: 1650440 - DNA, 15 bp, Homo sapiens
tgttgttttttctgg

SEQ ID NO: 1650441 - DNA, 15 bp, Homo sapiens
gttgttttttctggg

SEQ ID NO: 1650442 - DNA, 15 bp, Homo sapiens
ttgttttttctgggt

SEQ ID NO: 1650443 - DNA, 15 bp, Homo sapiens
tgttttttctgggtt

SEQ ID NO: 1650444 - DNA, 15 bp, Homo sapiens
gttttttctgggttg

SEQ ID NO: 1650445 - DNA, 15 bp, Homo sapiens
ttttttctgggttga

SEQ ID NO: 1650446 - DNA, 15 bp, Homo sapiens
tttttctgggttgac

SEQ ID NO: 1650447 - DNA, 15 bp, Homo sapiens
ttttctgggttgact

SEQ ID NO: 1650448 - DNA, 15 bp, Homo sapiens
tttctgggttgactc

SEQ ID NO: 1650449 - DNA, 15 bp, Homo sapiens
ttctgggttgactcc

SEQ ID NO: 1650450 - DNA, 15 bp, Homo sapiens
tctgggttgactccc

SEQ ID NO: 1650451 - DNA, 15 bp, Homo sapiens
ctgggttgactcccc

SEQ ID NO: 1650452 - DNA, 15 bp, Homo sapiens
tgggttgactcccct

SEQ ID NO: 1650453 - DNA, 15 bp, Homo sapiens
gggttgactcccctc

SEQ ID NO: 1650454 - DNA, 15 bp, Homo sapiens
ggttgactcccctcc

SEQ ID NO: 1650455 - DNA, 15 bp, Homo sapiens
gttgactcccctccc

SEQ ID NO: 1650456 - DNA, 15 bp, Homo sapiens
ttgactcccctccct

SEQ ID NO: 1650457 - DNA, 15 bp, Homo sapiens
tgactcccctccctt

SEQ ID NO: 1650458 - DNA, 15 bp, Homo sapiens
gactcccctccctta

SEQ ID NO: 1650459 - DNA, 15 bp, Homo sapiens
actcccctcccttat

SEQ ID NO: 1650460 - DNA, 15 bp, Homo sapiens
ctcccctcccttatt

SEQ ID NO: 1650461 - DNA, 15 bp, Homo sapiens
tcccctcccttattt

SEQ ID NO: 1650462 - DNA, 15 bp, Homo sapiens
cccctcccttattta

SEQ ID NO: 1650463 - DNA, 15 bp, Homo sapiens
ccctcccttatttag

SEQ ID NO: 1650464 - DNA, 15 bp, Homo sapiens
cctcccttatttagc

SEQ ID NO: 1650465 - DNA, 15 bp, Homo sapiens
ctcccttatttagct

SEQ ID NO: 1650466 - DNA, 15 bp, Homo sapiens
tcccttatttagcta

SEQ ID NO: 1650467 - DNA, 15 bp, Homo sapiens
cccttatttagctac

SEQ ID NO: 1650468 - DNA, 15 bp, Homo sapiens
ccttatttagctact

SEQ ID NO: 1650469 - DNA, 15 bp, Homo sapiens
cttatttagctactc

SEQ ID NO: 1650470 - DNA, 15 bp, Homo sapiens
ttatttagctactca

SEQ ID NO: 1650471 - DNA, 15 bp, Homo sapiens
tatttagctactcat

SEQ ID NO: 1650472 - DNA, 15 bp, Homo sapiens
atttagctactcatc

SEQ ID NO: 1650473 - DNA, 15 bp, Homo sapiens
tttagctactcatct

SEQ ID NO: 1650474 - DNA, 15 bp, Homo sapiens
ttagctactcatctc

SEQ ID NO: 1650475 - DNA, 15 bp, Homo sapiens
tagctactcatctct

SEQ ID NO: 1650476 - DNA, 15 bp, Homo sapiens
agctactcatctctt

SEQ ID NO: 1650477 - DNA, 15 bp, Homo sapiens
gctactcatctcttc

SEQ ID NO: 1650478 - DNA, 15 bp, Homo sapiens
ctactcatctcttcc

SEQ ID NO: 1650479 - DNA, 15 bp, Homo sapiens
tactcatctcttcca

SEQ ID NO: 1650480 - DNA, 15 bp, Homo sapiens
actcatctcttccat

SEQ ID NO: 1650481 - DNA, 15 bp, Homo sapiens
ctcatctcttccatc

SEQ ID NO: 1650482 - DNA, 15 bp, Homo sapiens
tcatctcttccatca

SEQ ID NO: 1650483 - DNA, 15 bp, Homo sapiens
catctcttccatcat

SEQ ID NO: 1650484 - DNA, 15 bp, Homo sapiens
atctcttccatcatc

SEQ ID NO: 1650485 - DNA, 15 bp, Homo sapiens
tctcttccatcatct

SEQ ID NO: 1650486 - DNA, 15 bp, Homo sapiens
ctcttccatcatctg

SEQ ID NO: 1650487 - DNA, 15 bp, Homo sapiens
tcttccatcatctgt

SEQ ID NO: 1650488 - DNA, 15 bp, Homo sapiens
cttccatcatctgta

SEQ ID NO: 1650489 - DNA, 15 bp, Homo sapiens
ttccatcatctgtat

SEQ ID NO: 1650490 - DNA, 15 bp, Homo sapiens
tccatcatctgtatt

SEQ ID NO: 1650491 - DNA, 15 bp, Homo sapiens
ccatcatctgtatta

SEQ ID NO: 1650492 - DNA, 15 bp, Homo sapiens
catcatctgtattaa

SEQ ID NO: 1650493 - DNA, 15 bp, Homo sapiens
atcatctgtattaaa

SEQ ID NO: 1650494 - DNA, 15 bp, Homo sapiens
tcatctgtattaaat

SEQ ID NO: 1650495 - DNA, 15 bp, Homo sapiens
catctgtattaaatc

SEQ ID NO: 1650496 - DNA, 15 bp, Homo sapiens
atctgtattaaatcc

SEQ ID NO: 1650497 - DNA, 15 bp, Homo sapiens
tctgtattaaatcct

SEQ ID NO: 1650498 - DNA, 15 bp, Homo sapiens
ctgtattaaatcctc

SEQ ID NO: 1650499 - DNA, 15 bp, Homo sapiens
tgtattaaatcctct

SEQ ID NO: 1650500 - DNA, 15 bp, Homo sapiens
gtattaaatcctctc

SEQ ID NO: 1650501 - DNA, 15 bp, Homo sapiens
tattaaatcctctct

SEQ ID NO: 1650502 - DNA, 15 bp, Homo sapiens
attaaatcctctctg

SEQ ID NO: 1650503 - DNA, 15 bp, Homo sapiens
ttaaatcctctctgt

SEQ ID NO: 1650504 - DNA, 15 bp, Homo sapiens
taaatcctctctgtt

SEQ ID NO: 1650505 - DNA, 15 bp, Homo sapiens
aaatcctctctgttg

SEQ ID NO: 1650506 - DNA, 15 bp, Homo sapiens
aatcctctctgttga

SEQ ID NO: 1650507 - DNA, 15 bp, Homo sapiens
atcctctctgttgaa

SEQ ID NO: 1650508 - DNA, 15 bp, Homo sapiens
tcctctctgttgaat

SEQ ID NO: 1650509 - DNA, 15 bp, Homo sapiens
cctctctgttgaatg

SEQ ID NO: 1650510 - DNA, 15 bp, Homo sapiens
ctctctgttgaatgt

SEQ ID NO: 1650511 - DNA, 15 bp, Homo sapiens
tctctgttgaatgtg

SEQ ID NO: 1650512 - DNA, 15 bp, Homo sapiens
ctctgttgaatgtgc

SEQ ID NO: 1650513 - DNA, 15 bp, Homo sapiens
tctgttgaatgtgca

SEQ ID NO: 1650514 - DNA, 15 bp, Homo sapiens
ctgttgaatgtgcac

SEQ ID NO: 1650515 - DNA, 15 bp, Homo sapiens
tgttgaatgtgcaca

SEQ ID NO: 1650516 - DNA, 15 bp, Homo sapiens
gttgaatgtgcacag

SEQ ID NO: 1650517 - DNA, 15 bp, Homo sapiens
ttgaatgtgcacagt

SEQ ID NO: 1650518 - DNA, 15 bp, Homo sapiens
tgaatgtgcacagtg

SEQ ID NO: 1650519 - DNA, 15 bp, Homo sapiens
gaatgtgcacagtgg

SEQ ID NO: 1650520 - DNA, 15 bp, Homo sapiens
aatgtgcacagtggc

SEQ ID NO: 1650521 - DNA, 15 bp, Homo sapiens
atgtgcacagtggct

SEQ ID NO: 1650522 - DNA, 15 bp, Homo sapiens
tgtgcacagtggctc

SEQ ID NO: 1650523 - DNA, 15 bp, Homo sapiens
gtgcacagtggctca

SEQ ID NO: 1650524 - DNA, 15 bp, Homo sapiens
tgcacagtggctcac

SEQ ID NO: 1650525 - DNA, 15 bp, Homo sapiens
agtggctcacaccta

SEQ ID NO: 1650526 - DNA, 15 bp, Homo sapiens
tataatcccagcacc

SEQ ID NO: 1650527 - DNA, 15 bp, Homo sapiens
ataatcccagcacct

SEQ ID NO: 1650528 - DNA, 15 bp, Homo sapiens
taatcccagcacctt

SEQ ID NO: 1650529 - DNA, 15 bp, Homo sapiens
aatcccagcaccttt

SEQ ID NO: 1650530 - DNA, 15 bp, Homo sapiens
atcccagcacctttg

SEQ ID NO: 1650531 - DNA, 15 bp, Homo sapiens
tcccagcacctttgg

SEQ ID NO: 1650532 - DNA, 15 bp, Homo sapiens
cccagcacctttggg

SEQ ID NO: 1650533 - DNA, 15 bp, Homo sapiens
ccagcacctttgggg

SEQ ID NO: 1650534 - DNA, 15 bp, Homo sapiens
cagcacctttggggg

SEQ ID NO: 1650535 - DNA, 15 bp, Homo sapiens
agcacctttgggggt

SEQ ID NO: 1650536 - DNA, 15 bp, Homo sapiens
gcacctttgggggtc

SEQ ID NO: 1650537 - DNA, 15 bp, Homo sapiens
cacctttgggggtca

SEQ ID NO: 1650538 - DNA, 15 bp, Homo sapiens
acctttgggggtcaa

SEQ ID NO: 1650539 - DNA, 15 bp, Homo sapiens
cctttgggggtcaag

SEQ ID NO: 1650540 - DNA, 15 bp, Homo sapiens
ctttgggggtcaagg

SEQ ID NO: 1650541 - DNA, 15 bp, Homo sapiens
tttgggggtcaaggc

SEQ ID NO: 1650542 - DNA, 15 bp, Homo sapiens
ttgggggtcaaggca

SEQ ID NO: 1650543 - DNA, 15 bp, Homo sapiens
tgggggtcaaggcag

SEQ ID NO: 1650544 - DNA, 15 bp, Homo sapiens
gggggtcaaggcagg

SEQ ID NO: 1650545 - DNA, 15 bp, Homo sapiens
ggggtcaaggcagga

SEQ ID NO: 1650546 - DNA, 15 bp, Homo sapiens
gggtcaaggcaggag

SEQ ID NO: 1650547 - DNA, 15 bp, Homo sapiens
ggtcaaggcaggagg

SEQ ID NO: 1650548 - DNA, 15 bp, Homo sapiens
gtcaaggcaggagga

SEQ ID NO: 1650549 - DNA, 15 bp, Homo sapiens
tcaaggcaggaggat

SEQ ID NO: 1650550 - DNA, 15 bp, Homo sapiens
aaggcaggaggatcg

SEQ ID NO: 1650551 - DNA, 15 bp, Homo sapiens
gaggatcgcttgatt

SEQ ID NO: 1650552 - DNA, 15 bp, Homo sapiens
aggatcgcttgattc

SEQ ID NO: 1650553 - DNA, 15 bp, Homo sapiens
ggatcgcttgattcc

SEQ ID NO: 1650554 - DNA, 15 bp, Homo sapiens
gatcgcttgattcca

SEQ ID NO: 1650555 - DNA, 15 bp, Homo sapiens
atcgcttgattccag

SEQ ID NO: 1650556 - DNA, 15 bp, Homo sapiens
tcgcttgattccagg

SEQ ID NO: 1650557 - DNA, 15 bp, Homo sapiens
cgcttgattccagga

SEQ ID NO: 1650558 - DNA, 15 bp, Homo sapiens
gcttgattccaggag

SEQ ID NO: 1650559 - DNA, 15 bp, Homo sapiens
cttgattccaggagt

SEQ ID NO: 1650560 - DNA, 15 bp, Homo sapiens
ttgattccaggagtt

SEQ ID NO: 1650561 - DNA, 15 bp, Homo sapiens
tgattccaggagttg

SEQ ID NO: 1650562 - DNA, 15 bp, Homo sapiens
gattccaggagttgg

SEQ ID NO: 1650563 - DNA, 15 bp, Homo sapiens
attccaggagttgga

SEQ ID NO: 1650564 - DNA, 15 bp, Homo sapiens
ttccaggagttggag

SEQ ID NO: 1650565 - DNA, 15 bp, Homo sapiens
tccaggagttggaga

SEQ ID NO: 1650566 - DNA, 15 bp, Homo sapiens
ccaggagttggagac

SEQ ID NO: 1650567 - DNA, 15 bp, Homo sapiens
agttggagaccagca

SEQ ID NO: 1650568 - DNA, 15 bp, Homo sapiens
gttggagaccagcat

SEQ ID NO: 1650569 - DNA, 15 bp, Homo sapiens
ttggagaccagcatg

SEQ ID NO: 1650570 - DNA, 15 bp, Homo sapiens
tggagaccagcatgg

SEQ ID NO: 1650571 - DNA, 15 bp, Homo sapiens
ggagaccagcatggg

SEQ ID NO: 1650572 - DNA, 15 bp, Homo sapiens
gagaccagcatgggt

SEQ ID NO: 1650573 - DNA, 15 bp, Homo sapiens
agaccagcatgggta

SEQ ID NO: 1650574 - DNA, 15 bp, Homo sapiens
gaccagcatgggtaa

SEQ ID NO: 1650575 - DNA, 15 bp, Homo sapiens
accagcatgggtaac

SEQ ID NO: 1650576 - DNA, 15 bp, Homo sapiens
ccagcatgggtaaca

SEQ ID NO: 1650577 - DNA, 15 bp, Homo sapiens
cagcatgggtaacag

SEQ ID NO: 1650578 - DNA, 15 bp, Homo sapiens
agcatgggtaacaga

SEQ ID NO: 1650579 - DNA, 15 bp, Homo sapiens
gcatgggtaacagag

SEQ ID NO: 1650580 - DNA, 15 bp, Homo sapiens
catgggtaacagagt

SEQ ID NO: 1650581 - DNA, 15 bp, Homo sapiens
atgggtaacagagtg

SEQ ID NO: 1650582 - DNA, 15 bp, Homo sapiens
tgggtaacagagtga

SEQ ID NO: 1650583 - DNA, 15 bp, Homo sapiens
gggtaacagagtgag

SEQ ID NO: 1650584 - DNA, 15 bp, Homo sapiens
ggtaacagagtgaga

SEQ ID NO: 1650585 - DNA, 15 bp, Homo sapiens
gtaacagagtgagac

SEQ ID NO: 1650586 - DNA, 15 bp, Homo sapiens
taacagagtgagacc

SEQ ID NO: 1650587 - DNA, 15 bp, Homo sapiens
acagagtgagacctt

SEQ ID NO: 1650588 - DNA, 15 bp, Homo sapiens
cagagtgagacctta

SEQ ID NO: 1650589 - DNA, 15 bp, Homo sapiens
agagtgagaccttat

SEQ ID NO: 1650590 - DNA, 15 bp, Homo sapiens
gagtgagaccttatc

SEQ ID NO: 1650591 - DNA, 15 bp, Homo sapiens
agtgagaccttatct

SEQ ID NO: 1650592 - DNA, 15 bp, Homo sapiens
gtgagaccttatctc

SEQ ID NO: 1650593 - DNA, 15 bp, Homo sapiens
tgagaccttatctct

SEQ ID NO: 1650594 - DNA, 15 bp, Homo sapiens
gagaccttatctctc

SEQ ID NO: 1650595 - DNA, 15 bp, Homo sapiens
agaccttatctctcc

SEQ ID NO: 1650596 - DNA, 15 bp, Homo sapiens
gaccttatctctcct

SEQ ID NO: 1650597 - DNA, 15 bp, Homo sapiens
accttatctctccta

SEQ ID NO: 1650598 - DNA, 15 bp, Homo sapiens
ccttatctctcctaa

SEQ ID NO: 1650599 - DNA, 15 bp, Homo sapiens
cttatctctcctaaa

SEQ ID NO: 1650600 - DNA, 15 bp, Homo sapiens
ttatctctcctaaaa

SEQ ID NO: 1650601 - DNA, 15 bp, Homo sapiens
tatctctcctaaaaa

SEQ ID NO: 1650602 - DNA, 15 bp, Homo sapiens
atctctcctaaaaat

SEQ ID NO: 1650603 - DNA, 15 bp, Homo sapiens
tctctcctaaaaata

SEQ ID NO: 1650604 - DNA, 15 bp, Homo sapiens
ctctcctaaaaataa

SEQ ID NO: 1650605 - DNA, 15 bp, Homo sapiens
tctcctaaaaataaa

SEQ ID NO: 1650606 - DNA, 15 bp, Homo sapiens
ctcctaaaaataaaa

SEQ ID NO: 1650607 - DNA, 15 bp, Homo sapiens
tcctaaaaataaaaa

SEQ ID NO: 1650608 - DNA, 15 bp, Homo sapiens
cctaaaaataaaaat

SEQ ID NO: 1650609 - DNA, 15 bp, Homo sapiens
ctaaaaataaaaata

SEQ ID NO: 1650610 - DNA, 15 bp, Homo sapiens
taaaaataaaaataa

SEQ ID NO: 1650611 - DNA, 15 bp, Homo sapiens
ataaataaataaatt

SEQ ID NO: 1650612 - DNA, 15 bp, Homo sapiens
taaataaataaattt

SEQ ID NO: 1650613 - DNA, 15 bp, Homo sapiens
aaataaataaatttt

SEQ ID NO: 1650614 - DNA, 15 bp, Homo sapiens
aataaataaatttta

SEQ ID NO: 1650615 - DNA, 15 bp, Homo sapiens
ataaataaattttaa

SEQ ID NO: 1650616 - DNA, 15 bp, Homo sapiens
taaataaattttaaa

SEQ ID NO: 1650617 - DNA, 15 bp, Homo sapiens
aaataaattttaaaa

SEQ ID NO: 1650618 - DNA, 15 bp, Homo sapiens
aataaattttaaaaa

SEQ ID NO: 1650619 - DNA, 15 bp, Homo sapiens
ataaattttaaaaaa

SEQ ID NO: 1650620 - DNA, 15 bp, Homo sapiens
taaattttaaaaaag

SEQ ID NO: 1650621 - DNA, 15 bp, Homo sapiens
aaattttaaaaaagc

SEQ ID NO: 1650622 - DNA, 15 bp, Homo sapiens
aattttaaaaaagct

SEQ ID NO: 1650623 - DNA, 15 bp, Homo sapiens
attttaaaaaagctg

SEQ ID NO: 1650624 - DNA, 15 bp, Homo sapiens
ttttaaaaaagctgg

SEQ ID NO: 1650625 - DNA, 15 bp, Homo sapiens
tttaaaaaagctggg

SEQ ID NO: 1650626 - DNA, 15 bp, Homo sapiens
ttaaaaaagctgggt

SEQ ID NO: 1650627 - DNA, 15 bp, Homo sapiens
taaaaaagctgggtg

SEQ ID NO: 1650628 - DNA, 15 bp, Homo sapiens
aaaaaagctgggtgt

SEQ ID NO: 1650629 - DNA, 15 bp, Homo sapiens
aaaaagctgggtgtg

SEQ ID NO: 1650630 - DNA, 15 bp, Homo sapiens
aaaagctgggtgtga

SEQ ID NO: 1650631 - DNA, 15 bp, Homo sapiens
aaagctgggtgtgat

SEQ ID NO: 1650632 - DNA, 15 bp, Homo sapiens
aagctgggtgtgatg

SEQ ID NO: 1650633 - DNA, 15 bp, Homo sapiens
gctgggtgtgatggt

SEQ ID NO: 1650634 - DNA, 15 bp, Homo sapiens
ctgggtgtgatggtg

SEQ ID NO: 1650635 - DNA, 15 bp, Homo sapiens
tgggtgtgatggtgc

SEQ ID NO: 1650636 - DNA, 15 bp, Homo sapiens
gggtgtgatggtgcg

SEQ ID NO: 1650637 - DNA, 15 bp, Homo sapiens
ggtgtgatggtgcgc

SEQ ID NO: 1650638 - DNA, 15 bp, Homo sapiens
gtgtgatggtgcgct

SEQ ID NO: 1650639 - DNA, 15 bp, Homo sapiens
tgtgatggtgcgctc

SEQ ID NO: 1650640 - DNA, 15 bp, Homo sapiens
gtgatggtgcgctcc

SEQ ID NO: 1650641 - DNA, 15 bp, Homo sapiens
tgatggtgcgctcct

SEQ ID NO: 1650642 - DNA, 15 bp, Homo sapiens
gatggtgcgctcctg

SEQ ID NO: 1650643 - DNA, 15 bp, Homo sapiens
atggtgcgctcctgt

SEQ ID NO: 1650644 - DNA, 15 bp, Homo sapiens
tggtgcgctcctgta

SEQ ID NO: 1650645 - DNA, 15 bp, Homo sapiens
ggtgcgctcctgtag

SEQ ID NO: 1650646 - DNA, 15 bp, Homo sapiens
gtgcgctcctgtagt

SEQ ID NO: 1650647 - DNA, 15 bp, Homo sapiens
tgcgctcctgtagtc

SEQ ID NO: 1650648 - DNA, 15 bp, Homo sapiens
gcgctcctgtagtcc

SEQ ID NO: 1650649 - DNA, 15 bp, Homo sapiens
cgctcctgtagtccc

SEQ ID NO: 1650650 - DNA, 15 bp, Homo sapiens
gtcccagctactcaa

SEQ ID NO: 1650651 - DNA, 15 bp, Homo sapiens
agctactcaagaggc

SEQ ID NO: 1650652 - DNA, 15 bp, Homo sapiens
gctactcaagaggct

SEQ ID NO: 1650653 - DNA, 15 bp, Homo sapiens
ctactcaagaggctg

SEQ ID NO: 1650654 - DNA, 15 bp, Homo sapiens
tactcaagaggctga

SEQ ID NO: 1650655 - DNA, 15 bp, Homo sapiens
actcaagaggctgag

SEQ ID NO: 1650656 - DNA, 15 bp, Homo sapiens
ctcaagaggctgagg

SEQ ID NO: 1650657 - DNA, 15 bp, Homo sapiens
tcaagaggctgaggt

SEQ ID NO: 1650658 - DNA, 15 bp, Homo sapiens
caagaggctgaggtg

SEQ ID NO: 1650659 - DNA, 15 bp, Homo sapiens
aagaggctgaggtgg

SEQ ID NO: 1650660 - DNA, 15 bp, Homo sapiens
tgaggtgggatgatc

SEQ ID NO: 1650661 - DNA, 15 bp, Homo sapiens
gaggtgggatgatca

SEQ ID NO: 1650662 - DNA, 15 bp, Homo sapiens
aggtgggatgatcac

SEQ ID NO: 1650663 - DNA, 15 bp, Homo sapiens
ggtgggatgatcact

SEQ ID NO: 1650664 - DNA, 15 bp, Homo sapiens
gtgggatgatcactt

SEQ ID NO: 1650665 - DNA, 15 bp, Homo sapiens
tgggatgatcacttg

SEQ ID NO: 1650666 - DNA, 15 bp, Homo sapiens
gggatgatcacttga

SEQ ID NO: 1650667 - DNA, 15 bp, Homo sapiens
ggatgatcacttgat

SEQ ID NO: 1650668 - DNA, 15 bp, Homo sapiens
gatgatcacttgatc

SEQ ID NO: 1650669 - DNA, 15 bp, Homo sapiens
atgatcacttgatcc

SEQ ID NO: 1650670 - DNA, 15 bp, Homo sapiens
tgatcacttgatcct

SEQ ID NO: 1650671 - DNA, 15 bp, Homo sapiens
gatcacttgatccta

SEQ ID NO: 1650672 - DNA, 15 bp, Homo sapiens
atcacttgatcctag

SEQ ID NO: 1650673 - DNA, 15 bp, Homo sapiens
tcacttgatcctagg

SEQ ID NO: 1650674 - DNA, 15 bp, Homo sapiens
cacttgatcctagga

SEQ ID NO: 1650675 - DNA, 15 bp, Homo sapiens
acttgatcctaggag

SEQ ID NO: 1650676 - DNA, 15 bp, Homo sapiens
cttgatcctaggagg

SEQ ID NO: 1650677 - DNA, 15 bp, Homo sapiens
ttgatcctaggaggt

SEQ ID NO: 1650678 - DNA, 15 bp, Homo sapiens
tgatcctaggaggtc

SEQ ID NO: 1650679 - DNA, 15 bp, Homo sapiens
gatcctaggaggtca

SEQ ID NO: 1650680 - DNA, 15 bp, Homo sapiens
atcctaggaggtcaa

SEQ ID NO: 1650681 - DNA, 15 bp, Homo sapiens
tcctaggaggtcaag

SEQ ID NO: 1650682 - DNA, 15 bp, Homo sapiens
aggtcaaggctgcaa

SEQ ID NO: 1650683 - DNA, 15 bp, Homo sapiens
ggtcaaggctgcaat

SEQ ID NO: 1650684 - DNA, 15 bp, Homo sapiens
gtcaaggctgcaatg

SEQ ID NO: 1650685 - DNA, 15 bp, Homo sapiens
tcaaggctgcaatga

SEQ ID NO: 1650686 - DNA, 15 bp, Homo sapiens
caaggctgcaatgag

SEQ ID NO: 1650687 - DNA, 15 bp, Homo sapiens
aaggctgcaatgagc

SEQ ID NO: 1650688 - DNA, 15 bp, Homo sapiens
aggctgcaatgagct

SEQ ID NO: 1650689 - DNA, 15 bp, Homo sapiens
ggctgcaatgagctg

SEQ ID NO: 1650690 - DNA, 15 bp, Homo sapiens
gctgcaatgagctgt

SEQ ID NO: 1650691 - DNA, 15 bp, Homo sapiens
ctgcaatgagctgtg

SEQ ID NO: 1650692 - DNA, 15 bp, Homo sapiens
tgcaatgagctgtga

SEQ ID NO: 1650693 - DNA, 15 bp, Homo sapiens
gcaatgagctgtgat

SEQ ID NO: 1650694 - DNA, 15 bp, Homo sapiens
caatgagctgtgatc

SEQ ID NO: 1650695 - DNA, 15 bp, Homo sapiens
aatgagctgtgatca

SEQ ID NO: 1650696 - DNA, 15 bp, Homo sapiens
atgagctgtgatcac

SEQ ID NO: 1650697 - DNA, 15 bp, Homo sapiens
tgagctgtgatcacg

SEQ ID NO: 1650698 - DNA, 15 bp, Homo sapiens
gagctgtgatcacgc

SEQ ID NO: 1650699 - DNA, 15 bp, Homo sapiens
agctgtgatcacgcc

SEQ ID NO: 1650700 - DNA, 15 bp, Homo sapiens
gctgtgatcacgcca

SEQ ID NO: 1650701 - DNA, 15 bp, Homo sapiens
ctgtgatcacgccac

SEQ ID NO: 1650702 - DNA, 15 bp, Homo sapiens
tgtgatcacgccact

SEQ ID NO: 1650703 - DNA, 15 bp, Homo sapiens
gtgatcacgccactg

SEQ ID NO: 1650704 - DNA, 15 bp, Homo sapiens
tgatcacgccactgc

SEQ ID NO: 1650705 - DNA, 15 bp, Homo sapiens
gatcacgccactgct

SEQ ID NO: 1650706 - DNA, 15 bp, Homo sapiens
atcacgccactgctt

SEQ ID NO: 1650707 - DNA, 15 bp, Homo sapiens
tcacgccactgcttt

SEQ ID NO: 1650708 - DNA, 15 bp, Homo sapiens
cacgccactgctttc

SEQ ID NO: 1650709 - DNA, 15 bp, Homo sapiens
acgccactgctttcc

SEQ ID NO: 1650710 - DNA, 15 bp, Homo sapiens
cgccactgctttcca

SEQ ID NO: 1650711 - DNA, 15 bp, Homo sapiens
gccactgctttccag

SEQ ID NO: 1650712 - DNA, 15 bp, Homo sapiens
ccactgctttccagc

SEQ ID NO: 1650713 - DNA, 15 bp, Homo sapiens
cactgctttccagcc

SEQ ID NO: 1650714 - DNA, 15 bp, Homo sapiens
actgctttccagccc

SEQ ID NO: 1650715 - DNA, 15 bp, Homo sapiens
ctgctttccagccca

SEQ ID NO: 1650716 - DNA, 15 bp, Homo sapiens
tgctttccagcccag

SEQ ID NO: 1650717 - DNA, 15 bp, Homo sapiens
gctttccagcccagc

SEQ ID NO: 1650718 - DNA, 15 bp, Homo sapiens
ctttccagcccagca

SEQ ID NO: 1650719 - DNA, 15 bp, Homo sapiens
tttccagcccagcag

SEQ ID NO: 1650720 - DNA, 15 bp, Homo sapiens
ttccagcccagcagc

SEQ ID NO: 1650721 - DNA, 15 bp, Homo sapiens
tccagcccagcagcc

SEQ ID NO: 1650722 - DNA, 15 bp, Homo sapiens
ccagcccagcagccc

SEQ ID NO: 1650723 - DNA, 15 bp, Homo sapiens
cagcccagcagccca

SEQ ID NO: 1650724 - DNA, 15 bp, Homo sapiens
agcccagcagcccag

SEQ ID NO: 1650725 - DNA, 15 bp, Homo sapiens
gcccagcagcccagt

SEQ ID NO: 1650726 - DNA, 15 bp, Homo sapiens
cccagcagcccagtc

SEQ ID NO: 1650727 - DNA, 15 bp, Homo sapiens
ccagcagcccagtct

SEQ ID NO: 1650728 - DNA, 15 bp, Homo sapiens
cagcagcccagtcta

SEQ ID NO: 1650729 - DNA, 15 bp, Homo sapiens
agcagcccagtctag

SEQ ID NO: 1650730 - DNA, 15 bp, Homo sapiens
gcagcccagtctagg

SEQ ID NO: 1650731 - DNA, 15 bp, Homo sapiens
cagcccagtctaggc

SEQ ID NO: 1650732 - DNA, 15 bp, Homo sapiens
agcccagtctaggca

SEQ ID NO: 1650733 - DNA, 15 bp, Homo sapiens
gcccagtctaggcaa

SEQ ID NO: 1650734 - DNA, 15 bp, Homo sapiens
cccagtctaggcaac

SEQ ID NO: 1650735 - DNA, 15 bp, Homo sapiens
ccagtctaggcaaca

SEQ ID NO: 1650736 - DNA, 15 bp, Homo sapiens
cagtctaggcaacag

SEQ ID NO: 1650737 - DNA, 15 bp, Homo sapiens
agtctaggcaacaga

SEQ ID NO: 1650738 - DNA, 15 bp, Homo sapiens
gtctaggcaacagag

SEQ ID NO: 1650739 - DNA, 15 bp, Homo sapiens
tctaggcaacagagc

SEQ ID NO: 1650740 - DNA, 15 bp, Homo sapiens
ctaggcaacagagcg

SEQ ID NO: 1650741 - DNA, 15 bp, Homo sapiens
taggcaacagagcga

SEQ ID NO: 1650742 - DNA, 15 bp, Homo sapiens
aggcaacagagcgag

SEQ ID NO: 1650743 - DNA, 15 bp, Homo sapiens
gcaacagagcgagat

SEQ ID NO: 1650744 - DNA, 15 bp, Homo sapiens
caacagagcgagatg

SEQ ID NO: 1650745 - DNA, 15 bp, Homo sapiens
aacagagcgagatgt

SEQ ID NO: 1650746 - DNA, 15 bp, Homo sapiens
acagagcgagatgtc

SEQ ID NO: 1650747 - DNA, 15 bp, Homo sapiens
cagagcgagatgtct

SEQ ID NO: 1650748 - DNA, 15 bp, Homo sapiens
agagcgagatgtctt

SEQ ID NO: 1650749 - DNA, 15 bp, Homo sapiens
gagcgagatgtctta

SEQ ID NO: 1650750 - DNA, 15 bp, Homo sapiens
agcgagatgtcttaa

SEQ ID NO: 1650751 - DNA, 15 bp, Homo sapiens
gcgagatgtcttaaa

SEQ ID NO: 1650752 - DNA, 15 bp, Homo sapiens
cgagatgtcttaaaa

SEQ ID NO: 1650753 - DNA, 15 bp, Homo sapiens
gagatgtcttaaaaa

SEQ ID NO: 1650754 - DNA, 15 bp, Homo sapiens
agatgtcttaaaaaa

SEQ ID NO: 1650755 - DNA, 15 bp, Homo sapiens
gatgtcttaaaaaaa

SEQ ID NO: 1650756 - DNA, 15 bp, Homo sapiens
aaaaaaaaaagaatc

SEQ ID NO: 1650757 - DNA, 15 bp, Homo sapiens
aaaaaaaaagaatcc

SEQ ID NO: 1650758 - DNA, 15 bp, Homo sapiens
aaaaaaaagaatcct

SEQ ID NO: 1650759 - DNA, 15 bp, Homo sapiens
aaaaaaagaatcctc

SEQ ID NO: 1650760 - DNA, 15 bp, Homo sapiens
aaaaaagaatcctct

SEQ ID NO: 1650761 - DNA, 15 bp, Homo sapiens
aaaaagaatcctctc

SEQ ID NO: 1650762 - DNA, 15 bp, Homo sapiens
aaaagaatcctctct

SEQ ID NO: 1650763 - DNA, 15 bp, Homo sapiens
aaagaatcctctctg

SEQ ID NO: 1650764 - DNA, 15 bp, Homo sapiens
aagaatcctctctgt

SEQ ID NO: 1650765 - DNA, 15 bp, Homo sapiens
agaatcctctctgtt

SEQ ID NO: 1650766 - DNA, 15 bp, Homo sapiens
gaatcctctctgttt

SEQ ID NO: 1650767 - DNA, 15 bp, Homo sapiens
aatcctctctgttta

SEQ ID NO: 1650768 - DNA, 15 bp, Homo sapiens
atcctctctgtttaa

SEQ ID NO: 1650769 - DNA, 15 bp, Homo sapiens
tcctctctgtttaaa

SEQ ID NO: 1650770 - DNA, 15 bp, Homo sapiens
cctctctgtttaaaa

SEQ ID NO: 1650771 - DNA, 15 bp, Homo sapiens
ctctctgtttaaaat

SEQ ID NO: 1650772 - DNA, 15 bp, Homo sapiens
tctctgtttaaaatg

SEQ ID NO: 1650773 - DNA, 15 bp, Homo sapiens
ctctgtttaaaatgc

SEQ ID NO: 1650774 - DNA, 15 bp, Homo sapiens
tctgtttaaaatgcc

SEQ ID NO: 1650775 - DNA, 15 bp, Homo sapiens
ctgtttaaaatgcct

SEQ ID NO: 1650776 - DNA, 15 bp, Homo sapiens
tgtttaaaatgcctg

SEQ ID NO: 1650777 - DNA, 15 bp, Homo sapiens
gtttaaaatgcctgg

SEQ ID NO: 1650778 - DNA, 15 bp, Homo sapiens
tttaaaatgcctggt

SEQ ID NO: 1650779 - DNA, 15 bp, Homo sapiens
ttaaaatgcctggtc

SEQ ID NO: 1650780 - DNA, 15 bp, Homo sapiens
taaaatgcctggtct

SEQ ID NO: 1650781 - DNA, 15 bp, Homo sapiens
aaaatgcctggtcta

SEQ ID NO: 1650782 - DNA, 15 bp, Homo sapiens
aaatgcctggtctag

SEQ ID NO: 1650783 - DNA, 15 bp, Homo sapiens
aatgcctggtctaga

SEQ ID NO: 1650784 - DNA, 15 bp, Homo sapiens
atgcctggtctagaa

SEQ ID NO: 1650785 - DNA, 15 bp, Homo sapiens
tgcctggtctagaag

SEQ ID NO: 1650786 - DNA, 15 bp, Homo sapiens
gcctggtctagaagg

SEQ ID NO: 1650787 - DNA, 15 bp, Homo sapiens
cctggtctagaaggg

SEQ ID NO: 1650788 - DNA, 15 bp, Homo sapiens
ctggtctagaagggt

SEQ ID NO: 1650789 - DNA, 15 bp, Homo sapiens
tggtctagaagggtt

SEQ ID NO: 1650790 - DNA, 15 bp, Homo sapiens
ggtctagaagggttt

SEQ ID NO: 1650791 - DNA, 15 bp, Homo sapiens
gtctagaagggtttc

SEQ ID NO: 1650792 - DNA, 15 bp, Homo sapiens
tctagaagggtttct

SEQ ID NO: 1650793 - DNA, 15 bp, Homo sapiens
ctagaagggtttctg

SEQ ID NO: 1650794 - DNA, 15 bp, Homo sapiens
tagaagggtttctgc

SEQ ID NO: 1650795 - DNA, 15 bp, Homo sapiens
agaagggtttctgct

SEQ ID NO: 1650796 - DNA, 15 bp, Homo sapiens
gaagggtttctgctc

SEQ ID NO: 1650797 - DNA, 15 bp, Homo sapiens
aagggtttctgctct

SEQ ID NO: 1650798 - DNA, 15 bp, Homo sapiens
agggtttctgctctc

SEQ ID NO: 1650799 - DNA, 15 bp, Homo sapiens
gggtttctgctctcc

SEQ ID NO: 1650800 - DNA, 15 bp, Homo sapiens
ggtttctgctctcct

SEQ ID NO: 1650801 - DNA, 15 bp, Homo sapiens
gtttctgctctcctt

SEQ ID NO: 1650802 - DNA, 15 bp, Homo sapiens
tttctgctctcctta

SEQ ID NO: 1650803 - DNA, 15 bp, Homo sapiens
ttctgctctccttac

SEQ ID NO: 1650804 - DNA, 15 bp, Homo sapiens
tctgctctccttact

SEQ ID NO: 1650805 - DNA, 15 bp, Homo sapiens
ctgctctccttacta

SEQ ID NO: 1650806 - DNA, 15 bp, Homo sapiens
tgctctccttactag

SEQ ID NO: 1650807 - DNA, 15 bp, Homo sapiens
gctctccttactagg

SEQ ID NO: 1650808 - DNA, 15 bp, Homo sapiens
ctctccttactaggc

SEQ ID NO: 1650809 - DNA, 15 bp, Homo sapiens
tctccttactaggcc

SEQ ID NO: 1650810 - DNA, 15 bp, Homo sapiens
ctccttactaggccc

SEQ ID NO: 1650811 - DNA, 15 bp, Homo sapiens
tccttactaggccct

SEQ ID NO: 1650812 - DNA, 15 bp, Homo sapiens
ccttactaggcccta

SEQ ID NO: 1650813 - DNA, 15 bp, Homo sapiens
cttactaggccctaa

SEQ ID NO: 1650814 - DNA, 15 bp, Homo sapiens
ttactaggccctaac

SEQ ID NO: 1650815 - DNA, 15 bp, Homo sapiens
tactaggccctaact

SEQ ID NO: 1650816 - DNA, 15 bp, Homo sapiens
actaggccctaacta

SEQ ID NO: 1650817 - DNA, 15 bp, Homo sapiens
ctaggccctaactag

SEQ ID NO: 1650818 - DNA, 15 bp, Homo sapiens
taggccctaactagt

SEQ ID NO: 1650819 - DNA, 15 bp, Homo sapiens
aggccctaactagta

SEQ ID NO: 1650820 - DNA, 15 bp, Homo sapiens
ggccctaactagtac

SEQ ID NO: 1650821 - DNA, 15 bp, Homo sapiens
gccctaactagtaca

SEQ ID NO: 1650822 - DNA, 15 bp, Homo sapiens
ccctaactagtacaa

SEQ ID NO: 1650823 - DNA, 15 bp, Homo sapiens
cctaactagtacaaa

SEQ ID NO: 1650824 - DNA, 15 bp, Homo sapiens
ctaactagtacaaac

SEQ ID NO: 1650825 - DNA, 15 bp, Homo sapiens
taactagtacaaaca

SEQ ID NO: 1650826 - DNA, 15 bp, Homo sapiens
aactagtacaaacag

SEQ ID NO: 1650827 - DNA, 15 bp, Homo sapiens
actagtacaaacagg

SEQ ID NO: 1650828 - DNA, 15 bp, Homo sapiens
ctagtacaaacagga

SEQ ID NO: 1650829 - DNA, 15 bp, Homo sapiens
tagtacaaacaggaa

SEQ ID NO: 1650830 - DNA, 15 bp, Homo sapiens
agtacaaacaggaat

SEQ ID NO: 1650831 - DNA, 15 bp, Homo sapiens
gtacaaacaggaatt

SEQ ID NO: 1650832 - DNA, 15 bp, Homo sapiens
tacaaacaggaatta

SEQ ID NO: 1650833 - DNA, 15 bp, Homo sapiens
acaaacaggaattac

SEQ ID NO: 1650834 - DNA, 15 bp, Homo sapiens
caaacaggaattaca

SEQ ID NO: 1650835 - DNA, 15 bp, Homo sapiens
aaacaggaattacat

SEQ ID NO: 1650836 - DNA, 15 bp, Homo sapiens
aacaggaattacata

SEQ ID NO: 1650837 - DNA, 15 bp, Homo sapiens
acaggaattacatag

SEQ ID NO: 1650838 - DNA, 15 bp, Homo sapiens
caggaattacatagt

SEQ ID NO: 1650839 - DNA, 15 bp, Homo sapiens
aggaattacatagta

SEQ ID NO: 1650840 - DNA, 15 bp, Homo sapiens
ggaattacatagtag

SEQ ID NO: 1650841 - DNA, 15 bp, Homo sapiens
gaattacatagtagt

SEQ ID NO: 1650842 - DNA, 15 bp, Homo sapiens
aattacatagtagta

SEQ ID NO: 1650843 - DNA, 15 bp, Homo sapiens
attacatagtagtaa

SEQ ID NO: 1650844 - DNA, 15 bp, Homo sapiens
ttacatagtagtaag

SEQ ID NO: 1650845 - DNA, 15 bp, Homo sapiens
tacatagtagtaaga

SEQ ID NO: 1650846 - DNA, 15 bp, Homo sapiens
acatagtagtaagaa

SEQ ID NO: 1650847 - DNA, 15 bp, Homo sapiens
catagtagtaagaaa

SEQ ID NO: 1650848 - DNA, 15 bp, Homo sapiens
atagtagtaagaaac

SEQ ID NO: 1650849 - DNA, 15 bp, Homo sapiens
tagtagtaagaaaca

SEQ ID NO: 1650850 - DNA, 15 bp, Homo sapiens
agtagtaagaaacaa

SEQ ID NO: 1650851 - DNA, 15 bp, Homo sapiens
gtagtaagaaacaag

SEQ ID NO: 1650852 - DNA, 15 bp, Homo sapiens
tagtaagaaacaagt

SEQ ID NO: 1650853 - DNA, 15 bp, Homo sapiens
agtaagaaacaagtg

SEQ ID NO: 1650854 - DNA, 15 bp, Homo sapiens
gtaagaaacaagtgc

SEQ ID NO: 1650855 - DNA, 15 bp, Homo sapiens
taagaaacaagtgct

SEQ ID NO: 1650856 - DNA, 15 bp, Homo sapiens
aagaaacaagtgctg

SEQ ID NO: 1650857 - DNA, 15 bp, Homo sapiens
agaaacaagtgctga

SEQ ID NO: 1650858 - DNA, 15 bp, Homo sapiens
gaaacaagtgctgaa

SEQ ID NO: 1650859 - DNA, 15 bp, Homo sapiens
aaacaagtgctgaaa

SEQ ID NO: 1650860 - DNA, 15 bp, Homo sapiens
aacaagtgctgaaat

SEQ ID NO: 1650861 - DNA, 15 bp, Homo sapiens
acaagtgctgaaatc

SEQ ID NO: 1650862 - DNA, 15 bp, Homo sapiens
caagtgctgaaatca

SEQ ID NO: 1650863 - DNA, 15 bp, Homo sapiens
aagtgctgaaatcag

SEQ ID NO: 1650864 - DNA, 15 bp, Homo sapiens
agtgctgaaatcagg

SEQ ID NO: 1650865 - DNA, 15 bp, Homo sapiens
gtgctgaaatcaggc

SEQ ID NO: 1650866 - DNA, 15 bp, Homo sapiens
tgctgaaatcaggca

SEQ ID NO: 1650867 - DNA, 15 bp, Homo sapiens
gctgaaatcaggcag

SEQ ID NO: 1650868 - DNA, 15 bp, Homo sapiens
ctgaaatcaggcaga

SEQ ID NO: 1650869 - DNA, 15 bp, Homo sapiens
tgaaatcaggcagat

SEQ ID NO: 1650870 - DNA, 15 bp, Homo sapiens
gaaatcaggcagatg

SEQ ID NO: 1650871 - DNA, 15 bp, Homo sapiens
aaatcaggcagatgt

SEQ ID NO: 1650872 - DNA, 15 bp, Homo sapiens
aatcaggcagatgtg

SEQ ID NO: 1650873 - DNA, 15 bp, Homo sapiens
atcaggcagatgtgg

SEQ ID NO: 1650874 - DNA, 15 bp, Homo sapiens
tcaggcagatgtggg

SEQ ID NO: 1650875 - DNA, 15 bp, Homo sapiens
caggcagatgtgggc

SEQ ID NO: 1650876 - DNA, 15 bp, Homo sapiens
aggcagatgtgggct

SEQ ID NO: 1650877 - DNA, 15 bp, Homo sapiens
ggcagatgtgggctt

SEQ ID NO: 1650878 - DNA, 15 bp, Homo sapiens
gcagatgtgggcttg

SEQ ID NO: 1650879 - DNA, 15 bp, Homo sapiens
cagatgtgggcttgt

SEQ ID NO: 1650880 - DNA, 15 bp, Homo sapiens
agatgtgggcttgtg

SEQ ID NO: 1650881 - DNA, 15 bp, Homo sapiens
gatgtgggcttgtgt

SEQ ID NO: 1650882 - DNA, 15 bp, Homo sapiens
atgtgggcttgtgtc

SEQ ID NO: 1650883 - DNA, 15 bp, Homo sapiens
tgtgggcttgtgtca

SEQ ID NO: 1650884 - DNA, 15 bp, Homo sapiens
gtgggcttgtgtcat

SEQ ID NO: 1650885 - DNA, 15 bp, Homo sapiens
tgggcttgtgtcatg

SEQ ID NO: 1650886 - DNA, 15 bp, Homo sapiens
gggcttgtgtcatgt

SEQ ID NO: 1650887 - DNA, 15 bp, Homo sapiens
ggcttgtgtcatgtt

SEQ ID NO: 1650888 - DNA, 15 bp, Homo sapiens
gcttgtgtcatgttc

SEQ ID NO: 1650889 - DNA, 15 bp, Homo sapiens
cttgtgtcatgttct

SEQ ID NO: 1650890 - DNA, 15 bp, Homo sapiens
ttgtgtcatgttcta

SEQ ID NO: 1650891 - DNA, 15 bp, Homo sapiens
tgtgtcatgttctaa

SEQ ID NO: 1650892 - DNA, 15 bp, Homo sapiens
gtgtcatgttctaat

SEQ ID NO: 1650893 - DNA, 15 bp, Homo sapiens
tgtcatgttctaata

SEQ ID NO: 1650894 - DNA, 15 bp, Homo sapiens
gtcatgttctaatat

SEQ ID NO: 1650895 - DNA, 15 bp, Homo sapiens
tcatgttctaatatg

SEQ ID NO: 1650896 - DNA, 15 bp, Homo sapiens
catgttctaatatgt

SEQ ID NO: 1650897 - DNA, 15 bp, Homo sapiens
atgttctaatatgtg

SEQ ID NO: 1650898 - DNA, 15 bp, Homo sapiens
tgttctaatatgtgc

SEQ ID NO: 1650899 - DNA, 15 bp, Homo sapiens
gttctaatatgtgct

SEQ ID NO: 1650900 - DNA, 15 bp, Homo sapiens
ttctaatatgtgctt

SEQ ID NO: 1650901 - DNA, 15 bp, Homo sapiens
tctaatatgtgcttt

SEQ ID NO: 1650902 - DNA, 15 bp, Homo sapiens
ctaatatgtgctttg

SEQ ID NO: 1650903 - DNA, 15 bp, Homo sapiens
taatatgtgctttgg

SEQ ID NO: 1650904 - DNA, 15 bp, Homo sapiens
aatatgtgctttgga

SEQ ID NO: 1650905 - DNA, 15 bp, Homo sapiens
atatgtgctttggac

SEQ ID NO: 1650906 - DNA, 15 bp, Homo sapiens
tatgtgctttggaca

SEQ ID NO: 1650907 - DNA, 15 bp, Homo sapiens
atgtgctttggacaa

SEQ ID NO: 1650908 - DNA, 15 bp, Homo sapiens
tgtgctttggacaaa

SEQ ID NO: 1650909 - DNA, 15 bp, Homo sapiens
gtgctttggacaaat

SEQ ID NO: 1650910 - DNA, 15 bp, Homo sapiens
tgctttggacaaatt

SEQ ID NO: 1650911 - DNA, 15 bp, Homo sapiens
gctttggacaaatta

SEQ ID NO: 1650912 - DNA, 15 bp, Homo sapiens
ctttggacaaattaa

SEQ ID NO: 1650913 - DNA, 15 bp, Homo sapiens
tttggacaaattaaa

SEQ ID NO: 1650914 - DNA, 15 bp, Homo sapiens
ttggacaaattaaaa

SEQ ID NO: 1650915 - DNA, 15 bp, Homo sapiens
tggacaaattaaaat

SEQ ID NO: 1650916 - DNA, 15 bp, Homo sapiens
ggacaaattaaaatg

SEQ ID NO: 1650917 - DNA, 15 bp, Homo sapiens
gacaaattaaaatga

SEQ ID NO: 1650918 - DNA, 15 bp, Homo sapiens
acaaattaaaatgac

SEQ ID NO: 1650919 - DNA, 15 bp, Homo sapiens
caaattaaaatgact

SEQ ID NO: 1650920 - DNA, 15 bp, Homo sapiens
aaattaaaatgactt

SEQ ID NO: 1650921 - DNA, 15 bp, Homo sapiens
aattaaaatgacttc

SEQ ID NO: 1650922 - DNA, 15 bp, Homo sapiens
attaaaatgacttct

SEQ ID NO: 1650923 - DNA, 15 bp, Homo sapiens
ttaaaatgacttctg

SEQ ID NO: 1650924 - DNA, 15 bp, Homo sapiens
taaaatgacttctgt

SEQ ID NO: 1650925 - DNA, 15 bp, Homo sapiens
aaaatgacttctgtg

SEQ ID NO: 1650926 - DNA, 15 bp, Homo sapiens
aaatgacttctgtgg

SEQ ID NO: 1650927 - DNA, 15 bp, Homo sapiens
aatgacttctgtggg

SEQ ID NO: 1650928 - DNA, 15 bp, Homo sapiens
atgacttctgtgggg

SEQ ID NO: 1650929 - DNA, 15 bp, Homo sapiens
tgacttctgtggggt

SEQ ID NO: 1650930 - DNA, 15 bp, Homo sapiens
gacttctgtggggtt

SEQ ID NO: 1650931 - DNA, 15 bp, Homo sapiens
acttctgtggggttt

SEQ ID NO: 1650932 - DNA, 15 bp, Homo sapiens
cttctgtggggttta

SEQ ID NO: 1650933 - DNA, 15 bp, Homo sapiens
ttctgtggggtttag

SEQ ID NO: 1650934 - DNA, 15 bp, Homo sapiens
tctgtggggtttagt

SEQ ID NO: 1650935 - DNA, 15 bp, Homo sapiens
ctgtggggtttagtt

SEQ ID NO: 1650936 - DNA, 15 bp, Homo sapiens
tgtggggtttagttt

SEQ ID NO: 1650937 - DNA, 15 bp, Homo sapiens
gtggggtttagtttc

SEQ ID NO: 1650938 - DNA, 15 bp, Homo sapiens
tggggtttagtttcc

SEQ ID NO: 1650939 - DNA, 15 bp, Homo sapiens
ggggtttagtttcct

SEQ ID NO: 1650940 - DNA, 15 bp, Homo sapiens
gggtttagtttcctc

SEQ ID NO: 1650941 - DNA, 15 bp, Homo sapiens
ggtttagtttcctct

SEQ ID NO: 1650942 - DNA, 15 bp, Homo sapiens
gtttagtttcctctt

SEQ ID NO: 1650943 - DNA, 15 bp, Homo sapiens
tttagtttcctctta

SEQ ID NO: 1650944 - DNA, 15 bp, Homo sapiens
ttagtttcctcttat

SEQ ID NO: 1650945 - DNA, 15 bp, Homo sapiens
tagtttcctcttatt

SEQ ID NO: 1650946 - DNA, 15 bp, Homo sapiens
agtttcctcttattt

SEQ ID NO: 1650947 - DNA, 15 bp, Homo sapiens
gtttcctcttatttt

SEQ ID NO: 1650948 - DNA, 15 bp, Homo sapiens
tttcctcttattttg

SEQ ID NO: 1650949 - DNA, 15 bp, Homo sapiens
ttcctcttattttga

SEQ ID NO: 1650950 - DNA, 15 bp, Homo sapiens
tcctcttattttgat

SEQ ID NO: 1650951 - DNA, 15 bp, Homo sapiens
cctcttattttgata

SEQ ID NO: 1650952 - DNA, 15 bp, Homo sapiens
ctcttattttgataa

SEQ ID NO: 1650953 - DNA, 15 bp, Homo sapiens
tcttattttgataat

SEQ ID NO: 1650954 - DNA, 15 bp, Homo sapiens
cttattttgataata

SEQ ID NO: 1650955 - DNA, 15 bp, Homo sapiens
ttattttgataataa

SEQ ID NO: 1650956 - DNA, 15 bp, Homo sapiens
tattttgataataac

SEQ ID NO: 1650957 - DNA, 15 bp, Homo sapiens
attttgataataaca

SEQ ID NO: 1650958 - DNA, 15 bp, Homo sapiens
ttttgataataacag

SEQ ID NO: 1650959 - DNA, 15 bp, Homo sapiens
tttgataataacagc

SEQ ID NO: 1650960 - DNA, 15 bp, Homo sapiens
ttgataataacagca

SEQ ID NO: 1650961 - DNA, 15 bp, Homo sapiens
tgataataacagcaa

SEQ ID NO: 1650962 - DNA, 15 bp, Homo sapiens
gataataacagcaat

SEQ ID NO: 1650963 - DNA, 15 bp, Homo sapiens
ataataacagcaata

SEQ ID NO: 1650964 - DNA, 15 bp, Homo sapiens
taataacagcaatat

SEQ ID NO: 1650965 - DNA, 15 bp, Homo sapiens
aataacagcaatatc

SEQ ID NO: 1650966 - DNA, 15 bp, Homo sapiens
ataacagcaatatct

SEQ ID NO: 1650967 - DNA, 15 bp, Homo sapiens
taacagcaatatctg

SEQ ID NO: 1650968 - DNA, 15 bp, Homo sapiens
aacagcaatatctgc

SEQ ID NO: 1650969 - DNA, 15 bp, Homo sapiens
acagcaatatctgcc

SEQ ID NO: 1650970 - DNA, 15 bp, Homo sapiens
cagcaatatctgcct

SEQ ID NO: 1650971 - DNA, 15 bp, Homo sapiens
agcaatatctgcctc

SEQ ID NO: 1650972 - DNA, 15 bp, Homo sapiens
gcaatatctgcctca

SEQ ID NO: 1650973 - DNA, 15 bp, Homo sapiens
caatatctgcctcaa

SEQ ID NO: 1650974 - DNA, 15 bp, Homo sapiens
aatatctgcctcaaa

SEQ ID NO: 1650975 - DNA, 15 bp, Homo sapiens
atatctgcctcaaat

SEQ ID NO: 1650976 - DNA, 15 bp, Homo sapiens
tatctgcctcaaatt

SEQ ID NO: 1650977 - DNA, 15 bp, Homo sapiens
atctgcctcaaatta

SEQ ID NO: 1650978 - DNA, 15 bp, Homo sapiens
tctgcctcaaattat

SEQ ID NO: 1650979 - DNA, 15 bp, Homo sapiens
ctgcctcaaattatt

SEQ ID NO: 1650980 - DNA, 15 bp, Homo sapiens
tgcctcaaattatta

SEQ ID NO: 1650981 - DNA, 15 bp, Homo sapiens
gcctcaaattattat

SEQ ID NO: 1650982 - DNA, 15 bp, Homo sapiens
cctcaaattattatt

SEQ ID NO: 1650983 - DNA, 15 bp, Homo sapiens
ctcaaattattattt

SEQ ID NO: 1650984 - DNA, 15 bp, Homo sapiens
tcaaattattattta

SEQ ID NO: 1650985 - DNA, 15 bp, Homo sapiens
caaattattatttaa

SEQ ID NO: 1650986 - DNA, 15 bp, Homo sapiens
aaattattatttaag

SEQ ID NO: 1650987 - DNA, 15 bp, Homo sapiens
aattattatttaagg

SEQ ID NO: 1650988 - DNA, 15 bp, Homo sapiens
attattatttaagga

SEQ ID NO: 1650989 - DNA, 15 bp, Homo sapiens
ttattatttaaggat

SEQ ID NO: 1650990 - DNA, 15 bp, Homo sapiens
tattatttaaggatt

SEQ ID NO: 1650991 - DNA, 15 bp, Homo sapiens
attatttaaggatta

SEQ ID NO: 1650992 - DNA, 15 bp, Homo sapiens
ttatttaaggattaa

SEQ ID NO: 1650993 - DNA, 15 bp, Homo sapiens
tatttaaggattaaa

SEQ ID NO: 1650994 - DNA, 15 bp, Homo sapiens
ttaaggattaaacat

SEQ ID NO: 1650995 - DNA, 15 bp, Homo sapiens
taaggattaaacatt

SEQ ID NO: 1650996 - DNA, 15 bp, Homo sapiens
aaggattaaacatta

SEQ ID NO: 1650997 - DNA, 15 bp, Homo sapiens
aggattaaacattat

SEQ ID NO: 1650998 - DNA, 15 bp, Homo sapiens
ggattaaacattatc

SEQ ID NO: 1650999 - DNA, 15 bp, Homo sapiens
gattaaacattatca

SEQ ID NO: 1651000 - DNA, 15 bp, Homo sapiens
attaaacattatcat

SEQ ID NO: 1651001 - DNA, 15 bp, Homo sapiens
ttaaacattatcata

SEQ ID NO: 1651002 - DNA, 15 bp, Homo sapiens
taaacattatcatac

SEQ ID NO: 1651003 - DNA, 15 bp, Homo sapiens
aaacattatcataca

SEQ ID NO: 1651004 - DNA, 15 bp, Homo sapiens
aacattatcatacaa

SEQ ID NO: 1651005 - DNA, 15 bp, Homo sapiens
acattatcatacaac

SEQ ID NO: 1651006 - DNA, 15 bp, Homo sapiens
cattatcatacaaca

SEQ ID NO: 1651007 - DNA, 15 bp, Homo sapiens
attatcatacaacag

SEQ ID NO: 1651008 - DNA, 15 bp, Homo sapiens
ttatcatacaacagt

SEQ ID NO: 1651009 - DNA, 15 bp, Homo sapiens
tatcatacaacagtt

SEQ ID NO: 1651010 - DNA, 15 bp, Homo sapiens
atcatacaacagttc

SEQ ID NO: 1651011 - DNA, 15 bp, Homo sapiens
tcatacaacagttcc

SEQ ID NO: 1651012 - DNA, 15 bp, Homo sapiens
catacaacagttcct

SEQ ID NO: 1651013 - DNA, 15 bp, Homo sapiens
atacaacagttccta

SEQ ID NO: 1651014 - DNA, 15 bp, Homo sapiens
tacaacagttcctaa

SEQ ID NO: 1651015 - DNA, 15 bp, Homo sapiens
acaacagttcctaaa

SEQ ID NO: 1651016 - DNA, 15 bp, Homo sapiens
caacagttcctaaac

SEQ ID NO: 1651017 - DNA, 15 bp, Homo sapiens
aacagttcctaaact

SEQ ID NO: 1651018 - DNA, 15 bp, Homo sapiens
acagttcctaaactt

SEQ ID NO: 1651019 - DNA, 15 bp, Homo sapiens
cagttcctaaacttc

SEQ ID NO: 1651020 - DNA, 15 bp, Homo sapiens
agttcctaaacttct

SEQ ID NO: 1651021 - DNA, 15 bp, Homo sapiens
gttcctaaacttcta

SEQ ID NO: 1651022 - DNA, 15 bp, Homo sapiens
ttcctaaacttctag

SEQ ID NO: 1651023 - DNA, 15 bp, Homo sapiens
tcctaaacttctaga

SEQ ID NO: 1651024 - DNA, 15 bp, Homo sapiens
cctaaacttctagat

SEQ ID NO: 1651025 - DNA, 15 bp, Homo sapiens
ctaaacttctagatt

SEQ ID NO: 1651026 - DNA, 15 bp, Homo sapiens
taaacttctagattt

SEQ ID NO: 1651027 - DNA, 15 bp, Homo sapiens
aaacttctagatttc

SEQ ID NO: 1651028 - DNA, 15 bp, Homo sapiens
aacttctagatttct

SEQ ID NO: 1651029 - DNA, 15 bp, Homo sapiens
acttctagatttctc

SEQ ID NO: 1651030 - DNA, 15 bp, Homo sapiens
cttctagatttctca

SEQ ID NO: 1651031 - DNA, 15 bp, Homo sapiens
ttctagatttctcaa

SEQ ID NO: 1651032 - DNA, 15 bp, Homo sapiens
tctagatttctcaaa

SEQ ID NO: 1651033 - DNA, 15 bp, Homo sapiens
ctagatttctcaaaa

SEQ ID NO: 1651034 - DNA, 15 bp, Homo sapiens
tagatttctcaaaat

SEQ ID NO: 1651035 - DNA, 15 bp, Homo sapiens
agatttctcaaaata

SEQ ID NO: 1651036 - DNA, 15 bp, Homo sapiens
gatttctcaaaatat

SEQ ID NO: 1651037 - DNA, 15 bp, Homo sapiens
atttctcaaaatatt

SEQ ID NO: 1651038 - DNA, 15 bp, Homo sapiens
tttctcaaaatattg

SEQ ID NO: 1651039 - DNA, 15 bp, Homo sapiens
ttctcaaaatattga

SEQ ID NO: 1651040 - DNA, 15 bp, Homo sapiens
tctcaaaatattgaa

SEQ ID NO: 1651041 - DNA, 15 bp, Homo sapiens
ctcaaaatattgaaa

SEQ ID NO: 1651042 - DNA, 15 bp, Homo sapiens
tcaaaatattgaaat

SEQ ID NO: 1651043 - DNA, 15 bp, Homo sapiens
caaaatattgaaatt

SEQ ID NO: 1651044 - DNA, 15 bp, Homo sapiens
aaaatattgaaattt

SEQ ID NO: 1651045 - DNA, 15 bp, Homo sapiens
aaatattgaaatttc

SEQ ID NO: 1651046 - DNA, 15 bp, Homo sapiens
aatattgaaatttca

SEQ ID NO: 1651047 - DNA, 15 bp, Homo sapiens
atattgaaatttcaa

SEQ ID NO: 1651048 - DNA, 15 bp, Homo sapiens
tattgaaatttcaaa

SEQ ID NO: 1651049 - DNA, 15 bp, Homo sapiens
attgaaatttcaaaa

SEQ ID NO: 1651050 - DNA, 15 bp, Homo sapiens
ttgaaatttcaaaaa

SEQ ID NO: 1651051 - DNA, 15 bp, Homo sapiens
tgaaatttcaaaaaa

SEQ ID NO: 1651052 - DNA, 15 bp, Homo sapiens
gaaatttcaaaaaat

SEQ ID NO: 1651053 - DNA, 15 bp, Homo sapiens
aaatttcaaaaaata

SEQ ID NO: 1651054 - DNA, 15 bp, Homo sapiens
aatttcaaaaaataa

SEQ ID NO: 1651055 - DNA, 15 bp, Homo sapiens
atttcaaaaaataaa

SEQ ID NO: 1651056 - DNA, 15 bp, Homo sapiens
tttcaaaaaataaaa

SEQ ID NO: 1651057 - DNA, 15 bp, Homo sapiens
ttcaaaaaataaaag

SEQ ID NO: 1651058 - DNA, 15 bp, Homo sapiens
tcaaaaaataaaagt

SEQ ID NO: 1651059 - DNA, 15 bp, Homo sapiens
caaaaaataaaagta

SEQ ID NO: 1651060 - DNA, 15 bp, Homo sapiens
aaaaaataaaagtag

SEQ ID NO: 1651061 - DNA, 15 bp, Homo sapiens
aaaaataaaagtaga

SEQ ID NO: 1651062 - DNA, 15 bp, Homo sapiens
aaaataaaagtagaa

SEQ ID NO: 1651063 - DNA, 15 bp, Homo sapiens
aaataaaagtagaaa

SEQ ID NO: 1651064 - DNA, 15 bp, Homo sapiens
aataaaagtagaaat

SEQ ID NO: 1651065 - DNA, 15 bp, Homo sapiens
ataaaagtagaaatt

SEQ ID NO: 1651066 - DNA, 15 bp, Homo sapiens
taaaagtagaaattg

SEQ ID NO: 1651067 - DNA, 15 bp, Homo sapiens
aaaagtagaaattga

SEQ ID NO: 1651068 - DNA, 15 bp, Homo sapiens
aaagtagaaattgag

SEQ ID NO: 1651069 - DNA, 15 bp, Homo sapiens
aagtagaaattgaga

SEQ ID NO: 1651070 - DNA, 15 bp, Homo sapiens
agtagaaattgagaa

SEQ ID NO: 1651071 - DNA, 15 bp, Homo sapiens
gtagaaattgagaaa

SEQ ID NO: 1651072 - DNA, 15 bp, Homo sapiens
tagaaattgagaaaa

SEQ ID NO: 1651073 - DNA, 15 bp, Homo sapiens
agaaattgagaaaaa

SEQ ID NO: 1651074 - DNA, 15 bp, Homo sapiens
gaaattgagaaaaat

SEQ ID NO: 1651075 - DNA, 15 bp, Homo sapiens
aaattgagaaaaatc

SEQ ID NO: 1651076 - DNA, 15 bp, Homo sapiens
aattgagaaaaatca

SEQ ID NO: 1651077 - DNA, 15 bp, Homo sapiens
attgagaaaaatcaa

SEQ ID NO: 1651078 - DNA, 15 bp, Homo sapiens
ttgagaaaaatcaac

SEQ ID NO: 1651079 - DNA, 15 bp, Homo sapiens
tgagaaaaatcaacc

SEQ ID NO: 1651080 - DNA, 15 bp, Homo sapiens
gagaaaaatcaacct

SEQ ID NO: 1651081 - DNA, 15 bp, Homo sapiens
agaaaaatcaacctg

SEQ ID NO: 1651082 - DNA, 15 bp, Homo sapiens
gaaaaatcaacctga

SEQ ID NO: 1651083 - DNA, 15 bp, Homo sapiens
aaaaatcaacctgag

SEQ ID NO: 1651084 - DNA, 15 bp, Homo sapiens
aaaatcaacctgagg

SEQ ID NO: 1651085 - DNA, 15 bp, Homo sapiens
aaatcaacctgaggt

SEQ ID NO: 1651086 - DNA, 15 bp, Homo sapiens
aatcaacctgaggtg

SEQ ID NO: 1651087 - DNA, 15 bp, Homo sapiens
atcaacctgaggtgt

SEQ ID NO: 1651088 - DNA, 15 bp, Homo sapiens
tcaacctgaggtgtc

SEQ ID NO: 1651089 - DNA, 15 bp, Homo sapiens
caacctgaggtgtca

SEQ ID NO: 1651090 - DNA, 15 bp, Homo sapiens
aacctgaggtgtcaa

SEQ ID NO: 1651091 - DNA, 15 bp, Homo sapiens
acctgaggtgtcaaa

SEQ ID NO: 1651092 - DNA, 15 bp, Homo sapiens
cctgaggtgtcaaaa

SEQ ID NO: 1651093 - DNA, 15 bp, Homo sapiens
ctgaggtgtcaaaat

SEQ ID NO: 1651094 - DNA, 15 bp, Homo sapiens
tgaggtgtcaaaatc

SEQ ID NO: 1651095 - DNA, 15 bp, Homo sapiens
gaggtgtcaaaatct

SEQ ID NO: 1651096 - DNA, 15 bp, Homo sapiens
aggtgtcaaaatctt

SEQ ID NO: 1651097 - DNA, 15 bp, Homo sapiens
ggtgtcaaaatcttt

SEQ ID NO: 1651098 - DNA, 15 bp, Homo sapiens
gtgtcaaaatcttta

SEQ ID NO: 1651099 - DNA, 15 bp, Homo sapiens
tgtcaaaatctttat

SEQ ID NO: 1651100 - DNA, 15 bp, Homo sapiens
gtcaaaatctttatt

SEQ ID NO: 1651101 - DNA, 15 bp, Homo sapiens
tcaaaatctttattt

SEQ ID NO: 1651102 - DNA, 15 bp, Homo sapiens
caaaatctttatttg

SEQ ID NO: 1651103 - DNA, 15 bp, Homo sapiens
aaaatctttatttgc

SEQ ID NO: 1651104 - DNA, 15 bp, Homo sapiens
aaatctttatttgcc

SEQ ID NO: 1651105 - DNA, 15 bp, Homo sapiens
aatctttatttgcct

SEQ ID NO: 1651106 - DNA, 15 bp, Homo sapiens
atctttatttgccta

SEQ ID NO: 1651107 - DNA, 15 bp, Homo sapiens
tctttatttgcctaa

SEQ ID NO: 1651108 - DNA, 15 bp, Homo sapiens
ctttatttgcctaaa

SEQ ID NO: 1651109 - DNA, 15 bp, Homo sapiens
tttatttgcctaaaa

SEQ ID NO: 1651110 - DNA, 15 bp, Homo sapiens
ttatttgcctaaaat

SEQ ID NO: 1651111 - DNA, 15 bp, Homo sapiens
tatttgcctaaaata

SEQ ID NO: 1651112 - DNA, 15 bp, Homo sapiens
atttgcctaaaataa

SEQ ID NO: 1651113 - DNA, 15 bp, Homo sapiens
tttgcctaaaataag

SEQ ID NO: 1651114 - DNA, 15 bp, Homo sapiens
ttgcctaaaataagg

SEQ ID NO: 1651115 - DNA, 15 bp, Homo sapiens
tgcctaaaataagga

SEQ ID NO: 1651116 - DNA, 15 bp, Homo sapiens
gcctaaaataaggaa

SEQ ID NO: 1651117 - DNA, 15 bp, Homo sapiens
cctaaaataaggaaa

SEQ ID NO: 1651118 - DNA, 15 bp, Homo sapiens
ctaaaataaggaaat

SEQ ID NO: 1651119 - DNA, 15 bp, Homo sapiens
taaaataaggaaata

SEQ ID NO: 1651120 - DNA, 15 bp, Homo sapiens
aaaataaggaaataa

SEQ ID NO: 1651121 - DNA, 15 bp, Homo sapiens
aaataaggaaataaa

SEQ ID NO: 1651122 - DNA, 15 bp, Homo sapiens
aataaggaaataaaa

SEQ ID NO: 1651123 - DNA, 15 bp, Homo sapiens
ataaggaaataaaaa

SEQ ID NO: 1651124 - DNA, 15 bp, Homo sapiens
taaggaaataaaaaa

SEQ ID NO: 1651125 - DNA, 15 bp, Homo sapiens
aaggaaataaaaaaa

SEQ ID NO: 1651126 - DNA, 15 bp, Homo sapiens
aggaaataaaaaaat

SEQ ID NO: 1651127 - DNA, 15 bp, Homo sapiens
ggaaataaaaaaatc

SEQ ID NO: 1651128 - DNA, 15 bp, Homo sapiens
gaaataaaaaaatca

SEQ ID NO: 1651129 - DNA, 15 bp, Homo sapiens
aaataaaaaaatcat

SEQ ID NO: 1651130 - DNA, 15 bp, Homo sapiens
aataaaaaaatcatc

SEQ ID NO: 1651131 - DNA, 15 bp, Homo sapiens
ataaaaaaatcatct

SEQ ID NO: 1651132 - DNA, 15 bp, Homo sapiens
taaaaaaatcatcta

SEQ ID NO: 1651133 - DNA, 15 bp, Homo sapiens
aaaaaaatcatctat

SEQ ID NO: 1651134 - DNA, 15 bp, Homo sapiens
aaaaaatcatctatc

SEQ ID NO: 1651135 - DNA, 15 bp, Homo sapiens
aaaaatcatctatca

SEQ ID NO: 1651136 - DNA, 15 bp, Homo sapiens
aaaatcatctatcat

SEQ ID NO: 1651137 - DNA, 15 bp, Homo sapiens
aaatcatctatcatc

SEQ ID NO: 1651138 - DNA, 15 bp, Homo sapiens
aatcatctatcatca

SEQ ID NO: 1651139 - DNA, 15 bp, Homo sapiens
atcatctatcatcac

SEQ ID NO: 1651140 - DNA, 15 bp, Homo sapiens
tcatctatcatcacc

SEQ ID NO: 1651141 - DNA, 15 bp, Homo sapiens
catctatcatcacca

SEQ ID NO: 1651142 - DNA, 15 bp, Homo sapiens
atctatcatcaccat

SEQ ID NO: 1651143 - DNA, 15 bp, Homo sapiens
tctatcatcaccatt

SEQ ID NO: 1651144 - DNA, 15 bp, Homo sapiens
ctatcatcaccattg

SEQ ID NO: 1651145 - DNA, 15 bp, Homo sapiens
tatcatcaccattgt

SEQ ID NO: 1651146 - DNA, 15 bp, Homo sapiens
atcatcaccattgta

SEQ ID NO: 1651147 - DNA, 15 bp, Homo sapiens
tcatcaccattgtat

SEQ ID NO: 1651148 - DNA, 15 bp, Homo sapiens
catcaccattgtatc

SEQ ID NO: 1651149 - DNA, 15 bp, Homo sapiens
atcaccattgtatca

SEQ ID NO: 1651150 - DNA, 15 bp, Homo sapiens
tcaccattgtatcac

SEQ ID NO: 1651151 - DNA, 15 bp, Homo sapiens
caccattgtatcact

SEQ ID NO: 1651152 - DNA, 15 bp, Homo sapiens
accattgtatcactg

SEQ ID NO: 1651153 - DNA, 15 bp, Homo sapiens
ccattgtatcactga

SEQ ID NO: 1651154 - DNA, 15 bp, Homo sapiens
cattgtatcactgaa

SEQ ID NO: 1651155 - DNA, 15 bp, Homo sapiens
attgtatcactgaaa

SEQ ID NO: 1651156 - DNA, 15 bp, Homo sapiens
ttgtatcactgaaaa

SEQ ID NO: 1651157 - DNA, 15 bp, Homo sapiens
tgtatcactgaaaat

SEQ ID NO: 1651158 - DNA, 15 bp, Homo sapiens
gtatcactgaaaatg

SEQ ID NO: 1651159 - DNA, 15 bp, Homo sapiens
tatcactgaaaatga

SEQ ID NO: 1651160 - DNA, 15 bp, Homo sapiens
atcactgaaaatgaa

SEQ ID NO: 1651161 - DNA, 15 bp, Homo sapiens
tcactgaaaatgaat

SEQ ID NO: 1651162 - DNA, 15 bp, Homo sapiens
cactgaaaatgaatt

SEQ ID NO: 1651163 - DNA, 15 bp, Homo sapiens
actgaaaatgaatta

SEQ ID NO: 1651164 - DNA, 15 bp, Homo sapiens
ctgaaaatgaattaa

SEQ ID NO: 1651165 - DNA, 15 bp, Homo sapiens
tgaaaatgaattaat

SEQ ID NO: 1651166 - DNA, 15 bp, Homo sapiens
gaaaatgaattaatt

SEQ ID NO: 1651167 - DNA, 15 bp, Homo sapiens
aaaatgaattaattt

SEQ ID NO: 1651168 - DNA, 15 bp, Homo sapiens
aaatgaattaatttt

SEQ ID NO: 1651169 - DNA, 15 bp, Homo sapiens
aatgaattaattttt

SEQ ID NO: 1651170 - DNA, 15 bp, Homo sapiens
atgaattaatttttt

SEQ ID NO: 1651171 - DNA, 15 bp, Homo sapiens
tgaattaatttttta

SEQ ID NO: 1651172 - DNA, 15 bp, Homo sapiens
gaattaattttttaa

SEQ ID NO: 1651173 - DNA, 15 bp, Homo sapiens
attaattttttaaaa

SEQ ID NO: 1651174 - DNA, 15 bp, Homo sapiens
ttaattttttaaaaa

SEQ ID NO: 1651175 - DNA, 15 bp, Homo sapiens
taattttttaaaaac

SEQ ID NO: 1651176 - DNA, 15 bp, Homo sapiens
aattttttaaaaaca

SEQ ID NO: 1651177 - DNA, 15 bp, Homo sapiens
attttttaaaaacat

SEQ ID NO: 1651178 - DNA, 15 bp, Homo sapiens
ttttttaaaaacatg

SEQ ID NO: 1651179 - DNA, 15 bp, Homo sapiens
tttttaaaaacatgg

SEQ ID NO: 1651180 - DNA, 15 bp, Homo sapiens
ttttaaaaacatggc

SEQ ID NO: 1651181 - DNA, 15 bp, Homo sapiens
tttaaaaacatggca

SEQ ID NO: 1651182 - DNA, 15 bp, Homo sapiens
ttaaaaacatggcaa

SEQ ID NO: 1651183 - DNA, 15 bp, Homo sapiens
taaaaacatggcaag

SEQ ID NO: 1651184 - DNA, 15 bp, Homo sapiens
aaaaacatggcaaga

SEQ ID NO: 1651185 - DNA, 15 bp, Homo sapiens
aaaacatggcaagaa

SEQ ID NO: 1651186 - DNA, 15 bp, Homo sapiens
aaacatggcaagaat

SEQ ID NO: 1651187 - DNA, 15 bp, Homo sapiens
aacatggcaagaata

SEQ ID NO: 1651188 - DNA, 15 bp, Homo sapiens
acatggcaagaatat

SEQ ID NO: 1651189 - DNA, 15 bp, Homo sapiens
catggcaagaatata

SEQ ID NO: 1651190 - DNA, 15 bp, Homo sapiens
atggcaagaatataa

SEQ ID NO: 1651191 - DNA, 15 bp, Homo sapiens
tggcaagaatataat

SEQ ID NO: 1651192 - DNA, 15 bp, Homo sapiens
ggcaagaatataatc

SEQ ID NO: 1651193 - DNA, 15 bp, Homo sapiens
gcaagaatataatct

SEQ ID NO: 1651194 - DNA, 15 bp, Homo sapiens
caagaatataatcta

SEQ ID NO: 1651195 - DNA, 15 bp, Homo sapiens
aagaatataatctaa

SEQ ID NO: 1651196 - DNA, 15 bp, Homo sapiens
agaatataatctaag

SEQ ID NO: 1651197 - DNA, 15 bp, Homo sapiens
gaatataatctaaga

SEQ ID NO: 1651198 - DNA, 15 bp, Homo sapiens
aatataatctaagaa

SEQ ID NO: 1651199 - DNA, 15 bp, Homo sapiens
atataatctaagaaa

SEQ ID NO: 1651200 - DNA, 15 bp, Homo sapiens
tataatctaagaaaa

SEQ ID NO: 1651201 - DNA, 15 bp, Homo sapiens
ataatctaagaaaaa

SEQ ID NO: 1651202 - DNA, 15 bp, Homo sapiens
taatctaagaaaaaa

SEQ ID NO: 1651203 - DNA, 15 bp, Homo sapiens
aatctaagaaaaaag

SEQ ID NO: 1651204 - DNA, 15 bp, Homo sapiens
atctaagaaaaaagg

SEQ ID NO: 1651205 - DNA, 15 bp, Homo sapiens
tctaagaaaaaaggg

SEQ ID NO: 1651206 - DNA, 15 bp, Homo sapiens
ctaagaaaaaagggc

SEQ ID NO: 1651207 - DNA, 15 bp, Homo sapiens
taagaaaaaagggca

SEQ ID NO: 1651208 - DNA, 15 bp, Homo sapiens
aagaaaaaagggcag

SEQ ID NO: 1651209 - DNA, 15 bp, Homo sapiens
agaaaaaagggcaga

SEQ ID NO: 1651210 - DNA, 15 bp, Homo sapiens
gaaaaaagggcagat

SEQ ID NO: 1651211 - DNA, 15 bp, Homo sapiens
aaaaaagggcagatt

SEQ ID NO: 1651212 - DNA, 15 bp, Homo sapiens
aaaaagggcagattc

SEQ ID NO: 1651213 - DNA, 15 bp, Homo sapiens
aaaagggcagattct

SEQ ID NO: 1651214 - DNA, 15 bp, Homo sapiens
aaagggcagattctt

SEQ ID NO: 1651215 - DNA, 15 bp, Homo sapiens
aagggcagattcttt

SEQ ID NO: 1651216 - DNA, 15 bp, Homo sapiens
agggcagattcttta

SEQ ID NO: 1651217 - DNA, 15 bp, Homo sapiens
gggcagattctttaa

SEQ ID NO: 1651218 - DNA, 15 bp, Homo sapiens
ggcagattctttaat

SEQ ID NO: 1651219 - DNA, 15 bp, Homo sapiens
gcagattctttaatt

SEQ ID NO: 1651220 - DNA, 15 bp, Homo sapiens
cagattctttaattg

SEQ ID NO: 1651221 - DNA, 15 bp, Homo sapiens
agattctttaattgt

SEQ ID NO: 1651222 - DNA, 15 bp, Homo sapiens
gattctttaattgtg

SEQ ID NO: 1651223 - DNA, 15 bp, Homo sapiens
attctttaattgtgt

SEQ ID NO: 1651224 - DNA, 15 bp, Homo sapiens
ttctttaattgtgta

SEQ ID NO: 1651225 - DNA, 15 bp, Homo sapiens
tctttaattgtgtaa

SEQ ID NO: 1651226 - DNA, 15 bp, Homo sapiens
ctttaattgtgtaaa

SEQ ID NO: 1651227 - DNA, 15 bp, Homo sapiens
tttaattgtgtaaat

SEQ ID NO: 1651228 - DNA, 15 bp, Homo sapiens
ttaattgtgtaaatt

SEQ ID NO: 1651229 - DNA, 15 bp, Homo sapiens
taattgtgtaaatta

SEQ ID NO: 1651230 - DNA, 15 bp, Homo sapiens
aattgtgtaaattaa

SEQ ID NO: 1651231 - DNA, 15 bp, Homo sapiens
attgtgtaaattaag

SEQ ID NO: 1651232 - DNA, 15 bp, Homo sapiens
ttgtgtaaattaagc

SEQ ID NO: 1651233 - DNA, 15 bp, Homo sapiens
tgtgtaaattaagct

SEQ ID NO: 1651234 - DNA, 15 bp, Homo sapiens
gtgtaaattaagctt

SEQ ID NO: 1651235 - DNA, 15 bp, Homo sapiens
tgtaaattaagcttt

SEQ ID NO: 1651236 - DNA, 15 bp, Homo sapiens
gtaaattaagcttta

SEQ ID NO: 1651237 - DNA, 15 bp, Homo sapiens
taaattaagctttat

SEQ ID NO: 1651238 - DNA, 15 bp, Homo sapiens
aaattaagctttata

SEQ ID NO: 1651239 - DNA, 15 bp, Homo sapiens
aattaagctttatag

SEQ ID NO: 1651240 - DNA, 15 bp, Homo sapiens
attaagctttataga

SEQ ID NO: 1651241 - DNA, 15 bp, Homo sapiens
ttaagctttatagaa

SEQ ID NO: 1651242 - DNA, 15 bp, Homo sapiens
taagctttatagaaa

SEQ ID NO: 1651243 - DNA, 15 bp, Homo sapiens
aagctttatagaaaa

SEQ ID NO: 1651244 - DNA, 15 bp, Homo sapiens
agctttatagaaaac

SEQ ID NO: 1651245 - DNA, 15 bp, Homo sapiens
gctttatagaaaact

SEQ ID NO: 1651246 - DNA, 15 bp, Homo sapiens
ctttatagaaaactc

SEQ ID NO: 1651247 - DNA, 15 bp, Homo sapiens
tttatagaaaactca

SEQ ID NO: 1651248 - DNA, 15 bp, Homo sapiens
ttatagaaaactcat

SEQ ID NO: 1651249 - DNA, 15 bp, Homo sapiens
tatagaaaactcatc

SEQ ID NO: 1651250 - DNA, 15 bp, Homo sapiens
atagaaaactcatca

SEQ ID NO: 1651251 - DNA, 15 bp, Homo sapiens
tagaaaactcatcat

SEQ ID NO: 1651252 - DNA, 15 bp, Homo sapiens
agaaaactcatcatt

SEQ ID NO: 1651253 - DNA, 15 bp, Homo sapiens
gaaaactcatcatta

SEQ ID NO: 1651254 - DNA, 15 bp, Homo sapiens
aaaactcatcattaa

SEQ ID NO: 1651255 - DNA, 15 bp, Homo sapiens
aaactcatcattaat

SEQ ID NO: 1651256 - DNA, 15 bp, Homo sapiens
aactcatcattaatt

SEQ ID NO: 1651257 - DNA, 15 bp, Homo sapiens
actcatcattaattt

SEQ ID NO: 1651258 - DNA, 15 bp, Homo sapiens
ctcatcattaattta

SEQ ID NO: 1651259 - DNA, 15 bp, Homo sapiens
tcatcattaatttaa

SEQ ID NO: 1651260 - DNA, 15 bp, Homo sapiens
catcattaatttaat

SEQ ID NO: 1651261 - DNA, 15 bp, Homo sapiens
atcattaatttaatt

SEQ ID NO: 1651262 - DNA, 15 bp, Homo sapiens
tcattaatttaattt

SEQ ID NO: 1651263 - DNA, 15 bp, Homo sapiens
cattaatttaatttt

SEQ ID NO: 1651264 - DNA, 15 bp, Homo sapiens
taatttaattttttt

SEQ ID NO: 1651265 - DNA, 15 bp, Homo sapiens
aatttaatttttttc

SEQ ID NO: 1651266 - DNA, 15 bp, Homo sapiens
atttaatttttttca

SEQ ID NO: 1651267 - DNA, 15 bp, Homo sapiens
tttaatttttttcat

SEQ ID NO: 1651268 - DNA, 15 bp, Homo sapiens
ttaatttttttcatc

SEQ ID NO: 1651269 - DNA, 15 bp, Homo sapiens
taatttttttcatct

SEQ ID NO: 1651270 - DNA, 15 bp, Homo sapiens
aatttttttcatctt

SEQ ID NO: 1651271 - DNA, 15 bp, Homo sapiens
atttttttcatcttt

SEQ ID NO: 1651272 - DNA, 15 bp, Homo sapiens
tttttttcatctttt

SEQ ID NO: 1651273 - DNA, 15 bp, Homo sapiens
ttttttcatcttttt

SEQ ID NO: 1651274 - DNA, 15 bp, Homo sapiens
tttttcatctttttt

SEQ ID NO: 1651275 - DNA, 15 bp, Homo sapiens
ttttcatctttttta

SEQ ID NO: 1651276 - DNA, 15 bp, Homo sapiens
tttcatcttttttaa

SEQ ID NO: 1651277 - DNA, 15 bp, Homo sapiens
ttcatcttttttaat

SEQ ID NO: 1651278 - DNA, 15 bp, Homo sapiens
tcatcttttttaatt

SEQ ID NO: 1651279 - DNA, 15 bp, Homo sapiens
catcttttttaattt

SEQ ID NO: 1651280 - DNA, 15 bp, Homo sapiens
atcttttttaatttt

SEQ ID NO: 1651281 - DNA, 15 bp, Homo sapiens
tcttttttaattttt

SEQ ID NO: 1651282 - DNA, 15 bp, Homo sapiens
cttttttaatttttc

SEQ ID NO: 1651283 - DNA, 15 bp, Homo sapiens
ttttttaatttttct

SEQ ID NO: 1651284 - DNA, 15 bp, Homo sapiens
tttttaatttttctg

SEQ ID NO: 1651285 - DNA, 15 bp, Homo sapiens
ttttaatttttctgt

SEQ ID NO: 1651286 - DNA, 15 bp, Homo sapiens
tttaatttttctgtg

SEQ ID NO: 1651287 - DNA, 15 bp, Homo sapiens
ttaatttttctgtgg

SEQ ID NO: 1651288 - DNA, 15 bp, Homo sapiens
taatttttctgtggc

SEQ ID NO: 1651289 - DNA, 15 bp, Homo sapiens
aatttttctgtggct

SEQ ID NO: 1651290 - DNA, 15 bp, Homo sapiens
atttttctgtggcta

SEQ ID NO: 1651291 - DNA, 15 bp, Homo sapiens
tttttctgtggctag

SEQ ID NO: 1651292 - DNA, 15 bp, Homo sapiens
ttttctgtggctaga

SEQ ID NO: 1651293 - DNA, 15 bp, Homo sapiens
tttctgtggctagat

SEQ ID NO: 1651294 - DNA, 15 bp, Homo sapiens
ttctgtggctagatg

SEQ ID NO: 1651295 - DNA, 15 bp, Homo sapiens
tctgtggctagatga

SEQ ID NO: 1651296 - DNA, 15 bp, Homo sapiens
ctgtggctagatgaa

SEQ ID NO: 1651297 - DNA, 15 bp, Homo sapiens
tgtggctagatgaaa

SEQ ID NO: 1651298 - DNA, 15 bp, Homo sapiens
gtggctagatgaaac

SEQ ID NO: 1651299 - DNA, 15 bp, Homo sapiens
tggctagatgaaacc

SEQ ID NO: 1651300 - DNA, 15 bp, Homo sapiens
ggctagatgaaacca

SEQ ID NO: 1651301 - DNA, 15 bp, Homo sapiens
gctagatgaaaccac

SEQ ID NO: 1651302 - DNA, 15 bp, Homo sapiens
ctagatgaaaccact

SEQ ID NO: 1651303 - DNA, 15 bp, Homo sapiens
tagatgaaaccactg

SEQ ID NO: 1651304 - DNA, 15 bp, Homo sapiens
agatgaaaccactgg

SEQ ID NO: 1651305 - DNA, 15 bp, Homo sapiens
gatgaaaccactggc

SEQ ID NO: 1651306 - DNA, 15 bp, Homo sapiens
atgaaaccactggca

SEQ ID NO: 1651307 - DNA, 15 bp, Homo sapiens
tgaaaccactggcat

SEQ ID NO: 1651308 - DNA, 15 bp, Homo sapiens
gaaaccactggcata

SEQ ID NO: 1651309 - DNA, 15 bp, Homo sapiens
aaaccactggcatag

SEQ ID NO: 1651310 - DNA, 15 bp, Homo sapiens
aaccactggcatagt

SEQ ID NO: 1651311 - DNA, 15 bp, Homo sapiens
accactggcatagtc

SEQ ID NO: 1651312 - DNA, 15 bp, Homo sapiens
ccactggcatagtcc

SEQ ID NO: 1651313 - DNA, 15 bp, Homo sapiens
cactggcatagtcca

SEQ ID NO: 1651314 - DNA, 15 bp, Homo sapiens
actggcatagtccag

SEQ ID NO: 1651315 - DNA, 15 bp, Homo sapiens
ctggcatagtccagc

SEQ ID NO: 1651316 - DNA, 15 bp, Homo sapiens
tggcatagtccagca

SEQ ID NO: 1651317 - DNA, 15 bp, Homo sapiens
ggcatagtccagcac

SEQ ID NO: 1651318 - DNA, 15 bp, Homo sapiens
gcatagtccagcact

SEQ ID NO: 1651319 - DNA, 15 bp, Homo sapiens
catagtccagcactt

SEQ ID NO: 1651320 - DNA, 15 bp, Homo sapiens
atagtccagcacttg

SEQ ID NO: 1651321 - DNA, 15 bp, Homo sapiens
tagtccagcacttgt

SEQ ID NO: 1651322 - DNA, 15 bp, Homo sapiens
agtccagcacttgtc

SEQ ID NO: 1651323 - DNA, 15 bp, Homo sapiens
gtccagcacttgtct

SEQ ID NO: 1651324 - DNA, 15 bp, Homo sapiens
tccagcacttgtctg

SEQ ID NO: 1651325 - DNA, 15 bp, Homo sapiens
ccagcacttgtctgc

SEQ ID NO: 1651326 - DNA, 15 bp, Homo sapiens
cagcacttgtctgct

SEQ ID NO: 1651327 - DNA, 15 bp, Homo sapiens
agcacttgtctgctt

SEQ ID NO: 1651328 - DNA, 15 bp, Homo sapiens
gcacttgtctgctta

SEQ ID NO: 1651329 - DNA, 15 bp, Homo sapiens
cacttgtctgcttat

SEQ ID NO: 1651330 - DNA, 15 bp, Homo sapiens
acttgtctgcttatc

SEQ ID NO: 1651331 - DNA, 15 bp, Homo sapiens
cttgtctgcttatca

SEQ ID NO: 1651332 - DNA, 15 bp, Homo sapiens
ttgtctgcttatcag

SEQ ID NO: 1651333 - DNA, 15 bp, Homo sapiens
tgtctgcttatcagc

SEQ ID NO: 1651334 - DNA, 15 bp, Homo sapiens
gtctgcttatcagct

SEQ ID NO: 1651335 - DNA, 15 bp, Homo sapiens
tctgcttatcagctc

SEQ ID NO: 1651336 - DNA, 15 bp, Homo sapiens
ctgcttatcagctct

SEQ ID NO: 1651337 - DNA, 15 bp, Homo sapiens
tgcttatcagctctt

SEQ ID NO: 1651338 - DNA, 15 bp, Homo sapiens
gcttatcagctcttg

SEQ ID NO: 1651339 - DNA, 15 bp, Homo sapiens
cttatcagctcttgt

SEQ ID NO: 1651340 - DNA, 15 bp, Homo sapiens
ttatcagctcttgtt

SEQ ID NO: 1651341 - DNA, 15 bp, Homo sapiens
tatcagctcttgttt

SEQ ID NO: 1651342 - DNA, 15 bp, Homo sapiens
atcagctcttgtttt

SEQ ID NO: 1651343 - DNA, 15 bp, Homo sapiens
tcagctcttgttttg

SEQ ID NO: 1651344 - DNA, 15 bp, Homo sapiens
cagctcttgttttgt

SEQ ID NO: 1651345 - DNA, 15 bp, Homo sapiens
agctcttgttttgtg

SEQ ID NO: 1651346 - DNA, 15 bp, Homo sapiens
gctcttgttttgtgt

SEQ ID NO: 1651347 - DNA, 15 bp, Homo sapiens
ctcttgttttgtgtg

SEQ ID NO: 1651348 - DNA, 15 bp, Homo sapiens
tcttgttttgtgtgg

SEQ ID NO: 1651349 - DNA, 15 bp, Homo sapiens
cttgttttgtgtggt

SEQ ID NO: 1651350 - DNA, 15 bp, Homo sapiens
ttgttttgtgtggtt

SEQ ID NO: 1651351 - DNA, 15 bp, Homo sapiens
tgttttgtgtggttt

SEQ ID NO: 1651352 - DNA, 15 bp, Homo sapiens
gttttgtgtggtttc

SEQ ID NO: 1651353 - DNA, 15 bp, Homo sapiens
ttttgtgtggtttct

SEQ ID NO: 1651354 - DNA, 15 bp, Homo sapiens
tttgtgtggtttctg

SEQ ID NO: 1651355 - DNA, 15 bp, Homo sapiens
ttgtgtggtttctgg

SEQ ID NO: 1651356 - DNA, 15 bp, Homo sapiens
tgtgtggtttctggt

SEQ ID NO: 1651357 - DNA, 15 bp, Homo sapiens
gtgtggtttctggta

SEQ ID NO: 1651358 - DNA, 15 bp, Homo sapiens
tgtggtttctggtat

SEQ ID NO: 1651359 - DNA, 15 bp, Homo sapiens
gtggtttctggtatt

SEQ ID NO: 1651360 - DNA, 15 bp, Homo sapiens
tggtttctggtattt

SEQ ID NO: 1651361 - DNA, 15 bp, Homo sapiens
ggtttctggtatttt

SEQ ID NO: 1651362 - DNA, 15 bp, Homo sapiens
gtttctggtattttt

SEQ ID NO: 1651363 - DNA, 15 bp, Homo sapiens
tttctggtattttta

SEQ ID NO: 1651364 - DNA, 15 bp, Homo sapiens
ttctggtatttttac

SEQ ID NO: 1651365 - DNA, 15 bp, Homo sapiens
tctggtatttttact

SEQ ID NO: 1651366 - DNA, 15 bp, Homo sapiens
ctggtatttttacta

SEQ ID NO: 1651367 - DNA, 15 bp, Homo sapiens
tggtatttttactat

SEQ ID NO: 1651368 - DNA, 15 bp, Homo sapiens
ggtatttttactatt

SEQ ID NO: 1651369 - DNA, 15 bp, Homo sapiens
gtatttttactatta

SEQ ID NO: 1651370 - DNA, 15 bp, Homo sapiens
tatttttactattac

SEQ ID NO: 1651371 - DNA, 15 bp, Homo sapiens
atttttactattact

SEQ ID NO: 1651372 - DNA, 15 bp, Homo sapiens
tttttactattactt

SEQ ID NO: 1651373 - DNA, 15 bp, Homo sapiens
ttttactattacttt

SEQ ID NO: 1651374 - DNA, 15 bp, Homo sapiens
tttactattactttt

SEQ ID NO: 1651375 - DNA, 15 bp, Homo sapiens
ttactattactttta

SEQ ID NO: 1651376 - DNA, 15 bp, Homo sapiens
tactattacttttat

SEQ ID NO: 1651377 - DNA, 15 bp, Homo sapiens
actattacttttatt

SEQ ID NO: 1651378 - DNA, 15 bp, Homo sapiens
ctattacttttatta

SEQ ID NO: 1651379 - DNA, 15 bp, Homo sapiens
tattacttttattat

SEQ ID NO: 1651380 - DNA, 15 bp, Homo sapiens
attacttttattatc

SEQ ID NO: 1651381 - DNA, 15 bp, Homo sapiens
ttacttttattatca

SEQ ID NO: 1651382 - DNA, 15 bp, Homo sapiens
tacttttattatcat

SEQ ID NO: 1651383 - DNA, 15 bp, Homo sapiens
acttttattatcatt

SEQ ID NO: 1651384 - DNA, 15 bp, Homo sapiens
ttttattatcattac

SEQ ID NO: 1651385 - DNA, 15 bp, Homo sapiens
tttattatcattact

SEQ ID NO: 1651386 - DNA, 15 bp, Homo sapiens
ttattatcattactt

SEQ ID NO: 1651387 - DNA, 15 bp, Homo sapiens
tattatcattacttc

SEQ ID NO: 1651388 - DNA, 15 bp, Homo sapiens
attatcattacttct

SEQ ID NO: 1651389 - DNA, 15 bp, Homo sapiens
ttatcattacttctg

SEQ ID NO: 1651390 - DNA, 15 bp, Homo sapiens
tatcattacttctgc

SEQ ID NO: 1651391 - DNA, 15 bp, Homo sapiens
atcattacttctgct

SEQ ID NO: 1651392 - DNA, 15 bp, Homo sapiens
tcattacttctgcta

SEQ ID NO: 1651393 - DNA, 15 bp, Homo sapiens
cattacttctgctat

SEQ ID NO: 1651394 - DNA, 15 bp, Homo sapiens
attacttctgctatt

SEQ ID NO: 1651395 - DNA, 15 bp, Homo sapiens
ttacttctgctatta

SEQ ID NO: 1651396 - DNA, 15 bp, Homo sapiens
tacttctgctattat

SEQ ID NO: 1651397 - DNA, 15 bp, Homo sapiens
acttctgctattatt

SEQ ID NO: 1651398 - DNA, 15 bp, Homo sapiens
cttctgctattatta

SEQ ID NO: 1651399 - DNA, 15 bp, Homo sapiens
ttctgctattattaa

SEQ ID NO: 1651400 - DNA, 15 bp, Homo sapiens
tctgctattattaag

SEQ ID NO: 1651401 - DNA, 15 bp, Homo sapiens
ctgctattattaaga

SEQ ID NO: 1651402 - DNA, 15 bp, Homo sapiens
tgctattattaagaa

SEQ ID NO: 1651403 - DNA, 15 bp, Homo sapiens
gctattattaagaat

SEQ ID NO: 1651404 - DNA, 15 bp, Homo sapiens
ctattattaagaatg

SEQ ID NO: 1651405 - DNA, 15 bp, Homo sapiens
tattattaagaatga

SEQ ID NO: 1651406 - DNA, 15 bp, Homo sapiens
attattaagaatgag

SEQ ID NO: 1651407 - DNA, 15 bp, Homo sapiens
ttattaagaatgaga

SEQ ID NO: 1651408 - DNA, 15 bp, Homo sapiens
tattaagaatgagag

SEQ ID NO: 1651409 - DNA, 15 bp, Homo sapiens
attaagaatgagagt

SEQ ID NO: 1651410 - DNA, 15 bp, Homo sapiens
ttaagaatgagagta

SEQ ID NO: 1651411 - DNA, 15 bp, Homo sapiens
taagaatgagagtat

SEQ ID NO: 1651412 - DNA, 15 bp, Homo sapiens
aagaatgagagtatt

SEQ ID NO: 1651413 - DNA, 15 bp, Homo sapiens
agaatgagagtatta

SEQ ID NO: 1651414 - DNA, 15 bp, Homo sapiens
gaatgagagtattaa

SEQ ID NO: 1651415 - DNA, 15 bp, Homo sapiens
aatgagagtattaat

SEQ ID NO: 1651416 - DNA, 15 bp, Homo sapiens
atgagagtattaatt

SEQ ID NO: 1651417 - DNA, 15 bp, Homo sapiens
tgagagtattaatta

SEQ ID NO: 1651418 - DNA, 15 bp, Homo sapiens
gagagtattaattaa

SEQ ID NO: 1651419 - DNA, 15 bp, Homo sapiens
agagtattaattaag

SEQ ID NO: 1651420 - DNA, 15 bp, Homo sapiens
gagtattaattaagg

SEQ ID NO: 1651421 - DNA, 15 bp, Homo sapiens
agtattaattaagga

SEQ ID NO: 1651422 - DNA, 15 bp, Homo sapiens
gtattaattaaggat

SEQ ID NO: 1651423 - DNA, 15 bp, Homo sapiens
tattaattaaggatc

SEQ ID NO: 1651424 - DNA, 15 bp, Homo sapiens
attaattaaggatct

SEQ ID NO: 1651425 - DNA, 15 bp, Homo sapiens
ttaattaaggatcta

SEQ ID NO: 1651426 - DNA, 15 bp, Homo sapiens
taattaaggatctaa

SEQ ID NO: 1651427 - DNA, 15 bp, Homo sapiens
aattaaggatctaag

SEQ ID NO: 1651428 - DNA, 15 bp, Homo sapiens
attaaggatctaaga

SEQ ID NO: 1651429 - DNA, 15 bp, Homo sapiens
ttaaggatctaagat

SEQ ID NO: 1651430 - DNA, 15 bp, Homo sapiens
taaggatctaagata

SEQ ID NO: 1651431 - DNA, 15 bp, Homo sapiens
aaggatctaagatag

SEQ ID NO: 1651432 - DNA, 15 bp, Homo sapiens
aggatctaagatagc

SEQ ID NO: 1651433 - DNA, 15 bp, Homo sapiens
ggatctaagatagcc

SEQ ID NO: 1651434 - DNA, 15 bp, Homo sapiens
gatctaagatagcca

SEQ ID NO: 1651435 - DNA, 15 bp, Homo sapiens
atctaagatagccaa

SEQ ID NO: 1651436 - DNA, 15 bp, Homo sapiens
tctaagatagccaaa

SEQ ID NO: 1651437 - DNA, 15 bp, Homo sapiens
ctaagatagccaaag

SEQ ID NO: 1651438 - DNA, 15 bp, Homo sapiens
taagatagccaaagt

SEQ ID NO: 1651439 - DNA, 15 bp, Homo sapiens
aagatagccaaagta

SEQ ID NO: 1651440 - DNA, 15 bp, Homo sapiens
agatagccaaagtag

SEQ ID NO: 1651441 - DNA, 15 bp, Homo sapiens
gatagccaaagtaga

SEQ ID NO: 1651442 - DNA, 15 bp, Homo sapiens
atagccaaagtagaa

SEQ ID NO: 1651443 - DNA, 15 bp, Homo sapiens
tagccaaagtagaat

SEQ ID NO: 1651444 - DNA, 15 bp, Homo sapiens
agccaaagtagaatt

SEQ ID NO: 1651445 - DNA, 15 bp, Homo sapiens
gccaaagtagaattc

SEQ ID NO: 1651446 - DNA, 15 bp, Homo sapiens
ccaaagtagaattct

SEQ ID NO: 1651447 - DNA, 15 bp, Homo sapiens
caaagtagaattctc

SEQ ID NO: 1651448 - DNA, 15 bp, Homo sapiens
aaagtagaattctct

SEQ ID NO: 1651449 - DNA, 15 bp, Homo sapiens
aagtagaattctctc

SEQ ID NO: 1651450 - DNA, 15 bp, Homo sapiens
agtagaattctctcc

SEQ ID NO: 1651451 - DNA, 15 bp, Homo sapiens
gtagaattctctcca

SEQ ID NO: 1651452 - DNA, 15 bp, Homo sapiens
tagaattctctccat

SEQ ID NO: 1651453 - DNA, 15 bp, Homo sapiens
agaattctctccatt

SEQ ID NO: 1651454 - DNA, 15 bp, Homo sapiens
gaattctctccattg

SEQ ID NO: 1651455 - DNA, 15 bp, Homo sapiens
aattctctccattgg

SEQ ID NO: 1651456 - DNA, 15 bp, Homo sapiens
attctctccattggc

SEQ ID NO: 1651457 - DNA, 15 bp, Homo sapiens
ttctctccattggct

SEQ ID NO: 1651458 - DNA, 15 bp, Homo sapiens
tctctccattggctt

SEQ ID NO: 1651459 - DNA, 15 bp, Homo sapiens
ctctccattggcttt

SEQ ID NO: 1651460 - DNA, 15 bp, Homo sapiens
tctccattggctttg

SEQ ID NO: 1651461 - DNA, 15 bp, Homo sapiens
ctccattggctttgt

SEQ ID NO: 1651462 - DNA, 15 bp, Homo sapiens
tccattggctttgtc

SEQ ID NO: 1651463 - DNA, 15 bp, Homo sapiens
ccattggctttgtca

SEQ ID NO: 1651464 - DNA, 15 bp, Homo sapiens
cattggctttgtcac

SEQ ID NO: 1651465 - DNA, 15 bp, Homo sapiens
attggctttgtcaca

SEQ ID NO: 1651466 - DNA, 15 bp, Homo sapiens
ttggctttgtcacat

SEQ ID NO: 1651467 - DNA, 15 bp, Homo sapiens
tggctttgtcacatc

SEQ ID NO: 1651468 - DNA, 15 bp, Homo sapiens
ggctttgtcacatca

SEQ ID NO: 1651469 - DNA, 15 bp, Homo sapiens
gctttgtcacatcat

SEQ ID NO: 1651470 - DNA, 15 bp, Homo sapiens
ctttgtcacatcatt

SEQ ID NO: 1651471 - DNA, 15 bp, Homo sapiens
tttgtcacatcattt

SEQ ID NO: 1651472 - DNA, 15 bp, Homo sapiens
ttgtcacatcatttt

SEQ ID NO: 1651473 - DNA, 15 bp, Homo sapiens
tgtcacatcattttc

SEQ ID NO: 1651474 - DNA, 15 bp, Homo sapiens
gtcacatcattttct

SEQ ID NO: 1651475 - DNA, 15 bp, Homo sapiens
tcacatcattttctt

SEQ ID NO: 1651476 - DNA, 15 bp, Homo sapiens
cacatcattttcttt

SEQ ID NO: 1651477 - DNA, 15 bp, Homo sapiens
acatcattttctttc

SEQ ID NO: 1651478 - DNA, 15 bp, Homo sapiens
catcattttctttct

SEQ ID NO: 1651479 - DNA, 15 bp, Homo sapiens
atcattttctttctt

SEQ ID NO: 1651480 - DNA, 15 bp, Homo sapiens
tcattttctttcttt

SEQ ID NO: 1651481 - DNA, 15 bp, Homo sapiens
cattttctttctttt

SEQ ID NO: 1651482 - DNA, 15 bp, Homo sapiens
ctttcttttttttat

SEQ ID NO: 1651483 - DNA, 15 bp, Homo sapiens
tttcttttttttatt

SEQ ID NO: 1651484 - DNA, 15 bp, Homo sapiens
ttcttttttttattt

SEQ ID NO: 1651485 - DNA, 15 bp, Homo sapiens
tcttttttttatttt

SEQ ID NO: 1651486 - DNA, 15 bp, Homo sapiens
cttttttttattttt

SEQ ID NO: 1651487 - DNA, 15 bp, Homo sapiens
ttttttattttttat

SEQ ID NO: 1651488 - DNA, 15 bp, Homo sapiens
tttttattttttatt

SEQ ID NO: 1651489 - DNA, 15 bp, Homo sapiens
ttttattttttattt

SEQ ID NO: 1651490 - DNA, 15 bp, Homo sapiens
tttattttttatttt

SEQ ID NO: 1651491 - DNA, 15 bp, Homo sapiens
ttattttttattttt

SEQ ID NO: 1651492 - DNA, 15 bp, Homo sapiens
tattttttattttta

SEQ ID NO: 1651493 - DNA, 15 bp, Homo sapiens
attttttatttttaa

SEQ ID NO: 1651494 - DNA, 15 bp, Homo sapiens
ttttttatttttaat

SEQ ID NO: 1651495 - DNA, 15 bp, Homo sapiens
tttttatttttaatt

SEQ ID NO: 1651496 - DNA, 15 bp, Homo sapiens
ttttatttttaatta

SEQ ID NO: 1651497 - DNA, 15 bp, Homo sapiens
tttatttttaattat

SEQ ID NO: 1651498 - DNA, 15 bp, Homo sapiens
ttatttttaattata

SEQ ID NO: 1651499 - DNA, 15 bp, Homo sapiens
tatttttaattatac

SEQ ID NO: 1651500 - DNA, 15 bp, Homo sapiens
atttttaattatact

SEQ ID NO: 1651501 - DNA, 15 bp, Homo sapiens
tttttaattatactt

SEQ ID NO: 1651502 - DNA, 15 bp, Homo sapiens
ttttaattatacttt

SEQ ID NO: 1651503 - DNA, 15 bp, Homo sapiens
tttaattatacttta

SEQ ID NO: 1651504 - DNA, 15 bp, Homo sapiens
ttaattatactttaa

SEQ ID NO: 1651505 - DNA, 15 bp, Homo sapiens
taattatactttaag

SEQ ID NO: 1651506 - DNA, 15 bp, Homo sapiens
aattatactttaagt

SEQ ID NO: 1651507 - DNA, 15 bp, Homo sapiens
gtacatgtgcagaac

SEQ ID NO: 1651508 - DNA, 15 bp, Homo sapiens
tacatgtgcagaacg

SEQ ID NO: 1651509 - DNA, 15 bp, Homo sapiens
acatgtgcagaacgt

SEQ ID NO: 1651510 - DNA, 15 bp, Homo sapiens
catgtgcagaacgtg

SEQ ID NO: 1651511 - DNA, 15 bp, Homo sapiens
atgtgcagaacgtgc

SEQ ID NO: 1651512 - DNA, 15 bp, Homo sapiens
tgtgcagaacgtgca

SEQ ID NO: 1651513 - DNA, 15 bp, Homo sapiens
gtgcagaacgtgcag

SEQ ID NO: 1651514 - DNA, 15 bp, Homo sapiens
tgcagaacgtgcagc

SEQ ID NO: 1651515 - DNA, 15 bp, Homo sapiens
gcagaacgtgcagcc

SEQ ID NO: 1651516 - DNA, 15 bp, Homo sapiens
cagaacgtgcagcct

SEQ ID NO: 1651517 - DNA, 15 bp, Homo sapiens
agaacgtgcagcctt

SEQ ID NO: 1651518 - DNA, 15 bp, Homo sapiens
gaacgtgcagccttg

SEQ ID NO: 1651519 - DNA, 15 bp, Homo sapiens
aacgtgcagccttgt

SEQ ID NO: 1651520 - DNA, 15 bp, Homo sapiens
acgtgcagccttgtt

SEQ ID NO: 1651521 - DNA, 15 bp, Homo sapiens
cgtgcagccttgtta

SEQ ID NO: 1651522 - DNA, 15 bp, Homo sapiens
gtgcagccttgttac

SEQ ID NO: 1651523 - DNA, 15 bp, Homo sapiens
tgcagccttgttaca

SEQ ID NO: 1651524 - DNA, 15 bp, Homo sapiens
gcagccttgttacat

SEQ ID NO: 1651525 - DNA, 15 bp, Homo sapiens
cagccttgttacata

SEQ ID NO: 1651526 - DNA, 15 bp, Homo sapiens
agccttgttacatag

SEQ ID NO: 1651527 - DNA, 15 bp, Homo sapiens
gccttgttacatagg

SEQ ID NO: 1651528 - DNA, 15 bp, Homo sapiens
ccttgttacataggt

SEQ ID NO: 1651529 - DNA, 15 bp, Homo sapiens
cttgttacataggta

SEQ ID NO: 1651530 - DNA, 15 bp, Homo sapiens
ttgttacataggtat

SEQ ID NO: 1651531 - DNA, 15 bp, Homo sapiens
tgttacataggtata

SEQ ID NO: 1651532 - DNA, 15 bp, Homo sapiens
gtatacacgtgccat

SEQ ID NO: 1651533 - DNA, 15 bp, Homo sapiens
tatacacgtgccatg

SEQ ID NO: 1651534 - DNA, 15 bp, Homo sapiens
atacacgtgccatgg

SEQ ID NO: 1651535 - DNA, 15 bp, Homo sapiens
tacacgtgccatggt

SEQ ID NO: 1651536 - DNA, 15 bp, Homo sapiens
acacgtgccatggtg

SEQ ID NO: 1651537 - DNA, 15 bp, Homo sapiens
cacgtgccatggtgg

SEQ ID NO: 1651538 - DNA, 15 bp, Homo sapiens
acgtgccatggtggt

SEQ ID NO: 1651539 - DNA, 15 bp, Homo sapiens
cgtgccatggtggtt

SEQ ID NO: 1651540 - DNA, 15 bp, Homo sapiens
tgccatggtggttta

SEQ ID NO: 1651541 - DNA, 15 bp, Homo sapiens
gccatggtggtttac

SEQ ID NO: 1651542 - DNA, 15 bp, Homo sapiens
ccatggtggtttact

SEQ ID NO: 1651543 - DNA, 15 bp, Homo sapiens
catggtggtttactg

SEQ ID NO: 1651544 - DNA, 15 bp, Homo sapiens
atggtggtttactgc

SEQ ID NO: 1651545 - DNA, 15 bp, Homo sapiens
tggtggtttactgca

SEQ ID NO: 1651546 - DNA, 15 bp, Homo sapiens
ggtggtttactgcac

SEQ ID NO: 1651547 - DNA, 15 bp, Homo sapiens
tggtttactgcacct

SEQ ID NO: 1651548 - DNA, 15 bp, Homo sapiens
ggtttactgcaccta

SEQ ID NO: 1651549 - DNA, 15 bp, Homo sapiens
gtttactgcacctat

SEQ ID NO: 1651550 - DNA, 15 bp, Homo sapiens
tttactgcacctatc

SEQ ID NO: 1651551 - DNA, 15 bp, Homo sapiens
ttactgcacctatca

SEQ ID NO: 1651552 - DNA, 15 bp, Homo sapiens
tactgcacctatcaa

SEQ ID NO: 1651553 - DNA, 15 bp, Homo sapiens
actgcacctatcaac

SEQ ID NO: 1651554 - DNA, 15 bp, Homo sapiens
ctgcacctatcaacc

SEQ ID NO: 1651555 - DNA, 15 bp, Homo sapiens
tgcacctatcaaccc

SEQ ID NO: 1651556 - DNA, 15 bp, Homo sapiens
gcacctatcaaccca

SEQ ID NO: 1651557 - DNA, 15 bp, Homo sapiens
cacctatcaacccat

SEQ ID NO: 1651558 - DNA, 15 bp, Homo sapiens
acctatcaacccatc

SEQ ID NO: 1651559 - DNA, 15 bp, Homo sapiens
cctatcaacccatca

SEQ ID NO: 1651560 - DNA, 15 bp, Homo sapiens
ctatcaacccatcat

SEQ ID NO: 1651561 - DNA, 15 bp, Homo sapiens
tatcaacccatcatc

SEQ ID NO: 1651562 - DNA, 15 bp, Homo sapiens
atcaacccatcatct

SEQ ID NO: 1651563 - DNA, 15 bp, Homo sapiens
tcaacccatcatcta

SEQ ID NO: 1651564 - DNA, 15 bp, Homo sapiens
caacccatcatctac

SEQ ID NO: 1651565 - DNA, 15 bp, Homo sapiens
aacccatcatctaca

SEQ ID NO: 1651566 - DNA, 15 bp, Homo sapiens
acccatcatctacat

SEQ ID NO: 1651567 - DNA, 15 bp, Homo sapiens
cccatcatctacatt

SEQ ID NO: 1651568 - DNA, 15 bp, Homo sapiens
ccatcatctacatta

SEQ ID NO: 1651569 - DNA, 15 bp, Homo sapiens
catcatctacattag

SEQ ID NO: 1651570 - DNA, 15 bp, Homo sapiens
atcatctacattagg

SEQ ID NO: 1651571 - DNA, 15 bp, Homo sapiens
tcatctacattaggt

SEQ ID NO: 1651572 - DNA, 15 bp, Homo sapiens
catctacattaggtg

SEQ ID NO: 1651573 - DNA, 15 bp, Homo sapiens
atctacattaggtgt

SEQ ID NO: 1651574 - DNA, 15 bp, Homo sapiens
tctacattaggtgtt

SEQ ID NO: 1651575 - DNA, 15 bp, Homo sapiens
ctacattaggtgttt

SEQ ID NO: 1651576 - DNA, 15 bp, Homo sapiens
tacattaggtgtttc

SEQ ID NO: 1651577 - DNA, 15 bp, Homo sapiens
acattaggtgtttct

SEQ ID NO: 1651578 - DNA, 15 bp, Homo sapiens
cattaggtgtttctc

SEQ ID NO: 1651579 - DNA, 15 bp, Homo sapiens
attaggtgtttctcc

SEQ ID NO: 1651580 - DNA, 15 bp, Homo sapiens
ttaggtgtttctcct

SEQ ID NO: 1651581 - DNA, 15 bp, Homo sapiens
taggtgtttctccta

SEQ ID NO: 1651582 - DNA, 15 bp, Homo sapiens
aggtgtttctcctaa

SEQ ID NO: 1651583 - DNA, 15 bp, Homo sapiens
ggtgtttctcctaat

SEQ ID NO: 1651584 - DNA, 15 bp, Homo sapiens
gtgtttctcctaatg

SEQ ID NO: 1651585 - DNA, 15 bp, Homo sapiens
tgtttctcctaatgc

SEQ ID NO: 1651586 - DNA, 15 bp, Homo sapiens
gtttctcctaatgct

SEQ ID NO: 1651587 - DNA, 15 bp, Homo sapiens
tttctcctaatgctg

SEQ ID NO: 1651588 - DNA, 15 bp, Homo sapiens
ttctcctaatgctgt

SEQ ID NO: 1651589 - DNA, 15 bp, Homo sapiens
tctcctaatgctgtc

SEQ ID NO: 1651590 - DNA, 15 bp, Homo sapiens
ctcctaatgctgtcc

SEQ ID NO: 1651591 - DNA, 15 bp, Homo sapiens
tcctaatgctgtccc

SEQ ID NO: 1651592 - DNA, 15 bp, Homo sapiens
cctaatgctgtccct

SEQ ID NO: 1651593 - DNA, 15 bp, Homo sapiens
ctaatgctgtccctc

SEQ ID NO: 1651594 - DNA, 15 bp, Homo sapiens
taatgctgtccctcc

SEQ ID NO: 1651595 - DNA, 15 bp, Homo sapiens
aatgctgtccctccc

SEQ ID NO: 1651596 - DNA, 15 bp, Homo sapiens
atgctgtccctcccc

SEQ ID NO: 1651597 - DNA, 15 bp, Homo sapiens
tgctgtccctccccc

SEQ ID NO: 1651598 - DNA, 15 bp, Homo sapiens
gctgtccctccccca

SEQ ID NO: 1651599 - DNA, 15 bp, Homo sapiens
ctgtccctcccccag

SEQ ID NO: 1651600 - DNA, 15 bp, Homo sapiens
tgtccctcccccagc

SEQ ID NO: 1651601 - DNA, 15 bp, Homo sapiens
gtccctcccccagcc

SEQ ID NO: 1651602 - DNA, 15 bp, Homo sapiens
tccctcccccagccc

SEQ ID NO: 1651603 - DNA, 15 bp, Homo sapiens
ccctcccccagcccc

SEQ ID NO: 1651604 - DNA, 15 bp, Homo sapiens
cctcccccagccccc

SEQ ID NO: 1651605 - DNA, 15 bp, Homo sapiens
ctcccccagcccccc

SEQ ID NO: 1651606 - DNA, 15 bp, Homo sapiens
tcccccagcccccca

SEQ ID NO: 1651607 - DNA, 15 bp, Homo sapiens
cccccagccccccag

SEQ ID NO: 1651608 - DNA, 15 bp, Homo sapiens
ccccagccccccagc

SEQ ID NO: 1651609 - DNA, 15 bp, Homo sapiens
cccagccccccagcc

SEQ ID NO: 1651610 - DNA, 15 bp, Homo sapiens
ccagccccccagccc

SEQ ID NO: 1651611 - DNA, 15 bp, Homo sapiens
cagccccccagccct

SEQ ID NO: 1651612 - DNA, 15 bp, Homo sapiens
agccccccagccctt

SEQ ID NO: 1651613 - DNA, 15 bp, Homo sapiens
gccccccagcccttg

SEQ ID NO: 1651614 - DNA, 15 bp, Homo sapiens
ccccccagcccttga

SEQ ID NO: 1651615 - DNA, 15 bp, Homo sapiens
cccccagcccttgac

SEQ ID NO: 1651616 - DNA, 15 bp, Homo sapiens
ccccagcccttgaca

SEQ ID NO: 1651617 - DNA, 15 bp, Homo sapiens
cccagcccttgacag

SEQ ID NO: 1651618 - DNA, 15 bp, Homo sapiens
ccagcccttgacagg

SEQ ID NO: 1651619 - DNA, 15 bp, Homo sapiens
cagcccttgacaggt

SEQ ID NO: 1651620 - DNA, 15 bp, Homo sapiens
agcccttgacaggtc

SEQ ID NO: 1651621 - DNA, 15 bp, Homo sapiens
gcccttgacaggtcc

SEQ ID NO: 1651622 - DNA, 15 bp, Homo sapiens
cccttgacaggtccc

SEQ ID NO: 1651623 - DNA, 15 bp, Homo sapiens
ccttgacaggtcccg

SEQ ID NO: 1651624 - DNA, 15 bp, Homo sapiens
cttgacaggtcccgg

SEQ ID NO: 1651625 - DNA, 15 bp, Homo sapiens
ttgacaggtcccggt

SEQ ID NO: 1651626 - DNA, 15 bp, Homo sapiens
tgacaggtcccggtg

SEQ ID NO: 1651627 - DNA, 15 bp, Homo sapiens
gacaggtcccggtgt

SEQ ID NO: 1651628 - DNA, 15 bp, Homo sapiens
acaggtcccggtgtg

SEQ ID NO: 1651629 - DNA, 15 bp, Homo sapiens
caggtcccggtgtgt

SEQ ID NO: 1651630 - DNA, 15 bp, Homo sapiens
aggtcccggtgtgtg

SEQ ID NO: 1651631 - DNA, 15 bp, Homo sapiens
ggtcccggtgtgtgt

SEQ ID NO: 1651632 - DNA, 15 bp, Homo sapiens
gtcccggtgtgtgtc

SEQ ID NO: 1651633 - DNA, 15 bp, Homo sapiens
tcccggtgtgtgtca

SEQ ID NO: 1651634 - DNA, 15 bp, Homo sapiens
cccggtgtgtgtcac

SEQ ID NO: 1651635 - DNA, 15 bp, Homo sapiens
ccggtgtgtgtcaca

SEQ ID NO: 1651636 - DNA, 15 bp, Homo sapiens
cggtgtgtgtcacac

SEQ ID NO: 1651637 - DNA, 15 bp, Homo sapiens
ggtgtgtgtcacacc

SEQ ID NO: 1651638 - DNA, 15 bp, Homo sapiens
gtgtgtgtcacaccg

SEQ ID NO: 1651639 - DNA, 15 bp, Homo sapiens
tgtgtgtcacaccgt

SEQ ID NO: 1651640 - DNA, 15 bp, Homo sapiens
gtgtgtcacaccgtt

SEQ ID NO: 1651641 - DNA, 15 bp, Homo sapiens
tgtgtcacaccgttt

SEQ ID NO: 1651642 - DNA, 15 bp, Homo sapiens
gtgtcacaccgtttt

SEQ ID NO: 1651643 - DNA, 15 bp, Homo sapiens
tgtcacaccgttttc

SEQ ID NO: 1651644 - DNA, 15 bp, Homo sapiens
gtcacaccgttttct

SEQ ID NO: 1651645 - DNA, 15 bp, Homo sapiens
tcacaccgttttcta

SEQ ID NO: 1651646 - DNA, 15 bp, Homo sapiens
cacaccgttttctat

SEQ ID NO: 1651647 - DNA, 15 bp, Homo sapiens
acaccgttttctata

SEQ ID NO: 1651648 - DNA, 15 bp, Homo sapiens
caccgttttctatat

SEQ ID NO: 1651649 - DNA, 15 bp, Homo sapiens
accgttttctatata

SEQ ID NO: 1651650 - DNA, 15 bp, Homo sapiens
ccgttttctatatat

SEQ ID NO: 1651651 - DNA, 15 bp, Homo sapiens
cgttttctatatata

SEQ ID NO: 1651652 - DNA, 15 bp, Homo sapiens
gttttctatatatac

SEQ ID NO: 1651653 - DNA, 15 bp, Homo sapiens
ttttctatatatact

SEQ ID NO: 1651654 - DNA, 15 bp, Homo sapiens
tttctatatatactc

SEQ ID NO: 1651655 - DNA, 15 bp, Homo sapiens
ttctatatatactct

SEQ ID NO: 1651656 - DNA, 15 bp, Homo sapiens
tctatatatactctt

SEQ ID NO: 1651657 - DNA, 15 bp, Homo sapiens
ctatatatactctta

SEQ ID NO: 1651658 - DNA, 15 bp, Homo sapiens
tatatatactcttaa

SEQ ID NO: 1651659 - DNA, 15 bp, Homo sapiens
atatatactcttaac

SEQ ID NO: 1651660 - DNA, 15 bp, Homo sapiens
tatatactcttaact

SEQ ID NO: 1651661 - DNA, 15 bp, Homo sapiens
atatactcttaactc

SEQ ID NO: 1651662 - DNA, 15 bp, Homo sapiens
tatactcttaactca

SEQ ID NO: 1651663 - DNA, 15 bp, Homo sapiens
atactcttaactcat

SEQ ID NO: 1651664 - DNA, 15 bp, Homo sapiens
tactcttaactcatg

SEQ ID NO: 1651665 - DNA, 15 bp, Homo sapiens
actcttaactcatgg

SEQ ID NO: 1651666 - DNA, 15 bp, Homo sapiens
ctcttaactcatggt

SEQ ID NO: 1651667 - DNA, 15 bp, Homo sapiens
tcttaactcatggtc

SEQ ID NO: 1651668 - DNA, 15 bp, Homo sapiens
cttaactcatggtct

SEQ ID NO: 1651669 - DNA, 15 bp, Homo sapiens
ttaactcatggtctc

SEQ ID NO: 1651670 - DNA, 15 bp, Homo sapiens
taactcatggtctca

SEQ ID NO: 1651671 - DNA, 15 bp, Homo sapiens
aactcatggtctcaa

SEQ ID NO: 1651672 - DNA, 15 bp, Homo sapiens
actcatggtctcaac

SEQ ID NO: 1651673 - DNA, 15 bp, Homo sapiens
ctcatggtctcaaca

SEQ ID NO: 1651674 - DNA, 15 bp, Homo sapiens
tcatggtctcaacat

SEQ ID NO: 1651675 - DNA, 15 bp, Homo sapiens
catggtctcaacatt

SEQ ID NO: 1651676 - DNA, 15 bp, Homo sapiens
atggtctcaacattt

SEQ ID NO: 1651677 - DNA, 15 bp, Homo sapiens
tggtctcaacatttc

SEQ ID NO: 1651678 - DNA, 15 bp, Homo sapiens
ggtctcaacatttct

SEQ ID NO: 1651679 - DNA, 15 bp, Homo sapiens
gtctcaacatttctg

SEQ ID NO: 1651680 - DNA, 15 bp, Homo sapiens
tctcaacatttctga

SEQ ID NO: 1651681 - DNA, 15 bp, Homo sapiens
ctcaacatttctgac

SEQ ID NO: 1651682 - DNA, 15 bp, Homo sapiens
tcaacatttctgaca

SEQ ID NO: 1651683 - DNA, 15 bp, Homo sapiens
caacatttctgacac

SEQ ID NO: 1651684 - DNA, 15 bp, Homo sapiens
aacatttctgacact

SEQ ID NO: 1651685 - DNA, 15 bp, Homo sapiens
acatttctgacactg

SEQ ID NO: 1651686 - DNA, 15 bp, Homo sapiens
catttctgacactga

SEQ ID NO: 1651687 - DNA, 15 bp, Homo sapiens
atttctgacactgac

SEQ ID NO: 1651688 - DNA, 15 bp, Homo sapiens
tttctgacactgacc

SEQ ID NO: 1651689 - DNA, 15 bp, Homo sapiens
ttctgacactgacca

SEQ ID NO: 1651690 - DNA, 15 bp, Homo sapiens
tctgacactgaccac

SEQ ID NO: 1651691 - DNA, 15 bp, Homo sapiens
ctgacactgaccaca

SEQ ID NO: 1651692 - DNA, 15 bp, Homo sapiens
tgacactgaccacat

SEQ ID NO: 1651693 - DNA, 15 bp, Homo sapiens
gacactgaccacatt

SEQ ID NO: 1651694 - DNA, 15 bp, Homo sapiens
acactgaccacattt

SEQ ID NO: 1651695 - DNA, 15 bp, Homo sapiens
cactgaccacatttc

SEQ ID NO: 1651696 - DNA, 15 bp, Homo sapiens
actgaccacatttcc

SEQ ID NO: 1651697 - DNA, 15 bp, Homo sapiens
ctgaccacatttccc

SEQ ID NO: 1651698 - DNA, 15 bp, Homo sapiens
tgaccacatttcccc

SEQ ID NO: 1651699 - DNA, 15 bp, Homo sapiens
gaccacatttccccc

SEQ ID NO: 1651700 - DNA, 15 bp, Homo sapiens
accacatttccccct

SEQ ID NO: 1651701 - DNA, 15 bp, Homo sapiens
ccacatttcccccta

SEQ ID NO: 1651702 - DNA, 15 bp, Homo sapiens
cacatttccccctaa

SEQ ID NO: 1651703 - DNA, 15 bp, Homo sapiens
acatttccccctaat

SEQ ID NO: 1651704 - DNA, 15 bp, Homo sapiens
catttccccctaatt

SEQ ID NO: 1651705 - DNA, 15 bp, Homo sapiens
atttccccctaattt

SEQ ID NO: 1651706 - DNA, 15 bp, Homo sapiens
tttccccctaatttg

SEQ ID NO: 1651707 - DNA, 15 bp, Homo sapiens
ttccccctaatttga

SEQ ID NO: 1651708 - DNA, 15 bp, Homo sapiens
tccccctaatttgac

SEQ ID NO: 1651709 - DNA, 15 bp, Homo sapiens
ccccctaatttgact

SEQ ID NO: 1651710 - DNA, 15 bp, Homo sapiens
cccctaatttgactc

SEQ ID NO: 1651711 - DNA, 15 bp, Homo sapiens
ccctaatttgactct

SEQ ID NO: 1651712 - DNA, 15 bp, Homo sapiens
cctaatttgactctg

SEQ ID NO: 1651713 - DNA, 15 bp, Homo sapiens
ctaatttgactctga

SEQ ID NO: 1651714 - DNA, 15 bp, Homo sapiens
taatttgactctgac

SEQ ID NO: 1651715 - DNA, 15 bp, Homo sapiens
aatttgactctgacc

SEQ ID NO: 1651716 - DNA, 15 bp, Homo sapiens
atttgactctgacca

SEQ ID NO: 1651717 - DNA, 15 bp, Homo sapiens
tttgactctgaccag

SEQ ID NO: 1651718 - DNA, 15 bp, Homo sapiens
ttgactctgaccaga

SEQ ID NO: 1651719 - DNA, 15 bp, Homo sapiens
tgactctgaccagaa

SEQ ID NO: 1651720 - DNA, 15 bp, Homo sapiens
gactctgaccagaaa

SEQ ID NO: 1651721 - DNA, 15 bp, Homo sapiens
actctgaccagaaaa

SEQ ID NO: 1651722 - DNA, 15 bp, Homo sapiens
ctctgaccagaaaaa

SEQ ID NO: 1651723 - DNA, 15 bp, Homo sapiens
tctgaccagaaaaat

SEQ ID NO: 1651724 - DNA, 15 bp, Homo sapiens
ctgaccagaaaaatc

SEQ ID NO: 1651725 - DNA, 15 bp, Homo sapiens
tgaccagaaaaatca

SEQ ID NO: 1651726 - DNA, 15 bp, Homo sapiens
gaccagaaaaatcag

SEQ ID NO: 1651727 - DNA, 15 bp, Homo sapiens
accagaaaaatcagg

SEQ ID NO: 1651728 - DNA, 15 bp, Homo sapiens
ccagaaaaatcaggt

SEQ ID NO: 1651729 - DNA, 15 bp, Homo sapiens
cagaaaaatcaggta

SEQ ID NO: 1651730 - DNA, 15 bp, Homo sapiens
agaaaaatcaggtaa

SEQ ID NO: 1651731 - DNA, 15 bp, Homo sapiens
gaaaaatcaggtaaa

SEQ ID NO: 1651732 - DNA, 15 bp, Homo sapiens
aaaaatcaggtaaaa

SEQ ID NO: 1651733 - DNA, 15 bp, Homo sapiens
aaaatcaggtaaaaa

SEQ ID NO: 1651734 - DNA, 15 bp, Homo sapiens
aaatcaggtaaaaag

SEQ ID NO: 1651735 - DNA, 15 bp, Homo sapiens
aatcaggtaaaaagt

SEQ ID NO: 1651736 - DNA, 15 bp, Homo sapiens
atcaggtaaaaagtg

SEQ ID NO: 1651737 - DNA, 15 bp, Homo sapiens
tcaggtaaaaagtgc

SEQ ID NO: 1651738 - DNA, 15 bp, Homo sapiens
caggtaaaaagtgct

SEQ ID NO: 1651739 - DNA, 15 bp, Homo sapiens
aggtaaaaagtgcta

SEQ ID NO: 1651740 - DNA, 15 bp, Homo sapiens
ggtaaaaagtgctag

SEQ ID NO: 1651741 - DNA, 15 bp, Homo sapiens
gtaaaaagtgctagt

SEQ ID NO: 1651742 - DNA, 15 bp, Homo sapiens
taaaaagtgctagtg

SEQ ID NO: 1651743 - DNA, 15 bp, Homo sapiens
aaaaagtgctagtgc

SEQ ID NO: 1651744 - DNA, 15 bp, Homo sapiens
aaaagtgctagtgca

SEQ ID NO: 1651745 - DNA, 15 bp, Homo sapiens
aaagtgctagtgcag

SEQ ID NO: 1651746 - DNA, 15 bp, Homo sapiens
aagtgctagtgcaga

SEQ ID NO: 1651747 - DNA, 15 bp, Homo sapiens
agtgctagtgcagat

SEQ ID NO: 1651748 - DNA, 15 bp, Homo sapiens
gtgctagtgcagatc

SEQ ID NO: 1651749 - DNA, 15 bp, Homo sapiens
tgctagtgcagatcc

SEQ ID NO: 1651750 - DNA, 15 bp, Homo sapiens
gctagtgcagatcct

SEQ ID NO: 1651751 - DNA, 15 bp, Homo sapiens
ctagtgcagatcctt

SEQ ID NO: 1651752 - DNA, 15 bp, Homo sapiens
tagtgcagatccttg

SEQ ID NO: 1651753 - DNA, 15 bp, Homo sapiens
agtgcagatccttgc

SEQ ID NO: 1651754 - DNA, 15 bp, Homo sapiens
gtgcagatccttgca

SEQ ID NO: 1651755 - DNA, 15 bp, Homo sapiens
tgcagatccttgcac

SEQ ID NO: 1651756 - DNA, 15 bp, Homo sapiens
gcagatccttgcacc

SEQ ID NO: 1651757 - DNA, 15 bp, Homo sapiens
cagatccttgcacca

SEQ ID NO: 1651758 - DNA, 15 bp, Homo sapiens
agatccttgcaccac

SEQ ID NO: 1651759 - DNA, 15 bp, Homo sapiens
gatccttgcaccaca

SEQ ID NO: 1651760 - DNA, 15 bp, Homo sapiens
atccttgcaccacaa

SEQ ID NO: 1651761 - DNA, 15 bp, Homo sapiens
tccttgcaccacaat

SEQ ID NO: 1651762 - DNA, 15 bp, Homo sapiens
ccttgcaccacaatg

SEQ ID NO: 1651763 - DNA, 15 bp, Homo sapiens
cttgcaccacaatgc

SEQ ID NO: 1651764 - DNA, 15 bp, Homo sapiens
ttgcaccacaatgca

SEQ ID NO: 1651765 - DNA, 15 bp, Homo sapiens
tgcaccacaatgcag

SEQ ID NO: 1651766 - DNA, 15 bp, Homo sapiens
gcaccacaatgcaga

SEQ ID NO: 1651767 - DNA, 15 bp, Homo sapiens
caccacaatgcagat

SEQ ID NO: 1651768 - DNA, 15 bp, Homo sapiens
accacaatgcagatg

SEQ ID NO: 1651769 - DNA, 15 bp, Homo sapiens
ccacaatgcagatgt

SEQ ID NO: 1651770 - DNA, 15 bp, Homo sapiens
cacaatgcagatgta

SEQ ID NO: 1651771 - DNA, 15 bp, Homo sapiens
acaatgcagatgtaa

SEQ ID NO: 1651772 - DNA, 15 bp, Homo sapiens
caatgcagatgtaaa

SEQ ID NO: 1651773 - DNA, 15 bp, Homo sapiens
aatgcagatgtaaaa

SEQ ID NO: 1651774 - DNA, 15 bp, Homo sapiens
atgcagatgtaaaaa

SEQ ID NO: 1651775 - DNA, 15 bp, Homo sapiens
tgcagatgtaaaaat

SEQ ID NO: 1651776 - DNA, 15 bp, Homo sapiens
gcagatgtaaaaatt

SEQ ID NO: 1651777 - DNA, 15 bp, Homo sapiens
cagatgtaaaaattt

SEQ ID NO: 1651778 - DNA, 15 bp, Homo sapiens
agatgtaaaaatttc

SEQ ID NO: 1651779 - DNA, 15 bp, Homo sapiens
gatgtaaaaatttca

SEQ ID NO: 1651780 - DNA, 15 bp, Homo sapiens
atgtaaaaatttcaa

SEQ ID NO: 1651781 - DNA, 15 bp, Homo sapiens
tgtaaaaatttcaag

SEQ ID NO: 1651782 - DNA, 15 bp, Homo sapiens
gtaaaaatttcaagt

SEQ ID NO: 1651783 - DNA, 15 bp, Homo sapiens
taaaaatttcaagtc

SEQ ID NO: 1651784 - DNA, 15 bp, Homo sapiens
aaaaatttcaagtct

SEQ ID NO: 1651785 - DNA, 15 bp, Homo sapiens
aaaatttcaagtcta

SEQ ID NO: 1651786 - DNA, 15 bp, Homo sapiens
aaatttcaagtctaa

SEQ ID NO: 1651787 - DNA, 15 bp, Homo sapiens
aatttcaagtctaac

SEQ ID NO: 1651788 - DNA, 15 bp, Homo sapiens
atttcaagtctaaca

SEQ ID NO: 1651789 - DNA, 15 bp, Homo sapiens
tttcaagtctaacat

SEQ ID NO: 1651790 - DNA, 15 bp, Homo sapiens
ttcaagtctaacatt

SEQ ID NO: 1651791 - DNA, 15 bp, Homo sapiens
tcaagtctaacattt

SEQ ID NO: 1651792 - DNA, 15 bp, Homo sapiens
caagtctaacatttt

SEQ ID NO: 1651793 - DNA, 15 bp, Homo sapiens
aagtctaacattttc

SEQ ID NO: 1651794 - DNA, 15 bp, Homo sapiens
agtctaacattttct

SEQ ID NO: 1651795 - DNA, 15 bp, Homo sapiens
gtctaacattttctt

SEQ ID NO: 1651796 - DNA, 15 bp, Homo sapiens
tctaacattttctta

SEQ ID NO: 1651797 - DNA, 15 bp, Homo sapiens
ctaacattttcttac

SEQ ID NO: 1651798 - DNA, 15 bp, Homo sapiens
taacattttcttact

SEQ ID NO: 1651799 - DNA, 15 bp, Homo sapiens
aacattttcttactg

SEQ ID NO: 1651800 - DNA, 15 bp, Homo sapiens
acattttcttactgt

SEQ ID NO: 1651801 - DNA, 15 bp, Homo sapiens
cattttcttactgtg

SEQ ID NO: 1651802 - DNA, 15 bp, Homo sapiens
attttcttactgtgt

SEQ ID NO: 1651803 - DNA, 15 bp, Homo sapiens
ttttcttactgtgtc

SEQ ID NO: 1651804 - DNA, 15 bp, Homo sapiens
tttcttactgtgtca

SEQ ID NO: 1651805 - DNA, 15 bp, Homo sapiens
ttcttactgtgtcat

SEQ ID NO: 1651806 - DNA, 15 bp, Homo sapiens
tcttactgtgtcata

SEQ ID NO: 1651807 - DNA, 15 bp, Homo sapiens
cttactgtgtcataa

SEQ ID NO: 1651808 - DNA, 15 bp, Homo sapiens
ttactgtgtcataat

SEQ ID NO: 1651809 - DNA, 15 bp, Homo sapiens
tactgtgtcataatt

SEQ ID NO: 1651810 - DNA, 15 bp, Homo sapiens
actgtgtcataattc

SEQ ID NO: 1651811 - DNA, 15 bp, Homo sapiens
ctgtgtcataattct

SEQ ID NO: 1651812 - DNA, 15 bp, Homo sapiens
tgtgtcataattctt

SEQ ID NO: 1651813 - DNA, 15 bp, Homo sapiens
gtgtcataattcttt

SEQ ID NO: 1651814 - DNA, 15 bp, Homo sapiens
tgtcataattcttta

SEQ ID NO: 1651815 - DNA, 15 bp, Homo sapiens
gtcataattctttat

SEQ ID NO: 1651816 - DNA, 15 bp, Homo sapiens
tcataattctttatc

SEQ ID NO: 1651817 - DNA, 15 bp, Homo sapiens
cataattctttatct

SEQ ID NO: 1651818 - DNA, 15 bp, Homo sapiens
ataattctttatctt

SEQ ID NO: 1651819 - DNA, 15 bp, Homo sapiens
taattctttatcttt

SEQ ID NO: 1651820 - DNA, 15 bp, Homo sapiens
aattctttatctttc

SEQ ID NO: 1651821 - DNA, 15 bp, Homo sapiens
attctttatctttct

SEQ ID NO: 1651822 - DNA, 15 bp, Homo sapiens
ttctttatctttctt

SEQ ID NO: 1651823 - DNA, 15 bp, Homo sapiens
tctttatctttcttc

SEQ ID NO: 1651824 - DNA, 15 bp, Homo sapiens
ctttatctttcttca

SEQ ID NO: 1651825 - DNA, 15 bp, Homo sapiens
tttatctttcttcac

SEQ ID NO: 1651826 - DNA, 15 bp, Homo sapiens
ttatctttcttcact

SEQ ID NO: 1651827 - DNA, 15 bp, Homo sapiens
tatctttcttcactc

SEQ ID NO: 1651828 - DNA, 15 bp, Homo sapiens
atctttcttcactcc

SEQ ID NO: 1651829 - DNA, 15 bp, Homo sapiens
tctttcttcactcca

SEQ ID NO: 1651830 - DNA, 15 bp, Homo sapiens
ctttcttcactccag

SEQ ID NO: 1651831 - DNA, 15 bp, Homo sapiens
tttcttcactccagc

SEQ ID NO: 1651832 - DNA, 15 bp, Homo sapiens
ttcttcactccagcc

SEQ ID NO: 1651833 - DNA, 15 bp, Homo sapiens
tcttcactccagccc

SEQ ID NO: 1651834 - DNA, 15 bp, Homo sapiens
cttcactccagccca

SEQ ID NO: 1651835 - DNA, 15 bp, Homo sapiens
ttcactccagcccag

SEQ ID NO: 1651836 - DNA, 15 bp, Homo sapiens
cactccagcccagcc

SEQ ID NO: 1651837 - DNA, 15 bp, Homo sapiens
actccagcccagccc

SEQ ID NO: 1651838 - DNA, 15 bp, Homo sapiens
ctccagcccagccca

SEQ ID NO: 1651839 - DNA, 15 bp, Homo sapiens
tccagcccagcccag

SEQ ID NO: 1651840 - DNA, 15 bp, Homo sapiens
ccagcccagcccagc

SEQ ID NO: 1651841 - DNA, 15 bp, Homo sapiens
cagcccagcccagcc

SEQ ID NO: 1651842 - DNA, 15 bp, Homo sapiens
agcccagcccagcca

SEQ ID NO: 1651843 - DNA, 15 bp, Homo sapiens
gcccagcccagccag

SEQ ID NO: 1651844 - DNA, 15 bp, Homo sapiens
cccagcccagccagc

SEQ ID NO: 1651845 - DNA, 15 bp, Homo sapiens
ccagcccagccagca

SEQ ID NO: 1651846 - DNA, 15 bp, Homo sapiens
cagcccagccagcag

SEQ ID NO: 1651847 - DNA, 15 bp, Homo sapiens
agcccagccagcaga

SEQ ID NO: 1651848 - DNA, 15 bp, Homo sapiens
gcccagccagcagac

SEQ ID NO: 1651849 - DNA, 15 bp, Homo sapiens
cccagccagcagaca

SEQ ID NO: 1651850 - DNA, 15 bp, Homo sapiens
ccagccagcagacat

SEQ ID NO: 1651851 - DNA, 15 bp, Homo sapiens
cagccagcagacatg

SEQ ID NO: 1651852 - DNA, 15 bp, Homo sapiens
agccagcagacatgc

SEQ ID NO: 1651853 - DNA, 15 bp, Homo sapiens
gccagcagacatgca

SEQ ID NO: 1651854 - DNA, 15 bp, Homo sapiens
ccagcagacatgcaa

SEQ ID NO: 1651855 - DNA, 15 bp, Homo sapiens
cagcagacatgcaaa

SEQ ID NO: 1651856 - DNA, 15 bp, Homo sapiens
agcagacatgcaaag

SEQ ID NO: 1651857 - DNA, 15 bp, Homo sapiens
gcagacatgcaaagt

SEQ ID NO: 1651858 - DNA, 15 bp, Homo sapiens
cagacatgcaaagtt

SEQ ID NO: 1651859 - DNA, 15 bp, Homo sapiens
agacatgcaaagttt

SEQ ID NO: 1651860 - DNA, 15 bp, Homo sapiens
gacatgcaaagtttt

SEQ ID NO: 1651861 - DNA, 15 bp, Homo sapiens
acatgcaaagttttc

SEQ ID NO: 1651862 - DNA, 15 bp, Homo sapiens
catgcaaagttttca

SEQ ID NO: 1651863 - DNA, 15 bp, Homo sapiens
atgcaaagttttcat

SEQ ID NO: 1651864 - DNA, 15 bp, Homo sapiens
tgcaaagttttcatg

SEQ ID NO: 1651865 - DNA, 15 bp, Homo sapiens
gcaaagttttcatgt

SEQ ID NO: 1651866 - DNA, 15 bp, Homo sapiens
caaagttttcatgta

SEQ ID NO: 1651867 - DNA, 15 bp, Homo sapiens
aaagttttcatgtaa

SEQ ID NO: 1651868 - DNA, 15 bp, Homo sapiens
aagttttcatgtaat

SEQ ID NO: 1651869 - DNA, 15 bp, Homo sapiens
agttttcatgtaata

SEQ ID NO: 1651870 - DNA, 15 bp, Homo sapiens
gttttcatgtaataa

SEQ ID NO: 1651871 - DNA, 15 bp, Homo sapiens
ttttcatgtaataat

SEQ ID NO: 1651872 - DNA, 15 bp, Homo sapiens
tttcatgtaataatt

SEQ ID NO: 1651873 - DNA, 15 bp, Homo sapiens
ttcatgtaataattt

SEQ ID NO: 1651874 - DNA, 15 bp, Homo sapiens
tcatgtaataatttt

SEQ ID NO: 1651875 - DNA, 15 bp, Homo sapiens
catgtaataattttt

SEQ ID NO: 1651876 - DNA, 15 bp, Homo sapiens
atgtaataattttta

SEQ ID NO: 1651877 - DNA, 15 bp, Homo sapiens
tgtaataatttttaa

SEQ ID NO: 1651878 - DNA, 15 bp, Homo sapiens
gtaataatttttaac

SEQ ID NO: 1651879 - DNA, 15 bp, Homo sapiens
taataatttttaact

SEQ ID NO: 1651880 - DNA, 15 bp, Homo sapiens
aataatttttaacta

SEQ ID NO: 1651881 - DNA, 15 bp, Homo sapiens
ataatttttaactac

SEQ ID NO: 1651882 - DNA, 15 bp, Homo sapiens
taatttttaactact

SEQ ID NO: 1651883 - DNA, 15 bp, Homo sapiens
aatttttaactactt

SEQ ID NO: 1651884 - DNA, 15 bp, Homo sapiens
atttttaactactta

SEQ ID NO: 1651885 - DNA, 15 bp, Homo sapiens
tttttaactacttat

SEQ ID NO: 1651886 - DNA, 15 bp, Homo sapiens
ttttaactacttatt

SEQ ID NO: 1651887 - DNA, 15 bp, Homo sapiens
tttaactacttattt

SEQ ID NO: 1651888 - DNA, 15 bp, Homo sapiens
ttaactacttatttg

SEQ ID NO: 1651889 - DNA, 15 bp, Homo sapiens
taactacttatttga

SEQ ID NO: 1651890 - DNA, 15 bp, Homo sapiens
aactacttatttgat

SEQ ID NO: 1651891 - DNA, 15 bp, Homo sapiens
actacttatttgata

SEQ ID NO: 1651892 - DNA, 15 bp, Homo sapiens
ctacttatttgatat

SEQ ID NO: 1651893 - DNA, 15 bp, Homo sapiens
tacttatttgatatt

SEQ ID NO: 1651894 - DNA, 15 bp, Homo sapiens
acttatttgatattt

SEQ ID NO: 1651895 - DNA, 15 bp, Homo sapiens
cttatttgatatttt

SEQ ID NO: 1651896 - DNA, 15 bp, Homo sapiens
ttatttgatattttc

SEQ ID NO: 1651897 - DNA, 15 bp, Homo sapiens
tatttgatattttca

SEQ ID NO: 1651898 - DNA, 15 bp, Homo sapiens
atttgatattttcag

SEQ ID NO: 1651899 - DNA, 15 bp, Homo sapiens
tttgatattttcagg

SEQ ID NO: 1651900 - DNA, 15 bp, Homo sapiens
ttgatattttcaggc

SEQ ID NO: 1651901 - DNA, 15 bp, Homo sapiens
tgatattttcaggct

SEQ ID NO: 1651902 - DNA, 15 bp, Homo sapiens
gatattttcaggctg

SEQ ID NO: 1651903 - DNA, 15 bp, Homo sapiens
atattttcaggctgt

SEQ ID NO: 1651904 - DNA, 15 bp, Homo sapiens
tattttcaggctgtc

SEQ ID NO: 1651905 - DNA, 15 bp, Homo sapiens
attttcaggctgtcc

SEQ ID NO: 1651906 - DNA, 15 bp, Homo sapiens
ttttcaggctgtccc

SEQ ID NO: 1651907 - DNA, 15 bp, Homo sapiens
tttcaggctgtccct

SEQ ID NO: 1651908 - DNA, 15 bp, Homo sapiens
ttcaggctgtccctt

SEQ ID NO: 1651909 - DNA, 15 bp, Homo sapiens
tcaggctgtcccttt

SEQ ID NO: 1651910 - DNA, 15 bp, Homo sapiens
caggctgtcccttta

SEQ ID NO: 1651911 - DNA, 15 bp, Homo sapiens
aggctgtccctttat

SEQ ID NO: 1651912 - DNA, 15 bp, Homo sapiens
ggctgtccctttata

SEQ ID NO: 1651913 - DNA, 15 bp, Homo sapiens
gctgtccctttataa

SEQ ID NO: 1651914 - DNA, 15 bp, Homo sapiens
ctgtccctttataat

SEQ ID NO: 1651915 - DNA, 15 bp, Homo sapiens
tgtccctttataatg

SEQ ID NO: 1651916 - DNA, 15 bp, Homo sapiens
gtccctttataatgt

SEQ ID NO: 1651917 - DNA, 15 bp, Homo sapiens
tccctttataatgtt

SEQ ID NO: 1651918 - DNA, 15 bp, Homo sapiens
ccctttataatgtta

SEQ ID NO: 1651919 - DNA, 15 bp, Homo sapiens
cctttataatgttaa

SEQ ID NO: 1651920 - DNA, 15 bp, Homo sapiens
ctttataatgttaaa

SEQ ID NO: 1651921 - DNA, 15 bp, Homo sapiens
tttataatgttaaaa

SEQ ID NO: 1651922 - DNA, 15 bp, Homo sapiens
ttataatgttaaaat

SEQ ID NO: 1651923 - DNA, 15 bp, Homo sapiens
tataatgttaaaata

SEQ ID NO: 1651924 - DNA, 15 bp, Homo sapiens
ataatgttaaaataa

SEQ ID NO: 1651925 - DNA, 15 bp, Homo sapiens
taatgttaaaataat

SEQ ID NO: 1651926 - DNA, 15 bp, Homo sapiens
aatgttaaaataatt

SEQ ID NO: 1651927 - DNA, 15 bp, Homo sapiens
atgttaaaataattt

SEQ ID NO: 1651928 - DNA, 15 bp, Homo sapiens
tgttaaaataattta

SEQ ID NO: 1651929 - DNA, 15 bp, Homo sapiens
gttaaaataatttat

SEQ ID NO: 1651930 - DNA, 15 bp, Homo sapiens
ttaaaataatttatc

SEQ ID NO: 1651931 - DNA, 15 bp, Homo sapiens
taaaataatttatct

SEQ ID NO: 1651932 - DNA, 15 bp, Homo sapiens
aaaataatttatctt

SEQ ID NO: 1651933 - DNA, 15 bp, Homo sapiens
aaataatttatcttc

SEQ ID NO: 1651934 - DNA, 15 bp, Homo sapiens
aataatttatcttca

SEQ ID NO: 1651935 - DNA, 15 bp, Homo sapiens
ataatttatcttcaa

SEQ ID NO: 1651936 - DNA, 15 bp, Homo sapiens
taatttatcttcaat

SEQ ID NO: 1651937 - DNA, 15 bp, Homo sapiens
aatttatcttcaatg

SEQ ID NO: 1651938 - DNA, 15 bp, Homo sapiens
atttatcttcaatgt

SEQ ID NO: 1651939 - DNA, 15 bp, Homo sapiens
tttatcttcaatgta

SEQ ID NO: 1651940 - DNA, 15 bp, Homo sapiens
ttatcttcaatgtaa

SEQ ID NO: 1651941 - DNA, 15 bp, Homo sapiens
tatcttcaatgtaat

SEQ ID NO: 1651942 - DNA, 15 bp, Homo sapiens
atcttcaatgtaatc

SEQ ID NO: 1651943 - DNA, 15 bp, Homo sapiens
tcttcaatgtaatca

SEQ ID NO: 1651944 - DNA, 15 bp, Homo sapiens
cttcaatgtaatcaa

SEQ ID NO: 1651945 - DNA, 15 bp, Homo sapiens
ttcaatgtaatcaat

SEQ ID NO: 1651946 - DNA, 15 bp, Homo sapiens
tcaatgtaatcaatt

SEQ ID NO: 1651947 - DNA, 15 bp, Homo sapiens
caatgtaatcaattt

SEQ ID NO: 1651948 - DNA, 15 bp, Homo sapiens
aatgtaatcaatttg

SEQ ID NO: 1651949 - DNA, 15 bp, Homo sapiens
atgtaatcaatttga

SEQ ID NO: 1651950 - DNA, 15 bp, Homo sapiens
tgtaatcaatttgaa

SEQ ID NO: 1651951 - DNA, 15 bp, Homo sapiens
gtaatcaatttgaag

SEQ ID NO: 1651952 - DNA, 15 bp, Homo sapiens
taatcaatttgaagg

SEQ ID NO: 1651953 - DNA, 15 bp, Homo sapiens
aatcaatttgaagga

SEQ ID NO: 1651954 - DNA, 15 bp, Homo sapiens
atcaatttgaaggaa

SEQ ID NO: 1651955 - DNA, 15 bp, Homo sapiens
tcaatttgaaggaac

SEQ ID NO: 1651956 - DNA, 15 bp, Homo sapiens
caatttgaaggaaca

SEQ ID NO: 1651957 - DNA, 15 bp, Homo sapiens
aatttgaaggaacaa

SEQ ID NO: 1651958 - DNA, 15 bp, Homo sapiens
atttgaaggaacaat

SEQ ID NO: 1651959 - DNA, 15 bp, Homo sapiens
tttgaaggaacaatg

SEQ ID NO: 1651960 - DNA, 15 bp, Homo sapiens
ttgaaggaacaatgc

SEQ ID NO: 1651961 - DNA, 15 bp, Homo sapiens
tgaaggaacaatgca

SEQ ID NO: 1651962 - DNA, 15 bp, Homo sapiens
gaaggaacaatgcaa

SEQ ID NO: 1651963 - DNA, 15 bp, Homo sapiens
aaggaacaatgcaaa

SEQ ID NO: 1651964 - DNA, 15 bp, Homo sapiens
aggaacaatgcaaat

SEQ ID NO: 1651965 - DNA, 15 bp, Homo sapiens
ggaacaatgcaaata

SEQ ID NO: 1651966 - DNA, 15 bp, Homo sapiens
gaacaatgcaaataa

SEQ ID NO: 1651967 - DNA, 15 bp, Homo sapiens
aacaatgcaaataag

SEQ ID NO: 1651968 - DNA, 15 bp, Homo sapiens
acaatgcaaataagt

SEQ ID NO: 1651969 - DNA, 15 bp, Homo sapiens
caatgcaaataagta

SEQ ID NO: 1651970 - DNA, 15 bp, Homo sapiens
aatgcaaataagtat

SEQ ID NO: 1651971 - DNA, 15 bp, Homo sapiens
atgcaaataagtatg

SEQ ID NO: 1651972 - DNA, 15 bp, Homo sapiens
tgcaaataagtatgt

SEQ ID NO: 1651973 - DNA, 15 bp, Homo sapiens
gcaaataagtatgtt

SEQ ID NO: 1651974 - DNA, 15 bp, Homo sapiens
caaataagtatgttg

SEQ ID NO: 1651975 - DNA, 15 bp, Homo sapiens
aaataagtatgttgc

SEQ ID NO: 1651976 - DNA, 15 bp, Homo sapiens
aataagtatgttgct

SEQ ID NO: 1651977 - DNA, 15 bp, Homo sapiens
ataagtatgttgctt

SEQ ID NO: 1651978 - DNA, 15 bp, Homo sapiens
taagtatgttgcttg

SEQ ID NO: 1651979 - DNA, 15 bp, Homo sapiens
aagtatgttgcttgt

SEQ ID NO: 1651980 - DNA, 15 bp, Homo sapiens
agtatgttgcttgtc

SEQ ID NO: 1651981 - DNA, 15 bp, Homo sapiens
gtatgttgcttgtct

SEQ ID NO: 1651982 - DNA, 15 bp, Homo sapiens
tatgttgcttgtctg

SEQ ID NO: 1651983 - DNA, 15 bp, Homo sapiens
atgttgcttgtctgt

SEQ ID NO: 1651984 - DNA, 15 bp, Homo sapiens
tgttgcttgtctgtg

SEQ ID NO: 1651985 - DNA, 15 bp, Homo sapiens
gttgcttgtctgtgt

SEQ ID NO: 1651986 - DNA, 15 bp, Homo sapiens
ttgcttgtctgtgta

SEQ ID NO: 1651987 - DNA, 15 bp, Homo sapiens
tgcttgtctgtgtac

SEQ ID NO: 1651988 - DNA, 15 bp, Homo sapiens
gcttgtctgtgtaca

SEQ ID NO: 1651989 - DNA, 15 bp, Homo sapiens
cttgtctgtgtacaa

SEQ ID NO: 1651990 - DNA, 15 bp, Homo sapiens
ttgtctgtgtacaaa

SEQ ID NO: 1651991 - DNA, 15 bp, Homo sapiens
tgtctgtgtacaaac

SEQ ID NO: 1651992 - DNA, 15 bp, Homo sapiens
gtctgtgtacaaacc

SEQ ID NO: 1651993 - DNA, 15 bp, Homo sapiens
tctgtgtacaaacca

SEQ ID NO: 1651994 - DNA, 15 bp, Homo sapiens
ctgtgtacaaaccaa

SEQ ID NO: 1651995 - DNA, 15 bp, Homo sapiens
tgtgtacaaaccaaa

SEQ ID NO: 1651996 - DNA, 15 bp, Homo sapiens
gtgtacaaaccaaac

SEQ ID NO: 1651997 - DNA, 15 bp, Homo sapiens
tgtacaaaccaaaca

SEQ ID NO: 1651998 - DNA, 15 bp, Homo sapiens
gtacaaaccaaacac

SEQ ID NO: 1651999 - DNA, 15 bp, Homo sapiens
tacaaaccaaacact

SEQ ID NO: 1652000 - DNA, 15 bp, Homo sapiens
acaaaccaaacacta

SEQ ID NO: 1652001 - DNA, 15 bp, Homo sapiens
caaaccaaacactaa

SEQ ID NO: 1652002 - DNA, 15 bp, Homo sapiens
aaccaaacactaaga

SEQ ID NO: 1652003 - DNA, 15 bp, Homo sapiens
accaaacactaagaa

SEQ ID NO: 1652004 - DNA, 15 bp, Homo sapiens
ccaaacactaagaat

SEQ ID NO: 1652005 - DNA, 15 bp, Homo sapiens
caaacactaagaatt

SEQ ID NO: 1652006 - DNA, 15 bp, Homo sapiens
aaacactaagaattt

SEQ ID NO: 1652007 - DNA, 15 bp, Homo sapiens
aacactaagaatttt

SEQ ID NO: 1652008 - DNA, 15 bp, Homo sapiens
acactaagaattttt

SEQ ID NO: 1652009 - DNA, 15 bp, Homo sapiens
cactaagaatttttc

SEQ ID NO: 1652010 - DNA, 15 bp, Homo sapiens
actaagaatttttca

SEQ ID NO: 1652011 - DNA, 15 bp, Homo sapiens
ctaagaatttttcaa

SEQ ID NO: 1652012 - DNA, 15 bp, Homo sapiens
taagaatttttcaac

SEQ ID NO: 1652013 - DNA, 15 bp, Homo sapiens
aagaatttttcaacc

SEQ ID NO: 1652014 - DNA, 15 bp, Homo sapiens
agaatttttcaacca

SEQ ID NO: 1652015 - DNA, 15 bp, Homo sapiens
gaatttttcaaccag

SEQ ID NO: 1652016 - DNA, 15 bp, Homo sapiens
aatttttcaaccagt

SEQ ID NO: 1652017 - DNA, 15 bp, Homo sapiens
atttttcaaccagtt

SEQ ID NO: 1652018 - DNA, 15 bp, Homo sapiens
tttttcaaccagttt

SEQ ID NO: 1652019 - DNA, 15 bp, Homo sapiens
ttttcaaccagtttt

SEQ ID NO: 1652020 - DNA, 15 bp, Homo sapiens
tttcaaccagttttg

SEQ ID NO: 1652021 - DNA, 15 bp, Homo sapiens
ttcaaccagttttgc

SEQ ID NO: 1652022 - DNA, 15 bp, Homo sapiens
tcaaccagttttgct

SEQ ID NO: 1652023 - DNA, 15 bp, Homo sapiens
caaccagttttgctg

SEQ ID NO: 1652024 - DNA, 15 bp, Homo sapiens
aaccagttttgctgg

SEQ ID NO: 1652025 - DNA, 15 bp, Homo sapiens
accagttttgctgga

SEQ ID NO: 1652026 - DNA, 15 bp, Homo sapiens
ccagttttgctggat

SEQ ID NO: 1652027 - DNA, 15 bp, Homo sapiens
cagttttgctggatt

SEQ ID NO: 1652028 - DNA, 15 bp, Homo sapiens
agttttgctggattc

SEQ ID NO: 1652029 - DNA, 15 bp, Homo sapiens
gttttgctggattca

SEQ ID NO: 1652030 - DNA, 15 bp, Homo sapiens
ttttgctggattcat

SEQ ID NO: 1652031 - DNA, 15 bp, Homo sapiens
tttgctggattcatc

SEQ ID NO: 1652032 - DNA, 15 bp, Homo sapiens
ttgctggattcatca

SEQ ID NO: 1652033 - DNA, 15 bp, Homo sapiens
tgctggattcatcag

SEQ ID NO: 1652034 - DNA, 15 bp, Homo sapiens
gctggattcatcagc

SEQ ID NO: 1652035 - DNA, 15 bp, Homo sapiens
ctggattcatcagca

SEQ ID NO: 1652036 - DNA, 15 bp, Homo sapiens
tggattcatcagcat

SEQ ID NO: 1652037 - DNA, 15 bp, Homo sapiens
ggattcatcagcata

SEQ ID NO: 1652038 - DNA, 15 bp, Homo sapiens
gattcatcagcatat

SEQ ID NO: 1652039 - DNA, 15 bp, Homo sapiens
attcatcagcatata

SEQ ID NO: 1652040 - DNA, 15 bp, Homo sapiens
ttcatcagcatataa

SEQ ID NO: 1652041 - DNA, 15 bp, Homo sapiens
tcatcagcatataat

SEQ ID NO: 1652042 - DNA, 15 bp, Homo sapiens
catcagcatataatt

SEQ ID NO: 1652043 - DNA, 15 bp, Homo sapiens
atcagcatataattt

SEQ ID NO: 1652044 - DNA, 15 bp, Homo sapiens
tcagcatataatttt

SEQ ID NO: 1652045 - DNA, 15 bp, Homo sapiens
cagcatataatttta

SEQ ID NO: 1652046 - DNA, 15 bp, Homo sapiens
agcatataattttat

SEQ ID NO: 1652047 - DNA, 15 bp, Homo sapiens
gcatataattttatt

SEQ ID NO: 1652048 - DNA, 15 bp, Homo sapiens
catataattttattc

SEQ ID NO: 1652049 - DNA, 15 bp, Homo sapiens
tataattttattctg

SEQ ID NO: 1652050 - DNA, 15 bp, Homo sapiens
ataattttattctgc

SEQ ID NO: 1652051 - DNA, 15 bp, Homo sapiens
taattttattctgcc

SEQ ID NO: 1652052 - DNA, 15 bp, Homo sapiens
aattttattctgcct

SEQ ID NO: 1652053 - DNA, 15 bp, Homo sapiens
attttattctgcctt

SEQ ID NO: 1652054 - DNA, 15 bp, Homo sapiens
ttttattctgccttt

SEQ ID NO: 1652055 - DNA, 15 bp, Homo sapiens
tttattctgcctttt

SEQ ID NO: 1652056 - DNA, 15 bp, Homo sapiens
ttattctgcctttta

SEQ ID NO: 1652057 - DNA, 15 bp, Homo sapiens
tattctgccttttac

SEQ ID NO: 1652058 - DNA, 15 bp, Homo sapiens
attctgccttttact

SEQ ID NO: 1652059 - DNA, 15 bp, Homo sapiens
ttctgccttttactt

SEQ ID NO: 1652060 - DNA, 15 bp, Homo sapiens
tctgccttttacttt

SEQ ID NO: 1652061 - DNA, 15 bp, Homo sapiens
ctgccttttactttt

SEQ ID NO: 1652062 - DNA, 15 bp, Homo sapiens
tgccttttactttta

SEQ ID NO: 1652063 - DNA, 15 bp, Homo sapiens
gccttttacttttag

SEQ ID NO: 1652064 - DNA, 15 bp, Homo sapiens
ccttttacttttagt

SEQ ID NO: 1652065 - DNA, 15 bp, Homo sapiens
cttttacttttagtc

SEQ ID NO: 1652066 - DNA, 15 bp, Homo sapiens
ttttacttttagtca

SEQ ID NO: 1652067 - DNA, 15 bp, Homo sapiens
tttacttttagtcat

SEQ ID NO: 1652068 - DNA, 15 bp, Homo sapiens
ttacttttagtcata

SEQ ID NO: 1652069 - DNA, 15 bp, Homo sapiens
tacttttagtcatat

SEQ ID NO: 1652070 - DNA, 15 bp, Homo sapiens
acttttagtcatatt

SEQ ID NO: 1652071 - DNA, 15 bp, Homo sapiens
cttttagtcatattt

SEQ ID NO: 1652072 - DNA, 15 bp, Homo sapiens
ttttagtcatattta

SEQ ID NO: 1652073 - DNA, 15 bp, Homo sapiens
tttagtcatatttat

SEQ ID NO: 1652074 - DNA, 15 bp, Homo sapiens
ttagtcatatttatt

SEQ ID NO: 1652075 - DNA, 15 bp, Homo sapiens
tagtcatatttattc

SEQ ID NO: 1652076 - DNA, 15 bp, Homo sapiens
agtcatatttattcc

SEQ ID NO: 1652077 - DNA, 15 bp, Homo sapiens
gtcatatttattcca

SEQ ID NO: 1652078 - DNA, 15 bp, Homo sapiens
tcatatttattccat

SEQ ID NO: 1652079 - DNA, 15 bp, Homo sapiens
catatttattccata

SEQ ID NO: 1652080 - DNA, 15 bp, Homo sapiens
atatttattccataa

SEQ ID NO: 1652081 - DNA, 15 bp, Homo sapiens
tatttattccataac

SEQ ID NO: 1652082 - DNA, 15 bp, Homo sapiens
atttattccataaca

SEQ ID NO: 1652083 - DNA, 15 bp, Homo sapiens
tttattccataacat

SEQ ID NO: 1652084 - DNA, 15 bp, Homo sapiens
ttattccataacata

SEQ ID NO: 1652085 - DNA, 15 bp, Homo sapiens
tattccataacatat

SEQ ID NO: 1652086 - DNA, 15 bp, Homo sapiens
attccataacatatt

SEQ ID NO: 1652087 - DNA, 15 bp, Homo sapiens
ttccataacatattc

SEQ ID NO: 1652088 - DNA, 15 bp, Homo sapiens
tccataacatattct

SEQ ID NO: 1652089 - DNA, 15 bp, Homo sapiens
ccataacatattctt

SEQ ID NO: 1652090 - DNA, 15 bp, Homo sapiens
cataacatattcttt

SEQ ID NO: 1652091 - DNA, 15 bp, Homo sapiens
ataacatattctttt

SEQ ID NO: 1652092 - DNA, 15 bp, Homo sapiens
taacatattctttta

SEQ ID NO: 1652093 - DNA, 15 bp, Homo sapiens
aacatattcttttaa

SEQ ID NO: 1652094 - DNA, 15 bp, Homo sapiens
acatattcttttaag

SEQ ID NO: 1652095 - DNA, 15 bp, Homo sapiens
catattcttttaaga

SEQ ID NO: 1652096 - DNA, 15 bp, Homo sapiens
atattcttttaagac

SEQ ID NO: 1652097 - DNA, 15 bp, Homo sapiens
tattcttttaagaca

SEQ ID NO: 1652098 - DNA, 15 bp, Homo sapiens
attcttttaagacat

SEQ ID NO: 1652099 - DNA, 15 bp, Homo sapiens
ttcttttaagacatc

SEQ ID NO: 1652100 - DNA, 15 bp, Homo sapiens
tcttttaagacatca

SEQ ID NO: 1652101 - DNA, 15 bp, Homo sapiens
cttttaagacatcac

SEQ ID NO: 1652102 - DNA, 15 bp, Homo sapiens
ttttaagacatcact

SEQ ID NO: 1652103 - DNA, 15 bp, Homo sapiens
tttaagacatcacta

SEQ ID NO: 1652104 - DNA, 15 bp, Homo sapiens
ttaagacatcactat

SEQ ID NO: 1652105 - DNA, 15 bp, Homo sapiens
taagacatcactatt

SEQ ID NO: 1652106 - DNA, 15 bp, Homo sapiens
aagacatcactatta

SEQ ID NO: 1652107 - DNA, 15 bp, Homo sapiens
agacatcactattag

SEQ ID NO: 1652108 - DNA, 15 bp, Homo sapiens
gacatcactattagt

SEQ ID NO: 1652109 - DNA, 15 bp, Homo sapiens
acatcactattagtc

SEQ ID NO: 1652110 - DNA, 15 bp, Homo sapiens
catcactattagtct

SEQ ID NO: 1652111 - DNA, 15 bp, Homo sapiens
atcactattagtctt

SEQ ID NO: 1652112 - DNA, 15 bp, Homo sapiens
tcactattagtctta

SEQ ID NO: 1652113 - DNA, 15 bp, Homo sapiens
cactattagtcttag

SEQ ID NO: 1652114 - DNA, 15 bp, Homo sapiens
actattagtcttaga

SEQ ID NO: 1652115 - DNA, 15 bp, Homo sapiens
ctattagtcttagaa

SEQ ID NO: 1652116 - DNA, 15 bp, Homo sapiens
tattagtcttagaaa

SEQ ID NO: 1652117 - DNA, 15 bp, Homo sapiens
attagtcttagaaat

SEQ ID NO: 1652118 - DNA, 15 bp, Homo sapiens
ttagtcttagaaatc

SEQ ID NO: 1652119 - DNA, 15 bp, Homo sapiens
tagtcttagaaatca

SEQ ID NO: 1652120 - DNA, 15 bp, Homo sapiens
agtcttagaaatcaa

SEQ ID NO: 1652121 - DNA, 15 bp, Homo sapiens
gtcttagaaatcaat

SEQ ID NO: 1652122 - DNA, 15 bp, Homo sapiens
tcttagaaatcaatg

SEQ ID NO: 1652123 - DNA, 15 bp, Homo sapiens
cttagaaatcaatga

SEQ ID NO: 1652124 - DNA, 15 bp, Homo sapiens
ttagaaatcaatgaa

SEQ ID NO: 1652125 - DNA, 15 bp, Homo sapiens
agaaatcaatgaaat

SEQ ID NO: 1652126 - DNA, 15 bp, Homo sapiens
gaaatcaatgaaata

SEQ ID NO: 1652127 - DNA, 15 bp, Homo sapiens
aaatcaatgaaataa

SEQ ID NO: 1652128 - DNA, 15 bp, Homo sapiens
aatcaatgaaataag

SEQ ID NO: 1652129 - DNA, 15 bp, Homo sapiens
atcaatgaaataaga

SEQ ID NO: 1652130 - DNA, 15 bp, Homo sapiens
tcaatgaaataagat

SEQ ID NO: 1652131 - DNA, 15 bp, Homo sapiens
caatgaaataagatt

SEQ ID NO: 1652132 - DNA, 15 bp, Homo sapiens
aatgaaataagattt

SEQ ID NO: 1652133 - DNA, 15 bp, Homo sapiens
atgaaataagatttg

SEQ ID NO: 1652134 - DNA, 15 bp, Homo sapiens
tgaaataagatttga

SEQ ID NO: 1652135 - DNA, 15 bp, Homo sapiens
gaaataagatttgat

SEQ ID NO: 1652136 - DNA, 15 bp, Homo sapiens
aaataagatttgatg

SEQ ID NO: 1652137 - DNA, 15 bp, Homo sapiens
aataagatttgatgg

SEQ ID NO: 1652138 - DNA, 15 bp, Homo sapiens
ataagatttgatggt

SEQ ID NO: 1652139 - DNA, 15 bp, Homo sapiens
taagatttgatggtc

SEQ ID NO: 1652140 - DNA, 15 bp, Homo sapiens
aagatttgatggtct

SEQ ID NO: 1652141 - DNA, 15 bp, Homo sapiens
agatttgatggtctg

SEQ ID NO: 1652142 - DNA, 15 bp, Homo sapiens
gatttgatggtctgg

SEQ ID NO: 1652143 - DNA, 15 bp, Homo sapiens
atttgatggtctggt

SEQ ID NO: 1652144 - DNA, 15 bp, Homo sapiens
tttgatggtctggtc

SEQ ID NO: 1652145 - DNA, 15 bp, Homo sapiens
ttgatggtctggtct

SEQ ID NO: 1652146 - DNA, 15 bp, Homo sapiens
tgatggtctggtctc

SEQ ID NO: 1652147 - DNA, 15 bp, Homo sapiens
gatggtctggtctct

SEQ ID NO: 1652148 - DNA, 15 bp, Homo sapiens
atggtctggtctctt

SEQ ID NO: 1652149 - DNA, 15 bp, Homo sapiens
tggtctggtctctta

SEQ ID NO: 1652150 - DNA, 15 bp, Homo sapiens
ggtctggtctcttac

SEQ ID NO: 1652151 - DNA, 15 bp, Homo sapiens
gtctggtctcttact

SEQ ID NO: 1652152 - DNA, 15 bp, Homo sapiens
tctggtctcttactt

SEQ ID NO: 1652153 - DNA, 15 bp, Homo sapiens
ctggtctcttacttc

SEQ ID NO: 1652154 - DNA, 15 bp, Homo sapiens
tggtctcttacttct

SEQ ID NO: 1652155 - DNA, 15 bp, Homo sapiens
ggtctcttacttctc

SEQ ID NO: 1652156 - DNA, 15 bp, Homo sapiens
gtctcttacttctca

SEQ ID NO: 1652157 - DNA, 15 bp, Homo sapiens
tctcttacttctcag

SEQ ID NO: 1652158 - DNA, 15 bp, Homo sapiens
ctcttacttctcagc

SEQ ID NO: 1652159 - DNA, 15 bp, Homo sapiens
tcttacttctcagcc

SEQ ID NO: 1652160 - DNA, 15 bp, Homo sapiens
cttacttctcagcct

SEQ ID NO: 1652161 - DNA, 15 bp, Homo sapiens
ttacttctcagcctc

SEQ ID NO: 1652162 - DNA, 15 bp, Homo sapiens
tacttctcagcctcc

SEQ ID NO: 1652163 - DNA, 15 bp, Homo sapiens
acttctcagcctcca

SEQ ID NO: 1652164 - DNA, 15 bp, Homo sapiens
cttctcagcctccaa

SEQ ID NO: 1652165 - DNA, 15 bp, Homo sapiens
ttctcagcctccaaa

SEQ ID NO: 1652166 - DNA, 15 bp, Homo sapiens
tctcagcctccaaaa

SEQ ID NO: 1652167 - DNA, 15 bp, Homo sapiens
ctcagcctccaaaat

SEQ ID NO: 1652168 - DNA, 15 bp, Homo sapiens
tcagcctccaaaatt

SEQ ID NO: 1652169 - DNA, 15 bp, Homo sapiens
cagcctccaaaattt

SEQ ID NO: 1652170 - DNA, 15 bp, Homo sapiens
agcctccaaaatttt

SEQ ID NO: 1652171 - DNA, 15 bp, Homo sapiens
gcctccaaaattttc

SEQ ID NO: 1652172 - DNA, 15 bp, Homo sapiens
cctccaaaattttcc

SEQ ID NO: 1652173 - DNA, 15 bp, Homo sapiens
ctccaaaattttcca

SEQ ID NO: 1652174 - DNA, 15 bp, Homo sapiens
tccaaaattttccat

SEQ ID NO: 1652175 - DNA, 15 bp, Homo sapiens
ccaaaattttccata

SEQ ID NO: 1652176 - DNA, 15 bp, Homo sapiens
caaaattttccataa

SEQ ID NO: 1652177 - DNA, 15 bp, Homo sapiens
aaaattttccataat

SEQ ID NO: 1652178 - DNA, 15 bp, Homo sapiens
aaattttccataatg

SEQ ID NO: 1652179 - DNA, 15 bp, Homo sapiens
aattttccataatgc

SEQ ID NO: 1652180 - DNA, 15 bp, Homo sapiens
attttccataatgcc

SEQ ID NO: 1652181 - DNA, 15 bp, Homo sapiens
ttttccataatgcca

SEQ ID NO: 1652182 - DNA, 15 bp, Homo sapiens
tttccataatgccaa

SEQ ID NO: 1652183 - DNA, 15 bp, Homo sapiens
ttccataatgccaaa

SEQ ID NO: 1652184 - DNA, 15 bp, Homo sapiens
tccataatgccaaat

SEQ ID NO: 1652185 - DNA, 15 bp, Homo sapiens
ccataatgccaaata

SEQ ID NO: 1652186 - DNA, 15 bp, Homo sapiens
cataatgccaaataa

SEQ ID NO: 1652187 - DNA, 15 bp, Homo sapiens
ataatgccaaataag

SEQ ID NO: 1652188 - DNA, 15 bp, Homo sapiens
taatgccaaataaga

SEQ ID NO: 1652189 - DNA, 15 bp, Homo sapiens
aatgccaaataagag

SEQ ID NO: 1652190 - DNA, 15 bp, Homo sapiens
atgccaaataagaga

SEQ ID NO: 1652191 - DNA, 15 bp, Homo sapiens
tgccaaataagagaa

SEQ ID NO: 1652192 - DNA, 15 bp, Homo sapiens
gccaaataagagaaa

SEQ ID NO: 1652193 - DNA, 15 bp, Homo sapiens
ccaaataagagaaat

SEQ ID NO: 1652194 - DNA, 15 bp, Homo sapiens
caaataagagaaata

SEQ ID NO: 1652195 - DNA, 15 bp, Homo sapiens
aaataagagaaatat

SEQ ID NO: 1652196 - DNA, 15 bp, Homo sapiens
aataagagaaatatc

SEQ ID NO: 1652197 - DNA, 15 bp, Homo sapiens
ataagagaaatatcc

SEQ ID NO: 1652198 - DNA, 15 bp, Homo sapiens
taagagaaatatccc

SEQ ID NO: 1652199 - DNA, 15 bp, Homo sapiens
aagagaaatatccct

SEQ ID NO: 1652200 - DNA, 15 bp, Homo sapiens
agagaaatatccctg

SEQ ID NO: 1652201 - DNA, 15 bp, Homo sapiens
gagaaatatccctgg

SEQ ID NO: 1652202 - DNA, 15 bp, Homo sapiens
agaaatatccctggt

SEQ ID NO: 1652203 - DNA, 15 bp, Homo sapiens
gaaatatccctggtg

SEQ ID NO: 1652204 - DNA, 15 bp, Homo sapiens
aaatatccctggtgt

SEQ ID NO: 1652205 - DNA, 15 bp, Homo sapiens
aatatccctggtgta

SEQ ID NO: 1652206 - DNA, 15 bp, Homo sapiens
atatccctggtgtag

SEQ ID NO: 1652207 - DNA, 15 bp, Homo sapiens
tatccctggtgtagc

SEQ ID NO: 1652208 - DNA, 15 bp, Homo sapiens
atccctggtgtagca

SEQ ID NO: 1652209 - DNA, 15 bp, Homo sapiens
tccctggtgtagcaa

SEQ ID NO: 1652210 - DNA, 15 bp, Homo sapiens
ccctggtgtagcaat

SEQ ID NO: 1652211 - DNA, 15 bp, Homo sapiens
cctggtgtagcaatc

SEQ ID NO: 1652212 - DNA, 15 bp, Homo sapiens
ctggtgtagcaatct

SEQ ID NO: 1652213 - DNA, 15 bp, Homo sapiens
tggtgtagcaatctc

SEQ ID NO: 1652214 - DNA, 15 bp, Homo sapiens
ggtgtagcaatctcc

SEQ ID NO: 1652215 - DNA, 15 bp, Homo sapiens
gtgtagcaatctcca

SEQ ID NO: 1652216 - DNA, 15 bp, Homo sapiens
tgtagcaatctccaa

SEQ ID NO: 1652217 - DNA, 15 bp, Homo sapiens
gtagcaatctccaat

SEQ ID NO: 1652218 - DNA, 15 bp, Homo sapiens
tagcaatctccaatt

SEQ ID NO: 1652219 - DNA, 15 bp, Homo sapiens
agcaatctccaattc

SEQ ID NO: 1652220 - DNA, 15 bp, Homo sapiens
gcaatctccaattcc

SEQ ID NO: 1652221 - DNA, 15 bp, Homo sapiens
caatctccaattccc

SEQ ID NO: 1652222 - DNA, 15 bp, Homo sapiens
aatctccaattccct

SEQ ID NO: 1652223 - DNA, 15 bp, Homo sapiens
atctccaattccctg

SEQ ID NO: 1652224 - DNA, 15 bp, Homo sapiens
tctccaattccctga

SEQ ID NO: 1652225 - DNA, 15 bp, Homo sapiens
ctccaattccctgaa

SEQ ID NO: 1652226 - DNA, 15 bp, Homo sapiens
tccaattccctgaaa

SEQ ID NO: 1652227 - DNA, 15 bp, Homo sapiens
ccaattccctgaaag

SEQ ID NO: 1652228 - DNA, 15 bp, Homo sapiens
caattccctgaaaga

SEQ ID NO: 1652229 - DNA, 15 bp, Homo sapiens
aattccctgaaagag

SEQ ID NO: 1652230 - DNA, 15 bp, Homo sapiens
attccctgaaagaga

SEQ ID NO: 1652231 - DNA, 15 bp, Homo sapiens
ttccctgaaagagaa

SEQ ID NO: 1652232 - DNA, 15 bp, Homo sapiens
tccctgaaagagaag

SEQ ID NO: 1652233 - DNA, 15 bp, Homo sapiens
ccctgaaagagaagt

SEQ ID NO: 1652234 - DNA, 15 bp, Homo sapiens
cctgaaagagaagtg

SEQ ID NO: 1652235 - DNA, 15 bp, Homo sapiens
ctgaaagagaagtga

SEQ ID NO: 1652236 - DNA, 15 bp, Homo sapiens
tgaaagagaagtgaa

SEQ ID NO: 1652237 - DNA, 15 bp, Homo sapiens
gaaagagaagtgaac

SEQ ID NO: 1652238 - DNA, 15 bp, Homo sapiens
aaagagaagtgaact

SEQ ID NO: 1652239 - DNA, 15 bp, Homo sapiens
aagagaagtgaactt

SEQ ID NO: 1652240 - DNA, 15 bp, Homo sapiens
agagaagtgaacttg

SEQ ID NO: 1652241 - DNA, 15 bp, Homo sapiens
gagaagtgaacttga

SEQ ID NO: 1652242 - DNA, 15 bp, Homo sapiens
agaagtgaacttgaa

SEQ ID NO: 1652243 - DNA, 15 bp, Homo sapiens
gaagtgaacttgaaa

SEQ ID NO: 1652244 - DNA, 15 bp, Homo sapiens
aagtgaacttgaaaa

SEQ ID NO: 1652245 - DNA, 15 bp, Homo sapiens
agtgaacttgaaaat

SEQ ID NO: 1652246 - DNA, 15 bp, Homo sapiens
gtgaacttgaaaata

SEQ ID NO: 1652247 - DNA, 15 bp, Homo sapiens
tgaacttgaaaataa

SEQ ID NO: 1652248 - DNA, 15 bp, Homo sapiens
gaacttgaaaataat

SEQ ID NO: 1652249 - DNA, 15 bp, Homo sapiens
aacttgaaaataatt

SEQ ID NO: 1652250 - DNA, 15 bp, Homo sapiens
acttgaaaataattt

SEQ ID NO: 1652251 - DNA, 15 bp, Homo sapiens
cttgaaaataatttt

SEQ ID NO: 1652252 - DNA, 15 bp, Homo sapiens
ttgaaaataattttc

SEQ ID NO: 1652253 - DNA, 15 bp, Homo sapiens
tgaaaataattttca

SEQ ID NO: 1652254 - DNA, 15 bp, Homo sapiens
gaaaataattttcaa

SEQ ID NO: 1652255 - DNA, 15 bp, Homo sapiens
aaaataattttcaag

SEQ ID NO: 1652256 - DNA, 15 bp, Homo sapiens
aaataattttcaagt

SEQ ID NO: 1652257 - DNA, 15 bp, Homo sapiens
aataattttcaagtc

SEQ ID NO: 1652258 - DNA, 15 bp, Homo sapiens
ataattttcaagtcc

SEQ ID NO: 1652259 - DNA, 15 bp, Homo sapiens
taattttcaagtcct

SEQ ID NO: 1652260 - DNA, 15 bp, Homo sapiens
aattttcaagtcctt

SEQ ID NO: 1652261 - DNA, 15 bp, Homo sapiens
attttcaagtccttt

SEQ ID NO: 1652262 - DNA, 15 bp, Homo sapiens
ttttcaagtcctttt

SEQ ID NO: 1652263 - DNA, 15 bp, Homo sapiens
tttcaagtccttttt

SEQ ID NO: 1652264 - DNA, 15 bp, Homo sapiens
ttcaagtccttttta

SEQ ID NO: 1652265 - DNA, 15 bp, Homo sapiens
tcaagtcctttttaa

SEQ ID NO: 1652266 - DNA, 15 bp, Homo sapiens
caagtcctttttaag

SEQ ID NO: 1652267 - DNA, 15 bp, Homo sapiens
aagtcctttttaagc

SEQ ID NO: 1652268 - DNA, 15 bp, Homo sapiens
agtcctttttaagcc

SEQ ID NO: 1652269 - DNA, 15 bp, Homo sapiens
gtcctttttaagcca

SEQ ID NO: 1652270 - DNA, 15 bp, Homo sapiens
tcctttttaagccat

SEQ ID NO: 1652271 - DNA, 15 bp, Homo sapiens
cctttttaagccatg

SEQ ID NO: 1652272 - DNA, 15 bp, Homo sapiens
ctttttaagccatga

SEQ ID NO: 1652273 - DNA, 15 bp, Homo sapiens
tttttaagccatgaa

SEQ ID NO: 1652274 - DNA, 15 bp, Homo sapiens
ttttaagccatgaag

SEQ ID NO: 1652275 - DNA, 15 bp, Homo sapiens
tttaagccatgaaga

SEQ ID NO: 1652276 - DNA, 15 bp, Homo sapiens
ttaagccatgaagat

SEQ ID NO: 1652277 - DNA, 15 bp, Homo sapiens
taagccatgaagatt

SEQ ID NO: 1652278 - DNA, 15 bp, Homo sapiens
aagccatgaagattt

SEQ ID NO: 1652279 - DNA, 15 bp, Homo sapiens
agccatgaagattta

SEQ ID NO: 1652280 - DNA, 15 bp, Homo sapiens
gccatgaagatttat

SEQ ID NO: 1652281 - DNA, 15 bp, Homo sapiens
ccatgaagatttatt

SEQ ID NO: 1652282 - DNA, 15 bp, Homo sapiens
catgaagatttattt

SEQ ID NO: 1652283 - DNA, 15 bp, Homo sapiens
atgaagatttatttt

SEQ ID NO: 1652284 - DNA, 15 bp, Homo sapiens
tgaagatttattttg

SEQ ID NO: 1652285 - DNA, 15 bp, Homo sapiens
gaagatttattttga

SEQ ID NO: 1652286 - DNA, 15 bp, Homo sapiens
aagatttattttgaa

SEQ ID NO: 1652287 - DNA, 15 bp, Homo sapiens
agatttattttgaat

SEQ ID NO: 1652288 - DNA, 15 bp, Homo sapiens
gatttattttgaatc

SEQ ID NO: 1652289 - DNA, 15 bp, Homo sapiens
atttattttgaatct

SEQ ID NO: 1652290 - DNA, 15 bp, Homo sapiens
tttattttgaatctt

SEQ ID NO: 1652291 - DNA, 15 bp, Homo sapiens
ttattttgaatcttt

SEQ ID NO: 1652292 - DNA, 15 bp, Homo sapiens
tattttgaatctttc

SEQ ID NO: 1652293 - DNA, 15 bp, Homo sapiens
attttgaatctttca

SEQ ID NO: 1652294 - DNA, 15 bp, Homo sapiens
ttttgaatctttcag

SEQ ID NO: 1652295 - DNA, 15 bp, Homo sapiens
tttgaatctttcagt

SEQ ID NO: 1652296 - DNA, 15 bp, Homo sapiens
ttgaatctttcagtg

SEQ ID NO: 1652297 - DNA, 15 bp, Homo sapiens
tgaatctttcagtgt

SEQ ID NO: 1652298 - DNA, 15 bp, Homo sapiens
gaatctttcagtgtg

SEQ ID NO: 1652299 - DNA, 15 bp, Homo sapiens
aatctttcagtgtgt

SEQ ID NO: 1652300 - DNA, 15 bp, Homo sapiens
atctttcagtgtgtg

SEQ ID NO: 1652301 - DNA, 15 bp, Homo sapiens
tctttcagtgtgtgc

SEQ ID NO: 1652302 - DNA, 15 bp, Homo sapiens
ctttcagtgtgtgca

SEQ ID NO: 1652303 - DNA, 15 bp, Homo sapiens
tttcagtgtgtgcat

SEQ ID NO: 1652304 - DNA, 15 bp, Homo sapiens
ttcagtgtgtgcata

SEQ ID NO: 1652305 - DNA, 15 bp, Homo sapiens
tcagtgtgtgcatag

SEQ ID NO: 1652306 - DNA, 15 bp, Homo sapiens
cagtgtgtgcatagc

SEQ ID NO: 1652307 - DNA, 15 bp, Homo sapiens
agtgtgtgcatagca

SEQ ID NO: 1652308 - DNA, 15 bp, Homo sapiens
gtgtgtgcatagcat

SEQ ID NO: 1652309 - DNA, 15 bp, Homo sapiens
tgtgtgcatagcatt

SEQ ID NO: 1652310 - DNA, 15 bp, Homo sapiens
gtgtgcatagcatta

SEQ ID NO: 1652311 - DNA, 15 bp, Homo sapiens
tgtgcatagcattat

SEQ ID NO: 1652312 - DNA, 15 bp, Homo sapiens
gtgcatagcattatt

SEQ ID NO: 1652313 - DNA, 15 bp, Homo sapiens
tgcatagcattattc

SEQ ID NO: 1652314 - DNA, 15 bp, Homo sapiens
gcatagcattattcc

SEQ ID NO: 1652315 - DNA, 15 bp, Homo sapiens
catagcattattcca

SEQ ID NO: 1652316 - DNA, 15 bp, Homo sapiens
atagcattattccaa

SEQ ID NO: 1652317 - DNA, 15 bp, Homo sapiens
tagcattattccaag

SEQ ID NO: 1652318 - DNA, 15 bp, Homo sapiens
agcattattccaagt

SEQ ID NO: 1652319 - DNA, 15 bp, Homo sapiens
gcattattccaagtc

SEQ ID NO: 1652320 - DNA, 15 bp, Homo sapiens
cattattccaagtcc

SEQ ID NO: 1652321 - DNA, 15 bp, Homo sapiens
attattccaagtcct

SEQ ID NO: 1652322 - DNA, 15 bp, Homo sapiens
ttattccaagtcctc

SEQ ID NO: 1652323 - DNA, 15 bp, Homo sapiens
tattccaagtcctct

SEQ ID NO: 1652324 - DNA, 15 bp, Homo sapiens
attccaagtcctctt

SEQ ID NO: 1652325 - DNA, 15 bp, Homo sapiens
ttccaagtcctcttc

SEQ ID NO: 1652326 - DNA, 15 bp, Homo sapiens
tccaagtcctcttca

SEQ ID NO: 1652327 - DNA, 15 bp, Homo sapiens
ccaagtcctcttcag

SEQ ID NO: 1652328 - DNA, 15 bp, Homo sapiens
caagtcctcttcagg

SEQ ID NO: 1652329 - DNA, 15 bp, Homo sapiens
aagtcctcttcaggg

SEQ ID NO: 1652330 - DNA, 15 bp, Homo sapiens
agtcctcttcagggt

SEQ ID NO: 1652331 - DNA, 15 bp, Homo sapiens
gtcctcttcagggta

SEQ ID NO: 1652332 - DNA, 15 bp, Homo sapiens
tcctcttcagggtaa

SEQ ID NO: 1652333 - DNA, 15 bp, Homo sapiens
cctcttcagggtaac

SEQ ID NO: 1652334 - DNA, 15 bp, Homo sapiens
ctcttcagggtaact

SEQ ID NO: 1652335 - DNA, 15 bp, Homo sapiens
tcttcagggtaactc

SEQ ID NO: 1652336 - DNA, 15 bp, Homo sapiens
cttcagggtaactct

SEQ ID NO: 1652337 - DNA, 15 bp, Homo sapiens
ttcagggtaactctt

SEQ ID NO: 1652338 - DNA, 15 bp, Homo sapiens
tcagggtaactcttg

SEQ ID NO: 1652339 - DNA, 15 bp, Homo sapiens
cagggtaactcttgt

SEQ ID NO: 1652340 - DNA, 15 bp, Homo sapiens
agggtaactcttgta

SEQ ID NO: 1652341 - DNA, 15 bp, Homo sapiens
gggtaactcttgtag

SEQ ID NO: 1652342 - DNA, 15 bp, Homo sapiens
ggtaactcttgtagg

SEQ ID NO: 1652343 - DNA, 15 bp, Homo sapiens
gtaactcttgtagga

SEQ ID NO: 1652344 - DNA, 15 bp, Homo sapiens
taactcttgtaggac

SEQ ID NO: 1652345 - DNA, 15 bp, Homo sapiens
aactcttgtaggacc

SEQ ID NO: 1652346 - DNA, 15 bp, Homo sapiens
actcttgtaggaccc

SEQ ID NO: 1652347 - DNA, 15 bp, Homo sapiens
ctcttgtaggaccca

SEQ ID NO: 1652348 - DNA, 15 bp, Homo sapiens
tcttgtaggacccag

SEQ ID NO: 1652349 - DNA, 15 bp, Homo sapiens
cttgtaggacccagg

SEQ ID NO: 1652350 - DNA, 15 bp, Homo sapiens
ttgtaggacccaggg

SEQ ID NO: 1652351 - DNA, 15 bp, Homo sapiens
tgtaggacccagggt

SEQ ID NO: 1652352 - DNA, 15 bp, Homo sapiens
gtaggacccagggta

SEQ ID NO: 1652353 - DNA, 15 bp, Homo sapiens
taggacccagggtat

SEQ ID NO: 1652354 - DNA, 15 bp, Homo sapiens
aggacccagggtata

SEQ ID NO: 1652355 - DNA, 15 bp, Homo sapiens
ggacccagggtatat

SEQ ID NO: 1652356 - DNA, 15 bp, Homo sapiens
gacccagggtatatc

SEQ ID NO: 1652357 - DNA, 15 bp, Homo sapiens
acccagggtatatct

SEQ ID NO: 1652358 - DNA, 15 bp, Homo sapiens
cccagggtatatctg

SEQ ID NO: 1652359 - DNA, 15 bp, Homo sapiens
ccagggtatatctgt

SEQ ID NO: 1652360 - DNA, 15 bp, Homo sapiens
cagggtatatctgtt

SEQ ID NO: 1652361 - DNA, 15 bp, Homo sapiens
agggtatatctgtta

SEQ ID NO: 1652362 - DNA, 15 bp, Homo sapiens
gggtatatctgttaa

SEQ ID NO: 1652363 - DNA, 15 bp, Homo sapiens
ggtatatctgttaac

SEQ ID NO: 1652364 - DNA, 15 bp, Homo sapiens
gtatatctgttaact

SEQ ID NO: 1652365 - DNA, 15 bp, Homo sapiens
tatatctgttaactg

SEQ ID NO: 1652366 - DNA, 15 bp, Homo sapiens
atatctgttaactga

SEQ ID NO: 1652367 - DNA, 15 bp, Homo sapiens
tatctgttaactgaa

SEQ ID NO: 1652368 - DNA, 15 bp, Homo sapiens
atctgttaactgaaa

SEQ ID NO: 1652369 - DNA, 15 bp, Homo sapiens
tctgttaactgaaaa

SEQ ID NO: 1652370 - DNA, 15 bp, Homo sapiens
ctgttaactgaaaaa

SEQ ID NO: 1652371 - DNA, 15 bp, Homo sapiens
tgttaactgaaaaag

SEQ ID NO: 1652372 - DNA, 15 bp, Homo sapiens
gttaactgaaaaagc

SEQ ID NO: 1652373 - DNA, 15 bp, Homo sapiens
ttaactgaaaaagca

SEQ ID NO: 1652374 - DNA, 15 bp, Homo sapiens
taactgaaaaagcaa

SEQ ID NO: 1652375 - DNA, 15 bp, Homo sapiens
aactgaaaaagcaat

SEQ ID NO: 1652376 - DNA, 15 bp, Homo sapiens
actgaaaaagcaatt

SEQ ID NO: 1652377 - DNA, 15 bp, Homo sapiens
ctgaaaaagcaattt

SEQ ID NO: 1652378 - DNA, 15 bp, Homo sapiens
tgaaaaagcaatttg

SEQ ID NO: 1652379 - DNA, 15 bp, Homo sapiens
gaaaaagcaatttga

SEQ ID NO: 1652380 - DNA, 15 bp, Homo sapiens
aaaaagcaatttgag

SEQ ID NO: 1652381 - DNA, 15 bp, Homo sapiens
aaaagcaatttgaga

SEQ ID NO: 1652382 - DNA, 15 bp, Homo sapiens
aaagcaatttgagaa

SEQ ID NO: 1652383 - DNA, 15 bp, Homo sapiens
aagcaatttgagaac

SEQ ID NO: 1652384 - DNA, 15 bp, Homo sapiens
agcaatttgagaacc

SEQ ID NO: 1652385 - DNA, 15 bp, Homo sapiens
gcaatttgagaacct

SEQ ID NO: 1652386 - DNA, 15 bp, Homo sapiens
caatttgagaacctc

SEQ ID NO: 1652387 - DNA, 15 bp, Homo sapiens
aatttgagaacctct

SEQ ID NO: 1652388 - DNA, 15 bp, Homo sapiens
atttgagaacctcta

SEQ ID NO: 1652389 - DNA, 15 bp, Homo sapiens
tttgagaacctctaa

SEQ ID NO: 1652390 - DNA, 15 bp, Homo sapiens
ttgagaacctctaag

SEQ ID NO: 1652391 - DNA, 15 bp, Homo sapiens
tgagaacctctaaga

SEQ ID NO: 1652392 - DNA, 15 bp, Homo sapiens
gagaacctctaagac

SEQ ID NO: 1652393 - DNA, 15 bp, Homo sapiens
agaacctctaagact

SEQ ID NO: 1652394 - DNA, 15 bp, Homo sapiens
gaacctctaagactg

SEQ ID NO: 1652395 - DNA, 15 bp, Homo sapiens
aacctctaagactga

SEQ ID NO: 1652396 - DNA, 15 bp, Homo sapiens
acctctaagactgat

SEQ ID NO: 1652397 - DNA, 15 bp, Homo sapiens
cctctaagactgatt

SEQ ID NO: 1652398 - DNA, 15 bp, Homo sapiens
ctctaagactgattt

SEQ ID NO: 1652399 - DNA, 15 bp, Homo sapiens
tctaagactgatttt

SEQ ID NO: 1652400 - DNA, 15 bp, Homo sapiens
ctaagactgattttt

SEQ ID NO: 1652401 - DNA, 15 bp, Homo sapiens
taagactgatttttg

SEQ ID NO: 1652402 - DNA, 15 bp, Homo sapiens
aagactgatttttga

SEQ ID NO: 1652403 - DNA, 15 bp, Homo sapiens
agactgatttttgaa

SEQ ID NO: 1652404 - DNA, 15 bp, Homo sapiens
gactgatttttgaaa

SEQ ID NO: 1652405 - DNA, 15 bp, Homo sapiens
actgatttttgaaaa

SEQ ID NO: 1652406 - DNA, 15 bp, Homo sapiens
ctgatttttgaaaat

SEQ ID NO: 1652407 - DNA, 15 bp, Homo sapiens
tgatttttgaaaatg

SEQ ID NO: 1652408 - DNA, 15 bp, Homo sapiens
gatttttgaaaatgc

SEQ ID NO: 1652409 - DNA, 15 bp, Homo sapiens
atttttgaaaatgca

SEQ ID NO: 1652410 - DNA, 15 bp, Homo sapiens
tttttgaaaatgcag

SEQ ID NO: 1652411 - DNA, 15 bp, Homo sapiens
ttttgaaaatgcagt

SEQ ID NO: 1652412 - DNA, 15 bp, Homo sapiens
tttgaaaatgcagta

SEQ ID NO: 1652413 - DNA, 15 bp, Homo sapiens
ttgaaaatgcagtat

SEQ ID NO: 1652414 - DNA, 15 bp, Homo sapiens
tgaaaatgcagtatc

SEQ ID NO: 1652415 - DNA, 15 bp, Homo sapiens
gaaaatgcagtatcc

SEQ ID NO: 1652416 - DNA, 15 bp, Homo sapiens
aaaatgcagtatcca

SEQ ID NO: 1652417 - DNA, 15 bp, Homo sapiens
aaatgcagtatccaa

SEQ ID NO: 1652418 - DNA, 15 bp, Homo sapiens
aatgcagtatccaaa

SEQ ID NO: 1652419 - DNA, 15 bp, Homo sapiens
atgcagtatccaaaa

SEQ ID NO: 1652420 - DNA, 15 bp, Homo sapiens
tgcagtatccaaaaa

SEQ ID NO: 1652421 - DNA, 15 bp, Homo sapiens
gcagtatccaaaaaa

SEQ ID NO: 1652422 - DNA, 15 bp, Homo sapiens
cagtatccaaaaaaa

SEQ ID NO: 1652423 - DNA, 15 bp, Homo sapiens
agtatccaaaaaaac

SEQ ID NO: 1652424 - DNA, 15 bp, Homo sapiens
gtatccaaaaaaaca

SEQ ID NO: 1652425 - DNA, 15 bp, Homo sapiens
tatccaaaaaaacag

SEQ ID NO: 1652426 - DNA, 15 bp, Homo sapiens
atccaaaaaaacaga

SEQ ID NO: 1652427 - DNA, 15 bp, Homo sapiens
tccaaaaaaacagat

SEQ ID NO: 1652428 - DNA, 15 bp, Homo sapiens
ccaaaaaaacagatt

SEQ ID NO: 1652429 - DNA, 15 bp, Homo sapiens
caaaaaaacagattt

SEQ ID NO: 1652430 - DNA, 15 bp, Homo sapiens
aaaaaaacagatttt

SEQ ID NO: 1652431 - DNA, 15 bp, Homo sapiens
aaaaaacagatttta

SEQ ID NO: 1652432 - DNA, 15 bp, Homo sapiens
aaaaacagattttag

SEQ ID NO: 1652433 - DNA, 15 bp, Homo sapiens
aaaacagattttaga

SEQ ID NO: 1652434 - DNA, 15 bp, Homo sapiens
aaacagattttagat

SEQ ID NO: 1652435 - DNA, 15 bp, Homo sapiens
aacagattttagatg

SEQ ID NO: 1652436 - DNA, 15 bp, Homo sapiens
acagattttagatgc

SEQ ID NO: 1652437 - DNA, 15 bp, Homo sapiens
cagattttagatgcc

SEQ ID NO: 1652438 - DNA, 15 bp, Homo sapiens
agattttagatgcca

SEQ ID NO: 1652439 - DNA, 15 bp, Homo sapiens
gattttagatgccat

SEQ ID NO: 1652440 - DNA, 15 bp, Homo sapiens
attttagatgccatc

SEQ ID NO: 1652441 - DNA, 15 bp, Homo sapiens
ttttagatgccatcc

SEQ ID NO: 1652442 - DNA, 15 bp, Homo sapiens
tttagatgccatccc

SEQ ID NO: 1652443 - DNA, 15 bp, Homo sapiens
ttagatgccatccca

SEQ ID NO: 1652444 - DNA, 15 bp, Homo sapiens
tagatgccatcccag

SEQ ID NO: 1652445 - DNA, 15 bp, Homo sapiens
agatgccatcccagc

SEQ ID NO: 1652446 - DNA, 15 bp, Homo sapiens
gatgccatcccagca

SEQ ID NO: 1652447 - DNA, 15 bp, Homo sapiens
atgccatcccagcag

SEQ ID NO: 1652448 - DNA, 15 bp, Homo sapiens
tgccatcccagcagg

SEQ ID NO: 1652449 - DNA, 15 bp, Homo sapiens
gccatcccagcaggt

SEQ ID NO: 1652450 - DNA, 15 bp, Homo sapiens
ccatcccagcaggtg

SEQ ID NO: 1652451 - DNA, 15 bp, Homo sapiens
catcccagcaggtgc

SEQ ID NO: 1652452 - DNA, 15 bp, Homo sapiens
atcccagcaggtgct

SEQ ID NO: 1652453 - DNA, 15 bp, Homo sapiens
tcccagcaggtgctg

SEQ ID NO: 1652454 - DNA, 15 bp, Homo sapiens
cccagcaggtgctgg

SEQ ID NO: 1652455 - DNA, 15 bp, Homo sapiens
ccagcaggtgctggt

SEQ ID NO: 1652456 - DNA, 15 bp, Homo sapiens
cagcaggtgctggta

SEQ ID NO: 1652457 - DNA, 15 bp, Homo sapiens
agcaggtgctggtaa

SEQ ID NO: 1652458 - DNA, 15 bp, Homo sapiens
gcaggtgctggtaac

SEQ ID NO: 1652459 - DNA, 15 bp, Homo sapiens
caggtgctggtaact

SEQ ID NO: 1652460 - DNA, 15 bp, Homo sapiens
aggtgctggtaactc

SEQ ID NO: 1652461 - DNA, 15 bp, Homo sapiens
ggtgctggtaactct

SEQ ID NO: 1652462 - DNA, 15 bp, Homo sapiens
gtgctggtaactctg

SEQ ID NO: 1652463 - DNA, 15 bp, Homo sapiens
tgctggtaactctgt

SEQ ID NO: 1652464 - DNA, 15 bp, Homo sapiens
gctggtaactctgta

SEQ ID NO: 1652465 - DNA, 15 bp, Homo sapiens
ctggtaactctgtac

SEQ ID NO: 1652466 - DNA, 15 bp, Homo sapiens
tggtaactctgtact

SEQ ID NO: 1652467 - DNA, 15 bp, Homo sapiens
ggtaactctgtactt

SEQ ID NO: 1652468 - DNA, 15 bp, Homo sapiens
gtaactctgtacttg

SEQ ID NO: 1652469 - DNA, 15 bp, Homo sapiens
taactctgtacttgt

SEQ ID NO: 1652470 - DNA, 15 bp, Homo sapiens
aactctgtacttgtg

SEQ ID NO: 1652471 - DNA, 15 bp, Homo sapiens
actctgtacttgtgt

SEQ ID NO: 1652472 - DNA, 15 bp, Homo sapiens
ctctgtacttgtgtg

SEQ ID NO: 1652473 - DNA, 15 bp, Homo sapiens
tctgtacttgtgtgg

SEQ ID NO: 1652474 - DNA, 15 bp, Homo sapiens
ctgtacttgtgtgga

SEQ ID NO: 1652475 - DNA, 15 bp, Homo sapiens
tgtacttgtgtggaa

SEQ ID NO: 1652476 - DNA, 15 bp, Homo sapiens
gtacttgtgtggaag

SEQ ID NO: 1652477 - DNA, 15 bp, Homo sapiens
tacttgtgtggaaga

SEQ ID NO: 1652478 - DNA, 15 bp, Homo sapiens
acttgtgtggaagat

SEQ ID NO: 1652479 - DNA, 15 bp, Homo sapiens
cttgtgtggaagatg

SEQ ID NO: 1652480 - DNA, 15 bp, Homo sapiens
ttgtgtggaagatgc

SEQ ID NO: 1652481 - DNA, 15 bp, Homo sapiens
tgtgtggaagatgcc

SEQ ID NO: 1652482 - DNA, 15 bp, Homo sapiens
gtgtggaagatgcct

SEQ ID NO: 1652483 - DNA, 15 bp, Homo sapiens
tgtggaagatgcctt

SEQ ID NO: 1652484 - DNA, 15 bp, Homo sapiens
gtggaagatgccttc

SEQ ID NO: 1652485 - DNA, 15 bp, Homo sapiens
tggaagatgccttct

SEQ ID NO: 1652486 - DNA, 15 bp, Homo sapiens
ggaagatgccttctg

SEQ ID NO: 1652487 - DNA, 15 bp, Homo sapiens
gaagatgccttctgt

SEQ ID NO: 1652488 - DNA, 15 bp, Homo sapiens
aagatgccttctgtg

SEQ ID NO: 1652489 - DNA, 15 bp, Homo sapiens
agatgccttctgtgg

SEQ ID NO: 1652490 - DNA, 15 bp, Homo sapiens
gatgccttctgtggg

SEQ ID NO: 1652491 - DNA, 15 bp, Homo sapiens
atgccttctgtgggt

SEQ ID NO: 1652492 - DNA, 15 bp, Homo sapiens
tgccttctgtgggtt

SEQ ID NO: 1652493 - DNA, 15 bp, Homo sapiens
gccttctgtgggttt

SEQ ID NO: 1652494 - DNA, 15 bp, Homo sapiens
ccttctgtgggtttg

SEQ ID NO: 1652495 - DNA, 15 bp, Homo sapiens
cttctgtgggtttgt

SEQ ID NO: 1652496 - DNA, 15 bp, Homo sapiens
ttctgtgggtttgtt

SEQ ID NO: 1652497 - DNA, 15 bp, Homo sapiens
tctgtgggtttgttt

SEQ ID NO: 1652498 - DNA, 15 bp, Homo sapiens
ctgtgggtttgttta

SEQ ID NO: 1652499 - DNA, 15 bp, Homo sapiens
tgtgggtttgtttag

SEQ ID NO: 1652500 - DNA, 15 bp, Homo sapiens
gtgggtttgtttagg

SEQ ID NO: 1652501 - DNA, 15 bp, Homo sapiens
tgggtttgtttagga

SEQ ID NO: 1652502 - DNA, 15 bp, Homo sapiens
gggtttgtttaggag

SEQ ID NO: 1652503 - DNA, 15 bp, Homo sapiens
ggtttgtttaggagt

SEQ ID NO: 1652504 - DNA, 15 bp, Homo sapiens
gtttgtttaggagtt

SEQ ID NO: 1652505 - DNA, 15 bp, Homo sapiens
tttgtttaggagttg

SEQ ID NO: 1652506 - DNA, 15 bp, Homo sapiens
ttgtttaggagttgt

SEQ ID NO: 1652507 - DNA, 15 bp, Homo sapiens
tgtttaggagttgtt

SEQ ID NO: 1652508 - DNA, 15 bp, Homo sapiens
gtttaggagttgttt

SEQ ID NO: 1652509 - DNA, 15 bp, Homo sapiens
tttaggagttgtttt

SEQ ID NO: 1652510 - DNA, 15 bp, Homo sapiens
ttaggagttgtttta

SEQ ID NO: 1652511 - DNA, 15 bp, Homo sapiens
taggagttgttttat

SEQ ID NO: 1652512 - DNA, 15 bp, Homo sapiens
aggagttgttttatg

SEQ ID NO: 1652513 - DNA, 15 bp, Homo sapiens
ggagttgttttatgg

SEQ ID NO: 1652514 - DNA, 15 bp, Homo sapiens
gagttgttttatgga

SEQ ID NO: 1652515 - DNA, 15 bp, Homo sapiens
agttgttttatggat

SEQ ID NO: 1652516 - DNA, 15 bp, Homo sapiens
gttgttttatggata

SEQ ID NO: 1652517 - DNA, 15 bp, Homo sapiens
ttgttttatggatac

SEQ ID NO: 1652518 - DNA, 15 bp, Homo sapiens
tgttttatggatacc

SEQ ID NO: 1652519 - DNA, 15 bp, Homo sapiens
gttttatggatacca

SEQ ID NO: 1652520 - DNA, 15 bp, Homo sapiens
ttttatggataccag

SEQ ID NO: 1652521 - DNA, 15 bp, Homo sapiens
tttatggataccagc

SEQ ID NO: 1652522 - DNA, 15 bp, Homo sapiens
ttatggataccagca

SEQ ID NO: 1652523 - DNA, 15 bp, Homo sapiens
tatggataccagcat

SEQ ID NO: 1652524 - DNA, 15 bp, Homo sapiens
atggataccagcatt

SEQ ID NO: 1652525 - DNA, 15 bp, Homo sapiens
tggataccagcattc

SEQ ID NO: 1652526 - DNA, 15 bp, Homo sapiens
ggataccagcattct

SEQ ID NO: 1652527 - DNA, 15 bp, Homo sapiens
gataccagcattctt

SEQ ID NO: 1652528 - DNA, 15 bp, Homo sapiens
ataccagcattcttc

SEQ ID NO: 1652529 - DNA, 15 bp, Homo sapiens
taccagcattcttct

SEQ ID NO: 1652530 - DNA, 15 bp, Homo sapiens
accagcattcttctc

SEQ ID NO: 1652531 - DNA, 15 bp, Homo sapiens
ccagcattcttctca

SEQ ID NO: 1652532 - DNA, 15 bp, Homo sapiens
cagcattcttctcaa

SEQ ID NO: 1652533 - DNA, 15 bp, Homo sapiens
agcattcttctcaag

SEQ ID NO: 1652534 - DNA, 15 bp, Homo sapiens
gcattcttctcaaga

SEQ ID NO: 1652535 - DNA, 15 bp, Homo sapiens
cattcttctcaagaa

SEQ ID NO: 1652536 - DNA, 15 bp, Homo sapiens
attcttctcaagaac

SEQ ID NO: 1652537 - DNA, 15 bp, Homo sapiens
ttcttctcaagaaca

SEQ ID NO: 1652538 - DNA, 15 bp, Homo sapiens
tcttctcaagaacac

SEQ ID NO: 1652539 - DNA, 15 bp, Homo sapiens
cttctcaagaacact

SEQ ID NO: 1652540 - DNA, 15 bp, Homo sapiens
ttctcaagaacactg

SEQ ID NO: 1652541 - DNA, 15 bp, Homo sapiens
tctcaagaacactga

SEQ ID NO: 1652542 - DNA, 15 bp, Homo sapiens
ctcaagaacactgag

SEQ ID NO: 1652543 - DNA, 15 bp, Homo sapiens
tcaagaacactgaga

SEQ ID NO: 1652544 - DNA, 15 bp, Homo sapiens
caagaacactgagaa

SEQ ID NO: 1652545 - DNA, 15 bp, Homo sapiens
aagaacactgagaat

SEQ ID NO: 1652546 - DNA, 15 bp, Homo sapiens
agaacactgagaatt

SEQ ID NO: 1652547 - DNA, 15 bp, Homo sapiens
gaacactgagaattc

SEQ ID NO: 1652548 - DNA, 15 bp, Homo sapiens
aacactgagaattct

SEQ ID NO: 1652549 - DNA, 15 bp, Homo sapiens
acactgagaattcta

SEQ ID NO: 1652550 - DNA, 15 bp, Homo sapiens
cactgagaattctat

SEQ ID NO: 1652551 - DNA, 15 bp, Homo sapiens
actgagaattctatg

SEQ ID NO: 1652552 - DNA, 15 bp, Homo sapiens
ctgagaattctatgc

SEQ ID NO: 1652553 - DNA, 15 bp, Homo sapiens
tgagaattctatgct

SEQ ID NO: 1652554 - DNA, 15 bp, Homo sapiens
gagaattctatgctg

SEQ ID NO: 1652555 - DNA, 15 bp, Homo sapiens
agaattctatgctgt

SEQ ID NO: 1652556 - DNA, 15 bp, Homo sapiens
gaattctatgctgta

SEQ ID NO: 1652557 - DNA, 15 bp, Homo sapiens
aattctatgctgtat

SEQ ID NO: 1652558 - DNA, 15 bp, Homo sapiens
attctatgctgtatc

SEQ ID NO: 1652559 - DNA, 15 bp, Homo sapiens
ttctatgctgtatcc

SEQ ID NO: 1652560 - DNA, 15 bp, Homo sapiens
tctatgctgtatcct

SEQ ID NO: 1652561 - DNA, 15 bp, Homo sapiens
ctatgctgtatcctt

SEQ ID NO: 1652562 - DNA, 15 bp, Homo sapiens
tatgctgtatccttg

SEQ ID NO: 1652563 - DNA, 15 bp, Homo sapiens
atgctgtatccttgt

SEQ ID NO: 1652564 - DNA, 15 bp, Homo sapiens
tgctgtatccttgta

SEQ ID NO: 1652565 - DNA, 15 bp, Homo sapiens
gctgtatccttgtat

SEQ ID NO: 1652566 - DNA, 15 bp, Homo sapiens
ctgtatccttgtatg

SEQ ID NO: 1652567 - DNA, 15 bp, Homo sapiens
tgtatccttgtatga

SEQ ID NO: 1652568 - DNA, 15 bp, Homo sapiens
gtatccttgtatgac

SEQ ID NO: 1652569 - DNA, 15 bp, Homo sapiens
tatccttgtatgacc

SEQ ID NO: 1652570 - DNA, 15 bp, Homo sapiens
atccttgtatgacca

SEQ ID NO: 1652571 - DNA, 15 bp, Homo sapiens
tccttgtatgaccaa

SEQ ID NO: 1652572 - DNA, 15 bp, Homo sapiens
ccttgtatgaccaat

SEQ ID NO: 1652573 - DNA, 15 bp, Homo sapiens
cttgtatgaccaatt

SEQ ID NO: 1652574 - DNA, 15 bp, Homo sapiens
ttgtatgaccaattg

SEQ ID NO: 1652575 - DNA, 15 bp, Homo sapiens
tgtatgaccaattga

SEQ ID NO: 1652576 - DNA, 15 bp, Homo sapiens
gtatgaccaattgac

SEQ ID NO: 1652577 - DNA, 15 bp, Homo sapiens
tatgaccaattgaca

SEQ ID NO: 1652578 - DNA, 15 bp, Homo sapiens
atgaccaattgacaa

SEQ ID NO: 1652579 - DNA, 15 bp, Homo sapiens
tgaccaattgacaag

SEQ ID NO: 1652580 - DNA, 15 bp, Homo sapiens
gaccaattgacaaga

SEQ ID NO: 1652581 - DNA, 15 bp, Homo sapiens
accaattgacaagaa

SEQ ID NO: 1652582 - DNA, 15 bp, Homo sapiens
ccaattgacaagaat

SEQ ID NO: 1652583 - DNA, 15 bp, Homo sapiens
caattgacaagaatt

SEQ ID NO: 1652584 - DNA, 15 bp, Homo sapiens
aattgacaagaattc

SEQ ID NO: 1652585 - DNA, 15 bp, Homo sapiens
attgacaagaattct

SEQ ID NO: 1652586 - DNA, 15 bp, Homo sapiens
ttgacaagaattctg

SEQ ID NO: 1652587 - DNA, 15 bp, Homo sapiens
tgacaagaattctgt

SEQ ID NO: 1652588 - DNA, 15 bp, Homo sapiens
gacaagaattctgtg

SEQ ID NO: 1652589 - DNA, 15 bp, Homo sapiens
acaagaattctgtgt

SEQ ID NO: 1652590 - DNA, 15 bp, Homo sapiens
caagaattctgtgtt

SEQ ID NO: 1652591 - DNA, 15 bp, Homo sapiens
aagaattctgtgttg

SEQ ID NO: 1652592 - DNA, 15 bp, Homo sapiens
agaattctgtgttga

SEQ ID NO: 1652593 - DNA, 15 bp, Homo sapiens
gaattctgtgttgac

SEQ ID NO: 1652594 - DNA, 15 bp, Homo sapiens
aattctgtgttgact

SEQ ID NO: 1652595 - DNA, 15 bp, Homo sapiens
attctgtgttgactt

SEQ ID NO: 1652596 - DNA, 15 bp, Homo sapiens
ttctgtgttgactta

SEQ ID NO: 1652597 - DNA, 15 bp, Homo sapiens
tctgtgttgacttat

SEQ ID NO: 1652598 - DNA, 15 bp, Homo sapiens
ctgtgttgacttata

SEQ ID NO: 1652599 - DNA, 15 bp, Homo sapiens
tgtgttgacttatat

SEQ ID NO: 1652600 - DNA, 15 bp, Homo sapiens
gtgttgacttatatt

SEQ ID NO: 1652601 - DNA, 15 bp, Homo sapiens
tgttgacttatattt

SEQ ID NO: 1652602 - DNA, 15 bp, Homo sapiens
gttgacttatatttc

SEQ ID NO: 1652603 - DNA, 15 bp, Homo sapiens
ttgacttatatttcc

SEQ ID NO: 1652604 - DNA, 15 bp, Homo sapiens
tgacttatatttccc

SEQ ID NO: 1652605 - DNA, 15 bp, Homo sapiens
gacttatatttccca

SEQ ID NO: 1652606 - DNA, 15 bp, Homo sapiens
acttatatttcccag

SEQ ID NO: 1652607 - DNA, 15 bp, Homo sapiens
cttatatttcccagt

SEQ ID NO: 1652608 - DNA, 15 bp, Homo sapiens
ttatatttcccagta

SEQ ID NO: 1652609 - DNA, 15 bp, Homo sapiens
tatatttcccagtaa

SEQ ID NO: 1652610 - DNA, 15 bp, Homo sapiens
atatttcccagtaaa

SEQ ID NO: 1652611 - DNA, 15 bp, Homo sapiens
tatttcccagtaaaa

SEQ ID NO: 1652612 - DNA, 15 bp, Homo sapiens
atttcccagtaaaag

SEQ ID NO: 1652613 - DNA, 15 bp, Homo sapiens
tttcccagtaaaagt

SEQ ID NO: 1652614 - DNA, 15 bp, Homo sapiens
ttcccagtaaaagta

SEQ ID NO: 1652615 - DNA, 15 bp, Homo sapiens
tcccagtaaaagtac

SEQ ID NO: 1652616 - DNA, 15 bp, Homo sapiens
cccagtaaaagtacg

SEQ ID NO: 1652617 - DNA, 15 bp, Homo sapiens
ccagtaaaagtacga

SEQ ID NO: 1652618 - DNA, 15 bp, Homo sapiens
cagtaaaagtacgaa

SEQ ID NO: 1652619 - DNA, 15 bp, Homo sapiens
agtaaaagtacgaag

SEQ ID NO: 1652620 - DNA, 15 bp, Homo sapiens
gtaaaagtacgaagc

SEQ ID NO: 1652621 - DNA, 15 bp, Homo sapiens
taaaagtacgaagca

SEQ ID NO: 1652622 - DNA, 15 bp, Homo sapiens
aaaagtacgaagcaa

SEQ ID NO: 1652623 - DNA, 15 bp, Homo sapiens
aaagtacgaagcaag

SEQ ID NO: 1652624 - DNA, 15 bp, Homo sapiens
aagtacgaagcaagc

SEQ ID NO: 1652625 - DNA, 15 bp, Homo sapiens
agtacgaagcaagca

SEQ ID NO: 1652626 - DNA, 15 bp, Homo sapiens
gtacgaagcaagcaa

SEQ ID NO: 1652627 - DNA, 15 bp, Homo sapiens
tacgaagcaagcaaa

SEQ ID NO: 1652628 - DNA, 15 bp, Homo sapiens
acgaagcaagcaaaa

SEQ ID NO: 1652629 - DNA, 15 bp, Homo sapiens
cgaagcaagcaaaag

SEQ ID NO: 1652630 - DNA, 15 bp, Homo sapiens
gaagcaagcaaaagc

SEQ ID NO: 1652631 - DNA, 15 bp, Homo sapiens
aagcaagcaaaagca

SEQ ID NO: 1652632 - DNA, 15 bp, Homo sapiens
agcaagcaaaagcag

SEQ ID NO: 1652633 - DNA, 15 bp, Homo sapiens
gcaagcaaaagcagt

SEQ ID NO: 1652634 - DNA, 15 bp, Homo sapiens
caagcaaaagcagtc

SEQ ID NO: 1652635 - DNA, 15 bp, Homo sapiens
aagcaaaagcagtct

SEQ ID NO: 1652636 - DNA, 15 bp, Homo sapiens
agcaaaagcagtctg

SEQ ID NO: 1652637 - DNA, 15 bp, Homo sapiens
gcaaaagcagtctga

SEQ ID NO: 1652638 - DNA, 15 bp, Homo sapiens
caaaagcagtctgat

SEQ ID NO: 1652639 - DNA, 15 bp, Homo sapiens
aaaagcagtctgata

SEQ ID NO: 1652640 - DNA, 15 bp, Homo sapiens
aaagcagtctgataa

SEQ ID NO: 1652641 - DNA, 15 bp, Homo sapiens
aagcagtctgataag

SEQ ID NO: 1652642 - DNA, 15 bp, Homo sapiens
agcagtctgataagg

SEQ ID NO: 1652643 - DNA, 15 bp, Homo sapiens
gcagtctgataagga

SEQ ID NO: 1652644 - DNA, 15 bp, Homo sapiens
cagtctgataaggaa

SEQ ID NO: 1652645 - DNA, 15 bp, Homo sapiens
agtctgataaggaaa

SEQ ID NO: 1652646 - DNA, 15 bp, Homo sapiens
gtctgataaggaaaa

SEQ ID NO: 1652647 - DNA, 15 bp, Homo sapiens
tctgataaggaaaat

SEQ ID NO: 1652648 - DNA, 15 bp, Homo sapiens
ctgataaggaaaatc

SEQ ID NO: 1652649 - DNA, 15 bp, Homo sapiens
tgataaggaaaatct

SEQ ID NO: 1652650 - DNA, 15 bp, Homo sapiens
gataaggaaaatctg

SEQ ID NO: 1652651 - DNA, 15 bp, Homo sapiens
ataaggaaaatctgt

SEQ ID NO: 1652652 - DNA, 15 bp, Homo sapiens
taaggaaaatctgtt

SEQ ID NO: 1652653 - DNA, 15 bp, Homo sapiens
aaggaaaatctgttg

SEQ ID NO: 1652654 - DNA, 15 bp, Homo sapiens
aggaaaatctgttgg

SEQ ID NO: 1652655 - DNA, 15 bp, Homo sapiens
ggaaaatctgttggg

SEQ ID NO: 1652656 - DNA, 15 bp, Homo sapiens
gaaaatctgttgggg

SEQ ID NO: 1652657 - DNA, 15 bp, Homo sapiens
aaaatctgttgggga

SEQ ID NO: 1652658 - DNA, 15 bp, Homo sapiens
aaatctgttggggaa

SEQ ID NO: 1652659 - DNA, 15 bp, Homo sapiens
aatctgttggggaaa

SEQ ID NO: 1652660 - DNA, 15 bp, Homo sapiens
atctgttggggaaag

SEQ ID NO: 1652661 - DNA, 15 bp, Homo sapiens
tctgttggggaaagg

SEQ ID NO: 1652662 - DNA, 15 bp, Homo sapiens
ctgttggggaaaggt

SEQ ID NO: 1652663 - DNA, 15 bp, Homo sapiens
tgttggggaaaggtt

SEQ ID NO: 1652664 - DNA, 15 bp, Homo sapiens
gttggggaaaggttt

SEQ ID NO: 1652665 - DNA, 15 bp, Homo sapiens
ttggggaaaggtttg

SEQ ID NO: 1652666 - DNA, 15 bp, Homo sapiens
tggggaaaggtttgc

SEQ ID NO: 1652667 - DNA, 15 bp, Homo sapiens
ggggaaaggtttgct

SEQ ID NO: 1652668 - DNA, 15 bp, Homo sapiens
gggaaaggtttgctt

SEQ ID NO: 1652669 - DNA, 15 bp, Homo sapiens
ggaaaggtttgctta

SEQ ID NO: 1652670 - DNA, 15 bp, Homo sapiens
gaaaggtttgcttag

SEQ ID NO: 1652671 - DNA, 15 bp, Homo sapiens
aaaggtttgcttaga

SEQ ID NO: 1652672 - DNA, 15 bp, Homo sapiens
aaggtttgcttagag

SEQ ID NO: 1652673 - DNA, 15 bp, Homo sapiens
aggtttgcttagaga

SEQ ID NO: 1652674 - DNA, 15 bp, Homo sapiens
ggtttgcttagagag

SEQ ID NO: 1652675 - DNA, 15 bp, Homo sapiens
gtttgcttagagagt

SEQ ID NO: 1652676 - DNA, 15 bp, Homo sapiens
tttgcttagagagtc

SEQ ID NO: 1652677 - DNA, 15 bp, Homo sapiens
ttgcttagagagtct

SEQ ID NO: 1652678 - DNA, 15 bp, Homo sapiens
tgcttagagagtctt

SEQ ID NO: 1652679 - DNA, 15 bp, Homo sapiens
gcttagagagtcttt

SEQ ID NO: 1652680 - DNA, 15 bp, Homo sapiens
cttagagagtctttt

SEQ ID NO: 1652681 - DNA, 15 bp, Homo sapiens
ttagagagtcttttg

SEQ ID NO: 1652682 - DNA, 15 bp, Homo sapiens
tagagagtcttttgg

SEQ ID NO: 1652683 - DNA, 15 bp, Homo sapiens
agagagtcttttggg

SEQ ID NO: 1652684 - DNA, 15 bp, Homo sapiens
gagagtcttttgggc

SEQ ID NO: 1652685 - DNA, 15 bp, Homo sapiens
agagtcttttgggca

SEQ ID NO: 1652686 - DNA, 15 bp, Homo sapiens
gagtcttttgggcac

SEQ ID NO: 1652687 - DNA, 15 bp, Homo sapiens
agtcttttgggcaca

SEQ ID NO: 1652688 - DNA, 15 bp, Homo sapiens
gtcttttgggcacat

SEQ ID NO: 1652689 - DNA, 15 bp, Homo sapiens
tcttttgggcacatt

SEQ ID NO: 1652690 - DNA, 15 bp, Homo sapiens
cttttgggcacattc

SEQ ID NO: 1652691 - DNA, 15 bp, Homo sapiens
ttttgggcacattca

SEQ ID NO: 1652692 - DNA, 15 bp, Homo sapiens
tttgggcacattcat

SEQ ID NO: 1652693 - DNA, 15 bp, Homo sapiens
ttgggcacattcatg

SEQ ID NO: 1652694 - DNA, 15 bp, Homo sapiens
tgggcacattcatgc

SEQ ID NO: 1652695 - DNA, 15 bp, Homo sapiens
gggcacattcatgct

SEQ ID NO: 1652696 - DNA, 15 bp, Homo sapiens
ggcacattcatgctc

SEQ ID NO: 1652697 - DNA, 15 bp, Homo sapiens
gcacattcatgctct

SEQ ID NO: 1652698 - DNA, 15 bp, Homo sapiens
cacattcatgctctc

SEQ ID NO: 1652699 - DNA, 15 bp, Homo sapiens
acattcatgctctct

SEQ ID NO: 1652700 - DNA, 15 bp, Homo sapiens
cattcatgctctcta

SEQ ID NO: 1652701 - DNA, 15 bp, Homo sapiens
attcatgctctctag

SEQ ID NO: 1652702 - DNA, 15 bp, Homo sapiens
ttcatgctctctagg

SEQ ID NO: 1652703 - DNA, 15 bp, Homo sapiens
tcatgctctctaggg

SEQ ID NO: 1652704 - DNA, 15 bp, Homo sapiens
catgctctctagggc

SEQ ID NO: 1652705 - DNA, 15 bp, Homo sapiens
atgctctctagggct

SEQ ID NO: 1652706 - DNA, 15 bp, Homo sapiens
tgctctctagggctt

SEQ ID NO: 1652707 - DNA, 15 bp, Homo sapiens
gctctctagggcttt

SEQ ID NO: 1652708 - DNA, 15 bp, Homo sapiens
ctctctagggctttt

SEQ ID NO: 1652709 - DNA, 15 bp, Homo sapiens
tctctagggcttttt

SEQ ID NO: 1652710 - DNA, 15 bp, Homo sapiens
ctctagggctttttt

SEQ ID NO: 1652711 - DNA, 15 bp, Homo sapiens
tctagggcttttttg

SEQ ID NO: 1652712 - DNA, 15 bp, Homo sapiens
ctagggcttttttgt

SEQ ID NO: 1652713 - DNA, 15 bp, Homo sapiens
tagggcttttttgta

SEQ ID NO: 1652714 - DNA, 15 bp, Homo sapiens
agggcttttttgtac

SEQ ID NO: 1652715 - DNA, 15 bp, Homo sapiens
gggcttttttgtaca

SEQ ID NO: 1652716 - DNA, 15 bp, Homo sapiens
ggcttttttgtacaa

SEQ ID NO: 1652717 - DNA, 15 bp, Homo sapiens
gcttttttgtacaac

SEQ ID NO: 1652718 - DNA, 15 bp, Homo sapiens
cttttttgtacaaca

SEQ ID NO: 1652719 - DNA, 15 bp, Homo sapiens
ttttttgtacaacac

SEQ ID NO: 1652720 - DNA, 15 bp, Homo sapiens
tttttgtacaacact

SEQ ID NO: 1652721 - DNA, 15 bp, Homo sapiens
ttttgtacaacactg

SEQ ID NO: 1652722 - DNA, 15 bp, Homo sapiens
tttgtacaacactgg

SEQ ID NO: 1652723 - DNA, 15 bp, Homo sapiens
ttgtacaacactggt

SEQ ID NO: 1652724 - DNA, 15 bp, Homo sapiens
tgtacaacactggta

SEQ ID NO: 1652725 - DNA, 15 bp, Homo sapiens
gtacaacactggtaa

SEQ ID NO: 1652726 - DNA, 15 bp, Homo sapiens
tacaacactggtaag

SEQ ID NO: 1652727 - DNA, 15 bp, Homo sapiens
acaacactggtaagc

SEQ ID NO: 1652728 - DNA, 15 bp, Homo sapiens
caacactggtaagcc

SEQ ID NO: 1652729 - DNA, 15 bp, Homo sapiens
aacactggtaagcca

SEQ ID NO: 1652730 - DNA, 15 bp, Homo sapiens
acactggtaagccag

SEQ ID NO: 1652731 - DNA, 15 bp, Homo sapiens
cactggtaagccagt

SEQ ID NO: 1652732 - DNA, 15 bp, Homo sapiens
actggtaagccagtt

SEQ ID NO: 1652733 - DNA, 15 bp, Homo sapiens
ctggtaagccagttc

SEQ ID NO: 1652734 - DNA, 15 bp, Homo sapiens
tggtaagccagttct

SEQ ID NO: 1652735 - DNA, 15 bp, Homo sapiens
ggtaagccagttctc

SEQ ID NO: 1652736 - DNA, 15 bp, Homo sapiens
gtaagccagttctca

SEQ ID NO: 1652737 - DNA, 15 bp, Homo sapiens
taagccagttctcaa

SEQ ID NO: 1652738 - DNA, 15 bp, Homo sapiens
aagccagttctcaaa

SEQ ID NO: 1652739 - DNA, 15 bp, Homo sapiens
agccagttctcaaag

SEQ ID NO: 1652740 - DNA, 15 bp, Homo sapiens
gccagttctcaaagt

SEQ ID NO: 1652741 - DNA, 15 bp, Homo sapiens
ccagttctcaaagtc

SEQ ID NO: 1652742 - DNA, 15 bp, Homo sapiens
cagttctcaaagtca

SEQ ID NO: 1652743 - DNA, 15 bp, Homo sapiens
agttctcaaagtcaa

SEQ ID NO: 1652744 - DNA, 15 bp, Homo sapiens
gttctcaaagtcaaa

SEQ ID NO: 1652745 - DNA, 15 bp, Homo sapiens
ttctcaaagtcaaac

SEQ ID NO: 1652746 - DNA, 15 bp, Homo sapiens
tctcaaagtcaaact

SEQ ID NO: 1652747 - DNA, 15 bp, Homo sapiens
ctcaaagtcaaactg

SEQ ID NO: 1652748 - DNA, 15 bp, Homo sapiens
tcaaagtcaaactga

SEQ ID NO: 1652749 - DNA, 15 bp, Homo sapiens
caaagtcaaactgat

SEQ ID NO: 1652750 - DNA, 15 bp, Homo sapiens
aaagtcaaactgata

SEQ ID NO: 1652751 - DNA, 15 bp, Homo sapiens
aagtcaaactgataa

SEQ ID NO: 1652752 - DNA, 15 bp, Homo sapiens
agtcaaactgataat

SEQ ID NO: 1652753 - DNA, 15 bp, Homo sapiens
gtcaaactgataata

SEQ ID NO: 1652754 - DNA, 15 bp, Homo sapiens
tcaaactgataatac

SEQ ID NO: 1652755 - DNA, 15 bp, Homo sapiens
caaactgataatact

SEQ ID NO: 1652756 - DNA, 15 bp, Homo sapiens
aaactgataatactc

SEQ ID NO: 1652757 - DNA, 15 bp, Homo sapiens
aactgataatactcc

SEQ ID NO: 1652758 - DNA, 15 bp, Homo sapiens
actgataatactcca

SEQ ID NO: 1652759 - DNA, 15 bp, Homo sapiens
ctgataatactccaa

SEQ ID NO: 1652760 - DNA, 15 bp, Homo sapiens
tgataatactccaat

SEQ ID NO: 1652761 - DNA, 15 bp, Homo sapiens
gataatactccaata

SEQ ID NO: 1652762 - DNA, 15 bp, Homo sapiens
ataatactccaatac

SEQ ID NO: 1652763 - DNA, 15 bp, Homo sapiens
taatactccaatact

SEQ ID NO: 1652764 - DNA, 15 bp, Homo sapiens
aatactccaatactt

SEQ ID NO: 1652765 - DNA, 15 bp, Homo sapiens
atactccaatactta

SEQ ID NO: 1652766 - DNA, 15 bp, Homo sapiens
tactccaatacttac

SEQ ID NO: 1652767 - DNA, 15 bp, Homo sapiens
actccaatacttaca

SEQ ID NO: 1652768 - DNA, 15 bp, Homo sapiens
ctccaatacttacaa

SEQ ID NO: 1652769 - DNA, 15 bp, Homo sapiens
tccaatacttacaag

SEQ ID NO: 1652770 - DNA, 15 bp, Homo sapiens
ccaatacttacaagt

SEQ ID NO: 1652771 - DNA, 15 bp, Homo sapiens
caatacttacaagta

SEQ ID NO: 1652772 - DNA, 15 bp, Homo sapiens
aatacttacaagtag

SEQ ID NO: 1652773 - DNA, 15 bp, Homo sapiens
atacttacaagtaga

SEQ ID NO: 1652774 - DNA, 15 bp, Homo sapiens
tacttacaagtagac

SEQ ID NO: 1652775 - DNA, 15 bp, Homo sapiens
acttacaagtagaca

SEQ ID NO: 1652776 - DNA, 15 bp, Homo sapiens
cttacaagtagacac

SEQ ID NO: 1652777 - DNA, 15 bp, Homo sapiens
ttacaagtagacact

SEQ ID NO: 1652778 - DNA, 15 bp, Homo sapiens
tacaagtagacactt

SEQ ID NO: 1652779 - DNA, 15 bp, Homo sapiens
acaagtagacacttg

SEQ ID NO: 1652780 - DNA, 15 bp, Homo sapiens
caagtagacacttgt

SEQ ID NO: 1652781 - DNA, 15 bp, Homo sapiens
aagtagacacttgta

SEQ ID NO: 1652782 - DNA, 15 bp, Homo sapiens
agtagacacttgtac

SEQ ID NO: 1652783 - DNA, 15 bp, Homo sapiens
gtagacacttgtacc

SEQ ID NO: 1652784 - DNA, 15 bp, Homo sapiens
tagacacttgtacca

SEQ ID NO: 1652785 - DNA, 15 bp, Homo sapiens
agacacttgtaccaa

SEQ ID NO: 1652786 - DNA, 15 bp, Homo sapiens
gacacttgtaccaaa

SEQ ID NO: 1652787 - DNA, 15 bp, Homo sapiens
acacttgtaccaaag

SEQ ID NO: 1652788 - DNA, 15 bp, Homo sapiens
cacttgtaccaaaga

SEQ ID NO: 1652789 - DNA, 15 bp, Homo sapiens
acttgtaccaaagaa

SEQ ID NO: 1652790 - DNA, 15 bp, Homo sapiens
cttgtaccaaagaac

SEQ ID NO: 1652791 - DNA, 15 bp, Homo sapiens
ttgtaccaaagaact

SEQ ID NO: 1652792 - DNA, 15 bp, Homo sapiens
tgtaccaaagaacta

SEQ ID NO: 1652793 - DNA, 15 bp, Homo sapiens
gtaccaaagaactat

SEQ ID NO: 1652794 - DNA, 15 bp, Homo sapiens
taccaaagaactata

SEQ ID NO: 1652795 - DNA, 15 bp, Homo sapiens
accaaagaactatac

SEQ ID NO: 1652796 - DNA, 15 bp, Homo sapiens
ccaaagaactatacg

SEQ ID NO: 1652797 - DNA, 15 bp, Homo sapiens
caaagaactatacgc

SEQ ID NO: 1652798 - DNA, 15 bp, Homo sapiens
aaagaactatacgct

SEQ ID NO: 1652799 - DNA, 15 bp, Homo sapiens
aagaactatacgctc

SEQ ID NO: 1652800 - DNA, 15 bp, Homo sapiens
agaactatacgctcc

SEQ ID NO: 1652801 - DNA, 15 bp, Homo sapiens
gaactatacgctcct

SEQ ID NO: 1652802 - DNA, 15 bp, Homo sapiens
aactatacgctcctg

SEQ ID NO: 1652803 - DNA, 15 bp, Homo sapiens
actatacgctcctgg

SEQ ID NO: 1652804 - DNA, 15 bp, Homo sapiens
ctatacgctcctggg

SEQ ID NO: 1652805 - DNA, 15 bp, Homo sapiens
tatacgctcctgggt

SEQ ID NO: 1652806 - DNA, 15 bp, Homo sapiens
atacgctcctgggtg

SEQ ID NO: 1652807 - DNA, 15 bp, Homo sapiens
tacgctcctgggtgc

SEQ ID NO: 1652808 - DNA, 15 bp, Homo sapiens
acgctcctgggtgct

SEQ ID NO: 1652809 - DNA, 15 bp, Homo sapiens
cgctcctgggtgctc

SEQ ID NO: 1652810 - DNA, 15 bp, Homo sapiens
gctcctgggtgctca

SEQ ID NO: 1652811 - DNA, 15 bp, Homo sapiens
ctcctgggtgctcac

SEQ ID NO: 1652812 - DNA, 15 bp, Homo sapiens
tcctgggtgctcaca

SEQ ID NO: 1652813 - DNA, 15 bp, Homo sapiens
cctgggtgctcacac

SEQ ID NO: 1652814 - DNA, 15 bp, Homo sapiens
ctgggtgctcacact

SEQ ID NO: 1652815 - DNA, 15 bp, Homo sapiens
tgggtgctcacactg

SEQ ID NO: 1652816 - DNA, 15 bp, Homo sapiens
gggtgctcacactgc

SEQ ID NO: 1652817 - DNA, 15 bp, Homo sapiens
ggtgctcacactgcc

SEQ ID NO: 1652818 - DNA, 15 bp, Homo sapiens
gtgctcacactgccc

SEQ ID NO: 1652819 - DNA, 15 bp, Homo sapiens
tgctcacactgccct

SEQ ID NO: 1652820 - DNA, 15 bp, Homo sapiens
gctcacactgccctt

SEQ ID NO: 1652821 - DNA, 15 bp, Homo sapiens
ctcacactgcccttt

SEQ ID NO: 1652822 - DNA, 15 bp, Homo sapiens
tcacactgccctttg

SEQ ID NO: 1652823 - DNA, 15 bp, Homo sapiens
cacactgccctttgc

SEQ ID NO: 1652824 - DNA, 15 bp, Homo sapiens
acactgccctttgct

SEQ ID NO: 1652825 - DNA, 15 bp, Homo sapiens
cactgccctttgctt

SEQ ID NO: 1652826 - DNA, 15 bp, Homo sapiens
actgccctttgcttg

SEQ ID NO: 1652827 - DNA, 15 bp, Homo sapiens
ctgccctttgcttga

SEQ ID NO: 1652828 - DNA, 15 bp, Homo sapiens
tgccctttgcttgag

SEQ ID NO: 1652829 - DNA, 15 bp, Homo sapiens
gccctttgcttgaga

SEQ ID NO: 1652830 - DNA, 15 bp, Homo sapiens
ccctttgcttgagaa

SEQ ID NO: 1652831 - DNA, 15 bp, Homo sapiens
cctttgcttgagaag

SEQ ID NO: 1652832 - DNA, 15 bp, Homo sapiens
ctttgcttgagaagt

SEQ ID NO: 1652833 - DNA, 15 bp, Homo sapiens
tttgcttgagaagta

SEQ ID NO: 1652834 - DNA, 15 bp, Homo sapiens
ttgcttgagaagtaa

SEQ ID NO: 1652835 - DNA, 15 bp, Homo sapiens
tgcttgagaagtaaa

SEQ ID NO: 1652836 - DNA, 15 bp, Homo sapiens
gcttgagaagtaaat

SEQ ID NO: 1652837 - DNA, 15 bp, Homo sapiens
cttgagaagtaaatg

SEQ ID NO: 1652838 - DNA, 15 bp, Homo sapiens
ttgagaagtaaatga

SEQ ID NO: 1652839 - DNA, 15 bp, Homo sapiens
tgagaagtaaatgaa

SEQ ID NO: 1652840 - DNA, 15 bp, Homo sapiens
gagaagtaaatgaac

SEQ ID NO: 1652841 - DNA, 15 bp, Homo sapiens
agaagtaaatgaaca

SEQ ID NO: 1652842 - DNA, 15 bp, Homo sapiens
gaagtaaatgaacat

SEQ ID NO: 1652843 - DNA, 15 bp, Homo sapiens
aagtaaatgaacata

SEQ ID NO: 1652844 - DNA, 15 bp, Homo sapiens
agtaaatgaacatag

SEQ ID NO: 1652845 - DNA, 15 bp, Homo sapiens
gtaaatgaacatagg

SEQ ID NO: 1652846 - DNA, 15 bp, Homo sapiens
taaatgaacatagga

SEQ ID NO: 1652847 - DNA, 15 bp, Homo sapiens
aaatgaacataggaa

SEQ ID NO: 1652848 - DNA, 15 bp, Homo sapiens
aatgaacataggaac

SEQ ID NO: 1652849 - DNA, 15 bp, Homo sapiens
atgaacataggaacg

SEQ ID NO: 1652850 - DNA, 15 bp, Homo sapiens
tgaacataggaacgc

SEQ ID NO: 1652851 - DNA, 15 bp, Homo sapiens
gaacataggaacgca

SEQ ID NO: 1652852 - DNA, 15 bp, Homo sapiens
aacataggaacgcag

SEQ ID NO: 1652853 - DNA, 15 bp, Homo sapiens
acataggaacgcaga

SEQ ID NO: 1652854 - DNA, 15 bp, Homo sapiens
cataggaacgcagat

SEQ ID NO: 1652855 - DNA, 15 bp, Homo sapiens
ataggaacgcagatg

SEQ ID NO: 1652856 - DNA, 15 bp, Homo sapiens
taggaacgcagatgc

SEQ ID NO: 1652857 - DNA, 15 bp, Homo sapiens
aggaacgcagatgca

SEQ ID NO: 1652858 - DNA, 15 bp, Homo sapiens
ggaacgcagatgcag

SEQ ID NO: 1652859 - DNA, 15 bp, Homo sapiens
gaacgcagatgcagg

SEQ ID NO: 1652860 - DNA, 15 bp, Homo sapiens
aacgcagatgcaggc

SEQ ID NO: 1652861 - DNA, 15 bp, Homo sapiens
acgcagatgcaggca

SEQ ID NO: 1652862 - DNA, 15 bp, Homo sapiens
cgcagatgcaggcag

SEQ ID NO: 1652863 - DNA, 15 bp, Homo sapiens
gcagatgcaggcaga

SEQ ID NO: 1652864 - DNA, 15 bp, Homo sapiens
cagatgcaggcagac

SEQ ID NO: 1652865 - DNA, 15 bp, Homo sapiens
agatgcaggcagaca

SEQ ID NO: 1652866 - DNA, 15 bp, Homo sapiens
gatgcaggcagacat

SEQ ID NO: 1652867 - DNA, 15 bp, Homo sapiens
atgcaggcagacatg

SEQ ID NO: 1652868 - DNA, 15 bp, Homo sapiens
tgcaggcagacatga

SEQ ID NO: 1652869 - DNA, 15 bp, Homo sapiens
gcaggcagacatgag

SEQ ID NO: 1652870 - DNA, 15 bp, Homo sapiens
caggcagacatgagc

SEQ ID NO: 1652871 - DNA, 15 bp, Homo sapiens
aggcagacatgagca

SEQ ID NO: 1652872 - DNA, 15 bp, Homo sapiens
ggcagacatgagcat

SEQ ID NO: 1652873 - DNA, 15 bp, Homo sapiens
gcagacatgagcatg

SEQ ID NO: 1652874 - DNA, 15 bp, Homo sapiens
cagacatgagcatga

SEQ ID NO: 1652875 - DNA, 15 bp, Homo sapiens
agacatgagcatgac

SEQ ID NO: 1652876 - DNA, 15 bp, Homo sapiens
gacatgagcatgaca

SEQ ID NO: 1652877 - DNA, 15 bp, Homo sapiens
acatgagcatgacag

SEQ ID NO: 1652878 - DNA, 15 bp, Homo sapiens
catgagcatgacagt

SEQ ID NO: 1652879 - DNA, 15 bp, Homo sapiens
atgagcatgacagtt

SEQ ID NO: 1652880 - DNA, 15 bp, Homo sapiens
tgagcatgacagttt

SEQ ID NO: 1652881 - DNA, 15 bp, Homo sapiens
gagcatgacagtttc

SEQ ID NO: 1652882 - DNA, 15 bp, Homo sapiens
agcatgacagtttca

SEQ ID NO: 1652883 - DNA, 15 bp, Homo sapiens
gcatgacagtttcat

SEQ ID NO: 1652884 - DNA, 15 bp, Homo sapiens
catgacagtttcatg

SEQ ID NO: 1652885 - DNA, 15 bp, Homo sapiens
atgacagtttcatgt

SEQ ID NO: 1652886 - DNA, 15 bp, Homo sapiens
tgacagtttcatgtg

SEQ ID NO: 1652887 - DNA, 15 bp, Homo sapiens
gacagtttcatgtgc

SEQ ID NO: 1652888 - DNA, 15 bp, Homo sapiens
acagtttcatgtgca

SEQ ID NO: 1652889 - DNA, 15 bp, Homo sapiens
cagtttcatgtgcat

SEQ ID NO: 1652890 - DNA, 15 bp, Homo sapiens
agtttcatgtgcatt

SEQ ID NO: 1652891 - DNA, 15 bp, Homo sapiens
gtttcatgtgcattt

SEQ ID NO: 1652892 - DNA, 15 bp, Homo sapiens
tttcatgtgcatttg

SEQ ID NO: 1652893 - DNA, 15 bp, Homo sapiens
ttcatgtgcatttgt

SEQ ID NO: 1652894 - DNA, 15 bp, Homo sapiens
tcatgtgcatttgtt

SEQ ID NO: 1652895 - DNA, 15 bp, Homo sapiens
catgtgcatttgttc

SEQ ID NO: 1652896 - DNA, 15 bp, Homo sapiens
atgtgcatttgttca

SEQ ID NO: 1652897 - DNA, 15 bp, Homo sapiens
tgtgcatttgttcat

SEQ ID NO: 1652898 - DNA, 15 bp, Homo sapiens
gtgcatttgttcatg

SEQ ID NO: 1652899 - DNA, 15 bp, Homo sapiens
tgcatttgttcatgg

SEQ ID NO: 1652900 - DNA, 15 bp, Homo sapiens
gcatttgttcatggt

SEQ ID NO: 1652901 - DNA, 15 bp, Homo sapiens
catttgttcatggtg

SEQ ID NO: 1652902 - DNA, 15 bp, Homo sapiens
atttgttcatggtgt

SEQ ID NO: 1652903 - DNA, 15 bp, Homo sapiens
tttgttcatggtgtt

SEQ ID NO: 1652904 - DNA, 15 bp, Homo sapiens
ttgttcatggtgttg

SEQ ID NO: 1652905 - DNA, 15 bp, Homo sapiens
tgttcatggtgttgt

SEQ ID NO: 1652906 - DNA, 15 bp, Homo sapiens
gttcatggtgttgtc

SEQ ID NO: 1652907 - DNA, 15 bp, Homo sapiens
ttcatggtgttgtct

SEQ ID NO: 1652908 - DNA, 15 bp, Homo sapiens
tcatggtgttgtctc

SEQ ID NO: 1652909 - DNA, 15 bp, Homo sapiens
catggtgttgtctct

SEQ ID NO: 1652910 - DNA, 15 bp, Homo sapiens
atggtgttgtctctg

SEQ ID NO: 1652911 - DNA, 15 bp, Homo sapiens
tggtgttgtctctga

SEQ ID NO: 1652912 - DNA, 15 bp, Homo sapiens
ggtgttgtctctgaa

SEQ ID NO: 1652913 - DNA, 15 bp, Homo sapiens
gtgttgtctctgaaa

SEQ ID NO: 1652914 - DNA, 15 bp, Homo sapiens
tgttgtctctgaaaa

SEQ ID NO: 1652915 - DNA, 15 bp, Homo sapiens
gttgtctctgaaaag

SEQ ID NO: 1652916 - DNA, 15 bp, Homo sapiens
ttgtctctgaaaagg

SEQ ID NO: 1652917 - DNA, 15 bp, Homo sapiens
tgtctctgaaaaggt

SEQ ID NO: 1652918 - DNA, 15 bp, Homo sapiens
gtctctgaaaaggtg

SEQ ID NO: 1652919 - DNA, 15 bp, Homo sapiens
tctctgaaaaggtga

SEQ ID NO: 1652920 - DNA, 15 bp, Homo sapiens
ctctgaaaaggtgat

SEQ ID NO: 1652921 - DNA, 15 bp, Homo sapiens
tctgaaaaggtgatc

SEQ ID NO: 1652922 - DNA, 15 bp, Homo sapiens
ctgaaaaggtgatct

SEQ ID NO: 1652923 - DNA, 15 bp, Homo sapiens
tgaaaaggtgatctc

SEQ ID NO: 1652924 - DNA, 15 bp, Homo sapiens
gaaaaggtgatctct

SEQ ID NO: 1652925 - DNA, 15 bp, Homo sapiens
aaaaggtgatctctg

SEQ ID NO: 1652926 - DNA, 15 bp, Homo sapiens
aaaggtgatctctgt

SEQ ID NO: 1652927 - DNA, 15 bp, Homo sapiens
aaggtgatctctgtc

SEQ ID NO: 1652928 - DNA, 15 bp, Homo sapiens
aggtgatctctgtcc

SEQ ID NO: 1652929 - DNA, 15 bp, Homo sapiens
ggtgatctctgtccc

SEQ ID NO: 1652930 - DNA, 15 bp, Homo sapiens
gtgatctctgtccca

SEQ ID NO: 1652931 - DNA, 15 bp, Homo sapiens
tgatctctgtcccaa

SEQ ID NO: 1652932 - DNA, 15 bp, Homo sapiens
gatctctgtcccaag

SEQ ID NO: 1652933 - DNA, 15 bp, Homo sapiens
atctctgtcccaaga

SEQ ID NO: 1652934 - DNA, 15 bp, Homo sapiens
tctctgtcccaagag

SEQ ID NO: 1652935 - DNA, 15 bp, Homo sapiens
ctctgtcccaagagt

SEQ ID NO: 1652936 - DNA, 15 bp, Homo sapiens
tctgtcccaagagtt

SEQ ID NO: 1652937 - DNA, 15 bp, Homo sapiens
ctgtcccaagagttg

SEQ ID NO: 1652938 - DNA, 15 bp, Homo sapiens
tgtcccaagagttga

SEQ ID NO: 1652939 - DNA, 15 bp, Homo sapiens
gtcccaagagttgag

SEQ ID NO: 1652940 - DNA, 15 bp, Homo sapiens
tcccaagagttgagg

SEQ ID NO: 1652941 - DNA, 15 bp, Homo sapiens
cccaagagttgagga

SEQ ID NO: 1652942 - DNA, 15 bp, Homo sapiens
ccaagagttgaggaa

SEQ ID NO: 1652943 - DNA, 15 bp, Homo sapiens
caagagttgaggaag

SEQ ID NO: 1652944 - DNA, 15 bp, Homo sapiens
aagagttgaggaagg

SEQ ID NO: 1652945 - DNA, 15 bp, Homo sapiens
agagttgaggaagga

SEQ ID NO: 1652946 - DNA, 15 bp, Homo sapiens
gagttgaggaaggag

SEQ ID NO: 1652947 - DNA, 15 bp, Homo sapiens
agttgaggaaggagg

SEQ ID NO: 1652948 - DNA, 15 bp, Homo sapiens
gttgaggaaggaggg

SEQ ID NO: 1652949 - DNA, 15 bp, Homo sapiens
ttgaggaaggagggc

SEQ ID NO: 1652950 - DNA, 15 bp, Homo sapiens
tgaggaaggagggca

SEQ ID NO: 1652951 - DNA, 15 bp, Homo sapiens
gaggaaggagggcag

SEQ ID NO: 1652952 - DNA, 15 bp, Homo sapiens
aggaaggagggcaga

SEQ ID NO: 1652953 - DNA, 15 bp, Homo sapiens
ggaaggagggcagac

SEQ ID NO: 1652954 - DNA, 15 bp, Homo sapiens
gaaggagggcagaca

SEQ ID NO: 1652955 - DNA, 15 bp, Homo sapiens
aaggagggcagacaa

SEQ ID NO: 1652956 - DNA, 15 bp, Homo sapiens
aggagggcagacaaa

SEQ ID NO: 1652957 - DNA, 15 bp, Homo sapiens
ggagggcagacaaaa

SEQ ID NO: 1652958 - DNA, 15 bp, Homo sapiens
gagggcagacaaaac

SEQ ID NO: 1652959 - DNA, 15 bp, Homo sapiens
agggcagacaaaact

SEQ ID NO: 1652960 - DNA, 15 bp, Homo sapiens
gggcagacaaaactt

SEQ ID NO: 1652961 - DNA, 15 bp, Homo sapiens
ggcagacaaaacttc

SEQ ID NO: 1652962 - DNA, 15 bp, Homo sapiens
gcagacaaaacttcc

SEQ ID NO: 1652963 - DNA, 15 bp, Homo sapiens
cagacaaaacttcct

SEQ ID NO: 1652964 - DNA, 15 bp, Homo sapiens
agacaaaacttcctg

SEQ ID NO: 1652965 - DNA, 15 bp, Homo sapiens
gacaaaacttcctga

SEQ ID NO: 1652966 - DNA, 15 bp, Homo sapiens
acaaaacttcctgaa

SEQ ID NO: 1652967 - DNA, 15 bp, Homo sapiens
caaaacttcctgaag

SEQ ID NO: 1652968 - DNA, 15 bp, Homo sapiens
aaaacttcctgaaga

SEQ ID NO: 1652969 - DNA, 15 bp, Homo sapiens
aaacttcctgaagaa

SEQ ID NO: 1652970 - DNA, 15 bp, Homo sapiens
aacttcctgaagaag

SEQ ID NO: 1652971 - DNA, 15 bp, Homo sapiens
acttcctgaagaagc

SEQ ID NO: 1652972 - DNA, 15 bp, Homo sapiens
cttcctgaagaagca

SEQ ID NO: 1652973 - DNA, 15 bp, Homo sapiens
ttcctgaagaagcaa

SEQ ID NO: 1652974 - DNA, 15 bp, Homo sapiens
tcctgaagaagcaac

SEQ ID NO: 1652975 - DNA, 15 bp, Homo sapiens
cctgaagaagcaact

SEQ ID NO: 1652976 - DNA, 15 bp, Homo sapiens
ctgaagaagcaacta

SEQ ID NO: 1652977 - DNA, 15 bp, Homo sapiens
tgaagaagcaactag

SEQ ID NO: 1652978 - DNA, 15 bp, Homo sapiens
gaagaagcaactaga

SEQ ID NO: 1652979 - DNA, 15 bp, Homo sapiens
aagaagcaactagat

SEQ ID NO: 1652980 - DNA, 15 bp, Homo sapiens
agaagcaactagata

SEQ ID NO: 1652981 - DNA, 15 bp, Homo sapiens
gaagcaactagataa

SEQ ID NO: 1652982 - DNA, 15 bp, Homo sapiens
aagcaactagataaa

SEQ ID NO: 1652983 - DNA, 15 bp, Homo sapiens
agcaactagataaac

SEQ ID NO: 1652984 - DNA, 15 bp, Homo sapiens
gcaactagataaacc

SEQ ID NO: 1652985 - DNA, 15 bp, Homo sapiens
caactagataaaccc

SEQ ID NO: 1652986 - DNA, 15 bp, Homo sapiens
aactagataaaccca

SEQ ID NO: 1652987 - DNA, 15 bp, Homo sapiens
actagataaacccac

SEQ ID NO: 1652988 - DNA, 15 bp, Homo sapiens
ctagataaacccact

SEQ ID NO: 1652989 - DNA, 15 bp, Homo sapiens
tagataaacccactt

SEQ ID NO: 1652990 - DNA, 15 bp, Homo sapiens
agataaacccacttg

SEQ ID NO: 1652991 - DNA, 15 bp, Homo sapiens
gataaacccacttgg

SEQ ID NO: 1652992 - DNA, 15 bp, Homo sapiens
ataaacccacttgga

SEQ ID NO: 1652993 - DNA, 15 bp, Homo sapiens
taaacccacttggag

SEQ ID NO: 1652994 - DNA, 15 bp, Homo sapiens
aaacccacttggagt

SEQ ID NO: 1652995 - DNA, 15 bp, Homo sapiens
aacccacttggagtt

SEQ ID NO: 1652996 - DNA, 15 bp, Homo sapiens
acccacttggagtta

SEQ ID NO: 1652997 - DNA, 15 bp, Homo sapiens
cccacttggagttat

SEQ ID NO: 1652998 - DNA, 15 bp, Homo sapiens
ccacttggagttatt

SEQ ID NO: 1652999 - DNA, 15 bp, Homo sapiens
cacttggagttattc

SEQ ID NO: 1653000 - DNA, 15 bp, Homo sapiens
acttggagttattct

SEQ ID NO: 1653001 - DNA, 15 bp, Homo sapiens
cttggagttattctt

SEQ ID NO: 1653002 - DNA, 15 bp, Homo sapiens
ttggagttattcttc

SEQ ID NO: 1653003 - DNA, 15 bp, Homo sapiens
tggagttattcttcc

SEQ ID NO: 1653004 - DNA, 15 bp, Homo sapiens
ggagttattcttcca

SEQ ID NO: 1653005 - DNA, 15 bp, Homo sapiens
gagttattcttccag

SEQ ID NO: 1653006 - DNA, 15 bp, Homo sapiens
agttattcttccagt

SEQ ID NO: 1653007 - DNA, 15 bp, Homo sapiens
gttattcttccagta

SEQ ID NO: 1653008 - DNA, 15 bp, Homo sapiens
ttattcttccagtag

SEQ ID NO: 1653009 - DNA, 15 bp, Homo sapiens
tattcttccagtagt

SEQ ID NO: 1653010 - DNA, 15 bp, Homo sapiens
attcttccagtagtt

SEQ ID NO: 1653011 - DNA, 15 bp, Homo sapiens
ttcttccagtagttt

SEQ ID NO: 1653012 - DNA, 15 bp, Homo sapiens
tcttccagtagttta

SEQ ID NO: 1653013 - DNA, 15 bp, Homo sapiens
cttccagtagtttaa

SEQ ID NO: 1653014 - DNA, 15 bp, Homo sapiens
ttccagtagtttaaa

SEQ ID NO: 1653015 - DNA, 15 bp, Homo sapiens
tccagtagtttaaat

SEQ ID NO: 1653016 - DNA, 15 bp, Homo sapiens
ccagtagtttaaata

SEQ ID NO: 1653017 - DNA, 15 bp, Homo sapiens
cagtagtttaaatag

SEQ ID NO: 1653018 - DNA, 15 bp, Homo sapiens
agtagtttaaataga

SEQ ID NO: 1653019 - DNA, 15 bp, Homo sapiens
gtagtttaaatagat

SEQ ID NO: 1653020 - DNA, 15 bp, Homo sapiens
tagtttaaatagatt

SEQ ID NO: 1653021 - DNA, 15 bp, Homo sapiens
agtttaaatagattg

SEQ ID NO: 1653022 - DNA, 15 bp, Homo sapiens
gtttaaatagattgc

SEQ ID NO: 1653023 - DNA, 15 bp, Homo sapiens
tttaaatagattgcg

SEQ ID NO: 1653024 - DNA, 15 bp, Homo sapiens
ttaaatagattgcgc

SEQ ID NO: 1653025 - DNA, 15 bp, Homo sapiens
taaatagattgcgca

SEQ ID NO: 1653026 - DNA, 15 bp, Homo sapiens
aaatagattgcgcac

SEQ ID NO: 1653027 - DNA, 15 bp, Homo sapiens
aatagattgcgcaca

SEQ ID NO: 1653028 - DNA, 15 bp, Homo sapiens
atagattgcgcacac

SEQ ID NO: 1653029 - DNA, 15 bp, Homo sapiens
tagattgcgcacaca

SEQ ID NO: 1653030 - DNA, 15 bp, Homo sapiens
agattgcgcacacaa

SEQ ID NO: 1653031 - DNA, 15 bp, Homo sapiens
gattgcgcacacaac

SEQ ID NO: 1653032 - DNA, 15 bp, Homo sapiens
attgcgcacacaact

SEQ ID NO: 1653033 - DNA, 15 bp, Homo sapiens
ttgcgcacacaactg

SEQ ID NO: 1653034 - DNA, 15 bp, Homo sapiens
tgcgcacacaactgc

SEQ ID NO: 1653035 - DNA, 15 bp, Homo sapiens
gcgcacacaactgct

SEQ ID NO: 1653036 - DNA, 15 bp, Homo sapiens
cgcacacaactgctc

SEQ ID NO: 1653037 - DNA, 15 bp, Homo sapiens
gcacacaactgctca

SEQ ID NO: 1653038 - DNA, 15 bp, Homo sapiens
cacacaactgctcac

SEQ ID NO: 1653039 - DNA, 15 bp, Homo sapiens
acacaactgctcaca

SEQ ID NO: 1653040 - DNA, 15 bp, Homo sapiens
cacaactgctcacac

SEQ ID NO: 1653041 - DNA, 15 bp, Homo sapiens
acaactgctcacact

SEQ ID NO: 1653042 - DNA, 15 bp, Homo sapiens
caactgctcacactt

SEQ ID NO: 1653043 - DNA, 15 bp, Homo sapiens
aactgctcacacttt

SEQ ID NO: 1653044 - DNA, 15 bp, Homo sapiens
actgctcacactttc

SEQ ID NO: 1653045 - DNA, 15 bp, Homo sapiens
tgctcacactttctc

SEQ ID NO: 1653046 - DNA, 15 bp, Homo sapiens
gctcacactttctca

SEQ ID NO: 1653047 - DNA, 15 bp, Homo sapiens
ctcacactttctcac

SEQ ID NO: 1653048 - DNA, 15 bp, Homo sapiens
tcacactttctcact

SEQ ID NO: 1653049 - DNA, 15 bp, Homo sapiens
cacactttctcactg

SEQ ID NO: 1653050 - DNA, 15 bp, Homo sapiens
acactttctcactgg

SEQ ID NO: 1653051 - DNA, 15 bp, Homo sapiens
cactttctcactggg

SEQ ID NO: 1653052 - DNA, 15 bp, Homo sapiens
actttctcactgggc

SEQ ID NO: 1653053 - DNA, 15 bp, Homo sapiens
ctttctcactgggcc

SEQ ID NO: 1653054 - DNA, 15 bp, Homo sapiens
tttctcactgggccc

SEQ ID NO: 1653055 - DNA, 15 bp, Homo sapiens
ttctcactgggccct

SEQ ID NO: 1653056 - DNA, 15 bp, Homo sapiens
tctcactgggccctc

SEQ ID NO: 1653057 - DNA, 15 bp, Homo sapiens
ctcactgggccctct

SEQ ID NO: 1653058 - DNA, 15 bp, Homo sapiens
tcactgggccctctt

SEQ ID NO: 1653059 - DNA, 15 bp, Homo sapiens
cactgggccctcttg

SEQ ID NO: 1653060 - DNA, 15 bp, Homo sapiens
actgggccctcttgg

SEQ ID NO: 1653061 - DNA, 15 bp, Homo sapiens
ctgggccctcttggg

SEQ ID NO: 1653062 - DNA, 15 bp, Homo sapiens
tgggccctcttggga

SEQ ID NO: 1653063 - DNA, 15 bp, Homo sapiens
gggccctcttgggac

SEQ ID NO: 1653064 - DNA, 15 bp, Homo sapiens
ggccctcttgggacc

SEQ ID NO: 1653065 - DNA, 15 bp, Homo sapiens
gccctcttgggacca

SEQ ID NO: 1653066 - DNA, 15 bp, Homo sapiens
ccctcttgggaccaa

SEQ ID NO: 1653067 - DNA, 15 bp, Homo sapiens
cctcttgggaccaat

SEQ ID NO: 1653068 - DNA, 15 bp, Homo sapiens
ctcttgggaccaatg

SEQ ID NO: 1653069 - DNA, 15 bp, Homo sapiens
tcttgggaccaatgc

SEQ ID NO: 1653070 - DNA, 15 bp, Homo sapiens
cttgggaccaatgct

SEQ ID NO: 1653071 - DNA, 15 bp, Homo sapiens
ttgggaccaatgcta

SEQ ID NO: 1653072 - DNA, 15 bp, Homo sapiens
tgggaccaatgctag

SEQ ID NO: 1653073 - DNA, 15 bp, Homo sapiens
gggaccaatgctaga

SEQ ID NO: 1653074 - DNA, 15 bp, Homo sapiens
ggaccaatgctagat

SEQ ID NO: 1653075 - DNA, 15 bp, Homo sapiens
gaccaatgctagata

SEQ ID NO: 1653076 - DNA, 15 bp, Homo sapiens
accaatgctagatag

SEQ ID NO: 1653077 - DNA, 15 bp, Homo sapiens
ccaatgctagatagt

SEQ ID NO: 1653078 - DNA, 15 bp, Homo sapiens
caatgctagatagtt

SEQ ID NO: 1653079 - DNA, 15 bp, Homo sapiens
aatgctagatagttt

SEQ ID NO: 1653080 - DNA, 15 bp, Homo sapiens
atgctagatagtttt

SEQ ID NO: 1653081 - DNA, 15 bp, Homo sapiens
tgctagatagttttg

SEQ ID NO: 1653082 - DNA, 15 bp, Homo sapiens
gctagatagttttga

SEQ ID NO: 1653083 - DNA, 15 bp, Homo sapiens
ctagatagttttgag

SEQ ID NO: 1653084 - DNA, 15 bp, Homo sapiens
tagatagttttgaga

SEQ ID NO: 1653085 - DNA, 15 bp, Homo sapiens
agatagttttgagac

SEQ ID NO: 1653086 - DNA, 15 bp, Homo sapiens
gatagttttgagaca

SEQ ID NO: 1653087 - DNA, 15 bp, Homo sapiens
atagttttgagacaa

SEQ ID NO: 1653088 - DNA, 15 bp, Homo sapiens
tagttttgagacaag

SEQ ID NO: 1653089 - DNA, 15 bp, Homo sapiens
agttttgagacaagc

SEQ ID NO: 1653090 - DNA, 15 bp, Homo sapiens
gttttgagacaagca

SEQ ID NO: 1653091 - DNA, 15 bp, Homo sapiens
ttttgagacaagcag

SEQ ID NO: 1653092 - DNA, 15 bp, Homo sapiens
tttgagacaagcaga

SEQ ID NO: 1653093 - DNA, 15 bp, Homo sapiens
ttgagacaagcagac

SEQ ID NO: 1653094 - DNA, 15 bp, Homo sapiens
tgagacaagcagaca

SEQ ID NO: 1653095 - DNA, 15 bp, Homo sapiens
gagacaagcagacag

SEQ ID NO: 1653096 - DNA, 15 bp, Homo sapiens
agacaagcagacagg

SEQ ID NO: 1653097 - DNA, 15 bp, Homo sapiens
gacaagcagacagga

SEQ ID NO: 1653098 - DNA, 15 bp, Homo sapiens
acaagcagacaggat

SEQ ID NO: 1653099 - DNA, 15 bp, Homo sapiens
caagcagacaggatt

SEQ ID NO: 1653100 - DNA, 15 bp, Homo sapiens
aagcagacaggatta

SEQ ID NO: 1653101 - DNA, 15 bp, Homo sapiens
agcagacaggattag

SEQ ID NO: 1653102 - DNA, 15 bp, Homo sapiens
gcagacaggattagg

SEQ ID NO: 1653103 - DNA, 15 bp, Homo sapiens
cagacaggattaggg

SEQ ID NO: 1653104 - DNA, 15 bp, Homo sapiens
agacaggattagggg

SEQ ID NO: 1653105 - DNA, 15 bp, Homo sapiens
gacaggattaggggt

SEQ ID NO: 1653106 - DNA, 15 bp, Homo sapiens
acaggattaggggtc

SEQ ID NO: 1653107 - DNA, 15 bp, Homo sapiens
caggattaggggtca

SEQ ID NO: 1653108 - DNA, 15 bp, Homo sapiens
aggattaggggtcaa

SEQ ID NO: 1653109 - DNA, 15 bp, Homo sapiens
ggattaggggtcaag

SEQ ID NO: 1653110 - DNA, 15 bp, Homo sapiens
gattaggggtcaagt

SEQ ID NO: 1653111 - DNA, 15 bp, Homo sapiens
attaggggtcaagtc

SEQ ID NO: 1653112 - DNA, 15 bp, Homo sapiens
ttaggggtcaagtct

SEQ ID NO: 1653113 - DNA, 15 bp, Homo sapiens
taggggtcaagtctg

SEQ ID NO: 1653114 - DNA, 15 bp, Homo sapiens
aggggtcaagtctgt

SEQ ID NO: 1653115 - DNA, 15 bp, Homo sapiens
ggggtcaagtctgtg

SEQ ID NO: 1653116 - DNA, 15 bp, Homo sapiens
gggtcaagtctgtga

SEQ ID NO: 1653117 - DNA, 15 bp, Homo sapiens
ggtcaagtctgtgaa

SEQ ID NO: 1653118 - DNA, 15 bp, Homo sapiens
gtcaagtctgtgaac

SEQ ID NO: 1653119 - DNA, 15 bp, Homo sapiens
tcaagtctgtgaacc

SEQ ID NO: 1653120 - DNA, 15 bp, Homo sapiens
caagtctgtgaacca

SEQ ID NO: 1653121 - DNA, 15 bp, Homo sapiens
aagtctgtgaaccat

SEQ ID NO: 1653122 - DNA, 15 bp, Homo sapiens
agtctgtgaaccatg

SEQ ID NO: 1653123 - DNA, 15 bp, Homo sapiens
gtctgtgaaccatgg

SEQ ID NO: 1653124 - DNA, 15 bp, Homo sapiens
tctgtgaaccatgga

SEQ ID NO: 1653125 - DNA, 15 bp, Homo sapiens
ctgtgaaccatggaa

SEQ ID NO: 1653126 - DNA, 15 bp, Homo sapiens
tgtgaaccatggaat

SEQ ID NO: 1653127 - DNA, 15 bp, Homo sapiens
gtgaaccatggaatg

SEQ ID NO: 1653128 - DNA, 15 bp, Homo sapiens
tgaaccatggaatgc

SEQ ID NO: 1653129 - DNA, 15 bp, Homo sapiens
gaaccatggaatgca

SEQ ID NO: 1653130 - DNA, 15 bp, Homo sapiens
aaccatggaatgcaa

SEQ ID NO: 1653131 - DNA, 15 bp, Homo sapiens
accatggaatgcaat

SEQ ID NO: 1653132 - DNA, 15 bp, Homo sapiens
ccatggaatgcaatt

SEQ ID NO: 1653133 - DNA, 15 bp, Homo sapiens
catggaatgcaattt

SEQ ID NO: 1653134 - DNA, 15 bp, Homo sapiens
atggaatgcaatttt

SEQ ID NO: 1653135 - DNA, 15 bp, Homo sapiens
tggaatgcaattttc

SEQ ID NO: 1653136 - DNA, 15 bp, Homo sapiens
ggaatgcaattttcc

SEQ ID NO: 1653137 - DNA, 15 bp, Homo sapiens
gaatgcaattttcct

SEQ ID NO: 1653138 - DNA, 15 bp, Homo sapiens
aatgcaattttcctc

SEQ ID NO: 1653139 - DNA, 15 bp, Homo sapiens
atgcaattttcctct

SEQ ID NO: 1653140 - DNA, 15 bp, Homo sapiens
tgcaattttcctctc

SEQ ID NO: 1653141 - DNA, 15 bp, Homo sapiens
gcaattttcctctcc

SEQ ID NO: 1653142 - DNA, 15 bp, Homo sapiens
caattttcctctcca

SEQ ID NO: 1653143 - DNA, 15 bp, Homo sapiens
aattttcctctccat

SEQ ID NO: 1653144 - DNA, 15 bp, Homo sapiens
attttcctctccatg

SEQ ID NO: 1653145 - DNA, 15 bp, Homo sapiens
ttttcctctccatga

SEQ ID NO: 1653146 - DNA, 15 bp, Homo sapiens
tttcctctccatgaa

SEQ ID NO: 1653147 - DNA, 15 bp, Homo sapiens
ttcctctccatgaaa

SEQ ID NO: 1653148 - DNA, 15 bp, Homo sapiens
tcctctccatgaaac

SEQ ID NO: 1653149 - DNA, 15 bp, Homo sapiens
cctctccatgaaact

SEQ ID NO: 1653150 - DNA, 15 bp, Homo sapiens
ctctccatgaaacta

SEQ ID NO: 1653151 - DNA, 15 bp, Homo sapiens
tctccatgaaactaa

SEQ ID NO: 1653152 - DNA, 15 bp, Homo sapiens
ctccatgaaactaac

SEQ ID NO: 1653153 - DNA, 15 bp, Homo sapiens
tccatgaaactaact

SEQ ID NO: 1653154 - DNA, 15 bp, Homo sapiens
ccatgaaactaactg

SEQ ID NO: 1653155 - DNA, 15 bp, Homo sapiens
catgaaactaactgg

SEQ ID NO: 1653156 - DNA, 15 bp, Homo sapiens
atgaaactaactggc

SEQ ID NO: 1653157 - DNA, 15 bp, Homo sapiens
tgaaactaactggcc

SEQ ID NO: 1653158 - DNA, 15 bp, Homo sapiens
gaaactaactggccc

SEQ ID NO: 1653159 - DNA, 15 bp, Homo sapiens
aaactaactggccct

SEQ ID NO: 1653160 - DNA, 15 bp, Homo sapiens
aactaactggccctt

SEQ ID NO: 1653161 - DNA, 15 bp, Homo sapiens
actaactggcccttt

SEQ ID NO: 1653162 - DNA, 15 bp, Homo sapiens
ctaactggccctttt

SEQ ID NO: 1653163 - DNA, 15 bp, Homo sapiens
taactggcccttttg

SEQ ID NO: 1653164 - DNA, 15 bp, Homo sapiens
aactggcccttttgg

SEQ ID NO: 1653165 - DNA, 15 bp, Homo sapiens
actggcccttttggg

SEQ ID NO: 1653166 - DNA, 15 bp, Homo sapiens
ctggcccttttgggg

SEQ ID NO: 1653167 - DNA, 15 bp, Homo sapiens
tggcccttttgggga

SEQ ID NO: 1653168 - DNA, 15 bp, Homo sapiens
ggcccttttggggat

SEQ ID NO: 1653169 - DNA, 15 bp, Homo sapiens
gcccttttggggatc

SEQ ID NO: 1653170 - DNA, 15 bp, Homo sapiens
cccttttggggatca

SEQ ID NO: 1653171 - DNA, 15 bp, Homo sapiens
ccttttggggatcaa

SEQ ID NO: 1653172 - DNA, 15 bp, Homo sapiens
cttttggggatcaaa

SEQ ID NO: 1653173 - DNA, 15 bp, Homo sapiens
ttttggggatcaaac

SEQ ID NO: 1653174 - DNA, 15 bp, Homo sapiens
tttggggatcaaacc

SEQ ID NO: 1653175 - DNA, 15 bp, Homo sapiens
ttggggatcaaacct

SEQ ID NO: 1653176 - DNA, 15 bp, Homo sapiens
tggggatcaaaccta

SEQ ID NO: 1653177 - DNA, 15 bp, Homo sapiens
ggggatcaaacctat

SEQ ID NO: 1653178 - DNA, 15 bp, Homo sapiens
gggatcaaacctatg

SEQ ID NO: 1653179 - DNA, 15 bp, Homo sapiens
ggatcaaacctatga

SEQ ID NO: 1653180 - DNA, 15 bp, Homo sapiens
gatcaaacctatgac

SEQ ID NO: 1653181 - DNA, 15 bp, Homo sapiens
atcaaacctatgacc

SEQ ID NO: 1653182 - DNA, 15 bp, Homo sapiens
tcaaacctatgacct

SEQ ID NO: 1653183 - DNA, 15 bp, Homo sapiens
caaacctatgacctt

SEQ ID NO: 1653184 - DNA, 15 bp, Homo sapiens
aaacctatgaccttg

SEQ ID NO: 1653185 - DNA, 15 bp, Homo sapiens
aacctatgaccttga

SEQ ID NO: 1653186 - DNA, 15 bp, Homo sapiens
acctatgaccttgag

SEQ ID NO: 1653187 - DNA, 15 bp, Homo sapiens
cctatgaccttgagc

SEQ ID NO: 1653188 - DNA, 15 bp, Homo sapiens
ctatgaccttgagct

SEQ ID NO: 1653189 - DNA, 15 bp, Homo sapiens
tatgaccttgagctt

SEQ ID NO: 1653190 - DNA, 15 bp, Homo sapiens
atgaccttgagcttg

SEQ ID NO: 1653191 - DNA, 15 bp, Homo sapiens
tgaccttgagcttgt

SEQ ID NO: 1653192 - DNA, 15 bp, Homo sapiens
gaccttgagcttgtt

SEQ ID NO: 1653193 - DNA, 15 bp, Homo sapiens
accttgagcttgtta

SEQ ID NO: 1653194 - DNA, 15 bp, Homo sapiens
ccttgagcttgttag

SEQ ID NO: 1653195 - DNA, 15 bp, Homo sapiens
cttgagcttgttagc

SEQ ID NO: 1653196 - DNA, 15 bp, Homo sapiens
ttgagcttgttagca

SEQ ID NO: 1653197 - DNA, 15 bp, Homo sapiens
tgagcttgttagcac

SEQ ID NO: 1653198 - DNA, 15 bp, Homo sapiens
gagcttgttagcact

SEQ ID NO: 1653199 - DNA, 15 bp, Homo sapiens
agcttgttagcactc

SEQ ID NO: 1653200 - DNA, 15 bp, Homo sapiens
gcttgttagcactct

SEQ ID NO: 1653201 - DNA, 15 bp, Homo sapiens
cttgttagcactcta

SEQ ID NO: 1653202 - DNA, 15 bp, Homo sapiens
ttgttagcactctac

SEQ ID NO: 1653203 - DNA, 15 bp, Homo sapiens
tgttagcactctact

SEQ ID NO: 1653204 - DNA, 15 bp, Homo sapiens
gttagcactctactc

SEQ ID NO: 1653205 - DNA, 15 bp, Homo sapiens
ttagcactctactcc

SEQ ID NO: 1653206 - DNA, 15 bp, Homo sapiens
tagcactctactcca

SEQ ID NO: 1653207 - DNA, 15 bp, Homo sapiens
agcactctactccaa

SEQ ID NO: 1653208 - DNA, 15 bp, Homo sapiens
gcactctactccaac

SEQ ID NO: 1653209 - DNA, 15 bp, Homo sapiens
cactctactccaact

SEQ ID NO: 1653210 - DNA, 15 bp, Homo sapiens
actctactccaacta

SEQ ID NO: 1653211 - DNA, 15 bp, Homo sapiens
ctctactccaactat

SEQ ID NO: 1653212 - DNA, 15 bp, Homo sapiens
tctactccaactatg

SEQ ID NO: 1653213 - DNA, 15 bp, Homo sapiens
ctactccaactatgc

SEQ ID NO: 1653214 - DNA, 15 bp, Homo sapiens
tactccaactatgcc

SEQ ID NO: 1653215 - DNA, 15 bp, Homo sapiens
actccaactatgccc

SEQ ID NO: 1653216 - DNA, 15 bp, Homo sapiens
ctccaactatgccca

SEQ ID NO: 1653217 - DNA, 15 bp, Homo sapiens
tccaactatgcccaa

SEQ ID NO: 1653218 - DNA, 15 bp, Homo sapiens
ccaactatgcccaaa

SEQ ID NO: 1653219 - DNA, 15 bp, Homo sapiens
caactatgcccaaaa

SEQ ID NO: 1653220 - DNA, 15 bp, Homo sapiens
aactatgcccaaaac

SEQ ID NO: 1653221 - DNA, 15 bp, Homo sapiens
actatgcccaaaaca

SEQ ID NO: 1653222 - DNA, 15 bp, Homo sapiens
ctatgcccaaaacaa

SEQ ID NO: 1653223 - DNA, 15 bp, Homo sapiens
tatgcccaaaacaaa

SEQ ID NO: 1653224 - DNA, 15 bp, Homo sapiens
atgcccaaaacaaat

SEQ ID NO: 1653225 - DNA, 15 bp, Homo sapiens
tgcccaaaacaaata

SEQ ID NO: 1653226 - DNA, 15 bp, Homo sapiens
gcccaaaacaaatac

SEQ ID NO: 1653227 - DNA, 15 bp, Homo sapiens
cccaaaacaaataca

SEQ ID NO: 1653228 - DNA, 15 bp, Homo sapiens
ccaaaacaaatacag

SEQ ID NO: 1653229 - DNA, 15 bp, Homo sapiens
caaaacaaatacagg

SEQ ID NO: 1653230 - DNA, 15 bp, Homo sapiens
aaaacaaatacaggt

SEQ ID NO: 1653231 - DNA, 15 bp, Homo sapiens
aaacaaatacaggtc

SEQ ID NO: 1653232 - DNA, 15 bp, Homo sapiens
aacaaatacaggtct

SEQ ID NO: 1653233 - DNA, 15 bp, Homo sapiens
acaaatacaggtctg

SEQ ID NO: 1653234 - DNA, 15 bp, Homo sapiens
caaatacaggtctga

SEQ ID NO: 1653235 - DNA, 15 bp, Homo sapiens
aaatacaggtctgaa

SEQ ID NO: 1653236 - DNA, 15 bp, Homo sapiens
aatacaggtctgaag

SEQ ID NO: 1653237 - DNA, 15 bp, Homo sapiens
atacaggtctgaagc

SEQ ID NO: 1653238 - DNA, 15 bp, Homo sapiens
tacaggtctgaagcc

SEQ ID NO: 1653239 - DNA, 15 bp, Homo sapiens
acaggtctgaagcca

SEQ ID NO: 1653240 - DNA, 15 bp, Homo sapiens
caggtctgaagccag

SEQ ID NO: 1653241 - DNA, 15 bp, Homo sapiens
aggtctgaagccaga

SEQ ID NO: 1653242 - DNA, 15 bp, Homo sapiens
ggtctgaagccagag

SEQ ID NO: 1653243 - DNA, 15 bp, Homo sapiens
gtctgaagccagagg

SEQ ID NO: 1653244 - DNA, 15 bp, Homo sapiens
tctgaagccagagga

SEQ ID NO: 1653245 - DNA, 15 bp, Homo sapiens
ctgaagccagaggag

SEQ ID NO: 1653246 - DNA, 15 bp, Homo sapiens
tgaagccagaggagc

SEQ ID NO: 1653247 - DNA, 15 bp, Homo sapiens
gaagccagaggagct

SEQ ID NO: 1653248 - DNA, 15 bp, Homo sapiens
aagccagaggagctc

SEQ ID NO: 1653249 - DNA, 15 bp, Homo sapiens
agccagaggagctcc

SEQ ID NO: 1653250 - DNA, 15 bp, Homo sapiens
gccagaggagctcca

SEQ ID NO: 1653251 - DNA, 15 bp, Homo sapiens
ccagaggagctccaa

SEQ ID NO: 1653252 - DNA, 15 bp, Homo sapiens
cagaggagctccaaa

SEQ ID NO: 1653253 - DNA, 15 bp, Homo sapiens
agaggagctccaaac

SEQ ID NO: 1653254 - DNA, 15 bp, Homo sapiens
gaggagctccaaacc

SEQ ID NO: 1653255 - DNA, 15 bp, Homo sapiens
aggagctccaaacca

SEQ ID NO: 1653256 - DNA, 15 bp, Homo sapiens
ggagctccaaaccac

SEQ ID NO: 1653257 - DNA, 15 bp, Homo sapiens
gagctccaaaccaca

SEQ ID NO: 1653258 - DNA, 15 bp, Homo sapiens
agctccaaaccacac

SEQ ID NO: 1653259 - DNA, 15 bp, Homo sapiens
gctccaaaccacaca

SEQ ID NO: 1653260 - DNA, 15 bp, Homo sapiens
ctccaaaccacacat

SEQ ID NO: 1653261 - DNA, 15 bp, Homo sapiens
tccaaaccacacata

SEQ ID NO: 1653262 - DNA, 15 bp, Homo sapiens
ccaaaccacacataa

SEQ ID NO: 1653263 - DNA, 15 bp, Homo sapiens
caaaccacacataaa

SEQ ID NO: 1653264 - DNA, 15 bp, Homo sapiens
aaaccacacataaaa

SEQ ID NO: 1653265 - DNA, 15 bp, Homo sapiens
aaccacacataaaaa

SEQ ID NO: 1653266 - DNA, 15 bp, Homo sapiens
accacacataaaaat

SEQ ID NO: 1653267 - DNA, 15 bp, Homo sapiens
ccacacataaaaatg

SEQ ID NO: 1653268 - DNA, 15 bp, Homo sapiens
cacacataaaaatgt

SEQ ID NO: 1653269 - DNA, 15 bp, Homo sapiens
acacataaaaatgta

SEQ ID NO: 1653270 - DNA, 15 bp, Homo sapiens
cacataaaaatgtaa

SEQ ID NO: 1653271 - DNA, 15 bp, Homo sapiens
cataaaaatgtaatc

SEQ ID NO: 1653272 - DNA, 15 bp, Homo sapiens
ataaaaatgtaatca

SEQ ID NO: 1653273 - DNA, 15 bp, Homo sapiens
taaaaatgtaatcaa

SEQ ID NO: 1653274 - DNA, 15 bp, Homo sapiens
aaaaatgtaatcaac

SEQ ID NO: 1653275 - DNA, 15 bp, Homo sapiens
aaaatgtaatcaaca

SEQ ID NO: 1653276 - DNA, 15 bp, Homo sapiens
aaatgtaatcaacag

SEQ ID NO: 1653277 - DNA, 15 bp, Homo sapiens
aatgtaatcaacaga

SEQ ID NO: 1653278 - DNA, 15 bp, Homo sapiens
atgtaatcaacagag

SEQ ID NO: 1653279 - DNA, 15 bp, Homo sapiens
tgtaatcaacagagc

SEQ ID NO: 1653280 - DNA, 15 bp, Homo sapiens
gtaatcaacagagcc

SEQ ID NO: 1653281 - DNA, 15 bp, Homo sapiens
taatcaacagagcca

SEQ ID NO: 1653282 - DNA, 15 bp, Homo sapiens
aatcaacagagccac

SEQ ID NO: 1653283 - DNA, 15 bp, Homo sapiens
atcaacagagccaca

SEQ ID NO: 1653284 - DNA, 15 bp, Homo sapiens
tcaacagagccacaa

SEQ ID NO: 1653285 - DNA, 15 bp, Homo sapiens
caacagagccacaag

SEQ ID NO: 1653286 - DNA, 15 bp, Homo sapiens
aacagagccacaagg

SEQ ID NO: 1653287 - DNA, 15 bp, Homo sapiens
acagagccacaagga

SEQ ID NO: 1653288 - DNA, 15 bp, Homo sapiens
cagagccacaaggaa

SEQ ID NO: 1653289 - DNA, 15 bp, Homo sapiens
agagccacaaggaaa

SEQ ID NO: 1653290 - DNA, 15 bp, Homo sapiens
gagccacaaggaaac

SEQ ID NO: 1653291 - DNA, 15 bp, Homo sapiens
agccacaaggaaaca

SEQ ID NO: 1653292 - DNA, 15 bp, Homo sapiens
gccacaaggaaacac

SEQ ID NO: 1653293 - DNA, 15 bp, Homo sapiens
ccacaaggaaacaca

SEQ ID NO: 1653294 - DNA, 15 bp, Homo sapiens
cacaaggaaacacat

SEQ ID NO: 1653295 - DNA, 15 bp, Homo sapiens
acaaggaaacacata

SEQ ID NO: 1653296 - DNA, 15 bp, Homo sapiens
caaggaaacacataa

SEQ ID NO: 1653297 - DNA, 15 bp, Homo sapiens
aaggaaacacataaa

SEQ ID NO: 1653298 - DNA, 15 bp, Homo sapiens
aggaaacacataaag

SEQ ID NO: 1653299 - DNA, 15 bp, Homo sapiens
ggaaacacataaagt

SEQ ID NO: 1653300 - DNA, 15 bp, Homo sapiens
gaaacacataaagta

SEQ ID NO: 1653301 - DNA, 15 bp, Homo sapiens
aaacacataaagtaa

SEQ ID NO: 1653302 - DNA, 15 bp, Homo sapiens
aacacataaagtaaa

SEQ ID NO: 1653303 - DNA, 15 bp, Homo sapiens
acacataaagtaaac

SEQ ID NO: 1653304 - DNA, 15 bp, Homo sapiens
cacataaagtaaaca

SEQ ID NO: 1653305 - DNA, 15 bp, Homo sapiens
acataaagtaaacac

SEQ ID NO: 1653306 - DNA, 15 bp, Homo sapiens
cataaagtaaacact

SEQ ID NO: 1653307 - DNA, 15 bp, Homo sapiens
ataaagtaaacactt

SEQ ID NO: 1653308 - DNA, 15 bp, Homo sapiens
taaagtaaacacttt

SEQ ID NO: 1653309 - DNA, 15 bp, Homo sapiens
aaagtaaacactttc

SEQ ID NO: 1653310 - DNA, 15 bp, Homo sapiens
aagtaaacactttct

SEQ ID NO: 1653311 - DNA, 15 bp, Homo sapiens
agtaaacactttcta

SEQ ID NO: 1653312 - DNA, 15 bp, Homo sapiens
gtaaacactttctat

SEQ ID NO: 1653313 - DNA, 15 bp, Homo sapiens
taaacactttctata

SEQ ID NO: 1653314 - DNA, 15 bp, Homo sapiens
aaacactttctatat

SEQ ID NO: 1653315 - DNA, 15 bp, Homo sapiens
aacactttctatata

SEQ ID NO: 1653316 - DNA, 15 bp, Homo sapiens
acactttctatatag

SEQ ID NO: 1653317 - DNA, 15 bp, Homo sapiens
cactttctatatagg

SEQ ID NO: 1653318 - DNA, 15 bp, Homo sapiens
actttctatataggc

SEQ ID NO: 1653319 - DNA, 15 bp, Homo sapiens
ctttctatataggca

SEQ ID NO: 1653320 - DNA, 15 bp, Homo sapiens
tttctatataggcaa

SEQ ID NO: 1653321 - DNA, 15 bp, Homo sapiens
ttctatataggcaaa

SEQ ID NO: 1653322 - DNA, 15 bp, Homo sapiens
tctatataggcaaaa

SEQ ID NO: 1653323 - DNA, 15 bp, Homo sapiens
ctatataggcaaaaa

SEQ ID NO: 1653324 - DNA, 15 bp, Homo sapiens
tatataggcaaaaag

SEQ ID NO: 1653325 - DNA, 15 bp, Homo sapiens
atataggcaaaaaga

SEQ ID NO: 1653326 - DNA, 15 bp, Homo sapiens
tataggcaaaaagaa

SEQ ID NO: 1653327 - DNA, 15 bp, Homo sapiens
ataggcaaaaagaac

SEQ ID NO: 1653328 - DNA, 15 bp, Homo sapiens
taggcaaaaagaaca

SEQ ID NO: 1653329 - DNA, 15 bp, Homo sapiens
aggcaaaaagaacag

SEQ ID NO: 1653330 - DNA, 15 bp, Homo sapiens
ggcaaaaagaacaga

SEQ ID NO: 1653331 - DNA, 15 bp, Homo sapiens
gcaaaaagaacagaa

SEQ ID NO: 1653332 - DNA, 15 bp, Homo sapiens
caaaaagaacagaag

SEQ ID NO: 1653333 - DNA, 15 bp, Homo sapiens
aaaaagaacagaaga

SEQ ID NO: 1653334 - DNA, 15 bp, Homo sapiens
aaaagaacagaagat

SEQ ID NO: 1653335 - DNA, 15 bp, Homo sapiens
aaagaacagaagatt

SEQ ID NO: 1653336 - DNA, 15 bp, Homo sapiens
aagaacagaagattt

SEQ ID NO: 1653337 - DNA, 15 bp, Homo sapiens
agaacagaagatttg

SEQ ID NO: 1653338 - DNA, 15 bp, Homo sapiens
gaacagaagatttgg

SEQ ID NO: 1653339 - DNA, 15 bp, Homo sapiens
aacagaagatttgga

SEQ ID NO: 1653340 - DNA, 15 bp, Homo sapiens
acagaagatttggaa

SEQ ID NO: 1653341 - DNA, 15 bp, Homo sapiens
cagaagatttggaaa

SEQ ID NO: 1653342 - DNA, 15 bp, Homo sapiens
agaagatttggaaag

SEQ ID NO: 1653343 - DNA, 15 bp, Homo sapiens
gaagatttggaaaga

SEQ ID NO: 1653344 - DNA, 15 bp, Homo sapiens
aagatttggaaagag

SEQ ID NO: 1653345 - DNA, 15 bp, Homo sapiens
agatttggaaagagc

SEQ ID NO: 1653346 - DNA, 15 bp, Homo sapiens
gatttggaaagagcc

SEQ ID NO: 1653347 - DNA, 15 bp, Homo sapiens
atttggaaagagcct

SEQ ID NO: 1653348 - DNA, 15 bp, Homo sapiens
tttggaaagagccta

SEQ ID NO: 1653349 - DNA, 15 bp, Homo sapiens
ttggaaagagcctac

SEQ ID NO: 1653350 - DNA, 15 bp, Homo sapiens
tggaaagagcctaca

SEQ ID NO: 1653351 - DNA, 15 bp, Homo sapiens
ggaaagagcctacat

SEQ ID NO: 1653352 - DNA, 15 bp, Homo sapiens
gaaagagcctacatt

SEQ ID NO: 1653353 - DNA, 15 bp, Homo sapiens
aaagagcctacattc

SEQ ID NO: 1653354 - DNA, 15 bp, Homo sapiens
aagagcctacattct

SEQ ID NO: 1653355 - DNA, 15 bp, Homo sapiens
agagcctacattctc

SEQ ID NO: 1653356 - DNA, 15 bp, Homo sapiens
gagcctacattctct

SEQ ID NO: 1653357 - DNA, 15 bp, Homo sapiens
agcctacattctctg

SEQ ID NO: 1653358 - DNA, 15 bp, Homo sapiens
gcctacattctctga

SEQ ID NO: 1653359 - DNA, 15 bp, Homo sapiens
cctacattctctgaa

SEQ ID NO: 1653360 - DNA, 15 bp, Homo sapiens
ctacattctctgaat

SEQ ID NO: 1653361 - DNA, 15 bp, Homo sapiens
tacattctctgaatc

SEQ ID NO: 1653362 - DNA, 15 bp, Homo sapiens
acattctctgaatcc

SEQ ID NO: 1653363 - DNA, 15 bp, Homo sapiens
cattctctgaatccc

SEQ ID NO: 1653364 - DNA, 15 bp, Homo sapiens
attctctgaatccct

SEQ ID NO: 1653365 - DNA, 15 bp, Homo sapiens
ttctctgaatccctt

SEQ ID NO: 1653366 - DNA, 15 bp, Homo sapiens
tctctgaatccctta

SEQ ID NO: 1653367 - DNA, 15 bp, Homo sapiens
ctctgaatcccttag

SEQ ID NO: 1653368 - DNA, 15 bp, Homo sapiens
tctgaatcccttagt

SEQ ID NO: 1653369 - DNA, 15 bp, Homo sapiens
ctgaatcccttagtc

SEQ ID NO: 1653370 - DNA, 15 bp, Homo sapiens
tgaatcccttagtca

SEQ ID NO: 1653371 - DNA, 15 bp, Homo sapiens
gaatcccttagtcat

SEQ ID NO: 1653372 - DNA, 15 bp, Homo sapiens
aatcccttagtcatc

SEQ ID NO: 1653373 - DNA, 15 bp, Homo sapiens
atcccttagtcatct

SEQ ID NO: 1653374 - DNA, 15 bp, Homo sapiens
tcccttagtcatctg

SEQ ID NO: 1653375 - DNA, 15 bp, Homo sapiens
cccttagtcatctga

SEQ ID NO: 1653376 - DNA, 15 bp, Homo sapiens
ccttagtcatctgaa

SEQ ID NO: 1653377 - DNA, 15 bp, Homo sapiens
cttagtcatctgaag

SEQ ID NO: 1653378 - DNA, 15 bp, Homo sapiens
ttagtcatctgaagg

SEQ ID NO: 1653379 - DNA, 15 bp, Homo sapiens
tagtcatctgaaggc

SEQ ID NO: 1653380 - DNA, 15 bp, Homo sapiens
agtcatctgaaggct

SEQ ID NO: 1653381 - DNA, 15 bp, Homo sapiens
gtcatctgaaggctt

SEQ ID NO: 1653382 - DNA, 15 bp, Homo sapiens
tcatctgaaggctta

SEQ ID NO: 1653383 - DNA, 15 bp, Homo sapiens
catctgaaggcttac

SEQ ID NO: 1653384 - DNA, 15 bp, Homo sapiens
atctgaaggcttact

SEQ ID NO: 1653385 - DNA, 15 bp, Homo sapiens
tctgaaggcttactg

SEQ ID NO: 1653386 - DNA, 15 bp, Homo sapiens
ctgaaggcttactgg

SEQ ID NO: 1653387 - DNA, 15 bp, Homo sapiens
tgaaggcttactgga

SEQ ID NO: 1653388 - DNA, 15 bp, Homo sapiens
gaaggcttactggaa

SEQ ID NO: 1653389 - DNA, 15 bp, Homo sapiens
aaggcttactggaaa

SEQ ID NO: 1653390 - DNA, 15 bp, Homo sapiens
aggcttactggaaat

SEQ ID NO: 1653391 - DNA, 15 bp, Homo sapiens
ggcttactggaaatt

SEQ ID NO: 1653392 - DNA, 15 bp, Homo sapiens
gcttactggaaattt

SEQ ID NO: 1653393 - DNA, 15 bp, Homo sapiens
cttactggaaatttc

SEQ ID NO: 1653394 - DNA, 15 bp, Homo sapiens
ttactggaaatttcc

SEQ ID NO: 1653395 - DNA, 15 bp, Homo sapiens
tactggaaatttcca

SEQ ID NO: 1653396 - DNA, 15 bp, Homo sapiens
actggaaatttccac

SEQ ID NO: 1653397 - DNA, 15 bp, Homo sapiens
ctggaaatttccacg

SEQ ID NO: 1653398 - DNA, 15 bp, Homo sapiens
tggaaatttccacgt

SEQ ID NO: 1653399 - DNA, 15 bp, Homo sapiens
ggaaatttccacgtg

SEQ ID NO: 1653400 - DNA, 15 bp, Homo sapiens
gaaatttccacgtgg

SEQ ID NO: 1653401 - DNA, 15 bp, Homo sapiens
aaatttccacgtgga

SEQ ID NO: 1653402 - DNA, 15 bp, Homo sapiens
aatttccacgtggat

SEQ ID NO: 1653403 - DNA, 15 bp, Homo sapiens
atttccacgtggata

SEQ ID NO: 1653404 - DNA, 15 bp, Homo sapiens
tttccacgtggatat

SEQ ID NO: 1653405 - DNA, 15 bp, Homo sapiens
ttccacgtggatatc

SEQ ID NO: 1653406 - DNA, 15 bp, Homo sapiens
tccacgtggatatct

SEQ ID NO: 1653407 - DNA, 15 bp, Homo sapiens
ccacgtggatatctt

SEQ ID NO: 1653408 - DNA, 15 bp, Homo sapiens
cacgtggatatcttc

SEQ ID NO: 1653409 - DNA, 15 bp, Homo sapiens
acgtggatatcttcc

SEQ ID NO: 1653410 - DNA, 15 bp, Homo sapiens
cgtggatatcttcca

SEQ ID NO: 1653411 - DNA, 15 bp, Homo sapiens
gtggatatcttccaa

SEQ ID NO: 1653412 - DNA, 15 bp, Homo sapiens
tggatatcttccaac

SEQ ID NO: 1653413 - DNA, 15 bp, Homo sapiens
ggatatcttccaaca

SEQ ID NO: 1653414 - DNA, 15 bp, Homo sapiens
gatatcttccaacac

SEQ ID NO: 1653415 - DNA, 15 bp, Homo sapiens
atatcttccaacact

SEQ ID NO: 1653416 - DNA, 15 bp, Homo sapiens
tatcttccaacactt

SEQ ID NO: 1653417 - DNA, 15 bp, Homo sapiens
atcttccaacacttt

SEQ ID NO: 1653418 - DNA, 15 bp, Homo sapiens
tcttccaacactttg

SEQ ID NO: 1653419 - DNA, 15 bp, Homo sapiens
cttccaacactttga

SEQ ID NO: 1653420 - DNA, 15 bp, Homo sapiens
ttccaacactttgac

SEQ ID NO: 1653421 - DNA, 15 bp, Homo sapiens
tccaacactttgact

SEQ ID NO: 1653422 - DNA, 15 bp, Homo sapiens
ccaacactttgactt

SEQ ID NO: 1653423 - DNA, 15 bp, Homo sapiens
caacactttgacttc

SEQ ID NO: 1653424 - DNA, 15 bp, Homo sapiens
aacactttgacttca

SEQ ID NO: 1653425 - DNA, 15 bp, Homo sapiens
acactttgacttcaa

SEQ ID NO: 1653426 - DNA, 15 bp, Homo sapiens
cactttgacttcaac

SEQ ID NO: 1653427 - DNA, 15 bp, Homo sapiens
actttgacttcaacc

SEQ ID NO: 1653428 - DNA, 15 bp, Homo sapiens
ctttgacttcaaccc

SEQ ID NO: 1653429 - DNA, 15 bp, Homo sapiens
tttgacttcaaccca

SEQ ID NO: 1653430 - DNA, 15 bp, Homo sapiens
ttgacttcaacccat

SEQ ID NO: 1653431 - DNA, 15 bp, Homo sapiens
tgacttcaacccatt

SEQ ID NO: 1653432 - DNA, 15 bp, Homo sapiens
gacttcaacccattt

SEQ ID NO: 1653433 - DNA, 15 bp, Homo sapiens
acttcaacccatttt

SEQ ID NO: 1653434 - DNA, 15 bp, Homo sapiens
cttcaacccattttc

SEQ ID NO: 1653435 - DNA, 15 bp, Homo sapiens
ttcaacccattttcc

SEQ ID NO: 1653436 - DNA, 15 bp, Homo sapiens
tcaacccattttcct

SEQ ID NO: 1653437 - DNA, 15 bp, Homo sapiens
caacccattttcctc

SEQ ID NO: 1653438 - DNA, 15 bp, Homo sapiens
aacccattttcctct

SEQ ID NO: 1653439 - DNA, 15 bp, Homo sapiens
acccattttcctctc

SEQ ID NO: 1653440 - DNA, 15 bp, Homo sapiens
cccattttcctctct

SEQ ID NO: 1653441 - DNA, 15 bp, Homo sapiens
ccattttcctctcta

SEQ ID NO: 1653442 - DNA, 15 bp, Homo sapiens
cattttcctctctag

SEQ ID NO: 1653443 - DNA, 15 bp, Homo sapiens
attttcctctctagt

SEQ ID NO: 1653444 - DNA, 15 bp, Homo sapiens
ttttcctctctagtc

SEQ ID NO: 1653445 - DNA, 15 bp, Homo sapiens
tttcctctctagtct

SEQ ID NO: 1653446 - DNA, 15 bp, Homo sapiens
ttcctctctagtctt

SEQ ID NO: 1653447 - DNA, 15 bp, Homo sapiens
tcctctctagtcttc

SEQ ID NO: 1653448 - DNA, 15 bp, Homo sapiens
cctctctagtcttca

SEQ ID NO: 1653449 - DNA, 15 bp, Homo sapiens
ctctctagtcttcac

SEQ ID NO: 1653450 - DNA, 15 bp, Homo sapiens
tctctagtcttcacc

SEQ ID NO: 1653451 - DNA, 15 bp, Homo sapiens
ctctagtcttcacct

SEQ ID NO: 1653452 - DNA, 15 bp, Homo sapiens
tctagtcttcacctc

SEQ ID NO: 1653453 - DNA, 15 bp, Homo sapiens
ctagtcttcacctct

SEQ ID NO: 1653454 - DNA, 15 bp, Homo sapiens
tagtcttcacctcta

SEQ ID NO: 1653455 - DNA, 15 bp, Homo sapiens
agtcttcacctctaa

SEQ ID NO: 1653456 - DNA, 15 bp, Homo sapiens
gtcttcacctctaaa

SEQ ID NO: 1653457 - DNA, 15 bp, Homo sapiens
tcttcacctctaaaa

SEQ ID NO: 1653458 - DNA, 15 bp, Homo sapiens
cttcacctctaaaag

SEQ ID NO: 1653459 - DNA, 15 bp, Homo sapiens
ttcacctctaaaagc

SEQ ID NO: 1653460 - DNA, 15 bp, Homo sapiens
tcacctctaaaagca

SEQ ID NO: 1653461 - DNA, 15 bp, Homo sapiens
cacctctaaaagcaa

SEQ ID NO: 1653462 - DNA, 15 bp, Homo sapiens
acctctaaaagcaat

SEQ ID NO: 1653463 - DNA, 15 bp, Homo sapiens
cctctaaaagcaatt

SEQ ID NO: 1653464 - DNA, 15 bp, Homo sapiens
ctctaaaagcaattt

SEQ ID NO: 1653465 - DNA, 15 bp, Homo sapiens
tctaaaagcaatttg

SEQ ID NO: 1653466 - DNA, 15 bp, Homo sapiens
ctaaaagcaatttgc

SEQ ID NO: 1653467 - DNA, 15 bp, Homo sapiens
taaaagcaatttgct

SEQ ID NO: 1653468 - DNA, 15 bp, Homo sapiens
aaaagcaatttgcta

SEQ ID NO: 1653469 - DNA, 15 bp, Homo sapiens
aaagcaatttgctat

SEQ ID NO: 1653470 - DNA, 15 bp, Homo sapiens
aagcaatttgctatt

SEQ ID NO: 1653471 - DNA, 15 bp, Homo sapiens
agcaatttgctattt

SEQ ID NO: 1653472 - DNA, 15 bp, Homo sapiens
gcaatttgctatttg

SEQ ID NO: 1653473 - DNA, 15 bp, Homo sapiens
caatttgctatttgg

SEQ ID NO: 1653474 - DNA, 15 bp, Homo sapiens
aatttgctatttgga

SEQ ID NO: 1653475 - DNA, 15 bp, Homo sapiens
atttgctatttggaa

SEQ ID NO: 1653476 - DNA, 15 bp, Homo sapiens
tttgctatttggaac

SEQ ID NO: 1653477 - DNA, 15 bp, Homo sapiens
ttgctatttggaact

SEQ ID NO: 1653478 - DNA, 15 bp, Homo sapiens
tgctatttggaactt

SEQ ID NO: 1653479 - DNA, 15 bp, Homo sapiens
gctatttggaacttt

SEQ ID NO: 1653480 - DNA, 15 bp, Homo sapiens
ctatttggaactttc

SEQ ID NO: 1653481 - DNA, 15 bp, Homo sapiens
tatttggaactttct

SEQ ID NO: 1653482 - DNA, 15 bp, Homo sapiens
atttggaactttctg

SEQ ID NO: 1653483 - DNA, 15 bp, Homo sapiens
tttggaactttctgt

SEQ ID NO: 1653484 - DNA, 15 bp, Homo sapiens
ttggaactttctgtc

SEQ ID NO: 1653485 - DNA, 15 bp, Homo sapiens
tggaactttctgtct

SEQ ID NO: 1653486 - DNA, 15 bp, Homo sapiens
ggaactttctgtcta

SEQ ID NO: 1653487 - DNA, 15 bp, Homo sapiens
gaactttctgtctat

SEQ ID NO: 1653488 - DNA, 15 bp, Homo sapiens
aactttctgtctatg

SEQ ID NO: 1653489 - DNA, 15 bp, Homo sapiens
actttctgtctatgg

SEQ ID NO: 1653490 - DNA, 15 bp, Homo sapiens
ctttctgtctatggc

SEQ ID NO: 1653491 - DNA, 15 bp, Homo sapiens
tttctgtctatggca

SEQ ID NO: 1653492 - DNA, 15 bp, Homo sapiens
ttctgtctatggcac

SEQ ID NO: 1653493 - DNA, 15 bp, Homo sapiens
tctgtctatggcacc

SEQ ID NO: 1653494 - DNA, 15 bp, Homo sapiens
ctgtctatggcacca

SEQ ID NO: 1653495 - DNA, 15 bp, Homo sapiens
tgtctatggcaccat

SEQ ID NO: 1653496 - DNA, 15 bp, Homo sapiens
gtctatggcaccata

SEQ ID NO: 1653497 - DNA, 15 bp, Homo sapiens
tctatggcaccataa

SEQ ID NO: 1653498 - DNA, 15 bp, Homo sapiens
ctatggcaccataat

SEQ ID NO: 1653499 - DNA, 15 bp, Homo sapiens
tatggcaccataatt

SEQ ID NO: 1653500 - DNA, 15 bp, Homo sapiens
atggcaccataattc

SEQ ID NO: 1653501 - DNA, 15 bp, Homo sapiens
tggcaccataattca

SEQ ID NO: 1653502 - DNA, 15 bp, Homo sapiens
ggcaccataattcag

SEQ ID NO: 1653503 - DNA, 15 bp, Homo sapiens
gcaccataattcagt

SEQ ID NO: 1653504 - DNA, 15 bp, Homo sapiens
caccataattcagtc

SEQ ID NO: 1653505 - DNA, 15 bp, Homo sapiens
accataattcagtca

SEQ ID NO: 1653506 - DNA, 15 bp, Homo sapiens
ccataattcagtcaa

SEQ ID NO: 1653507 - DNA, 15 bp, Homo sapiens
cataattcagtcaac

SEQ ID NO: 1653508 - DNA, 15 bp, Homo sapiens
ataattcagtcaacc

SEQ ID NO: 1653509 - DNA, 15 bp, Homo sapiens
taattcagtcaacca

SEQ ID NO: 1653510 - DNA, 15 bp, Homo sapiens
aattcagtcaaccaa

SEQ ID NO: 1653511 - DNA, 15 bp, Homo sapiens
attcagtcaaccaag

SEQ ID NO: 1653512 - DNA, 15 bp, Homo sapiens
ttcagtcaaccaagt

SEQ ID NO: 1653513 - DNA, 15 bp, Homo sapiens
tcagtcaaccaagtt

SEQ ID NO: 1653514 - DNA, 15 bp, Homo sapiens
cagtcaaccaagttc

SEQ ID NO: 1653515 - DNA, 15 bp, Homo sapiens
agtcaaccaagttca

SEQ ID NO: 1653516 - DNA, 15 bp, Homo sapiens
gtcaaccaagttcag

SEQ ID NO: 1653517 - DNA, 15 bp, Homo sapiens
tcaaccaagttcaga

SEQ ID NO: 1653518 - DNA, 15 bp, Homo sapiens
caaccaagttcagaa

SEQ ID NO: 1653519 - DNA, 15 bp, Homo sapiens
aaccaagttcagaac

SEQ ID NO: 1653520 - DNA, 15 bp, Homo sapiens
accaagttcagaacc

SEQ ID NO: 1653521 - DNA, 15 bp, Homo sapiens
ccaagttcagaacct

SEQ ID NO: 1653522 - DNA, 15 bp, Homo sapiens
caagttcagaacctt

SEQ ID NO: 1653523 - DNA, 15 bp, Homo sapiens
aagttcagaaccttg

SEQ ID NO: 1653524 - DNA, 15 bp, Homo sapiens
agttcagaaccttgg

SEQ ID NO: 1653525 - DNA, 15 bp, Homo sapiens
gttcagaaccttgga

SEQ ID NO: 1653526 - DNA, 15 bp, Homo sapiens
ttcagaaccttggag

SEQ ID NO: 1653527 - DNA, 15 bp, Homo sapiens
tcagaaccttggagt

SEQ ID NO: 1653528 - DNA, 15 bp, Homo sapiens
cagaaccttggagtt

SEQ ID NO: 1653529 - DNA, 15 bp, Homo sapiens
agaaccttggagttt

SEQ ID NO: 1653530 - DNA, 15 bp, Homo sapiens
gaaccttggagtttt

SEQ ID NO: 1653531 - DNA, 15 bp, Homo sapiens
aaccttggagttttc

SEQ ID NO: 1653532 - DNA, 15 bp, Homo sapiens
accttggagttttcc

SEQ ID NO: 1653533 - DNA, 15 bp, Homo sapiens
ccttggagttttcct

SEQ ID NO: 1653534 - DNA, 15 bp, Homo sapiens
cttggagttttcctc

SEQ ID NO: 1653535 - DNA, 15 bp, Homo sapiens
ttggagttttcctca

SEQ ID NO: 1653536 - DNA, 15 bp, Homo sapiens
tggagttttcctcag

SEQ ID NO: 1653537 - DNA, 15 bp, Homo sapiens
ggagttttcctcagc

SEQ ID NO: 1653538 - DNA, 15 bp, Homo sapiens
gagttttcctcagca

SEQ ID NO: 1653539 - DNA, 15 bp, Homo sapiens
agttttcctcagcaa

SEQ ID NO: 1653540 - DNA, 15 bp, Homo sapiens
gttttcctcagcaac

SEQ ID NO: 1653541 - DNA, 15 bp, Homo sapiens
ttttcctcagcaaca

SEQ ID NO: 1653542 - DNA, 15 bp, Homo sapiens
tttcctcagcaacac

SEQ ID NO: 1653543 - DNA, 15 bp, Homo sapiens
ttcctcagcaacaca

SEQ ID NO: 1653544 - DNA, 15 bp, Homo sapiens
tcctcagcaacacat

SEQ ID NO: 1653545 - DNA, 15 bp, Homo sapiens
cctcagcaacacatt

SEQ ID NO: 1653546 - DNA, 15 bp, Homo sapiens
ctcagcaacacattc

SEQ ID NO: 1653547 - DNA, 15 bp, Homo sapiens
tcagcaacacattca

SEQ ID NO: 1653548 - DNA, 15 bp, Homo sapiens
cagcaacacattcaa

SEQ ID NO: 1653549 - DNA, 15 bp, Homo sapiens
agcaacacattcaaa

SEQ ID NO: 1653550 - DNA, 15 bp, Homo sapiens
gcaacacattcaaac

SEQ ID NO: 1653551 - DNA, 15 bp, Homo sapiens
caacacattcaaaca

SEQ ID NO: 1653552 - DNA, 15 bp, Homo sapiens
aacacattcaaacat

SEQ ID NO: 1653553 - DNA, 15 bp, Homo sapiens
acacattcaaacatc

SEQ ID NO: 1653554 - DNA, 15 bp, Homo sapiens
cacattcaaacatcc

SEQ ID NO: 1653555 - DNA, 15 bp, Homo sapiens
acattcaaacatcca

SEQ ID NO: 1653556 - DNA, 15 bp, Homo sapiens
cattcaaacatccag

SEQ ID NO: 1653557 - DNA, 15 bp, Homo sapiens
attcaaacatccagt

SEQ ID NO: 1653558 - DNA, 15 bp, Homo sapiens
ttcaaacatccagtg

SEQ ID NO: 1653559 - DNA, 15 bp, Homo sapiens
tcaaacatccagtgc

SEQ ID NO: 1653560 - DNA, 15 bp, Homo sapiens
caaacatccagtgct

SEQ ID NO: 1653561 - DNA, 15 bp, Homo sapiens
aaacatccagtgctc

SEQ ID NO: 1653562 - DNA, 15 bp, Homo sapiens
aacatccagtgctca

SEQ ID NO: 1653563 - DNA, 15 bp, Homo sapiens
acatccagtgctcat

SEQ ID NO: 1653564 - DNA, 15 bp, Homo sapiens
catccagtgctcatt

SEQ ID NO: 1653565 - DNA, 15 bp, Homo sapiens
atccagtgctcatta

SEQ ID NO: 1653566 - DNA, 15 bp, Homo sapiens
tccagtgctcattag

SEQ ID NO: 1653567 - DNA, 15 bp, Homo sapiens
ccagtgctcattagg

SEQ ID NO: 1653568 - DNA, 15 bp, Homo sapiens
cagtgctcattaggt

SEQ ID NO: 1653569 - DNA, 15 bp, Homo sapiens
agtgctcattaggtc

SEQ ID NO: 1653570 - DNA, 15 bp, Homo sapiens
gtgctcattaggtca

SEQ ID NO: 1653571 - DNA, 15 bp, Homo sapiens
tgctcattaggtcat

SEQ ID NO: 1653572 - DNA, 15 bp, Homo sapiens
gctcattaggtcatc

SEQ ID NO: 1653573 - DNA, 15 bp, Homo sapiens
ctcattaggtcatcc

SEQ ID NO: 1653574 - DNA, 15 bp, Homo sapiens
tcattaggtcatcct

SEQ ID NO: 1653575 - DNA, 15 bp, Homo sapiens
cattaggtcatcctt

SEQ ID NO: 1653576 - DNA, 15 bp, Homo sapiens
attaggtcatccttc

SEQ ID NO: 1653577 - DNA, 15 bp, Homo sapiens
ttaggtcatccttca

SEQ ID NO: 1653578 - DNA, 15 bp, Homo sapiens
taggtcatccttcaa

SEQ ID NO: 1653579 - DNA, 15 bp, Homo sapiens
aggtcatccttcaag

SEQ ID NO: 1653580 - DNA, 15 bp, Homo sapiens
ggtcatccttcaagg

SEQ ID NO: 1653581 - DNA, 15 bp, Homo sapiens
gtcatccttcaaggt

SEQ ID NO: 1653582 - DNA, 15 bp, Homo sapiens
tcatccttcaaggtc

SEQ ID NO: 1653583 - DNA, 15 bp, Homo sapiens
catccttcaaggtca

SEQ ID NO: 1653584 - DNA, 15 bp, Homo sapiens
atccttcaaggtcat

SEQ ID NO: 1653585 - DNA, 15 bp, Homo sapiens
tccttcaaggtcatt

SEQ ID NO: 1653586 - DNA, 15 bp, Homo sapiens
ccttcaaggtcattt

SEQ ID NO: 1653587 - DNA, 15 bp, Homo sapiens
cttcaaggtcattta

SEQ ID NO: 1653588 - DNA, 15 bp, Homo sapiens
ttcaaggtcatttat

SEQ ID NO: 1653589 - DNA, 15 bp, Homo sapiens
tcaaggtcatttatg

SEQ ID NO: 1653590 - DNA, 15 bp, Homo sapiens
caaggtcatttatgc

SEQ ID NO: 1653591 - DNA, 15 bp, Homo sapiens
aaggtcatttatgct

SEQ ID NO: 1653592 - DNA, 15 bp, Homo sapiens
aggtcatttatgcta

SEQ ID NO: 1653593 - DNA, 15 bp, Homo sapiens
ggtcatttatgctaa

SEQ ID NO: 1653594 - DNA, 15 bp, Homo sapiens
gtcatttatgctaaa

SEQ ID NO: 1653595 - DNA, 15 bp, Homo sapiens
tcatttatgctaaat

SEQ ID NO: 1653596 - DNA, 15 bp, Homo sapiens
catttatgctaaata

SEQ ID NO: 1653597 - DNA, 15 bp, Homo sapiens
atttatgctaaataa

SEQ ID NO: 1653598 - DNA, 15 bp, Homo sapiens
tttatgctaaataac

SEQ ID NO: 1653599 - DNA, 15 bp, Homo sapiens
ttatgctaaataaca

SEQ ID NO: 1653600 - DNA, 15 bp, Homo sapiens
tatgctaaataacag

SEQ ID NO: 1653601 - DNA, 15 bp, Homo sapiens
atgctaaataacagc

SEQ ID NO: 1653602 - DNA, 15 bp, Homo sapiens
tgctaaataacagcc

SEQ ID NO: 1653603 - DNA, 15 bp, Homo sapiens
gctaaataacagcct

SEQ ID NO: 1653604 - DNA, 15 bp, Homo sapiens
ctaaataacagcctc

SEQ ID NO: 1653605 - DNA, 15 bp, Homo sapiens
taaataacagcctct

SEQ ID NO: 1653606 - DNA, 15 bp, Homo sapiens
aacagcctcttttta

SEQ ID NO: 1653607 - DNA, 15 bp, Homo sapiens
acagcctctttttaa

SEQ ID NO: 1653608 - DNA, 15 bp, Homo sapiens
cagcctctttttaaa

SEQ ID NO: 1653609 - DNA, 15 bp, Homo sapiens
agcctctttttaaaa

SEQ ID NO: 1653610 - DNA, 15 bp, Homo sapiens
gcctctttttaaaaa

SEQ ID NO: 1653611 - DNA, 15 bp, Homo sapiens
cctctttttaaaaat

SEQ ID NO: 1653612 - DNA, 15 bp, Homo sapiens
tctttttaaaaatag

SEQ ID NO: 1653613 - DNA, 15 bp, Homo sapiens
ctttttaaaaataga

SEQ ID NO: 1653614 - DNA, 15 bp, Homo sapiens
tttttaaaaatagag

SEQ ID NO: 1653615 - DNA, 15 bp, Homo sapiens
tttaaaaatagagat

SEQ ID NO: 1653616 - DNA, 15 bp, Homo sapiens
ttaaaaatagagatc

SEQ ID NO: 1653617 - DNA, 15 bp, Homo sapiens
taaaaatagagatca

SEQ ID NO: 1653618 - DNA, 15 bp, Homo sapiens
aaaaatagagatcaa

SEQ ID NO: 1653619 - DNA, 15 bp, Homo sapiens
aaaatagagatcaaa

SEQ ID NO: 1653620 - DNA, 15 bp, Homo sapiens
aaatagagatcaaaa

SEQ ID NO: 1653621 - DNA, 15 bp, Homo sapiens
aatagagatcaaaat

SEQ ID NO: 1653622 - DNA, 15 bp, Homo sapiens
atagagatcaaaata

SEQ ID NO: 1653623 - DNA, 15 bp, Homo sapiens
tagagatcaaaatat

SEQ ID NO: 1653624 - DNA, 15 bp, Homo sapiens
agagatcaaaatatg

SEQ ID NO: 1653625 - DNA, 15 bp, Homo sapiens
gagatcaaaatatgc

SEQ ID NO: 1653626 - DNA, 15 bp, Homo sapiens
agatcaaaatatgcc

SEQ ID NO: 1653627 - DNA, 15 bp, Homo sapiens
gatcaaaatatgcca

SEQ ID NO: 1653628 - DNA, 15 bp, Homo sapiens
atcaaaatatgccaa

SEQ ID NO: 1653629 - DNA, 15 bp, Homo sapiens
tcaaaatatgccaag

SEQ ID NO: 1653630 - DNA, 15 bp, Homo sapiens
caaaatatgccaagg

SEQ ID NO: 1653631 - DNA, 15 bp, Homo sapiens
aaaatatgccaaggc

SEQ ID NO: 1653632 - DNA, 15 bp, Homo sapiens
aaatatgccaaggcc

SEQ ID NO: 1653633 - DNA, 15 bp, Homo sapiens
aatatgccaaggcca

SEQ ID NO: 1653634 - DNA, 15 bp, Homo sapiens
atatgccaaggccat

SEQ ID NO: 1653635 - DNA, 15 bp, Homo sapiens
tatgccaaggccatt

SEQ ID NO: 1653636 - DNA, 15 bp, Homo sapiens
atgccaaggccatta

SEQ ID NO: 1653637 - DNA, 15 bp, Homo sapiens
tgccaaggccattat

SEQ ID NO: 1653638 - DNA, 15 bp, Homo sapiens
gccaaggccattatt

SEQ ID NO: 1653639 - DNA, 15 bp, Homo sapiens
ccaaggccattattc

SEQ ID NO: 1653640 - DNA, 15 bp, Homo sapiens
caaggccattattca

SEQ ID NO: 1653641 - DNA, 15 bp, Homo sapiens
aaggccattattcaa

SEQ ID NO: 1653642 - DNA, 15 bp, Homo sapiens
aggccattattcaaa

SEQ ID NO: 1653643 - DNA, 15 bp, Homo sapiens
ggccattattcaaac

SEQ ID NO: 1653644 - DNA, 15 bp, Homo sapiens
gccattattcaaaca

SEQ ID NO: 1653645 - DNA, 15 bp, Homo sapiens
ccattattcaaacat

SEQ ID NO: 1653646 - DNA, 15 bp, Homo sapiens
cattattcaaacatc

SEQ ID NO: 1653647 - DNA, 15 bp, Homo sapiens
attattcaaacatct

SEQ ID NO: 1653648 - DNA, 15 bp, Homo sapiens
ttattcaaacatctc

SEQ ID NO: 1653649 - DNA, 15 bp, Homo sapiens
tattcaaacatctct

SEQ ID NO: 1653650 - DNA, 15 bp, Homo sapiens
attcaaacatctctt

SEQ ID NO: 1653651 - DNA, 15 bp, Homo sapiens
ttcaaacatctctta

SEQ ID NO: 1653652 - DNA, 15 bp, Homo sapiens
tcaaacatctcttat

SEQ ID NO: 1653653 - DNA, 15 bp, Homo sapiens
caaacatctcttata

SEQ ID NO: 1653654 - DNA, 15 bp, Homo sapiens
aaacatctcttatat

SEQ ID NO: 1653655 - DNA, 15 bp, Homo sapiens
aacatctcttatatc

SEQ ID NO: 1653656 - DNA, 15 bp, Homo sapiens
acatctcttatatct

SEQ ID NO: 1653657 - DNA, 15 bp, Homo sapiens
catctcttatatctt

SEQ ID NO: 1653658 - DNA, 15 bp, Homo sapiens
atctcttatatcttt

SEQ ID NO: 1653659 - DNA, 15 bp, Homo sapiens
tctcttatatctttc

SEQ ID NO: 1653660 - DNA, 15 bp, Homo sapiens
ctcttatatctttcc

SEQ ID NO: 1653661 - DNA, 15 bp, Homo sapiens
tcttatatctttcct

SEQ ID NO: 1653662 - DNA, 15 bp, Homo sapiens
cttatatctttcctc

SEQ ID NO: 1653663 - DNA, 15 bp, Homo sapiens
ttatatctttcctcc

SEQ ID NO: 1653664 - DNA, 15 bp, Homo sapiens
tatatctttcctcct

SEQ ID NO: 1653665 - DNA, 15 bp, Homo sapiens
atatctttcctcctc

SEQ ID NO: 1653666 - DNA, 15 bp, Homo sapiens
tatctttcctcctcc

SEQ ID NO: 1653667 - DNA, 15 bp, Homo sapiens
atctttcctcctcct

SEQ ID NO: 1653668 - DNA, 15 bp, Homo sapiens
tctttcctcctccta

SEQ ID NO: 1653669 - DNA, 15 bp, Homo sapiens
ctttcctcctcctac

SEQ ID NO: 1653670 - DNA, 15 bp, Homo sapiens
tttcctcctcctacc

SEQ ID NO: 1653671 - DNA, 15 bp, Homo sapiens
ttcctcctcctaccc

SEQ ID NO: 1653672 - DNA, 15 bp, Homo sapiens
tcctcctcctacccc

SEQ ID NO: 1653673 - DNA, 15 bp, Homo sapiens
cctcctcctaccccc

SEQ ID NO: 1653674 - DNA, 15 bp, Homo sapiens
ctcctcctaccccca

SEQ ID NO: 1653675 - DNA, 15 bp, Homo sapiens
tcctcctacccccaa

SEQ ID NO: 1653676 - DNA, 15 bp, Homo sapiens
cctcctacccccaaa

SEQ ID NO: 1653677 - DNA, 15 bp, Homo sapiens
ctcctacccccaaag

SEQ ID NO: 1653678 - DNA, 15 bp, Homo sapiens
tcctacccccaaagg

SEQ ID NO: 1653679 - DNA, 15 bp, Homo sapiens
cctacccccaaaggc

SEQ ID NO: 1653680 - DNA, 15 bp, Homo sapiens
ctacccccaaaggca

SEQ ID NO: 1653681 - DNA, 15 bp, Homo sapiens
tacccccaaaggcat

SEQ ID NO: 1653682 - DNA, 15 bp, Homo sapiens
acccccaaaggcatc

SEQ ID NO: 1653683 - DNA, 15 bp, Homo sapiens
cccccaaaggcatca

SEQ ID NO: 1653684 - DNA, 15 bp, Homo sapiens
ccccaaaggcatcac

SEQ ID NO: 1653685 - DNA, 15 bp, Homo sapiens
cccaaaggcatcact

SEQ ID NO: 1653686 - DNA, 15 bp, Homo sapiens
ccaaaggcatcactc

SEQ ID NO: 1653687 - DNA, 15 bp, Homo sapiens
caaaggcatcactct

SEQ ID NO: 1653688 - DNA, 15 bp, Homo sapiens
aaaggcatcactctt

SEQ ID NO: 1653689 - DNA, 15 bp, Homo sapiens
aaggcatcactctta

SEQ ID NO: 1653690 - DNA, 15 bp, Homo sapiens
aggcatcactcttat

SEQ ID NO: 1653691 - DNA, 15 bp, Homo sapiens
ggcatcactcttatt

SEQ ID NO: 1653692 - DNA, 15 bp, Homo sapiens
gcatcactcttatta

SEQ ID NO: 1653693 - DNA, 15 bp, Homo sapiens
catcactcttattag

SEQ ID NO: 1653694 - DNA, 15 bp, Homo sapiens
atcactcttattagt

SEQ ID NO: 1653695 - DNA, 15 bp, Homo sapiens
tcactcttattagtc

SEQ ID NO: 1653696 - DNA, 15 bp, Homo sapiens
cactcttattagtcc

SEQ ID NO: 1653697 - DNA, 15 bp, Homo sapiens
actcttattagtcca

SEQ ID NO: 1653698 - DNA, 15 bp, Homo sapiens
ctcttattagtccaa

SEQ ID NO: 1653699 - DNA, 15 bp, Homo sapiens
tcttattagtccaac

SEQ ID NO: 1653700 - DNA, 15 bp, Homo sapiens
cttattagtccaacc

SEQ ID NO: 1653701 - DNA, 15 bp, Homo sapiens
ttattagtccaacct

SEQ ID NO: 1653702 - DNA, 15 bp, Homo sapiens
tattagtccaacctt

SEQ ID NO: 1653703 - DNA, 15 bp, Homo sapiens
attagtccaaccttt

SEQ ID NO: 1653704 - DNA, 15 bp, Homo sapiens
ttagtccaaccttta

SEQ ID NO: 1653705 - DNA, 15 bp, Homo sapiens
tagtccaacctttat

SEQ ID NO: 1653706 - DNA, 15 bp, Homo sapiens
agtccaacctttatt

SEQ ID NO: 1653707 - DNA, 15 bp, Homo sapiens
gtccaacctttattg

SEQ ID NO: 1653708 - DNA, 15 bp, Homo sapiens
tccaacctttattgc

SEQ ID NO: 1653709 - DNA, 15 bp, Homo sapiens
ccaacctttattgcc

SEQ ID NO: 1653710 - DNA, 15 bp, Homo sapiens
caacctttattgcct

SEQ ID NO: 1653711 - DNA, 15 bp, Homo sapiens
aacctttattgcctt

SEQ ID NO: 1653712 - DNA, 15 bp, Homo sapiens
acctttattgccttc

SEQ ID NO: 1653713 - DNA, 15 bp, Homo sapiens
cctttattgccttct

SEQ ID NO: 1653714 - DNA, 15 bp, Homo sapiens
ctttattgccttctg

SEQ ID NO: 1653715 - DNA, 15 bp, Homo sapiens
tttattgccttctgg

SEQ ID NO: 1653716 - DNA, 15 bp, Homo sapiens
ttattgccttctgga

SEQ ID NO: 1653717 - DNA, 15 bp, Homo sapiens
tattgccttctggac

SEQ ID NO: 1653718 - DNA, 15 bp, Homo sapiens
attgccttctggaca

SEQ ID NO: 1653719 - DNA, 15 bp, Homo sapiens
ttgccttctggacaa

SEQ ID NO: 1653720 - DNA, 15 bp, Homo sapiens
tgccttctggacaat

SEQ ID NO: 1653721 - DNA, 15 bp, Homo sapiens
gccttctggacaatt

SEQ ID NO: 1653722 - DNA, 15 bp, Homo sapiens
ccttctggacaattg

SEQ ID NO: 1653723 - DNA, 15 bp, Homo sapiens
cttctggacaattgc

SEQ ID NO: 1653724 - DNA, 15 bp, Homo sapiens
ttctggacaattgca

SEQ ID NO: 1653725 - DNA, 15 bp, Homo sapiens
tctggacaattgcaa

SEQ ID NO: 1653726 - DNA, 15 bp, Homo sapiens
ctggacaattgcaat

SEQ ID NO: 1653727 - DNA, 15 bp, Homo sapiens
tggacaattgcaatg

SEQ ID NO: 1653728 - DNA, 15 bp, Homo sapiens
ggacaattgcaatgg

SEQ ID NO: 1653729 - DNA, 15 bp, Homo sapiens
gacaattgcaatggc

SEQ ID NO: 1653730 - DNA, 15 bp, Homo sapiens
acaattgcaatggct

SEQ ID NO: 1653731 - DNA, 15 bp, Homo sapiens
caattgcaatggctg

SEQ ID NO: 1653732 - DNA, 15 bp, Homo sapiens
aattgcaatggctgc

SEQ ID NO: 1653733 - DNA, 15 bp, Homo sapiens
attgcaatggctgct

SEQ ID NO: 1653734 - DNA, 15 bp, Homo sapiens
ttgcaatggctgctc

SEQ ID NO: 1653735 - DNA, 15 bp, Homo sapiens
tgcaatggctgctca

SEQ ID NO: 1653736 - DNA, 15 bp, Homo sapiens
gcaatggctgctcac

SEQ ID NO: 1653737 - DNA, 15 bp, Homo sapiens
caatggctgctcacc

SEQ ID NO: 1653738 - DNA, 15 bp, Homo sapiens
aatggctgctcacca

SEQ ID NO: 1653739 - DNA, 15 bp, Homo sapiens
atggctgctcaccag

SEQ ID NO: 1653740 - DNA, 15 bp, Homo sapiens
tggctgctcaccagt

SEQ ID NO: 1653741 - DNA, 15 bp, Homo sapiens
ggctgctcaccagta

SEQ ID NO: 1653742 - DNA, 15 bp, Homo sapiens
gctgctcaccagtac

SEQ ID NO: 1653743 - DNA, 15 bp, Homo sapiens
ctgctcaccagtact

SEQ ID NO: 1653744 - DNA, 15 bp, Homo sapiens
tgctcaccagtactc

SEQ ID NO: 1653745 - DNA, 15 bp, Homo sapiens
gctcaccagtactcc

SEQ ID NO: 1653746 - DNA, 15 bp, Homo sapiens
ctcaccagtactcct

SEQ ID NO: 1653747 - DNA, 15 bp, Homo sapiens
tcaccagtactcctc

SEQ ID NO: 1653748 - DNA, 15 bp, Homo sapiens
caccagtactcctct

SEQ ID NO: 1653749 - DNA, 15 bp, Homo sapiens
accagtactcctctc

SEQ ID NO: 1653750 - DNA, 15 bp, Homo sapiens
ccagtactcctctct

SEQ ID NO: 1653751 - DNA, 15 bp, Homo sapiens
cagtactcctctctc

SEQ ID NO: 1653752 - DNA, 15 bp, Homo sapiens
agtactcctctctca

SEQ ID NO: 1653753 - DNA, 15 bp, Homo sapiens
gtactcctctctcaa

SEQ ID NO: 1653754 - DNA, 15 bp, Homo sapiens
tactcctctctcaat

SEQ ID NO: 1653755 - DNA, 15 bp, Homo sapiens
actcctctctcaatc

SEQ ID NO: 1653756 - DNA, 15 bp, Homo sapiens
ctcctctctcaatcc

SEQ ID NO: 1653757 - DNA, 15 bp, Homo sapiens
tcctctctcaatcca

SEQ ID NO: 1653758 - DNA, 15 bp, Homo sapiens
cctctctcaatccat

SEQ ID NO: 1653759 - DNA, 15 bp, Homo sapiens
ctctctcaatccatt

SEQ ID NO: 1653760 - DNA, 15 bp, Homo sapiens
tctctcaatccattt

SEQ ID NO: 1653761 - DNA, 15 bp, Homo sapiens
ctctcaatccatttg

SEQ ID NO: 1653762 - DNA, 15 bp, Homo sapiens
tctcaatccatttga

SEQ ID NO: 1653763 - DNA, 15 bp, Homo sapiens
ctcaatccatttgat

SEQ ID NO: 1653764 - DNA, 15 bp, Homo sapiens
tcaatccatttgata

SEQ ID NO: 1653765 - DNA, 15 bp, Homo sapiens
caatccatttgatat

SEQ ID NO: 1653766 - DNA, 15 bp, Homo sapiens
aatccatttgatata

SEQ ID NO: 1653767 - DNA, 15 bp, Homo sapiens
atccatttgatatag

SEQ ID NO: 1653768 - DNA, 15 bp, Homo sapiens
tccatttgatatagc

SEQ ID NO: 1653769 - DNA, 15 bp, Homo sapiens
ccatttgatatagca

SEQ ID NO: 1653770 - DNA, 15 bp, Homo sapiens
catttgatatagcat

SEQ ID NO: 1653771 - DNA, 15 bp, Homo sapiens
atttgatatagcatt

SEQ ID NO: 1653772 - DNA, 15 bp, Homo sapiens
tttgatatagcattt

SEQ ID NO: 1653773 - DNA, 15 bp, Homo sapiens
ttgatatagcatttt

SEQ ID NO: 1653774 - DNA, 15 bp, Homo sapiens
tgatatagcattttt

SEQ ID NO: 1653775 - DNA, 15 bp, Homo sapiens
gatatagcattttta

SEQ ID NO: 1653776 - DNA, 15 bp, Homo sapiens
atatagcatttttaa

SEQ ID NO: 1653777 - DNA, 15 bp, Homo sapiens
tatagcatttttaaa

SEQ ID NO: 1653778 - DNA, 15 bp, Homo sapiens
atagcatttttaaag

SEQ ID NO: 1653779 - DNA, 15 bp, Homo sapiens
tagcatttttaaagt

SEQ ID NO: 1653780 - DNA, 15 bp, Homo sapiens
agcatttttaaagtt

SEQ ID NO: 1653781 - DNA, 15 bp, Homo sapiens
gcatttttaaagttt

SEQ ID NO: 1653782 - DNA, 15 bp, Homo sapiens
catttttaaagtttt

SEQ ID NO: 1653783 - DNA, 15 bp, Homo sapiens
atttttaaagttttg

SEQ ID NO: 1653784 - DNA, 15 bp, Homo sapiens
tttttaaagttttgc

SEQ ID NO: 1653785 - DNA, 15 bp, Homo sapiens
ttttaaagttttgct

SEQ ID NO: 1653786 - DNA, 15 bp, Homo sapiens
tttaaagttttgctt

SEQ ID NO: 1653787 - DNA, 15 bp, Homo sapiens
ttaaagttttgcttg

SEQ ID NO: 1653788 - DNA, 15 bp, Homo sapiens
taaagttttgcttgg

SEQ ID NO: 1653789 - DNA, 15 bp, Homo sapiens
aaagttttgcttggc

SEQ ID NO: 1653790 - DNA, 15 bp, Homo sapiens
aagttttgcttggca

SEQ ID NO: 1653791 - DNA, 15 bp, Homo sapiens
agttttgcttggcat

SEQ ID NO: 1653792 - DNA, 15 bp, Homo sapiens
gttttgcttggcata

SEQ ID NO: 1653793 - DNA, 15 bp, Homo sapiens
ttttgcttggcatac

SEQ ID NO: 1653794 - DNA, 15 bp, Homo sapiens
tttgcttggcatacc

SEQ ID NO: 1653795 - DNA, 15 bp, Homo sapiens
ttgcttggcatacct

SEQ ID NO: 1653796 - DNA, 15 bp, Homo sapiens
tgcttggcatacctt

SEQ ID NO: 1653797 - DNA, 15 bp, Homo sapiens
gcttggcatacctta

SEQ ID NO: 1653798 - DNA, 15 bp, Homo sapiens
cttggcataccttat

SEQ ID NO: 1653799 - DNA, 15 bp, Homo sapiens
ttggcataccttatg

SEQ ID NO: 1653800 - DNA, 15 bp, Homo sapiens
tggcataccttatga

SEQ ID NO: 1653801 - DNA, 15 bp, Homo sapiens
ggcataccttatgaa

SEQ ID NO: 1653802 - DNA, 15 bp, Homo sapiens
gcataccttatgaaa

SEQ ID NO: 1653803 - DNA, 15 bp, Homo sapiens
cataccttatgaaaa

SEQ ID NO: 1653804 - DNA, 15 bp, Homo sapiens
ataccttatgaaaaa

SEQ ID NO: 1653805 - DNA, 15 bp, Homo sapiens
taccttatgaaaaac

SEQ ID NO: 1653806 - DNA, 15 bp, Homo sapiens
accttatgaaaaact

SEQ ID NO: 1653807 - DNA, 15 bp, Homo sapiens
ccttatgaaaaactt

SEQ ID NO: 1653808 - DNA, 15 bp, Homo sapiens
cttatgaaaaacttc

SEQ ID NO: 1653809 - DNA, 15 bp, Homo sapiens
ttatgaaaaacttca

SEQ ID NO: 1653810 - DNA, 15 bp, Homo sapiens
tatgaaaaacttcag

SEQ ID NO: 1653811 - DNA, 15 bp, Homo sapiens
atgaaaaacttcagt

SEQ ID NO: 1653812 - DNA, 15 bp, Homo sapiens
tgaaaaacttcagtg

SEQ ID NO: 1653813 - DNA, 15 bp, Homo sapiens
gaaaaacttcagtgg

SEQ ID NO: 1653814 - DNA, 15 bp, Homo sapiens
aaaaacttcagtggc

SEQ ID NO: 1653815 - DNA, 15 bp, Homo sapiens
aaaacttcagtggcc

SEQ ID NO: 1653816 - DNA, 15 bp, Homo sapiens
aaacttcagtggcca

SEQ ID NO: 1653817 - DNA, 15 bp, Homo sapiens
aacttcagtggccac

SEQ ID NO: 1653818 - DNA, 15 bp, Homo sapiens
acttcagtggccacc

SEQ ID NO: 1653819 - DNA, 15 bp, Homo sapiens
cttcagtggccacca

SEQ ID NO: 1653820 - DNA, 15 bp, Homo sapiens
ttcagtggccaccat

SEQ ID NO: 1653821 - DNA, 15 bp, Homo sapiens
tcagtggccaccatt

SEQ ID NO: 1653822 - DNA, 15 bp, Homo sapiens
cagtggccaccattt

SEQ ID NO: 1653823 - DNA, 15 bp, Homo sapiens
agtggccaccatttt

SEQ ID NO: 1653824 - DNA, 15 bp, Homo sapiens
gtggccaccattttc

SEQ ID NO: 1653825 - DNA, 15 bp, Homo sapiens
tggccaccattttca

SEQ ID NO: 1653826 - DNA, 15 bp, Homo sapiens
ggccaccattttcaa

SEQ ID NO: 1653827 - DNA, 15 bp, Homo sapiens
gccaccattttcaat

SEQ ID NO: 1653828 - DNA, 15 bp, Homo sapiens
ccaccattttcaatt

SEQ ID NO: 1653829 - DNA, 15 bp, Homo sapiens
caccattttcaattt

SEQ ID NO: 1653830 - DNA, 15 bp, Homo sapiens
accattttcaatttg

SEQ ID NO: 1653831 - DNA, 15 bp, Homo sapiens
ccattttcaatttga

SEQ ID NO: 1653832 - DNA, 15 bp, Homo sapiens
cattttcaatttgat

SEQ ID NO: 1653833 - DNA, 15 bp, Homo sapiens
attttcaatttgata

SEQ ID NO: 1653834 - DNA, 15 bp, Homo sapiens
ttttcaatttgatat

SEQ ID NO: 1653835 - DNA, 15 bp, Homo sapiens
tttcaatttgatatc

SEQ ID NO: 1653836 - DNA, 15 bp, Homo sapiens
ttcaatttgatatct

SEQ ID NO: 1653837 - DNA, 15 bp, Homo sapiens
tcaatttgatatctt

SEQ ID NO: 1653838 - DNA, 15 bp, Homo sapiens
caatttgatatcttt

SEQ ID NO: 1653839 - DNA, 15 bp, Homo sapiens
aatttgatatctttc

SEQ ID NO: 1653840 - DNA, 15 bp, Homo sapiens
atttgatatctttct

SEQ ID NO: 1653841 - DNA, 15 bp, Homo sapiens
tttgatatctttctt

SEQ ID NO: 1653842 - DNA, 15 bp, Homo sapiens
ttgatatctttcttt

SEQ ID NO: 1653843 - DNA, 15 bp, Homo sapiens
tgatatctttctttt

SEQ ID NO: 1653844 - DNA, 15 bp, Homo sapiens
gatatctttcttttt

SEQ ID NO: 1653845 - DNA, 15 bp, Homo sapiens
atatctttctttttc

SEQ ID NO: 1653846 - DNA, 15 bp, Homo sapiens
tatctttctttttct

SEQ ID NO: 1653847 - DNA, 15 bp, Homo sapiens
atctttctttttctt

SEQ ID NO: 1653848 - DNA, 15 bp, Homo sapiens
tctttctttttctta

SEQ ID NO: 1653849 - DNA, 15 bp, Homo sapiens
ctttctttttcttaa

SEQ ID NO: 1653850 - DNA, 15 bp, Homo sapiens
tttctttttcttaat

SEQ ID NO: 1653851 - DNA, 15 bp, Homo sapiens
ttctttttcttaata

SEQ ID NO: 1653852 - DNA, 15 bp, Homo sapiens
tctttttcttaatag

SEQ ID NO: 1653853 - DNA, 15 bp, Homo sapiens
ctttttcttaatagc

SEQ ID NO: 1653854 - DNA, 15 bp, Homo sapiens
tttttcttaatagct

SEQ ID NO: 1653855 - DNA, 15 bp, Homo sapiens
ttttcttaatagcta

SEQ ID NO: 1653856 - DNA, 15 bp, Homo sapiens
tttcttaatagctat

SEQ ID NO: 1653857 - DNA, 15 bp, Homo sapiens
ttcttaatagctatt

SEQ ID NO: 1653858 - DNA, 15 bp, Homo sapiens
tcttaatagctattg

SEQ ID NO: 1653859 - DNA, 15 bp, Homo sapiens
cttaatagctattgc

SEQ ID NO: 1653860 - DNA, 15 bp, Homo sapiens
ttaatagctattgca

SEQ ID NO: 1653861 - DNA, 15 bp, Homo sapiens
taatagctattgcaa

SEQ ID NO: 1653862 - DNA, 15 bp, Homo sapiens
aatagctattgcaac

SEQ ID NO: 1653863 - DNA, 15 bp, Homo sapiens
atagctattgcaact

SEQ ID NO: 1653864 - DNA, 15 bp, Homo sapiens
tagctattgcaacta

SEQ ID NO: 1653865 - DNA, 15 bp, Homo sapiens
agctattgcaactaa

SEQ ID NO: 1653866 - DNA, 15 bp, Homo sapiens
gctattgcaactaaa

SEQ ID NO: 1653867 - DNA, 15 bp, Homo sapiens
ctattgcaactaaaa

SEQ ID NO: 1653868 - DNA, 15 bp, Homo sapiens
tattgcaactaaaat

SEQ ID NO: 1653869 - DNA, 15 bp, Homo sapiens
attgcaactaaaata

SEQ ID NO: 1653870 - DNA, 15 bp, Homo sapiens
ttgcaactaaaatat

SEQ ID NO: 1653871 - DNA, 15 bp, Homo sapiens
tgcaactaaaatatt

SEQ ID NO: 1653872 - DNA, 15 bp, Homo sapiens
gcaactaaaatattc

SEQ ID NO: 1653873 - DNA, 15 bp, Homo sapiens
caactaaaatattca

SEQ ID NO: 1653874 - DNA, 15 bp, Homo sapiens
aactaaaatattcac

SEQ ID NO: 1653875 - DNA, 15 bp, Homo sapiens
actaaaatattcaca

SEQ ID NO: 1653876 - DNA, 15 bp, Homo sapiens
ctaaaatattcacat

SEQ ID NO: 1653877 - DNA, 15 bp, Homo sapiens
taaaatattcacatg

SEQ ID NO: 1653878 - DNA, 15 bp, Homo sapiens
aaaatattcacatgc

SEQ ID NO: 1653879 - DNA, 15 bp, Homo sapiens
aaatattcacatgca

SEQ ID NO: 1653880 - DNA, 15 bp, Homo sapiens
aatattcacatgcac

SEQ ID NO: 1653881 - DNA, 15 bp, Homo sapiens
atattcacatgcacc

SEQ ID NO: 1653882 - DNA, 15 bp, Homo sapiens
tattcacatgcacca

SEQ ID NO: 1653883 - DNA, 15 bp, Homo sapiens
attcacatgcaccac

SEQ ID NO: 1653884 - DNA, 15 bp, Homo sapiens
ttcacatgcaccaca

SEQ ID NO: 1653885 - DNA, 15 bp, Homo sapiens
tcacatgcaccacac

SEQ ID NO: 1653886 - DNA, 15 bp, Homo sapiens
cacatgcaccacacc

SEQ ID NO: 1653887 - DNA, 15 bp, Homo sapiens
acatgcaccacacct

SEQ ID NO: 1653888 - DNA, 15 bp, Homo sapiens
catgcaccacacctt

SEQ ID NO: 1653889 - DNA, 15 bp, Homo sapiens
atgcaccacaccttt

SEQ ID NO: 1653890 - DNA, 15 bp, Homo sapiens
tgcaccacacctttg

SEQ ID NO: 1653891 - DNA, 15 bp, Homo sapiens
gcaccacacctttgc

SEQ ID NO: 1653892 - DNA, 15 bp, Homo sapiens
caccacacctttgca

SEQ ID NO: 1653893 - DNA, 15 bp, Homo sapiens
accacacctttgcat

SEQ ID NO: 1653894 - DNA, 15 bp, Homo sapiens
ccacacctttgcata

SEQ ID NO: 1653895 - DNA, 15 bp, Homo sapiens
cacacctttgcataa

SEQ ID NO: 1653896 - DNA, 15 bp, Homo sapiens
acacctttgcataag

SEQ ID NO: 1653897 - DNA, 15 bp, Homo sapiens
cacctttgcataagt

SEQ ID NO: 1653898 - DNA, 15 bp, Homo sapiens
acctttgcataagtc

SEQ ID NO: 1653899 - DNA, 15 bp, Homo sapiens
cctttgcataagtca

SEQ ID NO: 1653900 - DNA, 15 bp, Homo sapiens
ctttgcataagtcat

SEQ ID NO: 1653901 - DNA, 15 bp, Homo sapiens
tttgcataagtcatt

SEQ ID NO: 1653902 - DNA, 15 bp, Homo sapiens
ttgcataagtcattc

SEQ ID NO: 1653903 - DNA, 15 bp, Homo sapiens
tgcataagtcattca

SEQ ID NO: 1653904 - DNA, 15 bp, Homo sapiens
gcataagtcattcac

SEQ ID NO: 1653905 - DNA, 15 bp, Homo sapiens
cataagtcattcacc

SEQ ID NO: 1653906 - DNA, 15 bp, Homo sapiens
ataagtcattcaccc

SEQ ID NO: 1653907 - DNA, 15 bp, Homo sapiens
taagtcattcaccct

SEQ ID NO: 1653908 - DNA, 15 bp, Homo sapiens
aagtcattcacccta

SEQ ID NO: 1653909 - DNA, 15 bp, Homo sapiens
agtcattcaccctac

SEQ ID NO: 1653910 - DNA, 15 bp, Homo sapiens
gtcattcaccctact

SEQ ID NO: 1653911 - DNA, 15 bp, Homo sapiens
tcattcaccctactt

SEQ ID NO: 1653912 - DNA, 15 bp, Homo sapiens
cattcaccctacttg

SEQ ID NO: 1653913 - DNA, 15 bp, Homo sapiens
attcaccctacttgg

SEQ ID NO: 1653914 - DNA, 15 bp, Homo sapiens
ttcaccctacttgga

SEQ ID NO: 1653915 - DNA, 15 bp, Homo sapiens
tcaccctacttggaa

SEQ ID NO: 1653916 - DNA, 15 bp, Homo sapiens
caccctacttggaaa

SEQ ID NO: 1653917 - DNA, 15 bp, Homo sapiens
accctacttggaaag

SEQ ID NO: 1653918 - DNA, 15 bp, Homo sapiens
ccctacttggaaagc

SEQ ID NO: 1653919 - DNA, 15 bp, Homo sapiens
cctacttggaaagct

SEQ ID NO: 1653920 - DNA, 15 bp, Homo sapiens
ctacttggaaagctt

SEQ ID NO: 1653921 - DNA, 15 bp, Homo sapiens
tacttggaaagcttc

SEQ ID NO: 1653922 - DNA, 15 bp, Homo sapiens
acttggaaagcttcc

SEQ ID NO: 1653923 - DNA, 15 bp, Homo sapiens
cttggaaagcttccc

SEQ ID NO: 1653924 - DNA, 15 bp, Homo sapiens
ttggaaagcttcccc

SEQ ID NO: 1653925 - DNA, 15 bp, Homo sapiens
tggaaagcttcccct

SEQ ID NO: 1653926 - DNA, 15 bp, Homo sapiens
ggaaagcttcccctt

SEQ ID NO: 1653927 - DNA, 15 bp, Homo sapiens
gaaagcttccccttg

SEQ ID NO: 1653928 - DNA, 15 bp, Homo sapiens
aaagcttccccttgc

SEQ ID NO: 1653929 - DNA, 15 bp, Homo sapiens
aagcttccccttgct

SEQ ID NO: 1653930 - DNA, 15 bp, Homo sapiens
agcttccccttgctt

SEQ ID NO: 1653931 - DNA, 15 bp, Homo sapiens
gcttccccttgcttc

SEQ ID NO: 1653932 - DNA, 15 bp, Homo sapiens
cttccccttgcttcc

SEQ ID NO: 1653933 - DNA, 15 bp, Homo sapiens
ttccccttgcttccc

SEQ ID NO: 1653934 - DNA, 15 bp, Homo sapiens
tccccttgcttccca

SEQ ID NO: 1653935 - DNA, 15 bp, Homo sapiens
ccccttgcttcccat

SEQ ID NO: 1653936 - DNA, 15 bp, Homo sapiens
cccttgcttcccata

SEQ ID NO: 1653937 - DNA, 15 bp, Homo sapiens
ccttgcttcccatac

SEQ ID NO: 1653938 - DNA, 15 bp, Homo sapiens
cttgcttcccataca

SEQ ID NO: 1653939 - DNA, 15 bp, Homo sapiens
ttgcttcccatacat

SEQ ID NO: 1653940 - DNA, 15 bp, Homo sapiens
tgcttcccatacatt

SEQ ID NO: 1653941 - DNA, 15 bp, Homo sapiens
gcttcccatacattc

SEQ ID NO: 1653942 - DNA, 15 bp, Homo sapiens
cttcccatacattca

SEQ ID NO: 1653943 - DNA, 15 bp, Homo sapiens
ttcccatacattcaa

SEQ ID NO: 1653944 - DNA, 15 bp, Homo sapiens
tcccatacattcaaa

SEQ ID NO: 1653945 - DNA, 15 bp, Homo sapiens
cccatacattcaaag

SEQ ID NO: 1653946 - DNA, 15 bp, Homo sapiens
ccatacattcaaagg

SEQ ID NO: 1653947 - DNA, 15 bp, Homo sapiens
catacattcaaaggc

SEQ ID NO: 1653948 - DNA, 15 bp, Homo sapiens
atacattcaaaggct

SEQ ID NO: 1653949 - DNA, 15 bp, Homo sapiens
tacattcaaaggcta

SEQ ID NO: 1653950 - DNA, 15 bp, Homo sapiens
acattcaaaggctag

SEQ ID NO: 1653951 - DNA, 15 bp, Homo sapiens
cattcaaaggctagc

SEQ ID NO: 1653952 - DNA, 15 bp, Homo sapiens
attcaaaggctagcc

SEQ ID NO: 1653953 - DNA, 15 bp, Homo sapiens
ttcaaaggctagcca

SEQ ID NO: 1653954 - DNA, 15 bp, Homo sapiens
tcaaaggctagccat

SEQ ID NO: 1653955 - DNA, 15 bp, Homo sapiens
caaaggctagccatc

SEQ ID NO: 1653956 - DNA, 15 bp, Homo sapiens
aaaggctagccatca

SEQ ID NO: 1653957 - DNA, 15 bp, Homo sapiens
aaggctagccatcat

SEQ ID NO: 1653958 - DNA, 15 bp, Homo sapiens
aggctagccatcatt

SEQ ID NO: 1653959 - DNA, 15 bp, Homo sapiens
ggctagccatcattt

SEQ ID NO: 1653960 - DNA, 15 bp, Homo sapiens
gctagccatcattta

SEQ ID NO: 1653961 - DNA, 15 bp, Homo sapiens
ctagccatcatttaa

SEQ ID NO: 1653962 - DNA, 15 bp, Homo sapiens
tagccatcatttaag

SEQ ID NO: 1653963 - DNA, 15 bp, Homo sapiens
agccatcatttaagg

SEQ ID NO: 1653964 - DNA, 15 bp, Homo sapiens
gccatcatttaaggc

SEQ ID NO: 1653965 - DNA, 15 bp, Homo sapiens
ccatcatttaaggca

SEQ ID NO: 1653966 - DNA, 15 bp, Homo sapiens
catcatttaaggcat

SEQ ID NO: 1653967 - DNA, 15 bp, Homo sapiens
atcatttaaggcata

SEQ ID NO: 1653968 - DNA, 15 bp, Homo sapiens
tcatttaaggcatag

SEQ ID NO: 1653969 - DNA, 15 bp, Homo sapiens
catttaaggcataga

SEQ ID NO: 1653970 - DNA, 15 bp, Homo sapiens
atttaaggcatagac

SEQ ID NO: 1653971 - DNA, 15 bp, Homo sapiens
tttaaggcatagacc

SEQ ID NO: 1653972 - DNA, 15 bp, Homo sapiens
ttaaggcatagacca

SEQ ID NO: 1653973 - DNA, 15 bp, Homo sapiens
taaggcatagaccat

SEQ ID NO: 1653974 - DNA, 15 bp, Homo sapiens
aaggcatagaccatg

SEQ ID NO: 1653975 - DNA, 15 bp, Homo sapiens
aggcatagaccatgt

SEQ ID NO: 1653976 - DNA, 15 bp, Homo sapiens
ggcatagaccatgtt

SEQ ID NO: 1653977 - DNA, 15 bp, Homo sapiens
gcatagaccatgttt

SEQ ID NO: 1653978 - DNA, 15 bp, Homo sapiens
catagaccatgtttc

SEQ ID NO: 1653979 - DNA, 15 bp, Homo sapiens
atagaccatgtttca

SEQ ID NO: 1653980 - DNA, 15 bp, Homo sapiens
tagaccatgtttcaa

SEQ ID NO: 1653981 - DNA, 15 bp, Homo sapiens
agaccatgtttcaat

SEQ ID NO: 1653982 - DNA, 15 bp, Homo sapiens
gaccatgtttcaatt

SEQ ID NO: 1653983 - DNA, 15 bp, Homo sapiens
accatgtttcaattc

SEQ ID NO: 1653984 - DNA, 15 bp, Homo sapiens
ccatgtttcaattct

SEQ ID NO: 1653985 - DNA, 15 bp, Homo sapiens
catgtttcaattctg

SEQ ID NO: 1653986 - DNA, 15 bp, Homo sapiens
atgtttcaattctgt

SEQ ID NO: 1653987 - DNA, 15 bp, Homo sapiens
tgtttcaattctgta

SEQ ID NO: 1653988 - DNA, 15 bp, Homo sapiens
gtttcaattctgtat

SEQ ID NO: 1653989 - DNA, 15 bp, Homo sapiens
tttcaattctgtatt

SEQ ID NO: 1653990 - DNA, 15 bp, Homo sapiens
ttcaattctgtattt

SEQ ID NO: 1653991 - DNA, 15 bp, Homo sapiens
tcaattctgtatttc

SEQ ID NO: 1653992 - DNA, 15 bp, Homo sapiens
caattctgtatttct

SEQ ID NO: 1653993 - DNA, 15 bp, Homo sapiens
aattctgtatttcta

SEQ ID NO: 1653994 - DNA, 15 bp, Homo sapiens
attctgtatttctag

SEQ ID NO: 1653995 - DNA, 15 bp, Homo sapiens
ttctgtatttctagg

SEQ ID NO: 1653996 - DNA, 15 bp, Homo sapiens
tctgtatttctaggc

SEQ ID NO: 1653997 - DNA, 15 bp, Homo sapiens
ctgtatttctaggct

SEQ ID NO: 1653998 - DNA, 15 bp, Homo sapiens
tgtatttctaggctc

SEQ ID NO: 1653999 - DNA, 15 bp, Homo sapiens
gtatttctaggctcc

SEQ ID NO: 1654000 - DNA, 15 bp, Homo sapiens
tatttctaggctcct

SEQ ID NO: 1654001 - DNA, 15 bp, Homo sapiens
atttctaggctcctc

SEQ ID NO: 1654002 - DNA, 15 bp, Homo sapiens
tttctaggctcctcc

SEQ ID NO: 1654003 - DNA, 15 bp, Homo sapiens
ttctaggctcctcca

SEQ ID NO: 1654004 - DNA, 15 bp, Homo sapiens
tctaggctcctccaa

SEQ ID NO: 1654005 - DNA, 15 bp, Homo sapiens
ctaggctcctccaaa

SEQ ID NO: 1654006 - DNA, 15 bp, Homo sapiens
taggctcctccaaaa

SEQ ID NO: 1654007 - DNA, 15 bp, Homo sapiens
aggctcctccaaaat

SEQ ID NO: 1654008 - DNA, 15 bp, Homo sapiens
ggctcctccaaaatc

SEQ ID NO: 1654009 - DNA, 15 bp, Homo sapiens
gctcctccaaaatca

SEQ ID NO: 1654010 - DNA, 15 bp, Homo sapiens
ctcctccaaaatcaa

SEQ ID NO: 1654011 - DNA, 15 bp, Homo sapiens
tcctccaaaatcaat

SEQ ID NO: 1654012 - DNA, 15 bp, Homo sapiens
cctccaaaatcaatg

SEQ ID NO: 1654013 - DNA, 15 bp, Homo sapiens
ctccaaaatcaatga

SEQ ID NO: 1654014 - DNA, 15 bp, Homo sapiens
tccaaaatcaatgac

SEQ ID NO: 1654015 - DNA, 15 bp, Homo sapiens
ccaaaatcaatgact

SEQ ID NO: 1654016 - DNA, 15 bp, Homo sapiens
caaaatcaatgactc

SEQ ID NO: 1654017 - DNA, 15 bp, Homo sapiens
aatcaatgactcttt

SEQ ID NO: 1654018 - DNA, 15 bp, Homo sapiens
atcaatgactctttc

SEQ ID NO: 1654019 - DNA, 15 bp, Homo sapiens
tcaatgactctttct

SEQ ID NO: 1654020 - DNA, 15 bp, Homo sapiens
caatgactctttctc

SEQ ID NO: 1654021 - DNA, 15 bp, Homo sapiens
aatgactctttctct

SEQ ID NO: 1654022 - DNA, 15 bp, Homo sapiens
atgactctttctctc

SEQ ID NO: 1654023 - DNA, 15 bp, Homo sapiens
tgactctttctctct

SEQ ID NO: 1654024 - DNA, 15 bp, Homo sapiens
gactctttctctctg

SEQ ID NO: 1654025 - DNA, 15 bp, Homo sapiens
actctttctctctgt

SEQ ID NO: 1654026 - DNA, 15 bp, Homo sapiens
ctctttctctctgtt

SEQ ID NO: 1654027 - DNA, 15 bp, Homo sapiens
tctttctctctgttg

SEQ ID NO: 1654028 - DNA, 15 bp, Homo sapiens
ctttctctctgttga

SEQ ID NO: 1654029 - DNA, 15 bp, Homo sapiens
tttctctctgttgaa

SEQ ID NO: 1654030 - DNA, 15 bp, Homo sapiens
ttctctctgttgaac

SEQ ID NO: 1654031 - DNA, 15 bp, Homo sapiens
tctctctgttgaact

SEQ ID NO: 1654032 - DNA, 15 bp, Homo sapiens
ctctctgttgaactc

SEQ ID NO: 1654033 - DNA, 15 bp, Homo sapiens
tctctgttgaactcc

SEQ ID NO: 1654034 - DNA, 15 bp, Homo sapiens
ctctgttgaactcct

SEQ ID NO: 1654035 - DNA, 15 bp, Homo sapiens
tctgttgaactcctg

SEQ ID NO: 1654036 - DNA, 15 bp, Homo sapiens
ctgttgaactcctgg

SEQ ID NO: 1654037 - DNA, 15 bp, Homo sapiens
tgttgaactcctgga

SEQ ID NO: 1654038 - DNA, 15 bp, Homo sapiens
gttgaactcctggac

SEQ ID NO: 1654039 - DNA, 15 bp, Homo sapiens
ttgaactcctggacc

SEQ ID NO: 1654040 - DNA, 15 bp, Homo sapiens
tgaactcctggaccc

SEQ ID NO: 1654041 - DNA, 15 bp, Homo sapiens
gaactcctggaccca

SEQ ID NO: 1654042 - DNA, 15 bp, Homo sapiens
aactcctggacccaa

SEQ ID NO: 1654043 - DNA, 15 bp, Homo sapiens
actcctggacccaac

SEQ ID NO: 1654044 - DNA, 15 bp, Homo sapiens
ctcctggacccaacc

SEQ ID NO: 1654045 - DNA, 15 bp, Homo sapiens
tcctggacccaacct

SEQ ID NO: 1654046 - DNA, 15 bp, Homo sapiens
cctggacccaacctt

SEQ ID NO: 1654047 - DNA, 15 bp, Homo sapiens
ctggacccaacctta

SEQ ID NO: 1654048 - DNA, 15 bp, Homo sapiens
tggacccaaccttag

SEQ ID NO: 1654049 - DNA, 15 bp, Homo sapiens
ggacccaaccttagc

SEQ ID NO: 1654050 - DNA, 15 bp, Homo sapiens
gacccaaccttagca

SEQ ID NO: 1654051 - DNA, 15 bp, Homo sapiens
acccaaccttagcaa

SEQ ID NO: 1654052 - DNA, 15 bp, Homo sapiens
cccaaccttagcaat

SEQ ID NO: 1654053 - DNA, 15 bp, Homo sapiens
ccaaccttagcaata

SEQ ID NO: 1654054 - DNA, 15 bp, Homo sapiens
caaccttagcaatat

SEQ ID NO: 1654055 - DNA, 15 bp, Homo sapiens
aaccttagcaatatc

SEQ ID NO: 1654056 - DNA, 15 bp, Homo sapiens
accttagcaatatca

SEQ ID NO: 1654057 - DNA, 15 bp, Homo sapiens
ccttagcaatatcat

SEQ ID NO: 1654058 - DNA, 15 bp, Homo sapiens
cttagcaatatcatt

SEQ ID NO: 1654059 - DNA, 15 bp, Homo sapiens
ttagcaatatcattc

SEQ ID NO: 1654060 - DNA, 15 bp, Homo sapiens
tagcaatatcattca

SEQ ID NO: 1654061 - DNA, 15 bp, Homo sapiens
agcaatatcattcat

SEQ ID NO: 1654062 - DNA, 15 bp, Homo sapiens
gcaatatcattcatc

SEQ ID NO: 1654063 - DNA, 15 bp, Homo sapiens
caatatcattcatca

SEQ ID NO: 1654064 - DNA, 15 bp, Homo sapiens
aatatcattcatcag

SEQ ID NO: 1654065 - DNA, 15 bp, Homo sapiens
atatcattcatcagg

SEQ ID NO: 1654066 - DNA, 15 bp, Homo sapiens
tatcattcatcagga

SEQ ID NO: 1654067 - DNA, 15 bp, Homo sapiens
atcattcatcaggaa

SEQ ID NO: 1654068 - DNA, 15 bp, Homo sapiens
tcattcatcaggaat

SEQ ID NO: 1654069 - DNA, 15 bp, Homo sapiens
cattcatcaggaatc

SEQ ID NO: 1654070 - DNA, 15 bp, Homo sapiens
attcatcaggaatct

SEQ ID NO: 1654071 - DNA, 15 bp, Homo sapiens
ttcatcaggaatcta

SEQ ID NO: 1654072 - DNA, 15 bp, Homo sapiens
tcatcaggaatctaa

SEQ ID NO: 1654073 - DNA, 15 bp, Homo sapiens
catcaggaatctaat

SEQ ID NO: 1654074 - DNA, 15 bp, Homo sapiens
atcaggaatctaatt

SEQ ID NO: 1654075 - DNA, 15 bp, Homo sapiens
tcaggaatctaattc

SEQ ID NO: 1654076 - DNA, 15 bp, Homo sapiens
caggaatctaattct

SEQ ID NO: 1654077 - DNA, 15 bp, Homo sapiens
aggaatctaattctc

SEQ ID NO: 1654078 - DNA, 15 bp, Homo sapiens
ggaatctaattctct

SEQ ID NO: 1654079 - DNA, 15 bp, Homo sapiens
gaatctaattctcta

SEQ ID NO: 1654080 - DNA, 15 bp, Homo sapiens
aatctaattctctat

SEQ ID NO: 1654081 - DNA, 15 bp, Homo sapiens
atctaattctctatg

SEQ ID NO: 1654082 - DNA, 15 bp, Homo sapiens
tctaattctctatga

SEQ ID NO: 1654083 - DNA, 15 bp, Homo sapiens
ctaattctctatgaa

SEQ ID NO: 1654084 - DNA, 15 bp, Homo sapiens
taattctctatgaat

SEQ ID NO: 1654085 - DNA, 15 bp, Homo sapiens
aattctctatgaatc

SEQ ID NO: 1654086 - DNA, 15 bp, Homo sapiens
attctctatgaatct

SEQ ID NO: 1654087 - DNA, 15 bp, Homo sapiens
ttctctatgaatcta

SEQ ID NO: 1654088 - DNA, 15 bp, Homo sapiens
tctctatgaatctat

SEQ ID NO: 1654089 - DNA, 15 bp, Homo sapiens
ctctatgaatctatc

SEQ ID NO: 1654090 - DNA, 15 bp, Homo sapiens
tctatgaatctatca

SEQ ID NO: 1654091 - DNA, 15 bp, Homo sapiens
ctatgaatctatcat

SEQ ID NO: 1654092 - DNA, 15 bp, Homo sapiens
tatgaatctatcatt

SEQ ID NO: 1654093 - DNA, 15 bp, Homo sapiens
atgaatctatcatta

SEQ ID NO: 1654094 - DNA, 15 bp, Homo sapiens
tgaatctatcattag

SEQ ID NO: 1654095 - DNA, 15 bp, Homo sapiens
gaatctatcattagt

SEQ ID NO: 1654096 - DNA, 15 bp, Homo sapiens
aatctatcattagta

SEQ ID NO: 1654097 - DNA, 15 bp, Homo sapiens
atctatcattagtat

SEQ ID NO: 1654098 - DNA, 15 bp, Homo sapiens
tctatcattagtata

SEQ ID NO: 1654099 - DNA, 15 bp, Homo sapiens
ctatcattagtatat

SEQ ID NO: 1654100 - DNA, 15 bp, Homo sapiens
tatcattagtatatt

SEQ ID NO: 1654101 - DNA, 15 bp, Homo sapiens
atcattagtatattt

SEQ ID NO: 1654102 - DNA, 15 bp, Homo sapiens
tcattagtatatttt

SEQ ID NO: 1654103 - DNA, 15 bp, Homo sapiens
cattagtatattttt

SEQ ID NO: 1654104 - DNA, 15 bp, Homo sapiens
attagtatatttttc

SEQ ID NO: 1654105 - DNA, 15 bp, Homo sapiens
ttagtatatttttcc

SEQ ID NO: 1654106 - DNA, 15 bp, Homo sapiens
tagtatatttttcct

SEQ ID NO: 1654107 - DNA, 15 bp, Homo sapiens
agtatatttttcctc

SEQ ID NO: 1654108 - DNA, 15 bp, Homo sapiens
gtatatttttcctct

SEQ ID NO: 1654109 - DNA, 15 bp, Homo sapiens
tatatttttcctcta

SEQ ID NO: 1654110 - DNA, 15 bp, Homo sapiens
atatttttcctctat

SEQ ID NO: 1654111 - DNA, 15 bp, Homo sapiens
tatttttcctctatg

SEQ ID NO: 1654112 - DNA, 15 bp, Homo sapiens
atttttcctctatgt

SEQ ID NO: 1654113 - DNA, 15 bp, Homo sapiens
tttttcctctatgta

SEQ ID NO: 1654114 - DNA, 15 bp, Homo sapiens
ttttcctctatgtaa

SEQ ID NO: 1654115 - DNA, 15 bp, Homo sapiens
tttcctctatgtaat

SEQ ID NO: 1654116 - DNA, 15 bp, Homo sapiens
ttcctctatgtaatg

SEQ ID NO: 1654117 - DNA, 15 bp, Homo sapiens
tcctctatgtaatgg

SEQ ID NO: 1654118 - DNA, 15 bp, Homo sapiens
cctctatgtaatggt

SEQ ID NO: 1654119 - DNA, 15 bp, Homo sapiens
ctctatgtaatggtt

SEQ ID NO: 1654120 - DNA, 15 bp, Homo sapiens
tctatgtaatggttt

SEQ ID NO: 1654121 - DNA, 15 bp, Homo sapiens
ctatgtaatggtttt

SEQ ID NO: 1654122 - DNA, 15 bp, Homo sapiens
tatgtaatggttttt

SEQ ID NO: 1654123 - DNA, 15 bp, Homo sapiens
atgtaatggtttttt

SEQ ID NO: 1654124 - DNA, 15 bp, Homo sapiens
tgtaatggtttttta

SEQ ID NO: 1654125 - DNA, 15 bp, Homo sapiens
gtaatggttttttac

SEQ ID NO: 1654126 - DNA, 15 bp, Homo sapiens
taatggttttttacc

SEQ ID NO: 1654127 - DNA, 15 bp, Homo sapiens
aatggttttttaccc

SEQ ID NO: 1654128 - DNA, 15 bp, Homo sapiens
atggttttttaccca

SEQ ID NO: 1654129 - DNA, 15 bp, Homo sapiens
tggttttttacccat

SEQ ID NO: 1654130 - DNA, 15 bp, Homo sapiens
ggttttttacccatc

SEQ ID NO: 1654131 - DNA, 15 bp, Homo sapiens
gttttttacccatca

SEQ ID NO: 1654132 - DNA, 15 bp, Homo sapiens
ttttttacccatcat

SEQ ID NO: 1654133 - DNA, 15 bp, Homo sapiens
tttttacccatcata

SEQ ID NO: 1654134 - DNA, 15 bp, Homo sapiens
ttttacccatcatat

SEQ ID NO: 1654135 - DNA, 15 bp, Homo sapiens
tttacccatcatatt

SEQ ID NO: 1654136 - DNA, 15 bp, Homo sapiens
ttacccatcatattg

SEQ ID NO: 1654137 - DNA, 15 bp, Homo sapiens
tacccatcatattgt

SEQ ID NO: 1654138 - DNA, 15 bp, Homo sapiens
acccatcatattgta

SEQ ID NO: 1654139 - DNA, 15 bp, Homo sapiens
cccatcatattgtaa

SEQ ID NO: 1654140 - DNA, 15 bp, Homo sapiens
ccatcatattgtaaa

SEQ ID NO: 1654141 - DNA, 15 bp, Homo sapiens
catcatattgtaaat

SEQ ID NO: 1654142 - DNA, 15 bp, Homo sapiens
atcatattgtaaatt

SEQ ID NO: 1654143 - DNA, 15 bp, Homo sapiens
tcatattgtaaattt

SEQ ID NO: 1654144 - DNA, 15 bp, Homo sapiens
catattgtaaatttt

SEQ ID NO: 1654145 - DNA, 15 bp, Homo sapiens
atattgtaaattttc

SEQ ID NO: 1654146 - DNA, 15 bp, Homo sapiens
tattgtaaattttct

SEQ ID NO: 1654147 - DNA, 15 bp, Homo sapiens
attgtaaattttctg

SEQ ID NO: 1654148 - DNA, 15 bp, Homo sapiens
ttgtaaattttctga

SEQ ID NO: 1654149 - DNA, 15 bp, Homo sapiens
tgtaaattttctgaa

SEQ ID NO: 1654150 - DNA, 15 bp, Homo sapiens
gtaaattttctgaag

SEQ ID NO: 1654151 - DNA, 15 bp, Homo sapiens
taaattttctgaagg

SEQ ID NO: 1654152 - DNA, 15 bp, Homo sapiens
aaattttctgaaggt

SEQ ID NO: 1654153 - DNA, 15 bp, Homo sapiens
aattttctgaaggta

SEQ ID NO: 1654154 - DNA, 15 bp, Homo sapiens
attttctgaaggtag

SEQ ID NO: 1654155 - DNA, 15 bp, Homo sapiens
ttttctgaaggtaga

SEQ ID NO: 1654156 - DNA, 15 bp, Homo sapiens
tttctgaaggtagag

SEQ ID NO: 1654157 - DNA, 15 bp, Homo sapiens
ttctgaaggtagaga

SEQ ID NO: 1654158 - DNA, 15 bp, Homo sapiens
tctgaaggtagagat

SEQ ID NO: 1654159 - DNA, 15 bp, Homo sapiens
ctgaaggtagagatt

SEQ ID NO: 1654160 - DNA, 15 bp, Homo sapiens
tgaaggtagagatta

SEQ ID NO: 1654161 - DNA, 15 bp, Homo sapiens
gaaggtagagattag

SEQ ID NO: 1654162 - DNA, 15 bp, Homo sapiens
aaggtagagattaga

SEQ ID NO: 1654163 - DNA, 15 bp, Homo sapiens
aggtagagattagac

SEQ ID NO: 1654164 - DNA, 15 bp, Homo sapiens
ggtagagattagact

SEQ ID NO: 1654165 - DNA, 15 bp, Homo sapiens
gtagagattagactt

SEQ ID NO: 1654166 - DNA, 15 bp, Homo sapiens
tagagattagacttt

SEQ ID NO: 1654167 - DNA, 15 bp, Homo sapiens
agagattagactttt

SEQ ID NO: 1654168 - DNA, 15 bp, Homo sapiens
gagattagactttta

SEQ ID NO: 1654169 - DNA, 15 bp, Homo sapiens
agattagacttttat

SEQ ID NO: 1654170 - DNA, 15 bp, Homo sapiens
gattagacttttatc

SEQ ID NO: 1654171 - DNA, 15 bp, Homo sapiens
attagacttttatct

SEQ ID NO: 1654172 - DNA, 15 bp, Homo sapiens
ttagacttttatctc

SEQ ID NO: 1654173 - DNA, 15 bp, Homo sapiens
tagacttttatctca

SEQ ID NO: 1654174 - DNA, 15 bp, Homo sapiens
agacttttatctcac

SEQ ID NO: 1654175 - DNA, 15 bp, Homo sapiens
gacttttatctcaca

SEQ ID NO: 1654176 - DNA, 15 bp, Homo sapiens
acttttatctcacag

SEQ ID NO: 1654177 - DNA, 15 bp, Homo sapiens
cttttatctcacagg

SEQ ID NO: 1654178 - DNA, 15 bp, Homo sapiens
ttttatctcacaggc

SEQ ID NO: 1654179 - DNA, 15 bp, Homo sapiens
tttatctcacaggca

SEQ ID NO: 1654180 - DNA, 15 bp, Homo sapiens
ttatctcacaggcat

SEQ ID NO: 1654181 - DNA, 15 bp, Homo sapiens
tatctcacaggcatt

SEQ ID NO: 1654182 - DNA, 15 bp, Homo sapiens
atctcacaggcattt

SEQ ID NO: 1654183 - DNA, 15 bp, Homo sapiens
tctcacaggcattta

SEQ ID NO: 1654184 - DNA, 15 bp, Homo sapiens
ctcacaggcatttac

SEQ ID NO: 1654185 - DNA, 15 bp, Homo sapiens
tcacaggcatttact

SEQ ID NO: 1654186 - DNA, 15 bp, Homo sapiens
cacaggcatttactg

SEQ ID NO: 1654187 - DNA, 15 bp, Homo sapiens
acaggcatttactga

SEQ ID NO: 1654188 - DNA, 15 bp, Homo sapiens
caggcatttactgag

SEQ ID NO: 1654189 - DNA, 15 bp, Homo sapiens
aggcatttactgagc

SEQ ID NO: 1654190 - DNA, 15 bp, Homo sapiens
ggcatttactgagca

SEQ ID NO: 1654191 - DNA, 15 bp, Homo sapiens
gcatttactgagcac

SEQ ID NO: 1654192 - DNA, 15 bp, Homo sapiens
catttactgagcact

SEQ ID NO: 1654193 - DNA, 15 bp, Homo sapiens
atttactgagcacta

SEQ ID NO: 1654194 - DNA, 15 bp, Homo sapiens
tttactgagcactaa

SEQ ID NO: 1654195 - DNA, 15 bp, Homo sapiens
ttactgagcactaat

SEQ ID NO: 1654196 - DNA, 15 bp, Homo sapiens
tactgagcactaatg

SEQ ID NO: 1654197 - DNA, 15 bp, Homo sapiens
actgagcactaatgt

SEQ ID NO: 1654198 - DNA, 15 bp, Homo sapiens
ctgagcactaatgtg

SEQ ID NO: 1654199 - DNA, 15 bp, Homo sapiens
tgagcactaatgtgt

SEQ ID NO: 1654200 - DNA, 15 bp, Homo sapiens
gagcactaatgtgtg

SEQ ID NO: 1654201 - DNA, 15 bp, Homo sapiens
agcactaatgtgtga

SEQ ID NO: 1654202 - DNA, 15 bp, Homo sapiens
gcactaatgtgtgag

SEQ ID NO: 1654203 - DNA, 15 bp, Homo sapiens
cactaatgtgtgaga

SEQ ID NO: 1654204 - DNA, 15 bp, Homo sapiens
actaatgtgtgagag

SEQ ID NO: 1654205 - DNA, 15 bp, Homo sapiens
ctaatgtgtgagaga

SEQ ID NO: 1654206 - DNA, 15 bp, Homo sapiens
taatgtgtgagagat

SEQ ID NO: 1654207 - DNA, 15 bp, Homo sapiens
aatgtgtgagagatg

SEQ ID NO: 1654208 - DNA, 15 bp, Homo sapiens
atgtgtgagagatgt

SEQ ID NO: 1654209 - DNA, 15 bp, Homo sapiens
tgtgtgagagatgtt

SEQ ID NO: 1654210 - DNA, 15 bp, Homo sapiens
gtgtgagagatgtta

SEQ ID NO: 1654211 - DNA, 15 bp, Homo sapiens
tgtgagagatgttat

SEQ ID NO: 1654212 - DNA, 15 bp, Homo sapiens
gtgagagatgttatt

SEQ ID NO: 1654213 - DNA, 15 bp, Homo sapiens
tgagagatgttattc

SEQ ID NO: 1654214 - DNA, 15 bp, Homo sapiens
gagagatgttattct

SEQ ID NO: 1654215 - DNA, 15 bp, Homo sapiens
agagatgttattctg

SEQ ID NO: 1654216 - DNA, 15 bp, Homo sapiens
gagatgttattctgg

SEQ ID NO: 1654217 - DNA, 15 bp, Homo sapiens
agatgttattctgga

SEQ ID NO: 1654218 - DNA, 15 bp, Homo sapiens
gatgttattctggaa

SEQ ID NO: 1654219 - DNA, 15 bp, Homo sapiens
atgttattctggaaa

SEQ ID NO: 1654220 - DNA, 15 bp, Homo sapiens
tgttattctggaaat

SEQ ID NO: 1654221 - DNA, 15 bp, Homo sapiens
gttattctggaaata

SEQ ID NO: 1654222 - DNA, 15 bp, Homo sapiens
ttattctggaaatat

SEQ ID NO: 1654223 - DNA, 15 bp, Homo sapiens
tattctggaaatata

SEQ ID NO: 1654224 - DNA, 15 bp, Homo sapiens
attctggaaatataa

SEQ ID NO: 1654225 - DNA, 15 bp, Homo sapiens
ttctggaaatataat

SEQ ID NO: 1654226 - DNA, 15 bp, Homo sapiens
tctggaaatataatt

SEQ ID NO: 1654227 - DNA, 15 bp, Homo sapiens
ctggaaatataattg

SEQ ID NO: 1654228 - DNA, 15 bp, Homo sapiens
tggaaatataattgt

SEQ ID NO: 1654229 - DNA, 15 bp, Homo sapiens
ggaaatataattgtg

SEQ ID NO: 1654230 - DNA, 15 bp, Homo sapiens
gaaatataattgtga

SEQ ID NO: 1654231 - DNA, 15 bp, Homo sapiens
aaatataattgtgag

SEQ ID NO: 1654232 - DNA, 15 bp, Homo sapiens
aatataattgtgagc

SEQ ID NO: 1654233 - DNA, 15 bp, Homo sapiens
atataattgtgagca

SEQ ID NO: 1654234 - DNA, 15 bp, Homo sapiens
tataattgtgagcaa

SEQ ID NO: 1654235 - DNA, 15 bp, Homo sapiens
ataattgtgagcaaa

SEQ ID NO: 1654236 - DNA, 15 bp, Homo sapiens
taattgtgagcaaaa

SEQ ID NO: 1654237 - DNA, 15 bp, Homo sapiens
aattgtgagcaaaac

SEQ ID NO: 1654238 - DNA, 15 bp, Homo sapiens
attgtgagcaaaaca

SEQ ID NO: 1654239 - DNA, 15 bp, Homo sapiens
ttgtgagcaaaacag

SEQ ID NO: 1654240 - DNA, 15 bp, Homo sapiens
tgtgagcaaaacaga

SEQ ID NO: 1654241 - DNA, 15 bp, Homo sapiens
gtgagcaaaacagat

SEQ ID NO: 1654242 - DNA, 15 bp, Homo sapiens
tgagcaaaacagatt

SEQ ID NO: 1654243 - DNA, 15 bp, Homo sapiens
gagcaaaacagattt

SEQ ID NO: 1654244 - DNA, 15 bp, Homo sapiens
agcaaaacagattta

SEQ ID NO: 1654245 - DNA, 15 bp, Homo sapiens
gcaaaacagatttac

SEQ ID NO: 1654246 - DNA, 15 bp, Homo sapiens
caaaacagatttaca

SEQ ID NO: 1654247 - DNA, 15 bp, Homo sapiens
aaaacagatttacat

SEQ ID NO: 1654248 - DNA, 15 bp, Homo sapiens
aaacagatttacatt

SEQ ID NO: 1654249 - DNA, 15 bp, Homo sapiens
aacagatttacatta

SEQ ID NO: 1654250 - DNA, 15 bp, Homo sapiens
acagatttacattat

SEQ ID NO: 1654251 - DNA, 15 bp, Homo sapiens
cagatttacattatg

SEQ ID NO: 1654252 - DNA, 15 bp, Homo sapiens
agatttacattatgg

SEQ ID NO: 1654253 - DNA, 15 bp, Homo sapiens
gatttacattatggt

SEQ ID NO: 1654254 - DNA, 15 bp, Homo sapiens
atttacattatggta

SEQ ID NO: 1654255 - DNA, 15 bp, Homo sapiens
tttacattatggtaa

SEQ ID NO: 1654256 - DNA, 15 bp, Homo sapiens
ttacattatggtaat

SEQ ID NO: 1654257 - DNA, 15 bp, Homo sapiens
tacattatggtaatg

SEQ ID NO: 1654258 - DNA, 15 bp, Homo sapiens
acattatggtaatga

SEQ ID NO: 1654259 - DNA, 15 bp, Homo sapiens
cattatggtaatgag

SEQ ID NO: 1654260 - DNA, 15 bp, Homo sapiens
attatggtaatgagg

SEQ ID NO: 1654261 - DNA, 15 bp, Homo sapiens
ttatggtaatgagga

SEQ ID NO: 1654262 - DNA, 15 bp, Homo sapiens
tatggtaatgaggag

SEQ ID NO: 1654263 - DNA, 15 bp, Homo sapiens
atggtaatgaggaga

SEQ ID NO: 1654264 - DNA, 15 bp, Homo sapiens
tggtaatgaggagat

SEQ ID NO: 1654265 - DNA, 15 bp, Homo sapiens
ggtaatgaggagatg

SEQ ID NO: 1654266 - DNA, 15 bp, Homo sapiens
gtaatgaggagatgg

SEQ ID NO: 1654267 - DNA, 15 bp, Homo sapiens
taatgaggagatgga

SEQ ID NO: 1654268 - DNA, 15 bp, Homo sapiens
aatgaggagatggac

SEQ ID NO: 1654269 - DNA, 15 bp, Homo sapiens
atgaggagatggaca

SEQ ID NO: 1654270 - DNA, 15 bp, Homo sapiens
tgaggagatggacaa

SEQ ID NO: 1654271 - DNA, 15 bp, Homo sapiens
gaggagatggacaat

SEQ ID NO: 1654272 - DNA, 15 bp, Homo sapiens
aggagatggacaata

SEQ ID NO: 1654273 - DNA, 15 bp, Homo sapiens
ggagatggacaataa

SEQ ID NO: 1654274 - DNA, 15 bp, Homo sapiens
gagatggacaataaa

SEQ ID NO: 1654275 - DNA, 15 bp, Homo sapiens
agatggacaataaac

SEQ ID NO: 1654276 - DNA, 15 bp, Homo sapiens
gatggacaataaaca

SEQ ID NO: 1654277 - DNA, 15 bp, Homo sapiens
atggacaataaacaa

SEQ ID NO: 1654278 - DNA, 15 bp, Homo sapiens
tggacaataaacaaa

SEQ ID NO: 1654279 - DNA, 15 bp, Homo sapiens
ggacaataaacaaat

SEQ ID NO: 1654280 - DNA, 15 bp, Homo sapiens
acaataaacaaatac

SEQ ID NO: 1654281 - DNA, 15 bp, Homo sapiens
caataaacaaataca

SEQ ID NO: 1654282 - DNA, 15 bp, Homo sapiens
aataaacaaatacat

SEQ ID NO: 1654283 - DNA, 15 bp, Homo sapiens
ataaacaaatacatg

SEQ ID NO: 1654284 - DNA, 15 bp, Homo sapiens
taaacaaatacatga

SEQ ID NO: 1654285 - DNA, 15 bp, Homo sapiens
aaacaaatacatgaa

SEQ ID NO: 1654286 - DNA, 15 bp, Homo sapiens
aacaaatacatgaac

SEQ ID NO: 1654287 - DNA, 15 bp, Homo sapiens
acaaatacatgaaca

SEQ ID NO: 1654288 - DNA, 15 bp, Homo sapiens
caaatacatgaacaa

SEQ ID NO: 1654289 - DNA, 15 bp, Homo sapiens
aaatacatgaacaag

SEQ ID NO: 1654290 - DNA, 15 bp, Homo sapiens
aatacatgaacaaga

SEQ ID NO: 1654291 - DNA, 15 bp, Homo sapiens
tacatgaacaagatg

SEQ ID NO: 1654292 - DNA, 15 bp, Homo sapiens
acatgaacaagatgc

SEQ ID NO: 1654293 - DNA, 15 bp, Homo sapiens
catgaacaagatgct

SEQ ID NO: 1654294 - DNA, 15 bp, Homo sapiens
atgaacaagatgctt

SEQ ID NO: 1654295 - DNA, 15 bp, Homo sapiens
tgaacaagatgcttg

SEQ ID NO: 1654296 - DNA, 15 bp, Homo sapiens
gaacaagatgcttgc

SEQ ID NO: 1654297 - DNA, 15 bp, Homo sapiens
aacaagatgcttgca

SEQ ID NO: 1654298 - DNA, 15 bp, Homo sapiens
acaagatgcttgcaa

SEQ ID NO: 1654299 - DNA, 15 bp, Homo sapiens
caagatgcttgcaaa

SEQ ID NO: 1654300 - DNA, 15 bp, Homo sapiens
aagatgcttgcaaat

SEQ ID NO: 1654301 - DNA, 15 bp, Homo sapiens
agatgcttgcaaata

SEQ ID NO: 1654302 - DNA, 15 bp, Homo sapiens
gatgcttgcaaatag

SEQ ID NO: 1654303 - DNA, 15 bp, Homo sapiens
atgcttgcaaatagt

SEQ ID NO: 1654304 - DNA, 15 bp, Homo sapiens
tgcttgcaaatagta

SEQ ID NO: 1654305 - DNA, 15 bp, Homo sapiens
gcttgcaaatagtag

SEQ ID NO: 1654306 - DNA, 15 bp, Homo sapiens
cttgcaaatagtaga

SEQ ID NO: 1654307 - DNA, 15 bp, Homo sapiens
ttgcaaatagtagaa

SEQ ID NO: 1654308 - DNA, 15 bp, Homo sapiens
tgcaaatagtagaat

SEQ ID NO: 1654309 - DNA, 15 bp, Homo sapiens
gcaaatagtagaatt

SEQ ID NO: 1654310 - DNA, 15 bp, Homo sapiens
caaatagtagaatta

SEQ ID NO: 1654311 - DNA, 15 bp, Homo sapiens
aaatagtagaattaa

SEQ ID NO: 1654312 - DNA, 15 bp, Homo sapiens
aatagtagaattaaa

SEQ ID NO: 1654313 - DNA, 15 bp, Homo sapiens
atagtagaattaaaa

SEQ ID NO: 1654314 - DNA, 15 bp, Homo sapiens
tagtagaattaaaaa

SEQ ID NO: 1654315 - DNA, 15 bp, Homo sapiens
agtagaattaaaaaa

SEQ ID NO: 1654316 - DNA, 15 bp, Homo sapiens
gtagaattaaaaaac

SEQ ID NO: 1654317 - DNA, 15 bp, Homo sapiens
tagaattaaaaaacc

SEQ ID NO: 1654318 - DNA, 15 bp, Homo sapiens
agaattaaaaaacca

SEQ ID NO: 1654319 - DNA, 15 bp, Homo sapiens
gaattaaaaaaccaa

SEQ ID NO: 1654320 - DNA, 15 bp, Homo sapiens
aattaaaaaaccaag

SEQ ID NO: 1654321 - DNA, 15 bp, Homo sapiens
attaaaaaaccaaga

SEQ ID NO: 1654322 - DNA, 15 bp, Homo sapiens
ttaaaaaaccaagag

SEQ ID NO: 1654323 - DNA, 15 bp, Homo sapiens
taaaaaaccaagagg

SEQ ID NO: 1654324 - DNA, 15 bp, Homo sapiens
aaaaaaccaagaggt

SEQ ID NO: 1654325 - DNA, 15 bp, Homo sapiens
aaaaaccaagaggtc

SEQ ID NO: 1654326 - DNA, 15 bp, Homo sapiens
aaaaccaagaggtcc

SEQ ID NO: 1654327 - DNA, 15 bp, Homo sapiens
aaaccaagaggtcca

SEQ ID NO: 1654328 - DNA, 15 bp, Homo sapiens
aaccaagaggtccat

SEQ ID NO: 1654329 - DNA, 15 bp, Homo sapiens
accaagaggtccata

SEQ ID NO: 1654330 - DNA, 15 bp, Homo sapiens
ccaagaggtccatat

SEQ ID NO: 1654331 - DNA, 15 bp, Homo sapiens
caagaggtccatatg

SEQ ID NO: 1654332 - DNA, 15 bp, Homo sapiens
aagaggtccatatgt

SEQ ID NO: 1654333 - DNA, 15 bp, Homo sapiens
agaggtccatatgtt

SEQ ID NO: 1654334 - DNA, 15 bp, Homo sapiens
gaggtccatatgtta

SEQ ID NO: 1654335 - DNA, 15 bp, Homo sapiens
aggtccatatgttaa

SEQ ID NO: 1654336 - DNA, 15 bp, Homo sapiens
ggtccatatgttaaa

SEQ ID NO: 1654337 - DNA, 15 bp, Homo sapiens
gtccatatgttaaaa

SEQ ID NO: 1654338 - DNA, 15 bp, Homo sapiens
tccatatgttaaaaa

SEQ ID NO: 1654339 - DNA, 15 bp, Homo sapiens
ccatatgttaaaaac

SEQ ID NO: 1654340 - DNA, 15 bp, Homo sapiens
catatgttaaaaaca

SEQ ID NO: 1654341 - DNA, 15 bp, Homo sapiens
atatgttaaaaacat

SEQ ID NO: 1654342 - DNA, 15 bp, Homo sapiens
tatgttaaaaacatg

SEQ ID NO: 1654343 - DNA, 15 bp, Homo sapiens
atgttaaaaacatgc

SEQ ID NO: 1654344 - DNA, 15 bp, Homo sapiens
tgttaaaaacatgca

SEQ ID NO: 1654345 - DNA, 15 bp, Homo sapiens
gttaaaaacatgcat

SEQ ID NO: 1654346 - DNA, 15 bp, Homo sapiens
ttaaaaacatgcatt

SEQ ID NO: 1654347 - DNA, 15 bp, Homo sapiens
taaaaacatgcattg

SEQ ID NO: 1654348 - DNA, 15 bp, Homo sapiens
aaaaacatgcattga

SEQ ID NO: 1654349 - DNA, 15 bp, Homo sapiens
aaaacatgcattgaa

SEQ ID NO: 1654350 - DNA, 15 bp, Homo sapiens
aaacatgcattgaat

SEQ ID NO: 1654351 - DNA, 15 bp, Homo sapiens
aacatgcattgaatc

SEQ ID NO: 1654352 - DNA, 15 bp, Homo sapiens
acatgcattgaatca

SEQ ID NO: 1654353 - DNA, 15 bp, Homo sapiens
catgcattgaatcac

SEQ ID NO: 1654354 - DNA, 15 bp, Homo sapiens
atgcattgaatcact

SEQ ID NO: 1654355 - DNA, 15 bp, Homo sapiens
tgcattgaatcacta

SEQ ID NO: 1654356 - DNA, 15 bp, Homo sapiens
gcattgaatcactat

SEQ ID NO: 1654357 - DNA, 15 bp, Homo sapiens
cattgaatcactatt

SEQ ID NO: 1654358 - DNA, 15 bp, Homo sapiens
attgaatcactatta

SEQ ID NO: 1654359 - DNA, 15 bp, Homo sapiens
ttgaatcactattac

SEQ ID NO: 1654360 - DNA, 15 bp, Homo sapiens
tgaatcactattact

SEQ ID NO: 1654361 - DNA, 15 bp, Homo sapiens
gaatcactattacta

SEQ ID NO: 1654362 - DNA, 15 bp, Homo sapiens
aatcactattactaa

SEQ ID NO: 1654363 - DNA, 15 bp, Homo sapiens
atcactattactaat

SEQ ID NO: 1654364 - DNA, 15 bp, Homo sapiens
tcactattactaatt

SEQ ID NO: 1654365 - DNA, 15 bp, Homo sapiens
cactattactaattc

SEQ ID NO: 1654366 - DNA, 15 bp, Homo sapiens
actattactaattca

SEQ ID NO: 1654367 - DNA, 15 bp, Homo sapiens
tattactaattcacc

SEQ ID NO: 1654368 - DNA, 15 bp, Homo sapiens
attactaattcacct

SEQ ID NO: 1654369 - DNA, 15 bp, Homo sapiens
ttactaattcacctc

SEQ ID NO: 1654370 - DNA, 15 bp, Homo sapiens
tactaattcacctct

SEQ ID NO: 1654371 - DNA, 15 bp, Homo sapiens
actaattcacctctt

SEQ ID NO: 1654372 - DNA, 15 bp, Homo sapiens
ctaattcacctcttt

SEQ ID NO: 1654373 - DNA, 15 bp, Homo sapiens
taattcacctctttt

SEQ ID NO: 1654374 - DNA, 15 bp, Homo sapiens
aattcacctcttttc

SEQ ID NO: 1654375 - DNA, 15 bp, Homo sapiens
attcacctcttttca

SEQ ID NO: 1654376 - DNA, 15 bp, Homo sapiens
ttcacctcttttcag

SEQ ID NO: 1654377 - DNA, 15 bp, Homo sapiens
tcacctcttttcagg

SEQ ID NO: 1654378 - DNA, 15 bp, Homo sapiens
cacctcttttcaggg

SEQ ID NO: 1654379 - DNA, 15 bp, Homo sapiens
acctcttttcagggg

SEQ ID NO: 1654380 - DNA, 15 bp, Homo sapiens
cctcttttcaggggc

SEQ ID NO: 1654381 - DNA, 15 bp, Homo sapiens
ctcttttcaggggct

SEQ ID NO: 1654382 - DNA, 15 bp, Homo sapiens
tcttttcaggggctg

SEQ ID NO: 1654383 - DNA, 15 bp, Homo sapiens
cttttcaggggctgg

SEQ ID NO: 1654384 - DNA, 15 bp, Homo sapiens
ttttcaggggctggg

SEQ ID NO: 1654385 - DNA, 15 bp, Homo sapiens
tttcaggggctgggc

SEQ ID NO: 1654386 - DNA, 15 bp, Homo sapiens
ttcaggggctgggca

SEQ ID NO: 1654387 - DNA, 15 bp, Homo sapiens
tcaggggctgggcag

SEQ ID NO: 1654388 - DNA, 15 bp, Homo sapiens
caggggctgggcagt

SEQ ID NO: 1654389 - DNA, 15 bp, Homo sapiens
aggggctgggcagtc

SEQ ID NO: 1654390 - DNA, 15 bp, Homo sapiens
ggggctgggcagtct

SEQ ID NO: 1654391 - DNA, 15 bp, Homo sapiens
gggctgggcagtcta

SEQ ID NO: 1654392 - DNA, 15 bp, Homo sapiens
ggctgggcagtctaa

SEQ ID NO: 1654393 - DNA, 15 bp, Homo sapiens
gctgggcagtctaat

SEQ ID NO: 1654394 - DNA, 15 bp, Homo sapiens
ctgggcagtctaatg

SEQ ID NO: 1654395 - DNA, 15 bp, Homo sapiens
tgggcagtctaatgg

SEQ ID NO: 1654396 - DNA, 15 bp, Homo sapiens
gggcagtctaatgga

SEQ ID NO: 1654397 - DNA, 15 bp, Homo sapiens
ggcagtctaatggaa

SEQ ID NO: 1654398 - DNA, 15 bp, Homo sapiens
gcagtctaatggaaa

SEQ ID NO: 1654399 - DNA, 15 bp, Homo sapiens
cagtctaatggaaaa

SEQ ID NO: 1654400 - DNA, 15 bp, Homo sapiens
agtctaatggaaaaa

SEQ ID NO: 1654401 - DNA, 15 bp, Homo sapiens
gtctaatggaaaaac

SEQ ID NO: 1654402 - DNA, 15 bp, Homo sapiens
tctaatggaaaaacc

SEQ ID NO: 1654403 - DNA, 15 bp, Homo sapiens
ctaatggaaaaacca

SEQ ID NO: 1654404 - DNA, 15 bp, Homo sapiens
taatggaaaaaccaa

SEQ ID NO: 1654405 - DNA, 15 bp, Homo sapiens
aatggaaaaaccaaa

SEQ ID NO: 1654406 - DNA, 15 bp, Homo sapiens
atggaaaaaccaaac

SEQ ID NO: 1654407 - DNA, 15 bp, Homo sapiens
tggaaaaaccaaacc

SEQ ID NO: 1654408 - DNA, 15 bp, Homo sapiens
ggaaaaaccaaacct

SEQ ID NO: 1654409 - DNA, 15 bp, Homo sapiens
gaaaaaccaaacctt

SEQ ID NO: 1654410 - DNA, 15 bp, Homo sapiens
aaaaaccaaaccttt

SEQ ID NO: 1654411 - DNA, 15 bp, Homo sapiens
aaaaccaaacctttg

SEQ ID NO: 1654412 - DNA, 15 bp, Homo sapiens
aaaccaaacctttgc

SEQ ID NO: 1654413 - DNA, 15 bp, Homo sapiens
aaccaaacctttgca

SEQ ID NO: 1654414 - DNA, 15 bp, Homo sapiens
accaaacctttgcaa

SEQ ID NO: 1654415 - DNA, 15 bp, Homo sapiens
ccaaacctttgcaaa

SEQ ID NO: 1654416 - DNA, 15 bp, Homo sapiens
caaacctttgcaaaa

SEQ ID NO: 1654417 - DNA, 15 bp, Homo sapiens
aaacctttgcaaaat

SEQ ID NO: 1654418 - DNA, 15 bp, Homo sapiens
aacctttgcaaaatg

SEQ ID NO: 1654419 - DNA, 15 bp, Homo sapiens
acctttgcaaaatga

SEQ ID NO: 1654420 - DNA, 15 bp, Homo sapiens
cctttgcaaaatgaa

SEQ ID NO: 1654421 - DNA, 15 bp, Homo sapiens
ctttgcaaaatgaat

SEQ ID NO: 1654422 - DNA, 15 bp, Homo sapiens
tttgcaaaatgaatt

SEQ ID NO: 1654423 - DNA, 15 bp, Homo sapiens
ttgcaaaatgaattg

SEQ ID NO: 1654424 - DNA, 15 bp, Homo sapiens
tgcaaaatgaattgt

SEQ ID NO: 1654425 - DNA, 15 bp, Homo sapiens
gcaaaatgaattgtt

SEQ ID NO: 1654426 - DNA, 15 bp, Homo sapiens
caaaatgaattgttc

SEQ ID NO: 1654427 - DNA, 15 bp, Homo sapiens
aaaatgaattgttcc

SEQ ID NO: 1654428 - DNA, 15 bp, Homo sapiens
aaatgaattgttccc

SEQ ID NO: 1654429 - DNA, 15 bp, Homo sapiens
aatgaattgttcccc

SEQ ID NO: 1654430 - DNA, 15 bp, Homo sapiens
atgaattgttccccc

SEQ ID NO: 1654431 - DNA, 15 bp, Homo sapiens
tgaattgttccccca

SEQ ID NO: 1654432 - DNA, 15 bp, Homo sapiens
gaattgttcccccat

SEQ ID NO: 1654433 - DNA, 15 bp, Homo sapiens
aattgttcccccatt

SEQ ID NO: 1654434 - DNA, 15 bp, Homo sapiens
attgttcccccattc

SEQ ID NO: 1654435 - DNA, 15 bp, Homo sapiens
ttgttcccccattct

SEQ ID NO: 1654436 - DNA, 15 bp, Homo sapiens
tgttcccccattcta

SEQ ID NO: 1654437 - DNA, 15 bp, Homo sapiens
gttcccccattctat

SEQ ID NO: 1654438 - DNA, 15 bp, Homo sapiens
ttcccccattctatc

SEQ ID NO: 1654439 - DNA, 15 bp, Homo sapiens
tcccccattctatct

SEQ ID NO: 1654440 - DNA, 15 bp, Homo sapiens
cccccattctatctt

SEQ ID NO: 1654441 - DNA, 15 bp, Homo sapiens
ccccattctatctta

SEQ ID NO: 1654442 - DNA, 15 bp, Homo sapiens
cccattctatcttag

SEQ ID NO: 1654443 - DNA, 15 bp, Homo sapiens
ccattctatcttagg

SEQ ID NO: 1654444 - DNA, 15 bp, Homo sapiens
cattctatcttaggt

SEQ ID NO: 1654445 - DNA, 15 bp, Homo sapiens
attctatcttaggtt

SEQ ID NO: 1654446 - DNA, 15 bp, Homo sapiens
ttctatcttaggttc

SEQ ID NO: 1654447 - DNA, 15 bp, Homo sapiens
tctatcttaggttcc

SEQ ID NO: 1654448 - DNA, 15 bp, Homo sapiens
ctatcttaggttccc

SEQ ID NO: 1654449 - DNA, 15 bp, Homo sapiens
tatcttaggttccct

SEQ ID NO: 1654450 - DNA, 15 bp, Homo sapiens
atcttaggttccctt

SEQ ID NO: 1654451 - DNA, 15 bp, Homo sapiens
tcttaggttcccttc

SEQ ID NO: 1654452 - DNA, 15 bp, Homo sapiens
cttaggttcccttct

SEQ ID NO: 1654453 - DNA, 15 bp, Homo sapiens
ttaggttcccttctc

SEQ ID NO: 1654454 - DNA, 15 bp, Homo sapiens
taggttcccttctct

SEQ ID NO: 1654455 - DNA, 15 bp, Homo sapiens
aggttcccttctctt

SEQ ID NO: 1654456 - DNA, 15 bp, Homo sapiens
ggttcccttctcttt

SEQ ID NO: 1654457 - DNA, 15 bp, Homo sapiens
gttcccttctctttt

SEQ ID NO: 1654458 - DNA, 15 bp, Homo sapiens
ttcccttctctttta

SEQ ID NO: 1654459 - DNA, 15 bp, Homo sapiens
tcccttctcttttag

SEQ ID NO: 1654460 - DNA, 15 bp, Homo sapiens
cccttctcttttagt

SEQ ID NO: 1654461 - DNA, 15 bp, Homo sapiens
ccttctcttttagta

SEQ ID NO: 1654462 - DNA, 15 bp, Homo sapiens
cttctcttttagtat

SEQ ID NO: 1654463 - DNA, 15 bp, Homo sapiens
ttctcttttagtatt

SEQ ID NO: 1654464 - DNA, 15 bp, Homo sapiens
tctcttttagtattc

SEQ ID NO: 1654465 - DNA, 15 bp, Homo sapiens
ctcttttagtattct

SEQ ID NO: 1654466 - DNA, 15 bp, Homo sapiens
tcttttagtattctc

SEQ ID NO: 1654467 - DNA, 15 bp, Homo sapiens
cttttagtattctct

SEQ ID NO: 1654468 - DNA, 15 bp, Homo sapiens
ttttagtattctctc

SEQ ID NO: 1654469 - DNA, 15 bp, Homo sapiens
tttagtattctctct

SEQ ID NO: 1654470 - DNA, 15 bp, Homo sapiens
ttagtattctctctc

SEQ ID NO: 1654471 - DNA, 15 bp, Homo sapiens
tagtattctctctct

SEQ ID NO: 1654472 - DNA, 15 bp, Homo sapiens
agtattctctctctt

SEQ ID NO: 1654473 - DNA, 15 bp, Homo sapiens
gtattctctctctta

SEQ ID NO: 1654474 - DNA, 15 bp, Homo sapiens
tattctctctcttac

SEQ ID NO: 1654475 - DNA, 15 bp, Homo sapiens
attctctctcttaca

SEQ ID NO: 1654476 - DNA, 15 bp, Homo sapiens
ttctctctcttacaa

SEQ ID NO: 1654477 - DNA, 15 bp, Homo sapiens
tctctctcttacaaa

SEQ ID NO: 1654478 - DNA, 15 bp, Homo sapiens
ctctctcttacaaag

SEQ ID NO: 1654479 - DNA, 15 bp, Homo sapiens
tctctcttacaaagt

SEQ ID NO: 1654480 - DNA, 15 bp, Homo sapiens
ctctcttacaaagtt

SEQ ID NO: 1654481 - DNA, 15 bp, Homo sapiens
tctcttacaaagttc

SEQ ID NO: 1654482 - DNA, 15 bp, Homo sapiens
ctcttacaaagttca

SEQ ID NO: 1654483 - DNA, 15 bp, Homo sapiens
tcttacaaagttcat

SEQ ID NO: 1654484 - DNA, 15 bp, Homo sapiens
cttacaaagttcatc

SEQ ID NO: 1654485 - DNA, 15 bp, Homo sapiens
ttacaaagttcatcc

SEQ ID NO: 1654486 - DNA, 15 bp, Homo sapiens
tacaaagttcatcct

SEQ ID NO: 1654487 - DNA, 15 bp, Homo sapiens
acaaagttcatccta

SEQ ID NO: 1654488 - DNA, 15 bp, Homo sapiens
caaagttcatcctat

SEQ ID NO: 1654489 - DNA, 15 bp, Homo sapiens
aaagttcatcctatt

SEQ ID NO: 1654490 - DNA, 15 bp, Homo sapiens
aagttcatcctatta

SEQ ID NO: 1654491 - DNA, 15 bp, Homo sapiens
agttcatcctattac

SEQ ID NO: 1654492 - DNA, 15 bp, Homo sapiens
gttcatcctattacc

SEQ ID NO: 1654493 - DNA, 15 bp, Homo sapiens
ttcatcctattacct

SEQ ID NO: 1654494 - DNA, 15 bp, Homo sapiens
tcatcctattacctg

SEQ ID NO: 1654495 - DNA, 15 bp, Homo sapiens
catcctattacctgg

SEQ ID NO: 1654496 - DNA, 15 bp, Homo sapiens
atcctattacctggt

SEQ ID NO: 1654497 - DNA, 15 bp, Homo sapiens
tcctattacctggtt

SEQ ID NO: 1654498 - DNA, 15 bp, Homo sapiens
cctattacctggttt

SEQ ID NO: 1654499 - DNA, 15 bp, Homo sapiens
ctattacctggtttc

SEQ ID NO: 1654500 - DNA, 15 bp, Homo sapiens
tattacctggtttcc

SEQ ID NO: 1654501 - DNA, 15 bp, Homo sapiens
attacctggtttcct

SEQ ID NO: 1654502 - DNA, 15 bp, Homo sapiens
ttacctggtttcctc

SEQ ID NO: 1654503 - DNA, 15 bp, Homo sapiens
tacctggtttcctct

SEQ ID NO: 1654504 - DNA, 15 bp, Homo sapiens
acctggtttcctctt

SEQ ID NO: 1654505 - DNA, 15 bp, Homo sapiens
cctggtttcctcttc

SEQ ID NO: 1654506 - DNA, 15 bp, Homo sapiens
ctggtttcctcttcc

SEQ ID NO: 1654507 - DNA, 15 bp, Homo sapiens
tggtttcctcttcca

SEQ ID NO: 1654508 - DNA, 15 bp, Homo sapiens
ggtttcctcttccat

SEQ ID NO: 1654509 - DNA, 15 bp, Homo sapiens
gtttcctcttccata

SEQ ID NO: 1654510 - DNA, 15 bp, Homo sapiens
tttcctcttccatac

SEQ ID NO: 1654511 - DNA, 15 bp, Homo sapiens
ttcctcttccataca

SEQ ID NO: 1654512 - DNA, 15 bp, Homo sapiens
tcctcttccatacag

SEQ ID NO: 1654513 - DNA, 15 bp, Homo sapiens
cctcttccatacagg

SEQ ID NO: 1654514 - DNA, 15 bp, Homo sapiens
ctcttccatacaggt

SEQ ID NO: 1654515 - DNA, 15 bp, Homo sapiens
tcttccatacaggtg

SEQ ID NO: 1654516 - DNA, 15 bp, Homo sapiens
cttccatacaggtga

SEQ ID NO: 1654517 - DNA, 15 bp, Homo sapiens
ttccatacaggtgat

SEQ ID NO: 1654518 - DNA, 15 bp, Homo sapiens
tccatacaggtgatt

SEQ ID NO: 1654519 - DNA, 15 bp, Homo sapiens
ccatacaggtgattt

SEQ ID NO: 1654520 - DNA, 15 bp, Homo sapiens
catacaggtgatttt

SEQ ID NO: 1654521 - DNA, 15 bp, Homo sapiens
atacaggtgatttta

SEQ ID NO: 1654522 - DNA, 15 bp, Homo sapiens
tacaggtgattttag

SEQ ID NO: 1654523 - DNA, 15 bp, Homo sapiens
acaggtgattttaga

SEQ ID NO: 1654524 - DNA, 15 bp, Homo sapiens
caggtgattttagat

SEQ ID NO: 1654525 - DNA, 15 bp, Homo sapiens
aggtgattttagatt

SEQ ID NO: 1654526 - DNA, 15 bp, Homo sapiens
ggtgattttagattg

SEQ ID NO: 1654527 - DNA, 15 bp, Homo sapiens
gtgattttagattga

SEQ ID NO: 1654528 - DNA, 15 bp, Homo sapiens
tgattttagattgat

SEQ ID NO: 1654529 - DNA, 15 bp, Homo sapiens
gattttagattgatg

SEQ ID NO: 1654530 - DNA, 15 bp, Homo sapiens
attttagattgatgc

SEQ ID NO: 1654531 - DNA, 15 bp, Homo sapiens
ttttagattgatgcc

SEQ ID NO: 1654532 - DNA, 15 bp, Homo sapiens
tttagattgatgcct

SEQ ID NO: 1654533 - DNA, 15 bp, Homo sapiens
ttagattgatgcctg

SEQ ID NO: 1654534 - DNA, 15 bp, Homo sapiens
tagattgatgcctgt

SEQ ID NO: 1654535 - DNA, 15 bp, Homo sapiens
agattgatgcctgtc

SEQ ID NO: 1654536 - DNA, 15 bp, Homo sapiens
gattgatgcctgtct

SEQ ID NO: 1654537 - DNA, 15 bp, Homo sapiens
attgatgcctgtctt

SEQ ID NO: 1654538 - DNA, 15 bp, Homo sapiens
ttgatgcctgtcttt

SEQ ID NO: 1654539 - DNA, 15 bp, Homo sapiens
tgatgcctgtctttc

SEQ ID NO: 1654540 - DNA, 15 bp, Homo sapiens
gatgcctgtctttcg

SEQ ID NO: 1654541 - DNA, 15 bp, Homo sapiens
atgcctgtctttcga

SEQ ID NO: 1654542 - DNA, 15 bp, Homo sapiens
tgcctgtctttcgaa

SEQ ID NO: 1654543 - DNA, 15 bp, Homo sapiens
gcctgtctttcgaag

SEQ ID NO: 1654544 - DNA, 15 bp, Homo sapiens
cctgtctttcgaagt

SEQ ID NO: 1654545 - DNA, 15 bp, Homo sapiens
ctgtctttcgaagtg

SEQ ID NO: 1654546 - DNA, 15 bp, Homo sapiens
tgtctttcgaagtgc

SEQ ID NO: 1654547 - DNA, 15 bp, Homo sapiens
gtctttcgaagtgca

SEQ ID NO: 1654548 - DNA, 15 bp, Homo sapiens
tctttcgaagtgcag

SEQ ID NO: 1654549 - DNA, 15 bp, Homo sapiens
ctttcgaagtgcagt

SEQ ID NO: 1654550 - DNA, 15 bp, Homo sapiens
tttcgaagtgcagtt

SEQ ID NO: 1654551 - DNA, 15 bp, Homo sapiens
ttcgaagtgcagtta

SEQ ID NO: 1654552 - DNA, 15 bp, Homo sapiens
tcgaagtgcagttat

SEQ ID NO: 1654553 - DNA, 15 bp, Homo sapiens
cgaagtgcagttatc

SEQ ID NO: 1654554 - DNA, 15 bp, Homo sapiens
gaagtgcagttatca

SEQ ID NO: 1654555 - DNA, 15 bp, Homo sapiens
aagtgcagttatcat

SEQ ID NO: 1654556 - DNA, 15 bp, Homo sapiens
agtgcagttatcata

SEQ ID NO: 1654557 - DNA, 15 bp, Homo sapiens
gtgcagttatcataa

SEQ ID NO: 1654558 - DNA, 15 bp, Homo sapiens
tgcagttatcataat

SEQ ID NO: 1654559 - DNA, 15 bp, Homo sapiens
gcagttatcataatc

SEQ ID NO: 1654560 - DNA, 15 bp, Homo sapiens
cagttatcataatct

SEQ ID NO: 1654561 - DNA, 15 bp, Homo sapiens
agttatcataatcta

SEQ ID NO: 1654562 - DNA, 15 bp, Homo sapiens
gttatcataatctac

SEQ ID NO: 1654563 - DNA, 15 bp, Homo sapiens
ttatcataatctact

SEQ ID NO: 1654564 - DNA, 15 bp, Homo sapiens
tatcataatctactg

SEQ ID NO: 1654565 - DNA, 15 bp, Homo sapiens
atcataatctactgc

SEQ ID NO: 1654566 - DNA, 15 bp, Homo sapiens
tcataatctactgcc

SEQ ID NO: 1654567 - DNA, 15 bp, Homo sapiens
cataatctactgcct

SEQ ID NO: 1654568 - DNA, 15 bp, Homo sapiens
ataatctactgcctg

SEQ ID NO: 1654569 - DNA, 15 bp, Homo sapiens
taatctactgcctga

SEQ ID NO: 1654570 - DNA, 15 bp, Homo sapiens
aatctactgcctgac

SEQ ID NO: 1654571 - DNA, 15 bp, Homo sapiens
atctactgcctgaca

SEQ ID NO: 1654572 - DNA, 15 bp, Homo sapiens
tctactgcctgacaa

SEQ ID NO: 1654573 - DNA, 15 bp, Homo sapiens
ctactgcctgacaat

SEQ ID NO: 1654574 - DNA, 15 bp, Homo sapiens
tactgcctgacaatc

SEQ ID NO: 1654575 - DNA, 15 bp, Homo sapiens
actgcctgacaatca

SEQ ID NO: 1654576 - DNA, 15 bp, Homo sapiens
ctgcctgacaatcac

SEQ ID NO: 1654577 - DNA, 15 bp, Homo sapiens
tgcctgacaatcacc

SEQ ID NO: 1654578 - DNA, 15 bp, Homo sapiens
gcctgacaatcacct

SEQ ID NO: 1654579 - DNA, 15 bp, Homo sapiens
cctgacaatcacctc

SEQ ID NO: 1654580 - DNA, 15 bp, Homo sapiens
ctgacaatcacctcc

SEQ ID NO: 1654581 - DNA, 15 bp, Homo sapiens
tgacaatcacctcca

SEQ ID NO: 1654582 - DNA, 15 bp, Homo sapiens
gacaatcacctccac

SEQ ID NO: 1654583 - DNA, 15 bp, Homo sapiens
acaatcacctccacc

SEQ ID NO: 1654584 - DNA, 15 bp, Homo sapiens
caatcacctccacct

SEQ ID NO: 1654585 - DNA, 15 bp, Homo sapiens
aatcacctccaccta

SEQ ID NO: 1654586 - DNA, 15 bp, Homo sapiens
atcacctccacctag

SEQ ID NO: 1654587 - DNA, 15 bp, Homo sapiens
tcacctccacctaga

SEQ ID NO: 1654588 - DNA, 15 bp, Homo sapiens
cacctccacctagaa

SEQ ID NO: 1654589 - DNA, 15 bp, Homo sapiens
acctccacctagaat

SEQ ID NO: 1654590 - DNA, 15 bp, Homo sapiens
cctccacctagaatt

SEQ ID NO: 1654591 - DNA, 15 bp, Homo sapiens
ctccacctagaatta

SEQ ID NO: 1654592 - DNA, 15 bp, Homo sapiens
tccacctagaattat

SEQ ID NO: 1654593 - DNA, 15 bp, Homo sapiens
ccacctagaattata

SEQ ID NO: 1654594 - DNA, 15 bp, Homo sapiens
cacctagaattatac

SEQ ID NO: 1654595 - DNA, 15 bp, Homo sapiens
acctagaattatact

SEQ ID NO: 1654596 - DNA, 15 bp, Homo sapiens
cctagaattatacta

SEQ ID NO: 1654597 - DNA, 15 bp, Homo sapiens
ctagaattatactat

SEQ ID NO: 1654598 - DNA, 15 bp, Homo sapiens
tagaattatactatc

SEQ ID NO: 1654599 - DNA, 15 bp, Homo sapiens
agaattatactatcc

SEQ ID NO: 1654600 - DNA, 15 bp, Homo sapiens
gaattatactatcca

SEQ ID NO: 1654601 - DNA, 15 bp, Homo sapiens
aattatactatccaa

SEQ ID NO: 1654602 - DNA, 15 bp, Homo sapiens
attatactatccaat

SEQ ID NO: 1654603 - DNA, 15 bp, Homo sapiens
ttatactatccaata

SEQ ID NO: 1654604 - DNA, 15 bp, Homo sapiens
tatactatccaatac

SEQ ID NO: 1654605 - DNA, 15 bp, Homo sapiens
atactatccaataca

SEQ ID NO: 1654606 - DNA, 15 bp, Homo sapiens
tactatccaatacag

SEQ ID NO: 1654607 - DNA, 15 bp, Homo sapiens
actatccaatacagc

SEQ ID NO: 1654608 - DNA, 15 bp, Homo sapiens
ctatccaatacagca

SEQ ID NO: 1654609 - DNA, 15 bp, Homo sapiens
tatccaatacagcag

SEQ ID NO: 1654610 - DNA, 15 bp, Homo sapiens
atccaatacagcagc

SEQ ID NO: 1654611 - DNA, 15 bp, Homo sapiens
tccaatacagcagct

SEQ ID NO: 1654612 - DNA, 15 bp, Homo sapiens
ccaatacagcagcta

SEQ ID NO: 1654613 - DNA, 15 bp, Homo sapiens
caatacagcagctag

SEQ ID NO: 1654614 - DNA, 15 bp, Homo sapiens
aatacagcagctagt

SEQ ID NO: 1654615 - DNA, 15 bp, Homo sapiens
atacagcagctagtg

SEQ ID NO: 1654616 - DNA, 15 bp, Homo sapiens
tacagcagctagtga

SEQ ID NO: 1654617 - DNA, 15 bp, Homo sapiens
acagcagctagtgag

SEQ ID NO: 1654618 - DNA, 15 bp, Homo sapiens
cagcagctagtgagc

SEQ ID NO: 1654619 - DNA, 15 bp, Homo sapiens
agcagctagtgagca

SEQ ID NO: 1654620 - DNA, 15 bp, Homo sapiens
gcagctagtgagcac

SEQ ID NO: 1654621 - DNA, 15 bp, Homo sapiens
cagctagtgagcact

SEQ ID NO: 1654622 - DNA, 15 bp, Homo sapiens
agctagtgagcactc

SEQ ID NO: 1654623 - DNA, 15 bp, Homo sapiens
gctagtgagcactcg

SEQ ID NO: 1654624 - DNA, 15 bp, Homo sapiens
ctagtgagcactcga

SEQ ID NO: 1654625 - DNA, 15 bp, Homo sapiens
tagtgagcactcgag

SEQ ID NO: 1654626 - DNA, 15 bp, Homo sapiens
agtgagcactcgaga

SEQ ID NO: 1654627 - DNA, 15 bp, Homo sapiens
gtgagcactcgagat

SEQ ID NO: 1654628 - DNA, 15 bp, Homo sapiens
tgagcactcgagata

SEQ ID NO: 1654629 - DNA, 15 bp, Homo sapiens
gagcactcgagatat

SEQ ID NO: 1654630 - DNA, 15 bp, Homo sapiens
agcactcgagatatg

SEQ ID NO: 1654631 - DNA, 15 bp, Homo sapiens
gcactcgagatatgg

SEQ ID NO: 1654632 - DNA, 15 bp, Homo sapiens
cactcgagatatggc

SEQ ID NO: 1654633 - DNA, 15 bp, Homo sapiens
actcgagatatggct

SEQ ID NO: 1654634 - DNA, 15 bp, Homo sapiens
ctcgagatatggcta

SEQ ID NO: 1654635 - DNA, 15 bp, Homo sapiens
tcgagatatggctag

SEQ ID NO: 1654636 - DNA, 15 bp, Homo sapiens
cgagatatggctagt

SEQ ID NO: 1654637 - DNA, 15 bp, Homo sapiens
gagatatggctagta

SEQ ID NO: 1654638 - DNA, 15 bp, Homo sapiens
agatatggctagtac

SEQ ID NO: 1654639 - DNA, 15 bp, Homo sapiens
gatatggctagtaca

SEQ ID NO: 1654640 - DNA, 15 bp, Homo sapiens
atatggctagtacaa

SEQ ID NO: 1654641 - DNA, 15 bp, Homo sapiens
tatggctagtacaaa

SEQ ID NO: 1654642 - DNA, 15 bp, Homo sapiens
atggctagtacaaat

SEQ ID NO: 1654643 - DNA, 15 bp, Homo sapiens
tggctagtacaaatt

SEQ ID NO: 1654644 - DNA, 15 bp, Homo sapiens
ggctagtacaaattg

SEQ ID NO: 1654645 - DNA, 15 bp, Homo sapiens
gctagtacaaattgg

SEQ ID NO: 1654646 - DNA, 15 bp, Homo sapiens
ctagtacaaattggg

SEQ ID NO: 1654647 - DNA, 15 bp, Homo sapiens
tagtacaaattggga

SEQ ID NO: 1654648 - DNA, 15 bp, Homo sapiens
agtacaaattgggat

SEQ ID NO: 1654649 - DNA, 15 bp, Homo sapiens
gtacaaattgggatg

SEQ ID NO: 1654650 - DNA, 15 bp, Homo sapiens
tacaaattgggatgt

SEQ ID NO: 1654651 - DNA, 15 bp, Homo sapiens
acaaattgggatgtg

SEQ ID NO: 1654652 - DNA, 15 bp, Homo sapiens
caaattgggatgtgc

SEQ ID NO: 1654653 - DNA, 15 bp, Homo sapiens
aaattgggatgtgct

SEQ ID NO: 1654654 - DNA, 15 bp, Homo sapiens
aattgggatgtgctg

SEQ ID NO: 1654655 - DNA, 15 bp, Homo sapiens
attgggatgtgctgt

SEQ ID NO: 1654656 - DNA, 15 bp, Homo sapiens
ttgggatgtgctgtg

SEQ ID NO: 1654657 - DNA, 15 bp, Homo sapiens
tgggatgtgctgtgg

SEQ ID NO: 1654658 - DNA, 15 bp, Homo sapiens
gggatgtgctgtggg

SEQ ID NO: 1654659 - DNA, 15 bp, Homo sapiens
ggatgtgctgtgggt

SEQ ID NO: 1654660 - DNA, 15 bp, Homo sapiens
gatgtgctgtgggta

SEQ ID NO: 1654661 - DNA, 15 bp, Homo sapiens
atgtgctgtgggtat

SEQ ID NO: 1654662 - DNA, 15 bp, Homo sapiens
tgtgctgtgggtata

SEQ ID NO: 1654663 - DNA, 15 bp, Homo sapiens
gtgctgtgggtataa

SEQ ID NO: 1654664 - DNA, 15 bp, Homo sapiens
tgctgtgggtataaa

SEQ ID NO: 1654665 - DNA, 15 bp, Homo sapiens
gctgtgggtataaaa

SEQ ID NO: 1654666 - DNA, 15 bp, Homo sapiens
ctgtgggtataaaat

SEQ ID NO: 1654667 - DNA, 15 bp, Homo sapiens
tgtgggtataaaata

SEQ ID NO: 1654668 - DNA, 15 bp, Homo sapiens
gtgggtataaaatac

SEQ ID NO: 1654669 - DNA, 15 bp, Homo sapiens
tgggtataaaataca

SEQ ID NO: 1654670 - DNA, 15 bp, Homo sapiens
gggtataaaatacat

SEQ ID NO: 1654671 - DNA, 15 bp, Homo sapiens
ggtataaaatacata

SEQ ID NO: 1654672 - DNA, 15 bp, Homo sapiens
gtataaaatacatat

SEQ ID NO: 1654673 - DNA, 15 bp, Homo sapiens
tataaaatacatatg

SEQ ID NO: 1654674 - DNA, 15 bp, Homo sapiens
ataaaatacatatgg

SEQ ID NO: 1654675 - DNA, 15 bp, Homo sapiens
taaaatacatatggg

SEQ ID NO: 1654676 - DNA, 15 bp, Homo sapiens
aaaatacatatggga

SEQ ID NO: 1654677 - DNA, 15 bp, Homo sapiens
aaatacatatgggat

SEQ ID NO: 1654678 - DNA, 15 bp, Homo sapiens
aatacatatgggatt

SEQ ID NO: 1654679 - DNA, 15 bp, Homo sapiens
atacatatgggattt

SEQ ID NO: 1654680 - DNA, 15 bp, Homo sapiens
tacatatgggatttc

SEQ ID NO: 1654681 - DNA, 15 bp, Homo sapiens
acatatgggatttca

SEQ ID NO: 1654682 - DNA, 15 bp, Homo sapiens
catatgggatttcaa

SEQ ID NO: 1654683 - DNA, 15 bp, Homo sapiens
atatgggatttcaaa

SEQ ID NO: 1654684 - DNA, 15 bp, Homo sapiens
tatgggatttcaaaa

SEQ ID NO: 1654685 - DNA, 15 bp, Homo sapiens
atgggatttcaaaaa

SEQ ID NO: 1654686 - DNA, 15 bp, Homo sapiens
tgggatttcaaaaac

SEQ ID NO: 1654687 - DNA, 15 bp, Homo sapiens
gggatttcaaaaact

SEQ ID NO: 1654688 - DNA, 15 bp, Homo sapiens
ggatttcaaaaactt

SEQ ID NO: 1654689 - DNA, 15 bp, Homo sapiens
gatttcaaaaactta

SEQ ID NO: 1654690 - DNA, 15 bp, Homo sapiens
atttcaaaaacttag

SEQ ID NO: 1654691 - DNA, 15 bp, Homo sapiens
tttcaaaaacttagc

SEQ ID NO: 1654692 - DNA, 15 bp, Homo sapiens
ttcaaaaacttagcc

SEQ ID NO: 1654693 - DNA, 15 bp, Homo sapiens
tcaaaaacttagcct

SEQ ID NO: 1654694 - DNA, 15 bp, Homo sapiens
caaaaacttagcctg

SEQ ID NO: 1654695 - DNA, 15 bp, Homo sapiens
aaaaacttagcctga

SEQ ID NO: 1654696 - DNA, 15 bp, Homo sapiens
aaaacttagcctgaa

SEQ ID NO: 1654697 - DNA, 15 bp, Homo sapiens
aaacttagcctgaaa

SEQ ID NO: 1654698 - DNA, 15 bp, Homo sapiens
aacttagcctgaaaa

SEQ ID NO: 1654699 - DNA, 15 bp, Homo sapiens
acttagcctgaaaaa

SEQ ID NO: 1654700 - DNA, 15 bp, Homo sapiens
cttagcctgaaaaaa

SEQ ID NO: 1654701 - DNA, 15 bp, Homo sapiens
ttagcctgaaaaaaa

SEQ ID NO: 1654702 - DNA, 15 bp, Homo sapiens
tagcctgaaaaaaag

SEQ ID NO: 1654703 - DNA, 15 bp, Homo sapiens
agcctgaaaaaaaga

SEQ ID NO: 1654704 - DNA, 15 bp, Homo sapiens
gaaaaaaagaatata

SEQ ID NO: 1654705 - DNA, 15 bp, Homo sapiens
aaaaaaagaatataa

SEQ ID NO: 1654706 - DNA, 15 bp, Homo sapiens
aaaaaagaatataac

SEQ ID NO: 1654707 - DNA, 15 bp, Homo sapiens
aaaaagaatataaca

SEQ ID NO: 1654708 - DNA, 15 bp, Homo sapiens
aaaagaatataacat

SEQ ID NO: 1654709 - DNA, 15 bp, Homo sapiens
aaagaatataacata

SEQ ID NO: 1654710 - DNA, 15 bp, Homo sapiens
aagaatataacataa

SEQ ID NO: 1654711 - DNA, 15 bp, Homo sapiens
agaatataacataat

SEQ ID NO: 1654712 - DNA, 15 bp, Homo sapiens
gaatataacataatc

SEQ ID NO: 1654713 - DNA, 15 bp, Homo sapiens
aatataacataatca

SEQ ID NO: 1654714 - DNA, 15 bp, Homo sapiens
atataacataatcaa

SEQ ID NO: 1654715 - DNA, 15 bp, Homo sapiens
tataacataatcaat

SEQ ID NO: 1654716 - DNA, 15 bp, Homo sapiens
ataacataatcaata

SEQ ID NO: 1654717 - DNA, 15 bp, Homo sapiens
taacataatcaatat

SEQ ID NO: 1654718 - DNA, 15 bp, Homo sapiens
aacataatcaatatt

SEQ ID NO: 1654719 - DNA, 15 bp, Homo sapiens
acataatcaatattt

SEQ ID NO: 1654720 - DNA, 15 bp, Homo sapiens
cataatcaatatttt

SEQ ID NO: 1654721 - DNA, 15 bp, Homo sapiens
ataatcaatatttta

SEQ ID NO: 1654722 - DNA, 15 bp, Homo sapiens
taatcaatattttat

SEQ ID NO: 1654723 - DNA, 15 bp, Homo sapiens
aatcaatattttatg

SEQ ID NO: 1654724 - DNA, 15 bp, Homo sapiens
atcaatattttatgg

SEQ ID NO: 1654725 - DNA, 15 bp, Homo sapiens
tcaatattttatggc

SEQ ID NO: 1654726 - DNA, 15 bp, Homo sapiens
caatattttatggca

SEQ ID NO: 1654727 - DNA, 15 bp, Homo sapiens
aatattttatggcaa

SEQ ID NO: 1654728 - DNA, 15 bp, Homo sapiens
atattttatggcaat

SEQ ID NO: 1654729 - DNA, 15 bp, Homo sapiens
tattttatggcaatt

SEQ ID NO: 1654730 - DNA, 15 bp, Homo sapiens
attttatggcaatta

SEQ ID NO: 1654731 - DNA, 15 bp, Homo sapiens
ttttatggcaattac

SEQ ID NO: 1654732 - DNA, 15 bp, Homo sapiens
tttatggcaattaca

SEQ ID NO: 1654733 - DNA, 15 bp, Homo sapiens
ttatggcaattacat

SEQ ID NO: 1654734 - DNA, 15 bp, Homo sapiens
tatggcaattacata

SEQ ID NO: 1654735 - DNA, 15 bp, Homo sapiens
atggcaattacatat

SEQ ID NO: 1654736 - DNA, 15 bp, Homo sapiens
tggcaattacatatt

SEQ ID NO: 1654737 - DNA, 15 bp, Homo sapiens
ggcaattacatattg

SEQ ID NO: 1654738 - DNA, 15 bp, Homo sapiens
gcaattacatattgg

SEQ ID NO: 1654739 - DNA, 15 bp, Homo sapiens
caattacatattgga

SEQ ID NO: 1654740 - DNA, 15 bp, Homo sapiens
aattacatattggaa

SEQ ID NO: 1654741 - DNA, 15 bp, Homo sapiens
attacatattggaat

SEQ ID NO: 1654742 - DNA, 15 bp, Homo sapiens
ttacatattggaatg

SEQ ID NO: 1654743 - DNA, 15 bp, Homo sapiens
tacatattggaatga

SEQ ID NO: 1654744 - DNA, 15 bp, Homo sapiens
acatattggaatgaa

SEQ ID NO: 1654745 - DNA, 15 bp, Homo sapiens
catattggaatgaaa

SEQ ID NO: 1654746 - DNA, 15 bp, Homo sapiens
atattggaatgaaag

SEQ ID NO: 1654747 - DNA, 15 bp, Homo sapiens
tattggaatgaaagt

SEQ ID NO: 1654748 - DNA, 15 bp, Homo sapiens
attggaatgaaagta

SEQ ID NO: 1654749 - DNA, 15 bp, Homo sapiens
ttggaatgaaagtat

SEQ ID NO: 1654750 - DNA, 15 bp, Homo sapiens
tggaatgaaagtatt

SEQ ID NO: 1654751 - DNA, 15 bp, Homo sapiens
ggaatgaaagtattt

SEQ ID NO: 1654752 - DNA, 15 bp, Homo sapiens
gaatgaaagtatttt

SEQ ID NO: 1654753 - DNA, 15 bp, Homo sapiens
aatgaaagtattttg

SEQ ID NO: 1654754 - DNA, 15 bp, Homo sapiens
atgaaagtattttgg

SEQ ID NO: 1654755 - DNA, 15 bp, Homo sapiens
tgaaagtattttggt

SEQ ID NO: 1654756 - DNA, 15 bp, Homo sapiens
gaaagtattttggtt

SEQ ID NO: 1654757 - DNA, 15 bp, Homo sapiens
aaagtattttggtta

SEQ ID NO: 1654758 - DNA, 15 bp, Homo sapiens
aagtattttggttat

SEQ ID NO: 1654759 - DNA, 15 bp, Homo sapiens
agtattttggttata

SEQ ID NO: 1654760 - DNA, 15 bp, Homo sapiens
gtattttggttatat

SEQ ID NO: 1654761 - DNA, 15 bp, Homo sapiens
tattttggttatatt

SEQ ID NO: 1654762 - DNA, 15 bp, Homo sapiens
attttggttatatta

SEQ ID NO: 1654763 - DNA, 15 bp, Homo sapiens
ttttggttatattag

SEQ ID NO: 1654764 - DNA, 15 bp, Homo sapiens
tttggttatattagg

SEQ ID NO: 1654765 - DNA, 15 bp, Homo sapiens
ttggttatattaggt

SEQ ID NO: 1654766 - DNA, 15 bp, Homo sapiens
tggttatattaggtt

SEQ ID NO: 1654767 - DNA, 15 bp, Homo sapiens
ggttatattaggtta

SEQ ID NO: 1654768 - DNA, 15 bp, Homo sapiens
gttatattaggttaa

SEQ ID NO: 1654769 - DNA, 15 bp, Homo sapiens
ttatattaggttaaa

SEQ ID NO: 1654770 - DNA, 15 bp, Homo sapiens
tatattaggttaaat

SEQ ID NO: 1654771 - DNA, 15 bp, Homo sapiens
atattaggttaaata

SEQ ID NO: 1654772 - DNA, 15 bp, Homo sapiens
tattaggttaaataa

SEQ ID NO: 1654773 - DNA, 15 bp, Homo sapiens
attaggttaaataaa

SEQ ID NO: 1654774 - DNA, 15 bp, Homo sapiens
ttaggttaaataaaa

SEQ ID NO: 1654775 - DNA, 15 bp, Homo sapiens
taggttaaataaaac

SEQ ID NO: 1654776 - DNA, 15 bp, Homo sapiens
aggttaaataaaaca

SEQ ID NO: 1654777 - DNA, 15 bp, Homo sapiens
ggttaaataaaacat

SEQ ID NO: 1654778 - DNA, 15 bp, Homo sapiens
gttaaataaaacata

SEQ ID NO: 1654779 - DNA, 15 bp, Homo sapiens
ttaaataaaacatat

SEQ ID NO: 1654780 - DNA, 15 bp, Homo sapiens
taaataaaacatatt

SEQ ID NO: 1654781 - DNA, 15 bp, Homo sapiens
aaataaaacatatta

SEQ ID NO: 1654782 - DNA, 15 bp, Homo sapiens
aataaaacatattat

SEQ ID NO: 1654783 - DNA, 15 bp, Homo sapiens
ataaaacatattatc

SEQ ID NO: 1654784 - DNA, 15 bp, Homo sapiens
taaaacatattatca

SEQ ID NO: 1654785 - DNA, 15 bp, Homo sapiens
aaaacatattatcaa

SEQ ID NO: 1654786 - DNA, 15 bp, Homo sapiens
aaacatattatcaaa

SEQ ID NO: 1654787 - DNA, 15 bp, Homo sapiens
aacatattatcaaaa

SEQ ID NO: 1654788 - DNA, 15 bp, Homo sapiens
acatattatcaaaat

SEQ ID NO: 1654789 - DNA, 15 bp, Homo sapiens
catattatcaaaatt

SEQ ID NO: 1654790 - DNA, 15 bp, Homo sapiens
atattatcaaaatta

SEQ ID NO: 1654791 - DNA, 15 bp, Homo sapiens
tattatcaaaattag

SEQ ID NO: 1654792 - DNA, 15 bp, Homo sapiens
attatcaaaattagt

SEQ ID NO: 1654793 - DNA, 15 bp, Homo sapiens
ttatcaaaattagtt

SEQ ID NO: 1654794 - DNA, 15 bp, Homo sapiens
tatcaaaattagttt

SEQ ID NO: 1654795 - DNA, 15 bp, Homo sapiens
atcaaaattagtttc

SEQ ID NO: 1654796 - DNA, 15 bp, Homo sapiens
tcaaaattagtttca

SEQ ID NO: 1654797 - DNA, 15 bp, Homo sapiens
caaaattagtttcat

SEQ ID NO: 1654798 - DNA, 15 bp, Homo sapiens
aaaattagtttcatt

SEQ ID NO: 1654799 - DNA, 15 bp, Homo sapiens
aaattagtttcattc

SEQ ID NO: 1654800 - DNA, 15 bp, Homo sapiens
aattagtttcattct

SEQ ID NO: 1654801 - DNA, 15 bp, Homo sapiens
attagtttcattcta

SEQ ID NO: 1654802 - DNA, 15 bp, Homo sapiens
ttagtttcattctac

SEQ ID NO: 1654803 - DNA, 15 bp, Homo sapiens
tagtttcattctact

SEQ ID NO: 1654804 - DNA, 15 bp, Homo sapiens
agtttcattctactt

SEQ ID NO: 1654805 - DNA, 15 bp, Homo sapiens
gtttcattctacttt

SEQ ID NO: 1654806 - DNA, 15 bp, Homo sapiens
tttcattctactttt

SEQ ID NO: 1654807 - DNA, 15 bp, Homo sapiens
ttcattctacttttt

SEQ ID NO: 1654808 - DNA, 15 bp, Homo sapiens
tcattctactttttt

SEQ ID NO: 1654809 - DNA, 15 bp, Homo sapiens
cattctacttttttt

SEQ ID NO: 1654810 - DNA, 15 bp, Homo sapiens
attctacttttttta

SEQ ID NO: 1654811 - DNA, 15 bp, Homo sapiens
ttctactttttttaa

SEQ ID NO: 1654812 - DNA, 15 bp, Homo sapiens
tctactttttttaat

SEQ ID NO: 1654813 - DNA, 15 bp, Homo sapiens
ctactttttttaata

SEQ ID NO: 1654814 - DNA, 15 bp, Homo sapiens
tactttttttaatat

SEQ ID NO: 1654815 - DNA, 15 bp, Homo sapiens
actttttttaatatg

SEQ ID NO: 1654816 - DNA, 15 bp, Homo sapiens
ctttttttaatatgg

SEQ ID NO: 1654817 - DNA, 15 bp, Homo sapiens
tttttttaatatggc

SEQ ID NO: 1654818 - DNA, 15 bp, Homo sapiens
ttttttaatatggct

SEQ ID NO: 1654819 - DNA, 15 bp, Homo sapiens
tttttaatatggcta

SEQ ID NO: 1654820 - DNA, 15 bp, Homo sapiens
aatatggctactagg

SEQ ID NO: 1654821 - DNA, 15 bp, Homo sapiens
atatggctactagga

SEQ ID NO: 1654822 - DNA, 15 bp, Homo sapiens
tatggctactaggaa

SEQ ID NO: 1654823 - DNA, 15 bp, Homo sapiens
atggctactaggaaa

SEQ ID NO: 1654824 - DNA, 15 bp, Homo sapiens
tggctactaggaaaa

SEQ ID NO: 1654825 - DNA, 15 bp, Homo sapiens
ggctactaggaaaat

SEQ ID NO: 1654826 - DNA, 15 bp, Homo sapiens
gctactaggaaaatt

SEQ ID NO: 1654827 - DNA, 15 bp, Homo sapiens
ctactaggaaaattt

SEQ ID NO: 1654828 - DNA, 15 bp, Homo sapiens
tactaggaaaattta

SEQ ID NO: 1654829 - DNA, 15 bp, Homo sapiens
actaggaaaatttaa

SEQ ID NO: 1654830 - DNA, 15 bp, Homo sapiens
ctaggaaaatttaaa

SEQ ID NO: 1654831 - DNA, 15 bp, Homo sapiens
taggaaaatttaaat

SEQ ID NO: 1654832 - DNA, 15 bp, Homo sapiens
aggaaaatttaaatg

SEQ ID NO: 1654833 - DNA, 15 bp, Homo sapiens
ggaaaatttaaatga

SEQ ID NO: 1654834 - DNA, 15 bp, Homo sapiens
gaaaatttaaatgac

SEQ ID NO: 1654835 - DNA, 15 bp, Homo sapiens
aaaatttaaatgacc

SEQ ID NO: 1654836 - DNA, 15 bp, Homo sapiens
aaatttaaatgaccc

SEQ ID NO: 1654837 - DNA, 15 bp, Homo sapiens
aatttaaatgaccca

SEQ ID NO: 1654838 - DNA, 15 bp, Homo sapiens
atttaaatgacccat

SEQ ID NO: 1654839 - DNA, 15 bp, Homo sapiens
tttaaatgacccatg

SEQ ID NO: 1654840 - DNA, 15 bp, Homo sapiens
ttaaatgacccatgg

SEQ ID NO: 1654841 - DNA, 15 bp, Homo sapiens
taaatgacccatggc

SEQ ID NO: 1654842 - DNA, 15 bp, Homo sapiens
aaatgacccatggct

SEQ ID NO: 1654843 - DNA, 15 bp, Homo sapiens
aatgacccatggctt

SEQ ID NO: 1654844 - DNA, 15 bp, Homo sapiens
atgacccatggctta

SEQ ID NO: 1654845 - DNA, 15 bp, Homo sapiens
tgacccatggcttac

SEQ ID NO: 1654846 - DNA, 15 bp, Homo sapiens
gacccatggcttaca

SEQ ID NO: 1654847 - DNA, 15 bp, Homo sapiens
acccatggcttacat

SEQ ID NO: 1654848 - DNA, 15 bp, Homo sapiens
cccatggcttacatt

SEQ ID NO: 1654849 - DNA, 15 bp, Homo sapiens
ccatggcttacattt

SEQ ID NO: 1654850 - DNA, 15 bp, Homo sapiens
catggcttacatttg

SEQ ID NO: 1654851 - DNA, 15 bp, Homo sapiens
atggcttacatttgt

SEQ ID NO: 1654852 - DNA, 15 bp, Homo sapiens
tggcttacatttgtg

SEQ ID NO: 1654853 - DNA, 15 bp, Homo sapiens
ggcttacatttgtgg

SEQ ID NO: 1654854 - DNA, 15 bp, Homo sapiens
gcttacatttgtggc

SEQ ID NO: 1654855 - DNA, 15 bp, Homo sapiens
cttacatttgtggct

SEQ ID NO: 1654856 - DNA, 15 bp, Homo sapiens
ttacatttgtggctc

SEQ ID NO: 1654857 - DNA, 15 bp, Homo sapiens
tacatttgtggctct

SEQ ID NO: 1654858 - DNA, 15 bp, Homo sapiens
acatttgtggctctc

SEQ ID NO: 1654859 - DNA, 15 bp, Homo sapiens
catttgtggctctca

SEQ ID NO: 1654860 - DNA, 15 bp, Homo sapiens
atttgtggctctcat

SEQ ID NO: 1654861 - DNA, 15 bp, Homo sapiens
tttgtggctctcata

SEQ ID NO: 1654862 - DNA, 15 bp, Homo sapiens
ttgtggctctcatat

SEQ ID NO: 1654863 - DNA, 15 bp, Homo sapiens
tgtggctctcatatg

SEQ ID NO: 1654864 - DNA, 15 bp, Homo sapiens
gtggctctcatatgt

SEQ ID NO: 1654865 - DNA, 15 bp, Homo sapiens
tggctctcatatgtc

SEQ ID NO: 1654866 - DNA, 15 bp, Homo sapiens
ggctctcatatgtct

SEQ ID NO: 1654867 - DNA, 15 bp, Homo sapiens
gctctcatatgtcta

SEQ ID NO: 1654868 - DNA, 15 bp, Homo sapiens
ctctcatatgtctat

SEQ ID NO: 1654869 - DNA, 15 bp, Homo sapiens
tctcatatgtctatt

SEQ ID NO: 1654870 - DNA, 15 bp, Homo sapiens
ctcatatgtctattg

SEQ ID NO: 1654871 - DNA, 15 bp, Homo sapiens
tcatatgtctattgg

SEQ ID NO: 1654872 - DNA, 15 bp, Homo sapiens
catatgtctattgga

SEQ ID NO: 1654873 - DNA, 15 bp, Homo sapiens
atatgtctattggac

SEQ ID NO: 1654874 - DNA, 15 bp, Homo sapiens
tatgtctattggaca

SEQ ID NO: 1654875 - DNA, 15 bp, Homo sapiens
atgtctattggacag

SEQ ID NO: 1654876 - DNA, 15 bp, Homo sapiens
tgtctattggacagt

SEQ ID NO: 1654877 - DNA, 15 bp, Homo sapiens
gtctattggacagta

SEQ ID NO: 1654878 - DNA, 15 bp, Homo sapiens
tctattggacagtac

SEQ ID NO: 1654879 - DNA, 15 bp, Homo sapiens
ctattggacagtact

SEQ ID NO: 1654880 - DNA, 15 bp, Homo sapiens
tattggacagtactg

SEQ ID NO: 1654881 - DNA, 15 bp, Homo sapiens
attggacagtactga

SEQ ID NO: 1654882 - DNA, 15 bp, Homo sapiens
ttggacagtactgac

SEQ ID NO: 1654883 - DNA, 15 bp, Homo sapiens
tggacagtactgacc

SEQ ID NO: 1654884 - DNA, 15 bp, Homo sapiens
ggacagtactgacct

SEQ ID NO: 1654885 - DNA, 15 bp, Homo sapiens
gacagtactgaccta

SEQ ID NO: 1654886 - DNA, 15 bp, Homo sapiens
acagtactgacctag

SEQ ID NO: 1654887 - DNA, 15 bp, Homo sapiens
cagtactgacctaga

SEQ ID NO: 1654888 - DNA, 15 bp, Homo sapiens
agtactgacctagat

SEQ ID NO: 1654889 - DNA, 15 bp, Homo sapiens
gtactgacctagatc

SEQ ID NO: 1654890 - DNA, 15 bp, Homo sapiens
tactgacctagatct

SEQ ID NO: 1654891 - DNA, 15 bp, Homo sapiens
actgacctagatcta

SEQ ID NO: 1654892 - DNA, 15 bp, Homo sapiens
ctgacctagatctac

SEQ ID NO: 1654893 - DNA, 15 bp, Homo sapiens
tgacctagatctacc

SEQ ID NO: 1654894 - DNA, 15 bp, Homo sapiens
gacctagatctacca

SEQ ID NO: 1654895 - DNA, 15 bp, Homo sapiens
acctagatctaccaa

SEQ ID NO: 1654896 - DNA, 15 bp, Homo sapiens
cctagatctaccaac

SEQ ID NO: 1654897 - DNA, 15 bp, Homo sapiens
ctagatctaccaacc

SEQ ID NO: 1654898 - DNA, 15 bp, Homo sapiens
tagatctaccaacca

SEQ ID NO: 1654899 - DNA, 15 bp, Homo sapiens
agatctaccaaccat

SEQ ID NO: 1654900 - DNA, 15 bp, Homo sapiens
gatctaccaaccatt

SEQ ID NO: 1654901 - DNA, 15 bp, Homo sapiens
atctaccaaccattc

SEQ ID NO: 1654902 - DNA, 15 bp, Homo sapiens
tctaccaaccattca

SEQ ID NO: 1654903 - DNA, 15 bp, Homo sapiens
ctaccaaccattcag

SEQ ID NO: 1654904 - DNA, 15 bp, Homo sapiens
taccaaccattcaga

SEQ ID NO: 1654905 - DNA, 15 bp, Homo sapiens
accaaccattcagat

SEQ ID NO: 1654906 - DNA, 15 bp, Homo sapiens
ccaaccattcagata

SEQ ID NO: 1654907 - DNA, 15 bp, Homo sapiens
caaccattcagatat

SEQ ID NO: 1654908 - DNA, 15 bp, Homo sapiens
aaccattcagatatg

SEQ ID NO: 1654909 - DNA, 15 bp, Homo sapiens
accattcagatatgg

SEQ ID NO: 1654910 - DNA, 15 bp, Homo sapiens
ccattcagatatgga

SEQ ID NO: 1654911 - DNA, 15 bp, Homo sapiens
cattcagatatggag

SEQ ID NO: 1654912 - DNA, 15 bp, Homo sapiens
attcagatatggagc

SEQ ID NO: 1654913 - DNA, 15 bp, Homo sapiens
ttcagatatggagca

SEQ ID NO: 1654914 - DNA, 15 bp, Homo sapiens
tcagatatggagcac

SEQ ID NO: 1654915 - DNA, 15 bp, Homo sapiens
cagatatggagcact

SEQ ID NO: 1654916 - DNA, 15 bp, Homo sapiens
agatatggagcactt

SEQ ID NO: 1654917 - DNA, 15 bp, Homo sapiens
gatatggagcactta

SEQ ID NO: 1654918 - DNA, 15 bp, Homo sapiens
atatggagcacttac

SEQ ID NO: 1654919 - DNA, 15 bp, Homo sapiens
tatggagcacttact

SEQ ID NO: 1654920 - DNA, 15 bp, Homo sapiens
atggagcacttactg

SEQ ID NO: 1654921 - DNA, 15 bp, Homo sapiens
tggagcacttactgc

SEQ ID NO: 1654922 - DNA, 15 bp, Homo sapiens
ggagcacttactgca

SEQ ID NO: 1654923 - DNA, 15 bp, Homo sapiens
gagcacttactgcat

SEQ ID NO: 1654924 - DNA, 15 bp, Homo sapiens
agcacttactgcatg

SEQ ID NO: 1654925 - DNA, 15 bp, Homo sapiens
gcacttactgcatgc

SEQ ID NO: 1654926 - DNA, 15 bp, Homo sapiens
cacttactgcatgcc

SEQ ID NO: 1654927 - DNA, 15 bp, Homo sapiens
acttactgcatgcca

SEQ ID NO: 1654928 - DNA, 15 bp, Homo sapiens
cttactgcatgccat

SEQ ID NO: 1654929 - DNA, 15 bp, Homo sapiens
ttactgcatgccatg

SEQ ID NO: 1654930 - DNA, 15 bp, Homo sapiens
tactgcatgccatga

SEQ ID NO: 1654931 - DNA, 15 bp, Homo sapiens
actgcatgccatgat

SEQ ID NO: 1654932 - DNA, 15 bp, Homo sapiens
ctgcatgccatgatt

SEQ ID NO: 1654933 - DNA, 15 bp, Homo sapiens
tgcatgccatgattc

SEQ ID NO: 1654934 - DNA, 15 bp, Homo sapiens
gcatgccatgattct

SEQ ID NO: 1654935 - DNA, 15 bp, Homo sapiens
catgccatgattcta

SEQ ID NO: 1654936 - DNA, 15 bp, Homo sapiens
atgccatgattctac

SEQ ID NO: 1654937 - DNA, 15 bp, Homo sapiens
tgccatgattctact

SEQ ID NO: 1654938 - DNA, 15 bp, Homo sapiens
gccatgattctactt

SEQ ID NO: 1654939 - DNA, 15 bp, Homo sapiens
ccatgattctacttg

SEQ ID NO: 1654940 - DNA, 15 bp, Homo sapiens
catgattctacttgg

SEQ ID NO: 1654941 - DNA, 15 bp, Homo sapiens
atgattctacttggt

SEQ ID NO: 1654942 - DNA, 15 bp, Homo sapiens
tgattctacttggtg

SEQ ID NO: 1654943 - DNA, 15 bp, Homo sapiens
gattctacttggtgc

SEQ ID NO: 1654944 - DNA, 15 bp, Homo sapiens
attctacttggtgcc

SEQ ID NO: 1654945 - DNA, 15 bp, Homo sapiens
ttctacttggtgcct

SEQ ID NO: 1654946 - DNA, 15 bp, Homo sapiens
tctacttggtgccta

SEQ ID NO: 1654947 - DNA, 15 bp, Homo sapiens
ctacttggtgcctaa

SEQ ID NO: 1654948 - DNA, 15 bp, Homo sapiens
tacttggtgcctaat

SEQ ID NO: 1654949 - DNA, 15 bp, Homo sapiens
acttggtgcctaatt

SEQ ID NO: 1654950 - DNA, 15 bp, Homo sapiens
cttggtgcctaattt

SEQ ID NO: 1654951 - DNA, 15 bp, Homo sapiens
ttggtgcctaatttc

SEQ ID NO: 1654952 - DNA, 15 bp, Homo sapiens
tggtgcctaatttct

SEQ ID NO: 1654953 - DNA, 15 bp, Homo sapiens
ggtgcctaatttctt

SEQ ID NO: 1654954 - DNA, 15 bp, Homo sapiens
gtgcctaatttctta

SEQ ID NO: 1654955 - DNA, 15 bp, Homo sapiens
tgcctaatttcttat

SEQ ID NO: 1654956 - DNA, 15 bp, Homo sapiens
gcctaatttcttata

SEQ ID NO: 1654957 - DNA, 15 bp, Homo sapiens
cctaatttcttatac

SEQ ID NO: 1654958 - DNA, 15 bp, Homo sapiens
ctaatttcttatact

SEQ ID NO: 1654959 - DNA, 15 bp, Homo sapiens
taatttcttatactg

SEQ ID NO: 1654960 - DNA, 15 bp, Homo sapiens
aatttcttatactgt

SEQ ID NO: 1654961 - DNA, 15 bp, Homo sapiens
atttcttatactgtc

SEQ ID NO: 1654962 - DNA, 15 bp, Homo sapiens
tttcttatactgtca

SEQ ID NO: 1654963 - DNA, 15 bp, Homo sapiens
ttcttatactgtcag

SEQ ID NO: 1654964 - DNA, 15 bp, Homo sapiens
tcttatactgtcagt

SEQ ID NO: 1654965 - DNA, 15 bp, Homo sapiens
cttatactgtcagta

SEQ ID NO: 1654966 - DNA, 15 bp, Homo sapiens
ttatactgtcagtac

SEQ ID NO: 1654967 - DNA, 15 bp, Homo sapiens
tatactgtcagtact

SEQ ID NO: 1654968 - DNA, 15 bp, Homo sapiens
atactgtcagtactt

SEQ ID NO: 1654969 - DNA, 15 bp, Homo sapiens
tactgtcagtacttc

SEQ ID NO: 1654970 - DNA, 15 bp, Homo sapiens
actgtcagtacttca

SEQ ID NO: 1654971 - DNA, 15 bp, Homo sapiens
ctgtcagtacttcaa

SEQ ID NO: 1654972 - DNA, 15 bp, Homo sapiens
tgtcagtacttcaat

SEQ ID NO: 1654973 - DNA, 15 bp, Homo sapiens
gtcagtacttcaatc

SEQ ID NO: 1654974 - DNA, 15 bp, Homo sapiens
tcagtacttcaatct

SEQ ID NO: 1654975 - DNA, 15 bp, Homo sapiens
cagtacttcaatctg

SEQ ID NO: 1654976 - DNA, 15 bp, Homo sapiens
agtacttcaatctgg

SEQ ID NO: 1654977 - DNA, 15 bp, Homo sapiens
gtacttcaatctggt

SEQ ID NO: 1654978 - DNA, 15 bp, Homo sapiens
tacttcaatctggtg

SEQ ID NO: 1654979 - DNA, 15 bp, Homo sapiens
acttcaatctggtga

SEQ ID NO: 1654980 - DNA, 15 bp, Homo sapiens
cttcaatctggtgag

SEQ ID NO: 1654981 - DNA, 15 bp, Homo sapiens
ttcaatctggtgagt

SEQ ID NO: 1654982 - DNA, 15 bp, Homo sapiens
tcaatctggtgagtc

SEQ ID NO: 1654983 - DNA, 15 bp, Homo sapiens
caatctggtgagtct

SEQ ID NO: 1654984 - DNA, 15 bp, Homo sapiens
aatctggtgagtcta

SEQ ID NO: 1654985 - DNA, 15 bp, Homo sapiens
atctggtgagtctaa

SEQ ID NO: 1654986 - DNA, 15 bp, Homo sapiens
tctggtgagtctaaa

SEQ ID NO: 1654987 - DNA, 15 bp, Homo sapiens
ctggtgagtctaaac

SEQ ID NO: 1654988 - DNA, 15 bp, Homo sapiens
tggtgagtctaaact

SEQ ID NO: 1654989 - DNA, 15 bp, Homo sapiens
ggtgagtctaaactg

SEQ ID NO: 1654990 - DNA, 15 bp, Homo sapiens
gtgagtctaaactga

SEQ ID NO: 1654991 - DNA, 15 bp, Homo sapiens
tgagtctaaactgaa

SEQ ID NO: 1654992 - DNA, 15 bp, Homo sapiens
gagtctaaactgaat

SEQ ID NO: 1654993 - DNA, 15 bp, Homo sapiens
agtctaaactgaata

SEQ ID NO: 1654994 - DNA, 15 bp, Homo sapiens
gtctaaactgaatat

SEQ ID NO: 1654995 - DNA, 15 bp, Homo sapiens
tctaaactgaatatg

SEQ ID NO: 1654996 - DNA, 15 bp, Homo sapiens
ctaaactgaatatgc

SEQ ID NO: 1654997 - DNA, 15 bp, Homo sapiens
taaactgaatatgct

SEQ ID NO: 1654998 - DNA, 15 bp, Homo sapiens
aaactgaatatgctc

SEQ ID NO: 1654999 - DNA, 15 bp, Homo sapiens
aactgaatatgctcc

SEQ ID NO: 1655000 - DNA, 15 bp, Homo sapiens
actgaatatgctcct

SEQ ID NO: 1655001 - DNA, 15 bp, Homo sapiens
ctgaatatgctcctt

SEQ ID NO: 1655002 - DNA, 15 bp, Homo sapiens
tgaatatgctccttc

SEQ ID NO: 1655003 - DNA, 15 bp, Homo sapiens
gaatatgctccttcc

SEQ ID NO: 1655004 - DNA, 15 bp, Homo sapiens
aatatgctccttccc

SEQ ID NO: 1655005 - DNA, 15 bp, Homo sapiens
atatgctccttcccc

SEQ ID NO: 1655006 - DNA, 15 bp, Homo sapiens
tatgctccttcccct

SEQ ID NO: 1655007 - DNA, 15 bp, Homo sapiens
atgctccttcccctt

SEQ ID NO: 1655008 - DNA, 15 bp, Homo sapiens
tgctccttccccttt

SEQ ID NO: 1655009 - DNA, 15 bp, Homo sapiens
gctccttcccctttc

SEQ ID NO: 1655010 - DNA, 15 bp, Homo sapiens
ctccttcccctttct

SEQ ID NO: 1655011 - DNA, 15 bp, Homo sapiens
tccttcccctttctc

SEQ ID NO: 1655012 - DNA, 15 bp, Homo sapiens
ccttcccctttctca

SEQ ID NO: 1655013 - DNA, 15 bp, Homo sapiens
cttcccctttctcat

SEQ ID NO: 1655014 - DNA, 15 bp, Homo sapiens
ttcccctttctcatc

SEQ ID NO: 1655015 - DNA, 15 bp, Homo sapiens
tcccctttctcatcc

SEQ ID NO: 1655016 - DNA, 15 bp, Homo sapiens
cccctttctcatccc

SEQ ID NO: 1655017 - DNA, 15 bp, Homo sapiens
ccctttctcatccca

SEQ ID NO: 1655018 - DNA, 15 bp, Homo sapiens
cctttctcatcccaa

SEQ ID NO: 1655019 - DNA, 15 bp, Homo sapiens
ctttctcatcccaag

SEQ ID NO: 1655020 - DNA, 15 bp, Homo sapiens
tttctcatcccaagg

SEQ ID NO: 1655021 - DNA, 15 bp, Homo sapiens
ttctcatcccaaggt

SEQ ID NO: 1655022 - DNA, 15 bp, Homo sapiens
tctcatcccaaggtt

SEQ ID NO: 1655023 - DNA, 15 bp, Homo sapiens
ctcatcccaaggtta

SEQ ID NO: 1655024 - DNA, 15 bp, Homo sapiens
tcatcccaaggttac

SEQ ID NO: 1655025 - DNA, 15 bp, Homo sapiens
catcccaaggttact

SEQ ID NO: 1655026 - DNA, 15 bp, Homo sapiens
atcccaaggttactc

SEQ ID NO: 1655027 - DNA, 15 bp, Homo sapiens
tcccaaggttactct

SEQ ID NO: 1655028 - DNA, 15 bp, Homo sapiens
cccaaggttactcta

SEQ ID NO: 1655029 - DNA, 15 bp, Homo sapiens
ccaaggttactctac

SEQ ID NO: 1655030 - DNA, 15 bp, Homo sapiens
caaggttactctaca

SEQ ID NO: 1655031 - DNA, 15 bp, Homo sapiens
aaggttactctacac

SEQ ID NO: 1655032 - DNA, 15 bp, Homo sapiens
aggttactctacact

SEQ ID NO: 1655033 - DNA, 15 bp, Homo sapiens
ggttactctacactt

SEQ ID NO: 1655034 - DNA, 15 bp, Homo sapiens
gttactctacacttc

SEQ ID NO: 1655035 - DNA, 15 bp, Homo sapiens
ttactctacacttcc

SEQ ID NO: 1655036 - DNA, 15 bp, Homo sapiens
tactctacacttcca

SEQ ID NO: 1655037 - DNA, 15 bp, Homo sapiens
actctacacttccac

SEQ ID NO: 1655038 - DNA, 15 bp, Homo sapiens
ctctacacttccact

SEQ ID NO: 1655039 - DNA, 15 bp, Homo sapiens
tctacacttccactt

SEQ ID NO: 1655040 - DNA, 15 bp, Homo sapiens
ctacacttccacttt

SEQ ID NO: 1655041 - DNA, 15 bp, Homo sapiens
tacacttccactttg

SEQ ID NO: 1655042 - DNA, 15 bp, Homo sapiens
acacttccactttgc

SEQ ID NO: 1655043 - DNA, 15 bp, Homo sapiens
cacttccactttgcc

SEQ ID NO: 1655044 - DNA, 15 bp, Homo sapiens
acttccactttgcca

SEQ ID NO: 1655045 - DNA, 15 bp, Homo sapiens
cttccactttgccac

SEQ ID NO: 1655046 - DNA, 15 bp, Homo sapiens
ttccactttgccact

SEQ ID NO: 1655047 - DNA, 15 bp, Homo sapiens
tccactttgccactt

SEQ ID NO: 1655048 - DNA, 15 bp, Homo sapiens
ccactttgccacttt

SEQ ID NO: 1655049 - DNA, 15 bp, Homo sapiens
cactttgccactttc

SEQ ID NO: 1655050 - DNA, 15 bp, Homo sapiens
actttgccactttca

SEQ ID NO: 1655051 - DNA, 15 bp, Homo sapiens
ctttgccactttcat

SEQ ID NO: 1655052 - DNA, 15 bp, Homo sapiens
tttgccactttcatc

SEQ ID NO: 1655053 - DNA, 15 bp, Homo sapiens
ttgccactttcatca

SEQ ID NO: 1655054 - DNA, 15 bp, Homo sapiens
tgccactttcatcag

SEQ ID NO: 1655055 - DNA, 15 bp, Homo sapiens
gccactttcatcagt

SEQ ID NO: 1655056 - DNA, 15 bp, Homo sapiens
ccactttcatcagtt

SEQ ID NO: 1655057 - DNA, 15 bp, Homo sapiens
cactttcatcagtta

SEQ ID NO: 1655058 - DNA, 15 bp, Homo sapiens
actttcatcagttac

SEQ ID NO: 1655059 - DNA, 15 bp, Homo sapiens
ctttcatcagttact

SEQ ID NO: 1655060 - DNA, 15 bp, Homo sapiens
tttcatcagttactg

SEQ ID NO: 1655061 - DNA, 15 bp, Homo sapiens
ttcatcagttactgt

SEQ ID NO: 1655062 - DNA, 15 bp, Homo sapiens
tcatcagttactgtg

SEQ ID NO: 1655063 - DNA, 15 bp, Homo sapiens
catcagttactgtgt

SEQ ID NO: 1655064 - DNA, 15 bp, Homo sapiens
atcagttactgtgtt

SEQ ID NO: 1655065 - DNA, 15 bp, Homo sapiens
tcagttactgtgttc

SEQ ID NO: 1655066 - DNA, 15 bp, Homo sapiens
cagttactgtgttcc

SEQ ID NO: 1655067 - DNA, 15 bp, Homo sapiens
agttactgtgttcca

SEQ ID NO: 1655068 - DNA, 15 bp, Homo sapiens
gttactgtgttccaa

SEQ ID NO: 1655069 - DNA, 15 bp, Homo sapiens
ttactgtgttccaac

SEQ ID NO: 1655070 - DNA, 15 bp, Homo sapiens
tactgtgttccaact

SEQ ID NO: 1655071 - DNA, 15 bp, Homo sapiens
actgtgttccaactt

SEQ ID NO: 1655072 - DNA, 15 bp, Homo sapiens
ctgtgttccaacttt

SEQ ID NO: 1655073 - DNA, 15 bp, Homo sapiens
tgtgttccaactttc

SEQ ID NO: 1655074 - DNA, 15 bp, Homo sapiens
gtgttccaactttcc

SEQ ID NO: 1655075 - DNA, 15 bp, Homo sapiens
tgttccaactttcca

SEQ ID NO: 1655076 - DNA, 15 bp, Homo sapiens
gttccaactttccag

SEQ ID NO: 1655077 - DNA, 15 bp, Homo sapiens
ttccaactttccaga

SEQ ID NO: 1655078 - DNA, 15 bp, Homo sapiens
tccaactttccagag

SEQ ID NO: 1655079 - DNA, 15 bp, Homo sapiens
ccaactttccagagt

SEQ ID NO: 1655080 - DNA, 15 bp, Homo sapiens
caactttccagagtt

SEQ ID NO: 1655081 - DNA, 15 bp, Homo sapiens
aactttccagagtta

SEQ ID NO: 1655082 - DNA, 15 bp, Homo sapiens
actttccagagttag

SEQ ID NO: 1655083 - DNA, 15 bp, Homo sapiens
ctttccagagttaga

SEQ ID NO: 1655084 - DNA, 15 bp, Homo sapiens
tttccagagttagaa

SEQ ID NO: 1655085 - DNA, 15 bp, Homo sapiens
ttccagagttagaaa

SEQ ID NO: 1655086 - DNA, 15 bp, Homo sapiens
tccagagttagaaag

SEQ ID NO: 1655087 - DNA, 15 bp, Homo sapiens
ccagagttagaaagt

SEQ ID NO: 1655088 - DNA, 15 bp, Homo sapiens
cagagttagaaagtc

SEQ ID NO: 1655089 - DNA, 15 bp, Homo sapiens
agagttagaaagtca

SEQ ID NO: 1655090 - DNA, 15 bp, Homo sapiens
gagttagaaagtcag

SEQ ID NO: 1655091 - DNA, 15 bp, Homo sapiens
agttagaaagtcaga

SEQ ID NO: 1655092 - DNA, 15 bp, Homo sapiens
gttagaaagtcagac

SEQ ID NO: 1655093 - DNA, 15 bp, Homo sapiens
ttagaaagtcagaca

SEQ ID NO: 1655094 - DNA, 15 bp, Homo sapiens
tagaaagtcagacat

SEQ ID NO: 1655095 - DNA, 15 bp, Homo sapiens
agaaagtcagacatc

SEQ ID NO: 1655096 - DNA, 15 bp, Homo sapiens
gaaagtcagacatct

SEQ ID NO: 1655097 - DNA, 15 bp, Homo sapiens
aaagtcagacatctt

SEQ ID NO: 1655098 - DNA, 15 bp, Homo sapiens
aagtcagacatcttt

SEQ ID NO: 1655099 - DNA, 15 bp, Homo sapiens
agtcagacatcttta

SEQ ID NO: 1655100 - DNA, 15 bp, Homo sapiens
gtcagacatctttat

SEQ ID NO: 1655101 - DNA, 15 bp, Homo sapiens
tcagacatctttatc

SEQ ID NO: 1655102 - DNA, 15 bp, Homo sapiens
cagacatctttatct

SEQ ID NO: 1655103 - DNA, 15 bp, Homo sapiens
agacatctttatctt

SEQ ID NO: 1655104 - DNA, 15 bp, Homo sapiens
gacatctttatcttt

SEQ ID NO: 1655105 - DNA, 15 bp, Homo sapiens
acatctttatctttt

SEQ ID NO: 1655106 - DNA, 15 bp, Homo sapiens
catctttatcttttc

SEQ ID NO: 1655107 - DNA, 15 bp, Homo sapiens
atctttatcttttct

SEQ ID NO: 1655108 - DNA, 15 bp, Homo sapiens
tctttatcttttctc

SEQ ID NO: 1655109 - DNA, 15 bp, Homo sapiens
ctttatcttttctca

SEQ ID NO: 1655110 - DNA, 15 bp, Homo sapiens
tttatcttttctcac

SEQ ID NO: 1655111 - DNA, 15 bp, Homo sapiens
ttatcttttctcaca

SEQ ID NO: 1655112 - DNA, 15 bp, Homo sapiens
tatcttttctcacag

SEQ ID NO: 1655113 - DNA, 15 bp, Homo sapiens
atcttttctcacagt

SEQ ID NO: 1655114 - DNA, 15 bp, Homo sapiens
tcttttctcacagtg

SEQ ID NO: 1655115 - DNA, 15 bp, Homo sapiens
cttttctcacagtgc

SEQ ID NO: 1655116 - DNA, 15 bp, Homo sapiens
ttttctcacagtgca

SEQ ID NO: 1655117 - DNA, 15 bp, Homo sapiens
tttctcacagtgcat

SEQ ID NO: 1655118 - DNA, 15 bp, Homo sapiens
ttctcacagtgcatc

SEQ ID NO: 1655119 - DNA, 15 bp, Homo sapiens
tctcacagtgcatca

SEQ ID NO: 1655120 - DNA, 15 bp, Homo sapiens
ctcacagtgcatcat

SEQ ID NO: 1655121 - DNA, 15 bp, Homo sapiens
tcacagtgcatcatt

SEQ ID NO: 1655122 - DNA, 15 bp, Homo sapiens
cacagtgcatcattt

SEQ ID NO: 1655123 - DNA, 15 bp, Homo sapiens
acagtgcatcatttg

SEQ ID NO: 1655124 - DNA, 15 bp, Homo sapiens
cagtgcatcatttgc

SEQ ID NO: 1655125 - DNA, 15 bp, Homo sapiens
agtgcatcatttgcc

SEQ ID NO: 1655126 - DNA, 15 bp, Homo sapiens
gtgcatcatttgcca

SEQ ID NO: 1655127 - DNA, 15 bp, Homo sapiens
tgcatcatttgccag

SEQ ID NO: 1655128 - DNA, 15 bp, Homo sapiens
gcatcatttgccagg

SEQ ID NO: 1655129 - DNA, 15 bp, Homo sapiens
catcatttgccaggt

SEQ ID NO: 1655130 - DNA, 15 bp, Homo sapiens
atcatttgccaggtc

SEQ ID NO: 1655131 - DNA, 15 bp, Homo sapiens
tcatttgccaggtcc

SEQ ID NO: 1655132 - DNA, 15 bp, Homo sapiens
catttgccaggtcct

SEQ ID NO: 1655133 - DNA, 15 bp, Homo sapiens
atttgccaggtcctg

SEQ ID NO: 1655134 - DNA, 15 bp, Homo sapiens
tttgccaggtcctgt

SEQ ID NO: 1655135 - DNA, 15 bp, Homo sapiens
ttgccaggtcctgtg

SEQ ID NO: 1655136 - DNA, 15 bp, Homo sapiens
tgccaggtcctgtgc

SEQ ID NO: 1655137 - DNA, 15 bp, Homo sapiens
gccaggtcctgtgca

SEQ ID NO: 1655138 - DNA, 15 bp, Homo sapiens
ccaggtcctgtgcag

SEQ ID NO: 1655139 - DNA, 15 bp, Homo sapiens
caggtcctgtgcagt

SEQ ID NO: 1655140 - DNA, 15 bp, Homo sapiens
aggtcctgtgcagtt

SEQ ID NO: 1655141 - DNA, 15 bp, Homo sapiens
ggtcctgtgcagttc

SEQ ID NO: 1655142 - DNA, 15 bp, Homo sapiens
gtcctgtgcagttcc

SEQ ID NO: 1655143 - DNA, 15 bp, Homo sapiens
tcctgtgcagttccc

SEQ ID NO: 1655144 - DNA, 15 bp, Homo sapiens
cctgtgcagttccct

SEQ ID NO: 1655145 - DNA, 15 bp, Homo sapiens
ctgtgcagttccctc

SEQ ID NO: 1655146 - DNA, 15 bp, Homo sapiens
tgtgcagttccctca

SEQ ID NO: 1655147 - DNA, 15 bp, Homo sapiens
gtgcagttccctcaa

SEQ ID NO: 1655148 - DNA, 15 bp, Homo sapiens
tgcagttccctcaat

SEQ ID NO: 1655149 - DNA, 15 bp, Homo sapiens
gcagttccctcaata

SEQ ID NO: 1655150 - DNA, 15 bp, Homo sapiens
cagttccctcaataa

SEQ ID NO: 1655151 - DNA, 15 bp, Homo sapiens
agttccctcaataac

SEQ ID NO: 1655152 - DNA, 15 bp, Homo sapiens
gttccctcaataacg

SEQ ID NO: 1655153 - DNA, 15 bp, Homo sapiens
ttccctcaataacgt

SEQ ID NO: 1655154 - DNA, 15 bp, Homo sapiens
tccctcaataacgtc

SEQ ID NO: 1655155 - DNA, 15 bp, Homo sapiens
ccctcaataacgtcc

SEQ ID NO: 1655156 - DNA, 15 bp, Homo sapiens
cctcaataacgtcct

SEQ ID NO: 1655157 - DNA, 15 bp, Homo sapiens
ctcaataacgtcctc

SEQ ID NO: 1655158 - DNA, 15 bp, Homo sapiens
tcaataacgtcctct

SEQ ID NO: 1655159 - DNA, 15 bp, Homo sapiens
caataacgtcctctc

SEQ ID NO: 1655160 - DNA, 15 bp, Homo sapiens
aataacgtcctctct

SEQ ID NO: 1655161 - DNA, 15 bp, Homo sapiens
ataacgtcctctctg

SEQ ID NO: 1655162 - DNA, 15 bp, Homo sapiens
taacgtcctctctgt

SEQ ID NO: 1655163 - DNA, 15 bp, Homo sapiens
aacgtcctctctgtt

SEQ ID NO: 1655164 - DNA, 15 bp, Homo sapiens
acgtcctctctgttt

SEQ ID NO: 1655165 - DNA, 15 bp, Homo sapiens
cgtcctctctgtttt

SEQ ID NO: 1655166 - DNA, 15 bp, Homo sapiens
gtcctctctgttttc

SEQ ID NO: 1655167 - DNA, 15 bp, Homo sapiens
tcctctctgttttct

SEQ ID NO: 1655168 - DNA, 15 bp, Homo sapiens
cctctctgttttctc

SEQ ID NO: 1655169 - DNA, 15 bp, Homo sapiens
ctctctgttttctct

SEQ ID NO: 1655170 - DNA, 15 bp, Homo sapiens
tctctgttttctctt

SEQ ID NO: 1655171 - DNA, 15 bp, Homo sapiens
ctctgttttctcttt

SEQ ID NO: 1655172 - DNA, 15 bp, Homo sapiens
tctgttttctctttc

SEQ ID NO: 1655173 - DNA, 15 bp, Homo sapiens
ctgttttctctttcc

SEQ ID NO: 1655174 - DNA, 15 bp, Homo sapiens
tgttttctctttccc

SEQ ID NO: 1655175 - DNA, 15 bp, Homo sapiens
gttttctctttcccc

SEQ ID NO: 1655176 - DNA, 15 bp, Homo sapiens
ttttctctttcccca

SEQ ID NO: 1655177 - DNA, 15 bp, Homo sapiens
tttctctttccccac

SEQ ID NO: 1655178 - DNA, 15 bp, Homo sapiens
ttctctttccccact

SEQ ID NO: 1655179 - DNA, 15 bp, Homo sapiens
tctctttccccacta

SEQ ID NO: 1655180 - DNA, 15 bp, Homo sapiens
ctctttccccactat

SEQ ID NO: 1655181 - DNA, 15 bp, Homo sapiens
tctttccccactatt

SEQ ID NO: 1655182 - DNA, 15 bp, Homo sapiens
ctttccccactattc

SEQ ID NO: 1655183 - DNA, 15 bp, Homo sapiens
tttccccactattct

SEQ ID NO: 1655184 - DNA, 15 bp, Homo sapiens
ttccccactattctc

SEQ ID NO: 1655185 - DNA, 15 bp, Homo sapiens
tccccactattctca

SEQ ID NO: 1655186 - DNA, 15 bp, Homo sapiens
ccccactattctcat

SEQ ID NO: 1655187 - DNA, 15 bp, Homo sapiens
cccactattctcatg

SEQ ID NO: 1655188 - DNA, 15 bp, Homo sapiens
ccactattctcatgc

SEQ ID NO: 1655189 - DNA, 15 bp, Homo sapiens
cactattctcatgcc

SEQ ID NO: 1655190 - DNA, 15 bp, Homo sapiens
actattctcatgcca

SEQ ID NO: 1655191 - DNA, 15 bp, Homo sapiens
ctattctcatgccac

SEQ ID NO: 1655192 - DNA, 15 bp, Homo sapiens
tattctcatgccact

SEQ ID NO: 1655193 - DNA, 15 bp, Homo sapiens
attctcatgccactg

SEQ ID NO: 1655194 - DNA, 15 bp, Homo sapiens
ttctcatgccactga

SEQ ID NO: 1655195 - DNA, 15 bp, Homo sapiens
tctcatgccactgac

SEQ ID NO: 1655196 - DNA, 15 bp, Homo sapiens
ctcatgccactgaca

SEQ ID NO: 1655197 - DNA, 15 bp, Homo sapiens
tcatgccactgacat

SEQ ID NO: 1655198 - DNA, 15 bp, Homo sapiens
catgccactgacatc

SEQ ID NO: 1655199 - DNA, 15 bp, Homo sapiens
atgccactgacatct

SEQ ID NO: 1655200 - DNA, 15 bp, Homo sapiens
tgccactgacatctc

SEQ ID NO: 1655201 - DNA, 15 bp, Homo sapiens
gccactgacatctct

SEQ ID NO: 1655202 - DNA, 15 bp, Homo sapiens
ccactgacatctctc

SEQ ID NO: 1655203 - DNA, 15 bp, Homo sapiens
cactgacatctctca

SEQ ID NO: 1655204 - DNA, 15 bp, Homo sapiens
actgacatctctcaa

SEQ ID NO: 1655205 - DNA, 15 bp, Homo sapiens
ctgacatctctcaat

SEQ ID NO: 1655206 - DNA, 15 bp, Homo sapiens
tgacatctctcaatg

SEQ ID NO: 1655207 - DNA, 15 bp, Homo sapiens
gacatctctcaatgg

SEQ ID NO: 1655208 - DNA, 15 bp, Homo sapiens
acatctctcaatgga

SEQ ID NO: 1655209 - DNA, 15 bp, Homo sapiens
catctctcaatggac

SEQ ID NO: 1655210 - DNA, 15 bp, Homo sapiens
atctctcaatggaca

SEQ ID NO: 1655211 - DNA, 15 bp, Homo sapiens
tctctcaatggacaa

SEQ ID NO: 1655212 - DNA, 15 bp, Homo sapiens
ctctcaatggacaac

SEQ ID NO: 1655213 - DNA, 15 bp, Homo sapiens
tctcaatggacaact

SEQ ID NO: 1655214 - DNA, 15 bp, Homo sapiens
ctcaatggacaactt

SEQ ID NO: 1655215 - DNA, 15 bp, Homo sapiens
tcaatggacaactta

SEQ ID NO: 1655216 - DNA, 15 bp, Homo sapiens
caatggacaacttag

SEQ ID NO: 1655217 - DNA, 15 bp, Homo sapiens
aatggacaacttagt

SEQ ID NO: 1655218 - DNA, 15 bp, Homo sapiens
atggacaacttagta

SEQ ID NO: 1655219 - DNA, 15 bp, Homo sapiens
tggacaacttagtag

SEQ ID NO: 1655220 - DNA, 15 bp, Homo sapiens
ggacaacttagtagg

SEQ ID NO: 1655221 - DNA, 15 bp, Homo sapiens
gacaacttagtaggt

SEQ ID NO: 1655222 - DNA, 15 bp, Homo sapiens
acaacttagtaggtt

SEQ ID NO: 1655223 - DNA, 15 bp, Homo sapiens
caacttagtaggttc

SEQ ID NO: 1655224 - DNA, 15 bp, Homo sapiens
aacttagtaggttcc

SEQ ID NO: 1655225 - DNA, 15 bp, Homo sapiens
acttagtaggttccc

SEQ ID NO: 1655226 - DNA, 15 bp, Homo sapiens
cttagtaggttccct

SEQ ID NO: 1655227 - DNA, 15 bp, Homo sapiens
ttagtaggttccctg

SEQ ID NO: 1655228 - DNA, 15 bp, Homo sapiens
tagtaggttccctgc

SEQ ID NO: 1655229 - DNA, 15 bp, Homo sapiens
agtaggttccctgcc

SEQ ID NO: 1655230 - DNA, 15 bp, Homo sapiens
gtaggttccctgcct

SEQ ID NO: 1655231 - DNA, 15 bp, Homo sapiens
taggttccctgcctc

SEQ ID NO: 1655232 - DNA, 15 bp, Homo sapiens
aggttccctgcctcc

SEQ ID NO: 1655233 - DNA, 15 bp, Homo sapiens
ggttccctgcctcct

SEQ ID NO: 1655234 - DNA, 15 bp, Homo sapiens
gttccctgcctcctt

SEQ ID NO: 1655235 - DNA, 15 bp, Homo sapiens
ttccctgcctccttc

SEQ ID NO: 1655236 - DNA, 15 bp, Homo sapiens
tccctgcctccttct

SEQ ID NO: 1655237 - DNA, 15 bp, Homo sapiens
ccctgcctccttctc

SEQ ID NO: 1655238 - DNA, 15 bp, Homo sapiens
cctgcctccttctct

SEQ ID NO: 1655239 - DNA, 15 bp, Homo sapiens
ctgcctccttctctt

SEQ ID NO: 1655240 - DNA, 15 bp, Homo sapiens
tgcctccttctcttc

SEQ ID NO: 1655241 - DNA, 15 bp, Homo sapiens
gcctccttctcttcc

SEQ ID NO: 1655242 - DNA, 15 bp, Homo sapiens
cctccttctcttccc

SEQ ID NO: 1655243 - DNA, 15 bp, Homo sapiens
ctccttctcttccca

SEQ ID NO: 1655244 - DNA, 15 bp, Homo sapiens
tccttctcttcccac

SEQ ID NO: 1655245 - DNA, 15 bp, Homo sapiens
ccttctcttcccacc

SEQ ID NO: 1655246 - DNA, 15 bp, Homo sapiens
cttctcttcccaccc

SEQ ID NO: 1655247 - DNA, 15 bp, Homo sapiens
ttctcttcccacccc

SEQ ID NO: 1655248 - DNA, 15 bp, Homo sapiens
tctcttcccacccca

SEQ ID NO: 1655249 - DNA, 15 bp, Homo sapiens
ctcttcccaccccag

SEQ ID NO: 1655250 - DNA, 15 bp, Homo sapiens
tcttcccaccccagt

SEQ ID NO: 1655251 - DNA, 15 bp, Homo sapiens
cttcccaccccagtc

SEQ ID NO: 1655252 - DNA, 15 bp, Homo sapiens
ttcccaccccagtct

SEQ ID NO: 1655253 - DNA, 15 bp, Homo sapiens
tcccaccccagtcta

SEQ ID NO: 1655254 - DNA, 15 bp, Homo sapiens
cccaccccagtctaa

SEQ ID NO: 1655255 - DNA, 15 bp, Homo sapiens
ccaccccagtctaat

SEQ ID NO: 1655256 - DNA, 15 bp, Homo sapiens
caccccagtctaatc

SEQ ID NO: 1655257 - DNA, 15 bp, Homo sapiens
accccagtctaatct

SEQ ID NO: 1655258 - DNA, 15 bp, Homo sapiens
ccccagtctaatcta

SEQ ID NO: 1655259 - DNA, 15 bp, Homo sapiens
cccagtctaatctat

SEQ ID NO: 1655260 - DNA, 15 bp, Homo sapiens
ccagtctaatctata

SEQ ID NO: 1655261 - DNA, 15 bp, Homo sapiens
cagtctaatctatat

SEQ ID NO: 1655262 - DNA, 15 bp, Homo sapiens
agtctaatctatatg

SEQ ID NO: 1655263 - DNA, 15 bp, Homo sapiens
gtctaatctatatgc

SEQ ID NO: 1655264 - DNA, 15 bp, Homo sapiens
tctaatctatatgct

SEQ ID NO: 1655265 - DNA, 15 bp, Homo sapiens
ctaatctatatgctg

SEQ ID NO: 1655266 - DNA, 15 bp, Homo sapiens
taatctatatgctgc

SEQ ID NO: 1655267 - DNA, 15 bp, Homo sapiens
aatctatatgctgct

SEQ ID NO: 1655268 - DNA, 15 bp, Homo sapiens
atctatatgctgctg

SEQ ID NO: 1655269 - DNA, 15 bp, Homo sapiens
tctatatgctgctgc

SEQ ID NO: 1655270 - DNA, 15 bp, Homo sapiens
ctatatgctgctgcc

SEQ ID NO: 1655271 - DNA, 15 bp, Homo sapiens
tatatgctgctgcca

SEQ ID NO: 1655272 - DNA, 15 bp, Homo sapiens
atatgctgctgccac

SEQ ID NO: 1655273 - DNA, 15 bp, Homo sapiens
tatgctgctgccaca

SEQ ID NO: 1655274 - DNA, 15 bp, Homo sapiens
atgctgctgccacat

SEQ ID NO: 1655275 - DNA, 15 bp, Homo sapiens
tgctgctgccacatc

SEQ ID NO: 1655276 - DNA, 15 bp, Homo sapiens
gctgctgccacatca

SEQ ID NO: 1655277 - DNA, 15 bp, Homo sapiens
ctgctgccacatcag

SEQ ID NO: 1655278 - DNA, 15 bp, Homo sapiens
tgctgccacatcagt

SEQ ID NO: 1655279 - DNA, 15 bp, Homo sapiens
gctgccacatcagtc

SEQ ID NO: 1655280 - DNA, 15 bp, Homo sapiens
ctgccacatcagtct

SEQ ID NO: 1655281 - DNA, 15 bp, Homo sapiens
tgccacatcagtctt

SEQ ID NO: 1655282 - DNA, 15 bp, Homo sapiens
gccacatcagtcttc

SEQ ID NO: 1655283 - DNA, 15 bp, Homo sapiens
ccacatcagtcttcc

SEQ ID NO: 1655284 - DNA, 15 bp, Homo sapiens
cacatcagtcttcct

SEQ ID NO: 1655285 - DNA, 15 bp, Homo sapiens
acatcagtcttccta

SEQ ID NO: 1655286 - DNA, 15 bp, Homo sapiens
catcagtcttcctaa

SEQ ID NO: 1655287 - DNA, 15 bp, Homo sapiens
atcagtcttcctaat

SEQ ID NO: 1655288 - DNA, 15 bp, Homo sapiens
tcagtcttcctaatc

SEQ ID NO: 1655289 - DNA, 15 bp, Homo sapiens
cagtcttcctaatcc

SEQ ID NO: 1655290 - DNA, 15 bp, Homo sapiens
agtcttcctaatcca

SEQ ID NO: 1655291 - DNA, 15 bp, Homo sapiens
gtcttcctaatccac

SEQ ID NO: 1655292 - DNA, 15 bp, Homo sapiens
tcttcctaatccacc

SEQ ID NO: 1655293 - DNA, 15 bp, Homo sapiens
cttcctaatccacca

SEQ ID NO: 1655294 - DNA, 15 bp, Homo sapiens
ttcctaatccaccaa

SEQ ID NO: 1655295 - DNA, 15 bp, Homo sapiens
tcctaatccaccaaa

SEQ ID NO: 1655296 - DNA, 15 bp, Homo sapiens
cctaatccaccaaag

SEQ ID NO: 1655297 - DNA, 15 bp, Homo sapiens
ctaatccaccaaagt

SEQ ID NO: 1655298 - DNA, 15 bp, Homo sapiens
taatccaccaaagtg

SEQ ID NO: 1655299 - DNA, 15 bp, Homo sapiens
aatccaccaaagtga

SEQ ID NO: 1655300 - DNA, 15 bp, Homo sapiens
atccaccaaagtgat

SEQ ID NO: 1655301 - DNA, 15 bp, Homo sapiens
tccaccaaagtgatg

SEQ ID NO: 1655302 - DNA, 15 bp, Homo sapiens
ccaccaaagtgatgt

SEQ ID NO: 1655303 - DNA, 15 bp, Homo sapiens
caccaaagtgatgtc

SEQ ID NO: 1655304 - DNA, 15 bp, Homo sapiens
accaaagtgatgtca

SEQ ID NO: 1655305 - DNA, 15 bp, Homo sapiens
ccaaagtgatgtcag

SEQ ID NO: 1655306 - DNA, 15 bp, Homo sapiens
caaagtgatgtcaga

SEQ ID NO: 1655307 - DNA, 15 bp, Homo sapiens
aaagtgatgtcagaa

SEQ ID NO: 1655308 - DNA, 15 bp, Homo sapiens
aagtgatgtcagaat

SEQ ID NO: 1655309 - DNA, 15 bp, Homo sapiens
agtgatgtcagaata

SEQ ID NO: 1655310 - DNA, 15 bp, Homo sapiens
gtgatgtcagaataa

SEQ ID NO: 1655311 - DNA, 15 bp, Homo sapiens
tgatgtcagaataaa

SEQ ID NO: 1655312 - DNA, 15 bp, Homo sapiens
gatgtcagaataaaa

SEQ ID NO: 1655313 - DNA, 15 bp, Homo sapiens
atgtcagaataaaag

SEQ ID NO: 1655314 - DNA, 15 bp, Homo sapiens
tgtcagaataaaaga

SEQ ID NO: 1655315 - DNA, 15 bp, Homo sapiens
gtcagaataaaagaa

SEQ ID NO: 1655316 - DNA, 15 bp, Homo sapiens
tcagaataaaagaat

SEQ ID NO: 1655317 - DNA, 15 bp, Homo sapiens
cagaataaaagaatg

SEQ ID NO: 1655318 - DNA, 15 bp, Homo sapiens
agaataaaagaatgg

SEQ ID NO: 1655319 - DNA, 15 bp, Homo sapiens
gaataaaagaatggt

SEQ ID NO: 1655320 - DNA, 15 bp, Homo sapiens
aataaaagaatggtg

SEQ ID NO: 1655321 - DNA, 15 bp, Homo sapiens
ataaaagaatggtgc

SEQ ID NO: 1655322 - DNA, 15 bp, Homo sapiens
taaaagaatggtgca

SEQ ID NO: 1655323 - DNA, 15 bp, Homo sapiens
aaaagaatggtgcat

SEQ ID NO: 1655324 - DNA, 15 bp, Homo sapiens
aaagaatggtgcatt

SEQ ID NO: 1655325 - DNA, 15 bp, Homo sapiens
aagaatggtgcattt

SEQ ID NO: 1655326 - DNA, 15 bp, Homo sapiens
agaatggtgcatttg

SEQ ID NO: 1655327 - DNA, 15 bp, Homo sapiens
gaatggtgcatttga

SEQ ID NO: 1655328 - DNA, 15 bp, Homo sapiens
aatggtgcatttgaa

SEQ ID NO: 1655329 - DNA, 15 bp, Homo sapiens
atggtgcatttgaag

SEQ ID NO: 1655330 - DNA, 15 bp, Homo sapiens
tggtgcatttgaagg

SEQ ID NO: 1655331 - DNA, 15 bp, Homo sapiens
ggtgcatttgaaggg

SEQ ID NO: 1655332 - DNA, 15 bp, Homo sapiens
gtgcatttgaagggg

SEQ ID NO: 1655333 - DNA, 15 bp, Homo sapiens
tgcatttgaaggggc

SEQ ID NO: 1655334 - DNA, 15 bp, Homo sapiens
gcatttgaaggggcc

SEQ ID NO: 1655335 - DNA, 15 bp, Homo sapiens
catttgaaggggcct

SEQ ID NO: 1655336 - DNA, 15 bp, Homo sapiens
atttgaaggggcctt

SEQ ID NO: 1655337 - DNA, 15 bp, Homo sapiens
tttgaaggggccttc

SEQ ID NO: 1655338 - DNA, 15 bp, Homo sapiens
ttgaaggggccttcc

SEQ ID NO: 1655339 - DNA, 15 bp, Homo sapiens
tgaaggggccttcca

SEQ ID NO: 1655340 - DNA, 15 bp, Homo sapiens
gaaggggccttccaa

SEQ ID NO: 1655341 - DNA, 15 bp, Homo sapiens
aaggggccttccaaa

SEQ ID NO: 1655342 - DNA, 15 bp, Homo sapiens
aggggccttccaaat

SEQ ID NO: 1655343 - DNA, 15 bp, Homo sapiens
ggggccttccaaatc

SEQ ID NO: 1655344 - DNA, 15 bp, Homo sapiens
gggccttccaaatct

SEQ ID NO: 1655345 - DNA, 15 bp, Homo sapiens
ggccttccaaatctc

SEQ ID NO: 1655346 - DNA, 15 bp, Homo sapiens
gccttccaaatctct

SEQ ID NO: 1655347 - DNA, 15 bp, Homo sapiens
ccttccaaatctctg

SEQ ID NO: 1655348 - DNA, 15 bp, Homo sapiens
cttccaaatctctgt

SEQ ID NO: 1655349 - DNA, 15 bp, Homo sapiens
ttccaaatctctgta

SEQ ID NO: 1655350 - DNA, 15 bp, Homo sapiens
tccaaatctctgtag

SEQ ID NO: 1655351 - DNA, 15 bp, Homo sapiens
ccaaatctctgtagg

SEQ ID NO: 1655352 - DNA, 15 bp, Homo sapiens
caaatctctgtaggc

SEQ ID NO: 1655353 - DNA, 15 bp, Homo sapiens
aaatctctgtaggct

SEQ ID NO: 1655354 - DNA, 15 bp, Homo sapiens
aatctctgtaggctc

SEQ ID NO: 1655355 - DNA, 15 bp, Homo sapiens
atctctgtaggctcc

SEQ ID NO: 1655356 - DNA, 15 bp, Homo sapiens
tctctgtaggctcct

SEQ ID NO: 1655357 - DNA, 15 bp, Homo sapiens
ctctgtaggctcctt

SEQ ID NO: 1655358 - DNA, 15 bp, Homo sapiens
tctgtaggctccttt

SEQ ID NO: 1655359 - DNA, 15 bp, Homo sapiens
ctgtaggctcctttc

SEQ ID NO: 1655360 - DNA, 15 bp, Homo sapiens
tgtaggctcctttca

SEQ ID NO: 1655361 - DNA, 15 bp, Homo sapiens
gtaggctcctttcaa

SEQ ID NO: 1655362 - DNA, 15 bp, Homo sapiens
taggctcctttcaaa

SEQ ID NO: 1655363 - DNA, 15 bp, Homo sapiens
aggctcctttcaaaa

SEQ ID NO: 1655364 - DNA, 15 bp, Homo sapiens
ggctcctttcaaaat

SEQ ID NO: 1655365 - DNA, 15 bp, Homo sapiens
gctcctttcaaaatg

SEQ ID NO: 1655366 - DNA, 15 bp, Homo sapiens
ctcctttcaaaatga

SEQ ID NO: 1655367 - DNA, 15 bp, Homo sapiens
tcctttcaaaatgag

SEQ ID NO: 1655368 - DNA, 15 bp, Homo sapiens
cctttcaaaatgaga

SEQ ID NO: 1655369 - DNA, 15 bp, Homo sapiens
ctttcaaaatgagat

SEQ ID NO: 1655370 - DNA, 15 bp, Homo sapiens
tttcaaaatgagatg

SEQ ID NO: 1655371 - DNA, 15 bp, Homo sapiens
ttcaaaatgagatga

SEQ ID NO: 1655372 - DNA, 15 bp, Homo sapiens
tcaaaatgagatgaa

SEQ ID NO: 1655373 - DNA, 15 bp, Homo sapiens
caaaatgagatgaat

SEQ ID NO: 1655374 - DNA, 15 bp, Homo sapiens
aaaatgagatgaata

SEQ ID NO: 1655375 - DNA, 15 bp, Homo sapiens
aaatgagatgaatag

SEQ ID NO: 1655376 - DNA, 15 bp, Homo sapiens
aatgagatgaataga

SEQ ID NO: 1655377 - DNA, 15 bp, Homo sapiens
atgagatgaatagat

SEQ ID NO: 1655378 - DNA, 15 bp, Homo sapiens
tgagatgaatagata

SEQ ID NO: 1655379 - DNA, 15 bp, Homo sapiens
gagatgaatagataa

SEQ ID NO: 1655380 - DNA, 15 bp, Homo sapiens
agatgaatagataag

SEQ ID NO: 1655381 - DNA, 15 bp, Homo sapiens
gatgaatagataaga

SEQ ID NO: 1655382 - DNA, 15 bp, Homo sapiens
atgaatagataagat

SEQ ID NO: 1655383 - DNA, 15 bp, Homo sapiens
tgaatagataagatt

SEQ ID NO: 1655384 - DNA, 15 bp, Homo sapiens
gaatagataagattt

SEQ ID NO: 1655385 - DNA, 15 bp, Homo sapiens
aatagataagattta

SEQ ID NO: 1655386 - DNA, 15 bp, Homo sapiens
atagataagatttac

SEQ ID NO: 1655387 - DNA, 15 bp, Homo sapiens
tagataagatttaca

SEQ ID NO: 1655388 - DNA, 15 bp, Homo sapiens
agataagatttacag

SEQ ID NO: 1655389 - DNA, 15 bp, Homo sapiens
gataagatttacagg

SEQ ID NO: 1655390 - DNA, 15 bp, Homo sapiens
ataagatttacaggg

SEQ ID NO: 1655391 - DNA, 15 bp, Homo sapiens
taagatttacagggg

SEQ ID NO: 1655392 - DNA, 15 bp, Homo sapiens
aagatttacagggga

SEQ ID NO: 1655393 - DNA, 15 bp, Homo sapiens
agatttacaggggaa

SEQ ID NO: 1655394 - DNA, 15 bp, Homo sapiens
gatttacaggggaag

SEQ ID NO: 1655395 - DNA, 15 bp, Homo sapiens
atttacaggggaagt

SEQ ID NO: 1655396 - DNA, 15 bp, Homo sapiens
tttacaggggaagta

SEQ ID NO: 1655397 - DNA, 15 bp, Homo sapiens
ttacaggggaagtac

SEQ ID NO: 1655398 - DNA, 15 bp, Homo sapiens
tacaggggaagtact

SEQ ID NO: 1655399 - DNA, 15 bp, Homo sapiens
acaggggaagtactg

SEQ ID NO: 1655400 - DNA, 15 bp, Homo sapiens
caggggaagtactgc

SEQ ID NO: 1655401 - DNA, 15 bp, Homo sapiens
aggggaagtactgcc

SEQ ID NO: 1655402 - DNA, 15 bp, Homo sapiens
ggggaagtactgcct

SEQ ID NO: 1655403 - DNA, 15 bp, Homo sapiens
gggaagtactgcctg

SEQ ID NO: 1655404 - DNA, 15 bp, Homo sapiens
ggaagtactgcctgt

SEQ ID NO: 1655405 - DNA, 15 bp, Homo sapiens
gaagtactgcctgtt

SEQ ID NO: 1655406 - DNA, 15 bp, Homo sapiens
aagtactgcctgttt

SEQ ID NO: 1655407 - DNA, 15 bp, Homo sapiens
agtactgcctgtttg

SEQ ID NO: 1655408 - DNA, 15 bp, Homo sapiens
gtactgcctgtttgc

SEQ ID NO: 1655409 - DNA, 15 bp, Homo sapiens
tactgcctgtttgcc

SEQ ID NO: 1655410 - DNA, 15 bp, Homo sapiens
actgcctgtttgcca

SEQ ID NO: 1655411 - DNA, 15 bp, Homo sapiens
ctgcctgtttgccac

SEQ ID NO: 1655412 - DNA, 15 bp, Homo sapiens
tgcctgtttgccact

SEQ ID NO: 1655413 - DNA, 15 bp, Homo sapiens
gcctgtttgccactg

SEQ ID NO: 1655414 - DNA, 15 bp, Homo sapiens
cctgtttgccactga

SEQ ID NO: 1655415 - DNA, 15 bp, Homo sapiens
ctgtttgccactgac

SEQ ID NO: 1655416 - DNA, 15 bp, Homo sapiens
tgtttgccactgact

SEQ ID NO: 1655417 - DNA, 15 bp, Homo sapiens
gtttgccactgacta

SEQ ID NO: 1655418 - DNA, 15 bp, Homo sapiens
tttgccactgactat

SEQ ID NO: 1655419 - DNA, 15 bp, Homo sapiens
ttgccactgactatt

SEQ ID NO: 1655420 - DNA, 15 bp, Homo sapiens
tgccactgactatta

SEQ ID NO: 1655421 - DNA, 15 bp, Homo sapiens
gccactgactattaa

SEQ ID NO: 1655422 - DNA, 15 bp, Homo sapiens
ccactgactattaat

SEQ ID NO: 1655423 - DNA, 15 bp, Homo sapiens
cactgactattaata

SEQ ID NO: 1655424 - DNA, 15 bp, Homo sapiens
actgactattaatag

SEQ ID NO: 1655425 - DNA, 15 bp, Homo sapiens
ctgactattaatagc

SEQ ID NO: 1655426 - DNA, 15 bp, Homo sapiens
tgactattaatagct

SEQ ID NO: 1655427 - DNA, 15 bp, Homo sapiens
gactattaatagctc

SEQ ID NO: 1655428 - DNA, 15 bp, Homo sapiens
actattaatagctca

SEQ ID NO: 1655429 - DNA, 15 bp, Homo sapiens
ctattaatagctcac

SEQ ID NO: 1655430 - DNA, 15 bp, Homo sapiens
tattaatagctcaca

SEQ ID NO: 1655431 - DNA, 15 bp, Homo sapiens
attaatagctcacat

SEQ ID NO: 1655432 - DNA, 15 bp, Homo sapiens
ttaatagctcacatg

SEQ ID NO: 1655433 - DNA, 15 bp, Homo sapiens
taatagctcacatgc

SEQ ID NO: 1655434 - DNA, 15 bp, Homo sapiens
aatagctcacatgca

SEQ ID NO: 1655435 - DNA, 15 bp, Homo sapiens
atagctcacatgcat

SEQ ID NO: 1655436 - DNA, 15 bp, Homo sapiens
tagctcacatgcata

SEQ ID NO: 1655437 - DNA, 15 bp, Homo sapiens
agctcacatgcataa

SEQ ID NO: 1655438 - DNA, 15 bp, Homo sapiens
gctcacatgcataat

SEQ ID NO: 1655439 - DNA, 15 bp, Homo sapiens
ctcacatgcataatc

SEQ ID NO: 1655440 - DNA, 15 bp, Homo sapiens
tcacatgcataatca

SEQ ID NO: 1655441 - DNA, 15 bp, Homo sapiens
cacatgcataatcat

SEQ ID NO: 1655442 - DNA, 15 bp, Homo sapiens
acatgcataatcatg

SEQ ID NO: 1655443 - DNA, 15 bp, Homo sapiens
catgcataatcatgt

SEQ ID NO: 1655444 - DNA, 15 bp, Homo sapiens
atgcataatcatgtg

SEQ ID NO: 1655445 - DNA, 15 bp, Homo sapiens
tgcataatcatgtga

SEQ ID NO: 1655446 - DNA, 15 bp, Homo sapiens
gcataatcatgtgaa

SEQ ID NO: 1655447 - DNA, 15 bp, Homo sapiens
cataatcatgtgaaa

SEQ ID NO: 1655448 - DNA, 15 bp, Homo sapiens
ataatcatgtgaaat

SEQ ID NO: 1655449 - DNA, 15 bp, Homo sapiens
taatcatgtgaaatc

SEQ ID NO: 1655450 - DNA, 15 bp, Homo sapiens
aatcatgtgaaatca

SEQ ID NO: 1655451 - DNA, 15 bp, Homo sapiens
atcatgtgaaatcat

SEQ ID NO: 1655452 - DNA, 15 bp, Homo sapiens
tcatgtgaaatcatt

SEQ ID NO: 1655453 - DNA, 15 bp, Homo sapiens
catgtgaaatcattc

SEQ ID NO: 1655454 - DNA, 15 bp, Homo sapiens
atgtgaaatcattcc

SEQ ID NO: 1655455 - DNA, 15 bp, Homo sapiens
tgtgaaatcattcca

SEQ ID NO: 1655456 - DNA, 15 bp, Homo sapiens
gtgaaatcattccaa

SEQ ID NO: 1655457 - DNA, 15 bp, Homo sapiens
tgaaatcattccaat

SEQ ID NO: 1655458 - DNA, 15 bp, Homo sapiens
gaaatcattccaata

SEQ ID NO: 1655459 - DNA, 15 bp, Homo sapiens
aaatcattccaataa

SEQ ID NO: 1655460 - DNA, 15 bp, Homo sapiens
aatcattccaataat

SEQ ID NO: 1655461 - DNA, 15 bp, Homo sapiens
atcattccaataata

SEQ ID NO: 1655462 - DNA, 15 bp, Homo sapiens
tcattccaataatat

SEQ ID NO: 1655463 - DNA, 15 bp, Homo sapiens
cattccaataatatt

SEQ ID NO: 1655464 - DNA, 15 bp, Homo sapiens
attccaataatatta

SEQ ID NO: 1655465 - DNA, 15 bp, Homo sapiens
ttccaataatattat

SEQ ID NO: 1655466 - DNA, 15 bp, Homo sapiens
tccaataatattatg

SEQ ID NO: 1655467 - DNA, 15 bp, Homo sapiens
ccaataatattatga

SEQ ID NO: 1655468 - DNA, 15 bp, Homo sapiens
caataatattatgag

SEQ ID NO: 1655469 - DNA, 15 bp, Homo sapiens
aataatattatgaga

SEQ ID NO: 1655470 - DNA, 15 bp, Homo sapiens
ataatattatgagag

SEQ ID NO: 1655471 - DNA, 15 bp, Homo sapiens
taatattatgagaga

SEQ ID NO: 1655472 - DNA, 15 bp, Homo sapiens
aatattatgagagag

SEQ ID NO: 1655473 - DNA, 15 bp, Homo sapiens
atattatgagagagg

SEQ ID NO: 1655474 - DNA, 15 bp, Homo sapiens
tattatgagagaggt

SEQ ID NO: 1655475 - DNA, 15 bp, Homo sapiens
attatgagagaggta

SEQ ID NO: 1655476 - DNA, 15 bp, Homo sapiens
ttatgagagaggtat

SEQ ID NO: 1655477 - DNA, 15 bp, Homo sapiens
tatgagagaggtatt

SEQ ID NO: 1655478 - DNA, 15 bp, Homo sapiens
atgagagaggtatta

SEQ ID NO: 1655479 - DNA, 15 bp, Homo sapiens
tgagagaggtattat

SEQ ID NO: 1655480 - DNA, 15 bp, Homo sapiens
gagagaggtattatt

SEQ ID NO: 1655481 - DNA, 15 bp, Homo sapiens
agagaggtattattt

SEQ ID NO: 1655482 - DNA, 15 bp, Homo sapiens
gagaggtattatttt

SEQ ID NO: 1655483 - DNA, 15 bp, Homo sapiens
agaggtattattttt

SEQ ID NO: 1655484 - DNA, 15 bp, Homo sapiens
gaggtattattttta

SEQ ID NO: 1655485 - DNA, 15 bp, Homo sapiens
aggtattatttttat

SEQ ID NO: 1655486 - DNA, 15 bp, Homo sapiens
ggtattatttttatt

SEQ ID NO: 1655487 - DNA, 15 bp, Homo sapiens
gtattatttttatta

SEQ ID NO: 1655488 - DNA, 15 bp, Homo sapiens
tattatttttattat

SEQ ID NO: 1655489 - DNA, 15 bp, Homo sapiens
ttatttttattatgc

SEQ ID NO: 1655490 - DNA, 15 bp, Homo sapiens
tatttttattatgcc

SEQ ID NO: 1655491 - DNA, 15 bp, Homo sapiens
atttttattatgccc

SEQ ID NO: 1655492 - DNA, 15 bp, Homo sapiens
tttttattatgccca

SEQ ID NO: 1655493 - DNA, 15 bp, Homo sapiens
ttttattatgcccat

SEQ ID NO: 1655494 - DNA, 15 bp, Homo sapiens
tttattatgcccatt

SEQ ID NO: 1655495 - DNA, 15 bp, Homo sapiens
ttattatgcccattt

SEQ ID NO: 1655496 - DNA, 15 bp, Homo sapiens
tattatgcccatttt

SEQ ID NO: 1655497 - DNA, 15 bp, Homo sapiens
attatgcccattttg

SEQ ID NO: 1655498 - DNA, 15 bp, Homo sapiens
ttatgcccattttgc

SEQ ID NO: 1655499 - DNA, 15 bp, Homo sapiens
tatgcccattttgca

SEQ ID NO: 1655500 - DNA, 15 bp, Homo sapiens
atgcccattttgcaa

SEQ ID NO: 1655501 - DNA, 15 bp, Homo sapiens
tgcccattttgcaaa

SEQ ID NO: 1655502 - DNA, 15 bp, Homo sapiens
gcccattttgcaaat

SEQ ID NO: 1655503 - DNA, 15 bp, Homo sapiens
cccattttgcaaatg

SEQ ID NO: 1655504 - DNA, 15 bp, Homo sapiens
ccattttgcaaatgg

SEQ ID NO: 1655505 - DNA, 15 bp, Homo sapiens
cattttgcaaatggg

SEQ ID NO: 1655506 - DNA, 15 bp, Homo sapiens
attttgcaaatggga

SEQ ID NO: 1655507 - DNA, 15 bp, Homo sapiens
ttttgcaaatgggaa

SEQ ID NO: 1655508 - DNA, 15 bp, Homo sapiens
tttgcaaatgggaat

SEQ ID NO: 1655509 - DNA, 15 bp, Homo sapiens
ttgcaaatgggaatc

SEQ ID NO: 1655510 - DNA, 15 bp, Homo sapiens
tgcaaatgggaatcc

SEQ ID NO: 1655511 - DNA, 15 bp, Homo sapiens
gcaaatgggaatccc

SEQ ID NO: 1655512 - DNA, 15 bp, Homo sapiens
caaatgggaatccca

SEQ ID NO: 1655513 - DNA, 15 bp, Homo sapiens
aaatgggaatcccaa

SEQ ID NO: 1655514 - DNA, 15 bp, Homo sapiens
aatgggaatcccaag

SEQ ID NO: 1655515 - DNA, 15 bp, Homo sapiens
atgggaatcccaaga

SEQ ID NO: 1655516 - DNA, 15 bp, Homo sapiens
tgggaatcccaagac

SEQ ID NO: 1655517 - DNA, 15 bp, Homo sapiens
gggaatcccaagacc

SEQ ID NO: 1655518 - DNA, 15 bp, Homo sapiens
ggaatcccaagaccc

SEQ ID NO: 1655519 - DNA, 15 bp, Homo sapiens
gaatcccaagaccca

SEQ ID NO: 1655520 - DNA, 15 bp, Homo sapiens
aatcccaagacccag

SEQ ID NO: 1655521 - DNA, 15 bp, Homo sapiens
atcccaagacccagg

SEQ ID NO: 1655522 - DNA, 15 bp, Homo sapiens
tcccaagacccaggg

SEQ ID NO: 1655523 - DNA, 15 bp, Homo sapiens
cccaagacccaggga

SEQ ID NO: 1655524 - DNA, 15 bp, Homo sapiens
ccaagacccagggag

SEQ ID NO: 1655525 - DNA, 15 bp, Homo sapiens
caagacccagggaga

SEQ ID NO: 1655526 - DNA, 15 bp, Homo sapiens
aagacccagggagat

SEQ ID NO: 1655527 - DNA, 15 bp, Homo sapiens
agacccagggagatt

SEQ ID NO: 1655528 - DNA, 15 bp, Homo sapiens
gacccagggagatta

SEQ ID NO: 1655529 - DNA, 15 bp, Homo sapiens
acccagggagattaa

SEQ ID NO: 1655530 - DNA, 15 bp, Homo sapiens
cccagggagattaag

SEQ ID NO: 1655531 - DNA, 15 bp, Homo sapiens
ccagggagattaagt

SEQ ID NO: 1655532 - DNA, 15 bp, Homo sapiens
cagggagattaagta

SEQ ID NO: 1655533 - DNA, 15 bp, Homo sapiens
agggagattaagtaa

SEQ ID NO: 1655534 - DNA, 15 bp, Homo sapiens
gggagattaagtaaa

SEQ ID NO: 1655535 - DNA, 15 bp, Homo sapiens
ggagattaagtaaaa

SEQ ID NO: 1655536 - DNA, 15 bp, Homo sapiens
gagattaagtaaaat

SEQ ID NO: 1655537 - DNA, 15 bp, Homo sapiens
agattaagtaaaata

SEQ ID NO: 1655538 - DNA, 15 bp, Homo sapiens
gattaagtaaaatac

SEQ ID NO: 1655539 - DNA, 15 bp, Homo sapiens
attaagtaaaatacc

SEQ ID NO: 1655540 - DNA, 15 bp, Homo sapiens
ttaagtaaaataccc

SEQ ID NO: 1655541 - DNA, 15 bp, Homo sapiens
taagtaaaatacccc

SEQ ID NO: 1655542 - DNA, 15 bp, Homo sapiens
aagtaaaatacccca

SEQ ID NO: 1655543 - DNA, 15 bp, Homo sapiens
agtaaaataccccaa

SEQ ID NO: 1655544 - DNA, 15 bp, Homo sapiens
gtaaaataccccaag

SEQ ID NO: 1655545 - DNA, 15 bp, Homo sapiens
taaaataccccaagg

SEQ ID NO: 1655546 - DNA, 15 bp, Homo sapiens
aaaataccccaaggt

SEQ ID NO: 1655547 - DNA, 15 bp, Homo sapiens
aaataccccaaggta

SEQ ID NO: 1655548 - DNA, 15 bp, Homo sapiens
aataccccaaggtat

SEQ ID NO: 1655549 - DNA, 15 bp, Homo sapiens
ataccccaaggtatg

SEQ ID NO: 1655550 - DNA, 15 bp, Homo sapiens
taccccaaggtatgt

SEQ ID NO: 1655551 - DNA, 15 bp, Homo sapiens
accccaaggtatgtt

SEQ ID NO: 1655552 - DNA, 15 bp, Homo sapiens
ccccaaggtatgtta

SEQ ID NO: 1655553 - DNA, 15 bp, Homo sapiens
cccaaggtatgttaa

SEQ ID NO: 1655554 - DNA, 15 bp, Homo sapiens
ccaaggtatgttaac

SEQ ID NO: 1655555 - DNA, 15 bp, Homo sapiens
caaggtatgttaaca

SEQ ID NO: 1655556 - DNA, 15 bp, Homo sapiens
aaggtatgttaacat

SEQ ID NO: 1655557 - DNA, 15 bp, Homo sapiens
aggtatgttaacatt

SEQ ID NO: 1655558 - DNA, 15 bp, Homo sapiens
ggtatgttaacatta

SEQ ID NO: 1655559 - DNA, 15 bp, Homo sapiens
gtatgttaacattat

SEQ ID NO: 1655560 - DNA, 15 bp, Homo sapiens
tatgttaacattatt

SEQ ID NO: 1655561 - DNA, 15 bp, Homo sapiens
atgttaacattattt

SEQ ID NO: 1655562 - DNA, 15 bp, Homo sapiens
tgttaacattatttg

SEQ ID NO: 1655563 - DNA, 15 bp, Homo sapiens
gttaacattatttgt

SEQ ID NO: 1655564 - DNA, 15 bp, Homo sapiens
ttaacattatttgtg

SEQ ID NO: 1655565 - DNA, 15 bp, Homo sapiens
taacattatttgtga

SEQ ID NO: 1655566 - DNA, 15 bp, Homo sapiens
aacattatttgtgag

SEQ ID NO: 1655567 - DNA, 15 bp, Homo sapiens
acattatttgtgagc

SEQ ID NO: 1655568 - DNA, 15 bp, Homo sapiens
cattatttgtgagcc

SEQ ID NO: 1655569 - DNA, 15 bp, Homo sapiens
attatttgtgagccc

SEQ ID NO: 1655570 - DNA, 15 bp, Homo sapiens
ttatttgtgagccca

SEQ ID NO: 1655571 - DNA, 15 bp, Homo sapiens
tatttgtgagcccag

SEQ ID NO: 1655572 - DNA, 15 bp, Homo sapiens
atttgtgagcccagg

SEQ ID NO: 1655573 - DNA, 15 bp, Homo sapiens
tttgtgagcccaggt

SEQ ID NO: 1655574 - DNA, 15 bp, Homo sapiens
ttgtgagcccaggtc

SEQ ID NO: 1655575 - DNA, 15 bp, Homo sapiens
tgtgagcccaggtct

SEQ ID NO: 1655576 - DNA, 15 bp, Homo sapiens
gtgagcccaggtcta

SEQ ID NO: 1655577 - DNA, 15 bp, Homo sapiens
tgagcccaggtctat

SEQ ID NO: 1655578 - DNA, 15 bp, Homo sapiens
gagcccaggtctatt

SEQ ID NO: 1655579 - DNA, 15 bp, Homo sapiens
agcccaggtctattt

SEQ ID NO: 1655580 - DNA, 15 bp, Homo sapiens
gcccaggtctatttg

SEQ ID NO: 1655581 - DNA, 15 bp, Homo sapiens
cccaggtctatttgc

SEQ ID NO: 1655582 - DNA, 15 bp, Homo sapiens
ccaggtctatttgcc

SEQ ID NO: 1655583 - DNA, 15 bp, Homo sapiens
caggtctatttgcct

SEQ ID NO: 1655584 - DNA, 15 bp, Homo sapiens
aggtctatttgcctc

SEQ ID NO: 1655585 - DNA, 15 bp, Homo sapiens
ggtctatttgcctcc

SEQ ID NO: 1655586 - DNA, 15 bp, Homo sapiens
gtctatttgcctcca

SEQ ID NO: 1655587 - DNA, 15 bp, Homo sapiens
tctatttgcctccag

SEQ ID NO: 1655588 - DNA, 15 bp, Homo sapiens
ctatttgcctccaga

SEQ ID NO: 1655589 - DNA, 15 bp, Homo sapiens
tatttgcctccagag

SEQ ID NO: 1655590 - DNA, 15 bp, Homo sapiens
atttgcctccagagg

SEQ ID NO: 1655591 - DNA, 15 bp, Homo sapiens
tttgcctccagaggt

SEQ ID NO: 1655592 - DNA, 15 bp, Homo sapiens
ttgcctccagaggtg

SEQ ID NO: 1655593 - DNA, 15 bp, Homo sapiens
tgcctccagaggtgt

SEQ ID NO: 1655594 - DNA, 15 bp, Homo sapiens
gcctccagaggtgtt

SEQ ID NO: 1655595 - DNA, 15 bp, Homo sapiens
cctccagaggtgttg

SEQ ID NO: 1655596 - DNA, 15 bp, Homo sapiens
ctccagaggtgttgc

SEQ ID NO: 1655597 - DNA, 15 bp, Homo sapiens
tccagaggtgttgct

SEQ ID NO: 1655598 - DNA, 15 bp, Homo sapiens
ccagaggtgttgctc

SEQ ID NO: 1655599 - DNA, 15 bp, Homo sapiens
cagaggtgttgctct

SEQ ID NO: 1655600 - DNA, 15 bp, Homo sapiens
agaggtgttgctctt

SEQ ID NO: 1655601 - DNA, 15 bp, Homo sapiens
gaggtgttgctctta

SEQ ID NO: 1655602 - DNA, 15 bp, Homo sapiens
aggtgttgctcttaa

SEQ ID NO: 1655603 - DNA, 15 bp, Homo sapiens
ggtgttgctcttaaa

SEQ ID NO: 1655604 - DNA, 15 bp, Homo sapiens
gtgttgctcttaaat

SEQ ID NO: 1655605 - DNA, 15 bp, Homo sapiens
tgttgctcttaaatt

SEQ ID NO: 1655606 - DNA, 15 bp, Homo sapiens
gttgctcttaaattc

SEQ ID NO: 1655607 - DNA, 15 bp, Homo sapiens
ttgctcttaaattct

SEQ ID NO: 1655608 - DNA, 15 bp, Homo sapiens
tgctcttaaattcta

SEQ ID NO: 1655609 - DNA, 15 bp, Homo sapiens
gctcttaaattctat

SEQ ID NO: 1655610 - DNA, 15 bp, Homo sapiens
ctcttaaattctatg

SEQ ID NO: 1655611 - DNA, 15 bp, Homo sapiens
tcttaaattctatgc

SEQ ID NO: 1655612 - DNA, 15 bp, Homo sapiens
cttaaattctatgct

SEQ ID NO: 1655613 - DNA, 15 bp, Homo sapiens
ttaaattctatgcta

SEQ ID NO: 1655614 - DNA, 15 bp, Homo sapiens
taaattctatgctat

SEQ ID NO: 1655615 - DNA, 15 bp, Homo sapiens
aaattctatgctata

SEQ ID NO: 1655616 - DNA, 15 bp, Homo sapiens
aattctatgctatat

SEQ ID NO: 1655617 - DNA, 15 bp, Homo sapiens
attctatgctatatt

SEQ ID NO: 1655618 - DNA, 15 bp, Homo sapiens
ttctatgctatatta

SEQ ID NO: 1655619 - DNA, 15 bp, Homo sapiens
tctatgctatattat

SEQ ID NO: 1655620 - DNA, 15 bp, Homo sapiens
ctatgctatattatt

SEQ ID NO: 1655621 - DNA, 15 bp, Homo sapiens
tatgctatattatta

SEQ ID NO: 1655622 - DNA, 15 bp, Homo sapiens
atgctatattattaa

SEQ ID NO: 1655623 - DNA, 15 bp, Homo sapiens
tgctatattattaaa

SEQ ID NO: 1655624 - DNA, 15 bp, Homo sapiens
gctatattattaaag

SEQ ID NO: 1655625 - DNA, 15 bp, Homo sapiens
ctatattattaaagt

SEQ ID NO: 1655626 - DNA, 15 bp, Homo sapiens
tatattattaaagta

SEQ ID NO: 1655627 - DNA, 15 bp, Homo sapiens
atattattaaagtaa

SEQ ID NO: 1655628 - DNA, 15 bp, Homo sapiens
attattaaagtaatt

SEQ ID NO: 1655629 - DNA, 15 bp, Homo sapiens
ttattaaagtaattg

SEQ ID NO: 1655630 - DNA, 15 bp, Homo sapiens
tattaaagtaattgg

SEQ ID NO: 1655631 - DNA, 15 bp, Homo sapiens
attaaagtaattggg

SEQ ID NO: 1655632 - DNA, 15 bp, Homo sapiens
ttaaagtaattgggg

SEQ ID NO: 1655633 - DNA, 15 bp, Homo sapiens
taaagtaattgggga

SEQ ID NO: 1655634 - DNA, 15 bp, Homo sapiens
aaagtaattggggaa

SEQ ID NO: 1655635 - DNA, 15 bp, Homo sapiens
aagtaattggggaaa

SEQ ID NO: 1655636 - DNA, 15 bp, Homo sapiens
agtaattggggaaag

SEQ ID NO: 1655637 - DNA, 15 bp, Homo sapiens
gtaattggggaaagt

SEQ ID NO: 1655638 - DNA, 15 bp, Homo sapiens
taattggggaaagtc

SEQ ID NO: 1655639 - DNA, 15 bp, Homo sapiens
aattggggaaagtct

SEQ ID NO: 1655640 - DNA, 15 bp, Homo sapiens
attggggaaagtctt

SEQ ID NO: 1655641 - DNA, 15 bp, Homo sapiens
ttggggaaagtcttc

SEQ ID NO: 1655642 - DNA, 15 bp, Homo sapiens
tggggaaagtcttca

SEQ ID NO: 1655643 - DNA, 15 bp, Homo sapiens
ggggaaagtcttcat

SEQ ID NO: 1655644 - DNA, 15 bp, Homo sapiens
gggaaagtcttcata

SEQ ID NO: 1655645 - DNA, 15 bp, Homo sapiens
ggaaagtcttcatag

SEQ ID NO: 1655646 - DNA, 15 bp, Homo sapiens
gaaagtcttcatagt

SEQ ID NO: 1655647 - DNA, 15 bp, Homo sapiens
aaagtcttcatagtc

SEQ ID NO: 1655648 - DNA, 15 bp, Homo sapiens
aagtcttcatagtcc

SEQ ID NO: 1655649 - DNA, 15 bp, Homo sapiens
agtcttcatagtcct

SEQ ID NO: 1655650 - DNA, 15 bp, Homo sapiens
gtcttcatagtcctc

SEQ ID NO: 1655651 - DNA, 15 bp, Homo sapiens
tcttcatagtcctct

SEQ ID NO: 1655652 - DNA, 15 bp, Homo sapiens
cttcatagtcctctc

SEQ ID NO: 1655653 - DNA, 15 bp, Homo sapiens
ttcatagtcctctcc

SEQ ID NO: 1655654 - DNA, 15 bp, Homo sapiens
tcatagtcctctccc

SEQ ID NO: 1655655 - DNA, 15 bp, Homo sapiens
catagtcctctcccc

SEQ ID NO: 1655656 - DNA, 15 bp, Homo sapiens
atagtcctctccccc

SEQ ID NO: 1655657 - DNA, 15 bp, Homo sapiens
tagtcctctcccccc

SEQ ID NO: 1655658 - DNA, 15 bp, Homo sapiens
agtcctctcccccca

SEQ ID NO: 1655659 - DNA, 15 bp, Homo sapiens
gtcctctccccccaa

SEQ ID NO: 1655660 - DNA, 15 bp, Homo sapiens
tcctctccccccaaa

SEQ ID NO: 1655661 - DNA, 15 bp, Homo sapiens
cctctccccccaaaa

SEQ ID NO: 1655662 - DNA, 15 bp, Homo sapiens
ctctccccccaaaac

SEQ ID NO: 1655663 - DNA, 15 bp, Homo sapiens
tctccccccaaaact

SEQ ID NO: 1655664 - DNA, 15 bp, Homo sapiens
ctccccccaaaactt

SEQ ID NO: 1655665 - DNA, 15 bp, Homo sapiens
tccccccaaaacttg

SEQ ID NO: 1655666 - DNA, 15 bp, Homo sapiens
ccccccaaaacttgc

SEQ ID NO: 1655667 - DNA, 15 bp, Homo sapiens
cccccaaaacttgca

SEQ ID NO: 1655668 - DNA, 15 bp, Homo sapiens
ccccaaaacttgcat

SEQ ID NO: 1655669 - DNA, 15 bp, Homo sapiens
cccaaaacttgcatc

SEQ ID NO: 1655670 - DNA, 15 bp, Homo sapiens
ccaaaacttgcatct

SEQ ID NO: 1655671 - DNA, 15 bp, Homo sapiens
caaaacttgcatctt

SEQ ID NO: 1655672 - DNA, 15 bp, Homo sapiens
aaaacttgcatcttt

SEQ ID NO: 1655673 - DNA, 15 bp, Homo sapiens
aaacttgcatctttc

SEQ ID NO: 1655674 - DNA, 15 bp, Homo sapiens
aacttgcatctttct

SEQ ID NO: 1655675 - DNA, 15 bp, Homo sapiens
acttgcatctttcta

SEQ ID NO: 1655676 - DNA, 15 bp, Homo sapiens
cttgcatctttctag

SEQ ID NO: 1655677 - DNA, 15 bp, Homo sapiens
ttgcatctttctaga

SEQ ID NO: 1655678 - DNA, 15 bp, Homo sapiens
tgcatctttctagat

SEQ ID NO: 1655679 - DNA, 15 bp, Homo sapiens
gcatctttctagatc

SEQ ID NO: 1655680 - DNA, 15 bp, Homo sapiens
catctttctagatca

SEQ ID NO: 1655681 - DNA, 15 bp, Homo sapiens
atctttctagatcag

SEQ ID NO: 1655682 - DNA, 15 bp, Homo sapiens
tctttctagatcagt

SEQ ID NO: 1655683 - DNA, 15 bp, Homo sapiens
ctttctagatcagta

SEQ ID NO: 1655684 - DNA, 15 bp, Homo sapiens
tttctagatcagtaa

SEQ ID NO: 1655685 - DNA, 15 bp, Homo sapiens
ttctagatcagtaaa

SEQ ID NO: 1655686 - DNA, 15 bp, Homo sapiens
tctagatcagtaaat

SEQ ID NO: 1655687 - DNA, 15 bp, Homo sapiens
ctagatcagtaaatt

SEQ ID NO: 1655688 - DNA, 15 bp, Homo sapiens
tagatcagtaaattc

SEQ ID NO: 1655689 - DNA, 15 bp, Homo sapiens
agatcagtaaattca

SEQ ID NO: 1655690 - DNA, 15 bp, Homo sapiens
gatcagtaaattcat

SEQ ID NO: 1655691 - DNA, 15 bp, Homo sapiens
atcagtaaattcatc

SEQ ID NO: 1655692 - DNA, 15 bp, Homo sapiens
tcagtaaattcatcc

SEQ ID NO: 1655693 - DNA, 15 bp, Homo sapiens
cagtaaattcatcct

SEQ ID NO: 1655694 - DNA, 15 bp, Homo sapiens
agtaaattcatccta

SEQ ID NO: 1655695 - DNA, 15 bp, Homo sapiens
gtaaattcatcctat

SEQ ID NO: 1655696 - DNA, 15 bp, Homo sapiens
taaattcatcctatg

SEQ ID NO: 1655697 - DNA, 15 bp, Homo sapiens
aaattcatcctatgt

SEQ ID NO: 1655698 - DNA, 15 bp, Homo sapiens
aattcatcctatgtc

SEQ ID NO: 1655699 - DNA, 15 bp, Homo sapiens
attcatcctatgtca

SEQ ID NO: 1655700 - DNA, 15 bp, Homo sapiens
ttcatcctatgtcag

SEQ ID NO: 1655701 - DNA, 15 bp, Homo sapiens
tcatcctatgtcaga

SEQ ID NO: 1655702 - DNA, 15 bp, Homo sapiens
catcctatgtcagat

SEQ ID NO: 1655703 - DNA, 15 bp, Homo sapiens
atcctatgtcagatc

SEQ ID NO: 1655704 - DNA, 15 bp, Homo sapiens
tcctatgtcagatca

SEQ ID NO: 1655705 - DNA, 15 bp, Homo sapiens
cctatgtcagatcaa

SEQ ID NO: 1655706 - DNA, 15 bp, Homo sapiens
ctatgtcagatcaaa

SEQ ID NO: 1655707 - DNA, 15 bp, Homo sapiens
tatgtcagatcaaaa

SEQ ID NO: 1655708 - DNA, 15 bp, Homo sapiens
atgtcagatcaaaag

SEQ ID NO: 1655709 - DNA, 15 bp, Homo sapiens
tgtcagatcaaaagt

SEQ ID NO: 1655710 - DNA, 15 bp, Homo sapiens
gtcagatcaaaagtc

SEQ ID NO: 1655711 - DNA, 15 bp, Homo sapiens
tcagatcaaaagtcc

SEQ ID NO: 1655712 - DNA, 15 bp, Homo sapiens
cagatcaaaagtcct

SEQ ID NO: 1655713 - DNA, 15 bp, Homo sapiens
agatcaaaagtccta

SEQ ID NO: 1655714 - DNA, 15 bp, Homo sapiens
gatcaaaagtcctat

SEQ ID NO: 1655715 - DNA, 15 bp, Homo sapiens
atcaaaagtcctatt

SEQ ID NO: 1655716 - DNA, 15 bp, Homo sapiens
tcaaaagtcctattc

SEQ ID NO: 1655717 - DNA, 15 bp, Homo sapiens
caaaagtcctattca

SEQ ID NO: 1655718 - DNA, 15 bp, Homo sapiens
aaaagtcctattcat

SEQ ID NO: 1655719 - DNA, 15 bp, Homo sapiens
aaagtcctattcatc

SEQ ID NO: 1655720 - DNA, 15 bp, Homo sapiens
aagtcctattcatcc

SEQ ID NO: 1655721 - DNA, 15 bp, Homo sapiens
agtcctattcatcct

SEQ ID NO: 1655722 - DNA, 15 bp, Homo sapiens
gtcctattcatccta

SEQ ID NO: 1655723 - DNA, 15 bp, Homo sapiens
cctattcatcctatg

SEQ ID NO: 1655724 - DNA, 15 bp, Homo sapiens
ctattcatcctatgt

SEQ ID NO: 1655725 - DNA, 15 bp, Homo sapiens
tattcatcctatgtc

SEQ ID NO: 1655726 - DNA, 15 bp, Homo sapiens
ttcatcctatgtcaa

SEQ ID NO: 1655727 - DNA, 15 bp, Homo sapiens
tcatcctatgtcaag

SEQ ID NO: 1655728 - DNA, 15 bp, Homo sapiens
catcctatgtcaagt

SEQ ID NO: 1655729 - DNA, 15 bp, Homo sapiens
atcctatgtcaagtt

SEQ ID NO: 1655730 - DNA, 15 bp, Homo sapiens
tcctatgtcaagtta

SEQ ID NO: 1655731 - DNA, 15 bp, Homo sapiens
cctatgtcaagttaa

SEQ ID NO: 1655732 - DNA, 15 bp, Homo sapiens
ctatgtcaagttaaa

SEQ ID NO: 1655733 - DNA, 15 bp, Homo sapiens
tatgtcaagttaaaa

SEQ ID NO: 1655734 - DNA, 15 bp, Homo sapiens
atgtcaagttaaaag

SEQ ID NO: 1655735 - DNA, 15 bp, Homo sapiens
tgtcaagttaaaagt

SEQ ID NO: 1655736 - DNA, 15 bp, Homo sapiens
gtcaagttaaaagtc

SEQ ID NO: 1655737 - DNA, 15 bp, Homo sapiens
tcaagttaaaagtcg

SEQ ID NO: 1655738 - DNA, 15 bp, Homo sapiens
caagttaaaagtcga

SEQ ID NO: 1655739 - DNA, 15 bp, Homo sapiens
aagttaaaagtcgaa

SEQ ID NO: 1655740 - DNA, 15 bp, Homo sapiens
agttaaaagtcgaag

SEQ ID NO: 1655741 - DNA, 15 bp, Homo sapiens
gttaaaagtcgaagt

SEQ ID NO: 1655742 - DNA, 15 bp, Homo sapiens
ttaaaagtcgaagtc

SEQ ID NO: 1655743 - DNA, 15 bp, Homo sapiens
taaaagtcgaagtca

SEQ ID NO: 1655744 - DNA, 15 bp, Homo sapiens
aaaagtcgaagtcat

SEQ ID NO: 1655745 - DNA, 15 bp, Homo sapiens
aaagtcgaagtcatt

SEQ ID NO: 1655746 - DNA, 15 bp, Homo sapiens
aagtcgaagtcattt

SEQ ID NO: 1655747 - DNA, 15 bp, Homo sapiens
agtcgaagtcatttt

SEQ ID NO: 1655748 - DNA, 15 bp, Homo sapiens
gtcgaagtcattttt

SEQ ID NO: 1655749 - DNA, 15 bp, Homo sapiens
tcgaagtcatttttg

SEQ ID NO: 1655750 - DNA, 15 bp, Homo sapiens
cgaagtcatttttga

SEQ ID NO: 1655751 - DNA, 15 bp, Homo sapiens
gaagtcatttttgat

SEQ ID NO: 1655752 - DNA, 15 bp, Homo sapiens
aagtcatttttgatg

SEQ ID NO: 1655753 - DNA, 15 bp, Homo sapiens
agtcatttttgatgc

SEQ ID NO: 1655754 - DNA, 15 bp, Homo sapiens
gtcatttttgatgct

SEQ ID NO: 1655755 - DNA, 15 bp, Homo sapiens
tcatttttgatgctg

SEQ ID NO: 1655756 - DNA, 15 bp, Homo sapiens
catttttgatgctgt

SEQ ID NO: 1655757 - DNA, 15 bp, Homo sapiens
atttttgatgctgtt

SEQ ID NO: 1655758 - DNA, 15 bp, Homo sapiens
tttttgatgctgttc

SEQ ID NO: 1655759 - DNA, 15 bp, Homo sapiens
ttttgatgctgttct

SEQ ID NO: 1655760 - DNA, 15 bp, Homo sapiens
tttgatgctgttctt

SEQ ID NO: 1655761 - DNA, 15 bp, Homo sapiens
ttgatgctgttcttt

SEQ ID NO: 1655762 - DNA, 15 bp, Homo sapiens
tgatgctgttctttg

SEQ ID NO: 1655763 - DNA, 15 bp, Homo sapiens
gatgctgttctttgt

SEQ ID NO: 1655764 - DNA, 15 bp, Homo sapiens
atgctgttctttgtc

SEQ ID NO: 1655765 - DNA, 15 bp, Homo sapiens
tgctgttctttgtca

SEQ ID NO: 1655766 - DNA, 15 bp, Homo sapiens
gctgttctttgtcac

SEQ ID NO: 1655767 - DNA, 15 bp, Homo sapiens
ctgttctttgtcaca

SEQ ID NO: 1655768 - DNA, 15 bp, Homo sapiens
tgttctttgtcacac

SEQ ID NO: 1655769 - DNA, 15 bp, Homo sapiens
gttctttgtcacact

SEQ ID NO: 1655770 - DNA, 15 bp, Homo sapiens
ttctttgtcacactc

SEQ ID NO: 1655771 - DNA, 15 bp, Homo sapiens
tctttgtcacactcc

SEQ ID NO: 1655772 - DNA, 15 bp, Homo sapiens
ctttgtcacactcca

SEQ ID NO: 1655773 - DNA, 15 bp, Homo sapiens
tttgtcacactccaa

SEQ ID NO: 1655774 - DNA, 15 bp, Homo sapiens
ttgtcacactccaaa

SEQ ID NO: 1655775 - DNA, 15 bp, Homo sapiens
tgtcacactccaaat

SEQ ID NO: 1655776 - DNA, 15 bp, Homo sapiens
gtcacactccaaatg

SEQ ID NO: 1655777 - DNA, 15 bp, Homo sapiens
tcacactccaaatga

SEQ ID NO: 1655778 - DNA, 15 bp, Homo sapiens
cacactccaaatgaa

SEQ ID NO: 1655779 - DNA, 15 bp, Homo sapiens
acactccaaatgaaa

SEQ ID NO: 1655780 - DNA, 15 bp, Homo sapiens
cactccaaatgaaat

SEQ ID NO: 1655781 - DNA, 15 bp, Homo sapiens
actccaaatgaaatc

SEQ ID NO: 1655782 - DNA, 15 bp, Homo sapiens
ctccaaatgaaatcc

SEQ ID NO: 1655783 - DNA, 15 bp, Homo sapiens
tccaaatgaaatcca

SEQ ID NO: 1655784 - DNA, 15 bp, Homo sapiens
ccaaatgaaatccat

SEQ ID NO: 1655785 - DNA, 15 bp, Homo sapiens
caaatgaaatccatc

SEQ ID NO: 1655786 - DNA, 15 bp, Homo sapiens
aaatgaaatccatca

SEQ ID NO: 1655787 - DNA, 15 bp, Homo sapiens
aatgaaatccatcag

SEQ ID NO: 1655788 - DNA, 15 bp, Homo sapiens
atgaaatccatcagc

SEQ ID NO: 1655789 - DNA, 15 bp, Homo sapiens
tgaaatccatcagcg

SEQ ID NO: 1655790 - DNA, 15 bp, Homo sapiens
gaaatccatcagcga

SEQ ID NO: 1655791 - DNA, 15 bp, Homo sapiens
aaatccatcagcgaa

SEQ ID NO: 1655792 - DNA, 15 bp, Homo sapiens
aatccatcagcgaat

SEQ ID NO: 1655793 - DNA, 15 bp, Homo sapiens
atccatcagcgaatc

SEQ ID NO: 1655794 - DNA, 15 bp, Homo sapiens
tccatcagcgaatct

SEQ ID NO: 1655795 - DNA, 15 bp, Homo sapiens
ccatcagcgaatctc

SEQ ID NO: 1655796 - DNA, 15 bp, Homo sapiens
catcagcgaatctca

SEQ ID NO: 1655797 - DNA, 15 bp, Homo sapiens
atcagcgaatctcat

SEQ ID NO: 1655798 - DNA, 15 bp, Homo sapiens
tcagcgaatctcata

SEQ ID NO: 1655799 - DNA, 15 bp, Homo sapiens
cagcgaatctcataa

SEQ ID NO: 1655800 - DNA, 15 bp, Homo sapiens
agcgaatctcataat

SEQ ID NO: 1655801 - DNA, 15 bp, Homo sapiens
gcgaatctcataatc

SEQ ID NO: 1655802 - DNA, 15 bp, Homo sapiens
cgaatctcataatct

SEQ ID NO: 1655803 - DNA, 15 bp, Homo sapiens
gaatctcataatctc

SEQ ID NO: 1655804 - DNA, 15 bp, Homo sapiens
aatctcataatctct

SEQ ID NO: 1655805 - DNA, 15 bp, Homo sapiens
atctcataatctctc

SEQ ID NO: 1655806 - DNA, 15 bp, Homo sapiens
tctcataatctctct

SEQ ID NO: 1655807 - DNA, 15 bp, Homo sapiens
ctcataatctctctc

SEQ ID NO: 1655808 - DNA, 15 bp, Homo sapiens
tcataatctctctca

SEQ ID NO: 1655809 - DNA, 15 bp, Homo sapiens
cataatctctctcat

SEQ ID NO: 1655810 - DNA, 15 bp, Homo sapiens
ataatctctctcata

SEQ ID NO: 1655811 - DNA, 15 bp, Homo sapiens
taatctctctcatag

SEQ ID NO: 1655812 - DNA, 15 bp, Homo sapiens
aatctctctcataga

SEQ ID NO: 1655813 - DNA, 15 bp, Homo sapiens
atctctctcatagaa

SEQ ID NO: 1655814 - DNA, 15 bp, Homo sapiens
tctctctcatagaaa

SEQ ID NO: 1655815 - DNA, 15 bp, Homo sapiens
ctctctcatagaaac

SEQ ID NO: 1655816 - DNA, 15 bp, Homo sapiens
tctctcatagaaaca

SEQ ID NO: 1655817 - DNA, 15 bp, Homo sapiens
ctctcatagaaacat

SEQ ID NO: 1655818 - DNA, 15 bp, Homo sapiens
tctcatagaaacata

SEQ ID NO: 1655819 - DNA, 15 bp, Homo sapiens
ctcatagaaacatac

SEQ ID NO: 1655820 - DNA, 15 bp, Homo sapiens
tcatagaaacataca

SEQ ID NO: 1655821 - DNA, 15 bp, Homo sapiens
catagaaacatacac

SEQ ID NO: 1655822 - DNA, 15 bp, Homo sapiens
atagaaacatacacc

SEQ ID NO: 1655823 - DNA, 15 bp, Homo sapiens
tagaaacatacacca

SEQ ID NO: 1655824 - DNA, 15 bp, Homo sapiens
agaaacatacaccaa

SEQ ID NO: 1655825 - DNA, 15 bp, Homo sapiens
gaaacatacaccaaa

SEQ ID NO: 1655826 - DNA, 15 bp, Homo sapiens
aaacatacaccaaat

SEQ ID NO: 1655827 - DNA, 15 bp, Homo sapiens
aacatacaccaaatc

SEQ ID NO: 1655828 - DNA, 15 bp, Homo sapiens
acatacaccaaatct

SEQ ID NO: 1655829 - DNA, 15 bp, Homo sapiens
catacaccaaatctt

SEQ ID NO: 1655830 - DNA, 15 bp, Homo sapiens
atacaccaaatcttc

SEQ ID NO: 1655831 - DNA, 15 bp, Homo sapiens
tacaccaaatcttca

SEQ ID NO: 1655832 - DNA, 15 bp, Homo sapiens
acaccaaatcttcat

SEQ ID NO: 1655833 - DNA, 15 bp, Homo sapiens
caccaaatcttcata

SEQ ID NO: 1655834 - DNA, 15 bp, Homo sapiens
accaaatcttcatat

SEQ ID NO: 1655835 - DNA, 15 bp, Homo sapiens
ccaaatcttcatata

SEQ ID NO: 1655836 - DNA, 15 bp, Homo sapiens
caaatcttcatatat

SEQ ID NO: 1655837 - DNA, 15 bp, Homo sapiens
aaatcttcatatata

SEQ ID NO: 1655838 - DNA, 15 bp, Homo sapiens
aatcttcatatatac

SEQ ID NO: 1655839 - DNA, 15 bp, Homo sapiens
atcttcatatataca

SEQ ID NO: 1655840 - DNA, 15 bp, Homo sapiens
tcttcatatatacac

SEQ ID NO: 1655841 - DNA, 15 bp, Homo sapiens
cttcatatatacact

SEQ ID NO: 1655842 - DNA, 15 bp, Homo sapiens
ttcatatatacactg

SEQ ID NO: 1655843 - DNA, 15 bp, Homo sapiens
tcatatatacactgt

SEQ ID NO: 1655844 - DNA, 15 bp, Homo sapiens
catatatacactgtc

SEQ ID NO: 1655845 - DNA, 15 bp, Homo sapiens
atatatacactgtca

SEQ ID NO: 1655846 - DNA, 15 bp, Homo sapiens
tatatacactgtcat

SEQ ID NO: 1655847 - DNA, 15 bp, Homo sapiens
atatacactgtcatc

SEQ ID NO: 1655848 - DNA, 15 bp, Homo sapiens
tatacactgtcatca

SEQ ID NO: 1655849 - DNA, 15 bp, Homo sapiens
atacactgtcatcat

SEQ ID NO: 1655850 - DNA, 15 bp, Homo sapiens
tacactgtcatcata

SEQ ID NO: 1655851 - DNA, 15 bp, Homo sapiens
acactgtcatcataa

SEQ ID NO: 1655852 - DNA, 15 bp, Homo sapiens
cactgtcatcataag

SEQ ID NO: 1655853 - DNA, 15 bp, Homo sapiens
actgtcatcataagc

SEQ ID NO: 1655854 - DNA, 15 bp, Homo sapiens
ctgtcatcataagcc

SEQ ID NO: 1655855 - DNA, 15 bp, Homo sapiens
tgtcatcataagccc

SEQ ID NO: 1655856 - DNA, 15 bp, Homo sapiens
gtcatcataagccct

SEQ ID NO: 1655857 - DNA, 15 bp, Homo sapiens
tcatcataagccctg

SEQ ID NO: 1655858 - DNA, 15 bp, Homo sapiens
catcataagccctgc

SEQ ID NO: 1655859 - DNA, 15 bp, Homo sapiens
atcataagccctgcc

SEQ ID NO: 1655860 - DNA, 15 bp, Homo sapiens
tcataagccctgcca

SEQ ID NO: 1655861 - DNA, 15 bp, Homo sapiens
cataagccctgccac

SEQ ID NO: 1655862 - DNA, 15 bp, Homo sapiens
ataagccctgccact

SEQ ID NO: 1655863 - DNA, 15 bp, Homo sapiens
taagccctgccactg

SEQ ID NO: 1655864 - DNA, 15 bp, Homo sapiens
aagccctgccactgc

SEQ ID NO: 1655865 - DNA, 15 bp, Homo sapiens
agccctgccactgct

SEQ ID NO: 1655866 - DNA, 15 bp, Homo sapiens
gccctgccactgctc

SEQ ID NO: 1655867 - DNA, 15 bp, Homo sapiens
ccctgccactgctca

SEQ ID NO: 1655868 - DNA, 15 bp, Homo sapiens
cctgccactgctcac

SEQ ID NO: 1655869 - DNA, 15 bp, Homo sapiens
ctgccactgctcact

SEQ ID NO: 1655870 - DNA, 15 bp, Homo sapiens
tgccactgctcactt

SEQ ID NO: 1655871 - DNA, 15 bp, Homo sapiens
gccactgctcactta

SEQ ID NO: 1655872 - DNA, 15 bp, Homo sapiens
ccactgctcacttaa

SEQ ID NO: 1655873 - DNA, 15 bp, Homo sapiens
cactgctcacttaaa

SEQ ID NO: 1655874 - DNA, 15 bp, Homo sapiens
actgctcacttaaaa

SEQ ID NO: 1655875 - DNA, 15 bp, Homo sapiens
ctgctcacttaaaat

SEQ ID NO: 1655876 - DNA, 15 bp, Homo sapiens
tgctcacttaaaatt

SEQ ID NO: 1655877 - DNA, 15 bp, Homo sapiens
gctcacttaaaattt

SEQ ID NO: 1655878 - DNA, 15 bp, Homo sapiens
ctcacttaaaattta

SEQ ID NO: 1655879 - DNA, 15 bp, Homo sapiens
tcacttaaaatttaa

SEQ ID NO: 1655880 - DNA, 15 bp, Homo sapiens
cacttaaaatttaat

SEQ ID NO: 1655881 - DNA, 15 bp, Homo sapiens
acttaaaatttaatt

SEQ ID NO: 1655882 - DNA, 15 bp, Homo sapiens
cttaaaatttaattt

SEQ ID NO: 1655883 - DNA, 15 bp, Homo sapiens
ttaaaatttaatttg

SEQ ID NO: 1655884 - DNA, 15 bp, Homo sapiens
taaaatttaatttgg

SEQ ID NO: 1655885 - DNA, 15 bp, Homo sapiens
aaaatttaatttggt

SEQ ID NO: 1655886 - DNA, 15 bp, Homo sapiens
aaatttaatttggtt

SEQ ID NO: 1655887 - DNA, 15 bp, Homo sapiens
aatttaatttggtta

SEQ ID NO: 1655888 - DNA, 15 bp, Homo sapiens
atttaatttggttac

SEQ ID NO: 1655889 - DNA, 15 bp, Homo sapiens
tttaatttggttact

SEQ ID NO: 1655890 - DNA, 15 bp, Homo sapiens
ttaatttggttactt

SEQ ID NO: 1655891 - DNA, 15 bp, Homo sapiens
taatttggttactta

SEQ ID NO: 1655892 - DNA, 15 bp, Homo sapiens
aatttggttacttaa

SEQ ID NO: 1655893 - DNA, 15 bp, Homo sapiens
atttggttacttaat

SEQ ID NO: 1655894 - DNA, 15 bp, Homo sapiens
tttggttacttaatg

SEQ ID NO: 1655895 - DNA, 15 bp, Homo sapiens
ttggttacttaatgc

SEQ ID NO: 1655896 - DNA, 15 bp, Homo sapiens
tggttacttaatgct

SEQ ID NO: 1655897 - DNA, 15 bp, Homo sapiens
ggttacttaatgctg

SEQ ID NO: 1655898 - DNA, 15 bp, Homo sapiens
gttacttaatgctgt

SEQ ID NO: 1655899 - DNA, 15 bp, Homo sapiens
ttacttaatgctgta

SEQ ID NO: 1655900 - DNA, 15 bp, Homo sapiens
tacttaatgctgtag

SEQ ID NO: 1655901 - DNA, 15 bp, Homo sapiens
acttaatgctgtagt

SEQ ID NO: 1655902 - DNA, 15 bp, Homo sapiens
cttaatgctgtagtg

SEQ ID NO: 1655903 - DNA, 15 bp, Homo sapiens
ttaatgctgtagtgg

SEQ ID NO: 1655904 - DNA, 15 bp, Homo sapiens
taatgctgtagtggg

SEQ ID NO: 1655905 - DNA, 15 bp, Homo sapiens
aatgctgtagtgggt

SEQ ID NO: 1655906 - DNA, 15 bp, Homo sapiens
atgctgtagtgggtt

SEQ ID NO: 1655907 - DNA, 15 bp, Homo sapiens
tgctgtagtgggttg

SEQ ID NO: 1655908 - DNA, 15 bp, Homo sapiens
gctgtagtgggttga

SEQ ID NO: 1655909 - DNA, 15 bp, Homo sapiens
ctgtagtgggttgaa

SEQ ID NO: 1655910 - DNA, 15 bp, Homo sapiens
tgtagtgggttgaac

SEQ ID NO: 1655911 - DNA, 15 bp, Homo sapiens
gtagtgggttgaact

SEQ ID NO: 1655912 - DNA, 15 bp, Homo sapiens
tagtgggttgaactg

SEQ ID NO: 1655913 - DNA, 15 bp, Homo sapiens
agtgggttgaactgt

SEQ ID NO: 1655914 - DNA, 15 bp, Homo sapiens
gtgggttgaactgta

SEQ ID NO: 1655915 - DNA, 15 bp, Homo sapiens
tgggttgaactgtat

SEQ ID NO: 1655916 - DNA, 15 bp, Homo sapiens
gggttgaactgtatc

SEQ ID NO: 1655917 - DNA, 15 bp, Homo sapiens
ggttgaactgtatcc

SEQ ID NO: 1655918 - DNA, 15 bp, Homo sapiens
gttgaactgtatccc

SEQ ID NO: 1655919 - DNA, 15 bp, Homo sapiens
ttgaactgtatccct

SEQ ID NO: 1655920 - DNA, 15 bp, Homo sapiens
tgaactgtatccctc

SEQ ID NO: 1655921 - DNA, 15 bp, Homo sapiens
gaactgtatccctca

SEQ ID NO: 1655922 - DNA, 15 bp, Homo sapiens
aactgtatccctcaa

SEQ ID NO: 1655923 - DNA, 15 bp, Homo sapiens
actgtatccctcaaa

SEQ ID NO: 1655924 - DNA, 15 bp, Homo sapiens
ctgtatccctcaaaa

SEQ ID NO: 1655925 - DNA, 15 bp, Homo sapiens
tgtatccctcaaaaa

SEQ ID NO: 1655926 - DNA, 15 bp, Homo sapiens
gtatccctcaaaaag

SEQ ID NO: 1655927 - DNA, 15 bp, Homo sapiens
tatccctcaaaaaga

SEQ ID NO: 1655928 - DNA, 15 bp, Homo sapiens
atccctcaaaaagat

SEQ ID NO: 1655929 - DNA, 15 bp, Homo sapiens
tccctcaaaaagata

SEQ ID NO: 1655930 - DNA, 15 bp, Homo sapiens
ccctcaaaaagatat

SEQ ID NO: 1655931 - DNA, 15 bp, Homo sapiens
cctcaaaaagatata

SEQ ID NO: 1655932 - DNA, 15 bp, Homo sapiens
ctcaaaaagatatat

SEQ ID NO: 1655933 - DNA, 15 bp, Homo sapiens
tcaaaaagatatatt

SEQ ID NO: 1655934 - DNA, 15 bp, Homo sapiens
caaaaagatatattt

SEQ ID NO: 1655935 - DNA, 15 bp, Homo sapiens
aaaaagatatatttg

SEQ ID NO: 1655936 - DNA, 15 bp, Homo sapiens
aaaagatatatttga

SEQ ID NO: 1655937 - DNA, 15 bp, Homo sapiens
aaagatatatttgag

SEQ ID NO: 1655938 - DNA, 15 bp, Homo sapiens
aagatatatttgagc

SEQ ID NO: 1655939 - DNA, 15 bp, Homo sapiens
agatatatttgagcc

SEQ ID NO: 1655940 - DNA, 15 bp, Homo sapiens
gatatatttgagccc

SEQ ID NO: 1655941 - DNA, 15 bp, Homo sapiens
atatatttgagccct

SEQ ID NO: 1655942 - DNA, 15 bp, Homo sapiens
tatatttgagcccta

SEQ ID NO: 1655943 - DNA, 15 bp, Homo sapiens
atatttgagccctac

SEQ ID NO: 1655944 - DNA, 15 bp, Homo sapiens
tatttgagccctacc

SEQ ID NO: 1655945 - DNA, 15 bp, Homo sapiens
atttgagccctacca

SEQ ID NO: 1655946 - DNA, 15 bp, Homo sapiens
tttgagccctaccac

SEQ ID NO: 1655947 - DNA, 15 bp, Homo sapiens
ttgagccctaccacc

SEQ ID NO: 1655948 - DNA, 15 bp, Homo sapiens
tgagccctaccaccc

SEQ ID NO: 1655949 - DNA, 15 bp, Homo sapiens
gagccctaccacccg

SEQ ID NO: 1655950 - DNA, 15 bp, Homo sapiens
agccctaccacccgc

SEQ ID NO: 1655951 - DNA, 15 bp, Homo sapiens
gccctaccacccgca

SEQ ID NO: 1655952 - DNA, 15 bp, Homo sapiens
ccctaccacccgcac

SEQ ID NO: 1655953 - DNA, 15 bp, Homo sapiens
cctaccacccgcaca

SEQ ID NO: 1655954 - DNA, 15 bp, Homo sapiens
ctaccacccgcacac

SEQ ID NO: 1655955 - DNA, 15 bp, Homo sapiens
taccacccgcacaca

SEQ ID NO: 1655956 - DNA, 15 bp, Homo sapiens
accacccgcacacac

SEQ ID NO: 1655957 - DNA, 15 bp, Homo sapiens
ccacccgcacacaca

SEQ ID NO: 1655958 - DNA, 15 bp, Homo sapiens
cacccgcacacacac

SEQ ID NO: 1655959 - DNA, 15 bp, Homo sapiens
acccgcacacacaca

SEQ ID NO: 1655960 - DNA, 15 bp, Homo sapiens
cccgcacacacacac

SEQ ID NO: 1655961 - DNA, 15 bp, Homo sapiens
ccgcacacacacact

SEQ ID NO: 1655962 - DNA, 15 bp, Homo sapiens
cgcacacacacactt

SEQ ID NO: 1655963 - DNA, 15 bp, Homo sapiens
gcacacacacactta

SEQ ID NO: 1655964 - DNA, 15 bp, Homo sapiens
cacacacacacttat

SEQ ID NO: 1655965 - DNA, 15 bp, Homo sapiens
acacacacacttatt

SEQ ID NO: 1655966 - DNA, 15 bp, Homo sapiens
cacacacacttatta

SEQ ID NO: 1655967 - DNA, 15 bp, Homo sapiens
acacacacttattaa

SEQ ID NO: 1655968 - DNA, 15 bp, Homo sapiens
cacacacttattaat

SEQ ID NO: 1655969 - DNA, 15 bp, Homo sapiens
acacacttattaatg

SEQ ID NO: 1655970 - DNA, 15 bp, Homo sapiens
cacacttattaatgt

SEQ ID NO: 1655971 - DNA, 15 bp, Homo sapiens
acacttattaatgtg

SEQ ID NO: 1655972 - DNA, 15 bp, Homo sapiens
cacttattaatgtga

SEQ ID NO: 1655973 - DNA, 15 bp, Homo sapiens
acttattaatgtgac

SEQ ID NO: 1655974 - DNA, 15 bp, Homo sapiens
cttattaatgtgacc

SEQ ID NO: 1655975 - DNA, 15 bp, Homo sapiens
ttattaatgtgacct

SEQ ID NO: 1655976 - DNA, 15 bp, Homo sapiens
tattaatgtgacctt

SEQ ID NO: 1655977 - DNA, 15 bp, Homo sapiens
attaatgtgaccttg

SEQ ID NO: 1655978 - DNA, 15 bp, Homo sapiens
ttaatgtgaccttgt

SEQ ID NO: 1655979 - DNA, 15 bp, Homo sapiens
taatgtgaccttgtt

SEQ ID NO: 1655980 - DNA, 15 bp, Homo sapiens
aatgtgaccttgttt

SEQ ID NO: 1655981 - DNA, 15 bp, Homo sapiens
atgtgaccttgtttg

SEQ ID NO: 1655982 - DNA, 15 bp, Homo sapiens
tgtgaccttgtttgg

SEQ ID NO: 1655983 - DNA, 15 bp, Homo sapiens
gtgaccttgtttgga

SEQ ID NO: 1655984 - DNA, 15 bp, Homo sapiens
tgaccttgtttggaa

SEQ ID NO: 1655985 - DNA, 15 bp, Homo sapiens
gaccttgtttggaaa

SEQ ID NO: 1655986 - DNA, 15 bp, Homo sapiens
accttgtttggaaat

SEQ ID NO: 1655987 - DNA, 15 bp, Homo sapiens
ccttgtttggaaatg

SEQ ID NO: 1655988 - DNA, 15 bp, Homo sapiens
cttgtttggaaatgg

SEQ ID NO: 1655989 - DNA, 15 bp, Homo sapiens
ttgtttggaaatgga

SEQ ID NO: 1655990 - DNA, 15 bp, Homo sapiens
tgtttggaaatggag

SEQ ID NO: 1655991 - DNA, 15 bp, Homo sapiens
gtttggaaatggagt

SEQ ID NO: 1655992 - DNA, 15 bp, Homo sapiens
tttggaaatggagtc

SEQ ID NO: 1655993 - DNA, 15 bp, Homo sapiens
ttggaaatggagtct

SEQ ID NO: 1655994 - DNA, 15 bp, Homo sapiens
tggaaatggagtctt

SEQ ID NO: 1655995 - DNA, 15 bp, Homo sapiens
ggaaatggagtcttt

SEQ ID NO: 1655996 - DNA, 15 bp, Homo sapiens
gaaatggagtctttg

SEQ ID NO: 1655997 - DNA, 15 bp, Homo sapiens
aaatggagtctttgc

SEQ ID NO: 1655998 - DNA, 15 bp, Homo sapiens
aatggagtctttgca

SEQ ID NO: 1655999 - DNA, 15 bp, Homo sapiens
atggagtctttgcag

SEQ ID NO: 1656000 - DNA, 15 bp, Homo sapiens
tggagtctttgcaga

SEQ ID NO: 1656001 - DNA, 15 bp, Homo sapiens
ggagtctttgcagat

SEQ ID NO: 1656002 - DNA, 15 bp, Homo sapiens
gagtctttgcagatg

SEQ ID NO: 1656003 - DNA, 15 bp, Homo sapiens
agtctttgcagatgt

SEQ ID NO: 1656004 - DNA, 15 bp, Homo sapiens
gtctttgcagatgtg

SEQ ID NO: 1656005 - DNA, 15 bp, Homo sapiens
tctttgcagatgtgg

SEQ ID NO: 1656006 - DNA, 15 bp, Homo sapiens
ctttgcagatgtggt

SEQ ID NO: 1656007 - DNA, 15 bp, Homo sapiens
tttgcagatgtggtt

SEQ ID NO: 1656008 - DNA, 15 bp, Homo sapiens
ttgcagatgtggtta

SEQ ID NO: 1656009 - DNA, 15 bp, Homo sapiens
tgcagatgtggttag

SEQ ID NO: 1656010 - DNA, 15 bp, Homo sapiens
gcagatgtggttagt

SEQ ID NO: 1656011 - DNA, 15 bp, Homo sapiens
cagatgtggttagtt

SEQ ID NO: 1656012 - DNA, 15 bp, Homo sapiens
agatgtggttagtta

SEQ ID NO: 1656013 - DNA, 15 bp, Homo sapiens
gatgtggttagttaa

SEQ ID NO: 1656014 - DNA, 15 bp, Homo sapiens
atgtggttagttaag

SEQ ID NO: 1656015 - DNA, 15 bp, Homo sapiens
tgtggttagttaaga

SEQ ID NO: 1656016 - DNA, 15 bp, Homo sapiens
gtggttagttaagaa

SEQ ID NO: 1656017 - DNA, 15 bp, Homo sapiens
tggttagttaagaat

SEQ ID NO: 1656018 - DNA, 15 bp, Homo sapiens
ggttagttaagaatc

SEQ ID NO: 1656019 - DNA, 15 bp, Homo sapiens
gttagttaagaatcc

SEQ ID NO: 1656020 - DNA, 15 bp, Homo sapiens
ttagttaagaatccc

SEQ ID NO: 1656021 - DNA, 15 bp, Homo sapiens
tagttaagaatccca

SEQ ID NO: 1656022 - DNA, 15 bp, Homo sapiens
agttaagaatcccat

SEQ ID NO: 1656023 - DNA, 15 bp, Homo sapiens
gttaagaatcccatg

SEQ ID NO: 1656024 - DNA, 15 bp, Homo sapiens
ttaagaatcccatga

SEQ ID NO: 1656025 - DNA, 15 bp, Homo sapiens
taagaatcccatgac

SEQ ID NO: 1656026 - DNA, 15 bp, Homo sapiens
aagaatcccatgact

SEQ ID NO: 1656027 - DNA, 15 bp, Homo sapiens
agaatcccatgactg

SEQ ID NO: 1656028 - DNA, 15 bp, Homo sapiens
gaatcccatgactga

SEQ ID NO: 1656029 - DNA, 15 bp, Homo sapiens
aatcccatgactgaa

SEQ ID NO: 1656030 - DNA, 15 bp, Homo sapiens
atcccatgactgaat

SEQ ID NO: 1656031 - DNA, 15 bp, Homo sapiens
tcccatgactgaatc

SEQ ID NO: 1656032 - DNA, 15 bp, Homo sapiens
cccatgactgaatca

SEQ ID NO: 1656033 - DNA, 15 bp, Homo sapiens
ccatgactgaatcat

SEQ ID NO: 1656034 - DNA, 15 bp, Homo sapiens
catgactgaatcatt

SEQ ID NO: 1656035 - DNA, 15 bp, Homo sapiens
atgactgaatcattc

SEQ ID NO: 1656036 - DNA, 15 bp, Homo sapiens
tgactgaatcattct

SEQ ID NO: 1656037 - DNA, 15 bp, Homo sapiens
gactgaatcattctt

SEQ ID NO: 1656038 - DNA, 15 bp, Homo sapiens
actgaatcattcttg

SEQ ID NO: 1656039 - DNA, 15 bp, Homo sapiens
ctgaatcattcttga

SEQ ID NO: 1656040 - DNA, 15 bp, Homo sapiens
tgaatcattcttgat

SEQ ID NO: 1656041 - DNA, 15 bp, Homo sapiens
gaatcattcttgatc

SEQ ID NO: 1656042 - DNA, 15 bp, Homo sapiens
aatcattcttgatct

SEQ ID NO: 1656043 - DNA, 15 bp, Homo sapiens
atcattcttgatcta

SEQ ID NO: 1656044 - DNA, 15 bp, Homo sapiens
tcattcttgatctag

SEQ ID NO: 1656045 - DNA, 15 bp, Homo sapiens
cattcttgatctagg

SEQ ID NO: 1656046 - DNA, 15 bp, Homo sapiens
attcttgatctaggg

SEQ ID NO: 1656047 - DNA, 15 bp, Homo sapiens
ttcttgatctagggt

SEQ ID NO: 1656048 - DNA, 15 bp, Homo sapiens
tcttgatctagggtg

SEQ ID NO: 1656049 - DNA, 15 bp, Homo sapiens
cttgatctagggtgg

SEQ ID NO: 1656050 - DNA, 15 bp, Homo sapiens
ttgatctagggtgga

SEQ ID NO: 1656051 - DNA, 15 bp, Homo sapiens
tgatctagggtggat

SEQ ID NO: 1656052 - DNA, 15 bp, Homo sapiens
gatctagggtggatc

SEQ ID NO: 1656053 - DNA, 15 bp, Homo sapiens
atctagggtggatcc

SEQ ID NO: 1656054 - DNA, 15 bp, Homo sapiens
tctagggtggatcct

SEQ ID NO: 1656055 - DNA, 15 bp, Homo sapiens
ctagggtggatccta

SEQ ID NO: 1656056 - DNA, 15 bp, Homo sapiens
tagggtggatcctaa

SEQ ID NO: 1656057 - DNA, 15 bp, Homo sapiens
agggtggatcctaaa

SEQ ID NO: 1656058 - DNA, 15 bp, Homo sapiens
gggtggatcctaaat

SEQ ID NO: 1656059 - DNA, 15 bp, Homo sapiens
ggtggatcctaaatc

SEQ ID NO: 1656060 - DNA, 15 bp, Homo sapiens
gtggatcctaaatcc

SEQ ID NO: 1656061 - DNA, 15 bp, Homo sapiens
tggatcctaaatcca

SEQ ID NO: 1656062 - DNA, 15 bp, Homo sapiens
ggatcctaaatccaa

SEQ ID NO: 1656063 - DNA, 15 bp, Homo sapiens
gatcctaaatccaat

SEQ ID NO: 1656064 - DNA, 15 bp, Homo sapiens
atcctaaatccaata

SEQ ID NO: 1656065 - DNA, 15 bp, Homo sapiens
tcctaaatccaataa

SEQ ID NO: 1656066 - DNA, 15 bp, Homo sapiens
cctaaatccaataaa

SEQ ID NO: 1656067 - DNA, 15 bp, Homo sapiens
ctaaatccaataaat

SEQ ID NO: 1656068 - DNA, 15 bp, Homo sapiens
taaatccaataaatg

SEQ ID NO: 1656069 - DNA, 15 bp, Homo sapiens
aaatccaataaatgg

SEQ ID NO: 1656070 - DNA, 15 bp, Homo sapiens
aatccaataaatggt

SEQ ID NO: 1656071 - DNA, 15 bp, Homo sapiens
atccaataaatggtg

SEQ ID NO: 1656072 - DNA, 15 bp, Homo sapiens
tccaataaatggtgt

SEQ ID NO: 1656073 - DNA, 15 bp, Homo sapiens
ccaataaatggtgtc

SEQ ID NO: 1656074 - DNA, 15 bp, Homo sapiens
caataaatggtgtct

SEQ ID NO: 1656075 - DNA, 15 bp, Homo sapiens
aataaatggtgtctt

SEQ ID NO: 1656076 - DNA, 15 bp, Homo sapiens
ataaatggtgtcttt

SEQ ID NO: 1656077 - DNA, 15 bp, Homo sapiens
taaatggtgtctttc

SEQ ID NO: 1656078 - DNA, 15 bp, Homo sapiens
aaatggtgtctttct

SEQ ID NO: 1656079 - DNA, 15 bp, Homo sapiens
aatggtgtctttcta

SEQ ID NO: 1656080 - DNA, 15 bp, Homo sapiens
atggtgtctttctaa

SEQ ID NO: 1656081 - DNA, 15 bp, Homo sapiens
tggtgtctttctaag

SEQ ID NO: 1656082 - DNA, 15 bp, Homo sapiens
ggtgtctttctaaga

SEQ ID NO: 1656083 - DNA, 15 bp, Homo sapiens
gtgtctttctaagag

SEQ ID NO: 1656084 - DNA, 15 bp, Homo sapiens
tgtctttctaagagc

SEQ ID NO: 1656085 - DNA, 15 bp, Homo sapiens
gtctttctaagagca

SEQ ID NO: 1656086 - DNA, 15 bp, Homo sapiens
tctttctaagagcaa

SEQ ID NO: 1656087 - DNA, 15 bp, Homo sapiens
ctttctaagagcaag

SEQ ID NO: 1656088 - DNA, 15 bp, Homo sapiens
tttctaagagcaagg

SEQ ID NO: 1656089 - DNA, 15 bp, Homo sapiens
ttctaagagcaagga

SEQ ID NO: 1656090 - DNA, 15 bp, Homo sapiens
tctaagagcaaggag

SEQ ID NO: 1656091 - DNA, 15 bp, Homo sapiens
ctaagagcaaggaga

SEQ ID NO: 1656092 - DNA, 15 bp, Homo sapiens
taagagcaaggagag

SEQ ID NO: 1656093 - DNA, 15 bp, Homo sapiens
aagagcaaggagagg

SEQ ID NO: 1656094 - DNA, 15 bp, Homo sapiens
agagcaaggagaggg

SEQ ID NO: 1656095 - DNA, 15 bp, Homo sapiens
gagcaaggagagggt

SEQ ID NO: 1656096 - DNA, 15 bp, Homo sapiens
agcaaggagagggtg

SEQ ID NO: 1656097 - DNA, 15 bp, Homo sapiens
gcaaggagagggtga

SEQ ID NO: 1656098 - DNA, 15 bp, Homo sapiens
caaggagagggtgat

SEQ ID NO: 1656099 - DNA, 15 bp, Homo sapiens
aaggagagggtgatt

SEQ ID NO: 1656100 - DNA, 15 bp, Homo sapiens
aggagagggtgattt

SEQ ID NO: 1656101 - DNA, 15 bp, Homo sapiens
ggagagggtgatttg

SEQ ID NO: 1656102 - DNA, 15 bp, Homo sapiens
gagagggtgatttgg

SEQ ID NO: 1656103 - DNA, 15 bp, Homo sapiens
agagggtgatttgga

SEQ ID NO: 1656104 - DNA, 15 bp, Homo sapiens
gagggtgatttggac

SEQ ID NO: 1656105 - DNA, 15 bp, Homo sapiens
agggtgatttggaca

SEQ ID NO: 1656106 - DNA, 15 bp, Homo sapiens
gggtgatttggacag

SEQ ID NO: 1656107 - DNA, 15 bp, Homo sapiens
ggtgatttggacaga

SEQ ID NO: 1656108 - DNA, 15 bp, Homo sapiens
gtgatttggacagag

SEQ ID NO: 1656109 - DNA, 15 bp, Homo sapiens
tgatttggacagaga

SEQ ID NO: 1656110 - DNA, 15 bp, Homo sapiens
gatttggacagagac

SEQ ID NO: 1656111 - DNA, 15 bp, Homo sapiens
atttggacagagaca

SEQ ID NO: 1656112 - DNA, 15 bp, Homo sapiens
tttggacagagacac

SEQ ID NO: 1656113 - DNA, 15 bp, Homo sapiens
ttggacagagacact

SEQ ID NO: 1656114 - DNA, 15 bp, Homo sapiens
tggacagagacactg

SEQ ID NO: 1656115 - DNA, 15 bp, Homo sapiens
ggacagagacactga

SEQ ID NO: 1656116 - DNA, 15 bp, Homo sapiens
gacagagacactgat

SEQ ID NO: 1656117 - DNA, 15 bp, Homo sapiens
acagagacactgata

SEQ ID NO: 1656118 - DNA, 15 bp, Homo sapiens
cagagacactgatac

SEQ ID NO: 1656119 - DNA, 15 bp, Homo sapiens
agagacactgataca

SEQ ID NO: 1656120 - DNA, 15 bp, Homo sapiens
gagacactgatacat

SEQ ID NO: 1656121 - DNA, 15 bp, Homo sapiens
agacactgatacatg

SEQ ID NO: 1656122 - DNA, 15 bp, Homo sapiens
gacactgatacatgg

SEQ ID NO: 1656123 - DNA, 15 bp, Homo sapiens
acactgatacatggg

SEQ ID NO: 1656124 - DNA, 15 bp, Homo sapiens
cactgatacatgggg

SEQ ID NO: 1656125 - DNA, 15 bp, Homo sapiens
actgatacatgggga

SEQ ID NO: 1656126 - DNA, 15 bp, Homo sapiens
ctgatacatggggaa

SEQ ID NO: 1656127 - DNA, 15 bp, Homo sapiens
tgatacatggggaaa

SEQ ID NO: 1656128 - DNA, 15 bp, Homo sapiens
gatacatggggaaag

SEQ ID NO: 1656129 - DNA, 15 bp, Homo sapiens
atacatggggaaagg

SEQ ID NO: 1656130 - DNA, 15 bp, Homo sapiens
tacatggggaaaggc

SEQ ID NO: 1656131 - DNA, 15 bp, Homo sapiens
acatggggaaaggcc

SEQ ID NO: 1656132 - DNA, 15 bp, Homo sapiens
catggggaaaggcca

SEQ ID NO: 1656133 - DNA, 15 bp, Homo sapiens
atggggaaaggccat

SEQ ID NO: 1656134 - DNA, 15 bp, Homo sapiens
tggggaaaggccatg

SEQ ID NO: 1656135 - DNA, 15 bp, Homo sapiens
ggggaaaggccatgt

SEQ ID NO: 1656136 - DNA, 15 bp, Homo sapiens
gggaaaggccatgtg

SEQ ID NO: 1656137 - DNA, 15 bp, Homo sapiens
ggaaaggccatgtga

SEQ ID NO: 1656138 - DNA, 15 bp, Homo sapiens
gaaaggccatgtgaa

SEQ ID NO: 1656139 - DNA, 15 bp, Homo sapiens
aaaggccatgtgaag

SEQ ID NO: 1656140 - DNA, 15 bp, Homo sapiens
aaggccatgtgaaga

SEQ ID NO: 1656141 - DNA, 15 bp, Homo sapiens
aggccatgtgaagag

SEQ ID NO: 1656142 - DNA, 15 bp, Homo sapiens
ggccatgtgaagagg

SEQ ID NO: 1656143 - DNA, 15 bp, Homo sapiens
gccatgtgaagaggg

SEQ ID NO: 1656144 - DNA, 15 bp, Homo sapiens
ccatgtgaagaggga

SEQ ID NO: 1656145 - DNA, 15 bp, Homo sapiens
catgtgaagagggag

SEQ ID NO: 1656146 - DNA, 15 bp, Homo sapiens
atgtgaagagggagg

SEQ ID NO: 1656147 - DNA, 15 bp, Homo sapiens
tgtgaagagggaggc

SEQ ID NO: 1656148 - DNA, 15 bp, Homo sapiens
gtgaagagggaggca

SEQ ID NO: 1656149 - DNA, 15 bp, Homo sapiens
tgaagagggaggcag

SEQ ID NO: 1656150 - DNA, 15 bp, Homo sapiens
gaagagggaggcaga

SEQ ID NO: 1656151 - DNA, 15 bp, Homo sapiens
aagagggaggcagag

SEQ ID NO: 1656152 - DNA, 15 bp, Homo sapiens
agagggaggcagaga

SEQ ID NO: 1656153 - DNA, 15 bp, Homo sapiens
gagggaggcagagac

SEQ ID NO: 1656154 - DNA, 15 bp, Homo sapiens
agggaggcagagact

SEQ ID NO: 1656155 - DNA, 15 bp, Homo sapiens
gggaggcagagactg

SEQ ID NO: 1656156 - DNA, 15 bp, Homo sapiens
ggaggcagagactgg

SEQ ID NO: 1656157 - DNA, 15 bp, Homo sapiens
gaggcagagactgga

SEQ ID NO: 1656158 - DNA, 15 bp, Homo sapiens
aggcagagactggag

SEQ ID NO: 1656159 - DNA, 15 bp, Homo sapiens
ggcagagactggagt

SEQ ID NO: 1656160 - DNA, 15 bp, Homo sapiens
gcagagactggagtt

SEQ ID NO: 1656161 - DNA, 15 bp, Homo sapiens
cagagactggagttg

SEQ ID NO: 1656162 - DNA, 15 bp, Homo sapiens
agagactggagttgt

SEQ ID NO: 1656163 - DNA, 15 bp, Homo sapiens
gagactggagttgtg

SEQ ID NO: 1656164 - DNA, 15 bp, Homo sapiens
agactggagttgtgc

SEQ ID NO: 1656165 - DNA, 15 bp, Homo sapiens
gactggagttgtgct

SEQ ID NO: 1656166 - DNA, 15 bp, Homo sapiens
actggagttgtgctt

SEQ ID NO: 1656167 - DNA, 15 bp, Homo sapiens
ctggagttgtgcttc

SEQ ID NO: 1656168 - DNA, 15 bp, Homo sapiens
tggagttgtgcttcc

SEQ ID NO: 1656169 - DNA, 15 bp, Homo sapiens
ggagttgtgcttcca

SEQ ID NO: 1656170 - DNA, 15 bp, Homo sapiens
gagttgtgcttccac

SEQ ID NO: 1656171 - DNA, 15 bp, Homo sapiens
agttgtgcttccaca

SEQ ID NO: 1656172 - DNA, 15 bp, Homo sapiens
gttgtgcttccacaa

SEQ ID NO: 1656173 - DNA, 15 bp, Homo sapiens
ttgtgcttccacaag

SEQ ID NO: 1656174 - DNA, 15 bp, Homo sapiens
tgtgcttccacaagc

SEQ ID NO: 1656175 - DNA, 15 bp, Homo sapiens
gtgcttccacaagcc

SEQ ID NO: 1656176 - DNA, 15 bp, Homo sapiens
tgcttccacaagcca

SEQ ID NO: 1656177 - DNA, 15 bp, Homo sapiens
gcttccacaagccaa

SEQ ID NO: 1656178 - DNA, 15 bp, Homo sapiens
cttccacaagccaag

SEQ ID NO: 1656179 - DNA, 15 bp, Homo sapiens
ttccacaagccaagg

SEQ ID NO: 1656180 - DNA, 15 bp, Homo sapiens
tccacaagccaagga

SEQ ID NO: 1656181 - DNA, 15 bp, Homo sapiens
ccacaagccaaggaa

SEQ ID NO: 1656182 - DNA, 15 bp, Homo sapiens
cacaagccaaggaat

SEQ ID NO: 1656183 - DNA, 15 bp, Homo sapiens
acaagccaaggaatg

SEQ ID NO: 1656184 - DNA, 15 bp, Homo sapiens
caagccaaggaatgc

SEQ ID NO: 1656185 - DNA, 15 bp, Homo sapiens
aagccaaggaatgcc

SEQ ID NO: 1656186 - DNA, 15 bp, Homo sapiens
agccaaggaatgcca

SEQ ID NO: 1656187 - DNA, 15 bp, Homo sapiens
gccaaggaatgccag

SEQ ID NO: 1656188 - DNA, 15 bp, Homo sapiens
ccaaggaatgccaga

SEQ ID NO: 1656189 - DNA, 15 bp, Homo sapiens
caaggaatgccagaa

SEQ ID NO: 1656190 - DNA, 15 bp, Homo sapiens
aaggaatgccagaag

SEQ ID NO: 1656191 - DNA, 15 bp, Homo sapiens
aggaatgccagaagc

SEQ ID NO: 1656192 - DNA, 15 bp, Homo sapiens
ggaatgccagaagcc

SEQ ID NO: 1656193 - DNA, 15 bp, Homo sapiens
gaatgccagaagcca

SEQ ID NO: 1656194 - DNA, 15 bp, Homo sapiens
aatgccagaagccac

SEQ ID NO: 1656195 - DNA, 15 bp, Homo sapiens
atgccagaagccacc

SEQ ID NO: 1656196 - DNA, 15 bp, Homo sapiens
tgccagaagccacca

SEQ ID NO: 1656197 - DNA, 15 bp, Homo sapiens
gccagaagccaccag

SEQ ID NO: 1656198 - DNA, 15 bp, Homo sapiens
ccagaagccaccaga

SEQ ID NO: 1656199 - DNA, 15 bp, Homo sapiens
cagaagccaccagag

SEQ ID NO: 1656200 - DNA, 15 bp, Homo sapiens
agaagccaccagagc

SEQ ID NO: 1656201 - DNA, 15 bp, Homo sapiens
gaagccaccagagct

SEQ ID NO: 1656202 - DNA, 15 bp, Homo sapiens
aagccaccagagctg

SEQ ID NO: 1656203 - DNA, 15 bp, Homo sapiens
agccaccagagctgg

SEQ ID NO: 1656204 - DNA, 15 bp, Homo sapiens
gccaccagagctgga

SEQ ID NO: 1656205 - DNA, 15 bp, Homo sapiens
ccaccagagctggaa

SEQ ID NO: 1656206 - DNA, 15 bp, Homo sapiens
caccagagctggaag

SEQ ID NO: 1656207 - DNA, 15 bp, Homo sapiens
accagagctggaaga

SEQ ID NO: 1656208 - DNA, 15 bp, Homo sapiens
ccagagctggaagat

SEQ ID NO: 1656209 - DNA, 15 bp, Homo sapiens
cagagctggaagatg

SEQ ID NO: 1656210 - DNA, 15 bp, Homo sapiens
agctggaagatgcaa

SEQ ID NO: 1656211 - DNA, 15 bp, Homo sapiens
gctggaagatgcaag

SEQ ID NO: 1656212 - DNA, 15 bp, Homo sapiens
ctggaagatgcaagg

SEQ ID NO: 1656213 - DNA, 15 bp, Homo sapiens
tggaagatgcaagga

SEQ ID NO: 1656214 - DNA, 15 bp, Homo sapiens
ggaagatgcaaggaa

SEQ ID NO: 1656215 - DNA, 15 bp, Homo sapiens
gaagatgcaaggaag

SEQ ID NO: 1656216 - DNA, 15 bp, Homo sapiens
aagatgcaaggaagg

SEQ ID NO: 1656217 - DNA, 15 bp, Homo sapiens
agatgcaaggaagga

SEQ ID NO: 1656218 - DNA, 15 bp, Homo sapiens
gatgcaaggaaggat

SEQ ID NO: 1656219 - DNA, 15 bp, Homo sapiens
atgcaaggaaggatt

SEQ ID NO: 1656220 - DNA, 15 bp, Homo sapiens
tgcaaggaaggattc

SEQ ID NO: 1656221 - DNA, 15 bp, Homo sapiens
gcaaggaaggattct

SEQ ID NO: 1656222 - DNA, 15 bp, Homo sapiens
caaggaaggattctc

SEQ ID NO: 1656223 - DNA, 15 bp, Homo sapiens
aaggaaggattctcc

SEQ ID NO: 1656224 - DNA, 15 bp, Homo sapiens
aggaaggattctcct

SEQ ID NO: 1656225 - DNA, 15 bp, Homo sapiens
ggaaggattctcctc

SEQ ID NO: 1656226 - DNA, 15 bp, Homo sapiens
gaaggattctcctct

SEQ ID NO: 1656227 - DNA, 15 bp, Homo sapiens
aaggattctcctcta

SEQ ID NO: 1656228 - DNA, 15 bp, Homo sapiens
aggattctcctctag

SEQ ID NO: 1656229 - DNA, 15 bp, Homo sapiens
ggattctcctctaga

SEQ ID NO: 1656230 - DNA, 15 bp, Homo sapiens
gattctcctctagag

SEQ ID NO: 1656231 - DNA, 15 bp, Homo sapiens
attctcctctagagt

SEQ ID NO: 1656232 - DNA, 15 bp, Homo sapiens
ttctcctctagagtt

SEQ ID NO: 1656233 - DNA, 15 bp, Homo sapiens
tctcctctagagttt

SEQ ID NO: 1656234 - DNA, 15 bp, Homo sapiens
ctcctctagagtttt

SEQ ID NO: 1656235 - DNA, 15 bp, Homo sapiens
tcctctagagttttc

SEQ ID NO: 1656236 - DNA, 15 bp, Homo sapiens
cctctagagttttca

SEQ ID NO: 1656237 - DNA, 15 bp, Homo sapiens
ctctagagttttcag

SEQ ID NO: 1656238 - DNA, 15 bp, Homo sapiens
tctagagttttcaga

SEQ ID NO: 1656239 - DNA, 15 bp, Homo sapiens
ctagagttttcagag

SEQ ID NO: 1656240 - DNA, 15 bp, Homo sapiens
tagagttttcagaga

SEQ ID NO: 1656241 - DNA, 15 bp, Homo sapiens
agagttttcagagag

SEQ ID NO: 1656242 - DNA, 15 bp, Homo sapiens
gagttttcagagaga

SEQ ID NO: 1656243 - DNA, 15 bp, Homo sapiens
agttttcagagagag

SEQ ID NO: 1656244 - DNA, 15 bp, Homo sapiens
gttttcagagagaga

SEQ ID NO: 1656245 - DNA, 15 bp, Homo sapiens
ttttcagagagagag

SEQ ID NO: 1656246 - DNA, 15 bp, Homo sapiens
tttcagagagagagc

SEQ ID NO: 1656247 - DNA, 15 bp, Homo sapiens
ttcagagagagagca

SEQ ID NO: 1656248 - DNA, 15 bp, Homo sapiens
tcagagagagagcat

SEQ ID NO: 1656249 - DNA, 15 bp, Homo sapiens
cagagagagagcatg

SEQ ID NO: 1656250 - DNA, 15 bp, Homo sapiens
agagagagagcatgg

SEQ ID NO: 1656251 - DNA, 15 bp, Homo sapiens
gagagagagcatggc

SEQ ID NO: 1656252 - DNA, 15 bp, Homo sapiens
agagagagcatggcc

SEQ ID NO: 1656253 - DNA, 15 bp, Homo sapiens
gagagagcatggccc

SEQ ID NO: 1656254 - DNA, 15 bp, Homo sapiens
agagagcatggccct

SEQ ID NO: 1656255 - DNA, 15 bp, Homo sapiens
gagagcatggccctg

SEQ ID NO: 1656256 - DNA, 15 bp, Homo sapiens
agagcatggccctgc

SEQ ID NO: 1656257 - DNA, 15 bp, Homo sapiens
gagcatggccctgct

SEQ ID NO: 1656258 - DNA, 15 bp, Homo sapiens
agcatggccctgctg

SEQ ID NO: 1656259 - DNA, 15 bp, Homo sapiens
gcatggccctgctga

SEQ ID NO: 1656260 - DNA, 15 bp, Homo sapiens
catggccctgctgac

SEQ ID NO: 1656261 - DNA, 15 bp, Homo sapiens
atggccctgctgaca

SEQ ID NO: 1656262 - DNA, 15 bp, Homo sapiens
tggccctgctgacac

SEQ ID NO: 1656263 - DNA, 15 bp, Homo sapiens
ggccctgctgacacc

SEQ ID NO: 1656264 - DNA, 15 bp, Homo sapiens
gccctgctgacacct

SEQ ID NO: 1656265 - DNA, 15 bp, Homo sapiens
ccctgctgacacctt

SEQ ID NO: 1656266 - DNA, 15 bp, Homo sapiens
cctgctgacaccttg

SEQ ID NO: 1656267 - DNA, 15 bp, Homo sapiens
ctgctgacaccttga

SEQ ID NO: 1656268 - DNA, 15 bp, Homo sapiens
tgctgacaccttgat

SEQ ID NO: 1656269 - DNA, 15 bp, Homo sapiens
gctgacaccttgatg

SEQ ID NO: 1656270 - DNA, 15 bp, Homo sapiens
ctgacaccttgatgt

SEQ ID NO: 1656271 - DNA, 15 bp, Homo sapiens
tgacaccttgatgtc

SEQ ID NO: 1656272 - DNA, 15 bp, Homo sapiens
gacaccttgatgtct

SEQ ID NO: 1656273 - DNA, 15 bp, Homo sapiens
acaccttgatgtctt

SEQ ID NO: 1656274 - DNA, 15 bp, Homo sapiens
caccttgatgtctta

SEQ ID NO: 1656275 - DNA, 15 bp, Homo sapiens
accttgatgtcttac

SEQ ID NO: 1656276 - DNA, 15 bp, Homo sapiens
ccttgatgtcttact

SEQ ID NO: 1656277 - DNA, 15 bp, Homo sapiens
cttgatgtcttactt

SEQ ID NO: 1656278 - DNA, 15 bp, Homo sapiens
ttgatgtcttacttc

SEQ ID NO: 1656279 - DNA, 15 bp, Homo sapiens
tgatgtcttacttct

SEQ ID NO: 1656280 - DNA, 15 bp, Homo sapiens
gatgtcttacttctg

SEQ ID NO: 1656281 - DNA, 15 bp, Homo sapiens
atgtcttacttctgg

SEQ ID NO: 1656282 - DNA, 15 bp, Homo sapiens
tgtcttacttctggc

SEQ ID NO: 1656283 - DNA, 15 bp, Homo sapiens
gtcttacttctggcc

SEQ ID NO: 1656284 - DNA, 15 bp, Homo sapiens
tcttacttctggcct

SEQ ID NO: 1656285 - DNA, 15 bp, Homo sapiens
cttacttctggcctc

SEQ ID NO: 1656286 - DNA, 15 bp, Homo sapiens
ttacttctggcctcc

SEQ ID NO: 1656287 - DNA, 15 bp, Homo sapiens
tacttctggcctcca

SEQ ID NO: 1656288 - DNA, 15 bp, Homo sapiens
acttctggcctccag

SEQ ID NO: 1656289 - DNA, 15 bp, Homo sapiens
cttctggcctccaga

SEQ ID NO: 1656290 - DNA, 15 bp, Homo sapiens
ttctggcctccagaa

SEQ ID NO: 1656291 - DNA, 15 bp, Homo sapiens
tctggcctccagaat

SEQ ID NO: 1656292 - DNA, 15 bp, Homo sapiens
ctggcctccagaatt

SEQ ID NO: 1656293 - DNA, 15 bp, Homo sapiens
tggcctccagaattg

SEQ ID NO: 1656294 - DNA, 15 bp, Homo sapiens
ggcctccagaattgt

SEQ ID NO: 1656295 - DNA, 15 bp, Homo sapiens
gcctccagaattgtg

SEQ ID NO: 1656296 - DNA, 15 bp, Homo sapiens
cctccagaattgtga

SEQ ID NO: 1656297 - DNA, 15 bp, Homo sapiens
ctccagaattgtgag

SEQ ID NO: 1656298 - DNA, 15 bp, Homo sapiens
tccagaattgtgaga

SEQ ID NO: 1656299 - DNA, 15 bp, Homo sapiens
ccagaattgtgagag

SEQ ID NO: 1656300 - DNA, 15 bp, Homo sapiens
cagaattgtgagaga

SEQ ID NO: 1656301 - DNA, 15 bp, Homo sapiens
agaattgtgagagaa

SEQ ID NO: 1656302 - DNA, 15 bp, Homo sapiens
gaattgtgagagaat

SEQ ID NO: 1656303 - DNA, 15 bp, Homo sapiens
aattgtgagagaata

SEQ ID NO: 1656304 - DNA, 15 bp, Homo sapiens
attgtgagagaatac

SEQ ID NO: 1656305 - DNA, 15 bp, Homo sapiens
ttgtgagagaataca

SEQ ID NO: 1656306 - DNA, 15 bp, Homo sapiens
tgtgagagaatacat

SEQ ID NO: 1656307 - DNA, 15 bp, Homo sapiens
gtgagagaatacatt

SEQ ID NO: 1656308 - DNA, 15 bp, Homo sapiens
tgagagaatacattt

SEQ ID NO: 1656309 - DNA, 15 bp, Homo sapiens
gagagaatacatttc

SEQ ID NO: 1656310 - DNA, 15 bp, Homo sapiens
agagaatacatttct

SEQ ID NO: 1656311 - DNA, 15 bp, Homo sapiens
gagaatacatttcta

SEQ ID NO: 1656312 - DNA, 15 bp, Homo sapiens
agaatacatttctat

SEQ ID NO: 1656313 - DNA, 15 bp, Homo sapiens
gaatacatttctatt

SEQ ID NO: 1656314 - DNA, 15 bp, Homo sapiens
aatacatttctattg

SEQ ID NO: 1656315 - DNA, 15 bp, Homo sapiens
atacatttctattgg

SEQ ID NO: 1656316 - DNA, 15 bp, Homo sapiens
tacatttctattggc

SEQ ID NO: 1656317 - DNA, 15 bp, Homo sapiens
acatttctattggct

SEQ ID NO: 1656318 - DNA, 15 bp, Homo sapiens
catttctattggctt

SEQ ID NO: 1656319 - DNA, 15 bp, Homo sapiens
atttctattggctta

SEQ ID NO: 1656320 - DNA, 15 bp, Homo sapiens
tttctattggcttaa

SEQ ID NO: 1656321 - DNA, 15 bp, Homo sapiens
ttctattggcttaag

SEQ ID NO: 1656322 - DNA, 15 bp, Homo sapiens
tctattggcttaagc

SEQ ID NO: 1656323 - DNA, 15 bp, Homo sapiens
ctattggcttaagcc

SEQ ID NO: 1656324 - DNA, 15 bp, Homo sapiens
tattggcttaagcca

SEQ ID NO: 1656325 - DNA, 15 bp, Homo sapiens
attggcttaagccac

SEQ ID NO: 1656326 - DNA, 15 bp, Homo sapiens
ttggcttaagccact

SEQ ID NO: 1656327 - DNA, 15 bp, Homo sapiens
tggcttaagccactc

SEQ ID NO: 1656328 - DNA, 15 bp, Homo sapiens
ggcttaagccactct

SEQ ID NO: 1656329 - DNA, 15 bp, Homo sapiens
gcttaagccactctg

SEQ ID NO: 1656330 - DNA, 15 bp, Homo sapiens
cttaagccactctgt

SEQ ID NO: 1656331 - DNA, 15 bp, Homo sapiens
ttaagccactctgtt

SEQ ID NO: 1656332 - DNA, 15 bp, Homo sapiens
taagccactctgttt

SEQ ID NO: 1656333 - DNA, 15 bp, Homo sapiens
aagccactctgtttg

SEQ ID NO: 1656334 - DNA, 15 bp, Homo sapiens
agccactctgtttgt

SEQ ID NO: 1656335 - DNA, 15 bp, Homo sapiens
gccactctgtttgtg

SEQ ID NO: 1656336 - DNA, 15 bp, Homo sapiens
ccactctgtttgtgg

SEQ ID NO: 1656337 - DNA, 15 bp, Homo sapiens
cactctgtttgtggt

SEQ ID NO: 1656338 - DNA, 15 bp, Homo sapiens
actctgtttgtggta

SEQ ID NO: 1656339 - DNA, 15 bp, Homo sapiens
ctctgtttgtggtag

SEQ ID NO: 1656340 - DNA, 15 bp, Homo sapiens
tctgtttgtggtagt

SEQ ID NO: 1656341 - DNA, 15 bp, Homo sapiens
ctgtttgtggtagta

SEQ ID NO: 1656342 - DNA, 15 bp, Homo sapiens
tgtttgtggtagtat

SEQ ID NO: 1656343 - DNA, 15 bp, Homo sapiens
gtttgtggtagtatg

SEQ ID NO: 1656344 - DNA, 15 bp, Homo sapiens
tttgtggtagtatgt

SEQ ID NO: 1656345 - DNA, 15 bp, Homo sapiens
ttgtggtagtatgtt

SEQ ID NO: 1656346 - DNA, 15 bp, Homo sapiens
tgtggtagtatgttg

SEQ ID NO: 1656347 - DNA, 15 bp, Homo sapiens
gtggtagtatgttgt

SEQ ID NO: 1656348 - DNA, 15 bp, Homo sapiens
tggtagtatgttgtg

SEQ ID NO: 1656349 - DNA, 15 bp, Homo sapiens
ggtagtatgttgtgg

SEQ ID NO: 1656350 - DNA, 15 bp, Homo sapiens
gtagtatgttgtggc

SEQ ID NO: 1656351 - DNA, 15 bp, Homo sapiens
tagtatgttgtggca

SEQ ID NO: 1656352 - DNA, 15 bp, Homo sapiens
agtatgttgtggcat

SEQ ID NO: 1656353 - DNA, 15 bp, Homo sapiens
gtatgttgtggcatc

SEQ ID NO: 1656354 - DNA, 15 bp, Homo sapiens
tatgttgtggcatct

SEQ ID NO: 1656355 - DNA, 15 bp, Homo sapiens
atgttgtggcatctc

SEQ ID NO: 1656356 - DNA, 15 bp, Homo sapiens
tgttgtggcatctct

SEQ ID NO: 1656357 - DNA, 15 bp, Homo sapiens
gttgtggcatctcta

SEQ ID NO: 1656358 - DNA, 15 bp, Homo sapiens
ttgtggcatctctag

SEQ ID NO: 1656359 - DNA, 15 bp, Homo sapiens
tgtggcatctctaga

SEQ ID NO: 1656360 - DNA, 15 bp, Homo sapiens
gtggcatctctagaa

SEQ ID NO: 1656361 - DNA, 15 bp, Homo sapiens
tggcatctctagaaa

SEQ ID NO: 1656362 - DNA, 15 bp, Homo sapiens
ggcatctctagaaaa

SEQ ID NO: 1656363 - DNA, 15 bp, Homo sapiens
gcatctctagaaaaa

SEQ ID NO: 1656364 - DNA, 15 bp, Homo sapiens
catctctagaaaaat

SEQ ID NO: 1656365 - DNA, 15 bp, Homo sapiens
atctctagaaaaata

SEQ ID NO: 1656366 - DNA, 15 bp, Homo sapiens
tctctagaaaaataa

SEQ ID NO: 1656367 - DNA, 15 bp, Homo sapiens
ctctagaaaaataat

SEQ ID NO: 1656368 - DNA, 15 bp, Homo sapiens
tctagaaaaataata

SEQ ID NO: 1656369 - DNA, 15 bp, Homo sapiens
ctagaaaaataatac

SEQ ID NO: 1656370 - DNA, 15 bp, Homo sapiens
tagaaaaataatact

SEQ ID NO: 1656371 - DNA, 15 bp, Homo sapiens
agaaaaataatactc

SEQ ID NO: 1656372 - DNA, 15 bp, Homo sapiens
gaaaaataatactcc

SEQ ID NO: 1656373 - DNA, 15 bp, Homo sapiens
aaaaataatactcca

SEQ ID NO: 1656374 - DNA, 15 bp, Homo sapiens
aaaataatactccat

SEQ ID NO: 1656375 - DNA, 15 bp, Homo sapiens
aaataatactccatc

SEQ ID NO: 1656376 - DNA, 15 bp, Homo sapiens
aataatactccatcc

SEQ ID NO: 1656377 - DNA, 15 bp, Homo sapiens
ataatactccatcct

SEQ ID NO: 1656378 - DNA, 15 bp, Homo sapiens
taatactccatcctt

SEQ ID NO: 1656379 - DNA, 15 bp, Homo sapiens
aatactccatccttt

SEQ ID NO: 1656380 - DNA, 15 bp, Homo sapiens
atactccatcctttc

SEQ ID NO: 1656381 - DNA, 15 bp, Homo sapiens
tactccatcctttca

SEQ ID NO: 1656382 - DNA, 15 bp, Homo sapiens
actccatcctttcat

SEQ ID NO: 1656383 - DNA, 15 bp, Homo sapiens
ctccatcctttcatc

SEQ ID NO: 1656384 - DNA, 15 bp, Homo sapiens
tccatcctttcatct

SEQ ID NO: 1656385 - DNA, 15 bp, Homo sapiens
ccatcctttcatctt

SEQ ID NO: 1656386 - DNA, 15 bp, Homo sapiens
catcctttcatcttc

SEQ ID NO: 1656387 - DNA, 15 bp, Homo sapiens
atcctttcatcttct

SEQ ID NO: 1656388 - DNA, 15 bp, Homo sapiens
tcctttcatcttcta

SEQ ID NO: 1656389 - DNA, 15 bp, Homo sapiens
cctttcatcttctac

SEQ ID NO: 1656390 - DNA, 15 bp, Homo sapiens
ctttcatcttctaca

SEQ ID NO: 1656391 - DNA, 15 bp, Homo sapiens
tttcatcttctacag

SEQ ID NO: 1656392 - DNA, 15 bp, Homo sapiens
ttcatcttctacagt

SEQ ID NO: 1656393 - DNA, 15 bp, Homo sapiens
tcatcttctacagtc

SEQ ID NO: 1656394 - DNA, 15 bp, Homo sapiens
catcttctacagtct

SEQ ID NO: 1656395 - DNA, 15 bp, Homo sapiens
atcttctacagtctg

SEQ ID NO: 1656396 - DNA, 15 bp, Homo sapiens
tcttctacagtctgt

SEQ ID NO: 1656397 - DNA, 15 bp, Homo sapiens
cttctacagtctgtt

SEQ ID NO: 1656398 - DNA, 15 bp, Homo sapiens
ttctacagtctgttc

SEQ ID NO: 1656399 - DNA, 15 bp, Homo sapiens
tctacagtctgttct

SEQ ID NO: 1656400 - DNA, 15 bp, Homo sapiens
ctacagtctgttctt

SEQ ID NO: 1656401 - DNA, 15 bp, Homo sapiens
tacagtctgttctta

SEQ ID NO: 1656402 - DNA, 15 bp, Homo sapiens
acagtctgttcttaa

SEQ ID NO: 1656403 - DNA, 15 bp, Homo sapiens
cagtctgttcttaac

SEQ ID NO: 1656404 - DNA, 15 bp, Homo sapiens
agtctgttcttaaca

SEQ ID NO: 1656405 - DNA, 15 bp, Homo sapiens
gtctgttcttaacac

SEQ ID NO: 1656406 - DNA, 15 bp, Homo sapiens
tctgttcttaacaca

SEQ ID NO: 1656407 - DNA, 15 bp, Homo sapiens
ctgttcttaacacag

SEQ ID NO: 1656408 - DNA, 15 bp, Homo sapiens
tgttcttaacacagg

SEQ ID NO: 1656409 - DNA, 15 bp, Homo sapiens
gttcttaacacagga

SEQ ID NO: 1656410 - DNA, 15 bp, Homo sapiens
ttcttaacacaggaa

SEQ ID NO: 1656411 - DNA, 15 bp, Homo sapiens
tcttaacacaggaac

SEQ ID NO: 1656412 - DNA, 15 bp, Homo sapiens
cttaacacaggaact

SEQ ID NO: 1656413 - DNA, 15 bp, Homo sapiens
ttaacacaggaactt

SEQ ID NO: 1656414 - DNA, 15 bp, Homo sapiens
taacacaggaacttc

SEQ ID NO: 1656415 - DNA, 15 bp, Homo sapiens
aacacaggaacttct

SEQ ID NO: 1656416 - DNA, 15 bp, Homo sapiens
acacaggaacttctg

SEQ ID NO: 1656417 - DNA, 15 bp, Homo sapiens
cacaggaacttctgg

SEQ ID NO: 1656418 - DNA, 15 bp, Homo sapiens
acaggaacttctggt

SEQ ID NO: 1656419 - DNA, 15 bp, Homo sapiens
caggaacttctggtt

SEQ ID NO: 1656420 - DNA, 15 bp, Homo sapiens
aggaacttctggttt

SEQ ID NO: 1656421 - DNA, 15 bp, Homo sapiens
ggaacttctggtttc

SEQ ID NO: 1656422 - DNA, 15 bp, Homo sapiens
gaacttctggtttcc

SEQ ID NO: 1656423 - DNA, 15 bp, Homo sapiens
aacttctggtttccg

SEQ ID NO: 1656424 - DNA, 15 bp, Homo sapiens
acttctggtttccgg

SEQ ID NO: 1656425 - DNA, 15 bp, Homo sapiens
cttctggtttccggt

SEQ ID NO: 1656426 - DNA, 15 bp, Homo sapiens
ttctggtttccggtc

SEQ ID NO: 1656427 - DNA, 15 bp, Homo sapiens
tctggtttccggtct

SEQ ID NO: 1656428 - DNA, 15 bp, Homo sapiens
ctggtttccggtctt

SEQ ID NO: 1656429 - DNA, 15 bp, Homo sapiens
tggtttccggtcttg

SEQ ID NO: 1656430 - DNA, 15 bp, Homo sapiens
ggtttccggtcttgc

SEQ ID NO: 1656431 - DNA, 15 bp, Homo sapiens
gtttccggtcttgca

SEQ ID NO: 1656432 - DNA, 15 bp, Homo sapiens
tttccggtcttgcag

SEQ ID NO: 1656433 - DNA, 15 bp, Homo sapiens
ttccggtcttgcagg

SEQ ID NO: 1656434 - DNA, 15 bp, Homo sapiens
tccggtcttgcaggt

SEQ ID NO: 1656435 - DNA, 15 bp, Homo sapiens
ccggtcttgcaggta

SEQ ID NO: 1656436 - DNA, 15 bp, Homo sapiens
cggtcttgcaggtaa

SEQ ID NO: 1656437 - DNA, 15 bp, Homo sapiens
ggtcttgcaggtaag

SEQ ID NO: 1656438 - DNA, 15 bp, Homo sapiens
gtcttgcaggtaagg

SEQ ID NO: 1656439 - DNA, 15 bp, Homo sapiens
tcttgcaggtaagga

SEQ ID NO: 1656440 - DNA, 15 bp, Homo sapiens
cttgcaggtaaggat

SEQ ID NO: 1656441 - DNA, 15 bp, Homo sapiens
ttgcaggtaaggatc

SEQ ID NO: 1656442 - DNA, 15 bp, Homo sapiens
tgcaggtaaggatct

SEQ ID NO: 1656443 - DNA, 15 bp, Homo sapiens
gcaggtaaggatctt

SEQ ID NO: 1656444 - DNA, 15 bp, Homo sapiens
caggtaaggatctta

SEQ ID NO: 1656445 - DNA, 15 bp, Homo sapiens
aggtaaggatcttag

SEQ ID NO: 1656446 - DNA, 15 bp, Homo sapiens
ggtaaggatcttaga

SEQ ID NO: 1656447 - DNA, 15 bp, Homo sapiens
gtaaggatcttagaa

SEQ ID NO: 1656448 - DNA, 15 bp, Homo sapiens
taaggatcttagaag

SEQ ID NO: 1656449 - DNA, 15 bp, Homo sapiens
aaggatcttagaagt

SEQ ID NO: 1656450 - DNA, 15 bp, Homo sapiens
aggatcttagaagtc

SEQ ID NO: 1656451 - DNA, 15 bp, Homo sapiens
ggatcttagaagtca

SEQ ID NO: 1656452 - DNA, 15 bp, Homo sapiens
gatcttagaagtcaa

SEQ ID NO: 1656453 - DNA, 15 bp, Homo sapiens
atcttagaagtcaaa

SEQ ID NO: 1656454 - DNA, 15 bp, Homo sapiens
tcttagaagtcaaaa

SEQ ID NO: 1656455 - DNA, 15 bp, Homo sapiens
cttagaagtcaaaac

SEQ ID NO: 1656456 - DNA, 15 bp, Homo sapiens
ttagaagtcaaaact

SEQ ID NO: 1656457 - DNA, 15 bp, Homo sapiens
tagaagtcaaaactc

SEQ ID NO: 1656458 - DNA, 15 bp, Homo sapiens
agaagtcaaaactcc

SEQ ID NO: 1656459 - DNA, 15 bp, Homo sapiens
gaagtcaaaactcca

SEQ ID NO: 1656460 - DNA, 15 bp, Homo sapiens
aagtcaaaactccat

SEQ ID NO: 1656461 - DNA, 15 bp, Homo sapiens
agtcaaaactccatt

SEQ ID NO: 1656462 - DNA, 15 bp, Homo sapiens
gtcaaaactccattc

SEQ ID NO: 1656463 - DNA, 15 bp, Homo sapiens
tcaaaactccattct

SEQ ID NO: 1656464 - DNA, 15 bp, Homo sapiens
caaaactccattctc

SEQ ID NO: 1656465 - DNA, 15 bp, Homo sapiens
aaaactccattctca

SEQ ID NO: 1656466 - DNA, 15 bp, Homo sapiens
aaactccattctcaa

SEQ ID NO: 1656467 - DNA, 15 bp, Homo sapiens
aactccattctcaaa

SEQ ID NO: 1656468 - DNA, 15 bp, Homo sapiens
actccattctcaaaa

SEQ ID NO: 1656469 - DNA, 15 bp, Homo sapiens
ctccattctcaaaac

SEQ ID NO: 1656470 - DNA, 15 bp, Homo sapiens
tccattctcaaaaca

SEQ ID NO: 1656471 - DNA, 15 bp, Homo sapiens
ccattctcaaaacaa

SEQ ID NO: 1656472 - DNA, 15 bp, Homo sapiens
cattctcaaaacaag

SEQ ID NO: 1656473 - DNA, 15 bp, Homo sapiens
attctcaaaacaagt

SEQ ID NO: 1656474 - DNA, 15 bp, Homo sapiens
ttctcaaaacaagta

SEQ ID NO: 1656475 - DNA, 15 bp, Homo sapiens
tctcaaaacaagtaa

SEQ ID NO: 1656476 - DNA, 15 bp, Homo sapiens
ctcaaaacaagtaaa

SEQ ID NO: 1656477 - DNA, 15 bp, Homo sapiens
tcaaaacaagtaaaa

SEQ ID NO: 1656478 - DNA, 15 bp, Homo sapiens
caaaacaagtaaaaa

SEQ ID NO: 1656479 - DNA, 15 bp, Homo sapiens
aaaacaagtaaaaag

SEQ ID NO: 1656480 - DNA, 15 bp, Homo sapiens
aaacaagtaaaaagc

SEQ ID NO: 1656481 - DNA, 15 bp, Homo sapiens
aacaagtaaaaagct

SEQ ID NO: 1656482 - DNA, 15 bp, Homo sapiens
acaagtaaaaagctg

SEQ ID NO: 1656483 - DNA, 15 bp, Homo sapiens
caagtaaaaagctga

SEQ ID NO: 1656484 - DNA, 15 bp, Homo sapiens
aagtaaaaagctgaa

SEQ ID NO: 1656485 - DNA, 15 bp, Homo sapiens
agtaaaaagctgaac

SEQ ID NO: 1656486 - DNA, 15 bp, Homo sapiens
gtaaaaagctgaaca

SEQ ID NO: 1656487 - DNA, 15 bp, Homo sapiens
taaaaagctgaacag

SEQ ID NO: 1656488 - DNA, 15 bp, Homo sapiens
aaaaagctgaacaga

SEQ ID NO: 1656489 - DNA, 15 bp, Homo sapiens
aaaagctgaacagag

SEQ ID NO: 1656490 - DNA, 15 bp, Homo sapiens
aaagctgaacagagt

SEQ ID NO: 1656491 - DNA, 15 bp, Homo sapiens
aagctgaacagagtg

SEQ ID NO: 1656492 - DNA, 15 bp, Homo sapiens
agctgaacagagtga

SEQ ID NO: 1656493 - DNA, 15 bp, Homo sapiens
gctgaacagagtgaa

SEQ ID NO: 1656494 - DNA, 15 bp, Homo sapiens
ctgaacagagtgaac

SEQ ID NO: 1656495 - DNA, 15 bp, Homo sapiens
tgaacagagtgaaca

SEQ ID NO: 1656496 - DNA, 15 bp, Homo sapiens
gaacagagtgaacaa

SEQ ID NO: 1656497 - DNA, 15 bp, Homo sapiens
aacagagtgaacaat

SEQ ID NO: 1656498 - DNA, 15 bp, Homo sapiens
acagagtgaacaatc

SEQ ID NO: 1656499 - DNA, 15 bp, Homo sapiens
cagagtgaacaatca

SEQ ID NO: 1656500 - DNA, 15 bp, Homo sapiens
agagtgaacaatcaa

SEQ ID NO: 1656501 - DNA, 15 bp, Homo sapiens
gagtgaacaatcaac

SEQ ID NO: 1656502 - DNA, 15 bp, Homo sapiens
agtgaacaatcaaca

SEQ ID NO: 1656503 - DNA, 15 bp, Homo sapiens
gtgaacaatcaacaa

SEQ ID NO: 1656504 - DNA, 15 bp, Homo sapiens
tgaacaatcaacaac

SEQ ID NO: 1656505 - DNA, 15 bp, Homo sapiens
gaacaatcaacaact

SEQ ID NO: 1656506 - DNA, 15 bp, Homo sapiens
aacaatcaacaactc

SEQ ID NO: 1656507 - DNA, 15 bp, Homo sapiens
acaatcaacaactct

SEQ ID NO: 1656508 - DNA, 15 bp, Homo sapiens
caatcaacaactctt

SEQ ID NO: 1656509 - DNA, 15 bp, Homo sapiens
aatcaacaactcttt

SEQ ID NO: 1656510 - DNA, 15 bp, Homo sapiens
atcaacaactctttt

SEQ ID NO: 1656511 - DNA, 15 bp, Homo sapiens
tcaacaactcttttt

SEQ ID NO: 1656512 - DNA, 15 bp, Homo sapiens
caacaactctttttg

SEQ ID NO: 1656513 - DNA, 15 bp, Homo sapiens
aacaactctttttgg

SEQ ID NO: 1656514 - DNA, 15 bp, Homo sapiens
acaactctttttgga

SEQ ID NO: 1656515 - DNA, 15 bp, Homo sapiens
caactctttttggat

SEQ ID NO: 1656516 - DNA, 15 bp, Homo sapiens
aactctttttggatc

SEQ ID NO: 1656517 - DNA, 15 bp, Homo sapiens
actctttttggatcc

SEQ ID NO: 1656518 - DNA, 15 bp, Homo sapiens
ctctttttggatcca

SEQ ID NO: 1656519 - DNA, 15 bp, Homo sapiens
tctttttggatccat

SEQ ID NO: 1656520 - DNA, 15 bp, Homo sapiens
ctttttggatccata

SEQ ID NO: 1656521 - DNA, 15 bp, Homo sapiens
tttttggatccataa

SEQ ID NO: 1656522 - DNA, 15 bp, Homo sapiens
ttttggatccataat

SEQ ID NO: 1656523 - DNA, 15 bp, Homo sapiens
tttggatccataata

SEQ ID NO: 1656524 - DNA, 15 bp, Homo sapiens
ttggatccataatag

SEQ ID NO: 1656525 - DNA, 15 bp, Homo sapiens
tggatccataataga

SEQ ID NO: 1656526 - DNA, 15 bp, Homo sapiens
ggatccataatagag

SEQ ID NO: 1656527 - DNA, 15 bp, Homo sapiens
gatccataatagagg

SEQ ID NO: 1656528 - DNA, 15 bp, Homo sapiens
atccataatagaggg

SEQ ID NO: 1656529 - DNA, 15 bp, Homo sapiens
tccataatagagggg

SEQ ID NO: 1656530 - DNA, 15 bp, Homo sapiens
ccataatagagggga

SEQ ID NO: 1656531 - DNA, 15 bp, Homo sapiens
cataatagaggggaa

SEQ ID NO: 1656532 - DNA, 15 bp, Homo sapiens
ataatagaggggaag

SEQ ID NO: 1656533 - DNA, 15 bp, Homo sapiens
taatagaggggaaga

SEQ ID NO: 1656534 - DNA, 15 bp, Homo sapiens
aatagaggggaagac

SEQ ID NO: 1656535 - DNA, 15 bp, Homo sapiens
atagaggggaagaca

SEQ ID NO: 1656536 - DNA, 15 bp, Homo sapiens
tagaggggaagacac

SEQ ID NO: 1656537 - DNA, 15 bp, Homo sapiens
agaggggaagacaca

SEQ ID NO: 1656538 - DNA, 15 bp, Homo sapiens
gaggggaagacacaa

SEQ ID NO: 1656539 - DNA, 15 bp, Homo sapiens
aggggaagacacaag

SEQ ID NO: 1656540 - DNA, 15 bp, Homo sapiens
ggggaagacacaagg

SEQ ID NO: 1656541 - DNA, 15 bp, Homo sapiens
gggaagacacaaggc

SEQ ID NO: 1656542 - DNA, 15 bp, Homo sapiens
ggaagacacaaggca

SEQ ID NO: 1656543 - DNA, 15 bp, Homo sapiens
gaagacacaaggcaa

SEQ ID NO: 1656544 - DNA, 15 bp, Homo sapiens
aagacacaaggcaaa

SEQ ID NO: 1656545 - DNA, 15 bp, Homo sapiens
agacacaaggcaaac

SEQ ID NO: 1656546 - DNA, 15 bp, Homo sapiens
gacacaaggcaaact

SEQ ID NO: 1656547 - DNA, 15 bp, Homo sapiens
acacaaggcaaactg

SEQ ID NO: 1656548 - DNA, 15 bp, Homo sapiens
cacaaggcaaactgc

SEQ ID NO: 1656549 - DNA, 15 bp, Homo sapiens
acaaggcaaactgct

SEQ ID NO: 1656550 - DNA, 15 bp, Homo sapiens
caaggcaaactgcta

SEQ ID NO: 1656551 - DNA, 15 bp, Homo sapiens
aaggcaaactgctat

SEQ ID NO: 1656552 - DNA, 15 bp, Homo sapiens
aggcaaactgctatc

SEQ ID NO: 1656553 - DNA, 15 bp, Homo sapiens
ggcaaactgctatcc

SEQ ID NO: 1656554 - DNA, 15 bp, Homo sapiens
gcaaactgctatcca

SEQ ID NO: 1656555 - DNA, 15 bp, Homo sapiens
caaactgctatccac

SEQ ID NO: 1656556 - DNA, 15 bp, Homo sapiens
aaactgctatccaca

SEQ ID NO: 1656557 - DNA, 15 bp, Homo sapiens
aactgctatccacaa

SEQ ID NO: 1656558 - DNA, 15 bp, Homo sapiens
actgctatccacaag

SEQ ID NO: 1656559 - DNA, 15 bp, Homo sapiens
ctgctatccacaaga

SEQ ID NO: 1656560 - DNA, 15 bp, Homo sapiens
tgctatccacaagac

SEQ ID NO: 1656561 - DNA, 15 bp, Homo sapiens
gctatccacaagact

SEQ ID NO: 1656562 - DNA, 15 bp, Homo sapiens
ctatccacaagactg

SEQ ID NO: 1656563 - DNA, 15 bp, Homo sapiens
tatccacaagactgg

SEQ ID NO: 1656564 - DNA, 15 bp, Homo sapiens
atccacaagactgga

SEQ ID NO: 1656565 - DNA, 15 bp, Homo sapiens
tccacaagactggag

SEQ ID NO: 1656566 - DNA, 15 bp, Homo sapiens
ccacaagactggaga

SEQ ID NO: 1656567 - DNA, 15 bp, Homo sapiens
cacaagactggagac

SEQ ID NO: 1656568 - DNA, 15 bp, Homo sapiens
acaagactggagaca

SEQ ID NO: 1656569 - DNA, 15 bp, Homo sapiens
caagactggagacag

SEQ ID NO: 1656570 - DNA, 15 bp, Homo sapiens
aagactggagacaga

SEQ ID NO: 1656571 - DNA, 15 bp, Homo sapiens
agactggagacagag

SEQ ID NO: 1656572 - DNA, 15 bp, Homo sapiens
gactggagacagagg

SEQ ID NO: 1656573 - DNA, 15 bp, Homo sapiens
actggagacagaggc

SEQ ID NO: 1656574 - DNA, 15 bp, Homo sapiens
ctggagacagaggca

SEQ ID NO: 1656575 - DNA, 15 bp, Homo sapiens
tggagacagaggcaa

SEQ ID NO: 1656576 - DNA, 15 bp, Homo sapiens
ggagacagaggcaaa

SEQ ID NO: 1656577 - DNA, 15 bp, Homo sapiens
gagacagaggcaaat

SEQ ID NO: 1656578 - DNA, 15 bp, Homo sapiens
agacagaggcaaata

SEQ ID NO: 1656579 - DNA, 15 bp, Homo sapiens
gacagaggcaaatac

SEQ ID NO: 1656580 - DNA, 15 bp, Homo sapiens
acagaggcaaataca

SEQ ID NO: 1656581 - DNA, 15 bp, Homo sapiens
cagaggcaaatacag

SEQ ID NO: 1656582 - DNA, 15 bp, Homo sapiens
agaggcaaatacagg

SEQ ID NO: 1656583 - DNA, 15 bp, Homo sapiens
gaggcaaatacaggg

SEQ ID NO: 1656584 - DNA, 15 bp, Homo sapiens
aggcaaatacaggga

SEQ ID NO: 1656585 - DNA, 15 bp, Homo sapiens
ggcaaatacagggaa

SEQ ID NO: 1656586 - DNA, 15 bp, Homo sapiens
gcaaatacagggaat

SEQ ID NO: 1656587 - DNA, 15 bp, Homo sapiens
caaatacagggaatc

SEQ ID NO: 1656588 - DNA, 15 bp, Homo sapiens
aaatacagggaatca

SEQ ID NO: 1656589 - DNA, 15 bp, Homo sapiens
aatacagggaatcat

SEQ ID NO: 1656590 - DNA, 15 bp, Homo sapiens
atacagggaatcatg

SEQ ID NO: 1656591 - DNA, 15 bp, Homo sapiens
tacagggaatcatgg

SEQ ID NO: 1656592 - DNA, 15 bp, Homo sapiens
acagggaatcatggc

SEQ ID NO: 1656593 - DNA, 15 bp, Homo sapiens
cagggaatcatggct

SEQ ID NO: 1656594 - DNA, 15 bp, Homo sapiens
agggaatcatggctt

SEQ ID NO: 1656595 - DNA, 15 bp, Homo sapiens
gggaatcatggcttc

SEQ ID NO: 1656596 - DNA, 15 bp, Homo sapiens
ggaatcatggcttcc

SEQ ID NO: 1656597 - DNA, 15 bp, Homo sapiens
gaatcatggcttccc

SEQ ID NO: 1656598 - DNA, 15 bp, Homo sapiens
aatcatggcttccca

SEQ ID NO: 1656599 - DNA, 15 bp, Homo sapiens
atcatggcttcccag

SEQ ID NO: 1656600 - DNA, 15 bp, Homo sapiens
tcatggcttcccagg

SEQ ID NO: 1656601 - DNA, 15 bp, Homo sapiens
catggcttcccagga

SEQ ID NO: 1656602 - DNA, 15 bp, Homo sapiens
atggcttcccaggac

SEQ ID NO: 1656603 - DNA, 15 bp, Homo sapiens
tggcttcccaggaca

SEQ ID NO: 1656604 - DNA, 15 bp, Homo sapiens
ggcttcccaggacat

SEQ ID NO: 1656605 - DNA, 15 bp, Homo sapiens
gcttcccaggacatg

SEQ ID NO: 1656606 - DNA, 15 bp, Homo sapiens
cttcccaggacatgc

SEQ ID NO: 1656607 - DNA, 15 bp, Homo sapiens
ttcccaggacatgct

SEQ ID NO: 1656608 - DNA, 15 bp, Homo sapiens
tcccaggacatgctc

SEQ ID NO: 1656609 - DNA, 15 bp, Homo sapiens
cccaggacatgctca

SEQ ID NO: 1656610 - DNA, 15 bp, Homo sapiens
ccaggacatgctcat

SEQ ID NO: 1656611 - DNA, 15 bp, Homo sapiens
caggacatgctcatg

SEQ ID NO: 1656612 - DNA, 15 bp, Homo sapiens
aggacatgctcatga

SEQ ID NO: 1656613 - DNA, 15 bp, Homo sapiens
ggacatgctcatgag

SEQ ID NO: 1656614 - DNA, 15 bp, Homo sapiens
gacatgctcatgagc

SEQ ID NO: 1656615 - DNA, 15 bp, Homo sapiens
acatgctcatgagca

SEQ ID NO: 1656616 - DNA, 15 bp, Homo sapiens
catgctcatgagcag

SEQ ID NO: 1656617 - DNA, 15 bp, Homo sapiens
atgctcatgagcaga

SEQ ID NO: 1656618 - DNA, 15 bp, Homo sapiens
tgctcatgagcagaa

SEQ ID NO: 1656619 - DNA, 15 bp, Homo sapiens
gctcatgagcagaaa

SEQ ID NO: 1656620 - DNA, 15 bp, Homo sapiens
ctcatgagcagaaac

SEQ ID NO: 1656621 - DNA, 15 bp, Homo sapiens
tcatgagcagaaact

SEQ ID NO: 1656622 - DNA, 15 bp, Homo sapiens
catgagcagaaactg

SEQ ID NO: 1656623 - DNA, 15 bp, Homo sapiens
atgagcagaaactgc

SEQ ID NO: 1656624 - DNA, 15 bp, Homo sapiens
tgagcagaaactgcc

SEQ ID NO: 1656625 - DNA, 15 bp, Homo sapiens
gagcagaaactgcca

SEQ ID NO: 1656626 - DNA, 15 bp, Homo sapiens
agcagaaactgccat

SEQ ID NO: 1656627 - DNA, 15 bp, Homo sapiens
gcagaaactgccatg

SEQ ID NO: 1656628 - DNA, 15 bp, Homo sapiens
cagaaactgccatgg

SEQ ID NO: 1656629 - DNA, 15 bp, Homo sapiens
agaaactgccatggg

SEQ ID NO: 1656630 - DNA, 15 bp, Homo sapiens
gaaactgccatggga

SEQ ID NO: 1656631 - DNA, 15 bp, Homo sapiens
aaactgccatgggaa

SEQ ID NO: 1656632 - DNA, 15 bp, Homo sapiens
aactgccatgggaac

SEQ ID NO: 1656633 - DNA, 15 bp, Homo sapiens
actgccatgggaact

SEQ ID NO: 1656634 - DNA, 15 bp, Homo sapiens
ctgccatgggaacta

SEQ ID NO: 1656635 - DNA, 15 bp, Homo sapiens
tgccatgggaactag

SEQ ID NO: 1656636 - DNA, 15 bp, Homo sapiens
gccatgggaactagt

SEQ ID NO: 1656637 - DNA, 15 bp, Homo sapiens
ccatgggaactagtg

SEQ ID NO: 1656638 - DNA, 15 bp, Homo sapiens
catgggaactagtgc

SEQ ID NO: 1656639 - DNA, 15 bp, Homo sapiens
atgggaactagtgct

SEQ ID NO: 1656640 - DNA, 15 bp, Homo sapiens
tgggaactagtgctg

SEQ ID NO: 1656641 - DNA, 15 bp, Homo sapiens
gggaactagtgctgt

SEQ ID NO: 1656642 - DNA, 15 bp, Homo sapiens
ggaactagtgctgtg

SEQ ID NO: 1656643 - DNA, 15 bp, Homo sapiens
gaactagtgctgtgg

SEQ ID NO: 1656644 - DNA, 15 bp, Homo sapiens
aactagtgctgtgga

SEQ ID NO: 1656645 - DNA, 15 bp, Homo sapiens
actagtgctgtggag

SEQ ID NO: 1656646 - DNA, 15 bp, Homo sapiens
ctagtgctgtggagg

SEQ ID NO: 1656647 - DNA, 15 bp, Homo sapiens
tagtgctgtggagga

SEQ ID NO: 1656648 - DNA, 15 bp, Homo sapiens
agtgctgtggaggaa

SEQ ID NO: 1656649 - DNA, 15 bp, Homo sapiens
gtgctgtggaggaac

SEQ ID NO: 1656650 - DNA, 15 bp, Homo sapiens
tgctgtggaggaaca

SEQ ID NO: 1656651 - DNA, 15 bp, Homo sapiens
gctgtggaggaacac

SEQ ID NO: 1656652 - DNA, 15 bp, Homo sapiens
ctgtggaggaacacc

SEQ ID NO: 1656653 - DNA, 15 bp, Homo sapiens
tgtggaggaacacct

SEQ ID NO: 1656654 - DNA, 15 bp, Homo sapiens
gtggaggaacacctg

SEQ ID NO: 1656655 - DNA, 15 bp, Homo sapiens
tggaggaacacctga

SEQ ID NO: 1656656 - DNA, 15 bp, Homo sapiens
ggaggaacacctgaa

SEQ ID NO: 1656657 - DNA, 15 bp, Homo sapiens
gaggaacacctgaac

SEQ ID NO: 1656658 - DNA, 15 bp, Homo sapiens
aggaacacctgaact

SEQ ID NO: 1656659 - DNA, 15 bp, Homo sapiens
ggaacacctgaactg

SEQ ID NO: 1656660 - DNA, 15 bp, Homo sapiens
gaacacctgaactgt

SEQ ID NO: 1656661 - DNA, 15 bp, Homo sapiens
aacacctgaactgta

SEQ ID NO: 1656662 - DNA, 15 bp, Homo sapiens
acacctgaactgtaa

SEQ ID NO: 1656663 - DNA, 15 bp, Homo sapiens
cacctgaactgtaat

SEQ ID NO: 1656664 - DNA, 15 bp, Homo sapiens
acctgaactgtaatt

SEQ ID NO: 1656665 - DNA, 15 bp, Homo sapiens
cctgaactgtaattg

SEQ ID NO: 1656666 - DNA, 15 bp, Homo sapiens
ctgaactgtaattga

SEQ ID NO: 1656667 - DNA, 15 bp, Homo sapiens
tgaactgtaattgac

SEQ ID NO: 1656668 - DNA, 15 bp, Homo sapiens
gaactgtaattgact

SEQ ID NO: 1656669 - DNA, 15 bp, Homo sapiens
aactgtaattgacta

SEQ ID NO: 1656670 - DNA, 15 bp, Homo sapiens
actgtaattgactaa

SEQ ID NO: 1656671 - DNA, 15 bp, Homo sapiens
ctgtaattgactaat

SEQ ID NO: 1656672 - DNA, 15 bp, Homo sapiens
tgtaattgactaatt

SEQ ID NO: 1656673 - DNA, 15 bp, Homo sapiens
gtaattgactaatta

SEQ ID NO: 1656674 - DNA, 15 bp, Homo sapiens
taattgactaattac

SEQ ID NO: 1656675 - DNA, 15 bp, Homo sapiens
aattgactaattact

SEQ ID NO: 1656676 - DNA, 15 bp, Homo sapiens
attgactaattactg

SEQ ID NO: 1656677 - DNA, 15 bp, Homo sapiens
ttgactaattactgg

SEQ ID NO: 1656678 - DNA, 15 bp, Homo sapiens
tgactaattactggg

SEQ ID NO: 1656679 - DNA, 15 bp, Homo sapiens
gactaattactgggg

SEQ ID NO: 1656680 - DNA, 15 bp, Homo sapiens
actaattactgggga

SEQ ID NO: 1656681 - DNA, 15 bp, Homo sapiens
ctaattactggggac

SEQ ID NO: 1656682 - DNA, 15 bp, Homo sapiens
taattactggggact

SEQ ID NO: 1656683 - DNA, 15 bp, Homo sapiens
aattactggggactc

SEQ ID NO: 1656684 - DNA, 15 bp, Homo sapiens
attactggggactca

SEQ ID NO: 1656685 - DNA, 15 bp, Homo sapiens
ttactggggactcag

SEQ ID NO: 1656686 - DNA, 15 bp, Homo sapiens
tactggggactcagc

SEQ ID NO: 1656687 - DNA, 15 bp, Homo sapiens
actggggactcagcg

SEQ ID NO: 1656688 - DNA, 15 bp, Homo sapiens
ctggggactcagcgc

SEQ ID NO: 1656689 - DNA, 15 bp, Homo sapiens
tggggactcagcgct

SEQ ID NO: 1656690 - DNA, 15 bp, Homo sapiens
ggggactcagcgctg

SEQ ID NO: 1656691 - DNA, 15 bp, Homo sapiens
gggactcagcgctga

SEQ ID NO: 1656692 - DNA, 15 bp, Homo sapiens
ggactcagcgctgac

SEQ ID NO: 1656693 - DNA, 15 bp, Homo sapiens
gactcagcgctgaca

SEQ ID NO: 1656694 - DNA, 15 bp, Homo sapiens
actcagcgctgacaa

SEQ ID NO: 1656695 - DNA, 15 bp, Homo sapiens
ctcagcgctgacaag

SEQ ID NO: 1656696 - DNA, 15 bp, Homo sapiens
tcagcgctgacaagc

SEQ ID NO: 1656697 - DNA, 15 bp, Homo sapiens
cagcgctgacaagcc

SEQ ID NO: 1656698 - DNA, 15 bp, Homo sapiens
agcgctgacaagcca

SEQ ID NO: 1656699 - DNA, 15 bp, Homo sapiens
gcgctgacaagccag

SEQ ID NO: 1656700 - DNA, 15 bp, Homo sapiens
cgctgacaagccaga

SEQ ID NO: 1656701 - DNA, 15 bp, Homo sapiens
gctgacaagccagat

SEQ ID NO: 1656702 - DNA, 15 bp, Homo sapiens
ctgacaagccagata

SEQ ID NO: 1656703 - DNA, 15 bp, Homo sapiens
tgacaagccagataa

SEQ ID NO: 1656704 - DNA, 15 bp, Homo sapiens
gacaagccagataat

SEQ ID NO: 1656705 - DNA, 15 bp, Homo sapiens
acaagccagataatt

SEQ ID NO: 1656706 - DNA, 15 bp, Homo sapiens
caagccagataatta

SEQ ID NO: 1656707 - DNA, 15 bp, Homo sapiens
aagccagataattaa

SEQ ID NO: 1656708 - DNA, 15 bp, Homo sapiens
agccagataattaaa

SEQ ID NO: 1656709 - DNA, 15 bp, Homo sapiens
gccagataattaaaa

SEQ ID NO: 1656710 - DNA, 15 bp, Homo sapiens
ccagataattaaaaa

SEQ ID NO: 1656711 - DNA, 15 bp, Homo sapiens
cagataattaaaaac

SEQ ID NO: 1656712 - DNA, 15 bp, Homo sapiens
agataattaaaaact

SEQ ID NO: 1656713 - DNA, 15 bp, Homo sapiens
gataattaaaaactt

SEQ ID NO: 1656714 - DNA, 15 bp, Homo sapiens
ataattaaaaacttt

SEQ ID NO: 1656715 - DNA, 15 bp, Homo sapiens
taattaaaaacttta

SEQ ID NO: 1656716 - DNA, 15 bp, Homo sapiens
aattaaaaactttag

SEQ ID NO: 1656717 - DNA, 15 bp, Homo sapiens
attaaaaactttagg

SEQ ID NO: 1656718 - DNA, 15 bp, Homo sapiens
ttaaaaactttaggg

SEQ ID NO: 1656719 - DNA, 15 bp, Homo sapiens
taaaaactttagggg

SEQ ID NO: 1656720 - DNA, 15 bp, Homo sapiens
aaaaactttaggggt

SEQ ID NO: 1656721 - DNA, 15 bp, Homo sapiens
aaaactttaggggtc

SEQ ID NO: 1656722 - DNA, 15 bp, Homo sapiens
aaactttaggggtct

SEQ ID NO: 1656723 - DNA, 15 bp, Homo sapiens
aactttaggggtctc

SEQ ID NO: 1656724 - DNA, 15 bp, Homo sapiens
actttaggggtctca

SEQ ID NO: 1656725 - DNA, 15 bp, Homo sapiens
ctttaggggtctcag

SEQ ID NO: 1656726 - DNA, 15 bp, Homo sapiens
tttaggggtctcagg

SEQ ID NO: 1656727 - DNA, 15 bp, Homo sapiens
ttaggggtctcagga

SEQ ID NO: 1656728 - DNA, 15 bp, Homo sapiens
taggggtctcaggag

SEQ ID NO: 1656729 - DNA, 15 bp, Homo sapiens
aggggtctcaggagc

SEQ ID NO: 1656730 - DNA, 15 bp, Homo sapiens
ggggtctcaggagct

SEQ ID NO: 1656731 - DNA, 15 bp, Homo sapiens
gggtctcaggagctc

SEQ ID NO: 1656732 - DNA, 15 bp, Homo sapiens
ggtctcaggagctca

SEQ ID NO: 1656733 - DNA, 15 bp, Homo sapiens
gtctcaggagctcaa

SEQ ID NO: 1656734 - DNA, 15 bp, Homo sapiens
tctcaggagctcaac

SEQ ID NO: 1656735 - DNA, 15 bp, Homo sapiens
ctcaggagctcaacc

SEQ ID NO: 1656736 - DNA, 15 bp, Homo sapiens
tcaggagctcaacca

SEQ ID NO: 1656737 - DNA, 15 bp, Homo sapiens
caggagctcaaccaa

SEQ ID NO: 1656738 - DNA, 15 bp, Homo sapiens
aggagctcaaccaag

SEQ ID NO: 1656739 - DNA, 15 bp, Homo sapiens
ggagctcaaccaagt

SEQ ID NO: 1656740 - DNA, 15 bp, Homo sapiens
gagctcaaccaagtt

SEQ ID NO: 1656741 - DNA, 15 bp, Homo sapiens
agctcaaccaagttc

SEQ ID NO: 1656742 - DNA, 15 bp, Homo sapiens
gctcaaccaagttcc

SEQ ID NO: 1656743 - DNA, 15 bp, Homo sapiens
ctcaaccaagttccc

SEQ ID NO: 1656744 - DNA, 15 bp, Homo sapiens
tcaaccaagttccca

SEQ ID NO: 1656745 - DNA, 15 bp, Homo sapiens
caaccaagttcccac

SEQ ID NO: 1656746 - DNA, 15 bp, Homo sapiens
aaccaagttcccaca

SEQ ID NO: 1656747 - DNA, 15 bp, Homo sapiens
accaagttcccacag

SEQ ID NO: 1656748 - DNA, 15 bp, Homo sapiens
ccaagttcccacagt

SEQ ID NO: 1656749 - DNA, 15 bp, Homo sapiens
caagttcccacagta

SEQ ID NO: 1656750 - DNA, 15 bp, Homo sapiens
aagttcccacagtaa

SEQ ID NO: 1656751 - DNA, 15 bp, Homo sapiens
agttcccacagtaag

SEQ ID NO: 1656752 - DNA, 15 bp, Homo sapiens
gttcccacagtaagc

SEQ ID NO: 1656753 - DNA, 15 bp, Homo sapiens
ttcccacagtaagcc

SEQ ID NO: 1656754 - DNA, 15 bp, Homo sapiens
tcccacagtaagcct

SEQ ID NO: 1656755 - DNA, 15 bp, Homo sapiens
cccacagtaagccta

SEQ ID NO: 1656756 - DNA, 15 bp, Homo sapiens
ccacagtaagcctaa

SEQ ID NO: 1656757 - DNA, 15 bp, Homo sapiens
cacagtaagcctaag

SEQ ID NO: 1656758 - DNA, 15 bp, Homo sapiens
acagtaagcctaaga

SEQ ID NO: 1656759 - DNA, 15 bp, Homo sapiens
cagtaagcctaagag

SEQ ID NO: 1656760 - DNA, 15 bp, Homo sapiens
agtaagcctaagaga

SEQ ID NO: 1656761 - DNA, 15 bp, Homo sapiens
gtaagcctaagagaa

SEQ ID NO: 1656762 - DNA, 15 bp, Homo sapiens
taagcctaagagaaa

SEQ ID NO: 1656763 - DNA, 15 bp, Homo sapiens
aagcctaagagaaaa

SEQ ID NO: 1656764 - DNA, 15 bp, Homo sapiens
agcctaagagaaaaa

SEQ ID NO: 1656765 - DNA, 15 bp, Homo sapiens
gcctaagagaaaaat

SEQ ID NO: 1656766 - DNA, 15 bp, Homo sapiens
cctaagagaaaaatc

SEQ ID NO: 1656767 - DNA, 15 bp, Homo sapiens
ctaagagaaaaatcc

SEQ ID NO: 1656768 - DNA, 15 bp, Homo sapiens
taagagaaaaatccc

SEQ ID NO: 1656769 - DNA, 15 bp, Homo sapiens
aagagaaaaatcccc

SEQ ID NO: 1656770 - DNA, 15 bp, Homo sapiens
agagaaaaatcccct

SEQ ID NO: 1656771 - DNA, 15 bp, Homo sapiens
gagaaaaatcccctc

SEQ ID NO: 1656772 - DNA, 15 bp, Homo sapiens
agaaaaatcccctca

SEQ ID NO: 1656773 - DNA, 15 bp, Homo sapiens
gaaaaatcccctcat

SEQ ID NO: 1656774 - DNA, 15 bp, Homo sapiens
aaaaatcccctcatg

SEQ ID NO: 1656775 - DNA, 15 bp, Homo sapiens
aaaatcccctcatgt

SEQ ID NO: 1656776 - DNA, 15 bp, Homo sapiens
aaatcccctcatgtt

SEQ ID NO: 1656777 - DNA, 15 bp, Homo sapiens
aatcccctcatgttt

SEQ ID NO: 1656778 - DNA, 15 bp, Homo sapiens
atcccctcatgtttc

SEQ ID NO: 1656779 - DNA, 15 bp, Homo sapiens
tcccctcatgtttcc

SEQ ID NO: 1656780 - DNA, 15 bp, Homo sapiens
cccctcatgtttcca

SEQ ID NO: 1656781 - DNA, 15 bp, Homo sapiens
ccctcatgtttccat

SEQ ID NO: 1656782 - DNA, 15 bp, Homo sapiens
cctcatgtttccatc

SEQ ID NO: 1656783 - DNA, 15 bp, Homo sapiens
ctcatgtttccatca

SEQ ID NO: 1656784 - DNA, 15 bp, Homo sapiens
tcatgtttccatcag

SEQ ID NO: 1656785 - DNA, 15 bp, Homo sapiens
catgtttccatcagg

SEQ ID NO: 1656786 - DNA, 15 bp, Homo sapiens
atgtttccatcaggg

SEQ ID NO: 1656787 - DNA, 15 bp, Homo sapiens
tgtttccatcagggg

SEQ ID NO: 1656788 - DNA, 15 bp, Homo sapiens
gtttccatcaggggg

SEQ ID NO: 1656789 - DNA, 15 bp, Homo sapiens
tttccatcaggggga

SEQ ID NO: 1656790 - DNA, 15 bp, Homo sapiens
ttccatcagggggag

SEQ ID NO: 1656791 - DNA, 15 bp, Homo sapiens
tccatcagggggagg

SEQ ID NO: 1656792 - DNA, 15 bp, Homo sapiens
ccatcagggggaggg

SEQ ID NO: 1656793 - DNA, 15 bp, Homo sapiens
catcagggggagggt

SEQ ID NO: 1656794 - DNA, 15 bp, Homo sapiens
atcagggggagggta

SEQ ID NO: 1656795 - DNA, 15 bp, Homo sapiens
tcagggggagggtaa

SEQ ID NO: 1656796 - DNA, 15 bp, Homo sapiens
cagggggagggtaaa

SEQ ID NO: 1656797 - DNA, 15 bp, Homo sapiens
agggggagggtaaag

SEQ ID NO: 1656798 - DNA, 15 bp, Homo sapiens
gggggagggtaaagg

SEQ ID NO: 1656799 - DNA, 15 bp, Homo sapiens
ggggagggtaaaggg

SEQ ID NO: 1656800 - DNA, 15 bp, Homo sapiens
gggagggtaaaggga

SEQ ID NO: 1656801 - DNA, 15 bp, Homo sapiens
ggagggtaaagggaa

SEQ ID NO: 1656802 - DNA, 15 bp, Homo sapiens
gagggtaaagggaac

SEQ ID NO: 1656803 - DNA, 15 bp, Homo sapiens
agggtaaagggaacc

SEQ ID NO: 1656804 - DNA, 15 bp, Homo sapiens
gggtaaagggaacca

SEQ ID NO: 1656805 - DNA, 15 bp, Homo sapiens
ggtaaagggaaccat

SEQ ID NO: 1656806 - DNA, 15 bp, Homo sapiens
gtaaagggaaccatt

SEQ ID NO: 1656807 - DNA, 15 bp, Homo sapiens
taaagggaaccattt

SEQ ID NO: 1656808 - DNA, 15 bp, Homo sapiens
aaagggaaccatttt

SEQ ID NO: 1656809 - DNA, 15 bp, Homo sapiens
aagggaaccattttg

SEQ ID NO: 1656810 - DNA, 15 bp, Homo sapiens
agggaaccattttga

SEQ ID NO: 1656811 - DNA, 15 bp, Homo sapiens
gggaaccattttgaa

SEQ ID NO: 1656812 - DNA, 15 bp, Homo sapiens
ggaaccattttgaaa

SEQ ID NO: 1656813 - DNA, 15 bp, Homo sapiens
gaaccattttgaaat

SEQ ID NO: 1656814 - DNA, 15 bp, Homo sapiens
aaccattttgaaata

SEQ ID NO: 1656815 - DNA, 15 bp, Homo sapiens
accattttgaaatag

SEQ ID NO: 1656816 - DNA, 15 bp, Homo sapiens
ccattttgaaatagg

SEQ ID NO: 1656817 - DNA, 15 bp, Homo sapiens
cattttgaaataggc

SEQ ID NO: 1656818 - DNA, 15 bp, Homo sapiens
attttgaaataggcc

SEQ ID NO: 1656819 - DNA, 15 bp, Homo sapiens
ttttgaaataggccg

SEQ ID NO: 1656820 - DNA, 15 bp, Homo sapiens
tttgaaataggccgg

SEQ ID NO: 1656821 - DNA, 15 bp, Homo sapiens
ttgaaataggccggg

SEQ ID NO: 1656822 - DNA, 15 bp, Homo sapiens
tgaaataggccgggg

SEQ ID NO: 1656823 - DNA, 15 bp, Homo sapiens
gaaataggccgggga

SEQ ID NO: 1656824 - DNA, 15 bp, Homo sapiens
aaataggccggggaa

SEQ ID NO: 1656825 - DNA, 15 bp, Homo sapiens
aataggccggggaat

SEQ ID NO: 1656826 - DNA, 15 bp, Homo sapiens
ataggccggggaatt

SEQ ID NO: 1656827 - DNA, 15 bp, Homo sapiens
taggccggggaattc

SEQ ID NO: 1656828 - DNA, 15 bp, Homo sapiens
aggccggggaattct

SEQ ID NO: 1656829 - DNA, 15 bp, Homo sapiens
ggccggggaattctg

SEQ ID NO: 1656830 - DNA, 15 bp, Homo sapiens
gccggggaattctgt

SEQ ID NO: 1656831 - DNA, 15 bp, Homo sapiens
ccggggaattctgtt

SEQ ID NO: 1656832 - DNA, 15 bp, Homo sapiens
cggggaattctgttc

SEQ ID NO: 1656833 - DNA, 15 bp, Homo sapiens
ggggaattctgttct

SEQ ID NO: 1656834 - DNA, 15 bp, Homo sapiens
gggaattctgttctt

SEQ ID NO: 1656835 - DNA, 15 bp, Homo sapiens
ggaattctgttctta

SEQ ID NO: 1656836 - DNA, 15 bp, Homo sapiens
gaattctgttcttaa

SEQ ID NO: 1656837 - DNA, 15 bp, Homo sapiens
aattctgttcttaac

SEQ ID NO: 1656838 - DNA, 15 bp, Homo sapiens
attctgttcttaaca

SEQ ID NO: 1656839 - DNA, 15 bp, Homo sapiens
ttctgttcttaacaa

SEQ ID NO: 1656840 - DNA, 15 bp, Homo sapiens
tctgttcttaacaag

SEQ ID NO: 1656841 - DNA, 15 bp, Homo sapiens
ctgttcttaacaaga

SEQ ID NO: 1656842 - DNA, 15 bp, Homo sapiens
tgttcttaacaagat

SEQ ID NO: 1656843 - DNA, 15 bp, Homo sapiens
gttcttaacaagatc

SEQ ID NO: 1656844 - DNA, 15 bp, Homo sapiens
ttcttaacaagatct

SEQ ID NO: 1656845 - DNA, 15 bp, Homo sapiens
tcttaacaagatctt

SEQ ID NO: 1656846 - DNA, 15 bp, Homo sapiens
cttaacaagatcttc

SEQ ID NO: 1656847 - DNA, 15 bp, Homo sapiens
ttaacaagatcttcc

SEQ ID NO: 1656848 - DNA, 15 bp, Homo sapiens
taacaagatcttccc

SEQ ID NO: 1656849 - DNA, 15 bp, Homo sapiens
aacaagatcttcccc

SEQ ID NO: 1656850 - DNA, 15 bp, Homo sapiens
acaagatcttccccg

SEQ ID NO: 1656851 - DNA, 15 bp, Homo sapiens
caagatcttccccgg

SEQ ID NO: 1656852 - DNA, 15 bp, Homo sapiens
aagatcttccccgga

SEQ ID NO: 1656853 - DNA, 15 bp, Homo sapiens
agatcttccccggaa

SEQ ID NO: 1656854 - DNA, 15 bp, Homo sapiens
gatcttccccggaat

SEQ ID NO: 1656855 - DNA, 15 bp, Homo sapiens
atcttccccggaata

SEQ ID NO: 1656856 - DNA, 15 bp, Homo sapiens
tcttccccggaataa

SEQ ID NO: 1656857 - DNA, 15 bp, Homo sapiens
cttccccggaataaa

SEQ ID NO: 1656858 - DNA, 15 bp, Homo sapiens
ttccccggaataaac

SEQ ID NO: 1656859 - DNA, 15 bp, Homo sapiens
tccccggaataaact

SEQ ID NO: 1656860 - DNA, 15 bp, Homo sapiens
ccccggaataaacta

SEQ ID NO: 1656861 - DNA, 15 bp, Homo sapiens
cccggaataaactaa

SEQ ID NO: 1656862 - DNA, 15 bp, Homo sapiens
ccggaataaactaat

SEQ ID NO: 1656863 - DNA, 15 bp, Homo sapiens
cggaataaactaatt

SEQ ID NO: 1656864 - DNA, 15 bp, Homo sapiens
ggaataaactaatta

SEQ ID NO: 1656865 - DNA, 15 bp, Homo sapiens
gaataaactaattaa

SEQ ID NO: 1656866 - DNA, 15 bp, Homo sapiens
aataaactaattaat

SEQ ID NO: 1656867 - DNA, 15 bp, Homo sapiens
ataaactaattaatc

SEQ ID NO: 1656868 - DNA, 15 bp, Homo sapiens
taaactaattaatca

SEQ ID NO: 1656869 - DNA, 15 bp, Homo sapiens
aaactaattaatcag

SEQ ID NO: 1656870 - DNA, 15 bp, Homo sapiens
aactaattaatcaga

SEQ ID NO: 1656871 - DNA, 15 bp, Homo sapiens
actaattaatcagag

SEQ ID NO: 1656872 - DNA, 15 bp, Homo sapiens
ctaattaatcagagt

SEQ ID NO: 1656873 - DNA, 15 bp, Homo sapiens
taattaatcagagtc

SEQ ID NO: 1656874 - DNA, 15 bp, Homo sapiens
aattaatcagagtct

SEQ ID NO: 1656875 - DNA, 15 bp, Homo sapiens
attaatcagagtcta

SEQ ID NO: 1656876 - DNA, 15 bp, Homo sapiens
ttaatcagagtctaa

SEQ ID NO: 1656877 - DNA, 15 bp, Homo sapiens
taatcagagtctaac

SEQ ID NO: 1656878 - DNA, 15 bp, Homo sapiens
aatcagagtctaacc

SEQ ID NO: 1656879 - DNA, 15 bp, Homo sapiens
atcagagtctaaccc

SEQ ID NO: 1656880 - DNA, 15 bp, Homo sapiens
tcagagtctaacccc

SEQ ID NO: 1656881 - DNA, 15 bp, Homo sapiens
cagagtctaaccccc

SEQ ID NO: 1656882 - DNA, 15 bp, Homo sapiens
agagtctaaccccct

SEQ ID NO: 1656883 - DNA, 15 bp, Homo sapiens
gagtctaacccccta

SEQ ID NO: 1656884 - DNA, 15 bp, Homo sapiens
agtctaaccccctag

SEQ ID NO: 1656885 - DNA, 15 bp, Homo sapiens
gtctaaccccctagg

SEQ ID NO: 1656886 - DNA, 15 bp, Homo sapiens
tctaaccccctaggg

SEQ ID NO: 1656887 - DNA, 15 bp, Homo sapiens
ctaaccccctagggt

SEQ ID NO: 1656888 - DNA, 15 bp, Homo sapiens
taaccccctagggta

SEQ ID NO: 1656889 - DNA, 15 bp, Homo sapiens
aaccccctagggtat

SEQ ID NO: 1656890 - DNA, 15 bp, Homo sapiens
accccctagggtatc

SEQ ID NO: 1656891 - DNA, 15 bp, Homo sapiens
ccccctagggtatca

SEQ ID NO: 1656892 - DNA, 15 bp, Homo sapiens
cccctagggtatcat

SEQ ID NO: 1656893 - DNA, 15 bp, Homo sapiens
ccctagggtatcatc

SEQ ID NO: 1656894 - DNA, 15 bp, Homo sapiens
cctagggtatcatca

SEQ ID NO: 1656895 - DNA, 15 bp, Homo sapiens
ctagggtatcatcag

SEQ ID NO: 1656896 - DNA, 15 bp, Homo sapiens
tagggtatcatcaga

SEQ ID NO: 1656897 - DNA, 15 bp, Homo sapiens
agggtatcatcagaa

SEQ ID NO: 1656898 - DNA, 15 bp, Homo sapiens
gggtatcatcagaaa

SEQ ID NO: 1656899 - DNA, 15 bp, Homo sapiens
ggtatcatcagaaac

SEQ ID NO: 1656900 - DNA, 15 bp, Homo sapiens
gtatcatcagaaact

SEQ ID NO: 1656901 - DNA, 15 bp, Homo sapiens
tatcatcagaaacta

SEQ ID NO: 1656902 - DNA, 15 bp, Homo sapiens
atcatcagaaactaa

SEQ ID NO: 1656903 - DNA, 15 bp, Homo sapiens
tcatcagaaactaac

SEQ ID NO: 1656904 - DNA, 15 bp, Homo sapiens
catcagaaactaact

SEQ ID NO: 1656905 - DNA, 15 bp, Homo sapiens
atcagaaactaactg

SEQ ID NO: 1656906 - DNA, 15 bp, Homo sapiens
tcagaaactaactga

SEQ ID NO: 1656907 - DNA, 15 bp, Homo sapiens
cagaaactaactgac

SEQ ID NO: 1656908 - DNA, 15 bp, Homo sapiens
agaaactaactgacc

SEQ ID NO: 1656909 - DNA, 15 bp, Homo sapiens
gaaactaactgacct

SEQ ID NO: 1656910 - DNA, 15 bp, Homo sapiens
aaactaactgacctg

SEQ ID NO: 1656911 - DNA, 15 bp, Homo sapiens
aactaactgacctgg

SEQ ID NO: 1656912 - DNA, 15 bp, Homo sapiens
actaactgacctggg

SEQ ID NO: 1656913 - DNA, 15 bp, Homo sapiens
ctaactgacctgggg

SEQ ID NO: 1656914 - DNA, 15 bp, Homo sapiens
taactgacctggggg

SEQ ID NO: 1656915 - DNA, 15 bp, Homo sapiens
aactgacctgggggg

SEQ ID NO: 1656916 - DNA, 15 bp, Homo sapiens
actgacctgggggga

SEQ ID NO: 1656917 - DNA, 15 bp, Homo sapiens
ctgacctggggggaa

SEQ ID NO: 1656918 - DNA, 15 bp, Homo sapiens
tgacctggggggaag

SEQ ID NO: 1656919 - DNA, 15 bp, Homo sapiens
gacctggggggaagg

SEQ ID NO: 1656920 - DNA, 15 bp, Homo sapiens
acctggggggaagga

SEQ ID NO: 1656921 - DNA, 15 bp, Homo sapiens
cctggggggaaggaa

SEQ ID NO: 1656922 - DNA, 15 bp, Homo sapiens
ctggggggaaggaaa

SEQ ID NO: 1656923 - DNA, 15 bp, Homo sapiens
tggggggaaggaaat

SEQ ID NO: 1656924 - DNA, 15 bp, Homo sapiens
ggggggaaggaaata

SEQ ID NO: 1656925 - DNA, 15 bp, Homo sapiens
gggggaaggaaatac

SEQ ID NO: 1656926 - DNA, 15 bp, Homo sapiens
ggggaaggaaatacc

SEQ ID NO: 1656927 - DNA, 15 bp, Homo sapiens
gggaaggaaataccc

SEQ ID NO: 1656928 - DNA, 15 bp, Homo sapiens
ggaaggaaataccca

SEQ ID NO: 1656929 - DNA, 15 bp, Homo sapiens
gaaggaaatacccaa

SEQ ID NO: 1656930 - DNA, 15 bp, Homo sapiens
aaggaaatacccaac

SEQ ID NO: 1656931 - DNA, 15 bp, Homo sapiens
aggaaatacccaact

SEQ ID NO: 1656932 - DNA, 15 bp, Homo sapiens
ggaaatacccaactc

SEQ ID NO: 1656933 - DNA, 15 bp, Homo sapiens
gaaatacccaactcc

SEQ ID NO: 1656934 - DNA, 15 bp, Homo sapiens
aaatacccaactcca

SEQ ID NO: 1656935 - DNA, 15 bp, Homo sapiens
aatacccaactccat

SEQ ID NO: 1656936 - DNA, 15 bp, Homo sapiens
atacccaactccatc

SEQ ID NO: 1656937 - DNA, 15 bp, Homo sapiens
tacccaactccatcc

SEQ ID NO: 1656938 - DNA, 15 bp, Homo sapiens
acccaactccatccc

SEQ ID NO: 1656939 - DNA, 15 bp, Homo sapiens
cccaactccatccca

SEQ ID NO: 1656940 - DNA, 15 bp, Homo sapiens
ccaactccatcccac

SEQ ID NO: 1656941 - DNA, 15 bp, Homo sapiens
caactccatcccact

SEQ ID NO: 1656942 - DNA, 15 bp, Homo sapiens
aactccatcccactc

SEQ ID NO: 1656943 - DNA, 15 bp, Homo sapiens
actccatcccactct

SEQ ID NO: 1656944 - DNA, 15 bp, Homo sapiens
ctccatcccactcta

SEQ ID NO: 1656945 - DNA, 15 bp, Homo sapiens
tccatcccactctag

SEQ ID NO: 1656946 - DNA, 15 bp, Homo sapiens
ccatcccactctagc

SEQ ID NO: 1656947 - DNA, 15 bp, Homo sapiens
catcccactctagcc

SEQ ID NO: 1656948 - DNA, 15 bp, Homo sapiens
atcccactctagcca

SEQ ID NO: 1656949 - DNA, 15 bp, Homo sapiens
tcccactctagccat

SEQ ID NO: 1656950 - DNA, 15 bp, Homo sapiens
cccactctagccatt

SEQ ID NO: 1656951 - DNA, 15 bp, Homo sapiens
ccactctagccattc

SEQ ID NO: 1656952 - DNA, 15 bp, Homo sapiens
cactctagccattct

SEQ ID NO: 1656953 - DNA, 15 bp, Homo sapiens
actctagccattctg

SEQ ID NO: 1656954 - DNA, 15 bp, Homo sapiens
ctctagccattctgt

SEQ ID NO: 1656955 - DNA, 15 bp, Homo sapiens
tctagccattctgtt

SEQ ID NO: 1656956 - DNA, 15 bp, Homo sapiens
ctagccattctgttc

SEQ ID NO: 1656957 - DNA, 15 bp, Homo sapiens
tagccattctgttcc

SEQ ID NO: 1656958 - DNA, 15 bp, Homo sapiens
agccattctgttcca

SEQ ID NO: 1656959 - DNA, 15 bp, Homo sapiens
gccattctgttccac

SEQ ID NO: 1656960 - DNA, 15 bp, Homo sapiens
ccattctgttccacc

SEQ ID NO: 1656961 - DNA, 15 bp, Homo sapiens
cattctgttccacct

SEQ ID NO: 1656962 - DNA, 15 bp, Homo sapiens
attctgttccaccta

SEQ ID NO: 1656963 - DNA, 15 bp, Homo sapiens
ttctgttccacctaa

SEQ ID NO: 1656964 - DNA, 15 bp, Homo sapiens
tctgttccacctaaa

SEQ ID NO: 1656965 - DNA, 15 bp, Homo sapiens
ctgttccacctaaaa

SEQ ID NO: 1656966 - DNA, 15 bp, Homo sapiens
tgttccacctaaaag

SEQ ID NO: 1656967 - DNA, 15 bp, Homo sapiens
gttccacctaaaagg

SEQ ID NO: 1656968 - DNA, 15 bp, Homo sapiens
ttccacctaaaaggg

SEQ ID NO: 1656969 - DNA, 15 bp, Homo sapiens
tccacctaaaaggga

SEQ ID NO: 1656970 - DNA, 15 bp, Homo sapiens
ccacctaaaagggaa

SEQ ID NO: 1656971 - DNA, 15 bp, Homo sapiens
cacctaaaagggaag

SEQ ID NO: 1656972 - DNA, 15 bp, Homo sapiens
acctaaaagggaaga

SEQ ID NO: 1656973 - DNA, 15 bp, Homo sapiens
cctaaaagggaagaa

SEQ ID NO: 1656974 - DNA, 15 bp, Homo sapiens
ctaaaagggaagaaa

SEQ ID NO: 1656975 - DNA, 15 bp, Homo sapiens
aaaagggaagaaaaa

SEQ ID NO: 1656976 - DNA, 15 bp, Homo sapiens
aaagggaagaaaaaa

SEQ ID NO: 1656977 - DNA, 15 bp, Homo sapiens
agggaagaaaaaaac

SEQ ID NO: 1656978 - DNA, 15 bp, Homo sapiens
gggaagaaaaaaact

SEQ ID NO: 1656979 - DNA, 15 bp, Homo sapiens
ggaagaaaaaaactg

SEQ ID NO: 1656980 - DNA, 15 bp, Homo sapiens
gaagaaaaaaactga

SEQ ID NO: 1656981 - DNA, 15 bp, Homo sapiens
aagaaaaaaactgag

SEQ ID NO: 1656982 - DNA, 15 bp, Homo sapiens
agaaaaaaactgaga

SEQ ID NO: 1656983 - DNA, 15 bp, Homo sapiens
gaaaaaaactgagaa

SEQ ID NO: 1656984 - DNA, 15 bp, Homo sapiens
aaaaaaactgagaaa

SEQ ID NO: 1656985 - DNA, 15 bp, Homo sapiens
aaaaaactgagaaag

SEQ ID NO: 1656986 - DNA, 15 bp, Homo sapiens
aaaaactgagaaaga

SEQ ID NO: 1656987 - DNA, 15 bp, Homo sapiens
aaaactgagaaagac

SEQ ID NO: 1656988 - DNA, 15 bp, Homo sapiens
aaactgagaaagact

SEQ ID NO: 1656989 - DNA, 15 bp, Homo sapiens
aactgagaaagactt

SEQ ID NO: 1656990 - DNA, 15 bp, Homo sapiens
actgagaaagacttc

SEQ ID NO: 1656991 - DNA, 15 bp, Homo sapiens
ctgagaaagacttct

SEQ ID NO: 1656992 - DNA, 15 bp, Homo sapiens
tgagaaagacttctg

SEQ ID NO: 1656993 - DNA, 15 bp, Homo sapiens
gagaaagacttctga

SEQ ID NO: 1656994 - DNA, 15 bp, Homo sapiens
agaaagacttctgaa

SEQ ID NO: 1656995 - DNA, 15 bp, Homo sapiens
gaaagacttctgaag

SEQ ID NO: 1656996 - DNA, 15 bp, Homo sapiens
aaagacttctgaagt

SEQ ID NO: 1656997 - DNA, 15 bp, Homo sapiens
aagacttctgaagtt

SEQ ID NO: 1656998 - DNA, 15 bp, Homo sapiens
agacttctgaagttc

SEQ ID NO: 1656999 - DNA, 15 bp, Homo sapiens
gacttctgaagttca

SEQ ID NO: 1657000 - DNA, 15 bp, Homo sapiens
acttctgaagttcac

SEQ ID NO: 1657001 - DNA, 15 bp, Homo sapiens
cttctgaagttcaca

SEQ ID NO: 1657002 - DNA, 15 bp, Homo sapiens
ttctgaagttcacag

SEQ ID NO: 1657003 - DNA, 15 bp, Homo sapiens
tctgaagttcacagt

SEQ ID NO: 1657004 - DNA, 15 bp, Homo sapiens
ctgaagttcacagtt

SEQ ID NO: 1657005 - DNA, 15 bp, Homo sapiens
tgaagttcacagttc

SEQ ID NO: 1657006 - DNA, 15 bp, Homo sapiens
gaagttcacagttca

SEQ ID NO: 1657007 - DNA, 15 bp, Homo sapiens
aagttcacagttcaa

SEQ ID NO: 1657008 - DNA, 15 bp, Homo sapiens
agttcacagttcaaa

SEQ ID NO: 1657009 - DNA, 15 bp, Homo sapiens
gttcacagttcaaag

SEQ ID NO: 1657010 - DNA, 15 bp, Homo sapiens
ttcacagttcaaagg

SEQ ID NO: 1657011 - DNA, 15 bp, Homo sapiens
tcacagttcaaaggc

SEQ ID NO: 1657012 - DNA, 15 bp, Homo sapiens
cacagttcaaaggca

SEQ ID NO: 1657013 - DNA, 15 bp, Homo sapiens
acagttcaaaggcat

SEQ ID NO: 1657014 - DNA, 15 bp, Homo sapiens
cagttcaaaggcata

SEQ ID NO: 1657015 - DNA, 15 bp, Homo sapiens
agttcaaaggcatag

SEQ ID NO: 1657016 - DNA, 15 bp, Homo sapiens
gttcaaaggcataga

SEQ ID NO: 1657017 - DNA, 15 bp, Homo sapiens
ttcaaaggcatagac

SEQ ID NO: 1657018 - DNA, 15 bp, Homo sapiens
tcaaaggcatagact

SEQ ID NO: 1657019 - DNA, 15 bp, Homo sapiens
caaaggcatagactc

SEQ ID NO: 1657020 - DNA, 15 bp, Homo sapiens
aaaggcatagactca

SEQ ID NO: 1657021 - DNA, 15 bp, Homo sapiens
aaggcatagactcac

SEQ ID NO: 1657022 - DNA, 15 bp, Homo sapiens
aggcatagactcact

SEQ ID NO: 1657023 - DNA, 15 bp, Homo sapiens
ggcatagactcacta

SEQ ID NO: 1657024 - DNA, 15 bp, Homo sapiens
gcatagactcactaa

SEQ ID NO: 1657025 - DNA, 15 bp, Homo sapiens
catagactcactaaa

SEQ ID NO: 1657026 - DNA, 15 bp, Homo sapiens
atagactcactaaag

SEQ ID NO: 1657027 - DNA, 15 bp, Homo sapiens
tagactcactaaagg

SEQ ID NO: 1657028 - DNA, 15 bp, Homo sapiens
agactcactaaagga

SEQ ID NO: 1657029 - DNA, 15 bp, Homo sapiens
gactcactaaaggac

SEQ ID NO: 1657030 - DNA, 15 bp, Homo sapiens
actcactaaaggact

SEQ ID NO: 1657031 - DNA, 15 bp, Homo sapiens
ctcactaaaggactg

SEQ ID NO: 1657032 - DNA, 15 bp, Homo sapiens
tcactaaaggactga

SEQ ID NO: 1657033 - DNA, 15 bp, Homo sapiens
cactaaaggactgag

SEQ ID NO: 1657034 - DNA, 15 bp, Homo sapiens
actaaaggactgaga

SEQ ID NO: 1657035 - DNA, 15 bp, Homo sapiens
ctaaaggactgagac

SEQ ID NO: 1657036 - DNA, 15 bp, Homo sapiens
taaaggactgagacc

SEQ ID NO: 1657037 - DNA, 15 bp, Homo sapiens
aaaggactgagacct

SEQ ID NO: 1657038 - DNA, 15 bp, Homo sapiens
aaggactgagaccta

SEQ ID NO: 1657039 - DNA, 15 bp, Homo sapiens
aggactgagacctaa

SEQ ID NO: 1657040 - DNA, 15 bp, Homo sapiens
ggactgagacctaag

SEQ ID NO: 1657041 - DNA, 15 bp, Homo sapiens
gactgagacctaagt

SEQ ID NO: 1657042 - DNA, 15 bp, Homo sapiens
actgagacctaagta

SEQ ID NO: 1657043 - DNA, 15 bp, Homo sapiens
ctgagacctaagtat

SEQ ID NO: 1657044 - DNA, 15 bp, Homo sapiens
tgagacctaagtata

SEQ ID NO: 1657045 - DNA, 15 bp, Homo sapiens
gagacctaagtatat

SEQ ID NO: 1657046 - DNA, 15 bp, Homo sapiens
agacctaagtatatg

SEQ ID NO: 1657047 - DNA, 15 bp, Homo sapiens
gacctaagtatatga

SEQ ID NO: 1657048 - DNA, 15 bp, Homo sapiens
acctaagtatatgac

SEQ ID NO: 1657049 - DNA, 15 bp, Homo sapiens
cctaagtatatgact

SEQ ID NO: 1657050 - DNA, 15 bp, Homo sapiens
ctaagtatatgacta

SEQ ID NO: 1657051 - DNA, 15 bp, Homo sapiens
taagtatatgactat

SEQ ID NO: 1657052 - DNA, 15 bp, Homo sapiens
aagtatatgactata

SEQ ID NO: 1657053 - DNA, 15 bp, Homo sapiens
agtatatgactatag

SEQ ID NO: 1657054 - DNA, 15 bp, Homo sapiens
gtatatgactataga

SEQ ID NO: 1657055 - DNA, 15 bp, Homo sapiens
tatatgactatagat

SEQ ID NO: 1657056 - DNA, 15 bp, Homo sapiens
atatgactatagatt

SEQ ID NO: 1657057 - DNA, 15 bp, Homo sapiens
tatgactatagattg

SEQ ID NO: 1657058 - DNA, 15 bp, Homo sapiens
atgactatagattgc

SEQ ID NO: 1657059 - DNA, 15 bp, Homo sapiens
tgactatagattgct

SEQ ID NO: 1657060 - DNA, 15 bp, Homo sapiens
gactatagattgctt

SEQ ID NO: 1657061 - DNA, 15 bp, Homo sapiens
actatagattgcttt

SEQ ID NO: 1657062 - DNA, 15 bp, Homo sapiens
ctatagattgctttc

SEQ ID NO: 1657063 - DNA, 15 bp, Homo sapiens
tatagattgctttcc

SEQ ID NO: 1657064 - DNA, 15 bp, Homo sapiens
atagattgctttcct

SEQ ID NO: 1657065 - DNA, 15 bp, Homo sapiens
tagattgctttcctg

SEQ ID NO: 1657066 - DNA, 15 bp, Homo sapiens
agattgctttcctgc

SEQ ID NO: 1657067 - DNA, 15 bp, Homo sapiens
gattgctttcctgct

SEQ ID NO: 1657068 - DNA, 15 bp, Homo sapiens
attgctttcctgctc

SEQ ID NO: 1657069 - DNA, 15 bp, Homo sapiens
ttgctttcctgctcc

SEQ ID NO: 1657070 - DNA, 15 bp, Homo sapiens
tgctttcctgctccc

SEQ ID NO: 1657071 - DNA, 15 bp, Homo sapiens
gctttcctgctcccc

SEQ ID NO: 1657072 - DNA, 15 bp, Homo sapiens
ctttcctgctcccca

SEQ ID NO: 1657073 - DNA, 15 bp, Homo sapiens
tttcctgctccccac

SEQ ID NO: 1657074 - DNA, 15 bp, Homo sapiens
ttcctgctccccaca

SEQ ID NO: 1657075 - DNA, 15 bp, Homo sapiens
tcctgctccccacag

SEQ ID NO: 1657076 - DNA, 15 bp, Homo sapiens
cctgctccccacagc

SEQ ID NO: 1657077 - DNA, 15 bp, Homo sapiens
ctgctccccacagct

SEQ ID NO: 1657078 - DNA, 15 bp, Homo sapiens
tgctccccacagctt

SEQ ID NO: 1657079 - DNA, 15 bp, Homo sapiens
gctccccacagctta

SEQ ID NO: 1657080 - DNA, 15 bp, Homo sapiens
ctccccacagcttac

SEQ ID NO: 1657081 - DNA, 15 bp, Homo sapiens
tccccacagcttacc

SEQ ID NO: 1657082 - DNA, 15 bp, Homo sapiens
ccccacagcttaccc

SEQ ID NO: 1657083 - DNA, 15 bp, Homo sapiens
cccacagcttacccc

SEQ ID NO: 1657084 - DNA, 15 bp, Homo sapiens
ccacagcttacccca

SEQ ID NO: 1657085 - DNA, 15 bp, Homo sapiens
cacagcttaccccac

SEQ ID NO: 1657086 - DNA, 15 bp, Homo sapiens
acagcttaccccaca

SEQ ID NO: 1657087 - DNA, 15 bp, Homo sapiens
cagcttaccccacac

SEQ ID NO: 1657088 - DNA, 15 bp, Homo sapiens
agcttaccccacact

SEQ ID NO: 1657089 - DNA, 15 bp, Homo sapiens
gcttaccccacacta

SEQ ID NO: 1657090 - DNA, 15 bp, Homo sapiens
cttaccccacactac

SEQ ID NO: 1657091 - DNA, 15 bp, Homo sapiens
ttaccccacactaca

SEQ ID NO: 1657092 - DNA, 15 bp, Homo sapiens
taccccacactacaa

SEQ ID NO: 1657093 - DNA, 15 bp, Homo sapiens
accccacactacaag

SEQ ID NO: 1657094 - DNA, 15 bp, Homo sapiens
ccccacactacaagg

SEQ ID NO: 1657095 - DNA, 15 bp, Homo sapiens
cccacactacaaggg

SEQ ID NO: 1657096 - DNA, 15 bp, Homo sapiens
ccacactacaagggg

SEQ ID NO: 1657097 - DNA, 15 bp, Homo sapiens
cacactacaaggggc

SEQ ID NO: 1657098 - DNA, 15 bp, Homo sapiens
acactacaaggggct

SEQ ID NO: 1657099 - DNA, 15 bp, Homo sapiens
cactacaaggggctt

SEQ ID NO: 1657100 - DNA, 15 bp, Homo sapiens
actacaaggggctta

SEQ ID NO: 1657101 - DNA, 15 bp, Homo sapiens
ctacaaggggcttac

SEQ ID NO: 1657102 - DNA, 15 bp, Homo sapiens
tacaaggggcttact

SEQ ID NO: 1657103 - DNA, 15 bp, Homo sapiens
acaaggggcttactt

SEQ ID NO: 1657104 - DNA, 15 bp, Homo sapiens
caaggggcttactta

SEQ ID NO: 1657105 - DNA, 15 bp, Homo sapiens
aaggggcttacttac

SEQ ID NO: 1657106 - DNA, 15 bp, Homo sapiens
aggggcttacttacc

SEQ ID NO: 1657107 - DNA, 15 bp, Homo sapiens
ggggcttacttacct

SEQ ID NO: 1657108 - DNA, 15 bp, Homo sapiens
gggcttacttacctg

SEQ ID NO: 1657109 - DNA, 15 bp, Homo sapiens
ggcttacttacctga

SEQ ID NO: 1657110 - DNA, 15 bp, Homo sapiens
gcttacttacctgat

SEQ ID NO: 1657111 - DNA, 15 bp, Homo sapiens
cttacttacctgata

SEQ ID NO: 1657112 - DNA, 15 bp, Homo sapiens
ttacttacctgatac

SEQ ID NO: 1657113 - DNA, 15 bp, Homo sapiens
tacttacctgataca

SEQ ID NO: 1657114 - DNA, 15 bp, Homo sapiens
acttacctgatacat

SEQ ID NO: 1657115 - DNA, 15 bp, Homo sapiens
cttacctgatacatc

SEQ ID NO: 1657116 - DNA, 15 bp, Homo sapiens
ttacctgatacatca

SEQ ID NO: 1657117 - DNA, 15 bp, Homo sapiens
tacctgatacatcac

SEQ ID NO: 1657118 - DNA, 15 bp, Homo sapiens
acctgatacatcaca

SEQ ID NO: 1657119 - DNA, 15 bp, Homo sapiens
cctgatacatcacat

SEQ ID NO: 1657120 - DNA, 15 bp, Homo sapiens
ctgatacatcacatc

SEQ ID NO: 1657121 - DNA, 15 bp, Homo sapiens
tgatacatcacatcc

SEQ ID NO: 1657122 - DNA, 15 bp, Homo sapiens
gatacatcacatcca

SEQ ID NO: 1657123 - DNA, 15 bp, Homo sapiens
atacatcacatccaa

SEQ ID NO: 1657124 - DNA, 15 bp, Homo sapiens
tacatcacatccaac

SEQ ID NO: 1657125 - DNA, 15 bp, Homo sapiens
acatcacatccaact

SEQ ID NO: 1657126 - DNA, 15 bp, Homo sapiens
catcacatccaactg

SEQ ID NO: 1657127 - DNA, 15 bp, Homo sapiens
atcacatccaactgc

SEQ ID NO: 1657128 - DNA, 15 bp, Homo sapiens
tcacatccaactgcc

SEQ ID NO: 1657129 - DNA, 15 bp, Homo sapiens
cacatccaactgcca

SEQ ID NO: 1657130 - DNA, 15 bp, Homo sapiens
acatccaactgccaa

SEQ ID NO: 1657131 - DNA, 15 bp, Homo sapiens
catccaactgccaaa

SEQ ID NO: 1657132 - DNA, 15 bp, Homo sapiens
atccaactgccaaaa

SEQ ID NO: 1657133 - DNA, 15 bp, Homo sapiens
tccaactgccaaaaa

SEQ ID NO: 1657134 - DNA, 15 bp, Homo sapiens
ccaactgccaaaaaa

SEQ ID NO: 1657135 - DNA, 15 bp, Homo sapiens
caactgccaaaaaat

SEQ ID NO: 1657136 - DNA, 15 bp, Homo sapiens
aactgccaaaaaatt

SEQ ID NO: 1657137 - DNA, 15 bp, Homo sapiens
actgccaaaaaatta

SEQ ID NO: 1657138 - DNA, 15 bp, Homo sapiens
ctgccaaaaaattat

SEQ ID NO: 1657139 - DNA, 15 bp, Homo sapiens
tgccaaaaaattata

SEQ ID NO: 1657140 - DNA, 15 bp, Homo sapiens
gccaaaaaattataa

SEQ ID NO: 1657141 - DNA, 15 bp, Homo sapiens
ccaaaaaattataaa

SEQ ID NO: 1657142 - DNA, 15 bp, Homo sapiens
caaaaaattataaac

SEQ ID NO: 1657143 - DNA, 15 bp, Homo sapiens
aaaaaattataaacc

SEQ ID NO: 1657144 - DNA, 15 bp, Homo sapiens
aaaaattataaacca

SEQ ID NO: 1657145 - DNA, 15 bp, Homo sapiens
aaaattataaaccat

SEQ ID NO: 1657146 - DNA, 15 bp, Homo sapiens
aaattataaaccata

SEQ ID NO: 1657147 - DNA, 15 bp, Homo sapiens
aattataaaccatac

SEQ ID NO: 1657148 - DNA, 15 bp, Homo sapiens
attataaaccatacc

SEQ ID NO: 1657149 - DNA, 15 bp, Homo sapiens
ttataaaccatacca

SEQ ID NO: 1657150 - DNA, 15 bp, Homo sapiens
tataaaccataccaa

SEQ ID NO: 1657151 - DNA, 15 bp, Homo sapiens
ataaaccataccaaa

SEQ ID NO: 1657152 - DNA, 15 bp, Homo sapiens
taaaccataccaaaa

SEQ ID NO: 1657153 - DNA, 15 bp, Homo sapiens
aaaccataccaaaag

SEQ ID NO: 1657154 - DNA, 15 bp, Homo sapiens
aaccataccaaaaga

SEQ ID NO: 1657155 - DNA, 15 bp, Homo sapiens
accataccaaaagac

SEQ ID NO: 1657156 - DNA, 15 bp, Homo sapiens
ccataccaaaagaca

SEQ ID NO: 1657157 - DNA, 15 bp, Homo sapiens
cataccaaaagacaa

SEQ ID NO: 1657158 - DNA, 15 bp, Homo sapiens
ataccaaaagacaaa

SEQ ID NO: 1657159 - DNA, 15 bp, Homo sapiens
taccaaaagacaaaa

SEQ ID NO: 1657160 - DNA, 15 bp, Homo sapiens
accaaaagacaaaaa

SEQ ID NO: 1657161 - DNA, 15 bp, Homo sapiens
ccaaaagacaaaaac

SEQ ID NO: 1657162 - DNA, 15 bp, Homo sapiens
caaaagacaaaaaca

SEQ ID NO: 1657163 - DNA, 15 bp, Homo sapiens
aaaagacaaaaacat

SEQ ID NO: 1657164 - DNA, 15 bp, Homo sapiens
aaagacaaaaacatc

SEQ ID NO: 1657165 - DNA, 15 bp, Homo sapiens
aagacaaaaacatca

SEQ ID NO: 1657166 - DNA, 15 bp, Homo sapiens
agacaaaaacatcat

SEQ ID NO: 1657167 - DNA, 15 bp, Homo sapiens
gacaaaaacatcatt

SEQ ID NO: 1657168 - DNA, 15 bp, Homo sapiens
acaaaaacatcattt

SEQ ID NO: 1657169 - DNA, 15 bp, Homo sapiens
caaaaacatcatttg

SEQ ID NO: 1657170 - DNA, 15 bp, Homo sapiens
aaaaacatcatttga

SEQ ID NO: 1657171 - DNA, 15 bp, Homo sapiens
aaaacatcatttgaa

SEQ ID NO: 1657172 - DNA, 15 bp, Homo sapiens
aaacatcatttgaaa

SEQ ID NO: 1657173 - DNA, 15 bp, Homo sapiens
aacatcatttgaaaa

SEQ ID NO: 1657174 - DNA, 15 bp, Homo sapiens
acatcatttgaaaag

SEQ ID NO: 1657175 - DNA, 15 bp, Homo sapiens
catcatttgaaaaga

SEQ ID NO: 1657176 - DNA, 15 bp, Homo sapiens
atcatttgaaaagac

SEQ ID NO: 1657177 - DNA, 15 bp, Homo sapiens
tcatttgaaaagaca

SEQ ID NO: 1657178 - DNA, 15 bp, Homo sapiens
catttgaaaagacag

SEQ ID NO: 1657179 - DNA, 15 bp, Homo sapiens
atttgaaaagacaga

SEQ ID NO: 1657180 - DNA, 15 bp, Homo sapiens
tttgaaaagacagag

SEQ ID NO: 1657181 - DNA, 15 bp, Homo sapiens
ttgaaaagacagagc

SEQ ID NO: 1657182 - DNA, 15 bp, Homo sapiens
tgaaaagacagagca

SEQ ID NO: 1657183 - DNA, 15 bp, Homo sapiens
gaaaagacagagcaa

SEQ ID NO: 1657184 - DNA, 15 bp, Homo sapiens
aaaagacagagcaag

SEQ ID NO: 1657185 - DNA, 15 bp, Homo sapiens
aaagacagagcaagc

SEQ ID NO: 1657186 - DNA, 15 bp, Homo sapiens
aagacagagcaagca

SEQ ID NO: 1657187 - DNA, 15 bp, Homo sapiens
agacagagcaagcat

SEQ ID NO: 1657188 - DNA, 15 bp, Homo sapiens
gacagagcaagcatc

SEQ ID NO: 1657189 - DNA, 15 bp, Homo sapiens
acagagcaagcatca

SEQ ID NO: 1657190 - DNA, 15 bp, Homo sapiens
cagagcaagcatcag

SEQ ID NO: 1657191 - DNA, 15 bp, Homo sapiens
agagcaagcatcaga

SEQ ID NO: 1657192 - DNA, 15 bp, Homo sapiens
gagcaagcatcagaa

SEQ ID NO: 1657193 - DNA, 15 bp, Homo sapiens
agcaagcatcagaac

SEQ ID NO: 1657194 - DNA, 15 bp, Homo sapiens
gcaagcatcagaacc

SEQ ID NO: 1657195 - DNA, 15 bp, Homo sapiens
caagcatcagaacca

SEQ ID NO: 1657196 - DNA, 15 bp, Homo sapiens
aagcatcagaaccaa

SEQ ID NO: 1657197 - DNA, 15 bp, Homo sapiens
agcatcagaaccaaa

SEQ ID NO: 1657198 - DNA, 15 bp, Homo sapiens
gcatcagaaccaaat

SEQ ID NO: 1657199 - DNA, 15 bp, Homo sapiens
catcagaaccaaata

SEQ ID NO: 1657200 - DNA, 15 bp, Homo sapiens
atcagaaccaaatat

SEQ ID NO: 1657201 - DNA, 15 bp, Homo sapiens
tcagaaccaaatatg

SEQ ID NO: 1657202 - DNA, 15 bp, Homo sapiens
cagaaccaaatatgg

SEQ ID NO: 1657203 - DNA, 15 bp, Homo sapiens
agaaccaaatatggc

SEQ ID NO: 1657204 - DNA, 15 bp, Homo sapiens
gaaccaaatatggca

SEQ ID NO: 1657205 - DNA, 15 bp, Homo sapiens
aaccaaatatggcag

SEQ ID NO: 1657206 - DNA, 15 bp, Homo sapiens
accaaatatggcagg

SEQ ID NO: 1657207 - DNA, 15 bp, Homo sapiens
ccaaatatggcaggg

SEQ ID NO: 1657208 - DNA, 15 bp, Homo sapiens
caaatatggcaggga

SEQ ID NO: 1657209 - DNA, 15 bp, Homo sapiens
aaatatggcagggat

SEQ ID NO: 1657210 - DNA, 15 bp, Homo sapiens
aatatggcagggata

SEQ ID NO: 1657211 - DNA, 15 bp, Homo sapiens
atatggcagggatat

SEQ ID NO: 1657212 - DNA, 15 bp, Homo sapiens
tatggcagggatatt

SEQ ID NO: 1657213 - DNA, 15 bp, Homo sapiens
atggcagggatattg

SEQ ID NO: 1657214 - DNA, 15 bp, Homo sapiens
tggcagggatattgg

SEQ ID NO: 1657215 - DNA, 15 bp, Homo sapiens
ggcagggatattgga

SEQ ID NO: 1657216 - DNA, 15 bp, Homo sapiens
gcagggatattggaa

SEQ ID NO: 1657217 - DNA, 15 bp, Homo sapiens
cagggatattggaat

SEQ ID NO: 1657218 - DNA, 15 bp, Homo sapiens
agggatattggaatt

SEQ ID NO: 1657219 - DNA, 15 bp, Homo sapiens
gggatattggaatta

SEQ ID NO: 1657220 - DNA, 15 bp, Homo sapiens
ggatattggaattat

SEQ ID NO: 1657221 - DNA, 15 bp, Homo sapiens
gatattggaattatc

SEQ ID NO: 1657222 - DNA, 15 bp, Homo sapiens
atattggaattatca

SEQ ID NO: 1657223 - DNA, 15 bp, Homo sapiens
tattggaattatcag

SEQ ID NO: 1657224 - DNA, 15 bp, Homo sapiens
attggaattatcaga

SEQ ID NO: 1657225 - DNA, 15 bp, Homo sapiens
ttggaattatcagac

SEQ ID NO: 1657226 - DNA, 15 bp, Homo sapiens
tggaattatcagacc

SEQ ID NO: 1657227 - DNA, 15 bp, Homo sapiens
ggaattatcagacca

SEQ ID NO: 1657228 - DNA, 15 bp, Homo sapiens
gaattatcagaccag

SEQ ID NO: 1657229 - DNA, 15 bp, Homo sapiens
aattatcagaccagg

SEQ ID NO: 1657230 - DNA, 15 bp, Homo sapiens
attatcagaccagga

SEQ ID NO: 1657231 - DNA, 15 bp, Homo sapiens
ttatcagaccaggaa

SEQ ID NO: 1657232 - DNA, 15 bp, Homo sapiens
tatcagaccaggaat

SEQ ID NO: 1657233 - DNA, 15 bp, Homo sapiens
atcagaccaggaatt

SEQ ID NO: 1657234 - DNA, 15 bp, Homo sapiens
tcagaccaggaattt

SEQ ID NO: 1657235 - DNA, 15 bp, Homo sapiens
cagaccaggaattta

SEQ ID NO: 1657236 - DNA, 15 bp, Homo sapiens
agaccaggaatttaa

SEQ ID NO: 1657237 - DNA, 15 bp, Homo sapiens
gaccaggaatttaaa

SEQ ID NO: 1657238 - DNA, 15 bp, Homo sapiens
accaggaatttaaaa

SEQ ID NO: 1657239 - DNA, 15 bp, Homo sapiens
ccaggaatttaaaac

SEQ ID NO: 1657240 - DNA, 15 bp, Homo sapiens
caggaatttaaaaca

SEQ ID NO: 1657241 - DNA, 15 bp, Homo sapiens
aggaatttaaaacaa

SEQ ID NO: 1657242 - DNA, 15 bp, Homo sapiens
ggaatttaaaacaac

SEQ ID NO: 1657243 - DNA, 15 bp, Homo sapiens
gaatttaaaacaact

SEQ ID NO: 1657244 - DNA, 15 bp, Homo sapiens
aatttaaaacaactg

SEQ ID NO: 1657245 - DNA, 15 bp, Homo sapiens
atttaaaacaactgt

SEQ ID NO: 1657246 - DNA, 15 bp, Homo sapiens
tttaaaacaactgtg

SEQ ID NO: 1657247 - DNA, 15 bp, Homo sapiens
ttaaaacaactgtga

SEQ ID NO: 1657248 - DNA, 15 bp, Homo sapiens
taaaacaactgtgat

SEQ ID NO: 1657249 - DNA, 15 bp, Homo sapiens
aaaacaactgtgatt

SEQ ID NO: 1657250 - DNA, 15 bp, Homo sapiens
aaacaactgtgatta

SEQ ID NO: 1657251 - DNA, 15 bp, Homo sapiens
aacaactgtgattaa

SEQ ID NO: 1657252 - DNA, 15 bp, Homo sapiens
acaactgtgattaac

SEQ ID NO: 1657253 - DNA, 15 bp, Homo sapiens
caactgtgattaaca

SEQ ID NO: 1657254 - DNA, 15 bp, Homo sapiens
aactgtgattaacat

SEQ ID NO: 1657255 - DNA, 15 bp, Homo sapiens
actgtgattaacatg

SEQ ID NO: 1657256 - DNA, 15 bp, Homo sapiens
ctgtgattaacatgc

SEQ ID NO: 1657257 - DNA, 15 bp, Homo sapiens
tgtgattaacatgcc

SEQ ID NO: 1657258 - DNA, 15 bp, Homo sapiens
gtgattaacatgcca

SEQ ID NO: 1657259 - DNA, 15 bp, Homo sapiens
tgattaacatgccaa

SEQ ID NO: 1657260 - DNA, 15 bp, Homo sapiens
gattaacatgccaag

SEQ ID NO: 1657261 - DNA, 15 bp, Homo sapiens
attaacatgccaagg

SEQ ID NO: 1657262 - DNA, 15 bp, Homo sapiens
ttaacatgccaaggg

SEQ ID NO: 1657263 - DNA, 15 bp, Homo sapiens
taacatgccaagggc

SEQ ID NO: 1657264 - DNA, 15 bp, Homo sapiens
aacatgccaagggct

SEQ ID NO: 1657265 - DNA, 15 bp, Homo sapiens
acatgccaagggctc

SEQ ID NO: 1657266 - DNA, 15 bp, Homo sapiens
catgccaagggctct

SEQ ID NO: 1657267 - DNA, 15 bp, Homo sapiens
atgccaagggctcta

SEQ ID NO: 1657268 - DNA, 15 bp, Homo sapiens
tgccaagggctctaa

SEQ ID NO: 1657269 - DNA, 15 bp, Homo sapiens
gccaagggctctaat

SEQ ID NO: 1657270 - DNA, 15 bp, Homo sapiens
ccaagggctctaatg

SEQ ID NO: 1657271 - DNA, 15 bp, Homo sapiens
caagggctctaatgg

SEQ ID NO: 1657272 - DNA, 15 bp, Homo sapiens
aagggctctaatgga

SEQ ID NO: 1657273 - DNA, 15 bp, Homo sapiens
agggctctaatggat

SEQ ID NO: 1657274 - DNA, 15 bp, Homo sapiens
gggctctaatggata

SEQ ID NO: 1657275 - DNA, 15 bp, Homo sapiens
ggctctaatggataa

SEQ ID NO: 1657276 - DNA, 15 bp, Homo sapiens
gctctaatggataaa

SEQ ID NO: 1657277 - DNA, 15 bp, Homo sapiens
ctctaatggataaag

SEQ ID NO: 1657278 - DNA, 15 bp, Homo sapiens
tctaatggataaagg

SEQ ID NO: 1657279 - DNA, 15 bp, Homo sapiens
ctaatggataaagga

SEQ ID NO: 1657280 - DNA, 15 bp, Homo sapiens
taatggataaaggag

SEQ ID NO: 1657281 - DNA, 15 bp, Homo sapiens
aatggataaaggaga

SEQ ID NO: 1657282 - DNA, 15 bp, Homo sapiens
atggataaaggagat

SEQ ID NO: 1657283 - DNA, 15 bp, Homo sapiens
tggataaaggagata

SEQ ID NO: 1657284 - DNA, 15 bp, Homo sapiens
ggataaaggagatag

SEQ ID NO: 1657285 - DNA, 15 bp, Homo sapiens
gataaaggagatagc

SEQ ID NO: 1657286 - DNA, 15 bp, Homo sapiens
ataaaggagatagca

SEQ ID NO: 1657287 - DNA, 15 bp, Homo sapiens
taaaggagatagcat

SEQ ID NO: 1657288 - DNA, 15 bp, Homo sapiens
aaaggagatagcatc

SEQ ID NO: 1657289 - DNA, 15 bp, Homo sapiens
aaggagatagcatcc

SEQ ID NO: 1657290 - DNA, 15 bp, Homo sapiens
aggagatagcatcca

SEQ ID NO: 1657291 - DNA, 15 bp, Homo sapiens
ggagatagcatccaa

SEQ ID NO: 1657292 - DNA, 15 bp, Homo sapiens
gagatagcatccaag

SEQ ID NO: 1657293 - DNA, 15 bp, Homo sapiens
agatagcatccaaga

SEQ ID NO: 1657294 - DNA, 15 bp, Homo sapiens
gatagcatccaagaa

SEQ ID NO: 1657295 - DNA, 15 bp, Homo sapiens
atagcatccaagaac

SEQ ID NO: 1657296 - DNA, 15 bp, Homo sapiens
tagcatccaagaaca

SEQ ID NO: 1657297 - DNA, 15 bp, Homo sapiens
agcatccaagaacac

SEQ ID NO: 1657298 - DNA, 15 bp, Homo sapiens
gcatccaagaacaca

SEQ ID NO: 1657299 - DNA, 15 bp, Homo sapiens
catccaagaacacat

SEQ ID NO: 1657300 - DNA, 15 bp, Homo sapiens
atccaagaacacatg

SEQ ID NO: 1657301 - DNA, 15 bp, Homo sapiens
tccaagaacacatgg

SEQ ID NO: 1657302 - DNA, 15 bp, Homo sapiens
ccaagaacacatgga

SEQ ID NO: 1657303 - DNA, 15 bp, Homo sapiens
caagaacacatggac

SEQ ID NO: 1657304 - DNA, 15 bp, Homo sapiens
aagaacacatggaca

SEQ ID NO: 1657305 - DNA, 15 bp, Homo sapiens
agaacacatggacaa

SEQ ID NO: 1657306 - DNA, 15 bp, Homo sapiens
gaacacatggacaat

SEQ ID NO: 1657307 - DNA, 15 bp, Homo sapiens
aacacatggacaatg

SEQ ID NO: 1657308 - DNA, 15 bp, Homo sapiens
acacatggacaatgt

SEQ ID NO: 1657309 - DNA, 15 bp, Homo sapiens
cacatggacaatgta

SEQ ID NO: 1657310 - DNA, 15 bp, Homo sapiens
acatggacaatgtaa

SEQ ID NO: 1657311 - DNA, 15 bp, Homo sapiens
catggacaatgtaag

SEQ ID NO: 1657312 - DNA, 15 bp, Homo sapiens
atggacaatgtaagc

SEQ ID NO: 1657313 - DNA, 15 bp, Homo sapiens
tggacaatgtaagca

SEQ ID NO: 1657314 - DNA, 15 bp, Homo sapiens
ggacaatgtaagcaa

SEQ ID NO: 1657315 - DNA, 15 bp, Homo sapiens
gacaatgtaagcaaa

SEQ ID NO: 1657316 - DNA, 15 bp, Homo sapiens
acaatgtaagcaaac

SEQ ID NO: 1657317 - DNA, 15 bp, Homo sapiens
caatgtaagcaaaca

SEQ ID NO: 1657318 - DNA, 15 bp, Homo sapiens
aatgtaagcaaacag

SEQ ID NO: 1657319 - DNA, 15 bp, Homo sapiens
atgtaagcaaacaga

SEQ ID NO: 1657320 - DNA, 15 bp, Homo sapiens
tgtaagcaaacagat

SEQ ID NO: 1657321 - DNA, 15 bp, Homo sapiens
gtaagcaaacagatg

SEQ ID NO: 1657322 - DNA, 15 bp, Homo sapiens
taagcaaacagatgg

SEQ ID NO: 1657323 - DNA, 15 bp, Homo sapiens
aagcaaacagatgga

SEQ ID NO: 1657324 - DNA, 15 bp, Homo sapiens
agcaaacagatggaa

SEQ ID NO: 1657325 - DNA, 15 bp, Homo sapiens
gcaaacagatggaaa

SEQ ID NO: 1657326 - DNA, 15 bp, Homo sapiens
caaacagatggaaat

SEQ ID NO: 1657327 - DNA, 15 bp, Homo sapiens
aaacagatggaaatc

SEQ ID NO: 1657328 - DNA, 15 bp, Homo sapiens
aacagatggaaatcc

SEQ ID NO: 1657329 - DNA, 15 bp, Homo sapiens
acagatggaaatcct

SEQ ID NO: 1657330 - DNA, 15 bp, Homo sapiens
cagatggaaatccta

SEQ ID NO: 1657331 - DNA, 15 bp, Homo sapiens
agatggaaatcctaa

SEQ ID NO: 1657332 - DNA, 15 bp, Homo sapiens
gatggaaatcctaag

SEQ ID NO: 1657333 - DNA, 15 bp, Homo sapiens
atggaaatcctaaga

SEQ ID NO: 1657334 - DNA, 15 bp, Homo sapiens
tggaaatcctaagaa

SEQ ID NO: 1657335 - DNA, 15 bp, Homo sapiens
ggaaatcctaagaaa

SEQ ID NO: 1657336 - DNA, 15 bp, Homo sapiens
gaaatcctaagaaag

SEQ ID NO: 1657337 - DNA, 15 bp, Homo sapiens
aaatcctaagaaaga

SEQ ID NO: 1657338 - DNA, 15 bp, Homo sapiens
aatcctaagaaagaa

SEQ ID NO: 1657339 - DNA, 15 bp, Homo sapiens
atcctaagaaagaat

SEQ ID NO: 1657340 - DNA, 15 bp, Homo sapiens
tcctaagaaagaatg

SEQ ID NO: 1657341 - DNA, 15 bp, Homo sapiens
cctaagaaagaatga

SEQ ID NO: 1657342 - DNA, 15 bp, Homo sapiens
ctaagaaagaatgaa

SEQ ID NO: 1657343 - DNA, 15 bp, Homo sapiens
taagaaagaatgaaa

SEQ ID NO: 1657344 - DNA, 15 bp, Homo sapiens
aagaaagaatgaaat

SEQ ID NO: 1657345 - DNA, 15 bp, Homo sapiens
agaaagaatgaaata

SEQ ID NO: 1657346 - DNA, 15 bp, Homo sapiens
gaaagaatgaaatag

SEQ ID NO: 1657347 - DNA, 15 bp, Homo sapiens
aaagaatgaaataga

SEQ ID NO: 1657348 - DNA, 15 bp, Homo sapiens
aagaatgaaatagaa

SEQ ID NO: 1657349 - DNA, 15 bp, Homo sapiens
agaatgaaatagaaa

SEQ ID NO: 1657350 - DNA, 15 bp, Homo sapiens
gaatgaaatagaaat

SEQ ID NO: 1657351 - DNA, 15 bp, Homo sapiens
aatgaaatagaaatg

SEQ ID NO: 1657352 - DNA, 15 bp, Homo sapiens
atgaaatagaaatgc

SEQ ID NO: 1657353 - DNA, 15 bp, Homo sapiens
tgaaatagaaatgct

SEQ ID NO: 1657354 - DNA, 15 bp, Homo sapiens
gaaatagaaatgcta

SEQ ID NO: 1657355 - DNA, 15 bp, Homo sapiens
aaatagaaatgctag

SEQ ID NO: 1657356 - DNA, 15 bp, Homo sapiens
aatagaaatgctaga

SEQ ID NO: 1657357 - DNA, 15 bp, Homo sapiens
atagaaatgctagat

SEQ ID NO: 1657358 - DNA, 15 bp, Homo sapiens
tagaaatgctagata

SEQ ID NO: 1657359 - DNA, 15 bp, Homo sapiens
agaaatgctagatat

SEQ ID NO: 1657360 - DNA, 15 bp, Homo sapiens
gaaatgctagatatc

SEQ ID NO: 1657361 - DNA, 15 bp, Homo sapiens
aaatgctagatatca

SEQ ID NO: 1657362 - DNA, 15 bp, Homo sapiens
aatgctagatatcaa

SEQ ID NO: 1657363 - DNA, 15 bp, Homo sapiens
atgctagatatcaaa

SEQ ID NO: 1657364 - DNA, 15 bp, Homo sapiens
tgctagatatcaaaa

SEQ ID NO: 1657365 - DNA, 15 bp, Homo sapiens
gctagatatcaaaaa

SEQ ID NO: 1657366 - DNA, 15 bp, Homo sapiens
ctagatatcaaaaac

SEQ ID NO: 1657367 - DNA, 15 bp, Homo sapiens
tagatatcaaaaaca

SEQ ID NO: 1657368 - DNA, 15 bp, Homo sapiens
agatatcaaaaacac

SEQ ID NO: 1657369 - DNA, 15 bp, Homo sapiens
gatatcaaaaacacc

SEQ ID NO: 1657370 - DNA, 15 bp, Homo sapiens
atatcaaaaacacca

SEQ ID NO: 1657371 - DNA, 15 bp, Homo sapiens
tatcaaaaacaccat

SEQ ID NO: 1657372 - DNA, 15 bp, Homo sapiens
atcaaaaacaccata

SEQ ID NO: 1657373 - DNA, 15 bp, Homo sapiens
tcaaaaacaccataa

SEQ ID NO: 1657374 - DNA, 15 bp, Homo sapiens
caaaaacaccataac

SEQ ID NO: 1657375 - DNA, 15 bp, Homo sapiens
aaaaacaccataaca

SEQ ID NO: 1657376 - DNA, 15 bp, Homo sapiens
aaaacaccataacag

SEQ ID NO: 1657377 - DNA, 15 bp, Homo sapiens
aaacaccataacaga

SEQ ID NO: 1657378 - DNA, 15 bp, Homo sapiens
aacaccataacagaa

SEQ ID NO: 1657379 - DNA, 15 bp, Homo sapiens
acaccataacagaaa

SEQ ID NO: 1657380 - DNA, 15 bp, Homo sapiens
caccataacagaaat

SEQ ID NO: 1657381 - DNA, 15 bp, Homo sapiens
accataacagaaata

SEQ ID NO: 1657382 - DNA, 15 bp, Homo sapiens
ccataacagaaataa

SEQ ID NO: 1657383 - DNA, 15 bp, Homo sapiens
cataacagaaataaa

SEQ ID NO: 1657384 - DNA, 15 bp, Homo sapiens
ataacagaaataaag

SEQ ID NO: 1657385 - DNA, 15 bp, Homo sapiens
taacagaaataaaga

SEQ ID NO: 1657386 - DNA, 15 bp, Homo sapiens
aacagaaataaagaa

SEQ ID NO: 1657387 - DNA, 15 bp, Homo sapiens
acagaaataaagaat

SEQ ID NO: 1657388 - DNA, 15 bp, Homo sapiens
cagaaataaagaatg

SEQ ID NO: 1657389 - DNA, 15 bp, Homo sapiens
agaaataaagaatga

SEQ ID NO: 1657390 - DNA, 15 bp, Homo sapiens
gaaataaagaatgac

SEQ ID NO: 1657391 - DNA, 15 bp, Homo sapiens
aaataaagaatgact

SEQ ID NO: 1657392 - DNA, 15 bp, Homo sapiens
aataaagaatgactt

SEQ ID NO: 1657393 - DNA, 15 bp, Homo sapiens
ataaagaatgacttt

SEQ ID NO: 1657394 - DNA, 15 bp, Homo sapiens
taaagaatgactttg

SEQ ID NO: 1657395 - DNA, 15 bp, Homo sapiens
aaagaatgactttga

SEQ ID NO: 1657396 - DNA, 15 bp, Homo sapiens
aagaatgactttgat

SEQ ID NO: 1657397 - DNA, 15 bp, Homo sapiens
agaatgactttgatg

SEQ ID NO: 1657398 - DNA, 15 bp, Homo sapiens
gaatgactttgatgg

SEQ ID NO: 1657399 - DNA, 15 bp, Homo sapiens
aatgactttgatggg

SEQ ID NO: 1657400 - DNA, 15 bp, Homo sapiens
atgactttgatgggc

SEQ ID NO: 1657401 - DNA, 15 bp, Homo sapiens
tgactttgatgggct

SEQ ID NO: 1657402 - DNA, 15 bp, Homo sapiens
gactttgatgggctt

SEQ ID NO: 1657403 - DNA, 15 bp, Homo sapiens
actttgatgggcttc

SEQ ID NO: 1657404 - DNA, 15 bp, Homo sapiens
ctttgatgggcttct

SEQ ID NO: 1657405 - DNA, 15 bp, Homo sapiens
tttgatgggcttctt

SEQ ID NO: 1657406 - DNA, 15 bp, Homo sapiens
ttgatgggcttctta

SEQ ID NO: 1657407 - DNA, 15 bp, Homo sapiens
tgatgggcttcttag

SEQ ID NO: 1657408 - DNA, 15 bp, Homo sapiens
gatgggcttcttagt

SEQ ID NO: 1657409 - DNA, 15 bp, Homo sapiens
atgggcttcttagta

SEQ ID NO: 1657410 - DNA, 15 bp, Homo sapiens
tgggcttcttagtag

SEQ ID NO: 1657411 - DNA, 15 bp, Homo sapiens
gggcttcttagtaga

SEQ ID NO: 1657412 - DNA, 15 bp, Homo sapiens
ggcttcttagtagac

SEQ ID NO: 1657413 - DNA, 15 bp, Homo sapiens
gcttcttagtagact

SEQ ID NO: 1657414 - DNA, 15 bp, Homo sapiens
cttcttagtagactg

SEQ ID NO: 1657415 - DNA, 15 bp, Homo sapiens
ttcttagtagactgg

SEQ ID NO: 1657416 - DNA, 15 bp, Homo sapiens
tcttagtagactgga

SEQ ID NO: 1657417 - DNA, 15 bp, Homo sapiens
cttagtagactggac

SEQ ID NO: 1657418 - DNA, 15 bp, Homo sapiens
ttagtagactggaca

SEQ ID NO: 1657419 - DNA, 15 bp, Homo sapiens
tagtagactggacac

SEQ ID NO: 1657420 - DNA, 15 bp, Homo sapiens
agtagactggacaca

SEQ ID NO: 1657421 - DNA, 15 bp, Homo sapiens
gtagactggacacag

SEQ ID NO: 1657422 - DNA, 15 bp, Homo sapiens
tagactggacacagt

SEQ ID NO: 1657423 - DNA, 15 bp, Homo sapiens
agactggacacagtt

SEQ ID NO: 1657424 - DNA, 15 bp, Homo sapiens
gactggacacagttg

SEQ ID NO: 1657425 - DNA, 15 bp, Homo sapiens
actggacacagttga

SEQ ID NO: 1657426 - DNA, 15 bp, Homo sapiens
ctggacacagttgag

SEQ ID NO: 1657427 - DNA, 15 bp, Homo sapiens
tggacacagttgagg

SEQ ID NO: 1657428 - DNA, 15 bp, Homo sapiens
acacagttgaggaaa

SEQ ID NO: 1657429 - DNA, 15 bp, Homo sapiens
cacagttgaggaaag

SEQ ID NO: 1657430 - DNA, 15 bp, Homo sapiens
acagttgaggaaaga

SEQ ID NO: 1657431 - DNA, 15 bp, Homo sapiens
cagttgaggaaagaa

SEQ ID NO: 1657432 - DNA, 15 bp, Homo sapiens
agttgaggaaagaat

SEQ ID NO: 1657433 - DNA, 15 bp, Homo sapiens
gttgaggaaagaatc

SEQ ID NO: 1657434 - DNA, 15 bp, Homo sapiens
ttgaggaaagaatct

SEQ ID NO: 1657435 - DNA, 15 bp, Homo sapiens
tgaggaaagaatctc

SEQ ID NO: 1657436 - DNA, 15 bp, Homo sapiens
gaggaaagaatctct

SEQ ID NO: 1657437 - DNA, 15 bp, Homo sapiens
aggaaagaatctctg

SEQ ID NO: 1657438 - DNA, 15 bp, Homo sapiens
ggaaagaatctctga

SEQ ID NO: 1657439 - DNA, 15 bp, Homo sapiens
gaaagaatctctgag

SEQ ID NO: 1657440 - DNA, 15 bp, Homo sapiens
aaagaatctctgagc

SEQ ID NO: 1657441 - DNA, 15 bp, Homo sapiens
aagaatctctgagca

SEQ ID NO: 1657442 - DNA, 15 bp, Homo sapiens
agaatctctgagcat

SEQ ID NO: 1657443 - DNA, 15 bp, Homo sapiens
gaatctctgagcatg

SEQ ID NO: 1657444 - DNA, 15 bp, Homo sapiens
aatctctgagcatga

SEQ ID NO: 1657445 - DNA, 15 bp, Homo sapiens
atctctgagcatgag

SEQ ID NO: 1657446 - DNA, 15 bp, Homo sapiens
tctctgagcatgagg

SEQ ID NO: 1657447 - DNA, 15 bp, Homo sapiens
ctctgagcatgagga

SEQ ID NO: 1657448 - DNA, 15 bp, Homo sapiens
tctgagcatgaggat

SEQ ID NO: 1657449 - DNA, 15 bp, Homo sapiens
ctgagcatgaggata

SEQ ID NO: 1657450 - DNA, 15 bp, Homo sapiens
tgagcatgaggatac

SEQ ID NO: 1657451 - DNA, 15 bp, Homo sapiens
gagcatgaggataca

SEQ ID NO: 1657452 - DNA, 15 bp, Homo sapiens
agcatgaggatacag

SEQ ID NO: 1657453 - DNA, 15 bp, Homo sapiens
gcatgaggatacagc

SEQ ID NO: 1657454 - DNA, 15 bp, Homo sapiens
catgaggatacagca

SEQ ID NO: 1657455 - DNA, 15 bp, Homo sapiens
atgaggatacagcaa

SEQ ID NO: 1657456 - DNA, 15 bp, Homo sapiens
tgaggatacagcaat

SEQ ID NO: 1657457 - DNA, 15 bp, Homo sapiens
gaggatacagcaata

SEQ ID NO: 1657458 - DNA, 15 bp, Homo sapiens
aggatacagcaatag

SEQ ID NO: 1657459 - DNA, 15 bp, Homo sapiens
ggatacagcaataga

SEQ ID NO: 1657460 - DNA, 15 bp, Homo sapiens
gatacagcaatagaa

SEQ ID NO: 1657461 - DNA, 15 bp, Homo sapiens
atacagcaatagaaa

SEQ ID NO: 1657462 - DNA, 15 bp, Homo sapiens
tacagcaatagaaac

SEQ ID NO: 1657463 - DNA, 15 bp, Homo sapiens
acagcaatagaaact

SEQ ID NO: 1657464 - DNA, 15 bp, Homo sapiens
cagcaatagaaactt

SEQ ID NO: 1657465 - DNA, 15 bp, Homo sapiens
agcaatagaaactta

SEQ ID NO: 1657466 - DNA, 15 bp, Homo sapiens
gcaatagaaacttaa

SEQ ID NO: 1657467 - DNA, 15 bp, Homo sapiens
caatagaaacttaaa

SEQ ID NO: 1657468 - DNA, 15 bp, Homo sapiens
aatagaaacttaaaa

SEQ ID NO: 1657469 - DNA, 15 bp, Homo sapiens
atagaaacttaaaaa

SEQ ID NO: 1657470 - DNA, 15 bp, Homo sapiens
tagaaacttaaaaac

SEQ ID NO: 1657471 - DNA, 15 bp, Homo sapiens
agaaacttaaaaact

SEQ ID NO: 1657472 - DNA, 15 bp, Homo sapiens
gaaacttaaaaacta

SEQ ID NO: 1657473 - DNA, 15 bp, Homo sapiens
aaacttaaaaactaa

SEQ ID NO: 1657474 - DNA, 15 bp, Homo sapiens
aacttaaaaactaaa

SEQ ID NO: 1657475 - DNA, 15 bp, Homo sapiens
acttaaaaactaaaa

SEQ ID NO: 1657476 - DNA, 15 bp, Homo sapiens
cttaaaaactaaaaa

SEQ ID NO: 1657477 - DNA, 15 bp, Homo sapiens
ttaaaaactaaaaag

SEQ ID NO: 1657478 - DNA, 15 bp, Homo sapiens
taaaaactaaaaagc

SEQ ID NO: 1657479 - DNA, 15 bp, Homo sapiens
aaaaactaaaaagca

SEQ ID NO: 1657480 - DNA, 15 bp, Homo sapiens
aaaactaaaaagcaa

SEQ ID NO: 1657481 - DNA, 15 bp, Homo sapiens
aaactaaaaagcaaa

SEQ ID NO: 1657482 - DNA, 15 bp, Homo sapiens
aactaaaaagcaaag

SEQ ID NO: 1657483 - DNA, 15 bp, Homo sapiens
actaaaaagcaaaga

SEQ ID NO: 1657484 - DNA, 15 bp, Homo sapiens
ctaaaaagcaaagag

SEQ ID NO: 1657485 - DNA, 15 bp, Homo sapiens
taaaaagcaaagaga

SEQ ID NO: 1657486 - DNA, 15 bp, Homo sapiens
aaaaagcaaagagaa

SEQ ID NO: 1657487 - DNA, 15 bp, Homo sapiens
aaaagcaaagagaac

SEQ ID NO: 1657488 - DNA, 15 bp, Homo sapiens
aaagcaaagagaaca

SEQ ID NO: 1657489 - DNA, 15 bp, Homo sapiens
aagcaaagagaacaa

SEQ ID NO: 1657490 - DNA, 15 bp, Homo sapiens
agcaaagagaacaaa

SEQ ID NO: 1657491 - DNA, 15 bp, Homo sapiens
gcaaagagaacaaat

SEQ ID NO: 1657492 - DNA, 15 bp, Homo sapiens
caaagagaacaaata

SEQ ID NO: 1657493 - DNA, 15 bp, Homo sapiens
aaagagaacaaatac

SEQ ID NO: 1657494 - DNA, 15 bp, Homo sapiens
aagagaacaaatact

SEQ ID NO: 1657495 - DNA, 15 bp, Homo sapiens
agagaacaaatactg

SEQ ID NO: 1657496 - DNA, 15 bp, Homo sapiens
gagaacaaatactgg

SEQ ID NO: 1657497 - DNA, 15 bp, Homo sapiens
agaacaaatactggg

SEQ ID NO: 1657498 - DNA, 15 bp, Homo sapiens
gaacaaatactgggg

SEQ ID NO: 1657499 - DNA, 15 bp, Homo sapiens
aacaaatactgggga

SEQ ID NO: 1657500 - DNA, 15 bp, Homo sapiens
acaaatactggggac

SEQ ID NO: 1657501 - DNA, 15 bp, Homo sapiens
caaatactggggaca

SEQ ID NO: 1657502 - DNA, 15 bp, Homo sapiens
aaatactggggacaa

SEQ ID NO: 1657503 - DNA, 15 bp, Homo sapiens
aatactggggacaaa

SEQ ID NO: 1657504 - DNA, 15 bp, Homo sapiens
atactggggacaaaa

SEQ ID NO: 1657505 - DNA, 15 bp, Homo sapiens
tactggggacaaaaa

SEQ ID NO: 1657506 - DNA, 15 bp, Homo sapiens
actggggacaaaaac

SEQ ID NO: 1657507 - DNA, 15 bp, Homo sapiens
ctggggacaaaaaca

SEQ ID NO: 1657508 - DNA, 15 bp, Homo sapiens
tggggacaaaaacag

SEQ ID NO: 1657509 - DNA, 15 bp, Homo sapiens
ggggacaaaaacagt

SEQ ID NO: 1657510 - DNA, 15 bp, Homo sapiens
gggacaaaaacagta

SEQ ID NO: 1657511 - DNA, 15 bp, Homo sapiens
ggacaaaaacagtac

SEQ ID NO: 1657512 - DNA, 15 bp, Homo sapiens
gacaaaaacagtaca

SEQ ID NO: 1657513 - DNA, 15 bp, Homo sapiens
acaaaaacagtacaa

SEQ ID NO: 1657514 - DNA, 15 bp, Homo sapiens
caaaaacagtacaaa

SEQ ID NO: 1657515 - DNA, 15 bp, Homo sapiens
aaaaacagtacaaaa

SEQ ID NO: 1657516 - DNA, 15 bp, Homo sapiens
aaaacagtacaaaat

SEQ ID NO: 1657517 - DNA, 15 bp, Homo sapiens
aaacagtacaaaata

SEQ ID NO: 1657518 - DNA, 15 bp, Homo sapiens
aacagtacaaaatat

SEQ ID NO: 1657519 - DNA, 15 bp, Homo sapiens
acagtacaaaatatc

SEQ ID NO: 1657520 - DNA, 15 bp, Homo sapiens
cagtacaaaatatcc

SEQ ID NO: 1657521 - DNA, 15 bp, Homo sapiens
agtacaaaatatcca

SEQ ID NO: 1657522 - DNA, 15 bp, Homo sapiens
gtacaaaatatccag

SEQ ID NO: 1657523 - DNA, 15 bp, Homo sapiens
tacaaaatatccagg

SEQ ID NO: 1657524 - DNA, 15 bp, Homo sapiens
acaaaatatccaggg

SEQ ID NO: 1657525 - DNA, 15 bp, Homo sapiens
caaaatatccaggga

SEQ ID NO: 1657526 - DNA, 15 bp, Homo sapiens
aaaatatccagggac

SEQ ID NO: 1657527 - DNA, 15 bp, Homo sapiens
aaatatccagggact

SEQ ID NO: 1657528 - DNA, 15 bp, Homo sapiens
aatatccagggactg

SEQ ID NO: 1657529 - DNA, 15 bp, Homo sapiens
atatccagggactgt

SEQ ID NO: 1657530 - DNA, 15 bp, Homo sapiens
tatccagggactgta

SEQ ID NO: 1657531 - DNA, 15 bp, Homo sapiens
atccagggactgtag

SEQ ID NO: 1657532 - DNA, 15 bp, Homo sapiens
tccagggactgtagg

SEQ ID NO: 1657533 - DNA, 15 bp, Homo sapiens
ccagggactgtagga

SEQ ID NO: 1657534 - DNA, 15 bp, Homo sapiens
cagggactgtaggac

SEQ ID NO: 1657535 - DNA, 15 bp, Homo sapiens
agggactgtaggaca

SEQ ID NO: 1657536 - DNA, 15 bp, Homo sapiens
gggactgtaggacaa

SEQ ID NO: 1657537 - DNA, 15 bp, Homo sapiens
ggactgtaggacaac

SEQ ID NO: 1657538 - DNA, 15 bp, Homo sapiens
gactgtaggacaact

SEQ ID NO: 1657539 - DNA, 15 bp, Homo sapiens
actgtaggacaacta

SEQ ID NO: 1657540 - DNA, 15 bp, Homo sapiens
ctgtaggacaactac

SEQ ID NO: 1657541 - DNA, 15 bp, Homo sapiens
tgtaggacaactaca

SEQ ID NO: 1657542 - DNA, 15 bp, Homo sapiens
gtaggacaactacaa

SEQ ID NO: 1657543 - DNA, 15 bp, Homo sapiens
taggacaactacaaa

SEQ ID NO: 1657544 - DNA, 15 bp, Homo sapiens
aggacaactacaaat

SEQ ID NO: 1657545 - DNA, 15 bp, Homo sapiens
ggacaactacaaatg

SEQ ID NO: 1657546 - DNA, 15 bp, Homo sapiens
gacaactacaaatgg

SEQ ID NO: 1657547 - DNA, 15 bp, Homo sapiens
acaactacaaatggt

SEQ ID NO: 1657548 - DNA, 15 bp, Homo sapiens
caactacaaatggtg

SEQ ID NO: 1657549 - DNA, 15 bp, Homo sapiens
aactacaaatggtgt

SEQ ID NO: 1657550 - DNA, 15 bp, Homo sapiens
actacaaatggtgta

SEQ ID NO: 1657551 - DNA, 15 bp, Homo sapiens
ctacaaatggtgtaa

SEQ ID NO: 1657552 - DNA, 15 bp, Homo sapiens
tacaaatggtgtaac

SEQ ID NO: 1657553 - DNA, 15 bp, Homo sapiens
acaaatggtgtaaca

SEQ ID NO: 1657554 - DNA, 15 bp, Homo sapiens
caaatggtgtaacat

SEQ ID NO: 1657555 - DNA, 15 bp, Homo sapiens
aaatggtgtaacata

SEQ ID NO: 1657556 - DNA, 15 bp, Homo sapiens
aatggtgtaacatat

SEQ ID NO: 1657557 - DNA, 15 bp, Homo sapiens
atggtgtaacatatg

SEQ ID NO: 1657558 - DNA, 15 bp, Homo sapiens
tggtgtaacatatgt

SEQ ID NO: 1657559 - DNA, 15 bp, Homo sapiens
ggtgtaacatatgta

SEQ ID NO: 1657560 - DNA, 15 bp, Homo sapiens
gtgtaacatatgtac

SEQ ID NO: 1657561 - DNA, 15 bp, Homo sapiens
tgtaacatatgtaca

SEQ ID NO: 1657562 - DNA, 15 bp, Homo sapiens
gtaacatatgtacaa

SEQ ID NO: 1657563 - DNA, 15 bp, Homo sapiens
taacatatgtacaat

SEQ ID NO: 1657564 - DNA, 15 bp, Homo sapiens
aacatatgtacaata

SEQ ID NO: 1657565 - DNA, 15 bp, Homo sapiens
acatatgtacaatag

SEQ ID NO: 1657566 - DNA, 15 bp, Homo sapiens
catatgtacaatagg

SEQ ID NO: 1657567 - DNA, 15 bp, Homo sapiens
atatgtacaatagga

SEQ ID NO: 1657568 - DNA, 15 bp, Homo sapiens
tatgtacaataggaa

SEQ ID NO: 1657569 - DNA, 15 bp, Homo sapiens
atgtacaataggaac

SEQ ID NO: 1657570 - DNA, 15 bp, Homo sapiens
tgtacaataggaaca

SEQ ID NO: 1657571 - DNA, 15 bp, Homo sapiens
gtacaataggaacac

SEQ ID NO: 1657572 - DNA, 15 bp, Homo sapiens
tacaataggaacacc

SEQ ID NO: 1657573 - DNA, 15 bp, Homo sapiens
acaataggaacacca

SEQ ID NO: 1657574 - DNA, 15 bp, Homo sapiens
caataggaacaccag

SEQ ID NO: 1657575 - DNA, 15 bp, Homo sapiens
aataggaacaccaga

SEQ ID NO: 1657576 - DNA, 15 bp, Homo sapiens
ataggaacaccagaa

SEQ ID NO: 1657577 - DNA, 15 bp, Homo sapiens
taggaacaccagaag

SEQ ID NO: 1657578 - DNA, 15 bp, Homo sapiens
aggaacaccagaagg

SEQ ID NO: 1657579 - DNA, 15 bp, Homo sapiens
ggaacaccagaagga

SEQ ID NO: 1657580 - DNA, 15 bp, Homo sapiens
gaacaccagaaggag

SEQ ID NO: 1657581 - DNA, 15 bp, Homo sapiens
aacaccagaaggaga

SEQ ID NO: 1657582 - DNA, 15 bp, Homo sapiens
acaccagaaggagaa

SEQ ID NO: 1657583 - DNA, 15 bp, Homo sapiens
caccagaaggagaag

SEQ ID NO: 1657584 - DNA, 15 bp, Homo sapiens
accagaaggagaaga

SEQ ID NO: 1657585 - DNA, 15 bp, Homo sapiens
ccagaaggagaagag

SEQ ID NO: 1657586 - DNA, 15 bp, Homo sapiens
cagaaggagaagaga

SEQ ID NO: 1657587 - DNA, 15 bp, Homo sapiens
agaaggagaagagaa

SEQ ID NO: 1657588 - DNA, 15 bp, Homo sapiens
gaaggagaagagaaa

SEQ ID NO: 1657589 - DNA, 15 bp, Homo sapiens
aaggagaagagaaaa

SEQ ID NO: 1657590 - DNA, 15 bp, Homo sapiens
aggagaagagaaaaa

SEQ ID NO: 1657591 - DNA, 15 bp, Homo sapiens
ggagaagagaaaaaa

SEQ ID NO: 1657592 - DNA, 15 bp, Homo sapiens
gagaagagaaaaaag

SEQ ID NO: 1657593 - DNA, 15 bp, Homo sapiens
agaagagaaaaaagc

SEQ ID NO: 1657594 - DNA, 15 bp, Homo sapiens
gaagagaaaaaagca

SEQ ID NO: 1657595 - DNA, 15 bp, Homo sapiens
aagagaaaaaagcaa

SEQ ID NO: 1657596 - DNA, 15 bp, Homo sapiens
agagaaaaaagcaaa

SEQ ID NO: 1657597 - DNA, 15 bp, Homo sapiens
gagaaaaaagcaaaa

SEQ ID NO: 1657598 - DNA, 15 bp, Homo sapiens
agaaaaaagcaaaag

SEQ ID NO: 1657599 - DNA, 15 bp, Homo sapiens
gaaaaaagcaaaaga

SEQ ID NO: 1657600 - DNA, 15 bp, Homo sapiens
aaaaaagcaaaagaa

SEQ ID NO: 1657601 - DNA, 15 bp, Homo sapiens
aaaaagcaaaagaaa

SEQ ID NO: 1657602 - DNA, 15 bp, Homo sapiens
aaaagcaaaagaaat

SEQ ID NO: 1657603 - DNA, 15 bp, Homo sapiens
aaagcaaaagaaata

SEQ ID NO: 1657604 - DNA, 15 bp, Homo sapiens
aagcaaaagaaatat

SEQ ID NO: 1657605 - DNA, 15 bp, Homo sapiens
agcaaaagaaatatt

SEQ ID NO: 1657606 - DNA, 15 bp, Homo sapiens
gcaaaagaaatattt

SEQ ID NO: 1657607 - DNA, 15 bp, Homo sapiens
caaaagaaatatttg

SEQ ID NO: 1657608 - DNA, 15 bp, Homo sapiens
aaatatttgaaataa

SEQ ID NO: 1657609 - DNA, 15 bp, Homo sapiens
aatatttgaaataat

SEQ ID NO: 1657610 - DNA, 15 bp, Homo sapiens
atatttgaaataata

SEQ ID NO: 1657611 - DNA, 15 bp, Homo sapiens
tatttgaaataataa

SEQ ID NO: 1657612 - DNA, 15 bp, Homo sapiens
atttgaaataataat

SEQ ID NO: 1657613 - DNA, 15 bp, Homo sapiens
tttgaaataataatg

SEQ ID NO: 1657614 - DNA, 15 bp, Homo sapiens
ttgaaataataatgg

SEQ ID NO: 1657615 - DNA, 15 bp, Homo sapiens
tgaaataataatggc

SEQ ID NO: 1657616 - DNA, 15 bp, Homo sapiens
gaaataataatggct

SEQ ID NO: 1657617 - DNA, 15 bp, Homo sapiens
aaataataatggctg

SEQ ID NO: 1657618 - DNA, 15 bp, Homo sapiens
aataataatggctgg

SEQ ID NO: 1657619 - DNA, 15 bp, Homo sapiens
ataataatggctggg

SEQ ID NO: 1657620 - DNA, 15 bp, Homo sapiens
taataatggctggga

SEQ ID NO: 1657621 - DNA, 15 bp, Homo sapiens
aataatggctgggaa

SEQ ID NO: 1657622 - DNA, 15 bp, Homo sapiens
ataatggctgggaat

SEQ ID NO: 1657623 - DNA, 15 bp, Homo sapiens
taatggctgggaatt

SEQ ID NO: 1657624 - DNA, 15 bp, Homo sapiens
aatggctgggaattt

SEQ ID NO: 1657625 - DNA, 15 bp, Homo sapiens
atggctgggaatttc

SEQ ID NO: 1657626 - DNA, 15 bp, Homo sapiens
tggctgggaatttcc

SEQ ID NO: 1657627 - DNA, 15 bp, Homo sapiens
ggctgggaatttccc

SEQ ID NO: 1657628 - DNA, 15 bp, Homo sapiens
gctgggaatttcccc

SEQ ID NO: 1657629 - DNA, 15 bp, Homo sapiens
ctgggaatttcccca

SEQ ID NO: 1657630 - DNA, 15 bp, Homo sapiens
tgggaatttccccaa

SEQ ID NO: 1657631 - DNA, 15 bp, Homo sapiens
gggaatttccccaaa

SEQ ID NO: 1657632 - DNA, 15 bp, Homo sapiens
ggaatttccccaaat

SEQ ID NO: 1657633 - DNA, 15 bp, Homo sapiens
gaatttccccaaatt

SEQ ID NO: 1657634 - DNA, 15 bp, Homo sapiens
aatttccccaaatta

SEQ ID NO: 1657635 - DNA, 15 bp, Homo sapiens
atttccccaaattaa

SEQ ID NO: 1657636 - DNA, 15 bp, Homo sapiens
tttccccaaattaat

SEQ ID NO: 1657637 - DNA, 15 bp, Homo sapiens
ttccccaaattaatg

SEQ ID NO: 1657638 - DNA, 15 bp, Homo sapiens
tccccaaattaatgt

SEQ ID NO: 1657639 - DNA, 15 bp, Homo sapiens
ccccaaattaatgtc

SEQ ID NO: 1657640 - DNA, 15 bp, Homo sapiens
cccaaattaatgtca

SEQ ID NO: 1657641 - DNA, 15 bp, Homo sapiens
ccaaattaatgtcag

SEQ ID NO: 1657642 - DNA, 15 bp, Homo sapiens
caaattaatgtcagg

SEQ ID NO: 1657643 - DNA, 15 bp, Homo sapiens
aaattaatgtcagga

SEQ ID NO: 1657644 - DNA, 15 bp, Homo sapiens
aattaatgtcaggac

SEQ ID NO: 1657645 - DNA, 15 bp, Homo sapiens
attaatgtcaggacg

SEQ ID NO: 1657646 - DNA, 15 bp, Homo sapiens
ttaatgtcaggacga

SEQ ID NO: 1657647 - DNA, 15 bp, Homo sapiens
taatgtcaggacgac

SEQ ID NO: 1657648 - DNA, 15 bp, Homo sapiens
aatgtcaggacgaca

SEQ ID NO: 1657649 - DNA, 15 bp, Homo sapiens
atgtcaggacgacaa

SEQ ID NO: 1657650 - DNA, 15 bp, Homo sapiens
tgtcaggacgacaaa

SEQ ID NO: 1657651 - DNA, 15 bp, Homo sapiens
gtcaggacgacaaag

SEQ ID NO: 1657652 - DNA, 15 bp, Homo sapiens
tcaggacgacaaagt

SEQ ID NO: 1657653 - DNA, 15 bp, Homo sapiens
caggacgacaaagtg

SEQ ID NO: 1657654 - DNA, 15 bp, Homo sapiens
aggacgacaaagtgt

SEQ ID NO: 1657655 - DNA, 15 bp, Homo sapiens
ggacgacaaagtgtt

SEQ ID NO: 1657656 - DNA, 15 bp, Homo sapiens
gacgacaaagtgttg

SEQ ID NO: 1657657 - DNA, 15 bp, Homo sapiens
acgacaaagtgttgc

SEQ ID NO: 1657658 - DNA, 15 bp, Homo sapiens
cgacaaagtgttgca

SEQ ID NO: 1657659 - DNA, 15 bp, Homo sapiens
gacaaagtgttgcaa

SEQ ID NO: 1657660 - DNA, 15 bp, Homo sapiens
acaaagtgttgcaag

SEQ ID NO: 1657661 - DNA, 15 bp, Homo sapiens
caaagtgttgcaagg

SEQ ID NO: 1657662 - DNA, 15 bp, Homo sapiens
aaagtgttgcaagga

SEQ ID NO: 1657663 - DNA, 15 bp, Homo sapiens
aagtgttgcaaggag

SEQ ID NO: 1657664 - DNA, 15 bp, Homo sapiens
agtgttgcaaggagc

SEQ ID NO: 1657665 - DNA, 15 bp, Homo sapiens
gtgttgcaaggagcc

SEQ ID NO: 1657666 - DNA, 15 bp, Homo sapiens
tgttgcaaggagcca

SEQ ID NO: 1657667 - DNA, 15 bp, Homo sapiens
gttgcaaggagccag

SEQ ID NO: 1657668 - DNA, 15 bp, Homo sapiens
ttgcaaggagccagt

SEQ ID NO: 1657669 - DNA, 15 bp, Homo sapiens
tgcaaggagccagtt

SEQ ID NO: 1657670 - DNA, 15 bp, Homo sapiens
gcaaggagccagtta

SEQ ID NO: 1657671 - DNA, 15 bp, Homo sapiens
caaggagccagttag

SEQ ID NO: 1657672 - DNA, 15 bp, Homo sapiens
aaggagccagttagt

SEQ ID NO: 1657673 - DNA, 15 bp, Homo sapiens
aggagccagttagtg

SEQ ID NO: 1657674 - DNA, 15 bp, Homo sapiens
ggagccagttagtgt

SEQ ID NO: 1657675 - DNA, 15 bp, Homo sapiens
gagccagttagtgtt

SEQ ID NO: 1657676 - DNA, 15 bp, Homo sapiens
agccagttagtgttc

SEQ ID NO: 1657677 - DNA, 15 bp, Homo sapiens
gccagttagtgttct

SEQ ID NO: 1657678 - DNA, 15 bp, Homo sapiens
ccagttagtgttcta

SEQ ID NO: 1657679 - DNA, 15 bp, Homo sapiens
cagttagtgttctac

SEQ ID NO: 1657680 - DNA, 15 bp, Homo sapiens
agttagtgttctact

SEQ ID NO: 1657681 - DNA, 15 bp, Homo sapiens
gttagtgttctactg

SEQ ID NO: 1657682 - DNA, 15 bp, Homo sapiens
ttagtgttctactgc

SEQ ID NO: 1657683 - DNA, 15 bp, Homo sapiens
tagtgttctactgca

SEQ ID NO: 1657684 - DNA, 15 bp, Homo sapiens
agtgttctactgcat

SEQ ID NO: 1657685 - DNA, 15 bp, Homo sapiens
gtgttctactgcatt

SEQ ID NO: 1657686 - DNA, 15 bp, Homo sapiens
tgttctactgcattg

SEQ ID NO: 1657687 - DNA, 15 bp, Homo sapiens
gttctactgcattga

SEQ ID NO: 1657688 - DNA, 15 bp, Homo sapiens
ttctactgcattgaa

SEQ ID NO: 1657689 - DNA, 15 bp, Homo sapiens
tctactgcattgaaa

SEQ ID NO: 1657690 - DNA, 15 bp, Homo sapiens
ctactgcattgaaag

SEQ ID NO: 1657691 - DNA, 15 bp, Homo sapiens
tactgcattgaaagg

SEQ ID NO: 1657692 - DNA, 15 bp, Homo sapiens
actgcattgaaaggt

SEQ ID NO: 1657693 - DNA, 15 bp, Homo sapiens
ctgcattgaaaggta

SEQ ID NO: 1657694 - DNA, 15 bp, Homo sapiens
tgcattgaaaggtaa

SEQ ID NO: 1657695 - DNA, 15 bp, Homo sapiens
gcattgaaaggtaat

SEQ ID NO: 1657696 - DNA, 15 bp, Homo sapiens
cattgaaaggtaata

SEQ ID NO: 1657697 - DNA, 15 bp, Homo sapiens
attgaaaggtaataa

SEQ ID NO: 1657698 - DNA, 15 bp, Homo sapiens
ttgaaaggtaataaa

SEQ ID NO: 1657699 - DNA, 15 bp, Homo sapiens
tgaaaggtaataaaa

SEQ ID NO: 1657700 - DNA, 15 bp, Homo sapiens
gaaaggtaataaaat

SEQ ID NO: 1657701 - DNA, 15 bp, Homo sapiens
aaaggtaataaaata

SEQ ID NO: 1657702 - DNA, 15 bp, Homo sapiens
aaggtaataaaatat

SEQ ID NO: 1657703 - DNA, 15 bp, Homo sapiens
aggtaataaaatatt

SEQ ID NO: 1657704 - DNA, 15 bp, Homo sapiens
ggtaataaaatattc

SEQ ID NO: 1657705 - DNA, 15 bp, Homo sapiens
gtaataaaatattcg

SEQ ID NO: 1657706 - DNA, 15 bp, Homo sapiens
taataaaatattcgt

SEQ ID NO: 1657707 - DNA, 15 bp, Homo sapiens
aataaaatattcgta

SEQ ID NO: 1657708 - DNA, 15 bp, Homo sapiens
ataaaatattcgtaa

SEQ ID NO: 1657709 - DNA, 15 bp, Homo sapiens
taaaatattcgtaag

SEQ ID NO: 1657710 - DNA, 15 bp, Homo sapiens
aaaatattcgtaagg

SEQ ID NO: 1657711 - DNA, 15 bp, Homo sapiens
aaatattcgtaaggt

SEQ ID NO: 1657712 - DNA, 15 bp, Homo sapiens
aatattcgtaaggta

SEQ ID NO: 1657713 - DNA, 15 bp, Homo sapiens
atattcgtaaggtat

SEQ ID NO: 1657714 - DNA, 15 bp, Homo sapiens
tattcgtaaggtatt

SEQ ID NO: 1657715 - DNA, 15 bp, Homo sapiens
attcgtaaggtattt

SEQ ID NO: 1657716 - DNA, 15 bp, Homo sapiens
ttcgtaaggtatttt

SEQ ID NO: 1657717 - DNA, 15 bp, Homo sapiens
tcgtaaggtatttta

SEQ ID NO: 1657718 - DNA, 15 bp, Homo sapiens
cgtaaggtattttat

SEQ ID NO: 1657719 - DNA, 15 bp, Homo sapiens
gtaaggtattttata

SEQ ID NO: 1657720 - DNA, 15 bp, Homo sapiens
taaggtattttataa

SEQ ID NO: 1657721 - DNA, 15 bp, Homo sapiens
aaggtattttataat

SEQ ID NO: 1657722 - DNA, 15 bp, Homo sapiens
aggtattttataatg

SEQ ID NO: 1657723 - DNA, 15 bp, Homo sapiens
ggtattttataatgt

SEQ ID NO: 1657724 - DNA, 15 bp, Homo sapiens
gtattttataatgta

SEQ ID NO: 1657725 - DNA, 15 bp, Homo sapiens
tattttataatgtaa

SEQ ID NO: 1657726 - DNA, 15 bp, Homo sapiens
attttataatgtaaa

SEQ ID NO: 1657727 - DNA, 15 bp, Homo sapiens
ttttataatgtaaag

SEQ ID NO: 1657728 - DNA, 15 bp, Homo sapiens
tttataatgtaaagg

SEQ ID NO: 1657729 - DNA, 15 bp, Homo sapiens
ttataatgtaaagga

SEQ ID NO: 1657730 - DNA, 15 bp, Homo sapiens
tataatgtaaaggat

SEQ ID NO: 1657731 - DNA, 15 bp, Homo sapiens
ataatgtaaaggata

SEQ ID NO: 1657732 - DNA, 15 bp, Homo sapiens
taatgtaaaggatat

SEQ ID NO: 1657733 - DNA, 15 bp, Homo sapiens
aatgtaaaggatatt

SEQ ID NO: 1657734 - DNA, 15 bp, Homo sapiens
atgtaaaggatattt

SEQ ID NO: 1657735 - DNA, 15 bp, Homo sapiens
tgtaaaggatatttg

SEQ ID NO: 1657736 - DNA, 15 bp, Homo sapiens
gtaaaggatatttgt

SEQ ID NO: 1657737 - DNA, 15 bp, Homo sapiens
taaaggatatttgtg

SEQ ID NO: 1657738 - DNA, 15 bp, Homo sapiens
aaaggatatttgtgc

SEQ ID NO: 1657739 - DNA, 15 bp, Homo sapiens
aaggatatttgtgct

SEQ ID NO: 1657740 - DNA, 15 bp, Homo sapiens
aggatatttgtgctt

SEQ ID NO: 1657741 - DNA, 15 bp, Homo sapiens
ggatatttgtgcttt

SEQ ID NO: 1657742 - DNA, 15 bp, Homo sapiens
gatatttgtgctttt

SEQ ID NO: 1657743 - DNA, 15 bp, Homo sapiens
atatttgtgcttttc

SEQ ID NO: 1657744 - DNA, 15 bp, Homo sapiens
tatttgtgcttttcg

SEQ ID NO: 1657745 - DNA, 15 bp, Homo sapiens
atttgtgcttttcgt

SEQ ID NO: 1657746 - DNA, 15 bp, Homo sapiens
tttgtgcttttcgtg

SEQ ID NO: 1657747 - DNA, 15 bp, Homo sapiens
ttgtgcttttcgtga

SEQ ID NO: 1657748 - DNA, 15 bp, Homo sapiens
tgtgcttttcgtgag

SEQ ID NO: 1657749 - DNA, 15 bp, Homo sapiens
gtgcttttcgtgagt

SEQ ID NO: 1657750 - DNA, 15 bp, Homo sapiens
tgcttttcgtgagta

SEQ ID NO: 1657751 - DNA, 15 bp, Homo sapiens
gcttttcgtgagtag

SEQ ID NO: 1657752 - DNA, 15 bp, Homo sapiens
cttttcgtgagtagc

SEQ ID NO: 1657753 - DNA, 15 bp, Homo sapiens
ttttcgtgagtagct

SEQ ID NO: 1657754 - DNA, 15 bp, Homo sapiens
tttcgtgagtagctt

SEQ ID NO: 1657755 - DNA, 15 bp, Homo sapiens
ttcgtgagtagcttt

SEQ ID NO: 1657756 - DNA, 15 bp, Homo sapiens
tcgtgagtagctttg

SEQ ID NO: 1657757 - DNA, 15 bp, Homo sapiens
cgtgagtagctttgg

SEQ ID NO: 1657758 - DNA, 15 bp, Homo sapiens
gtgagtagctttggt

SEQ ID NO: 1657759 - DNA, 15 bp, Homo sapiens
tgagtagctttggtg

SEQ ID NO: 1657760 - DNA, 15 bp, Homo sapiens
gagtagctttggtga

SEQ ID NO: 1657761 - DNA, 15 bp, Homo sapiens
agtagctttggtgaa

SEQ ID NO: 1657762 - DNA, 15 bp, Homo sapiens
gtagctttggtgaat

SEQ ID NO: 1657763 - DNA, 15 bp, Homo sapiens
tagctttggtgaatc

SEQ ID NO: 1657764 - DNA, 15 bp, Homo sapiens
agctttggtgaatca

SEQ ID NO: 1657765 - DNA, 15 bp, Homo sapiens
gctttggtgaatcag

SEQ ID NO: 1657766 - DNA, 15 bp, Homo sapiens
ctttggtgaatcaga

SEQ ID NO: 1657767 - DNA, 15 bp, Homo sapiens
tttggtgaatcagaa

SEQ ID NO: 1657768 - DNA, 15 bp, Homo sapiens
ttggtgaatcagaac

SEQ ID NO: 1657769 - DNA, 15 bp, Homo sapiens
tggtgaatcagaaca

SEQ ID NO: 1657770 - DNA, 15 bp, Homo sapiens
ggtgaatcagaacaa

SEQ ID NO: 1657771 - DNA, 15 bp, Homo sapiens
gtgaatcagaacaaa

SEQ ID NO: 1657772 - DNA, 15 bp, Homo sapiens
tgaatcagaacaaac

SEQ ID NO: 1657773 - DNA, 15 bp, Homo sapiens
gaatcagaacaaaca

SEQ ID NO: 1657774 - DNA, 15 bp, Homo sapiens
aatcagaacaaacat

SEQ ID NO: 1657775 - DNA, 15 bp, Homo sapiens
atcagaacaaacatc

SEQ ID NO: 1657776 - DNA, 15 bp, Homo sapiens
tcagaacaaacatca

SEQ ID NO: 1657777 - DNA, 15 bp, Homo sapiens
cagaacaaacatcac

SEQ ID NO: 1657778 - DNA, 15 bp, Homo sapiens
agaacaaacatcaca

SEQ ID NO: 1657779 - DNA, 15 bp, Homo sapiens
gaacaaacatcacat

SEQ ID NO: 1657780 - DNA, 15 bp, Homo sapiens
aacaaacatcacatt

SEQ ID NO: 1657781 - DNA, 15 bp, Homo sapiens
acaaacatcacattg

SEQ ID NO: 1657782 - DNA, 15 bp, Homo sapiens
caaacatcacattga

SEQ ID NO: 1657783 - DNA, 15 bp, Homo sapiens
aaacatcacattgag

SEQ ID NO: 1657784 - DNA, 15 bp, Homo sapiens
aacatcacattgagg

SEQ ID NO: 1657785 - DNA, 15 bp, Homo sapiens
acatcacattgaggc

SEQ ID NO: 1657786 - DNA, 15 bp, Homo sapiens
catcacattgaggct

SEQ ID NO: 1657787 - DNA, 15 bp, Homo sapiens
atcacattgaggctg

SEQ ID NO: 1657788 - DNA, 15 bp, Homo sapiens
tcacattgaggctga

SEQ ID NO: 1657789 - DNA, 15 bp, Homo sapiens
cacattgaggctgaa

SEQ ID NO: 1657790 - DNA, 15 bp, Homo sapiens
acattgaggctgaag

SEQ ID NO: 1657791 - DNA, 15 bp, Homo sapiens
cattgaggctgaagt

SEQ ID NO: 1657792 - DNA, 15 bp, Homo sapiens
attgaggctgaagta

SEQ ID NO: 1657793 - DNA, 15 bp, Homo sapiens
ttgaggctgaagtaa

SEQ ID NO: 1657794 - DNA, 15 bp, Homo sapiens
tgaggctgaagtaaa

SEQ ID NO: 1657795 - DNA, 15 bp, Homo sapiens
gaggctgaagtaaag

SEQ ID NO: 1657796 - DNA, 15 bp, Homo sapiens
aggctgaagtaaaga

SEQ ID NO: 1657797 - DNA, 15 bp, Homo sapiens
ggctgaagtaaagaa

SEQ ID NO: 1657798 - DNA, 15 bp, Homo sapiens
gctgaagtaaagaat

SEQ ID NO: 1657799 - DNA, 15 bp, Homo sapiens
ctgaagtaaagaatg

SEQ ID NO: 1657800 - DNA, 15 bp, Homo sapiens
tgaagtaaagaatga

SEQ ID NO: 1657801 - DNA, 15 bp, Homo sapiens
gaagtaaagaatgag

SEQ ID NO: 1657802 - DNA, 15 bp, Homo sapiens
aagtaaagaatgagt

SEQ ID NO: 1657803 - DNA, 15 bp, Homo sapiens
agtaaagaatgagtg

SEQ ID NO: 1657804 - DNA, 15 bp, Homo sapiens
gtaaagaatgagtga

SEQ ID NO: 1657805 - DNA, 15 bp, Homo sapiens
taaagaatgagtgag

SEQ ID NO: 1657806 - DNA, 15 bp, Homo sapiens
aaagaatgagtgaga

SEQ ID NO: 1657807 - DNA, 15 bp, Homo sapiens
aagaatgagtgagag

SEQ ID NO: 1657808 - DNA, 15 bp, Homo sapiens
agaatgagtgagagg

SEQ ID NO: 1657809 - DNA, 15 bp, Homo sapiens
gaatgagtgagaggt

SEQ ID NO: 1657810 - DNA, 15 bp, Homo sapiens
aatgagtgagaggtg

SEQ ID NO: 1657811 - DNA, 15 bp, Homo sapiens
atgagtgagaggtgt

SEQ ID NO: 1657812 - DNA, 15 bp, Homo sapiens
tgagtgagaggtgtg

SEQ ID NO: 1657813 - DNA, 15 bp, Homo sapiens
gagtgagaggtgtgg

SEQ ID NO: 1657814 - DNA, 15 bp, Homo sapiens
agtgagaggtgtgga

SEQ ID NO: 1657815 - DNA, 15 bp, Homo sapiens
gtgagaggtgtggaa

SEQ ID NO: 1657816 - DNA, 15 bp, Homo sapiens
tgagaggtgtggaaa

SEQ ID NO: 1657817 - DNA, 15 bp, Homo sapiens
gagaggtgtggaaat

SEQ ID NO: 1657818 - DNA, 15 bp, Homo sapiens
agaggtgtggaaatg

SEQ ID NO: 1657819 - DNA, 15 bp, Homo sapiens
gaggtgtggaaatga

SEQ ID NO: 1657820 - DNA, 15 bp, Homo sapiens
aggtgtggaaatgaa

SEQ ID NO: 1657821 - DNA, 15 bp, Homo sapiens
ggtgtggaaatgaag

SEQ ID NO: 1657822 - DNA, 15 bp, Homo sapiens
gtgtggaaatgaaga

SEQ ID NO: 1657823 - DNA, 15 bp, Homo sapiens
tgtggaaatgaagaa

SEQ ID NO: 1657824 - DNA, 15 bp, Homo sapiens
gtggaaatgaagaaa

SEQ ID NO: 1657825 - DNA, 15 bp, Homo sapiens
tggaaatgaagaaaa

SEQ ID NO: 1657826 - DNA, 15 bp, Homo sapiens
ggaaatgaagaaaaa

SEQ ID NO: 1657827 - DNA, 15 bp, Homo sapiens
gaaatgaagaaaaaa

SEQ ID NO: 1657828 - DNA, 15 bp, Homo sapiens
aaatgaagaaaaaaa

SEQ ID NO: 1657829 - DNA, 15 bp, Homo sapiens
aatgaagaaaaaaat

SEQ ID NO: 1657830 - DNA, 15 bp, Homo sapiens
atgaagaaaaaaatg

SEQ ID NO: 1657831 - DNA, 15 bp, Homo sapiens
tgaagaaaaaaatgt

SEQ ID NO: 1657832 - DNA, 15 bp, Homo sapiens
gaagaaaaaaatgtg

SEQ ID NO: 1657833 - DNA, 15 bp, Homo sapiens
aagaaaaaaatgtgt

SEQ ID NO: 1657834 - DNA, 15 bp, Homo sapiens
agaaaaaaatgtgta

SEQ ID NO: 1657835 - DNA, 15 bp, Homo sapiens
gaaaaaaatgtgtag

SEQ ID NO: 1657836 - DNA, 15 bp, Homo sapiens
aaaaaaatgtgtaga

SEQ ID NO: 1657837 - DNA, 15 bp, Homo sapiens
aaaaaatgtgtagaa

SEQ ID NO: 1657838 - DNA, 15 bp, Homo sapiens
aaaaatgtgtagaag

SEQ ID NO: 1657839 - DNA, 15 bp, Homo sapiens
aaaatgtgtagaaga

SEQ ID NO: 1657840 - DNA, 15 bp, Homo sapiens
aaatgtgtagaagac

SEQ ID NO: 1657841 - DNA, 15 bp, Homo sapiens
aatgtgtagaagact

SEQ ID NO: 1657842 - DNA, 15 bp, Homo sapiens
atgtgtagaagactt

SEQ ID NO: 1657843 - DNA, 15 bp, Homo sapiens
tgtgtagaagacttt

SEQ ID NO: 1657844 - DNA, 15 bp, Homo sapiens
gtgtagaagactttt

SEQ ID NO: 1657845 - DNA, 15 bp, Homo sapiens
tgtagaagactttta

SEQ ID NO: 1657846 - DNA, 15 bp, Homo sapiens
gtagaagacttttaa

SEQ ID NO: 1657847 - DNA, 15 bp, Homo sapiens
tagaagacttttaaa

SEQ ID NO: 1657848 - DNA, 15 bp, Homo sapiens
agaagacttttaaaa

SEQ ID NO: 1657849 - DNA, 15 bp, Homo sapiens
gaagacttttaaaaa

SEQ ID NO: 1657850 - DNA, 15 bp, Homo sapiens
aagacttttaaaaag

SEQ ID NO: 1657851 - DNA, 15 bp, Homo sapiens
agacttttaaaaaga

SEQ ID NO: 1657852 - DNA, 15 bp, Homo sapiens
gacttttaaaaagaa

SEQ ID NO: 1657853 - DNA, 15 bp, Homo sapiens
acttttaaaaagaat

SEQ ID NO: 1657854 - DNA, 15 bp, Homo sapiens
cttttaaaaagaatg

SEQ ID NO: 1657855 - DNA, 15 bp, Homo sapiens
ttttaaaaagaatgt

SEQ ID NO: 1657856 - DNA, 15 bp, Homo sapiens
tttaaaaagaatgtt

SEQ ID NO: 1657857 - DNA, 15 bp, Homo sapiens
ttaaaaagaatgttg

SEQ ID NO: 1657858 - DNA, 15 bp, Homo sapiens
taaaaagaatgttga

SEQ ID NO: 1657859 - DNA, 15 bp, Homo sapiens
aaaaagaatgttgac

SEQ ID NO: 1657860 - DNA, 15 bp, Homo sapiens
aaaagaatgttgacc

SEQ ID NO: 1657861 - DNA, 15 bp, Homo sapiens
aaagaatgttgacca

SEQ ID NO: 1657862 - DNA, 15 bp, Homo sapiens
aagaatgttgaccag

SEQ ID NO: 1657863 - DNA, 15 bp, Homo sapiens
agaatgttgaccagg

SEQ ID NO: 1657864 - DNA, 15 bp, Homo sapiens
gaatgttgaccagga

SEQ ID NO: 1657865 - DNA, 15 bp, Homo sapiens
aatgttgaccaggag

SEQ ID NO: 1657866 - DNA, 15 bp, Homo sapiens
atgttgaccaggagg

SEQ ID NO: 1657867 - DNA, 15 bp, Homo sapiens
tgttgaccaggagga

SEQ ID NO: 1657868 - DNA, 15 bp, Homo sapiens
gttgaccaggaggaa

SEQ ID NO: 1657869 - DNA, 15 bp, Homo sapiens
ttgaccaggaggaat

SEQ ID NO: 1657870 - DNA, 15 bp, Homo sapiens
tgaccaggaggaatc

SEQ ID NO: 1657871 - DNA, 15 bp, Homo sapiens
gaccaggaggaatca

SEQ ID NO: 1657872 - DNA, 15 bp, Homo sapiens
accaggaggaatcag

SEQ ID NO: 1657873 - DNA, 15 bp, Homo sapiens
ccaggaggaatcaga

SEQ ID NO: 1657874 - DNA, 15 bp, Homo sapiens
caggaggaatcagag

SEQ ID NO: 1657875 - DNA, 15 bp, Homo sapiens
aggaggaatcagaga

SEQ ID NO: 1657876 - DNA, 15 bp, Homo sapiens
ggaggaatcagagaa

SEQ ID NO: 1657877 - DNA, 15 bp, Homo sapiens
gaggaatcagagaaa

SEQ ID NO: 1657878 - DNA, 15 bp, Homo sapiens
aggaatcagagaaac

SEQ ID NO: 1657879 - DNA, 15 bp, Homo sapiens
ggaatcagagaaaca

SEQ ID NO: 1657880 - DNA, 15 bp, Homo sapiens
gaatcagagaaacag

SEQ ID NO: 1657881 - DNA, 15 bp, Homo sapiens
aatcagagaaacagg

SEQ ID NO: 1657882 - DNA, 15 bp, Homo sapiens
atcagagaaacaggg

SEQ ID NO: 1657883 - DNA, 15 bp, Homo sapiens
tcagagaaacagggc

SEQ ID NO: 1657884 - DNA, 15 bp, Homo sapiens
cagagaaacagggct

SEQ ID NO: 1657885 - DNA, 15 bp, Homo sapiens
agagaaacagggctg

SEQ ID NO: 1657886 - DNA, 15 bp, Homo sapiens
gagaaacagggctgt

SEQ ID NO: 1657887 - DNA, 15 bp, Homo sapiens
agaaacagggctgtg

SEQ ID NO: 1657888 - DNA, 15 bp, Homo sapiens
gaaacagggctgtgg

SEQ ID NO: 1657889 - DNA, 15 bp, Homo sapiens
aaacagggctgtgga

SEQ ID NO: 1657890 - DNA, 15 bp, Homo sapiens
aacagggctgtggaa

SEQ ID NO: 1657891 - DNA, 15 bp, Homo sapiens
acagggctgtggaat

SEQ ID NO: 1657892 - DNA, 15 bp, Homo sapiens
cagggctgtggaatt

SEQ ID NO: 1657893 - DNA, 15 bp, Homo sapiens
agggctgtggaatta

SEQ ID NO: 1657894 - DNA, 15 bp, Homo sapiens
gggctgtggaattaa

SEQ ID NO: 1657895 - DNA, 15 bp, Homo sapiens
ggctgtggaattaag

SEQ ID NO: 1657896 - DNA, 15 bp, Homo sapiens
gctgtggaattaaga

SEQ ID NO: 1657897 - DNA, 15 bp, Homo sapiens
ctgtggaattaagag

SEQ ID NO: 1657898 - DNA, 15 bp, Homo sapiens
tgtggaattaagaga

SEQ ID NO: 1657899 - DNA, 15 bp, Homo sapiens
gtggaattaagagat

SEQ ID NO: 1657900 - DNA, 15 bp, Homo sapiens
tggaattaagagatt

SEQ ID NO: 1657901 - DNA, 15 bp, Homo sapiens
ggaattaagagattt

SEQ ID NO: 1657902 - DNA, 15 bp, Homo sapiens
gaattaagagatttt

SEQ ID NO: 1657903 - DNA, 15 bp, Homo sapiens
aattaagagattttt

SEQ ID NO: 1657904 - DNA, 15 bp, Homo sapiens
attaagagatttttt

SEQ ID NO: 1657905 - DNA, 15 bp, Homo sapiens
gattttttttaatgg

SEQ ID NO: 1657906 - DNA, 15 bp, Homo sapiens
attttttttaatgga

SEQ ID NO: 1657907 - DNA, 15 bp, Homo sapiens
ttttttttaatggaa

SEQ ID NO: 1657908 - DNA, 15 bp, Homo sapiens
tttttttaatggaag

SEQ ID NO: 1657909 - DNA, 15 bp, Homo sapiens
ttttttaatggaagg

SEQ ID NO: 1657910 - DNA, 15 bp, Homo sapiens
tttttaatggaaggt

SEQ ID NO: 1657911 - DNA, 15 bp, Homo sapiens
ttttaatggaaggtg

SEQ ID NO: 1657912 - DNA, 15 bp, Homo sapiens
tttaatggaaggtgc

SEQ ID NO: 1657913 - DNA, 15 bp, Homo sapiens
ttaatggaaggtgct

SEQ ID NO: 1657914 - DNA, 15 bp, Homo sapiens
taatggaaggtgcta

SEQ ID NO: 1657915 - DNA, 15 bp, Homo sapiens
aatggaaggtgctag

SEQ ID NO: 1657916 - DNA, 15 bp, Homo sapiens
atggaaggtgctaga

SEQ ID NO: 1657917 - DNA, 15 bp, Homo sapiens
tggaaggtgctagaa

SEQ ID NO: 1657918 - DNA, 15 bp, Homo sapiens
ggaaggtgctagaaa

SEQ ID NO: 1657919 - DNA, 15 bp, Homo sapiens
gaaggtgctagaaaa

SEQ ID NO: 1657920 - DNA, 15 bp, Homo sapiens
aaggtgctagaaaag

SEQ ID NO: 1657921 - DNA, 15 bp, Homo sapiens
aggtgctagaaaagg

SEQ ID NO: 1657922 - DNA, 15 bp, Homo sapiens
ggtgctagaaaaggt

SEQ ID NO: 1657923 - DNA, 15 bp, Homo sapiens
gtgctagaaaaggta

SEQ ID NO: 1657924 - DNA, 15 bp, Homo sapiens
tgctagaaaaggtat

SEQ ID NO: 1657925 - DNA, 15 bp, Homo sapiens
gctagaaaaggtatt

SEQ ID NO: 1657926 - DNA, 15 bp, Homo sapiens
ctagaaaaggtattg

SEQ ID NO: 1657927 - DNA, 15 bp, Homo sapiens
tagaaaaggtattga

SEQ ID NO: 1657928 - DNA, 15 bp, Homo sapiens
agaaaaggtattgat

SEQ ID NO: 1657929 - DNA, 15 bp, Homo sapiens
gaaaaggtattgatg

SEQ ID NO: 1657930 - DNA, 15 bp, Homo sapiens
aaaaggtattgatgc

SEQ ID NO: 1657931 - DNA, 15 bp, Homo sapiens
aaaggtattgatgct

SEQ ID NO: 1657932 - DNA, 15 bp, Homo sapiens
aaggtattgatgcta

SEQ ID NO: 1657933 - DNA, 15 bp, Homo sapiens
aggtattgatgctaa

SEQ ID NO: 1657934 - DNA, 15 bp, Homo sapiens
ggtattgatgctaac

SEQ ID NO: 1657935 - DNA, 15 bp, Homo sapiens
gtattgatgctaaca

SEQ ID NO: 1657936 - DNA, 15 bp, Homo sapiens
tattgatgctaacag

SEQ ID NO: 1657937 - DNA, 15 bp, Homo sapiens
attgatgctaacaga

SEQ ID NO: 1657938 - DNA, 15 bp, Homo sapiens
ttgatgctaacagaa

SEQ ID NO: 1657939 - DNA, 15 bp, Homo sapiens
tgatgctaacagaaa

SEQ ID NO: 1657940 - DNA, 15 bp, Homo sapiens
gatgctaacagaaat

SEQ ID NO: 1657941 - DNA, 15 bp, Homo sapiens
atgctaacagaaatg

SEQ ID NO: 1657942 - DNA, 15 bp, Homo sapiens
tgctaacagaaatga

SEQ ID NO: 1657943 - DNA, 15 bp, Homo sapiens
gctaacagaaatgac

SEQ ID NO: 1657944 - DNA, 15 bp, Homo sapiens
ctaacagaaatgaca

SEQ ID NO: 1657945 - DNA, 15 bp, Homo sapiens
taacagaaatgacaa

SEQ ID NO: 1657946 - DNA, 15 bp, Homo sapiens
aacagaaatgacaaa

SEQ ID NO: 1657947 - DNA, 15 bp, Homo sapiens
acagaaatgacaaag

SEQ ID NO: 1657948 - DNA, 15 bp, Homo sapiens
cagaaatgacaaagt

SEQ ID NO: 1657949 - DNA, 15 bp, Homo sapiens
agaaatgacaaagta

SEQ ID NO: 1657950 - DNA, 15 bp, Homo sapiens
gaaatgacaaagtaa

SEQ ID NO: 1657951 - DNA, 15 bp, Homo sapiens
aaatgacaaagtaaa

SEQ ID NO: 1657952 - DNA, 15 bp, Homo sapiens
aatgacaaagtaaaa

SEQ ID NO: 1657953 - DNA, 15 bp, Homo sapiens
atgacaaagtaaaat

SEQ ID NO: 1657954 - DNA, 15 bp, Homo sapiens
tgacaaagtaaaatg

SEQ ID NO: 1657955 - DNA, 15 bp, Homo sapiens
gacaaagtaaaatga

SEQ ID NO: 1657956 - DNA, 15 bp, Homo sapiens
acaaagtaaaatgac

SEQ ID NO: 1657957 - DNA, 15 bp, Homo sapiens
caaagtaaaatgaca

SEQ ID NO: 1657958 - DNA, 15 bp, Homo sapiens
aaagtaaaatgacaa

SEQ ID NO: 1657959 - DNA, 15 bp, Homo sapiens
aagtaaaatgacaaa

SEQ ID NO: 1657960 - DNA, 15 bp, Homo sapiens
agtaaaatgacaaac

SEQ ID NO: 1657961 - DNA, 15 bp, Homo sapiens
gtaaaatgacaaacc

SEQ ID NO: 1657962 - DNA, 15 bp, Homo sapiens
taaaatgacaaaccc

SEQ ID NO: 1657963 - DNA, 15 bp, Homo sapiens
aaaatgacaaaccca

SEQ ID NO: 1657964 - DNA, 15 bp, Homo sapiens
aaatgacaaacccac

SEQ ID NO: 1657965 - DNA, 15 bp, Homo sapiens
aatgacaaacccaca

SEQ ID NO: 1657966 - DNA, 15 bp, Homo sapiens
atgacaaacccacaa

SEQ ID NO: 1657967 - DNA, 15 bp, Homo sapiens
tgacaaacccacaac

SEQ ID NO: 1657968 - DNA, 15 bp, Homo sapiens
gacaaacccacaacc

SEQ ID NO: 1657969 - DNA, 15 bp, Homo sapiens
acaaacccacaacca

SEQ ID NO: 1657970 - DNA, 15 bp, Homo sapiens
caaacccacaaccaa

SEQ ID NO: 1657971 - DNA, 15 bp, Homo sapiens
aaacccacaaccaac

SEQ ID NO: 1657972 - DNA, 15 bp, Homo sapiens
aacccacaaccaaca

SEQ ID NO: 1657973 - DNA, 15 bp, Homo sapiens
acccacaaccaacat

SEQ ID NO: 1657974 - DNA, 15 bp, Homo sapiens
cccacaaccaacata

SEQ ID NO: 1657975 - DNA, 15 bp, Homo sapiens
ccacaaccaacataa

SEQ ID NO: 1657976 - DNA, 15 bp, Homo sapiens
cacaaccaacataat

SEQ ID NO: 1657977 - DNA, 15 bp, Homo sapiens
acaaccaacataata

SEQ ID NO: 1657978 - DNA, 15 bp, Homo sapiens
caaccaacataataa

SEQ ID NO: 1657979 - DNA, 15 bp, Homo sapiens
aaccaacataataat

SEQ ID NO: 1657980 - DNA, 15 bp, Homo sapiens
accaacataataatg

SEQ ID NO: 1657981 - DNA, 15 bp, Homo sapiens
ccaacataataatga

SEQ ID NO: 1657982 - DNA, 15 bp, Homo sapiens
caacataataatgaa

SEQ ID NO: 1657983 - DNA, 15 bp, Homo sapiens
aacataataatgaat

SEQ ID NO: 1657984 - DNA, 15 bp, Homo sapiens
acataataatgaata

SEQ ID NO: 1657985 - DNA, 15 bp, Homo sapiens
cataataatgaatag

SEQ ID NO: 1657986 - DNA, 15 bp, Homo sapiens
ataataatgaatagg

SEQ ID NO: 1657987 - DNA, 15 bp, Homo sapiens
taataatgaataggg

SEQ ID NO: 1657988 - DNA, 15 bp, Homo sapiens
aataatgaataggga

SEQ ID NO: 1657989 - DNA, 15 bp, Homo sapiens
ataatgaatagggaa

SEQ ID NO: 1657990 - DNA, 15 bp, Homo sapiens
taatgaatagggaaa

SEQ ID NO: 1657991 - DNA, 15 bp, Homo sapiens
aatgaatagggaaaa

SEQ ID NO: 1657992 - DNA, 15 bp, Homo sapiens
atgaatagggaaaag

SEQ ID NO: 1657993 - DNA, 15 bp, Homo sapiens
tgaatagggaaaagt

SEQ ID NO: 1657994 - DNA, 15 bp, Homo sapiens
gaatagggaaaagtt

SEQ ID NO: 1657995 - DNA, 15 bp, Homo sapiens
aatagggaaaagttg

SEQ ID NO: 1657996 - DNA, 15 bp, Homo sapiens
atagggaaaagttga

SEQ ID NO: 1657997 - DNA, 15 bp, Homo sapiens
tagggaaaagttgaa

SEQ ID NO: 1657998 - DNA, 15 bp, Homo sapiens
agggaaaagttgaaa

SEQ ID NO: 1657999 - DNA, 15 bp, Homo sapiens
gggaaaagttgaaag

SEQ ID NO: 1658000 - DNA, 15 bp, Homo sapiens
ggaaaagttgaaagc

SEQ ID NO: 1658001 - DNA, 15 bp, Homo sapiens
gaaaagttgaaagca

SEQ ID NO: 1658002 - DNA, 15 bp, Homo sapiens
aaaagttgaaagcat

SEQ ID NO: 1658003 - DNA, 15 bp, Homo sapiens
aaagttgaaagcatt

SEQ ID NO: 1658004 - DNA, 15 bp, Homo sapiens
aagttgaaagcattc

SEQ ID NO: 1658005 - DNA, 15 bp, Homo sapiens
agttgaaagcattcc

SEQ ID NO: 1658006 - DNA, 15 bp, Homo sapiens
gttgaaagcattccc

SEQ ID NO: 1658007 - DNA, 15 bp, Homo sapiens
ttgaaagcattccct

SEQ ID NO: 1658008 - DNA, 15 bp, Homo sapiens
tgaaagcattccctc

SEQ ID NO: 1658009 - DNA, 15 bp, Homo sapiens
gaaagcattccctct

SEQ ID NO: 1658010 - DNA, 15 bp, Homo sapiens
aaagcattccctctg

SEQ ID NO: 1658011 - DNA, 15 bp, Homo sapiens
agcattccctctgag

SEQ ID NO: 1658012 - DNA, 15 bp, Homo sapiens
gcattccctctgaga

SEQ ID NO: 1658013 - DNA, 15 bp, Homo sapiens
cattccctctgagaa

SEQ ID NO: 1658014 - DNA, 15 bp, Homo sapiens
attccctctgagaac

SEQ ID NO: 1658015 - DNA, 15 bp, Homo sapiens
ttccctctgagaact

SEQ ID NO: 1658016 - DNA, 15 bp, Homo sapiens
tccctctgagaactg

SEQ ID NO: 1658017 - DNA, 15 bp, Homo sapiens
ccctctgagaactgg

SEQ ID NO: 1658018 - DNA, 15 bp, Homo sapiens
cctctgagaactgga

SEQ ID NO: 1658019 - DNA, 15 bp, Homo sapiens
ctctgagaactggaa

SEQ ID NO: 1658020 - DNA, 15 bp, Homo sapiens
tctgagaactggaac

SEQ ID NO: 1658021 - DNA, 15 bp, Homo sapiens
ctgagaactggaaca

SEQ ID NO: 1658022 - DNA, 15 bp, Homo sapiens
tgagaactggaacaa

SEQ ID NO: 1658023 - DNA, 15 bp, Homo sapiens
gagaactggaacaag

SEQ ID NO: 1658024 - DNA, 15 bp, Homo sapiens
agaactggaacaaga

SEQ ID NO: 1658025 - DNA, 15 bp, Homo sapiens
gaactggaacaagac

SEQ ID NO: 1658026 - DNA, 15 bp, Homo sapiens
aactggaacaagaca

SEQ ID NO: 1658027 - DNA, 15 bp, Homo sapiens
actggaacaagacaa

SEQ ID NO: 1658028 - DNA, 15 bp, Homo sapiens
ctggaacaagacaag

SEQ ID NO: 1658029 - DNA, 15 bp, Homo sapiens
gcagggacatccaca

SEQ ID NO: 1658030 - DNA, 15 bp, Homo sapiens
cagggacatccacag

SEQ ID NO: 1658031 - DNA, 15 bp, Homo sapiens
agggacatccacagg

SEQ ID NO: 1658032 - DNA, 15 bp, Homo sapiens
gggacatccacaggg

SEQ ID NO: 1658033 - DNA, 15 bp, Homo sapiens
ggacatccacagggt

SEQ ID NO: 1658034 - DNA, 15 bp, Homo sapiens
gacatccacagggtg

SEQ ID NO: 1658035 - DNA, 15 bp, Homo sapiens
acatccacagggtgg

SEQ ID NO: 1658036 - DNA, 15 bp, Homo sapiens
catccacagggtggg

SEQ ID NO: 1658037 - DNA, 15 bp, Homo sapiens
atccacagggtgggc

SEQ ID NO: 1658038 - DNA, 15 bp, Homo sapiens
tccacagggtgggcg

SEQ ID NO: 1658039 - DNA, 15 bp, Homo sapiens
ccacagggtgggcgt

SEQ ID NO: 1658040 - DNA, 15 bp, Homo sapiens
cacagggtgggcgtg

SEQ ID NO: 1658041 - DNA, 15 bp, Homo sapiens
acagggtgggcgtgg

SEQ ID NO: 1658042 - DNA, 15 bp, Homo sapiens
cagggtgggcgtggg

SEQ ID NO: 1658043 - DNA, 15 bp, Homo sapiens
agggtgggcgtgggc

SEQ ID NO: 1658044 - DNA, 15 bp, Homo sapiens
gggtgggcgtgggcc

SEQ ID NO: 1658045 - DNA, 15 bp, Homo sapiens
ggtgggcgtgggccc

SEQ ID NO: 1658046 - DNA, 15 bp, Homo sapiens
gtgggcgtgggccct

SEQ ID NO: 1658047 - DNA, 15 bp, Homo sapiens
tgggcgtgggccctc

SEQ ID NO: 1658048 - DNA, 15 bp, Homo sapiens
gggcgtgggccctct

SEQ ID NO: 1658049 - DNA, 15 bp, Homo sapiens
ggcgtgggccctctc

SEQ ID NO: 1658050 - DNA, 15 bp, Homo sapiens
gcgtgggccctctca

SEQ ID NO: 1658051 - DNA, 15 bp, Homo sapiens
cgtgggccctctcat

SEQ ID NO: 1658052 - DNA, 15 bp, Homo sapiens
gtgggccctctcatc

SEQ ID NO: 1658053 - DNA, 15 bp, Homo sapiens
tgggccctctcatcc

SEQ ID NO: 1658054 - DNA, 15 bp, Homo sapiens
gggccctctcatccc

SEQ ID NO: 1658055 - DNA, 15 bp, Homo sapiens
ggccctctcatccct

SEQ ID NO: 1658056 - DNA, 15 bp, Homo sapiens
gccctctcatccctc

SEQ ID NO: 1658057 - DNA, 15 bp, Homo sapiens
ccctctcatccctcc

SEQ ID NO: 1658058 - DNA, 15 bp, Homo sapiens
cctctcatccctccc

SEQ ID NO: 1658059 - DNA, 15 bp, Homo sapiens
ctctcatccctccct

SEQ ID NO: 1658060 - DNA, 15 bp, Homo sapiens
tctcatccctccctc

SEQ ID NO: 1658061 - DNA, 15 bp, Homo sapiens
ctcatccctccctcc

SEQ ID NO: 1658062 - DNA, 15 bp, Homo sapiens
tcatccctccctccc

SEQ ID NO: 1658063 - DNA, 15 bp, Homo sapiens
catccctccctccca

SEQ ID NO: 1658064 - DNA, 15 bp, Homo sapiens
atccctccctcccac

SEQ ID NO: 1658065 - DNA, 15 bp, Homo sapiens
tccctccctcccact

SEQ ID NO: 1658066 - DNA, 15 bp, Homo sapiens
ccctccctcccactc

SEQ ID NO: 1658067 - DNA, 15 bp, Homo sapiens
cctccctcccactca

SEQ ID NO: 1658068 - DNA, 15 bp, Homo sapiens
ctccctcccactcac

SEQ ID NO: 1658069 - DNA, 15 bp, Homo sapiens
tccctcccactcact

SEQ ID NO: 1658070 - DNA, 15 bp, Homo sapiens
ccctcccactcactt

SEQ ID NO: 1658071 - DNA, 15 bp, Homo sapiens
cctcccactcacttc

SEQ ID NO: 1658072 - DNA, 15 bp, Homo sapiens
ctcccactcacttca

SEQ ID NO: 1658073 - DNA, 15 bp, Homo sapiens
tcccactcacttcac

SEQ ID NO: 1658074 - DNA, 15 bp, Homo sapiens
cccactcacttcacg

SEQ ID NO: 1658075 - DNA, 15 bp, Homo sapiens
ccactcacttcacgc

SEQ ID NO: 1658076 - DNA, 15 bp, Homo sapiens
cactcacttcacgct

SEQ ID NO: 1658077 - DNA, 15 bp, Homo sapiens
actcacttcacgctg

SEQ ID NO: 1658078 - DNA, 15 bp, Homo sapiens
ctcacttcacgctgg

SEQ ID NO: 1658079 - DNA, 15 bp, Homo sapiens
tcacttcacgctggc

SEQ ID NO: 1658080 - DNA, 15 bp, Homo sapiens
cacttcacgctggct

SEQ ID NO: 1658081 - DNA, 15 bp, Homo sapiens
acttcacgctggctg

SEQ ID NO: 1658082 - DNA, 15 bp, Homo sapiens
cttcacgctggctgg

SEQ ID NO: 1658083 - DNA, 15 bp, Homo sapiens
ttcacgctggctggg

SEQ ID NO: 1658084 - DNA, 15 bp, Homo sapiens
tcacgctggctgggc

SEQ ID NO: 1658085 - DNA, 15 bp, Homo sapiens
cacgctggctgggcc

SEQ ID NO: 1658086 - DNA, 15 bp, Homo sapiens
acgctggctgggccc

SEQ ID NO: 1658087 - DNA, 15 bp, Homo sapiens
cgctggctgggcccc

SEQ ID NO: 1658088 - DNA, 15 bp, Homo sapiens
gctggctgggcccca

SEQ ID NO: 1658089 - DNA, 15 bp, Homo sapiens
ctggctgggccccaa

SEQ ID NO: 1658090 - DNA, 15 bp, Homo sapiens
tggctgggccccaag

SEQ ID NO: 1658091 - DNA, 15 bp, Homo sapiens
ggctgggccccaagg

SEQ ID NO: 1658092 - DNA, 15 bp, Homo sapiens
gctgggccccaaggt

SEQ ID NO: 1658093 - DNA, 15 bp, Homo sapiens
ctgggccccaaggtg

SEQ ID NO: 1658094 - DNA, 15 bp, Homo sapiens
tgggccccaaggtgt

SEQ ID NO: 1658095 - DNA, 15 bp, Homo sapiens
gggccccaaggtgtt

SEQ ID NO: 1658096 - DNA, 15 bp, Homo sapiens
ggccccaaggtgttt

SEQ ID NO: 1658097 - DNA, 15 bp, Homo sapiens
gccccaaggtgtttg

SEQ ID NO: 1658098 - DNA, 15 bp, Homo sapiens
ccccaaggtgtttgc

SEQ ID NO: 1658099 - DNA, 15 bp, Homo sapiens
cccaaggtgtttgca

SEQ ID NO: 1658100 - DNA, 15 bp, Homo sapiens
ccaaggtgtttgcac

SEQ ID NO: 1658101 - DNA, 15 bp, Homo sapiens
caaggtgtttgcacc

SEQ ID NO: 1658102 - DNA, 15 bp, Homo sapiens
aaggtgtttgcaccc

SEQ ID NO: 1658103 - DNA, 15 bp, Homo sapiens
aggtgtttgcacccc

SEQ ID NO: 1658104 - DNA, 15 bp, Homo sapiens
ggtgtttgcacccct

SEQ ID NO: 1658105 - DNA, 15 bp, Homo sapiens
gtgtttgcacccctt

SEQ ID NO: 1658106 - DNA, 15 bp, Homo sapiens
tgtttgcaccccttg

SEQ ID NO: 1658107 - DNA, 15 bp, Homo sapiens
gtttgcaccccttgc

SEQ ID NO: 1658108 - DNA, 15 bp, Homo sapiens
tttgcaccccttgca

SEQ ID NO: 1658109 - DNA, 15 bp, Homo sapiens
ttgcaccccttgcag

SEQ ID NO: 1658110 - DNA, 15 bp, Homo sapiens
tgcaccccttgcagt

SEQ ID NO: 1658111 - DNA, 15 bp, Homo sapiens
gcaccccttgcagtg

SEQ ID NO: 1658112 - DNA, 15 bp, Homo sapiens
caccccttgcagtga

SEQ ID NO: 1658113 - DNA, 15 bp, Homo sapiens
accccttgcagtgag

SEQ ID NO: 1658114 - DNA, 15 bp, Homo sapiens
ccccttgcagtgagt

SEQ ID NO: 1658115 - DNA, 15 bp, Homo sapiens
cccttgcagtgagtg

SEQ ID NO: 1658116 - DNA, 15 bp, Homo sapiens
ccttgcagtgagtga

SEQ ID NO: 1658117 - DNA, 15 bp, Homo sapiens
cttgcagtgagtgac

SEQ ID NO: 1658118 - DNA, 15 bp, Homo sapiens
ttgcagtgagtgacc

SEQ ID NO: 1658119 - DNA, 15 bp, Homo sapiens
tgcagtgagtgacct

SEQ ID NO: 1658120 - DNA, 15 bp, Homo sapiens
gcagtgagtgacctt

SEQ ID NO: 1658121 - DNA, 15 bp, Homo sapiens
cagtgagtgaccttc

SEQ ID NO: 1658122 - DNA, 15 bp, Homo sapiens
agtgagtgaccttct

SEQ ID NO: 1658123 - DNA, 15 bp, Homo sapiens
gtgagtgaccttctc

SEQ ID NO: 1658124 - DNA, 15 bp, Homo sapiens
tgagtgaccttctct

SEQ ID NO: 1658125 - DNA, 15 bp, Homo sapiens
gagtgaccttctcta

SEQ ID NO: 1658126 - DNA, 15 bp, Homo sapiens
agtgaccttctctag

SEQ ID NO: 1658127 - DNA, 15 bp, Homo sapiens
gtgaccttctctagt

SEQ ID NO: 1658128 - DNA, 15 bp, Homo sapiens
tgaccttctctagtg

SEQ ID NO: 1658129 - DNA, 15 bp, Homo sapiens
gaccttctctagtgc

SEQ ID NO: 1658130 - DNA, 15 bp, Homo sapiens
accttctctagtgca

SEQ ID NO: 1658131 - DNA, 15 bp, Homo sapiens
ccttctctagtgcag

SEQ ID NO: 1658132 - DNA, 15 bp, Homo sapiens
cttctctagtgcagc

SEQ ID NO: 1658133 - DNA, 15 bp, Homo sapiens
ttctctagtgcagca

SEQ ID NO: 1658134 - DNA, 15 bp, Homo sapiens
tctctagtgcagcaa

SEQ ID NO: 1658135 - DNA, 15 bp, Homo sapiens
ctctagtgcagcaag

SEQ ID NO: 1658136 - DNA, 15 bp, Homo sapiens
tctagtgcagcaagc

SEQ ID NO: 1658137 - DNA, 15 bp, Homo sapiens
ctagtgcagcaagct

SEQ ID NO: 1658138 - DNA, 15 bp, Homo sapiens
tagtgcagcaagctc

SEQ ID NO: 1658139 - DNA, 15 bp, Homo sapiens
agtgcagcaagctca

SEQ ID NO: 1658140 - DNA, 15 bp, Homo sapiens
gtgcagcaagctcag

SEQ ID NO: 1658141 - DNA, 15 bp, Homo sapiens
tgcagcaagctcaga

SEQ ID NO: 1658142 - DNA, 15 bp, Homo sapiens
gcagcaagctcagaa

SEQ ID NO: 1658143 - DNA, 15 bp, Homo sapiens
cagcaagctcagaac

SEQ ID NO: 1658144 - DNA, 15 bp, Homo sapiens
agcaagctcagaacc

SEQ ID NO: 1658145 - DNA, 15 bp, Homo sapiens
gcaagctcagaacct

SEQ ID NO: 1658146 - DNA, 15 bp, Homo sapiens
caagctcagaacctg

SEQ ID NO: 1658147 - DNA, 15 bp, Homo sapiens
aagctcagaacctgc

SEQ ID NO: 1658148 - DNA, 15 bp, Homo sapiens
agctcagaacctgct

SEQ ID NO: 1658149 - DNA, 15 bp, Homo sapiens
gctcagaacctgctg

SEQ ID NO: 1658150 - DNA, 15 bp, Homo sapiens
ctcagaacctgctgc

SEQ ID NO: 1658151 - DNA, 15 bp, Homo sapiens
tcagaacctgctgcc

SEQ ID NO: 1658152 - DNA, 15 bp, Homo sapiens
cagaacctgctgcca

SEQ ID NO: 1658153 - DNA, 15 bp, Homo sapiens
agaacctgctgccac

SEQ ID NO: 1658154 - DNA, 15 bp, Homo sapiens
gaacctgctgccact

SEQ ID NO: 1658155 - DNA, 15 bp, Homo sapiens
aacctgctgccactg

SEQ ID NO: 1658156 - DNA, 15 bp, Homo sapiens
acctgctgccactgg

SEQ ID NO: 1658157 - DNA, 15 bp, Homo sapiens
cctgctgccactgga

SEQ ID NO: 1658158 - DNA, 15 bp, Homo sapiens
ctgctgccactggag

SEQ ID NO: 1658159 - DNA, 15 bp, Homo sapiens
tgctgccactggagt

SEQ ID NO: 1658160 - DNA, 15 bp, Homo sapiens
gctgccactggagtt

SEQ ID NO: 1658161 - DNA, 15 bp, Homo sapiens
ctgccactggagttg

SEQ ID NO: 1658162 - DNA, 15 bp, Homo sapiens
tgccactggagttgt

SEQ ID NO: 1658163 - DNA, 15 bp, Homo sapiens
gccactggagttgtc

SEQ ID NO: 1658164 - DNA, 15 bp, Homo sapiens
ccactggagttgtcc

SEQ ID NO: 1658165 - DNA, 15 bp, Homo sapiens
cactggagttgtccc

SEQ ID NO: 1658166 - DNA, 15 bp, Homo sapiens
actggagttgtccca

SEQ ID NO: 1658167 - DNA, 15 bp, Homo sapiens
ctggagttgtcccat

SEQ ID NO: 1658168 - DNA, 15 bp, Homo sapiens
tggagttgtcccatt

SEQ ID NO: 1658169 - DNA, 15 bp, Homo sapiens
ggagttgtcccattg

SEQ ID NO: 1658170 - DNA, 15 bp, Homo sapiens
gagttgtcccattgc

SEQ ID NO: 1658171 - DNA, 15 bp, Homo sapiens
agttgtcccattgct

SEQ ID NO: 1658172 - DNA, 15 bp, Homo sapiens
gttgtcccattgctg

SEQ ID NO: 1658173 - DNA, 15 bp, Homo sapiens
ttgtcccattgctga

SEQ ID NO: 1658174 - DNA, 15 bp, Homo sapiens
tgtcccattgctgat

SEQ ID NO: 1658175 - DNA, 15 bp, Homo sapiens
gtcccattgctgatg

SEQ ID NO: 1658176 - DNA, 15 bp, Homo sapiens
tcccattgctgatgc

SEQ ID NO: 1658177 - DNA, 15 bp, Homo sapiens
cccattgctgatgca

SEQ ID NO: 1658178 - DNA, 15 bp, Homo sapiens
ccattgctgatgcag

SEQ ID NO: 1658179 - DNA, 15 bp, Homo sapiens
cattgctgatgcaga

SEQ ID NO: 1658180 - DNA, 15 bp, Homo sapiens
attgctgatgcagaa

SEQ ID NO: 1658181 - DNA, 15 bp, Homo sapiens
ttgctgatgcagaaa

SEQ ID NO: 1658182 - DNA, 15 bp, Homo sapiens
tgctgatgcagaaag

SEQ ID NO: 1658183 - DNA, 15 bp, Homo sapiens
gctgatgcagaaagg

SEQ ID NO: 1658184 - DNA, 15 bp, Homo sapiens
ctgatgcagaaaggt

SEQ ID NO: 1658185 - DNA, 15 bp, Homo sapiens
tgatgcagaaaggtg

SEQ ID NO: 1658186 - DNA, 15 bp, Homo sapiens
gatgcagaaaggtga

SEQ ID NO: 1658187 - DNA, 15 bp, Homo sapiens
atgcagaaaggtgaa

SEQ ID NO: 1658188 - DNA, 15 bp, Homo sapiens
tgcagaaaggtgaag

SEQ ID NO: 1658189 - DNA, 15 bp, Homo sapiens
gcagaaaggtgaaga

SEQ ID NO: 1658190 - DNA, 15 bp, Homo sapiens
cagaaaggtgaagaa

SEQ ID NO: 1658191 - DNA, 15 bp, Homo sapiens
agaaaggtgaagaac

SEQ ID NO: 1658192 - DNA, 15 bp, Homo sapiens
gaaaggtgaagaact

SEQ ID NO: 1658193 - DNA, 15 bp, Homo sapiens
aaaggtgaagaacta

SEQ ID NO: 1658194 - DNA, 15 bp, Homo sapiens
aaggtgaagaactag

SEQ ID NO: 1658195 - DNA, 15 bp, Homo sapiens
aggtgaagaactagc

SEQ ID NO: 1658196 - DNA, 15 bp, Homo sapiens
ggtgaagaactagca

SEQ ID NO: 1658197 - DNA, 15 bp, Homo sapiens
gtgaagaactagcag

SEQ ID NO: 1658198 - DNA, 15 bp, Homo sapiens
tgaagaactagcaga

SEQ ID NO: 1658199 - DNA, 15 bp, Homo sapiens
gaagaactagcagaa

SEQ ID NO: 1658200 - DNA, 15 bp, Homo sapiens
aagaactagcagaac

SEQ ID NO: 1658201 - DNA, 15 bp, Homo sapiens
agaactagcagaaca

SEQ ID NO: 1658202 - DNA, 15 bp, Homo sapiens
gaactagcagaacac

SEQ ID NO: 1658203 - DNA, 15 bp, Homo sapiens
aactagcagaacact

SEQ ID NO: 1658204 - DNA, 15 bp, Homo sapiens
actagcagaacactg

SEQ ID NO: 1658205 - DNA, 15 bp, Homo sapiens
ctagcagaacactgg

SEQ ID NO: 1658206 - DNA, 15 bp, Homo sapiens
tagcagaacactgga

SEQ ID NO: 1658207 - DNA, 15 bp, Homo sapiens
agcagaacactggaa

SEQ ID NO: 1658208 - DNA, 15 bp, Homo sapiens
gcagaacactggaaa

SEQ ID NO: 1658209 - DNA, 15 bp, Homo sapiens
cagaacactggaaat

SEQ ID NO: 1658210 - DNA, 15 bp, Homo sapiens
agaacactggaaatg

SEQ ID NO: 1658211 - DNA, 15 bp, Homo sapiens
gaacactggaaatgc

SEQ ID NO: 1658212 - DNA, 15 bp, Homo sapiens
aacactggaaatgcc

SEQ ID NO: 1658213 - DNA, 15 bp, Homo sapiens
acactggaaatgccc

SEQ ID NO: 1658214 - DNA, 15 bp, Homo sapiens
cactggaaatgccct

SEQ ID NO: 1658215 - DNA, 15 bp, Homo sapiens
actggaaatgccctc

SEQ ID NO: 1658216 - DNA, 15 bp, Homo sapiens
ctggaaatgccctcc

SEQ ID NO: 1658217 - DNA, 15 bp, Homo sapiens
tggaaatgccctcca

SEQ ID NO: 1658218 - DNA, 15 bp, Homo sapiens
ggaaatgccctccat

SEQ ID NO: 1658219 - DNA, 15 bp, Homo sapiens
gaaatgccctccatc

SEQ ID NO: 1658220 - DNA, 15 bp, Homo sapiens
aaatgccctccatct

SEQ ID NO: 1658221 - DNA, 15 bp, Homo sapiens
aatgccctccatctg

SEQ ID NO: 1658222 - DNA, 15 bp, Homo sapiens
atgccctccatctgg

SEQ ID NO: 1658223 - DNA, 15 bp, Homo sapiens
tgccctccatctggg

SEQ ID NO: 1658224 - DNA, 15 bp, Homo sapiens
gccctccatctgggt

SEQ ID NO: 1658225 - DNA, 15 bp, Homo sapiens
ccctccatctgggtc

SEQ ID NO: 1658226 - DNA, 15 bp, Homo sapiens
cctccatctgggtcc

SEQ ID NO: 1658227 - DNA, 15 bp, Homo sapiens
ctccatctgggtcca

SEQ ID NO: 1658228 - DNA, 15 bp, Homo sapiens
tccatctgggtccat

SEQ ID NO: 1658229 - DNA, 15 bp, Homo sapiens
ccatctgggtccatg

SEQ ID NO: 1658230 - DNA, 15 bp, Homo sapiens
catctgggtccatgg

SEQ ID NO: 1658231 - DNA, 15 bp, Homo sapiens
atctgggtccatggc

SEQ ID NO: 1658232 - DNA, 15 bp, Homo sapiens
tctgggtccatggct

SEQ ID NO: 1658233 - DNA, 15 bp, Homo sapiens
ctgggtccatggcta

SEQ ID NO: 1658234 - DNA, 15 bp, Homo sapiens
tgggtccatggctac

SEQ ID NO: 1658235 - DNA, 15 bp, Homo sapiens
gggtccatggctact

SEQ ID NO: 1658236 - DNA, 15 bp, Homo sapiens
ggtccatggctactt

SEQ ID NO: 1658237 - DNA, 15 bp, Homo sapiens
gtccatggctactta

SEQ ID NO: 1658238 - DNA, 15 bp, Homo sapiens
tccatggctacttaa

SEQ ID NO: 1658239 - DNA, 15 bp, Homo sapiens
ccatggctacttaag

SEQ ID NO: 1658240 - DNA, 15 bp, Homo sapiens
catggctacttaagc

SEQ ID NO: 1658241 - DNA, 15 bp, Homo sapiens
atggctacttaagct

SEQ ID NO: 1658242 - DNA, 15 bp, Homo sapiens
tggctacttaagctc

SEQ ID NO: 1658243 - DNA, 15 bp, Homo sapiens
ggctacttaagctca

SEQ ID NO: 1658244 - DNA, 15 bp, Homo sapiens
gctacttaagctcaa

SEQ ID NO: 1658245 - DNA, 15 bp, Homo sapiens
ctacttaagctcaat

SEQ ID NO: 1658246 - DNA, 15 bp, Homo sapiens
tacttaagctcaatg

SEQ ID NO: 1658247 - DNA, 15 bp, Homo sapiens
acttaagctcaatgc

SEQ ID NO: 1658248 - DNA, 15 bp, Homo sapiens
cttaagctcaatgct

SEQ ID NO: 1658249 - DNA, 15 bp, Homo sapiens
ttaagctcaatgctc

SEQ ID NO: 1658250 - DNA, 15 bp, Homo sapiens
taagctcaatgctcc

SEQ ID NO: 1658251 - DNA, 15 bp, Homo sapiens
aagctcaatgctccc

SEQ ID NO: 1658252 - DNA, 15 bp, Homo sapiens
agctcaatgctccct

SEQ ID NO: 1658253 - DNA, 15 bp, Homo sapiens
gctcaatgctccctg

SEQ ID NO: 1658254 - DNA, 15 bp, Homo sapiens
ctcaatgctccctgg

SEQ ID NO: 1658255 - DNA, 15 bp, Homo sapiens
tcaatgctccctggc

SEQ ID NO: 1658256 - DNA, 15 bp, Homo sapiens
caatgctccctggca

SEQ ID NO: 1658257 - DNA, 15 bp, Homo sapiens
aatgctccctggcag

SEQ ID NO: 1658258 - DNA, 15 bp, Homo sapiens
atgctccctggcagg

SEQ ID NO: 1658259 - DNA, 15 bp, Homo sapiens
tgctccctggcaggc

SEQ ID NO: 1658260 - DNA, 15 bp, Homo sapiens
gctccctggcaggca

SEQ ID NO: 1658261 - DNA, 15 bp, Homo sapiens
ctccctggcaggcag

SEQ ID NO: 1658262 - DNA, 15 bp, Homo sapiens
tccctggcaggcagg

SEQ ID NO: 1658263 - DNA, 15 bp, Homo sapiens
ccctggcaggcagga

SEQ ID NO: 1658264 - DNA, 15 bp, Homo sapiens
cctggcaggcaggag

SEQ ID NO: 1658265 - DNA, 15 bp, Homo sapiens
ctggcaggcaggagg

SEQ ID NO: 1658266 - DNA, 15 bp, Homo sapiens
tggcaggcaggagga

SEQ ID NO: 1658267 - DNA, 15 bp, Homo sapiens
ggcaggcaggaggac

SEQ ID NO: 1658268 - DNA, 15 bp, Homo sapiens
gcaggcaggaggaca

SEQ ID NO: 1658269 - DNA, 15 bp, Homo sapiens
caggcaggaggacag

SEQ ID NO: 1658270 - DNA, 15 bp, Homo sapiens
aggcaggaggacagg

SEQ ID NO: 1658271 - DNA, 15 bp, Homo sapiens
ggcaggaggacaggt

SEQ ID NO: 1658272 - DNA, 15 bp, Homo sapiens
gcaggaggacaggtg

SEQ ID NO: 1658273 - DNA, 15 bp, Homo sapiens
caggaggacaggtgc

SEQ ID NO: 1658274 - DNA, 15 bp, Homo sapiens
aggaggacaggtgct

SEQ ID NO: 1658275 - DNA, 15 bp, Homo sapiens
ggaggacaggtgcta

SEQ ID NO: 1658276 - DNA, 15 bp, Homo sapiens
gaggacaggtgctat

SEQ ID NO: 1658277 - DNA, 15 bp, Homo sapiens
aggacaggtgctatt

SEQ ID NO: 1658278 - DNA, 15 bp, Homo sapiens
ggacaggtgctattg

SEQ ID NO: 1658279 - DNA, 15 bp, Homo sapiens
gacaggtgctattgc

SEQ ID NO: 1658280 - DNA, 15 bp, Homo sapiens
acaggtgctattgcc

SEQ ID NO: 1658281 - DNA, 15 bp, Homo sapiens
caggtgctattgccc

SEQ ID NO: 1658282 - DNA, 15 bp, Homo sapiens
aggtgctattgccct

SEQ ID NO: 1658283 - DNA, 15 bp, Homo sapiens
ggtgctattgccctg

SEQ ID NO: 1658284 - DNA, 15 bp, Homo sapiens
gtgctattgccctgt

SEQ ID NO: 1658285 - DNA, 15 bp, Homo sapiens
tgctattgccctgtt

SEQ ID NO: 1658286 - DNA, 15 bp, Homo sapiens
gctattgccctgttg

SEQ ID NO: 1658287 - DNA, 15 bp, Homo sapiens
ctattgccctgttgg

SEQ ID NO: 1658288 - DNA, 15 bp, Homo sapiens
tattgccctgttggg

SEQ ID NO: 1658289 - DNA, 15 bp, Homo sapiens
attgccctgttggga

SEQ ID NO: 1658290 - DNA, 15 bp, Homo sapiens
ttgccctgttgggac

SEQ ID NO: 1658291 - DNA, 15 bp, Homo sapiens
tgccctgttgggaca

SEQ ID NO: 1658292 - DNA, 15 bp, Homo sapiens
gccctgttgggacag

SEQ ID NO: 1658293 - DNA, 15 bp, Homo sapiens
ccctgttgggacaga

SEQ ID NO: 1658294 - DNA, 15 bp, Homo sapiens
cctgttgggacagat

SEQ ID NO: 1658295 - DNA, 15 bp, Homo sapiens
ctgttgggacagatg

SEQ ID NO: 1658296 - DNA, 15 bp, Homo sapiens
tgttgggacagatga

SEQ ID NO: 1658297 - DNA, 15 bp, Homo sapiens
gttgggacagatgaa

SEQ ID NO: 1658298 - DNA, 15 bp, Homo sapiens
ttgggacagatgaaa

SEQ ID NO: 1658299 - DNA, 15 bp, Homo sapiens
tgggacagatgaaaa

SEQ ID NO: 1658300 - DNA, 15 bp, Homo sapiens
gggacagatgaaaaa

SEQ ID NO: 1658301 - DNA, 15 bp, Homo sapiens
ggacagatgaaaaac

SEQ ID NO: 1658302 - DNA, 15 bp, Homo sapiens
gacagatgaaaaaca

SEQ ID NO: 1658303 - DNA, 15 bp, Homo sapiens
acagatgaaaaacag

SEQ ID NO: 1658304 - DNA, 15 bp, Homo sapiens
cagatgaaaaacaga

SEQ ID NO: 1658305 - DNA, 15 bp, Homo sapiens
agatgaaaaacagac

SEQ ID NO: 1658306 - DNA, 15 bp, Homo sapiens
gatgaaaaacagaca

SEQ ID NO: 1658307 - DNA, 15 bp, Homo sapiens
atgaaaaacagacac

SEQ ID NO: 1658308 - DNA, 15 bp, Homo sapiens
tgaaaaacagacaca

SEQ ID NO: 1658309 - DNA, 15 bp, Homo sapiens
gaaaaacagacacag

SEQ ID NO: 1658310 - DNA, 15 bp, Homo sapiens
aaaaacagacacagg

SEQ ID NO: 1658311 - DNA, 15 bp, Homo sapiens
aaaacagacacaggg

SEQ ID NO: 1658312 - DNA, 15 bp, Homo sapiens
aaacagacacaggga

SEQ ID NO: 1658313 - DNA, 15 bp, Homo sapiens
aacagacacagggag

SEQ ID NO: 1658314 - DNA, 15 bp, Homo sapiens
acagacacagggagg

SEQ ID NO: 1658315 - DNA, 15 bp, Homo sapiens
cagacacagggagga

SEQ ID NO: 1658316 - DNA, 15 bp, Homo sapiens
agacacagggaggat

SEQ ID NO: 1658317 - DNA, 15 bp, Homo sapiens
gacacagggaggatg

SEQ ID NO: 1658318 - DNA, 15 bp, Homo sapiens
acacagggaggatga

SEQ ID NO: 1658319 - DNA, 15 bp, Homo sapiens
cacagggaggatgag

SEQ ID NO: 1658320 - DNA, 15 bp, Homo sapiens
acagggaggatgagt

SEQ ID NO: 1658321 - DNA, 15 bp, Homo sapiens
cagggaggatgagtg

SEQ ID NO: 1658322 - DNA, 15 bp, Homo sapiens
agggaggatgagtga

SEQ ID NO: 1658323 - DNA, 15 bp, Homo sapiens
gggaggatgagtgat

SEQ ID NO: 1658324 - DNA, 15 bp, Homo sapiens
ggaggatgagtgatt

SEQ ID NO: 1658325 - DNA, 15 bp, Homo sapiens
gaggatgagtgattt

SEQ ID NO: 1658326 - DNA, 15 bp, Homo sapiens
aggatgagtgatttg

SEQ ID NO: 1658327 - DNA, 15 bp, Homo sapiens
ggatgagtgatttgc

SEQ ID NO: 1658328 - DNA, 15 bp, Homo sapiens
gatgagtgatttgcc

SEQ ID NO: 1658329 - DNA, 15 bp, Homo sapiens
atgagtgatttgccc

SEQ ID NO: 1658330 - DNA, 15 bp, Homo sapiens
tgagtgatttgccct

SEQ ID NO: 1658331 - DNA, 15 bp, Homo sapiens
gagtgatttgccctg

SEQ ID NO: 1658332 - DNA, 15 bp, Homo sapiens
agtgatttgccctga

SEQ ID NO: 1658333 - DNA, 15 bp, Homo sapiens
gtgatttgccctgac

SEQ ID NO: 1658334 - DNA, 15 bp, Homo sapiens
tgatttgccctgact

SEQ ID NO: 1658335 - DNA, 15 bp, Homo sapiens
gatttgccctgacta

SEQ ID NO: 1658336 - DNA, 15 bp, Homo sapiens
atttgccctgactat

SEQ ID NO: 1658337 - DNA, 15 bp, Homo sapiens
tttgccctgactata

SEQ ID NO: 1658338 - DNA, 15 bp, Homo sapiens
ttgccctgactatag

SEQ ID NO: 1658339 - DNA, 15 bp, Homo sapiens
tgccctgactataga

SEQ ID NO: 1658340 - DNA, 15 bp, Homo sapiens
gccctgactatagag

SEQ ID NO: 1658341 - DNA, 15 bp, Homo sapiens
ccctgactatagagt

SEQ ID NO: 1658342 - DNA, 15 bp, Homo sapiens
cctgactatagagtg

SEQ ID NO: 1658343 - DNA, 15 bp, Homo sapiens
ctgactatagagtgg

SEQ ID NO: 1658344 - DNA, 15 bp, Homo sapiens
tgactatagagtggc

SEQ ID NO: 1658345 - DNA, 15 bp, Homo sapiens
gactatagagtggca

SEQ ID NO: 1658346 - DNA, 15 bp, Homo sapiens
actatagagtggcag

SEQ ID NO: 1658347 - DNA, 15 bp, Homo sapiens
ctatagagtggcagg

SEQ ID NO: 1658348 - DNA, 15 bp, Homo sapiens
tatagagtggcaggg

SEQ ID NO: 1658349 - DNA, 15 bp, Homo sapiens
atagagtggcagggc

SEQ ID NO: 1658350 - DNA, 15 bp, Homo sapiens
tagagtggcagggcc

SEQ ID NO: 1658351 - DNA, 15 bp, Homo sapiens
agagtggcagggcca

SEQ ID NO: 1658352 - DNA, 15 bp, Homo sapiens
gagtggcagggccaa

SEQ ID NO: 1658353 - DNA, 15 bp, Homo sapiens
agtggcagggccaag

SEQ ID NO: 1658354 - DNA, 15 bp, Homo sapiens
gtggcagggccaagg

SEQ ID NO: 1658355 - DNA, 15 bp, Homo sapiens
tggcagggccaaggc

SEQ ID NO: 1658356 - DNA, 15 bp, Homo sapiens
ggcagggccaaggca

SEQ ID NO: 1658357 - DNA, 15 bp, Homo sapiens
gcagggccaaggcag

SEQ ID NO: 1658358 - DNA, 15 bp, Homo sapiens
cagggccaaggcaga

SEQ ID NO: 1658359 - DNA, 15 bp, Homo sapiens
agggccaaggcagag

SEQ ID NO: 1658360 - DNA, 15 bp, Homo sapiens
gggccaaggcagagc

SEQ ID NO: 1658361 - DNA, 15 bp, Homo sapiens
ggccaaggcagagcc

SEQ ID NO: 1658362 - DNA, 15 bp, Homo sapiens
gccaaggcagagccc

SEQ ID NO: 1658363 - DNA, 15 bp, Homo sapiens
ccaaggcagagccca

SEQ ID NO: 1658364 - DNA, 15 bp, Homo sapiens
caaggcagagcccag

SEQ ID NO: 1658365 - DNA, 15 bp, Homo sapiens
aaggcagagcccagg

SEQ ID NO: 1658366 - DNA, 15 bp, Homo sapiens
aggcagagcccaggc

SEQ ID NO: 1658367 - DNA, 15 bp, Homo sapiens
ggcagagcccaggcc

SEQ ID NO: 1658368 - DNA, 15 bp, Homo sapiens
gcagagcccaggcct

SEQ ID NO: 1658369 - DNA, 15 bp, Homo sapiens
cagagcccaggcctc

SEQ ID NO: 1658370 - DNA, 15 bp, Homo sapiens
agagcccaggcctcc

SEQ ID NO: 1658371 - DNA, 15 bp, Homo sapiens
gagcccaggcctcct

SEQ ID NO: 1658372 - DNA, 15 bp, Homo sapiens
agcccaggcctcctg

SEQ ID NO: 1658373 - DNA, 15 bp, Homo sapiens
gcccaggcctcctgc

SEQ ID NO: 1658374 - DNA, 15 bp, Homo sapiens
cccaggcctcctgca

SEQ ID NO: 1658375 - DNA, 15 bp, Homo sapiens
ccaggcctcctgcac

SEQ ID NO: 1658376 - DNA, 15 bp, Homo sapiens
caggcctcctgcacc

SEQ ID NO: 1658377 - DNA, 15 bp, Homo sapiens
aggcctcctgcacct

SEQ ID NO: 1658378 - DNA, 15 bp, Homo sapiens
ggcctcctgcaccta

SEQ ID NO: 1658379 - DNA, 15 bp, Homo sapiens
gcctcctgcacctag

SEQ ID NO: 1658380 - DNA, 15 bp, Homo sapiens
cctcctgcacctagg

SEQ ID NO: 1658381 - DNA, 15 bp, Homo sapiens
ctcctgcacctaggt

SEQ ID NO: 1658382 - DNA, 15 bp, Homo sapiens
tcctgcacctaggtc

SEQ ID NO: 1658383 - DNA, 15 bp, Homo sapiens
cctgcacctaggtca

SEQ ID NO: 1658384 - DNA, 15 bp, Homo sapiens
ctgcacctaggtcag

SEQ ID NO: 1658385 - DNA, 15 bp, Homo sapiens
tgcacctaggtcagt

SEQ ID NO: 1658386 - DNA, 15 bp, Homo sapiens
gcacctaggtcagtg

SEQ ID NO: 1658387 - DNA, 15 bp, Homo sapiens
cacctaggtcagtgt

SEQ ID NO: 1658388 - DNA, 15 bp, Homo sapiens
acctaggtcagtgtt

SEQ ID NO: 1658389 - DNA, 15 bp, Homo sapiens
cctaggtcagtgttc

SEQ ID NO: 1658390 - DNA, 15 bp, Homo sapiens
ctaggtcagtgttcc

SEQ ID NO: 1658391 - DNA, 15 bp, Homo sapiens
taggtcagtgttcct

SEQ ID NO: 1658392 - DNA, 15 bp, Homo sapiens
aggtcagtgttcctc

SEQ ID NO: 1658393 - DNA, 15 bp, Homo sapiens
ggtcagtgttcctcc

SEQ ID NO: 1658394 - DNA, 15 bp, Homo sapiens
gtcagtgttcctccc

SEQ ID NO: 1658395 - DNA, 15 bp, Homo sapiens
tcagtgttcctccca

SEQ ID NO: 1658396 - DNA, 15 bp, Homo sapiens
cagtgttcctcccag

SEQ ID NO: 1658397 - DNA, 15 bp, Homo sapiens
agtgttcctcccagt

SEQ ID NO: 1658398 - DNA, 15 bp, Homo sapiens
gtgttcctcccagtt

SEQ ID NO: 1658399 - DNA, 15 bp, Homo sapiens
tgttcctcccagtta

SEQ ID NO: 1658400 - DNA, 15 bp, Homo sapiens
gttcctcccagttac

SEQ ID NO: 1658401 - DNA, 15 bp, Homo sapiens
ttcctcccagttaca

SEQ ID NO: 1658402 - DNA, 15 bp, Homo sapiens
tcctcccagttacag

SEQ ID NO: 1658403 - DNA, 15 bp, Homo sapiens
cctcccagttacagt

SEQ ID NO: 1658404 - DNA, 15 bp, Homo sapiens
ctcccagttacagtc

SEQ ID NO: 1658405 - DNA, 15 bp, Homo sapiens
tcccagttacagtct

SEQ ID NO: 1658406 - DNA, 15 bp, Homo sapiens
cccagttacagtcta

SEQ ID NO: 1658407 - DNA, 15 bp, Homo sapiens
ccagttacagtctaa

SEQ ID NO: 1658408 - DNA, 15 bp, Homo sapiens
cagttacagtctaaa

SEQ ID NO: 1658409 - DNA, 15 bp, Homo sapiens
agttacagtctaaac

SEQ ID NO: 1658410 - DNA, 15 bp, Homo sapiens
gttacagtctaaact

SEQ ID NO: 1658411 - DNA, 15 bp, Homo sapiens
ttacagtctaaactg

SEQ ID NO: 1658412 - DNA, 15 bp, Homo sapiens
tacagtctaaactgg

SEQ ID NO: 1658413 - DNA, 15 bp, Homo sapiens
acagtctaaactgga

SEQ ID NO: 1658414 - DNA, 15 bp, Homo sapiens
cagtctaaactggaa

SEQ ID NO: 1658415 - DNA, 15 bp, Homo sapiens
agtctaaactggaat

SEQ ID NO: 1658416 - DNA, 15 bp, Homo sapiens
gtctaaactggaatg

SEQ ID NO: 1658417 - DNA, 15 bp, Homo sapiens
tctaaactggaatgg

SEQ ID NO: 1658418 - DNA, 15 bp, Homo sapiens
ctaaactggaatggc

SEQ ID NO: 1658419 - DNA, 15 bp, Homo sapiens
taaactggaatggca

SEQ ID NO: 1658420 - DNA, 15 bp, Homo sapiens
aaactggaatggcag

SEQ ID NO: 1658421 - DNA, 15 bp, Homo sapiens
aactggaatggcagg

SEQ ID NO: 1658422 - DNA, 15 bp, Homo sapiens
actggaatggcaggc

SEQ ID NO: 1658423 - DNA, 15 bp, Homo sapiens
ctggaatggcaggca

SEQ ID NO: 1658424 - DNA, 15 bp, Homo sapiens
tggaatggcaggcaa

SEQ ID NO: 1658425 - DNA, 15 bp, Homo sapiens
ggaatggcaggcaaa

SEQ ID NO: 1658426 - DNA, 15 bp, Homo sapiens
gaatggcaggcaaag

SEQ ID NO: 1658427 - DNA, 15 bp, Homo sapiens
aatggcaggcaaagc

SEQ ID NO: 1658428 - DNA, 15 bp, Homo sapiens
atggcaggcaaagcc

SEQ ID NO: 1658429 - DNA, 15 bp, Homo sapiens
tggcaggcaaagccc

SEQ ID NO: 1658430 - DNA, 15 bp, Homo sapiens
ggcaggcaaagcccc

SEQ ID NO: 1658431 - DNA, 15 bp, Homo sapiens
gcaggcaaagcccct

SEQ ID NO: 1658432 - DNA, 15 bp, Homo sapiens
caggcaaagcccctg

SEQ ID NO: 1658433 - DNA, 15 bp, Homo sapiens
aggcaaagcccctgt

SEQ ID NO: 1658434 - DNA, 15 bp, Homo sapiens
ggcaaagcccctgtg

SEQ ID NO: 1658435 - DNA, 15 bp, Homo sapiens
gcaaagcccctgtgg

SEQ ID NO: 1658436 - DNA, 15 bp, Homo sapiens
caaagcccctgtgga

SEQ ID NO: 1658437 - DNA, 15 bp, Homo sapiens
aaagcccctgtggaa

SEQ ID NO: 1658438 - DNA, 15 bp, Homo sapiens
aagcccctgtggaag

SEQ ID NO: 1658439 - DNA, 15 bp, Homo sapiens
agcccctgtggaagg

SEQ ID NO: 1658440 - DNA, 15 bp, Homo sapiens
gcccctgtggaaggg

SEQ ID NO: 1658441 - DNA, 15 bp, Homo sapiens
cccctgtggaagggg

SEQ ID NO: 1658442 - DNA, 15 bp, Homo sapiens
ccctgtggaagggga

SEQ ID NO: 1658443 - DNA, 15 bp, Homo sapiens
cctgtggaaggggaa

SEQ ID NO: 1658444 - DNA, 15 bp, Homo sapiens
ctgtggaaggggaag

SEQ ID NO: 1658445 - DNA, 15 bp, Homo sapiens
tgtggaaggggaagg

SEQ ID NO: 1658446 - DNA, 15 bp, Homo sapiens
gtggaaggggaaggt

SEQ ID NO: 1658447 - DNA, 15 bp, Homo sapiens
tggaaggggaaggtg

SEQ ID NO: 1658448 - DNA, 15 bp, Homo sapiens
ggaaggggaaggtga

SEQ ID NO: 1658449 - DNA, 15 bp, Homo sapiens
gaaggggaaggtgaa

SEQ ID NO: 1658450 - DNA, 15 bp, Homo sapiens
aaggggaaggtgaag

SEQ ID NO: 1658451 - DNA, 15 bp, Homo sapiens
aggggaaggtgaagg

SEQ ID NO: 1658452 - DNA, 15 bp, Homo sapiens
ggggaaggtgaaggc

SEQ ID NO: 1658453 - DNA, 15 bp, Homo sapiens
gggaaggtgaaggct

SEQ ID NO: 1658454 - DNA, 15 bp, Homo sapiens
ggaaggtgaaggctc

SEQ ID NO: 1658455 - DNA, 15 bp, Homo sapiens
gaaggtgaaggctca

SEQ ID NO: 1658456 - DNA, 15 bp, Homo sapiens
aaggtgaaggctcaa

SEQ ID NO: 1658457 - DNA, 15 bp, Homo sapiens
aggtgaaggctcaat

SEQ ID NO: 1658458 - DNA, 15 bp, Homo sapiens
ggtgaaggctcaatc

SEQ ID NO: 1658459 - DNA, 15 bp, Homo sapiens
gtgaaggctcaatca

SEQ ID NO: 1658460 - DNA, 15 bp, Homo sapiens
tgaaggctcaatcaa

SEQ ID NO: 1658461 - DNA, 15 bp, Homo sapiens
gaaggctcaatcaaa

SEQ ID NO: 1658462 - DNA, 15 bp, Homo sapiens
aaggctcaatcaaag

SEQ ID NO: 1658463 - DNA, 15 bp, Homo sapiens
aggctcaatcaaagg

SEQ ID NO: 1658464 - DNA, 15 bp, Homo sapiens
ggctcaatcaaagga

SEQ ID NO: 1658465 - DNA, 15 bp, Homo sapiens
gctcaatcaaaggat

SEQ ID NO: 1658466 - DNA, 15 bp, Homo sapiens
ctcaatcaaaggatc

SEQ ID NO: 1658467 - DNA, 15 bp, Homo sapiens
tcaatcaaaggatcc

SEQ ID NO: 1658468 - DNA, 15 bp, Homo sapiens
caatcaaaggatccc

SEQ ID NO: 1658469 - DNA, 15 bp, Homo sapiens
aatcaaaggatcccc

SEQ ID NO: 1658470 - DNA, 15 bp, Homo sapiens
atcaaaggatcccca

SEQ ID NO: 1658471 - DNA, 15 bp, Homo sapiens
tcaaaggatccccag

SEQ ID NO: 1658472 - DNA, 15 bp, Homo sapiens
caaaggatccccaga

SEQ ID NO: 1658473 - DNA, 15 bp, Homo sapiens
aaaggatccccagag

SEQ ID NO: 1658474 - DNA, 15 bp, Homo sapiens
aaggatccccagaga

SEQ ID NO: 1658475 - DNA, 15 bp, Homo sapiens
aggatccccagagac

SEQ ID NO: 1658476 - DNA, 15 bp, Homo sapiens
ggatccccagagact

SEQ ID NO: 1658477 - DNA, 15 bp, Homo sapiens
gatccccagagactt

SEQ ID NO: 1658478 - DNA, 15 bp, Homo sapiens
atccccagagacttt

SEQ ID NO: 1658479 - DNA, 15 bp, Homo sapiens
tccccagagactttc

SEQ ID NO: 1658480 - DNA, 15 bp, Homo sapiens
ccccagagactttcc

SEQ ID NO: 1658481 - DNA, 15 bp, Homo sapiens
cccagagactttcca

SEQ ID NO: 1658482 - DNA, 15 bp, Homo sapiens
ccagagactttccag

SEQ ID NO: 1658483 - DNA, 15 bp, Homo sapiens
cagagactttccaga

SEQ ID NO: 1658484 - DNA, 15 bp, Homo sapiens
agagactttccagat

SEQ ID NO: 1658485 - DNA, 15 bp, Homo sapiens
gagactttccagata

SEQ ID NO: 1658486 - DNA, 15 bp, Homo sapiens
agactttccagatat

SEQ ID NO: 1658487 - DNA, 15 bp, Homo sapiens
gactttccagatatc

SEQ ID NO: 1658488 - DNA, 15 bp, Homo sapiens
actttccagatatct

SEQ ID NO: 1658489 - DNA, 15 bp, Homo sapiens
ctttccagatatctg

SEQ ID NO: 1658490 - DNA, 15 bp, Homo sapiens
tttccagatatctga

SEQ ID NO: 1658491 - DNA, 15 bp, Homo sapiens
ttccagatatctgaa

SEQ ID NO: 1658492 - DNA, 15 bp, Homo sapiens
tccagatatctgaag

SEQ ID NO: 1658493 - DNA, 15 bp, Homo sapiens
ccagatatctgaaga

SEQ ID NO: 1658494 - DNA, 15 bp, Homo sapiens
cagatatctgaagaa

SEQ ID NO: 1658495 - DNA, 15 bp, Homo sapiens
agatatctgaagaag

SEQ ID NO: 1658496 - DNA, 15 bp, Homo sapiens
gatatctgaagaagt

SEQ ID NO: 1658497 - DNA, 15 bp, Homo sapiens
atatctgaagaagtc

SEQ ID NO: 1658498 - DNA, 15 bp, Homo sapiens
tatctgaagaagtcc

SEQ ID NO: 1658499 - DNA, 15 bp, Homo sapiens
atctgaagaagtcct

SEQ ID NO: 1658500 - DNA, 15 bp, Homo sapiens
tctgaagaagtcctg

SEQ ID NO: 1658501 - DNA, 15 bp, Homo sapiens
ctgaagaagtcctga

SEQ ID NO: 1658502 - DNA, 15 bp, Homo sapiens
tgaagaagtcctgat

SEQ ID NO: 1658503 - DNA, 15 bp, Homo sapiens
gaagaagtcctgatg

SEQ ID NO: 1658504 - DNA, 15 bp, Homo sapiens
aagaagtcctgatgt

SEQ ID NO: 1658505 - DNA, 15 bp, Homo sapiens
agaagtcctgatgtc

SEQ ID NO: 1658506 - DNA, 15 bp, Homo sapiens
gaagtcctgatgtca

SEQ ID NO: 1658507 - DNA, 15 bp, Homo sapiens
aagtcctgatgtcac

SEQ ID NO: 1658508 - DNA, 15 bp, Homo sapiens
agtcctgatgtcact

SEQ ID NO: 1658509 - DNA, 15 bp, Homo sapiens
gtcctgatgtcactg

SEQ ID NO: 1658510 - DNA, 15 bp, Homo sapiens
tcctgatgtcactgc

SEQ ID NO: 1658511 - DNA, 15 bp, Homo sapiens
cctgatgtcactgcc

SEQ ID NO: 1658512 - DNA, 15 bp, Homo sapiens
ctgatgtcactgccc

SEQ ID NO: 1658513 - DNA, 15 bp, Homo sapiens
tgatgtcactgcccc

SEQ ID NO: 1658514 - DNA, 15 bp, Homo sapiens
gatgtcactgccccg

SEQ ID NO: 1658515 - DNA, 15 bp, Homo sapiens
atgtcactgccccgg

SEQ ID NO: 1658516 - DNA, 15 bp, Homo sapiens
tgtcactgccccggt

SEQ ID NO: 1658517 - DNA, 15 bp, Homo sapiens
gtcactgccccggtc

SEQ ID NO: 1658518 - DNA, 15 bp, Homo sapiens
tcactgccccggtcc

SEQ ID NO: 1658519 - DNA, 15 bp, Homo sapiens
cactgccccggtcct

SEQ ID NO: 1658520 - DNA, 15 bp, Homo sapiens
actgccccggtcctt

SEQ ID NO: 1658521 - DNA, 15 bp, Homo sapiens
ctgccccggtccttc

SEQ ID NO: 1658522 - DNA, 15 bp, Homo sapiens
tgccccggtccttcc

SEQ ID NO: 1658523 - DNA, 15 bp, Homo sapiens
gccccggtccttccc

SEQ ID NO: 1658524 - DNA, 15 bp, Homo sapiens
ccccggtccttcccc

SEQ ID NO: 1658525 - DNA, 15 bp, Homo sapiens
cccggtccttcccca

SEQ ID NO: 1658526 - DNA, 15 bp, Homo sapiens
ccggtccttccccag

SEQ ID NO: 1658527 - DNA, 15 bp, Homo sapiens
cggtccttccccagg

SEQ ID NO: 1658528 - DNA, 15 bp, Homo sapiens
ggtccttccccaggt

SEQ ID NO: 1658529 - DNA, 15 bp, Homo sapiens
gtccttccccaggta

SEQ ID NO: 1658530 - DNA, 15 bp, Homo sapiens
tccttccccaggtag

SEQ ID NO: 1658531 - DNA, 15 bp, Homo sapiens
ccttccccaggtaga

SEQ ID NO: 1658532 - DNA, 15 bp, Homo sapiens
cttccccaggtagag

SEQ ID NO: 1658533 - DNA, 15 bp, Homo sapiens
ttccccaggtagagc

SEQ ID NO: 1658534 - DNA, 15 bp, Homo sapiens
tccccaggtagagca

SEQ ID NO: 1658535 - DNA, 15 bp, Homo sapiens
ccccaggtagagcaa

SEQ ID NO: 1658536 - DNA, 15 bp, Homo sapiens
cccaggtagagcaac

SEQ ID NO: 1658537 - DNA, 15 bp, Homo sapiens
ccaggtagagcaaca

SEQ ID NO: 1658538 - DNA, 15 bp, Homo sapiens
caggtagagcaacac

SEQ ID NO: 1658539 - DNA, 15 bp, Homo sapiens
aggtagagcaacact

SEQ ID NO: 1658540 - DNA, 15 bp, Homo sapiens
ggtagagcaacactc

SEQ ID NO: 1658541 - DNA, 15 bp, Homo sapiens
gtagagcaacactcc

SEQ ID NO: 1658542 - DNA, 15 bp, Homo sapiens
tagagcaacactcct

SEQ ID NO: 1658543 - DNA, 15 bp, Homo sapiens
agagcaacactcctc

SEQ ID NO: 1658544 - DNA, 15 bp, Homo sapiens
gagcaacactcctcg

SEQ ID NO: 1658545 - DNA, 15 bp, Homo sapiens
agcaacactcctcgc

SEQ ID NO: 1658546 - DNA, 15 bp, Homo sapiens
gcaacactcctcgcc

SEQ ID NO: 1658547 - DNA, 15 bp, Homo sapiens
caacactcctcgccg

SEQ ID NO: 1658548 - DNA, 15 bp, Homo sapiens
aacactcctcgccgc

SEQ ID NO: 1658549 - DNA, 15 bp, Homo sapiens
acactcctcgccgca

SEQ ID NO: 1658550 - DNA, 15 bp, Homo sapiens
cactcctcgccgcaa

SEQ ID NO: 1658551 - DNA, 15 bp, Homo sapiens
actcctcgccgcaac

SEQ ID NO: 1658552 - DNA, 15 bp, Homo sapiens
ctcctcgccgcaacc

SEQ ID NO: 1658553 - DNA, 15 bp, Homo sapiens
tcctcgccgcaaccc

SEQ ID NO: 1658554 - DNA, 15 bp, Homo sapiens
cctcgccgcaaccca

SEQ ID NO: 1658555 - DNA, 15 bp, Homo sapiens
ctcgccgcaacccaa

SEQ ID NO: 1658556 - DNA, 15 bp, Homo sapiens
tcgccgcaacccaac

SEQ ID NO: 1658557 - DNA, 15 bp, Homo sapiens
cgccgcaacccaact

SEQ ID NO: 1658558 - DNA, 15 bp, Homo sapiens
gccgcaacccaactg

SEQ ID NO: 1658559 - DNA, 15 bp, Homo sapiens
ccgcaacccaactgg

SEQ ID NO: 1658560 - DNA, 15 bp, Homo sapiens
cgcaacccaactggc

SEQ ID NO: 1658561 - DNA, 15 bp, Homo sapiens
gcaacccaactggct

SEQ ID NO: 1658562 - DNA, 15 bp, Homo sapiens
caacccaactggctc

SEQ ID NO: 1658563 - DNA, 15 bp, Homo sapiens
aacccaactggctcc

SEQ ID NO: 1658564 - DNA, 15 bp, Homo sapiens
acccaactggctccc

SEQ ID NO: 1658565 - DNA, 15 bp, Homo sapiens
cccaactggctcccc

SEQ ID NO: 1658566 - DNA, 15 bp, Homo sapiens
ccaactggctcccct

SEQ ID NO: 1658567 - DNA, 15 bp, Homo sapiens
caactggctcccctt

SEQ ID NO: 1658568 - DNA, 15 bp, Homo sapiens
aactggctcccctta

SEQ ID NO: 1658569 - DNA, 15 bp, Homo sapiens
actggctccccttac

SEQ ID NO: 1658570 - DNA, 15 bp, Homo sapiens
ctggctccccttacc

SEQ ID NO: 1658571 - DNA, 15 bp, Homo sapiens
tggctccccttacct

SEQ ID NO: 1658572 - DNA, 15 bp, Homo sapiens
ggctccccttacctt

SEQ ID NO: 1658573 - DNA, 15 bp, Homo sapiens
gctccccttaccttc

SEQ ID NO: 1658574 - DNA, 15 bp, Homo sapiens
ctccccttaccttct

SEQ ID NO: 1658575 - DNA, 15 bp, Homo sapiens
tccccttaccttcta

SEQ ID NO: 1658576 - DNA, 15 bp, Homo sapiens
ccccttaccttctac

SEQ ID NO: 1658577 - DNA, 15 bp, Homo sapiens
cccttaccttctaca

SEQ ID NO: 1658578 - DNA, 15 bp, Homo sapiens
ccttaccttctacac

SEQ ID NO: 1658579 - DNA, 15 bp, Homo sapiens
cttaccttctacaca

SEQ ID NO: 1658580 - DNA, 15 bp, Homo sapiens
ttaccttctacacac

SEQ ID NO: 1658581 - DNA, 15 bp, Homo sapiens
taccttctacacaca

SEQ ID NO: 1658582 - DNA, 15 bp, Homo sapiens
accttctacacacac

SEQ ID NO: 1658583 - DNA, 15 bp, Homo sapiens
ccttctacacacaca

SEQ ID NO: 1658584 - DNA, 15 bp, Homo sapiens
cttctacacacacac

SEQ ID NO: 1658585 - DNA, 15 bp, Homo sapiens
ttctacacacacaca

SEQ ID NO: 1658586 - DNA, 15 bp, Homo sapiens
tctacacacacacac

SEQ ID NO: 1658587 - DNA, 15 bp, Homo sapiens
acacacacacaaatc

SEQ ID NO: 1658588 - DNA, 15 bp, Homo sapiens
cacacacacaaatcc

SEQ ID NO: 1658589 - DNA, 15 bp, Homo sapiens
acacacacaaatcca

SEQ ID NO: 1658590 - DNA, 15 bp, Homo sapiens
cacacacaaatccaa

SEQ ID NO: 1658591 - DNA, 15 bp, Homo sapiens
acacacaaatccaag

SEQ ID NO: 1658592 - DNA, 15 bp, Homo sapiens
cacacaaatccaaga

SEQ ID NO: 1658593 - DNA, 15 bp, Homo sapiens
acacaaatccaagac

SEQ ID NO: 1658594 - DNA, 15 bp, Homo sapiens
cacaaatccaagaca

SEQ ID NO: 1658595 - DNA, 15 bp, Homo sapiens
acaaatccaagacaa

SEQ ID NO: 1658596 - DNA, 15 bp, Homo sapiens
caaatccaagacaac

SEQ ID NO: 1658597 - DNA, 15 bp, Homo sapiens
aaatccaagacaaca

SEQ ID NO: 1658598 - DNA, 15 bp, Homo sapiens
aatccaagacaacac

SEQ ID NO: 1658599 - DNA, 15 bp, Homo sapiens
atccaagacaacact

SEQ ID NO: 1658600 - DNA, 15 bp, Homo sapiens
tccaagacaacacta

SEQ ID NO: 1658601 - DNA, 15 bp, Homo sapiens
ccaagacaacactac

SEQ ID NO: 1658602 - DNA, 15 bp, Homo sapiens
caagacaacactact

SEQ ID NO: 1658603 - DNA, 15 bp, Homo sapiens
aagacaacactacta

SEQ ID NO: 1658604 - DNA, 15 bp, Homo sapiens
agacaacactactaa

SEQ ID NO: 1658605 - DNA, 15 bp, Homo sapiens
gacaacactactaag

SEQ ID NO: 1658606 - DNA, 15 bp, Homo sapiens
acaacactactaagg

SEQ ID NO: 1658607 - DNA, 15 bp, Homo sapiens
caacactactaaggc

SEQ ID NO: 1658608 - DNA, 15 bp, Homo sapiens
aacactactaaggct

SEQ ID NO: 1658609 - DNA, 15 bp, Homo sapiens
acactactaaggctt

SEQ ID NO: 1658610 - DNA, 15 bp, Homo sapiens
cactactaaggcttc

SEQ ID NO: 1658611 - DNA, 15 bp, Homo sapiens
actactaaggcttct

SEQ ID NO: 1658612 - DNA, 15 bp, Homo sapiens
ctactaaggcttctt

SEQ ID NO: 1658613 - DNA, 15 bp, Homo sapiens
tactaaggcttcttt

SEQ ID NO: 1658614 - DNA, 15 bp, Homo sapiens
actaaggcttctttg

SEQ ID NO: 1658615 - DNA, 15 bp, Homo sapiens
ctaaggcttctttgg

SEQ ID NO: 1658616 - DNA, 15 bp, Homo sapiens
taaggcttctttggg

SEQ ID NO: 1658617 - DNA, 15 bp, Homo sapiens
aaggcttctttggga

SEQ ID NO: 1658618 - DNA, 15 bp, Homo sapiens
aggcttctttgggaa

SEQ ID NO: 1658619 - DNA, 15 bp, Homo sapiens
ggcttctttgggaag

SEQ ID NO: 1658620 - DNA, 15 bp, Homo sapiens
gcttctttgggaagg

SEQ ID NO: 1658621 - DNA, 15 bp, Homo sapiens
cttctttgggaaggg

SEQ ID NO: 1658622 - DNA, 15 bp, Homo sapiens
ttctttgggaagggg

SEQ ID NO: 1658623 - DNA, 15 bp, Homo sapiens
tctttgggaagggga

SEQ ID NO: 1658624 - DNA, 15 bp, Homo sapiens
ctttgggaaggggaa

SEQ ID NO: 1658625 - DNA, 15 bp, Homo sapiens
tttgggaaggggaag

SEQ ID NO: 1658626 - DNA, 15 bp, Homo sapiens
ttgggaaggggaagt

SEQ ID NO: 1658627 - DNA, 15 bp, Homo sapiens
tgggaaggggaagta

SEQ ID NO: 1658628 - DNA, 15 bp, Homo sapiens
gggaaggggaagtag

SEQ ID NO: 1658629 - DNA, 15 bp, Homo sapiens
ggaaggggaagtagg

SEQ ID NO: 1658630 - DNA, 15 bp, Homo sapiens
gaaggggaagtaggg

SEQ ID NO: 1658631 - DNA, 15 bp, Homo sapiens
aaggggaagtaggga

SEQ ID NO: 1658632 - DNA, 15 bp, Homo sapiens
aggggaagtagggat

SEQ ID NO: 1658633 - DNA, 15 bp, Homo sapiens
ggggaagtagggata

SEQ ID NO: 1658634 - DNA, 15 bp, Homo sapiens
gggaagtagggatag

SEQ ID NO: 1658635 - DNA, 15 bp, Homo sapiens
ggaagtagggatagg

SEQ ID NO: 1658636 - DNA, 15 bp, Homo sapiens
gaagtagggataggt

SEQ ID NO: 1658637 - DNA, 15 bp, Homo sapiens
aagtagggataggta

SEQ ID NO: 1658638 - DNA, 15 bp, Homo sapiens
agtagggataggtaa

SEQ ID NO: 1658639 - DNA, 15 bp, Homo sapiens
gtagggataggtaag

SEQ ID NO: 1658640 - DNA, 15 bp, Homo sapiens
tagggataggtaaga

SEQ ID NO: 1658641 - DNA, 15 bp, Homo sapiens
agggataggtaagag

SEQ ID NO: 1658642 - DNA, 15 bp, Homo sapiens
gggataggtaagagg

SEQ ID NO: 1658643 - DNA, 15 bp, Homo sapiens
ggataggtaagagga

SEQ ID NO: 1658644 - DNA, 15 bp, Homo sapiens
gataggtaagaggaa

SEQ ID NO: 1658645 - DNA, 15 bp, Homo sapiens
ataggtaagaggaaa

SEQ ID NO: 1658646 - DNA, 15 bp, Homo sapiens
taggtaagaggaaag

SEQ ID NO: 1658647 - DNA, 15 bp, Homo sapiens
aggtaagaggaaagt

SEQ ID NO: 1658648 - DNA, 15 bp, Homo sapiens
ggtaagaggaaagta

SEQ ID NO: 1658649 - DNA, 15 bp, Homo sapiens
gtaagaggaaagtaa

SEQ ID NO: 1658650 - DNA, 15 bp, Homo sapiens
taagaggaaagtaag

SEQ ID NO: 1658651 - DNA, 15 bp, Homo sapiens
aagaggaaagtaagg

SEQ ID NO: 1658652 - DNA, 15 bp, Homo sapiens
agaggaaagtaaggg

SEQ ID NO: 1658653 - DNA, 15 bp, Homo sapiens
gaggaaagtaaggga

SEQ ID NO: 1658654 - DNA, 15 bp, Homo sapiens
aggaaagtaagggac

SEQ ID NO: 1658655 - DNA, 15 bp, Homo sapiens
ggaaagtaagggacc

SEQ ID NO: 1658656 - DNA, 15 bp, Homo sapiens
gaaagtaagggacct

SEQ ID NO: 1658657 - DNA, 15 bp, Homo sapiens
aaagtaagggacctc

SEQ ID NO: 1658658 - DNA, 15 bp, Homo sapiens
aagtaagggacctcc

SEQ ID NO: 1658659 - DNA, 15 bp, Homo sapiens
agtaagggacctcct

SEQ ID NO: 1658660 - DNA, 15 bp, Homo sapiens
gtaagggacctccta

SEQ ID NO: 1658661 - DNA, 15 bp, Homo sapiens
taagggacctcctat

SEQ ID NO: 1658662 - DNA, 15 bp, Homo sapiens
aagggacctcctatc

SEQ ID NO: 1658663 - DNA, 15 bp, Homo sapiens
agggacctcctatcc

SEQ ID NO: 1658664 - DNA, 15 bp, Homo sapiens
gggacctcctatcca

SEQ ID NO: 1658665 - DNA, 15 bp, Homo sapiens
ggacctcctatccag

SEQ ID NO: 1658666 - DNA, 15 bp, Homo sapiens
gacctcctatccagc

SEQ ID NO: 1658667 - DNA, 15 bp, Homo sapiens
acctcctatccagcc

SEQ ID NO: 1658668 - DNA, 15 bp, Homo sapiens
cctcctatccagcct

SEQ ID NO: 1658669 - DNA, 15 bp, Homo sapiens
ctcctatccagcctc

SEQ ID NO: 1658670 - DNA, 15 bp, Homo sapiens
tcctatccagcctcc

SEQ ID NO: 1658671 - DNA, 15 bp, Homo sapiens
cctatccagcctcca

SEQ ID NO: 1658672 - DNA, 15 bp, Homo sapiens
ctatccagcctccat

SEQ ID NO: 1658673 - DNA, 15 bp, Homo sapiens
tatccagcctccatg

SEQ ID NO: 1658674 - DNA, 15 bp, Homo sapiens
atccagcctccatgg

SEQ ID NO: 1658675 - DNA, 15 bp, Homo sapiens
tccagcctccatgga

SEQ ID NO: 1658676 - DNA, 15 bp, Homo sapiens
ccagcctccatggaa

SEQ ID NO: 1658677 - DNA, 15 bp, Homo sapiens
cagcctccatggaat

SEQ ID NO: 1658678 - DNA, 15 bp, Homo sapiens
agcctccatggaatc

SEQ ID NO: 1658679 - DNA, 15 bp, Homo sapiens
gcctccatggaatcc

SEQ ID NO: 1658680 - DNA, 15 bp, Homo sapiens
cctccatggaatcct

SEQ ID NO: 1658681 - DNA, 15 bp, Homo sapiens
ctccatggaatcctg

SEQ ID NO: 1658682 - DNA, 15 bp, Homo sapiens
tccatggaatcctga

SEQ ID NO: 1658683 - DNA, 15 bp, Homo sapiens
ccatggaatcctgac

SEQ ID NO: 1658684 - DNA, 15 bp, Homo sapiens
catggaatcctgact

SEQ ID NO: 1658685 - DNA, 15 bp, Homo sapiens
atggaatcctgactt

SEQ ID NO: 1658686 - DNA, 15 bp, Homo sapiens
tggaatcctgacttc

SEQ ID NO: 1658687 - DNA, 15 bp, Homo sapiens
ggaatcctgacttct

SEQ ID NO: 1658688 - DNA, 15 bp, Homo sapiens
gaatcctgacttctt

SEQ ID NO: 1658689 - DNA, 15 bp, Homo sapiens
aatcctgacttcttt

SEQ ID NO: 1658690 - DNA, 15 bp, Homo sapiens
atcctgacttctttt

SEQ ID NO: 1658691 - DNA, 15 bp, Homo sapiens
tcctgacttcttttc

SEQ ID NO: 1658692 - DNA, 15 bp, Homo sapiens
cctgacttcttttcc

SEQ ID NO: 1658693 - DNA, 15 bp, Homo sapiens
ctgacttcttttcct

SEQ ID NO: 1658694 - DNA, 15 bp, Homo sapiens
tgacttcttttcctt

SEQ ID NO: 1658695 - DNA, 15 bp, Homo sapiens
gacttcttttccttg

SEQ ID NO: 1658696 - DNA, 15 bp, Homo sapiens
acttcttttccttgt

SEQ ID NO: 1658697 - DNA, 15 bp, Homo sapiens
cttcttttccttgtt

SEQ ID NO: 1658698 - DNA, 15 bp, Homo sapiens
ttcttttccttgtta

SEQ ID NO: 1658699 - DNA, 15 bp, Homo sapiens
tcttttccttgttat

SEQ ID NO: 1658700 - DNA, 15 bp, Homo sapiens
cttttccttgttatt

SEQ ID NO: 1658701 - DNA, 15 bp, Homo sapiens
ttttccttgttattt

SEQ ID NO: 1658702 - DNA, 15 bp, Homo sapiens
tttccttgttatttc

SEQ ID NO: 1658703 - DNA, 15 bp, Homo sapiens
ttccttgttatttca

SEQ ID NO: 1658704 - DNA, 15 bp, Homo sapiens
tccttgttatttcaa

SEQ ID NO: 1658705 - DNA, 15 bp, Homo sapiens
ccttgttatttcaac

SEQ ID NO: 1658706 - DNA, 15 bp, Homo sapiens
cttgttatttcaact

SEQ ID NO: 1658707 - DNA, 15 bp, Homo sapiens
ttgttatttcaactt

SEQ ID NO: 1658708 - DNA, 15 bp, Homo sapiens
tgttatttcaacttc

SEQ ID NO: 1658709 - DNA, 15 bp, Homo sapiens
gttatttcaacttct

SEQ ID NO: 1658710 - DNA, 15 bp, Homo sapiens
ttatttcaacttctt

SEQ ID NO: 1658711 - DNA, 15 bp, Homo sapiens
tatttcaacttcttc

SEQ ID NO: 1658712 - DNA, 15 bp, Homo sapiens
atttcaacttcttcc

SEQ ID NO: 1658713 - DNA, 15 bp, Homo sapiens
tttcaacttcttcca

SEQ ID NO: 1658714 - DNA, 15 bp, Homo sapiens
ttcaacttcttccac

SEQ ID NO: 1658715 - DNA, 15 bp, Homo sapiens
tcaacttcttccacc

SEQ ID NO: 1658716 - DNA, 15 bp, Homo sapiens
caacttcttccaccc

SEQ ID NO: 1658717 - DNA, 15 bp, Homo sapiens
aacttcttccacccc

SEQ ID NO: 1658718 - DNA, 15 bp, Homo sapiens
acttcttccacccca

SEQ ID NO: 1658719 - DNA, 15 bp, Homo sapiens
cttcttccaccccat

SEQ ID NO: 1658720 - DNA, 15 bp, Homo sapiens
ttcttccaccccatc

SEQ ID NO: 1658721 - DNA, 15 bp, Homo sapiens
tcttccaccccatct

SEQ ID NO: 1658722 - DNA, 15 bp, Homo sapiens
cttccaccccatctt

SEQ ID NO: 1658723 - DNA, 15 bp, Homo sapiens
ttccaccccatcttt

SEQ ID NO: 1658724 - DNA, 15 bp, Homo sapiens
tccaccccatctttt

SEQ ID NO: 1658725 - DNA, 15 bp, Homo sapiens
ccaccccatctttta

SEQ ID NO: 1658726 - DNA, 15 bp, Homo sapiens
caccccatcttttaa

SEQ ID NO: 1658727 - DNA, 15 bp, Homo sapiens
accccatcttttaaa

SEQ ID NO: 1658728 - DNA, 15 bp, Homo sapiens
ccccatcttttaaac

SEQ ID NO: 1658729 - DNA, 15 bp, Homo sapiens
cccatcttttaaact

SEQ ID NO: 1658730 - DNA, 15 bp, Homo sapiens
ccatcttttaaactt

SEQ ID NO: 1658731 - DNA, 15 bp, Homo sapiens
catcttttaaacttt

SEQ ID NO: 1658732 - DNA, 15 bp, Homo sapiens
atcttttaaacttta

SEQ ID NO: 1658733 - DNA, 15 bp, Homo sapiens
tcttttaaactttag

SEQ ID NO: 1658734 - DNA, 15 bp, Homo sapiens
cttttaaactttaga

SEQ ID NO: 1658735 - DNA, 15 bp, Homo sapiens
ttttaaactttagac

SEQ ID NO: 1658736 - DNA, 15 bp, Homo sapiens
tttaaactttagact

SEQ ID NO: 1658737 - DNA, 15 bp, Homo sapiens
ttaaactttagactc

SEQ ID NO: 1658738 - DNA, 15 bp, Homo sapiens
taaactttagactcc

SEQ ID NO: 1658739 - DNA, 15 bp, Homo sapiens
aaactttagactcca

SEQ ID NO: 1658740 - DNA, 15 bp, Homo sapiens
aactttagactccag

SEQ ID NO: 1658741 - DNA, 15 bp, Homo sapiens
actttagactccagc

SEQ ID NO: 1658742 - DNA, 15 bp, Homo sapiens
ctttagactccagcc

SEQ ID NO: 1658743 - DNA, 15 bp, Homo sapiens
tttagactccagcca

SEQ ID NO: 1658744 - DNA, 15 bp, Homo sapiens
ttagactccagccac

SEQ ID NO: 1658745 - DNA, 15 bp, Homo sapiens
tagactccagccaca

SEQ ID NO: 1658746 - DNA, 15 bp, Homo sapiens
agactccagccacag

SEQ ID NO: 1658747 - DNA, 15 bp, Homo sapiens
gactccagccacaga

SEQ ID NO: 1658748 - DNA, 15 bp, Homo sapiens
actccagccacagaa

SEQ ID NO: 1658749 - DNA, 15 bp, Homo sapiens
ctccagccacagaag

SEQ ID NO: 1658750 - DNA, 15 bp, Homo sapiens
tccagccacagaagc

SEQ ID NO: 1658751 - DNA, 15 bp, Homo sapiens
ccagccacagaagct

SEQ ID NO: 1658752 - DNA, 15 bp, Homo sapiens
cagccacagaagctt

SEQ ID NO: 1658753 - DNA, 15 bp, Homo sapiens
agccacagaagctta

SEQ ID NO: 1658754 - DNA, 15 bp, Homo sapiens
gccacagaagcttac

SEQ ID NO: 1658755 - DNA, 15 bp, Homo sapiens
ccacagaagcttaca

SEQ ID NO: 1658756 - DNA, 15 bp, Homo sapiens
cacagaagcttacaa

SEQ ID NO: 1658757 - DNA, 15 bp, Homo sapiens
acagaagcttacaac

SEQ ID NO: 1658758 - DNA, 15 bp, Homo sapiens
cagaagcttacaact

SEQ ID NO: 1658759 - DNA, 15 bp, Homo sapiens
agaagcttacaacta

SEQ ID NO: 1658760 - DNA, 15 bp, Homo sapiens
gaagcttacaactaa

SEQ ID NO: 1658761 - DNA, 15 bp, Homo sapiens
aagcttacaactaaa

SEQ ID NO: 1658762 - DNA, 15 bp, Homo sapiens
agcttacaactaaaa

SEQ ID NO: 1658763 - DNA, 15 bp, Homo sapiens
gcttacaactaaaag

SEQ ID NO: 1658764 - DNA, 15 bp, Homo sapiens
cttacaactaaaaga

SEQ ID NO: 1658765 - DNA, 15 bp, Homo sapiens
ttacaactaaaagaa

SEQ ID NO: 1658766 - DNA, 15 bp, Homo sapiens
tacaactaaaagaaa

SEQ ID NO: 1658767 - DNA, 15 bp, Homo sapiens
acaactaaaagaaac

SEQ ID NO: 1658768 - DNA, 15 bp, Homo sapiens
caactaaaagaaact

SEQ ID NO: 1658769 - DNA, 15 bp, Homo sapiens
aactaaaagaaactc

SEQ ID NO: 1658770 - DNA, 15 bp, Homo sapiens
actaaaagaaactct

SEQ ID NO: 1658771 - DNA, 15 bp, Homo sapiens
ctaaaagaaactcta

SEQ ID NO: 1658772 - DNA, 15 bp, Homo sapiens
taaaagaaactctaa

SEQ ID NO: 1658773 - DNA, 15 bp, Homo sapiens
aaaagaaactctaag

SEQ ID NO: 1658774 - DNA, 15 bp, Homo sapiens
aaagaaactctaagg

SEQ ID NO: 1658775 - DNA, 15 bp, Homo sapiens
aagaaactctaaggc

SEQ ID NO: 1658776 - DNA, 15 bp, Homo sapiens
agaaactctaaggcc

SEQ ID NO: 1658777 - DNA, 15 bp, Homo sapiens
gaaactctaaggcca

SEQ ID NO: 1658778 - DNA, 15 bp, Homo sapiens
aaactctaaggccaa

SEQ ID NO: 1658779 - DNA, 15 bp, Homo sapiens
aactctaaggccaat

SEQ ID NO: 1658780 - DNA, 15 bp, Homo sapiens
actctaaggccaatt

SEQ ID NO: 1658781 - DNA, 15 bp, Homo sapiens
ctctaaggccaattt

SEQ ID NO: 1658782 - DNA, 15 bp, Homo sapiens
tctaaggccaattta

SEQ ID NO: 1658783 - DNA, 15 bp, Homo sapiens
ctaaggccaatttaa

SEQ ID NO: 1658784 - DNA, 15 bp, Homo sapiens
taaggccaatttaat

SEQ ID NO: 1658785 - DNA, 15 bp, Homo sapiens
aaggccaatttaatc

SEQ ID NO: 1658786 - DNA, 15 bp, Homo sapiens
aggccaatttaatcc

SEQ ID NO: 1658787 - DNA, 15 bp, Homo sapiens
ggccaatttaatcca

SEQ ID NO: 1658788 - DNA, 15 bp, Homo sapiens
gccaatttaatccaa

SEQ ID NO: 1658789 - DNA, 15 bp, Homo sapiens
ccaatttaatccaag

SEQ ID NO: 1658790 - DNA, 15 bp, Homo sapiens
caatttaatccaagg

SEQ ID NO: 1658791 - DNA, 15 bp, Homo sapiens
aatttaatccaaggt

SEQ ID NO: 1658792 - DNA, 15 bp, Homo sapiens
atttaatccaaggtt

SEQ ID NO: 1658793 - DNA, 15 bp, Homo sapiens
tttaatccaaggttt

SEQ ID NO: 1658794 - DNA, 15 bp, Homo sapiens
ttaatccaaggtttc

SEQ ID NO: 1658795 - DNA, 15 bp, Homo sapiens
taatccaaggtttca

SEQ ID NO: 1658796 - DNA, 15 bp, Homo sapiens
aatccaaggtttcat

SEQ ID NO: 1658797 - DNA, 15 bp, Homo sapiens
atccaaggtttcatt

SEQ ID NO: 1658798 - DNA, 15 bp, Homo sapiens
tccaaggtttcattc

SEQ ID NO: 1658799 - DNA, 15 bp, Homo sapiens
ccaaggtttcattct

SEQ ID NO: 1658800 - DNA, 15 bp, Homo sapiens
caaggtttcattcta

SEQ ID NO: 1658801 - DNA, 15 bp, Homo sapiens
aaggtttcattctat

SEQ ID NO: 1658802 - DNA, 15 bp, Homo sapiens
aggtttcattctatg

SEQ ID NO: 1658803 - DNA, 15 bp, Homo sapiens
ggtttcattctatgt

SEQ ID NO: 1658804 - DNA, 15 bp, Homo sapiens
gtttcattctatgtg

SEQ ID NO: 1658805 - DNA, 15 bp, Homo sapiens
tttcattctatgtgc

SEQ ID NO: 1658806 - DNA, 15 bp, Homo sapiens
ttcattctatgtgct

SEQ ID NO: 1658807 - DNA, 15 bp, Homo sapiens
tcattctatgtgctg

SEQ ID NO: 1658808 - DNA, 15 bp, Homo sapiens
cattctatgtgctgg

SEQ ID NO: 1658809 - DNA, 15 bp, Homo sapiens
attctatgtgctgga

SEQ ID NO: 1658810 - DNA, 15 bp, Homo sapiens
ttctatgtgctggag

SEQ ID NO: 1658811 - DNA, 15 bp, Homo sapiens
tctatgtgctggaga

SEQ ID NO: 1658812 - DNA, 15 bp, Homo sapiens
ctatgtgctggagat

SEQ ID NO: 1658813 - DNA, 15 bp, Homo sapiens
tatgtgctggagatg

SEQ ID NO: 1658814 - DNA, 15 bp, Homo sapiens
atgtgctggagatgg

SEQ ID NO: 1658815 - DNA, 15 bp, Homo sapiens
tgtgctggagatggt

SEQ ID NO: 1658816 - DNA, 15 bp, Homo sapiens
gtgctggagatggtg

SEQ ID NO: 1658817 - DNA, 15 bp, Homo sapiens
tgctggagatggtgt

SEQ ID NO: 1658818 - DNA, 15 bp, Homo sapiens
gctggagatggtgta

SEQ ID NO: 1658819 - DNA, 15 bp, Homo sapiens
ctggagatggtgtac

SEQ ID NO: 1658820 - DNA, 15 bp, Homo sapiens
tggagatggtgtaca

SEQ ID NO: 1658821 - DNA, 15 bp, Homo sapiens
ggagatggtgtacag

SEQ ID NO: 1658822 - DNA, 15 bp, Homo sapiens
gagatggtgtacagt

SEQ ID NO: 1658823 - DNA, 15 bp, Homo sapiens
agatggtgtacagta

SEQ ID NO: 1658824 - DNA, 15 bp, Homo sapiens
gatggtgtacagtag

SEQ ID NO: 1658825 - DNA, 15 bp, Homo sapiens
atggtgtacagtagg

SEQ ID NO: 1658826 - DNA, 15 bp, Homo sapiens
tggtgtacagtaggg

SEQ ID NO: 1658827 - DNA, 15 bp, Homo sapiens
ggtgtacagtagggt

SEQ ID NO: 1658828 - DNA, 15 bp, Homo sapiens
gtgtacagtagggtg

SEQ ID NO: 1658829 - DNA, 15 bp, Homo sapiens
tgtacagtagggtga

SEQ ID NO: 1658830 - DNA, 15 bp, Homo sapiens
gtacagtagggtgag

SEQ ID NO: 1658831 - DNA, 15 bp, Homo sapiens
tacagtagggtgagg

SEQ ID NO: 1658832 - DNA, 15 bp, Homo sapiens
acagtagggtgagga

SEQ ID NO: 1658833 - DNA, 15 bp, Homo sapiens
cagtagggtgaggaa

SEQ ID NO: 1658834 - DNA, 15 bp, Homo sapiens
agtagggtgaggaaa

SEQ ID NO: 1658835 - DNA, 15 bp, Homo sapiens
gtagggtgaggaaac

SEQ ID NO: 1658836 - DNA, 15 bp, Homo sapiens
tagggtgaggaaacc

SEQ ID NO: 1658837 - DNA, 15 bp, Homo sapiens
agggtgaggaaacca

SEQ ID NO: 1658838 - DNA, 15 bp, Homo sapiens
gggtgaggaaaccaa

SEQ ID NO: 1658839 - DNA, 15 bp, Homo sapiens
ggtgaggaaaccaaa

SEQ ID NO: 1658840 - DNA, 15 bp, Homo sapiens
gtgaggaaaccaaat

SEQ ID NO: 1658841 - DNA, 15 bp, Homo sapiens
tgaggaaaccaaatt

SEQ ID NO: 1658842 - DNA, 15 bp, Homo sapiens
gaggaaaccaaattc

SEQ ID NO: 1658843 - DNA, 15 bp, Homo sapiens
aggaaaccaaattct

SEQ ID NO: 1658844 - DNA, 15 bp, Homo sapiens
ggaaaccaaattctc

SEQ ID NO: 1658845 - DNA, 15 bp, Homo sapiens
gaaaccaaattctca

SEQ ID NO: 1658846 - DNA, 15 bp, Homo sapiens
aaaccaaattctcag

SEQ ID NO: 1658847 - DNA, 15 bp, Homo sapiens
aaccaaattctcagt

SEQ ID NO: 1658848 - DNA, 15 bp, Homo sapiens
accaaattctcagtt

SEQ ID NO: 1658849 - DNA, 15 bp, Homo sapiens
ccaaattctcagttg

SEQ ID NO: 1658850 - DNA, 15 bp, Homo sapiens
caaattctcagttgg

SEQ ID NO: 1658851 - DNA, 15 bp, Homo sapiens
aaattctcagttggc

SEQ ID NO: 1658852 - DNA, 15 bp, Homo sapiens
aattctcagttggca

SEQ ID NO: 1658853 - DNA, 15 bp, Homo sapiens
attctcagttggcac

SEQ ID NO: 1658854 - DNA, 15 bp, Homo sapiens
ttctcagttggcact

SEQ ID NO: 1658855 - DNA, 15 bp, Homo sapiens
tctcagttggcactg

SEQ ID NO: 1658856 - DNA, 15 bp, Homo sapiens
ctcagttggcactgg

SEQ ID NO: 1658857 - DNA, 15 bp, Homo sapiens
tcagttggcactggt

SEQ ID NO: 1658858 - DNA, 15 bp, Homo sapiens
cagttggcactggtg

SEQ ID NO: 1658859 - DNA, 15 bp, Homo sapiens
agttggcactggtgt

SEQ ID NO: 1658860 - DNA, 15 bp, Homo sapiens
gttggcactggtgta

SEQ ID NO: 1658861 - DNA, 15 bp, Homo sapiens
ttggcactggtgtac

SEQ ID NO: 1658862 - DNA, 15 bp, Homo sapiens
tggcactggtgtacc

SEQ ID NO: 1658863 - DNA, 15 bp, Homo sapiens
ggcactggtgtaccc

SEQ ID NO: 1658864 - DNA, 15 bp, Homo sapiens
gcactggtgtaccct

SEQ ID NO: 1658865 - DNA, 15 bp, Homo sapiens
cactggtgtaccctt

SEQ ID NO: 1658866 - DNA, 15 bp, Homo sapiens
actggtgtacccttg

SEQ ID NO: 1658867 - DNA, 15 bp, Homo sapiens
ctggtgtacccttgt

SEQ ID NO: 1658868 - DNA, 15 bp, Homo sapiens
tggtgtacccttgta

SEQ ID NO: 1658869 - DNA, 15 bp, Homo sapiens
ggtgtacccttgtac

SEQ ID NO: 1658870 - DNA, 15 bp, Homo sapiens
gtgtacccttgtaca

SEQ ID NO: 1658871 - DNA, 15 bp, Homo sapiens
tgtacccttgtacag

SEQ ID NO: 1658872 - DNA, 15 bp, Homo sapiens
gtacccttgtacagg

SEQ ID NO: 1658873 - DNA, 15 bp, Homo sapiens
tacccttgtacaggt

SEQ ID NO: 1658874 - DNA, 15 bp, Homo sapiens
acccttgtacaggtg

SEQ ID NO: 1658875 - DNA, 15 bp, Homo sapiens
cccttgtacaggtga

SEQ ID NO: 1658876 - DNA, 15 bp, Homo sapiens
ccttgtacaggtgat

SEQ ID NO: 1658877 - DNA, 15 bp, Homo sapiens
cttgtacaggtgatg

SEQ ID NO: 1658878 - DNA, 15 bp, Homo sapiens
ttgtacaggtgatgt

SEQ ID NO: 1658879 - DNA, 15 bp, Homo sapiens
tgtacaggtgatgta

SEQ ID NO: 1658880 - DNA, 15 bp, Homo sapiens
gtacaggtgatgtaa

SEQ ID NO: 1658881 - DNA, 15 bp, Homo sapiens
tacaggtgatgtaat

SEQ ID NO: 1658882 - DNA, 15 bp, Homo sapiens
acaggtgatgtaata

SEQ ID NO: 1658883 - DNA, 15 bp, Homo sapiens
caggtgatgtaatat

SEQ ID NO: 1658884 - DNA, 15 bp, Homo sapiens
aggtgatgtaatatc

SEQ ID NO: 1658885 - DNA, 15 bp, Homo sapiens
ggtgatgtaatatct

SEQ ID NO: 1658886 - DNA, 15 bp, Homo sapiens
gtgatgtaatatctc

SEQ ID NO: 1658887 - DNA, 15 bp, Homo sapiens
tgatgtaatatctct

SEQ ID NO: 1658888 - DNA, 15 bp, Homo sapiens
gatgtaatatctctg

SEQ ID NO: 1658889 - DNA, 15 bp, Homo sapiens
atgtaatatctctgt

SEQ ID NO: 1658890 - DNA, 15 bp, Homo sapiens
tgtaatatctctgtg

SEQ ID NO: 1658891 - DNA, 15 bp, Homo sapiens
gtaatatctctgtgc

SEQ ID NO: 1658892 - DNA, 15 bp, Homo sapiens
taatatctctgtgcc

SEQ ID NO: 1658893 - DNA, 15 bp, Homo sapiens
aatatctctgtgcct

SEQ ID NO: 1658894 - DNA, 15 bp, Homo sapiens
atatctctgtgcctc

SEQ ID NO: 1658895 - DNA, 15 bp, Homo sapiens
tatctctgtgcctca

SEQ ID NO: 1658896 - DNA, 15 bp, Homo sapiens
atctctgtgcctcag

SEQ ID NO: 1658897 - DNA, 15 bp, Homo sapiens
ctgtgcctcagtttg

SEQ ID NO: 1658898 - DNA, 15 bp, Homo sapiens
tgtgcctcagtttgc

SEQ ID NO: 1658899 - DNA, 15 bp, Homo sapiens
gtgcctcagtttgct

SEQ ID NO: 1658900 - DNA, 15 bp, Homo sapiens
tgcctcagtttgctc

SEQ ID NO: 1658901 - DNA, 15 bp, Homo sapiens
gcctcagtttgctca

SEQ ID NO: 1658902 - DNA, 15 bp, Homo sapiens
cctcagtttgctcac

SEQ ID NO: 1658903 - DNA, 15 bp, Homo sapiens
ctcagtttgctcact

SEQ ID NO: 1658904 - DNA, 15 bp, Homo sapiens
tcagtttgctcacta

SEQ ID NO: 1658905 - DNA, 15 bp, Homo sapiens
cagtttgctcactat

SEQ ID NO: 1658906 - DNA, 15 bp, Homo sapiens
agtttgctcactata

SEQ ID NO: 1658907 - DNA, 15 bp, Homo sapiens
gtttgctcactataa

SEQ ID NO: 1658908 - DNA, 15 bp, Homo sapiens
tttgctcactataaa

SEQ ID NO: 1658909 - DNA, 15 bp, Homo sapiens
ttgctcactataaaa

SEQ ID NO: 1658910 - DNA, 15 bp, Homo sapiens
tgctcactataaaat

SEQ ID NO: 1658911 - DNA, 15 bp, Homo sapiens
gctcactataaaata

SEQ ID NO: 1658912 - DNA, 15 bp, Homo sapiens
ctcactataaaatag

SEQ ID NO: 1658913 - DNA, 15 bp, Homo sapiens
tcactataaaataga

SEQ ID NO: 1658914 - DNA, 15 bp, Homo sapiens
cactataaaatagag

SEQ ID NO: 1658915 - DNA, 15 bp, Homo sapiens
actataaaatagaga

SEQ ID NO: 1658916 - DNA, 15 bp, Homo sapiens
ctataaaatagagac

SEQ ID NO: 1658917 - DNA, 15 bp, Homo sapiens
tataaaatagagacg

SEQ ID NO: 1658918 - DNA, 15 bp, Homo sapiens
ataaaatagagacgg

SEQ ID NO: 1658919 - DNA, 15 bp, Homo sapiens
taaaatagagacggt

SEQ ID NO: 1658920 - DNA, 15 bp, Homo sapiens
aaaatagagacggta

SEQ ID NO: 1658921 - DNA, 15 bp, Homo sapiens
aaatagagacggtag

SEQ ID NO: 1658922 - DNA, 15 bp, Homo sapiens
aatagagacggtagg

SEQ ID NO: 1658923 - DNA, 15 bp, Homo sapiens
atagagacggtaggg

SEQ ID NO: 1658924 - DNA, 15 bp, Homo sapiens
tagagacggtagggg

SEQ ID NO: 1658925 - DNA, 15 bp, Homo sapiens
agagacggtaggggt

SEQ ID NO: 1658926 - DNA, 15 bp, Homo sapiens
gagacggtaggggtc

SEQ ID NO: 1658927 - DNA, 15 bp, Homo sapiens
agacggtaggggtca

SEQ ID NO: 1658928 - DNA, 15 bp, Homo sapiens
gacggtaggggtcat

SEQ ID NO: 1658929 - DNA, 15 bp, Homo sapiens
acggtaggggtcatg

SEQ ID NO: 1658930 - DNA, 15 bp, Homo sapiens
cggtaggggtcatgg

SEQ ID NO: 1658931 - DNA, 15 bp, Homo sapiens
ggtaggggtcatggt

SEQ ID NO: 1658932 - DNA, 15 bp, Homo sapiens
gtaggggtcatggtg

SEQ ID NO: 1658933 - DNA, 15 bp, Homo sapiens
taggggtcatggtga

SEQ ID NO: 1658934 - DNA, 15 bp, Homo sapiens
aggggtcatggtgag

SEQ ID NO: 1658935 - DNA, 15 bp, Homo sapiens
ggggtcatggtgagc

SEQ ID NO: 1658936 - DNA, 15 bp, Homo sapiens
gggtcatggtgagca

SEQ ID NO: 1658937 - DNA, 15 bp, Homo sapiens
ggtcatggtgagcac

SEQ ID NO: 1658938 - DNA, 15 bp, Homo sapiens
gtcatggtgagcact

SEQ ID NO: 1658939 - DNA, 15 bp, Homo sapiens
tcatggtgagcacta

SEQ ID NO: 1658940 - DNA, 15 bp, Homo sapiens
catggtgagcactac

SEQ ID NO: 1658941 - DNA, 15 bp, Homo sapiens
atggtgagcactacc

SEQ ID NO: 1658942 - DNA, 15 bp, Homo sapiens
tggtgagcactacct

SEQ ID NO: 1658943 - DNA, 15 bp, Homo sapiens
ggtgagcactacctg

SEQ ID NO: 1658944 - DNA, 15 bp, Homo sapiens
gtgagcactacctga

SEQ ID NO: 1658945 - DNA, 15 bp, Homo sapiens
tgagcactacctgac

SEQ ID NO: 1658946 - DNA, 15 bp, Homo sapiens
gagcactacctgact

SEQ ID NO: 1658947 - DNA, 15 bp, Homo sapiens
agcactacctgacta

SEQ ID NO: 1658948 - DNA, 15 bp, Homo sapiens
gcactacctgactag

SEQ ID NO: 1658949 - DNA, 15 bp, Homo sapiens
cactacctgactagc

SEQ ID NO: 1658950 - DNA, 15 bp, Homo sapiens
actacctgactagca

SEQ ID NO: 1658951 - DNA, 15 bp, Homo sapiens
ctacctgactagcat

SEQ ID NO: 1658952 - DNA, 15 bp, Homo sapiens
tacctgactagcata

SEQ ID NO: 1658953 - DNA, 15 bp, Homo sapiens
acctgactagcatat

SEQ ID NO: 1658954 - DNA, 15 bp, Homo sapiens
cctgactagcatata

SEQ ID NO: 1658955 - DNA, 15 bp, Homo sapiens
ctgactagcatataa

SEQ ID NO: 1658956 - DNA, 15 bp, Homo sapiens
tgactagcatataag

SEQ ID NO: 1658957 - DNA, 15 bp, Homo sapiens
gactagcatataaga

SEQ ID NO: 1658958 - DNA, 15 bp, Homo sapiens
actagcatataagaa

SEQ ID NO: 1658959 - DNA, 15 bp, Homo sapiens
ctagcatataagaag

SEQ ID NO: 1658960 - DNA, 15 bp, Homo sapiens
tagcatataagaagc

SEQ ID NO: 1658961 - DNA, 15 bp, Homo sapiens
agcatataagaagct

SEQ ID NO: 1658962 - DNA, 15 bp, Homo sapiens
gcatataagaagctt

SEQ ID NO: 1658963 - DNA, 15 bp, Homo sapiens
catataagaagcttt

SEQ ID NO: 1658964 - DNA, 15 bp, Homo sapiens
atataagaagctttc

SEQ ID NO: 1658965 - DNA, 15 bp, Homo sapiens
tataagaagctttca

SEQ ID NO: 1658966 - DNA, 15 bp, Homo sapiens
ataagaagctttcag

SEQ ID NO: 1658967 - DNA, 15 bp, Homo sapiens
taagaagctttcagc

SEQ ID NO: 1658968 - DNA, 15 bp, Homo sapiens
aagaagctttcagca

SEQ ID NO: 1658969 - DNA, 15 bp, Homo sapiens
agaagctttcagcaa

SEQ ID NO: 1658970 - DNA, 15 bp, Homo sapiens
gaagctttcagcaag

SEQ ID NO: 1658971 - DNA, 15 bp, Homo sapiens
aagctttcagcaagt

SEQ ID NO: 1658972 - DNA, 15 bp, Homo sapiens
agctttcagcaagtg

SEQ ID NO: 1658973 - DNA, 15 bp, Homo sapiens
gctttcagcaagtgc

SEQ ID NO: 1658974 - DNA, 15 bp, Homo sapiens
ctttcagcaagtgca

SEQ ID NO: 1658975 - DNA, 15 bp, Homo sapiens
tttcagcaagtgcag

SEQ ID NO: 1658976 - DNA, 15 bp, Homo sapiens
ttcagcaagtgcaga

SEQ ID NO: 1658977 - DNA, 15 bp, Homo sapiens
tcagcaagtgcagac

SEQ ID NO: 1658978 - DNA, 15 bp, Homo sapiens
cagcaagtgcagact

SEQ ID NO: 1658979 - DNA, 15 bp, Homo sapiens
agcaagtgcagacta

SEQ ID NO: 1658980 - DNA, 15 bp, Homo sapiens
gcaagtgcagactac

SEQ ID NO: 1658981 - DNA, 15 bp, Homo sapiens
caagtgcagactact

SEQ ID NO: 1658982 - DNA, 15 bp, Homo sapiens
aagtgcagactactc

SEQ ID NO: 1658983 - DNA, 15 bp, Homo sapiens
agtgcagactactct

SEQ ID NO: 1658984 - DNA, 15 bp, Homo sapiens
gtgcagactactctt

SEQ ID NO: 1658985 - DNA, 15 bp, Homo sapiens
tgcagactactctta

SEQ ID NO: 1658986 - DNA, 15 bp, Homo sapiens
gcagactactcttac

SEQ ID NO: 1658987 - DNA, 15 bp, Homo sapiens
cagactactcttacc

SEQ ID NO: 1658988 - DNA, 15 bp, Homo sapiens
agactactcttaccc

SEQ ID NO: 1658989 - DNA, 15 bp, Homo sapiens
gactactcttaccca

SEQ ID NO: 1658990 - DNA, 15 bp, Homo sapiens
actactcttacccac

SEQ ID NO: 1658991 - DNA, 15 bp, Homo sapiens
ctactcttacccact

SEQ ID NO: 1658992 - DNA, 15 bp, Homo sapiens
tactcttacccactt

SEQ ID NO: 1658993 - DNA, 15 bp, Homo sapiens
actcttacccacttc

SEQ ID NO: 1658994 - DNA, 15 bp, Homo sapiens
ctcttacccacttcc

SEQ ID NO: 1658995 - DNA, 15 bp, Homo sapiens
tcttacccacttccc

SEQ ID NO: 1658996 - DNA, 15 bp, Homo sapiens
cttacccacttcccc

SEQ ID NO: 1658997 - DNA, 15 bp, Homo sapiens
ttacccacttccccc

SEQ ID NO: 1658998 - DNA, 15 bp, Homo sapiens
tacccacttccccca

SEQ ID NO: 1658999 - DNA, 15 bp, Homo sapiens
acccacttcccccaa

SEQ ID NO: 1659000 - DNA, 15 bp, Homo sapiens
cccacttcccccaag

SEQ ID NO: 1659001 - DNA, 15 bp, Homo sapiens
ccacttcccccaagc

SEQ ID NO: 1659002 - DNA, 15 bp, Homo sapiens
cacttcccccaagca

SEQ ID NO: 1659003 - DNA, 15 bp, Homo sapiens
acttcccccaagcac

SEQ ID NO: 1659004 - DNA, 15 bp, Homo sapiens
cttcccccaagcaca

SEQ ID NO: 1659005 - DNA, 15 bp, Homo sapiens
ttcccccaagcacag

SEQ ID NO: 1659006 - DNA, 15 bp, Homo sapiens
tcccccaagcacagt

SEQ ID NO: 1659007 - DNA, 15 bp, Homo sapiens
cccccaagcacagtt

SEQ ID NO: 1659008 - DNA, 15 bp, Homo sapiens
ccccaagcacagttg

SEQ ID NO: 1659009 - DNA, 15 bp, Homo sapiens
cccaagcacagttgg

SEQ ID NO: 1659010 - DNA, 15 bp, Homo sapiens
ccaagcacagttggg

SEQ ID NO: 1659011 - DNA, 15 bp, Homo sapiens
caagcacagttgggg

SEQ ID NO: 1659012 - DNA, 15 bp, Homo sapiens
aagcacagttggggt

SEQ ID NO: 1659013 - DNA, 15 bp, Homo sapiens
agcacagttggggtg

SEQ ID NO: 1659014 - DNA, 15 bp, Homo sapiens
gcacagttggggtgg

SEQ ID NO: 1659015 - DNA, 15 bp, Homo sapiens
cacagttggggtggg

SEQ ID NO: 1659016 - DNA, 15 bp, Homo sapiens
acagttggggtgggg

SEQ ID NO: 1659017 - DNA, 15 bp, Homo sapiens
cagttggggtggggg

SEQ ID NO: 1659018 - DNA, 15 bp, Homo sapiens
agttggggtggggga

SEQ ID NO: 1659019 - DNA, 15 bp, Homo sapiens
gttggggtgggggac

SEQ ID NO: 1659020 - DNA, 15 bp, Homo sapiens
ttggggtgggggaca

SEQ ID NO: 1659021 - DNA, 15 bp, Homo sapiens
tggggtgggggacag

SEQ ID NO: 1659022 - DNA, 15 bp, Homo sapiens
ggggtgggggacagc

SEQ ID NO: 1659023 - DNA, 15 bp, Homo sapiens
gggtgggggacagct

SEQ ID NO: 1659024 - DNA, 15 bp, Homo sapiens
ggtgggggacagctg

SEQ ID NO: 1659025 - DNA, 15 bp, Homo sapiens
gtgggggacagctga

SEQ ID NO: 1659026 - DNA, 15 bp, Homo sapiens
tgggggacagctgaa

SEQ ID NO: 1659027 - DNA, 15 bp, Homo sapiens
gggggacagctgaag

SEQ ID NO: 1659028 - DNA, 15 bp, Homo sapiens
ggggacagctgaaga

SEQ ID NO: 1659029 - DNA, 15 bp, Homo sapiens
gggacagctgaagag

SEQ ID NO: 1659030 - DNA, 15 bp, Homo sapiens
ggacagctgaagagg

SEQ ID NO: 1659031 - DNA, 15 bp, Homo sapiens
gacagctgaagaggt

SEQ ID NO: 1659032 - DNA, 15 bp, Homo sapiens
acagctgaagaggtg

SEQ ID NO: 1659033 - DNA, 15 bp, Homo sapiens
cagctgaagaggtgg

SEQ ID NO: 1659034 - DNA, 15 bp, Homo sapiens
agctgaagaggtgga

SEQ ID NO: 1659035 - DNA, 15 bp, Homo sapiens
gctgaagaggtggaa

SEQ ID NO: 1659036 - DNA, 15 bp, Homo sapiens
ctgaagaggtggaaa

SEQ ID NO: 1659037 - DNA, 15 bp, Homo sapiens
tgaagaggtggaaac

SEQ ID NO: 1659038 - DNA, 15 bp, Homo sapiens
gaagaggtggaaaca

SEQ ID NO: 1659039 - DNA, 15 bp, Homo sapiens
aagaggtggaaacat

SEQ ID NO: 1659040 - DNA, 15 bp, Homo sapiens
agaggtggaaacatg

SEQ ID NO: 1659041 - DNA, 15 bp, Homo sapiens
gaggtggaaacatgt

SEQ ID NO: 1659042 - DNA, 15 bp, Homo sapiens
aggtggaaacatgtg

SEQ ID NO: 1659043 - DNA, 15 bp, Homo sapiens
ggtggaaacatgtgc

SEQ ID NO: 1659044 - DNA, 15 bp, Homo sapiens
gtggaaacatgtgcc

SEQ ID NO: 1659045 - DNA, 15 bp, Homo sapiens
tggaaacatgtgcct

SEQ ID NO: 1659046 - DNA, 15 bp, Homo sapiens
ggaaacatgtgcctg

SEQ ID NO: 1659047 - DNA, 15 bp, Homo sapiens
gaaacatgtgcctga

SEQ ID NO: 1659048 - DNA, 15 bp, Homo sapiens
aaacatgtgcctgag

SEQ ID NO: 1659049 - DNA, 15 bp, Homo sapiens
aacatgtgcctgaga

SEQ ID NO: 1659050 - DNA, 15 bp, Homo sapiens
acatgtgcctgagaa

SEQ ID NO: 1659051 - DNA, 15 bp, Homo sapiens
catgtgcctgagaat

SEQ ID NO: 1659052 - DNA, 15 bp, Homo sapiens
atgtgcctgagaatc

SEQ ID NO: 1659053 - DNA, 15 bp, Homo sapiens
tgtgcctgagaatcc

SEQ ID NO: 1659054 - DNA, 15 bp, Homo sapiens
gtgcctgagaatcct

SEQ ID NO: 1659055 - DNA, 15 bp, Homo sapiens
tgcctgagaatccta

SEQ ID NO: 1659056 - DNA, 15 bp, Homo sapiens
gcctgagaatcctaa

SEQ ID NO: 1659057 - DNA, 15 bp, Homo sapiens
cctgagaatcctaat

SEQ ID NO: 1659058 - DNA, 15 bp, Homo sapiens
ctgagaatcctaatg

SEQ ID NO: 1659059 - DNA, 15 bp, Homo sapiens
tgagaatcctaatga

SEQ ID NO: 1659060 - DNA, 15 bp, Homo sapiens
gagaatcctaatgaa

SEQ ID NO: 1659061 - DNA, 15 bp, Homo sapiens
agaatcctaatgaaa

SEQ ID NO: 1659062 - DNA, 15 bp, Homo sapiens
gaatcctaatgaaat

SEQ ID NO: 1659063 - DNA, 15 bp, Homo sapiens
aatcctaatgaaatc

SEQ ID NO: 1659064 - DNA, 15 bp, Homo sapiens
atcctaatgaaatcg

SEQ ID NO: 1659065 - DNA, 15 bp, Homo sapiens
tcctaatgaaatcgg

SEQ ID NO: 1659066 - DNA, 15 bp, Homo sapiens
cctaatgaaatcggg

SEQ ID NO: 1659067 - DNA, 15 bp, Homo sapiens
ctaatgaaatcgggg

SEQ ID NO: 1659068 - DNA, 15 bp, Homo sapiens
taatgaaatcggggt

SEQ ID NO: 1659069 - DNA, 15 bp, Homo sapiens
aatgaaatcggggta

SEQ ID NO: 1659070 - DNA, 15 bp, Homo sapiens
atgaaatcggggtaa

SEQ ID NO: 1659071 - DNA, 15 bp, Homo sapiens
tgaaatcggggtaaa

SEQ ID NO: 1659072 - DNA, 15 bp, Homo sapiens
gaaatcggggtaaag

SEQ ID NO: 1659073 - DNA, 15 bp, Homo sapiens
aaatcggggtaaagg

SEQ ID NO: 1659074 - DNA, 15 bp, Homo sapiens
aatcggggtaaagga

SEQ ID NO: 1659075 - DNA, 15 bp, Homo sapiens
atcggggtaaaggag

SEQ ID NO: 1659076 - DNA, 15 bp, Homo sapiens
tcggggtaaaggagc

SEQ ID NO: 1659077 - DNA, 15 bp, Homo sapiens
cggggtaaaggagcc

SEQ ID NO: 1659078 - DNA, 15 bp, Homo sapiens
ggggtaaaggagcct

SEQ ID NO: 1659079 - DNA, 15 bp, Homo sapiens
gggtaaaggagcctg

SEQ ID NO: 1659080 - DNA, 15 bp, Homo sapiens
ggtaaaggagcctgg

SEQ ID NO: 1659081 - DNA, 15 bp, Homo sapiens
gtaaaggagcctgga

SEQ ID NO: 1659082 - DNA, 15 bp, Homo sapiens
taaaggagcctggaa

SEQ ID NO: 1659083 - DNA, 15 bp, Homo sapiens
aaaggagcctggaac

SEQ ID NO: 1659084 - DNA, 15 bp, Homo sapiens
aaggagcctggaaca

SEQ ID NO: 1659085 - DNA, 15 bp, Homo sapiens
aggagcctggaacac

SEQ ID NO: 1659086 - DNA, 15 bp, Homo sapiens
ggagcctggaacaca

SEQ ID NO: 1659087 - DNA, 15 bp, Homo sapiens
gagcctggaacacat

SEQ ID NO: 1659088 - DNA, 15 bp, Homo sapiens
agcctggaacacatc

SEQ ID NO: 1659089 - DNA, 15 bp, Homo sapiens
gcctggaacacatcc

SEQ ID NO: 1659090 - DNA, 15 bp, Homo sapiens
cctggaacacatcct

SEQ ID NO: 1659091 - DNA, 15 bp, Homo sapiens
ctggaacacatcctg

SEQ ID NO: 1659092 - DNA, 15 bp, Homo sapiens
tggaacacatcctgt

SEQ ID NO: 1659093 - DNA, 15 bp, Homo sapiens
ggaacacatcctgtg

SEQ ID NO: 1659094 - DNA, 15 bp, Homo sapiens
gaacacatcctgtga

SEQ ID NO: 1659095 - DNA, 15 bp, Homo sapiens
aacacatcctgtgac

SEQ ID NO: 1659096 - DNA, 15 bp, Homo sapiens
acacatcctgtgacc

SEQ ID NO: 1659097 - DNA, 15 bp, Homo sapiens
cacatcctgtgaccc

SEQ ID NO: 1659098 - DNA, 15 bp, Homo sapiens
acatcctgtgacccc

SEQ ID NO: 1659099 - DNA, 15 bp, Homo sapiens
catcctgtgaccccg

SEQ ID NO: 1659100 - DNA, 15 bp, Homo sapiens
atcctgtgaccccgc

SEQ ID NO: 1659101 - DNA, 15 bp, Homo sapiens
tcctgtgaccccgcc

SEQ ID NO: 1659102 - DNA, 15 bp, Homo sapiens
cctgtgaccccgcct

SEQ ID NO: 1659103 - DNA, 15 bp, Homo sapiens
ctgtgaccccgcctg

SEQ ID NO: 1659104 - DNA, 15 bp, Homo sapiens
tgtgaccccgcctgt

SEQ ID NO: 1659105 - DNA, 15 bp, Homo sapiens
gtgaccccgcctgta

SEQ ID NO: 1659106 - DNA, 15 bp, Homo sapiens
tgaccccgcctgtac

SEQ ID NO: 1659107 - DNA, 15 bp, Homo sapiens
gaccccgcctgtact

SEQ ID NO: 1659108 - DNA, 15 bp, Homo sapiens
accccgcctgtactg

SEQ ID NO: 1659109 - DNA, 15 bp, Homo sapiens
ccccgcctgtactgt

SEQ ID NO: 1659110 - DNA, 15 bp, Homo sapiens
cccgcctgtactgta

SEQ ID NO: 1659111 - DNA, 15 bp, Homo sapiens
ccgcctgtactgtag

SEQ ID NO: 1659112 - DNA, 15 bp, Homo sapiens
cgcctgtactgtagg

SEQ ID NO: 1659113 - DNA, 15 bp, Homo sapiens
gcctgtactgtagga

SEQ ID NO: 1659114 - DNA, 15 bp, Homo sapiens
cctgtactgtaggaa

SEQ ID NO: 1659115 - DNA, 15 bp, Homo sapiens
ctgtactgtaggaag

SEQ ID NO: 1659116 - DNA, 15 bp, Homo sapiens
tgtactgtaggaagc

SEQ ID NO: 1659117 - DNA, 15 bp, Homo sapiens
gtactgtaggaagcc

SEQ ID NO: 1659118 - DNA, 15 bp, Homo sapiens
tactgtaggaagcca

SEQ ID NO: 1659119 - DNA, 15 bp, Homo sapiens
actgtaggaagccag

SEQ ID NO: 1659120 - DNA, 15 bp, Homo sapiens
ctgtaggaagccagt

SEQ ID NO: 1659121 - DNA, 15 bp, Homo sapiens
tgtaggaagccagtc

SEQ ID NO: 1659122 - DNA, 15 bp, Homo sapiens
gtaggaagccagtct

SEQ ID NO: 1659123 - DNA, 15 bp, Homo sapiens
taggaagccagtctc

SEQ ID NO: 1659124 - DNA, 15 bp, Homo sapiens
aggaagccagtctct

SEQ ID NO: 1659125 - DNA, 15 bp, Homo sapiens
ggaagccagtctctg

SEQ ID NO: 1659126 - DNA, 15 bp, Homo sapiens
gaagccagtctctgg

SEQ ID NO: 1659127 - DNA, 15 bp, Homo sapiens
aagccagtctctgga

SEQ ID NO: 1659128 - DNA, 15 bp, Homo sapiens
agccagtctctggaa

SEQ ID NO: 1659129 - DNA, 15 bp, Homo sapiens
gccagtctctggaaa

SEQ ID NO: 1659130 - DNA, 15 bp, Homo sapiens
ccagtctctggaaag

SEQ ID NO: 1659131 - DNA, 15 bp, Homo sapiens
cagtctctggaaagt

SEQ ID NO: 1659132 - DNA, 15 bp, Homo sapiens
agtctctggaaagta

SEQ ID NO: 1659133 - DNA, 15 bp, Homo sapiens
gtctctggaaagtaa

SEQ ID NO: 1659134 - DNA, 15 bp, Homo sapiens
tctctggaaagtaaa

SEQ ID NO: 1659135 - DNA, 15 bp, Homo sapiens
ctctggaaagtaaaa

SEQ ID NO: 1659136 - DNA, 15 bp, Homo sapiens
tctggaaagtaaaat

SEQ ID NO: 1659137 - DNA, 15 bp, Homo sapiens
ctggaaagtaaaatg

SEQ ID NO: 1659138 - DNA, 15 bp, Homo sapiens
tggaaagtaaaatgg

SEQ ID NO: 1659139 - DNA, 15 bp, Homo sapiens
ggaaagtaaaatgga

SEQ ID NO: 1659140 - DNA, 15 bp, Homo sapiens
gaaagtaaaatggaa

SEQ ID NO: 1659141 - DNA, 15 bp, Homo sapiens
aaagtaaaatggaag

SEQ ID NO: 1659142 - DNA, 15 bp, Homo sapiens
aagtaaaatggaagg

SEQ ID NO: 1659143 - DNA, 15 bp, Homo sapiens
agtaaaatggaaggg

SEQ ID NO: 1659144 - DNA, 15 bp, Homo sapiens
gtaaaatggaagggc

SEQ ID NO: 1659145 - DNA, 15 bp, Homo sapiens
taaaatggaagggct

SEQ ID NO: 1659146 - DNA, 15 bp, Homo sapiens
aaaatggaagggctg

SEQ ID NO: 1659147 - DNA, 15 bp, Homo sapiens
aaatggaagggctgc

SEQ ID NO: 1659148 - DNA, 15 bp, Homo sapiens
aatggaagggctgct

SEQ ID NO: 1659149 - DNA, 15 bp, Homo sapiens
atggaagggctgctt

SEQ ID NO: 1659150 - DNA, 15 bp, Homo sapiens
tggaagggctgcttg

SEQ ID NO: 1659151 - DNA, 15 bp, Homo sapiens
ggaagggctgcttgg

SEQ ID NO: 1659152 - DNA, 15 bp, Homo sapiens
gaagggctgcttggg

SEQ ID NO: 1659153 - DNA, 15 bp, Homo sapiens
aagggctgcttggga

SEQ ID NO: 1659154 - DNA, 15 bp, Homo sapiens
agggctgcttgggaa

SEQ ID NO: 1659155 - DNA, 15 bp, Homo sapiens
gggctgcttgggaac

SEQ ID NO: 1659156 - DNA, 15 bp, Homo sapiens
ggctgcttgggaact

SEQ ID NO: 1659157 - DNA, 15 bp, Homo sapiens
gctgcttgggaactt

SEQ ID NO: 1659158 - DNA, 15 bp, Homo sapiens
ctgcttgggaacttt

SEQ ID NO: 1659159 - DNA, 15 bp, Homo sapiens
tgcttgggaactttg

SEQ ID NO: 1659160 - DNA, 15 bp, Homo sapiens
gcttgggaactttga

SEQ ID NO: 1659161 - DNA, 15 bp, Homo sapiens
cttgggaactttgag

SEQ ID NO: 1659162 - DNA, 15 bp, Homo sapiens
ttgggaactttgagg

SEQ ID NO: 1659163 - DNA, 15 bp, Homo sapiens
tgggaactttgagga

SEQ ID NO: 1659164 - DNA, 15 bp, Homo sapiens
gggaactttgaggat

SEQ ID NO: 1659165 - DNA, 15 bp, Homo sapiens
ggaactttgaggata

SEQ ID NO: 1659166 - DNA, 15 bp, Homo sapiens
gaactttgaggatat

SEQ ID NO: 1659167 - DNA, 15 bp, Homo sapiens
aactttgaggatatt

SEQ ID NO: 1659168 - DNA, 15 bp, Homo sapiens
actttgaggatattt

SEQ ID NO: 1659169 - DNA, 15 bp, Homo sapiens
ctttgaggatattta

SEQ ID NO: 1659170 - DNA, 15 bp, Homo sapiens
tttgaggatatttag

SEQ ID NO: 1659171 - DNA, 15 bp, Homo sapiens
ttgaggatatttagc

SEQ ID NO: 1659172 - DNA, 15 bp, Homo sapiens
tgaggatatttagcc

SEQ ID NO: 1659173 - DNA, 15 bp, Homo sapiens
gaggatatttagccc

SEQ ID NO: 1659174 - DNA, 15 bp, Homo sapiens
aggatatttagccca

SEQ ID NO: 1659175 - DNA, 15 bp, Homo sapiens
ggatatttagcccac

SEQ ID NO: 1659176 - DNA, 15 bp, Homo sapiens
gatatttagcccacc

SEQ ID NO: 1659177 - DNA, 15 bp, Homo sapiens
atatttagcccaccc

SEQ ID NO: 1659178 - DNA, 15 bp, Homo sapiens
tatttagcccacccc

SEQ ID NO: 1659179 - DNA, 15 bp, Homo sapiens
atttagcccaccccc

SEQ ID NO: 1659180 - DNA, 15 bp, Homo sapiens
tttagcccaccccct

SEQ ID NO: 1659181 - DNA, 15 bp, Homo sapiens
ttagcccaccccctc

SEQ ID NO: 1659182 - DNA, 15 bp, Homo sapiens
tagcccaccccctca

SEQ ID NO: 1659183 - DNA, 15 bp, Homo sapiens
agcccaccccctcat

SEQ ID NO: 1659184 - DNA, 15 bp, Homo sapiens
gcccaccccctcatt

SEQ ID NO: 1659185 - DNA, 15 bp, Homo sapiens
cccaccccctcattt

SEQ ID NO: 1659186 - DNA, 15 bp, Homo sapiens
ccaccccctcatttt

SEQ ID NO: 1659187 - DNA, 15 bp, Homo sapiens
caccccctcattttt

SEQ ID NO: 1659188 - DNA, 15 bp, Homo sapiens
accccctcattttta

SEQ ID NO: 1659189 - DNA, 15 bp, Homo sapiens
ccccctcatttttac

SEQ ID NO: 1659190 - DNA, 15 bp, Homo sapiens
cccctcatttttact

SEQ ID NO: 1659191 - DNA, 15 bp, Homo sapiens
ccctcatttttactt

SEQ ID NO: 1659192 - DNA, 15 bp, Homo sapiens
cctcatttttacttg

SEQ ID NO: 1659193 - DNA, 15 bp, Homo sapiens
ctcatttttacttgg

SEQ ID NO: 1659194 - DNA, 15 bp, Homo sapiens
tcatttttacttggg

SEQ ID NO: 1659195 - DNA, 15 bp, Homo sapiens
catttttacttgggg

SEQ ID NO: 1659196 - DNA, 15 bp, Homo sapiens
atttttacttgggga

SEQ ID NO: 1659197 - DNA, 15 bp, Homo sapiens
tttttacttggggaa

SEQ ID NO: 1659198 - DNA, 15 bp, Homo sapiens
ttttacttggggaaa

SEQ ID NO: 1659199 - DNA, 15 bp, Homo sapiens
tttacttggggaaac

SEQ ID NO: 1659200 - DNA, 15 bp, Homo sapiens
ttacttggggaaact

SEQ ID NO: 1659201 - DNA, 15 bp, Homo sapiens
tacttggggaaacta

SEQ ID NO: 1659202 - DNA, 15 bp, Homo sapiens
acttggggaaactaa

SEQ ID NO: 1659203 - DNA, 15 bp, Homo sapiens
cttggggaaactaag

SEQ ID NO: 1659204 - DNA, 15 bp, Homo sapiens
ttggggaaactaagg

SEQ ID NO: 1659205 - DNA, 15 bp, Homo sapiens
tggggaaactaaggc

SEQ ID NO: 1659206 - DNA, 15 bp, Homo sapiens
ggggaaactaaggcc

SEQ ID NO: 1659207 - DNA, 15 bp, Homo sapiens
gggaaactaaggccc

SEQ ID NO: 1659208 - DNA, 15 bp, Homo sapiens
ggaaactaaggccca

SEQ ID NO: 1659209 - DNA, 15 bp, Homo sapiens
gaaactaaggcccag

SEQ ID NO: 1659210 - DNA, 15 bp, Homo sapiens
aaactaaggcccaga

SEQ ID NO: 1659211 - DNA, 15 bp, Homo sapiens
aactaaggcccagag

SEQ ID NO: 1659212 - DNA, 15 bp, Homo sapiens
actaaggcccagaga

SEQ ID NO: 1659213 - DNA, 15 bp, Homo sapiens
ctaaggcccagagac

SEQ ID NO: 1659214 - DNA, 15 bp, Homo sapiens
taaggcccagagacc

SEQ ID NO: 1659215 - DNA, 15 bp, Homo sapiens
aaggcccagagacct

SEQ ID NO: 1659216 - DNA, 15 bp, Homo sapiens
aggcccagagaccta

SEQ ID NO: 1659217 - DNA, 15 bp, Homo sapiens
ggcccagagacctaa

SEQ ID NO: 1659218 - DNA, 15 bp, Homo sapiens
gcccagagacctaag

SEQ ID NO: 1659219 - DNA, 15 bp, Homo sapiens
cccagagacctaagg

SEQ ID NO: 1659220 - DNA, 15 bp, Homo sapiens
ccagagacctaaggt

SEQ ID NO: 1659221 - DNA, 15 bp, Homo sapiens
cagagacctaaggtg

SEQ ID NO: 1659222 - DNA, 15 bp, Homo sapiens
agagacctaaggtga

SEQ ID NO: 1659223 - DNA, 15 bp, Homo sapiens
gagacctaaggtgac

SEQ ID NO: 1659224 - DNA, 15 bp, Homo sapiens
agacctaaggtgact

SEQ ID NO: 1659225 - DNA, 15 bp, Homo sapiens
gacctaaggtgactg

SEQ ID NO: 1659226 - DNA, 15 bp, Homo sapiens
acctaaggtgactgc

SEQ ID NO: 1659227 - DNA, 15 bp, Homo sapiens
cctaaggtgactgcc

SEQ ID NO: 1659228 - DNA, 15 bp, Homo sapiens
ctaaggtgactgcct

SEQ ID NO: 1659229 - DNA, 15 bp, Homo sapiens
taaggtgactgccta

SEQ ID NO: 1659230 - DNA, 15 bp, Homo sapiens
aaggtgactgcctaa

SEQ ID NO: 1659231 - DNA, 15 bp, Homo sapiens
aggtgactgcctaag

SEQ ID NO: 1659232 - DNA, 15 bp, Homo sapiens
ggtgactgcctaagt

SEQ ID NO: 1659233 - DNA, 15 bp, Homo sapiens
gtgactgcctaagtt

SEQ ID NO: 1659234 - DNA, 15 bp, Homo sapiens
tgactgcctaagtta

SEQ ID NO: 1659235 - DNA, 15 bp, Homo sapiens
gactgcctaagttag

SEQ ID NO: 1659236 - DNA, 15 bp, Homo sapiens
actgcctaagttagc

SEQ ID NO: 1659237 - DNA, 15 bp, Homo sapiens
ctgcctaagttagca

SEQ ID NO: 1659238 - DNA, 15 bp, Homo sapiens
tgcctaagttagcaa

SEQ ID NO: 1659239 - DNA, 15 bp, Homo sapiens
gcctaagttagcaag

SEQ ID NO: 1659240 - DNA, 15 bp, Homo sapiens
cctaagttagcaagg

SEQ ID NO: 1659241 - DNA, 15 bp, Homo sapiens
ctaagttagcaagga

SEQ ID NO: 1659242 - DNA, 15 bp, Homo sapiens
taagttagcaaggag

SEQ ID NO: 1659243 - DNA, 15 bp, Homo sapiens
aagttagcaaggaga

SEQ ID NO: 1659244 - DNA, 15 bp, Homo sapiens
agttagcaaggagaa

SEQ ID NO: 1659245 - DNA, 15 bp, Homo sapiens
gttagcaaggagaag

SEQ ID NO: 1659246 - DNA, 15 bp, Homo sapiens
ttagcaaggagaagt

SEQ ID NO: 1659247 - DNA, 15 bp, Homo sapiens
tagcaaggagaagtc

SEQ ID NO: 1659248 - DNA, 15 bp, Homo sapiens
agcaaggagaagtct

SEQ ID NO: 1659249 - DNA, 15 bp, Homo sapiens
gcaaggagaagtctt

SEQ ID NO: 1659250 - DNA, 15 bp, Homo sapiens
caaggagaagtcttg

SEQ ID NO: 1659251 - DNA, 15 bp, Homo sapiens
aaggagaagtcttgg

SEQ ID NO: 1659252 - DNA, 15 bp, Homo sapiens
aggagaagtcttggg

SEQ ID NO: 1659253 - DNA, 15 bp, Homo sapiens
ggagaagtcttgggt

SEQ ID NO: 1659254 - DNA, 15 bp, Homo sapiens
gagaagtcttgggta

SEQ ID NO: 1659255 - DNA, 15 bp, Homo sapiens
agaagtcttgggtat

SEQ ID NO: 1659256 - DNA, 15 bp, Homo sapiens
gaagtcttgggtatt

SEQ ID NO: 1659257 - DNA, 15 bp, Homo sapiens
aagtcttgggtattc

SEQ ID NO: 1659258 - DNA, 15 bp, Homo sapiens
agtcttgggtattca

SEQ ID NO: 1659259 - DNA, 15 bp, Homo sapiens
gtcttgggtattcat

SEQ ID NO: 1659260 - DNA, 15 bp, Homo sapiens
tcttgggtattcatc

SEQ ID NO: 1659261 - DNA, 15 bp, Homo sapiens
cttgggtattcatcc

SEQ ID NO: 1659262 - DNA, 15 bp, Homo sapiens
ttgggtattcatccc

SEQ ID NO: 1659263 - DNA, 15 bp, Homo sapiens
tgggtattcatccca

SEQ ID NO: 1659264 - DNA, 15 bp, Homo sapiens
gggtattcatcccag

SEQ ID NO: 1659265 - DNA, 15 bp, Homo sapiens
ggtattcatcccagg

SEQ ID NO: 1659266 - DNA, 15 bp, Homo sapiens
gtattcatcccaggt

SEQ ID NO: 1659267 - DNA, 15 bp, Homo sapiens
tattcatcccaggtt

SEQ ID NO: 1659268 - DNA, 15 bp, Homo sapiens
attcatcccaggttg

SEQ ID NO: 1659269 - DNA, 15 bp, Homo sapiens
ttcatcccaggttgg

SEQ ID NO: 1659270 - DNA, 15 bp, Homo sapiens
tcatcccaggttggg

SEQ ID NO: 1659271 - DNA, 15 bp, Homo sapiens
catcccaggttgggg

SEQ ID NO: 1659272 - DNA, 15 bp, Homo sapiens
atcccaggttggggg

SEQ ID NO: 1659273 - DNA, 15 bp, Homo sapiens
tcccaggttgggggg

SEQ ID NO: 1659274 - DNA, 15 bp, Homo sapiens
cccaggttgggggga

SEQ ID NO: 1659275 - DNA, 15 bp, Homo sapiens
ccaggttggggggac

SEQ ID NO: 1659276 - DNA, 15 bp, Homo sapiens
caggttggggggacc

SEQ ID NO: 1659277 - DNA, 15 bp, Homo sapiens
aggttggggggaccc

SEQ ID NO: 1659278 - DNA, 15 bp, Homo sapiens
ggttggggggaccca

SEQ ID NO: 1659279 - DNA, 15 bp, Homo sapiens
gttggggggacccaa

SEQ ID NO: 1659280 - DNA, 15 bp, Homo sapiens
ttggggggacccaat

SEQ ID NO: 1659281 - DNA, 15 bp, Homo sapiens
tggggggacccaatt

SEQ ID NO: 1659282 - DNA, 15 bp, Homo sapiens
ggggggacccaatta

SEQ ID NO: 1659283 - DNA, 15 bp, Homo sapiens
gggggacccaattat

SEQ ID NO: 1659284 - DNA, 15 bp, Homo sapiens
ggggacccaattatt

SEQ ID NO: 1659285 - DNA, 15 bp, Homo sapiens
gggacccaattattt

SEQ ID NO: 1659286 - DNA, 15 bp, Homo sapiens
ggacccaattatttc

SEQ ID NO: 1659287 - DNA, 15 bp, Homo sapiens
gacccaattatttct

SEQ ID NO: 1659288 - DNA, 15 bp, Homo sapiens
acccaattatttctc

SEQ ID NO: 1659289 - DNA, 15 bp, Homo sapiens
cccaattatttctca

SEQ ID NO: 1659290 - DNA, 15 bp, Homo sapiens
ccaattatttctcaa

SEQ ID NO: 1659291 - DNA, 15 bp, Homo sapiens
caattatttctcaat

SEQ ID NO: 1659292 - DNA, 15 bp, Homo sapiens
aattatttctcaatc

SEQ ID NO: 1659293 - DNA, 15 bp, Homo sapiens
attatttctcaatcc

SEQ ID NO: 1659294 - DNA, 15 bp, Homo sapiens
ttatttctcaatccc

SEQ ID NO: 1659295 - DNA, 15 bp, Homo sapiens
tatttctcaatccca

SEQ ID NO: 1659296 - DNA, 15 bp, Homo sapiens
atttctcaatcccat

SEQ ID NO: 1659297 - DNA, 15 bp, Homo sapiens
tttctcaatcccatt

SEQ ID NO: 1659298 - DNA, 15 bp, Homo sapiens
ttctcaatcccattg

SEQ ID NO: 1659299 - DNA, 15 bp, Homo sapiens
tctcaatcccattgt

SEQ ID NO: 1659300 - DNA, 15 bp, Homo sapiens
ctcaatcccattgta

SEQ ID NO: 1659301 - DNA, 15 bp, Homo sapiens
tcaatcccattgtat

SEQ ID NO: 1659302 - DNA, 15 bp, Homo sapiens
caatcccattgtatt

SEQ ID NO: 1659303 - DNA, 15 bp, Homo sapiens
aatcccattgtattc

SEQ ID NO: 1659304 - DNA, 15 bp, Homo sapiens
atcccattgtattct

SEQ ID NO: 1659305 - DNA, 15 bp, Homo sapiens
tcccattgtattctg

SEQ ID NO: 1659306 - DNA, 15 bp, Homo sapiens
cccattgtattctgg

SEQ ID NO: 1659307 - DNA, 15 bp, Homo sapiens
ccattgtattctgga

SEQ ID NO: 1659308 - DNA, 15 bp, Homo sapiens
cattgtattctggaa

SEQ ID NO: 1659309 - DNA, 15 bp, Homo sapiens
attgtattctggaat

SEQ ID NO: 1659310 - DNA, 15 bp, Homo sapiens
ttgtattctggaatg

SEQ ID NO: 1659311 - DNA, 15 bp, Homo sapiens
tgtattctggaatgg

SEQ ID NO: 1659312 - DNA, 15 bp, Homo sapiens
gtattctggaatggg

SEQ ID NO: 1659313 - DNA, 15 bp, Homo sapiens
tattctggaatgggc

SEQ ID NO: 1659314 - DNA, 15 bp, Homo sapiens
attctggaatgggca

SEQ ID NO: 1659315 - DNA, 15 bp, Homo sapiens
ttctggaatgggcaa

SEQ ID NO: 1659316 - DNA, 15 bp, Homo sapiens
tctggaatgggcaat

SEQ ID NO: 1659317 - DNA, 15 bp, Homo sapiens
ctggaatgggcaatt

SEQ ID NO: 1659318 - DNA, 15 bp, Homo sapiens
tggaatgggcaattt

SEQ ID NO: 1659319 - DNA, 15 bp, Homo sapiens
ggaatgggcaatttg

SEQ ID NO: 1659320 - DNA, 15 bp, Homo sapiens
gaatgggcaatttgt

SEQ ID NO: 1659321 - DNA, 15 bp, Homo sapiens
aatgggcaatttgtc

SEQ ID NO: 1659322 - DNA, 15 bp, Homo sapiens
atgggcaatttgtcc

SEQ ID NO: 1659323 - DNA, 15 bp, Homo sapiens
tgggcaatttgtcca

SEQ ID NO: 1659324 - DNA, 15 bp, Homo sapiens
gggcaatttgtccac

SEQ ID NO: 1659325 - DNA, 15 bp, Homo sapiens
ggcaatttgtccacg

SEQ ID NO: 1659326 - DNA, 15 bp, Homo sapiens
gcaatttgtccacgt

SEQ ID NO: 1659327 - DNA, 15 bp, Homo sapiens
caatttgtccacgtc

SEQ ID NO: 1659328 - DNA, 15 bp, Homo sapiens
aatttgtccacgtca

SEQ ID NO: 1659329 - DNA, 15 bp, Homo sapiens
atttgtccacgtcac

SEQ ID NO: 1659330 - DNA, 15 bp, Homo sapiens
tttgtccacgtcact

SEQ ID NO: 1659331 - DNA, 15 bp, Homo sapiens
ttgtccacgtcactg

SEQ ID NO: 1659332 - DNA, 15 bp, Homo sapiens
tgtccacgtcactgt

SEQ ID NO: 1659333 - DNA, 15 bp, Homo sapiens
gtccacgtcactgtg

SEQ ID NO: 1659334 - DNA, 15 bp, Homo sapiens
tccacgtcactgtga

SEQ ID NO: 1659335 - DNA, 15 bp, Homo sapiens
ccacgtcactgtgac

SEQ ID NO: 1659336 - DNA, 15 bp, Homo sapiens
cacgtcactgtgacc

SEQ ID NO: 1659337 - DNA, 15 bp, Homo sapiens
acgtcactgtgacct

SEQ ID NO: 1659338 - DNA, 15 bp, Homo sapiens
cgtcactgtgaccta

SEQ ID NO: 1659339 - DNA, 15 bp, Homo sapiens
gtcactgtgacctag

SEQ ID NO: 1659340 - DNA, 15 bp, Homo sapiens
tcactgtgacctagg

SEQ ID NO: 1659341 - DNA, 15 bp, Homo sapiens
cactgtgacctagga

SEQ ID NO: 1659342 - DNA, 15 bp, Homo sapiens
actgtgacctaggaa

SEQ ID NO: 1659343 - DNA, 15 bp, Homo sapiens
ctgtgacctaggaac

SEQ ID NO: 1659344 - DNA, 15 bp, Homo sapiens
tgtgacctaggaaca

SEQ ID NO: 1659345 - DNA, 15 bp, Homo sapiens
gtgacctaggaacac

SEQ ID NO: 1659346 - DNA, 15 bp, Homo sapiens
tgacctaggaacacg

SEQ ID NO: 1659347 - DNA, 15 bp, Homo sapiens
gacctaggaacacgc

SEQ ID NO: 1659348 - DNA, 15 bp, Homo sapiens
acctaggaacacgcg

SEQ ID NO: 1659349 - DNA, 15 bp, Homo sapiens
cctaggaacacgcga

SEQ ID NO: 1659350 - DNA, 15 bp, Homo sapiens
ctaggaacacgcgaa

SEQ ID NO: 1659351 - DNA, 15 bp, Homo sapiens
taggaacacgcgaat

SEQ ID NO: 1659352 - DNA, 15 bp, Homo sapiens
aggaacacgcgaatg

SEQ ID NO: 1659353 - DNA, 15 bp, Homo sapiens
ggaacacgcgaatga

SEQ ID NO: 1659354 - DNA, 15 bp, Homo sapiens
gaacacgcgaatgag

SEQ ID NO: 1659355 - DNA, 15 bp, Homo sapiens
aacacgcgaatgaga

SEQ ID NO: 1659356 - DNA, 15 bp, Homo sapiens
acacgcgaatgagaa

SEQ ID NO: 1659357 - DNA, 15 bp, Homo sapiens
cacgcgaatgagaac

SEQ ID NO: 1659358 - DNA, 15 bp, Homo sapiens
acgcgaatgagaacc

SEQ ID NO: 1659359 - DNA, 15 bp, Homo sapiens
cgcgaatgagaaccc

SEQ ID NO: 1659360 - DNA, 15 bp, Homo sapiens
gcgaatgagaaccca

SEQ ID NO: 1659361 - DNA, 15 bp, Homo sapiens
cgaatgagaacccac

SEQ ID NO: 1659362 - DNA, 15 bp, Homo sapiens
gaatgagaacccaca

SEQ ID NO: 1659363 - DNA, 15 bp, Homo sapiens
aatgagaacccacag

SEQ ID NO: 1659364 - DNA, 15 bp, Homo sapiens
atgagaacccacagc

SEQ ID NO: 1659365 - DNA, 15 bp, Homo sapiens
tgagaacccacagct

SEQ ID NO: 1659366 - DNA, 15 bp, Homo sapiens
gagaacccacagctg

SEQ ID NO: 1659367 - DNA, 15 bp, Homo sapiens
agaacccacagctga

SEQ ID NO: 1659368 - DNA, 15 bp, Homo sapiens
gaacccacagctgag

SEQ ID NO: 1659369 - DNA, 15 bp, Homo sapiens
aacccacagctgagg

SEQ ID NO: 1659370 - DNA, 15 bp, Homo sapiens
acccacagctgaggg

SEQ ID NO: 1659371 - DNA, 15 bp, Homo sapiens
cccacagctgagggc

SEQ ID NO: 1659372 - DNA, 15 bp, Homo sapiens
ccacagctgagggcc

SEQ ID NO: 1659373 - DNA, 15 bp, Homo sapiens
cacagctgagggcct

SEQ ID NO: 1659374 - DNA, 15 bp, Homo sapiens
acagctgagggcctc

SEQ ID NO: 1659375 - DNA, 15 bp, Homo sapiens
cagctgagggcctct

SEQ ID NO: 1659376 - DNA, 15 bp, Homo sapiens
agctgagggcctctg

SEQ ID NO: 1659377 - DNA, 15 bp, Homo sapiens
gctgagggcctctgc

SEQ ID NO: 1659378 - DNA, 15 bp, Homo sapiens
ctgagggcctctgcg

SEQ ID NO: 1659379 - DNA, 15 bp, Homo sapiens
tgagggcctctgcgc

SEQ ID NO: 1659380 - DNA, 15 bp, Homo sapiens
gagggcctctgcgca

SEQ ID NO: 1659381 - DNA, 15 bp, Homo sapiens
agggcctctgcgcac

SEQ ID NO: 1659382 - DNA, 15 bp, Homo sapiens
gggcctctgcgcaca

SEQ ID NO: 1659383 - DNA, 15 bp, Homo sapiens
ggcctctgcgcacag

SEQ ID NO: 1659384 - DNA, 15 bp, Homo sapiens
gcctctgcgcacaga

SEQ ID NO: 1659385 - DNA, 15 bp, Homo sapiens
cctctgcgcacagaa

SEQ ID NO: 1659386 - DNA, 15 bp, Homo sapiens
ctctgcgcacagaac

SEQ ID NO: 1659387 - DNA, 15 bp, Homo sapiens
tctgcgcacagaaca

SEQ ID NO: 1659388 - DNA, 15 bp, Homo sapiens
ctgcgcacagaacag

SEQ ID NO: 1659389 - DNA, 15 bp, Homo sapiens
tgcgcacagaacagc

SEQ ID NO: 1659390 - DNA, 15 bp, Homo sapiens
gcgcacagaacagct

SEQ ID NO: 1659391 - DNA, 15 bp, Homo sapiens
cgcacagaacagctg

SEQ ID NO: 1659392 - DNA, 15 bp, Homo sapiens
gcacagaacagctgt

SEQ ID NO: 1659393 - DNA, 15 bp, Homo sapiens
cacagaacagctgtt

SEQ ID NO: 1659394 - DNA, 15 bp, Homo sapiens
acagaacagctgttc

SEQ ID NO: 1659395 - DNA, 15 bp, Homo sapiens
cagaacagctgttct

SEQ ID NO: 1659396 - DNA, 15 bp, Homo sapiens
agaacagctgttctc

SEQ ID NO: 1659397 - DNA, 15 bp, Homo sapiens
gaacagctgttctcc

SEQ ID NO: 1659398 - DNA, 15 bp, Homo sapiens
aacagctgttctccc

SEQ ID NO: 1659399 - DNA, 15 bp, Homo sapiens
acagctgttctcccc

SEQ ID NO: 1659400 - DNA, 15 bp, Homo sapiens
cagctgttctcccca

SEQ ID NO: 1659401 - DNA, 15 bp, Homo sapiens
agctgttctccccag

SEQ ID NO: 1659402 - DNA, 15 bp, Homo sapiens
gctgttctccccagg

SEQ ID NO: 1659403 - DNA, 15 bp, Homo sapiens
ctgttctccccagga

SEQ ID NO: 1659404 - DNA, 15 bp, Homo sapiens
tgttctccccaggaa

SEQ ID NO: 1659405 - DNA, 15 bp, Homo sapiens
gttctccccaggaaa

SEQ ID NO: 1659406 - DNA, 15 bp, Homo sapiens
ttctccccaggaaat

SEQ ID NO: 1659407 - DNA, 15 bp, Homo sapiens
tctccccaggaaatc

SEQ ID NO: 1659408 - DNA, 15 bp, Homo sapiens
ctccccaggaaatca

SEQ ID NO: 1659409 - DNA, 15 bp, Homo sapiens
tccccaggaaatcaa

SEQ ID NO: 1659410 - DNA, 15 bp, Homo sapiens
ccccaggaaatcaac

SEQ ID NO: 1659411 - DNA, 15 bp, Homo sapiens
cccaggaaatcaact

SEQ ID NO: 1659412 - DNA, 15 bp, Homo sapiens
ccaggaaatcaactt

SEQ ID NO: 1659413 - DNA, 15 bp, Homo sapiens
caggaaatcaacttt

SEQ ID NO: 1659414 - DNA, 15 bp, Homo sapiens
aggaaatcaactttt

SEQ ID NO: 1659415 - DNA, 15 bp, Homo sapiens
ggaaatcaacttttt

SEQ ID NO: 1659416 - DNA, 15 bp, Homo sapiens
gaaatcaactttttt

SEQ ID NO: 1659417 - DNA, 15 bp, Homo sapiens
aaatcaacttttttt

SEQ ID NO: 1659418 - DNA, 15 bp, Homo sapiens
aatcaacttttttta

SEQ ID NO: 1659419 - DNA, 15 bp, Homo sapiens
atcaactttttttaa

SEQ ID NO: 1659420 - DNA, 15 bp, Homo sapiens
tcaactttttttaat

SEQ ID NO: 1659421 - DNA, 15 bp, Homo sapiens
caactttttttaatt

SEQ ID NO: 1659422 - DNA, 15 bp, Homo sapiens
aactttttttaattg

SEQ ID NO: 1659423 - DNA, 15 bp, Homo sapiens
actttttttaattga

SEQ ID NO: 1659424 - DNA, 15 bp, Homo sapiens
ctttttttaattgag

SEQ ID NO: 1659425 - DNA, 15 bp, Homo sapiens
tttttttaattgaga

SEQ ID NO: 1659426 - DNA, 15 bp, Homo sapiens
ttttttaattgagaa

SEQ ID NO: 1659427 - DNA, 15 bp, Homo sapiens
tttttaattgagaag

SEQ ID NO: 1659428 - DNA, 15 bp, Homo sapiens
ttttaattgagaagc

SEQ ID NO: 1659429 - DNA, 15 bp, Homo sapiens
tttaattgagaagct

SEQ ID NO: 1659430 - DNA, 15 bp, Homo sapiens
ttaattgagaagcta

SEQ ID NO: 1659431 - DNA, 15 bp, Homo sapiens
taattgagaagctaa

SEQ ID NO: 1659432 - DNA, 15 bp, Homo sapiens
aattgagaagctaaa

SEQ ID NO: 1659433 - DNA, 15 bp, Homo sapiens
attgagaagctaaaa

SEQ ID NO: 1659434 - DNA, 15 bp, Homo sapiens
ttgagaagctaaaaa

SEQ ID NO: 1659435 - DNA, 15 bp, Homo sapiens
tgagaagctaaaaaa

SEQ ID NO: 1659436 - DNA, 15 bp, Homo sapiens
gagaagctaaaaaat

SEQ ID NO: 1659437 - DNA, 15 bp, Homo sapiens
agaagctaaaaaatt

SEQ ID NO: 1659438 - DNA, 15 bp, Homo sapiens
gaagctaaaaaatta

SEQ ID NO: 1659439 - DNA, 15 bp, Homo sapiens
aagctaaaaaattat

SEQ ID NO: 1659440 - DNA, 15 bp, Homo sapiens
agctaaaaaattatt

SEQ ID NO: 1659441 - DNA, 15 bp, Homo sapiens
gctaaaaaattattc

SEQ ID NO: 1659442 - DNA, 15 bp, Homo sapiens
ctaaaaaattattct

SEQ ID NO: 1659443 - DNA, 15 bp, Homo sapiens
taaaaaattattcta

SEQ ID NO: 1659444 - DNA, 15 bp, Homo sapiens
aaaaaattattctaa

SEQ ID NO: 1659445 - DNA, 15 bp, Homo sapiens
aaaaattattctaag

SEQ ID NO: 1659446 - DNA, 15 bp, Homo sapiens
aaaattattctaaga

SEQ ID NO: 1659447 - DNA, 15 bp, Homo sapiens
aaattattctaagag

SEQ ID NO: 1659448 - DNA, 15 bp, Homo sapiens
aattattctaagaga

SEQ ID NO: 1659449 - DNA, 15 bp, Homo sapiens
attattctaagagag

SEQ ID NO: 1659450 - DNA, 15 bp, Homo sapiens
ttattctaagagagg

SEQ ID NO: 1659451 - DNA, 15 bp, Homo sapiens
tattctaagagaggt

SEQ ID NO: 1659452 - DNA, 15 bp, Homo sapiens
attctaagagaggta

SEQ ID NO: 1659453 - DNA, 15 bp, Homo sapiens
ttctaagagaggtag

SEQ ID NO: 1659454 - DNA, 15 bp, Homo sapiens
tctaagagaggtagc

SEQ ID NO: 1659455 - DNA, 15 bp, Homo sapiens
ctaagagaggtagcc

SEQ ID NO: 1659456 - DNA, 15 bp, Homo sapiens
taagagaggtagccc

SEQ ID NO: 1659457 - DNA, 15 bp, Homo sapiens
aagagaggtagccca

SEQ ID NO: 1659458 - DNA, 15 bp, Homo sapiens
agagaggtagcccat

SEQ ID NO: 1659459 - DNA, 15 bp, Homo sapiens
gagaggtagcccatc

SEQ ID NO: 1659460 - DNA, 15 bp, Homo sapiens
agaggtagcccatcc

SEQ ID NO: 1659461 - DNA, 15 bp, Homo sapiens
gaggtagcccatcct

SEQ ID NO: 1659462 - DNA, 15 bp, Homo sapiens
aggtagcccatccta

SEQ ID NO: 1659463 - DNA, 15 bp, Homo sapiens
ggtagcccatcctaa

SEQ ID NO: 1659464 - DNA, 15 bp, Homo sapiens
gtagcccatcctaaa

SEQ ID NO: 1659465 - DNA, 15 bp, Homo sapiens
tagcccatcctaaaa

SEQ ID NO: 1659466 - DNA, 15 bp, Homo sapiens
agcccatcctaaaaa

SEQ ID NO: 1659467 - DNA, 15 bp, Homo sapiens
gcccatcctaaaaat

SEQ ID NO: 1659468 - DNA, 15 bp, Homo sapiens
cccatcctaaaaata

SEQ ID NO: 1659469 - DNA, 15 bp, Homo sapiens
ccatcctaaaaatag

SEQ ID NO: 1659470 - DNA, 15 bp, Homo sapiens
catcctaaaaatagc

SEQ ID NO: 1659471 - DNA, 15 bp, Homo sapiens
atcctaaaaatagct

SEQ ID NO: 1659472 - DNA, 15 bp, Homo sapiens
tcctaaaaatagctg

SEQ ID NO: 1659473 - DNA, 15 bp, Homo sapiens
cctaaaaatagctgt

SEQ ID NO: 1659474 - DNA, 15 bp, Homo sapiens
ctaaaaatagctgta

SEQ ID NO: 1659475 - DNA, 15 bp, Homo sapiens
taaaaatagctgtaa

SEQ ID NO: 1659476 - DNA, 15 bp, Homo sapiens
aaaaatagctgtaat

SEQ ID NO: 1659477 - DNA, 15 bp, Homo sapiens
aaaatagctgtaatg

SEQ ID NO: 1659478 - DNA, 15 bp, Homo sapiens
aaatagctgtaatgc

SEQ ID NO: 1659479 - DNA, 15 bp, Homo sapiens
aatagctgtaatgca

SEQ ID NO: 1659480 - DNA, 15 bp, Homo sapiens
atagctgtaatgcag

SEQ ID NO: 1659481 - DNA, 15 bp, Homo sapiens
tagctgtaatgcaga

SEQ ID NO: 1659482 - DNA, 15 bp, Homo sapiens
agctgtaatgcagaa

SEQ ID NO: 1659483 - DNA, 15 bp, Homo sapiens
gctgtaatgcagaag

SEQ ID NO: 1659484 - DNA, 15 bp, Homo sapiens
ctgtaatgcagaagt

SEQ ID NO: 1659485 - DNA, 15 bp, Homo sapiens
tgtaatgcagaagtt

SEQ ID NO: 1659486 - DNA, 15 bp, Homo sapiens
gtaatgcagaagttc

SEQ ID NO: 1659487 - DNA, 15 bp, Homo sapiens
taatgcagaagttca

SEQ ID NO: 1659488 - DNA, 15 bp, Homo sapiens
aatgcagaagttcat

SEQ ID NO: 1659489 - DNA, 15 bp, Homo sapiens
atgcagaagttcatg

SEQ ID NO: 1659490 - DNA, 15 bp, Homo sapiens
tgcagaagttcatgt

SEQ ID NO: 1659491 - DNA, 15 bp, Homo sapiens
gcagaagttcatgtt

SEQ ID NO: 1659492 - DNA, 15 bp, Homo sapiens
cagaagttcatgttc

SEQ ID NO: 1659493 - DNA, 15 bp, Homo sapiens
agaagttcatgttca

SEQ ID NO: 1659494 - DNA, 15 bp, Homo sapiens
gaagttcatgttcaa

SEQ ID NO: 1659495 - DNA, 15 bp, Homo sapiens
aagttcatgttcaac

SEQ ID NO: 1659496 - DNA, 15 bp, Homo sapiens
agttcatgttcaacc

SEQ ID NO: 1659497 - DNA, 15 bp, Homo sapiens
gttcatgttcaacca

SEQ ID NO: 1659498 - DNA, 15 bp, Homo sapiens
ttcatgttcaaccaa

SEQ ID NO: 1659499 - DNA, 15 bp, Homo sapiens
tcatgttcaaccaat

SEQ ID NO: 1659500 - DNA, 15 bp, Homo sapiens
catgttcaaccaatc

SEQ ID NO: 1659501 - DNA, 15 bp, Homo sapiens
atgttcaaccaatca

SEQ ID NO: 1659502 - DNA, 15 bp, Homo sapiens
tgttcaaccaatcat

SEQ ID NO: 1659503 - DNA, 15 bp, Homo sapiens
gttcaaccaatcatt

SEQ ID NO: 1659504 - DNA, 15 bp, Homo sapiens
ttcaaccaatcattt

SEQ ID NO: 1659505 - DNA, 15 bp, Homo sapiens
tcaaccaatcatttt

SEQ ID NO: 1659506 - DNA, 15 bp, Homo sapiens
caaccaatcattttt

SEQ ID NO: 1659507 - DNA, 15 bp, Homo sapiens
aaccaatcatttttg

SEQ ID NO: 1659508 - DNA, 15 bp, Homo sapiens
accaatcatttttgc

SEQ ID NO: 1659509 - DNA, 15 bp, Homo sapiens
ccaatcatttttgct

SEQ ID NO: 1659510 - DNA, 15 bp, Homo sapiens
caatcatttttgctt

SEQ ID NO: 1659511 - DNA, 15 bp, Homo sapiens
aatcatttttgctta

SEQ ID NO: 1659512 - DNA, 15 bp, Homo sapiens
atcatttttgcttac

SEQ ID NO: 1659513 - DNA, 15 bp, Homo sapiens
tcatttttgcttacg

SEQ ID NO: 1659514 - DNA, 15 bp, Homo sapiens
catttttgcttacga

SEQ ID NO: 1659515 - DNA, 15 bp, Homo sapiens
atttttgcttacgat

SEQ ID NO: 1659516 - DNA, 15 bp, Homo sapiens
tttttgcttacgatg

SEQ ID NO: 1659517 - DNA, 15 bp, Homo sapiens
ttttgcttacgatgc

SEQ ID NO: 1659518 - DNA, 15 bp, Homo sapiens
tttgcttacgatgca

SEQ ID NO: 1659519 - DNA, 15 bp, Homo sapiens
ttgcttacgatgcaa

SEQ ID NO: 1659520 - DNA, 15 bp, Homo sapiens
tgcttacgatgcaaa

SEQ ID NO: 1659521 - DNA, 15 bp, Homo sapiens
gcttacgatgcaaaa

SEQ ID NO: 1659522 - DNA, 15 bp, Homo sapiens
cttacgatgcaaaaa

SEQ ID NO: 1659523 - DNA, 15 bp, Homo sapiens
ttacgatgcaaaaat

SEQ ID NO: 1659524 - DNA, 15 bp, Homo sapiens
tacgatgcaaaaatt

SEQ ID NO: 1659525 - DNA, 15 bp, Homo sapiens
acgatgcaaaaattg

SEQ ID NO: 1659526 - DNA, 15 bp, Homo sapiens
cgatgcaaaaattga

SEQ ID NO: 1659527 - DNA, 15 bp, Homo sapiens
gatgcaaaaattgaa

SEQ ID NO: 1659528 - DNA, 15 bp, Homo sapiens
atgcaaaaattgaaa

SEQ ID NO: 1659529 - DNA, 15 bp, Homo sapiens
tgcaaaaattgaaaa

SEQ ID NO: 1659530 - DNA, 15 bp, Homo sapiens
gcaaaaattgaaaac

SEQ ID NO: 1659531 - DNA, 15 bp, Homo sapiens
caaaaattgaaaact

SEQ ID NO: 1659532 - DNA, 15 bp, Homo sapiens
aaaaattgaaaacta

SEQ ID NO: 1659533 - DNA, 15 bp, Homo sapiens
aaaattgaaaactaa

SEQ ID NO: 1659534 - DNA, 15 bp, Homo sapiens
aattgaaaactaagt

SEQ ID NO: 1659535 - DNA, 15 bp, Homo sapiens
attgaaaactaagtt

SEQ ID NO: 1659536 - DNA, 15 bp, Homo sapiens
ttgaaaactaagttt

SEQ ID NO: 1659537 - DNA, 15 bp, Homo sapiens
tgaaaactaagttta

SEQ ID NO: 1659538 - DNA, 15 bp, Homo sapiens
gaaaactaagtttat

SEQ ID NO: 1659539 - DNA, 15 bp, Homo sapiens
aaaactaagtttatt

SEQ ID NO: 1659540 - DNA, 15 bp, Homo sapiens
aaactaagtttatta

SEQ ID NO: 1659541 - DNA, 15 bp, Homo sapiens
aactaagtttattag

SEQ ID NO: 1659542 - DNA, 15 bp, Homo sapiens
ctaagtttattagag

SEQ ID NO: 1659543 - DNA, 15 bp, Homo sapiens
taagtttattagaga

SEQ ID NO: 1659544 - DNA, 15 bp, Homo sapiens
aagtttattagagag

SEQ ID NO: 1659545 - DNA, 15 bp, Homo sapiens
agtttattagagagg

SEQ ID NO: 1659546 - DNA, 15 bp, Homo sapiens
gtttattagagaggt

SEQ ID NO: 1659547 - DNA, 15 bp, Homo sapiens
tttattagagaggtt

SEQ ID NO: 1659548 - DNA, 15 bp, Homo sapiens
ttattagagaggtta

SEQ ID NO: 1659549 - DNA, 15 bp, Homo sapiens
tattagagaggttag

SEQ ID NO: 1659550 - DNA, 15 bp, Homo sapiens
attagagaggttaga

SEQ ID NO: 1659551 - DNA, 15 bp, Homo sapiens
ttagagaggttagag

SEQ ID NO: 1659552 - DNA, 15 bp, Homo sapiens
tagagaggttagaga

SEQ ID NO: 1659553 - DNA, 15 bp, Homo sapiens
agagaggttagagaa

SEQ ID NO: 1659554 - DNA, 15 bp, Homo sapiens
gaggttagagaagga

SEQ ID NO: 1659555 - DNA, 15 bp, Homo sapiens
aggttagagaaggag

SEQ ID NO: 1659556 - DNA, 15 bp, Homo sapiens
ggttagagaaggagg

SEQ ID NO: 1659557 - DNA, 15 bp, Homo sapiens
ttagagaaggaggag

SEQ ID NO: 1659558 - DNA, 15 bp, Homo sapiens
tagagaaggaggagc

SEQ ID NO: 1659559 - DNA, 15 bp, Homo sapiens
agagaaggaggagct

SEQ ID NO: 1659560 - DNA, 15 bp, Homo sapiens
gagaaggaggagctc

SEQ ID NO: 1659561 - DNA, 15 bp, Homo sapiens
agaaggaggagctct

SEQ ID NO: 1659562 - DNA, 15 bp, Homo sapiens
gaaggaggagctcta

SEQ ID NO: 1659563 - DNA, 15 bp, Homo sapiens
aaggaggagctctaa

SEQ ID NO: 1659564 - DNA, 15 bp, Homo sapiens
aggaggagctctaag

SEQ ID NO: 1659565 - DNA, 15 bp, Homo sapiens
ggaggagctctaagc

SEQ ID NO: 1659566 - DNA, 15 bp, Homo sapiens
gaggagctctaagca

SEQ ID NO: 1659567 - DNA, 15 bp, Homo sapiens
aggagctctaagcag

SEQ ID NO: 1659568 - DNA, 15 bp, Homo sapiens
ggagctctaagcaga

SEQ ID NO: 1659569 - DNA, 15 bp, Homo sapiens
gagctctaagcagaa

SEQ ID NO: 1659570 - DNA, 15 bp, Homo sapiens
gctctaagcagaaaa

SEQ ID NO: 1659571 - DNA, 15 bp, Homo sapiens
ctctaagcagaaaaa

SEQ ID NO: 1659572 - DNA, 15 bp, Homo sapiens
tctaagcagaaaaaa

SEQ ID NO: 1659573 - DNA, 15 bp, Homo sapiens
ctaagcagaaaaaat

SEQ ID NO: 1659574 - DNA, 15 bp, Homo sapiens
taagcagaaaaaatc

SEQ ID NO: 1659575 - DNA, 15 bp, Homo sapiens
aagcagaaaaaatcc

SEQ ID NO: 1659576 - DNA, 15 bp, Homo sapiens
agcagaaaaaatcct

SEQ ID NO: 1659577 - DNA, 15 bp, Homo sapiens
gcagaaaaaatcctg

SEQ ID NO: 1659578 - DNA, 15 bp, Homo sapiens
cagaaaaaatcctgt

SEQ ID NO: 1659579 - DNA, 15 bp, Homo sapiens
agaaaaaatcctgtg

SEQ ID NO: 1659580 - DNA, 15 bp, Homo sapiens
gaaaaaatcctgtgc

SEQ ID NO: 1659581 - DNA, 15 bp, Homo sapiens
aaaaaatcctgtgcc

SEQ ID NO: 1659582 - DNA, 15 bp, Homo sapiens
aaaaatcctgtgccg

SEQ ID NO: 1659583 - DNA, 15 bp, Homo sapiens
aaaatcctgtgccgg

SEQ ID NO: 1659584 - DNA, 15 bp, Homo sapiens
aaatcctgtgccggg

SEQ ID NO: 1659585 - DNA, 15 bp, Homo sapiens
aatcctgtgccggga

SEQ ID NO: 1659586 - DNA, 15 bp, Homo sapiens
atcctgtgccgggaa

SEQ ID NO: 1659587 - DNA, 15 bp, Homo sapiens
tcctgtgccgggaaa

SEQ ID NO: 1659588 - DNA, 15 bp, Homo sapiens
cctgtgccgggaaac

SEQ ID NO: 1659589 - DNA, 15 bp, Homo sapiens
ctgtgccgggaaacc

SEQ ID NO: 1659590 - DNA, 15 bp, Homo sapiens
tgtgccgggaaacct

SEQ ID NO: 1659591 - DNA, 15 bp, Homo sapiens
gtgccgggaaacctt

SEQ ID NO: 1659592 - DNA, 15 bp, Homo sapiens
tgccgggaaaccttg

SEQ ID NO: 1659593 - DNA, 15 bp, Homo sapiens
gccgggaaaccttga

SEQ ID NO: 1659594 - DNA, 15 bp, Homo sapiens
ccgggaaaccttgat

SEQ ID NO: 1659595 - DNA, 15 bp, Homo sapiens
cgggaaaccttgatt

SEQ ID NO: 1659596 - DNA, 15 bp, Homo sapiens
gggaaaccttgattg

SEQ ID NO: 1659597 - DNA, 15 bp, Homo sapiens
ggaaaccttgattgt

SEQ ID NO: 1659598 - DNA, 15 bp, Homo sapiens
gaaaccttgattgtg

SEQ ID NO: 1659599 - DNA, 15 bp, Homo sapiens
aaaccttgattgtgg

SEQ ID NO: 1659600 - DNA, 15 bp, Homo sapiens
aaccttgattgtggc

SEQ ID NO: 1659601 - DNA, 15 bp, Homo sapiens
accttgattgtggct

SEQ ID NO: 1659602 - DNA, 15 bp, Homo sapiens
ccttgattgtggctt

SEQ ID NO: 1659603 - DNA, 15 bp, Homo sapiens
cttgattgtggcttt

SEQ ID NO: 1659604 - DNA, 15 bp, Homo sapiens
ttgattgtggctttt

SEQ ID NO: 1659605 - DNA, 15 bp, Homo sapiens
tgattgtggcttttt

SEQ ID NO: 1659606 - DNA, 15 bp, Homo sapiens
gattgtggcttttta

SEQ ID NO: 1659607 - DNA, 15 bp, Homo sapiens
attgtggctttttaa

SEQ ID NO: 1659608 - DNA, 15 bp, Homo sapiens
ttgtggctttttaat

SEQ ID NO: 1659609 - DNA, 15 bp, Homo sapiens
tgtggctttttaatg

SEQ ID NO: 1659610 - DNA, 15 bp, Homo sapiens
gtggctttttaatga

SEQ ID NO: 1659611 - DNA, 15 bp, Homo sapiens
tggctttttaatgaa

SEQ ID NO: 1659612 - DNA, 15 bp, Homo sapiens
ggctttttaatgaat

SEQ ID NO: 1659613 - DNA, 15 bp, Homo sapiens
gctttttaatgaatg

SEQ ID NO: 1659614 - DNA, 15 bp, Homo sapiens
ctttttaatgaatga

SEQ ID NO: 1659615 - DNA, 15 bp, Homo sapiens
tttttaatgaatgaa

SEQ ID NO: 1659616 - DNA, 15 bp, Homo sapiens
ttttaatgaatgaag

SEQ ID NO: 1659617 - DNA, 15 bp, Homo sapiens
tttaatgaatgaaga

SEQ ID NO: 1659618 - DNA, 15 bp, Homo sapiens
ttaatgaatgaagag

SEQ ID NO: 1659619 - DNA, 15 bp, Homo sapiens
taatgaatgaagagg

SEQ ID NO: 1659620 - DNA, 15 bp, Homo sapiens
aatgaatgaagaggc

SEQ ID NO: 1659621 - DNA, 15 bp, Homo sapiens
atgaatgaagaggcc

SEQ ID NO: 1659622 - DNA, 15 bp, Homo sapiens
tgaatgaagaggcct

SEQ ID NO: 1659623 - DNA, 15 bp, Homo sapiens
gaatgaagaggcctc

SEQ ID NO: 1659624 - DNA, 15 bp, Homo sapiens
aatgaagaggcctcc

SEQ ID NO: 1659625 - DNA, 15 bp, Homo sapiens
atgaagaggcctccc

SEQ ID NO: 1659626 - DNA, 15 bp, Homo sapiens
tgaagaggcctccct

SEQ ID NO: 1659627 - DNA, 15 bp, Homo sapiens
gaagaggcctccctg

SEQ ID NO: 1659628 - DNA, 15 bp, Homo sapiens
aagaggcctccctga

SEQ ID NO: 1659629 - DNA, 15 bp, Homo sapiens
agaggcctccctgag

SEQ ID NO: 1659630 - DNA, 15 bp, Homo sapiens
gaggcctccctgagc

SEQ ID NO: 1659631 - DNA, 15 bp, Homo sapiens
aggcctccctgagct

SEQ ID NO: 1659632 - DNA, 15 bp, Homo sapiens
ggcctccctgagctt

SEQ ID NO: 1659633 - DNA, 15 bp, Homo sapiens
gcctccctgagctta

SEQ ID NO: 1659634 - DNA, 15 bp, Homo sapiens
cctccctgagcttac

SEQ ID NO: 1659635 - DNA, 15 bp, Homo sapiens
ctccctgagcttaca

SEQ ID NO: 1659636 - DNA, 15 bp, Homo sapiens
tccctgagcttacaa

SEQ ID NO: 1659637 - DNA, 15 bp, Homo sapiens
ccctgagcttacaat

SEQ ID NO: 1659638 - DNA, 15 bp, Homo sapiens
cctgagcttacaata

SEQ ID NO: 1659639 - DNA, 15 bp, Homo sapiens
ctgagcttacaatat

SEQ ID NO: 1659640 - DNA, 15 bp, Homo sapiens
tgagcttacaatata

SEQ ID NO: 1659641 - DNA, 15 bp, Homo sapiens
gagcttacaatataa

SEQ ID NO: 1659642 - DNA, 15 bp, Homo sapiens
agcttacaatataaa

SEQ ID NO: 1659643 - DNA, 15 bp, Homo sapiens
gcttacaatataaaa

SEQ ID NO: 1659644 - DNA, 15 bp, Homo sapiens
cttacaatataaaag

SEQ ID NO: 1659645 - DNA, 15 bp, Homo sapiens
ttacaatataaaagg

SEQ ID NO: 1659646 - DNA, 15 bp, Homo sapiens
tacaatataaaaggg

SEQ ID NO: 1659647 - DNA, 15 bp, Homo sapiens
acaatataaaagggg

SEQ ID NO: 1659648 - DNA, 15 bp, Homo sapiens
caatataaaaggggg

SEQ ID NO: 1659649 - DNA, 15 bp, Homo sapiens
aatataaaaggggga

SEQ ID NO: 1659650 - DNA, 15 bp, Homo sapiens
atataaaagggggac

SEQ ID NO: 1659651 - DNA, 15 bp, Homo sapiens
tataaaagggggaca

SEQ ID NO: 1659652 - DNA, 15 bp, Homo sapiens
ataaaagggggacag

SEQ ID NO: 1659653 - DNA, 15 bp, Homo sapiens
taaaagggggacaga

SEQ ID NO: 1659654 - DNA, 15 bp, Homo sapiens
aaaagggggacagag

SEQ ID NO: 1659655 - DNA, 15 bp, Homo sapiens
aaagggggacagaga

SEQ ID NO: 1659656 - DNA, 15 bp, Homo sapiens
aagggggacagagag

SEQ ID NO: 1659657 - DNA, 15 bp, Homo sapiens
agggggacagagagg

SEQ ID NO: 1659658 - DNA, 15 bp, Homo sapiens
gggggacagagaggt

SEQ ID NO: 1659659 - DNA, 15 bp, Homo sapiens
ggggacagagaggtg

SEQ ID NO: 1659660 - DNA, 15 bp, Homo sapiens
gggacagagaggtga

SEQ ID NO: 1659661 - DNA, 15 bp, Homo sapiens
ggacagagaggtgaa

SEQ ID NO: 1659662 - DNA, 15 bp, Homo sapiens
gacagagaggtgaag

SEQ ID NO: 1659663 - DNA, 15 bp, Homo sapiens
acagagaggtgaagg

SEQ ID NO: 1659664 - DNA, 15 bp, Homo sapiens
cagagaggtgaaggt

SEQ ID NO: 1659665 - DNA, 15 bp, Homo sapiens
agagaggtgaaggtc

SEQ ID NO: 1659666 - DNA, 15 bp, Homo sapiens
gagaggtgaaggtct

SEQ ID NO: 1659667 - DNA, 15 bp, Homo sapiens
agaggtgaaggtcta

SEQ ID NO: 1659668 - DNA, 15 bp, Homo sapiens
gaggtgaaggtctac

SEQ ID NO: 1659669 - DNA, 15 bp, Homo sapiens
aggtgaaggtctaca

SEQ ID NO: 1659670 - DNA, 15 bp, Homo sapiens
ggtgaaggtctacac

SEQ ID NO: 1659671 - DNA, 15 bp, Homo sapiens
gtgaaggtctacaca

SEQ ID NO: 1659672 - DNA, 15 bp, Homo sapiens
tgaaggtctacacat

SEQ ID NO: 1659673 - DNA, 15 bp, Homo sapiens
gaaggtctacacatc

SEQ ID NO: 1659674 - DNA, 15 bp, Homo sapiens
aaggtctacacatca

SEQ ID NO: 1659675 - DNA, 15 bp, Homo sapiens
aggtctacacatcag

SEQ ID NO: 1659676 - DNA, 15 bp, Homo sapiens
ggtctacacatcagg

SEQ ID NO: 1659677 - DNA, 15 bp, Homo sapiens
gtctacacatcaggg

SEQ ID NO: 1659678 - DNA, 15 bp, Homo sapiens
tctacacatcagggg

SEQ ID NO: 1659679 - DNA, 15 bp, Homo sapiens
ctacacatcaggggc

SEQ ID NO: 1659680 - DNA, 15 bp, Homo sapiens
tacacatcaggggct

SEQ ID NO: 1659681 - DNA, 15 bp, Homo sapiens
acacatcaggggctt

SEQ ID NO: 1659682 - DNA, 15 bp, Homo sapiens
cacatcaggggcttg

SEQ ID NO: 1659683 - DNA, 15 bp, Homo sapiens
acatcaggggcttgc

SEQ ID NO: 1659684 - DNA, 15 bp, Homo sapiens
catcaggggcttgct

SEQ ID NO: 1659685 - DNA, 15 bp, Homo sapiens
atcaggggcttgctc

SEQ ID NO: 1659686 - DNA, 15 bp, Homo sapiens
tcaggggcttgctct

SEQ ID NO: 1659687 - DNA, 15 bp, Homo sapiens
caggggcttgctctt

SEQ ID NO: 1659688 - DNA, 15 bp, Homo sapiens
aggggcttgctcttg

SEQ ID NO: 1659689 - DNA, 15 bp, Homo sapiens
ggggcttgctcttgc

SEQ ID NO: 1659690 - DNA, 15 bp, Homo sapiens
gggcttgctcttgca

SEQ ID NO: 1659691 - DNA, 15 bp, Homo sapiens
ggcttgctcttgcaa

SEQ ID NO: 1659692 - DNA, 15 bp, Homo sapiens
gcttgctcttgcaaa

SEQ ID NO: 1659693 - DNA, 15 bp, Homo sapiens
cttgctcttgcaaaa

SEQ ID NO: 1659694 - DNA, 15 bp, Homo sapiens
ttgctcttgcaaaac

SEQ ID NO: 1659695 - DNA, 15 bp, Homo sapiens
tgctcttgcaaaacc

SEQ ID NO: 1659696 - DNA, 15 bp, Homo sapiens
gctcttgcaaaacca

SEQ ID NO: 1659697 - DNA, 15 bp, Homo sapiens
ctcttgcaaaaccaa

SEQ ID NO: 1659698 - DNA, 15 bp, Homo sapiens
tcttgcaaaaccaaa

SEQ ID NO: 1659699 - DNA, 15 bp, Homo sapiens
cttgcaaaaccaaac

SEQ ID NO: 1659700 - DNA, 15 bp, Homo sapiens
ttgcaaaaccaaacc

SEQ ID NO: 1659701 - DNA, 15 bp, Homo sapiens
tgcaaaaccaaacca

SEQ ID NO: 1659702 - DNA, 15 bp, Homo sapiens
gcaaaaccaaaccac

SEQ ID NO: 1659703 - DNA, 15 bp, Homo sapiens
caaaaccaaaccaca

SEQ ID NO: 1659704 - DNA, 15 bp, Homo sapiens
aaaaccaaaccacaa

SEQ ID NO: 1659705 - DNA, 15 bp, Homo sapiens
aaaccaaaccacaag

SEQ ID NO: 1659706 - DNA, 15 bp, Homo sapiens
aaccaaaccacaaga

SEQ ID NO: 1659707 - DNA, 15 bp, Homo sapiens
accaaaccacaagac

SEQ ID NO: 1659708 - DNA, 15 bp, Homo sapiens
ccaaaccacaagaca

SEQ ID NO: 1659709 - DNA, 15 bp, Homo sapiens
caaaccacaagacag

SEQ ID NO: 1659710 - DNA, 15 bp, Homo sapiens
aaaccacaagacaga

SEQ ID NO: 1659711 - DNA, 15 bp, Homo sapiens
aaccacaagacagac

SEQ ID NO: 1659712 - DNA, 15 bp, Homo sapiens
accacaagacagact

SEQ ID NO: 1659713 - DNA, 15 bp, Homo sapiens
ccacaagacagactt

SEQ ID NO: 1659714 - DNA, 15 bp, Homo sapiens
cacaagacagacttg

SEQ ID NO: 1659715 - DNA, 15 bp, Homo sapiens
acaagacagacttgc

SEQ ID NO: 1659716 - DNA, 15 bp, Homo sapiens
caagacagacttgca

SEQ ID NO: 1659717 - DNA, 15 bp, Homo sapiens
aagacagacttgcaa

SEQ ID NO: 1659718 - DNA, 15 bp, Homo sapiens
agacagacttgcaaa

SEQ ID NO: 1659719 - DNA, 15 bp, Homo sapiens
gacagacttgcaaaa

SEQ ID NO: 1659720 - DNA, 15 bp, Homo sapiens
acagacttgcaaaag

SEQ ID NO: 1659721 - DNA, 15 bp, Homo sapiens
cagacttgcaaaaga

SEQ ID NO: 1659722 - DNA, 15 bp, Homo sapiens
agacttgcaaaagaa

SEQ ID NO: 1659723 - DNA, 15 bp, Homo sapiens
gacttgcaaaagaag

SEQ ID NO: 1659724 - DNA, 15 bp, Homo sapiens
acttgcaaaagaagg

SEQ ID NO: 1659725 - DNA, 15 bp, Homo sapiens
cttgcaaaagaaggc

SEQ ID NO: 1659726 - DNA, 15 bp, Homo sapiens
ttgcaaaagaaggca

SEQ ID NO: 1659727 - DNA, 15 bp, Homo sapiens
tgcaaaagaaggcat

SEQ ID NO: 1659728 - DNA, 15 bp, Homo sapiens
gcaaaagaaggcatg

SEQ ID NO: 1659729 - DNA, 15 bp, Homo sapiens
caaaagaaggcatgc

SEQ ID NO: 1659730 - DNA, 15 bp, Homo sapiens
aaaagaaggcatgca

SEQ ID NO: 1659731 - DNA, 15 bp, Homo sapiens
aaagaaggcatgcac

SEQ ID NO: 1659732 - DNA, 15 bp, Homo sapiens
aagaaggcatgcaca

SEQ ID NO: 1659733 - DNA, 15 bp, Homo sapiens
agaaggcatgcacag

SEQ ID NO: 1659734 - DNA, 15 bp, Homo sapiens
gaaggcatgcacagc

SEQ ID NO: 1659735 - DNA, 15 bp, Homo sapiens
aaggcatgcacagct

SEQ ID NO: 1659736 - DNA, 15 bp, Homo sapiens
aggcatgcacagctc

SEQ ID NO: 1659737 - DNA, 15 bp, Homo sapiens
ggcatgcacagctca

SEQ ID NO: 1659738 - DNA, 15 bp, Homo sapiens
gcatgcacagctcag

SEQ ID NO: 1659739 - DNA, 15 bp, Homo sapiens
catgcacagctcagc

SEQ ID NO: 1659740 - DNA, 15 bp, Homo sapiens
atgcacagctcagca

SEQ ID NO: 1659741 - DNA, 15 bp, Homo sapiens
tgcacagctcagcac

SEQ ID NO: 1659742 - DNA, 15 bp, Homo sapiens
gcacagctcagcact

SEQ ID NO: 1659743 - DNA, 15 bp, Homo sapiens
cacagctcagcactg

SEQ ID NO: 1659744 - DNA, 15 bp, Homo sapiens
acagctcagcactgc

SEQ ID NO: 1659745 - DNA, 15 bp, Homo sapiens
cagctcagcactgct

SEQ ID NO: 1659746 - DNA, 15 bp, Homo sapiens
agctcagcactgctc

SEQ ID NO: 1659747 - DNA, 15 bp, Homo sapiens
gctcagcactgctct

SEQ ID NO: 1659748 - DNA, 15 bp, Homo sapiens
ctcagcactgctctg

SEQ ID NO: 1659749 - DNA, 15 bp, Homo sapiens
tcagcactgctctgt

SEQ ID NO: 1659750 - DNA, 15 bp, Homo sapiens
cagcactgctctgtt

SEQ ID NO: 1659751 - DNA, 15 bp, Homo sapiens
agcactgctctgttg

SEQ ID NO: 1659752 - DNA, 15 bp, Homo sapiens
gcactgctctgttgc

SEQ ID NO: 1659753 - DNA, 15 bp, Homo sapiens
cactgctctgttgcc

SEQ ID NO: 1659754 - DNA, 15 bp, Homo sapiens
actgctctgttgcct

SEQ ID NO: 1659755 - DNA, 15 bp, Homo sapiens
ctgctctgttgcctg

SEQ ID NO: 1659756 - DNA, 15 bp, Homo sapiens
tgctctgttgcctgg

SEQ ID NO: 1659757 - DNA, 15 bp, Homo sapiens
gctctgttgcctggt

SEQ ID NO: 1659758 - DNA, 15 bp, Homo sapiens
ctctgttgcctggtc

SEQ ID NO: 1659759 - DNA, 15 bp, Homo sapiens
tctgttgcctggtcc

SEQ ID NO: 1659760 - DNA, 15 bp, Homo sapiens
ctgttgcctggtcct

SEQ ID NO: 1659761 - DNA, 15 bp, Homo sapiens
tgttgcctggtcctc

SEQ ID NO: 1659762 - DNA, 15 bp, Homo sapiens
gttgcctggtcctcc

SEQ ID NO: 1659763 - DNA, 15 bp, Homo sapiens
ttgcctggtcctcct

SEQ ID NO: 1659764 - DNA, 15 bp, Homo sapiens
tgcctggtcctcctg

SEQ ID NO: 1659765 - DNA, 15 bp, Homo sapiens
gcctggtcctcctga

SEQ ID NO: 1659766 - DNA, 15 bp, Homo sapiens
cctggtcctcctgac

SEQ ID NO: 1659767 - DNA, 15 bp, Homo sapiens
ctggtcctcctgact

SEQ ID NO: 1659768 - DNA, 15 bp, Homo sapiens
tggtcctcctgactg

SEQ ID NO: 1659769 - DNA, 15 bp, Homo sapiens
ggtcctcctgactgg

SEQ ID NO: 1659770 - DNA, 15 bp, Homo sapiens
gtcctcctgactggg

SEQ ID NO: 1659771 - DNA, 15 bp, Homo sapiens
tcctcctgactgggg

SEQ ID NO: 1659772 - DNA, 15 bp, Homo sapiens
cctcctgactggggt

SEQ ID NO: 1659773 - DNA, 15 bp, Homo sapiens
ctcctgactggggtg

SEQ ID NO: 1659774 - DNA, 15 bp, Homo sapiens
tcctgactggggtga

SEQ ID NO: 1659775 - DNA, 15 bp, Homo sapiens
cctgactggggtgag

SEQ ID NO: 1659776 - DNA, 15 bp, Homo sapiens
ctgactggggtgagg

SEQ ID NO: 1659777 - DNA, 15 bp, Homo sapiens
tgactggggtgaggg

SEQ ID NO: 1659778 - DNA, 15 bp, Homo sapiens
gactggggtgagggc

SEQ ID NO: 1659779 - DNA, 15 bp, Homo sapiens
actggggtgagggcc

SEQ ID NO: 1659780 - DNA, 15 bp, Homo sapiens
ctggggtgagggcca

SEQ ID NO: 1659781 - DNA, 15 bp, Homo sapiens
tggggtgagggccag

SEQ ID NO: 1659782 - DNA, 15 bp, Homo sapiens
ggggtgagggccagc

SEQ ID NO: 1659783 - DNA, 15 bp, Homo sapiens
gggtgagggccagcc

SEQ ID NO: 1659784 - DNA, 15 bp, Homo sapiens
ggtgagggccagccc

SEQ ID NO: 1659785 - DNA, 15 bp, Homo sapiens
gtgagggccagccca

SEQ ID NO: 1659786 - DNA, 15 bp, Homo sapiens
tgagggccagcccag

SEQ ID NO: 1659787 - DNA, 15 bp, Homo sapiens
gagggccagcccagg

SEQ ID NO: 1659788 - DNA, 15 bp, Homo sapiens
agggccagcccaggc

SEQ ID NO: 1659789 - DNA, 15 bp, Homo sapiens
gggccagcccaggcc

SEQ ID NO: 1659790 - DNA, 15 bp, Homo sapiens
ggccagcccaggcca

SEQ ID NO: 1659791 - DNA, 15 bp, Homo sapiens
gccagcccaggccag

SEQ ID NO: 1659792 - DNA, 15 bp, Homo sapiens
ccagcccaggccagg

SEQ ID NO: 1659793 - DNA, 15 bp, Homo sapiens
cagcccaggccaggg

SEQ ID NO: 1659794 - DNA, 15 bp, Homo sapiens
agcccaggccagggc

SEQ ID NO: 1659795 - DNA, 15 bp, Homo sapiens
gcccaggccagggca

SEQ ID NO: 1659796 - DNA, 15 bp, Homo sapiens
cccaggccagggcac

SEQ ID NO: 1659797 - DNA, 15 bp, Homo sapiens
ccaggccagggcacc

SEQ ID NO: 1659798 - DNA, 15 bp, Homo sapiens
caggccagggcaccc

SEQ ID NO: 1659799 - DNA, 15 bp, Homo sapiens
aggccagggcaccca

SEQ ID NO: 1659800 - DNA, 15 bp, Homo sapiens
ggccagggcacccag

SEQ ID NO: 1659801 - DNA, 15 bp, Homo sapiens
gccagggcacccagt

SEQ ID NO: 1659802 - DNA, 15 bp, Homo sapiens
ccagggcacccagtc

SEQ ID NO: 1659803 - DNA, 15 bp, Homo sapiens
cagggcacccagtct

SEQ ID NO: 1659804 - DNA, 15 bp, Homo sapiens
agggcacccagtctg

SEQ ID NO: 1659805 - DNA, 15 bp, Homo sapiens
gggcacccagtctga

SEQ ID NO: 1659806 - DNA, 15 bp, Homo sapiens
ggcacccagtctgag

SEQ ID NO: 1659807 - DNA, 15 bp, Homo sapiens
gcacccagtctgaga

SEQ ID NO: 1659808 - DNA, 15 bp, Homo sapiens
cacccagtctgagaa

SEQ ID NO: 1659809 - DNA, 15 bp, Homo sapiens
acccagtctgagaac

SEQ ID NO: 1659810 - DNA, 15 bp, Homo sapiens
cccagtctgagaaca

SEQ ID NO: 1659811 - DNA, 15 bp, Homo sapiens
ccagtctgagaacag

SEQ ID NO: 1659812 - DNA, 15 bp, Homo sapiens
cagtctgagaacagc

SEQ ID NO: 1659813 - DNA, 15 bp, Homo sapiens
agtctgagaacagct

SEQ ID NO: 1659814 - DNA, 15 bp, Homo sapiens
gtctgagaacagctg

SEQ ID NO: 1659815 - DNA, 15 bp, Homo sapiens
tctgagaacagctgc

SEQ ID NO: 1659816 - DNA, 15 bp, Homo sapiens
ctgagaacagctgca

SEQ ID NO: 1659817 - DNA, 15 bp, Homo sapiens
tgagaacagctgcac

SEQ ID NO: 1659818 - DNA, 15 bp, Homo sapiens
gagaacagctgcacc

SEQ ID NO: 1659819 - DNA, 15 bp, Homo sapiens
agaacagctgcaccc

SEQ ID NO: 1659820 - DNA, 15 bp, Homo sapiens
gaacagctgcaccca

SEQ ID NO: 1659821 - DNA, 15 bp, Homo sapiens
aacagctgcacccac

SEQ ID NO: 1659822 - DNA, 15 bp, Homo sapiens
acagctgcacccact

SEQ ID NO: 1659823 - DNA, 15 bp, Homo sapiens
cagctgcacccactt

SEQ ID NO: 1659824 - DNA, 15 bp, Homo sapiens
agctgcacccacttc

SEQ ID NO: 1659825 - DNA, 15 bp, Homo sapiens
gctgcacccacttcc

SEQ ID NO: 1659826 - DNA, 15 bp, Homo sapiens
ctgcacccacttccc

SEQ ID NO: 1659827 - DNA, 15 bp, Homo sapiens
tgcacccacttccca

SEQ ID NO: 1659828 - DNA, 15 bp, Homo sapiens
gcacccacttcccag

SEQ ID NO: 1659829 - DNA, 15 bp, Homo sapiens
cacccacttcccagg

SEQ ID NO: 1659830 - DNA, 15 bp, Homo sapiens
acccacttcccaggc

SEQ ID NO: 1659831 - DNA, 15 bp, Homo sapiens
cccacttcccaggca

SEQ ID NO: 1659832 - DNA, 15 bp, Homo sapiens
ccacttcccaggcaa

SEQ ID NO: 1659833 - DNA, 15 bp, Homo sapiens
cacttcccaggcaac

SEQ ID NO: 1659834 - DNA, 15 bp, Homo sapiens
acttcccaggcaacc

SEQ ID NO: 1659835 - DNA, 15 bp, Homo sapiens
cttcccaggcaacct

SEQ ID NO: 1659836 - DNA, 15 bp, Homo sapiens
ttcccaggcaacctg

SEQ ID NO: 1659837 - DNA, 15 bp, Homo sapiens
tcccaggcaacctgc

SEQ ID NO: 1659838 - DNA, 15 bp, Homo sapiens
cccaggcaacctgcc

SEQ ID NO: 1659839 - DNA, 15 bp, Homo sapiens
ccaggcaacctgcct

SEQ ID NO: 1659840 - DNA, 15 bp, Homo sapiens
caggcaacctgccta

SEQ ID NO: 1659841 - DNA, 15 bp, Homo sapiens
aggcaacctgcctaa

SEQ ID NO: 1659842 - DNA, 15 bp, Homo sapiens
ggcaacctgcctaac

SEQ ID NO: 1659843 - DNA, 15 bp, Homo sapiens
gcaacctgcctaaca

SEQ ID NO: 1659844 - DNA, 15 bp, Homo sapiens
caacctgcctaacat

SEQ ID NO: 1659845 - DNA, 15 bp, Homo sapiens
aacctgcctaacatg

SEQ ID NO: 1659846 - DNA, 15 bp, Homo sapiens
acctgcctaacatgc

SEQ ID NO: 1659847 - DNA, 15 bp, Homo sapiens
cctgcctaacatgct

SEQ ID NO: 1659848 - DNA, 15 bp, Homo sapiens
ctgcctaacatgctt

SEQ ID NO: 1659849 - DNA, 15 bp, Homo sapiens
tgcctaacatgcttc

SEQ ID NO: 1659850 - DNA, 15 bp, Homo sapiens
gcctaacatgcttcg

SEQ ID NO: 1659851 - DNA, 15 bp, Homo sapiens
cctaacatgcttcga

SEQ ID NO: 1659852 - DNA, 15 bp, Homo sapiens
ctaacatgcttcgag

SEQ ID NO: 1659853 - DNA, 15 bp, Homo sapiens
taacatgcttcgaga

SEQ ID NO: 1659854 - DNA, 15 bp, Homo sapiens
aacatgcttcgagat

SEQ ID NO: 1659855 - DNA, 15 bp, Homo sapiens
acatgcttcgagatc

SEQ ID NO: 1659856 - DNA, 15 bp, Homo sapiens
catgcttcgagatct

SEQ ID NO: 1659857 - DNA, 15 bp, Homo sapiens
atgcttcgagatctc

SEQ ID NO: 1659858 - DNA, 15 bp, Homo sapiens
tgcttcgagatctcc

SEQ ID NO: 1659859 - DNA, 15 bp, Homo sapiens
gcttcgagatctccg

SEQ ID NO: 1659860 - DNA, 15 bp, Homo sapiens
cttcgagatctccga

SEQ ID NO: 1659861 - DNA, 15 bp, Homo sapiens
ttcgagatctccgag

SEQ ID NO: 1659862 - DNA, 15 bp, Homo sapiens
tcgagatctccgaga

SEQ ID NO: 1659863 - DNA, 15 bp, Homo sapiens
cgagatctccgagat

SEQ ID NO: 1659864 - DNA, 15 bp, Homo sapiens
gagatctccgagatg

SEQ ID NO: 1659865 - DNA, 15 bp, Homo sapiens
agatctccgagatgc

SEQ ID NO: 1659866 - DNA, 15 bp, Homo sapiens
gatctccgagatgcc

SEQ ID NO: 1659867 - DNA, 15 bp, Homo sapiens
atctccgagatgcct

SEQ ID NO: 1659868 - DNA, 15 bp, Homo sapiens
tctccgagatgcctt

SEQ ID NO: 1659869 - DNA, 15 bp, Homo sapiens
ctccgagatgccttc

SEQ ID NO: 1659870 - DNA, 15 bp, Homo sapiens
tccgagatgccttca

SEQ ID NO: 1659871 - DNA, 15 bp, Homo sapiens
ccgagatgccttcag

SEQ ID NO: 1659872 - DNA, 15 bp, Homo sapiens
cgagatgccttcagc

SEQ ID NO: 1659873 - DNA, 15 bp, Homo sapiens
gagatgccttcagca

SEQ ID NO: 1659874 - DNA, 15 bp, Homo sapiens
agatgccttcagcag

SEQ ID NO: 1659875 - DNA, 15 bp, Homo sapiens
gatgccttcagcaga

SEQ ID NO: 1659876 - DNA, 15 bp, Homo sapiens
atgccttcagcagag

SEQ ID NO: 1659877 - DNA, 15 bp, Homo sapiens
tgccttcagcagagt

SEQ ID NO: 1659878 - DNA, 15 bp, Homo sapiens
gccttcagcagagtg

SEQ ID NO: 1659879 - DNA, 15 bp, Homo sapiens
ccttcagcagagtga

SEQ ID NO: 1659880 - DNA, 15 bp, Homo sapiens
cttcagcagagtgaa

SEQ ID NO: 1659881 - DNA, 15 bp, Homo sapiens
ttcagcagagtgaag

SEQ ID NO: 1659882 - DNA, 15 bp, Homo sapiens
tcagcagagtgaaga

SEQ ID NO: 1659883 - DNA, 15 bp, Homo sapiens
cagcagagtgaagac

SEQ ID NO: 1659884 - DNA, 15 bp, Homo sapiens
agcagagtgaagact

SEQ ID NO: 1659885 - DNA, 15 bp, Homo sapiens
gcagagtgaagactt

SEQ ID NO: 1659886 - DNA, 15 bp, Homo sapiens
cagagtgaagacttt

SEQ ID NO: 1659887 - DNA, 15 bp, Homo sapiens
agagtgaagactttc

SEQ ID NO: 1659888 - DNA, 15 bp, Homo sapiens
gagtgaagactttct

SEQ ID NO: 1659889 - DNA, 15 bp, Homo sapiens
agtgaagactttctt

SEQ ID NO: 1659890 - DNA, 15 bp, Homo sapiens
gtgaagactttcttt

SEQ ID NO: 1659891 - DNA, 15 bp, Homo sapiens
tgaagactttctttg

SEQ ID NO: 1659892 - DNA, 15 bp, Homo sapiens
gaagactttctttgt

SEQ ID NO: 1659893 - DNA, 15 bp, Homo sapiens
aagactttctttgtg

SEQ ID NO: 1659894 - DNA, 15 bp, Homo sapiens
agactttctttgtga

SEQ ID NO: 1659895 - DNA, 15 bp, Homo sapiens
gactttctttgtgag

SEQ ID NO: 1659896 - DNA, 15 bp, Homo sapiens
actttctttgtgagt

SEQ ID NO: 1659897 - DNA, 15 bp, Homo sapiens
ctttctttgtgagta

SEQ ID NO: 1659898 - DNA, 15 bp, Homo sapiens
tttctttgtgagtat

SEQ ID NO: 1659899 - DNA, 15 bp, Homo sapiens
ttctttgtgagtatg

SEQ ID NO: 1659900 - DNA, 15 bp, Homo sapiens
tctttgtgagtatga

SEQ ID NO: 1659901 - DNA, 15 bp, Homo sapiens
ctttgtgagtatgat

SEQ ID NO: 1659902 - DNA, 15 bp, Homo sapiens
tttgtgagtatgatt

SEQ ID NO: 1659903 - DNA, 15 bp, Homo sapiens
ttgtgagtatgattc

SEQ ID NO: 1659904 - DNA, 15 bp, Homo sapiens
tgtgagtatgattcc

SEQ ID NO: 1659905 - DNA, 15 bp, Homo sapiens
gtgagtatgattcct

SEQ ID NO: 1659906 - DNA, 15 bp, Homo sapiens
tgagtatgattcctt

SEQ ID NO: 1659907 - DNA, 15 bp, Homo sapiens
gagtatgattccttc

SEQ ID NO: 1659908 - DNA, 15 bp, Homo sapiens
agtatgattccttcc

SEQ ID NO: 1659909 - DNA, 15 bp, Homo sapiens
gtatgattccttcct

SEQ ID NO: 1659910 - DNA, 15 bp, Homo sapiens
tatgattccttcctg

SEQ ID NO: 1659911 - DNA, 15 bp, Homo sapiens
atgattccttcctgt

SEQ ID NO: 1659912 - DNA, 15 bp, Homo sapiens
tgattccttcctgtc

SEQ ID NO: 1659913 - DNA, 15 bp, Homo sapiens
gattccttcctgtcc

SEQ ID NO: 1659914 - DNA, 15 bp, Homo sapiens
attccttcctgtcct

SEQ ID NO: 1659915 - DNA, 15 bp, Homo sapiens
ttccttcctgtcctt

SEQ ID NO: 1659916 - DNA, 15 bp, Homo sapiens
tccttcctgtccttt

SEQ ID NO: 1659917 - DNA, 15 bp, Homo sapiens
ccttcctgtcctttc

SEQ ID NO: 1659918 - DNA, 15 bp, Homo sapiens
cttcctgtcctttct

SEQ ID NO: 1659919 - DNA, 15 bp, Homo sapiens
ttcctgtcctttctc

SEQ ID NO: 1659920 - DNA, 15 bp, Homo sapiens
tcctgtcctttctct

SEQ ID NO: 1659921 - DNA, 15 bp, Homo sapiens
cctgtcctttctctc

SEQ ID NO: 1659922 - DNA, 15 bp, Homo sapiens
ctgtcctttctctct

SEQ ID NO: 1659923 - DNA, 15 bp, Homo sapiens
tgtcctttctctctt

SEQ ID NO: 1659924 - DNA, 15 bp, Homo sapiens
gtcctttctctcttc

SEQ ID NO: 1659925 - DNA, 15 bp, Homo sapiens
tcctttctctcttcc

SEQ ID NO: 1659926 - DNA, 15 bp, Homo sapiens
cctttctctcttcct

SEQ ID NO: 1659927 - DNA, 15 bp, Homo sapiens
ctttctctcttcctg

SEQ ID NO: 1659928 - DNA, 15 bp, Homo sapiens
tttctctcttcctgg

SEQ ID NO: 1659929 - DNA, 15 bp, Homo sapiens
ttctctcttcctggg

SEQ ID NO: 1659930 - DNA, 15 bp, Homo sapiens
tctctcttcctggga

SEQ ID NO: 1659931 - DNA, 15 bp, Homo sapiens
ctctcttcctgggac

SEQ ID NO: 1659932 - DNA, 15 bp, Homo sapiens
tctcttcctgggact

SEQ ID NO: 1659933 - DNA, 15 bp, Homo sapiens
ctcttcctgggactg

SEQ ID NO: 1659934 - DNA, 15 bp, Homo sapiens
tcttcctgggactgc

SEQ ID NO: 1659935 - DNA, 15 bp, Homo sapiens
cttcctgggactgcc

SEQ ID NO: 1659936 - DNA, 15 bp, Homo sapiens
ttcctgggactgcct

SEQ ID NO: 1659937 - DNA, 15 bp, Homo sapiens
tcctgggactgcctg

SEQ ID NO: 1659938 - DNA, 15 bp, Homo sapiens
cctgggactgcctga

SEQ ID NO: 1659939 - DNA, 15 bp, Homo sapiens
ctgggactgcctgaa

SEQ ID NO: 1659940 - DNA, 15 bp, Homo sapiens
tgggactgcctgaac

SEQ ID NO: 1659941 - DNA, 15 bp, Homo sapiens
gggactgcctgaact

SEQ ID NO: 1659942 - DNA, 15 bp, Homo sapiens
ggactgcctgaacta

SEQ ID NO: 1659943 - DNA, 15 bp, Homo sapiens
gactgcctgaactag

SEQ ID NO: 1659944 - DNA, 15 bp, Homo sapiens
actgcctgaactaga

SEQ ID NO: 1659945 - DNA, 15 bp, Homo sapiens
ctgcctgaactagac

SEQ ID NO: 1659946 - DNA, 15 bp, Homo sapiens
tgcctgaactagaca

SEQ ID NO: 1659947 - DNA, 15 bp, Homo sapiens
gcctgaactagacat

SEQ ID NO: 1659948 - DNA, 15 bp, Homo sapiens
cctgaactagacatt

SEQ ID NO: 1659949 - DNA, 15 bp, Homo sapiens
ctgaactagacattc

SEQ ID NO: 1659950 - DNA, 15 bp, Homo sapiens
tgaactagacattct

SEQ ID NO: 1659951 - DNA, 15 bp, Homo sapiens
gaactagacattctc

SEQ ID NO: 1659952 - DNA, 15 bp, Homo sapiens
aactagacattctcc

SEQ ID NO: 1659953 - DNA, 15 bp, Homo sapiens
actagacattctcct

SEQ ID NO: 1659954 - DNA, 15 bp, Homo sapiens
ctagacattctcctg

SEQ ID NO: 1659955 - DNA, 15 bp, Homo sapiens
tagacattctcctgg

SEQ ID NO: 1659956 - DNA, 15 bp, Homo sapiens
agacattctcctgga

SEQ ID NO: 1659957 - DNA, 15 bp, Homo sapiens
gacattctcctggaa

SEQ ID NO: 1659958 - DNA, 15 bp, Homo sapiens
acattctcctggaac

SEQ ID NO: 1659959 - DNA, 15 bp, Homo sapiens
cattctcctggaact

SEQ ID NO: 1659960 - DNA, 15 bp, Homo sapiens
attctcctggaacta

SEQ ID NO: 1659961 - DNA, 15 bp, Homo sapiens
ttctcctggaactat

SEQ ID NO: 1659962 - DNA, 15 bp, Homo sapiens
tctcctggaactata

SEQ ID NO: 1659963 - DNA, 15 bp, Homo sapiens
ctcctggaactataa

SEQ ID NO: 1659964 - DNA, 15 bp, Homo sapiens
tcctggaactataag

SEQ ID NO: 1659965 - DNA, 15 bp, Homo sapiens
cctggaactataaga

SEQ ID NO: 1659966 - DNA, 15 bp, Homo sapiens
ctggaactataagaa

SEQ ID NO: 1659967 - DNA, 15 bp, Homo sapiens
tggaactataagaac

SEQ ID NO: 1659968 - DNA, 15 bp, Homo sapiens
ggaactataagaacc

SEQ ID NO: 1659969 - DNA, 15 bp, Homo sapiens
gaactataagaaccc

SEQ ID NO: 1659970 - DNA, 15 bp, Homo sapiens
aactataagaaccct

SEQ ID NO: 1659971 - DNA, 15 bp, Homo sapiens
actataagaaccctc

SEQ ID NO: 1659972 - DNA, 15 bp, Homo sapiens
ctataagaaccctcc

SEQ ID NO: 1659973 - DNA, 15 bp, Homo sapiens
tataagaaccctcct

SEQ ID NO: 1659974 - DNA, 15 bp, Homo sapiens
ataagaaccctcctc

SEQ ID NO: 1659975 - DNA, 15 bp, Homo sapiens
taagaaccctcctcc

SEQ ID NO: 1659976 - DNA, 15 bp, Homo sapiens
aagaaccctcctcct

SEQ ID NO: 1659977 - DNA, 15 bp, Homo sapiens
agaaccctcctcctg

SEQ ID NO: 1659978 - DNA, 15 bp, Homo sapiens
gaaccctcctcctgc

SEQ ID NO: 1659979 - DNA, 15 bp, Homo sapiens
aaccctcctcctgcg

SEQ ID NO: 1659980 - DNA, 15 bp, Homo sapiens
accctcctcctgcgc

SEQ ID NO: 1659981 - DNA, 15 bp, Homo sapiens
ccctcctcctgcgcc

SEQ ID NO: 1659982 - DNA, 15 bp, Homo sapiens
cctcctcctgcgcct

SEQ ID NO: 1659983 - DNA, 15 bp, Homo sapiens
ctcctcctgcgcctc

SEQ ID NO: 1659984 - DNA, 15 bp, Homo sapiens
tcctcctgcgcctcc

SEQ ID NO: 1659985 - DNA, 15 bp, Homo sapiens
cctcctgcgcctcca

SEQ ID NO: 1659986 - DNA, 15 bp, Homo sapiens
ctcctgcgcctccac

SEQ ID NO: 1659987 - DNA, 15 bp, Homo sapiens
tcctgcgcctccacc

SEQ ID NO: 1659988 - DNA, 15 bp, Homo sapiens
cctgcgcctccacct

SEQ ID NO: 1659989 - DNA, 15 bp, Homo sapiens
ctgcgcctccacctc

SEQ ID NO: 1659990 - DNA, 15 bp, Homo sapiens
tgcgcctccacctcc

SEQ ID NO: 1659991 - DNA, 15 bp, Homo sapiens
gcgcctccacctcca

SEQ ID NO: 1659992 - DNA, 15 bp, Homo sapiens
cgcctccacctccat

SEQ ID NO: 1659993 - DNA, 15 bp, Homo sapiens
gcctccacctccatc

SEQ ID NO: 1659994 - DNA, 15 bp, Homo sapiens
cctccacctccatcc

SEQ ID NO: 1659995 - DNA, 15 bp, Homo sapiens
ctccacctccatccc

SEQ ID NO: 1659996 - DNA, 15 bp, Homo sapiens
tccacctccatcccc

SEQ ID NO: 1659997 - DNA, 15 bp, Homo sapiens
ccacctccatcccca

SEQ ID NO: 1659998 - DNA, 15 bp, Homo sapiens
gtgaaacactcactc

SEQ ID NO: 1659999 - DNA, 15 bp, Homo sapiens
tgaaacactcactcc

SEQ ID NO: 1660000 - DNA, 15 bp, Homo sapiens
gaaacactcactccc

SEQ ID NO: 1660001 - DNA, 15 bp, Homo sapiens
aaacactcactcccc

SEQ ID NO: 1660002 - DNA, 15 bp, Homo sapiens
aacactcactcccca

SEQ ID NO: 1660003 - DNA, 15 bp, Homo sapiens
acactcactccccat

SEQ ID NO: 1660004 - DNA, 15 bp, Homo sapiens
cactcactccccatt

SEQ ID NO: 1660005 - DNA, 15 bp, Homo sapiens
actcactccccattc

SEQ ID NO: 1660006 - DNA, 15 bp, Homo sapiens
ctcactccccattcc

SEQ ID NO: 1660007 - DNA, 15 bp, Homo sapiens
tcactccccattcca

SEQ ID NO: 1660008 - DNA, 15 bp, Homo sapiens
cactccccattccac

SEQ ID NO: 1660009 - DNA, 15 bp, Homo sapiens
actccccattccacc

SEQ ID NO: 1660010 - DNA, 15 bp, Homo sapiens
ctccccattccacct

SEQ ID NO: 1660011 - DNA, 15 bp, Homo sapiens
tccccattccacctc

SEQ ID NO: 1660012 - DNA, 15 bp, Homo sapiens
ccccattccacctcc

SEQ ID NO: 1660013 - DNA, 15 bp, Homo sapiens
cccattccacctccc

SEQ ID NO: 1660014 - DNA, 15 bp, Homo sapiens
ccattccacctcccc

SEQ ID NO: 1660015 - DNA, 15 bp, Homo sapiens
cattccacctcccca

SEQ ID NO: 1660016 - DNA, 15 bp, Homo sapiens
attccacctccccag

SEQ ID NO: 1660017 - DNA, 15 bp, Homo sapiens
ttccacctccccagc

SEQ ID NO: 1660018 - DNA, 15 bp, Homo sapiens
tccacctccccagcc

SEQ ID NO: 1660019 - DNA, 15 bp, Homo sapiens
ccacctccccagccc

SEQ ID NO: 1660020 - DNA, 15 bp, Homo sapiens
cacctccccagcccc

SEQ ID NO: 1660021 - DNA, 15 bp, Homo sapiens
acctccccagcccct

SEQ ID NO: 1660022 - DNA, 15 bp, Homo sapiens
cctccccagcccctg

SEQ ID NO: 1660023 - DNA, 15 bp, Homo sapiens
ctccccagcccctgg

SEQ ID NO: 1660024 - DNA, 15 bp, Homo sapiens
tccccagcccctggc

SEQ ID NO: 1660025 - DNA, 15 bp, Homo sapiens
ccccagcccctggca

SEQ ID NO: 1660026 - DNA, 15 bp, Homo sapiens
cccagcccctggcac

SEQ ID NO: 1660027 - DNA, 15 bp, Homo sapiens
ccagcccctggcacc

SEQ ID NO: 1660028 - DNA, 15 bp, Homo sapiens
cagcccctggcaccc

SEQ ID NO: 1660029 - DNA, 15 bp, Homo sapiens
agcccctggcacccc

SEQ ID NO: 1660030 - DNA, 15 bp, Homo sapiens
gcccctggcaccccc

SEQ ID NO: 1660031 - DNA, 15 bp, Homo sapiens
cccctggcacccccc

SEQ ID NO: 1660032 - DNA, 15 bp, Homo sapiens
ccctggcacccccca

SEQ ID NO: 1660033 - DNA, 15 bp, Homo sapiens
cctggcaccccccat

SEQ ID NO: 1660034 - DNA, 15 bp, Homo sapiens
ctggcaccccccatt

SEQ ID NO: 1660035 - DNA, 15 bp, Homo sapiens
tggcaccccccattt

SEQ ID NO: 1660036 - DNA, 15 bp, Homo sapiens
ggcaccccccatttt

SEQ ID NO: 1660037 - DNA, 15 bp, Homo sapiens
gcaccccccatttta

SEQ ID NO: 1660038 - DNA, 15 bp, Homo sapiens
caccccccattttat

SEQ ID NO: 1660039 - DNA, 15 bp, Homo sapiens
accccccattttatt

SEQ ID NO: 1660040 - DNA, 15 bp, Homo sapiens
ccccccattttattc

SEQ ID NO: 1660041 - DNA, 15 bp, Homo sapiens
cccccattttattct

SEQ ID NO: 1660042 - DNA, 15 bp, Homo sapiens
ccccattttattctg

SEQ ID NO: 1660043 - DNA, 15 bp, Homo sapiens
cccattttattctgg

SEQ ID NO: 1660044 - DNA, 15 bp, Homo sapiens
ccattttattctggt

SEQ ID NO: 1660045 - DNA, 15 bp, Homo sapiens
cattttattctggtg

SEQ ID NO: 1660046 - DNA, 15 bp, Homo sapiens
attttattctggtgc

SEQ ID NO: 1660047 - DNA, 15 bp, Homo sapiens
ttttattctggtgct

SEQ ID NO: 1660048 - DNA, 15 bp, Homo sapiens
tttattctggtgcta

SEQ ID NO: 1660049 - DNA, 15 bp, Homo sapiens
ttattctggtgctag

SEQ ID NO: 1660050 - DNA, 15 bp, Homo sapiens
tattctggtgctagg

SEQ ID NO: 1660051 - DNA, 15 bp, Homo sapiens
attctggtgctaggg

SEQ ID NO: 1660052 - DNA, 15 bp, Homo sapiens
ttctggtgctagggg

SEQ ID NO: 1660053 - DNA, 15 bp, Homo sapiens
tctggtgctagggga

SEQ ID NO: 1660054 - DNA, 15 bp, Homo sapiens
ctggtgctaggggaa

SEQ ID NO: 1660055 - DNA, 15 bp, Homo sapiens
tggtgctaggggaat

SEQ ID NO: 1660056 - DNA, 15 bp, Homo sapiens
ggtgctaggggaatt

SEQ ID NO: 1660057 - DNA, 15 bp, Homo sapiens
gtgctaggggaattt

SEQ ID NO: 1660058 - DNA, 15 bp, Homo sapiens
tgctaggggaatttc

SEQ ID NO: 1660059 - DNA, 15 bp, Homo sapiens
gctaggggaatttca

SEQ ID NO: 1660060 - DNA, 15 bp, Homo sapiens
ctaggggaatttcaa

SEQ ID NO: 1660061 - DNA, 15 bp, Homo sapiens
taggggaatttcaaa

SEQ ID NO: 1660062 - DNA, 15 bp, Homo sapiens
aggggaatttcaaac

SEQ ID NO: 1660063 - DNA, 15 bp, Homo sapiens
ggggaatttcaaacc

SEQ ID NO: 1660064 - DNA, 15 bp, Homo sapiens
gggaatttcaaacca

SEQ ID NO: 1660065 - DNA, 15 bp, Homo sapiens
ggaatttcaaaccag

SEQ ID NO: 1660066 - DNA, 15 bp, Homo sapiens
gaatttcaaaccagg

SEQ ID NO: 1660067 - DNA, 15 bp, Homo sapiens
aatttcaaaccaggc

SEQ ID NO: 1660068 - DNA, 15 bp, Homo sapiens
atttcaaaccaggca

SEQ ID NO: 1660069 - DNA, 15 bp, Homo sapiens
tttcaaaccaggcaa

SEQ ID NO: 1660070 - DNA, 15 bp, Homo sapiens
ttcaaaccaggcaag

SEQ ID NO: 1660071 - DNA, 15 bp, Homo sapiens
tcaaaccaggcaagt

SEQ ID NO: 1660072 - DNA, 15 bp, Homo sapiens
caaaccaggcaagtc

SEQ ID NO: 1660073 - DNA, 15 bp, Homo sapiens
aaaccaggcaagtct

SEQ ID NO: 1660074 - DNA, 15 bp, Homo sapiens
aaccaggcaagtctc

SEQ ID NO: 1660075 - DNA, 15 bp, Homo sapiens
accaggcaagtctca

SEQ ID NO: 1660076 - DNA, 15 bp, Homo sapiens
ccaggcaagtctcaa

SEQ ID NO: 1660077 - DNA, 15 bp, Homo sapiens
caggcaagtctcaac

SEQ ID NO: 1660078 - DNA, 15 bp, Homo sapiens
aggcaagtctcaaca

SEQ ID NO: 1660079 - DNA, 15 bp, Homo sapiens
ggcaagtctcaacac

SEQ ID NO: 1660080 - DNA, 15 bp, Homo sapiens
gcaagtctcaacaca

SEQ ID NO: 1660081 - DNA, 15 bp, Homo sapiens
caagtctcaacacat

SEQ ID NO: 1660082 - DNA, 15 bp, Homo sapiens
aagtctcaacacatg

SEQ ID NO: 1660083 - DNA, 15 bp, Homo sapiens
agtctcaacacatgc

SEQ ID NO: 1660084 - DNA, 15 bp, Homo sapiens
gtctcaacacatgct

SEQ ID NO: 1660085 - DNA, 15 bp, Homo sapiens
tctcaacacatgctc

SEQ ID NO: 1660086 - DNA, 15 bp, Homo sapiens
ctcaacacatgctcg

SEQ ID NO: 1660087 - DNA, 15 bp, Homo sapiens
tcaacacatgctcga

SEQ ID NO: 1660088 - DNA, 15 bp, Homo sapiens
caacacatgctcgag

SEQ ID NO: 1660089 - DNA, 15 bp, Homo sapiens
aacacatgctcgagt

SEQ ID NO: 1660090 - DNA, 15 bp, Homo sapiens
acacatgctcgagtg

SEQ ID NO: 1660091 - DNA, 15 bp, Homo sapiens
cacatgctcgagtgt

SEQ ID NO: 1660092 - DNA, 15 bp, Homo sapiens
acatgctcgagtgta

SEQ ID NO: 1660093 - DNA, 15 bp, Homo sapiens
catgctcgagtgtaa

SEQ ID NO: 1660094 - DNA, 15 bp, Homo sapiens
atgctcgagtgtaag

SEQ ID NO: 1660095 - DNA, 15 bp, Homo sapiens
tgctcgagtgtaaga

SEQ ID NO: 1660096 - DNA, 15 bp, Homo sapiens
gctcgagtgtaagaa

SEQ ID NO: 1660097 - DNA, 15 bp, Homo sapiens
ctcgagtgtaagaac

SEQ ID NO: 1660098 - DNA, 15 bp, Homo sapiens
tcgagtgtaagaacc

SEQ ID NO: 1660099 - DNA, 15 bp, Homo sapiens
cgagtgtaagaacca

SEQ ID NO: 1660100 - DNA, 15 bp, Homo sapiens
gagtgtaagaaccag

SEQ ID NO: 1660101 - DNA, 15 bp, Homo sapiens
agtgtaagaaccagc

SEQ ID NO: 1660102 - DNA, 15 bp, Homo sapiens
gtgtaagaaccagcc

SEQ ID NO: 1660103 - DNA, 15 bp, Homo sapiens
tgtaagaaccagccc

SEQ ID NO: 1660104 - DNA, 15 bp, Homo sapiens
gtaagaaccagccca

SEQ ID NO: 1660105 - DNA, 15 bp, Homo sapiens
taagaaccagcccac

SEQ ID NO: 1660106 - DNA, 15 bp, Homo sapiens
aagaaccagcccaca

SEQ ID NO: 1660107 - DNA, 15 bp, Homo sapiens
agaaccagcccacag

SEQ ID NO: 1660108 - DNA, 15 bp, Homo sapiens
gaaccagcccacagc

SEQ ID NO: 1660109 - DNA, 15 bp, Homo sapiens
aaccagcccacagcc

SEQ ID NO: 1660110 - DNA, 15 bp, Homo sapiens
accagcccacagcct

SEQ ID NO: 1660111 - DNA, 15 bp, Homo sapiens
ccagcccacagcctc

SEQ ID NO: 1660112 - DNA, 15 bp, Homo sapiens
cagcccacagcctcg

SEQ ID NO: 1660113 - DNA, 15 bp, Homo sapiens
agcccacagcctcgt

SEQ ID NO: 1660114 - DNA, 15 bp, Homo sapiens
gcccacagcctcgtt

SEQ ID NO: 1660115 - DNA, 15 bp, Homo sapiens
cccacagcctcgttc

SEQ ID NO: 1660116 - DNA, 15 bp, Homo sapiens
ccacagcctcgttcc

SEQ ID NO: 1660117 - DNA, 15 bp, Homo sapiens
cacagcctcgttccc

SEQ ID NO: 1660118 - DNA, 15 bp, Homo sapiens
acagcctcgttccct

SEQ ID NO: 1660119 - DNA, 15 bp, Homo sapiens
cagcctcgttcccta

SEQ ID NO: 1660120 - DNA, 15 bp, Homo sapiens
agcctcgttccctaa

SEQ ID NO: 1660121 - DNA, 15 bp, Homo sapiens
gcctcgttccctaat

SEQ ID NO: 1660122 - DNA, 15 bp, Homo sapiens
cctcgttccctaatc

SEQ ID NO: 1660123 - DNA, 15 bp, Homo sapiens
ctcgttccctaatca

SEQ ID NO: 1660124 - DNA, 15 bp, Homo sapiens
tcgttccctaatcac

SEQ ID NO: 1660125 - DNA, 15 bp, Homo sapiens
cgttccctaatcacg

SEQ ID NO: 1660126 - DNA, 15 bp, Homo sapiens
gttccctaatcacgg

SEQ ID NO: 1660127 - DNA, 15 bp, Homo sapiens
ttccctaatcacggt

SEQ ID NO: 1660128 - DNA, 15 bp, Homo sapiens
tccctaatcacggtc

SEQ ID NO: 1660129 - DNA, 15 bp, Homo sapiens
ccctaatcacggtca

SEQ ID NO: 1660130 - DNA, 15 bp, Homo sapiens
cctaatcacggtcaa

SEQ ID NO: 1660131 - DNA, 15 bp, Homo sapiens
ctaatcacggtcaaa

SEQ ID NO: 1660132 - DNA, 15 bp, Homo sapiens
taatcacggtcaaac

SEQ ID NO: 1660133 - DNA, 15 bp, Homo sapiens
aatcacggtcaaacc

SEQ ID NO: 1660134 - DNA, 15 bp, Homo sapiens
atcacggtcaaacca

SEQ ID NO: 1660135 - DNA, 15 bp, Homo sapiens
tcacggtcaaaccag

SEQ ID NO: 1660136 - DNA, 15 bp, Homo sapiens
cacggtcaaaccaga

SEQ ID NO: 1660137 - DNA, 15 bp, Homo sapiens
acggtcaaaccagaa

SEQ ID NO: 1660138 - DNA, 15 bp, Homo sapiens
cggtcaaaccagaat

SEQ ID NO: 1660139 - DNA, 15 bp, Homo sapiens
ggtcaaaccagaatt

SEQ ID NO: 1660140 - DNA, 15 bp, Homo sapiens
gtcaaaccagaattc

SEQ ID NO: 1660141 - DNA, 15 bp, Homo sapiens
tcaaaccagaattct

SEQ ID NO: 1660142 - DNA, 15 bp, Homo sapiens
caaaccagaattcta

SEQ ID NO: 1660143 - DNA, 15 bp, Homo sapiens
aaaccagaattctac

SEQ ID NO: 1660144 - DNA, 15 bp, Homo sapiens
aaccagaattctact

SEQ ID NO: 1660145 - DNA, 15 bp, Homo sapiens
accagaattctactc

SEQ ID NO: 1660146 - DNA, 15 bp, Homo sapiens
ccagaattctactcc

SEQ ID NO: 1660147 - DNA, 15 bp, Homo sapiens
cagaattctactcca

SEQ ID NO: 1660148 - DNA, 15 bp, Homo sapiens
agaattctactccag

SEQ ID NO: 1660149 - DNA, 15 bp, Homo sapiens
gaattctactccagg

SEQ ID NO: 1660150 - DNA, 15 bp, Homo sapiens
aattctactccaggt

SEQ ID NO: 1660151 - DNA, 15 bp, Homo sapiens
attctactccaggtt

SEQ ID NO: 1660152 - DNA, 15 bp, Homo sapiens
ttctactccaggttc

SEQ ID NO: 1660153 - DNA, 15 bp, Homo sapiens
tctactccaggttct

SEQ ID NO: 1660154 - DNA, 15 bp, Homo sapiens
ctactccaggttcta

SEQ ID NO: 1660155 - DNA, 15 bp, Homo sapiens
tactccaggttctac

SEQ ID NO: 1660156 - DNA, 15 bp, Homo sapiens
actccaggttctact

SEQ ID NO: 1660157 - DNA, 15 bp, Homo sapiens
ctccaggttctactc

SEQ ID NO: 1660158 - DNA, 15 bp, Homo sapiens
tccaggttctactct

SEQ ID NO: 1660159 - DNA, 15 bp, Homo sapiens
ccaggttctactctg

SEQ ID NO: 1660160 - DNA, 15 bp, Homo sapiens
caggttctactctgt

SEQ ID NO: 1660161 - DNA, 15 bp, Homo sapiens
aggttctactctgtg

SEQ ID NO: 1660162 - DNA, 15 bp, Homo sapiens
ggttctactctgtga

SEQ ID NO: 1660163 - DNA, 15 bp, Homo sapiens
gttctactctgtgaa

SEQ ID NO: 1660164 - DNA, 15 bp, Homo sapiens
ttctactctgtgaat

SEQ ID NO: 1660165 - DNA, 15 bp, Homo sapiens
tctactctgtgaatc

SEQ ID NO: 1660166 - DNA, 15 bp, Homo sapiens
ctactctgtgaatct

SEQ ID NO: 1660167 - DNA, 15 bp, Homo sapiens
tactctgtgaatctg

SEQ ID NO: 1660168 - DNA, 15 bp, Homo sapiens
actctgtgaatctgc

SEQ ID NO: 1660169 - DNA, 15 bp, Homo sapiens
ctctgtgaatctgct

SEQ ID NO: 1660170 - DNA, 15 bp, Homo sapiens
tctgtgaatctgctt

SEQ ID NO: 1660171 - DNA, 15 bp, Homo sapiens
ctgtgaatctgcttt

SEQ ID NO: 1660172 - DNA, 15 bp, Homo sapiens
tgtgaatctgctttc

SEQ ID NO: 1660173 - DNA, 15 bp, Homo sapiens
gtgaatctgctttct

SEQ ID NO: 1660174 - DNA, 15 bp, Homo sapiens
tgaatctgctttctg

SEQ ID NO: 1660175 - DNA, 15 bp, Homo sapiens
gaatctgctttctgt

SEQ ID NO: 1660176 - DNA, 15 bp, Homo sapiens
aatctgctttctgtg

SEQ ID NO: 1660177 - DNA, 15 bp, Homo sapiens
atctgctttctgtga

SEQ ID NO: 1660178 - DNA, 15 bp, Homo sapiens
tctgctttctgtgaa

SEQ ID NO: 1660179 - DNA, 15 bp, Homo sapiens
ctgctttctgtgaat

SEQ ID NO: 1660180 - DNA, 15 bp, Homo sapiens
tgctttctgtgaatc

SEQ ID NO: 1660181 - DNA, 15 bp, Homo sapiens
gctttctgtgaatct

SEQ ID NO: 1660182 - DNA, 15 bp, Homo sapiens
ctttctgtgaatctg

SEQ ID NO: 1660183 - DNA, 15 bp, Homo sapiens
tttctgtgaatctgt

SEQ ID NO: 1660184 - DNA, 15 bp, Homo sapiens
ttctgtgaatctgtt

SEQ ID NO: 1660185 - DNA, 15 bp, Homo sapiens
tctgtgaatctgtta

SEQ ID NO: 1660186 - DNA, 15 bp, Homo sapiens
ctgtgaatctgttac

SEQ ID NO: 1660187 - DNA, 15 bp, Homo sapiens
tgtgaatctgttact

SEQ ID NO: 1660188 - DNA, 15 bp, Homo sapiens
gtgaatctgttactc

SEQ ID NO: 1660189 - DNA, 15 bp, Homo sapiens
tgaatctgttactct

SEQ ID NO: 1660190 - DNA, 15 bp, Homo sapiens
gaatctgttactctg

SEQ ID NO: 1660191 - DNA, 15 bp, Homo sapiens
aatctgttactctgg

SEQ ID NO: 1660192 - DNA, 15 bp, Homo sapiens
atctgttactctggg

SEQ ID NO: 1660193 - DNA, 15 bp, Homo sapiens
tctgttactctgggg

SEQ ID NO: 1660194 - DNA, 15 bp, Homo sapiens
ctgttactctgggga

SEQ ID NO: 1660195 - DNA, 15 bp, Homo sapiens
tgttactctggggac

SEQ ID NO: 1660196 - DNA, 15 bp, Homo sapiens
gttactctggggacc

SEQ ID NO: 1660197 - DNA, 15 bp, Homo sapiens
ttactctggggaccg

SEQ ID NO: 1660198 - DNA, 15 bp, Homo sapiens
tactctggggaccgc

SEQ ID NO: 1660199 - DNA, 15 bp, Homo sapiens
actctggggaccgcc

SEQ ID NO: 1660200 - DNA, 15 bp, Homo sapiens
ctctggggaccgcct

SEQ ID NO: 1660201 - DNA, 15 bp, Homo sapiens
tctggggaccgccta

SEQ ID NO: 1660202 - DNA, 15 bp, Homo sapiens
ctggggaccgcctat

SEQ ID NO: 1660203 - DNA, 15 bp, Homo sapiens
tggggaccgcctata

SEQ ID NO: 1660204 - DNA, 15 bp, Homo sapiens
ggggaccgcctataa

SEQ ID NO: 1660205 - DNA, 15 bp, Homo sapiens
gggaccgcctataag

SEQ ID NO: 1660206 - DNA, 15 bp, Homo sapiens
ggaccgcctataagt

SEQ ID NO: 1660207 - DNA, 15 bp, Homo sapiens
gaccgcctataagtt

SEQ ID NO: 1660208 - DNA, 15 bp, Homo sapiens
accgcctataagttg

SEQ ID NO: 1660209 - DNA, 15 bp, Homo sapiens
ccgcctataagttga

SEQ ID NO: 1660210 - DNA, 15 bp, Homo sapiens
cgcctataagttgaa

SEQ ID NO: 1660211 - DNA, 15 bp, Homo sapiens
gcctataagttgaat

SEQ ID NO: 1660212 - DNA, 15 bp, Homo sapiens
cctataagttgaatc

SEQ ID NO: 1660213 - DNA, 15 bp, Homo sapiens
ctataagttgaatcc

SEQ ID NO: 1660214 - DNA, 15 bp, Homo sapiens
tataagttgaatcct

SEQ ID NO: 1660215 - DNA, 15 bp, Homo sapiens
ataagttgaatccta

SEQ ID NO: 1660216 - DNA, 15 bp, Homo sapiens
taagttgaatcctac

SEQ ID NO: 1660217 - DNA, 15 bp, Homo sapiens
aagttgaatcctaca

SEQ ID NO: 1660218 - DNA, 15 bp, Homo sapiens
agttgaatcctacag

SEQ ID NO: 1660219 - DNA, 15 bp, Homo sapiens
gttgaatcctacagt

SEQ ID NO: 1660220 - DNA, 15 bp, Homo sapiens
ttgaatcctacagtg

SEQ ID NO: 1660221 - DNA, 15 bp, Homo sapiens
tgaatcctacagtgt

SEQ ID NO: 1660222 - DNA, 15 bp, Homo sapiens
gaatcctacagtgtc

SEQ ID NO: 1660223 - DNA, 15 bp, Homo sapiens
aatcctacagtgtct

SEQ ID NO: 1660224 - DNA, 15 bp, Homo sapiens
atcctacagtgtctc

SEQ ID NO: 1660225 - DNA, 15 bp, Homo sapiens
tcctacagtgtctcc

SEQ ID NO: 1660226 - DNA, 15 bp, Homo sapiens
cctacagtgtctcca

SEQ ID NO: 1660227 - DNA, 15 bp, Homo sapiens
ctacagtgtctccac

SEQ ID NO: 1660228 - DNA, 15 bp, Homo sapiens
tacagtgtctccact

SEQ ID NO: 1660229 - DNA, 15 bp, Homo sapiens
acagtgtctccactt

SEQ ID NO: 1660230 - DNA, 15 bp, Homo sapiens
cagtgtctccacttc

SEQ ID NO: 1660231 - DNA, 15 bp, Homo sapiens
agtgtctccacttca

SEQ ID NO: 1660232 - DNA, 15 bp, Homo sapiens
gtgtctccacttcag

SEQ ID NO: 1660233 - DNA, 15 bp, Homo sapiens
tgtctccacttcagt

SEQ ID NO: 1660234 - DNA, 15 bp, Homo sapiens
gtctccacttcagtg

SEQ ID NO: 1660235 - DNA, 15 bp, Homo sapiens
tctccacttcagtga

SEQ ID NO: 1660236 - DNA, 15 bp, Homo sapiens
ctccacttcagtgac

SEQ ID NO: 1660237 - DNA, 15 bp, Homo sapiens
tccacttcagtgact

SEQ ID NO: 1660238 - DNA, 15 bp, Homo sapiens
ccacttcagtgactg

SEQ ID NO: 1660239 - DNA, 15 bp, Homo sapiens
cacttcagtgactgg

SEQ ID NO: 1660240 - DNA, 15 bp, Homo sapiens
acttcagtgactggc

SEQ ID NO: 1660241 - DNA, 15 bp, Homo sapiens
cttcagtgactggct

SEQ ID NO: 1660242 - DNA, 15 bp, Homo sapiens
ttcagtgactggctt

SEQ ID NO: 1660243 - DNA, 15 bp, Homo sapiens
tcagtgactggctta

SEQ ID NO: 1660244 - DNA, 15 bp, Homo sapiens
cagtgactggcttat

SEQ ID NO: 1660245 - DNA, 15 bp, Homo sapiens
agtgactggcttatt

SEQ ID NO: 1660246 - DNA, 15 bp, Homo sapiens
gtgactggcttattt

SEQ ID NO: 1660247 - DNA, 15 bp, Homo sapiens
tgactggcttatttc

SEQ ID NO: 1660248 - DNA, 15 bp, Homo sapiens
gactggcttatttca

SEQ ID NO: 1660249 - DNA, 15 bp, Homo sapiens
actggcttatttcac

SEQ ID NO: 1660250 - DNA, 15 bp, Homo sapiens
ggcttatttcacttt

SEQ ID NO: 1660251 - DNA, 15 bp, Homo sapiens
gcttatttcactttt

SEQ ID NO: 1660252 - DNA, 15 bp, Homo sapiens
cttatttcacttttc

SEQ ID NO: 1660253 - DNA, 15 bp, Homo sapiens
ttatttcacttttct

SEQ ID NO: 1660254 - DNA, 15 bp, Homo sapiens
tatttcacttttctc

SEQ ID NO: 1660255 - DNA, 15 bp, Homo sapiens
atttcacttttctcc

SEQ ID NO: 1660256 - DNA, 15 bp, Homo sapiens
tttcacttttctcct

SEQ ID NO: 1660257 - DNA, 15 bp, Homo sapiens
ttcacttttctcctc

SEQ ID NO: 1660258 - DNA, 15 bp, Homo sapiens
tcacttttctcctct

SEQ ID NO: 1660259 - DNA, 15 bp, Homo sapiens
cacttttctcctctt

SEQ ID NO: 1660260 - DNA, 15 bp, Homo sapiens
acttttctcctcttt

SEQ ID NO: 1660261 - DNA, 15 bp, Homo sapiens
cttttctcctcttta

SEQ ID NO: 1660262 - DNA, 15 bp, Homo sapiens
ttttctcctctttat

SEQ ID NO: 1660263 - DNA, 15 bp, Homo sapiens
tttctcctctttatt

SEQ ID NO: 1660264 - DNA, 15 bp, Homo sapiens
ttctcctctttattt

SEQ ID NO: 1660265 - DNA, 15 bp, Homo sapiens
tctcctctttattta

SEQ ID NO: 1660266 - DNA, 15 bp, Homo sapiens
ctcctctttatttat

SEQ ID NO: 1660267 - DNA, 15 bp, Homo sapiens
tcctctttatttatg

SEQ ID NO: 1660268 - DNA, 15 bp, Homo sapiens
cctctttatttatga

SEQ ID NO: 1660269 - DNA, 15 bp, Homo sapiens
ctctttatttatgag

SEQ ID NO: 1660270 - DNA, 15 bp, Homo sapiens
tctttatttatgaga

SEQ ID NO: 1660271 - DNA, 15 bp, Homo sapiens
ctttatttatgagac

SEQ ID NO: 1660272 - DNA, 15 bp, Homo sapiens
tttatttatgagaca

SEQ ID NO: 1660273 - DNA, 15 bp, Homo sapiens
ttatttatgagacaa

SEQ ID NO: 1660274 - DNA, 15 bp, Homo sapiens
tatttatgagacaaa

SEQ ID NO: 1660275 - DNA, 15 bp, Homo sapiens
atttatgagacaaaa

SEQ ID NO: 1660276 - DNA, 15 bp, Homo sapiens
tttatgagacaaaat

SEQ ID NO: 1660277 - DNA, 15 bp, Homo sapiens
ttatgagacaaaatt

SEQ ID NO: 1660278 - DNA, 15 bp, Homo sapiens
tatgagacaaaattt

SEQ ID NO: 1660279 - DNA, 15 bp, Homo sapiens
atgagacaaaatttc

SEQ ID NO: 1660280 - DNA, 15 bp, Homo sapiens
tgagacaaaatttcg

SEQ ID NO: 1660281 - DNA, 15 bp, Homo sapiens
gagacaaaatttcgc

SEQ ID NO: 1660282 - DNA, 15 bp, Homo sapiens
agacaaaatttcgct

SEQ ID NO: 1660283 - DNA, 15 bp, Homo sapiens
gacaaaatttcgctc

SEQ ID NO: 1660284 - DNA, 15 bp, Homo sapiens
acaaaatttcgctct

SEQ ID NO: 1660285 - DNA, 15 bp, Homo sapiens
caaaatttcgctctt

SEQ ID NO: 1660286 - DNA, 15 bp, Homo sapiens
aaaatttcgctcttg

SEQ ID NO: 1660287 - DNA, 15 bp, Homo sapiens
aaatttcgctcttgt

SEQ ID NO: 1660288 - DNA, 15 bp, Homo sapiens
aatttcgctcttgtt

SEQ ID NO: 1660289 - DNA, 15 bp, Homo sapiens
atttcgctcttgttg

SEQ ID NO: 1660290 - DNA, 15 bp, Homo sapiens
ttcgctcttgttgct

SEQ ID NO: 1660291 - DNA, 15 bp, Homo sapiens
tcgctcttgttgctc

SEQ ID NO: 1660292 - DNA, 15 bp, Homo sapiens
cgctcttgttgctca

SEQ ID NO: 1660293 - DNA, 15 bp, Homo sapiens
ttgctcaggctggaa

SEQ ID NO: 1660294 - DNA, 15 bp, Homo sapiens
tgctcaggctggaat

SEQ ID NO: 1660295 - DNA, 15 bp, Homo sapiens
gctcaggctggaatg

SEQ ID NO: 1660296 - DNA, 15 bp, Homo sapiens
ctcaggctggaatgc

SEQ ID NO: 1660297 - DNA, 15 bp, Homo sapiens
tcaggctggaatgca

SEQ ID NO: 1660298 - DNA, 15 bp, Homo sapiens
caggctggaatgcaa

SEQ ID NO: 1660299 - DNA, 15 bp, Homo sapiens
aggctggaatgcaat

SEQ ID NO: 1660300 - DNA, 15 bp, Homo sapiens
gctggaatgcaatgg

SEQ ID NO: 1660301 - DNA, 15 bp, Homo sapiens
tggaatgcaatggcg

SEQ ID NO: 1660302 - DNA, 15 bp, Homo sapiens
ggaatgcaatggcgt

SEQ ID NO: 1660303 - DNA, 15 bp, Homo sapiens
gaatgcaatggcgtg

SEQ ID NO: 1660304 - DNA, 15 bp, Homo sapiens
aatgcaatggcgtga

SEQ ID NO: 1660305 - DNA, 15 bp, Homo sapiens
atgcaatggcgtgat

SEQ ID NO: 1660306 - DNA, 15 bp, Homo sapiens
gcgtgatctcggcta

SEQ ID NO: 1660307 - DNA, 15 bp, Homo sapiens
cgtgatctcggctaa

SEQ ID NO: 1660308 - DNA, 15 bp, Homo sapiens
gtgatctcggctaat

SEQ ID NO: 1660309 - DNA, 15 bp, Homo sapiens
tgatctcggctaatt

SEQ ID NO: 1660310 - DNA, 15 bp, Homo sapiens
gatctcggctaattt

SEQ ID NO: 1660311 - DNA, 15 bp, Homo sapiens
atctcggctaatttt

SEQ ID NO: 1660312 - DNA, 15 bp, Homo sapiens
tctcggctaattttt

SEQ ID NO: 1660313 - DNA, 15 bp, Homo sapiens
ctcggctaatttttt

SEQ ID NO: 1660314 - DNA, 15 bp, Homo sapiens
tcggctaattttttt

SEQ ID NO: 1660315 - DNA, 15 bp, Homo sapiens
tttagtagaggcggg

SEQ ID NO: 1660316 - DNA, 15 bp, Homo sapiens
ttagtagaggcgggg

SEQ ID NO: 1660317 - DNA, 15 bp, Homo sapiens
tagtagaggcggggt

SEQ ID NO: 1660318 - DNA, 15 bp, Homo sapiens
agtagaggcggggtt

SEQ ID NO: 1660319 - DNA, 15 bp, Homo sapiens
gtagaggcggggttt

SEQ ID NO: 1660320 - DNA, 15 bp, Homo sapiens
tagaggcggggtttc

SEQ ID NO: 1660321 - DNA, 15 bp, Homo sapiens
agaggcggggtttca

SEQ ID NO: 1660322 - DNA, 15 bp, Homo sapiens
gaggcggggtttcac

SEQ ID NO: 1660323 - DNA, 15 bp, Homo sapiens
aggcggggtttcacc

SEQ ID NO: 1660324 - DNA, 15 bp, Homo sapiens
ggcggggtttcacca

SEQ ID NO: 1660325 - DNA, 15 bp, Homo sapiens
gcggggtttcaccat

SEQ ID NO: 1660326 - DNA, 15 bp, Homo sapiens
actcctgacctcaga

SEQ ID NO: 1660327 - DNA, 15 bp, Homo sapiens
ctcctgacctcagac

SEQ ID NO: 1660328 - DNA, 15 bp, Homo sapiens
tcctgacctcagacg

SEQ ID NO: 1660329 - DNA, 15 bp, Homo sapiens
cctgacctcagacga

SEQ ID NO: 1660330 - DNA, 15 bp, Homo sapiens
ctgacctcagacgat

SEQ ID NO: 1660331 - DNA, 15 bp, Homo sapiens
tgacctcagacgatc

SEQ ID NO: 1660332 - DNA, 15 bp, Homo sapiens
gacctcagacgatcc

SEQ ID NO: 1660333 - DNA, 15 bp, Homo sapiens
acctcagacgatcca

SEQ ID NO: 1660334 - DNA, 15 bp, Homo sapiens
cctcagacgatccac

SEQ ID NO: 1660335 - DNA, 15 bp, Homo sapiens
ctcagacgatccact

SEQ ID NO: 1660336 - DNA, 15 bp, Homo sapiens
tcagacgatccactt

SEQ ID NO: 1660337 - DNA, 15 bp, Homo sapiens
cagacgatccacttt

SEQ ID NO: 1660338 - DNA, 15 bp, Homo sapiens
agacgatccactttg

SEQ ID NO: 1660339 - DNA, 15 bp, Homo sapiens
gacgatccactttgg

SEQ ID NO: 1660340 - DNA, 15 bp, Homo sapiens
acgatccactttggc

SEQ ID NO: 1660341 - DNA, 15 bp, Homo sapiens
cgatccactttggcc

SEQ ID NO: 1660342 - DNA, 15 bp, Homo sapiens
gatccactttggcct

SEQ ID NO: 1660343 - DNA, 15 bp, Homo sapiens
atccactttggcctt

SEQ ID NO: 1660344 - DNA, 15 bp, Homo sapiens
tccactttggccttc

SEQ ID NO: 1660345 - DNA, 15 bp, Homo sapiens
ccactttggccttcc

SEQ ID NO: 1660346 - DNA, 15 bp, Homo sapiens
cactttggccttcca

SEQ ID NO: 1660347 - DNA, 15 bp, Homo sapiens
actttggccttccaa

SEQ ID NO: 1660348 - DNA, 15 bp, Homo sapiens
ctttggccttccaaa

SEQ ID NO: 1660349 - DNA, 15 bp, Homo sapiens
tttggccttccaaag

SEQ ID NO: 1660350 - DNA, 15 bp, Homo sapiens
ttggccttccaaagt

SEQ ID NO: 1660351 - DNA, 15 bp, Homo sapiens
ggattacaggcgcgg

SEQ ID NO: 1660352 - DNA, 15 bp, Homo sapiens
gattacaggcgcggc

SEQ ID NO: 1660353 - DNA, 15 bp, Homo sapiens
attacaggcgcggcc

SEQ ID NO: 1660354 - DNA, 15 bp, Homo sapiens
ttacaggcgcggccc

SEQ ID NO: 1660355 - DNA, 15 bp, Homo sapiens
tacaggcgcggccca

SEQ ID NO: 1660356 - DNA, 15 bp, Homo sapiens
acaggcgcggcccac

SEQ ID NO: 1660357 - DNA, 15 bp, Homo sapiens
caggcgcggcccacc

SEQ ID NO: 1660358 - DNA, 15 bp, Homo sapiens
aggcgcggcccacct

SEQ ID NO: 1660359 - DNA, 15 bp, Homo sapiens
ggcgcggcccacctt

SEQ ID NO: 1660360 - DNA, 15 bp, Homo sapiens
gcgcggcccaccttt

SEQ ID NO: 1660361 - DNA, 15 bp, Homo sapiens
cgcggcccacctttc

SEQ ID NO: 1660362 - DNA, 15 bp, Homo sapiens
gcggcccacctttct

SEQ ID NO: 1660363 - DNA, 15 bp, Homo sapiens
cggcccacctttctc

SEQ ID NO: 1660364 - DNA, 15 bp, Homo sapiens
ggcccacctttctcc

SEQ ID NO: 1660365 - DNA, 15 bp, Homo sapiens
gcccacctttctcct

SEQ ID NO: 1660366 - DNA, 15 bp, Homo sapiens
cccacctttctcctc

SEQ ID NO: 1660367 - DNA, 15 bp, Homo sapiens
ccacctttctcctct

SEQ ID NO: 1660368 - DNA, 15 bp, Homo sapiens
cacctttctcctctt

SEQ ID NO: 1660369 - DNA, 15 bp, Homo sapiens
acctttctcctctta

SEQ ID NO: 1660370 - DNA, 15 bp, Homo sapiens
cctttctcctcttaa

SEQ ID NO: 1660371 - DNA, 15 bp, Homo sapiens
ctttctcctcttaat

SEQ ID NO: 1660372 - DNA, 15 bp, Homo sapiens
tttctcctcttaatc

SEQ ID NO: 1660373 - DNA, 15 bp, Homo sapiens
ttctcctcttaatca

SEQ ID NO: 1660374 - DNA, 15 bp, Homo sapiens
tctcctcttaatcac

SEQ ID NO: 1660375 - DNA, 15 bp, Homo sapiens
ctcctcttaatcaca

SEQ ID NO: 1660376 - DNA, 15 bp, Homo sapiens
tcctcttaatcacac

SEQ ID NO: 1660377 - DNA, 15 bp, Homo sapiens
cctcttaatcacaca

SEQ ID NO: 1660378 - DNA, 15 bp, Homo sapiens
ctcttaatcacacag

SEQ ID NO: 1660379 - DNA, 15 bp, Homo sapiens
tcttaatcacacagg

SEQ ID NO: 1660380 - DNA, 15 bp, Homo sapiens
cttaatcacacaggt

SEQ ID NO: 1660381 - DNA, 15 bp, Homo sapiens
ttaatcacacaggta

SEQ ID NO: 1660382 - DNA, 15 bp, Homo sapiens
taatcacacaggtaa

SEQ ID NO: 1660383 - DNA, 15 bp, Homo sapiens
aatcacacaggtaat

SEQ ID NO: 1660384 - DNA, 15 bp, Homo sapiens
atcacacaggtaatc

SEQ ID NO: 1660385 - DNA, 15 bp, Homo sapiens
tcacacaggtaatcc

SEQ ID NO: 1660386 - DNA, 15 bp, Homo sapiens
cacacaggtaatcca

SEQ ID NO: 1660387 - DNA, 15 bp, Homo sapiens
acacaggtaatccat

SEQ ID NO: 1660388 - DNA, 15 bp, Homo sapiens
cacaggtaatccata

SEQ ID NO: 1660389 - DNA, 15 bp, Homo sapiens
acaggtaatccatac

SEQ ID NO: 1660390 - DNA, 15 bp, Homo sapiens
caggtaatccataca

SEQ ID NO: 1660391 - DNA, 15 bp, Homo sapiens
aggtaatccatacat

SEQ ID NO: 1660392 - DNA, 15 bp, Homo sapiens
ggtaatccatacata

SEQ ID NO: 1660393 - DNA, 15 bp, Homo sapiens
gtaatccatacatac

SEQ ID NO: 1660394 - DNA, 15 bp, Homo sapiens
taatccatacatacg

SEQ ID NO: 1660395 - DNA, 15 bp, Homo sapiens
aatccatacatacga

SEQ ID NO: 1660396 - DNA, 15 bp, Homo sapiens
atccatacatacgac

SEQ ID NO: 1660397 - DNA, 15 bp, Homo sapiens
tccatacatacgaca

SEQ ID NO: 1660398 - DNA, 15 bp, Homo sapiens
ccatacatacgacat

SEQ ID NO: 1660399 - DNA, 15 bp, Homo sapiens
catacatacgacatt

SEQ ID NO: 1660400 - DNA, 15 bp, Homo sapiens
atacatacgacattc

SEQ ID NO: 1660401 - DNA, 15 bp, Homo sapiens
tacatacgacattct

SEQ ID NO: 1660402 - DNA, 15 bp, Homo sapiens
acatacgacattctt

SEQ ID NO: 1660403 - DNA, 15 bp, Homo sapiens
catacgacattcttt

SEQ ID NO: 1660404 - DNA, 15 bp, Homo sapiens
atacgacattctttt

SEQ ID NO: 1660405 - DNA, 15 bp, Homo sapiens
tacgacattcttttt

SEQ ID NO: 1660406 - DNA, 15 bp, Homo sapiens
acgacattctttttt

SEQ ID NO: 1660407 - DNA, 15 bp, Homo sapiens
cgacattcttttttt

SEQ ID NO: 1660408 - DNA, 15 bp, Homo sapiens
gacattctttttttt

SEQ ID NO: 1660409 - DNA, 15 bp, Homo sapiens
acattcttttttttt

SEQ ID NO: 1660410 - DNA, 15 bp, Homo sapiens
ttttttttttgacac

SEQ ID NO: 1660411 - DNA, 15 bp, Homo sapiens
tttttttttgacacg

SEQ ID NO: 1660412 - DNA, 15 bp, Homo sapiens
ttttttttgacacgg

SEQ ID NO: 1660413 - DNA, 15 bp, Homo sapiens
tttttttgacacgga

SEQ ID NO: 1660414 - DNA, 15 bp, Homo sapiens
ttttttgacacggag

SEQ ID NO: 1660415 - DNA, 15 bp, Homo sapiens
tttttgacacggagt

SEQ ID NO: 1660416 - DNA, 15 bp, Homo sapiens
ttttgacacggagtc

SEQ ID NO: 1660417 - DNA, 15 bp, Homo sapiens
tttgacacggagtct

SEQ ID NO: 1660418 - DNA, 15 bp, Homo sapiens
ttgacacggagtctt

SEQ ID NO: 1660419 - DNA, 15 bp, Homo sapiens
tgacacggagtctta

SEQ ID NO: 1660420 - DNA, 15 bp, Homo sapiens
gacacggagtcttac

SEQ ID NO: 1660421 - DNA, 15 bp, Homo sapiens
acacggagtcttact

SEQ ID NO: 1660422 - DNA, 15 bp, Homo sapiens
cacggagtcttactc

SEQ ID NO: 1660423 - DNA, 15 bp, Homo sapiens
acggagtcttactct

SEQ ID NO: 1660424 - DNA, 15 bp, Homo sapiens
cggagtcttactctg

SEQ ID NO: 1660425 - DNA, 15 bp, Homo sapiens
ggagtcttactctgt

SEQ ID NO: 1660426 - DNA, 15 bp, Homo sapiens
gagtcttactctgtc

SEQ ID NO: 1660427 - DNA, 15 bp, Homo sapiens
agtcttactctgtca

SEQ ID NO: 1660428 - DNA, 15 bp, Homo sapiens
cttactctgtcacct

SEQ ID NO: 1660429 - DNA, 15 bp, Homo sapiens
ttactctgtcaccta

SEQ ID NO: 1660430 - DNA, 15 bp, Homo sapiens
tactctgtcacctag

SEQ ID NO: 1660431 - DNA, 15 bp, Homo sapiens
ctctgcctcccagga

SEQ ID NO: 1660432 - DNA, 15 bp, Homo sapiens
tctgcctcccaggat

SEQ ID NO: 1660433 - DNA, 15 bp, Homo sapiens
ctgcctcccaggatc

SEQ ID NO: 1660434 - DNA, 15 bp, Homo sapiens
tgcctcccaggatca

SEQ ID NO: 1660435 - DNA, 15 bp, Homo sapiens
gcctcccaggatcaa

SEQ ID NO: 1660436 - DNA, 15 bp, Homo sapiens
cctcccaggatcaag

SEQ ID NO: 1660437 - DNA, 15 bp, Homo sapiens
ctcccaggatcaagc

SEQ ID NO: 1660438 - DNA, 15 bp, Homo sapiens
tcccaggatcaagca

SEQ ID NO: 1660439 - DNA, 15 bp, Homo sapiens
cccaggatcaagcaa

SEQ ID NO: 1660440 - DNA, 15 bp, Homo sapiens
ccaggatcaagcaat

SEQ ID NO: 1660441 - DNA, 15 bp, Homo sapiens
caggatcaagcaatt

SEQ ID NO: 1660442 - DNA, 15 bp, Homo sapiens
aggatcaagcaattc

SEQ ID NO: 1660443 - DNA, 15 bp, Homo sapiens
ggatcaagcaattct

SEQ ID NO: 1660444 - DNA, 15 bp, Homo sapiens
gatcaagcaattctc

SEQ ID NO: 1660445 - DNA, 15 bp, Homo sapiens
atcaagcaattctcc

SEQ ID NO: 1660446 - DNA, 15 bp, Homo sapiens
tgggattacaggtaa

SEQ ID NO: 1660447 - DNA, 15 bp, Homo sapiens
gggattacaggtaac

SEQ ID NO: 1660448 - DNA, 15 bp, Homo sapiens
ggattacaggtaacc

SEQ ID NO: 1660449 - DNA, 15 bp, Homo sapiens
gattacaggtaacca

SEQ ID NO: 1660450 - DNA, 15 bp, Homo sapiens
attacaggtaaccat

SEQ ID NO: 1660451 - DNA, 15 bp, Homo sapiens
ttacaggtaaccatc

SEQ ID NO: 1660452 - DNA, 15 bp, Homo sapiens
tacaggtaaccatca

SEQ ID NO: 1660453 - DNA, 15 bp, Homo sapiens
acaggtaaccatcac

SEQ ID NO: 1660454 - DNA, 15 bp, Homo sapiens
caggtaaccatcacc

SEQ ID NO: 1660455 - DNA, 15 bp, Homo sapiens
aggtaaccatcacca

SEQ ID NO: 1660456 - DNA, 15 bp, Homo sapiens
ggtaaccatcaccac

SEQ ID NO: 1660457 - DNA, 15 bp, Homo sapiens
gtaaccatcaccaca

SEQ ID NO: 1660458 - DNA, 15 bp, Homo sapiens
taaccatcaccacac

SEQ ID NO: 1660459 - DNA, 15 bp, Homo sapiens
aaccatcaccacacc

SEQ ID NO: 1660460 - DNA, 15 bp, Homo sapiens
accatcaccacacct

SEQ ID NO: 1660461 - DNA, 15 bp, Homo sapiens
ccatcaccacacctg

SEQ ID NO: 1660462 - DNA, 15 bp, Homo sapiens
catcaccacacctgg

SEQ ID NO: 1660463 - DNA, 15 bp, Homo sapiens
atcaccacacctggc

SEQ ID NO: 1660464 - DNA, 15 bp, Homo sapiens
tcaccacacctggct

SEQ ID NO: 1660465 - DNA, 15 bp, Homo sapiens
ccacacctggctaaa

SEQ ID NO: 1660466 - DNA, 15 bp, Homo sapiens
cacacctggctaaat

SEQ ID NO: 1660467 - DNA, 15 bp, Homo sapiens
acacctggctaaatt

SEQ ID NO: 1660468 - DNA, 15 bp, Homo sapiens
cacctggctaaattt

SEQ ID NO: 1660469 - DNA, 15 bp, Homo sapiens
acctggctaaatttt

SEQ ID NO: 1660470 - DNA, 15 bp, Homo sapiens
cctggctaaattttg

SEQ ID NO: 1660471 - DNA, 15 bp, Homo sapiens
ctggctaaattttgt

SEQ ID NO: 1660472 - DNA, 15 bp, Homo sapiens
tggctaaattttgta

SEQ ID NO: 1660473 - DNA, 15 bp, Homo sapiens
ggctaaattttgtat

SEQ ID NO: 1660474 - DNA, 15 bp, Homo sapiens
gctaaattttgtatt

SEQ ID NO: 1660475 - DNA, 15 bp, Homo sapiens
ctaaattttgtattt

SEQ ID NO: 1660476 - DNA, 15 bp, Homo sapiens
taaattttgtatttt

SEQ ID NO: 1660477 - DNA, 15 bp, Homo sapiens
aaattttgtattttt

SEQ ID NO: 1660478 - DNA, 15 bp, Homo sapiens
acggggtttcaccac

SEQ ID NO: 1660479 - DNA, 15 bp, Homo sapiens
cggggtttcaccacg

SEQ ID NO: 1660480 - DNA, 15 bp, Homo sapiens
ggtttcaccacgttg

SEQ ID NO: 1660481 - DNA, 15 bp, Homo sapiens
gtttcaccacgttgg

SEQ ID NO: 1660482 - DNA, 15 bp, Homo sapiens
tttcaccacgttggc

SEQ ID NO: 1660483 - DNA, 15 bp, Homo sapiens
ttcaccacgttggcc

SEQ ID NO: 1660484 - DNA, 15 bp, Homo sapiens
tcaccacgttggcca

SEQ ID NO: 1660485 - DNA, 15 bp, Homo sapiens
caccacgttggccac

SEQ ID NO: 1660486 - DNA, 15 bp, Homo sapiens
accacgttggccacg

SEQ ID NO: 1660487 - DNA, 15 bp, Homo sapiens
ccacgttggccacgc

SEQ ID NO: 1660488 - DNA, 15 bp, Homo sapiens
cacgttggccacgct

SEQ ID NO: 1660489 - DNA, 15 bp, Homo sapiens
acgttggccacgctg

SEQ ID NO: 1660490 - DNA, 15 bp, Homo sapiens
cgttggccacgctgg

SEQ ID NO: 1660491 - DNA, 15 bp, Homo sapiens
gttggccacgctggt

SEQ ID NO: 1660492 - DNA, 15 bp, Homo sapiens
ttggccacgctggta

SEQ ID NO: 1660493 - DNA, 15 bp, Homo sapiens
tggccacgctggtat

SEQ ID NO: 1660494 - DNA, 15 bp, Homo sapiens
ggccacgctggtatt

SEQ ID NO: 1660495 - DNA, 15 bp, Homo sapiens
gccacgctggtattg

SEQ ID NO: 1660496 - DNA, 15 bp, Homo sapiens
ccacgctggtattga

SEQ ID NO: 1660497 - DNA, 15 bp, Homo sapiens
cacgctggtattgaa

SEQ ID NO: 1660498 - DNA, 15 bp, Homo sapiens
acgctggtattgaac

SEQ ID NO: 1660499 - DNA, 15 bp, Homo sapiens
cgctggtattgaact

SEQ ID NO: 1660500 - DNA, 15 bp, Homo sapiens
gctggtattgaactc

SEQ ID NO: 1660501 - DNA, 15 bp, Homo sapiens
ctggtattgaactcc

SEQ ID NO: 1660502 - DNA, 15 bp, Homo sapiens
tggtattgaactcct

SEQ ID NO: 1660503 - DNA, 15 bp, Homo sapiens
ggtattgaactcctg

SEQ ID NO: 1660504 - DNA, 15 bp, Homo sapiens
gtattgaactcctgg

SEQ ID NO: 1660505 - DNA, 15 bp, Homo sapiens
tattgaactcctggc

SEQ ID NO: 1660506 - DNA, 15 bp, Homo sapiens
attgaactcctggct

SEQ ID NO: 1660507 - DNA, 15 bp, Homo sapiens
ggcttcaagtgatct

SEQ ID NO: 1660508 - DNA, 15 bp, Homo sapiens
gcttcaagtgatctt

SEQ ID NO: 1660509 - DNA, 15 bp, Homo sapiens
cttcaagtgatcttc

SEQ ID NO: 1660510 - DNA, 15 bp, Homo sapiens
ttcaagtgatcttcc

SEQ ID NO: 1660511 - DNA, 15 bp, Homo sapiens
gatcttcctgtctcg

SEQ ID NO: 1660512 - DNA, 15 bp, Homo sapiens
atcttcctgtctcgg

SEQ ID NO: 1660513 - DNA, 15 bp, Homo sapiens
tcttcctgtctcggt

SEQ ID NO: 1660514 - DNA, 15 bp, Homo sapiens
cttcctgtctcggtc

SEQ ID NO: 1660515 - DNA, 15 bp, Homo sapiens
ttcctgtctcggtct

SEQ ID NO: 1660516 - DNA, 15 bp, Homo sapiens
tcctgtctcggtctc

SEQ ID NO: 1660517 - DNA, 15 bp, Homo sapiens
cctgtctcggtctcc

SEQ ID NO: 1660518 - DNA, 15 bp, Homo sapiens
ctgtctcggtctccc

SEQ ID NO: 1660519 - DNA, 15 bp, Homo sapiens
tgtctcggtctcccg

SEQ ID NO: 1660520 - DNA, 15 bp, Homo sapiens
gtctcggtctcccga

SEQ ID NO: 1660521 - DNA, 15 bp, Homo sapiens
tctcggtctcccgaa

SEQ ID NO: 1660522 - DNA, 15 bp, Homo sapiens
ctcggtctcccgaag

SEQ ID NO: 1660523 - DNA, 15 bp, Homo sapiens
tcggtctcccgaagt

SEQ ID NO: 1660524 - DNA, 15 bp, Homo sapiens
cggtctcccgaagtg

SEQ ID NO: 1660525 - DNA, 15 bp, Homo sapiens
ggtctcccgaagtgc

SEQ ID NO: 1660526 - DNA, 15 bp, Homo sapiens
gtctcccgaagtgct

SEQ ID NO: 1660527 - DNA, 15 bp, Homo sapiens
tctcccgaagtgctg

SEQ ID NO: 1660528 - DNA, 15 bp, Homo sapiens
caggaatgagccact

SEQ ID NO: 1660529 - DNA, 15 bp, Homo sapiens
aggaatgagccactg

SEQ ID NO: 1660530 - DNA, 15 bp, Homo sapiens
ggaatgagccactgt

SEQ ID NO: 1660531 - DNA, 15 bp, Homo sapiens
gaatgagccactgtg

SEQ ID NO: 1660532 - DNA, 15 bp, Homo sapiens
aatgagccactgtgc

SEQ ID NO: 1660533 - DNA, 15 bp, Homo sapiens
cactgtgcccggcca

SEQ ID NO: 1660534 - DNA, 15 bp, Homo sapiens
actgtgcccggccaa

SEQ ID NO: 1660535 - DNA, 15 bp, Homo sapiens
ctgtgcccggccaat

SEQ ID NO: 1660536 - DNA, 15 bp, Homo sapiens
tgtgcccggccaata

SEQ ID NO: 1660537 - DNA, 15 bp, Homo sapiens
gtgcccggccaatac

SEQ ID NO: 1660538 - DNA, 15 bp, Homo sapiens
tgcccggccaatacg

SEQ ID NO: 1660539 - DNA, 15 bp, Homo sapiens
gcccggccaatacga

SEQ ID NO: 1660540 - DNA, 15 bp, Homo sapiens
cccggccaatacgac

SEQ ID NO: 1660541 - DNA, 15 bp, Homo sapiens
ccggccaatacgaca

SEQ ID NO: 1660542 - DNA, 15 bp, Homo sapiens
cggccaatacgacat

SEQ ID NO: 1660543 - DNA, 15 bp, Homo sapiens
ggccaatacgacatc

SEQ ID NO: 1660544 - DNA, 15 bp, Homo sapiens
gccaatacgacatct

SEQ ID NO: 1660545 - DNA, 15 bp, Homo sapiens
ccaatacgacatctg

SEQ ID NO: 1660546 - DNA, 15 bp, Homo sapiens
caatacgacatctgt

SEQ ID NO: 1660547 - DNA, 15 bp, Homo sapiens
aatacgacatctgtg

SEQ ID NO: 1660548 - DNA, 15 bp, Homo sapiens
atacgacatctgtgc

SEQ ID NO: 1660549 - DNA, 15 bp, Homo sapiens
tacgacatctgtgca

SEQ ID NO: 1660550 - DNA, 15 bp, Homo sapiens
acgacatctgtgcaa

SEQ ID NO: 1660551 - DNA, 15 bp, Homo sapiens
cgacatctgtgcaat

SEQ ID NO: 1660552 - DNA, 15 bp, Homo sapiens
gacatctgtgcaatg

SEQ ID NO: 1660553 - DNA, 15 bp, Homo sapiens
acatctgtgcaatga

SEQ ID NO: 1660554 - DNA, 15 bp, Homo sapiens
catctgtgcaatgaa

SEQ ID NO: 1660555 - DNA, 15 bp, Homo sapiens
atctgtgcaatgaag

SEQ ID NO: 1660556 - DNA, 15 bp, Homo sapiens
tctgtgcaatgaagt

SEQ ID NO: 1660557 - DNA, 15 bp, Homo sapiens
ctgtgcaatgaagtg

SEQ ID NO: 1660558 - DNA, 15 bp, Homo sapiens
tgtgcaatgaagtgc

SEQ ID NO: 1660559 - DNA, 15 bp, Homo sapiens
gtgcaatgaagtgca

SEQ ID NO: 1660560 - DNA, 15 bp, Homo sapiens
tgcaatgaagtgcaa

SEQ ID NO: 1660561 - DNA, 15 bp, Homo sapiens
gcaatgaagtgcaac

SEQ ID NO: 1660562 - DNA, 15 bp, Homo sapiens
caatgaagtgcaaca

SEQ ID NO: 1660563 - DNA, 15 bp, Homo sapiens
aatgaagtgcaacat

SEQ ID NO: 1660564 - DNA, 15 bp, Homo sapiens
atgaagtgcaacata

SEQ ID NO: 1660565 - DNA, 15 bp, Homo sapiens
tgaagtgcaacatat

SEQ ID NO: 1660566 - DNA, 15 bp, Homo sapiens
gaagtgcaacatata

SEQ ID NO: 1660567 - DNA, 15 bp, Homo sapiens
aagtgcaacatataa

SEQ ID NO: 1660568 - DNA, 15 bp, Homo sapiens
agtgcaacatataag

SEQ ID NO: 1660569 - DNA, 15 bp, Homo sapiens
gtgcaacatataaga

SEQ ID NO: 1660570 - DNA, 15 bp, Homo sapiens
tgcaacatataagac

SEQ ID NO: 1660571 - DNA, 15 bp, Homo sapiens
gcaacatataagaca

SEQ ID NO: 1660572 - DNA, 15 bp, Homo sapiens
caacatataagacac

SEQ ID NO: 1660573 - DNA, 15 bp, Homo sapiens
aacatataagacacc

SEQ ID NO: 1660574 - DNA, 15 bp, Homo sapiens
acatataagacaccc

SEQ ID NO: 1660575 - DNA, 15 bp, Homo sapiens
catataagacaccct

SEQ ID NO: 1660576 - DNA, 15 bp, Homo sapiens
atataagacaccctt

SEQ ID NO: 1660577 - DNA, 15 bp, Homo sapiens
tataagacacccttc

SEQ ID NO: 1660578 - DNA, 15 bp, Homo sapiens
ataagacacccttcc

SEQ ID NO: 1660579 - DNA, 15 bp, Homo sapiens
taagacacccttccc

SEQ ID NO: 1660580 - DNA, 15 bp, Homo sapiens
aagacacccttcccc

SEQ ID NO: 1660581 - DNA, 15 bp, Homo sapiens
agacacccttccccc

SEQ ID NO: 1660582 - DNA, 15 bp, Homo sapiens
gacacccttccccca

SEQ ID NO: 1660583 - DNA, 15 bp, Homo sapiens
acacccttcccccac

SEQ ID NO: 1660584 - DNA, 15 bp, Homo sapiens
cacccttcccccacc

SEQ ID NO: 1660585 - DNA, 15 bp, Homo sapiens
acccttcccccaccc

SEQ ID NO: 1660586 - DNA, 15 bp, Homo sapiens
cccttcccccaccca

SEQ ID NO: 1660587 - DNA, 15 bp, Homo sapiens
ccttcccccacccac

SEQ ID NO: 1660588 - DNA, 15 bp, Homo sapiens
cttcccccacccact

SEQ ID NO: 1660589 - DNA, 15 bp, Homo sapiens
ttcccccacccactg

SEQ ID NO: 1660590 - DNA, 15 bp, Homo sapiens
tcccccacccactgc

SEQ ID NO: 1660591 - DNA, 15 bp, Homo sapiens
cccccacccactgcc

SEQ ID NO: 1660592 - DNA, 15 bp, Homo sapiens
ccccacccactgccc

SEQ ID NO: 1660593 - DNA, 15 bp, Homo sapiens
cccacccactgcccc

SEQ ID NO: 1660594 - DNA, 15 bp, Homo sapiens
ccacccactgccccc

SEQ ID NO: 1660595 - DNA, 15 bp, Homo sapiens
cacccactgccccca

SEQ ID NO: 1660596 - DNA, 15 bp, Homo sapiens
acccactgcccccac

SEQ ID NO: 1660597 - DNA, 15 bp, Homo sapiens
cccactgcccccacc

SEQ ID NO: 1660598 - DNA, 15 bp, Homo sapiens
ccactgcccccacca

SEQ ID NO: 1660599 - DNA, 15 bp, Homo sapiens
cactgcccccaccac

SEQ ID NO: 1660600 - DNA, 15 bp, Homo sapiens
actgcccccaccacc

SEQ ID NO: 1660601 - DNA, 15 bp, Homo sapiens
ctgcccccaccaccg

SEQ ID NO: 1660602 - DNA, 15 bp, Homo sapiens
tgcccccaccaccgc

SEQ ID NO: 1660603 - DNA, 15 bp, Homo sapiens
gcccccaccaccgcc

SEQ ID NO: 1660604 - DNA, 15 bp, Homo sapiens
cccccaccaccgccc

SEQ ID NO: 1660605 - DNA, 15 bp, Homo sapiens
ccccaccaccgcccc

SEQ ID NO: 1660606 - DNA, 15 bp, Homo sapiens
cccaccaccgccccc

SEQ ID NO: 1660607 - DNA, 15 bp, Homo sapiens
ccaccaccgccccca

SEQ ID NO: 1660608 - DNA, 15 bp, Homo sapiens
caccaccgcccccac

SEQ ID NO: 1660609 - DNA, 15 bp, Homo sapiens
accaccgcccccacg

SEQ ID NO: 1660610 - DNA, 15 bp, Homo sapiens
ccaccgcccccacgc

SEQ ID NO: 1660611 - DNA, 15 bp, Homo sapiens
caccgcccccacgcc

SEQ ID NO: 1660612 - DNA, 15 bp, Homo sapiens
accgcccccacgccc

SEQ ID NO: 1660613 - DNA, 15 bp, Homo sapiens
ccgcccccacgcccc

SEQ ID NO: 1660614 - DNA, 15 bp, Homo sapiens
cgcccccacgccccc

SEQ ID NO: 1660615 - DNA, 15 bp, Homo sapiens
gcccccacgccccca

SEQ ID NO: 1660616 - DNA, 15 bp, Homo sapiens
cccccacgcccccac

SEQ ID NO: 1660617 - DNA, 15 bp, Homo sapiens
ccccacgcccccacc

SEQ ID NO: 1660618 - DNA, 15 bp, Homo sapiens
cccacgcccccaccc

SEQ ID NO: 1660619 - DNA, 15 bp, Homo sapiens
ccacgcccccacccc

SEQ ID NO: 1660620 - DNA, 15 bp, Homo sapiens
cacgcccccaccccc

SEQ ID NO: 1660621 - DNA, 15 bp, Homo sapiens
acgcccccaccccca

SEQ ID NO: 1660622 - DNA, 15 bp, Homo sapiens
cgcccccacccccat

SEQ ID NO: 1660623 - DNA, 15 bp, Homo sapiens
gcccccacccccatc

SEQ ID NO: 1660624 - DNA, 15 bp, Homo sapiens
cccccacccccatct

SEQ ID NO: 1660625 - DNA, 15 bp, Homo sapiens
ccccacccccatctc

SEQ ID NO: 1660626 - DNA, 15 bp, Homo sapiens
cccacccccatctcc

SEQ ID NO: 1660627 - DNA, 15 bp, Homo sapiens
ccacccccatctcca

SEQ ID NO: 1660628 - DNA, 15 bp, Homo sapiens
cacccccatctccag

SEQ ID NO: 1660629 - DNA, 15 bp, Homo sapiens
acccccatctccaga

SEQ ID NO: 1660630 - DNA, 15 bp, Homo sapiens
cccccatctccagat

SEQ ID NO: 1660631 - DNA, 15 bp, Homo sapiens
ccccatctccagatc

SEQ ID NO: 1660632 - DNA, 15 bp, Homo sapiens
cccatctccagatca

SEQ ID NO: 1660633 - DNA, 15 bp, Homo sapiens
ccatctccagatcag

SEQ ID NO: 1660634 - DNA, 15 bp, Homo sapiens
catctccagatcaga

SEQ ID NO: 1660635 - DNA, 15 bp, Homo sapiens
atctccagatcagaa

SEQ ID NO: 1660636 - DNA, 15 bp, Homo sapiens
tctccagatcagaac

SEQ ID NO: 1660637 - DNA, 15 bp, Homo sapiens
ctccagatcagaacc

SEQ ID NO: 1660638 - DNA, 15 bp, Homo sapiens
tccagatcagaacct

SEQ ID NO: 1660639 - DNA, 15 bp, Homo sapiens
ccagatcagaacctg

SEQ ID NO: 1660640 - DNA, 15 bp, Homo sapiens
cagatcagaacctgg

SEQ ID NO: 1660641 - DNA, 15 bp, Homo sapiens
agatcagaacctggg

SEQ ID NO: 1660642 - DNA, 15 bp, Homo sapiens
gatcagaacctgggg

SEQ ID NO: 1660643 - DNA, 15 bp, Homo sapiens
atcagaacctggggc

SEQ ID NO: 1660644 - DNA, 15 bp, Homo sapiens
tcagaacctggggct

SEQ ID NO: 1660645 - DNA, 15 bp, Homo sapiens
cagaacctggggctg

SEQ ID NO: 1660646 - DNA, 15 bp, Homo sapiens
agaacctggggctgt

SEQ ID NO: 1660647 - DNA, 15 bp, Homo sapiens
gaacctggggctgtg

SEQ ID NO: 1660648 - DNA, 15 bp, Homo sapiens
aacctggggctgtgc

SEQ ID NO: 1660649 - DNA, 15 bp, Homo sapiens
acctggggctgtgca

SEQ ID NO: 1660650 - DNA, 15 bp, Homo sapiens
cctggggctgtgcaa

SEQ ID NO: 1660651 - DNA, 15 bp, Homo sapiens
ctggggctgtgcaat

SEQ ID NO: 1660652 - DNA, 15 bp, Homo sapiens
tggggctgtgcaatt

SEQ ID NO: 1660653 - DNA, 15 bp, Homo sapiens
ggggctgtgcaattt

SEQ ID NO: 1660654 - DNA, 15 bp, Homo sapiens
gggctgtgcaatttt

SEQ ID NO: 1660655 - DNA, 15 bp, Homo sapiens
ggctgtgcaatttta

SEQ ID NO: 1660656 - DNA, 15 bp, Homo sapiens
gctgtgcaattttaa

SEQ ID NO: 1660657 - DNA, 15 bp, Homo sapiens
ctgtgcaattttaaa

SEQ ID NO: 1660658 - DNA, 15 bp, Homo sapiens
tgtgcaattttaaac

SEQ ID NO: 1660659 - DNA, 15 bp, Homo sapiens
gtgcaattttaaacg

SEQ ID NO: 1660660 - DNA, 15 bp, Homo sapiens
tgcaattttaaacgt

SEQ ID NO: 1660661 - DNA, 15 bp, Homo sapiens
gcaattttaaacgtt

SEQ ID NO: 1660662 - DNA, 15 bp, Homo sapiens
caattttaaacgttg

SEQ ID NO: 1660663 - DNA, 15 bp, Homo sapiens
aattttaaacgttgt

SEQ ID NO: 1660664 - DNA, 15 bp, Homo sapiens
attttaaacgttgta

SEQ ID NO: 1660665 - DNA, 15 bp, Homo sapiens
ttttaaacgttgtag

SEQ ID NO: 1660666 - DNA, 15 bp, Homo sapiens
tttaaacgttgtagc

SEQ ID NO: 1660667 - DNA, 15 bp, Homo sapiens
ttaaacgttgtagcc

SEQ ID NO: 1660668 - DNA, 15 bp, Homo sapiens
taaacgttgtagcca

SEQ ID NO: 1660669 - DNA, 15 bp, Homo sapiens
aaacgttgtagccac

SEQ ID NO: 1660670 - DNA, 15 bp, Homo sapiens
aacgttgtagccact

SEQ ID NO: 1660671 - DNA, 15 bp, Homo sapiens
acgttgtagccactt

SEQ ID NO: 1660672 - DNA, 15 bp, Homo sapiens
cgttgtagccacttg

SEQ ID NO: 1660673 - DNA, 15 bp, Homo sapiens
gttgtagccacttgc

SEQ ID NO: 1660674 - DNA, 15 bp, Homo sapiens
ttgtagccacttgct

SEQ ID NO: 1660675 - DNA, 15 bp, Homo sapiens
tgtagccacttgcta

SEQ ID NO: 1660676 - DNA, 15 bp, Homo sapiens
gtagccacttgctac

SEQ ID NO: 1660677 - DNA, 15 bp, Homo sapiens
tagccacttgctact

SEQ ID NO: 1660678 - DNA, 15 bp, Homo sapiens
agccacttgctactt

SEQ ID NO: 1660679 - DNA, 15 bp, Homo sapiens
gccacttgctacttg

SEQ ID NO: 1660680 - DNA, 15 bp, Homo sapiens
ccacttgctacttgg

SEQ ID NO: 1660681 - DNA, 15 bp, Homo sapiens
cacttgctacttggg

SEQ ID NO: 1660682 - DNA, 15 bp, Homo sapiens
acttgctacttgggt

SEQ ID NO: 1660683 - DNA, 15 bp, Homo sapiens
cttgctacttgggta

SEQ ID NO: 1660684 - DNA, 15 bp, Homo sapiens
ttgctacttgggtag

SEQ ID NO: 1660685 - DNA, 15 bp, Homo sapiens
tgctacttgggtagt

SEQ ID NO: 1660686 - DNA, 15 bp, Homo sapiens
gctacttgggtagtt

SEQ ID NO: 1660687 - DNA, 15 bp, Homo sapiens
ctacttgggtagttg

SEQ ID NO: 1660688 - DNA, 15 bp, Homo sapiens
tacttgggtagttga

SEQ ID NO: 1660689 - DNA, 15 bp, Homo sapiens
acttgggtagttgaa

SEQ ID NO: 1660690 - DNA, 15 bp, Homo sapiens
cttgggtagttgaag

SEQ ID NO: 1660691 - DNA, 15 bp, Homo sapiens
ttgggtagttgaagt

SEQ ID NO: 1660692 - DNA, 15 bp, Homo sapiens
tgggtagttgaagtt

SEQ ID NO: 1660693 - DNA, 15 bp, Homo sapiens
gggtagttgaagttc

SEQ ID NO: 1660694 - DNA, 15 bp, Homo sapiens
ggtagttgaagttca

SEQ ID NO: 1660695 - DNA, 15 bp, Homo sapiens
gtagttgaagttcag

SEQ ID NO: 1660696 - DNA, 15 bp, Homo sapiens
tagttgaagttcagt

SEQ ID NO: 1660697 - DNA, 15 bp, Homo sapiens
agttgaagttcagtc

SEQ ID NO: 1660698 - DNA, 15 bp, Homo sapiens
gttgaagttcagtct

SEQ ID NO: 1660699 - DNA, 15 bp, Homo sapiens
ttgaagttcagtctc

SEQ ID NO: 1660700 - DNA, 15 bp, Homo sapiens
tgaagttcagtctca

SEQ ID NO: 1660701 - DNA, 15 bp, Homo sapiens
gaagttcagtctcag

SEQ ID NO: 1660702 - DNA, 15 bp, Homo sapiens
aagttcagtctcagc

SEQ ID NO: 1660703 - DNA, 15 bp, Homo sapiens
agttcagtctcagcc

SEQ ID NO: 1660704 - DNA, 15 bp, Homo sapiens
gttcagtctcagcca

SEQ ID NO: 1660705 - DNA, 15 bp, Homo sapiens
ttcagtctcagccag

SEQ ID NO: 1660706 - DNA, 15 bp, Homo sapiens
tcagtctcagccagg

SEQ ID NO: 1660707 - DNA, 15 bp, Homo sapiens
cagtctcagccaggt

SEQ ID NO: 1660708 - DNA, 15 bp, Homo sapiens
agtctcagccaggtt

SEQ ID NO: 1660709 - DNA, 15 bp, Homo sapiens
gtctcagccaggttg

SEQ ID NO: 1660710 - DNA, 15 bp, Homo sapiens
tctcagccaggttgg

SEQ ID NO: 1660711 - DNA, 15 bp, Homo sapiens
ctcagccaggttgga

SEQ ID NO: 1660712 - DNA, 15 bp, Homo sapiens
tcagccaggttggag

SEQ ID NO: 1660713 - DNA, 15 bp, Homo sapiens
cagccaggttggagt

SEQ ID NO: 1660714 - DNA, 15 bp, Homo sapiens
agccaggttggagtc

SEQ ID NO: 1660715 - DNA, 15 bp, Homo sapiens
gccaggttggagtcc

SEQ ID NO: 1660716 - DNA, 15 bp, Homo sapiens
ccaggttggagtcct

SEQ ID NO: 1660717 - DNA, 15 bp, Homo sapiens
caggttggagtcctg

SEQ ID NO: 1660718 - DNA, 15 bp, Homo sapiens
aggttggagtcctgg

SEQ ID NO: 1660719 - DNA, 15 bp, Homo sapiens
ggttggagtcctgga

SEQ ID NO: 1660720 - DNA, 15 bp, Homo sapiens
gttggagtcctggac

SEQ ID NO: 1660721 - DNA, 15 bp, Homo sapiens
ttggagtcctggact

SEQ ID NO: 1660722 - DNA, 15 bp, Homo sapiens
tggagtcctggactc

SEQ ID NO: 1660723 - DNA, 15 bp, Homo sapiens
ggagtcctggactct

SEQ ID NO: 1660724 - DNA, 15 bp, Homo sapiens
gagtcctggactctg

SEQ ID NO: 1660725 - DNA, 15 bp, Homo sapiens
agtcctggactctgg

SEQ ID NO: 1660726 - DNA, 15 bp, Homo sapiens
gtcctggactctggc

SEQ ID NO: 1660727 - DNA, 15 bp, Homo sapiens
tcctggactctggcc

SEQ ID NO: 1660728 - DNA, 15 bp, Homo sapiens
cctggactctggccc

SEQ ID NO: 1660729 - DNA, 15 bp, Homo sapiens
ctggactctggcccc

SEQ ID NO: 1660730 - DNA, 15 bp, Homo sapiens
tggactctggcccct

SEQ ID NO: 1660731 - DNA, 15 bp, Homo sapiens
ggactctggcccctc

SEQ ID NO: 1660732 - DNA, 15 bp, Homo sapiens
gactctggcccctct

SEQ ID NO: 1660733 - DNA, 15 bp, Homo sapiens
actctggcccctctt

SEQ ID NO: 1660734 - DNA, 15 bp, Homo sapiens
ctctggcccctcttt

SEQ ID NO: 1660735 - DNA, 15 bp, Homo sapiens
tctggcccctctttt

SEQ ID NO: 1660736 - DNA, 15 bp, Homo sapiens
ctggcccctctttta

SEQ ID NO: 1660737 - DNA, 15 bp, Homo sapiens
tggcccctcttttat

SEQ ID NO: 1660738 - DNA, 15 bp, Homo sapiens
ggcccctcttttatt

SEQ ID NO: 1660739 - DNA, 15 bp, Homo sapiens
gcccctcttttattt

SEQ ID NO: 1660740 - DNA, 15 bp, Homo sapiens
cccctcttttatttt

SEQ ID NO: 1660741 - DNA, 15 bp, Homo sapiens
ccctcttttattttt

SEQ ID NO: 1660742 - DNA, 15 bp, Homo sapiens
cctcttttattttta

SEQ ID NO: 1660743 - DNA, 15 bp, Homo sapiens
ctcttttatttttat

SEQ ID NO: 1660744 - DNA, 15 bp, Homo sapiens
tcttttatttttatt

SEQ ID NO: 1660745 - DNA, 15 bp, Homo sapiens
cttttatttttattt

SEQ ID NO: 1660746 - DNA, 15 bp, Homo sapiens
tatttttatttttta

SEQ ID NO: 1660747 - DNA, 15 bp, Homo sapiens
atttttattttttat

SEQ ID NO: 1660748 - DNA, 15 bp, Homo sapiens
tttttattttttatt

SEQ ID NO: 1660749 - DNA, 15 bp, Homo sapiens
ttttattttttattt

SEQ ID NO: 1660750 - DNA, 15 bp, Homo sapiens
tttattttttatttt

SEQ ID NO: 1660751 - DNA, 15 bp, Homo sapiens
ttattttttattttt

SEQ ID NO: 1660752 - DNA, 15 bp, Homo sapiens
tattttttatttttt

SEQ ID NO: 1660753 - DNA, 15 bp, Homo sapiens
attttttattttttt

SEQ ID NO: 1660754 - DNA, 15 bp, Homo sapiens
ttttttatttttttt

SEQ ID NO: 1660755 - DNA, 15 bp, Homo sapiens
ttatttttttttgag

SEQ ID NO: 1660756 - DNA, 15 bp, Homo sapiens
tatttttttttgaga

SEQ ID NO: 1660757 - DNA, 15 bp, Homo sapiens
gctctgtcgcccaga

SEQ ID NO: 1660758 - DNA, 15 bp, Homo sapiens
ctctgtcgcccagac

SEQ ID NO: 1660759 - DNA, 15 bp, Homo sapiens
tctgtcgcccagact

SEQ ID NO: 1660760 - DNA, 15 bp, Homo sapiens
ctgtcgcccagactg

SEQ ID NO: 1660761 - DNA, 15 bp, Homo sapiens
tgtcgcccagactgg

SEQ ID NO: 1660762 - DNA, 15 bp, Homo sapiens
gtcgcccagactgga

SEQ ID NO: 1660763 - DNA, 15 bp, Homo sapiens
tcgcccagactggag

SEQ ID NO: 1660764 - DNA, 15 bp, Homo sapiens
cgcccagactggagc

SEQ ID NO: 1660765 - DNA, 15 bp, Homo sapiens
gcccagactggagcg

SEQ ID NO: 1660766 - DNA, 15 bp, Homo sapiens
cccagactggagcgc

SEQ ID NO: 1660767 - DNA, 15 bp, Homo sapiens
ccagactggagcgca

SEQ ID NO: 1660768 - DNA, 15 bp, Homo sapiens
cagactggagcgcag

SEQ ID NO: 1660769 - DNA, 15 bp, Homo sapiens
agactggagcgcagt

SEQ ID NO: 1660770 - DNA, 15 bp, Homo sapiens
gactggagcgcagtg

SEQ ID NO: 1660771 - DNA, 15 bp, Homo sapiens
actggagcgcagtgg

SEQ ID NO: 1660772 - DNA, 15 bp, Homo sapiens
ctggagcgcagtggt

SEQ ID NO: 1660773 - DNA, 15 bp, Homo sapiens
tggagcgcagtggtg

SEQ ID NO: 1660774 - DNA, 15 bp, Homo sapiens
ggagcgcagtggtgc

SEQ ID NO: 1660775 - DNA, 15 bp, Homo sapiens
gagcgcagtggtgcg

SEQ ID NO: 1660776 - DNA, 15 bp, Homo sapiens
agcgcagtggtgcga

SEQ ID NO: 1660777 - DNA, 15 bp, Homo sapiens
gcgcagtggtgcgat

SEQ ID NO: 1660778 - DNA, 15 bp, Homo sapiens
cgcagtggtgcgatc

SEQ ID NO: 1660779 - DNA, 15 bp, Homo sapiens
agctctgcctcctga

SEQ ID NO: 1660780 - DNA, 15 bp, Homo sapiens
gctctgcctcctgag

SEQ ID NO: 1660781 - DNA, 15 bp, Homo sapiens
ctctgcctcctgagt

SEQ ID NO: 1660782 - DNA, 15 bp, Homo sapiens
tctgcctcctgagtt

SEQ ID NO: 1660783 - DNA, 15 bp, Homo sapiens
ctgcctcctgagttc

SEQ ID NO: 1660784 - DNA, 15 bp, Homo sapiens
tgcctcctgagttca

SEQ ID NO: 1660785 - DNA, 15 bp, Homo sapiens
gcctcctgagttcac

SEQ ID NO: 1660786 - DNA, 15 bp, Homo sapiens
cctcctgagttcacg

SEQ ID NO: 1660787 - DNA, 15 bp, Homo sapiens
ctcctgagttcacgc

SEQ ID NO: 1660788 - DNA, 15 bp, Homo sapiens
tcctgagttcacgcc

SEQ ID NO: 1660789 - DNA, 15 bp, Homo sapiens
cctgagttcacgcca

SEQ ID NO: 1660790 - DNA, 15 bp, Homo sapiens
ctgagttcacgccat

SEQ ID NO: 1660791 - DNA, 15 bp, Homo sapiens
tgagttcacgccatt

SEQ ID NO: 1660792 - DNA, 15 bp, Homo sapiens
gagttcacgccattc

SEQ ID NO: 1660793 - DNA, 15 bp, Homo sapiens
agttcacgccattcc

SEQ ID NO: 1660794 - DNA, 15 bp, Homo sapiens
gttcacgccattccc

SEQ ID NO: 1660795 - DNA, 15 bp, Homo sapiens
ttcacgccattcccc

SEQ ID NO: 1660796 - DNA, 15 bp, Homo sapiens
tcacgccattccccc

SEQ ID NO: 1660797 - DNA, 15 bp, Homo sapiens
cacgccattcccccg

SEQ ID NO: 1660798 - DNA, 15 bp, Homo sapiens
acgccattcccccgc

SEQ ID NO: 1660799 - DNA, 15 bp, Homo sapiens
cgccattcccccgcc

SEQ ID NO: 1660800 - DNA, 15 bp, Homo sapiens
gccattcccccgcct

SEQ ID NO: 1660801 - DNA, 15 bp, Homo sapiens
ccattcccccgcctc

SEQ ID NO: 1660802 - DNA, 15 bp, Homo sapiens
cattcccccgcctca

SEQ ID NO: 1660803 - DNA, 15 bp, Homo sapiens
attcccccgcctcag

SEQ ID NO: 1660804 - DNA, 15 bp, Homo sapiens
ttcccccgcctcagc

SEQ ID NO: 1660805 - DNA, 15 bp, Homo sapiens
tcccccgcctcagcc

SEQ ID NO: 1660806 - DNA, 15 bp, Homo sapiens
cccccgcctcagcct

SEQ ID NO: 1660807 - DNA, 15 bp, Homo sapiens
ccccgcctcagcctc

SEQ ID NO: 1660808 - DNA, 15 bp, Homo sapiens
gcgcccgccaccaca

SEQ ID NO: 1660809 - DNA, 15 bp, Homo sapiens
cgcccgccaccacac

SEQ ID NO: 1660810 - DNA, 15 bp, Homo sapiens
cccgccaccacaccc

SEQ ID NO: 1660811 - DNA, 15 bp, Homo sapiens
cgccaccacacccgg

SEQ ID NO: 1660812 - DNA, 15 bp, Homo sapiens
caccacacccggcta

SEQ ID NO: 1660813 - DNA, 15 bp, Homo sapiens
accacacccggctaa

SEQ ID NO: 1660814 - DNA, 15 bp, Homo sapiens
ccacacccggctaat

SEQ ID NO: 1660815 - DNA, 15 bp, Homo sapiens
cacacccggctaatt

SEQ ID NO: 1660816 - DNA, 15 bp, Homo sapiens
acacccggctaattt

SEQ ID NO: 1660817 - DNA, 15 bp, Homo sapiens
cacccggctaatttc

SEQ ID NO: 1660818 - DNA, 15 bp, Homo sapiens
acccggctaatttct

SEQ ID NO: 1660819 - DNA, 15 bp, Homo sapiens
cccggctaatttctt

SEQ ID NO: 1660820 - DNA, 15 bp, Homo sapiens
ccggctaatttcttg

SEQ ID NO: 1660821 - DNA, 15 bp, Homo sapiens
cggctaatttcttgt

SEQ ID NO: 1660822 - DNA, 15 bp, Homo sapiens
ggctaatttcttgta

SEQ ID NO: 1660823 - DNA, 15 bp, Homo sapiens
gctaatttcttgtat

SEQ ID NO: 1660824 - DNA, 15 bp, Homo sapiens
ctaatttcttgtatt

SEQ ID NO: 1660825 - DNA, 15 bp, Homo sapiens
taatttcttgtattt

SEQ ID NO: 1660826 - DNA, 15 bp, Homo sapiens
aatttcttgtatttt

SEQ ID NO: 1660827 - DNA, 15 bp, Homo sapiens
atttcttgtattttt

SEQ ID NO: 1660828 - DNA, 15 bp, Homo sapiens
tttcttgtatttttt

SEQ ID NO: 1660829 - DNA, 15 bp, Homo sapiens
ttcttgtatttttta

SEQ ID NO: 1660830 - DNA, 15 bp, Homo sapiens
tcttgtattttttag

SEQ ID NO: 1660831 - DNA, 15 bp, Homo sapiens
cttgtattttttagt

SEQ ID NO: 1660832 - DNA, 15 bp, Homo sapiens
gatggggtttcaccc

SEQ ID NO: 1660833 - DNA, 15 bp, Homo sapiens
atggggtttcaccct

SEQ ID NO: 1660834 - DNA, 15 bp, Homo sapiens
tggggtttcaccctg

SEQ ID NO: 1660835 - DNA, 15 bp, Homo sapiens
ggggtttcaccctgt

SEQ ID NO: 1660836 - DNA, 15 bp, Homo sapiens
gggtttcaccctgtt

SEQ ID NO: 1660837 - DNA, 15 bp, Homo sapiens
ggtttcaccctgtta

SEQ ID NO: 1660838 - DNA, 15 bp, Homo sapiens
gtttcaccctgttag

SEQ ID NO: 1660839 - DNA, 15 bp, Homo sapiens
tttcaccctgttagc

SEQ ID NO: 1660840 - DNA, 15 bp, Homo sapiens
ttcaccctgttagcc

SEQ ID NO: 1660841 - DNA, 15 bp, Homo sapiens
tcaccctgttagcca

SEQ ID NO: 1660842 - DNA, 15 bp, Homo sapiens
caccctgttagccag

SEQ ID NO: 1660843 - DNA, 15 bp, Homo sapiens
accctgttagccagg

SEQ ID NO: 1660844 - DNA, 15 bp, Homo sapiens
ccctgttagccagga

SEQ ID NO: 1660845 - DNA, 15 bp, Homo sapiens
cctgttagccaggat

SEQ ID NO: 1660846 - DNA, 15 bp, Homo sapiens
ctgttagccaggatg

SEQ ID NO: 1660847 - DNA, 15 bp, Homo sapiens
agccaggatggtcta

SEQ ID NO: 1660848 - DNA, 15 bp, Homo sapiens
gccaggatggtctag

SEQ ID NO: 1660849 - DNA, 15 bp, Homo sapiens
ccaggatggtctaga

SEQ ID NO: 1660850 - DNA, 15 bp, Homo sapiens
caggatggtctagat

SEQ ID NO: 1660851 - DNA, 15 bp, Homo sapiens
aggatggtctagatt

SEQ ID NO: 1660852 - DNA, 15 bp, Homo sapiens
ggatggtctagattt

SEQ ID NO: 1660853 - DNA, 15 bp, Homo sapiens
gatggtctagatttc

SEQ ID NO: 1660854 - DNA, 15 bp, Homo sapiens
atggtctagatttcc

SEQ ID NO: 1660855 - DNA, 15 bp, Homo sapiens
tggtctagatttcct

SEQ ID NO: 1660856 - DNA, 15 bp, Homo sapiens
ggtctagatttcctg

SEQ ID NO: 1660857 - DNA, 15 bp, Homo sapiens
gtctagatttcctga

SEQ ID NO: 1660858 - DNA, 15 bp, Homo sapiens
tctagatttcctgac

SEQ ID NO: 1660859 - DNA, 15 bp, Homo sapiens
ctagatttcctgacc

SEQ ID NO: 1660860 - DNA, 15 bp, Homo sapiens
tagatttcctgacct

SEQ ID NO: 1660861 - DNA, 15 bp, Homo sapiens
agatttcctgacctt

SEQ ID NO: 1660862 - DNA, 15 bp, Homo sapiens
gatttcctgacctta

SEQ ID NO: 1660863 - DNA, 15 bp, Homo sapiens
atttcctgaccttat

SEQ ID NO: 1660864 - DNA, 15 bp, Homo sapiens
tttcctgaccttatg

SEQ ID NO: 1660865 - DNA, 15 bp, Homo sapiens
ttcctgaccttatga

SEQ ID NO: 1660866 - DNA, 15 bp, Homo sapiens
tcctgaccttatgat

SEQ ID NO: 1660867 - DNA, 15 bp, Homo sapiens
cctgaccttatgatc

SEQ ID NO: 1660868 - DNA, 15 bp, Homo sapiens
ctgaccttatgatcc

SEQ ID NO: 1660869 - DNA, 15 bp, Homo sapiens
tgaccttatgatccg

SEQ ID NO: 1660870 - DNA, 15 bp, Homo sapiens
gaccttatgatccgc

SEQ ID NO: 1660871 - DNA, 15 bp, Homo sapiens
accttatgatccgcc

SEQ ID NO: 1660872 - DNA, 15 bp, Homo sapiens
ccttatgatccgcct

SEQ ID NO: 1660873 - DNA, 15 bp, Homo sapiens
cttatgatccgcctg

SEQ ID NO: 1660874 - DNA, 15 bp, Homo sapiens
ttatgatccgcctgc

SEQ ID NO: 1660875 - DNA, 15 bp, Homo sapiens
tatgatccgcctgcc

SEQ ID NO: 1660876 - DNA, 15 bp, Homo sapiens
tccgcctgcctcggg

SEQ ID NO: 1660877 - DNA, 15 bp, Homo sapiens
ccgcctgcctcgggc

SEQ ID NO: 1660878 - DNA, 15 bp, Homo sapiens
cgcctgcctcgggcc

SEQ ID NO: 1660879 - DNA, 15 bp, Homo sapiens
gcctgcctcgggcct

SEQ ID NO: 1660880 - DNA, 15 bp, Homo sapiens
cctgcctcgggcctc

SEQ ID NO: 1660881 - DNA, 15 bp, Homo sapiens
ctgcctcgggcctcc

SEQ ID NO: 1660882 - DNA, 15 bp, Homo sapiens
tgcctcgggcctccc

SEQ ID NO: 1660883 - DNA, 15 bp, Homo sapiens
gcctcgggcctccca

SEQ ID NO: 1660884 - DNA, 15 bp, Homo sapiens
cctcgggcctcccaa

SEQ ID NO: 1660885 - DNA, 15 bp, Homo sapiens
ctcgggcctcccaaa

SEQ ID NO: 1660886 - DNA, 15 bp, Homo sapiens
tcgggcctcccaaag

SEQ ID NO: 1660887 - DNA, 15 bp, Homo sapiens
cgggcctcccaaagt

SEQ ID NO: 1660888 - DNA, 15 bp, Homo sapiens
caaagtgctgggatg

SEQ ID NO: 1660889 - DNA, 15 bp, Homo sapiens
aaagtgctgggatga

SEQ ID NO: 1660890 - DNA, 15 bp, Homo sapiens
aagtgctgggatgac

SEQ ID NO: 1660891 - DNA, 15 bp, Homo sapiens
agtgctgggatgaca

SEQ ID NO: 1660892 - DNA, 15 bp, Homo sapiens
gtgctgggatgacag

SEQ ID NO: 1660893 - DNA, 15 bp, Homo sapiens
tgctgggatgacagg

SEQ ID NO: 1660894 - DNA, 15 bp, Homo sapiens
gctgggatgacagga

SEQ ID NO: 1660895 - DNA, 15 bp, Homo sapiens
ctgggatgacaggag

SEQ ID NO: 1660896 - DNA, 15 bp, Homo sapiens
tgggatgacaggagt

SEQ ID NO: 1660897 - DNA, 15 bp, Homo sapiens
gggatgacaggagtg

SEQ ID NO: 1660898 - DNA, 15 bp, Homo sapiens
ggatgacaggagtga

SEQ ID NO: 1660899 - DNA, 15 bp, Homo sapiens
gatgacaggagtgag

SEQ ID NO: 1660900 - DNA, 15 bp, Homo sapiens
atgacaggagtgagc

SEQ ID NO: 1660901 - DNA, 15 bp, Homo sapiens
tgacaggagtgagcc

SEQ ID NO: 1660902 - DNA, 15 bp, Homo sapiens
gacaggagtgagcca

SEQ ID NO: 1660903 - DNA, 15 bp, Homo sapiens
acaggagtgagccac

SEQ ID NO: 1660904 - DNA, 15 bp, Homo sapiens
caggagtgagccacc

SEQ ID NO: 1660905 - DNA, 15 bp, Homo sapiens
aggagtgagccaccg

SEQ ID NO: 1660906 - DNA, 15 bp, Homo sapiens
ggagtgagccaccgc

SEQ ID NO: 1660907 - DNA, 15 bp, Homo sapiens
gagtgagccaccgcg

SEQ ID NO: 1660908 - DNA, 15 bp, Homo sapiens
agtgagccaccgcgc

SEQ ID NO: 1660909 - DNA, 15 bp, Homo sapiens
accgcgcccggcctc

SEQ ID NO: 1660910 - DNA, 15 bp, Homo sapiens
ccgcgcccggcctct

SEQ ID NO: 1660911 - DNA, 15 bp, Homo sapiens
cgcgcccggcctctt

SEQ ID NO: 1660912 - DNA, 15 bp, Homo sapiens
gcgcccggcctcttt

SEQ ID NO: 1660913 - DNA, 15 bp, Homo sapiens
cgcccggcctctttt

SEQ ID NO: 1660914 - DNA, 15 bp, Homo sapiens
gcccggcctcttttt

SEQ ID NO: 1660915 - DNA, 15 bp, Homo sapiens
cccggcctctttttt

SEQ ID NO: 1660916 - DNA, 15 bp, Homo sapiens
ccggcctcttttttt

SEQ ID NO: 1660917 - DNA, 15 bp, Homo sapiens
cggcctctttttttt

SEQ ID NO: 1660918 - DNA, 15 bp, Homo sapiens
ggcctcttttttttt

SEQ ID NO: 1660919 - DNA, 15 bp, Homo sapiens
ttttttttagacagt

SEQ ID NO: 1660920 - DNA, 15 bp, Homo sapiens
tttttttagacagtc

SEQ ID NO: 1660921 - DNA, 15 bp, Homo sapiens
ttttttagacagtct

SEQ ID NO: 1660922 - DNA, 15 bp, Homo sapiens
tttttagacagtctc

SEQ ID NO: 1660923 - DNA, 15 bp, Homo sapiens
ttttagacagtctct

SEQ ID NO: 1660924 - DNA, 15 bp, Homo sapiens
tttagacagtctctg

SEQ ID NO: 1660925 - DNA, 15 bp, Homo sapiens
ttagacagtctctgt

SEQ ID NO: 1660926 - DNA, 15 bp, Homo sapiens
tagacagtctctgtc

SEQ ID NO: 1660927 - DNA, 15 bp, Homo sapiens
agacagtctctgtca

SEQ ID NO: 1660928 - DNA, 15 bp, Homo sapiens
gacagtctctgtcac

SEQ ID NO: 1660929 - DNA, 15 bp, Homo sapiens
acagtctctgtcacc

SEQ ID NO: 1660930 - DNA, 15 bp, Homo sapiens
cagtctctgtcaccc

SEQ ID NO: 1660931 - DNA, 15 bp, Homo sapiens
agtctctgtcaccca

SEQ ID NO: 1660932 - DNA, 15 bp, Homo sapiens
gtctctgtcacccag

SEQ ID NO: 1660933 - DNA, 15 bp, Homo sapiens
ccaggctagagtgcg

SEQ ID NO: 1660934 - DNA, 15 bp, Homo sapiens
caggctagagtgcga

SEQ ID NO: 1660935 - DNA, 15 bp, Homo sapiens
aggctagagtgcgat

SEQ ID NO: 1660936 - DNA, 15 bp, Homo sapiens
ggctagagtgcgatg

SEQ ID NO: 1660937 - DNA, 15 bp, Homo sapiens
gctagagtgcgatgg

SEQ ID NO: 1660938 - DNA, 15 bp, Homo sapiens
ctagagtgcgatggt

SEQ ID NO: 1660939 - DNA, 15 bp, Homo sapiens
tagagtgcgatggtg

SEQ ID NO: 1660940 - DNA, 15 bp, Homo sapiens
agagtgcgatggtgc

SEQ ID NO: 1660941 - DNA, 15 bp, Homo sapiens
gagtgcgatggtgcg

SEQ ID NO: 1660942 - DNA, 15 bp, Homo sapiens
agtgcgatggtgcga

SEQ ID NO: 1660943 - DNA, 15 bp, Homo sapiens
gtgcgatggtgcgat

SEQ ID NO: 1660944 - DNA, 15 bp, Homo sapiens
tgcgatggtgcgatc

SEQ ID NO: 1660945 - DNA, 15 bp, Homo sapiens
gcgatggtgcgatct

SEQ ID NO: 1660946 - DNA, 15 bp, Homo sapiens
cgatggtgcgatctc

SEQ ID NO: 1660947 - DNA, 15 bp, Homo sapiens
gatggtgcgatctcg

SEQ ID NO: 1660948 - DNA, 15 bp, Homo sapiens
atggtgcgatctcgg

SEQ ID NO: 1660949 - DNA, 15 bp, Homo sapiens
tgcaacctccacctt

SEQ ID NO: 1660950 - DNA, 15 bp, Homo sapiens
gcaacctccaccttc

SEQ ID NO: 1660951 - DNA, 15 bp, Homo sapiens
caacctccaccttcc

SEQ ID NO: 1660952 - DNA, 15 bp, Homo sapiens
aacctccaccttccg

SEQ ID NO: 1660953 - DNA, 15 bp, Homo sapiens
acctccaccttccgg

SEQ ID NO: 1660954 - DNA, 15 bp, Homo sapiens
cctccaccttccggg

SEQ ID NO: 1660955 - DNA, 15 bp, Homo sapiens
ctccaccttccgggt

SEQ ID NO: 1660956 - DNA, 15 bp, Homo sapiens
tccaccttccgggtt

SEQ ID NO: 1660957 - DNA, 15 bp, Homo sapiens
ccaccttccgggttc

SEQ ID NO: 1660958 - DNA, 15 bp, Homo sapiens
caccttccgggttca

SEQ ID NO: 1660959 - DNA, 15 bp, Homo sapiens
accttccgggttcaa

SEQ ID NO: 1660960 - DNA, 15 bp, Homo sapiens
ccttccgggttcaag

SEQ ID NO: 1660961 - DNA, 15 bp, Homo sapiens
cttccgggttcaagc

SEQ ID NO: 1660962 - DNA, 15 bp, Homo sapiens
ttccgggttcaagcg

SEQ ID NO: 1660963 - DNA, 15 bp, Homo sapiens
tccgggttcaagcga

SEQ ID NO: 1660964 - DNA, 15 bp, Homo sapiens
attacaggtgcctgt

SEQ ID NO: 1660965 - DNA, 15 bp, Homo sapiens
ttacaggtgcctgtg

SEQ ID NO: 1660966 - DNA, 15 bp, Homo sapiens
tacaggtgcctgtga

SEQ ID NO: 1660967 - DNA, 15 bp, Homo sapiens
acaggtgcctgtgac

SEQ ID NO: 1660968 - DNA, 15 bp, Homo sapiens
caggtgcctgtgacc

SEQ ID NO: 1660969 - DNA, 15 bp, Homo sapiens
aggtgcctgtgacca

SEQ ID NO: 1660970 - DNA, 15 bp, Homo sapiens
ggtgcctgtgaccac

SEQ ID NO: 1660971 - DNA, 15 bp, Homo sapiens
gtgcctgtgaccacg

SEQ ID NO: 1660972 - DNA, 15 bp, Homo sapiens
tgcctgtgaccacgc

SEQ ID NO: 1660973 - DNA, 15 bp, Homo sapiens
gcctgtgaccacgcc

SEQ ID NO: 1660974 - DNA, 15 bp, Homo sapiens
cctgtgaccacgccc

SEQ ID NO: 1660975 - DNA, 15 bp, Homo sapiens
ctgtgaccacgcccg

SEQ ID NO: 1660976 - DNA, 15 bp, Homo sapiens
tgtgaccacgcccgg

SEQ ID NO: 1660977 - DNA, 15 bp, Homo sapiens
gtgaccacgcccggc

SEQ ID NO: 1660978 - DNA, 15 bp, Homo sapiens
tgaccacgcccggct

SEQ ID NO: 1660979 - DNA, 15 bp, Homo sapiens
gaccacgcccggctg

SEQ ID NO: 1660980 - DNA, 15 bp, Homo sapiens
accacgcccggctga

SEQ ID NO: 1660981 - DNA, 15 bp, Homo sapiens
ccacgcccggctgat

SEQ ID NO: 1660982 - DNA, 15 bp, Homo sapiens
cacgcccggctgatt

SEQ ID NO: 1660983 - DNA, 15 bp, Homo sapiens
acgcccggctgattt

SEQ ID NO: 1660984 - DNA, 15 bp, Homo sapiens
cgcccggctgatttt

SEQ ID NO: 1660985 - DNA, 15 bp, Homo sapiens
gcccggctgattttt

SEQ ID NO: 1660986 - DNA, 15 bp, Homo sapiens
cccggctgatttttg

SEQ ID NO: 1660987 - DNA, 15 bp, Homo sapiens
ccggctgatttttgt

SEQ ID NO: 1660988 - DNA, 15 bp, Homo sapiens
cggctgatttttgta

SEQ ID NO: 1660989 - DNA, 15 bp, Homo sapiens
ggctgatttttgtat

SEQ ID NO: 1660990 - DNA, 15 bp, Homo sapiens
gctgatttttgtatt

SEQ ID NO: 1660991 - DNA, 15 bp, Homo sapiens
ctgatttttgtattt

SEQ ID NO: 1660992 - DNA, 15 bp, Homo sapiens
tgatttttgtatttt

SEQ ID NO: 1660993 - DNA, 15 bp, Homo sapiens
gatttttgtattttt

SEQ ID NO: 1660994 - DNA, 15 bp, Homo sapiens
cggggtttcaccaca

SEQ ID NO: 1660995 - DNA, 15 bp, Homo sapiens
caccacattggtcag

SEQ ID NO: 1660996 - DNA, 15 bp, Homo sapiens
accacattggtcagg

SEQ ID NO: 1660997 - DNA, 15 bp, Homo sapiens
ccacattggtcaggc

SEQ ID NO: 1660998 - DNA, 15 bp, Homo sapiens
cacattggtcaggct

SEQ ID NO: 1660999 - DNA, 15 bp, Homo sapiens
acattggtcaggcta

SEQ ID NO: 1661000 - DNA, 15 bp, Homo sapiens
cattggtcaggctag

SEQ ID NO: 1661001 - DNA, 15 bp, Homo sapiens
attggtcaggctagc

SEQ ID NO: 1661002 - DNA, 15 bp, Homo sapiens
ttggtcaggctagcc

SEQ ID NO: 1661003 - DNA, 15 bp, Homo sapiens
tggtcaggctagcct

SEQ ID NO: 1661004 - DNA, 15 bp, Homo sapiens
ggtcaggctagcctc

SEQ ID NO: 1661005 - DNA, 15 bp, Homo sapiens
gtcaggctagcctca

SEQ ID NO: 1661006 - DNA, 15 bp, Homo sapiens
tcaggctagcctcaa

SEQ ID NO: 1661007 - DNA, 15 bp, Homo sapiens
caggctagcctcaaa

SEQ ID NO: 1661008 - DNA, 15 bp, Homo sapiens
aggctagcctcaaac

SEQ ID NO: 1661009 - DNA, 15 bp, Homo sapiens
ggctagcctcaaact

SEQ ID NO: 1661010 - DNA, 15 bp, Homo sapiens
gctagcctcaaactc

SEQ ID NO: 1661011 - DNA, 15 bp, Homo sapiens
ctagcctcaaactcc

SEQ ID NO: 1661012 - DNA, 15 bp, Homo sapiens
tagcctcaaactcct

SEQ ID NO: 1661013 - DNA, 15 bp, Homo sapiens
gcctcaaactcctga

SEQ ID NO: 1661014 - DNA, 15 bp, Homo sapiens
cctcaaactcctgac

SEQ ID NO: 1661015 - DNA, 15 bp, Homo sapiens
tcaaactcctgaccc

SEQ ID NO: 1661016 - DNA, 15 bp, Homo sapiens
caaactcctgacccc

SEQ ID NO: 1661017 - DNA, 15 bp, Homo sapiens
aaactcctgaccccg

SEQ ID NO: 1661018 - DNA, 15 bp, Homo sapiens
aactcctgaccccgt

SEQ ID NO: 1661019 - DNA, 15 bp, Homo sapiens
actcctgaccccgtg

SEQ ID NO: 1661020 - DNA, 15 bp, Homo sapiens
ctcctgaccccgtga

SEQ ID NO: 1661021 - DNA, 15 bp, Homo sapiens
tcctgaccccgtgat

SEQ ID NO: 1661022 - DNA, 15 bp, Homo sapiens
cctgaccccgtgatc

SEQ ID NO: 1661023 - DNA, 15 bp, Homo sapiens
ctgaccccgtgatcc

SEQ ID NO: 1661024 - DNA, 15 bp, Homo sapiens
tgaccccgtgatcct

SEQ ID NO: 1661025 - DNA, 15 bp, Homo sapiens
gaccccgtgatcctt

SEQ ID NO: 1661026 - DNA, 15 bp, Homo sapiens
accccgtgatccttc

SEQ ID NO: 1661027 - DNA, 15 bp, Homo sapiens
ccccgtgatccttcc

SEQ ID NO: 1661028 - DNA, 15 bp, Homo sapiens
cccgtgatccttccg

SEQ ID NO: 1661029 - DNA, 15 bp, Homo sapiens
ccgtgatccttccgc

SEQ ID NO: 1661030 - DNA, 15 bp, Homo sapiens
cgtgatccttccgcc

SEQ ID NO: 1661031 - DNA, 15 bp, Homo sapiens
gtgatccttccgcct

SEQ ID NO: 1661032 - DNA, 15 bp, Homo sapiens
tgatccttccgcctc

SEQ ID NO: 1661033 - DNA, 15 bp, Homo sapiens
gatccttccgcctca

SEQ ID NO: 1661034 - DNA, 15 bp, Homo sapiens
atccttccgcctcag

SEQ ID NO: 1661035 - DNA, 15 bp, Homo sapiens
tccttccgcctcagc

SEQ ID NO: 1661036 - DNA, 15 bp, Homo sapiens
ccttccgcctcagcc

SEQ ID NO: 1661037 - DNA, 15 bp, Homo sapiens
cttccgcctcagcct

SEQ ID NO: 1661038 - DNA, 15 bp, Homo sapiens
ttccgcctcagcctc

SEQ ID NO: 1661039 - DNA, 15 bp, Homo sapiens
tccgcctcagcctcc

SEQ ID NO: 1661040 - DNA, 15 bp, Homo sapiens
ctgggattacaggac

SEQ ID NO: 1661041 - DNA, 15 bp, Homo sapiens
tgggattacaggact

SEQ ID NO: 1661042 - DNA, 15 bp, Homo sapiens
gggattacaggactc

SEQ ID NO: 1661043 - DNA, 15 bp, Homo sapiens
ggattacaggactct

SEQ ID NO: 1661044 - DNA, 15 bp, Homo sapiens
gattacaggactctg

SEQ ID NO: 1661045 - DNA, 15 bp, Homo sapiens
attacaggactctgg

SEQ ID NO: 1661046 - DNA, 15 bp, Homo sapiens
ttacaggactctggc

SEQ ID NO: 1661047 - DNA, 15 bp, Homo sapiens
tacaggactctggcc

SEQ ID NO: 1661048 - DNA, 15 bp, Homo sapiens
acaggactctggccc

SEQ ID NO: 1661049 - DNA, 15 bp, Homo sapiens
caggactctggccca

SEQ ID NO: 1661050 - DNA, 15 bp, Homo sapiens
aggactctggcccat

SEQ ID NO: 1661051 - DNA, 15 bp, Homo sapiens
ggactctggcccatc

SEQ ID NO: 1661052 - DNA, 15 bp, Homo sapiens
gactctggcccatct

SEQ ID NO: 1661053 - DNA, 15 bp, Homo sapiens
actctggcccatctt

SEQ ID NO: 1661054 - DNA, 15 bp, Homo sapiens
ctctggcccatcttg

SEQ ID NO: 1661055 - DNA, 15 bp, Homo sapiens
tctggcccatcttgg

SEQ ID NO: 1661056 - DNA, 15 bp, Homo sapiens
ctggcccatcttggc

SEQ ID NO: 1661057 - DNA, 15 bp, Homo sapiens
tggcccatcttggct

SEQ ID NO: 1661058 - DNA, 15 bp, Homo sapiens
ggcccatcttggctg

SEQ ID NO: 1661059 - DNA, 15 bp, Homo sapiens
gcccatcttggctgc

SEQ ID NO: 1661060 - DNA, 15 bp, Homo sapiens
cccatcttggctgct

SEQ ID NO: 1661061 - DNA, 15 bp, Homo sapiens
ccatcttggctgctg

SEQ ID NO: 1661062 - DNA, 15 bp, Homo sapiens
catcttggctgctgc

SEQ ID NO: 1661063 - DNA, 15 bp, Homo sapiens
atcttggctgctgcc

SEQ ID NO: 1661064 - DNA, 15 bp, Homo sapiens
tcttggctgctgcca

SEQ ID NO: 1661065 - DNA, 15 bp, Homo sapiens
cttggctgctgccaa

SEQ ID NO: 1661066 - DNA, 15 bp, Homo sapiens
ttggctgctgccaat

SEQ ID NO: 1661067 - DNA, 15 bp, Homo sapiens
tggctgctgccaatg

SEQ ID NO: 1661068 - DNA, 15 bp, Homo sapiens
ggctgctgccaatgt

SEQ ID NO: 1661069 - DNA, 15 bp, Homo sapiens
gctgctgccaatgtc

SEQ ID NO: 1661070 - DNA, 15 bp, Homo sapiens
ctgctgccaatgtcc

SEQ ID NO: 1661071 - DNA, 15 bp, Homo sapiens
tgctgccaatgtcct

SEQ ID NO: 1661072 - DNA, 15 bp, Homo sapiens
gctgccaatgtcctt

SEQ ID NO: 1661073 - DNA, 15 bp, Homo sapiens
ctgccaatgtccttc

SEQ ID NO: 1661074 - DNA, 15 bp, Homo sapiens
tgccaatgtccttcc

SEQ ID NO: 1661075 - DNA, 15 bp, Homo sapiens
gccaatgtccttcct

SEQ ID NO: 1661076 - DNA, 15 bp, Homo sapiens
ccaatgtccttcctt

SEQ ID NO: 1661077 - DNA, 15 bp, Homo sapiens
caatgtccttccttc

SEQ ID NO: 1661078 - DNA, 15 bp, Homo sapiens
aatgtccttccttct

SEQ ID NO: 1661079 - DNA, 15 bp, Homo sapiens
atgtccttccttcta

SEQ ID NO: 1661080 - DNA, 15 bp, Homo sapiens
tgtccttccttctat

SEQ ID NO: 1661081 - DNA, 15 bp, Homo sapiens
gtccttccttctatc

SEQ ID NO: 1661082 - DNA, 15 bp, Homo sapiens
tccttccttctatct

SEQ ID NO: 1661083 - DNA, 15 bp, Homo sapiens
ccttccttctatctt

SEQ ID NO: 1661084 - DNA, 15 bp, Homo sapiens
cttccttctatcttg

SEQ ID NO: 1661085 - DNA, 15 bp, Homo sapiens
ttccttctatcttgg

SEQ ID NO: 1661086 - DNA, 15 bp, Homo sapiens
tccttctatcttggt

SEQ ID NO: 1661087 - DNA, 15 bp, Homo sapiens
ccttctatcttggtt

SEQ ID NO: 1661088 - DNA, 15 bp, Homo sapiens
cttctatcttggttt

SEQ ID NO: 1661089 - DNA, 15 bp, Homo sapiens
ttctatcttggtttt

SEQ ID NO: 1661090 - DNA, 15 bp, Homo sapiens
tctatcttggttttt

SEQ ID NO: 1661091 - DNA, 15 bp, Homo sapiens
ctatcttggtttttc

SEQ ID NO: 1661092 - DNA, 15 bp, Homo sapiens
tatcttggtttttcc

SEQ ID NO: 1661093 - DNA, 15 bp, Homo sapiens
atcttggtttttcca

SEQ ID NO: 1661094 - DNA, 15 bp, Homo sapiens
tcttggtttttccac

SEQ ID NO: 1661095 - DNA, 15 bp, Homo sapiens
cttggtttttccaca

SEQ ID NO: 1661096 - DNA, 15 bp, Homo sapiens
ttggtttttccacag

SEQ ID NO: 1661097 - DNA, 15 bp, Homo sapiens
tggtttttccacagt

SEQ ID NO: 1661098 - DNA, 15 bp, Homo sapiens
ggtttttccacagtt

SEQ ID NO: 1661099 - DNA, 15 bp, Homo sapiens
gtttttccacagtta

SEQ ID NO: 1661100 - DNA, 15 bp, Homo sapiens
tttttccacagttac

SEQ ID NO: 1661101 - DNA, 15 bp, Homo sapiens
ttttccacagttacg

SEQ ID NO: 1661102 - DNA, 15 bp, Homo sapiens
tttccacagttacgc

SEQ ID NO: 1661103 - DNA, 15 bp, Homo sapiens
ttccacagttacgca

SEQ ID NO: 1661104 - DNA, 15 bp, Homo sapiens
tccacagttacgcac

SEQ ID NO: 1661105 - DNA, 15 bp, Homo sapiens
ccacagttacgcaca

SEQ ID NO: 1661106 - DNA, 15 bp, Homo sapiens
cacagttacgcacat

SEQ ID NO: 1661107 - DNA, 15 bp, Homo sapiens
acagttacgcacatg

SEQ ID NO: 1661108 - DNA, 15 bp, Homo sapiens
cagttacgcacatgc

SEQ ID NO: 1661109 - DNA, 15 bp, Homo sapiens
agttacgcacatgcc

SEQ ID NO: 1661110 - DNA, 15 bp, Homo sapiens
gttacgcacatgcca

SEQ ID NO: 1661111 - DNA, 15 bp, Homo sapiens
ttacgcacatgccag

SEQ ID NO: 1661112 - DNA, 15 bp, Homo sapiens
tacgcacatgccaga

SEQ ID NO: 1661113 - DNA, 15 bp, Homo sapiens
acgcacatgccagat

SEQ ID NO: 1661114 - DNA, 15 bp, Homo sapiens
cgcacatgccagata

SEQ ID NO: 1661115 - DNA, 15 bp, Homo sapiens
gcacatgccagataa

SEQ ID NO: 1661116 - DNA, 15 bp, Homo sapiens
cacatgccagataac

SEQ ID NO: 1661117 - DNA, 15 bp, Homo sapiens
acatgccagataacg

SEQ ID NO: 1661118 - DNA, 15 bp, Homo sapiens
catgccagataacgg

SEQ ID NO: 1661119 - DNA, 15 bp, Homo sapiens
atgccagataacggc

SEQ ID NO: 1661120 - DNA, 15 bp, Homo sapiens
tgccagataacggcg

SEQ ID NO: 1661121 - DNA, 15 bp, Homo sapiens
gccagataacggcga

SEQ ID NO: 1661122 - DNA, 15 bp, Homo sapiens
ccagataacggcgag

SEQ ID NO: 1661123 - DNA, 15 bp, Homo sapiens
cagataacggcgagt

SEQ ID NO: 1661124 - DNA, 15 bp, Homo sapiens
agataacggcgagtc

SEQ ID NO: 1661125 - DNA, 15 bp, Homo sapiens
gataacggcgagtct

SEQ ID NO: 1661126 - DNA, 15 bp, Homo sapiens
ataacggcgagtctg

SEQ ID NO: 1661127 - DNA, 15 bp, Homo sapiens
taacggcgagtctgt

SEQ ID NO: 1661128 - DNA, 15 bp, Homo sapiens
aacggcgagtctgtt

SEQ ID NO: 1661129 - DNA, 15 bp, Homo sapiens
acggcgagtctgttc

SEQ ID NO: 1661130 - DNA, 15 bp, Homo sapiens
cggcgagtctgttcc

SEQ ID NO: 1661131 - DNA, 15 bp, Homo sapiens
ggcgagtctgttccc

SEQ ID NO: 1661132 - DNA, 15 bp, Homo sapiens
gcgagtctgttcccc

SEQ ID NO: 1661133 - DNA, 15 bp, Homo sapiens
cgagtctgttcccca

SEQ ID NO: 1661134 - DNA, 15 bp, Homo sapiens
gagtctgttccccag

SEQ ID NO: 1661135 - DNA, 15 bp, Homo sapiens
agtctgttccccagc

SEQ ID NO: 1661136 - DNA, 15 bp, Homo sapiens
gtctgttccccagca

SEQ ID NO: 1661137 - DNA, 15 bp, Homo sapiens
tctgttccccagcaa

SEQ ID NO: 1661138 - DNA, 15 bp, Homo sapiens
ctgttccccagcaac

SEQ ID NO: 1661139 - DNA, 15 bp, Homo sapiens
tgttccccagcaact

SEQ ID NO: 1661140 - DNA, 15 bp, Homo sapiens
gttccccagcaactg

SEQ ID NO: 1661141 - DNA, 15 bp, Homo sapiens
ttccccagcaactgc

SEQ ID NO: 1661142 - DNA, 15 bp, Homo sapiens
tccccagcaactgca

SEQ ID NO: 1661143 - DNA, 15 bp, Homo sapiens
ccccagcaactgcaa

SEQ ID NO: 1661144 - DNA, 15 bp, Homo sapiens
cccagcaactgcaac

SEQ ID NO: 1661145 - DNA, 15 bp, Homo sapiens
ccagcaactgcaacg

SEQ ID NO: 1661146 - DNA, 15 bp, Homo sapiens
cagcaactgcaacgg

SEQ ID NO: 1661147 - DNA, 15 bp, Homo sapiens
agcaactgcaacgga

SEQ ID NO: 1661148 - DNA, 15 bp, Homo sapiens
gcaactgcaacggat

SEQ ID NO: 1661149 - DNA, 15 bp, Homo sapiens
caactgcaacggatc

SEQ ID NO: 1661150 - DNA, 15 bp, Homo sapiens
aactgcaacggatct

SEQ ID NO: 1661151 - DNA, 15 bp, Homo sapiens
actgcaacggatctg

SEQ ID NO: 1661152 - DNA, 15 bp, Homo sapiens
ctgcaacggatctgc

SEQ ID NO: 1661153 - DNA, 15 bp, Homo sapiens
tgcaacggatctgcc

SEQ ID NO: 1661154 - DNA, 15 bp, Homo sapiens
gcaacggatctgccc

SEQ ID NO: 1661155 - DNA, 15 bp, Homo sapiens
caacggatctgccca

SEQ ID NO: 1661156 - DNA, 15 bp, Homo sapiens
aacggatctgcccac

SEQ ID NO: 1661157 - DNA, 15 bp, Homo sapiens
acggatctgcccacc

SEQ ID NO: 1661158 - DNA, 15 bp, Homo sapiens
cggatctgcccacca

SEQ ID NO: 1661159 - DNA, 15 bp, Homo sapiens
ggatctgcccaccac

SEQ ID NO: 1661160 - DNA, 15 bp, Homo sapiens
gatctgcccaccact

SEQ ID NO: 1661161 - DNA, 15 bp, Homo sapiens
atctgcccaccactg

SEQ ID NO: 1661162 - DNA, 15 bp, Homo sapiens
tctgcccaccactgg

SEQ ID NO: 1661163 - DNA, 15 bp, Homo sapiens
ctgcccaccactggg

SEQ ID NO: 1661164 - DNA, 15 bp, Homo sapiens
tgcccaccactggga

SEQ ID NO: 1661165 - DNA, 15 bp, Homo sapiens
gcccaccactgggaa

SEQ ID NO: 1661166 - DNA, 15 bp, Homo sapiens
cccaccactgggaaa

SEQ ID NO: 1661167 - DNA, 15 bp, Homo sapiens
ccaccactgggaaat

SEQ ID NO: 1661168 - DNA, 15 bp, Homo sapiens
caccactgggaaatg

SEQ ID NO: 1661169 - DNA, 15 bp, Homo sapiens
accactgggaaatgg

SEQ ID NO: 1661170 - DNA, 15 bp, Homo sapiens
ccactgggaaatgga

SEQ ID NO: 1661171 - DNA, 15 bp, Homo sapiens
cactgggaaatggaa

SEQ ID NO: 1661172 - DNA, 15 bp, Homo sapiens
actgggaaatggaag

SEQ ID NO: 1661173 - DNA, 15 bp, Homo sapiens
ctgggaaatggaaga

SEQ ID NO: 1661174 - DNA, 15 bp, Homo sapiens
tgggaaatggaagac

SEQ ID NO: 1661175 - DNA, 15 bp, Homo sapiens
gggaaatggaagacc

SEQ ID NO: 1661176 - DNA, 15 bp, Homo sapiens
ggaaatggaagacct

SEQ ID NO: 1661177 - DNA, 15 bp, Homo sapiens
gaaatggaagacctt

SEQ ID NO: 1661178 - DNA, 15 bp, Homo sapiens
aaatggaagaccttg

SEQ ID NO: 1661179 - DNA, 15 bp, Homo sapiens
aatggaagaccttgc

SEQ ID NO: 1661180 - DNA, 15 bp, Homo sapiens
atggaagaccttgca

SEQ ID NO: 1661181 - DNA, 15 bp, Homo sapiens
tggaagaccttgcag

SEQ ID NO: 1661182 - DNA, 15 bp, Homo sapiens
ggaagaccttgcagc

SEQ ID NO: 1661183 - DNA, 15 bp, Homo sapiens
gaagaccttgcagcc

SEQ ID NO: 1661184 - DNA, 15 bp, Homo sapiens
aagaccttgcagccc

SEQ ID NO: 1661185 - DNA, 15 bp, Homo sapiens
agaccttgcagccca

SEQ ID NO: 1661186 - DNA, 15 bp, Homo sapiens
gaccttgcagcccag

SEQ ID NO: 1661187 - DNA, 15 bp, Homo sapiens
accttgcagcccagg

SEQ ID NO: 1661188 - DNA, 15 bp, Homo sapiens
ccttgcagcccaggt

SEQ ID NO: 1661189 - DNA, 15 bp, Homo sapiens
cttgcagcccaggtc

SEQ ID NO: 1661190 - DNA, 15 bp, Homo sapiens
ttgcagcccaggtct

SEQ ID NO: 1661191 - DNA, 15 bp, Homo sapiens
tgcagcccaggtctt

SEQ ID NO: 1661192 - DNA, 15 bp, Homo sapiens
gcagcccaggtcttt

SEQ ID NO: 1661193 - DNA, 15 bp, Homo sapiens
cagcccaggtctttg

SEQ ID NO: 1661194 - DNA, 15 bp, Homo sapiens
agcccaggtctttgt

SEQ ID NO: 1661195 - DNA, 15 bp, Homo sapiens
gcccaggtctttgta

SEQ ID NO: 1661196 - DNA, 15 bp, Homo sapiens
cccaggtctttgtag

SEQ ID NO: 1661197 - DNA, 15 bp, Homo sapiens
ccaggtctttgtaga

SEQ ID NO: 1661198 - DNA, 15 bp, Homo sapiens
caggtctttgtagac

SEQ ID NO: 1661199 - DNA, 15 bp, Homo sapiens
aggtctttgtagacc

SEQ ID NO: 1661200 - DNA, 15 bp, Homo sapiens
ggtctttgtagacca

SEQ ID NO: 1661201 - DNA, 15 bp, Homo sapiens
gtctttgtagaccaa

SEQ ID NO: 1661202 - DNA, 15 bp, Homo sapiens
tctttgtagaccaag

SEQ ID NO: 1661203 - DNA, 15 bp, Homo sapiens
ctttgtagaccaaga

SEQ ID NO: 1661204 - DNA, 15 bp, Homo sapiens
tttgtagaccaagat

SEQ ID NO: 1661205 - DNA, 15 bp, Homo sapiens
ttgtagaccaagatt

SEQ ID NO: 1661206 - DNA, 15 bp, Homo sapiens
tgtagaccaagatta

SEQ ID NO: 1661207 - DNA, 15 bp, Homo sapiens
gtagaccaagattag

SEQ ID NO: 1661208 - DNA, 15 bp, Homo sapiens
tagaccaagattaga

SEQ ID NO: 1661209 - DNA, 15 bp, Homo sapiens
agaccaagattagat

SEQ ID NO: 1661210 - DNA, 15 bp, Homo sapiens
gaccaagattagatt

SEQ ID NO: 1661211 - DNA, 15 bp, Homo sapiens
accaagattagattg

SEQ ID NO: 1661212 - DNA, 15 bp, Homo sapiens
ccaagattagattgt

SEQ ID NO: 1661213 - DNA, 15 bp, Homo sapiens
caagattagattgtg

SEQ ID NO: 1661214 - DNA, 15 bp, Homo sapiens
aagattagattgtgg

SEQ ID NO: 1661215 - DNA, 15 bp, Homo sapiens
agattagattgtggt

SEQ ID NO: 1661216 - DNA, 15 bp, Homo sapiens
gattagattgtggtc

SEQ ID NO: 1661217 - DNA, 15 bp, Homo sapiens
attagattgtggtca

SEQ ID NO: 1661218 - DNA, 15 bp, Homo sapiens
ttagattgtggtcaa

SEQ ID NO: 1661219 - DNA, 15 bp, Homo sapiens
tagattgtggtcaac

SEQ ID NO: 1661220 - DNA, 15 bp, Homo sapiens
agattgtggtcaaca

SEQ ID NO: 1661221 - DNA, 15 bp, Homo sapiens
gattgtggtcaacaa

SEQ ID NO: 1661222 - DNA, 15 bp, Homo sapiens
attgtggtcaacaaa

SEQ ID NO: 1661223 - DNA, 15 bp, Homo sapiens
ttgtggtcaacaaac

SEQ ID NO: 1661224 - DNA, 15 bp, Homo sapiens
tgtggtcaacaaaca

SEQ ID NO: 1661225 - DNA, 15 bp, Homo sapiens
gtggtcaacaaacac

SEQ ID NO: 1661226 - DNA, 15 bp, Homo sapiens
tggtcaacaaacacc

SEQ ID NO: 1661227 - DNA, 15 bp, Homo sapiens
ggtcaacaaacacct

SEQ ID NO: 1661228 - DNA, 15 bp, Homo sapiens
gtcaacaaacacctg

SEQ ID NO: 1661229 - DNA, 15 bp, Homo sapiens
tcaacaaacacctga

SEQ ID NO: 1661230 - DNA, 15 bp, Homo sapiens
caacaaacacctgac

SEQ ID NO: 1661231 - DNA, 15 bp, Homo sapiens
aacaaacacctgacc

SEQ ID NO: 1661232 - DNA, 15 bp, Homo sapiens
acaaacacctgacct

SEQ ID NO: 1661233 - DNA, 15 bp, Homo sapiens
caaacacctgacctt

SEQ ID NO: 1661234 - DNA, 15 bp, Homo sapiens
aaacacctgaccttg

SEQ ID NO: 1661235 - DNA, 15 bp, Homo sapiens
aacacctgaccttgg

SEQ ID NO: 1661236 - DNA, 15 bp, Homo sapiens
acacctgaccttggc

SEQ ID NO: 1661237 - DNA, 15 bp, Homo sapiens
cacctgaccttggcc

SEQ ID NO: 1661238 - DNA, 15 bp, Homo sapiens
acctgaccttggcct

SEQ ID NO: 1661239 - DNA, 15 bp, Homo sapiens
cctgaccttggcctt

SEQ ID NO: 1661240 - DNA, 15 bp, Homo sapiens
ctgaccttggccttt

SEQ ID NO: 1661241 - DNA, 15 bp, Homo sapiens
tgaccttggcctttg

SEQ ID NO: 1661242 - DNA, 15 bp, Homo sapiens
gaccttggcctttgg

SEQ ID NO: 1661243 - DNA, 15 bp, Homo sapiens
accttggcctttgga

SEQ ID NO: 1661244 - DNA, 15 bp, Homo sapiens
ccttggcctttggaa

SEQ ID NO: 1661245 - DNA, 15 bp, Homo sapiens
cttggcctttggaac

SEQ ID NO: 1661246 - DNA, 15 bp, Homo sapiens
ttggcctttggaacc

SEQ ID NO: 1661247 - DNA, 15 bp, Homo sapiens
tggcctttggaacca

SEQ ID NO: 1661248 - DNA, 15 bp, Homo sapiens
ggcctttggaaccat

SEQ ID NO: 1661249 - DNA, 15 bp, Homo sapiens
gcctttggaaccatc

SEQ ID NO: 1661250 - DNA, 15 bp, Homo sapiens
cctttggaaccatca

SEQ ID NO: 1661251 - DNA, 15 bp, Homo sapiens
ctttggaaccatcag

SEQ ID NO: 1661252 - DNA, 15 bp, Homo sapiens
tttggaaccatcagc

SEQ ID NO: 1661253 - DNA, 15 bp, Homo sapiens
ttggaaccatcagcc

SEQ ID NO: 1661254 - DNA, 15 bp, Homo sapiens
tggaaccatcagcca

SEQ ID NO: 1661255 - DNA, 15 bp, Homo sapiens
ggaaccatcagccat

SEQ ID NO: 1661256 - DNA, 15 bp, Homo sapiens
gaaccatcagccatg

SEQ ID NO: 1661257 - DNA, 15 bp, Homo sapiens
aaccatcagccatgt

SEQ ID NO: 1661258 - DNA, 15 bp, Homo sapiens
accatcagccatgtc

SEQ ID NO: 1661259 - DNA, 15 bp, Homo sapiens
ccatcagccatgtca

SEQ ID NO: 1661260 - DNA, 15 bp, Homo sapiens
catcagccatgtcag

SEQ ID NO: 1661261 - DNA, 15 bp, Homo sapiens
atcagccatgtcagc

SEQ ID NO: 1661262 - DNA, 15 bp, Homo sapiens
tcagccatgtcagct

SEQ ID NO: 1661263 - DNA, 15 bp, Homo sapiens
cagccatgtcagcta

SEQ ID NO: 1661264 - DNA, 15 bp, Homo sapiens
agccatgtcagctaa

SEQ ID NO: 1661265 - DNA, 15 bp, Homo sapiens
gccatgtcagctaaa

SEQ ID NO: 1661266 - DNA, 15 bp, Homo sapiens
ccatgtcagctaaaa

SEQ ID NO: 1661267 - DNA, 15 bp, Homo sapiens
catgtcagctaaaat

SEQ ID NO: 1661268 - DNA, 15 bp, Homo sapiens
atgtcagctaaaata

SEQ ID NO: 1661269 - DNA, 15 bp, Homo sapiens
tgtcagctaaaataa

SEQ ID NO: 1661270 - DNA, 15 bp, Homo sapiens
gtcagctaaaataaa

SEQ ID NO: 1661271 - DNA, 15 bp, Homo sapiens
tcagctaaaataaaa

SEQ ID NO: 1661272 - DNA, 15 bp, Homo sapiens
cagctaaaataaaag

SEQ ID NO: 1661273 - DNA, 15 bp, Homo sapiens
agctaaaataaaagc

SEQ ID NO: 1661274 - DNA, 15 bp, Homo sapiens
gctaaaataaaagca

SEQ ID NO: 1661275 - DNA, 15 bp, Homo sapiens
ctaaaataaaagcag

SEQ ID NO: 1661276 - DNA, 15 bp, Homo sapiens
taaaataaaagcaga

SEQ ID NO: 1661277 - DNA, 15 bp, Homo sapiens
aaaataaaagcagaa

SEQ ID NO: 1661278 - DNA, 15 bp, Homo sapiens
aaataaaagcagaat

SEQ ID NO: 1661279 - DNA, 15 bp, Homo sapiens
aataaaagcagaatc

SEQ ID NO: 1661280 - DNA, 15 bp, Homo sapiens
ataaaagcagaatct

SEQ ID NO: 1661281 - DNA, 15 bp, Homo sapiens
taaaagcagaatctg

SEQ ID NO: 1661282 - DNA, 15 bp, Homo sapiens
aaaagcagaatctgg

SEQ ID NO: 1661283 - DNA, 15 bp, Homo sapiens
aaagcagaatctggc

SEQ ID NO: 1661284 - DNA, 15 bp, Homo sapiens
aagcagaatctggct

SEQ ID NO: 1661285 - DNA, 15 bp, Homo sapiens
agcagaatctggctg

SEQ ID NO: 1661286 - DNA, 15 bp, Homo sapiens
gcagaatctggctgg

SEQ ID NO: 1661287 - DNA, 15 bp, Homo sapiens
cagaatctggctggg

SEQ ID NO: 1661288 - DNA, 15 bp, Homo sapiens
agaatctggctgggc

SEQ ID NO: 1661289 - DNA, 15 bp, Homo sapiens
gaatctggctgggcg

SEQ ID NO: 1661290 - DNA, 15 bp, Homo sapiens
aatctggctgggcgc

SEQ ID NO: 1661291 - DNA, 15 bp, Homo sapiens
atctggctgggcgca

SEQ ID NO: 1661292 - DNA, 15 bp, Homo sapiens
tctggctgggcgcag

SEQ ID NO: 1661293 - DNA, 15 bp, Homo sapiens
ctggctgggcgcagt

SEQ ID NO: 1661294 - DNA, 15 bp, Homo sapiens
tggctgggcgcagtg

SEQ ID NO: 1661295 - DNA, 15 bp, Homo sapiens
cccagcactttgggg

SEQ ID NO: 1661296 - DNA, 15 bp, Homo sapiens
ccagcactttggggg

SEQ ID NO: 1661297 - DNA, 15 bp, Homo sapiens
cagcactttgggggg

SEQ ID NO: 1661298 - DNA, 15 bp, Homo sapiens
agcactttggggggc

SEQ ID NO: 1661299 - DNA, 15 bp, Homo sapiens
gcactttggggggct

SEQ ID NO: 1661300 - DNA, 15 bp, Homo sapiens
cactttggggggctg

SEQ ID NO: 1661301 - DNA, 15 bp, Homo sapiens
actttggggggctga

SEQ ID NO: 1661302 - DNA, 15 bp, Homo sapiens
ctttggggggctgag

SEQ ID NO: 1661303 - DNA, 15 bp, Homo sapiens
tttggggggctgagg

SEQ ID NO: 1661304 - DNA, 15 bp, Homo sapiens
ttggggggctgaggt

SEQ ID NO: 1661305 - DNA, 15 bp, Homo sapiens
tggggggctgaggtg

SEQ ID NO: 1661306 - DNA, 15 bp, Homo sapiens
ggggggctgaggtgg

SEQ ID NO: 1661307 - DNA, 15 bp, Homo sapiens
gggggctgaggtggg

SEQ ID NO: 1661308 - DNA, 15 bp, Homo sapiens
ggggctgaggtgggc

SEQ ID NO: 1661309 - DNA, 15 bp, Homo sapiens
gggctgaggtgggca

SEQ ID NO: 1661310 - DNA, 15 bp, Homo sapiens
ctgaggtgggcagac

SEQ ID NO: 1661311 - DNA, 15 bp, Homo sapiens
tgaggtgggcagacc

SEQ ID NO: 1661312 - DNA, 15 bp, Homo sapiens
gaggtgggcagacca

SEQ ID NO: 1661313 - DNA, 15 bp, Homo sapiens
aggtgggcagaccac

SEQ ID NO: 1661314 - DNA, 15 bp, Homo sapiens
ggtgggcagaccacc

SEQ ID NO: 1661315 - DNA, 15 bp, Homo sapiens
gtgggcagaccacct

SEQ ID NO: 1661316 - DNA, 15 bp, Homo sapiens
tgggcagaccacctg

SEQ ID NO: 1661317 - DNA, 15 bp, Homo sapiens
gcagaccacctgagg

SEQ ID NO: 1661318 - DNA, 15 bp, Homo sapiens
cagaccacctgaggt

SEQ ID NO: 1661319 - DNA, 15 bp, Homo sapiens
agaccacctgaggtc

SEQ ID NO: 1661320 - DNA, 15 bp, Homo sapiens
gaccacctgaggtcc

SEQ ID NO: 1661321 - DNA, 15 bp, Homo sapiens
accacctgaggtccg

SEQ ID NO: 1661322 - DNA, 15 bp, Homo sapiens
ccacctgaggtccgg

SEQ ID NO: 1661323 - DNA, 15 bp, Homo sapiens
cacctgaggtccggc

SEQ ID NO: 1661324 - DNA, 15 bp, Homo sapiens
acctgaggtccggcg

SEQ ID NO: 1661325 - DNA, 15 bp, Homo sapiens
cctgaggtccggcgt

SEQ ID NO: 1661326 - DNA, 15 bp, Homo sapiens
ctgaggtccggcgtt

SEQ ID NO: 1661327 - DNA, 15 bp, Homo sapiens
tgaggtccggcgttc

SEQ ID NO: 1661328 - DNA, 15 bp, Homo sapiens
gaggtccggcgttct

SEQ ID NO: 1661329 - DNA, 15 bp, Homo sapiens
aggtccggcgttcta

SEQ ID NO: 1661330 - DNA, 15 bp, Homo sapiens
ggtccggcgttctag

SEQ ID NO: 1661331 - DNA, 15 bp, Homo sapiens
gtccggcgttctaga

SEQ ID NO: 1661332 - DNA, 15 bp, Homo sapiens
tccggcgttctagac

SEQ ID NO: 1661333 - DNA, 15 bp, Homo sapiens
ccggcgttctagacc

SEQ ID NO: 1661334 - DNA, 15 bp, Homo sapiens
cggcgttctagacca

SEQ ID NO: 1661335 - DNA, 15 bp, Homo sapiens
ggcgttctagaccag

SEQ ID NO: 1661336 - DNA, 15 bp, Homo sapiens
gcgttctagaccagc

SEQ ID NO: 1661337 - DNA, 15 bp, Homo sapiens
cgttctagaccagcc

SEQ ID NO: 1661338 - DNA, 15 bp, Homo sapiens
gttctagaccagcct

SEQ ID NO: 1661339 - DNA, 15 bp, Homo sapiens
ttctagaccagcctg

SEQ ID NO: 1661340 - DNA, 15 bp, Homo sapiens
tctagaccagcctga

SEQ ID NO: 1661341 - DNA, 15 bp, Homo sapiens
ctagaccagcctgac

SEQ ID NO: 1661342 - DNA, 15 bp, Homo sapiens
tagaccagcctgacc

SEQ ID NO: 1661343 - DNA, 15 bp, Homo sapiens
gcctgaccaatatga

SEQ ID NO: 1661344 - DNA, 15 bp, Homo sapiens
cctgaccaatatgat

SEQ ID NO: 1661345 - DNA, 15 bp, Homo sapiens
ctgaccaatatgatg

SEQ ID NO: 1661346 - DNA, 15 bp, Homo sapiens
tgaccaatatgatga

SEQ ID NO: 1661347 - DNA, 15 bp, Homo sapiens
gaccaatatgatgaa

SEQ ID NO: 1661348 - DNA, 15 bp, Homo sapiens
accaatatgatgaaa

SEQ ID NO: 1661349 - DNA, 15 bp, Homo sapiens
ccaatatgatgaaac

SEQ ID NO: 1661350 - DNA, 15 bp, Homo sapiens
caatatgatgaaacc

SEQ ID NO: 1661351 - DNA, 15 bp, Homo sapiens
aatatgatgaaaccc

SEQ ID NO: 1661352 - DNA, 15 bp, Homo sapiens
atatgatgaaacccc

SEQ ID NO: 1661353 - DNA, 15 bp, Homo sapiens
tatgatgaaaccccg

SEQ ID NO: 1661354 - DNA, 15 bp, Homo sapiens
ccgtctctactaaac

SEQ ID NO: 1661355 - DNA, 15 bp, Homo sapiens
cgtctctactaaaca

SEQ ID NO: 1661356 - DNA, 15 bp, Homo sapiens
taaacatacaaaaat

SEQ ID NO: 1661357 - DNA, 15 bp, Homo sapiens
aaacatacaaaaatt

SEQ ID NO: 1661358 - DNA, 15 bp, Homo sapiens
aacatacaaaaatta

SEQ ID NO: 1661359 - DNA, 15 bp, Homo sapiens
acatacaaaaattag

SEQ ID NO: 1661360 - DNA, 15 bp, Homo sapiens
catacaaaaattagc

SEQ ID NO: 1661361 - DNA, 15 bp, Homo sapiens
ctgggcatggtggcg

SEQ ID NO: 1661362 - DNA, 15 bp, Homo sapiens
tgggcatggtggcgg

SEQ ID NO: 1661363 - DNA, 15 bp, Homo sapiens
gggcatggtggcggg

SEQ ID NO: 1661364 - DNA, 15 bp, Homo sapiens
ggcatggtggcgggc

SEQ ID NO: 1661365 - DNA, 15 bp, Homo sapiens
gcatggtggcgggca

SEQ ID NO: 1661366 - DNA, 15 bp, Homo sapiens
catggtggcgggcac

SEQ ID NO: 1661367 - DNA, 15 bp, Homo sapiens
atggtggcgggcacc

SEQ ID NO: 1661368 - DNA, 15 bp, Homo sapiens
ggcgggcacctgtaa

SEQ ID NO: 1661369 - DNA, 15 bp, Homo sapiens
gcgggcacctgtaat

SEQ ID NO: 1661370 - DNA, 15 bp, Homo sapiens
ggcacctgtaatccc

SEQ ID NO: 1661371 - DNA, 15 bp, Homo sapiens
gcacctgtaatccca

SEQ ID NO: 1661372 - DNA, 15 bp, Homo sapiens
tgaggaaggagaatt

SEQ ID NO: 1661373 - DNA, 15 bp, Homo sapiens
gaggaaggagaattg

SEQ ID NO: 1661374 - DNA, 15 bp, Homo sapiens
aggaaggagaattgc

SEQ ID NO: 1661375 - DNA, 15 bp, Homo sapiens
ggaaggagaattgct

SEQ ID NO: 1661376 - DNA, 15 bp, Homo sapiens
gaaggagaattgctt

SEQ ID NO: 1661377 - DNA, 15 bp, Homo sapiens
aaggagaattgcttg

SEQ ID NO: 1661378 - DNA, 15 bp, Homo sapiens
aattgcttgaaccct

SEQ ID NO: 1661379 - DNA, 15 bp, Homo sapiens
attgcttgaaccctg

SEQ ID NO: 1661380 - DNA, 15 bp, Homo sapiens
ttgcttgaaccctgg

SEQ ID NO: 1661381 - DNA, 15 bp, Homo sapiens
tgcttgaaccctgga

SEQ ID NO: 1661382 - DNA, 15 bp, Homo sapiens
gcactccaacctgga

SEQ ID NO: 1661383 - DNA, 15 bp, Homo sapiens
cactccaacctggac

SEQ ID NO: 1661384 - DNA, 15 bp, Homo sapiens
actccaacctggact

SEQ ID NO: 1661385 - DNA, 15 bp, Homo sapiens
ctccaacctggactg

SEQ ID NO: 1661386 - DNA, 15 bp, Homo sapiens
tccaacctggactgc

SEQ ID NO: 1661387 - DNA, 15 bp, Homo sapiens
ccaacctggactgca

SEQ ID NO: 1661388 - DNA, 15 bp, Homo sapiens
caacctggactgcag

SEQ ID NO: 1661389 - DNA, 15 bp, Homo sapiens
aacctggactgcaga

SEQ ID NO: 1661390 - DNA, 15 bp, Homo sapiens
acctggactgcagaa

SEQ ID NO: 1661391 - DNA, 15 bp, Homo sapiens
cctggactgcagaac

SEQ ID NO: 1661392 - DNA, 15 bp, Homo sapiens
ctggactgcagaaca

SEQ ID NO: 1661393 - DNA, 15 bp, Homo sapiens
tggactgcagaacaa

SEQ ID NO: 1661394 - DNA, 15 bp, Homo sapiens
ggactgcagaacaag

SEQ ID NO: 1661395 - DNA, 15 bp, Homo sapiens
gactgcagaacaaga

SEQ ID NO: 1661396 - DNA, 15 bp, Homo sapiens
actgcagaacaagac

SEQ ID NO: 1661397 - DNA, 15 bp, Homo sapiens
ctgcagaacaagact

SEQ ID NO: 1661398 - DNA, 15 bp, Homo sapiens
tgcagaacaagactc

SEQ ID NO: 1661399 - DNA, 15 bp, Homo sapiens
gcagaacaagactct

SEQ ID NO: 1661400 - DNA, 15 bp, Homo sapiens
cagaacaagactctg

SEQ ID NO: 1661401 - DNA, 15 bp, Homo sapiens
agaacaagactctgt

SEQ ID NO: 1661402 - DNA, 15 bp, Homo sapiens
gaacaagactctgtc

SEQ ID NO: 1661403 - DNA, 15 bp, Homo sapiens
aacaagactctgtcc

SEQ ID NO: 1661404 - DNA, 15 bp, Homo sapiens
acaagactctgtccc

SEQ ID NO: 1661405 - DNA, 15 bp, Homo sapiens
caagactctgtccca

SEQ ID NO: 1661406 - DNA, 15 bp, Homo sapiens
aagactctgtcccaa

SEQ ID NO: 1661407 - DNA, 15 bp, Homo sapiens
agactctgtcccaaa

SEQ ID NO: 1661408 - DNA, 15 bp, Homo sapiens
gactctgtcccaaaa

SEQ ID NO: 1661409 - DNA, 15 bp, Homo sapiens
actctgtcccaaaag

SEQ ID NO: 1661410 - DNA, 15 bp, Homo sapiens
ctctgtcccaaaagc

SEQ ID NO: 1661411 - DNA, 15 bp, Homo sapiens
tctgtcccaaaagca

SEQ ID NO: 1661412 - DNA, 15 bp, Homo sapiens
ctgtcccaaaagcag

SEQ ID NO: 1661413 - DNA, 15 bp, Homo sapiens
tgtcccaaaagcaga

SEQ ID NO: 1661414 - DNA, 15 bp, Homo sapiens
gtcccaaaagcagat

SEQ ID NO: 1661415 - DNA, 15 bp, Homo sapiens
tcccaaaagcagata

SEQ ID NO: 1661416 - DNA, 15 bp, Homo sapiens
cccaaaagcagataa

SEQ ID NO: 1661417 - DNA, 15 bp, Homo sapiens
ccaaaagcagataaa

SEQ ID NO: 1661418 - DNA, 15 bp, Homo sapiens
caaaagcagataaat

SEQ ID NO: 1661419 - DNA, 15 bp, Homo sapiens
aaaagcagataaata

SEQ ID NO: 1661420 - DNA, 15 bp, Homo sapiens
aaagcagataaataa

SEQ ID NO: 1661421 - DNA, 15 bp, Homo sapiens
aagcagataaataaa

SEQ ID NO: 1661422 - DNA, 15 bp, Homo sapiens
agcagataaataaaa

SEQ ID NO: 1661423 - DNA, 15 bp, Homo sapiens
gcagataaataaaaa

SEQ ID NO: 1661424 - DNA, 15 bp, Homo sapiens
cagataaataaaaat

SEQ ID NO: 1661425 - DNA, 15 bp, Homo sapiens
agataaataaaaata

SEQ ID NO: 1661426 - DNA, 15 bp, Homo sapiens
gataaataaaaataa

SEQ ID NO: 1661427 - DNA, 15 bp, Homo sapiens
taaaaataaataaaa

SEQ ID NO: 1661428 - DNA, 15 bp, Homo sapiens
aaaaataaataaaaa

SEQ ID NO: 1661429 - DNA, 15 bp, Homo sapiens
aaaataaataaaaat

SEQ ID NO: 1661430 - DNA, 15 bp, Homo sapiens
aataaaaataaaaat

SEQ ID NO: 1661431 - DNA, 15 bp, Homo sapiens
ataaaaataaaaata

SEQ ID NO: 1661432 - DNA, 15 bp, Homo sapiens
taaaaataaaaatat

SEQ ID NO: 1661433 - DNA, 15 bp, Homo sapiens
aaaaataaaaatatg

SEQ ID NO: 1661434 - DNA, 15 bp, Homo sapiens
aaaataaaaatatgg

SEQ ID NO: 1661435 - DNA, 15 bp, Homo sapiens
aaataaaaatatggc

SEQ ID NO: 1661436 - DNA, 15 bp, Homo sapiens
aataaaaatatggcc

SEQ ID NO: 1661437 - DNA, 15 bp, Homo sapiens
ataaaaatatggccg

SEQ ID NO: 1661438 - DNA, 15 bp, Homo sapiens
taaaaatatggccgg

SEQ ID NO: 1661439 - DNA, 15 bp, Homo sapiens
aaaaatatggccggg

SEQ ID NO: 1661440 - DNA, 15 bp, Homo sapiens
aaaatatggccgggc

SEQ ID NO: 1661441 - DNA, 15 bp, Homo sapiens
aaatatggccgggca

SEQ ID NO: 1661442 - DNA, 15 bp, Homo sapiens
aatatggccgggcat

SEQ ID NO: 1661443 - DNA, 15 bp, Homo sapiens
atatggccgggcatg

SEQ ID NO: 1661444 - DNA, 15 bp, Homo sapiens
tatggccgggcatgg

SEQ ID NO: 1661445 - DNA, 15 bp, Homo sapiens
atggccgggcatggt

SEQ ID NO: 1661446 - DNA, 15 bp, Homo sapiens
tggccgggcatggtg

SEQ ID NO: 1661447 - DNA, 15 bp, Homo sapiens
gtaatcccaacactg

SEQ ID NO: 1661448 - DNA, 15 bp, Homo sapiens
taatcccaacactgg

SEQ ID NO: 1661449 - DNA, 15 bp, Homo sapiens
aatcccaacactggg

SEQ ID NO: 1661450 - DNA, 15 bp, Homo sapiens
atcccaacactggga

SEQ ID NO: 1661451 - DNA, 15 bp, Homo sapiens
tcccaacactgggaa

SEQ ID NO: 1661452 - DNA, 15 bp, Homo sapiens
cccaacactgggaag

SEQ ID NO: 1661453 - DNA, 15 bp, Homo sapiens
ccaacactgggaaga

SEQ ID NO: 1661454 - DNA, 15 bp, Homo sapiens
caacactgggaagat

SEQ ID NO: 1661455 - DNA, 15 bp, Homo sapiens
aacactgggaagatg

SEQ ID NO: 1661456 - DNA, 15 bp, Homo sapiens
acactgggaagatga

SEQ ID NO: 1661457 - DNA, 15 bp, Homo sapiens
cactgggaagatgag

SEQ ID NO: 1661458 - DNA, 15 bp, Homo sapiens
actgggaagatgagg

SEQ ID NO: 1661459 - DNA, 15 bp, Homo sapiens
ctgggaagatgaggc

SEQ ID NO: 1661460 - DNA, 15 bp, Homo sapiens
tgggaagatgaggcg

SEQ ID NO: 1661461 - DNA, 15 bp, Homo sapiens
gggaagatgaggcgg

SEQ ID NO: 1661462 - DNA, 15 bp, Homo sapiens
ggaagatgaggcggg

SEQ ID NO: 1661463 - DNA, 15 bp, Homo sapiens
gaagatgaggcgggc

SEQ ID NO: 1661464 - DNA, 15 bp, Homo sapiens
aagatgaggcgggca

SEQ ID NO: 1661465 - DNA, 15 bp, Homo sapiens
agatgaggcgggcag

SEQ ID NO: 1661466 - DNA, 15 bp, Homo sapiens
gatgaggcgggcaga

SEQ ID NO: 1661467 - DNA, 15 bp, Homo sapiens
atgaggcgggcagat

SEQ ID NO: 1661468 - DNA, 15 bp, Homo sapiens
atcacgaggtcaggg

SEQ ID NO: 1661469 - DNA, 15 bp, Homo sapiens
tcacgaggtcaggga

SEQ ID NO: 1661470 - DNA, 15 bp, Homo sapiens
cacgaggtcagggat

SEQ ID NO: 1661471 - DNA, 15 bp, Homo sapiens
acgaggtcagggatt

SEQ ID NO: 1661472 - DNA, 15 bp, Homo sapiens
cgaggtcagggattc

SEQ ID NO: 1661473 - DNA, 15 bp, Homo sapiens
gaggtcagggattcg

SEQ ID NO: 1661474 - DNA, 15 bp, Homo sapiens
aggtcagggattcga

SEQ ID NO: 1661475 - DNA, 15 bp, Homo sapiens
ggtcagggattcgag

SEQ ID NO: 1661476 - DNA, 15 bp, Homo sapiens
gtcagggattcgaga

SEQ ID NO: 1661477 - DNA, 15 bp, Homo sapiens
tcagggattcgagac

SEQ ID NO: 1661478 - DNA, 15 bp, Homo sapiens
cagggattcgagacc

SEQ ID NO: 1661479 - DNA, 15 bp, Homo sapiens
agggattcgagacca

SEQ ID NO: 1661480 - DNA, 15 bp, Homo sapiens
gggattcgagaccag

SEQ ID NO: 1661481 - DNA, 15 bp, Homo sapiens
ggattcgagaccagc

SEQ ID NO: 1661482 - DNA, 15 bp, Homo sapiens
gattcgagaccagcc

SEQ ID NO: 1661483 - DNA, 15 bp, Homo sapiens
attagccgggcatga

SEQ ID NO: 1661484 - DNA, 15 bp, Homo sapiens
ttagccgggcatgat

SEQ ID NO: 1661485 - DNA, 15 bp, Homo sapiens
tagccgggcatgatg

SEQ ID NO: 1661486 - DNA, 15 bp, Homo sapiens
agccgggcatgatgc

SEQ ID NO: 1661487 - DNA, 15 bp, Homo sapiens
gccgggcatgatgct

SEQ ID NO: 1661488 - DNA, 15 bp, Homo sapiens
ccgggcatgatgctg

SEQ ID NO: 1661489 - DNA, 15 bp, Homo sapiens
cgggcatgatgctgc

SEQ ID NO: 1661490 - DNA, 15 bp, Homo sapiens
gggcatgatgctgca

SEQ ID NO: 1661491 - DNA, 15 bp, Homo sapiens
ggcatgatgctgcat

SEQ ID NO: 1661492 - DNA, 15 bp, Homo sapiens
gcatgatgctgcatg

SEQ ID NO: 1661493 - DNA, 15 bp, Homo sapiens
catgatgctgcatgc

SEQ ID NO: 1661494 - DNA, 15 bp, Homo sapiens
atgatgctgcatgcc

SEQ ID NO: 1661495 - DNA, 15 bp, Homo sapiens
tgatgctgcatgcct

SEQ ID NO: 1661496 - DNA, 15 bp, Homo sapiens
gatgctgcatgcctg

SEQ ID NO: 1661497 - DNA, 15 bp, Homo sapiens
atgctgcatgcctgt

SEQ ID NO: 1661498 - DNA, 15 bp, Homo sapiens
tgctgcatgcctgta

SEQ ID NO: 1661499 - DNA, 15 bp, Homo sapiens
gctgcatgcctgtaa

SEQ ID NO: 1661500 - DNA, 15 bp, Homo sapiens
ctgcatgcctgtaat

SEQ ID NO: 1661501 - DNA, 15 bp, Homo sapiens
caggagaatcgcttc

SEQ ID NO: 1661502 - DNA, 15 bp, Homo sapiens
aggagaatcgcttca

SEQ ID NO: 1661503 - DNA, 15 bp, Homo sapiens
ggagaatcgcttcat

SEQ ID NO: 1661504 - DNA, 15 bp, Homo sapiens
gagaatcgcttcatc

SEQ ID NO: 1661505 - DNA, 15 bp, Homo sapiens
agaatcgcttcatcc

SEQ ID NO: 1661506 - DNA, 15 bp, Homo sapiens
gaatcgcttcatccc

SEQ ID NO: 1661507 - DNA, 15 bp, Homo sapiens
aatcgcttcatcccg

SEQ ID NO: 1661508 - DNA, 15 bp, Homo sapiens
atcgcttcatcccgg

SEQ ID NO: 1661509 - DNA, 15 bp, Homo sapiens
tcgcttcatcccggg

SEQ ID NO: 1661510 - DNA, 15 bp, Homo sapiens
cgcttcatcccggga

SEQ ID NO: 1661511 - DNA, 15 bp, Homo sapiens
gcttcatcccgggag

SEQ ID NO: 1661512 - DNA, 15 bp, Homo sapiens
cttcatcccgggagg

SEQ ID NO: 1661513 - DNA, 15 bp, Homo sapiens
ttcatcccgggaggt

SEQ ID NO: 1661514 - DNA, 15 bp, Homo sapiens
tcatcccgggaggtg

SEQ ID NO: 1661515 - DNA, 15 bp, Homo sapiens
catcccgggaggtgg

SEQ ID NO: 1661516 - DNA, 15 bp, Homo sapiens
atcccgggaggtgga

SEQ ID NO: 1661517 - DNA, 15 bp, Homo sapiens
tcccgggaggtggag

SEQ ID NO: 1661518 - DNA, 15 bp, Homo sapiens
tctagcctgggcaaa

SEQ ID NO: 1661519 - DNA, 15 bp, Homo sapiens
ctagcctgggcaaaa

SEQ ID NO: 1661520 - DNA, 15 bp, Homo sapiens
tagcctgggcaaaag

SEQ ID NO: 1661521 - DNA, 15 bp, Homo sapiens
cctgggcaaaagagt

SEQ ID NO: 1661522 - DNA, 15 bp, Homo sapiens
ctgggcaaaagagtg

SEQ ID NO: 1661523 - DNA, 15 bp, Homo sapiens
tgggcaaaagagtga

SEQ ID NO: 1661524 - DNA, 15 bp, Homo sapiens
gggcaaaagagtgag

SEQ ID NO: 1661525 - DNA, 15 bp, Homo sapiens
ggcaaaagagtgaga

SEQ ID NO: 1661526 - DNA, 15 bp, Homo sapiens
gcaaaagagtgagac

SEQ ID NO: 1661527 - DNA, 15 bp, Homo sapiens
caaaagagtgagact

SEQ ID NO: 1661528 - DNA, 15 bp, Homo sapiens
aaaagagtgagactc

SEQ ID NO: 1661529 - DNA, 15 bp, Homo sapiens
aaagagtgagactcc

SEQ ID NO: 1661530 - DNA, 15 bp, Homo sapiens
agtgagactccatcg

SEQ ID NO: 1661531 - DNA, 15 bp, Homo sapiens
gtgagactccatcgc

SEQ ID NO: 1661532 - DNA, 15 bp, Homo sapiens
tgagactccatcgca

SEQ ID NO: 1661533 - DNA, 15 bp, Homo sapiens
gagactccatcgcaa

SEQ ID NO: 1661534 - DNA, 15 bp, Homo sapiens
agactccatcgcaag

SEQ ID NO: 1661535 - DNA, 15 bp, Homo sapiens
gactccatcgcaaga

SEQ ID NO: 1661536 - DNA, 15 bp, Homo sapiens
actccatcgcaagaa

SEQ ID NO: 1661537 - DNA, 15 bp, Homo sapiens
ctccatcgcaagaaa

SEQ ID NO: 1661538 - DNA, 15 bp, Homo sapiens
tccatcgcaagaaaa

SEQ ID NO: 1661539 - DNA, 15 bp, Homo sapiens
ccatcgcaagaaaaa

SEQ ID NO: 1661540 - DNA, 15 bp, Homo sapiens
catcgcaagaaaaaa

SEQ ID NO: 1661541 - DNA, 15 bp, Homo sapiens
atcgcaagaaaaaaa

SEQ ID NO: 1661542 - DNA, 15 bp, Homo sapiens
tcgcaagaaaaaaaa

SEQ ID NO: 1661543 - DNA, 15 bp, Homo sapiens
cgcaagaaaaaaaaa

SEQ ID NO: 1661544 - DNA, 15 bp, Homo sapiens
gcaagaaaaaaaaaa

SEQ ID NO: 1661545 - DNA, 15 bp, Homo sapiens
caagaaaaaaaaaaa

SEQ ID NO: 1661546 - DNA, 15 bp, Homo sapiens
aaaaaaaagctgcaa

SEQ ID NO: 1661547 - DNA, 15 bp, Homo sapiens
aaaaaaagctgcaag

SEQ ID NO: 1661548 - DNA, 15 bp, Homo sapiens
aaaaaagctgcaagc

SEQ ID NO: 1661549 - DNA, 15 bp, Homo sapiens
aaaaagctgcaagct

SEQ ID NO: 1661550 - DNA, 15 bp, Homo sapiens
aaaagctgcaagctc

SEQ ID NO: 1661551 - DNA, 15 bp, Homo sapiens
aaagctgcaagctct

SEQ ID NO: 1661552 - DNA, 15 bp, Homo sapiens
aagctgcaagctctg

SEQ ID NO: 1661553 - DNA, 15 bp, Homo sapiens
agctgcaagctctgt

SEQ ID NO: 1661554 - DNA, 15 bp, Homo sapiens
gctgcaagctctgtc

SEQ ID NO: 1661555 - DNA, 15 bp, Homo sapiens
ctgcaagctctgtct

SEQ ID NO: 1661556 - DNA, 15 bp, Homo sapiens
tgcaagctctgtctc

SEQ ID NO: 1661557 - DNA, 15 bp, Homo sapiens
gcaagctctgtctcc

SEQ ID NO: 1661558 - DNA, 15 bp, Homo sapiens
caagctctgtctccc

SEQ ID NO: 1661559 - DNA, 15 bp, Homo sapiens
aagctctgtctcccg

SEQ ID NO: 1661560 - DNA, 15 bp, Homo sapiens
agctctgtctcccgg

SEQ ID NO: 1661561 - DNA, 15 bp, Homo sapiens
gctctgtctcccggg

SEQ ID NO: 1661562 - DNA, 15 bp, Homo sapiens
ctctgtctcccgggt

SEQ ID NO: 1661563 - DNA, 15 bp, Homo sapiens
tctgtctcccgggtt

SEQ ID NO: 1661564 - DNA, 15 bp, Homo sapiens
ctgtctcccgggttc

SEQ ID NO: 1661565 - DNA, 15 bp, Homo sapiens
tgtctcccgggttca

SEQ ID NO: 1661566 - DNA, 15 bp, Homo sapiens
tgcctcagccttcca

SEQ ID NO: 1661567 - DNA, 15 bp, Homo sapiens
gcctcagccttccaa

SEQ ID NO: 1661568 - DNA, 15 bp, Homo sapiens
tcagccttccaagta

SEQ ID NO: 1661569 - DNA, 15 bp, Homo sapiens
cagccttccaagtag

SEQ ID NO: 1661570 - DNA, 15 bp, Homo sapiens
agccttccaagtagc

SEQ ID NO: 1661571 - DNA, 15 bp, Homo sapiens
gccttccaagtagct

SEQ ID NO: 1661572 - DNA, 15 bp, Homo sapiens
ccttccaagtagcta

SEQ ID NO: 1661573 - DNA, 15 bp, Homo sapiens
cttccaagtagctag

SEQ ID NO: 1661574 - DNA, 15 bp, Homo sapiens
ttccaagtagctagg

SEQ ID NO: 1661575 - DNA, 15 bp, Homo sapiens
tccaagtagctagga

SEQ ID NO: 1661576 - DNA, 15 bp, Homo sapiens
ccaagtagctaggat

SEQ ID NO: 1661577 - DNA, 15 bp, Homo sapiens
caagtagctaggatt

SEQ ID NO: 1661578 - DNA, 15 bp, Homo sapiens
aagtagctaggatta

SEQ ID NO: 1661579 - DNA, 15 bp, Homo sapiens
agtagctaggattat

SEQ ID NO: 1661580 - DNA, 15 bp, Homo sapiens
gtagctaggattata

SEQ ID NO: 1661581 - DNA, 15 bp, Homo sapiens
tagctaggattatac

SEQ ID NO: 1661582 - DNA, 15 bp, Homo sapiens
agctaggattatacg

SEQ ID NO: 1661583 - DNA, 15 bp, Homo sapiens
gctaggattatacgc

SEQ ID NO: 1661584 - DNA, 15 bp, Homo sapiens
ctaggattatacgcg

SEQ ID NO: 1661585 - DNA, 15 bp, Homo sapiens
taggattatacgcgc

SEQ ID NO: 1661586 - DNA, 15 bp, Homo sapiens
aggattatacgcgcc

SEQ ID NO: 1661587 - DNA, 15 bp, Homo sapiens
ggattatacgcgccc

SEQ ID NO: 1661588 - DNA, 15 bp, Homo sapiens
gattatacgcgcccg

SEQ ID NO: 1661589 - DNA, 15 bp, Homo sapiens
attatacgcgcccgc

SEQ ID NO: 1661590 - DNA, 15 bp, Homo sapiens
ttatacgcgcccgcc

SEQ ID NO: 1661591 - DNA, 15 bp, Homo sapiens
tatacgcgcccgcca

SEQ ID NO: 1661592 - DNA, 15 bp, Homo sapiens
atacgcgcccgccac

SEQ ID NO: 1661593 - DNA, 15 bp, Homo sapiens
tacgcgcccgccacc

SEQ ID NO: 1661594 - DNA, 15 bp, Homo sapiens
acgcgcccgccacca

SEQ ID NO: 1661595 - DNA, 15 bp, Homo sapiens
cgcgcccgccaccat

SEQ ID NO: 1661596 - DNA, 15 bp, Homo sapiens
ttttagtagagatgc

SEQ ID NO: 1661597 - DNA, 15 bp, Homo sapiens
tttagtagagatgcg

SEQ ID NO: 1661598 - DNA, 15 bp, Homo sapiens
ttagtagagatgcgg

SEQ ID NO: 1661599 - DNA, 15 bp, Homo sapiens
tagtagagatgcggt

SEQ ID NO: 1661600 - DNA, 15 bp, Homo sapiens
agtagagatgcggtt

SEQ ID NO: 1661601 - DNA, 15 bp, Homo sapiens
gtagagatgcggttt

SEQ ID NO: 1661602 - DNA, 15 bp, Homo sapiens
tagagatgcggtttc

SEQ ID NO: 1661603 - DNA, 15 bp, Homo sapiens
agagatgcggtttca

SEQ ID NO: 1661604 - DNA, 15 bp, Homo sapiens
gagatgcggtttcac

SEQ ID NO: 1661605 - DNA, 15 bp, Homo sapiens
agatgcggtttcacc

SEQ ID NO: 1661606 - DNA, 15 bp, Homo sapiens
gatgcggtttcacca

SEQ ID NO: 1661607 - DNA, 15 bp, Homo sapiens
atgcggtttcaccat

SEQ ID NO: 1661608 - DNA, 15 bp, Homo sapiens
tgcggtttcaccatg

SEQ ID NO: 1661609 - DNA, 15 bp, Homo sapiens
gcggtttcaccatgt

SEQ ID NO: 1661610 - DNA, 15 bp, Homo sapiens
cggtttcaccatgtt

SEQ ID NO: 1661611 - DNA, 15 bp, Homo sapiens
aactcctgacctcac

SEQ ID NO: 1661612 - DNA, 15 bp, Homo sapiens
actcctgacctcacg

SEQ ID NO: 1661613 - DNA, 15 bp, Homo sapiens
ctcctgacctcacgt

SEQ ID NO: 1661614 - DNA, 15 bp, Homo sapiens
tcctgacctcacgtg

SEQ ID NO: 1661615 - DNA, 15 bp, Homo sapiens
cctgacctcacgtga

SEQ ID NO: 1661616 - DNA, 15 bp, Homo sapiens
ctgacctcacgtgat

SEQ ID NO: 1661617 - DNA, 15 bp, Homo sapiens
tgacctcacgtgatc

SEQ ID NO: 1661618 - DNA, 15 bp, Homo sapiens
gacctcacgtgatcc

SEQ ID NO: 1661619 - DNA, 15 bp, Homo sapiens
acctcacgtgatcca

SEQ ID NO: 1661620 - DNA, 15 bp, Homo sapiens
cctcacgtgatccac

SEQ ID NO: 1661621 - DNA, 15 bp, Homo sapiens
ctcacgtgatccacc

SEQ ID NO: 1661622 - DNA, 15 bp, Homo sapiens
tcacgtgatccacct

SEQ ID NO: 1661623 - DNA, 15 bp, Homo sapiens
cacgtgatccacctg

SEQ ID NO: 1661624 - DNA, 15 bp, Homo sapiens
acgtgatccacctgc

SEQ ID NO: 1661625 - DNA, 15 bp, Homo sapiens
tacaggtgtgaaccc

SEQ ID NO: 1661626 - DNA, 15 bp, Homo sapiens
acaggtgtgaacccc

SEQ ID NO: 1661627 - DNA, 15 bp, Homo sapiens
caggtgtgaacccct

SEQ ID NO: 1661628 - DNA, 15 bp, Homo sapiens
aggtgtgaacccctg

SEQ ID NO: 1661629 - DNA, 15 bp, Homo sapiens
ggtgtgaacccctgc

SEQ ID NO: 1661630 - DNA, 15 bp, Homo sapiens
gtgtgaacccctgcg

SEQ ID NO: 1661631 - DNA, 15 bp, Homo sapiens
tgtgaacccctgcgc

SEQ ID NO: 1661632 - DNA, 15 bp, Homo sapiens
gtgaacccctgcgcc

SEQ ID NO: 1661633 - DNA, 15 bp, Homo sapiens
tgaacccctgcgcct

SEQ ID NO: 1661634 - DNA, 15 bp, Homo sapiens
gaacccctgcgcctg

SEQ ID NO: 1661635 - DNA, 15 bp, Homo sapiens
aacccctgcgcctgg

SEQ ID NO: 1661636 - DNA, 15 bp, Homo sapiens
acccctgcgcctggc

SEQ ID NO: 1661637 - DNA, 15 bp, Homo sapiens
cccctgcgcctggcc

SEQ ID NO: 1661638 - DNA, 15 bp, Homo sapiens
ccctgcgcctggcca

SEQ ID NO: 1661639 - DNA, 15 bp, Homo sapiens
cctgcgcctggccaa

SEQ ID NO: 1661640 - DNA, 15 bp, Homo sapiens
cgcctggccaagaaa

SEQ ID NO: 1661641 - DNA, 15 bp, Homo sapiens
gcctggccaagaaaa

SEQ ID NO: 1661642 - DNA, 15 bp, Homo sapiens
cctggccaagaaaag

SEQ ID NO: 1661643 - DNA, 15 bp, Homo sapiens
ctggccaagaaaagt

SEQ ID NO: 1661644 - DNA, 15 bp, Homo sapiens
tggccaagaaaagtt

SEQ ID NO: 1661645 - DNA, 15 bp, Homo sapiens
ggccaagaaaagttg

SEQ ID NO: 1661646 - DNA, 15 bp, Homo sapiens
gccaagaaaagttgc

SEQ ID NO: 1661647 - DNA, 15 bp, Homo sapiens
ccaagaaaagttgct

SEQ ID NO: 1661648 - DNA, 15 bp, Homo sapiens
caagaaaagttgctt

SEQ ID NO: 1661649 - DNA, 15 bp, Homo sapiens
aagaaaagttgcttg

SEQ ID NO: 1661650 - DNA, 15 bp, Homo sapiens
agaaaagttgcttga

SEQ ID NO: 1661651 - DNA, 15 bp, Homo sapiens
gaaaagttgcttgaa

SEQ ID NO: 1661652 - DNA, 15 bp, Homo sapiens
aaaagttgcttgaat

SEQ ID NO: 1661653 - DNA, 15 bp, Homo sapiens
aaagttgcttgaatg

SEQ ID NO: 1661654 - DNA, 15 bp, Homo sapiens
aagttgcttgaatga

SEQ ID NO: 1661655 - DNA, 15 bp, Homo sapiens
agttgcttgaatgaa

SEQ ID NO: 1661656 - DNA, 15 bp, Homo sapiens
gttgcttgaatgaag

SEQ ID NO: 1661657 - DNA, 15 bp, Homo sapiens
ttgcttgaatgaaga

SEQ ID NO: 1661658 - DNA, 15 bp, Homo sapiens
tgcttgaatgaagag

SEQ ID NO: 1661659 - DNA, 15 bp, Homo sapiens
gcttgaatgaagagt

SEQ ID NO: 1661660 - DNA, 15 bp, Homo sapiens
cttgaatgaagagta

SEQ ID NO: 1661661 - DNA, 15 bp, Homo sapiens
ttgaatgaagagtaa

SEQ ID NO: 1661662 - DNA, 15 bp, Homo sapiens
tgaatgaagagtaaa

SEQ ID NO: 1661663 - DNA, 15 bp, Homo sapiens
gaatgaagagtaaat

SEQ ID NO: 1661664 - DNA, 15 bp, Homo sapiens
aatgaagagtaaata

SEQ ID NO: 1661665 - DNA, 15 bp, Homo sapiens
atgaagagtaaatag

SEQ ID NO: 1661666 - DNA, 15 bp, Homo sapiens
tgaagagtaaataga

SEQ ID NO: 1661667 - DNA, 15 bp, Homo sapiens
gaagagtaaatagaa

SEQ ID NO: 1661668 - DNA, 15 bp, Homo sapiens
aagagtaaatagaag

SEQ ID NO: 1661669 - DNA, 15 bp, Homo sapiens
agagtaaatagaaga

SEQ ID NO: 1661670 - DNA, 15 bp, Homo sapiens
gagtaaatagaagac

SEQ ID NO: 1661671 - DNA, 15 bp, Homo sapiens
agtaaatagaagacc

SEQ ID NO: 1661672 - DNA, 15 bp, Homo sapiens
gtaaatagaagaccc

SEQ ID NO: 1661673 - DNA, 15 bp, Homo sapiens
taaatagaagaccca

SEQ ID NO: 1661674 - DNA, 15 bp, Homo sapiens
aaatagaagacccag

SEQ ID NO: 1661675 - DNA, 15 bp, Homo sapiens
aatagaagacccaga

SEQ ID NO: 1661676 - DNA, 15 bp, Homo sapiens
atagaagacccagaa

SEQ ID NO: 1661677 - DNA, 15 bp, Homo sapiens
tagaagacccagaaa

SEQ ID NO: 1661678 - DNA, 15 bp, Homo sapiens
agaagacccagaaag

SEQ ID NO: 1661679 - DNA, 15 bp, Homo sapiens
gaagacccagaaaga

SEQ ID NO: 1661680 - DNA, 15 bp, Homo sapiens
aagacccagaaagaa

SEQ ID NO: 1661681 - DNA, 15 bp, Homo sapiens
agacccagaaagaaa

SEQ ID NO: 1661682 - DNA, 15 bp, Homo sapiens
gacccagaaagaaat

SEQ ID NO: 1661683 - DNA, 15 bp, Homo sapiens
acccagaaagaaatg

SEQ ID NO: 1661684 - DNA, 15 bp, Homo sapiens
cccagaaagaaatga

SEQ ID NO: 1661685 - DNA, 15 bp, Homo sapiens
ccagaaagaaatgat

SEQ ID NO: 1661686 - DNA, 15 bp, Homo sapiens
cagaaagaaatgatt

SEQ ID NO: 1661687 - DNA, 15 bp, Homo sapiens
agaaagaaatgattc

SEQ ID NO: 1661688 - DNA, 15 bp, Homo sapiens
gaaagaaatgattcg

SEQ ID NO: 1661689 - DNA, 15 bp, Homo sapiens
aaagaaatgattcgt

SEQ ID NO: 1661690 - DNA, 15 bp, Homo sapiens
aagaaatgattcgtc

SEQ ID NO: 1661691 - DNA, 15 bp, Homo sapiens
agaaatgattcgtcc

SEQ ID NO: 1661692 - DNA, 15 bp, Homo sapiens
gaaatgattcgtccg

SEQ ID NO: 1661693 - DNA, 15 bp, Homo sapiens
aaatgattcgtccga

SEQ ID NO: 1661694 - DNA, 15 bp, Homo sapiens
aatgattcgtccgag

SEQ ID NO: 1661695 - DNA, 15 bp, Homo sapiens
atgattcgtccgagg

SEQ ID NO: 1661696 - DNA, 15 bp, Homo sapiens
tgattcgtccgagga

SEQ ID NO: 1661697 - DNA, 15 bp, Homo sapiens
gattcgtccgaggaa

SEQ ID NO: 1661698 - DNA, 15 bp, Homo sapiens
attcgtccgaggaag

SEQ ID NO: 1661699 - DNA, 15 bp, Homo sapiens
ttcgtccgaggaagg

SEQ ID NO: 1661700 - DNA, 15 bp, Homo sapiens
tcgtccgaggaaggt

SEQ ID NO: 1661701 - DNA, 15 bp, Homo sapiens
cgtccgaggaaggtc

SEQ ID NO: 1661702 - DNA, 15 bp, Homo sapiens
gtccgaggaaggtca

SEQ ID NO: 1661703 - DNA, 15 bp, Homo sapiens
tccgaggaaggtcac

SEQ ID NO: 1661704 - DNA, 15 bp, Homo sapiens
ccgaggaaggtcaca

SEQ ID NO: 1661705 - DNA, 15 bp, Homo sapiens
cgaggaaggtcacag

SEQ ID NO: 1661706 - DNA, 15 bp, Homo sapiens
gaggaaggtcacaga

SEQ ID NO: 1661707 - DNA, 15 bp, Homo sapiens
aggaaggtcacagaa

SEQ ID NO: 1661708 - DNA, 15 bp, Homo sapiens
ggaaggtcacagaag

SEQ ID NO: 1661709 - DNA, 15 bp, Homo sapiens
gaaggtcacagaagc

SEQ ID NO: 1661710 - DNA, 15 bp, Homo sapiens
aaggtcacagaagca

SEQ ID NO: 1661711 - DNA, 15 bp, Homo sapiens
aggtcacagaagcaa

SEQ ID NO: 1661712 - DNA, 15 bp, Homo sapiens
ggtcacagaagcaac

SEQ ID NO: 1661713 - DNA, 15 bp, Homo sapiens
gtcacagaagcaacg

SEQ ID NO: 1661714 - DNA, 15 bp, Homo sapiens
tcacagaagcaacgt

SEQ ID NO: 1661715 - DNA, 15 bp, Homo sapiens
cacagaagcaacgta

SEQ ID NO: 1661716 - DNA, 15 bp, Homo sapiens
acagaagcaacgtaa

SEQ ID NO: 1661717 - DNA, 15 bp, Homo sapiens
cagaagcaacgtaat

SEQ ID NO: 1661718 - DNA, 15 bp, Homo sapiens
agaagcaacgtaatc

SEQ ID NO: 1661719 - DNA, 15 bp, Homo sapiens
gaagcaacgtaatca

SEQ ID NO: 1661720 - DNA, 15 bp, Homo sapiens
aagcaacgtaatcaa

SEQ ID NO: 1661721 - DNA, 15 bp, Homo sapiens
agcaacgtaatcaag

SEQ ID NO: 1661722 - DNA, 15 bp, Homo sapiens
gcaacgtaatcaaga

SEQ ID NO: 1661723 - DNA, 15 bp, Homo sapiens
caacgtaatcaagat

SEQ ID NO: 1661724 - DNA, 15 bp, Homo sapiens
aacgtaatcaagatg

SEQ ID NO: 1661725 - DNA, 15 bp, Homo sapiens
acgtaatcaagatgg

SEQ ID NO: 1661726 - DNA, 15 bp, Homo sapiens
cgtaatcaagatgga

SEQ ID NO: 1661727 - DNA, 15 bp, Homo sapiens
gtaatcaagatggaa

SEQ ID NO: 1661728 - DNA, 15 bp, Homo sapiens
taatcaagatggaaa

SEQ ID NO: 1661729 - DNA, 15 bp, Homo sapiens
aatcaagatggaaat

SEQ ID NO: 1661730 - DNA, 15 bp, Homo sapiens
atcaagatggaaatc

SEQ ID NO: 1661731 - DNA, 15 bp, Homo sapiens
tcaagatggaaatct

SEQ ID NO: 1661732 - DNA, 15 bp, Homo sapiens
caagatggaaatctg

SEQ ID NO: 1661733 - DNA, 15 bp, Homo sapiens
aagatggaaatctga

SEQ ID NO: 1661734 - DNA, 15 bp, Homo sapiens
agatggaaatctgac

SEQ ID NO: 1661735 - DNA, 15 bp, Homo sapiens
gatggaaatctgact

SEQ ID NO: 1661736 - DNA, 15 bp, Homo sapiens
atggaaatctgactc

SEQ ID NO: 1661737 - DNA, 15 bp, Homo sapiens
tggaaatctgactct

SEQ ID NO: 1661738 - DNA, 15 bp, Homo sapiens
ggaaatctgactctt

SEQ ID NO: 1661739 - DNA, 15 bp, Homo sapiens
gaaatctgactcttc

SEQ ID NO: 1661740 - DNA, 15 bp, Homo sapiens
aaatctgactcttcc

SEQ ID NO: 1661741 - DNA, 15 bp, Homo sapiens
aatctgactcttcct

SEQ ID NO: 1661742 - DNA, 15 bp, Homo sapiens
atctgactcttccta

SEQ ID NO: 1661743 - DNA, 15 bp, Homo sapiens
tctgactcttcctaa

SEQ ID NO: 1661744 - DNA, 15 bp, Homo sapiens
ctgactcttcctaat

SEQ ID NO: 1661745 - DNA, 15 bp, Homo sapiens
tgactcttcctaatt

SEQ ID NO: 1661746 - DNA, 15 bp, Homo sapiens
gactcttcctaattt

SEQ ID NO: 1661747 - DNA, 15 bp, Homo sapiens
actcttcctaatttt

SEQ ID NO: 1661748 - DNA, 15 bp, Homo sapiens
ctcttcctaattttg

SEQ ID NO: 1661749 - DNA, 15 bp, Homo sapiens
tcttcctaattttgg

SEQ ID NO: 1661750 - DNA, 15 bp, Homo sapiens
cttcctaattttggc

SEQ ID NO: 1661751 - DNA, 15 bp, Homo sapiens
ttcctaattttggcc

SEQ ID NO: 1661752 - DNA, 15 bp, Homo sapiens
tcctaattttggcca

SEQ ID NO: 1661753 - DNA, 15 bp, Homo sapiens
cctaattttggccag

SEQ ID NO: 1661754 - DNA, 15 bp, Homo sapiens
ctaattttggccaga

SEQ ID NO: 1661755 - DNA, 15 bp, Homo sapiens
taattttggccagac

SEQ ID NO: 1661756 - DNA, 15 bp, Homo sapiens
aattttggccagact

SEQ ID NO: 1661757 - DNA, 15 bp, Homo sapiens
attttggccagactt

SEQ ID NO: 1661758 - DNA, 15 bp, Homo sapiens
ttttggccagacttc

SEQ ID NO: 1661759 - DNA, 15 bp, Homo sapiens
tttggccagacttcc

SEQ ID NO: 1661760 - DNA, 15 bp, Homo sapiens
ttggccagacttccc

SEQ ID NO: 1661761 - DNA, 15 bp, Homo sapiens
tggccagacttccca

SEQ ID NO: 1661762 - DNA, 15 bp, Homo sapiens
ggccagacttcccat

SEQ ID NO: 1661763 - DNA, 15 bp, Homo sapiens
gccagacttcccatc

SEQ ID NO: 1661764 - DNA, 15 bp, Homo sapiens
ccagacttcccatcc

SEQ ID NO: 1661765 - DNA, 15 bp, Homo sapiens
cagacttcccatccc

SEQ ID NO: 1661766 - DNA, 15 bp, Homo sapiens
agacttcccatccct

SEQ ID NO: 1661767 - DNA, 15 bp, Homo sapiens
gacttcccatccctc

SEQ ID NO: 1661768 - DNA, 15 bp, Homo sapiens
acttcccatccctcc

SEQ ID NO: 1661769 - DNA, 15 bp, Homo sapiens
cttcccatccctcca

SEQ ID NO: 1661770 - DNA, 15 bp, Homo sapiens
ttcccatccctccaa

SEQ ID NO: 1661771 - DNA, 15 bp, Homo sapiens
tcccatccctccaaa

SEQ ID NO: 1661772 - DNA, 15 bp, Homo sapiens
cccatccctccaaag

SEQ ID NO: 1661773 - DNA, 15 bp, Homo sapiens
ccatccctccaaagc

SEQ ID NO: 1661774 - DNA, 15 bp, Homo sapiens
catccctccaaagct

SEQ ID NO: 1661775 - DNA, 15 bp, Homo sapiens
atccctccaaagctt

SEQ ID NO: 1661776 - DNA, 15 bp, Homo sapiens
tccctccaaagcttt

SEQ ID NO: 1661777 - DNA, 15 bp, Homo sapiens
ccctccaaagctttc

SEQ ID NO: 1661778 - DNA, 15 bp, Homo sapiens
cctccaaagctttcc

SEQ ID NO: 1661779 - DNA, 15 bp, Homo sapiens
ctccaaagctttcca

SEQ ID NO: 1661780 - DNA, 15 bp, Homo sapiens
tccaaagctttccag

SEQ ID NO: 1661781 - DNA, 15 bp, Homo sapiens
ccaaagctttccaga

SEQ ID NO: 1661782 - DNA, 15 bp, Homo sapiens
caaagctttccagac

SEQ ID NO: 1661783 - DNA, 15 bp, Homo sapiens
aaagctttccagact

SEQ ID NO: 1661784 - DNA, 15 bp, Homo sapiens
aagctttccagactc

SEQ ID NO: 1661785 - DNA, 15 bp, Homo sapiens
agctttccagactct

SEQ ID NO: 1661786 - DNA, 15 bp, Homo sapiens
gctttccagactctt

SEQ ID NO: 1661787 - DNA, 15 bp, Homo sapiens
ctttccagactcttc

SEQ ID NO: 1661788 - DNA, 15 bp, Homo sapiens
tttccagactcttcc

SEQ ID NO: 1661789 - DNA, 15 bp, Homo sapiens
ttccagactcttcca

SEQ ID NO: 1661790 - DNA, 15 bp, Homo sapiens
tccagactcttccag

SEQ ID NO: 1661791 - DNA, 15 bp, Homo sapiens
ccagactcttccaga

SEQ ID NO: 1661792 - DNA, 15 bp, Homo sapiens
cagactcttccagat

SEQ ID NO: 1661793 - DNA, 15 bp, Homo sapiens
agactcttccagatc

SEQ ID NO: 1661794 - DNA, 15 bp, Homo sapiens
gactcttccagatca

SEQ ID NO: 1661795 - DNA, 15 bp, Homo sapiens
actcttccagatcat

SEQ ID NO: 1661796 - DNA, 15 bp, Homo sapiens
ctcttccagatcatt

SEQ ID NO: 1661797 - DNA, 15 bp, Homo sapiens
tcttccagatcattc

SEQ ID NO: 1661798 - DNA, 15 bp, Homo sapiens
cttccagatcattct

SEQ ID NO: 1661799 - DNA, 15 bp, Homo sapiens
ttccagatcattcta

SEQ ID NO: 1661800 - DNA, 15 bp, Homo sapiens
tccagatcattctag

SEQ ID NO: 1661801 - DNA, 15 bp, Homo sapiens
ccagatcattctaga

SEQ ID NO: 1661802 - DNA, 15 bp, Homo sapiens
cagatcattctagat

SEQ ID NO: 1661803 - DNA, 15 bp, Homo sapiens
agatcattctagata

SEQ ID NO: 1661804 - DNA, 15 bp, Homo sapiens
gatcattctagatat

SEQ ID NO: 1661805 - DNA, 15 bp, Homo sapiens
atcattctagatatt

SEQ ID NO: 1661806 - DNA, 15 bp, Homo sapiens
tcattctagatattt

SEQ ID NO: 1661807 - DNA, 15 bp, Homo sapiens
cattctagatatttc

SEQ ID NO: 1661808 - DNA, 15 bp, Homo sapiens
attctagatatttcc

SEQ ID NO: 1661809 - DNA, 15 bp, Homo sapiens
ttctagatatttcca

SEQ ID NO: 1661810 - DNA, 15 bp, Homo sapiens
tctagatatttccag

SEQ ID NO: 1661811 - DNA, 15 bp, Homo sapiens
ctagatatttccaga

SEQ ID NO: 1661812 - DNA, 15 bp, Homo sapiens
tagatatttccagaa

SEQ ID NO: 1661813 - DNA, 15 bp, Homo sapiens
agatatttccagaaa

SEQ ID NO: 1661814 - DNA, 15 bp, Homo sapiens
gatatttccagaaat

SEQ ID NO: 1661815 - DNA, 15 bp, Homo sapiens
atatttccagaaatc

SEQ ID NO: 1661816 - DNA, 15 bp, Homo sapiens
tatttccagaaatca

SEQ ID NO: 1661817 - DNA, 15 bp, Homo sapiens
atttccagaaatcat

SEQ ID NO: 1661818 - DNA, 15 bp, Homo sapiens
tttccagaaatcatt

SEQ ID NO: 1661819 - DNA, 15 bp, Homo sapiens
ttccagaaatcattc

SEQ ID NO: 1661820 - DNA, 15 bp, Homo sapiens
tccagaaatcattcg

SEQ ID NO: 1661821 - DNA, 15 bp, Homo sapiens
ccagaaatcattcgt

SEQ ID NO: 1661822 - DNA, 15 bp, Homo sapiens
cagaaatcattcgtg

SEQ ID NO: 1661823 - DNA, 15 bp, Homo sapiens
agaaatcattcgtga

SEQ ID NO: 1661824 - DNA, 15 bp, Homo sapiens
gaaatcattcgtgaa

SEQ ID NO: 1661825 - DNA, 15 bp, Homo sapiens
aaatcattcgtgaaa

SEQ ID NO: 1661826 - DNA, 15 bp, Homo sapiens
aatcattcgtgaaat

SEQ ID NO: 1661827 - DNA, 15 bp, Homo sapiens
atcattcgtgaaatc

SEQ ID NO: 1661828 - DNA, 15 bp, Homo sapiens
tcattcgtgaaatct

SEQ ID NO: 1661829 - DNA, 15 bp, Homo sapiens
cattcgtgaaatcta

SEQ ID NO: 1661830 - DNA, 15 bp, Homo sapiens
attcgtgaaatctaa

SEQ ID NO: 1661831 - DNA, 15 bp, Homo sapiens
ttcgtgaaatctaac

SEQ ID NO: 1661832 - DNA, 15 bp, Homo sapiens
tcgtgaaatctaact

SEQ ID NO: 1661833 - DNA, 15 bp, Homo sapiens
cgtgaaatctaacta

SEQ ID NO: 1661834 - DNA, 15 bp, Homo sapiens
gtgaaatctaactag

SEQ ID NO: 1661835 - DNA, 15 bp, Homo sapiens
tgaaatctaactagg

SEQ ID NO: 1661836 - DNA, 15 bp, Homo sapiens
gaaatctaactagga

SEQ ID NO: 1661837 - DNA, 15 bp, Homo sapiens
aaatctaactaggag

SEQ ID NO: 1661838 - DNA, 15 bp, Homo sapiens
aatctaactaggagt

SEQ ID NO: 1661839 - DNA, 15 bp, Homo sapiens
atctaactaggagta

SEQ ID NO: 1661840 - DNA, 15 bp, Homo sapiens
tctaactaggagtag

SEQ ID NO: 1661841 - DNA, 15 bp, Homo sapiens
ctaactaggagtagt

SEQ ID NO: 1661842 - DNA, 15 bp, Homo sapiens
taactaggagtagtc

SEQ ID NO: 1661843 - DNA, 15 bp, Homo sapiens
aactaggagtagtct

SEQ ID NO: 1661844 - DNA, 15 bp, Homo sapiens
actaggagtagtctg

SEQ ID NO: 1661845 - DNA, 15 bp, Homo sapiens
ctaggagtagtctgt

SEQ ID NO: 1661846 - DNA, 15 bp, Homo sapiens
taggagtagtctgta

SEQ ID NO: 1661847 - DNA, 15 bp, Homo sapiens
aggagtagtctgtaa

SEQ ID NO: 1661848 - DNA, 15 bp, Homo sapiens
ggagtagtctgtaaa

SEQ ID NO: 1661849 - DNA, 15 bp, Homo sapiens
gagtagtctgtaaac

SEQ ID NO: 1661850 - DNA, 15 bp, Homo sapiens
agtagtctgtaaaca

SEQ ID NO: 1661851 - DNA, 15 bp, Homo sapiens
gtagtctgtaaacaa

SEQ ID NO: 1661852 - DNA, 15 bp, Homo sapiens
tagtctgtaaacaat

SEQ ID NO: 1661853 - DNA, 15 bp, Homo sapiens
agtctgtaaacaatg

SEQ ID NO: 1661854 - DNA, 15 bp, Homo sapiens
gtctgtaaacaatgt

SEQ ID NO: 1661855 - DNA, 15 bp, Homo sapiens
tctgtaaacaatgtg

SEQ ID NO: 1661856 - DNA, 15 bp, Homo sapiens
ctgtaaacaatgtgt

SEQ ID NO: 1661857 - DNA, 15 bp, Homo sapiens
tgtaaacaatgtgtt

SEQ ID NO: 1661858 - DNA, 15 bp, Homo sapiens
gtaaacaatgtgttt

SEQ ID NO: 1661859 - DNA, 15 bp, Homo sapiens
taaacaatgtgtttc

SEQ ID NO: 1661860 - DNA, 15 bp, Homo sapiens
aaacaatgtgtttca

SEQ ID NO: 1661861 - DNA, 15 bp, Homo sapiens
aacaatgtgtttcac

SEQ ID NO: 1661862 - DNA, 15 bp, Homo sapiens
acaatgtgtttcaca

SEQ ID NO: 1661863 - DNA, 15 bp, Homo sapiens
caatgtgtttcacac

SEQ ID NO: 1661864 - DNA, 15 bp, Homo sapiens
aatgtgtttcacaca

SEQ ID NO: 1661865 - DNA, 15 bp, Homo sapiens
atgtgtttcacacag

SEQ ID NO: 1661866 - DNA, 15 bp, Homo sapiens
tgtgtttcacacaga

SEQ ID NO: 1661867 - DNA, 15 bp, Homo sapiens
gtgtttcacacagat

SEQ ID NO: 1661868 - DNA, 15 bp, Homo sapiens
tgtttcacacagata

SEQ ID NO: 1661869 - DNA, 15 bp, Homo sapiens
gtttcacacagatac

SEQ ID NO: 1661870 - DNA, 15 bp, Homo sapiens
tttcacacagataca

SEQ ID NO: 1661871 - DNA, 15 bp, Homo sapiens
ttcacacagatacaa

SEQ ID NO: 1661872 - DNA, 15 bp, Homo sapiens
tcacacagatacaat

SEQ ID NO: 1661873 - DNA, 15 bp, Homo sapiens
cacacagatacaatt

SEQ ID NO: 1661874 - DNA, 15 bp, Homo sapiens
acacagatacaattc

SEQ ID NO: 1661875 - DNA, 15 bp, Homo sapiens
cacagatacaattca

SEQ ID NO: 1661876 - DNA, 15 bp, Homo sapiens
acagatacaattcat

SEQ ID NO: 1661877 - DNA, 15 bp, Homo sapiens
cagatacaattcata

SEQ ID NO: 1661878 - DNA, 15 bp, Homo sapiens
gatacaattcataaa

SEQ ID NO: 1661879 - DNA, 15 bp, Homo sapiens
atacaattcataaac

SEQ ID NO: 1661880 - DNA, 15 bp, Homo sapiens
tacaattcataaacg

SEQ ID NO: 1661881 - DNA, 15 bp, Homo sapiens
acaattcataaacga

SEQ ID NO: 1661882 - DNA, 15 bp, Homo sapiens
caattcataaacgat

SEQ ID NO: 1661883 - DNA, 15 bp, Homo sapiens
aattcataaacgatg

SEQ ID NO: 1661884 - DNA, 15 bp, Homo sapiens
attcataaacgatga

SEQ ID NO: 1661885 - DNA, 15 bp, Homo sapiens
ttcataaacgatgag

SEQ ID NO: 1661886 - DNA, 15 bp, Homo sapiens
tcataaacgatgaga

SEQ ID NO: 1661887 - DNA, 15 bp, Homo sapiens
cataaacgatgagaa

SEQ ID NO: 1661888 - DNA, 15 bp, Homo sapiens
ataaacgatgagaag

SEQ ID NO: 1661889 - DNA, 15 bp, Homo sapiens
taaacgatgagaaga

SEQ ID NO: 1661890 - DNA, 15 bp, Homo sapiens
aaacgatgagaagac

SEQ ID NO: 1661891 - DNA, 15 bp, Homo sapiens
aacgatgagaagaca

SEQ ID NO: 1661892 - DNA, 15 bp, Homo sapiens
acgatgagaagacaa

SEQ ID NO: 1661893 - DNA, 15 bp, Homo sapiens
cgatgagaagacaag

SEQ ID NO: 1661894 - DNA, 15 bp, Homo sapiens
gatgagaagacaagg

SEQ ID NO: 1661895 - DNA, 15 bp, Homo sapiens
atgagaagacaagga

SEQ ID NO: 1661896 - DNA, 15 bp, Homo sapiens
tgagaagacaaggac

SEQ ID NO: 1661897 - DNA, 15 bp, Homo sapiens
gagaagacaaggaca

SEQ ID NO: 1661898 - DNA, 15 bp, Homo sapiens
agaagacaaggacac

SEQ ID NO: 1661899 - DNA, 15 bp, Homo sapiens
gaagacaaggacact

SEQ ID NO: 1661900 - DNA, 15 bp, Homo sapiens
aagacaaggacactt

SEQ ID NO: 1661901 - DNA, 15 bp, Homo sapiens
agacaaggacacttc

SEQ ID NO: 1661902 - DNA, 15 bp, Homo sapiens
gacaaggacacttca

SEQ ID NO: 1661903 - DNA, 15 bp, Homo sapiens
acaaggacacttcat

SEQ ID NO: 1661904 - DNA, 15 bp, Homo sapiens
caaggacacttcatg

SEQ ID NO: 1661905 - DNA, 15 bp, Homo sapiens
aaggacacttcatga

SEQ ID NO: 1661906 - DNA, 15 bp, Homo sapiens
aggacacttcatgaa

SEQ ID NO: 1661907 - DNA, 15 bp, Homo sapiens
ggacacttcatgaat

SEQ ID NO: 1661908 - DNA, 15 bp, Homo sapiens
gacacttcatgaatg

SEQ ID NO: 1661909 - DNA, 15 bp, Homo sapiens
acacttcatgaatga

SEQ ID NO: 1661910 - DNA, 15 bp, Homo sapiens
cacttcatgaatgaa

SEQ ID NO: 1661911 - DNA, 15 bp, Homo sapiens
acttcatgaatgaaa

SEQ ID NO: 1661912 - DNA, 15 bp, Homo sapiens
cttcatgaatgaaat

SEQ ID NO: 1661913 - DNA, 15 bp, Homo sapiens
ttcatgaatgaaatt

SEQ ID NO: 1661914 - DNA, 15 bp, Homo sapiens
tcatgaatgaaattt

SEQ ID NO: 1661915 - DNA, 15 bp, Homo sapiens
catgaatgaaatttt

SEQ ID NO: 1661916 - DNA, 15 bp, Homo sapiens
atgaatgaaattttt

SEQ ID NO: 1661917 - DNA, 15 bp, Homo sapiens
tgaatgaaattttta

SEQ ID NO: 1661918 - DNA, 15 bp, Homo sapiens
gaatgaaatttttac

SEQ ID NO: 1661919 - DNA, 15 bp, Homo sapiens
aatgaaatttttacg

SEQ ID NO: 1661920 - DNA, 15 bp, Homo sapiens
atgaaatttttacgg

SEQ ID NO: 1661921 - DNA, 15 bp, Homo sapiens
tgaaatttttacggc

SEQ ID NO: 1661922 - DNA, 15 bp, Homo sapiens
gaaatttttacggcc

SEQ ID NO: 1661923 - DNA, 15 bp, Homo sapiens
aaatttttacggccg

SEQ ID NO: 1661924 - DNA, 15 bp, Homo sapiens
aatttttacggccgg

SEQ ID NO: 1661925 - DNA, 15 bp, Homo sapiens
atttttacggccggg

SEQ ID NO: 1661926 - DNA, 15 bp, Homo sapiens
ctgcacccatcaacc

SEQ ID NO: 1661927 - DNA, 15 bp, Homo sapiens
tgcacccatcaaccg

SEQ ID NO: 1661928 - DNA, 15 bp, Homo sapiens
gcacccatcaaccgg

SEQ ID NO: 1661929 - DNA, 15 bp, Homo sapiens
cacccatcaaccggt

SEQ ID NO: 1661930 - DNA, 15 bp, Homo sapiens
acccatcaaccggtc

SEQ ID NO: 1661931 - DNA, 15 bp, Homo sapiens
cccatcaaccggtca

SEQ ID NO: 1661932 - DNA, 15 bp, Homo sapiens
ccatcaaccggtcat

SEQ ID NO: 1661933 - DNA, 15 bp, Homo sapiens
catcaaccggtcatc

SEQ ID NO: 1661934 - DNA, 15 bp, Homo sapiens
atcaaccggtcatct

SEQ ID NO: 1661935 - DNA, 15 bp, Homo sapiens
tcaaccggtcatcta

SEQ ID NO: 1661936 - DNA, 15 bp, Homo sapiens
caaccggtcatctac

SEQ ID NO: 1661937 - DNA, 15 bp, Homo sapiens
aaccggtcatctaca

SEQ ID NO: 1661938 - DNA, 15 bp, Homo sapiens
accggtcatctacat

SEQ ID NO: 1661939 - DNA, 15 bp, Homo sapiens
ccggtcatctacatt

SEQ ID NO: 1661940 - DNA, 15 bp, Homo sapiens
cggtcatctacatta

SEQ ID NO: 1661941 - DNA, 15 bp, Homo sapiens
ggtcatctacattag

SEQ ID NO: 1661942 - DNA, 15 bp, Homo sapiens
gtcatctacattagg

SEQ ID NO: 1661943 - DNA, 15 bp, Homo sapiens
tcatctacattaggt

SEQ ID NO: 1661944 - DNA, 15 bp, Homo sapiens
catctacattaggta

SEQ ID NO: 1661945 - DNA, 15 bp, Homo sapiens
atctacattaggtat

SEQ ID NO: 1661946 - DNA, 15 bp, Homo sapiens
tctacattaggtatt

SEQ ID NO: 1661947 - DNA, 15 bp, Homo sapiens
ctacattaggtattt

SEQ ID NO: 1661948 - DNA, 15 bp, Homo sapiens
tacattaggtatttc

SEQ ID NO: 1661949 - DNA, 15 bp, Homo sapiens
acattaggtatttct

SEQ ID NO: 1661950 - DNA, 15 bp, Homo sapiens
cattaggtatttctc

SEQ ID NO: 1661951 - DNA, 15 bp, Homo sapiens
attaggtatttctcc

SEQ ID NO: 1661952 - DNA, 15 bp, Homo sapiens
ttaggtatttctcct

SEQ ID NO: 1661953 - DNA, 15 bp, Homo sapiens
taggtatttctccta

SEQ ID NO: 1661954 - DNA, 15 bp, Homo sapiens
aggtatttctcctaa

SEQ ID NO: 1661955 - DNA, 15 bp, Homo sapiens
ggtatttctcctaat

SEQ ID NO: 1661956 - DNA, 15 bp, Homo sapiens
gtatttctcctaatg

SEQ ID NO: 1661957 - DNA, 15 bp, Homo sapiens
tatttctcctaatgc

SEQ ID NO: 1661958 - DNA, 15 bp, Homo sapiens
atttctcctaatgct

SEQ ID NO: 1661959 - DNA, 15 bp, Homo sapiens
tttctcctaatgcta

SEQ ID NO: 1661960 - DNA, 15 bp, Homo sapiens
ttctcctaatgctat

SEQ ID NO: 1661961 - DNA, 15 bp, Homo sapiens
ctaatgctatccctt

SEQ ID NO: 1661962 - DNA, 15 bp, Homo sapiens
taatgctatcccttc

SEQ ID NO: 1661963 - DNA, 15 bp, Homo sapiens
aatgctatcccttcc

SEQ ID NO: 1661964 - DNA, 15 bp, Homo sapiens
atgctatcccttccc

SEQ ID NO: 1661965 - DNA, 15 bp, Homo sapiens
tgctatcccttccct

SEQ ID NO: 1661966 - DNA, 15 bp, Homo sapiens
gctatcccttcccta

SEQ ID NO: 1661967 - DNA, 15 bp, Homo sapiens
ctatcccttccctag

SEQ ID NO: 1661968 - DNA, 15 bp, Homo sapiens
tatcccttccctagc

SEQ ID NO: 1661969 - DNA, 15 bp, Homo sapiens
atcccttccctagcc

SEQ ID NO: 1661970 - DNA, 15 bp, Homo sapiens
tcccttccctagccc

SEQ ID NO: 1661971 - DNA, 15 bp, Homo sapiens
cccttccctagccct

SEQ ID NO: 1661972 - DNA, 15 bp, Homo sapiens
ccttccctagccctc

SEQ ID NO: 1661973 - DNA, 15 bp, Homo sapiens
cttccctagccctcc

SEQ ID NO: 1661974 - DNA, 15 bp, Homo sapiens
ttccctagccctcca

SEQ ID NO: 1661975 - DNA, 15 bp, Homo sapiens
tccctagccctccac

SEQ ID NO: 1661976 - DNA, 15 bp, Homo sapiens
ccctagccctccact

SEQ ID NO: 1661977 - DNA, 15 bp, Homo sapiens
cctagccctccactc

SEQ ID NO: 1661978 - DNA, 15 bp, Homo sapiens
ctagccctccactct

SEQ ID NO: 1661979 - DNA, 15 bp, Homo sapiens
tagccctccactctc

SEQ ID NO: 1661980 - DNA, 15 bp, Homo sapiens
agccctccactctcc

SEQ ID NO: 1661981 - DNA, 15 bp, Homo sapiens
gccctccactctccc

SEQ ID NO: 1661982 - DNA, 15 bp, Homo sapiens
ccctccactctcccg

SEQ ID NO: 1661983 - DNA, 15 bp, Homo sapiens
cctccactctcccgg

SEQ ID NO: 1661984 - DNA, 15 bp, Homo sapiens
ctccactctcccggt

SEQ ID NO: 1661985 - DNA, 15 bp, Homo sapiens
tccactctcccggtt

SEQ ID NO: 1661986 - DNA, 15 bp, Homo sapiens
ccactctcccggttt

SEQ ID NO: 1661987 - DNA, 15 bp, Homo sapiens
cactctcccggtttt

SEQ ID NO: 1661988 - DNA, 15 bp, Homo sapiens
actctcccggttttt

SEQ ID NO: 1661989 - DNA, 15 bp, Homo sapiens
ctctcccggtttttt

SEQ ID NO: 1661990 - DNA, 15 bp, Homo sapiens
tctcccggttttttg

SEQ ID NO: 1661991 - DNA, 15 bp, Homo sapiens
ctcccggttttttgt

SEQ ID NO: 1661992 - DNA, 15 bp, Homo sapiens
tcccggttttttgtt

SEQ ID NO: 1661993 - DNA, 15 bp, Homo sapiens
cccggttttttgttt

SEQ ID NO: 1661994 - DNA, 15 bp, Homo sapiens
ccggttttttgtttt

SEQ ID NO: 1661995 - DNA, 15 bp, Homo sapiens
cggttttttgttttg

SEQ ID NO: 1661996 - DNA, 15 bp, Homo sapiens
tgttttgttttgttg

SEQ ID NO: 1661997 - DNA, 15 bp, Homo sapiens
gttttgttttgttgt

SEQ ID NO: 1661998 - DNA, 15 bp, Homo sapiens
ttttgttttgttgtt

SEQ ID NO: 1661999 - DNA, 15 bp, Homo sapiens
tttgttttgttgttt

SEQ ID NO: 1662000 - DNA, 15 bp, Homo sapiens
ttgttttgttgtttt

SEQ ID NO: 1662001 - DNA, 15 bp, Homo sapiens
tgttttgttgttttg

SEQ ID NO: 1662002 - DNA, 15 bp, Homo sapiens
gttttgttgttttgt

SEQ ID NO: 1662003 - DNA, 15 bp, Homo sapiens
ttttgttgttttgtt

SEQ ID NO: 1662004 - DNA, 15 bp, Homo sapiens
tttgttgttttgttt

SEQ ID NO: 1662005 - DNA, 15 bp, Homo sapiens
ttgttgttttgtttt

SEQ ID NO: 1662006 - DNA, 15 bp, Homo sapiens
tgttgttttgttttt

SEQ ID NO: 1662007 - DNA, 15 bp, Homo sapiens
gttgttttgttttta

SEQ ID NO: 1662008 - DNA, 15 bp, Homo sapiens
ttgttttgtttttag

SEQ ID NO: 1662009 - DNA, 15 bp, Homo sapiens
tgttttgtttttagt

SEQ ID NO: 1662010 - DNA, 15 bp, Homo sapiens
gttttgtttttagta

SEQ ID NO: 1662011 - DNA, 15 bp, Homo sapiens
ttttgtttttagtag

SEQ ID NO: 1662012 - DNA, 15 bp, Homo sapiens
tttgtttttagtaga

SEQ ID NO: 1662013 - DNA, 15 bp, Homo sapiens
ttgtttttagtagag

SEQ ID NO: 1662014 - DNA, 15 bp, Homo sapiens
agtagagacagggtc

SEQ ID NO: 1662015 - DNA, 15 bp, Homo sapiens
agacagggtctcacc

SEQ ID NO: 1662016 - DNA, 15 bp, Homo sapiens
gacagggtctcacca

SEQ ID NO: 1662017 - DNA, 15 bp, Homo sapiens
acagggtctcaccat

SEQ ID NO: 1662018 - DNA, 15 bp, Homo sapiens
cagggtctcaccatg

SEQ ID NO: 1662019 - DNA, 15 bp, Homo sapiens
agggtctcaccatgt

SEQ ID NO: 1662020 - DNA, 15 bp, Homo sapiens
gggtctcaccatgtt

SEQ ID NO: 1662021 - DNA, 15 bp, Homo sapiens
ggtctcaccatgttg

SEQ ID NO: 1662022 - DNA, 15 bp, Homo sapiens
tagtcttgaactcct

SEQ ID NO: 1662023 - DNA, 15 bp, Homo sapiens
agtcttgaactcctg

SEQ ID NO: 1662024 - DNA, 15 bp, Homo sapiens
caagtgatccgccca

SEQ ID NO: 1662025 - DNA, 15 bp, Homo sapiens
aagtgatccgcccac

SEQ ID NO: 1662026 - DNA, 15 bp, Homo sapiens
agtgatccgcccacc

SEQ ID NO: 1662027 - DNA, 15 bp, Homo sapiens
tgatccgcccacctc

SEQ ID NO: 1662028 - DNA, 15 bp, Homo sapiens
gatccgcccacctca

SEQ ID NO: 1662029 - DNA, 15 bp, Homo sapiens
atccgcccacctcag

SEQ ID NO: 1662030 - DNA, 15 bp, Homo sapiens
tccgcccacctcagc

SEQ ID NO: 1662031 - DNA, 15 bp, Homo sapiens
ccgcccacctcagcc

SEQ ID NO: 1662032 - DNA, 15 bp, Homo sapiens
cgcccacctcagcct

SEQ ID NO: 1662033 - DNA, 15 bp, Homo sapiens
gcccacctcagcctc

SEQ ID NO: 1662034 - DNA, 15 bp, Homo sapiens
gattacaggtgtgac

SEQ ID NO: 1662035 - DNA, 15 bp, Homo sapiens
attacaggtgtgacc

SEQ ID NO: 1662036 - DNA, 15 bp, Homo sapiens
ttacaggtgtgaccc

SEQ ID NO: 1662037 - DNA, 15 bp, Homo sapiens
tacaggtgtgaccca

SEQ ID NO: 1662038 - DNA, 15 bp, Homo sapiens
acaggtgtgacccac

SEQ ID NO: 1662039 - DNA, 15 bp, Homo sapiens
caggtgtgacccact

SEQ ID NO: 1662040 - DNA, 15 bp, Homo sapiens
aggtgtgacccacta

SEQ ID NO: 1662041 - DNA, 15 bp, Homo sapiens
ggtgtgacccactac

SEQ ID NO: 1662042 - DNA, 15 bp, Homo sapiens
gtgtgacccactaca

SEQ ID NO: 1662043 - DNA, 15 bp, Homo sapiens
tgtgacccactacac

SEQ ID NO: 1662044 - DNA, 15 bp, Homo sapiens
gtgacccactacact

SEQ ID NO: 1662045 - DNA, 15 bp, Homo sapiens
tgacccactacactc

SEQ ID NO: 1662046 - DNA, 15 bp, Homo sapiens
gacccactacactcg

SEQ ID NO: 1662047 - DNA, 15 bp, Homo sapiens
acccactacactcgg

SEQ ID NO: 1662048 - DNA, 15 bp, Homo sapiens
cccactacactcggc

SEQ ID NO: 1662049 - DNA, 15 bp, Homo sapiens
ccactacactcggcc

SEQ ID NO: 1662050 - DNA, 15 bp, Homo sapiens
cactacactcggcct

SEQ ID NO: 1662051 - DNA, 15 bp, Homo sapiens
actacactcggcctt

SEQ ID NO: 1662052 - DNA, 15 bp, Homo sapiens
ctacactcggcctta

SEQ ID NO: 1662053 - DNA, 15 bp, Homo sapiens
tacactcggccttat

SEQ ID NO: 1662054 - DNA, 15 bp, Homo sapiens
acactcggccttatt

SEQ ID NO: 1662055 - DNA, 15 bp, Homo sapiens
cactcggccttattt

SEQ ID NO: 1662056 - DNA, 15 bp, Homo sapiens
actcggccttatttt

SEQ ID NO: 1662057 - DNA, 15 bp, Homo sapiens
ctcggccttattttc

SEQ ID NO: 1662058 - DNA, 15 bp, Homo sapiens
tcggccttattttca

SEQ ID NO: 1662059 - DNA, 15 bp, Homo sapiens
cggccttattttcac

SEQ ID NO: 1662060 - DNA, 15 bp, Homo sapiens
ggccttattttcact

SEQ ID NO: 1662061 - DNA, 15 bp, Homo sapiens
gccttattttcactt

SEQ ID NO: 1662062 - DNA, 15 bp, Homo sapiens
ccttattttcactta

SEQ ID NO: 1662063 - DNA, 15 bp, Homo sapiens
cttattttcacttat

SEQ ID NO: 1662064 - DNA, 15 bp, Homo sapiens
ttattttcacttatt

SEQ ID NO: 1662065 - DNA, 15 bp, Homo sapiens
tattttcacttattt

SEQ ID NO: 1662066 - DNA, 15 bp, Homo sapiens
attttcacttattta

SEQ ID NO: 1662067 - DNA, 15 bp, Homo sapiens
ttttcacttatttat

SEQ ID NO: 1662068 - DNA, 15 bp, Homo sapiens
tttcacttatttatg

SEQ ID NO: 1662069 - DNA, 15 bp, Homo sapiens
ttcacttatttatgc

SEQ ID NO: 1662070 - DNA, 15 bp, Homo sapiens
tcacttatttatgca

SEQ ID NO: 1662071 - DNA, 15 bp, Homo sapiens
cacttatttatgcaa

SEQ ID NO: 1662072 - DNA, 15 bp, Homo sapiens
acttatttatgcaat

SEQ ID NO: 1662073 - DNA, 15 bp, Homo sapiens
cttatttatgcaatt

SEQ ID NO: 1662074 - DNA, 15 bp, Homo sapiens
ttatttatgcaattt

SEQ ID NO: 1662075 - DNA, 15 bp, Homo sapiens
tatttatgcaatttt

SEQ ID NO: 1662076 - DNA, 15 bp, Homo sapiens
atttatgcaattttc

SEQ ID NO: 1662077 - DNA, 15 bp, Homo sapiens
tttatgcaattttca

SEQ ID NO: 1662078 - DNA, 15 bp, Homo sapiens
ttatgcaattttcac

SEQ ID NO: 1662079 - DNA, 15 bp, Homo sapiens
tatgcaattttcact

SEQ ID NO: 1662080 - DNA, 15 bp, Homo sapiens
atgcaattttcacta

SEQ ID NO: 1662081 - DNA, 15 bp, Homo sapiens
tgcaattttcactat

SEQ ID NO: 1662082 - DNA, 15 bp, Homo sapiens
gcaattttcactatt

SEQ ID NO: 1662083 - DNA, 15 bp, Homo sapiens
caattttcactattg

SEQ ID NO: 1662084 - DNA, 15 bp, Homo sapiens
aattttcactattgc

SEQ ID NO: 1662085 - DNA, 15 bp, Homo sapiens
attttcactattgct

SEQ ID NO: 1662086 - DNA, 15 bp, Homo sapiens
ttttcactattgcta

SEQ ID NO: 1662087 - DNA, 15 bp, Homo sapiens
tttcactattgctat

SEQ ID NO: 1662088 - DNA, 15 bp, Homo sapiens
ttcactattgctata

SEQ ID NO: 1662089 - DNA, 15 bp, Homo sapiens
tcactattgctatat

SEQ ID NO: 1662090 - DNA, 15 bp, Homo sapiens
cactattgctatatt

SEQ ID NO: 1662091 - DNA, 15 bp, Homo sapiens
actattgctatattc

SEQ ID NO: 1662092 - DNA, 15 bp, Homo sapiens
ctattgctatattct

SEQ ID NO: 1662093 - DNA, 15 bp, Homo sapiens
tattgctatattcta

SEQ ID NO: 1662094 - DNA, 15 bp, Homo sapiens
attgctatattctag

SEQ ID NO: 1662095 - DNA, 15 bp, Homo sapiens
ttgctatattctagg

SEQ ID NO: 1662096 - DNA, 15 bp, Homo sapiens
tgctatattctagga

SEQ ID NO: 1662097 - DNA, 15 bp, Homo sapiens
gctatattctaggag

SEQ ID NO: 1662098 - DNA, 15 bp, Homo sapiens
ctatattctaggagg

SEQ ID NO: 1662099 - DNA, 15 bp, Homo sapiens
tatattctaggaggc

SEQ ID NO: 1662100 - DNA, 15 bp, Homo sapiens
atattctaggaggca

SEQ ID NO: 1662101 - DNA, 15 bp, Homo sapiens
tattctaggaggcac

SEQ ID NO: 1662102 - DNA, 15 bp, Homo sapiens
attctaggaggcact

SEQ ID NO: 1662103 - DNA, 15 bp, Homo sapiens
ttctaggaggcactg

SEQ ID NO: 1662104 - DNA, 15 bp, Homo sapiens
tctaggaggcactgt

SEQ ID NO: 1662105 - DNA, 15 bp, Homo sapiens
ctaggaggcactgtg

SEQ ID NO: 1662106 - DNA, 15 bp, Homo sapiens
taggaggcactgtgg

SEQ ID NO: 1662107 - DNA, 15 bp, Homo sapiens
aggaggcactgtgga

SEQ ID NO: 1662108 - DNA, 15 bp, Homo sapiens
ggaggcactgtggaa

SEQ ID NO: 1662109 - DNA, 15 bp, Homo sapiens
gaggcactgtggaat

SEQ ID NO: 1662110 - DNA, 15 bp, Homo sapiens
aggcactgtggaatt

SEQ ID NO: 1662111 - DNA, 15 bp, Homo sapiens
ggcactgtggaattg

SEQ ID NO: 1662112 - DNA, 15 bp, Homo sapiens
gcactgtggaattgc

SEQ ID NO: 1662113 - DNA, 15 bp, Homo sapiens
cactgtggaattgca

SEQ ID NO: 1662114 - DNA, 15 bp, Homo sapiens
actgtggaattgcac

SEQ ID NO: 1662115 - DNA, 15 bp, Homo sapiens
ctgtggaattgcact

SEQ ID NO: 1662116 - DNA, 15 bp, Homo sapiens
tgtggaattgcactg

SEQ ID NO: 1662117 - DNA, 15 bp, Homo sapiens
gtggaattgcactgt

SEQ ID NO: 1662118 - DNA, 15 bp, Homo sapiens
tggaattgcactgtg

SEQ ID NO: 1662119 - DNA, 15 bp, Homo sapiens
ggaattgcactgtgg

SEQ ID NO: 1662120 - DNA, 15 bp, Homo sapiens
gaattgcactgtgga

SEQ ID NO: 1662121 - DNA, 15 bp, Homo sapiens
aattgcactgtggaa

SEQ ID NO: 1662122 - DNA, 15 bp, Homo sapiens
attgcactgtggaat

SEQ ID NO: 1662123 - DNA, 15 bp, Homo sapiens
ttgcactgtggaatt

SEQ ID NO: 1662124 - DNA, 15 bp, Homo sapiens
tgcactgtggaattt

SEQ ID NO: 1662125 - DNA, 15 bp, Homo sapiens
gcactgtggaatttt

SEQ ID NO: 1662126 - DNA, 15 bp, Homo sapiens
cactgtggaatttta

SEQ ID NO: 1662127 - DNA, 15 bp, Homo sapiens
actgtggaattttag

SEQ ID NO: 1662128 - DNA, 15 bp, Homo sapiens
ctgtggaattttagt

SEQ ID NO: 1662129 - DNA, 15 bp, Homo sapiens
tgtggaattttagta

SEQ ID NO: 1662130 - DNA, 15 bp, Homo sapiens
gtggaattttagtat

SEQ ID NO: 1662131 - DNA, 15 bp, Homo sapiens
tggaattttagtatt

SEQ ID NO: 1662132 - DNA, 15 bp, Homo sapiens
ggaattttagtattg

SEQ ID NO: 1662133 - DNA, 15 bp, Homo sapiens
gaattttagtattgc

SEQ ID NO: 1662134 - DNA, 15 bp, Homo sapiens
aattttagtattgct

SEQ ID NO: 1662135 - DNA, 15 bp, Homo sapiens
attttagtattgctg

SEQ ID NO: 1662136 - DNA, 15 bp, Homo sapiens
ttttagtattgctgt

SEQ ID NO: 1662137 - DNA, 15 bp, Homo sapiens
tttagtattgctgta

SEQ ID NO: 1662138 - DNA, 15 bp, Homo sapiens
ttagtattgctgtat

SEQ ID NO: 1662139 - DNA, 15 bp, Homo sapiens
tagtattgctgtatt

SEQ ID NO: 1662140 - DNA, 15 bp, Homo sapiens
agtattgctgtattt

SEQ ID NO: 1662141 - DNA, 15 bp, Homo sapiens
gtattgctgtatttc

SEQ ID NO: 1662142 - DNA, 15 bp, Homo sapiens
tattgctgtatttca

SEQ ID NO: 1662143 - DNA, 15 bp, Homo sapiens
attgctgtatttcag

SEQ ID NO: 1662144 - DNA, 15 bp, Homo sapiens
ttgctgtatttcagc

SEQ ID NO: 1662145 - DNA, 15 bp, Homo sapiens
tgctgtatttcagca

SEQ ID NO: 1662146 - DNA, 15 bp, Homo sapiens
gctgtatttcagcaa

SEQ ID NO: 1662147 - DNA, 15 bp, Homo sapiens
ctgtatttcagcaag

SEQ ID NO: 1662148 - DNA, 15 bp, Homo sapiens
tgtatttcagcaagc

SEQ ID NO: 1662149 - DNA, 15 bp, Homo sapiens
gtatttcagcaagcc

SEQ ID NO: 1662150 - DNA, 15 bp, Homo sapiens
tatttcagcaagcca

SEQ ID NO: 1662151 - DNA, 15 bp, Homo sapiens
atttcagcaagccat

SEQ ID NO: 1662152 - DNA, 15 bp, Homo sapiens
tttcagcaagccatg

SEQ ID NO: 1662153 - DNA, 15 bp, Homo sapiens
ttcagcaagccatga

SEQ ID NO: 1662154 - DNA, 15 bp, Homo sapiens
tcagcaagccatgag

SEQ ID NO: 1662155 - DNA, 15 bp, Homo sapiens
cagcaagccatgagg

SEQ ID NO: 1662156 - DNA, 15 bp, Homo sapiens
agcaagccatgaggt

SEQ ID NO: 1662157 - DNA, 15 bp, Homo sapiens
gcaagccatgaggtc

SEQ ID NO: 1662158 - DNA, 15 bp, Homo sapiens
caagccatgaggtct

SEQ ID NO: 1662159 - DNA, 15 bp, Homo sapiens
aagccatgaggtctg

SEQ ID NO: 1662160 - DNA, 15 bp, Homo sapiens
agccatgaggtctgt

SEQ ID NO: 1662161 - DNA, 15 bp, Homo sapiens
gccatgaggtctgtc

SEQ ID NO: 1662162 - DNA, 15 bp, Homo sapiens
ccatgaggtctgtca

SEQ ID NO: 1662163 - DNA, 15 bp, Homo sapiens
catgaggtctgtcag

SEQ ID NO: 1662164 - DNA, 15 bp, Homo sapiens
atgaggtctgtcagc

SEQ ID NO: 1662165 - DNA, 15 bp, Homo sapiens
tgaggtctgtcagca

SEQ ID NO: 1662166 - DNA, 15 bp, Homo sapiens
gaggtctgtcagcac

SEQ ID NO: 1662167 - DNA, 15 bp, Homo sapiens
aggtctgtcagcaca

SEQ ID NO: 1662168 - DNA, 15 bp, Homo sapiens
ggtctgtcagcacac

SEQ ID NO: 1662169 - DNA, 15 bp, Homo sapiens
gtctgtcagcacacg

SEQ ID NO: 1662170 - DNA, 15 bp, Homo sapiens
tctgtcagcacacgg

SEQ ID NO: 1662171 - DNA, 15 bp, Homo sapiens
ctgtcagcacacggc

SEQ ID NO: 1662172 - DNA, 15 bp, Homo sapiens
tgtcagcacacggct

SEQ ID NO: 1662173 - DNA, 15 bp, Homo sapiens
gtcagcacacggctt

SEQ ID NO: 1662174 - DNA, 15 bp, Homo sapiens
tcagcacacggcttt

SEQ ID NO: 1662175 - DNA, 15 bp, Homo sapiens
cagcacacggctttg

SEQ ID NO: 1662176 - DNA, 15 bp, Homo sapiens
agcacacggctttgg

SEQ ID NO: 1662177 - DNA, 15 bp, Homo sapiens
gcacacggctttggg

SEQ ID NO: 1662178 - DNA, 15 bp, Homo sapiens
cacacggctttgggc

SEQ ID NO: 1662179 - DNA, 15 bp, Homo sapiens
acacggctttgggca

SEQ ID NO: 1662180 - DNA, 15 bp, Homo sapiens
cacggctttgggcat

SEQ ID NO: 1662181 - DNA, 15 bp, Homo sapiens
acggctttgggcatt

SEQ ID NO: 1662182 - DNA, 15 bp, Homo sapiens
cggctttgggcattt

SEQ ID NO: 1662183 - DNA, 15 bp, Homo sapiens
ggctttgggcatttt

SEQ ID NO: 1662184 - DNA, 15 bp, Homo sapiens
gctttgggcattttg

SEQ ID NO: 1662185 - DNA, 15 bp, Homo sapiens
ctttgggcattttgt

SEQ ID NO: 1662186 - DNA, 15 bp, Homo sapiens
tttgggcattttgtg

SEQ ID NO: 1662187 - DNA, 15 bp, Homo sapiens
ttgggcattttgtga

SEQ ID NO: 1662188 - DNA, 15 bp, Homo sapiens
tgggcattttgtgaa

SEQ ID NO: 1662189 - DNA, 15 bp, Homo sapiens
gggcattttgtgaag

SEQ ID NO: 1662190 - DNA, 15 bp, Homo sapiens
ggcattttgtgaaga

SEQ ID NO: 1662191 - DNA, 15 bp, Homo sapiens
gcattttgtgaagat

SEQ ID NO: 1662192 - DNA, 15 bp, Homo sapiens
cattttgtgaagata

SEQ ID NO: 1662193 - DNA, 15 bp, Homo sapiens
attttgtgaagataa

SEQ ID NO: 1662194 - DNA, 15 bp, Homo sapiens
ttttgtgaagataac

SEQ ID NO: 1662195 - DNA, 15 bp, Homo sapiens
tttgtgaagataact

SEQ ID NO: 1662196 - DNA, 15 bp, Homo sapiens
ttgtgaagataactg

SEQ ID NO: 1662197 - DNA, 15 bp, Homo sapiens
tgtgaagataactga

SEQ ID NO: 1662198 - DNA, 15 bp, Homo sapiens
gtgaagataactgat

SEQ ID NO: 1662199 - DNA, 15 bp, Homo sapiens
tgaagataactgatg

SEQ ID NO: 1662200 - DNA, 15 bp, Homo sapiens
gaagataactgatgc

SEQ ID NO: 1662201 - DNA, 15 bp, Homo sapiens
aagataactgatgcc

SEQ ID NO: 1662202 - DNA, 15 bp, Homo sapiens
agataactgatgcca

SEQ ID NO: 1662203 - DNA, 15 bp, Homo sapiens
gataactgatgccag

SEQ ID NO: 1662204 - DNA, 15 bp, Homo sapiens
ataactgatgccagc

SEQ ID NO: 1662205 - DNA, 15 bp, Homo sapiens
taactgatgccagct

SEQ ID NO: 1662206 - DNA, 15 bp, Homo sapiens
aactgatgccagctg

SEQ ID NO: 1662207 - DNA, 15 bp, Homo sapiens
actgatgccagctga

SEQ ID NO: 1662208 - DNA, 15 bp, Homo sapiens
ctgatgccagctgag

SEQ ID NO: 1662209 - DNA, 15 bp, Homo sapiens
tgatgccagctgagc

SEQ ID NO: 1662210 - DNA, 15 bp, Homo sapiens
gatgccagctgagcc

SEQ ID NO: 1662211 - DNA, 15 bp, Homo sapiens
atgccagctgagcca

SEQ ID NO: 1662212 - DNA, 15 bp, Homo sapiens
tgccagctgagccaa

SEQ ID NO: 1662213 - DNA, 15 bp, Homo sapiens
gccagctgagccaag

SEQ ID NO: 1662214 - DNA, 15 bp, Homo sapiens
ccagctgagccaagg

SEQ ID NO: 1662215 - DNA, 15 bp, Homo sapiens
cagctgagccaaggc

SEQ ID NO: 1662216 - DNA, 15 bp, Homo sapiens
agctgagccaaggca

SEQ ID NO: 1662217 - DNA, 15 bp, Homo sapiens
gctgagccaaggcag

SEQ ID NO: 1662218 - DNA, 15 bp, Homo sapiens
ctgagccaaggcagg

SEQ ID NO: 1662219 - DNA, 15 bp, Homo sapiens
tgagccaaggcaggt

SEQ ID NO: 1662220 - DNA, 15 bp, Homo sapiens
gagccaaggcaggtt

SEQ ID NO: 1662221 - DNA, 15 bp, Homo sapiens
agccaaggcaggttc

SEQ ID NO: 1662222 - DNA, 15 bp, Homo sapiens
gccaaggcaggttcc

SEQ ID NO: 1662223 - DNA, 15 bp, Homo sapiens
ccaaggcaggttcct

SEQ ID NO: 1662224 - DNA, 15 bp, Homo sapiens
caaggcaggttcctg

SEQ ID NO: 1662225 - DNA, 15 bp, Homo sapiens
aaggcaggttcctga

SEQ ID NO: 1662226 - DNA, 15 bp, Homo sapiens
aggcaggttcctgat

SEQ ID NO: 1662227 - DNA, 15 bp, Homo sapiens
ggcaggttcctgatt

SEQ ID NO: 1662228 - DNA, 15 bp, Homo sapiens
gcaggttcctgattc

SEQ ID NO: 1662229 - DNA, 15 bp, Homo sapiens
caggttcctgattcc

SEQ ID NO: 1662230 - DNA, 15 bp, Homo sapiens
aggttcctgattcca

SEQ ID NO: 1662231 - DNA, 15 bp, Homo sapiens
ggttcctgattccac

SEQ ID NO: 1662232 - DNA, 15 bp, Homo sapiens
gttcctgattccacc

SEQ ID NO: 1662233 - DNA, 15 bp, Homo sapiens
ttcctgattccaccc

SEQ ID NO: 1662234 - DNA, 15 bp, Homo sapiens
tcctgattccaccca

SEQ ID NO: 1662235 - DNA, 15 bp, Homo sapiens
cctgattccacccac

SEQ ID NO: 1662236 - DNA, 15 bp, Homo sapiens
ctgattccacccact

SEQ ID NO: 1662237 - DNA, 15 bp, Homo sapiens
tgattccacccactg

SEQ ID NO: 1662238 - DNA, 15 bp, Homo sapiens
gattccacccactgg

SEQ ID NO: 1662239 - DNA, 15 bp, Homo sapiens
attccacccactggc

SEQ ID NO: 1662240 - DNA, 15 bp, Homo sapiens
ttccacccactggca

SEQ ID NO: 1662241 - DNA, 15 bp, Homo sapiens
tccacccactggcag

SEQ ID NO: 1662242 - DNA, 15 bp, Homo sapiens
ccacccactggcagg

SEQ ID NO: 1662243 - DNA, 15 bp, Homo sapiens
cacccactggcaggc

SEQ ID NO: 1662244 - DNA, 15 bp, Homo sapiens
acccactggcaggca

SEQ ID NO: 1662245 - DNA, 15 bp, Homo sapiens
cccactggcaggcac

SEQ ID NO: 1662246 - DNA, 15 bp, Homo sapiens
ccactggcaggcacc

SEQ ID NO: 1662247 - DNA, 15 bp, Homo sapiens
cactggcaggcaccg

SEQ ID NO: 1662248 - DNA, 15 bp, Homo sapiens
actggcaggcaccga

SEQ ID NO: 1662249 - DNA, 15 bp, Homo sapiens
ctggcaggcaccgag

SEQ ID NO: 1662250 - DNA, 15 bp, Homo sapiens
tggcaggcaccgagg

SEQ ID NO: 1662251 - DNA, 15 bp, Homo sapiens
ggcaggcaccgaggt

SEQ ID NO: 1662252 - DNA, 15 bp, Homo sapiens
gcaggcaccgaggtc

SEQ ID NO: 1662253 - DNA, 15 bp, Homo sapiens
caggcaccgaggtct

SEQ ID NO: 1662254 - DNA, 15 bp, Homo sapiens
aggcaccgaggtctc

SEQ ID NO: 1662255 - DNA, 15 bp, Homo sapiens
ggcaccgaggtctct

SEQ ID NO: 1662256 - DNA, 15 bp, Homo sapiens
gcaccgaggtctctg

SEQ ID NO: 1662257 - DNA, 15 bp, Homo sapiens
caccgaggtctctgc

SEQ ID NO: 1662258 - DNA, 15 bp, Homo sapiens
accgaggtctctgct

SEQ ID NO: 1662259 - DNA, 15 bp, Homo sapiens
ccgaggtctctgctg

SEQ ID NO: 1662260 - DNA, 15 bp, Homo sapiens
cgaggtctctgctgt

SEQ ID NO: 1662261 - DNA, 15 bp, Homo sapiens
gaggtctctgctgtt

SEQ ID NO: 1662262 - DNA, 15 bp, Homo sapiens
aggtctctgctgtta

SEQ ID NO: 1662263 - DNA, 15 bp, Homo sapiens
ggtctctgctgttac

SEQ ID NO: 1662264 - DNA, 15 bp, Homo sapiens
gtctctgctgttact

SEQ ID NO: 1662265 - DNA, 15 bp, Homo sapiens
tctctgctgttactg

SEQ ID NO: 1662266 - DNA, 15 bp, Homo sapiens
ctctgctgttactga

SEQ ID NO: 1662267 - DNA, 15 bp, Homo sapiens
tctgctgttactgat

SEQ ID NO: 1662268 - DNA, 15 bp, Homo sapiens
ctgctgttactgatg

SEQ ID NO: 1662269 - DNA, 15 bp, Homo sapiens
tgctgttactgatgg

SEQ ID NO: 1662270 - DNA, 15 bp, Homo sapiens
gctgttactgatggt

SEQ ID NO: 1662271 - DNA, 15 bp, Homo sapiens
ctgttactgatggtt

SEQ ID NO: 1662272 - DNA, 15 bp, Homo sapiens
tgttactgatggttt

SEQ ID NO: 1662273 - DNA, 15 bp, Homo sapiens
gttactgatggtttc

SEQ ID NO: 1662274 - DNA, 15 bp, Homo sapiens
ttactgatggtttct

SEQ ID NO: 1662275 - DNA, 15 bp, Homo sapiens
tactgatggtttctc

SEQ ID NO: 1662276 - DNA, 15 bp, Homo sapiens
actgatggtttctct

SEQ ID NO: 1662277 - DNA, 15 bp, Homo sapiens
ctgatggtttctctg

SEQ ID NO: 1662278 - DNA, 15 bp, Homo sapiens
tgatggtttctctgt

SEQ ID NO: 1662279 - DNA, 15 bp, Homo sapiens
gatggtttctctgtg

SEQ ID NO: 1662280 - DNA, 15 bp, Homo sapiens
atggtttctctgtgg

SEQ ID NO: 1662281 - DNA, 15 bp, Homo sapiens
tggtttctctgtgga

SEQ ID NO: 1662282 - DNA, 15 bp, Homo sapiens
ggtttctctgtggat

SEQ ID NO: 1662283 - DNA, 15 bp, Homo sapiens
gtttctctgtggatt

SEQ ID NO: 1662284 - DNA, 15 bp, Homo sapiens
tttctctgtggattg

SEQ ID NO: 1662285 - DNA, 15 bp, Homo sapiens
ttctctgtggattga

SEQ ID NO: 1662286 - DNA, 15 bp, Homo sapiens
tctctgtggattgat

SEQ ID NO: 1662287 - DNA, 15 bp, Homo sapiens
ctctgtggattgatg

SEQ ID NO: 1662288 - DNA, 15 bp, Homo sapiens
tctgtggattgatgg

SEQ ID NO: 1662289 - DNA, 15 bp, Homo sapiens
ctgtggattgatggg

SEQ ID NO: 1662290 - DNA, 15 bp, Homo sapiens
tgtggattgatgggc
